United States Patent Application Publication US 2005/0255487 A1 - sequence listing, part 40

SEQ ID NO: 1091414 - RNA, 19 nt, Homo sapiens
  misc_RNA (1)...(19): siRNA sense strand
aaaugcaccaguugaagga

SEQ ID NO: 1091415 - RNA, 19 nt, Homo sapiens
  misc_RNA (1)...(19): siRNA sense strand
gcucguaacuccuuuauug

SEQ ID NO: 1091416 - RNA, 19 nt, Homo sapiens
  misc_RNA (1)...(19): siRNA sense strand
gaaagcacuucagaauuua

SEQ ID NO: 1091417 - RNA, 19 nt, Homo sapiens
  misc_RNA (1)...(19): siRNA sense strand
guaauguucuggcuaauuu

SEQ ID NO: 1091418 - RNA, 19 nt, Homo sapiens
  misc_RNA (1)...(19): siRNA sense strand
ggaagaaucuauugaggau

SEQ ID NO: 1091419 - RNA, 19 nt, Homo sapiens
  misc_RNA (1)...(19): siRNA sense strand
gaacauaaucgcccucuau

SEQ ID NO: 1091420 - RNA, 19 nt, Homo sapiens
  misc_RNA (1)...(19): siRNA sense strand
gagauaagcauaacgcaaa

SEQ ID NO: 1091421 - RNA, 19 nt, Homo sapiens
  misc_RNA (1)...(19): siRNA sense strand
gcaauaacaaccaaacaaa

SEQ ID NO: 1091422 - RNA, 19 nt, Homo sapiens
  misc_RNA (1)...(19): siRNA sense strand
gggcauaauuccacaaugu

SEQ ID NO: 1091423 - RNA, 19 nt, Homo sapiens
  misc_RNA (1)...(19): siRNA sense strand
uaacuucauucuuguggua

SEQ ID NO: 1091424 - RNA, 19 nt, Homo sapiens
  misc_RNA (1)...(19): siRNA sense strand
gaacauguacauuagcauu

SEQ ID NO: 1091425 - RNA, 19 nt, Homo sapiens
  misc_RNA (1)...(19): siRNA sense strand
uaucaugccuuucgauuca

SEQ ID NO: 1091426 - RNA, 19 nt, Homo sapiens
  misc_RNA (1)...(19): siRNA sense strand
cuacauuucuucacagcua

SEQ ID NO: 1091427 - RNA, 19 nt, Homo sapiens
  misc_RNA (1)...(19): siRNA sense strand
gaaccaaguaggagugaaa

SEQ ID NO: 1091428 - RNA, 19 nt, Homo sapiens
  misc_RNA (1)...(19): siRNA sense strand
caguuuggaucgcuauaua

SEQ ID NO: 1091429 - RNA, 19 nt, Homo sapiens
  misc_RNA (1)...(19): siRNA sense strand
ggaaggcaauaacaaccaa

SEQ ID NO: 1091430 - RNA, 19 nt, Homo sapiens
  misc_RNA (1)...(19): siRNA sense strand
ccacagaaugcgcuuuaua

SEQ ID NO: 1091431 - RNA, 19 nt, Homo sapiens
  misc_RNA (1)...(19): siRNA sense strand
uagauccagucauguauuu

SEQ ID NO: 1091432 - RNA, 19 nt, Homo sapiens
  misc_RNA (1)...(19): siRNA sense strand
gaagucauaccauaacaau

SEQ ID NO: 1091433 - RNA, 19 nt, Homo sapiens
  misc_RNA (1)...(19): siRNA sense strand
gugguaauguucuggcuaa

SEQ ID NO: 1091434 - RNA, 19 nt, Homo sapiens
  misc_RNA (1)...(19): siRNA sense strand
agaaugcgcuuuauaacca

SEQ ID NO: 1091435 - RNA, 19 nt, Homo sapiens
  misc_RNA (1)...(19): siRNA sense strand
cacagaaugcgcuuuauaa

SEQ ID NO: 1091436 - RNA, 19 nt, Homo sapiens
  misc_RNA (1)...(19): siRNA sense strand
ccacaaaacuucucagcaa

SEQ ID NO: 1091437 - RNA, 19 nt, Homo sapiens
  misc_RNA (1)...(19): siRNA sense strand
gauacucccugcaugauac

SEQ ID NO: 1091438 - RNA, 19 nt, Homo sapiens
  misc_RNA (1)...(19): siRNA sense strand
gagaagucauaccauaaca

SEQ ID NO: 1091439 - RNA, 19 nt, Homo sapiens
  misc_RNA (1)...(19): siRNA sense strand
caacggaaggcaauaacaa

SEQ ID NO: 1091440 - RNA, 19 nt, Homo sapiens
  misc_RNA (1)...(19): siRNA sense strand
ggacugguugggaacauaa

SEQ ID NO: 1091441 - RNA, 19 nt, Homo sapiens
  misc_RNA (1)...(19): siRNA sense strand
uaacaaugacgacaacuuc

SEQ ID NO: 1091442 - RNA, 19 nt, Homo sapiens
  misc_RNA (1)...(19): siRNA sense strand
ggauuccuaacuaugauua

SEQ ID NO: 1091443 - RNA, 19 nt, Homo sapiens
  misc_RNA (1)...(19): siRNA sense strand
ggauacucccugcaugaua

SEQ ID NO: 1091444 - RNA, 19 nt, Homo sapiens
  misc_RNA (1)...(19): siRNA sense strand
gcuuagauccagucaugua

SEQ ID NO: 1091445 - RNA, 19 nt, Homo sapiens
  misc_RNA (1)...(19): siRNA sense strand
aaaaggaggucaaaauuuc

SEQ ID NO: 1091446 - RNA, 19 nt, Homo sapiens
  misc_RNA (1)...(19): siRNA sense strand
ggaacauaaucgcccucua

SEQ ID NO: 1091447 - RNA, 19 nt, Homo sapiens
  misc_RNA (1)...(19): siRNA sense strand
ucucaucuuucaauaguug

SEQ ID NO: 1091448 - RNA, 19 nt, Homo sapiens
  misc_RNA (1)...(19): siRNA sense strand
guucucucaucuuucaaua

SEQ ID NO: 1091449 - RNA, 19 nt, Homo sapiens
  misc_RNA (1)...(19): siRNA sense strand
uaaucgcccucuauguauu

SEQ ID NO: 1091450 - RNA, 19 nt, Homo sapiens
  misc_RNA (1)...(19): siRNA sense strand
gaaaggagggcauaauucc

SEQ ID NO: 1091451 - RNA, 19 nt, Homo sapiens
  misc_RNA (1)...(19): siRNA sense strand
gggacugguugggaacaua

SEQ ID NO: 1091452 - RNA, 19 nt, Homo sapiens
  misc_RNA (1)...(19): siRNA sense strand
cugccucccuuuccgaaua

SEQ ID NO: 1091453 - RNA, 19 nt, Homo sapiens
  misc_RNA (1)...(19): siRNA sense strand
uugcuuagauccagucaug

SEQ ID NO: 1091454 - RNA, 19 nt, Homo sapiens
  misc_RNA (1)...(19): siRNA sense strand
gaaugcgcuuuauaaccaa

SEQ ID NO: 1091455 - RNA, 19 nt, Homo sapiens
  misc_RNA (1)...(19): siRNA sense strand
gguggauuccuaacuauga

SEQ ID NO: 1091456 - RNA, 19 nt, Homo sapiens
  misc_RNA (1)...(19): siRNA sense strand
cuugguggauuccuaacua

SEQ ID NO: 1091457 - RNA, 19 nt, Homo sapiens
  misc_RNA (1)...(19): siRNA sense strand
aagaaaggagggcauaauu

SEQ ID NO: 1091458 - RNA, 19 nt, Homo sapiens
  misc_RNA (1)...(19): siRNA sense strand
auugcuaucuacuguguua

SEQ ID NO: 1091459 - RNA, 19 nt, Homo sapiens
  misc_RNA (1)...(19): siRNA sense strand
aaaauaaugugccaacuuc

SEQ ID NO: 1091460 - RNA, 19 nt, Homo sapiens
  misc_RNA (1)...(19): siRNA sense strand
ucucucaucuuucaauagu

SEQ ID NO: 1091461 - RNA, 19 nt, Homo sapiens
  misc_RNA (1)...(19): siRNA sense strand
cgauucaucuacauuucuu

SEQ ID NO: 1091462 - RNA, 19 nt, Homo sapiens
  misc_RNA (1)...(19): siRNA sense strand
ggcaauaacaaccaaacaa

SEQ ID NO: 1091463 - RNA, 19 nt, Homo sapiens
  misc_RNA (1)...(19): siRNA sense strand
aaauugcuaucuacugugu

SEQ ID NO: 1091464 - RNA, 19 nt, Homo sapiens
  misc_RNA (1)...(19): siRNA sense strand
agucauguauuuccugaug

SEQ ID NO: 1091465 - RNA, 19 nt, Homo sapiens
  misc_RNA (1)...(19): siRNA sense strand
gcagaccuccuacucaucu

SEQ ID NO: 1091466 - RNA, 19 nt, Homo sapiens
  misc_RNA (1)...(19): siRNA sense strand
caaggugaaccaaguagga

SEQ ID NO: 1091467 - RNA, 19 nt, Homo sapiens
  misc_RNA (1)...(19): siRNA sense strand
gguaauguucuggcuaauu

SEQ ID NO: 1091468 - RNA, 19 nt, Homo sapiens
  misc_RNA (1)...(19): siRNA sense strand
auacaucuguggcagugaa

SEQ ID NO: 1091469 - RNA, 19 nt, Homo sapiens
  misc_RNA (1)...(19): siRNA sense strand
cuucacagcuaaauguauc

SEQ ID NO: 1091470 - RNA, 19 nt, Homo sapiens
  misc_RNA (1)...(19): siRNA sense strand
cuaaauguaucaucuugcu

SEQ ID NO: 1091471 - RNA, 19 nt, Homo sapiens
  misc_RNA (1)...(19): siRNA sense strand
uugcuuggauucaucaguu

SEQ ID NO: 1091472 - RNA, 19 nt, Homo sapiens
  misc_RNA (1)...(19): siRNA sense strand
uaagaaaggagggcauaau

SEQ ID NO: 1091473 - RNA, 19 nt, Homo sapiens
  misc_RNA (1)...(19): siRNA sense strand
caauaacaaccaaacaaag

SEQ ID NO: 1091474 - RNA, 19 nt, Homo sapiens
  misc_RNA (1)...(19): siRNA sense strand
gcucuugguggauuccuaa

SEQ ID NO: 1091475 - RNA, 19 nt, Homo sapiens
  misc_RNA (1)...(19): siRNA sense strand
guuuggaucgcuauauaaa

SEQ ID NO: 1091476 - RNA, 19 nt, Homo sapiens
  misc_RNA (1)...(19): siRNA sense strand
auaaugugccaacuucuuu

SEQ ID NO: 1091477 - RNA, 19 nt, Homo sapiens
  misc_RNA (1)...(19): siRNA sense strand
agaaaggagggcauaauuc

SEQ ID NO: 1091478 - RNA, 19 nt, Homo sapiens
  misc_RNA (1)...(19): siRNA sense strand
gcaacggaaggcaauaaca

SEQ ID NO: 1091479 - RNA, 19 nt, Homo sapiens
  misc_RNA (1)...(19): siRNA sense strand
gaucaugcugguucucuca

SEQ ID NO: 1091480 - RNA, 19 nt, Homo sapiens
  misc_RNA (1)...(19): siRNA sense strand
cuaccugucccauggauga

SEQ ID NO: 1091481 - RNA, 19 nt, Homo sapiens
  misc_RNA (1)...(19): siRNA sense strand
acagcuaaauguaucaucu

SEQ ID NO: 1091482 - RNA, 19 nt, Homo sapiens
  misc_RNA (1)...(19): siRNA sense strand
ucaucuacauuucuucaca

SEQ ID NO: 1091483 - RNA, 19 nt, Homo sapiens
  misc_RNA (1)...(19): siRNA sense strand
ucguaacuccuuuauugua

SEQ ID NO: 1091484 - RNA, 19 nt, Homo sapiens
  misc_RNA (1)...(19): siRNA sense strand
ccauaacaaugacgacaac

SEQ ID NO: 1091485 - RNA, 19 nt, Homo sapiens
  misc_RNA (1)...(19): siRNA sense strand
uuacagagauaagcauaac

SEQ ID NO: 1091486 - RNA, 19 nt, Homo sapiens
  misc_RNA (1)...(19): siRNA sense strand
cagcaacggaaggcaauaa

SEQ ID NO: 1091487 - RNA, 19 nt, Homo sapiens
  misc_RNA (1)...(19): siRNA sense strand
cugguucucucaucuuuca

SEQ ID NO: 1091488 - RNA, 19 nt, Homo sapiens
  misc_RNA (1)...(19): siRNA sense strand
cguaacuccuuuauuguac

SEQ ID NO: 1091489 - RNA, 19 nt, Homo sapiens
  misc_RNA (1)...(19): siRNA sense strand
gaaggcaauaacaaccaaa

SEQ ID NO: 1091490 - RNA, 19 nt, Homo sapiens
  misc_RNA (1)...(19): siRNA sense strand
uaaucggucuauacagcaa

SEQ ID NO: 1091491 - RNA, 19 nt, Homo sapiens
  misc_RNA (1)...(19): siRNA sense strand
gaaaauacagucuaguucu

SEQ ID NO: 1091492 - RNA, 19 nt, Homo sapiens
  misc_RNA (1)...(19): siRNA sense strand
uucaauaguugcuuagauc

SEQ ID NO: 1091493 - RNA, 19 nt, Homo sapiens
  misc_RNA (1)...(19): siRNA sense strand
cuacagcucguaacuccuu

SEQ ID NO: 1091494 - RNA, 19 nt, Homo sapiens
  misc_RNA (1)...(19): siRNA sense strand
caguaacauucgcaaaaua

SEQ ID NO: 1091495 - RNA, 19 nt, Homo sapiens
  misc_RNA (1)...(19): siRNA sense strand
gguauucaccguaaaagaa

SEQ ID NO: 1091496 - RNA, 19 nt, Homo sapiens
  misc_RNA (1)...(19): siRNA sense strand
cauuacagagauaagcaua

SEQ ID NO: 1091497 - RNA, 19 nt, Homo sapiens
  misc_RNA (1)...(19): siRNA sense strand
ucccacagaaugcgcuuua

SEQ ID NO: 1091498 - RNA, 19 nt, Homo sapiens
  misc_RNA (1)...(19): siRNA sense strand
gaauuuaaaccaggauacu

SEQ ID NO: 1091499 - RNA, 19 nt, Homo sapiens
  misc_RNA (1)...(19): siRNA sense strand
guauggaugcuugcucuug

SEQ ID NO: 1091500 - RNA, 19 nt, Homo sapiens
  misc_RNA (1)...(19): siRNA sense strand
ccacauccuacucuguuau

SEQ ID NO: 1091501 - RNA, 19 nt, Homo sapiens
  misc_RNA (1)...(19): siRNA sense strand
cuaaaaggaggucaaaauu

SEQ ID NO: 1091502 - RNA, 19 nt, Homo sapiens
  misc_RNA (1)...(19): siRNA sense strand
guggauuccuaacuaugau

SEQ ID NO: 1091503 - RNA, 19 nt, Homo sapiens
  misc_RNA (1)...(19): siRNA sense strand
uugcagaccuccuacucau

SEQ ID NO: 1091504 - RNA, 19 nt, Homo sapiens
  misc_RNA (1)...(19): siRNA sense strand
ccaaguaggagugaaagca

SEQ ID NO: 1091505 - RNA, 19 nt, Homo sapiens
  misc_RNA (1)...(19): siRNA sense strand
uacauuucuucacagcuaa

SEQ ID NO: 1091506 - RNA, 19 nt, Homo sapiens
  misc_RNA (1)...(19): siRNA sense strand
gugcaagguugugggaaca

SEQ ID NO: 1091507 - RNA, 19 nt, Homo sapiens
  misc_RNA (1)...(19): siRNA sense strand
uaggugugauucugugcaa

SEQ ID NO: 1091508 - RNA, 19 nt, Homo sapiens
  misc_RNA (1)...(19): siRNA sense strand
gagggcauaauuccacaau

SEQ ID NO: 1091509 - RNA, 19 nt, Homo sapiens
  misc_RNA (1)...(19): siRNA sense strand
cagucuaguucuaaaagua

SEQ ID NO: 1091510 - RNA, 19 nt, Homo sapiens
  misc_RNA (1)...(19): siRNA sense strand
cagaauuuaaaccaggaua

SEQ ID NO: 1091511 - RNA, 19 nt, Homo sapiens
  misc_RNA (1)...(19): siRNA sense strand
caaaauaaugugccaacuu

SEQ ID NO: 1091512 - RNA, 19 nt, Homo sapiens
  misc_RNA (1)...(19): siRNA sense strand
ucauguauuuccugauguc

SEQ ID NO: 1091513 - RNA, 19 nt, Homo sapiens
  misc_RNA (1)...(19): siRNA sense strand
guaacuccuuuauuguacu

SEQ ID NO: 1091514 - RNA, 19 nt, Homo sapiens
  misc_RNA (1)...(19): siRNA sense strand
aauaaugugccaacuucuu

SEQ ID NO: 1091515 - RNA, 19 nt, Homo sapiens
  misc_RNA (1)...(19): siRNA sense strand
caacaaugauggucagaau

SEQ ID NO: 1091516 - RNA, 19 nt, Homo sapiens
  misc_RNA (1)...(19): siRNA sense strand
gaacuuggccucuuaucga

SEQ ID NO: 1091517 - RNA, 19 nt, Homo sapiens
  misc_RNA (1)...(19): siRNA sense strand
acaaugauggucagaauua

SEQ ID NO: 1091518 - RNA, 19 nt, Homo sapiens
  misc_RNA (1)...(19): siRNA sense strand
caagaagcgcguuguguuu

SEQ ID NO: 1091519 - RNA, 19 nt, Homo sapiens
  misc_RNA (1)...(19): siRNA sense strand
caccagacgucuccuaaga

SEQ ID NO: 1091520 - RNA, 19 nt, Homo sapiens
  misc_RNA (1)...(19): siRNA sense strand
agugauaccuucucauuug

SEQ ID NO: 1091521 - RNA, 19 nt, Homo sapiens
  misc_RNA (1)...(19): siRNA sense strand
gcacagauagugauaccuu

SEQ ID NO: 1091522 - RNA, 19 nt, Homo sapiens
  misc_RNA (1)...(19): siRNA sense strand
uggagaacuuggccucuua

SEQ ID NO: 1091523 - RNA, 19 nt, Homo sapiens
  misc_RNA (1)...(19): siRNA sense strand
cgugggaucugcaguuuga

SEQ ID NO: 1091524 - RNA, 19 nt, Homo sapiens
  misc_RNA (1)...(19): siRNA sense strand
gaauuucaacgacgacauu

SEQ ID NO: 1091525 - RNA, 19 nt, Homo sapiens
  misc_RNA (1)...(19): siRNA sense strand
ccacguccuuugacaaguu

SEQ ID NO: 1091526 - RNA, 19 nt, Homo sapiens
  misc_RNA (1)...(19): siRNA sense strand
ugauaucuccucugccuua

SEQ ID NO: 1091527 - RNA, 19 nt, Homo sapiens
  misc_RNA (1)...(19): siRNA sense strand
ggagccacuuucagaagaa

SEQ ID NO: 1091528 - RNA, 19 nt, Homo sapiens
  misc_RNA (1)...(19): siRNA sense strand
cugaaaucaugucucaaua

SEQ ID NO: 1091529 - RNA, 19 nt, Homo sapiens
  misc_RNA (1)...(19): siRNA sense strand
caacugagcagaaaauuga

SEQ ID NO: 1091530 - RNA, 19 nt, Homo sapiens
  misc_RNA (1)...(19): siRNA sense strand
caaccgauuacuuaaguuu

SEQ ID NO: 1091531 - RNA, 19 nt, Homo sapiens
  misc_RNA (1)...(19): siRNA sense strand
ccaagaagcgcguuguguu

SEQ ID NO: 1091532 - RNA, 19 nt, Homo sapiens
  misc_RNA (1)...(19): siRNA sense strand
gaagugcucacacaaccaa

SEQ ID NO: 1091533 - RNA, 19 nt, Homo sapiens
  misc_RNA (1)...(19): siRNA sense strand
guucagauccguaucacuu

SEQ ID NO: 1091534 - RNA, 19 nt, Homo sapiens
  misc_RNA (1)...(19): siRNA sense strand
caccaccugugaagaguuu

SEQ ID NO: 1091535 - RNA, 19 nt, Homo sapiens
  misc_RNA (1)...(19): siRNA sense strand
ucuuggaccuuaaugauau

SEQ ID NO: 1091536 - RNA, 19 nt, Homo sapiens
  misc_RNA (1)...(19): siRNA sense strand
gauaucuccucugccuuaa

SEQ ID NO: 1091537 - RNA, 19 nt, Homo sapiens
  misc_RNA (1)...(19): siRNA sense strand
ucacugcgauccaugucuu

SEQ ID NO: 1091538 - RNA, 19 nt, Homo sapiens
  misc_RNA (1)...(19): siRNA sense strand
uaagacagaguuagaguca

SEQ ID NO: 1091539 - RNA, 19 nt, Homo sapiens
  misc_RNA (1)...(19): siRNA sense strand
gccuucaaccgauuacuua

SEQ ID NO: 1091540 - RNA, 19 nt, Homo sapiens
  misc_RNA (1)...(19): siRNA sense strand
gaguuagagucaacaaucu

SEQ ID NO: 1091541 - RNA, 19 nt, Homo sapiens
  misc_RNA (1)...(19): siRNA sense strand
gacgacauuuugugaauaa

SEQ ID NO: 1091542 - RNA, 19 nt, Homo sapiens
  misc_RNA (1)...(19): siRNA sense strand
uuugaucucuuggaccuua

SEQ ID NO: 1091543 - RNA, 19 nt, Homo sapiens
  misc_RNA (1)...(19): siRNA sense strand
caaugauggucagaauuau

SEQ ID NO: 1091544 - RNA, 19 nt, Homo sapiens
  misc_RNA (1)...(19): siRNA sense strand
gauguggccaugaggcuuu

SEQ ID NO: 1091545 - RNA, 19 nt, Homo sapiens
  misc_RNA (1)...(19): siRNA sense strand
aaagccaaaucacagaaug

SEQ ID NO: 1091546 - RNA, 19 nt, Homo sapiens
  misc_RNA (1)...(19): siRNA sense strand
agaagaacuuugucugucu

SEQ ID NO: 1091547 - RNA, 19 nt, Homo sapiens
  misc_RNA (1)...(19): siRNA sense strand
ucuccgaccucccagaaga

SEQ ID NO: 1091548 - RNA, 19 nt, Homo sapiens
  misc_RNA (1)...(19): siRNA sense strand
guuagagucaacaaucuuu

SEQ ID NO: 1091549 - RNA, 19 nt, Homo sapiens
  misc_RNA (1)...(19): siRNA sense strand
agacagaguuagagucaac

SEQ ID NO: 1091550 - RNA, 19 nt, Homo sapiens
  misc_RNA (1)...(19): siRNA sense strand
cggagccacuuucagaaga

SEQ ID NO: 1091551 - RNA, 19 nt, Homo sapiens
  misc_RNA (1)...(19): siRNA sense strand
guaucacuuucgauucuug

SEQ ID NO: 1091552 - RNA, 19 nt, Homo sapiens
  misc_RNA (1)...(19): siRNA sense strand
gaaaauugaguucugcauu

SEQ ID NO: 1091553 - RNA, 19 nt, Homo sapiens
  misc_RNA (1)...(19): siRNA sense strand
ucagauccguaucacuuuc

SEQ ID NO: 1091554 - RNA, 19 nt, Homo sapiens
  misc_RNA (1)...(19): siRNA sense strand
ccucagccuucaaccgauu

SEQ ID NO: 1091555 - RNA, 19 nt, Homo sapiens
  misc_RNA (1)...(19): siRNA sense strand
ccugaaaucaugucucaau

SEQ ID NO: 1091556 - RNA, 19 nt, Homo sapiens
  misc_RNA (1)...(19): siRNA sense strand
gagcugcaccagaaugauc

SEQ ID NO: 1091557 - RNA, 19 nt, Homo sapiens
  misc_RNA (1)...(19): siRNA sense strand
gacuggaagugcucacaca

SEQ ID NO: 1091558 - RNA, 19 nt, Homo sapiens
  misc_RNA (1)...(19): siRNA sense strand
ccagaaugauccagguuuu

SEQ ID NO: 1091559 - RNA, 19 nt, Homo sapiens
  misc_RNA (1)...(19): siRNA sense strand
uaaagccccugaaaucaug

SEQ ID NO: 1091560 - RNA, 19 nt, Homo sapiens
  misc_RNA (1)...(19): siRNA sense strand
ggagaacuuggccucuuau

SEQ ID NO: 1091561 - RNA, 19 nt, Homo sapiens
  misc_RNA (1)...(19): siRNA sense strand
gauggucagaauuauagaa

SEQ ID NO: 1091562 - RNA, 19 nt, Homo sapiens
  misc_RNA (1)...(19): siRNA sense strand
auagugauaccuucucauu

SEQ ID NO: 1091563 - RNA, 19 nt, Homo sapiens
  misc_RNA (1)...(19): siRNA sense strand
aaucacagaaugacuggaa

SEQ ID NO: 1091564 - RNA, 19 nt, Homo sapiens
  misc_RNA (1)...(19): siRNA sense strand
ccguaucacuuucgauucu

SEQ ID NO: 1091565 - RNA, 19 nt, Homo sapiens
  misc_RNA (1)...(19): siRNA sense strand
uuagauccacguccuuuga

SEQ ID NO: 1091566 - RNA, 19 nt, Homo sapiens
  misc_RNA (1)...(19): siRNA sense strand
uaucuccucugccuuaaaa

SEQ ID NO: 1091567 - RNA, 19 nt, Homo sapiens
  misc_RNA (1)...(19): siRNA sense strand
caaagccaaaucacagaau

SEQ ID NO: 1091568 - RNA, 19 nt, Homo sapiens
  misc_RNA (1)...(19): siRNA sense strand
cuuggccucuuaucgauga

SEQ ID NO: 1091569 - RNA, 19 nt, Homo sapiens
  misc_RNA (1)...(19): siRNA sense strand
ucacacaaccaagccaaga

SEQ ID NO: 1091570 - RNA, 19 nt, Homo sapiens
  misc_RNA (1)...(19): siRNA sense strand
uaaauuaaagccccugaaa

SEQ ID NO: 1091571 - RNA, 19 nt, Homo sapiens
  misc_RNA (1)...(19): siRNA sense strand
agaguuagagucaacaauc

SEQ ID NO: 1091572 - RNA, 19 nt, Homo sapiens
  misc_RNA (1)...(19): siRNA sense strand
cucauuugccauugacuua

SEQ ID NO: 1091573 - RNA, 19 nt, Homo sapiens
  misc_RNA (1)...(19): siRNA sense strand
aaaguucagauccguauca

SEQ ID NO: 1091574 - RNA, 19 nt, Homo sapiens
  misc_RNA (1)...(19): siRNA sense strand
cgacgacauuuugugaaua

SEQ ID NO: 1091575 - RNA, 19 nt, Homo sapiens
  misc_RNA (1)...(19): siRNA sense strand
gauccacguccuuugacaa

SEQ ID NO: 1091576 - RNA, 19 nt, Homo sapiens
  misc_RNA (1)...(19): siRNA sense strand
ucaaccgauuacuuaaguu

SEQ ID NO: 1091577 - RNA, 19 nt, Homo sapiens
  misc_RNA (1)...(19): siRNA sense strand
cauuccaacugagcagaaa

SEQ ID NO: 1091578 - RNA, 19 nt, Homo sapiens
  misc_RNA (1)...(19): siRNA sense strand
agauagugauaccuucuca

SEQ ID NO: 1091579 - RNA, 19 nt, Homo sapiens
  misc_RNA (1)...(19): siRNA sense strand
gguggcacagauagugaua

SEQ ID NO: 1091580 - RNA, 19 nt, Homo sapiens
  misc_RNA (1)...(19): siRNA sense strand
caacgacgacauuuuguga

SEQ ID NO: 1091581 - RNA, 19 nt, Homo sapiens
  misc_RNA (1)...(19): siRNA sense strand
agaaaguucagauccguau

SEQ ID NO: 1091582 - RNA, 19 nt, Homo sapiens
  misc_RNA (1)...(19): siRNA sense strand
aggcuuugcuuggcacauu

SEQ ID NO: 1091583 - RNA, 19 nt, Homo sapiens
  misc_RNA (1)...(19): siRNA sense strand
uccaagggccucucucuca

SEQ ID NO: 1091584 - RNA, 19 nt, Homo sapiens
  misc_RNA (1)...(19): siRNA sense strand
ggucaugcccguggaugug

SEQ ID NO: 1091585 - RNA, 19 nt, Homo sapiens
  misc_RNA (1)...(19): siRNA sense strand
uagugauaccuucucauuu

SEQ ID NO: 1091586 - RNA, 19 nt, Homo sapiens
  misc_RNA (1)...(19): siRNA sense strand
uaaaacaccacgaggagaa

SEQ ID NO: 1091587 - RNA, 19 nt, Homo sapiens
  misc_RNA (1)...(19): siRNA sense strand
guucugcauuucuuaccau

SEQ ID NO: 1091588 - RNA, 19 nt, Homo sapiens
  misc_RNA (1)...(19): siRNA sense strand
guguaugguggcacagaua

SEQ ID NO: 1091589 - RNA, 19 nt, Homo sapiens
  misc_RNA (1)...(19): siRNA sense strand
gcaagagcgaacagugaca

SEQ ID NO: 1091590 - RNA, 19 nt, Homo sapiens
  misc_RNA (1)...(19): siRNA sense strand
uucaaccgauuacuuaagu

SEQ ID NO: 1091591 - RNA, 19 nt, Homo sapiens
  misc_RNA (1)...(19): siRNA sense strand
cagcgugggaucugcaguu

SEQ ID NO: 1091592 - RNA, 19 nt, Homo sapiens
  misc_RNA (1)...(19): siRNA sense strand
cacaaagccaaaucacaga

SEQ ID NO: 1091593 - RNA, 19 nt, Homo sapiens
  misc_RNA (1)...(19): siRNA sense strand
aagaagcgcguuguguuug

SEQ ID NO: 1091594 - RNA, 19 nt, Homo sapiens
  misc_RNA (1)...(19): siRNA sense strand
gacugugucuauaugaaaa

SEQ ID NO: 1091595 - RNA, 19 nt, Homo sapiens
  misc_RNA (1)...(19): siRNA sense strand
ugagaagaaaguucagauc

SEQ ID NO: 1091596 - RNA, 19 nt, Homo sapiens
  misc_RNA (1)...(19): siRNA sense strand
acaaagccaaaucacagaa

SEQ ID NO: 1091597 - RNA, 19 nt, Homo sapiens
  misc_RNA (1)...(19): siRNA sense strand
ccacaugugucagaccaua

SEQ ID NO: 1091598 - RNA, 19 nt, Homo sapiens
  misc_RNA (1)...(19): siRNA sense strand
uggcagagcccaagauaaa

SEQ ID NO: 1091599 - RNA, 19 nt, Homo sapiens
  misc_RNA (1)...(19): siRNA sense strand
gcugggaggugcuggaugu

SEQ ID NO: 1091600 - RNA, 19 nt, Homo sapiens
  misc_RNA (1)...(19): siRNA sense strand
caagagauucuaccuggaa

SEQ ID NO: 1091601 - RNA, 19 nt, Homo sapiens
  misc_RNA (1)...(19): siRNA sense strand
aagaggcacuuucugaguu

SEQ ID NO: 1091602 - RNA, 19 nt, Homo sapiens
  misc_RNA (1)...(19): siRNA sense strand
ggaaccagcccagcucuga

SEQ ID NO: 1091603 - RNA, 19 nt, Homo sapiens
  misc_RNA (1)...(19): siRNA sense strand
aagaugagcuugcacuucu

SEQ ID NO: 1091604 - RNA, 19 nt, Homo sapiens
  misc_RNA (1)...(19): siRNA sense strand
gaaggucacucgggaacca

SEQ ID NO: 1091605 - RNA, 19 nt, Homo sapiens
  misc_RNA (1)...(19): siRNA sense strand
ggacuuggaagaggacauu

SEQ ID NO: 1091606 - RNA, 19 nt, Homo sapiens
  misc_RNA (1)...(19): siRNA sense strand
ccaaaagcaucaccagaaa

SEQ ID NO: 1091607 - RNA, 19 nt, Homo sapiens
  misc_RNA (1)...(19): siRNA sense strand
ggaagggacgcugugguaa

SEQ ID NO: 1091608 - RNA, 19 nt, Homo sapiens
  misc_RNA (1)...(19): siRNA sense strand
gcucgcggauccuccaguu

SEQ ID NO: 1091609 - RNA, 19 nt, Homo sapiens
  misc_RNA (1)...(19): siRNA sense strand
gaagggacgcugugguaag

SEQ ID NO: 1091610 - RNA, 19 nt, Homo sapiens
  misc_RNA (1)...(19): siRNA sense strand
gaccagaagacccagaaga

SEQ ID NO: 1091611 - RNA, 19 nt, Homo sapiens
  misc_RNA (1)...(19): siRNA sense strand
gcaccaccaugaccaaagc

SEQ ID NO: 1091612 - RNA, 19 nt, Homo sapiens
  misc_RNA (1)...(19): siRNA sense strand
ccaaagcucagucggacaa

SEQ ID NO: 1091613 - RNA, 19 nt, Homo sapiens
  misc_RNA (1)...(19): siRNA sense strand
gcuggcagagcccaagaua

SEQ ID NO: 1091614 - RNA, 19 nt, Homo sapiens
  misc_RNA (1)...(19): siRNA sense strand
caagauaaacuggcaaguc

SEQ ID NO: 1091615 - RNA, 19 nt, Homo sapiens
  misc_RNA (1)...(19): siRNA sense strand
gacccuggaucccaaagag

SEQ ID NO: 1091616 - RNA, 19 nt, Homo sapiens
  misc_RNA (1)...(19): siRNA sense strand
gaacugucucggcccaaga

SEQ ID NO: 1091617 - RNA, 19 nt, Homo sapiens
  misc_RNA (1)...(19): siRNA sense strand
agaggcacuuucugaguug

SEQ ID NO: 1091618 - RNA, 19 nt, Homo sapiens
  misc_RNA (1)...(19): siRNA sense strand
aaacuggcaaguccugaaa

SEQ ID NO: 1091619 - RNA, 19 nt, Homo sapiens
  misc_RNA (1)...(19): siRNA sense strand
gcagagcccaagauaaacu

SEQ ID NO: 1091620 - RNA, 19 nt, Homo sapiens
  misc_RNA (1)...(19): siRNA sense strand
gguccucccuggaauacag

SEQ ID NO: 1091621 - RNA, 19 nt, Homo sapiens
  misc_RNA (1)...(19): siRNA sense strand
cauguaagaugagcuugca

SEQ ID NO: 1091622 - RNA, 19 nt, Homo sapiens
  misc_RNA (1)...(19): siRNA sense strand
ccuggaauauuacaacaac

SEQ ID NO: 1091623 - RNA, 19 nt, Homo sapiens
  misc_RNA (1)...(19): siRNA sense strand
aggaagggacgcuguggua

SEQ ID NO: 1091624 - RNA, 19 nt, Homo sapiens
  misc_RNA (1)...(19): siRNA sense strand
uaagaugagcuugcacuuc

SEQ ID NO: 1091625 - RNA, 19 nt, Homo sapiens
  misc_RNA (1)...(19): siRNA sense strand
ccaagccacaugugucaga

SEQ ID NO: 1091626 - RNA, 19 nt, Homo sapiens
  misc_RNA (1)...(19): siRNA sense strand
uaaacuggcaaguccugaa

SEQ ID NO: 1091627 - RNA, 19 nt, Homo sapiens
  misc_RNA (1)...(19): siRNA sense strand
gacaccacccucaccauca

SEQ ID NO: 1091628 - RNA, 19 nt, Homo sapiens
  misc_RNA (1)...(19): siRNA sense strand
guaagaugagcuugcacuu

SEQ ID NO: 1091629 - RNA, 19 nt, Homo sapiens
  misc_RNA (1)...(19): siRNA sense strand
ucugaggugucccagguau

SEQ ID NO: 1091630 - RNA, 19 nt, Homo sapiens
  misc_RNA (1)...(19): siRNA sense strand
gugcguuccugaccgagau

SEQ ID NO: 1091631 - RNA, 19 nt, Homo sapiens
  misc_RNA (1)...(19): siRNA sense strand
acuggcaaguccugaaaga

SEQ ID NO: 1091632 - RNA, 19 nt, Homo sapiens
  misc_RNA (1)...(19): siRNA sense strand
cgagucgccugaaggaacu

SEQ ID NO: 1091633 - RNA, 19 nt, Homo sapiens
  misc_RNA (1)...(19): siRNA sense strand
uggcaaguccugaaagaca

SEQ ID NO: 1091634 - RNA, 19 nt, Homo sapiens
  misc_RNA (1)...(19): siRNA sense strand
uaaccgccuccuucacuug

SEQ ID NO: 1091635 - RNA, 19 nt, Homo sapiens
  misc_RNA (1)...(19): siRNA sense strand
cauaaccgccuccuucacu

SEQ ID NO: 1091636 - RNA, 19 nt, Homo sapiens
  misc_RNA (1)...(19): siRNA sense strand
uuucugaguuggagagagu

SEQ ID NO: 1091637 - RNA, 19 nt, Homo sapiens
  misc_RNA (1)...(19): siRNA sense strand
gaugagcuugcacuucugu

SEQ ID NO: 1091638 - RNA, 19 nt, Homo sapiens
  misc_RNA (1)...(19): siRNA sense strand
ggaauauuacaacaacaac

SEQ ID NO: 1091639 - RNA, 19 nt, Homo sapiens
  misc_RNA (1)...(19): siRNA sense strand
ggagacccuggaucccaaa

SEQ ID NO: 1091640 - RNA, 19 nt, Homo sapiens
  misc_RNA (1)...(19): siRNA sense strand
ugcuggaugucaccaagaa

SEQ ID NO: 1091641 - RNA, 19 nt, Homo sapiens
  misc_RNA (1)...(19): siRNA sense strand
acuccugucuggcccauuc

SEQ ID NO: 1091642 - RNA, 19 nt, Homo sapiens
  misc_RNA (1)...(19): siRNA sense strand
uaccuggaauauuacaaca

SEQ ID NO: 1091643 - RNA, 19 nt, Homo sapiens
  misc_RNA (1)...(19): siRNA sense strand
gccuggaucuccccaugua

SEQ ID NO: 1091644 - RNA, 19 nt, Homo sapiens
  misc_RNA (1)...(19): siRNA sense strand
gggcagaaauucacacagu

SEQ ID NO: 1091645 - RNA, 19 nt, Homo sapiens
  misc_RNA (1)...(19): siRNA sense strand
ggaaggaccaucugauucu

SEQ ID NO: 1091646 - RNA, 19 nt, Homo sapiens
  misc_RNA (1)...(19): siRNA sense strand
gcagaaauucacacaguca

SEQ ID NO: 1091647 - RNA, 19 nt, Homo sapiens
  misc_RNA (1)...(19): siRNA sense strand
gaaggaccaucugauucug

SEQ ID NO: 1091648 - RNA, 19 nt, Homo sapiens
  misc_RNA (1)...(19): siRNA sense strand
gggaaggaccaucugauuc

SEQ ID NO: 1091649 - RNA, 19 nt, Homo sapiens
  misc_RNA (1)...(19): siRNA sense strand
gaccaucugauucuggauu

SEQ ID NO: 1091650 - RNA, 19 nt, Homo sapiens
  misc_RNA (1)...(19): siRNA sense strand
cgggaaggaccaucugauu

SEQ ID NO: 1091651 - RNA, 19 nt, Homo sapiens
  misc_RNA (1)...(19): siRNA sense strand
ggaguucaccacacaagcu

SEQ ID NO: 1091652 - RNA, 19 nt, Homo sapiens
  misc_RNA (1)...(19): siRNA sense strand
uaucgugggcagaaauuca

SEQ ID NO: 1091653 - RNA, 19 nt, Homo sapiens
  misc_RNA (1)...(19): siRNA sense strand
ggacguguguuuauaauua

SEQ ID NO: 1091654 - RNA, 19 nt, Homo sapiens
  misc_RNA (1)...(19): siRNA sense strand
ucaaagauguucccaauaa

SEQ ID NO: 1091655 - RNA, 19 nt, Homo sapiens
  misc_RNA (1)...(19): siRNA sense strand
gaaguuaaauggaucuuug

SEQ ID NO: 1091656 - RNA, 19 nt, Homo sapiens
  misc_RNA (1)...(19): siRNA sense strand
gaaaggcccacucuauuua

SEQ ID NO: 1091657 - RNA, 19 nt, Homo sapiens
  misc_RNA (1)...(19): siRNA sense strand
ggagagaaauagaaacaaa

SEQ ID NO: 1091658 - RNA, 19 nt, Homo sapiens
  misc_RNA (1)...(19): siRNA sense strand
ggaaaggcccacucuauuu

SEQ ID NO: 1091659 - RNA, 19 nt, Homo sapiens
  misc_RNA (1)...(19): siRNA sense strand
gaauggacguguguuuaua

SEQ ID NO: 1091660 - RNA, 19 nt, Homo sapiens
  misc_RNA (1)...(19): siRNA sense strand
gggcaaauuugaaguuaaa

SEQ ID NO: 1091661 - RNA, 19 nt, Homo sapiens
  misc_RNA (1)...(19): siRNA sense strand
guacugagcaugguaauaa

SEQ ID NO: 1091662 - RNA, 19 nt, Homo sapiens
  misc_RNA (1)...(19): siRNA sense strand
ugacauacaucguuccauu

SEQ ID NO: 1091663 - RNA, 19 nt, Homo sapiens
  misc_RNA (1)...(19): siRNA sense strand
acacaaaguucugcuuaua

SEQ ID NO: 1091664 - RNA, 19 nt, Homo sapiens
  misc_RNA (1)...(19): siRNA sense strand
caacacaaaguucugcuua

SEQ ID NO: 1091665 - RNA, 19 nt, Homo sapiens
  misc_RNA (1)...(19): siRNA sense strand
uaacagcuauccaccaaug

SEQ ID NO: 1091666 - RNA, 19 nt, Homo sapiens
  misc_RNA (1)...(19): siRNA sense strand
uggagaacaucacuauaua

SEQ ID NO: 1091667 - RNA, 19 nt, Homo sapiens
  misc_RNA (1)...(19): siRNA sense strand
uaaaggccauaaacaacua

SEQ ID NO: 1091668 - RNA, 19 nt, Homo sapiens
  misc_RNA (1)...(19): siRNA sense strand
gaagaauggacguguguuu

SEQ ID NO: 1091669 - RNA, 19 nt, Homo sapiens
  misc_RNA (1)...(19): siRNA sense strand
caacaaaccgguuaccaau

SEQ ID NO: 1091670 - RNA, 19 nt, Homo sapiens
  misc_RNA (1)...(19): siRNA sense strand
gcauaccaccucaaucuuu

SEQ ID NO: 1091671 - RNA, 19 nt, Homo sapiens
  misc_RNA (1)...(19): siRNA sense strand
acaaaccgguuaccaauuc

SEQ ID NO: 1091672 - RNA, 19 nt, Homo sapiens
  misc_RNA (1)...(19): siRNA sense strand
gacaaccuauggacaaaug

SEQ ID NO: 1091673 - RNA, 19 nt, Homo sapiens
  misc_RNA (1)...(19): siRNA sense strand
gggaaaggcccacucuauu

SEQ ID NO: 1091674 - RNA, 19 nt, Homo sapiens
  misc_RNA (1)...(19): siRNA sense strand
gagcaggcuucaaccagaa

SEQ ID NO: 1091675 - RNA, 19 nt, Homo sapiens
  misc_RNA (1)...(19): siRNA sense strand
ugccauaucugacaaccua

SEQ ID NO: 1091676 - RNA, 19 nt, Homo sapiens
  misc_RNA (1)...(19): siRNA sense strand
caaaucagaguaacagcua

SEQ ID NO: 1091677 - RNA, 19 nt, Homo sapiens
  misc_RNA (1)...(19): siRNA sense strand
ggauuuccauauucucuug

SEQ ID NO: 1091678 - RNA, 19 nt, Homo sapiens
  misc_RNA (1)...(19): siRNA sense strand
gaagggcaaauuugaaguu

SEQ ID NO: 1091679 - RNA, 19 nt, Homo sapiens
  misc_RNA (1)...(19): siRNA sense strand
gggcugccauugccagaaa

SEQ ID NO: 1091680 - RNA, 19 nt, Homo sapiens
  misc_RNA (1)...(19): siRNA sense strand
uugaugacuuugcacauua

SEQ ID NO: 1091681 - RNA, 19 nt, Homo sapiens
  misc_RNA (1)...(19): siRNA sense strand
ugucaaagauguucccaau

SEQ ID NO: 1091682 - RNA, 19 nt, Homo sapiens
  misc_RNA (1)...(19): siRNA sense strand
ccagcagccucagccauua

SEQ ID NO: 1091683 - RNA, 19 nt, Homo sapiens
  misc_RNA (1)...(19): siRNA sense strand
gacauacaucguuccauua

SEQ ID NO: 1091684 - RNA, 19 nt, Homo sapiens
  misc_RNA (1)...(19): siRNA sense strand
auccauacaugccuaguua

SEQ ID NO: 1091685 - RNA, 19 nt, Homo sapiens
  misc_RNA (1)...(19): siRNA sense strand
caacaugaauauuggaacu

SEQ ID NO: 1091686 - RNA, 19 nt, Homo sapiens
  misc_RNA (1)...(19): siRNA sense strand
aaaccucaaccgaaacuua

SEQ ID NO: 1091687 - RNA, 19 nt, Homo sapiens
  misc_RNA (1)...(19): siRNA sense strand
uuacuaugcuccauccauu

SEQ ID NO: 1091688 - RNA, 19 nt, Homo sapiens
  misc_RNA (1)...(19): siRNA sense strand
acaaaugaguaauggagaa

SEQ ID NO: 1091689 - RNA, 19 nt, Homo sapiens
  misc_RNA (1)...(19): siRNA sense strand
gggcaaggaaauaaaguuu

SEQ ID NO: 1091690 - RNA, 19 nt, Homo sapiens
  misc_RNA (1)...(19): siRNA sense strand
aauaaccaauuacggcaua

SEQ ID NO: 1091691 - RNA, 19 nt, Homo sapiens
  misc_RNA (1)...(19): siRNA sense strand
guaccaccaccuccuauaa

SEQ ID NO: 1091692 - RNA, 19 nt, Homo sapiens
  misc_RNA (1)...(19): siRNA sense strand
ugccaaaccucaaccgaaa

SEQ ID NO: 1091693 - RNA, 19 nt, Homo sapiens
  misc_RNA (1)...(19): siRNA sense strand
aggcaugacuggacugaaa

SEQ ID NO: 1091694 - RNA, 19 nt, Homo sapiens
  misc_RNA (1)...(19): siRNA sense strand
ggacaaucaacacaaaguu

SEQ ID NO: 1091695 - RNA, 19 nt, Homo sapiens
  misc_RNA (1)...(19): siRNA sense strand
cauaccaccucaaucuuug

SEQ ID NO: 1091696 - RNA, 19 nt, Homo sapiens
  misc_RNA (1)...(19): siRNA sense strand
uauuuacucuucaguguga

SEQ ID NO: 1091697 - RNA, 19 nt, Homo sapiens
  misc_RNA (1)...(19): siRNA sense strand
cagggacaaucaacacaaa

SEQ ID NO: 1091698 - RNA, 19 nt, Homo sapiens
  misc_RNA (1)...(19): siRNA sense strand
caagggcaaugugggaauu

SEQ ID NO: 1091699 - RNA, 19 nt, Homo sapiens
  misc_RNA (1)...(19): siRNA sense strand
acaaaguucugcuuauagu

SEQ ID NO: 1091700 - RNA, 19 nt, Homo sapiens
  misc_RNA (1)...(19): siRNA sense strand
cuaaagggcaaggaaauaa

SEQ ID NO: 1091701 - RNA, 19 nt, Homo sapiens
  misc_RNA (1)...(19): siRNA sense strand
guagggagagaaauagaaa

SEQ ID NO: 1091702 - RNA, 19 nt, Homo sapiens
  misc_RNA (1)...(19): siRNA sense strand
aagggacacucaagaggua

SEQ ID NO: 1091703 - RNA, 19 nt, Homo sapiens
  misc_RNA (1)...(19): siRNA sense strand
uaaguggaagggcaaauuu

SEQ ID NO: 1091704 - RNA, 19 nt, Homo sapiens
  misc_RNA (1)...(19): siRNA sense strand
gagcagcagugguaugacu

SEQ ID NO: 1091705 - RNA, 19 nt, Homo sapiens
  misc_RNA (1)...(19): siRNA sense strand
gcagugguaugacuagcau

SEQ ID NO: 1091706 - RNA, 19 nt, Homo sapiens
  misc_RNA (1)...(19): siRNA sense strand
ugacuagcauugcaaccaa

SEQ ID NO: 1091707 - RNA, 19 nt, Homo sapiens
  misc_RNA (1)...(19): siRNA sense strand
gcuuugagcagcaguggua

SEQ ID NO: 1091708 - RNA, 19 nt, Homo sapiens
  misc_RNA (1)...(19): siRNA sense strand
uaaagggcaaggaaauaaa

SEQ ID NO: 1091709 - RNA, 19 nt, Homo sapiens
  misc_RNA (1)...(19): siRNA sense strand
aagggcaaauuugaaguua

SEQ ID NO: 1091710 - RNA, 19 nt, Homo sapiens
  misc_RNA (1)...(19): siRNA sense strand
ccugacagcugcagugaca

SEQ ID NO: 1091711 - RNA, 19 nt, Homo sapiens
  misc_RNA (1)...(19): siRNA sense strand
uuaaguagccagacaaauc

SEQ ID NO: 1091712 - RNA, 19 nt, Homo sapiens
  misc_RNA (1)...(19): siRNA sense strand
uaaguagccagacaaauca

SEQ ID NO: 1091713 - RNA, 19 nt, Homo sapiens
  misc_RNA (1)...(19): siRNA sense strand
uaauggagaacaucacuau

SEQ ID NO: 1091714 - RNA, 19 nt, Homo sapiens
  misc_RNA (1)...(19): siRNA sense strand
caaaguucugcuuauagua

SEQ ID NO: 1091715 - RNA, 19 nt, Homo sapiens
  misc_RNA (1)...(19): siRNA sense strand
gaugguguauuuagucaac

SEQ ID NO: 1091716 - RNA, 19 nt, Homo sapiens
  misc_RNA (1)...(19): siRNA sense strand
cagaugguguauuuaguca

SEQ ID NO: 1091717 - RNA, 19 nt, Homo sapiens
  misc_RNA (1)...(19): siRNA sense strand
uggcugaaaugaagucugu

SEQ ID NO: 1091718 - RNA, 19 nt, Homo sapiens
  misc_RNA (1)...(19): siRNA sense strand
uggaguggcugaaaugaag

SEQ ID NO: 1091719 - RNA, 19 nt, Homo sapiens
  misc_RNA (1)...(19): siRNA sense strand
caacuauaaucccaaagac

SEQ ID NO: 1091720 - RNA, 19 nt, Homo sapiens
  misc_RNA (1)...(19): siRNA sense strand
aguaacagcuauccaccaa

SEQ ID NO: 1091721 - RNA, 19 nt, Homo sapiens
  misc_RNA (1)...(19): siRNA sense strand
caaagauguucccaauaac

SEQ ID NO: 1091722 - RNA, 19 nt, Homo sapiens
  misc_RNA (1)...(19): siRNA sense strand
ggugucuggucucaggaua

SEQ ID NO: 1091723 - RNA, 19 nt, Homo sapiens
  misc_RNA (1)...(19): siRNA sense strand
aagaugcuguaaaugauga

SEQ ID NO: 1091724 - RNA, 19 nt, Homo sapiens
  misc_RNA (1)...(19): siRNA sense strand
aagaauggacguguguuua

SEQ ID NO: 1091725 - RNA, 19 nt, Homo sapiens
  misc_RNA (1)...(19): siRNA sense strand
acauacaucguuccauuaa

SEQ ID NO: 1091726 - RNA, 19 nt, Homo sapiens
  misc_RNA (1)...(19): siRNA sense strand
cauacaucguuccauuaaa

SEQ ID NO: 1091727 - RNA, 19 nt, Homo sapiens
  misc_RNA (1)...(19): siRNA sense strand
ccuaaagggcaaggaaaua

SEQ ID NO: 1091728 - RNA, 19 nt, Homo sapiens
  misc_RNA (1)...(19): siRNA sense strand
ugacuuugcacauuaugaa

SEQ ID NO: 1091729 - RNA, 19 nt, Homo sapiens
  misc_RNA (1)...(19): siRNA sense strand
cggcauauucgcuuagaaa

SEQ ID NO: 1091730 - RNA, 19 nt, Homo sapiens
  misc_RNA (1)...(19): siRNA sense strand
gcuaaaggccauaaacaac

SEQ ID NO: 1091731 - RNA, 19 nt, Homo sapiens
  misc_RNA (1)...(19): siRNA sense strand
ugggagagcuauuacugau

SEQ ID NO: 1091732 - RNA, 19 nt, Homo sapiens
  misc_RNA (1)...(19): siRNA sense strand
caauggagcgggcagugaa

SEQ ID NO: 1091733 - RNA, 19 nt, Homo sapiens
  misc_RNA (1)...(19): siRNA sense strand
acaugaauauuggaacuug

SEQ ID NO: 1091734 - RNA, 19 nt, Homo sapiens
  misc_RNA (1)...(19): siRNA sense strand
gauuuggcaaugauacuuu

SEQ ID NO: 1091735 - RNA, 19 nt, Homo sapiens
  misc_RNA (1)...(19): siRNA sense strand
gacaaucaacacaaaguuc

SEQ ID NO: 1091736 - RNA, 19 nt, Homo sapiens
  misc_RNA (1)...(19): siRNA sense strand
ucuauuuacucuucagugu

SEQ ID NO: 1091737 - RNA, 19 nt, Homo sapiens
  misc_RNA (1)...(19): siRNA sense strand
ggccauaaacaacuauaau

SEQ ID NO: 1091738 - RNA, 19 nt, Homo sapiens
  misc_RNA (1)...(19): siRNA sense strand
aaagccaacugccucaaca

SEQ ID NO: 1091739 - RNA, 19 nt, Homo sapiens
  misc_RNA (1)...(19): siRNA sense strand
cagaaagccugccaaaccu

SEQ ID NO: 1091740 - RNA, 19 nt, Homo sapiens
  misc_RNA (1)...(19): siRNA sense strand
ggagaacaucacuauauac

SEQ ID NO: 1091741 - RNA, 19 nt, Homo sapiens
  misc_RNA (1)...(19): siRNA sense strand
caaaccgguuaccaauuca

SEQ ID NO: 1091742 - RNA, 19 nt, Homo sapiens
  misc_RNA (1)...(19): siRNA sense strand
ggucucaggauaaguggaa

SEQ ID NO: 1091743 - RNA, 19 nt, Homo sapiens
  misc_RNA (1)...(19): siRNA sense strand
gcugaaaugaagucuguug

SEQ ID NO: 1091744 - RNA, 19 nt, Homo sapiens
  misc_RNA (1)...(19): siRNA sense strand
gaccuaaagggcaaggaaa

SEQ ID NO: 1091745 - RNA, 19 nt, Homo sapiens
  misc_RNA (1)...(19): siRNA sense strand
guaguacugagcaugguaa

SEQ ID NO: 1091746 - RNA, 19 nt, Homo sapiens
  misc_RNA (1)...(19): siRNA sense strand
agaauggacguguguuuau

SEQ ID NO: 1091747 - RNA, 19 nt, Homo sapiens
  misc_RNA (1)...(19): siRNA sense strand
guacaaaacgguucgauuc

SEQ ID NO: 1091748 - RNA, 19 nt, Homo sapiens
  misc_RNA (1)...(19): siRNA sense strand
ccagaaagccugccaaacc

SEQ ID NO: 1091749 - RNA, 19 nt, Homo sapiens
  misc_RNA (1)...(19): siRNA sense strand
ugacagcugcagugacaaa

SEQ ID NO: 1091750 - RNA, 19 nt, Homo sapiens
  misc_RNA (1)...(19): siRNA sense strand
uauuggaacuugggaugaa

SEQ ID NO: 1091751 - RNA, 19 nt, Homo sapiens
  misc_RNA (1)...(19): siRNA sense strand
gccauaaacaacuauaauc

SEQ ID NO: 1091752 - RNA, 19 nt, Homo sapiens
  misc_RNA (1)...(19): siRNA sense strand
ugaugacuuugcacauuau

SEQ ID NO: 1091753 - RNA, 19 nt, Homo sapiens
  misc_RNA (1)...(19): siRNA sense strand
cagaagagcuggccaaguu

SEQ ID NO: 1091754 - RNA, 19 nt, Homo sapiens
  misc_RNA (1)...(19): siRNA sense strand
ggaaggugcugaagaagaa

SEQ ID NO: 1091755 - RNA, 19 nt, Homo sapiens
  misc_RNA (1)...(19): siRNA sense strand
gaagaaggcgaaaugaaug

SEQ ID NO: 1091756 - RNA, 19 nt, Homo sapiens
  misc_RNA (1)...(19): siRNA sense strand
gagaucaauuugcuuucua

SEQ ID NO: 1091757 - RNA, 19 nt, Homo sapiens
  misc_RNA (1)...(19): siRNA sense strand
ccaaggagcuccggcagaa

SEQ ID NO: 1091758 - RNA, 19 nt, Homo sapiens
  misc_RNA (1)...(19): siRNA sense strand
ugacagaccugcagagcau

SEQ ID NO: 1091759 - RNA, 19 nt, Homo sapiens
  misc_RNA (1)...(19): siRNA sense strand
gagcugagaucaauuugcu

SEQ ID NO: 1091760 - RNA, 19 nt, Homo sapiens
  misc_RNA (1)...(19): siRNA sense strand
ucgaagacauuguugaaga

SEQ ID NO: 1091761 - RNA, 19 nt, Homo sapiens
  misc_RNA (1)...(19): siRNA sense strand
acuauuacgugaccuauga

SEQ ID NO: 1091762 - RNA, 19 nt, Homo sapiens
  misc_RNA (1)...(19): siRNA sense strand
uugaagagguuacugaaga

SEQ ID NO: 1091763 - RNA, 19 nt, Homo sapiens
  misc_RNA (1)...(19): siRNA sense strand
cugaagaggucguggaaga

SEQ ID NO: 1091764 - RNA, 19 nt, Homo sapiens
  misc_RNA (1)...(19): siRNA sense strand
ugaagaaggcgaaaugaau

SEQ ID NO: 1091765 - RNA, 19 nt, Homo sapiens
  misc_RNA (1)...(19): siRNA sense strand
uggaagacgucaucgaaga

SEQ ID NO: 1091766 - RNA, 19 nt, Homo sapiens
  misc_RNA (1)...(19): siRNA sense strand
gaagagcuggccaaguuga

SEQ ID NO: 1091767 - RNA, 19 nt, Homo sapiens
  misc_RNA (1)...(19): siRNA sense strand
gcugagaucaauuugcuuu

SEQ ID NO: 1091768 - RNA, 19 nt, Homo sapiens
  misc_RNA (1)...(19): siRNA sense strand
gaaacccacuggccuuggu

SEQ ID NO: 1091769 - RNA, 19 nt, Homo sapiens
  misc_RNA (1)...(19): siRNA sense strand
gggauucaaagaagauuaa

SEQ ID NO: 1091770 - RNA, 19 nt, Homo sapiens
  misc_RNA (1)...(19): siRNA sense strand
ggccagggauucaaagaag

SEQ ID NO: 1091771 - RNA, 19 nt, Homo sapiens
  misc_RNA (1)...(19): siRNA sense strand
gaagagugaggcugggauu

SEQ ID NO: 1091772 - RNA, 19 nt, Homo sapiens
  misc_RNA (1)...(19): siRNA sense strand
caauuugcuuucuaguuug

SEQ ID NO: 1091773 - RNA, 19 nt, Homo sapiens
  misc_RNA (1)...(19): siRNA sense strand
agacauuguugaagagguu

SEQ ID NO: 1091774 - RNA, 19 nt, Homo sapiens
  misc_RNA (1)...(19): siRNA sense strand
gcacaggaggcgcaguuug

SEQ ID NO: 1091775 - RNA, 19 nt, Homo sapiens
  misc_RNA (1)...(19): siRNA sense strand
aguggaaggugcugaagaa

SEQ ID NO: 1091776 - RNA, 19 nt, Homo sapiens
  misc_RNA (1)...(19): siRNA sense strand
caucgaagacauuguugaa

SEQ ID NO: 1091777 - RNA, 19 nt, Homo sapiens
  misc_RNA (1)...(19): siRNA sense strand
agaaagggaaggagaaaga

SEQ ID NO: 1091778 - RNA, 19 nt, Homo sapiens
  misc_RNA (1)...(19): siRNA sense strand
caagaaagggaaggagaaa

SEQ ID NO: 1091779 - RNA, 19 nt, Homo sapiens
  misc_RNA (1)...(19): siRNA sense strand
aagggucucuggagucuga

SEQ ID NO: 1091780 - RNA, 19 nt, Homo sapiens
  misc_RNA (1)...(19): siRNA sense strand
cgaagacauuguugaagag

SEQ ID NO: 1091781 - RNA, 19 nt, Homo sapiens
  misc_RNA (1)...(19): siRNA sense strand
cugcucaccuggcuucuug

SEQ ID NO: 1091782 - RNA, 19 nt, Homo sapiens
  misc_RNA (1)...(19): siRNA sense strand
gaugaagaaggcgaaauga

SEQ ID NO: 1091783 - RNA, 19 nt, Homo sapiens
  misc_RNA (1)...(19): siRNA sense strand
ucucccagcuuagaauuau

SEQ ID NO: 1091784 - RNA, 19 nt, Homo sapiens
  misc_RNA (1)...(19): siRNA sense strand
gccagggauucaaagaaga

SEQ ID NO: 1091785 - RNA, 19 nt, Homo sapiens
  misc_RNA (1)...(19): siRNA sense strand
cgaagggucucuggagucu

SEQ ID NO: 1091786 - RNA, 19 nt, Homo sapiens
  misc_RNA (1)...(19): siRNA sense strand
gcccuuucaucacuuacaa

SEQ ID NO: 1091787 - RNA, 19 nt, Homo sapiens
  misc_RNA (1)...(19): siRNA sense strand
gaccuaugauuuugugaaa

SEQ ID NO: 1091788 - RNA, 19 nt, Homo sapiens
  misc_RNA (1)...(19): siRNA sense strand
gggagaugcugugcugaca

SEQ ID NO: 1091789 - RNA, 19 nt, Homo sapiens
  misc_RNA (1)...(19): siRNA sense strand
gauuaagaaaguugccaaa

SEQ ID NO: 1091790 - RNA, 19 nt, Homo sapiens
  misc_RNA (1)...(19): siRNA sense strand
gagagucggagcugucugu

SEQ ID NO: 1091791 - RNA, 19 nt, Homo sapiens
  misc_RNA (1)...(19): siRNA sense strand
ugaagagguuacugaagag

SEQ ID NO: 1091792 - RNA, 19 nt, Homo sapiens
  misc_RNA (1)...(19): siRNA sense strand
ugagaucaauuugcuuucu

SEQ ID NO: 1091793 - RNA, 19 nt, Homo sapiens
  misc_RNA (1)...(19): siRNA sense strand
gaucuacgaaggcgauuac

SEQ ID NO: 1091794 - RNA, 19 nt, Homo sapiens
  misc_RNA (1)...(19): siRNA sense strand
ucccagcuuagaauuauua

SEQ ID NO: 1091795 - RNA, 19 nt, Homo sapiens
  misc_RNA (1)...(19): siRNA sense strand
gaccaucggaaacaucaga

SEQ ID NO: 1091796 - RNA, 19 nt, Homo sapiens
  misc_RNA (1)...(19): siRNA sense strand
gaagacgucaucgaagaca

SEQ ID NO: 1091797 - RNA, 19 nt, Homo sapiens
  misc_RNA (1)...(19): siRNA sense strand
acaagaaagggaaggagaa

SEQ ID NO: 1091798 - RNA, 19 nt, Homo sapiens
  misc_RNA (1)...(19): siRNA sense strand
cuucagcacugcccacaag

SEQ ID NO: 1091799 - RNA, 19 nt, Homo sapiens
  misc_RNA (1)...(19): siRNA sense strand
agacgguccugcucaccuu

SEQ ID NO: 1091800 - RNA, 19 nt, Homo sapiens
  misc_RNA (1)...(19): siRNA sense strand
cgucaucgaagacauuguu

SEQ ID NO: 1091801 - RNA, 19 nt, Homo sapiens
  misc_RNA (1)...(19): siRNA sense strand
ccucaauggcgaucucuug

SEQ ID NO: 1091802 - RNA, 19 nt, Homo sapiens
  misc_RNA (1)...(19): siRNA sense strand
ggaccaccgugaccaucgu

SEQ ID NO: 1091803 - RNA, 19 nt, Homo sapiens
  misc_RNA (1)...(19): siRNA sense strand
agucggagcugucugucau

SEQ ID NO: 1091804 - RNA, 19 nt, Homo sapiens
  misc_RNA (1)...(19): siRNA sense strand
cguggaagacgucaucgaa

SEQ ID NO: 1091805 - RNA, 19 nt, Homo sapiens
  misc_RNA (1)...(19): siRNA sense strand
cacaggaggcgcaguuugu

SEQ ID NO: 1091806 - RNA, 19 nt, Homo sapiens
  misc_RNA (1)...(19): siRNA sense strand
caucugacaggcugacguu

SEQ ID NO: 1091807 - RNA, 19 nt, Homo sapiens
  misc_RNA (1)...(19): siRNA sense strand
ggugcuaccugcuguugac

SEQ ID NO: 1091808 - RNA, 19 nt, Homo sapiens
  misc_RNA (1)...(19): siRNA sense strand
gaaggcgaaaugaaugagu

SEQ ID NO: 1091809 - RNA, 19 nt, Homo sapiens
  misc_RNA (1)...(19): siRNA sense strand
ccuaugauuuugugaaaga

SEQ ID NO: 1091810 - RNA, 19 nt, Homo sapiens
  misc_RNA (1)...(19): siRNA sense strand
ggcgugguccgcacauuga

SEQ ID NO: 1091811 - RNA, 19 nt, Homo sapiens
  misc_RNA (1)...(19): siRNA sense strand
gggagaaagacaagaaagg

SEQ ID NO: 1091812 - RNA, 19 nt, Homo sapiens
  misc_RNA (1)...(19): siRNA sense strand
ugaccaucguggaggagaa

SEQ ID NO: 1091813 - RNA, 19 nt, Homo sapiens
  misc_RNA (1)...(19): siRNA sense strand
caaguugaggcugcguaua

SEQ ID NO: 1091814 - RNA, 19 nt, Homo sapiens
  misc_RNA (1)...(19): siRNA sense strand
agaugaagaaggcgaaaug

SEQ ID NO: 1091815 - RNA, 19 nt, Homo sapiens
  misc_RNA (1)...(19): siRNA sense strand
caccgugucucccaaugag

SEQ ID NO: 1091816 - RNA, 19 nt, Homo sapiens
  misc_RNA (1)...(19): siRNA sense strand
gaguggaaggugcugaaga

SEQ ID NO: 1091817 - RNA, 19 nt, Homo sapiens
  misc_RNA (1)...(19): siRNA sense strand
agacgucaucgaagacauu

SEQ ID NO: 1091818 - RNA, 19 nt, Homo sapiens
  misc_RNA (1)...(19): siRNA sense strand
ucacuuacaacuauuacgu

SEQ ID NO: 1091819 - RNA, 19 nt, Homo sapiens
  misc_RNA (1)...(19): siRNA sense strand
aagccgugauuccgaucua

SEQ ID NO: 1091820 - RNA, 19 nt, Homo sapiens
  misc_RNA (1)...(19): siRNA sense strand
aagaaggcgaaaugaauga

SEQ ID NO: 1091821 - RNA, 19 nt, Homo sapiens
  misc_RNA (1)...(19): siRNA sense strand
uggccuuggugcccuacua

SEQ ID NO: 1091822 - RNA, 19 nt, Homo sapiens
  misc_RNA (1)...(19): siRNA sense strand
gcagaagagcuggccaagu

SEQ ID NO: 1091823 - RNA, 19 nt, Homo sapiens
  misc_RNA (1)...(19): siRNA sense strand
ggaagacgucaucgaagac

SEQ ID NO: 1091824 - RNA, 19 nt, Homo sapiens
  misc_RNA (1)...(19): siRNA sense strand
agaucaauuugcuuucuag

SEQ ID NO: 1091825 - RNA, 19 nt, Homo sapiens
  misc_RNA (1)...(19): siRNA sense strand
caacuauuacgugaccuau

SEQ ID NO: 1091826 - RNA, 19 nt, Homo sapiens
  misc_RNA (1)...(19): siRNA sense strand
uuacgugaccuaugauuuu

SEQ ID NO: 1091827 - RNA, 19 nt, Homo sapiens
  misc_RNA (1)...(19): siRNA sense strand
gcgcauguucgccguguag

SEQ ID NO: 1091828 - RNA, 19 nt, Homo sapiens
  misc_RNA (1)...(19): siRNA sense strand
gaggaggcucugcgcaugu

SEQ ID NO: 1091829 - RNA, 19 nt, Homo sapiens
  misc_RNA (1)...(19): siRNA sense strand
uggaaggugcugaagaaga

SEQ ID NO: 1091830 - RNA, 19 nt, Homo sapiens
  misc_RNA (1)...(19): siRNA sense strand
gaaagggaaggagaaagac

SEQ ID NO: 1091831 - RNA, 19 nt, Homo sapiens
  misc_RNA (1)...(19): siRNA sense strand
ggccacaacaaacuucuag

SEQ ID NO: 1091832 - RNA, 19 nt, Homo sapiens
  misc_RNA (1)...(19): siRNA sense strand
ggucguggaagacgucauc

SEQ ID NO: 1091833 - RNA, 19 nt, Homo sapiens
  misc_RNA (1)...(19): siRNA sense strand
gggcuucaacgaccugaca

SEQ ID NO: 1091834 - RNA, 19 nt, Homo sapiens
  misc_RNA (1)...(19): siRNA sense strand
caucguggaggagaagauu

SEQ ID NO: 1091835 - RNA, 19 nt, Homo sapiens
  misc_RNA (1)...(19): siRNA sense strand
ccaaguugaggcugcguau

SEQ ID NO: 1091836 - RNA, 19 nt, Homo sapiens
  misc_RNA (1)...(19): siRNA sense strand
ggagguggaugacuucuuu

SEQ ID NO: 1091837 - RNA, 19 nt, Homo sapiens
  misc_RNA (1)...(19): siRNA sense strand
gggaaaagcuacagaaauu

SEQ ID NO: 1091838 - RNA, 19 nt, Homo sapiens
  misc_RNA (1)...(19): siRNA sense strand
ggaccuuccuguuggagua

SEQ ID NO: 1091839 - RNA, 19 nt, Homo sapiens
  misc_RNA (1)...(19): siRNA sense strand
gggaagaguuugccaagau

SEQ ID NO: 1091840 - RNA, 19 nt, Homo sapiens
  misc_RNA (1)...(19): siRNA sense strand
ggaagaguuugccaagaug

SEQ ID NO: 1091841 - RNA, 19 nt, Homo sapiens
  misc_RNA (1)...(19): siRNA sense strand
ucaaggagguggaugacuu

SEQ ID NO: 1091842 - RNA, 19 nt, Homo sapiens
  misc_RNA (1)...(19): siRNA sense strand
gggcgugccuuguuguuug

SEQ ID NO: 1091843 - RNA, 19 nt, Homo sapiens
  misc_RNA (1)...(19): siRNA sense strand
gagcagggcgugccuuguu

SEQ ID NO: 1091844 - RNA, 19 nt, Homo sapiens
  misc_RNA (1)...(19): siRNA sense strand
gaggguuucugaggaauau

SEQ ID NO: 1091845 - RNA, 19 nt, Homo sapiens
  misc_RNA (1)...(19): siRNA sense strand
ugaggaauauugugaaguc

SEQ ID NO: 1091846 - RNA, 19 nt, Homo sapiens
  misc_RNA (1)...(19): siRNA sense strand
gaauauggacaggaucuga

SEQ ID NO: 1091847 - RNA, 19 nt, Homo sapiens
  misc_RNA (1)...(19): siRNA sense strand
cggaguaccuggccaucuu

SEQ ID NO: 1091848 - RNA, 19 nt, Homo sapiens
  misc_RNA (1)...(19): siRNA sense strand
gaagaguuugccaagauga

SEQ ID NO: 1091849 - RNA, 19 nt, Homo sapiens
  misc_RNA (1)...(19): siRNA sense strand
ggagacguaugcggagguu

SEQ ID NO: 1091850 - RNA, 19 nt, Homo sapiens
  misc_RNA (1)...(19): siRNA sense strand
ggaggguuucugaggaaua

SEQ ID NO: 1091851 - RNA, 19 nt, Homo sapiens
  misc_RNA (1)...(19): siRNA sense strand
ggaguaccuggccaucuuu

SEQ ID NO: 1091852 - RNA, 19 nt, Homo sapiens
  misc_RNA (1)...(19): siRNA sense strand
ccuuacagguggagauuuc

SEQ ID NO: 1091853 - RNA, 19 nt, Homo sapiens
  misc_RNA (1)...(19): siRNA sense strand
gaguaccuggccaucuuua

SEQ ID NO: 1091854 - RNA, 19 nt, Homo sapiens
  misc_RNA (1)...(19): siRNA sense strand
guaccuggccaucuuuaag

SEQ ID NO: 1091855 - RNA, 19 nt, Homo sapiens
  misc_RNA (1)...(19): siRNA sense strand
ucggaggguuucugaggaa

SEQ ID NO: 1091856 - RNA, 19 nt, Homo sapiens
  misc_RNA (1)...(19): siRNA sense strand
augccuacguggagaauga

SEQ ID NO: 1091857 - RNA, 19 nt, Homo sapiens
  misc_RNA (1)...(19): siRNA sense strand
agaagacaguugcgaugca

SEQ ID NO: 1091858 - RNA, 19 nt, Homo sapiens
  misc_RNA (1)...(19): siRNA sense strand
ugagugagcgggacaaggu

SEQ ID NO: 1091859 - RNA, 19 nt, Homo sapiens
  misc_RNA (1)...(19): siRNA sense strand
caaggagguggaugacuuc

SEQ ID NO: 1091860 - RNA, 19 nt, Homo sapiens
  misc_RNA (1)...(19): siRNA sense strand
gaaaagcuacagaaauugg

SEQ ID NO: 1091861 - RNA, 19 nt, Homo sapiens
  misc_RNA (1)...(19): siRNA sense strand
ucacacccguauccgagau

SEQ ID NO: 1091862 - RNA, 19 nt, Homo sapiens
  misc_RNA (1)...(19): siRNA sense strand
caguugcgaugcacgaagu

SEQ ID NO: 1091863 - RNA, 19 nt, Homo sapiens
  misc_RNA (1)...(19): siRNA sense strand
gagcugccucccucacuuc

SEQ ID NO: 1091864 - RNA, 19 nt, Homo sapiens
  misc_RNA (1)...(19): siRNA sense strand
ggguuucugaggaauauug

SEQ ID NO: 1091865 - RNA, 19 nt, Homo sapiens
  misc_RNA (1)...(19): siRNA sense strand
agagcugccucccucacuu

SEQ ID NO: 1091866 - RNA, 19 nt, Homo sapiens
  misc_RNA (1)...(19): siRNA sense strand
ccucaucacgggcauguca

SEQ ID NO: 1091867 - RNA, 19 nt, Homo sapiens
  misc_RNA (1)...(19): siRNA sense strand
cgggaagaguuugccaaga

SEQ ID NO: 1091868 - RNA, 19 nt, Homo sapiens
  misc_RNA (1)...(19): siRNA sense strand
gcaugucagggcucaagga

SEQ ID NO: 1091869 - RNA, 19 nt, Homo sapiens
  misc_RNA (1)...(19): siRNA sense strand
uggaguaucacacccguau

SEQ ID NO: 1091870 - RNA, 19 nt, Homo sapiens
  misc_RNA (1)...(19): siRNA sense strand
ggacaaugcuaauguauga

SEQ ID NO: 1091871 - RNA, 19 nt, Homo sapiens
  misc_RNA (1)...(19): siRNA sense strand
caagcaagcucaaaugaaa

SEQ ID NO: 1091872 - RNA, 19 nt, Homo sapiens
  misc_RNA (1)...(19): siRNA sense strand
guaaagguauucugaaauc

SEQ ID NO: 1091873 - RNA, 19 nt, Homo sapiens
  misc_RNA (1)...(19): siRNA sense strand
gguacaagauccuuacaaa

SEQ ID NO: 1091874 - RNA, 19 nt, Homo sapiens
  misc_RNA (1)...(19): siRNA sense strand
ggaugaugcuugcaaacua

SEQ ID NO: 1091875 - RNA, 19 nt, Homo sapiens
  misc_RNA (1)...(19): siRNA sense strand
gaugaugcuugcaaacuaa

SEQ ID NO: 1091876 - RNA, 19 nt, Homo sapiens
  misc_RNA (1)...(19): siRNA sense strand
uaacagcuggcgcaaauua

SEQ ID NO: 1091877 - RNA, 19 nt, Homo sapiens
  misc_RNA (1)...(19): siRNA sense strand
gcagcggaauucuauguaa

SEQ ID NO: 1091878 - RNA, 19 nt, Homo sapiens
  misc_RNA (1)...(19): siRNA sense strand
gcaagaucauuacuaucaa

SEQ ID NO: 1091879 - RNA, 19 nt, Homo sapiens
  misc_RNA (1)...(19): siRNA sense strand
ccaggacaaugcuaaugua

SEQ ID NO: 1091880 - RNA, 19 nt, Homo sapiens
  misc_RNA (1)...(19): siRNA sense strand
aauaacagcuggcgcaaau

SEQ ID NO: 1091881 - RNA, 19 nt, Homo sapiens
  misc_RNA (1)...(19): siRNA sense strand
uauggaagaugaacguauu

SEQ ID NO: 1091882 - RNA, 19 nt, Homo sapiens
  misc_RNA (1)...(19): siRNA sense strand
ccucaaauguaccacguaa

SEQ ID NO: 1091883 - RNA, 19 nt, Homo sapiens
  misc_RNA (1)...(19): siRNA sense strand
guauuaaugccgucaagua

SEQ ID NO: 1091884 - RNA, 19 nt, Homo sapiens
  misc_RNA (1)...(19): siRNA sense strand
caugcaagauuauguacaa

SEQ ID NO: 1091885 - RNA, 19 nt, Homo sapiens
  misc_RNA (1)...(19): siRNA sense strand
caaguaaggcaguggauga

SEQ ID NO: 1091886 - RNA, 19 nt, Homo sapiens
  misc_RNA (1)...(19): siRNA sense strand
aaggaaauuucaccguaua

SEQ ID NO: 1091887 - RNA, 19 nt, Homo sapiens
  misc_RNA (1)...(19): siRNA sense strand
cacaugaaauacugaagaa

SEQ ID NO: 1091888 - RNA, 19 nt, Homo sapiens
  misc_RNA (1)...(19): siRNA sense strand
aaaggaaauuucaccguau

SEQ ID NO: 1091889 - RNA, 19 nt, Homo sapiens
  misc_RNA (1)...(19): siRNA sense strand
ccacguaaagguauucuga

SEQ ID NO: 1091890 - RNA, 19 nt, Homo sapiens
  misc_RNA (1)...(19): siRNA sense strand
uaacgcaagagauccauaa

SEQ ID NO: 1091891 - RNA, 19 nt, Homo sapiens
  misc_RNA (1)...(19): siRNA sense strand
caaaccgucuacgaaauga

SEQ ID NO: 1091892 - RNA, 19 nt, Homo sapiens
  misc_RNA (1)...(19): siRNA sense strand
aaugauauuucgacuccua

SEQ ID NO: 1091893 - RNA, 19 nt, Homo sapiens
  misc_RNA (1)...(19): siRNA sense strand
cgcaagagauccauaagca

SEQ ID NO: 1091894 - RNA, 19 nt, Homo sapiens
  misc_RNA (1)...(19): siRNA sense strand
gaaucguuccucaaaugua

SEQ ID NO: 1091895 - RNA, 19 nt, Homo sapiens
  misc_RNA (1)...(19): siRNA sense strand
gcagaguacauuucgcaaa

SEQ ID NO: 1091896 - RNA, 19 nt, Homo sapiens
  misc_RNA (1)...(19): siRNA sense strand
caucagguacaaaggauaa

SEQ ID NO: 1091897 - RNA, 19 nt, Homo sapiens
  misc_RNA (1)...(19): siRNA sense strand
uaaagacauuucagcucaa

SEQ ID NO: 1091898 - RNA, 19 nt, Homo sapiens
  misc_RNA (1)...(19): siRNA sense strand
uggcgcaaauuaaaucuug

SEQ ID NO: 1091899 - RNA, 19 nt, Homo sapiens
  misc_RNA (1)...(19): siRNA sense strand
aaagacauuucagcucaaa

SEQ ID NO: 1091900 - RNA, 19 nt, Homo sapiens
  misc_RNA (1)...(19): siRNA sense strand
acagagggcuugguuaucu

SEQ ID NO: 1091901 - RNA, 19 nt, Homo sapiens
  misc_RNA (1)...(19): siRNA sense strand
gaacguauuuucccgaagu

SEQ ID NO: 1091902 - RNA, 19 nt, Homo sapiens
  misc_RNA (1)...(19): siRNA sense strand
ggccaugguuacaaguauu

SEQ ID NO: 1091903 - RNA, 19 nt, Homo sapiens
  misc_RNA (1)...(19): siRNA sense strand
caccuuucaucguguuuaa

SEQ ID NO: 1091904 - RNA, 19 nt, Homo sapiens
  misc_RNA (1)...(19): siRNA sense strand
gauccaagcaagcucaaau

SEQ ID NO: 1091905 - RNA, 19 nt, Homo sapiens
  misc_RNA (1)...(19): siRNA sense strand
uguaacacaugaaauacug

SEQ ID NO: 1091906 - RNA, 19 nt, Homo sapiens
  misc_RNA (1)...(19): siRNA sense strand
uauuaaugccgucaaguaa

SEQ ID NO: 1091907 - RNA, 19 nt, Homo sapiens
  misc_RNA (1)...(19): siRNA sense strand
uauuaaggauccuacuaug

SEQ ID NO: 1091908 - RNA, 19 nt, Homo sapiens
  misc_RNA (1)...(19): siRNA sense strand
ccaagcaagcucaaaugaa

SEQ ID NO: 1091909 - RNA, 19 nt, Homo sapiens
  misc_RNA (1)...(19): siRNA sense strand
ucaaauguaccacguaaag

SEQ ID NO: 1091910 - RNA, 19 nt, Homo sapiens
  misc_RNA (1)...(19): siRNA sense strand
ggaaauuucaccguauaau

SEQ ID NO: 1091911 - RNA, 19 nt, Homo sapiens
  misc_RNA (1)...(19): siRNA sense strand
acguaaagguauucugaaa

SEQ ID NO: 1091912 - RNA, 19 nt, Homo sapiens
  misc_RNA (1)...(19): siRNA sense strand
auuuagaggugaaacguuu

SEQ ID NO: 1091913 - RNA, 19 nt, Homo sapiens
  misc_RNA (1)...(19): siRNA sense strand
gaaaauauucccaggacaa

SEQ ID NO: 1091914 - RNA, 19 nt, Homo sapiens
  misc_RNA (1)...(19): siRNA sense strand
caccagcuacggauuguuu

SEQ ID NO: 1091915 - RNA, 19 nt, Homo sapiens
  misc_RNA (1)...(19): siRNA sense strand
guccaaaguaacugauaua

SEQ ID NO: 1091916 - RNA, 19 nt, Homo sapiens
  misc_RNA (1)...(19): siRNA sense strand
ucaaaccgucuacgaaaug

SEQ ID NO: 1091917 - RNA, 19 nt, Homo sapiens
  misc_RNA (1)...(19): siRNA sense strand
ucucaaaccgucuacgaaa

SEQ ID NO: 1091918 - RNA, 19 nt, Homo sapiens
  misc_RNA (1)...(19): siRNA sense strand
caugaaauacugaagaaag

SEQ ID NO: 1091919 - RNA, 19 nt, Homo sapiens
  misc_RNA (1)...(19): siRNA sense strand
gaucucaaaccgucuacga

SEQ ID NO: 1091920 - RNA, 19 nt, Homo sapiens
  misc_RNA (1)...(19): siRNA sense strand
ugcaagaucauuacuauca

SEQ ID NO: 1091921 - RNA, 19 nt, Homo sapiens
  misc_RNA (1)...(19): siRNA sense strand
auacugauggccaugguua

SEQ ID NO: 1091922 - RNA, 19 nt, Homo sapiens
  misc_RNA (1)...(19): siRNA sense strand
gguuaucucauacaaacaa

SEQ ID NO: 1091923 - RNA, 19 nt, Homo sapiens
  misc_RNA (1)...(19): siRNA sense strand
agucuggagugaucucaaa

SEQ ID NO: 1091924 - RNA, 19 nt, Homo sapiens
  misc_RNA (1)...(19): siRNA sense strand
uaacuguccaaccucuaua

SEQ ID NO: 1091925 - RNA, 19 nt, Homo sapiens
  misc_RNA (1)...(19): siRNA sense strand
acacaugaaauacugaaga

SEQ ID NO: 1091926 - RNA, 19 nt, Homo sapiens
  misc_RNA (1)...(19): siRNA sense strand
auacuuaacuguccaaccu

SEQ ID NO: 1091927 - RNA, 19 nt, Homo sapiens
  misc_RNA (1)...(19): siRNA sense strand
gggcuugguuaucucauac

SEQ ID NO: 1091928 - RNA, 19 nt, Homo sapiens
  misc_RNA (1)...(19): siRNA sense strand
gcgcaaauuaaaucuugaa

SEQ ID NO: 1091929 - RNA, 19 nt, Homo sapiens
  misc_RNA (1)...(19): siRNA sense strand
uagaggcuaagcuuauuaa

SEQ ID NO: 1091930 - RNA, 19 nt, Homo sapiens
  misc_RNA (1)...(19): siRNA sense strand
uaauacagagggcuugguu

SEQ ID NO: 1091931 - RNA, 19 nt, Homo sapiens
  misc_RNA (1)...(19): siRNA sense strand
ugaggugacugaaccaaaa

SEQ ID NO: 1091932 - RNA, 19 nt, Homo sapiens
  misc_RNA (1)...(19): siRNA sense strand
aauuagggguccauacuua

SEQ ID NO: 1091933 - RNA, 19 nt, Homo sapiens
  misc_RNA (1)...(19): siRNA sense strand
caccaugcaagauuaugua

SEQ ID NO: 1091934 - RNA, 19 nt, Homo sapiens
  misc_RNA (1)...(19): siRNA sense strand
uuaaggauccuacuaugca

SEQ ID NO: 1091935 - RNA, 19 nt, Homo sapiens
  misc_RNA (1)...(19): siRNA sense strand
caagcucaaaugaaaguug

SEQ ID NO: 1091936 - RNA, 19 nt, Homo sapiens
  misc_RNA (1)...(19): siRNA sense strand
uauaucggcccuacaaaca

SEQ ID NO: 1091937 - RNA, 19 nt, Homo sapiens
  misc_RNA (1)...(19): siRNA sense strand
gcuacggauuguuucugaa

SEQ ID NO: 1091938 - RNA, 19 nt, Homo sapiens
  misc_RNA (1)...(19): siRNA sense strand
auacagagggcuugguuau

SEQ ID NO: 1091939 - RNA, 19 nt, Homo sapiens
  misc_RNA (1)...(19): siRNA sense strand
uuaaugccgucaaguaagg

SEQ ID NO: 1091940 - RNA, 19 nt, Homo sapiens
  misc_RNA (1)...(19): siRNA sense strand
gccaugguuacaaguauuu

SEQ ID NO: 1091941 - RNA, 19 nt, Homo sapiens
  misc_RNA (1)...(19): siRNA sense strand
gauccuacuaugcagugua

SEQ ID NO: 1091942 - RNA, 19 nt, Homo sapiens
  misc_RNA (1)...(19): siRNA sense strand
gcacgaaaugcaagaucau

SEQ ID NO: 1091943 - RNA, 19 nt, Homo sapiens
  misc_RNA (1)...(19): siRNA sense strand
ucuacgaaaugaaaugaag

SEQ ID NO: 1091944 - RNA, 19 nt, Homo sapiens
  misc_RNA (1)...(19): siRNA sense strand
uauguacaauaucgcaguu

SEQ ID NO: 1091945 - RNA, 19 nt, Homo sapiens
  misc_RNA (1)...(19): siRNA sense strand
ugaaaucagguacaagauc

SEQ ID NO: 1091946 - RNA, 19 nt, Homo sapiens
  misc_RNA (1)...(19): siRNA sense strand
gcuugguuaucucauacaa

SEQ ID NO: 1091947 - RNA, 19 nt, Homo sapiens
  misc_RNA (1)...(19): siRNA sense strand
cgaaguccaaaguaacuga

SEQ ID NO: 1091948 - RNA, 19 nt, Homo sapiens
  misc_RNA (1)...(19): siRNA sense strand
gauauaauggauguuguca

SEQ ID NO: 1091949 - RNA, 19 nt, Homo sapiens
  misc_RNA (1)...(19): siRNA sense strand
aaucguuccucaaauguac

SEQ ID NO: 1091950 - RNA, 19 nt, Homo sapiens
  misc_RNA (1)...(19): siRNA sense strand
uucccgaaguccaaaguaa

SEQ ID NO: 1091951 - RNA, 19 nt, Homo sapiens
  misc_RNA (1)...(19): siRNA sense strand
guaacgcaagagauccaua

SEQ ID NO: 1091952 - RNA, 19 nt, Homo sapiens
  misc_RNA (1)...(19): siRNA sense strand
acagcuggcgcaaauuaaa

SEQ ID NO: 1091953 - RNA, 19 nt, Homo sapiens
  misc_RNA (1)...(19): siRNA sense strand
aguccaaaguaacugauau

SEQ ID NO: 1091954 - RNA, 19 nt, Homo sapiens
  misc_RNA (1)...(19): siRNA sense strand
guugucaccaugcaagauu

SEQ ID NO: 1091955 - RNA, 19 nt, Homo sapiens
  misc_RNA (1)...(19): siRNA sense strand
caucuccacuccaucuuuu

SEQ ID NO: 1091956 - RNA, 19 nt, Homo sapiens
  misc_RNA (1)...(19): siRNA sense strand
cagguacaaaggauaacua

SEQ ID NO: 1091957 - RNA, 19 nt, Homo sapiens
  misc_RNA (1)...(19): siRNA sense strand
cagcggaauucuauguaac

SEQ ID NO: 1091958 - RNA, 19 nt, Homo sapiens
  misc_RNA (1)...(19): siRNA sense strand
guacaagauccuuacaaaa

SEQ ID NO: 1091959 - RNA, 19 nt, Homo sapiens
  misc_RNA (1)...(19): siRNA sense strand
uugguuaucucauacaaac

SEQ ID NO: 1091960 - RNA, 19 nt, Homo sapiens
  misc_RNA (1)...(19): siRNA sense strand
auccuacuaugcaguguaa

SEQ ID NO: 1091961 - RNA, 19 nt, Homo sapiens
  misc_RNA (1)...(19): siRNA sense strand
gaaauuagggguccauacu

SEQ ID NO: 1091962 - RNA, 19 nt, Homo sapiens
  misc_RNA (1)...(19): siRNA sense strand
agagaccaguaacgcaaga

SEQ ID NO: 1091963 - RNA, 19 nt, Homo sapiens
  misc_RNA (1)...(19): siRNA sense strand
cucaaaccgucuacgaaau

SEQ ID NO: 1091964 - RNA, 19 nt, Homo sapiens
  misc_RNA (1)...(19): siRNA sense strand
agggcuugguuaucucaua

SEQ ID NO: 1091965 - RNA, 19 nt, Homo sapiens
  misc_RNA (1)...(19): siRNA sense strand
aaaguuugcagaguacauu

SEQ ID NO: 1091966 - RNA, 19 nt, Homo sapiens
  misc_RNA (1)...(19): siRNA sense strand
gugcagcggaauucuaugu

SEQ ID NO: 1091967 - RNA, 19 nt, Homo sapiens
  misc_RNA (1)...(19): siRNA sense strand
uggccaugguuacaaguau

SEQ ID NO: 1091968 - RNA, 19 nt, Homo sapiens
  misc_RNA (1)...(19): siRNA sense strand
cguaaagguauucugaaau

SEQ ID NO: 1091969 - RNA, 19 nt, Homo sapiens
  misc_RNA (1)...(19): siRNA sense strand
ggcgcaaauuaaaucuuga

SEQ ID NO: 1091970 - RNA, 19 nt, Homo sapiens
  misc_RNA (1)...(19): siRNA sense strand
caggaaagguggacagaga

SEQ ID NO: 1091971 - RNA, 19 nt, Homo sapiens
  misc_RNA (1)...(19): siRNA sense strand
cuaaauaccuaccaacagu

SEQ ID NO: 1091972 - RNA, 19 nt, Homo sapiens
  misc_RNA (1)...(19): siRNA sense strand
ggacaccgauaugcuaaau

SEQ ID NO: 1091973 - RNA, 19 nt, Homo sapiens
  misc_RNA (1)...(19): siRNA sense strand
gcaggacaccgauaugcua

SEQ ID NO: 1091974 - RNA, 19 nt, Homo sapiens
  misc_RNA (1)...(19): siRNA sense strand
gaaaggacagggcucugaa

SEQ ID NO: 1091975 - RNA, 19 nt, Homo sapiens
  misc_RNA (1)...(19): siRNA sense strand
gcucaaggcagacagcaaa

SEQ ID NO: 1091976 - RNA, 19 nt, Homo sapiens
  misc_RNA (1)...(19): siRNA sense strand
gcacaggcagcuacagaga

SEQ ID NO: 1091977 - RNA, 19 nt, Homo sapiens
  misc_RNA (1)...(19): siRNA sense strand
ccgauaugcuaaauaccua

SEQ ID NO: 1091978 - RNA, 19 nt, Homo sapiens
  misc_RNA (1)...(19): siRNA sense strand
acaccgauaugcuaaauac

SEQ ID NO: 1091979 - RNA, 19 nt, Homo sapiens
  misc_RNA (1)...(19): siRNA sense strand
gggagagcaucgccacaga

SEQ ID NO: 1091980 - RNA, 19 nt, Homo sapiens
  misc_RNA (1)...(19): siRNA sense strand
caaggcagacagcaaagaa

SEQ ID NO: 1091981 - RNA, 19 nt, Homo sapiens
  misc_RNA (1)...(19): siRNA sense strand
acaggcagcuacagagaga

SEQ ID NO: 1091982 - RNA, 19 nt, Homo sapiens
  misc_RNA (1)...(19): siRNA sense strand
gaacggggcugcucaagcu

SEQ ID NO: 1091983 - RNA, 19 nt, Homo sapiens
  misc_RNA (1)...(19): siRNA sense strand
gaaggagggcugguuguca

SEQ ID NO: 1091984 - RNA, 19 nt, Homo sapiens
  misc_RNA (1)...(19): siRNA sense strand
ggaagacaagggccaagga

SEQ ID NO: 1091985 - RNA, 19 nt, Homo sapiens
  misc_RNA (1)...(19): siRNA sense strand
gaucacuucccgcuucuuc

SEQ ID NO: 1091986 - RNA, 19 nt, Homo sapiens
  misc_RNA (1)...(19): siRNA sense strand
cgggauacgaugaaacuuu

SEQ ID NO: 1091987 - RNA, 19 nt, Homo sapiens
  misc_RNA (1)...(19): siRNA sense strand
ucucagaggaggagcaauu

SEQ ID NO: 1091988 - RNA, 19 nt, Homo sapiens
  misc_RNA (1)...(19): siRNA sense strand
gagggcugguugucagaga

SEQ ID NO: 1091989 - RNA, 19 nt, Homo sapiens
  misc_RNA (1)...(19): siRNA sense strand
caugggaccuggagaagcu

SEQ ID NO: 1091990 - RNA, 19 nt, Homo sapiens
  misc_RNA (1)...(19): siRNA sense strand
aagcugcccuggaagacuu

SEQ ID NO: 1091991 - RNA, 19 nt, Homo sapiens
  misc_RNA (1)...(19): siRNA sense strand
gaccgucucucaggacaag

SEQ ID NO: 1091992 - RNA, 19 nt, Homo sapiens
  misc_RNA (1)...(19): siRNA sense strand
ugaagagucugaagaucac

SEQ ID NO: 1091993 - RNA, 19 nt, Homo sapiens
  misc_RNA (1)...(19): siRNA sense strand
cauggcugcugcuggaaga

SEQ ID NO: 1091994 - RNA, 19 nt, Homo sapiens
  misc_RNA (1)...(19): siRNA sense strand
uaaucgcaccuuccacaaa

SEQ ID NO: 1091995 - RNA, 19 nt, Homo sapiens
  misc_RNA (1)...(19): siRNA sense strand
cccaaaagcugcccuggaa

SEQ ID NO: 1091996 - RNA, 19 nt, Homo sapiens
  misc_RNA (1)...(19): siRNA sense strand
gacaauggaggaagacaag

SEQ ID NO: 1091997 - RNA, 19 nt, Homo sapiens
  misc_RNA (1)...(19): siRNA sense strand
ggaauggaaaggccuaugc

SEQ ID NO: 1091998 - RNA, 19 nt, Homo sapiens
  misc_RNA (1)...(19): siRNA sense strand
uaaauaccuaccaacaguu

SEQ ID NO: 1091999 - RNA, 19 nt, Homo sapiens
  misc_RNA (1)...(19): siRNA sense strand
caggacaccgauaugcuaa

SEQ ID NO: 1092000 - RNA, 19 nt, Homo sapiens
  misc_RNA (1)...(19): siRNA sense strand
cugaagagucugaagauca

SEQ ID NO: 1092001 - RNA, 19 nt, Homo sapiens
  misc_RNA (1)...(19): siRNA sense strand
ggagagcaucgccacagau

SEQ ID NO: 1092002 - RNA, 19 nt, Homo sapiens
  misc_RNA (1)...(19): siRNA sense strand
aaucgcaccuuccacaaac

SEQ ID NO: 1092003 - RNA, 19 nt, Homo sapiens
  misc_RNA (1)...(19): siRNA sense strand
gcuaaauaccuaccaacag

SEQ ID NO: 1092004 - RNA, 19 nt, Homo sapiens
  misc_RNA (1)...(19): siRNA sense strand
cgacaauggaggaagacaa

SEQ ID NO: 1092005 - RNA, 19 nt, Homo sapiens
  misc_RNA (1)...(19): siRNA sense strand
agaaaggacagggcucuga

SEQ ID NO: 1092006 - RNA, 19 nt, Homo sapiens
  misc_RNA (1)...(19): siRNA sense strand
gauggugugccaaaucaag

SEQ ID NO: 1092007 - RNA, 19 nt, Homo sapiens
  misc_RNA (1)...(19): siRNA sense strand
ggccaugggaccuggagaa

SEQ ID NO: 1092008 - RNA, 19 nt, Homo sapiens
  misc_RNA (1)...(19): siRNA sense strand
uaugcuaaauaccuaccaa

SEQ ID NO: 1092009 - RNA, 19 nt, Homo sapiens
  misc_RNA (1)...(19): siRNA sense strand
cuccaucccuacuggcaaa

SEQ ID NO: 1092010 - RNA, 19 nt, Homo sapiens
  misc_RNA (1)...(19): siRNA sense strand
gacaccgauaugcuaaaua

SEQ ID NO: 1092011 - RNA, 19 nt, Homo sapiens
  misc_RNA (1)...(19): siRNA sense strand
aggcgacaauggaggaaga

SEQ ID NO: 1092012 - RNA, 19 nt, Homo sapiens
  misc_RNA (1)...(19): siRNA sense strand
ggugauggugugccaaauc

SEQ ID NO: 1092013 - RNA, 19 nt, Homo sapiens
  misc_RNA (1)...(19): siRNA sense strand
aggacucccugcagaagga

SEQ ID NO: 1092014 - RNA, 19 nt, Homo sapiens
  misc_RNA (1)...(19): siRNA sense strand
caaaagcugcccuggaaga

SEQ ID NO: 1092015 - RNA, 19 nt, Homo sapiens
  misc_RNA (1)...(19): siRNA sense strand
gggcugguugucagagaaa

SEQ ID NO: 1092016 - RNA, 19 nt, Homo sapiens
  misc_RNA (1)...(19): siRNA sense strand
gaucucagaggaggagcaa

SEQ ID NO: 1092017 - RNA, 19 nt, Homo sapiens
  misc_RNA (1)...(19): siRNA sense strand
cugccaaccucccuaaucg

SEQ ID NO: 1092018 - RNA, 19 nt, Homo sapiens
  misc_RNA (1)...(19): siRNA sense strand
gaacuagcguuucaauuga

SEQ ID NO: 1092019 - RNA, 19 nt, Homo sapiens
  misc_RNA (1)...(19): siRNA sense strand
ggaaauagcaguucagguu

SEQ ID NO: 1092020 - RNA, 19 nt, Homo sapiens
  misc_RNA (1)...(19): siRNA sense strand
ggaguuugcucguuauauu

SEQ ID NO: 1092021 - RNA, 19 nt, Homo sapiens
  misc_RNA (1)...(19): siRNA sense strand
gaugauggcucucugaaug

SEQ ID NO: 1092022 - RNA, 19 nt, Homo sapiens
  misc_RNA (1)...(19): siRNA sense strand
ggaacuagcguuucaauug

SEQ ID NO: 1092023 - RNA, 19 nt, Homo sapiens
  misc_RNA (1)...(19): siRNA sense strand
ccaaaugguuucacuggaa

SEQ ID NO: 1092024 - RNA, 19 nt, Homo sapiens
  misc_RNA (1)...(19): siRNA sense strand
gaacaaggccaggaaauag

SEQ ID NO: 1092025 - RNA, 19 nt, Homo sapiens
  misc_RNA (1)...(19): siRNA sense strand
ccauggaguuugcucguua

SEQ ID NO: 1092026 - RNA, 19 nt, Homo sapiens
  misc_RNA (1)...(19): siRNA sense strand
gaaauagcaguucagguuu

SEQ ID NO: 1092027 - RNA, 19 nt, Homo sapiens
  misc_RNA (1)...(19): siRNA sense strand
gccaaagucacacaauuua

SEQ ID NO: 1092028 - RNA, 19 nt, Homo sapiens
  misc_RNA (1)...(19): siRNA sense strand
gagaugggacggaguaauu

SEQ ID NO: 1092029 - RNA, 19 nt, Homo sapiens
  misc_RNA (1)...(19): siRNA sense strand
gguggaaagugguugguuu

SEQ ID NO: 1092030 - RNA, 19 nt, Homo sapiens
  misc_RNA (1)...(19): siRNA sense strand
agagagaccugccuugaau

SEQ ID NO: 1092031 - RNA, 19 nt, Homo sapiens
  misc_RNA (1)...(19): siRNA sense strand
uauaggaucugcagaaucu

SEQ ID NO: 1092032 - RNA, 19 nt, Homo sapiens
  misc_RNA (1)...(19): siRNA sense strand
ucugauaacuuccuaaaca

SEQ ID NO: 1092033 - RNA, 19 nt, Homo sapiens
  misc_RNA (1)...(19): siRNA sense strand
gguggcaucuaugucauua

SEQ ID NO: 1092034 - RNA, 19 nt, Homo sapiens
  misc_RNA (1)...(19): siRNA sense strand
ucagaaggccuuugagauu

SEQ ID NO: 1092035 - RNA, 19 nt, Homo sapiens
  misc_RNA (1)...(19): siRNA sense strand
acacucaucuugaauguca

SEQ ID NO: 1092036 - RNA, 19 nt, Homo sapiens
  misc_RNA (1)...(19): siRNA sense strand
gagugucuauuacaugauu

SEQ ID NO: 1092037 - RNA, 19 nt, Homo sapiens
  misc_RNA (1)...(19): siRNA sense strand
gauauaggaucugcagaau

SEQ ID NO: 1092038 - RNA, 19 nt, Homo sapiens
  misc_RNA (1)...(19): siRNA sense strand
cagaaggccuuugagauug

SEQ ID NO: 1092039 - RNA, 19 nt, Homo sapiens
  misc_RNA (1)...(19): siRNA sense strand
ugaccugggugaaagaauu

SEQ ID NO: 1092040 - RNA, 19 nt, Homo sapiens
  misc_RNA (1)...(19): siRNA sense strand
ggaagcaaaucguaguucu

SEQ ID NO: 1092041 - RNA, 19 nt, Homo sapiens
  misc_RNA (1)...(19): siRNA sense strand
aagcaaaucguaguucuua

SEQ ID NO: 1092042 - RNA, 19 nt, Homo sapiens
  misc_RNA (1)...(19): siRNA sense strand
ggugaaagaauuaaagaga

SEQ ID NO: 1092043 - RNA, 19 nt, Homo sapiens
  misc_RNA (1)...(19): siRNA sense strand
caaucacacucaucuugaa

SEQ ID NO: 1092044 - RNA, 19 nt, Homo sapiens
  misc_RNA (1)...(19): siRNA sense strand
aaacguauccccaucauua

SEQ ID NO: 1092045 - RNA, 19 nt, Homo sapiens
  misc_RNA (1)...(19): siRNA sense strand
ggccaucaaugaguucuuu

SEQ ID NO: 1092046 - RNA, 19 nt, Homo sapiens
  misc_RNA (1)...(19): siRNA sense strand
aaucguaguucuuacaaug

SEQ ID NO: 1092047 - RNA, 19 nt, Homo sapiens
  misc_RNA (1)...(19): siRNA sense strand
gaagaacuggcaagaagug

SEQ ID NO: 1092048 - RNA, 19 nt, Homo sapiens
  misc_RNA (1)...(19): siRNA sense strand
gauguggacuucgaccaaa

SEQ ID NO: 1092049 - RNA, 19 nt, Homo sapiens
  misc_RNA (1)...(19): siRNA sense strand
ugaacaaggccaggaaaua

SEQ ID NO: 1092050 - RNA, 19 nt, Homo sapiens
  misc_RNA (1)...(19): siRNA sense strand
ucuaaacugucgagccuuu

SEQ ID NO: 1092051 - RNA, 19 nt, Homo sapiens
  misc_RNA (1)...(19): siRNA sense strand
gcaaaucguaguucuuaca

SEQ ID NO: 1092052 - RNA, 19 nt, Homo sapiens
  misc_RNA (1)...(19): siRNA sense strand
caguccaccugaugauaua

SEQ ID NO: 1092053 - RNA, 19 nt, Homo sapiens
  misc_RNA (1)...(19): siRNA sense strand
cuacauuguugcuuauuca

SEQ ID NO: 1092054 - RNA, 19 nt, Homo sapiens
  misc_RNA (1)...(19): siRNA sense strand
acacggcugugcaugauga

SEQ ID NO: 1092055 - RNA, 19 nt, Homo sapiens
  misc_RNA (1)...(19): siRNA sense strand
gauaacuuccuaaacauca

SEQ ID NO: 1092056 - RNA, 19 nt, Homo sapiens
  misc_RNA (1)...(19): siRNA sense strand
caagguggcaucuauguca

SEQ ID NO: 1092057 - RNA, 19 nt, Homo sapiens
  misc_RNA (1)...(19): siRNA sense strand
gaccugggugaaagaauua

SEQ ID NO: 1092058 - RNA, 19 nt, Homo sapiens
  misc_RNA (1)...(19): siRNA sense strand
caugauuguuugccugauu

SEQ ID NO: 1092059 - RNA, 19 nt, Homo sapiens
  misc_RNA (1)...(19): siRNA sense strand
caaggcagcagucauuuca

SEQ ID NO: 1092060 - RNA, 19 nt, Homo sapiens
  misc_RNA (1)...(19): siRNA sense strand
agaaggccaucaaugaguu

SEQ ID NO: 1092061 - RNA, 19 nt, Homo sapiens
  misc_RNA (1)...(19): siRNA sense strand
ccaaagucacacaauuuaa

SEQ ID NO: 1092062 - RNA, 19 nt, Homo sapiens
  misc_RNA (1)...(19): siRNA sense strand
caaagucacacaauuuaag

SEQ ID NO: 1092063 - RNA, 19 nt, Homo sapiens
  misc_RNA (1)...(19): siRNA sense strand
caaguucccacucggauga

SEQ ID NO: 1092064 - RNA, 19 nt, Homo sapiens
  misc_RNA (1)...(19): siRNA sense strand
gaaugaacaaggccaggaa

SEQ ID NO: 1092065 - RNA, 19 nt, Homo sapiens
  misc_RNA (1)...(19): siRNA sense strand
ccagagaugggacggagua

SEQ ID NO: 1092066 - RNA, 19 nt, Homo sapiens
  misc_RNA (1)...(19): siRNA sense strand
ucacacucaucuugaaugu

SEQ ID NO: 1092067 - RNA, 19 nt, Homo sapiens
  misc_RNA (1)...(19): siRNA sense strand
ucacagccagucacuauga

SEQ ID NO: 1092068 - RNA, 19 nt, Homo sapiens
  misc_RNA (1)...(19): siRNA sense strand
agagggaacuagcguuuca

SEQ ID NO: 1092069 - RNA, 19 nt, Homo sapiens
  misc_RNA (1)...(19): siRNA sense strand
gcuacauuguugcuuauuc

SEQ ID NO: 1092070 - RNA, 19 nt, Homo sapiens
  misc_RNA (1)...(19): siRNA sense strand
aaagagggaacuagcguuu

SEQ ID NO: 1092071 - RNA, 19 nt, Homo sapiens
  misc_RNA (1)...(19): siRNA sense strand
uugaagaacuggcaagaag

SEQ ID NO: 1092072 - RNA, 19 nt, Homo sapiens
  misc_RNA (1)...(19): siRNA sense strand
gagaaggccaucaaugagu

SEQ ID NO: 1092073 - RNA, 19 nt, Homo sapiens
  misc_RNA (1)...(19): siRNA sense strand
gaagcaaaucguaguucuu

SEQ ID NO: 1092074 - RNA, 19 nt, Homo sapiens
  misc_RNA (1)...(19): siRNA sense strand
cugagaaggccaucaauga

SEQ ID NO: 1092075 - RNA, 19 nt, Homo sapiens
  misc_RNA (1)...(19): siRNA sense strand
ucgccaaagucacacaauu

SEQ ID NO: 1092076 - RNA, 19 nt, Homo sapiens
  misc_RNA (1)...(19): siRNA sense strand
aaauagcaguucagguuuc

SEQ ID NO: 1092077 - RNA, 19 nt, Homo sapiens
  misc_RNA (1)...(19): siRNA sense strand
ggaggagauucagaugaug

SEQ ID NO: 1092078 - RNA, 19 nt, Homo sapiens
  misc_RNA (1)...(19): siRNA sense strand
ucacacaauuuaagaccau

SEQ ID NO: 1092079 - RNA, 19 nt, Homo sapiens
  misc_RNA (1)...(19): siRNA sense strand
cuaugaagauguccauugg

SEQ ID NO: 1092080 - RNA, 19 nt, Homo sapiens
  misc_RNA (1)...(19): siRNA sense strand
gcgaguggaugacccugau

SEQ ID NO: 1092081 - RNA, 19 nt, Homo sapiens
  misc_RNA (1)...(19): siRNA sense strand
cgccaaagucacacaauuu

SEQ ID NO: 1092082 - RNA, 19 nt, Homo sapiens
  misc_RNA (1)...(19): siRNA sense strand
ucugucacccuacguguua

SEQ ID NO: 1092083 - RNA, 19 nt, Homo sapiens
  misc_RNA (1)...(19): siRNA sense strand
guugguuucugauaacuuc

SEQ ID NO: 1092084 - RNA, 19 nt, Homo sapiens
  misc_RNA (1)...(19): siRNA sense strand
cauuguugcuuauucacuu

SEQ ID NO: 1092085 - RNA, 19 nt, Homo sapiens
  misc_RNA (1)...(19): siRNA sense strand
aaagagagaccugccuuga

SEQ ID NO: 1092086 - RNA, 19 nt, Homo sapiens
  misc_RNA (1)...(19): siRNA sense strand
caucauuaccucagccaaa

SEQ ID NO: 1092087 - RNA, 19 nt, Homo sapiens
  misc_RNA (1)...(19): siRNA sense strand
ucucaaggcagcagucauu

SEQ ID NO: 1092088 - RNA, 19 nt, Homo sapiens
  misc_RNA (1)...(19): siRNA sense strand
cugcagaaucuaacuguaa

SEQ ID NO: 1092089 - RNA, 19 nt, Homo sapiens
  misc_RNA (1)...(19): siRNA sense strand
ugauauaggaucugcagaa

SEQ ID NO: 1092090 - RNA, 19 nt, Homo sapiens
  misc_RNA (1)...(19): siRNA sense strand
cacccuacguguuaucuuc

SEQ ID NO: 1092091 - RNA, 19 nt, Homo sapiens
  misc_RNA (1)...(19): siRNA sense strand
aggaggagauucagaugau

SEQ ID NO: 1092092 - RNA, 19 nt, Homo sapiens
  misc_RNA (1)...(19): siRNA sense strand
caaaucguaguucuuacaa

SEQ ID NO: 1092093 - RNA, 19 nt, Homo sapiens
  misc_RNA (1)...(19): siRNA sense strand
ucacuggaagcaaaucgua

SEQ ID NO: 1092094 - RNA, 19 nt, Homo sapiens
  misc_RNA (1)...(19): siRNA sense strand
gccaggaaauagcaguuca

SEQ ID NO: 1092095 - RNA, 19 nt, Homo sapiens
  misc_RNA (1)...(19): siRNA sense strand
agugguugguuucugauaa

SEQ ID NO: 1092096 - RNA, 19 nt, Homo sapiens
  misc_RNA (1)...(19): siRNA sense strand
cuacaaagauggggcauau

SEQ ID NO: 1092097 - RNA, 19 nt, Homo sapiens
  misc_RNA (1)...(19): siRNA sense strand
gaguuugcucguuauauug

SEQ ID NO: 1092098 - RNA, 19 nt, Homo sapiens
  misc_RNA (1)...(19): siRNA sense strand
ucucacagccagucacuau

SEQ ID NO: 1092099 - RNA, 19 nt, Homo sapiens
  misc_RNA (1)...(19): siRNA sense strand
ugaaaacugucagcuguaa

SEQ ID NO: 1092100 - RNA, 19 nt, Homo sapiens
  misc_RNA (1)...(19): siRNA sense strand
caucaaugaguucuuuaga

SEQ ID NO: 1092101 - RNA, 19 nt, Homo sapiens
  misc_RNA (1)...(19): siRNA sense strand
uacaaucacacucaucuug

SEQ ID NO: 1092102 - RNA, 19 nt, Homo sapiens
  misc_RNA (1)...(19): siRNA sense strand
augagugucuauuacauga

SEQ ID NO: 1092103 - RNA, 19 nt, Homo sapiens
  misc_RNA (1)...(19): siRNA sense strand
gcagagguggaaagugguu

SEQ ID NO: 1092104 - RNA, 19 nt, Homo sapiens
  misc_RNA (1)...(19): siRNA sense strand
cagaaucuaacuguaacua

SEQ ID NO: 1092105 - RNA, 19 nt, Homo sapiens
  misc_RNA (1)...(19): siRNA sense strand
ugauggcucucugaaugaa

SEQ ID NO: 1092106 - RNA, 19 nt, Homo sapiens
  misc_RNA (1)...(19): siRNA sense strand
acaaucacacucaucuuga

SEQ ID NO: 1092107 - RNA, 19 nt, Homo sapiens
  misc_RNA (1)...(19): siRNA sense strand
gaugaccgugggcucuaua

SEQ ID NO: 1092108 - RNA, 19 nt, Homo sapiens
  misc_RNA (1)...(19): siRNA sense strand
gccagucacuaugaagaug

SEQ ID NO: 1092109 - RNA, 19 nt, Homo sapiens
  misc_RNA (1)...(19): siRNA sense strand
uaggaucugcagaaucuaa

SEQ ID NO: 1092110 - RNA, 19 nt, Homo sapiens
  misc_RNA (1)...(19): siRNA sense strand
gaguggaugacccugauga

SEQ ID NO: 1092111 - RNA, 19 nt, Homo sapiens
  misc_RNA (1)...(19): siRNA sense strand
ggagcucgccaaagucaca

SEQ ID NO: 1092112 - RNA, 19 nt, Homo sapiens
  misc_RNA (1)...(19): siRNA sense strand
gaacugaaggggcugagaa

SEQ ID NO: 1092113 - RNA, 19 nt, Homo sapiens
  misc_RNA (1)...(19): siRNA sense strand
gggaacuagcguuucaauu

SEQ ID NO: 1092114 - RNA, 19 nt, Homo sapiens
  misc_RNA (1)...(19): siRNA sense strand
gagccuuuguugaggagau

SEQ ID NO: 1092115 - RNA, 19 nt, Homo sapiens
  misc_RNA (1)...(19): siRNA sense strand
cauggaguuugcucguuau

SEQ ID NO: 1092116 - RNA, 19 nt, Homo sapiens
  misc_RNA (1)...(19): siRNA sense strand
ugguuucacuggaagcaaa

SEQ ID NO: 1092117 - RNA, 19 nt, Homo sapiens
  misc_RNA (1)...(19): siRNA sense strand
uuccaccucuuauucuaaa

SEQ ID NO: 1092118 - RNA, 19 nt, Homo sapiens
  misc_RNA (1)...(19): siRNA sense strand
gcucaacucucgcaacuuc

SEQ ID NO: 1092119 - RNA, 19 nt, Homo sapiens
  misc_RNA (1)...(19): siRNA sense strand
gcaagguggugcccugcua

SEQ ID NO: 1092120 - RNA, 19 nt, Homo sapiens
  misc_RNA (1)...(19): siRNA sense strand
ggccagaccuaguguccua

SEQ ID NO: 1092121 - RNA, 19 nt, Homo sapiens
  misc_RNA (1)...(19): siRNA sense strand
cgcagaagcuguccaagau

SEQ ID NO: 1092122 - RNA, 19 nt, Homo sapiens
  misc_RNA (1)...(19): siRNA sense strand
gagaggaggaggaggaaga

SEQ ID NO: 1092123 - RNA, 19 nt, Homo sapiens
  misc_RNA (1)...(19): siRNA sense strand
ucucuugucuuacgauaug

SEQ ID NO: 1092124 - RNA, 19 nt, Homo sapiens
  misc_RNA (1)...(19): siRNA sense strand
ggaagaggaggaggaagaa

SEQ ID NO: 1092125 - RNA, 19 nt, Homo sapiens
  misc_RNA (1)...(19): siRNA sense strand
ucucggacgugcccaaguu

SEQ ID NO: 1092126 - RNA, 19 nt, Homo sapiens
  misc_RNA (1)...(19): siRNA sense strand
gaacgcagcccuggacaac

SEQ ID NO: 1092127 - RNA, 19 nt, Homo sapiens
  misc_RNA (1)...(19): siRNA sense strand
aauggcaacuucucacuca

SEQ ID NO: 1092128 - RNA, 19 nt, Homo sapiens
  misc_RNA (1)...(19): siRNA sense strand
ggaggaagaggaggaggaa

SEQ ID NO: 1092129 - RNA, 19 nt, Homo sapiens
  misc_RNA (1)...(19): siRNA sense strand
gagaaaagcuaccacuacu

SEQ ID NO: 1092130 - RNA, 19 nt, Homo sapiens
  misc_RNA (1)...(19): siRNA sense strand
cagcucaacucucgcaacu

SEQ ID NO: 1092131 - RNA, 19 nt, Homo sapiens
  misc_RNA (1)...(19): siRNA sense strand
aaagcuaccacuacucuau

SEQ ID NO: 1092132 - RNA, 19 nt, Homo sapiens
  misc_RNA (1)...(19): siRNA sense strand
ccacuacucuaugcacuac

SEQ ID NO: 1092133 - RNA, 19 nt, Homo sapiens
  misc_RNA (1)...(19): siRNA sense strand
cccaagaagcgcaagauga

SEQ ID NO: 1092134 - RNA, 19 nt, Homo sapiens
  misc_RNA (1)...(19): siRNA sense strand
ccaagaagcgcaagaugac

SEQ ID NO: 1092135 - RNA, 19 nt, Homo sapiens
  misc_RNA (1)...(19): siRNA sense strand
aaucucuugucuuacgaua

SEQ ID NO: 1092136 - RNA, 19 nt, Homo sapiens
  misc_RNA (1)...(19): siRNA sense strand
gcgccuagccaagaacuau

SEQ ID NO: 1092137 - RNA, 19 nt, Homo sapiens
  misc_RNA (1)...(19): siRNA sense strand
gaaaagcuaccacuacucu

SEQ ID NO: 1092138 - RNA, 19 nt, Homo sapiens
  misc_RNA (1)...(19): siRNA sense strand
gcaagcggccagaccuagu

SEQ ID NO: 1092139 - RNA, 19 nt, Homo sapiens
  misc_RNA (1)...(19): siRNA sense strand
gcagaagcuguccaagauc

SEQ ID NO: 1092140 - RNA, 19 nt, Homo sapiens
  misc_RNA (1)...(19): siRNA sense strand
acgcagaagcuguccaaga

SEQ ID NO: 1092141 - RNA, 19 nt, Homo sapiens
  misc_RNA (1)...(19): siRNA sense strand
cuuacgauaugcaccuuca

SEQ ID NO: 1092142 - RNA, 19 nt, Homo sapiens
  misc_RNA (1)...(19): siRNA sense strand
aggaagaggaggaggaaga

SEQ ID NO: 1092143 - RNA, 19 nt, Homo sapiens
  misc_RNA (1)...(19): siRNA sense strand
cuacaacagcuccgaguac

SEQ ID NO: 1092144 - RNA, 19 nt, Homo sapiens
  misc_RNA (1)...(19): siRNA sense strand
caagcggccagaccuagug

SEQ ID NO: 1092145 - RNA, 19 nt, Homo sapiens
  misc_RNA (1)...(19): siRNA sense strand
agaauuggaugcucacuua

SEQ ID NO: 1092146 - RNA, 19 nt, Homo sapiens
  misc_RNA (1)...(19): siRNA sense strand
gaaaggaaacuauugcaaa

SEQ ID NO: 1092147 - RNA, 19 nt, Homo sapiens
  misc_RNA (1)...(19): siRNA sense strand
acuuagaacugcucaauua

SEQ ID NO: 1092148 - RNA, 19 nt, Homo sapiens
  misc_RNA (1)...(19): siRNA sense strand
ccaggguucucuaugauua

SEQ ID NO: 1092149 - RNA, 19 nt, Homo sapiens
  misc_RNA (1)...(19): siRNA sense strand
gcacaguguuaccaguaua

SEQ ID NO: 1092150 - RNA, 19 nt, Homo sapiens
  misc_RNA (1)...(19): siRNA sense strand
ggaaucagcaguacacaug

SEQ ID NO: 1092151 - RNA, 19 nt, Homo sapiens
  misc_RNA (1)...(19): siRNA sense strand
caaaugcgauugguucuuc

SEQ ID NO: 1092152 - RNA, 19 nt, Homo sapiens
  misc_RNA (1)...(19): siRNA sense strand
cagaugaggugaucacugu

SEQ ID NO: 1092153 - RNA, 19 nt, Homo sapiens
  misc_RNA (1)...(19): siRNA sense strand
aaacgucagccuuaaauuu

SEQ ID NO: 1092154 - RNA, 19 nt, Homo sapiens
  misc_RNA (1)...(19): siRNA sense strand
uagagaaccuccuuagcaa

SEQ ID NO: 1092155 - RNA, 19 nt, Homo sapiens
  misc_RNA (1)...(19): siRNA sense strand
uagaagcccagaugacuua

SEQ ID NO: 1092156 - RNA, 19 nt, Homo sapiens
  misc_RNA (1)...(19): siRNA sense strand
ccaauuaccuacuuagaac

SEQ ID NO: 1092157 - RNA, 19 nt, Homo sapiens
  misc_RNA (1)...(19): siRNA sense strand
aaacugaaguguuauugca

SEQ ID NO: 1092158 - RNA, 19 nt, Homo sapiens
  misc_RNA (1)...(19): siRNA sense strand
ccagaugacuuacuaugca

SEQ ID NO: 1092159 - RNA, 19 nt, Homo sapiens
  misc_RNA (1)...(19): siRNA sense strand
acagagaacugauucaaac

SEQ ID NO: 1092160 - RNA, 19 nt, Homo sapiens
  misc_RNA (1)...(19): siRNA sense strand
caccuucgcugucugaaug

SEQ ID NO: 1092161 - RNA, 19 nt, Homo sapiens
  misc_RNA (1)...(19): siRNA sense strand
agcaaacaguacugaauua

SEQ ID NO: 1092162 - RNA, 19 nt, Homo sapiens
  misc_RNA (1)...(19): siRNA sense strand
augagaaacuggauagaaa

SEQ ID NO: 1092163 - RNA, 19 nt, Homo sapiens
  misc_RNA (1)...(19): siRNA sense strand
gaaguuuuccauccaauua

SEQ ID NO: 1092164 - RNA, 19 nt, Homo sapiens
  misc_RNA (1)...(19): siRNA sense strand
guaaucaccucuccuucca

SEQ ID NO: 1092165 - RNA, 19 nt, Homo sapiens
  misc_RNA (1)...(19): siRNA sense strand
cagcaaacaguacugaauu

SEQ ID NO: 1092166 - RNA, 19 nt, Homo sapiens
  misc_RNA (1)...(19): siRNA sense strand
aggaacagcuuaugguaau

SEQ ID NO: 1092167 - RNA, 19 nt, Homo sapiens
  misc_RNA (1)...(19): siRNA sense strand
gcaaacaguacugaauuau

SEQ ID NO: 1092168 - RNA, 19 nt, Homo sapiens
  misc_RNA (1)...(19): siRNA sense strand
gauucaaacgucagccuua

SEQ ID NO: 1092169 - RNA, 19 nt, Homo sapiens
  misc_RNA (1)...(19): siRNA sense strand
gaucgucaagcagagauua

SEQ ID NO: 1092170 - RNA, 19 nt, Homo sapiens
  misc_RNA (1)...(19): siRNA sense strand
gaaaggccaggguucucua

SEQ ID NO: 1092171 - RNA, 19 nt, Homo sapiens
  misc_RNA (1)...(19): siRNA sense strand
caggauagaagaauuuguu

SEQ ID NO: 1092172 - RNA, 19 nt, Homo sapiens
  misc_RNA (1)...(19): siRNA sense strand
gcagcaaacaguacugaau

SEQ ID NO: 1092173 - RNA, 19 nt, Homo sapiens
  misc_RNA (1)...(19): siRNA sense strand
aagcccagaugacuuacua

SEQ ID NO: 1092174 - RNA, 19 nt, Homo sapiens
  misc_RNA (1)...(19): siRNA sense strand
gaaacuagaaauucaucug

SEQ ID NO: 1092175 - RNA, 19 nt, Homo sapiens
  misc_RNA (1)...(19): siRNA sense strand
gcuaaagaaaggaaacuau

SEQ ID NO: 1092176 - RNA, 19 nt, Homo sapiens
  misc_RNA (1)...(19): siRNA sense strand
gacagagaacugauucaaa

SEQ ID NO: 1092177 - RNA, 19 nt, Homo sapiens
  misc_RNA (1)...(19): siRNA sense strand
aagcagagauuaccagacu

SEQ ID NO: 1092178 - RNA, 19 nt, Homo sapiens
  misc_RNA (1)...(19): siRNA sense strand
gccaauuaccuacuuagaa

SEQ ID NO: 1092179 - RNA, 19 nt, Homo sapiens
  misc_RNA (1)...(19): siRNA sense strand
gcagagauuaccagacuuc

SEQ ID NO: 1092180 - RNA, 19 nt, Homo sapiens
  misc_RNA (1)...(19): siRNA sense strand
gcagacagagaacugauuc

SEQ ID NO: 1092181 - RNA, 19 nt, Homo sapiens
  misc_RNA (1)...(19): siRNA sense strand
ggugccaauuaccuacuua

SEQ ID NO: 1092182 - RNA, 19 nt, Homo sapiens
  misc_RNA (1)...(19): siRNA sense strand
caaccucagugaccuuaag

SEQ ID NO: 1092183 - RNA, 19 nt, Homo sapiens
  misc_RNA (1)...(19): siRNA sense strand
auaagagacuggauuugga

SEQ ID NO: 1092184 - RNA, 19 nt, Homo sapiens
  misc_RNA (1)...(19): siRNA sense strand
ccaggaacagcuuauggua

SEQ ID NO: 1092185 - RNA, 19 nt, Homo sapiens
  misc_RNA (1)...(19): siRNA sense strand
gcaguacacaugcccauca

SEQ ID NO: 1092186 - RNA, 19 nt, Homo sapiens
  misc_RNA (1)...(19): siRNA sense strand
gagaaccuccuuagcaaag

SEQ ID NO: 1092187 - RNA, 19 nt, Homo sapiens
  misc_RNA (1)...(19): siRNA sense strand
gauucagacuggcuaaugg

SEQ ID NO: 1092188 - RNA, 19 nt, Homo sapiens
  misc_RNA (1)...(19): siRNA sense strand
guucaguguuguuggaaug

SEQ ID NO: 1092189 - RNA, 19 nt, Homo sapiens
  misc_RNA (1)...(19): siRNA sense strand
guacugaauuaucacuucu

SEQ ID NO: 1092190 - RNA, 19 nt, Homo sapiens
  misc_RNA (1)...(19): siRNA sense strand
ugugacaccuguaccauca

SEQ ID NO: 1092191 - RNA, 19 nt, Homo sapiens
  misc_RNA (1)...(19): siRNA sense strand
uaacaacaaucagacuucu

SEQ ID NO: 1092192 - RNA, 19 nt, Homo sapiens
  misc_RNA (1)...(19): siRNA sense strand
caaaugccaggauagaaga

SEQ ID NO: 1092193 - RNA, 19 nt, Homo sapiens
  misc_RNA (1)...(19): siRNA sense strand
auaaacaacccagaacuuu

SEQ ID NO: 1092194 - RNA, 19 nt, Homo sapiens
  misc_RNA (1)...(19): siRNA sense strand
agaaggagauuacaaaaca

SEQ ID NO: 1092195 - RNA, 19 nt, Homo sapiens
  misc_RNA (1)...(19): siRNA sense strand
ucaacaaguggccuaguaa

SEQ ID NO: 1092196 - RNA, 19 nt, Homo sapiens
  misc_RNA (1)...(19): siRNA sense strand
ugccauggcuucaacaagu

SEQ ID NO: 1092197 - RNA, 19 nt, Homo sapiens
  misc_RNA (1)...(19): siRNA sense strand
ugcagaaacuagaaauuca

SEQ ID NO: 1092198 - RNA, 19 nt, Homo sapiens
  misc_RNA (1)...(19): siRNA sense strand
caggaacagcuuaugguaa

SEQ ID NO: 1092199 - RNA, 19 nt, Homo sapiens
  misc_RNA (1)...(19): siRNA sense strand
acaaguggccuaguaauca

SEQ ID NO: 1092200 - RNA, 19 nt, Homo sapiens
  misc_RNA (1)...(19): siRNA sense strand
uucaacaaguggccuagua

SEQ ID NO: 1092201 - RNA, 19 nt, Homo sapiens
  misc_RNA (1)...(19): siRNA sense strand
guaacaacaaucagacuuc

SEQ ID NO: 1092202 - RNA, 19 nt, Homo sapiens
  misc_RNA (1)...(19): siRNA sense strand
ggcaaaagcugcagaaacu

SEQ ID NO: 1092203 - RNA, 19 nt, Homo sapiens
  misc_RNA (1)...(19): siRNA sense strand
ucaaacgucagccuuaaau

SEQ ID NO: 1092204 - RNA, 19 nt, Homo sapiens
  misc_RNA (1)...(19): siRNA sense strand
ccaaaugccaggauagaag

SEQ ID NO: 1092205 - RNA, 19 nt, Homo sapiens
  misc_RNA (1)...(19): siRNA sense strand
ggccaggguucucuaugau

SEQ ID NO: 1092206 - RNA, 19 nt, Homo sapiens
  misc_RNA (1)...(19): siRNA sense strand
caacaaguggccuaguaau

SEQ ID NO: 1092207 - RNA, 19 nt, Homo sapiens
  misc_RNA (1)...(19): siRNA sense strand
cuagagggaaucagcagua

SEQ ID NO: 1092208 - RNA, 19 nt, Homo sapiens
  misc_RNA (1)...(19): siRNA sense strand
ggaacagcuuaugguaaug

SEQ ID NO: 1092209 - RNA, 19 nt, Homo sapiens
  misc_RNA (1)...(19): siRNA sense strand
uauaaacaacccagaacuu

SEQ ID NO: 1092210 - RNA, 19 nt, Homo sapiens
  misc_RNA (1)...(19): siRNA sense strand
caaacaguacugaauuauc

SEQ ID NO: 1092211 - RNA, 19 nt, Homo sapiens
  misc_RNA (1)...(19): siRNA sense strand
gcuccaagucguauaaaca

SEQ ID NO: 1092212 - RNA, 19 nt, Homo sapiens
  misc_RNA (1)...(19): siRNA sense strand
ggauucagacuggcuaaug

SEQ ID NO: 1092213 - RNA, 19 nt, Homo sapiens
  misc_RNA (1)...(19): siRNA sense strand
uuagagaaccuccuuagca

SEQ ID NO: 1092214 - RNA, 19 nt, Homo sapiens
  misc_RNA (1)...(19): siRNA sense strand
aggccaggguucucuauga

SEQ ID NO: 1092215 - RNA, 19 nt, Homo sapiens
  misc_RNA (1)...(19): siRNA sense strand
ccauccaauuaucuuagua

SEQ ID NO: 1092216 - RNA, 19 nt, Homo sapiens
  misc_RNA (1)...(19): siRNA sense strand
guagaagcccagaugacuu

SEQ ID NO: 1092217 - RNA, 19 nt, Homo sapiens
  misc_RNA (1)...(19): siRNA sense strand
gcagaaacuagaaauucau

SEQ ID NO: 1092218 - RNA, 19 nt, Homo sapiens
  misc_RNA (1)...(19): siRNA sense strand
gaacuuuugggacaauaua

SEQ ID NO: 1092219 - RNA, 19 nt, Homo sapiens
  misc_RNA (1)...(19): siRNA sense strand
caucugaacaggaauuaag

SEQ ID NO: 1092220 - RNA, 19 nt, Homo sapiens
  misc_RNA (1)...(19): siRNA sense strand
caaacgucagccuuaaauu

SEQ ID NO: 1092221 - RNA, 19 nt, Homo sapiens
  misc_RNA (1)...(19): siRNA sense strand
gacuuacuaugcacagugu

SEQ ID NO: 1092222 - RNA, 19 nt, Homo sapiens
  misc_RNA (1)...(19): siRNA sense strand
caaaauaagagacuggauu

SEQ ID NO: 1092223 - RNA, 19 nt, Homo sapiens
  misc_RNA (1)...(19): siRNA sense strand
uaugagaaacuggauagaa

SEQ ID NO: 1092224 - RNA, 19 nt, Homo sapiens
  misc_RNA (1)...(19): siRNA sense strand
uggaacagcagacagagaa

SEQ ID NO: 1092225 - RNA, 19 nt, Homo sapiens
  misc_RNA (1)...(19): siRNA sense strand
aaagcuccaagucguauaa

SEQ ID NO: 1092226 - RNA, 19 nt, Homo sapiens
  misc_RNA (1)...(19): siRNA sense strand
gccauggcuucaacaagug

SEQ ID NO: 1092227 - RNA, 19 nt, Homo sapiens
  misc_RNA (1)...(19): siRNA sense strand
gaaggagauuacaaaacaa

SEQ ID NO: 1092228 - RNA, 19 nt, Homo sapiens
  misc_RNA (1)...(19): siRNA sense strand
auucaaacgucagccuuaa

SEQ ID NO: 1092229 - RNA, 19 nt, Homo sapiens
  misc_RNA (1)...(19): siRNA sense strand
gaaccuccuuagcaaagcu

SEQ ID NO: 1092230 - RNA, 19 nt, Homo sapiens
  misc_RNA (1)...(19): siRNA sense strand
caaagcugaauguaccaaa

SEQ ID NO: 1092231 - RNA, 19 nt, Homo sapiens
  misc_RNA (1)...(19): siRNA sense strand
gaugaggugaucacugugu

SEQ ID NO: 1092232 - RNA, 19 nt, Homo sapiens
  misc_RNA (1)...(19): siRNA sense strand
acaccuguaccaucaguuu

SEQ ID NO: 1092233 - RNA, 19 nt, Homo sapiens
  misc_RNA (1)...(19): siRNA sense strand
gaacagcuuaugguaaugc

SEQ ID NO: 1092234 - RNA, 19 nt, Homo sapiens
  misc_RNA (1)...(19): siRNA sense strand
uaugaugcagcaaacagua

SEQ ID NO: 1092235 - RNA, 19 nt, Homo sapiens
  misc_RNA (1)...(19): siRNA sense strand
aacaauugcuaaagaaagg

SEQ ID NO: 1092236 - RNA, 19 nt, Homo sapiens
  misc_RNA (1)...(19): siRNA sense strand
cuuacuaugcacaguguua

SEQ ID NO: 1092237 - RNA, 19 nt, Homo sapiens
  misc_RNA (1)...(19): siRNA sense strand
ugagaagacagaauuggau

SEQ ID NO: 1092238 - RNA, 19 nt, Homo sapiens
  misc_RNA (1)...(19): siRNA sense strand
cugaaugacuuuguagaag

SEQ ID NO: 1092239 - RNA, 19 nt, Homo sapiens
  misc_RNA (1)...(19): siRNA sense strand
agacagagaacugauucaa

SEQ ID NO: 1092240 - RNA, 19 nt, Homo sapiens
  misc_RNA (1)...(19): siRNA sense strand
ugacaccuguaccaucagu

SEQ ID NO: 1092241 - RNA, 19 nt, Homo sapiens
  misc_RNA (1)...(19): siRNA sense strand
ucacuuagagaaccuccuu

SEQ ID NO: 1092242 - RNA, 19 nt, Homo sapiens
  misc_RNA (1)...(19): siRNA sense strand
uaagagacuggauuuggau

SEQ ID NO: 1092243 - RNA, 19 nt, Homo sapiens
  misc_RNA (1)...(19): siRNA sense strand
caaguggccuaguaaucac

SEQ ID NO: 1092244 - RNA, 19 nt, Homo sapiens
  misc_RNA (1)...(19): siRNA sense strand
cuaguaaucaccucuccuu

SEQ ID NO: 1092245 - RNA, 19 nt, Homo sapiens
  misc_RNA (1)...(19): siRNA sense strand
ggaggcaggugucaagcua

SEQ ID NO: 1092246 - RNA, 19 nt, Homo sapiens
  misc_RNA (1)...(19): siRNA sense strand
acaaguaccugcuccacua

SEQ ID NO: 1092247 - RNA, 19 nt, Homo sapiens
  misc_RNA (1)...(19): siRNA sense strand
gguggcagguguuuaauga

SEQ ID NO: 1092248 - RNA, 19 nt, Homo sapiens
  misc_RNA (1)...(19): siRNA sense strand
gaauuggacucccgcuucu

SEQ ID NO: 1092249 - RNA, 19 nt, Homo sapiens
  misc_RNA (1)...(19): siRNA sense strand
cuaugacccuuaccugauu

SEQ ID NO: 1092250 - RNA, 19 nt, Homo sapiens
  misc_RNA (1)...(19): siRNA sense strand
uauugugucugaucucauu

SEQ ID NO: 1092251 - RNA, 19 nt, Homo sapiens
  misc_RNA (1)...(19): siRNA sense strand
gauaauauugugucugauc

SEQ ID NO: 1092252 - RNA, 19 nt, Homo sapiens
  misc_RNA (1)...(19): siRNA sense strand
ccacugcuugcaccauuua

SEQ ID NO: 1092253 - RNA, 19 nt, Homo sapiens
  misc_RNA (1)...(19): siRNA sense strand
gaccuuaccaagccaauca

SEQ ID NO: 1092254 - RNA, 19 nt, Homo sapiens
  misc_RNA (1)...(19): siRNA sense strand
ggacgccuaugacccuuac

SEQ ID NO: 1092255 - RNA, 19 nt, Homo sapiens
  misc_RNA (1)...(19): siRNA sense strand
ugccaugucuucaauuuac

SEQ ID NO: 1092256 - RNA, 19 nt, Homo sapiens
  misc_RNA (1)...(19): siRNA sense strand
gccacugcuugcaccauuu

SEQ ID NO: 1092257 - RNA, 19 nt, Homo sapiens
  misc_RNA (1)...(19): siRNA sense strand
ccauuuaccauaaguucuu

SEQ ID NO: 1092258 - RNA, 19 nt, Homo sapiens
  misc_RNA (1)...(19): siRNA sense strand
cgugguggcagguguuuaa

SEQ ID NO: 1092259 - RNA, 19 nt, Homo sapiens
  misc_RNA (1)...(19): siRNA sense strand
ucaauguguccaacaggua

SEQ ID NO: 1092260 - RNA, 19 nt, Homo sapiens
  misc_RNA (1)...(19): siRNA sense strand
gcuugcaccauuuaccaua

SEQ ID NO: 1092261 - RNA, 19 nt, Homo sapiens
  misc_RNA (1)...(19): siRNA sense strand
gguguuuaaugacgaccuu

SEQ ID NO: 1092262 - RNA, 19 nt, Homo sapiens
  misc_RNA (1)...(19): siRNA sense strand
cuugcaccauuuaccauaa

SEQ ID NO: 1092263 - RNA, 19 nt, Homo sapiens
  misc_RNA (1)...(19): siRNA sense strand
ggacagcaucgugcagugu

SEQ ID NO: 1092264 - RNA, 19 nt, Homo sapiens
  misc_RNA (1)...(19): siRNA sense strand
aauauugugucugaucuca

SEQ ID NO: 1092265 - RNA, 19 nt, Homo sapiens
  misc_RNA (1)...(19): siRNA sense strand
uuuauaccauggacacaga

SEQ ID NO: 1092266 - RNA, 19 nt, Homo sapiens
  misc_RNA (1)...(19): siRNA sense strand
ggacucgugacaucaucaa

SEQ ID NO: 1092267 - RNA, 19 nt, Homo sapiens
  misc_RNA (1)...(19): siRNA sense strand
ggacacagagauccccuaa

SEQ ID NO: 1092268 - RNA, 19 nt, Homo sapiens
  misc_RNA (1)...(19): siRNA sense strand
gcaccauuuaccauaaguu

SEQ ID NO: 1092269 - RNA, 19 nt, Homo sapiens
  misc_RNA (1)...(19): siRNA sense strand
ugccacugcuugcaccauu

SEQ ID NO: 1092270 - RNA, 19 nt, Homo sapiens
  misc_RNA (1)...(19): siRNA sense strand
ccuaugacccuuaccugau

SEQ ID NO: 1092271 - RNA, 19 nt, Homo sapiens
  misc_RNA (1)...(19): siRNA sense strand
cugcaggucuacggaguug

SEQ ID NO: 1092272 - RNA, 19 nt, Homo sapiens
  misc_RNA (1)...(19): siRNA sense strand
gcggugagccccuggaauu

SEQ ID NO: 1092273 - RNA, 19 nt, Homo sapiens
  misc_RNA (1)...(19): siRNA sense strand
uguccaacagguacuuuaa

SEQ ID NO: 1092274 - RNA, 19 nt, Homo sapiens
  misc_RNA (1)...(19): siRNA sense strand
cugcuccacuaccugguuu

SEQ ID NO: 1092275 - RNA, 19 nt, Homo sapiens
  misc_RNA (1)...(19): siRNA sense strand
gcaggucuacggaguugag

SEQ ID NO: 1092276 - RNA, 19 nt, Homo sapiens
  misc_RNA (1)...(19): siRNA sense strand
uccagcauccacacaagua

SEQ ID NO: 1092277 - RNA, 19 nt, Homo sapiens
  misc_RNA (1)...(19): siRNA sense strand
uuaaugacgaccuuaccaa

SEQ ID NO: 1092278 - RNA, 19 nt, Homo sapiens
  misc_RNA (1)...(19): siRNA sense strand
uaugacccuuaccugauug

SEQ ID NO: 1092279 - RNA, 19 nt, Homo sapiens
  misc_RNA (1)...(19): siRNA sense strand
acaggacccucaacaaauu

SEQ ID NO: 1092280 - RNA, 19 nt, Homo sapiens
  misc_RNA (1)...(19): siRNA sense strand
gaacacaggacccucaaca

SEQ ID NO: 1092281 - RNA, 19 nt, Homo sapiens
  misc_RNA (1)...(19): siRNA sense strand
acacaggacccucaacaaa

SEQ ID NO: 1092282 - RNA, 19 nt, Homo sapiens
  misc_RNA (1)...(19): siRNA sense strand
gugcagaccaccacagauu

SEQ ID NO: 1092283 - RNA, 19 nt, Homo sapiens
  misc_RNA (1)...(19): siRNA sense strand
caaagggucagcagggaaa

SEQ ID NO: 1092284 - RNA, 19 nt, Homo sapiens
  misc_RNA (1)...(19): siRNA sense strand
ucuagaagcaggcagaauu

SEQ ID NO: 1092285 - RNA, 19 nt, Homo sapiens
  misc_RNA (1)...(19): siRNA sense strand
gugaacagaccucagagaa

SEQ ID NO: 1092286 - RNA, 19 nt, Homo sapiens
  misc_RNA (1)...(19): siRNA sense strand
ucuccgaugugacaagauu

SEQ ID NO: 1092287 - RNA, 19 nt, Homo sapiens
  misc_RNA (1)...(19): siRNA sense strand
agacuuucaugaucccauu

SEQ ID NO: 1092288 - RNA, 19 nt, Homo sapiens
  misc_RNA (1)...(19): siRNA sense strand
ccaagggugagaaccagua

SEQ ID NO: 1092289 - RNA, 19 nt, Homo sapiens
  misc_RNA (1)...(19): siRNA sense strand
cacaggacccucaacaaau

SEQ ID NO: 1092290 - RNA, 19 nt, Homo sapiens
  misc_RNA (1)...(19): siRNA sense strand
ggcccagcgugaccagaaa

SEQ ID NO: 1092291 - RNA, 19 nt, Homo sapiens
  misc_RNA (1)...(19): siRNA sense strand
cuagaagcaggcagaauug

SEQ ID NO: 1092292 - RNA, 19 nt, Homo sapiens
  misc_RNA (1)...(19): siRNA sense strand
cagauucuccgaugugaca

SEQ ID NO: 1092293 - RNA, 19 nt, Homo sapiens
  misc_RNA (1)...(19): siRNA sense strand
ccucagguccucccacgaa

SEQ ID NO: 1092294 - RNA, 19 nt, Homo sapiens
  misc_RNA (1)...(19): siRNA sense strand
cagugacccuggagaaucu

SEQ ID NO: 1092295 - RNA, 19 nt, Homo sapiens
  misc_RNA (1)...(19): siRNA sense strand
cacccuggcucccuguuca

SEQ ID NO: 1092296 - RNA, 19 nt, Homo sapiens
  misc_RNA (1)...(19): siRNA sense strand
gcagaccaccacagauucu

SEQ ID NO: 1092297 - RNA, 19 nt, Homo sapiens
  misc_RNA (1)...(19): siRNA sense strand
ggugaacagaccucagaga

SEQ ID NO: 1092298 - RNA, 19 nt, Homo sapiens
  misc_RNA (1)...(19): siRNA sense strand
ugaacagaccucagagaag

SEQ ID NO: 1092299 - RNA, 19 nt, Homo sapiens
  misc_RNA (1)...(19): siRNA sense strand
gagaagaacugcauuauua

SEQ ID NO: 1092300 - RNA, 19 nt, Homo sapiens
  misc_RNA (1)...(19): siRNA sense strand
ggaugaagaugacaauuua

SEQ ID NO: 1092301 - RNA, 19 nt, Homo sapiens
  misc_RNA (1)...(19): siRNA sense strand
gaacuuaccuaauggauau

SEQ ID NO: 1092302 - RNA, 19 nt, Homo sapiens
  misc_RNA (1)...(19): siRNA sense strand
gcucagaacuuaccuaaug

SEQ ID NO: 1092303 - RNA, 19 nt, Homo sapiens
  misc_RNA (1)...(19): siRNA sense strand
ggacagggauccucagauu

SEQ ID NO: 1092304 - RNA, 19 nt, Homo sapiens
  misc_RNA (1)...(19): siRNA sense strand
gaaauaaucaucagacaga

SEQ ID NO: 1092305 - RNA, 19 nt, Homo sapiens
  misc_RNA (1)...(19): siRNA sense strand
gaacacaggcagcuuaauu

SEQ ID NO: 1092306 - RNA, 19 nt, Homo sapiens
  misc_RNA (1)...(19): siRNA sense strand
guacugaucugcccauguu

SEQ ID NO: 1092307 - RNA, 19 nt, Homo sapiens
  misc_RNA (1)...(19): siRNA sense strand
ugaguuagguucuggcaua

SEQ ID NO: 1092308 - RNA, 19 nt, Homo sapiens
  misc_RNA (1)...(19): siRNA sense strand
uuaacaaacugguguauga

SEQ ID NO: 1092309 - RNA, 19 nt, Homo sapiens
  misc_RNA (1)...(19): siRNA sense strand
caacucagcucagagaaga

SEQ ID NO: 1092310 - RNA, 19 nt, Homo sapiens
  misc_RNA (1)...(19): siRNA sense strand
gaagaaccaaguaguauug

SEQ ID NO: 1092311 - RNA, 19 nt, Homo sapiens
  misc_RNA (1)...(19): siRNA sense strand
gaacugcugcuaugucaaa

SEQ ID NO: 1092312 - RNA, 19 nt, Homo sapiens
  misc_RNA (1)...(19): siRNA sense strand
gaacaaguuuaaggucauu

SEQ ID NO: 1092313 - RNA, 19 nt, Homo sapiens
  misc_RNA (1)...(19): siRNA sense strand
guauaaaugugguggaaga

SEQ ID NO: 1092314 - RNA, 19 nt, Homo sapiens
  misc_RNA (1)...(19): siRNA sense strand
cgagagaacugcugcuaug

SEQ ID NO: 1092315 - RNA, 19 nt, Homo sapiens
  misc_RNA (1)...(19): siRNA sense strand
caacagucuuuaacuuuga

SEQ ID NO: 1092316 - RNA, 19 nt, Homo sapiens
  misc_RNA (1)...(19): siRNA sense strand
gaaggagucaaauuuguuu

SEQ ID NO: 1092317 - RNA, 19 nt, Homo sapiens
  misc_RNA (1)...(19): siRNA sense strand
gagaacugcugcuauguca

SEQ ID NO: 1092318 - RNA, 19 nt, Homo sapiens
  misc_RNA (1)...(19): siRNA sense strand
ccgcaaacgugacucagua

SEQ ID NO: 1092319 - RNA, 19 nt, Homo sapiens
  misc_RNA (1)...(19): siRNA sense strand
uguuguagcuguccagaua

SEQ ID NO: 1092320 - RNA, 19 nt, Homo sapiens
  misc_RNA (1)...(19): siRNA sense strand
ccaacagucuuuaacuuug

SEQ ID NO: 1092321 - RNA, 19 nt, Homo sapiens
  misc_RNA (1)...(19): siRNA sense strand
ggucgaaggugucaaacug

SEQ ID NO: 1092322 - RNA, 19 nt, Homo sapiens
  misc_RNA (1)...(19): siRNA sense strand
ggaagagccaguuguagaa

SEQ ID NO: 1092323 - RNA, 19 nt, Homo sapiens
  misc_RNA (1)...(19): siRNA sense strand
gagaugcacccucuguuaa

SEQ ID NO: 1092324 - RNA, 19 nt, Homo sapiens
  misc_RNA (1)...(19): siRNA sense strand
gggaugaagaugacaauuu

SEQ ID NO: 1092325 - RNA, 19 nt, Homo sapiens
  misc_RNA (1)...(19): siRNA sense strand
aaagaagaaccaaguagua

SEQ ID NO: 1092326 - RNA, 19 nt, Homo sapiens
  misc_RNA (1)...(19): siRNA sense strand
uaucagacgcccaaguuua

SEQ ID NO: 1092327 - RNA, 19 nt, Homo sapiens
  misc_RNA (1)...(19): siRNA sense strand
ugacagugaugaacgaaga

SEQ ID NO: 1092328 - RNA, 19 nt, Homo sapiens
  misc_RNA (1)...(19): siRNA sense strand
gagcaaauaacacagaaug

SEQ ID NO: 1092329 - RNA, 19 nt, Homo sapiens
  misc_RNA (1)...(19): siRNA sense strand
gauaucagacgcccaaguu

SEQ ID NO: 1092330 - RNA, 19 nt, Homo sapiens
  misc_RNA (1)...(19): siRNA sense strand
cgucugacauccaccagua

SEQ ID NO: 1092331 - RNA, 19 nt, Homo sapiens
  misc_RNA (1)...(19): siRNA sense strand
caacaacucagcucagaga

SEQ ID NO: 1092332 - RNA, 19 nt, Homo sapiens
  misc_RNA (1)...(19): siRNA sense strand
cuacaggugugcaagaaga

SEQ ID NO: 1092333 - RNA, 19 nt, Homo sapiens
  misc_RNA (1)...(19): siRNA sense strand
ggaaguggagcaaauaaca

SEQ ID NO: 1092334 - RNA, 19 nt, Homo sapiens
  misc_RNA (1)...(19): siRNA sense strand
uggaagagaucaaguuagu

SEQ ID NO: 1092335 - RNA, 19 nt, Homo sapiens
  misc_RNA (1)...(19): siRNA sense strand
ggaacaaguuuaaggucau

SEQ ID NO: 1092336 - RNA, 19 nt, Homo sapiens
  misc_RNA (1)...(19): siRNA sense strand
ggaagaaucuacacauccu

SEQ ID NO: 1092337 - RNA, 19 nt, Homo sapiens
  misc_RNA (1)...(19): siRNA sense strand
cauguuagccuggaaauga

SEQ ID NO: 1092338 - RNA, 19 nt, Homo sapiens
  misc_RNA (1)...(19): siRNA sense strand
cugcugcuaugucaaauuu

SEQ ID NO: 1092339 - RNA, 19 nt, Homo sapiens
  misc_RNA (1)...(19): siRNA sense strand
caaaagcaguuaauggaaa

SEQ ID NO: 1092340 - RNA, 19 nt, Homo sapiens
  misc_RNA (1)...(19): siRNA sense strand
caggagaggucgucugaca

SEQ ID NO: 1092341 - RNA, 19 nt, Homo sapiens
  misc_RNA (1)...(19): siRNA sense strand
ucagagaagaacugcauua

SEQ ID NO: 1092342 - RNA, 19 nt, Homo sapiens
  misc_RNA (1)...(19): siRNA sense strand
guuagguucuggcauaaug

SEQ ID NO: 1092343 - RNA, 19 nt, Homo sapiens
  misc_RNA (1)...(19): siRNA sense strand
acaggcagcuuaauuacau

SEQ ID NO: 1092344 - RNA, 19 nt, Homo sapiens
  misc_RNA (1)...(19): siRNA sense strand
ccaaagaccccaucucuaa

SEQ ID NO: 1092345 - RNA, 19 nt, Homo sapiens
  misc_RNA (1)...(19): siRNA sense strand
ccucagauacccagaauau

SEQ ID NO: 1092346 - RNA, 19 nt, Homo sapiens
  misc_RNA (1)...(19): siRNA sense strand
caccaacagucuuuaacuu

SEQ ID NO: 1092347 - RNA, 19 nt, Homo sapiens
  misc_RNA (1)...(19): siRNA sense strand
gaagagccaguuguagaaa

SEQ ID NO: 1092348 - RNA, 19 nt, Homo sapiens
  misc_RNA (1)...(19): siRNA sense strand
guacaccaacagucuuuaa

SEQ ID NO: 1092349 - RNA, 19 nt, Homo sapiens
  misc_RNA (1)...(19): siRNA sense strand
uagauccaaugcauaacua

SEQ ID NO: 1092350 - RNA, 19 nt, Homo sapiens
  misc_RNA (1)...(19): siRNA sense strand
gaagcccgcaagcuaagua

SEQ ID NO: 1092351 - RNA, 19 nt, Homo sapiens
  misc_RNA (1)...(19): siRNA sense strand
gaguuagguucuggcauaa

SEQ ID NO: 1092352 - RNA, 19 nt, Homo sapiens
  misc_RNA (1)...(19): siRNA sense strand
ggaacaaguacauaccuau

SEQ ID NO: 1092353 - RNA, 19 nt, Homo sapiens
  misc_RNA (1)...(19): siRNA sense strand
gaaacuggagcaacuugga

SEQ ID NO: 1092354 - RNA, 19 nt, Homo sapiens
  misc_RNA (1)...(19): siRNA sense strand
gcaaacgugacucaguaaa

SEQ ID NO: 1092355 - RNA, 19 nt, Homo sapiens
  misc_RNA (1)...(19): siRNA sense strand
uaaguagggaugaagauga

SEQ ID NO: 1092356 - RNA, 19 nt, Homo sapiens
  misc_RNA (1)...(19): siRNA sense strand
ggagcaacuuggaagagau

SEQ ID NO: 1092357 - RNA, 19 nt, Homo sapiens
  misc_RNA (1)...(19): siRNA sense strand
gaauuggaagucccuagaa

SEQ ID NO: 1092358 - RNA, 19 nt, Homo sapiens
  misc_RNA (1)...(19): siRNA sense strand
gguggaagagccaguugua

SEQ ID NO: 1092359 - RNA, 19 nt, Homo sapiens
  misc_RNA (1)...(19): siRNA sense strand
uaacauguugcaagagauu

SEQ ID NO: 1092360 - RNA, 19 nt, Homo sapiens
  misc_RNA (1)...(19): siRNA sense strand
ccaguuguagaaagaaaua

SEQ ID NO: 1092361 - RNA, 19 nt, Homo sapiens
  misc_RNA (1)...(19): siRNA sense strand
ggagaggucgucugacauc

SEQ ID NO: 1092362 - RNA, 19 nt, Homo sapiens
  misc_RNA (1)...(19): siRNA sense strand
agagcuguaugccgugaua

SEQ ID NO: 1092363 - RNA, 19 nt, Homo sapiens
  misc_RNA (1)...(19): siRNA sense strand
uuacauacagguugacuug

SEQ ID NO: 1092364 - RNA, 19 nt, Homo sapiens
  misc_RNA (1)...(19): siRNA sense strand
uuagaacacaggcagcuua

SEQ ID NO: 1092365 - RNA, 19 nt, Homo sapiens
  misc_RNA (1)...(19): siRNA sense strand
aacacaggcagcuuaauua

SEQ ID NO: 1092366 - RNA, 19 nt, Homo sapiens
  misc_RNA (1)...(19): siRNA sense strand
ccagauaaccaucggaaca

SEQ ID NO: 1092367 - RNA, 19 nt, Homo sapiens
  misc_RNA (1)...(19): siRNA sense strand
cauacagguugacuuggaa

SEQ ID NO: 1092368 - RNA, 19 nt, Homo sapiens
  misc_RNA (1)...(19): siRNA sense strand
uaaucuagauccaaugcau

SEQ ID NO: 1092369 - RNA, 19 nt, Homo sapiens
  misc_RNA (1)...(19): siRNA sense strand
caagugugcauguuccauu

SEQ ID NO: 1092370 - RNA, 19 nt, Homo sapiens
  misc_RNA (1)...(19): siRNA sense strand
acauacagguugacuugga

SEQ ID NO: 1092371 - RNA, 19 nt, Homo sapiens
  misc_RNA (1)...(19): siRNA sense strand
gagaaacuggagcaacuug

SEQ ID NO: 1092372 - RNA, 19 nt, Homo sapiens
  misc_RNA (1)...(19): siRNA sense strand
acucgaaucucuuuucuuu

SEQ ID NO: 1092373 - RNA, 19 nt, Homo sapiens
  misc_RNA (1)...(19): siRNA sense strand
gaugacaauuuaggaccaa

SEQ ID NO: 1092374 - RNA, 19 nt, Homo sapiens
  misc_RNA (1)...(19): siRNA sense strand
agagaagaacugcauuauu

SEQ ID NO: 1092375 - RNA, 19 nt, Homo sapiens
  misc_RNA (1)...(19): siRNA sense strand
gaugcacccucuguuaaca

SEQ ID NO: 1092376 - RNA, 19 nt, Homo sapiens
  misc_RNA (1)...(19): siRNA sense strand
gaacuuacagacacagaac

SEQ ID NO: 1092377 - RNA, 19 nt, Homo sapiens
  misc_RNA (1)...(19): siRNA sense strand
aagagaaacuggagcaacu

SEQ ID NO: 1092378 - RNA, 19 nt, Homo sapiens
  misc_RNA (1)...(19): siRNA sense strand
ugaaggagucaaauuuguu

SEQ ID NO: 1092379 - RNA, 19 nt, Homo sapiens
  misc_RNA (1)...(19): siRNA sense strand
cuacacauccuuugcuugu

SEQ ID NO: 1092380 - RNA, 19 nt, Homo sapiens
  misc_RNA (1)...(19): siRNA sense strand
uuuaacauguugcaagaga

SEQ ID NO: 1092381 - RNA, 19 nt, Homo sapiens
  misc_RNA (1)...(19): siRNA sense strand
gaaagcagcacaccaaaag

SEQ ID NO: 1092382 - RNA, 19 nt, Homo sapiens
  misc_RNA (1)...(19): siRNA sense strand
cgucgggacuguacaccaa

SEQ ID NO: 1092383 - RNA, 19 nt, Homo sapiens
  misc_RNA (1)...(19): siRNA sense strand
cugaaggagucaaauuugu

SEQ ID NO: 1092384 - RNA, 19 nt, Homo sapiens
  misc_RNA (1)...(19): siRNA sense strand
uaagugugcccgugcagaa

SEQ ID NO: 1092385 - RNA, 19 nt, Homo sapiens
  misc_RNA (1)...(19): siRNA sense strand
ggaacuuacagacacagaa

SEQ ID NO: 1092386 - RNA, 19 nt, Homo sapiens
  misc_RNA (1)...(19): siRNA sense strand
ucgaaucucuuuucuuuug

SEQ ID NO: 1092387 - RNA, 19 nt, Homo sapiens
  misc_RNA (1)...(19): siRNA sense strand
ugauagacaucgagagaac

SEQ ID NO: 1092388 - RNA, 19 nt, Homo sapiens
  misc_RNA (1)...(19): siRNA sense strand
caagcuaaguagggaugaa

SEQ ID NO: 1092389 - RNA, 19 nt, Homo sapiens
  misc_RNA (1)...(19): siRNA sense strand
caucuuugccuccuguuug

SEQ ID NO: 1092390 - RNA, 19 nt, Homo sapiens
  misc_RNA (1)...(19): siRNA sense strand
gcucagagaagaacugcau

SEQ ID NO: 1092391 - RNA, 19 nt, Homo sapiens
  misc_RNA (1)...(19): siRNA sense strand
agagccaguuguagaaaga

SEQ ID NO: 1092392 - RNA, 19 nt, Homo sapiens
  misc_RNA (1)...(19): siRNA sense strand
uaguauaaaugugguggaa

SEQ ID NO: 1092393 - RNA, 19 nt, Homo sapiens
  misc_RNA (1)...(19): siRNA sense strand
uggaagagccaguuguaga

SEQ ID NO: 1092394 - RNA, 19 nt, Homo sapiens
  misc_RNA (1)...(19): siRNA sense strand
gccacgagaugaugguaca

SEQ ID NO: 1092395 - RNA, 19 nt, Homo sapiens
  misc_RNA (1)...(19): siRNA sense strand
guagcuguccagauaaaga

SEQ ID NO: 1092396 - RNA, 19 nt, Homo sapiens
  misc_RNA (1)...(19): siRNA sense strand
uaacaaacugguguaugaa

SEQ ID NO: 1092397 - RNA, 19 nt, Homo sapiens
  misc_RNA (1)...(19): siRNA sense strand
agaagaaccaaguaguauu

SEQ ID NO: 1092398 - RNA, 19 nt, Homo sapiens
  misc_RNA (1)...(19): siRNA sense strand
gggaaugaguuagguucug

SEQ ID NO: 1092399 - RNA, 19 nt, Homo sapiens
  misc_RNA (1)...(19): siRNA sense strand
ccacugaggucccugagau

SEQ ID NO: 1092400 - RNA, 19 nt, Homo sapiens
  misc_RNA (1)...(19): siRNA sense strand
gcgagguacuucaucgauu

SEQ ID NO: 1092401 - RNA, 19 nt, Homo sapiens
  misc_RNA (1)...(19): siRNA sense strand
cgagguacuucaucgauuc

SEQ ID NO: 1092402 - RNA, 19 nt, Homo sapiens
  misc_RNA (1)...(19): siRNA sense strand
gauccaaagaccacaagaa

SEQ ID NO: 1092403 - RNA, 19 nt, Homo sapiens
  misc_RNA (1)...(19): siRNA sense strand
ggacuuggaugagauucac

SEQ ID NO: 1092404 - RNA, 19 nt, Homo sapiens
  misc_RNA (1)...(19): siRNA sense strand
cagcggguaugggauccua

SEQ ID NO: 1092405 - RNA, 19 nt, Homo sapiens
  misc_RNA (1)...(19): siRNA sense strand
ggccggacuuggaugagau

SEQ ID NO: 1092406 - RNA, 19 nt, Homo sapiens
  misc_RNA (1)...(19): siRNA sense strand
ccaaagaccacaagaaaag

SEQ ID NO: 1092407 - RNA, 19 nt, Homo sapiens
  misc_RNA (1)...(19): siRNA sense strand
gcgucgagcccuacaguca

SEQ ID NO: 1092408 - RNA, 19 nt, Homo sapiens
  misc_RNA (1)...(19): siRNA sense strand
auccaaagaccacaagaaa

SEQ ID NO: 1092409 - RNA, 19 nt, Homo sapiens
  misc_RNA (1)...(19): siRNA sense strand
ugaggucccugagauggau

SEQ ID NO: 1092410 - RNA, 19 nt, Homo sapiens
  misc_RNA (1)...(19): siRNA sense strand
gagcgucgagcccuacagu

SEQ ID NO: 1092411 - RNA, 19 nt, Homo sapiens
  misc_RNA (1)...(19): siRNA sense strand
gcagugcccacggaagugu

SEQ ID NO: 1092412 - RNA, 19 nt, Homo sapiens
  misc_RNA (1)...(19): siRNA sense strand
gaaagaaacaucagagaaa

SEQ ID NO: 1092413 - RNA, 19 nt, Homo sapiens
  misc_RNA (1)...(19): siRNA sense strand
ggacaaagaugaauaugag

SEQ ID NO: 1092414 - RNA, 19 nt, Homo sapiens
  misc_RNA (1)...(19): siRNA sense strand
gaggaggacuugacauuug

SEQ ID NO: 1092415 - RNA, 19 nt, Homo sapiens
  misc_RNA (1)...(19): siRNA sense strand
gaaagugggacaaagauga

SEQ ID NO: 1092416 - RNA, 19 nt, Homo sapiens
  misc_RNA (1)...(19): siRNA sense strand
gcagaaggauuaugauuuu

SEQ ID NO: 1092417 - RNA, 19 nt, Homo sapiens
  misc_RNA (1)...(19): siRNA sense strand
gaaggacuccaucaacuuu

SEQ ID NO: 1092418 - RNA, 19 nt, Homo sapiens
  misc_RNA (1)...(19): siRNA sense strand
agaagaagauggaagagaa

SEQ ID NO: 1092419 - RNA, 19 nt, Homo sapiens
  misc_RNA (1)...(19): siRNA sense strand
ggaaagaaacaucagagaa

SEQ ID NO: 1092420 - RNA, 19 nt, Homo sapiens
  misc_RNA (1)...(19): siRNA sense strand
ugaaggagcucagagaaga

SEQ ID NO: 1092421 - RNA, 19 nt, Homo sapiens
  misc_RNA (1)...(19): siRNA sense strand
aagagaagcagaaggauua

SEQ ID NO: 1092422 - RNA, 19 nt, Homo sapiens
  misc_RNA (1)...(19): siRNA sense strand
gaagagaagcagaaggauu

SEQ ID NO: 1092423 - RNA, 19 nt, Homo sapiens
  misc_RNA (1)...(19): siRNA sense strand
agaagaggcucacggaaga

SEQ ID NO: 1092424 - RNA, 19 nt, Homo sapiens
  misc_RNA (1)...(19): siRNA sense strand
ggccaaagcguacaagaaa

SEQ ID NO: 1092425 - RNA, 19 nt, Homo sapiens
  misc_RNA (1)...(19): siRNA sense strand
gggaggauauuacugcaau

SEQ ID NO: 1092426 - RNA, 19 nt, Homo sapiens
  misc_RNA (1)...(19): siRNA sense strand
ggauauuacugcaaugucu

SEQ ID NO: 1092427 - RNA, 19 nt, Homo sapiens
  misc_RNA (1)...(19): siRNA sense strand
ccaaagcguacaagaaaga

SEQ ID NO: 1092428 - RNA, 19 nt, Homo sapiens
  misc_RNA (1)...(19): siRNA sense strand
gggacaaagaugaauauga

SEQ ID NO: 1092429 - RNA, 19 nt, Homo sapiens
  misc_RNA (1)...(19): siRNA sense strand
agaaacagaaggagaagaa

SEQ ID NO: 1092430 - RNA, 19 nt, Homo sapiens
  misc_RNA (1)...(19): siRNA sense strand
agaagcagaaggauuauga

SEQ ID NO: 1092431 - RNA, 19 nt, Homo sapiens
  misc_RNA (1)...(19): siRNA sense strand
gaugaaggagcucagagaa

SEQ ID NO: 1092432 - RNA, 19 nt, Homo sapiens
  misc_RNA (1)...(19): siRNA sense strand
gugaaggacuccaucaacu

SEQ ID NO: 1092433 - RNA, 19 nt, Homo sapiens
  misc_RNA (1)...(19): siRNA sense strand
caagaaagagaaacagaag

SEQ ID NO: 1092434 - RNA, 19 nt, Homo sapiens
  misc_RNA (1)...(19): siRNA sense strand
ggaugaaggagcucagaga

SEQ ID NO: 1092435 - RNA, 19 nt, Homo sapiens
  misc_RNA (1)...(19): siRNA sense strand
uggaucacauuaauggaaa

SEQ ID NO: 1092436 - RNA, 19 nt, Homo sapiens
  misc_RNA (1)...(19): siRNA sense strand
gggcuucucuggcuuuggu

SEQ ID NO: 1092437 - RNA, 19 nt, Homo sapiens
  misc_RNA (1)...(19): siRNA sense strand
gaaacagaaggagaagaaa

SEQ ID NO: 1092438 - RNA, 19 nt, Homo sapiens
  misc_RNA (1)...(19): siRNA sense strand
acaagaagaagauggaaga

SEQ ID NO: 1092439 - RNA, 19 nt, Homo sapiens
  misc_RNA (1)...(19): siRNA sense strand
aaagaaacaucagagaaac

SEQ ID NO: 1092440 - RNA, 19 nt, Homo sapiens
  misc_RNA (1)...(19): siRNA sense strand
agaaagagaaacagaagga

SEQ ID NO: 1092441 - RNA, 19 nt, Homo sapiens
  misc_RNA (1)...(19): siRNA sense strand
ugagauggcagcugugaug

SEQ ID NO: 1092442 - RNA, 19 nt, Homo sapiens
  misc_RNA (1)...(19): siRNA sense strand
acaauugucauuaccaaga

SEQ ID NO: 1092443 - RNA, 19 nt, Homo sapiens
  misc_RNA (1)...(19): siRNA sense strand
aggaggacuugacauuuga

SEQ ID NO: 1092444 - RNA, 19 nt, Homo sapiens
  misc_RNA (1)...(19): siRNA sense strand
gcucagagaagaggaggaa

SEQ ID NO: 1092445 - RNA, 19 nt, Homo sapiens
  misc_RNA (1)...(19): siRNA sense strand
gaagaagauggaagagaag

SEQ ID NO: 1092446 - RNA, 19 nt, Homo sapiens
  misc_RNA (1)...(19): siRNA sense strand
ggaggauauuacugcaaug

SEQ ID NO: 1092447 - RNA, 19 nt, Homo sapiens
  misc_RNA (1)...(19): siRNA sense strand
gaugagauggcagcuguga

SEQ ID NO: 1092448 - RNA, 19 nt, Homo sapiens
  misc_RNA (1)...(19): siRNA sense strand
acaagaaagagaaacagaa

SEQ ID NO: 1092449 - RNA, 19 nt, Homo sapiens
  misc_RNA (1)...(19): siRNA sense strand
aaagaaagauggaaaacca

SEQ ID NO: 1092450 - RNA, 19 nt, Homo sapiens
  misc_RNA (1)...(19): siRNA sense strand
gaucaggugaagaaacguu

SEQ ID NO: 1092451 - RNA, 19 nt, Homo sapiens
  misc_RNA (1)...(19): siRNA sense strand
ugaaggacuccaucaacuu

SEQ ID NO: 1092452 - RNA, 19 nt, Homo sapiens
  misc_RNA (1)...(19): siRNA sense strand
ugaggaggacuugacauuu

SEQ ID NO: 1092453 - RNA, 19 nt, Homo sapiens
  misc_RNA (1)...(19): siRNA sense strand
aagagaaacagaaggagaa

SEQ ID NO: 1092454 - RNA, 19 nt, Homo sapiens
  misc_RNA (1)...(19): siRNA sense strand
agagaaaccugggcauguc

SEQ ID NO: 1092455 - RNA, 19 nt, Homo sapiens
  misc_RNA (1)...(19): siRNA sense strand
gaaaccugggcaugucuau

SEQ ID NO: 1092456 - RNA, 19 nt, Homo sapiens
  misc_RNA (1)...(19): siRNA sense strand
ccaucaacuuucuggauca

SEQ ID NO: 1092457 - RNA, 19 nt, Homo sapiens
  misc_RNA (1)...(19): siRNA sense strand
guuccaccaagaagaguua

SEQ ID NO: 1092458 - RNA, 19 nt, Homo sapiens
  misc_RNA (1)...(19): siRNA sense strand
gccaaagcguacaagaaag

SEQ ID NO: 1092459 - RNA, 19 nt, Homo sapiens
  misc_RNA (1)...(19): siRNA sense strand
uggaagagaagcagaagga

SEQ ID NO: 1092460 - RNA, 19 nt, Homo sapiens
  misc_RNA (1)...(19): siRNA sense strand
gugacuguguggugaagga

SEQ ID NO: 1092461 - RNA, 19 nt, Homo sapiens
  misc_RNA (1)...(19): siRNA sense strand
gagaaaagaaagauggaaa

SEQ ID NO: 1092462 - RNA, 19 nt, Homo sapiens
  misc_RNA (1)...(19): siRNA sense strand
ggauuaugauuuugaggaa

SEQ ID NO: 1092463 - RNA, 19 nt, Homo sapiens
  misc_RNA (1)...(19): siRNA sense strand
gccgaaagugggacaaaga

SEQ ID NO: 1092464 - RNA, 19 nt, Homo sapiens
  misc_RNA (1)...(19): siRNA sense strand
ucaacaagaagaagaugga

SEQ ID NO: 1092465 - RNA, 19 nt, Homo sapiens
  misc_RNA (1)...(19): siRNA sense strand
gaggucaacaagaagaaga

SEQ ID NO: 1092466 - RNA, 19 nt, Homo sapiens
  misc_RNA (1)...(19): siRNA sense strand
gaggauauuacugcaaugu

SEQ ID NO: 1092467 - RNA, 19 nt, Homo sapiens
  misc_RNA (1)...(19): siRNA sense strand
gaugggcuucucuggcuuu

SEQ ID NO: 1092468 - RNA, 19 nt, Homo sapiens
  misc_RNA (1)...(19): siRNA sense strand
aagcagaaggauuaugauu

SEQ ID NO: 1092469 - RNA, 19 nt, Homo sapiens
  misc_RNA (1)...(19): siRNA sense strand
gaagcagaaggauuaugau

SEQ ID NO: 1092470 - RNA, 19 nt, Homo sapiens
  misc_RNA (1)...(19): siRNA sense strand
aaagugggacaaagaugaa

SEQ ID NO: 1092471 - RNA, 19 nt, Homo sapiens
  misc_RNA (1)...(19): siRNA sense strand
caacuuucuggaucacauu

SEQ ID NO: 1092472 - RNA, 19 nt, Homo sapiens
  misc_RNA (1)...(19): siRNA sense strand
ugaggaggacgaugagaug

SEQ ID NO: 1092473 - RNA, 19 nt, Homo sapiens
  misc_RNA (1)...(19): siRNA sense strand
agcagaaggauuaugauuu

SEQ ID NO: 1092474 - RNA, 19 nt, Homo sapiens
  misc_RNA (1)...(19): siRNA sense strand
caacaagaagaagauggaa

SEQ ID NO: 1092475 - RNA, 19 nt, Homo sapiens
  misc_RNA (1)...(19): siRNA sense strand
cgagagcuuuuacggcaua

SEQ ID NO: 1092476 - RNA, 19 nt, Homo sapiens
  misc_RNA (1)...(19): siRNA sense strand
cagagaaaccugggcaugu

SEQ ID NO: 1092477 - RNA, 19 nt, Homo sapiens
  misc_RNA (1)...(19): siRNA sense strand
ucaacuuucuggaucacau

SEQ ID NO: 1092478 - RNA, 19 nt, Homo sapiens
  misc_RNA (1)...(19): siRNA sense strand
cauuugaggaggacgauga

SEQ ID NO: 1092479 - RNA, 19 nt, Homo sapiens
  misc_RNA (1)...(19): siRNA sense strand
gaagagagagaaaagaaag

SEQ ID NO: 1092480 - RNA, 19 nt, Homo sapiens
  misc_RNA (1)...(19): siRNA sense strand
ggaagagagagaaaagaaa

SEQ ID NO: 1092481 - RNA, 19 nt, Homo sapiens
  misc_RNA (1)...(19): siRNA sense strand
gagaugggaggauauuacu

SEQ ID NO: 1092482 - RNA, 19 nt, Homo sapiens
  misc_RNA (1)...(19): siRNA sense strand
gaucacauuaauggaaaga

SEQ ID NO: 1092483 - RNA, 19 nt, Homo sapiens
  misc_RNA (1)...(19): siRNA sense strand
cugaggaggacuugacauu

SEQ ID NO: 1092484 - RNA, 19 nt, Homo sapiens
  misc_RNA (1)...(19): siRNA sense strand
cgaaagugggacaaagaug

SEQ ID NO: 1092485 - RNA, 19 nt, Homo sapiens
  misc_RNA (1)...(19): siRNA sense strand
ggugaaggacuccaucaac

SEQ ID NO: 1092486 - RNA, 19 nt, Homo sapiens
  misc_RNA (1)...(19): siRNA sense strand
caauugucauuaccaagac

SEQ ID NO: 1092487 - RNA, 19 nt, Homo sapiens
  misc_RNA (1)...(19): siRNA sense strand
gacaaagaugaauaugaga

SEQ ID NO: 1092488 - RNA, 19 nt, Homo sapiens
  misc_RNA (1)...(19): siRNA sense strand
ugagaugggaggauauuac

SEQ ID NO: 1092489 - RNA, 19 nt, Homo sapiens
  misc_RNA (1)...(19): siRNA sense strand
aagcguacaagaaagagaa

SEQ ID NO: 1092490 - RNA, 19 nt, Homo sapiens
  misc_RNA (1)...(19): siRNA sense strand
gaggcucacggaagagaga

SEQ ID NO: 1092491 - RNA, 19 nt, Homo sapiens
  misc_RNA (1)...(19): siRNA sense strand
uggaucaggugaagaaacg

SEQ ID NO: 1092492 - RNA, 19 nt, Homo sapiens
  misc_RNA (1)...(19): siRNA sense strand
gagaaacagaaggagaaga

SEQ ID NO: 1092493 - RNA, 19 nt, Homo sapiens
  misc_RNA (1)...(19): siRNA sense strand
gaaggauuaugauuuugag

SEQ ID NO: 1092494 - RNA, 19 nt, Homo sapiens
  misc_RNA (1)...(19): siRNA sense strand
gugggacaaagaugaauau

SEQ ID NO: 1092495 - RNA, 19 nt, Homo sapiens
  misc_RNA (1)...(19): siRNA sense strand
agacaaccccucaaucuga

SEQ ID NO: 1092496 - RNA, 19 nt, Homo sapiens
  misc_RNA (1)...(19): siRNA sense strand
ggaucacauuaauggaaag

SEQ ID NO: 1092497 - RNA, 19 nt, Homo sapiens
  misc_RNA (1)...(19): siRNA sense strand
caagacaaccccucaaucu

SEQ ID NO: 1092498 - RNA, 19 nt, Homo sapiens
  misc_RNA (1)...(19): siRNA sense strand
uacaagaaagagaaacaga

SEQ ID NO: 1092499 - RNA, 19 nt, Homo sapiens
  misc_RNA (1)...(19): siRNA sense strand
gaaggagcucagagaagag

SEQ ID NO: 1092500 - RNA, 19 nt, Homo sapiens
  misc_RNA (1)...(19): siRNA sense strand
gcaaugucugugacugugu

SEQ ID NO: 1092501 - RNA, 19 nt, Homo sapiens
  misc_RNA (1)...(19): siRNA sense strand
ggaagagaagcagaaggau

SEQ ID NO: 1092502 - RNA, 19 nt, Homo sapiens
  misc_RNA (1)...(19): siRNA sense strand
aagcuugggaagacaauug

SEQ ID NO: 1092503 - RNA, 19 nt, Homo sapiens
  misc_RNA (1)...(19): siRNA sense strand
gggaauuccuggacacaaa

SEQ ID NO: 1092504 - RNA, 19 nt, Homo sapiens
  misc_RNA (1)...(19): siRNA sense strand
gagacaggcugauuuccaa

SEQ ID NO: 1092505 - RNA, 19 nt, Homo sapiens
  misc_RNA (1)...(19): siRNA sense strand
gugaaacacuccagaccua

SEQ ID NO: 1092506 - RNA, 19 nt, Homo sapiens
  misc_RNA (1)...(19): siRNA sense strand
gacaggagccuacaguaaa

SEQ ID NO: 1092507 - RNA, 19 nt, Homo sapiens
  misc_RNA (1)...(19): siRNA sense strand
ggagauaccgcuguuacua

SEQ ID NO: 1092508 - RNA, 19 nt, Homo sapiens
  misc_RNA (1)...(19): siRNA sense strand
gcagggagauaccgcuguu

SEQ ID NO: 1092509 - RNA, 19 nt, Homo sapiens
  misc_RNA (1)...(19): siRNA sense strand
gggaguaccgucuggauaa

SEQ ID NO: 1092510 - RNA, 19 nt, Homo sapiens
  misc_RNA (1)...(19): siRNA sense strand
ggaguaccgucuggauaaa

SEQ ID NO: 1092511 - RNA, 19 nt, Homo sapiens
  misc_RNA (1)...(19): siRNA sense strand
ggagcccaauggacacuuu

SEQ ID NO: 1092512 - RNA, 19 nt, Homo sapiens
  misc_RNA (1)...(19): siRNA sense strand
ugacaggagccuacaguaa

SEQ ID NO: 1092513 - RNA, 19 nt, Homo sapiens
  misc_RNA (1)...(19): siRNA sense strand
gagauaccgcuguuacuau

SEQ ID NO: 1092514 - RNA, 19 nt, Homo sapiens
  misc_RNA (1)...(19): siRNA sense strand
gcagagcccacacgaugaa

SEQ ID NO: 1092515 - RNA, 19 nt, Homo sapiens
  misc_RNA (1)...(19): siRNA sense strand
ccaagaacaaggccagauu

SEQ ID NO: 1092516 - RNA, 19 nt, Homo sapiens
  misc_RNA (1)...(19): siRNA sense strand
ggaacucugugaccaucug

SEQ ID NO: 1092517 - RNA, 19 nt, Homo sapiens
  misc_RNA (1)...(19): siRNA sense strand
ggacauuggcccagagaca

SEQ ID NO: 1092518 - RNA, 19 nt, Homo sapiens
  misc_RNA (1)...(19): siRNA sense strand
acacuuuccuucugaucaa

SEQ ID NO: 1092519 - RNA, 19 nt, Homo sapiens
  misc_RNA (1)...(19): siRNA sense strand
gagaaggcacugggaggua

SEQ ID NO: 1092520 - RNA, 19 nt, Homo sapiens
  misc_RNA (1)...(19): siRNA sense strand
gcacugggagguacugauc

SEQ ID NO: 1092521 - RNA, 19 nt, Homo sapiens
  misc_RNA (1)...(19): siRNA sense strand
caagaacaaggccagauuc

SEQ ID NO: 1092522 - RNA, 19 nt, Homo sapiens
  misc_RNA (1)...(19): siRNA sense strand
ccagagacaggcugauuuc

SEQ ID NO: 1092523 - RNA, 19 nt, Homo sapiens
  misc_RNA (1)...(19): siRNA sense strand
ugacguaugccaaggugaa

SEQ ID NO: 1092524 - RNA, 19 nt, Homo sapiens
  misc_RNA (1)...(19): siRNA sense strand
cagcugagcccagugucua

SEQ ID NO: 1092525 - RNA, 19 nt, Homo sapiens
  misc_RNA (1)...(19): siRNA sense strand
cuugugaccucaggaaaga

SEQ ID NO: 1092526 - RNA, 19 nt, Homo sapiens
  misc_RNA (1)...(19): siRNA sense strand
uacaguaaacccacccuuu

SEQ ID NO: 1092527 - RNA, 19 nt, Homo sapiens
  misc_RNA (1)...(19): siRNA sense strand
ugaggcugcugcaucugaa

SEQ ID NO: 1092528 - RNA, 19 nt, Homo sapiens
  misc_RNA (1)...(19): siRNA sense strand
acaguaaacccacccuuuc

SEQ ID NO: 1092529 - RNA, 19 nt, Homo sapiens
  misc_RNA (1)...(19): siRNA sense strand
gaugacaggagccuacagu

SEQ ID NO: 1092530 - RNA, 19 nt, Homo sapiens
  misc_RNA (1)...(19): siRNA sense strand
gagcgugacccugcugugu

SEQ ID NO: 1092531 - RNA, 19 nt, Homo sapiens
  misc_RNA (1)...(19): siRNA sense strand
gcccagagacaggcugauu

SEQ ID NO: 1092532 - RNA, 19 nt, Homo sapiens
  misc_RNA (1)...(19): siRNA sense strand
caguaaacccacccuuuca

SEQ ID NO: 1092533 - RNA, 19 nt, Homo sapiens
  misc_RNA (1)...(19): siRNA sense strand
aguaccgucuggauaaaga

SEQ ID NO: 1092534 - RNA, 19 nt, Homo sapiens
  misc_RNA (1)...(19): siRNA sense strand
cacuggagcccaagaacaa

SEQ ID NO: 1092535 - RNA, 19 nt, Homo sapiens
  misc_RNA (1)...(19): siRNA sense strand
acaggagccuacaguaaac

SEQ ID NO: 1092536 - RNA, 19 nt, Homo sapiens
  misc_RNA (1)...(19): siRNA sense strand
ggaauuccuggacacaaag

SEQ ID NO: 1092537 - RNA, 19 nt, Homo sapiens
  misc_RNA (1)...(19): siRNA sense strand
cacaagguccgucucaaca

SEQ ID NO: 1092538 - RNA, 19 nt, Homo sapiens
  misc_RNA (1)...(19): siRNA sense strand
cccacuaccugcugucaca

SEQ ID NO: 1092539 - RNA, 19 nt, Homo sapiens
  misc_RNA (1)...(19): siRNA sense strand
aauggacacuuuccuucug

SEQ ID NO: 1092540 - RNA, 19 nt, Homo sapiens
  misc_RNA (1)...(19): siRNA sense strand
ggacuaugcagggagauac

SEQ ID NO: 1092541 - RNA, 19 nt, Homo sapiens
  misc_RNA (1)...(19): siRNA sense strand
ggcagagcccacacgauga

SEQ ID NO: 1092542 - RNA, 19 nt, Homo sapiens
  misc_RNA (1)...(19): siRNA sense strand
gagcucauagucucaggau

SEQ ID NO: 1092543 - RNA, 19 nt, Homo sapiens
  misc_RNA (1)...(19): siRNA sense strand
cgggaguaccgucuggaua

SEQ ID NO: 1092544 - RNA, 19 nt, Homo sapiens
  misc_RNA (1)...(19): siRNA sense strand
ccacuggagcccaagaaca

SEQ ID NO: 1092545 - RNA, 19 nt, Homo sapiens
  misc_RNA (1)...(19): siRNA sense strand
gacacuuuccuucugauca

SEQ ID NO: 1092546 - RNA, 19 nt, Homo sapiens
  misc_RNA (1)...(19): siRNA sense strand
ggacacuuuccuucugauc

SEQ ID NO: 1092547 - RNA, 19 nt, Homo sapiens
  misc_RNA (1)...(19): siRNA sense strand
ccacucuggccauccacua

SEQ ID NO: 1092548 - RNA, 19 nt, Homo sapiens
  misc_RNA (1)...(19): siRNA sense strand
ggaaaacacaggacauugg

SEQ ID NO: 1092549 - RNA, 19 nt, Homo sapiens
  misc_RNA (1)...(19): siRNA sense strand
ccacaagguccgucucaac

SEQ ID NO: 1092550 - RNA, 19 nt, Homo sapiens
  misc_RNA (1)...(19): siRNA sense strand
caauggacacuuuccuucu

SEQ ID NO: 1092551 - RNA, 19 nt, Homo sapiens
  misc_RNA (1)...(19): siRNA sense strand
aaacacuccagaccuagga

SEQ ID NO: 1092552 - RNA, 19 nt, Homo sapiens
  misc_RNA (1)...(19): siRNA sense strand
cccagagacaggcugauuu

SEQ ID NO: 1092553 - RNA, 19 nt, Homo sapiens
  misc_RNA (1)...(19): siRNA sense strand
cacugaggcugcugcaucu

SEQ ID NO: 1092554 - RNA, 19 nt, Homo sapiens
  misc_RNA (1)...(19): siRNA sense strand
ggaagaagaugacaaggau

SEQ ID NO: 1092555 - RNA, 19 nt, Homo sapiens
  misc_RNA (1)...(19): siRNA sense strand
ugaaagagcuccagaugau

SEQ ID NO: 1092556 - RNA, 19 nt, Homo sapiens
  misc_RNA (1)...(19): siRNA sense strand
aaagaacccucaacccaua

SEQ ID NO: 1092557 - RNA, 19 nt, Homo sapiens
  misc_RNA (1)...(19): siRNA sense strand
gaucacacccacaaugaaa

SEQ ID NO: 1092558 - RNA, 19 nt, Homo sapiens
  misc_RNA (1)...(19): siRNA sense strand
guaaggaacccagcacaaa

SEQ ID NO: 1092559 - RNA, 19 nt, Homo sapiens
  misc_RNA (1)...(19): siRNA sense strand
acacagaaguggagucaag

SEQ ID NO: 1092560 - RNA, 19 nt, Homo sapiens
  misc_RNA (1)...(19): siRNA sense strand
gaaagagcuccagaugaug

SEQ ID NO: 1092561 - RNA, 19 nt, Homo sapiens
  misc_RNA (1)...(19): siRNA sense strand
gcagaaugcaucccuaaaa

SEQ ID NO: 1092562 - RNA, 19 nt, Homo sapiens
  misc_RNA (1)...(19): siRNA sense strand
ggaucacacccacaaugaa

SEQ ID NO: 1092563 - RNA, 19 nt, Homo sapiens
  misc_RNA (1)...(19): siRNA sense strand
caacggaagaagaugacaa

SEQ ID NO: 1092564 - RNA, 19 nt, Homo sapiens
  misc_RNA (1)...(19): siRNA sense strand
gaagaugacaaggaucaca

SEQ ID NO: 1092565 - RNA, 19 nt, Homo sapiens
  misc_RNA (1)...(19): siRNA sense strand
ccacggcaacggaagaaga

SEQ ID NO: 1092566 - RNA, 19 nt, Homo sapiens
  misc_RNA (1)...(19): siRNA sense strand
acaaggaucacacccacaa

SEQ ID NO: 1092567 - RNA, 19 nt, Homo sapiens
  misc_RNA (1)...(19): siRNA sense strand
cauauaccaccacuggauu

SEQ ID NO: 1092568 - RNA, 19 nt, Homo sapiens
  misc_RNA (1)...(19): siRNA sense strand
cggaagaagaugacaagga

SEQ ID NO: 1092569 - RNA, 19 nt, Homo sapiens
  misc_RNA (1)...(19): siRNA sense strand
ccauauaccaccacuggau

SEQ ID NO: 1092570 - RNA, 19 nt, Homo sapiens
  misc_RNA (1)...(19): siRNA sense strand
gcaccucugggacagcaaa

SEQ ID NO: 1092571 - RNA, 19 nt, Homo sapiens
  misc_RNA (1)...(19): siRNA sense strand
aagaagaugacaaggauca

SEQ ID NO: 1092572 - RNA, 19 nt, Homo sapiens
  misc_RNA (1)...(19): siRNA sense strand
gaucccagacacagaagug

SEQ ID NO: 1092573 - RNA, 19 nt, Homo sapiens
  misc_RNA (1)...(19): siRNA sense strand
aaugaaagagcuccagaug

SEQ ID NO: 1092574 - RNA, 19 nt, Homo sapiens
  misc_RNA (1)...(19): siRNA sense strand
ucacacccacaaugaaaga

SEQ ID NO: 1092575 - RNA, 19 nt, Homo sapiens
  misc_RNA (1)...(19): siRNA sense strand
ccagucauccccagagaua

SEQ ID NO: 1092576 - RNA, 19 nt, Homo sapiens
  misc_RNA (1)...(19): siRNA sense strand
cggcaacggaagaagauga

SEQ ID NO: 1092577 - RNA, 19 nt, Homo sapiens
  misc_RNA (1)...(19): siRNA sense strand
caaugaaagagcuccagau

SEQ ID NO: 1092578 - RNA, 19 nt, Homo sapiens
  misc_RNA (1)...(19): siRNA sense strand
uaaggaacccagcacaaaa

SEQ ID NO: 1092579 - RNA, 19 nt, Homo sapiens
  misc_RNA (1)...(19): siRNA sense strand
aggaucacacccacaauga

SEQ ID NO: 1092580 - RNA, 19 nt, Homo sapiens
  misc_RNA (1)...(19): siRNA sense strand
caacagagcucuucagaaa

SEQ ID NO: 1092581 - RNA, 19 nt, Homo sapiens
  misc_RNA (1)...(19): siRNA sense strand
ggaagaaggugauagagua

SEQ ID NO: 1092582 - RNA, 19 nt, Homo sapiens
  misc_RNA (1)...(19): siRNA sense strand
aaacacaacuucagacuug

SEQ ID NO: 1092583 - RNA, 19 nt, Homo sapiens
  misc_RNA (1)...(19): siRNA sense strand
gaaaggauuuaacgaagga

SEQ ID NO: 1092584 - RNA, 19 nt, Homo sapiens
  misc_RNA (1)...(19): siRNA sense strand
ugacaaagacugcaaagaa

SEQ ID NO: 1092585 - RNA, 19 nt, Homo sapiens
  misc_RNA (1)...(19): siRNA sense strand
gcaaacaaguauccuaucu

SEQ ID NO: 1092586 - RNA, 19 nt, Homo sapiens
  misc_RNA (1)...(19): siRNA sense strand
aaacaaguauccuaucuuc

SEQ ID NO: 1092587 - RNA, 19 nt, Homo sapiens
  misc_RNA (1)...(19): siRNA sense strand
caaguauccuaucuucuuu

SEQ ID NO: 1092588 - RNA, 19 nt, Homo sapiens
  misc_RNA (1)...(19): siRNA sense strand
gaaaauaacccaggaguaa

SEQ ID NO: 1092589 - RNA, 19 nt, Homo sapiens
  misc_RNA (1)...(19): siRNA sense strand
ucaaagaaauccucuaaac

SEQ ID NO: 1092590 - RNA, 19 nt, Homo sapiens
  misc_RNA (1)...(19): siRNA sense strand
gacaaagacugcaaagaag

SEQ ID NO: 1092591 - RNA, 19 nt, Homo sapiens
  misc_RNA (1)...(19): siRNA sense strand
gagaugaagaugacaaaga

SEQ ID NO: 1092592 - RNA, 19 nt, Homo sapiens
  misc_RNA (1)...(19): siRNA sense strand
ggaguacaaagacaaguuu

SEQ ID NO: 1092593 - RNA, 19 nt, Homo sapiens
  misc_RNA (1)...(19): siRNA sense strand
aaacaaacggaaaggauuu

SEQ ID NO: 1092594 - RNA, 19 nt, Homo sapiens
  misc_RNA (1)...(19): siRNA sense strand
caaacaaacggaaaggauu

SEQ ID NO: 1092595 - RNA, 19 nt, Homo sapiens
  misc_RNA (1)...(19): siRNA sense strand
cauauaaggaguacaaaga

SEQ ID NO: 1092596 - RNA, 19 nt, Homo sapiens
  misc_RNA (1)...(19): siRNA sense strand
caaagaaauccucuaaaca

SEQ ID NO: 1092597 - RNA, 19 nt, Homo sapiens
  misc_RNA (1)...(19): siRNA sense strand
gggagaagguggaaauacu

SEQ ID NO: 1092598 - RNA, 19 nt, Homo sapiens
  misc_RNA (1)...(19): siRNA sense strand
caagaaacacaacuucaga

SEQ ID NO: 1092599 - RNA, 19 nt, Homo sapiens
  misc_RNA (1)...(19): siRNA sense strand
gaaggauugugggaaauag

SEQ ID NO: 1092600 - RNA, 19 nt, Homo sapiens
  misc_RNA (1)...(19): siRNA sense strand
gaaacacaacuucagacuu

SEQ ID NO: 1092601 - RNA, 19 nt, Homo sapiens
  misc_RNA (1)...(19): siRNA sense strand
agacaaguuuggaaaguca

SEQ ID NO: 1092602 - RNA, 19 nt, Homo sapiens
  misc_RNA (1)...(19): siRNA sense strand
uaacccaggaguaaaguuu

SEQ ID NO: 1092603 - RNA, 19 nt, Homo sapiens
  misc_RNA (1)...(19): siRNA sense strand
acaaguauccuaucuucuu

SEQ ID NO: 1092604 - RNA, 19 nt, Homo sapiens
  misc_RNA (1)...(19): siRNA sense strand
aaagaaauccucuaaacag

SEQ ID NO: 1092605 - RNA, 19 nt, Homo sapiens
  misc_RNA (1)...(19): siRNA sense strand
acagagcucuucagaaacu

SEQ ID NO: 1092606 - RNA, 19 nt, Homo sapiens
  misc_RNA (1)...(19): siRNA sense strand
ggaaaaggcaaaagaaaga

SEQ ID NO: 1092607 - RNA, 19 nt, Homo sapiens
  misc_RNA (1)...(19): siRNA sense strand
gcaacagagcucuucagaa

SEQ ID NO: 1092608 - RNA, 19 nt, Homo sapiens
  misc_RNA (1)...(19): siRNA sense strand
agaaggugauagaguagaa

SEQ ID NO: 1092609 - RNA, 19 nt, Homo sapiens
  misc_RNA (1)...(19): siRNA sense strand
aaagacaaguuuggaaagu

SEQ ID NO: 1092610 - RNA, 19 nt, Homo sapiens
  misc_RNA (1)...(19): siRNA sense strand
caaagaagaggaaaacaaa

SEQ ID NO: 1092611 - RNA, 19 nt, Homo sapiens
  misc_RNA (1)...(19): siRNA sense strand
gaagaaggugauagaguag

SEQ ID NO: 1092612 - RNA, 19 nt, Homo sapiens
  misc_RNA (1)...(19): siRNA sense strand
cgaaggauugugggaaaua

SEQ ID NO: 1092613 - RNA, 19 nt, Homo sapiens
  misc_RNA (1)...(19): siRNA sense strand
caacuucagacuugcagaa

SEQ ID NO: 1092614 - RNA, 19 nt, Homo sapiens
  misc_RNA (1)...(19): siRNA sense strand
cagcaaacaaguauccuau

SEQ ID NO: 1092615 - RNA, 19 nt, Homo sapiens
  misc_RNA (1)...(19): siRNA sense strand
aagaaauccucuaaacagu

SEQ ID NO: 1092616 - RNA, 19 nt, Homo sapiens
  misc_RNA (1)...(19): siRNA sense strand
cuucaaagaaauccucuaa

SEQ ID NO: 1092617 - RNA, 19 nt, Homo sapiens
  misc_RNA (1)...(19): siRNA sense strand
gugauagaguagaagaaga

SEQ ID NO: 1092618 - RNA, 19 nt, Homo sapiens
  misc_RNA (1)...(19): siRNA sense strand
uauaaggaguacaaagaca

SEQ ID NO: 1092619 - RNA, 19 nt, Homo sapiens
  misc_RNA (1)...(19): siRNA sense strand
ucuaaacagucccggaaau

SEQ ID NO: 1092620 - RNA, 19 nt, Homo sapiens
  misc_RNA (1)...(19): siRNA sense strand
ggagaagguggaaauacug

SEQ ID NO: 1092621 - RNA, 19 nt, Homo sapiens
  misc_RNA (1)...(19): siRNA sense strand
gcaaagaagaggaaaacaa

SEQ ID NO: 1092622 - RNA, 19 nt, Homo sapiens
  misc_RNA (1)...(19): siRNA sense strand
caaacaaguauccuaucuu

SEQ ID NO: 1092623 - RNA, 19 nt, Homo sapiens
  misc_RNA (1)...(19): siRNA sense strand
aacgaaggauugugggaaa

SEQ ID NO: 1092624 - RNA, 19 nt, Homo sapiens
  misc_RNA (1)...(19): siRNA sense strand
gagggagaagguggaaaua

SEQ ID NO: 1092625 - RNA, 19 nt, Homo sapiens
  misc_RNA (1)...(19): siRNA sense strand
ugaggaagaaggugauaga

SEQ ID NO: 1092626 - RNA, 19 nt, Homo sapiens
  misc_RNA (1)...(19): siRNA sense strand
ucaaacaaacggaaaggau

SEQ ID NO: 1092627 - RNA, 19 nt, Homo sapiens
  misc_RNA (1)...(19): siRNA sense strand
agaugaagaugacaaagac

SEQ ID NO: 1092628 - RNA, 19 nt, Homo sapiens
  misc_RNA (1)...(19): siRNA sense strand
acaaagacugcaaagaaga

SEQ ID NO: 1092629 - RNA, 19 nt, Homo sapiens
  misc_RNA (1)...(19): siRNA sense strand
caacgacacaagaaacaca

SEQ ID NO: 1092630 - RNA, 19 nt, Homo sapiens
  misc_RNA (1)...(19): siRNA sense strand
uagaguagaagaagaugga

SEQ ID NO: 1092631 - RNA, 19 nt, Homo sapiens
  misc_RNA (1)...(19): siRNA sense strand
gaguagaagaagauggaaa

SEQ ID NO: 1092632 - RNA, 19 nt, Homo sapiens
  misc_RNA (1)...(19): siRNA sense strand
acacaagaaacacaacuuc

SEQ ID NO: 1092633 - RNA, 19 nt, Homo sapiens
  misc_RNA (1)...(19): siRNA sense strand
ccagcaaacaaguauccua

SEQ ID NO: 1092634 - RNA, 19 nt, Homo sapiens
  misc_RNA (1)...(19): siRNA sense strand
caaagacugcaaagaagag

SEQ ID NO: 1092635 - RNA, 19 nt, Homo sapiens
  misc_RNA (1)...(19): siRNA sense strand
ugagggagaagguggaaau

SEQ ID NO: 1092636 - RNA, 19 nt, Homo sapiens
  misc_RNA (1)...(19): siRNA sense strand
gacacaagaaacacaacuu

SEQ ID NO: 1092637 - RNA, 19 nt, Homo sapiens
  misc_RNA (1)...(19): siRNA sense strand
ggauugugggaaauagaaa

SEQ ID NO: 1092638 - RNA, 19 nt, Homo sapiens
  misc_RNA (1)...(19): siRNA sense strand
ugauagaguagaagaagau

SEQ ID NO: 1092639 - RNA, 19 nt, Homo sapiens
  misc_RNA (1)...(19): siRNA sense strand
aaauaacccaggaguaaag

SEQ ID NO: 1092640 - RNA, 19 nt, Homo sapiens
  misc_RNA (1)...(19): siRNA sense strand
ggauuuaacgaaggauugu

SEQ ID NO: 1092641 - RNA, 19 nt, Homo sapiens
  misc_RNA (1)...(19): siRNA sense strand
ggugauagaguagaagaag

SEQ ID NO: 1092642 - RNA, 19 nt, Homo sapiens
  misc_RNA (1)...(19): siRNA sense strand
aaagucaaacaaacggaaa

SEQ ID NO: 1092643 - RNA, 19 nt, Homo sapiens
  misc_RNA (1)...(19): siRNA sense strand
acggaaaggauuuaacgaa

SEQ ID NO: 1092644 - RNA, 19 nt, Homo sapiens
  misc_RNA (1)...(19): siRNA sense strand
cacaagaaacacaacuuca

SEQ ID NO: 1092645 - RNA, 19 nt, Homo sapiens
  misc_RNA (1)...(19): siRNA sense strand
gcacccaugaaacugcauu

SEQ ID NO: 1092646 - RNA, 19 nt, Homo sapiens
  misc_RNA (1)...(19): siRNA sense strand
ugcaagcagugaggaagaa

SEQ ID NO: 1092647 - RNA, 19 nt, Homo sapiens
  misc_RNA (1)...(19): siRNA sense strand
ugugaagccuccagcaaac

SEQ ID NO: 1092648 - RNA, 19 nt, Homo sapiens
  misc_RNA (1)...(19): siRNA sense strand
ggcaacgacacaagaaaca

SEQ ID NO: 1092649 - RNA, 19 nt, Homo sapiens
  misc_RNA (1)...(19): siRNA sense strand
uaaacagucccggaaaucu

SEQ ID NO: 1092650 - RNA, 19 nt, Homo sapiens
  misc_RNA (1)...(19): siRNA sense strand
aaacggaaaggauuuaacg

SEQ ID NO: 1092651 - RNA, 19 nt, Homo sapiens
  misc_RNA (1)...(19): siRNA sense strand
gggcaacgacacaagaaac

SEQ ID NO: 1092652 - RNA, 19 nt, Homo sapiens
  misc_RNA (1)...(19): siRNA sense strand
ugaagccuccagcaaacaa

SEQ ID NO: 1092653 - RNA, 19 nt, Homo sapiens
  misc_RNA (1)...(19): siRNA sense strand
gaaaaggcaaaagaaagaa

SEQ ID NO: 1092654 - RNA, 19 nt, Homo sapiens
  misc_RNA (1)...(19): siRNA sense strand
aacaaacggaaaggauuua

SEQ ID NO: 1092655 - RNA, 19 nt, Homo sapiens
  misc_RNA (1)...(19): siRNA sense strand
acaaacggaaaggauuuaa

SEQ ID NO: 1092656 - RNA, 19 nt, Homo sapiens
  misc_RNA (1)...(19): siRNA sense strand
gcgggcaacgacacaagaa

SEQ ID NO: 1092657 - RNA, 19 nt, Homo sapiens
  misc_RNA (1)...(19): siRNA sense strand
gcacagaacccaguacuga

SEQ ID NO: 1092658 - RNA, 19 nt, Homo sapiens
  misc_RNA (1)...(19): siRNA sense strand
ggacauacuuacagagcaa

SEQ ID NO: 1092659 - RNA, 19 nt, Homo sapiens
  misc_RNA (1)...(19): siRNA sense strand
ccagaaagaugaaagaaaa

SEQ ID NO: 1092660 - RNA, 19 nt, Homo sapiens
  misc_RNA (1)...(19): siRNA sense strand
gaucuuggcaguucaguau

SEQ ID NO: 1092661 - RNA, 19 nt, Homo sapiens
  misc_RNA (1)...(19): siRNA sense strand
gggaagaaacuaaauguca

SEQ ID NO: 1092662 - RNA, 19 nt, Homo sapiens
  misc_RNA (1)...(19): siRNA sense strand
gagaagagaauguggacaa

SEQ ID NO: 1092663 - RNA, 19 nt, Homo sapiens
  misc_RNA (1)...(19): siRNA sense strand
gaaagcacagaacccagua

SEQ ID NO: 1092664 - RNA, 19 nt, Homo sapiens
  misc_RNA (1)...(19): siRNA sense strand
uaggauggcuugaggacuu

SEQ ID NO: 1092665 - RNA, 19 nt, Homo sapiens
  misc_RNA (1)...(19): siRNA sense strand
ccaccacccucauccuuug

SEQ ID NO: 1092666 - RNA, 19 nt, Homo sapiens
  misc_RNA (1)...(19): siRNA sense strand
cauccucccuggcaucuga

SEQ ID NO: 1092667 - RNA, 19 nt, Homo sapiens
  misc_RNA (1)...(19): siRNA sense strand
ugagagaggugguggacau

SEQ ID NO: 1092668 - RNA, 19 nt, Homo sapiens
  misc_RNA (1)...(19): siRNA sense strand
gaauuacacacccaaggaa

SEQ ID NO: 1092669 - RNA, 19 nt, Homo sapiens
  misc_RNA (1)...(19): siRNA sense strand
gcaguucaguaucgaugga

SEQ ID NO: 1092670 - RNA, 19 nt, Homo sapiens
  misc_RNA (1)...(19): siRNA sense strand
gagcaccacucgccauguc

SEQ ID NO: 1092671 - RNA, 19 nt, Homo sapiens
  misc_RNA (1)...(19): siRNA sense strand
ggacacagcaguggaucuu

SEQ ID NO: 1092672 - RNA, 19 nt, Homo sapiens
  misc_RNA (1)...(19): siRNA sense strand
gaagaaacuaaaugucaca

SEQ ID NO: 1092673 - RNA, 19 nt, Homo sapiens
  misc_RNA (1)...(19): siRNA sense strand
gaaggacacagcaguggau

SEQ ID NO: 1092674 - RNA, 19 nt, Homo sapiens
  misc_RNA (1)...(19): siRNA sense strand
gaggugguggacauacuua

SEQ ID NO: 1092675 - RNA, 19 nt, Homo sapiens
  misc_RNA (1)...(19): siRNA sense strand
gccagaaagaugaaagaaa

SEQ ID NO: 1092676 - RNA, 19 nt, Homo sapiens
  misc_RNA (1)...(19): siRNA sense strand
agacgacccucacucucuu

SEQ ID NO: 1092677 - RNA, 19 nt, Homo sapiens
  misc_RNA (1)...(19): siRNA sense strand
acaaggauguggccauguc

SEQ ID NO: 1092678 - RNA, 19 nt, Homo sapiens
  misc_RNA (1)...(19): siRNA sense strand
agacuuuucuucacuauga

SEQ ID NO: 1092679 - RNA, 19 nt, Homo sapiens
  misc_RNA (1)...(19): siRNA sense strand
gagaggugguggacauacu

SEQ ID NO: 1092680 - RNA, 19 nt, Homo sapiens
  misc_RNA (1)...(19): siRNA sense strand
cgucaucccuaaguucaga

SEQ ID NO: 1092681 - RNA, 19 nt, Homo sapiens
  misc_RNA (1)...(19): siRNA sense strand
guccuuccauuacaucuca

SEQ ID NO: 1092682 - RNA, 19 nt, Homo sapiens
  misc_RNA (1)...(19): siRNA sense strand
gagagaggugguggacaua

SEQ ID NO: 1092683 - RNA, 19 nt, Homo sapiens
  misc_RNA (1)...(19): siRNA sense strand
cagccgccaucccagcuuu

SEQ ID NO: 1092684 - RNA, 19 nt, Homo sapiens
  misc_RNA (1)...(19): siRNA sense strand
ucaccgucaucccuaaguu

SEQ ID NO: 1092685 - RNA, 19 nt, Homo sapiens
  misc_RNA (1)...(19): siRNA sense strand
gccauguccuuccauuaca

SEQ ID NO: 1092686 - RNA, 19 nt, Homo sapiens
  misc_RNA (1)...(19): siRNA sense strand
gagccagaaagaugaaaga

SEQ ID NO: 1092687 - RNA, 19 nt, Homo sapiens
  misc_RNA (1)...(19): siRNA sense strand
gaauguggacaacgguuca

SEQ ID NO: 1092688 - RNA, 19 nt, Homo sapiens
  misc_RNA (1)...(19): siRNA sense strand
caguggaucuuggcaguuc

SEQ ID NO: 1092689 - RNA, 19 nt, Homo sapiens
  misc_RNA (1)...(19): siRNA sense strand
gggagaaugacaaggaugu

SEQ ID NO: 1092690 - RNA, 19 nt, Homo sapiens
  misc_RNA (1)...(19): siRNA sense strand
ggccauguccuuccauuac

SEQ ID NO: 1092691 - RNA, 19 nt, Homo sapiens
  misc_RNA (1)...(19): siRNA sense strand
gcaacugcuugacauucag

SEQ ID NO: 1092692 - RNA, 19 nt, Homo sapiens
  misc_RNA (1)...(19): siRNA sense strand
agaauuacacacccaagga

SEQ ID NO: 1092693 - RNA, 19 nt, Homo sapiens
  misc_RNA (1)...(19): siRNA sense strand
acagaacccaguacugaga

SEQ ID NO: 1092694 - RNA, 19 nt, Homo sapiens
  misc_RNA (1)...(19): siRNA sense strand
gaugucuugugagcagaaa

SEQ ID NO: 1092695 - RNA, 19 nt, Homo sapiens
  misc_RNA (1)...(19): siRNA sense strand
aaugggagacugcauagga

SEQ ID NO: 1092696 - RNA, 19 nt, Homo sapiens
  misc_RNA (1)...(19): siRNA sense strand
gccaccacccucauccuuu

SEQ ID NO: 1092697 - RNA, 19 nt, Homo sapiens
  misc_RNA (1)...(19): siRNA sense strand
caucccagcuuugcuucug

SEQ ID NO: 1092698 - RNA, 19 nt, Homo sapiens
  misc_RNA (1)...(19): siRNA sense strand
gcuugaggacuucuugaug

SEQ ID NO: 1092699 - RNA, 19 nt, Homo sapiens
  misc_RNA (1)...(19): siRNA sense strand
gugggagaaugacaaggau

SEQ ID NO: 1092700 - RNA, 19 nt, Homo sapiens
  misc_RNA (1)...(19): siRNA sense strand
gacccucacucucuuugcu

SEQ ID NO: 1092701 - RNA, 19 nt, Homo sapiens
  misc_RNA (1)...(19): siRNA sense strand
aaagaaaagugggagaaug

SEQ ID NO: 1092702 - RNA, 19 nt, Homo sapiens
  misc_RNA (1)...(19): siRNA sense strand
acaucaccgucaucccuaa

SEQ ID NO: 1092703 - RNA, 19 nt, Homo sapiens
  misc_RNA (1)...(19): siRNA sense strand
gcgagacgacccucacucu

SEQ ID NO: 1092704 - RNA, 19 nt, Homo sapiens
  misc_RNA (1)...(19): siRNA sense strand
ggaucuuggcaguucagua

SEQ ID NO: 1092705 - RNA, 19 nt, Homo sapiens
  misc_RNA (1)...(19): siRNA sense strand
ugucacaacggccuggaaa

SEQ ID NO: 1092706 - RNA, 19 nt, Homo sapiens
  misc_RNA (1)...(19): siRNA sense strand
guggccauguccuuccauu

SEQ ID NO: 1092707 - RNA, 19 nt, Homo sapiens
  misc_RNA (1)...(19): siRNA sense strand
cucacucucuuugcuauga

SEQ ID NO: 1092708 - RNA, 19 nt, Homo sapiens
  misc_RNA (1)...(19): siRNA sense strand
ucucuuugcuaugacauca

SEQ ID NO: 1092709 - RNA, 19 nt, Homo sapiens
  misc_RNA (1)...(19): siRNA sense strand
gaaagaaaagugggagaau

SEQ ID NO: 1092710 - RNA, 19 nt, Homo sapiens
  misc_RNA (1)...(19): siRNA sense strand
gaagugugcugauggaaau

SEQ ID NO: 1092711 - RNA, 19 nt, Homo sapiens
  misc_RNA (1)...(19): siRNA sense strand
aaacuuacgucacaucaaa

SEQ ID NO: 1092712 - RNA, 19 nt, Homo sapiens
  misc_RNA (1)...(19): siRNA sense strand
gaagagcagucaguacauu

SEQ ID NO: 1092713 - RNA, 19 nt, Homo sapiens
  misc_RNA (1)...(19): siRNA sense strand
caaaagaccuucacaguau

SEQ ID NO: 1092714 - RNA, 19 nt, Homo sapiens
  misc_RNA (1)...(19): siRNA sense strand
guucaauucugguauauga

SEQ ID NO: 1092715 - RNA, 19 nt, Homo sapiens
  misc_RNA (1)...(19): siRNA sense strand
ggaccuacuugcaaacuau

SEQ ID NO: 1092716 - RNA, 19 nt, Homo sapiens
  misc_RNA (1)...(19): siRNA sense strand
ggaaacaggccgaguuaga

SEQ ID NO: 1092717 - RNA, 19 nt, Homo sapiens
  misc_RNA (1)...(19): siRNA sense strand
gcauagacuuucagacaga

SEQ ID NO: 1092718 - RNA, 19 nt, Homo sapiens
  misc_RNA (1)...(19): siRNA sense strand
gaacagaugcuaaggaaac

SEQ ID NO: 1092719 - RNA, 19 nt, Homo sapiens
  misc_RNA (1)...(19): siRNA sense strand
gaaacaggccgaguuagaa

SEQ ID NO: 1092720 - RNA, 19 nt, Homo sapiens
  misc_RNA (1)...(19): siRNA sense strand
gcagucaugugcaggaguu

SEQ ID NO: 1092721 - RNA, 19 nt, Homo sapiens
  misc_RNA (1)...(19): siRNA sense strand
guuaagauguugaguacug

SEQ ID NO: 1092722 - RNA, 19 nt, Homo sapiens
  misc_RNA (1)...(19): siRNA sense strand
cauuugaggugaaccguaa

SEQ ID NO: 1092723 - RNA, 19 nt, Homo sapiens
  misc_RNA (1)...(19): siRNA sense strand
cuacuuggcuaccuuaaca

SEQ ID NO: 1092724 - RNA, 19 nt, Homo sapiens
  misc_RNA (1)...(19): siRNA sense strand
ggaguuaguagcucagaaa

SEQ ID NO: 1092725 - RNA, 19 nt, Homo sapiens
  misc_RNA (1)...(19): siRNA sense strand
agacaacacuauuaaacug

SEQ ID NO: 1092726 - RNA, 19 nt, Homo sapiens
  misc_RNA (1)...(19): siRNA sense strand
gaggcuaacuacaucuaug

SEQ ID NO: 1092727 - RNA, 19 nt, Homo sapiens
  misc_RNA (1)...(19): siRNA sense strand
aaaguucccuacugaagga

SEQ ID NO: 1092728 - RNA, 19 nt, Homo sapiens
  misc_RNA (1)...(19): siRNA sense strand
cagagaagaugguccacau

SEQ ID NO: 1092729 - RNA, 19 nt, Homo sapiens
  misc_RNA (1)...(19): siRNA sense strand
cuuccaggcuuugguguua

SEQ ID NO: 1092730 - RNA, 19 nt, Homo sapiens
  misc_RNA (1)...(19): siRNA sense strand
gcaacauccugguguguac

SEQ ID NO: 1092731 - RNA, 19 nt, Homo sapiens
  misc_RNA (1)...(19): siRNA sense strand
aggaacagaugcuaaggaa

SEQ ID NO: 1092732 - RNA, 19 nt, Homo sapiens
  misc_RNA (1)...(19): siRNA sense strand
ggcacugucuugugaccua

SEQ ID NO: 1092733 - RNA, 19 nt, Homo sapiens
  misc_RNA (1)...(19): siRNA sense strand
ggaugaagcagcaaauucu

SEQ ID NO: 1092734 - RNA, 19 nt, Homo sapiens
  misc_RNA (1)...(19): siRNA sense strand
ucacaucaaagucagaauu

SEQ ID NO: 1092735 - RNA, 19 nt, Homo sapiens
  misc_RNA (1)...(19): siRNA sense strand
gguguuaagauguugagua

SEQ ID NO: 1092736 - RNA, 19 nt, Homo sapiens
  misc_RNA (1)...(19): siRNA sense strand
auaccgugguccagacuua

SEQ ID NO: 1092737 - RNA, 19 nt, Homo sapiens
  misc_RNA (1)...(19): siRNA sense strand
uggaggaccuacuugcaaa

SEQ ID NO: 1092738 - RNA, 19 nt, Homo sapiens
  misc_RNA (1)...(19): siRNA sense strand
uaaggaaacaggccgaguu

SEQ ID NO: 1092739 - RNA, 19 nt, Homo sapiens
  misc_RNA (1)...(19): siRNA sense strand
cugcagguccucacugaua

SEQ ID NO: 1092740 - RNA, 19 nt, Homo sapiens
  misc_RNA (1)...(19): siRNA sense strand
ccaaaagaccuucacagua

SEQ ID NO: 1092741 - RNA, 19 nt, Homo sapiens
  misc_RNA (1)...(19): siRNA sense strand
aaggaaacaggccgaguua

SEQ ID NO: 1092742 - RNA, 19 nt, Homo sapiens
  misc_RNA (1)...(19): siRNA sense strand
ggacaucugcccauuugag

SEQ ID NO: 1092743 - RNA, 19 nt, Homo sapiens
  misc_RNA (1)...(19): siRNA sense strand
gggaugaagcagcaaauuc

SEQ ID NO: 1092744 - RNA, 19 nt, Homo sapiens
  misc_RNA (1)...(19): siRNA sense strand
gcuuugguguuaagauguu

SEQ ID NO: 1092745 - RNA, 19 nt, Homo sapiens
  misc_RNA (1)...(19): siRNA sense strand
guguuaagauguugaguac

SEQ ID NO: 1092746 - RNA, 19 nt, Homo sapiens
  misc_RNA (1)...(19): siRNA sense strand
gacaacacuauuaaacuga

SEQ ID NO: 1092747 - RNA, 19 nt, Homo sapiens
  misc_RNA (1)...(19): siRNA sense strand
cgaagugugcugauggaaa

SEQ ID NO: 1092748 - RNA, 19 nt, Homo sapiens
  misc_RNA (1)...(19): siRNA sense strand
cacaucaaagucagaauuu

SEQ ID NO: 1092749 - RNA, 19 nt, Homo sapiens
  misc_RNA (1)...(19): siRNA sense strand
uuggacaucugcccauuug

SEQ ID NO: 1092750 - RNA, 19 nt, Homo sapiens
  misc_RNA (1)...(19): siRNA sense strand
ccacuggucucccugucau

SEQ ID NO: 1092751 - RNA, 19 nt, Homo sapiens
  misc_RNA (1)...(19): siRNA sense strand
guuuagcaguuaccucaga

SEQ ID NO: 1092752 - RNA, 19 nt, Homo sapiens
  misc_RNA (1)...(19): siRNA sense strand
ugaccuacaggccugauaa

SEQ ID NO: 1092753 - RNA, 19 nt, Homo sapiens
  misc_RNA (1)...(19): siRNA sense strand
guauaugacgugcgaaaca

SEQ ID NO: 1092754 - RNA, 19 nt, Homo sapiens
  misc_RNA (1)...(19): siRNA sense strand
gaaccguaacagcuacuug

SEQ ID NO: 1092755 - RNA, 19 nt, Homo sapiens
  misc_RNA (1)...(19): siRNA sense strand
ggccaaugguucaauucug

SEQ ID NO: 1092756 - RNA, 19 nt, Homo sapiens
  misc_RNA (1)...(19): siRNA sense strand
ugcagguccucacugauaa

SEQ ID NO: 1092757 - RNA, 19 nt, Homo sapiens
  misc_RNA (1)...(19): siRNA sense strand
ucccggcacugucuuguga

SEQ ID NO: 1092758 - RNA, 19 nt, Homo sapiens
  misc_RNA (1)...(19): siRNA sense strand
cagcugcauuuccauaugg

SEQ ID NO: 1092759 - RNA, 19 nt, Homo sapiens
  misc_RNA (1)...(19): siRNA sense strand
gaaacacgagcagucaugu

SEQ ID NO: 1092760 - RNA, 19 nt, Homo sapiens
  misc_RNA (1)...(19): siRNA sense strand
caucaaagucagaauuuac

SEQ ID NO: 1092761 - RNA, 19 nt, Homo sapiens
  misc_RNA (1)...(19): siRNA sense strand
ucagcugcauuuccauaug

SEQ ID NO: 1092762 - RNA, 19 nt, Homo sapiens
  misc_RNA (1)...(19): siRNA sense strand
cgaaacacgagcagucaug

SEQ ID NO: 1092763 - RNA, 19 nt, Homo sapiens
  misc_RNA (1)...(19): siRNA sense strand
aaacaggccgaguuagaau

SEQ ID NO: 1092764 - RNA, 19 nt, Homo sapiens
  misc_RNA (1)...(19): siRNA sense strand
cauacgaagugugcugaug

SEQ ID NO: 1092765 - RNA, 19 nt, Homo sapiens
  misc_RNA (1)...(19): siRNA sense strand
uaagugcacuaggcuucaa

SEQ ID NO: 1092766 - RNA, 19 nt, Homo sapiens
  misc_RNA (1)...(19): siRNA sense strand
ugagcugccuggugauauc

SEQ ID NO: 1092767 - RNA, 19 nt, Homo sapiens
  misc_RNA (1)...(19): siRNA sense strand
gguccagacuuauaaugcu

SEQ ID NO: 1092768 - RNA, 19 nt, Homo sapiens
  misc_RNA (1)...(19): siRNA sense strand
ucccuagacaacacuauua

SEQ ID NO: 1092769 - RNA, 19 nt, Homo sapiens
  misc_RNA (1)...(19): siRNA sense strand
ggcaacauccuggugugua

SEQ ID NO: 1092770 - RNA, 19 nt, Homo sapiens
  misc_RNA (1)...(19): siRNA sense strand
gaaaaguucccuacugaag

SEQ ID NO: 1092771 - RNA, 19 nt, Homo sapiens
  misc_RNA (1)...(19): siRNA sense strand
gaccuacaggccugauaaa

SEQ ID NO: 1092772 - RNA, 19 nt, Homo sapiens
  misc_RNA (1)...(19): siRNA sense strand
cugcauagacuuucagaca

SEQ ID NO: 1092773 - RNA, 19 nt, Homo sapiens
  misc_RNA (1)...(19): siRNA sense strand
gccagcacaagcacaagua

SEQ ID NO: 1092774 - RNA, 19 nt, Homo sapiens
  misc_RNA (1)...(19): siRNA sense strand
ggaacagaugcuaaggaaa

SEQ ID NO: 1092775 - RNA, 19 nt, Homo sapiens
  misc_RNA (1)...(19): siRNA sense strand
ccucagcugcauuuccaua

SEQ ID NO: 1092776 - RNA, 19 nt, Homo sapiens
  misc_RNA (1)...(19): siRNA sense strand
ugaaggaacagaugcuaag

SEQ ID NO: 1092777 - RNA, 19 nt, Homo sapiens
  misc_RNA (1)...(19): siRNA sense strand
cagcuacuuggcuaccuua

SEQ ID NO: 1092778 - RNA, 19 nt, Homo sapiens
  misc_RNA (1)...(19): siRNA sense strand
aaucacaccaccauacgaa

SEQ ID NO: 1092779 - RNA, 19 nt, Homo sapiens
  misc_RNA (1)...(19): siRNA sense strand
cuuggaggaugcuucauuc

SEQ ID NO: 1092780 - RNA, 19 nt, Homo sapiens
  misc_RNA (1)...(19): siRNA sense strand
gucaguacauuccgaugca

SEQ ID NO: 1092781 - RNA, 19 nt, Homo sapiens
  misc_RNA (1)...(19): siRNA sense strand
uuggcuaccuuaacagaga

SEQ ID NO: 1092782 - RNA, 19 nt, Homo sapiens
  misc_RNA (1)...(19): siRNA sense strand
ccgaucagccuguguugga

SEQ ID NO: 1092783 - RNA, 19 nt, Homo sapiens
  misc_RNA (1)...(19): siRNA sense strand
cuagacaacacuauuaaac

SEQ ID NO: 1092784 - RNA, 19 nt, Homo sapiens
  misc_RNA (1)...(19): siRNA sense strand
aaaggcguguucaggacuu

SEQ ID NO: 1092785 - RNA, 19 nt, Homo sapiens
  misc_RNA (1)...(19): siRNA sense strand
uuacgucacaucaaaguca

SEQ ID NO: 1092786 - RNA, 19 nt, Homo sapiens
  misc_RNA (1)...(19): siRNA sense strand
cguccugucuggagcuguu

SEQ ID NO: 1092787 - RNA, 19 nt, Homo sapiens
  misc_RNA (1)...(19): siRNA sense strand
aggcuuugguguuaagaug

SEQ ID NO: 1092788 - RNA, 19 nt, Homo sapiens
  misc_RNA (1)...(19): siRNA sense strand
uccaaagcccagagaauga

SEQ ID NO: 1092789 - RNA, 19 nt, Homo sapiens
  misc_RNA (1)...(19): siRNA sense strand
augguucaauucugguaua

SEQ ID NO: 1092790 - RNA, 19 nt, Homo sapiens
  misc_RNA (1)...(19): siRNA sense strand
ugaguacugccaacaugaa

SEQ ID NO: 1092791 - RNA, 19 nt, Homo sapiens
  misc_RNA (1)...(19): siRNA sense strand
ccucaggccucuuuucuuc

SEQ ID NO: 1092792 - RNA, 19 nt, Homo sapiens
  misc_RNA (1)...(19): siRNA sense strand
caaugguucaauucuggua

SEQ ID NO: 1092793 - RNA, 19 nt, Homo sapiens
  misc_RNA (1)...(19): siRNA sense strand
ccuagacaacacuauuaaa

SEQ ID NO: 1092794 - RNA, 19 nt, Homo sapiens
  misc_RNA (1)...(19): siRNA sense strand
uacgaagugugcugaugga

SEQ ID NO: 1092795 - RNA, 19 nt, Homo sapiens
  misc_RNA (1)...(19): siRNA sense strand
gaugaagcagcaaauucug

SEQ ID NO: 1092796 - RNA, 19 nt, Homo sapiens
  misc_RNA (1)...(19): siRNA sense strand
gaguuagaaucagcacagu

SEQ ID NO: 1092797 - RNA, 19 nt, Homo sapiens
  misc_RNA (1)...(19): siRNA sense strand
ccaaagcccagagaaugau

SEQ ID NO: 1092798 - RNA, 19 nt, Homo sapiens
  misc_RNA (1)...(19): siRNA sense strand
guacugccaacaugaagag

SEQ ID NO: 1092799 - RNA, 19 nt, Homo sapiens
  misc_RNA (1)...(19): siRNA sense strand
gaaggaacagaugcuaagg

SEQ ID NO: 1092800 - RNA, 19 nt, Homo sapiens
  misc_RNA (1)...(19): siRNA sense strand
cuugcaaacuauugaccaa

SEQ ID NO: 1092801 - RNA, 19 nt, Homo sapiens
  misc_RNA (1)...(19): siRNA sense strand
gaccuacuugcaaacuauu

SEQ ID NO: 1092802 - RNA, 19 nt, Homo sapiens
  misc_RNA (1)...(19): siRNA sense strand
caguaucucaggcaggaaa

SEQ ID NO: 1092803 - RNA, 19 nt, Homo sapiens
  misc_RNA (1)...(19): siRNA sense strand
ggacuggccaaugguucaa

SEQ ID NO: 1092804 - RNA, 19 nt, Homo sapiens
  misc_RNA (1)...(19): siRNA sense strand
ggaagaggaugugauuuau

SEQ ID NO: 1092805 - RNA, 19 nt, Homo sapiens
  misc_RNA (1)...(19): siRNA sense strand
caaguacgauuguaagaug

SEQ ID NO: 1092806 - RNA, 19 nt, Homo sapiens
  misc_RNA (1)...(19): siRNA sense strand
gaacaugacuguggcucaa

SEQ ID NO: 1092807 - RNA, 19 nt, Homo sapiens
  misc_RNA (1)...(19): siRNA sense strand
gagaggcguuugaguuuga

SEQ ID NO: 1092808 - RNA, 19 nt, Homo sapiens
  misc_RNA (1)...(19): siRNA sense strand
aagaggaugugauuuauga

SEQ ID NO: 1092809 - RNA, 19 nt, Homo sapiens
  misc_RNA (1)...(19): siRNA sense strand
ccaaguauguggugaagug

SEQ ID NO: 1092810 - RNA, 19 nt, Homo sapiens
  misc_RNA (1)...(19): siRNA sense strand
cagaagcacuuguguguca

SEQ ID NO: 1092811 - RNA, 19 nt, Homo sapiens
  misc_RNA (1)...(19): siRNA sense strand
agagagacaucuuggcuuu

SEQ ID NO: 1092812 - RNA, 19 nt, Homo sapiens
  misc_RNA (1)...(19): siRNA sense strand
gcauugaccgguucacuuu

SEQ ID NO: 1092813 - RNA, 19 nt, Homo sapiens
  misc_RNA (1)...(19): siRNA sense strand
gacgagagcccgacaguug

SEQ ID NO: 1092814 - RNA, 19 nt, Homo sapiens
  misc_RNA (1)...(19): siRNA sense strand
uggaagaggaugugauuua

SEQ ID NO: 1092815 - RNA, 19 nt, Homo sapiens
  misc_RNA (1)...(19): siRNA sense strand
ccagugaguucgagagcua

SEQ ID NO: 1092816 - RNA, 19 nt, Homo sapiens
  misc_RNA (1)...(19): siRNA sense strand
gagcagaucacgcuucuca

SEQ ID NO: 1092817 - RNA, 19 nt, Homo sapiens
  misc_RNA (1)...(19): siRNA sense strand
ggaaaggcauggucucacu

SEQ ID NO: 1092818 - RNA, 19 nt, Homo sapiens
  misc_RNA (1)...(19): siRNA sense strand
gaagaguucccgucgcauu

SEQ ID NO: 1092819 - RNA, 19 nt, Homo sapiens
  misc_RNA (1)...(19): siRNA sense strand
caucuuggcuuugagaguu

SEQ ID NO: 1092820 - RNA, 19 nt, Homo sapiens
  misc_RNA (1)...(19): siRNA sense strand
ggacagcacccuccucauc

SEQ ID NO: 1092821 - RNA, 19 nt, Homo sapiens
  misc_RNA (1)...(19): siRNA sense strand
ggagaggcguuugaguuug

SEQ ID NO: 1092822 - RNA, 19 nt, Homo sapiens
  misc_RNA (1)...(19): siRNA sense strand
gcagugagcgugacacaca

SEQ ID NO: 1092823 - RNA, 19 nt, Homo sapiens
  misc_RNA (1)...(19): siRNA sense strand
cauaggagaucagcugguu

SEQ ID NO: 1092824 - RNA, 19 nt, Homo sapiens
  misc_RNA (1)...(19): siRNA sense strand
gcagggcuaccgcaacuuu

SEQ ID NO: 1092825 - RNA, 19 nt, Homo sapiens
  misc_RNA (1)...(19): siRNA sense strand
ggcauggucucacucaaug

SEQ ID NO: 1092826 - RNA, 19 nt, Homo sapiens
  misc_RNA (1)...(19): siRNA sense strand
agagacaucuuggcuuuga

SEQ ID NO: 1092827 - RNA, 19 nt, Homo sapiens
  misc_RNA (1)...(19): siRNA sense strand
uaccagaaccugaacauga

SEQ ID NO: 1092828 - RNA, 19 nt, Homo sapiens
  misc_RNA (1)...(19): siRNA sense strand
gaagaggaugugauuuaug

SEQ ID NO: 1092829 - RNA, 19 nt, Homo sapiens
  misc_RNA (1)...(19): siRNA sense strand
ccauguccaucaucaagaa

SEQ ID NO: 1092830 - RNA, 19 nt, Homo sapiens
  misc_RNA (1)...(19): siRNA sense strand
ugacagugaugaugaagag

SEQ ID NO: 1092831 - RNA, 19 nt, Homo sapiens
  misc_RNA (1)...(19): siRNA sense strand
ccaaguccauggugcuaga

SEQ ID NO: 1092832 - RNA, 19 nt, Homo sapiens
  misc_RNA (1)...(19): siRNA sense strand
gcacugccacuccauguuc

SEQ ID NO: 1092833 - RNA, 19 nt, Homo sapiens
  misc_RNA (1)...(19): siRNA sense strand
uggagacgcuggcugagaa

SEQ ID NO: 1092834 - RNA, 19 nt, Homo sapiens
  misc_RNA (1)...(19): siRNA sense strand
gcagcuacguggagucucu

SEQ ID NO: 1092835 - RNA, 19 nt, Homo sapiens
  misc_RNA (1)...(19): siRNA sense strand
gcaccuaccagaaccugaa

SEQ ID NO: 1092836 - RNA, 19 nt, Homo sapiens
  misc_RNA (1)...(19): siRNA sense strand
gcagaucacgcuucucauc

SEQ ID NO: 1092837 - RNA, 19 nt, Homo sapiens
  misc_RNA (1)...(19): siRNA sense strand
cagggcaggcucagaauaa

SEQ ID NO: 1092838 - RNA, 19 nt, Homo sapiens
  misc_RNA (1)...(19): siRNA sense strand
gcgggcagcuaauuaaguc

SEQ ID NO: 1092839 - RNA, 19 nt, Homo sapiens
  misc_RNA (1)...(19): siRNA sense strand
gugacuacgugaacaacuu

SEQ ID NO: 1092840 - RNA, 19 nt, Homo sapiens
  misc_RNA (1)...(19): siRNA sense strand
gccaacaagugccgucuca

SEQ ID NO: 1092841 - RNA, 19 nt, Homo sapiens
  misc_RNA (1)...(19): siRNA sense strand
ggucaacagguuacauuug

SEQ ID NO: 1092842 - RNA, 19 nt, Homo sapiens
  misc_RNA (1)...(19): siRNA sense strand
caggugcccuugaugcuau

SEQ ID NO: 1092843 - RNA, 19 nt, Homo sapiens
  misc_RNA (1)...(19): siRNA sense strand
caggagaggcguuugaguu

SEQ ID NO: 1092844 - RNA, 19 nt, Homo sapiens
  misc_RNA (1)...(19): siRNA sense strand
gcuggaagcggaagaguuc

SEQ ID NO: 1092845 - RNA, 19 nt, Homo sapiens
  misc_RNA (1)...(19): siRNA sense strand
gucaacagguuacauuugg

SEQ ID NO: 1092846 - RNA, 19 nt, Homo sapiens
  misc_RNA (1)...(19): siRNA sense strand
gcacucaggcgccaagaag

SEQ ID NO: 1092847 - RNA, 19 nt, Homo sapiens
  misc_RNA (1)...(19): siRNA sense strand
ugcaggagcugaagcacaa

SEQ ID NO: 1092848 - RNA, 19 nt, Homo sapiens
  misc_RNA (1)...(19): siRNA sense strand
gcaagugccaggugguguu

SEQ ID NO: 1092849 - RNA, 19 nt, Homo sapiens
  misc_RNA (1)...(19): siRNA sense strand
ccauggugcuagaugugua

SEQ ID NO: 1092850 - RNA, 19 nt, Homo sapiens
  misc_RNA (1)...(19): siRNA sense strand
ggcagcugcuccuguguga

SEQ ID NO: 1092851 - RNA, 19 nt, Homo sapiens
  misc_RNA (1)...(19): siRNA sense strand
gagguucccacaguucaua

SEQ ID NO: 1092852 - RNA, 19 nt, Homo sapiens
  misc_RNA (1)...(19): siRNA sense strand
gcaggugcccuugaugcua

SEQ ID NO: 1092853 - RNA, 19 nt, Homo sapiens
  misc_RNA (1)...(19): siRNA sense strand
gaggacggcuccauuuacg

SEQ ID NO: 1092854 - RNA, 19 nt, Homo sapiens
  misc_RNA (1)...(19): siRNA sense strand
gccagaagcacuugugugu

SEQ ID NO: 1092855 - RNA, 19 nt, Homo sapiens
  misc_RNA (1)...(19): siRNA sense strand
gcagcagccucaacaagcu

SEQ ID NO: 1092856 - RNA, 19 nt, Homo sapiens
  misc_RNA (1)...(19): siRNA sense strand
gugccaacaucaacuucaa

SEQ ID NO: 1092857 - RNA, 19 nt, Homo sapiens
  misc_RNA (1)...(19): siRNA sense strand
gcaccuaugacaaggacaa

SEQ ID NO: 1092858 - RNA, 19 nt, Homo sapiens
  misc_RNA (1)...(19): siRNA sense strand
gcacggcaccuaccagaac

SEQ ID NO: 1092859 - RNA, 19 nt, Homo sapiens
  misc_RNA (1)...(19): siRNA sense strand
ugaugacagugaugaugaa

SEQ ID NO: 1092860 - RNA, 19 nt, Homo sapiens
  misc_RNA (1)...(19): siRNA sense strand
ucaagcccauccagagguu

SEQ ID NO: 1092861 - RNA, 19 nt, Homo sapiens
  misc_RNA (1)...(19): siRNA sense strand
caaggacaaugugcucauc

SEQ ID NO: 1092862 - RNA, 19 nt, Homo sapiens
  misc_RNA (1)...(19): siRNA sense strand
gagagauacgccaggacua

SEQ ID NO: 1092863 - RNA, 19 nt, Homo sapiens
  misc_RNA (1)...(19): siRNA sense strand
gagauccacucggccaaca

SEQ ID NO: 1092864 - RNA, 19 nt, Homo sapiens
  misc_RNA (1)...(19): siRNA sense strand
ggucagcguuucggacauc

SEQ ID NO: 1092865 - RNA, 19 nt, Homo sapiens
  misc_RNA (1)...(19): siRNA sense strand
ccaaggaugggcuggagaa

SEQ ID NO: 1092866 - RNA, 19 nt, Homo sapiens
  misc_RNA (1)...(19): siRNA sense strand
agagauacgccaggacuaa

SEQ ID NO: 1092867 - RNA, 19 nt, Homo sapiens
  misc_RNA (1)...(19): siRNA sense strand
cagcugcuccugugugaga

SEQ ID NO: 1092868 - RNA, 19 nt, Homo sapiens
  misc_RNA (1)...(19): siRNA sense strand
ccgggucacuguccuggaa

SEQ ID NO: 1092869 - RNA, 19 nt, Homo sapiens
  misc_RNA (1)...(19): siRNA sense strand
caaggagcgucgggucuuc

SEQ ID NO: 1092870 - RNA, 19 nt, Homo sapiens
  misc_RNA (1)...(19): siRNA sense strand
caggugguccggaggcaua

SEQ ID NO: 1092871 - RNA, 19 nt, Homo sapiens
  misc_RNA (1)...(19): siRNA sense strand
augggacccuugcugcuua

SEQ ID NO: 1092872 - RNA, 19 nt, Homo sapiens
  misc_RNA (1)...(19): siRNA sense strand
ugcuagauguguacaguga

SEQ ID NO: 1092873 - RNA, 19 nt, Homo sapiens
  misc_RNA (1)...(19): siRNA sense strand
aggagaggcguuugaguuu

SEQ ID NO: 1092874 - RNA, 19 nt, Homo sapiens
  misc_RNA (1)...(19): siRNA sense strand
ugaagcacaaguacgauug

SEQ ID NO: 1092875 - RNA, 19 nt, Homo sapiens
  misc_RNA (1)...(19): siRNA sense strand
ggugcuagauguguacagu

SEQ ID NO: 1092876 - RNA, 19 nt, Homo sapiens
  misc_RNA (1)...(19): siRNA sense strand
ucaccagccuccugaucug

SEQ ID NO: 1092877 - RNA, 19 nt, Homo sapiens
  misc_RNA (1)...(19): siRNA sense strand
ccucagggcaggcucagaa

SEQ ID NO: 1092878 - RNA, 19 nt, Homo sapiens
  misc_RNA (1)...(19): siRNA sense strand
guacagugacuacgugaac

SEQ ID NO: 1092879 - RNA, 19 nt, Homo sapiens
  misc_RNA (1)...(19): siRNA sense strand
gaaggcauccccaagauca

SEQ ID NO: 1092880 - RNA, 19 nt, Homo sapiens
  misc_RNA (1)...(19): siRNA sense strand
gcagcauccuccucuacag

SEQ ID NO: 1092881 - RNA, 19 nt, Homo sapiens
  misc_RNA (1)...(19): siRNA sense strand
ccuggaagaggaugugauu

SEQ ID NO: 1092882 - RNA, 19 nt, Homo sapiens
  misc_RNA (1)...(19): siRNA sense strand
gaugggacccuugcugcuu

SEQ ID NO: 1092883 - RNA, 19 nt, Homo sapiens
  misc_RNA (1)...(19): siRNA sense strand
ucagggcaggcucagaaua

SEQ ID NO: 1092884 - RNA, 19 nt, Homo sapiens
  misc_RNA (1)...(19): siRNA sense strand
gaaccugcucuacgaggau

SEQ ID NO: 1092885 - RNA, 19 nt, Homo sapiens
  misc_RNA (1)...(19): siRNA sense strand
gggauuccaccgagaagau

SEQ ID NO: 1092886 - RNA, 19 nt, Homo sapiens
  misc_RNA (1)...(19): siRNA sense strand
ccagugccauguccaucau

SEQ ID NO: 1092887 - RNA, 19 nt, Homo sapiens
  misc_RNA (1)...(19): siRNA sense strand
ugaguuugaugacagugau

SEQ ID NO: 1092888 - RNA, 19 nt, Homo sapiens
  misc_RNA (1)...(19): siRNA sense strand
gaccgcagcagccucaaca

SEQ ID NO: 1092889 - RNA, 19 nt, Homo sapiens
  misc_RNA (1)...(19): siRNA sense strand
gggccagguggaaaucuuu

SEQ ID NO: 1092890 - RNA, 19 nt, Homo sapiens
  misc_RNA (1)...(19): siRNA sense strand
gcccggaugaggacaagaa

SEQ ID NO: 1092891 - RNA, 19 nt, Homo sapiens
  misc_RNA (1)...(19): siRNA sense strand
acaugacuguggcucaaga

SEQ ID NO: 1092892 - RNA, 19 nt, Homo sapiens
  misc_RNA (1)...(19): siRNA sense strand
cagaucacgcuucucauca

SEQ ID NO: 1092893 - RNA, 19 nt, Homo sapiens
  misc_RNA (1)...(19): siRNA sense strand
ccuaugacaaggacaaugu

SEQ ID NO: 1092894 - RNA, 19 nt, Homo sapiens
  misc_RNA (1)...(19): siRNA sense strand
aguauguggugaaguggaa

SEQ ID NO: 1092895 - RNA, 19 nt, Homo sapiens
  misc_RNA (1)...(19): siRNA sense strand
ucuacgggcugauggucaa

SEQ ID NO: 1092896 - RNA, 19 nt, Homo sapiens
  misc_RNA (1)...(19): siRNA sense strand
gacagcacccuccucaucu

SEQ ID NO: 1092897 - RNA, 19 nt, Homo sapiens
  misc_RNA (1)...(19): siRNA sense strand
agaagggcauccucuugca

SEQ ID NO: 1092898 - RNA, 19 nt, Homo sapiens
  misc_RNA (1)...(19): siRNA sense strand
ggugaaggaggaagagauc

SEQ ID NO: 1092899 - RNA, 19 nt, Homo sapiens
  misc_RNA (1)...(19): siRNA sense strand
gcuugucugugccaacauc

SEQ ID NO: 1092900 - RNA, 19 nt, Homo sapiens
  misc_RNA (1)...(19): siRNA sense strand
gcccaaguauguggugaag

SEQ ID NO: 1092901 - RNA, 19 nt, Homo sapiens
  misc_RNA (1)...(19): siRNA sense strand
gcaccuccauccgccucuu

SEQ ID NO: 1092902 - RNA, 19 nt, Homo sapiens
  misc_RNA (1)...(19): siRNA sense strand
gagacgagagcccgacagu

SEQ ID NO: 1092903 - RNA, 19 nt, Homo sapiens
  misc_RNA (1)...(19): siRNA sense strand
gggucaacagguuacauuu

SEQ ID NO: 1092904 - RNA, 19 nt, Homo sapiens
  misc_RNA (1)...(19): siRNA sense strand
gcaaaggauucuauucuua

SEQ ID NO: 1092905 - RNA, 19 nt, Homo sapiens
  misc_RNA (1)...(19): siRNA sense strand
caagggaugucuucaguga

SEQ ID NO: 1092906 - RNA, 19 nt, Homo sapiens
  misc_RNA (1)...(19): siRNA sense strand
ggacacggaugcggaguuu

SEQ ID NO: 1092907 - RNA, 19 nt, Homo sapiens
  misc_RNA (1)...(19): siRNA sense strand
gaacagcaaaggauucuau

SEQ ID NO: 1092908 - RNA, 19 nt, Homo sapiens
  misc_RNA (1)...(19): siRNA sense strand
gauuuagacucucugauug

SEQ ID NO: 1092909 - RNA, 19 nt, Homo sapiens
  misc_RNA (1)...(19): siRNA sense strand
gguugaagaugacaaauuc

SEQ ID NO: 1092910 - RNA, 19 nt, Homo sapiens
  misc_RNA (1)...(19): siRNA sense strand
uaaaugacgugaccagcuu

SEQ ID NO: 1092911 - RNA, 19 nt, Homo sapiens
  misc_RNA (1)...(19): siRNA sense strand
gucaugagguggaacagua

SEQ ID NO: 1092912 - RNA, 19 nt, Homo sapiens
  misc_RNA (1)...(19): siRNA sense strand
ccaaugacaucgagcuguu

SEQ ID NO: 1092913 - RNA, 19 nt, Homo sapiens
  misc_RNA (1)...(19): siRNA sense strand
gacuauacauucucucaga

SEQ ID NO: 1092914 - RNA, 19 nt, Homo sapiens
  misc_RNA (1)...(19): siRNA sense strand
gacuaugaaugcacaacua

SEQ ID NO: 1092915 - RNA, 19 nt, Homo sapiens
  misc_RNA (1)...(19): siRNA sense strand
caaaauacccucuaccuuu

SEQ ID NO: 1092916 - RNA, 19 nt, Homo sapiens
  misc_RNA (1)...(19): siRNA sense strand
caaauuccaccguuucuga

SEQ ID NO: 1092917 - RNA, 19 nt, Homo sapiens
  misc_RNA (1)...(19): siRNA sense strand
gcaggcgccucguucauuc

SEQ ID NO: 1092918 - RNA, 19 nt, Homo sapiens
  misc_RNA (1)...(19): siRNA sense strand
gaccagcuuugacuaugaa

SEQ ID NO: 1092919 - RNA, 19 nt, Homo sapiens
  misc_RNA (1)...(19): siRNA sense strand
cgacaggagagauuucuuu

SEQ ID NO: 1092920 - RNA, 19 nt, Homo sapiens
  misc_RNA (1)...(19): siRNA sense strand
aaucaaggaccgaauguuu

SEQ ID NO: 1092921 - RNA, 19 nt, Homo sapiens
  misc_RNA (1)...(19): siRNA sense strand
gaugcggaguuuguugaua

SEQ ID NO: 1092922 - RNA, 19 nt, Homo sapiens
  misc_RNA (1)...(19): siRNA sense strand
gaaaucaaggaccgaaugu

SEQ ID NO: 1092923 - RNA, 19 nt, Homo sapiens
  misc_RNA (1)...(19): siRNA sense strand
ugaccagcuuugacuauga

SEQ ID NO: 1092924 - RNA, 19 nt, Homo sapiens
  misc_RNA (1)...(19): siRNA sense strand
ggaguuuguugauaucgau

SEQ ID NO: 1092925 - RNA, 19 nt, Homo sapiens
  misc_RNA (1)...(19): siRNA sense strand
guaaggccauucucaucga

SEQ ID NO: 1092926 - RNA, 19 nt, Homo sapiens
  misc_RNA (1)...(19): siRNA sense strand
ugauuuagacucucugauu

SEQ ID NO: 1092927 - RNA, 19 nt, Homo sapiens
  misc_RNA (1)...(19): siRNA sense strand
agggaugucuucagugauu

SEQ ID NO: 1092928 - RNA, 19 nt, Homo sapiens
  misc_RNA (1)...(19): siRNA sense strand
caucgaugaucaggucuuu

SEQ ID NO: 1092929 - RNA, 19 nt, Homo sapiens
  misc_RNA (1)...(19): siRNA sense strand
gaaugcacaacuacagauu

SEQ ID NO: 1092930 - RNA, 19 nt, Homo sapiens
  misc_RNA (1)...(19): siRNA sense strand
ggaugucuucagugauuua

SEQ ID NO: 1092931 - RNA, 19 nt, Homo sapiens
  misc_RNA (1)...(19): siRNA sense strand
gggagugacuauacauucu

SEQ ID NO: 1092932 - RNA, 19 nt, Homo sapiens
  misc_RNA (1)...(19): siRNA sense strand
ccggagcuaugacaacauu

SEQ ID NO: 1092933 - RNA, 19 nt, Homo sapiens
  misc_RNA (1)...(19): siRNA sense strand
acaaauacgacgagaguug

SEQ ID NO: 1092934 - RNA, 19 nt, Homo sapiens
  misc_RNA (1)...(19): siRNA sense strand
guccacaguuuauaaaugg

SEQ ID NO: 1092935 - RNA, 19 nt, Homo sapiens
  misc_RNA (1)...(19): siRNA sense strand
ugcuauugcugaauucuaa

SEQ ID NO: 1092936 - RNA, 19 nt, Homo sapiens
  misc_RNA (1)...(19): siRNA sense strand
cugcagcccuuuucuuuua

SEQ ID NO: 1092937 - RNA, 19 nt, Homo sapiens
  misc_RNA (1)...(19): siRNA sense strand
gaagggaacaaaauagaaa

SEQ ID NO: 1092938 - RNA, 19 nt, Homo sapiens
  misc_RNA (1)...(19): siRNA sense strand
ggaauaaaagcucuaagaa

SEQ ID NO: 1092939 - RNA, 19 nt, Homo sapiens
  misc_RNA (1)...(19): siRNA sense strand
ggcuauaccugugguugaa

SEQ ID NO: 1092940 - RNA, 19 nt, Homo sapiens
  misc_RNA (1)...(19): siRNA sense strand
uuucugaugugcuguguau

SEQ ID NO: 1092941 - RNA, 19 nt, Homo sapiens
  misc_RNA (1)...(19): siRNA sense strand
auaaagagaagcagcuauu

SEQ ID NO: 1092942 - RNA, 19 nt, Homo sapiens
  misc_RNA (1)...(19): siRNA sense strand
acaucgagcuguuucagau

SEQ ID NO: 1092943 - RNA, 19 nt, Homo sapiens
  misc_RNA (1)...(19): siRNA sense strand
caaaggauucuauucuuac

SEQ ID NO: 1092944 - RNA, 19 nt, Homo sapiens
  misc_RNA (1)...(19): siRNA sense strand
cagcaaaggauucuauucu

SEQ ID NO: 1092945 - RNA, 19 nt, Homo sapiens
  misc_RNA (1)...(19): siRNA sense strand
ugaccugacucaccuuucu

SEQ ID NO: 1092946 - RNA, 19 nt, Homo sapiens
  misc_RNA (1)...(19): siRNA sense strand
ccagugggauaaagagaag

SEQ ID NO: 1092947 - RNA, 19 nt, Homo sapiens
  misc_RNA (1)...(19): siRNA sense strand
ccaccagaguaucaggaaa

SEQ ID NO: 1092948 - RNA, 19 nt, Homo sapiens
  misc_RNA (1)...(19): siRNA sense strand
uaccugugguugaagauga

SEQ ID NO: 1092949 - RNA, 19 nt, Homo sapiens
  misc_RNA (1)...(19): siRNA sense strand
uguccacaguuuauaaaug

SEQ ID NO: 1092950 - RNA, 19 nt, Homo sapiens
  misc_RNA (1)...(19): siRNA sense strand
aaagagaagcagcuauuca

SEQ ID NO: 1092951 - RNA, 19 nt, Homo sapiens
  misc_RNA (1)...(19): siRNA sense strand
ggauaaagagaagcagcua

SEQ ID NO: 1092952 - RNA, 19 nt, Homo sapiens
  misc_RNA (1)...(19): siRNA sense strand
ugacaaauuccaccguuuc

SEQ ID NO: 1092953 - RNA, 19 nt, Homo sapiens
  misc_RNA (1)...(19): siRNA sense strand
uaaauggaacagcaaagga

SEQ ID NO: 1092954 - RNA, 19 nt, Homo sapiens
  misc_RNA (1)...(19): siRNA sense strand
uucgguggcucucacauuu

SEQ ID NO: 1092955 - RNA, 19 nt, Homo sapiens
  misc_RNA (1)...(19): siRNA sense strand
gggaugucuucagugauuu

SEQ ID NO: 1092956 - RNA, 19 nt, Homo sapiens
  misc_RNA (1)...(19): siRNA sense strand
aagagaagcagcuauucaa

SEQ ID NO: 1092957 - RNA, 19 nt, Homo sapiens
  misc_RNA (1)...(19): siRNA sense strand
gauaaagagaagcagcuau

SEQ ID NO: 1092958 - RNA, 19 nt, Homo sapiens
  misc_RNA (1)...(19): siRNA sense strand
ugauugaacuagauuugag

SEQ ID NO: 1092959 - RNA, 19 nt, Homo sapiens
  misc_RNA (1)...(19): siRNA sense strand
ccaaggagucuaucaucug

SEQ ID NO: 1092960 - RNA, 19 nt, Homo sapiens
  misc_RNA (1)...(19): siRNA sense strand
gagaagcagcuauucaaaa

SEQ ID NO: 1092961 - RNA, 19 nt, Homo sapiens
  misc_RNA (1)...(19): siRNA sense strand
cuauacauucucucagaua

SEQ ID NO: 1092962 - RNA, 19 nt, Homo sapiens
  misc_RNA (1)...(19): siRNA sense strand
augcggaguuuguugauau

SEQ ID NO: 1092963 - RNA, 19 nt, Homo sapiens
  misc_RNA (1)...(19): siRNA sense strand
agcaaaggauucuauucuu

SEQ ID NO: 1092964 - RNA, 19 nt, Homo sapiens
  misc_RNA (1)...(19): siRNA sense strand
uuacaaauacgacgagagu

SEQ ID NO: 1092965 - RNA, 19 nt, Homo sapiens
  misc_RNA (1)...(19): siRNA sense strand
ggugguagcccagcucuuc

SEQ ID NO: 1092966 - RNA, 19 nt, Homo sapiens
  misc_RNA (1)...(19): siRNA sense strand
ccugguaaaugggacguuu

SEQ ID NO: 1092967 - RNA, 19 nt, Homo sapiens
  misc_RNA (1)...(19): siRNA sense strand
caaauuccaagacauagag

SEQ ID NO: 1092968 - RNA, 19 nt, Homo sapiens
  misc_RNA (1)...(19): siRNA sense strand
gauauaccagugggauaaa

SEQ ID NO: 1092969 - RNA, 19 nt, Homo sapiens
  misc_RNA (1)...(19): siRNA sense strand
agauauaccagugggauaa

SEQ ID NO: 1092970 - RNA, 19 nt, Homo sapiens
  misc_RNA (1)...(19): siRNA sense strand
gugaccagcuuugacuaug

SEQ ID NO: 1092971 - RNA, 19 nt, Homo sapiens
  misc_RNA (1)...(19): siRNA sense strand
uacauucucucagauauac

SEQ ID NO: 1092972 - RNA, 19 nt, Homo sapiens
  misc_RNA (1)...(19): siRNA sense strand
aaaauacccucuaccuuuc

SEQ ID NO: 1092973 - RNA, 19 nt, Homo sapiens
  misc_RNA (1)...(19): siRNA sense strand
cagauauaccagugggaua

SEQ ID NO: 1092974 - RNA, 19 nt, Homo sapiens
  misc_RNA (1)...(19): siRNA sense strand
cuauaccugugguugaaga

SEQ ID NO: 1092975 - RNA, 19 nt, Homo sapiens
  misc_RNA (1)...(19): siRNA sense strand
agagaagcagcuauucaaa

SEQ ID NO: 1092976 - RNA, 19 nt, Homo sapiens
  misc_RNA (1)...(19): siRNA sense strand
gaauaaaagcucuaagaag

SEQ ID NO: 1092977 - RNA, 19 nt, Homo sapiens
  misc_RNA (1)...(19): siRNA sense strand
ucaggucuuugugguggua

SEQ ID NO: 1092978 - RNA, 19 nt, Homo sapiens
  misc_RNA (1)...(19): siRNA sense strand
ucugaugugcuguguauug

SEQ ID NO: 1092979 - RNA, 19 nt, Homo sapiens
  misc_RNA (1)...(19): siRNA sense strand
uaaagagaagcagcuauuc

SEQ ID NO: 1092980 - RNA, 19 nt, Homo sapiens
  misc_RNA (1)...(19): siRNA sense strand
agaaaucaaggaccgaaug

SEQ ID NO: 1092981 - RNA, 19 nt, Homo sapiens
  misc_RNA (1)...(19): siRNA sense strand
gagugacuauacauucucu

SEQ ID NO: 1092982 - RNA, 19 nt, Homo sapiens
  misc_RNA (1)...(19): siRNA sense strand
acacggaugcggaguuugu

SEQ ID NO: 1092983 - RNA, 19 nt, Homo sapiens
  misc_RNA (1)...(19): siRNA sense strand
ucaaauuccaagacauaga

SEQ ID NO: 1092984 - RNA, 19 nt, Homo sapiens
  misc_RNA (1)...(19): siRNA sense strand
ggagcuaugacaacauuac

SEQ ID NO: 1092985 - RNA, 19 nt, Homo sapiens
  misc_RNA (1)...(19): siRNA sense strand
uagacucucugauugaacu

SEQ ID NO: 1092986 - RNA, 19 nt, Homo sapiens
  misc_RNA (1)...(19): siRNA sense strand
cuucagugauuuagacucu

SEQ ID NO: 1092987 - RNA, 19 nt, Homo sapiens
  misc_RNA (1)...(19): siRNA sense strand
guaccaaggagucuaucau

SEQ ID NO: 1092988 - RNA, 19 nt, Homo sapiens
  misc_RNA (1)...(19): siRNA sense strand
gagcuaugacaacauuaca

SEQ ID NO: 1092989 - RNA, 19 nt, Homo sapiens
  misc_RNA (1)...(19): siRNA sense strand
uuuagacucucugauugaa

SEQ ID NO: 1092990 - RNA, 19 nt, Homo sapiens
  misc_RNA (1)...(19): siRNA sense strand
ucagugauuuagacucucu

SEQ ID NO: 1092991 - RNA, 19 nt, Homo sapiens
  misc_RNA (1)...(19): siRNA sense strand
cuacagauuuuguuguuca

SEQ ID NO: 1092992 - RNA, 19 nt, Homo sapiens
  misc_RNA (1)...(19): siRNA sense strand
ccaccgacaggagagauuu

SEQ ID NO: 1092993 - RNA, 19 nt, Homo sapiens
  misc_RNA (1)...(19): siRNA sense strand
gcaaaauacccucuaccuu

SEQ ID NO: 1092994 - RNA, 19 nt, Homo sapiens
  misc_RNA (1)...(19): siRNA sense strand
ccacaguuuauaaauggaa

SEQ ID NO: 1092995 - RNA, 19 nt, Homo sapiens
  misc_RNA (1)...(19): siRNA sense strand
ccagucgguuucaguggau

SEQ ID NO: 1092996 - RNA, 19 nt, Homo sapiens
  misc_RNA (1)...(19): siRNA sense strand
uaaaugggacguuuucaga

SEQ ID NO: 1092997 - RNA, 19 nt, Homo sapiens
  misc_RNA (1)...(19): siRNA sense strand
ugaauuuccggagcuauga

SEQ ID NO: 1092998 - RNA, 19 nt, Homo sapiens
  misc_RNA (1)...(19): siRNA sense strand
ggaacaaaauagaaaccau

SEQ ID NO: 1092999 - RNA, 19 nt, Homo sapiens
  misc_RNA (1)...(19): siRNA sense strand
gacaucgagcuguuucaga

SEQ ID NO: 1093000 - RNA, 19 nt, Homo sapiens
  misc_RNA (1)...(19): siRNA sense strand
ucgaugaucaggucuuugu

SEQ ID NO: 1093001 - RNA, 19 nt, Homo sapiens
  misc_RNA (1)...(19): siRNA sense strand
uaaggccauucucaucgau

SEQ ID NO: 1093002 - RNA, 19 nt, Homo sapiens
  misc_RNA (1)...(19): siRNA sense strand
ucuaacucauucacgauca

SEQ ID NO: 1093003 - RNA, 19 nt, Homo sapiens
  misc_RNA (1)...(19): siRNA sense strand
uuguugauaucgauggaaa

SEQ ID NO: 1093004 - RNA, 19 nt, Homo sapiens
  misc_RNA (1)...(19): siRNA sense strand
gaucugaaguuucgaauug

SEQ ID NO: 1093005 - RNA, 19 nt, Homo sapiens
  misc_RNA (1)...(19): siRNA sense strand
gaagaauucugcuuuaagu

SEQ ID NO: 1093006 - RNA, 19 nt, Homo sapiens
  misc_RNA (1)...(19): siRNA sense strand
ggacugaacuauaguaacu

SEQ ID NO: 1093007 - RNA, 19 nt, Homo sapiens
  misc_RNA (1)...(19): siRNA sense strand
gcugggaacuggcaauaaa

SEQ ID NO: 1093008 - RNA, 19 nt, Homo sapiens
  misc_RNA (1)...(19): siRNA sense strand
gaugagggcuugcuguaug

SEQ ID NO: 1093009 - RNA, 19 nt, Homo sapiens
  misc_RNA (1)...(19): siRNA sense strand
gaugaggucuuuguauuug

SEQ ID NO: 1093010 - RNA, 19 nt, Homo sapiens
  misc_RNA (1)...(19): siRNA sense strand
guaccaaucucuugaucaa

SEQ ID NO: 1093011 - RNA, 19 nt, Homo sapiens
  misc_RNA (1)...(19): siRNA sense strand
uauaguaacugucuaggaa

SEQ ID NO: 1093012 - RNA, 19 nt, Homo sapiens
  misc_RNA (1)...(19): siRNA sense strand
cuagaaggcuuauguggaa

SEQ ID NO: 1093013 - RNA, 19 nt, Homo sapiens
  misc_RNA (1)...(19): siRNA sense strand
cagagucacugaagaaaga

SEQ ID NO: 1093014 - RNA, 19 nt, Homo sapiens
  misc_RNA (1)...(19): siRNA sense strand
cuaaaggaauucauugcua

SEQ ID NO: 1093015 - RNA, 19 nt, Homo sapiens
  misc_RNA (1)...(19): siRNA sense strand
uaacaacuguggccaagug

SEQ ID NO: 1093016 - RNA, 19 nt, Homo sapiens
  misc_RNA (1)...(19): siRNA sense strand
cuauaggucuucuggauuu

SEQ ID NO: 1093017 - RNA, 19 nt, Homo sapiens
  misc_RNA (1)...(19): siRNA sense strand
gauagaaaucgaucaguuu

SEQ ID NO: 1093018 - RNA, 19 nt, Homo sapiens
  misc_RNA (1)...(19): siRNA sense strand
caagagaucgcgucuauuc

SEQ ID NO: 1093019 - RNA, 19 nt, Homo sapiens
  misc_RNA (1)...(19): siRNA sense strand
ugaaggaagugauagaaau

SEQ ID NO: 1093020 - RNA, 19 nt, Homo sapiens
  misc_RNA (1)...(19): siRNA sense strand
gcacauacucuagcacuaa

SEQ ID NO: 1093021 - RNA, 19 nt, Homo sapiens
  misc_RNA (1)...(19): siRNA sense strand
gaacuauaguaacugucua

SEQ ID NO: 1093022 - RNA, 19 nt, Homo sapiens
  misc_RNA (1)...(19): siRNA sense strand
ccauaaagcuguuuugaaa

SEQ ID NO: 1093023 - RNA, 19 nt, Homo sapiens
  misc_RNA (1)...(19): siRNA sense strand
gauaugaugcagaggauuu

SEQ ID NO: 1093024 - RNA, 19 nt, Homo sapiens
  misc_RNA (1)...(19): siRNA sense strand
ugacaaugaugaggucuuu

SEQ ID NO: 1093025 - RNA, 19 nt, Homo sapiens
  misc_RNA (1)...(19): siRNA sense strand
ggaaugaagacaugaagga

SEQ ID NO: 1093026 - RNA, 19 nt, Homo sapiens
  misc_RNA (1)...(19): siRNA sense strand
caguaaauguggagccuuu

SEQ ID NO: 1093027 - RNA, 19 nt, Homo sapiens
  misc_RNA (1)...(19): siRNA sense strand
guacguuacugacaaugau

SEQ ID NO: 1093028 - RNA, 19 nt, Homo sapiens
  misc_RNA (1)...(19): siRNA sense strand
gaauuacuguggagaaugc

SEQ ID NO: 1093029 - RNA, 19 nt, Homo sapiens
  misc_RNA (1)...(19): siRNA sense strand
caagugggaucagguucua

SEQ ID NO: 1093030 - RNA, 19 nt, Homo sapiens
  misc_RNA (1)...(19): siRNA sense strand
caccgaagauggagugguu

SEQ ID NO: 1093031 - RNA, 19 nt, Homo sapiens
  misc_RNA (1)...(19): siRNA sense strand
cagaggauuuagaagaauu

SEQ ID NO: 1093032 - RNA, 19 nt, Homo sapiens
  misc_RNA (1)...(19): siRNA sense strand
gccagaagaugcuauaggu

SEQ ID NO: 1093033 - RNA, 19 nt, Homo sapiens
  misc_RNA (1)...(19): siRNA sense strand
ggacaauggcgagguauau

SEQ ID NO: 1093034 - RNA, 19 nt, Homo sapiens
  misc_RNA (1)...(19): siRNA sense strand
guauuuggacugaacuaua

SEQ ID NO: 1093035 - RNA, 19 nt, Homo sapiens
  misc_RNA (1)...(19): siRNA sense strand
gauccauguuccagucgua

SEQ ID NO: 1093036 - RNA, 19 nt, Homo sapiens
  misc_RNA (1)...(19): siRNA sense strand
gcagaggauuuagaagaau

SEQ ID NO: 1093037 - RNA, 19 nt, Homo sapiens
  misc_RNA (1)...(19): siRNA sense strand
gagaaugccuuuucgcuau

SEQ ID NO: 1093038 - RNA, 19 nt, Homo sapiens
  misc_RNA (1)...(19): siRNA sense strand
gaagauggagugguuuaug

SEQ ID NO: 1093039 - RNA, 19 nt, Homo sapiens
  misc_RNA (1)...(19): siRNA sense strand
gaaggaagugauagaaauc

SEQ ID NO: 1093040 - RNA, 19 nt, Homo sapiens
  misc_RNA (1)...(19): siRNA sense strand
ggagaaagaaaggguggua

SEQ ID NO: 1093041 - RNA, 19 nt, Homo sapiens
  misc_RNA (1)...(19): siRNA sense strand
guauuggaaugaagacaug

SEQ ID NO: 1093042 - RNA, 19 nt, Homo sapiens
  misc_RNA (1)...(19): siRNA sense strand
ggcgacaucuuacugugaa

SEQ ID NO: 1093043 - RNA, 19 nt, Homo sapiens
  misc_RNA (1)...(19): siRNA sense strand
agacaugaaggaagugaua

SEQ ID NO: 1093044 - RNA, 19 nt, Homo sapiens
  misc_RNA (1)...(19): siRNA sense strand
cucaagagaucgcgucuau

SEQ ID NO: 1093045 - RNA, 19 nt, Homo sapiens
  misc_RNA (1)...(19): siRNA sense strand
gaaaguggcccaucuucac

SEQ ID NO: 1093046 - RNA, 19 nt, Homo sapiens
  misc_RNA (1)...(19): siRNA sense strand
uacacagacugcagcauuu

SEQ ID NO: 1093047 - RNA, 19 nt, Homo sapiens
  misc_RNA (1)...(19): siRNA sense strand
ggaaaguggcccaucuuca

SEQ ID NO: 1093048 - RNA, 19 nt, Homo sapiens
  misc_RNA (1)...(19): siRNA sense strand
gaaggcuuauguggaaaga

SEQ ID NO: 1093049 - RNA, 19 nt, Homo sapiens
  misc_RNA (1)...(19): siRNA sense strand
gaaagggugguagagauug

SEQ ID NO: 1093050 - RNA, 19 nt, Homo sapiens
  misc_RNA (1)...(19): siRNA sense strand
gaucagguucuacagcaaa

SEQ ID NO: 1093051 - RNA, 19 nt, Homo sapiens
  misc_RNA (1)...(19): siRNA sense strand
uauuuggacugaacuauag

SEQ ID NO: 1093052 - RNA, 19 nt, Homo sapiens
  misc_RNA (1)...(19): siRNA sense strand
gugaagcacuguacguuac

SEQ ID NO: 1093053 - RNA, 19 nt, Homo sapiens
  misc_RNA (1)...(19): siRNA sense strand
gaaugaagacaugaaggaa

SEQ ID NO: 1093054 - RNA, 19 nt, Homo sapiens
  misc_RNA (1)...(19): siRNA sense strand
cagcugggcuugggaaaca

SEQ ID NO: 1093055 - RNA, 19 nt, Homo sapiens
  misc_RNA (1)...(19): siRNA sense strand
aagaaagggugguagagau

SEQ ID NO: 1093056 - RNA, 19 nt, Homo sapiens
  misc_RNA (1)...(19): siRNA sense strand
ugcagaggauuuagaagaa

SEQ ID NO: 1093057 - RNA, 19 nt, Homo sapiens
  misc_RNA (1)...(19): siRNA sense strand
aaacuuugucagcacauua

SEQ ID NO: 1093058 - RNA, 19 nt, Homo sapiens
  misc_RNA (1)...(19): siRNA sense strand
uccaguaccucuacacaga

SEQ ID NO: 1093059 - RNA, 19 nt, Homo sapiens
  misc_RNA (1)...(19): siRNA sense strand
caauggauauagccagcuu

SEQ ID NO: 1093060 - RNA, 19 nt, Homo sapiens
  misc_RNA (1)...(19): siRNA sense strand
agaaacugcugaucugaag

SEQ ID NO: 1093061 - RNA, 19 nt, Homo sapiens
  misc_RNA (1)...(19): siRNA sense strand
gauaaccagaguacacuug

SEQ ID NO: 1093062 - RNA, 19 nt, Homo sapiens
  misc_RNA (1)...(19): siRNA sense strand
augaugaggucuuuguauu

SEQ ID NO: 1093063 - RNA, 19 nt, Homo sapiens
  misc_RNA (1)...(19): siRNA sense strand
guccaggucuguaccaauc

SEQ ID NO: 1093064 - RNA, 19 nt, Homo sapiens
  misc_RNA (1)...(19): siRNA sense strand
ugaugaggucuuuguauuu

SEQ ID NO: 1093065 - RNA, 19 nt, Homo sapiens
  misc_RNA (1)...(19): siRNA sense strand
gcuaaagccaguaaaugug

SEQ ID NO: 1093066 - RNA, 19 nt, Homo sapiens
  misc_RNA (1)...(19): siRNA sense strand
ggauggcccucugcuaaag

SEQ ID NO: 1093067 - RNA, 19 nt, Homo sapiens
  misc_RNA (1)...(19): siRNA sense strand
gaauuugauaguccagaaa

SEQ ID NO: 1093068 - RNA, 19 nt, Homo sapiens
  misc_RNA (1)...(19): siRNA sense strand
agaauuugauaguccagaa

SEQ ID NO: 1093069 - RNA, 19 nt, Homo sapiens
  misc_RNA (1)...(19): siRNA sense strand
ggaaugggacgaccaacca

SEQ ID NO: 1093070 - RNA, 19 nt, Homo sapiens
  misc_RNA (1)...(19): siRNA sense strand
ggagauaaccagaguacac

SEQ ID NO: 1093071 - RNA, 19 nt, Homo sapiens
  misc_RNA (1)...(19): siRNA sense strand
uuacacagacugcagcauu

SEQ ID NO: 1093072 - RNA, 19 nt, Homo sapiens
  misc_RNA (1)...(19): siRNA sense strand
uguggagcaugaagacuuu

SEQ ID NO: 1093073 - RNA, 19 nt, Homo sapiens
  misc_RNA (1)...(19): siRNA sense strand
cagaugagggcuugcugua

SEQ ID NO: 1093074 - RNA, 19 nt, Homo sapiens
  misc_RNA (1)...(19): siRNA sense strand
ucaagcaagugguggaagu

SEQ ID NO: 1093075 - RNA, 19 nt, Homo sapiens
  misc_RNA (1)...(19): siRNA sense strand
gaaagaaagggugguagag

SEQ ID NO: 1093076 - RNA, 19 nt, Homo sapiens
  misc_RNA (1)...(19): siRNA sense strand
gaagacaugaaggaaguga

SEQ ID NO: 1093077 - RNA, 19 nt, Homo sapiens
  misc_RNA (1)...(19): siRNA sense strand
ucuaggaacuggagauaac

SEQ ID NO: 1093078 - RNA, 19 nt, Homo sapiens
  misc_RNA (1)...(19): siRNA sense strand
gcccucugcuaaaggaauu

SEQ ID NO: 1093079 - RNA, 19 nt, Homo sapiens
  misc_RNA (1)...(19): siRNA sense strand
gcuauaggucuucuggauu

SEQ ID NO: 1093080 - RNA, 19 nt, Homo sapiens
  misc_RNA (1)...(19): siRNA sense strand
ggaucagguucuacagcaa

SEQ ID NO: 1093081 - RNA, 19 nt, Homo sapiens
  misc_RNA (1)...(19): siRNA sense strand
ccgaagauggagugguuua

SEQ ID NO: 1093082 - RNA, 19 nt, Homo sapiens
  misc_RNA (1)...(19): siRNA sense strand
cagauaugaugcagaggau

SEQ ID NO: 1093083 - RNA, 19 nt, Homo sapiens
  misc_RNA (1)...(19): siRNA sense strand
uggauuuggcgacaucuua

SEQ ID NO: 1093084 - RNA, 19 nt, Homo sapiens
  misc_RNA (1)...(19): siRNA sense strand
gcacuguacguuacugaca

SEQ ID NO: 1093085 - RNA, 19 nt, Homo sapiens
  misc_RNA (1)...(19): siRNA sense strand
gacagaaguuacacagacu

SEQ ID NO: 1093086 - RNA, 19 nt, Homo sapiens
  misc_RNA (1)...(19): siRNA sense strand
gaggaauuacuguggagaa

SEQ ID NO: 1093087 - RNA, 19 nt, Homo sapiens
  misc_RNA (1)...(19): siRNA sense strand
ggaauuacuguggagaaug

SEQ ID NO: 1093088 - RNA, 19 nt, Homo sapiens
  misc_RNA (1)...(19): siRNA sense strand
aaagaaagggugguagaga

SEQ ID NO: 1093089 - RNA, 19 nt, Homo sapiens
  misc_RNA (1)...(19): siRNA sense strand
uuuaacaguugcagaguca

SEQ ID NO: 1093090 - RNA, 19 nt, Homo sapiens
  misc_RNA (1)...(19): siRNA sense strand
agaaagggugguagagauu

SEQ ID NO: 1093091 - RNA, 19 nt, Homo sapiens
  misc_RNA (1)...(19): siRNA sense strand
caagcaagugguggaagua

SEQ ID NO: 1093092 - RNA, 19 nt, Homo sapiens
  misc_RNA (1)...(19): siRNA sense strand
cccaguguaucgugccuuu

SEQ ID NO: 1093093 - RNA, 19 nt, Homo sapiens
  misc_RNA (1)...(19): siRNA sense strand
caaugaugaggucuuugua

SEQ ID NO: 1093094 - RNA, 19 nt, Homo sapiens
  misc_RNA (1)...(19): siRNA sense strand
ugaggucuuuguauuugga

SEQ ID NO: 1093095 - RNA, 19 nt, Homo sapiens
  misc_RNA (1)...(19): siRNA sense strand
uaagaggguaguuggcauu

SEQ ID NO: 1093096 - RNA, 19 nt, Homo sapiens
  misc_RNA (1)...(19): siRNA sense strand
ucuggacaauggcgaggua

SEQ ID NO: 1093097 - RNA, 19 nt, Homo sapiens
  misc_RNA (1)...(19): siRNA sense strand
agaaagaaagggugguaga

SEQ ID NO: 1093098 - RNA, 19 nt, Homo sapiens
  misc_RNA (1)...(19): siRNA sense strand
gcuaagcccagcacacauc

SEQ ID NO: 1093099 - RNA, 19 nt, Homo sapiens
  misc_RNA (1)...(19): siRNA sense strand
gaagcacuguacguuacug

SEQ ID NO: 1093100 - RNA, 19 nt, Homo sapiens
  misc_RNA (1)...(19): siRNA sense strand
ggaagugauagaaaucgau

SEQ ID NO: 1093101 - RNA, 19 nt, Homo sapiens
  misc_RNA (1)...(19): siRNA sense strand
gcagagucacugaagaaag

SEQ ID NO: 1093102 - RNA, 19 nt, Homo sapiens
  misc_RNA (1)...(19): siRNA sense strand
ucaaccaacuccucgaaaa

SEQ ID NO: 1093103 - RNA, 19 nt, Homo sapiens
  misc_RNA (1)...(19): siRNA sense strand
ggucuguaccaaucucuug

SEQ ID NO: 1093104 - RNA, 19 nt, Homo sapiens
  misc_RNA (1)...(19): siRNA sense strand
caaaugaacuaaccaauuc

SEQ ID NO: 1093105 - RNA, 19 nt, Homo sapiens
  misc_RNA (1)...(19): siRNA sense strand
gaaauuugcuacuucaaga

SEQ ID NO: 1093106 - RNA, 19 nt, Homo sapiens
  misc_RNA (1)...(19): siRNA sense strand
gaagagaaacugaugcuuu

SEQ ID NO: 1093107 - RNA, 19 nt, Homo sapiens
  misc_RNA (1)...(19): siRNA sense strand
gaggacaaguugcuuaauu

SEQ ID NO: 1093108 - RNA, 19 nt, Homo sapiens
  misc_RNA (1)...(19): siRNA sense strand
aguaauagauccuccaaua

SEQ ID NO: 1093109 - RNA, 19 nt, Homo sapiens
  misc_RNA (1)...(19): siRNA sense strand
agaagaagaugaacaaaga

SEQ ID NO: 1093110 - RNA, 19 nt, Homo sapiens
  misc_RNA (1)...(19): siRNA sense strand
gaaauaagacucuaucaag

SEQ ID NO: 1093111 - RNA, 19 nt, Homo sapiens
  misc_RNA (1)...(19): siRNA sense strand
ggauaugucuugcacuuau

SEQ ID NO: 1093112 - RNA, 19 nt, Homo sapiens
  misc_RNA (1)...(19): siRNA sense strand
ggacuaaagugcugaaacu

SEQ ID NO: 1093113 - RNA, 19 nt, Homo sapiens
  misc_RNA (1)...(19): siRNA sense strand
guggaaagcuggcaaagga

SEQ ID NO: 1093114 - RNA, 19 nt, Homo sapiens
  misc_RNA (1)...(19): siRNA sense strand
ggacuaccauggcagaaga

SEQ ID NO: 1093115 - RNA, 19 nt, Homo sapiens
  misc_RNA (1)...(19): siRNA sense strand
gaaccaaucacaaguccua

SEQ ID NO: 1093116 - RNA, 19 nt, Homo sapiens
  misc_RNA (1)...(19): siRNA sense strand
gagaguaaacuucauagaa

SEQ ID NO: 1093117 - RNA, 19 nt, Homo sapiens
  misc_RNA (1)...(19): siRNA sense strand
ggacaaguugcuuaauuaa

SEQ ID NO: 1093118 - RNA, 19 nt, Homo sapiens
  misc_RNA (1)...(19): siRNA sense strand
aaacaaggcaucaguagaa

SEQ ID NO: 1093119 - RNA, 19 nt, Homo sapiens
  misc_RNA (1)...(19): siRNA sense strand
aggacaaguugcuuaauua

SEQ ID NO: 1093120 - RNA, 19 nt, Homo sapiens
  misc_RNA (1)...(19): siRNA sense strand
gaagacauacugcaggaaa

SEQ ID NO: 1093121 - RNA, 19 nt, Homo sapiens
  misc_RNA (1)...(19): siRNA sense strand
aaugagauguuauccagua

SEQ ID NO: 1093122 - RNA, 19 nt, Homo sapiens
  misc_RNA (1)...(19): siRNA sense strand
gaaaagcaauuguugauag

SEQ ID NO: 1093123 - RNA, 19 nt, Homo sapiens
  misc_RNA (1)...(19): siRNA sense strand
acacauaaaccuaaggaua

SEQ ID NO: 1093124 - RNA, 19 nt, Homo sapiens
  misc_RNA (1)...(19): siRNA sense strand
aaagaaaccucggaagaga

SEQ ID NO: 1093125 - RNA, 19 nt, Homo sapiens
  misc_RNA (1)...(19): siRNA sense strand
gaacuaaccaauucaacug

SEQ ID NO: 1093126 - RNA, 19 nt, Homo sapiens
  misc_RNA (1)...(19): siRNA sense strand
agaaacaaaugacuacaga

SEQ ID NO: 1093127 - RNA, 19 nt, Homo sapiens
  misc_RNA (1)...(19): siRNA sense strand
guaaucaaacuccgcauuu

SEQ ID NO: 1093128 - RNA, 19 nt, Homo sapiens
  misc_RNA (1)...(19): siRNA sense strand
gcaggaaaaugagauguua

SEQ ID NO: 1093129 - RNA, 19 nt, Homo sapiens
  misc_RNA (1)...(19): siRNA sense strand
gacacacgauuguagauau

SEQ ID NO: 1093130 - RNA, 19 nt, Homo sapiens
  misc_RNA (1)...(19): siRNA sense strand
gagaaaagcucgucugagu

SEQ ID NO: 1093131 - RNA, 19 nt, Homo sapiens
  misc_RNA (1)...(19): siRNA sense strand
ucagagaagucaguauuga

SEQ ID NO: 1093132 - RNA, 19 nt, Homo sapiens
  misc_RNA (1)...(19): siRNA sense strand
uaauagauccuccaauaug

SEQ ID NO: 1093133 - RNA, 19 nt, Homo sapiens
  misc_RNA (1)...(19): siRNA sense strand
gaaauggagaguaaacuuc

SEQ ID NO: 1093134 - RNA, 19 nt, Homo sapiens
  misc_RNA (1)...(19): siRNA sense strand
ggaaagggccucaugaaaa

SEQ ID NO: 1093135 - RNA, 19 nt, Homo sapiens
  misc_RNA (1)...(19): siRNA sense strand
gaaacaaggcaucaguaga

SEQ ID NO: 1093136 - RNA, 19 nt, Homo sapiens
  misc_RNA (1)...(19): siRNA sense strand
cauagaaauuugcuacuuc

SEQ ID NO: 1093137 - RNA, 19 nt, Homo sapiens
  misc_RNA (1)...(19): siRNA sense strand
ggaaauggagaguaaacuu

SEQ ID NO: 1093138 - RNA, 19 nt, Homo sapiens
  misc_RNA (1)...(19): siRNA sense strand
ccaaagaaaccucggaaga

SEQ ID NO: 1093139 - RNA, 19 nt, Homo sapiens
  misc_RNA (1)...(19): siRNA sense strand
gaucagcucagcccaaaga

SEQ ID NO: 1093140 - RNA, 19 nt, Homo sapiens
  misc_RNA (1)...(19): siRNA sense strand
aauagauccuccaauauga

SEQ ID NO: 1093141 - RNA, 19 nt, Homo sapiens
  misc_RNA (1)...(19): siRNA sense strand
gaagucaguauugaagaua

SEQ ID NO: 1093142 - RNA, 19 nt, Homo sapiens
  misc_RNA (1)...(19): siRNA sense strand
ugccugaacuugauuaaug

SEQ ID NO: 1093143 - RNA, 19 nt, Homo sapiens
  misc_RNA (1)...(19): siRNA sense strand
uaacggaguugggaagaga

SEQ ID NO: 1093144 - RNA, 19 nt, Homo sapiens
  misc_RNA (1)...(19): siRNA sense strand
gauaugucuugcacuuauu

SEQ ID NO: 1093145 - RNA, 19 nt, Homo sapiens
  misc_RNA (1)...(19): siRNA sense strand
gcaugagccugcaggacaa

SEQ ID NO: 1093146 - RNA, 19 nt, Homo sapiens
  misc_RNA (1)...(19): siRNA sense strand
gaugagaguucugcagcaa

SEQ ID NO: 1093147 - RNA, 19 nt, Homo sapiens
  misc_RNA (1)...(19): siRNA sense strand
gaagauacagguguugaug

SEQ ID NO: 1093148 - RNA, 19 nt, Homo sapiens
  misc_RNA (1)...(19): siRNA sense strand
caaggaagaagucagagaa

SEQ ID NO: 1093149 - RNA, 19 nt, Homo sapiens
  misc_RNA (1)...(19): siRNA sense strand
guaauagauccuccaauau

SEQ ID NO: 1093150 - RNA, 19 nt, Homo sapiens
  misc_RNA (1)...(19): siRNA sense strand
gaagaagucagagaaguca

SEQ ID NO: 1093151 - RNA, 19 nt, Homo sapiens
  misc_RNA (1)...(19): siRNA sense strand
aaucacaaguccuauugaa

SEQ ID NO: 1093152 - RNA, 19 nt, Homo sapiens
  misc_RNA (1)...(19): siRNA sense strand
gacugccacuacuaaauuu

SEQ ID NO: 1093153 - RNA, 19 nt, Homo sapiens
  misc_RNA (1)...(19): siRNA sense strand
uggaacagcuaacggaguu

SEQ ID NO: 1093154 - RNA, 19 nt, Homo sapiens
  misc_RNA (1)...(19): siRNA sense strand
gaaaagcucgucugaguga

SEQ ID NO: 1093155 - RNA, 19 nt, Homo sapiens
  misc_RNA (1)...(19): siRNA sense strand
ccaggcauuucaccuuaaa

SEQ ID NO: 1093156 - RNA, 19 nt, Homo sapiens
  misc_RNA (1)...(19): siRNA sense strand
gagaaaauauggagaaguc

SEQ ID NO: 1093157 - RNA, 19 nt, Homo sapiens
  misc_RNA (1)...(19): siRNA sense strand
ugacugccacuacuaaauu

SEQ ID NO: 1093158 - RNA, 19 nt, Homo sapiens
  misc_RNA (1)...(19): siRNA sense strand
gccagauuguucagucuaa

SEQ ID NO: 1093159 - RNA, 19 nt, Homo sapiens
  misc_RNA (1)...(19): siRNA sense strand
caacuugugcgaccuccua

SEQ ID NO: 1093160 - RNA, 19 nt, Homo sapiens
  misc_RNA (1)...(19): siRNA sense strand
acacacgauuguagauauu

SEQ ID NO: 1093161 - RNA, 19 nt, Homo sapiens
  misc_RNA (1)...(19): siRNA sense strand
gccugaacuugauuaauga

SEQ ID NO: 1093162 - RNA, 19 nt, Homo sapiens
  misc_RNA (1)...(19): siRNA sense strand
uagaucagcucagcccaaa

SEQ ID NO: 1093163 - RNA, 19 nt, Homo sapiens
  misc_RNA (1)...(19): siRNA sense strand
aaacagcuuuaucuagugu

SEQ ID NO: 1093164 - RNA, 19 nt, Homo sapiens
  misc_RNA (1)...(19): siRNA sense strand
gcaaaggaagagugcuaaa

SEQ ID NO: 1093165 - RNA, 19 nt, Homo sapiens
  misc_RNA (1)...(19): siRNA sense strand
caaaagauccaacccauga

SEQ ID NO: 1093166 - RNA, 19 nt, Homo sapiens
  misc_RNA (1)...(19): siRNA sense strand
ggaagaagucagagaaguc

SEQ ID NO: 1093167 - RNA, 19 nt, Homo sapiens
  misc_RNA (1)...(19): siRNA sense strand
gagaugcgacacacgauug

SEQ ID NO: 1093168 - RNA, 19 nt, Homo sapiens
  misc_RNA (1)...(19): siRNA sense strand
gauauacuggucacacuga

SEQ ID NO: 1093169 - RNA, 19 nt, Homo sapiens
  misc_RNA (1)...(19): siRNA sense strand
gacauuaagccaggcauuu

SEQ ID NO: 1093170 - RNA, 19 nt, Homo sapiens
  misc_RNA (1)...(19): siRNA sense strand
gcaaggaagaagucagaga

SEQ ID NO: 1093171 - RNA, 19 nt, Homo sapiens
  misc_RNA (1)...(19): siRNA sense strand
caguagagaucagagaguu

SEQ ID NO: 1093172 - RNA, 19 nt, Homo sapiens
  misc_RNA (1)...(19): siRNA sense strand
uuagaagucaucacaguaa

SEQ ID NO: 1093173 - RNA, 19 nt, Homo sapiens
  misc_RNA (1)...(19): siRNA sense strand
aaccugugcuuggaucuua

SEQ ID NO: 1093174 - RNA, 19 nt, Homo sapiens
  misc_RNA (1)...(19): siRNA sense strand
gaaacaaaugacuacagaa

SEQ ID NO: 1093175 - RNA, 19 nt, Homo sapiens
  misc_RNA (1)...(19): siRNA sense strand
cagaaacgaggacaaguug

SEQ ID NO: 1093176 - RNA, 19 nt, Homo sapiens
  misc_RNA (1)...(19): siRNA sense strand
gaagucagagaagucagua

SEQ ID NO: 1093177 - RNA, 19 nt, Homo sapiens
  misc_RNA (1)...(19): siRNA sense strand
gaaugccugaacuugauua

SEQ ID NO: 1093178 - RNA, 19 nt, Homo sapiens
  misc_RNA (1)...(19): siRNA sense strand
guaguaauugacacacaua

SEQ ID NO: 1093179 - RNA, 19 nt, Homo sapiens
  misc_RNA (1)...(19): siRNA sense strand
cuaugaggcugauacaaca

SEQ ID NO: 1093180 - RNA, 19 nt, Homo sapiens
  misc_RNA (1)...(19): siRNA sense strand
agagaguugugacaucuga

SEQ ID NO: 1093181 - RNA, 19 nt, Homo sapiens
  misc_RNA (1)...(19): siRNA sense strand
gagauguuauccaguagag

SEQ ID NO: 1093182 - RNA, 19 nt, Homo sapiens
  misc_RNA (1)...(19): siRNA sense strand
cgacacacgauuguagaua

SEQ ID NO: 1093183 - RNA, 19 nt, Homo sapiens
  misc_RNA (1)...(19): siRNA sense strand
caaagaaaccucggaagag

SEQ ID NO: 1093184 - RNA, 19 nt, Homo sapiens
  misc_RNA (1)...(19): siRNA sense strand
gaagucaucacaguaauac

SEQ ID NO: 1093185 - RNA, 19 nt, Homo sapiens
  misc_RNA (1)...(19): siRNA sense strand
ucucagaacacacaacuug

SEQ ID NO: 1093186 - RNA, 19 nt, Homo sapiens
  misc_RNA (1)...(19): siRNA sense strand
caauaugacugccacuacu

SEQ ID NO: 1093187 - RNA, 19 nt, Homo sapiens
  misc_RNA (1)...(19): siRNA sense strand
guaauugacacacauaaac

SEQ ID NO: 1093188 - RNA, 19 nt, Homo sapiens
  misc_RNA (1)...(19): siRNA sense strand
acaaugaagagucaagaaa

SEQ ID NO: 1093189 - RNA, 19 nt, Homo sapiens
  misc_RNA (1)...(19): siRNA sense strand
gauguuauccaguagagau

SEQ ID NO: 1093190 - RNA, 19 nt, Homo sapiens
  misc_RNA (1)...(19): siRNA sense strand
gaaaaccucuacaagucaa

SEQ ID NO: 1093191 - RNA, 19 nt, Homo sapiens
  misc_RNA (1)...(19): siRNA sense strand
gccaggcauuucaccuuaa

SEQ ID NO: 1093192 - RNA, 19 nt, Homo sapiens
  misc_RNA (1)...(19): siRNA sense strand
agccaggcauuucaccuua

SEQ ID NO: 1093193 - RNA, 19 nt, Homo sapiens
  misc_RNA (1)...(19): siRNA sense strand
cacauaaaccuaaggauag

SEQ ID NO: 1093194 - RNA, 19 nt, Homo sapiens
  misc_RNA (1)...(19): siRNA sense strand
ugagaguucugcagcaaca

SEQ ID NO: 1093195 - RNA, 19 nt, Homo sapiens
  misc_RNA (1)...(19): siRNA sense strand
cuaaauugccagauauguu

SEQ ID NO: 1093196 - RNA, 19 nt, Homo sapiens
  misc_RNA (1)...(19): siRNA sense strand
cuucuaaauugccagauau

SEQ ID NO: 1093197 - RNA, 19 nt, Homo sapiens
  misc_RNA (1)...(19): siRNA sense strand
cggaaagggccucaugaaa

SEQ ID NO: 1093198 - RNA, 19 nt, Homo sapiens
  misc_RNA (1)...(19): siRNA sense strand
cuugugcgaccuccuauua

SEQ ID NO: 1093199 - RNA, 19 nt, Homo sapiens
  misc_RNA (1)...(19): siRNA sense strand
aagagaaacugaugcuuuu

SEQ ID NO: 1093200 - RNA, 19 nt, Homo sapiens
  misc_RNA (1)...(19): siRNA sense strand
aaagagcaaagaagacaaa

SEQ ID NO: 1093201 - RNA, 19 nt, Homo sapiens
  misc_RNA (1)...(19): siRNA sense strand
agaagucaguauugaagau

SEQ ID NO: 1093202 - RNA, 19 nt, Homo sapiens
  misc_RNA (1)...(19): siRNA sense strand
ugaggcugauacaacauaa

SEQ ID NO: 1093203 - RNA, 19 nt, Homo sapiens
  misc_RNA (1)...(19): siRNA sense strand
ccagauauguuaaaagauc

SEQ ID NO: 1093204 - RNA, 19 nt, Homo sapiens
  misc_RNA (1)...(19): siRNA sense strand
gagcacagaugguguauuu

SEQ ID NO: 1093205 - RNA, 19 nt, Homo sapiens
  misc_RNA (1)...(19): siRNA sense strand
caaauaugcugaaagguua

SEQ ID NO: 1093206 - RNA, 19 nt, Homo sapiens
  misc_RNA (1)...(19): siRNA sense strand
gaagaauucucucaggaaa

SEQ ID NO: 1093207 - RNA, 19 nt, Homo sapiens
  misc_RNA (1)...(19): siRNA sense strand
ggaauuaucaagugaagua

SEQ ID NO: 1093208 - RNA, 19 nt, Homo sapiens
  misc_RNA (1)...(19): siRNA sense strand
cagaagagguggccuuaaa

SEQ ID NO: 1093209 - RNA, 19 nt, Homo sapiens
  misc_RNA (1)...(19): siRNA sense strand
ucagggagcucuacuaaug

SEQ ID NO: 1093210 - RNA, 19 nt, Homo sapiens
  misc_RNA (1)...(19): siRNA sense strand
gcuaaugacuuuguaaaug

SEQ ID NO: 1093211 - RNA, 19 nt, Homo sapiens
  misc_RNA (1)...(19): siRNA sense strand
caauaggacugcaguuuau

SEQ ID NO: 1093212 - RNA, 19 nt, Homo sapiens
  misc_RNA (1)...(19): siRNA sense strand
cgagaaggauuuaaugaug

SEQ ID NO: 1093213 - RNA, 19 nt, Homo sapiens
  misc_RNA (1)...(19): siRNA sense strand
gaaguggcaucgaauaugg

SEQ ID NO: 1093214 - RNA, 19 nt, Homo sapiens
  misc_RNA (1)...(19): siRNA sense strand
caucgaauauggcaagauu

SEQ ID NO: 1093215 - RNA, 19 nt, Homo sapiens
  misc_RNA (1)...(19): siRNA sense strand
gaaacaaggccaaauuaca

SEQ ID NO: 1093216 - RNA, 19 nt, Homo sapiens
  misc_RNA (1)...(19): siRNA sense strand
ccaauaggacugcaguuua

SEQ ID NO: 1093217 - RNA, 19 nt, Homo sapiens
  misc_RNA (1)...(19): siRNA sense strand
gagaaggauuuaaugaugu

SEQ ID NO: 1093218 - RNA, 19 nt, Homo sapiens
  misc_RNA (1)...(19): siRNA sense strand
gaucagggagcucuacuaa

SEQ ID NO: 1093219 - RNA, 19 nt, Homo sapiens
  misc_RNA (1)...(19): siRNA sense strand
caucagaaguggcaucgaa

SEQ ID NO: 1093220 - RNA, 19 nt, Homo sapiens
  misc_RNA (1)...(19): siRNA sense strand
gcugaaagguuauauacca

SEQ ID NO: 1093221 - RNA, 19 nt, Homo sapiens
  misc_RNA (1)...(19): siRNA sense strand
ucacaccaguuauucaauu

SEQ ID NO: 1093222 - RNA, 19 nt, Homo sapiens
  misc_RNA (1)...(19): siRNA sense strand
gacaacaugugcaucaaau

SEQ ID NO: 1093223 - RNA, 19 nt, Homo sapiens
  misc_RNA (1)...(19): siRNA sense strand
gaugugagcaaacuaugua

SEQ ID NO: 1093224 - RNA, 19 nt, Homo sapiens
  misc_RNA (1)...(19): siRNA sense strand
caacaugugcaucaaauau

SEQ ID NO: 1093225 - RNA, 19 nt, Homo sapiens
  misc_RNA (1)...(19): siRNA sense strand
gaauuccuauugcaguaaa

SEQ ID NO: 1093226 - RNA, 19 nt, Homo sapiens
  misc_RNA (1)...(19): siRNA sense strand
guagaugucuugcuaacuc

SEQ ID NO: 1093227 - RNA, 19 nt, Homo sapiens
  misc_RNA (1)...(19): siRNA sense strand
ggaugugccaggaaucuua

SEQ ID NO: 1093228 - RNA, 19 nt, Homo sapiens
  misc_RNA (1)...(19): siRNA sense strand
caucaaauaugcugaaagg

SEQ ID NO: 1093229 - RNA, 19 nt, Homo sapiens
  misc_RNA (1)...(19): siRNA sense strand
aaaugucucucucuuauca

SEQ ID NO: 1093230 - RNA, 19 nt, Homo sapiens
  misc_RNA (1)...(19): siRNA sense strand
ucaaauaugcugaaagguu

SEQ ID NO: 1093231 - RNA, 19 nt, Homo sapiens
  misc_RNA (1)...(19): siRNA sense strand
gaagugcccaggaugauau

SEQ ID NO: 1093232 - RNA, 19 nt, Homo sapiens
  misc_RNA (1)...(19): siRNA sense strand
uggaguagaugucuugcua

SEQ ID NO: 1093233 - RNA, 19 nt, Homo sapiens
  misc_RNA (1)...(19): siRNA sense strand
ggaagaauucucucaggaa

SEQ ID NO: 1093234 - RNA, 19 nt, Homo sapiens
  misc_RNA (1)...(19): siRNA sense strand
gcuacaauauggucacaga

SEQ ID NO: 1093235 - RNA, 19 nt, Homo sapiens
  misc_RNA (1)...(19): siRNA sense strand
gaaguacagucucuuuggu

SEQ ID NO: 1093236 - RNA, 19 nt, Homo sapiens
  misc_RNA (1)...(19): siRNA sense strand
guauaggaauuccaaagga

SEQ ID NO: 1093237 - RNA, 19 nt, Homo sapiens
  misc_RNA (1)...(19): siRNA sense strand
aaaacaagcugaagaauca

SEQ ID NO: 1093238 - RNA, 19 nt, Homo sapiens
  misc_RNA (1)...(19): siRNA sense strand
guuauucaauugucugcua

SEQ ID NO: 1093239 - RNA, 19 nt, Homo sapiens
  misc_RNA (1)...(19): siRNA sense strand
caaaguaauugaaguaucc

SEQ ID NO: 1093240 - RNA, 19 nt, Homo sapiens
  misc_RNA (1)...(19): siRNA sense strand
guaccggaauuaucaagug

SEQ ID NO: 1093241 - RNA, 19 nt, Homo sapiens
  misc_RNA (1)...(19): siRNA sense strand
gcacagaugguguauuugg

SEQ ID NO: 1093242 - RNA, 19 nt, Homo sapiens
  misc_RNA (1)...(19): siRNA sense strand
cuacgcggcuuuaggauca

SEQ ID NO: 1093243 - RNA, 19 nt, Homo sapiens
  misc_RNA (1)...(19): siRNA sense strand
cacaguacaugaaccuauu

SEQ ID NO: 1093244 - RNA, 19 nt, Homo sapiens
  misc_RNA (1)...(19): siRNA sense strand
ccaaaggaauaucuuguac

SEQ ID NO: 1093245 - RNA, 19 nt, Homo sapiens
  misc_RNA (1)...(19): siRNA sense strand
caucaaagaggacaacaga

SEQ ID NO: 1093246 - RNA, 19 nt, Homo sapiens
  misc_RNA (1)...(19): siRNA sense strand
gcagaugugagcaaacuau

SEQ ID NO: 1093247 - RNA, 19 nt, Homo sapiens
  misc_RNA (1)...(19): siRNA sense strand
gcagugaguaucccuguug

SEQ ID NO: 1093248 - RNA, 19 nt, Homo sapiens
  misc_RNA (1)...(19): siRNA sense strand
gauuugaugggcuacaaua

SEQ ID NO: 1093249 - RNA, 19 nt, Homo sapiens
  misc_RNA (1)...(19): siRNA sense strand
gaauauggcaagauuugau

SEQ ID NO: 1093250 - RNA, 19 nt, Homo sapiens
  misc_RNA (1)...(19): siRNA sense strand
cagggacucuaccacagua

SEQ ID NO: 1093251 - RNA, 19 nt, Homo sapiens
  misc_RNA (1)...(19): siRNA sense strand
ccaaaguaauugaaguauc

SEQ ID NO: 1093252 - RNA, 19 nt, Homo sapiens
  misc_RNA (1)...(19): siRNA sense strand
caagugaaguacagucucu

SEQ ID NO: 1093253 - RNA, 19 nt, Homo sapiens
  misc_RNA (1)...(19): siRNA sense strand
ggccaaaguaauugaagua

SEQ ID NO: 1093254 - RNA, 19 nt, Homo sapiens
  misc_RNA (1)...(19): siRNA sense strand
ggauuuagauggaauuccu

SEQ ID NO: 1093255 - RNA, 19 nt, Homo sapiens
  misc_RNA (1)...(19): siRNA sense strand
aaaguuagccucugucucu

SEQ ID NO: 1093256 - RNA, 19 nt, Homo sapiens
  misc_RNA (1)...(19): siRNA sense strand
cuaaugacuuuguaaaugc

SEQ ID NO: 1093257 - RNA, 19 nt, Homo sapiens
  misc_RNA (1)...(19): siRNA sense strand
cuacauuacugugucagaa

SEQ ID NO: 1093258 - RNA, 19 nt, Homo sapiens
  misc_RNA (1)...(19): siRNA sense strand
uggaauuccuauugcagua

SEQ ID NO: 1093259 - RNA, 19 nt, Homo sapiens
  misc_RNA (1)...(19): siRNA sense strand
aaagacaauuucagcacuu

SEQ ID NO: 1093260 - RNA, 19 nt, Homo sapiens
  misc_RNA (1)...(19): siRNA sense strand
cugaaacaaggccaaauua

SEQ ID NO: 1093261 - RNA, 19 nt, Homo sapiens
  misc_RNA (1)...(19): siRNA sense strand
gacgagaaggauuuaauga

SEQ ID NO: 1093262 - RNA, 19 nt, Homo sapiens
  misc_RNA (1)...(19): siRNA sense strand
acugugggcuuguugguuu

SEQ ID NO: 1093263 - RNA, 19 nt, Homo sapiens
  misc_RNA (1)...(19): siRNA sense strand
gagcucuacuaaugggaaa

SEQ ID NO: 1093264 - RNA, 19 nt, Homo sapiens
  misc_RNA (1)...(19): siRNA sense strand
gagacaacaugugcaucaa

SEQ ID NO: 1093265 - RNA, 19 nt, Homo sapiens
  misc_RNA (1)...(19): siRNA sense strand
uacaguagccaaaugguuu

SEQ ID NO: 1093266 - RNA, 19 nt, Homo sapiens
  misc_RNA (1)...(19): siRNA sense strand
acaauauggucacagaugu

SEQ ID NO: 1093267 - RNA, 19 nt, Homo sapiens
  misc_RNA (1)...(19): siRNA sense strand
uaucggcguucacaugcua

SEQ ID NO: 1093268 - RNA, 19 nt, Homo sapiens
  misc_RNA (1)...(19): siRNA sense strand
uuucagcacuucuggcauu

SEQ ID NO: 1093269 - RNA, 19 nt, Homo sapiens
  misc_RNA (1)...(19): siRNA sense strand
ugagugaggcaguaccaua

SEQ ID NO: 1093270 - RNA, 19 nt, Homo sapiens
  misc_RNA (1)...(19): siRNA sense strand
ucagaaguggcaucgaaua

SEQ ID NO: 1093271 - RNA, 19 nt, Homo sapiens
  misc_RNA (1)...(19): siRNA sense strand
cauucaugcuucccaguuu

SEQ ID NO: 1093272 - RNA, 19 nt, Homo sapiens
  misc_RNA (1)...(19): siRNA sense strand
acaggaggaucgaccagaa

SEQ ID NO: 1093273 - RNA, 19 nt, Homo sapiens
  misc_RNA (1)...(19): siRNA sense strand
gaaggccaaguuucuaaau

SEQ ID NO: 1093274 - RNA, 19 nt, Homo sapiens
  misc_RNA (1)...(19): siRNA sense strand
uuagauggaauuccuauug

SEQ ID NO: 1093275 - RNA, 19 nt, Homo sapiens
  misc_RNA (1)...(19): siRNA sense strand
gccaauaggacugcaguuu

SEQ ID NO: 1093276 - RNA, 19 nt, Homo sapiens
  misc_RNA (1)...(19): siRNA sense strand
ggaauuccuauugcaguaa

SEQ ID NO: 1093277 - RNA, 19 nt, Homo sapiens
  misc_RNA (1)...(19): siRNA sense strand
guuagccucugucucucua

SEQ ID NO: 1093278 - RNA, 19 nt, Homo sapiens
  misc_RNA (1)...(19): siRNA sense strand
cagcaguccuugaaaauga

SEQ ID NO: 1093279 - RNA, 19 nt, Homo sapiens
  misc_RNA (1)...(19): siRNA sense strand
ccagcagcuucuuacagua

SEQ ID NO: 1093280 - RNA, 19 nt, Homo sapiens
  misc_RNA (1)...(19): siRNA sense strand
gaguagaugucuugcuaac

SEQ ID NO: 1093281 - RNA, 19 nt, Homo sapiens
  misc_RNA (1)...(19): siRNA sense strand
gcacugaaacaaggccaaa

SEQ ID NO: 1093282 - RNA, 19 nt, Homo sapiens
  misc_RNA (1)...(19): siRNA sense strand
uaucaagaaggccaaguuu

SEQ ID NO: 1093283 - RNA, 19 nt, Homo sapiens
  misc_RNA (1)...(19): siRNA sense strand
uacaguaguucagaaguug

SEQ ID NO: 1093284 - RNA, 19 nt, Homo sapiens
  misc_RNA (1)...(19): siRNA sense strand
cgaagugcccaggaugaua

SEQ ID NO: 1093285 - RNA, 19 nt, Homo sapiens
  misc_RNA (1)...(19): siRNA sense strand
ggaguagaugucuugcuaa

SEQ ID NO: 1093286 - RNA, 19 nt, Homo sapiens
  misc_RNA (1)...(19): siRNA sense strand
gacaacagaacccgaagug

SEQ ID NO: 1093287 - RNA, 19 nt, Homo sapiens
  misc_RNA (1)...(19): siRNA sense strand
gaugugccaggaaucuuaa

SEQ ID NO: 1093288 - RNA, 19 nt, Homo sapiens
  misc_RNA (1)...(19): siRNA sense strand
agaaggauuuaaugaugug

SEQ ID NO: 1093289 - RNA, 19 nt, Homo sapiens
  misc_RNA (1)...(19): siRNA sense strand
gggccaaaguaauugaagu

SEQ ID NO: 1093290 - RNA, 19 nt, Homo sapiens
  misc_RNA (1)...(19): siRNA sense strand
gagaaaagaggaagcagaa

SEQ ID NO: 1093291 - RNA, 19 nt, Homo sapiens
  misc_RNA (1)...(19): siRNA sense strand
cacaccaguuauucaauug

SEQ ID NO: 1093292 - RNA, 19 nt, Homo sapiens
  misc_RNA (1)...(19): siRNA sense strand
ccacaguacaugaaccuau

SEQ ID NO: 1093293 - RNA, 19 nt, Homo sapiens
  misc_RNA (1)...(19): siRNA sense strand
cgauggaugugccaggaau

SEQ ID NO: 1093294 - RNA, 19 nt, Homo sapiens
  misc_RNA (1)...(19): siRNA sense strand
ugagacaacaugugcauca

SEQ ID NO: 1093295 - RNA, 19 nt, Homo sapiens
  misc_RNA (1)...(19): siRNA sense strand
ucaaagaggacaacagaac

SEQ ID NO: 1093296 - RNA, 19 nt, Homo sapiens
  misc_RNA (1)...(19): siRNA sense strand
ccacugaagccauguaugc

SEQ ID NO: 1093297 - RNA, 19 nt, Homo sapiens
  misc_RNA (1)...(19): siRNA sense strand
ucgaauauggcaagauuug

SEQ ID NO: 1093298 - RNA, 19 nt, Homo sapiens
  misc_RNA (1)...(19): siRNA sense strand
cagaaguggcaucgaauau

SEQ ID NO: 1093299 - RNA, 19 nt, Homo sapiens
  misc_RNA (1)...(19): siRNA sense strand
uaccggaauuaucaaguga

SEQ ID NO: 1093300 - RNA, 19 nt, Homo sapiens
  misc_RNA (1)...(19): siRNA sense strand
gaugaugcagcaauugugu

SEQ ID NO: 1093301 - RNA, 19 nt, Homo sapiens
  misc_RNA (1)...(19): siRNA sense strand
gaaaagaggaagcagaauc

SEQ ID NO: 1093302 - RNA, 19 nt, Homo sapiens
  misc_RNA (1)...(19): siRNA sense strand
agaauucucucaggaaacu

SEQ ID NO: 1093303 - RNA, 19 nt, Homo sapiens
  misc_RNA (1)...(19): siRNA sense strand
cuguaaauauggcaggauu

SEQ ID NO: 1093304 - RNA, 19 nt, Homo sapiens
  misc_RNA (1)...(19): siRNA sense strand
gcugauauauccacuggua

SEQ ID NO: 1093305 - RNA, 19 nt, Homo sapiens
  misc_RNA (1)...(19): siRNA sense strand
gaacuuugauucuuuagag

SEQ ID NO: 1093306 - RNA, 19 nt, Homo sapiens
  misc_RNA (1)...(19): siRNA sense strand
gaacccauauuacaagaau

SEQ ID NO: 1093307 - RNA, 19 nt, Homo sapiens
  misc_RNA (1)...(19): siRNA sense strand
uaagaaacgacuagaguua

SEQ ID NO: 1093308 - RNA, 19 nt, Homo sapiens
  misc_RNA (1)...(19): siRNA sense strand
gacaauuucuuccagguuu

SEQ ID NO: 1093309 - RNA, 19 nt, Homo sapiens
  misc_RNA (1)...(19): siRNA sense strand
gaagaagucuauggaaaca

SEQ ID NO: 1093310 - RNA, 19 nt, Homo sapiens
  misc_RNA (1)...(19): siRNA sense strand
cgagcggacugcauuauga

SEQ ID NO: 1093311 - RNA, 19 nt, Homo sapiens
  misc_RNA (1)...(19): siRNA sense strand
ggaaacacauaucaugcau

SEQ ID NO: 1093312 - RNA, 19 nt, Homo sapiens
  misc_RNA (1)...(19): siRNA sense strand
aaacacauaucaugcauac

SEQ ID NO: 1093313 - RNA, 19 nt, Homo sapiens
  misc_RNA (1)...(19): siRNA sense strand
ccacugguauuuacuaugg

SEQ ID NO: 1093314 - RNA, 19 nt, Homo sapiens
  misc_RNA (1)...(19): siRNA sense strand
ugaagaagcuaagaaacga

SEQ ID NO: 1093315 - RNA, 19 nt, Homo sapiens
  misc_RNA (1)...(19): siRNA sense strand
aauaaugaauggccacuga

SEQ ID NO: 1093316 - RNA, 19 nt, Homo sapiens
  misc_RNA (1)...(19): siRNA sense strand
uaucaugcauaccuucaaa

SEQ ID NO: 1093317 - RNA, 19 nt, Homo sapiens
  misc_RNA (1)...(19): siRNA sense strand
gaaacacauaucaugcaua

SEQ ID NO: 1093318 - RNA, 19 nt, Homo sapiens
  misc_RNA (1)...(19): siRNA sense strand
ucacuuauuucagcaauuc

SEQ ID NO: 1093319 - RNA, 19 nt, Homo sapiens
  misc_RNA (1)...(19): siRNA sense strand
gauaaucuuccagcugaua

SEQ ID NO: 1093320 - RNA, 19 nt, Homo sapiens
  misc_RNA (1)...(19): siRNA sense strand
acgaagaagucuauggaaa

SEQ ID NO: 1093321 - RNA, 19 nt, Homo sapiens
  misc_RNA (1)...(19): siRNA sense strand
ucaaagaggacuucuaugg

SEQ ID NO: 1093322 - RNA, 19 nt, Homo sapiens
  misc_RNA (1)...(19): siRNA sense strand
gauauauccacugguauuu

SEQ ID NO: 1093323 - RNA, 19 nt, Homo sapiens
  misc_RNA (1)...(19): siRNA sense strand
gcuaagaaacgacuagagu

SEQ ID NO: 1093324 - RNA, 19 nt, Homo sapiens
  misc_RNA (1)...(19): siRNA sense strand
cugagcaagugguagauaa

SEQ ID NO: 1093325 - RNA, 19 nt, Homo sapiens
  misc_RNA (1)...(19): siRNA sense strand
agaagucuauggaaacaca

SEQ ID NO: 1093326 - RNA, 19 nt, Homo sapiens
  misc_RNA (1)...(19): siRNA sense strand
agaguuaccagaacauuug

SEQ ID NO: 1093327 - RNA, 19 nt, Homo sapiens
  misc_RNA (1)...(19): siRNA sense strand
ugauauauccacugguauu

SEQ ID NO: 1093328 - RNA, 19 nt, Homo sapiens
  misc_RNA (1)...(19): siRNA sense strand
cgacuagaguuaccagaac

SEQ ID NO: 1093329 - RNA, 19 nt, Homo sapiens
  misc_RNA (1)...(19): siRNA sense strand
uauauccacugguauuuac

SEQ ID NO: 1093330 - RNA, 19 nt, Homo sapiens
  misc_RNA (1)...(19): siRNA sense strand
agaauacgaagaagucuau

SEQ ID NO: 1093331 - RNA, 19 nt, Homo sapiens
  misc_RNA (1)...(19): siRNA sense strand
gacuagaguuaccagaaca

SEQ ID NO: 1093332 - RNA, 19 nt, Homo sapiens
  misc_RNA (1)...(19): siRNA sense strand
cuucaaagaggacuucuau

SEQ ID NO: 1093333 - RNA, 19 nt, Homo sapiens
  misc_RNA (1)...(19): siRNA sense strand
cuaagaaacgacuagaguu

SEQ ID NO: 1093334 - RNA, 19 nt, Homo sapiens
  misc_RNA (1)...(19): siRNA sense strand
acaagaauacgaagaaguc

SEQ ID NO: 1093335 - RNA, 19 nt, Homo sapiens
  misc_RNA (1)...(19): siRNA sense strand
gaagcuaagaaacgacuag

SEQ ID NO: 1093336 - RNA, 19 nt, Homo sapiens
  misc_RNA (1)...(19): siRNA sense strand
cgaagaagucuauggaaac

SEQ ID NO: 1093337 - RNA, 19 nt, Homo sapiens
  misc_RNA (1)...(19): siRNA sense strand
uagaguuaccagaacauuu

SEQ ID NO: 1093338 - RNA, 19 nt, Homo sapiens
  misc_RNA (1)...(19): siRNA sense strand
uaagaugguggugagcaua

SEQ ID NO: 1093339 - RNA, 19 nt, Homo sapiens
  misc_RNA (1)...(19): siRNA sense strand
gagcaagugguagauaauc

SEQ ID NO: 1093340 - RNA, 19 nt, Homo sapiens
  misc_RNA (1)...(19): siRNA sense strand
guuaccagaacauuugaaa

SEQ ID NO: 1093341 - RNA, 19 nt, Homo sapiens
  misc_RNA (1)...(19): siRNA sense strand
ggaacccauauuacaagaa

SEQ ID NO: 1093342 - RNA, 19 nt, Homo sapiens
  misc_RNA (1)...(19): siRNA sense strand
uggaacccauauuacaaga

SEQ ID NO: 1093343 - RNA, 19 nt, Homo sapiens
  misc_RNA (1)...(19): siRNA sense strand
gauauugaagaagcuaaga

SEQ ID NO: 1093344 - RNA, 19 nt, Homo sapiens
  misc_RNA (1)...(19): siRNA sense strand
ggacuucuauggggaaauc

SEQ ID NO: 1093345 - RNA, 19 nt, Homo sapiens
  misc_RNA (1)...(19): siRNA sense strand
uaaucuuccagcugauaua

SEQ ID NO: 1093346 - RNA, 19 nt, Homo sapiens
  misc_RNA (1)...(19): siRNA sense strand
ucaugcauaccuucaaaga

SEQ ID NO: 1093347 - RNA, 19 nt, Homo sapiens
  misc_RNA (1)...(19): siRNA sense strand
acacauaucaugcauaccu

SEQ ID NO: 1093348 - RNA, 19 nt, Homo sapiens
  misc_RNA (1)...(19): siRNA sense strand
auacgaagaagucuaugga

SEQ ID NO: 1093349 - RNA, 19 nt, Homo sapiens
  misc_RNA (1)...(19): siRNA sense strand
cacauaucaugcauaccuu

SEQ ID NO: 1093350 - RNA, 19 nt, Homo sapiens
  misc_RNA (1)...(19): siRNA sense strand
uauccacugguauuuacua

SEQ ID NO: 1093351 - RNA, 19 nt, Homo sapiens
  misc_RNA (1)...(19): siRNA sense strand
acaauuucuuccagguuuc

SEQ ID NO: 1093352 - RNA, 19 nt, Homo sapiens
  misc_RNA (1)...(19): siRNA sense strand
uuacaagaauacgaagaag

SEQ ID NO: 1093353 - RNA, 19 nt, Homo sapiens
  misc_RNA (1)...(19): siRNA sense strand
ggaaagagcacauugauaa

SEQ ID NO: 1093354 - RNA, 19 nt, Homo sapiens
  misc_RNA (1)...(19): siRNA sense strand
gaacgugacuuacuuacug

SEQ ID NO: 1093355 - RNA, 19 nt, Homo sapiens
  misc_RNA (1)...(19): siRNA sense strand
uaagauaacugccaaagug

SEQ ID NO: 1093356 - RNA, 19 nt, Homo sapiens
  misc_RNA (1)...(19): siRNA sense strand
cuacaggaauggaugauua

SEQ ID NO: 1093357 - RNA, 19 nt, Homo sapiens
  misc_RNA (1)...(19): siRNA sense strand
gaagcaggauauccaaauu

SEQ ID NO: 1093358 - RNA, 19 nt, Homo sapiens
  misc_RNA (1)...(19): siRNA sense strand
caaggaagauugcgaugaa

SEQ ID NO: 1093359 - RNA, 19 nt, Homo sapiens
  misc_RNA (1)...(19): siRNA sense strand
ggaaugacugugauaaaua

SEQ ID NO: 1093360 - RNA, 19 nt, Homo sapiens
  misc_RNA (1)...(19): siRNA sense strand
gauaaggaauggaaugaga

SEQ ID NO: 1093361 - RNA, 19 nt, Homo sapiens
  misc_RNA (1)...(19): siRNA sense strand
agagacaacugaagaauug

SEQ ID NO: 1093362 - RNA, 19 nt, Homo sapiens
  misc_RNA (1)...(19): siRNA sense strand
ucaguuggcuaaacaaauu

SEQ ID NO: 1093363 - RNA, 19 nt, Homo sapiens
  misc_RNA (1)...(19): siRNA sense strand
uaacaccacuuaaaucuag

SEQ ID NO: 1093364 - RNA, 19 nt, Homo sapiens
  misc_RNA (1)...(19): siRNA sense strand
gcacaagaaacacaaguaa

SEQ ID NO: 1093365 - RNA, 19 nt, Homo sapiens
  misc_RNA (1)...(19): siRNA sense strand
caacaaaucauuccaguca

SEQ ID NO: 1093366 - RNA, 19 nt, Homo sapiens
  misc_RNA (1)...(19): siRNA sense strand
ugacuuaucuaaucaggaa

SEQ ID NO: 1093367 - RNA, 19 nt, Homo sapiens
  misc_RNA (1)...(19): siRNA sense strand
ccucuagaaucaucaaaua

SEQ ID NO: 1093368 - RNA, 19 nt, Homo sapiens
  misc_RNA (1)...(19): siRNA sense strand
ucaaagcaguaacagauuu

SEQ ID NO: 1093369 - RNA, 19 nt, Homo sapiens
  misc_RNA (1)...(19): siRNA sense strand
ugaagaaagugaaacagaa

SEQ ID NO: 1093370 - RNA, 19 nt, Homo sapiens
  misc_RNA (1)...(19): siRNA sense strand
ccaagaauauuucaaacug

SEQ ID NO: 1093371 - RNA, 19 nt, Homo sapiens
  misc_RNA (1)...(19): siRNA sense strand
gcaguaggaucugauaaga

SEQ ID NO: 1093372 - RNA, 19 nt, Homo sapiens
  misc_RNA (1)...(19): siRNA sense strand
gaagaaagugaaacagaaa

SEQ ID NO: 1093373 - RNA, 19 nt, Homo sapiens
  misc_RNA (1)...(19): siRNA sense strand
accaggagcuacagaauua

SEQ ID NO: 1093374 - RNA, 19 nt, Homo sapiens
  misc_RNA (1)...(19): siRNA sense strand
caacaaacuuaggacuaua

SEQ ID NO: 1093375 - RNA, 19 nt, Homo sapiens
  misc_RNA (1)...(19): siRNA sense strand
agaaacaugucacuaagaa

SEQ ID NO: 1093376 - RNA, 19 nt, Homo sapiens
  misc_RNA (1)...(19): siRNA sense strand
gaaaauacauggccaucaa

SEQ ID NO: 1093377 - RNA, 19 nt, Homo sapiens
  misc_RNA (1)...(19): siRNA sense strand
gaacucugauucugcauag

SEQ ID NO: 1093378 - RNA, 19 nt, Homo sapiens
  misc_RNA (1)...(19): siRNA sense strand
gaauacuguugccaaguuu

SEQ ID NO: 1093379 - RNA, 19 nt, Homo sapiens
  misc_RNA (1)...(19): siRNA sense strand
caagagaggugaugcugau

SEQ ID NO: 1093380 - RNA, 19 nt, Homo sapiens
  misc_RNA (1)...(19): siRNA sense strand
ucagguagcuaugucauuu

SEQ ID NO: 1093381 - RNA, 19 nt, Homo sapiens
  misc_RNA (1)...(19): siRNA sense strand
aaagaugcaugagguauaa

SEQ ID NO: 1093382 - RNA, 19 nt, Homo sapiens
  misc_RNA (1)...(19): siRNA sense strand
gaaacaagacauuaacuag

SEQ ID NO: 1093383 - RNA, 19 nt, Homo sapiens
  misc_RNA (1)...(19): siRNA sense strand
aagcaccacugcacaauuu

SEQ ID NO: 1093384 - RNA, 19 nt, Homo sapiens
  misc_RNA (1)...(19): siRNA sense strand
cuaaugcuguggaaucuuu

SEQ ID NO: 1093385 - RNA, 19 nt, Homo sapiens
  misc_RNA (1)...(19): siRNA sense strand
ggagaaaacucugguauug

SEQ ID NO: 1093386 - RNA, 19 nt, Homo sapiens
  misc_RNA (1)...(19): siRNA sense strand
gggaauuucuggaacaguu

SEQ ID NO: 1093387 - RNA, 19 nt, Homo sapiens
  misc_RNA (1)...(19): siRNA sense strand
acaccaagacuucauauaa

SEQ ID NO: 1093388 - RNA, 19 nt, Homo sapiens
  misc_RNA (1)...(19): siRNA sense strand
uaacacagacuuaggagaa

SEQ ID NO: 1093389 - RNA, 19 nt, Homo sapiens
  misc_RNA (1)...(19): siRNA sense strand
gaagucugguguuaggaaa

SEQ ID NO: 1093390 - RNA, 19 nt, Homo sapiens
  misc_RNA (1)...(19): siRNA sense strand
gaaagaagcaggauaucca

SEQ ID NO: 1093391 - RNA, 19 nt, Homo sapiens
  misc_RNA (1)...(19): siRNA sense strand
agacgucacuaacauauau

SEQ ID NO: 1093392 - RNA, 19 nt, Homo sapiens
  misc_RNA (1)...(19): siRNA sense strand
uaacauauauuggcacagu

SEQ ID NO: 1093393 - RNA, 19 nt, Homo sapiens
  misc_RNA (1)...(19): siRNA sense strand
caaagaugcaugagguaua

SEQ ID NO: 1093394 - RNA, 19 nt, Homo sapiens
  misc_RNA (1)...(19): siRNA sense strand
ggugaaagaacaaaugaaa

SEQ ID NO: 1093395 - RNA, 19 nt, Homo sapiens
  misc_RNA (1)...(19): siRNA sense strand
gagcucaguuggcuaaaca

SEQ ID NO: 1093396 - RNA, 19 nt, Homo sapiens
  misc_RNA (1)...(19): siRNA sense strand
caaauaggcaucccuuaga

SEQ ID NO: 1093397 - RNA, 19 nt, Homo sapiens
  misc_RNA (1)...(19): siRNA sense strand
caucaguccucaccagauu

SEQ ID NO: 1093398 - RNA, 19 nt, Homo sapiens
  misc_RNA (1)...(19): siRNA sense strand
guucccagaugaccaagua

SEQ ID NO: 1093399 - RNA, 19 nt, Homo sapiens
  misc_RNA (1)...(19): siRNA sense strand
caugcuagguucuauaaau

SEQ ID NO: 1093400 - RNA, 19 nt, Homo sapiens
  misc_RNA (1)...(19): siRNA sense strand
ucaguuaucuuuccauugg

SEQ ID NO: 1093401 - RNA, 19 nt, Homo sapiens
  misc_RNA (1)...(19): siRNA sense strand
caaguaauauuccagugau

SEQ ID NO: 1093402 - RNA, 19 nt, Homo sapiens
  misc_RNA (1)...(19): siRNA sense strand
aaggaaagcugaaguuaag

SEQ ID NO: 1093403 - RNA, 19 nt, Homo sapiens
  misc_RNA (1)...(19): siRNA sense strand
cagaugaccaaguaaauaa

SEQ ID NO: 1093404 - RNA, 19 nt, Homo sapiens
  misc_RNA (1)...(19): siRNA sense strand
ucaaucagaagaaagcuua

SEQ ID NO: 1093405 - RNA, 19 nt, Homo sapiens
  misc_RNA (1)...(19): siRNA sense strand
gaagaaugccagaggaaau

SEQ ID NO: 1093406 - RNA, 19 nt, Homo sapiens
  misc_RNA (1)...(19): siRNA sense strand
agaaagagcacaagaaaca

SEQ ID NO: 1093407 - RNA, 19 nt, Homo sapiens
  misc_RNA (1)...(19): siRNA sense strand
aaagagccaccaccacuua

SEQ ID NO: 1093408 - RNA, 19 nt, Homo sapiens
  misc_RNA (1)...(19): siRNA sense strand
ggaaugagaaggaguuaca

SEQ ID NO: 1093409 - RNA, 19 nt, Homo sapiens
  misc_RNA (1)...(19): siRNA sense strand
augcuuaccugguuuaauu

SEQ ID NO: 1093410 - RNA, 19 nt, Homo sapiens
  misc_RNA (1)...(19): siRNA sense strand
caccagauuugucaaguga

SEQ ID NO: 1093411 - RNA, 19 nt, Homo sapiens
  misc_RNA (1)...(19): siRNA sense strand
cgaaacaagacauuaacua

SEQ ID NO: 1093412 - RNA, 19 nt, Homo sapiens
  misc_RNA (1)...(19): siRNA sense strand
uaaauaggaaugacuguga

SEQ ID NO: 1093413 - RNA, 19 nt, Homo sapiens
  misc_RNA (1)...(19): siRNA sense strand
agaauacuguugccaaguu

SEQ ID NO: 1093414 - RNA, 19 nt, Homo sapiens
  misc_RNA (1)...(19): siRNA sense strand
gagaaggaguuacagaaac

SEQ ID NO: 1093415 - RNA, 19 nt, Homo sapiens
  misc_RNA (1)...(19): siRNA sense strand
gaucugauaagacaaauag

SEQ ID NO: 1093416 - RNA, 19 nt, Homo sapiens
  misc_RNA (1)...(19): siRNA sense strand
gacauaaggaaaucaauga

SEQ ID NO: 1093417 - RNA, 19 nt, Homo sapiens
  misc_RNA (1)...(19): siRNA sense strand
gauagacgucacuaacaua

SEQ ID NO: 1093418 - RNA, 19 nt, Homo sapiens
  misc_RNA (1)...(19): siRNA sense strand
gaaagagcacauugauaau

SEQ ID NO: 1093419 - RNA, 19 nt, Homo sapiens
  misc_RNA (1)...(19): siRNA sense strand
gaugacaguucacuaagag

SEQ ID NO: 1093420 - RNA, 19 nt, Homo sapiens
  misc_RNA (1)...(19): siRNA sense strand
aaauaggcaucccuuagaa

SEQ ID NO: 1093421 - RNA, 19 nt, Homo sapiens
  misc_RNA (1)...(19): siRNA sense strand
ugagaaagagcacaagaaa

SEQ ID NO: 1093422 - RNA, 19 nt, Homo sapiens
  misc_RNA (1)...(19): siRNA sense strand
gaaagcugaaguuaagaaa

SEQ ID NO: 1093423 - RNA, 19 nt, Homo sapiens
  misc_RNA (1)...(19): siRNA sense strand
ggaaagcugaaguuaagaa

SEQ ID NO: 1093424 - RNA, 19 nt, Homo sapiens
  misc_RNA (1)...(19): siRNA sense strand
gaugaacgugacuuacuua

SEQ ID NO: 1093425 - RNA, 19 nt, Homo sapiens
  misc_RNA (1)...(19): siRNA sense strand
gcaagagacaacugaagaa

SEQ ID NO: 1093426 - RNA, 19 nt, Homo sapiens
  misc_RNA (1)...(19): siRNA sense strand
guagaagcccgaaacaaga

SEQ ID NO: 1093427 - RNA, 19 nt, Homo sapiens
  misc_RNA (1)...(19): siRNA sense strand
gaagccagccaauuccaaa

SEQ ID NO: 1093428 - RNA, 19 nt, Homo sapiens
  misc_RNA (1)...(19): siRNA sense strand
cagaggaaauacauggaaa

SEQ ID NO: 1093429 - RNA, 19 nt, Homo sapiens
  misc_RNA (1)...(19): siRNA sense strand
ccagaugaccaaguaaaua

SEQ ID NO: 1093430 - RNA, 19 nt, Homo sapiens
  misc_RNA (1)...(19): siRNA sense strand
ccaaacagauacugcucaa

SEQ ID NO: 1093431 - RNA, 19 nt, Homo sapiens
  misc_RNA (1)...(19): siRNA sense strand
gcaacaccaagacuucaua

SEQ ID NO: 1093432 - RNA, 19 nt, Homo sapiens
  misc_RNA (1)...(19): siRNA sense strand
acaacaaacuuaggacuau

SEQ ID NO: 1093433 - RNA, 19 nt, Homo sapiens
  misc_RNA (1)...(19): siRNA sense strand
aaacaugucacuaagaaga

SEQ ID NO: 1093434 - RNA, 19 nt, Homo sapiens
  misc_RNA (1)...(19): siRNA sense strand
ccagaaacaugucacuaag

SEQ ID NO: 1093435 - RNA, 19 nt, Homo sapiens
  misc_RNA (1)...(19): siRNA sense strand
uuagaaugcuuaccugguu

SEQ ID NO: 1093436 - RNA, 19 nt, Homo sapiens
  misc_RNA (1)...(19): siRNA sense strand
caucaaagcaguaacagau

SEQ ID NO: 1093437 - RNA, 19 nt, Homo sapiens
  misc_RNA (1)...(19): siRNA sense strand
ucagaugacaguucacuaa

SEQ ID NO: 1093438 - RNA, 19 nt, Homo sapiens
  misc_RNA (1)...(19): siRNA sense strand
caagaaaaccaaacagaua

SEQ ID NO: 1093439 - RNA, 19 nt, Homo sapiens
  misc_RNA (1)...(19): siRNA sense strand
caggcaacguuuauauauu

SEQ ID NO: 1093440 - RNA, 19 nt, Homo sapiens
  misc_RNA (1)...(19): siRNA sense strand
gcucaccucugacuuuaag

SEQ ID NO: 1093441 - RNA, 19 nt, Homo sapiens
  misc_RNA (1)...(19): siRNA sense strand
gaaggaaaaccccauuuaa

SEQ ID NO: 1093442 - RNA, 19 nt, Homo sapiens
  misc_RNA (1)...(19): siRNA sense strand
caucaguuaucuuuccauu

SEQ ID NO: 1093443 - RNA, 19 nt, Homo sapiens
  misc_RNA (1)...(19): siRNA sense strand
gaacugaagaguaauaagc

SEQ ID NO: 1093444 - RNA, 19 nt, Homo sapiens
  misc_RNA (1)...(19): siRNA sense strand
agaagaagccagccaauuc

SEQ ID NO: 1093445 - RNA, 19 nt, Homo sapiens
  misc_RNA (1)...(19): siRNA sense strand
aaaggaaagcugaaguuaa

SEQ ID NO: 1093446 - RNA, 19 nt, Homo sapiens
  misc_RNA (1)...(19): siRNA sense strand
aacaaaugcucaccucuga

SEQ ID NO: 1093447 - RNA, 19 nt, Homo sapiens
  misc_RNA (1)...(19): siRNA sense strand
cgaugaacgugacuuacuu

SEQ ID NO: 1093448 - RNA, 19 nt, Homo sapiens
  misc_RNA (1)...(19): siRNA sense strand
gaaaagaacagggaaaaga

SEQ ID NO: 1093449 - RNA, 19 nt, Homo sapiens
  misc_RNA (1)...(19): siRNA sense strand
acaaaucauuccagucaga

SEQ ID NO: 1093450 - RNA, 19 nt, Homo sapiens
  misc_RNA (1)...(19): siRNA sense strand
agagguagcugcggcugua

SEQ ID NO: 1093451 - RNA, 19 nt, Homo sapiens
  misc_RNA (1)...(19): siRNA sense strand
gcuacagaauuaaacaugu

SEQ ID NO: 1093452 - RNA, 19 nt, Homo sapiens
  misc_RNA (1)...(19): siRNA sense strand
aagaugaccaugaugauuu

SEQ ID NO: 1093453 - RNA, 19 nt, Homo sapiens
  misc_RNA (1)...(19): siRNA sense strand
gaucaucucuguaaacuuu

SEQ ID NO: 1093454 - RNA, 19 nt, Homo sapiens
  misc_RNA (1)...(19): siRNA sense strand
caaaugaggugcugaauga

SEQ ID NO: 1093455 - RNA, 19 nt, Homo sapiens
  misc_RNA (1)...(19): siRNA sense strand
gaaacaaguugagcaaauu

SEQ ID NO: 1093456 - RNA, 19 nt, Homo sapiens
  misc_RNA (1)...(19): siRNA sense strand
guucggacaucaacaaaua

SEQ ID NO: 1093457 - RNA, 19 nt, Homo sapiens
  misc_RNA (1)...(19): siRNA sense strand
gaagaaaguuccuuaugca

SEQ ID NO: 1093458 - RNA, 19 nt, Homo sapiens
  misc_RNA (1)...(19): siRNA sense strand
ggaauggacucacuuucaa

SEQ ID NO: 1093459 - RNA, 19 nt, Homo sapiens
  misc_RNA (1)...(19): siRNA sense strand
ggaaagaugaaucaaauga

SEQ ID NO: 1093460 - RNA, 19 nt, Homo sapiens
  misc_RNA (1)...(19): siRNA sense strand
ugaaagacuugcacagaaa

SEQ ID NO: 1093461 - RNA, 19 nt, Homo sapiens
  misc_RNA (1)...(19): siRNA sense strand
gcauggugcugaugugaaa

SEQ ID NO: 1093462 - RNA, 19 nt, Homo sapiens
  misc_RNA (1)...(19): siRNA sense strand
gggaauaccagaacaacua

SEQ ID NO: 1093463 - RNA, 19 nt, Homo sapiens
  misc_RNA (1)...(19): siRNA sense strand
gaaaugacaauuccagguu

SEQ ID NO: 1093464 - RNA, 19 nt, Homo sapiens
  misc_RNA (1)...(19): siRNA sense strand
caaagagaccagagagaua

SEQ ID NO: 1093465 - RNA, 19 nt, Homo sapiens
  misc_RNA (1)...(19): siRNA sense strand
aaaguaaaguguccuguau

SEQ ID NO: 1093466 - RNA, 19 nt, Homo sapiens
  misc_RNA (1)...(19): siRNA sense strand
gaaaguuccuuaugcaaaa

SEQ ID NO: 1093467 - RNA, 19 nt, Homo sapiens
  misc_RNA (1)...(19): siRNA sense strand
gcacauaaggaggcgauua

SEQ ID NO: 1093468 - RNA, 19 nt, Homo sapiens
  misc_RNA (1)...(19): siRNA sense strand
ccacagagaugaaccuuuu

SEQ ID NO: 1093469 - RNA, 19 nt, Homo sapiens
  misc_RNA (1)...(19): siRNA sense strand
ggacacggcccucaggaaa

SEQ ID NO: 1093470 - RNA, 19 nt, Homo sapiens
  misc_RNA (1)...(19): siRNA sense strand
gaaaagcugugaaccgaaa

SEQ ID NO: 1093471 - RNA, 19 nt, Homo sapiens
  misc_RNA (1)...(19): siRNA sense strand
aguaaaguguccuguauuu

SEQ ID NO: 1093472 - RNA, 19 nt, Homo sapiens
  misc_RNA (1)...(19): siRNA sense strand
gaacagaauauggcaaaga

SEQ ID NO: 1093473 - RNA, 19 nt, Homo sapiens
  misc_RNA (1)...(19): siRNA sense strand
aagcagaaauugagcaaga

SEQ ID NO: 1093474 - RNA, 19 nt, Homo sapiens
  misc_RNA (1)...(19): siRNA sense strand
caaugaacauggcucaaau

SEQ ID NO: 1093475 - RNA, 19 nt, Homo sapiens
  misc_RNA (1)...(19): siRNA sense strand
gagaacagaauauggcaaa

SEQ ID NO: 1093476 - RNA, 19 nt, Homo sapiens
  misc_RNA (1)...(19): siRNA sense strand
gacauuaaauuggaagaga

SEQ ID NO: 1093477 - RNA, 19 nt, Homo sapiens
  misc_RNA (1)...(19): siRNA sense strand
ccuaauagccuggcaguaa

SEQ ID NO: 1093478 - RNA, 19 nt, Homo sapiens
  misc_RNA (1)...(19): siRNA sense strand
caaaugaccauacuagcaa

SEQ ID NO: 1093479 - RNA, 19 nt, Homo sapiens
  misc_RNA (1)...(19): siRNA sense strand
agaaacaaguugagcaaau

SEQ ID NO: 1093480 - RNA, 19 nt, Homo sapiens
  misc_RNA (1)...(19): siRNA sense strand
gcaaagagaccagagagau

SEQ ID NO: 1093481 - RNA, 19 nt, Homo sapiens
  misc_RNA (1)...(19): siRNA sense strand
gauccaagguccugugucu

SEQ ID NO: 1093482 - RNA, 19 nt, Homo sapiens
  misc_RNA (1)...(19): siRNA sense strand
ggacaucaacaaauaaagu

SEQ ID NO: 1093483 - RNA, 19 nt, Homo sapiens
  misc_RNA (1)...(19): siRNA sense strand
ugaaugcaguaacaacaaa

SEQ ID NO: 1093484 - RNA, 19 nt, Homo sapiens
  misc_RNA (1)...(19): siRNA sense strand
uaaaguguccuguauuugu

SEQ ID NO: 1093485 - RNA, 19 nt, Homo sapiens
  misc_RNA (1)...(19): siRNA sense strand
caacuucuggagcaacuua

SEQ ID NO: 1093486 - RNA, 19 nt, Homo sapiens
  misc_RNA (1)...(19): siRNA sense strand
ggaauaccagaacaacuaa

SEQ ID NO: 1093487 - RNA, 19 nt, Homo sapiens
  misc_RNA (1)...(19): siRNA sense strand
ccacggaggauaugugaaa

SEQ ID NO: 1093488 - RNA, 19 nt, Homo sapiens
  misc_RNA (1)...(19): siRNA sense strand
gaucuggucccaccuauag

SEQ ID NO: 1093489 - RNA, 19 nt, Homo sapiens
  misc_RNA (1)...(19): siRNA sense strand
gguccaaugucucagauuc

SEQ ID NO: 1093490 - RNA, 19 nt, Homo sapiens
  misc_RNA (1)...(19): siRNA sense strand
ugacggcacuguuagaauc

SEQ ID NO: 1093491 - RNA, 19 nt, Homo sapiens
  misc_RNA (1)...(19): siRNA sense strand
uaaaguaaaguguccugua

SEQ ID NO: 1093492 - RNA, 19 nt, Homo sapiens
  misc_RNA (1)...(19): siRNA sense strand
gugcugaugugaaaugugu

SEQ ID NO: 1093493 - RNA, 19 nt, Homo sapiens
  misc_RNA (1)...(19): siRNA sense strand
gagagcaccacgauggaua

SEQ ID NO: 1093494 - RNA, 19 nt, Homo sapiens
  misc_RNA (1)...(19): siRNA sense strand
gaagauggaguagaauaug

SEQ ID NO: 1093495 - RNA, 19 nt, Homo sapiens
  misc_RNA (1)...(19): siRNA sense strand
gaacaugaacaacgucaag

SEQ ID NO: 1093496 - RNA, 19 nt, Homo sapiens
  misc_RNA (1)...(19): siRNA sense strand
gaugaccucgaaccuaaua

SEQ ID NO: 1093497 - RNA, 19 nt, Homo sapiens
  misc_RNA (1)...(19): siRNA sense strand
ugaauaauccuaugaaugc

SEQ ID NO: 1093498 - RNA, 19 nt, Homo sapiens
  misc_RNA (1)...(19): siRNA sense strand
aaugacaauuccagguuua

SEQ ID NO: 1093499 - RNA, 19 nt, Homo sapiens
  misc_RNA (1)...(19): siRNA sense strand
caacacuucaugcccauaa

SEQ ID NO: 1093500 - RNA, 19 nt, Homo sapiens
  misc_RNA (1)...(19): siRNA sense strand
ccaaaggguuaguuguuuc

SEQ ID NO: 1093501 - RNA, 19 nt, Homo sapiens
  misc_RNA (1)...(19): siRNA sense strand
aaaguguccuguauuuguu

SEQ ID NO: 1093502 - RNA, 19 nt, Homo sapiens
  misc_RNA (1)...(19): siRNA sense strand
aaaugacaauuccagguuu

SEQ ID NO: 1093503 - RNA, 19 nt, Homo sapiens
  misc_RNA (1)...(19): siRNA sense strand
gcccggagaugaacguuuc

SEQ ID NO: 1093504 - RNA, 19 nt, Homo sapiens
  misc_RNA (1)...(19): siRNA sense strand
ggacaaaugggaccacaag

SEQ ID NO: 1093505 - RNA, 19 nt, Homo sapiens
  misc_RNA (1)...(19): siRNA sense strand
agaagaaaguuccuuaugc

SEQ ID NO: 1093506 - RNA, 19 nt, Homo sapiens
  misc_RNA (1)...(19): siRNA sense strand
caaugcaacagcuuacuuu

SEQ ID NO: 1093507 - RNA, 19 nt, Homo sapiens
  misc_RNA (1)...(19): siRNA sense strand
gcagaaauugagcaagaaa

SEQ ID NO: 1093508 - RNA, 19 nt, Homo sapiens
  misc_RNA (1)...(19): siRNA sense strand
cuaauagccuggcaguaau

SEQ ID NO: 1093509 - RNA, 19 nt, Homo sapiens
  misc_RNA (1)...(19): siRNA sense strand
uggaaugucugaagaugga

SEQ ID NO: 1093510 - RNA, 19 nt, Homo sapiens
  misc_RNA (1)...(19): siRNA sense strand
ggccaggucaugaacauuu

SEQ ID NO: 1093511 - RNA, 19 nt, Homo sapiens
  misc_RNA (1)...(19): siRNA sense strand
agaauaugaugaccucgaa

SEQ ID NO: 1093512 - RNA, 19 nt, Homo sapiens
  misc_RNA (1)...(19): siRNA sense strand
cuuccgaggucauaagaaa

SEQ ID NO: 1093513 - RNA, 19 nt, Homo sapiens
  misc_RNA (1)...(19): siRNA sense strand
gcucagagagugcccaaau

SEQ ID NO: 1093514 - RNA, 19 nt, Homo sapiens
  misc_RNA (1)...(19): siRNA sense strand
uugaaagacuugcacagaa

SEQ ID NO: 1093515 - RNA, 19 nt, Homo sapiens
  misc_RNA (1)...(19): siRNA sense strand
aaacacaagcagaaauuga

SEQ ID NO: 1093516 - RNA, 19 nt, Homo sapiens
  misc_RNA (1)...(19): siRNA sense strand
gaaugggaauaccagaaca

SEQ ID NO: 1093517 - RNA, 19 nt, Homo sapiens
  misc_RNA (1)...(19): siRNA sense strand
augaugaccucgaaccuaa

SEQ ID NO: 1093518 - RNA, 19 nt, Homo sapiens
  misc_RNA (1)...(19): siRNA sense strand
aagauggaguagaauauga

SEQ ID NO: 1093519 - RNA, 19 nt, Homo sapiens
  misc_RNA (1)...(19): siRNA sense strand
ugaugcagguuauuacaau

SEQ ID NO: 1093520 - RNA, 19 nt, Homo sapiens
  misc_RNA (1)...(19): siRNA sense strand
guagagggaguaacaugaa

SEQ ID NO: 1093521 - RNA, 19 nt, Homo sapiens
  misc_RNA (1)...(19): siRNA sense strand
ccaaugaacauggcucaaa

SEQ ID NO: 1093522 - RNA, 19 nt, Homo sapiens
  misc_RNA (1)...(19): siRNA sense strand
caauccaucuguaauuaag

SEQ ID NO: 1093523 - RNA, 19 nt, Homo sapiens
  misc_RNA (1)...(19): siRNA sense strand
guuagaaucugggacuuuc

SEQ ID NO: 1093524 - RNA, 19 nt, Homo sapiens
  misc_RNA (1)...(19): siRNA sense strand
gaguuuacccuguggaaug

SEQ ID NO: 1093525 - RNA, 19 nt, Homo sapiens
  misc_RNA (1)...(19): siRNA sense strand
ccuauaggaauguugaaua

SEQ ID NO: 1093526 - RNA, 19 nt, Homo sapiens
  misc_RNA (1)...(19): siRNA sense strand
ggacucacuuucaauuuug

SEQ ID NO: 1093527 - RNA, 19 nt, Homo sapiens
  misc_RNA (1)...(19): siRNA sense strand
cagcagaccagaugacuuc

SEQ ID NO: 1093528 - RNA, 19 nt, Homo sapiens
  misc_RNA (1)...(19): siRNA sense strand
aaaaguaccucagaagaaa

SEQ ID NO: 1093529 - RNA, 19 nt, Homo sapiens
  misc_RNA (1)...(19): siRNA sense strand
ggggaaagaugaaucaaau

SEQ ID NO: 1093530 - RNA, 19 nt, Homo sapiens
  misc_RNA (1)...(19): siRNA sense strand
gcaaugcaacagcuuacuu

SEQ ID NO: 1093531 - RNA, 19 nt, Homo sapiens
  misc_RNA (1)...(19): siRNA sense strand
cgaaaccgaccaggugaua

SEQ ID NO: 1093532 - RNA, 19 nt, Homo sapiens
  misc_RNA (1)...(19): siRNA sense strand
agacuggcauccaaccaaa

SEQ ID NO: 1093533 - RNA, 19 nt, Homo sapiens
  misc_RNA (1)...(19): siRNA sense strand
gcagagucuugcaacacuu

SEQ ID NO: 1093534 - RNA, 19 nt, Homo sapiens
  misc_RNA (1)...(19): siRNA sense strand
cagcaggcuuggaugcaaa

SEQ ID NO: 1093535 - RNA, 19 nt, Homo sapiens
  misc_RNA (1)...(19): siRNA sense strand
gucugaagauggaguagaa

SEQ ID NO: 1093536 - RNA, 19 nt, Homo sapiens
  misc_RNA (1)...(19): siRNA sense strand
aaaccgaccaggugauaaa

SEQ ID NO: 1093537 - RNA, 19 nt, Homo sapiens
  misc_RNA (1)...(19): siRNA sense strand
gcucaaaugaccauacuag

SEQ ID NO: 1093538 - RNA, 19 nt, Homo sapiens
  misc_RNA (1)...(19): siRNA sense strand
cagaagaaaguuccuuaug

SEQ ID NO: 1093539 - RNA, 19 nt, Homo sapiens
  misc_RNA (1)...(19): siRNA sense strand
gguagagggaguaacauga

SEQ ID NO: 1093540 - RNA, 19 nt, Homo sapiens
  misc_RNA (1)...(19): siRNA sense strand
ggucccaccuauaggaaug

SEQ ID NO: 1093541 - RNA, 19 nt, Homo sapiens
  misc_RNA (1)...(19): siRNA sense strand
agaaaguuccuuaugcaaa

SEQ ID NO: 1093542 - RNA, 19 nt, Homo sapiens
  misc_RNA (1)...(19): siRNA sense strand
gaaaccgaccaggugauaa

SEQ ID NO: 1093543 - RNA, 19 nt, Homo sapiens
  misc_RNA (1)...(19): siRNA sense strand
gucugaugguucuuuguua

SEQ ID NO: 1093544 - RNA, 19 nt, Homo sapiens
  misc_RNA (1)...(19): siRNA sense strand
ucagaaaccuaaaagaaga

SEQ ID NO: 1093545 - RNA, 19 nt, Homo sapiens
  misc_RNA (1)...(19): siRNA sense strand
gagauaugcgggcaauuca

SEQ ID NO: 1093546 - RNA, 19 nt, Homo sapiens
  misc_RNA (1)...(19): siRNA sense strand
ggccaccgguuacgugaau

SEQ ID NO: 1093547 - RNA, 19 nt, Homo sapiens
  misc_RNA (1)...(19): siRNA sense strand
gcgcuuuggccaccgguua

SEQ ID NO: 1093548 - RNA, 19 nt, Homo sapiens
  misc_RNA (1)...(19): siRNA sense strand
acacggcccucaggaaaug

SEQ ID NO: 1093549 - RNA, 19 nt, Homo sapiens
  misc_RNA (1)...(19): siRNA sense strand
gcaagggccuccucauccu

SEQ ID NO: 1093550 - RNA, 19 nt, Homo sapiens
  misc_RNA (1)...(19): siRNA sense strand
gggaauggaggaagugaug

SEQ ID NO: 1093551 - RNA, 19 nt, Homo sapiens
  misc_RNA (1)...(19): siRNA sense strand
gaacagauggggaaagaug

SEQ ID NO: 1093552 - RNA, 19 nt, Homo sapiens
  misc_RNA (1)...(19): siRNA sense strand
ugaccauacuagcaaauuc

SEQ ID NO: 1093553 - RNA, 19 nt, Homo sapiens
  misc_RNA (1)...(19): siRNA sense strand
ugacaggacugcagaucaa

SEQ ID NO: 1093554 - RNA, 19 nt, Homo sapiens
  misc_RNA (1)...(19): siRNA sense strand
ggcaugaucaccuucaaua

SEQ ID NO: 1093555 - RNA, 19 nt, Homo sapiens
  misc_RNA (1)...(19): siRNA sense strand
gguguggccuucuacaaug

SEQ ID NO: 1093556 - RNA, 19 nt, Homo sapiens
  misc_RNA (1)...(19): siRNA sense strand
gcagaccaccuccuucuau

SEQ ID NO: 1093557 - RNA, 19 nt, Homo sapiens
  misc_RNA (1)...(19): siRNA sense strand
ccaugguguuccuuaauaa

SEQ ID NO: 1093558 - RNA, 19 nt, Homo sapiens
  misc_RNA (1)...(19): siRNA sense strand
uccaugguguuccuuaaua

SEQ ID NO: 1093559 - RNA, 19 nt, Homo sapiens
  misc_RNA (1)...(19): siRNA sense strand
gcaugaucaccuucaauaa

SEQ ID NO: 1093560 - RNA, 19 nt, Homo sapiens
  misc_RNA (1)...(19): siRNA sense strand
ucaacgugcugcucuccua

SEQ ID NO: 1093561 - RNA, 19 nt, Homo sapiens
  misc_RNA (1)...(19): siRNA sense strand
ugaccacgcugcugugcaa

SEQ ID NO: 1093562 - RNA, 19 nt, Homo sapiens
  misc_RNA (1)...(19): siRNA sense strand
ucaauaaccucugccucaa

SEQ ID NO: 1093563 - RNA, 19 nt, Homo sapiens
  misc_RNA (1)...(19): siRNA sense strand
gcugggagaugaagaagac

SEQ ID NO: 1093564 - RNA, 19 nt, Homo sapiens
  misc_RNA (1)...(19): siRNA sense strand
gcaucuggcgccugacuuu

SEQ ID NO: 1093565 - RNA, 19 nt, Homo sapiens
  misc_RNA (1)...(19): siRNA sense strand
ccaguccgcugacccacaa

SEQ ID NO: 1093566 - RNA, 19 nt, Homo sapiens
  misc_RNA (1)...(19): siRNA sense strand
cagaccaccuccuucuaug

SEQ ID NO: 1093567 - RNA, 19 nt, Homo sapiens
  misc_RNA (1)...(19): siRNA sense strand
aauaaccucugccucaagu

SEQ ID NO: 1093568 - RNA, 19 nt, Homo sapiens
  misc_RNA (1)...(19): siRNA sense strand
ggacugcagaucaaguuca

SEQ ID NO: 1093569 - RNA, 19 nt, Homo sapiens
  misc_RNA (1)...(19): siRNA sense strand
gcgccugacuuucuacaac

SEQ ID NO: 1093570 - RNA, 19 nt, Homo sapiens
  misc_RNA (1)...(19): siRNA sense strand
ccaaagacagcgagaagag

SEQ ID NO: 1093571 - RNA, 19 nt, Homo sapiens
  misc_RNA (1)...(19): siRNA sense strand
ucaagcagaccaccuccuu

SEQ ID NO: 1093572 - RNA, 19 nt, Homo sapiens
  misc_RNA (1)...(19): siRNA sense strand
caaggccugugcccagaca

SEQ ID NO: 1093573 - RNA, 19 nt, Homo sapiens
  misc_RNA (1)...(19): siRNA sense strand
ucuccaugguguuccuuaa

SEQ ID NO: 1093574 - RNA, 19 nt, Homo sapiens
  misc_RNA (1)...(19): siRNA sense strand
caugaucaccuucaauaac

SEQ ID NO: 1093575 - RNA, 19 nt, Homo sapiens
  misc_RNA (1)...(19): siRNA sense strand
ucuccuaccugcugcucaa

SEQ ID NO: 1093576 - RNA, 19 nt, Homo sapiens
  misc_RNA (1)...(19): siRNA sense strand
caccugcgguaucaucauc

SEQ ID NO: 1093577 - RNA, 19 nt, Homo sapiens
  misc_RNA (1)...(19): siRNA sense strand
ucuggcgccugacuuucua

SEQ ID NO: 1093578 - RNA, 19 nt, Homo sapiens
  misc_RNA (1)...(19): siRNA sense strand
cugcucaccugcgguauca

SEQ ID NO: 1093579 - RNA, 19 nt, Homo sapiens
  misc_RNA (1)...(19): siRNA sense strand
ggacgagcaacaugauggu

SEQ ID NO: 1093580 - RNA, 19 nt, Homo sapiens
  misc_RNA (1)...(19): siRNA sense strand
caggacugcagaucaaguu

SEQ ID NO: 1093581 - RNA, 19 nt, Homo sapiens
  misc_RNA (1)...(19): siRNA sense strand
ccacgcugcugugcaaagg

SEQ ID NO: 1093582 - RNA, 19 nt, Homo sapiens
  misc_RNA (1)...(19): siRNA sense strand
cgccugacuuucuacaaca

SEQ ID NO: 1093583 - RNA, 19 nt, Homo sapiens
  misc_RNA (1)...(19): siRNA sense strand
gaucauugcugucuucaaa

SEQ ID NO: 1093584 - RNA, 19 nt, Homo sapiens
  misc_RNA (1)...(19): siRNA sense strand
acaacuggcugauuaaaua

SEQ ID NO: 1093585 - RNA, 19 nt, Homo sapiens
  misc_RNA (1)...(19): siRNA sense strand
cuacaaagaugcagacuau

SEQ ID NO: 1093586 - RNA, 19 nt, Homo sapiens
  misc_RNA (1)...(19): siRNA sense strand
aaugacaacuggcugauua

SEQ ID NO: 1093587 - RNA, 19 nt, Homo sapiens
  misc_RNA (1)...(19): siRNA sense strand
ggaccuauaugaacucuuc

SEQ ID NO: 1093588 - RNA, 19 nt, Homo sapiens
  misc_RNA (1)...(19): siRNA sense strand
gaaggagccuguuaucaag

SEQ ID NO: 1093589 - RNA, 19 nt, Homo sapiens
  misc_RNA (1)...(19): siRNA sense strand
ggaagaggaccuauaugaa

SEQ ID NO: 1093590 - RNA, 19 nt, Homo sapiens
  misc_RNA (1)...(19): siRNA sense strand
agugagaccuucaacuaua

SEQ ID NO: 1093591 - RNA, 19 nt, Homo sapiens
  misc_RNA (1)...(19): siRNA sense strand
uaguauaccuggccaguga

SEQ ID NO: 1093592 - RNA, 19 nt, Homo sapiens
  misc_RNA (1)...(19): siRNA sense strand
ccagugagaccuucaacua

SEQ ID NO: 1093593 - RNA, 19 nt, Homo sapiens
  misc_RNA (1)...(19): siRNA sense strand
gaagaggaccuauaugaac

SEQ ID NO: 1093594 - RNA, 19 nt, Homo sapiens
  misc_RNA (1)...(19): siRNA sense strand
cagaaccucuuccugagaa

SEQ ID NO: 1093595 - RNA, 19 nt, Homo sapiens
  misc_RNA (1)...(19): siRNA sense strand
ugaaggagccuguuaucaa

SEQ ID NO: 1093596 - RNA, 19 nt, Homo sapiens
  misc_RNA (1)...(19): siRNA sense strand
guugaaggcuacaaagaug

SEQ ID NO: 1093597 - RNA, 19 nt, Homo sapiens
  misc_RNA (1)...(19): siRNA sense strand
aaauaugacuguccaaugg

SEQ ID NO: 1093598 - RNA, 19 nt, Homo sapiens
  misc_RNA (1)...(19): siRNA sense strand
gguugguggugcuggauua

SEQ ID NO: 1093599 - RNA, 19 nt, Homo sapiens
  misc_RNA (1)...(19): siRNA sense strand
gagacgagcccacuagugu

SEQ ID NO: 1093600 - RNA, 19 nt, Homo sapiens
  misc_RNA (1)...(19): siRNA sense strand
gaggaucauugcugucuuc

SEQ ID NO: 1093601 - RNA, 19 nt, Homo sapiens
  misc_RNA (1)...(19): siRNA sense strand
ccaaguggcugcagaagcu

SEQ ID NO: 1093602 - RNA, 19 nt, Homo sapiens
  misc_RNA (1)...(19): siRNA sense strand
acaaagaugcagacuauug

SEQ ID NO: 1093603 - RNA, 19 nt, Homo sapiens
  misc_RNA (1)...(19): siRNA sense strand
gugacugccuuguccuuaa

SEQ ID NO: 1093604 - RNA, 19 nt, Homo sapiens
  misc_RNA (1)...(19): siRNA sense strand
caacacugaucgaggcaau

SEQ ID NO: 1093605 - RNA, 19 nt, Homo sapiens
  misc_RNA (1)...(19): siRNA sense strand
gcaucgggcuaccaccaaa

SEQ ID NO: 1093606 - RNA, 19 nt, Homo sapiens
  misc_RNA (1)...(19): siRNA sense strand
uggaagaggaccuauauga

SEQ ID NO: 1093607 - RNA, 19 nt, Homo sapiens
  misc_RNA (1)...(19): siRNA sense strand
ccagggcuaucucucagaa

SEQ ID NO: 1093608 - RNA, 19 nt, Homo sapiens
  misc_RNA (1)...(19): siRNA sense strand
gugcuguccuugcugcuuu

SEQ ID NO: 1093609 - RNA, 19 nt, Homo sapiens
  misc_RNA (1)...(19): siRNA sense strand
ucugauccuuccaaagaua

SEQ ID NO: 1093610 - RNA, 19 nt, Homo sapiens
  misc_RNA (1)...(19): siRNA sense strand
aaacuggaacucaacauug

SEQ ID NO: 1093611 - RNA, 19 nt, Homo sapiens
  misc_RNA (1)...(19): siRNA sense strand
cagaagcugugcuguccuu

SEQ ID NO: 1093612 - RNA, 19 nt, Homo sapiens
  misc_RNA (1)...(19): siRNA sense strand
ucaagaaagauccugguuu

SEQ ID NO: 1093613 - RNA, 19 nt, Homo sapiens
  misc_RNA (1)...(19): siRNA sense strand
uaaauaugacuguccaaug

SEQ ID NO: 1093614 - RNA, 19 nt, Homo sapiens
  misc_RNA (1)...(19): siRNA sense strand
aaaguuggacagcgguuua

SEQ ID NO: 1093615 - RNA, 19 nt, Homo sapiens
  misc_RNA (1)...(19): siRNA sense strand
cauuccagcucuuuguuga

SEQ ID NO: 1093616 - RNA, 19 nt, Homo sapiens
  misc_RNA (1)...(19): siRNA sense strand
ccagaugccaccugugauu

SEQ ID NO: 1093617 - RNA, 19 nt, Homo sapiens
  misc_RNA (1)...(19): siRNA sense strand
gaacacuaaccggcaacua

SEQ ID NO: 1093618 - RNA, 19 nt, Homo sapiens
  misc_RNA (1)...(19): siRNA sense strand
gcagaaccucuuccugaga

SEQ ID NO: 1093619 - RNA, 19 nt, Homo sapiens
  misc_RNA (1)...(19): siRNA sense strand
gauaucggacccuaacuuc

SEQ ID NO: 1093620 - RNA, 19 nt, Homo sapiens
  misc_RNA (1)...(19): siRNA sense strand
ggacgagacgagcccacua

SEQ ID NO: 1093621 - RNA, 19 nt, Homo sapiens
  misc_RNA (1)...(19): siRNA sense strand
ggaccaaguggcugcagaa

SEQ ID NO: 1093622 - RNA, 19 nt, Homo sapiens
  misc_RNA (1)...(19): siRNA sense strand
ggacuuggaagaggaccua

SEQ ID NO: 1093623 - RNA, 19 nt, Homo sapiens
  misc_RNA (1)...(19): siRNA sense strand
gugagaccuucaacuauag

SEQ ID NO: 1093624 - RNA, 19 nt, Homo sapiens
  misc_RNA (1)...(19): siRNA sense strand
caucgagcgcugcaucuuu

SEQ ID NO: 1093625 - RNA, 19 nt, Homo sapiens
  misc_RNA (1)...(19): siRNA sense strand
ggaggaucauugcugucuu

SEQ ID NO: 1093626 - RNA, 19 nt, Homo sapiens
  misc_RNA (1)...(19): siRNA sense strand
ggugcuggauuacaucauc

SEQ ID NO: 1093627 - RNA, 19 nt, Homo sapiens
  misc_RNA (1)...(19): siRNA sense strand
caaagaugcagacuauugg

SEQ ID NO: 1093628 - RNA, 19 nt, Homo sapiens
  misc_RNA (1)...(19): siRNA sense strand
uaaccagggcuaucucuca

SEQ ID NO: 1093629 - RNA, 19 nt, Homo sapiens
  misc_RNA (1)...(19): siRNA sense strand
caacuggcugauuaaauau

SEQ ID NO: 1093630 - RNA, 19 nt, Homo sapiens
  misc_RNA (1)...(19): siRNA sense strand
acuauuggcugcggcguuu

SEQ ID NO: 1093631 - RNA, 19 nt, Homo sapiens
  misc_RNA (1)...(19): siRNA sense strand
caaagauaucggacccuaa

SEQ ID NO: 1093632 - RNA, 19 nt, Homo sapiens
  misc_RNA (1)...(19): siRNA sense strand
gacaacuggcugauuaaau

SEQ ID NO: 1093633 - RNA, 19 nt, Homo sapiens
  misc_RNA (1)...(19): siRNA sense strand
cagacugggugguggugaa

SEQ ID NO: 1093634 - RNA, 19 nt, Homo sapiens
  misc_RNA (1)...(19): siRNA sense strand
guccagaugccaccuguga

SEQ ID NO: 1093635 - RNA, 19 nt, Homo sapiens
  misc_RNA (1)...(19): siRNA sense strand
ugacccaggccuugaaaga

SEQ ID NO: 1093636 - RNA, 19 nt, Homo sapiens
  misc_RNA (1)...(19): siRNA sense strand
ccaguuccauaagcagauu

SEQ ID NO: 1093637 - RNA, 19 nt, Homo sapiens
  misc_RNA (1)...(19): siRNA sense strand
gcuacaaagaugcagacua

SEQ ID NO: 1093638 - RNA, 19 nt, Homo sapiens
  misc_RNA (1)...(19): siRNA sense strand
cuucaacuauagugccauu

SEQ ID NO: 1093639 - RNA, 19 nt, Homo sapiens
  misc_RNA (1)...(19): siRNA sense strand
aagaggaccuauaugaacu

SEQ ID NO: 1093640 - RNA, 19 nt, Homo sapiens
  misc_RNA (1)...(19): siRNA sense strand
augggcaucuuaauccuaa

SEQ ID NO: 1093641 - RNA, 19 nt, Homo sapiens
  misc_RNA (1)...(19): siRNA sense strand
caacuauagugccauugac

SEQ ID NO: 1093642 - RNA, 19 nt, Homo sapiens
  misc_RNA (1)...(19): siRNA sense strand
gagaaagugccaaaaguug

SEQ ID NO: 1093643 - RNA, 19 nt, Homo sapiens
  misc_RNA (1)...(19): siRNA sense strand
gauuacaucauccgcaaca

SEQ ID NO: 1093644 - RNA, 19 nt, Homo sapiens
  misc_RNA (1)...(19): siRNA sense strand
aacuggaacucaacauugu

SEQ ID NO: 1093645 - RNA, 19 nt, Homo sapiens
  misc_RNA (1)...(19): siRNA sense strand
guggugaaggagccuguua

SEQ ID NO: 1093646 - RNA, 19 nt, Homo sapiens
  misc_RNA (1)...(19): siRNA sense strand
ugacaacuggcugauuaaa

SEQ ID NO: 1093647 - RNA, 19 nt, Homo sapiens
  misc_RNA (1)...(19): siRNA sense strand
acacugaucgaggcaauga

SEQ ID NO: 1093648 - RNA, 19 nt, Homo sapiens
  misc_RNA (1)...(19): siRNA sense strand
ggucuucuagcgaguccua

SEQ ID NO: 1093649 - RNA, 19 nt, Homo sapiens
  misc_RNA (1)...(19): siRNA sense strand
acuggcugauuaaauauga

SEQ ID NO: 1093650 - RNA, 19 nt, Homo sapiens
  misc_RNA (1)...(19): siRNA sense strand
cagugagaccuucaacuau

SEQ ID NO: 1093651 - RNA, 19 nt, Homo sapiens
  misc_RNA (1)...(19): siRNA sense strand
ucaaacccaagaaugaaga

SEQ ID NO: 1093652 - RNA, 19 nt, Homo sapiens
  misc_RNA (1)...(19): siRNA sense strand
aauccuaaguggaccaagu

SEQ ID NO: 1093653 - RNA, 19 nt, Homo sapiens
  misc_RNA (1)...(19): siRNA sense strand
ggugaaggagccuguuauc

SEQ ID NO: 1093654 - RNA, 19 nt, Homo sapiens
  misc_RNA (1)...(19): siRNA sense strand
aaagauaucggacccuaac

SEQ ID NO: 1093655 - RNA, 19 nt, Homo sapiens
  misc_RNA (1)...(19): siRNA sense strand
cuuggaagaggaccuauau

SEQ ID NO: 1093656 - RNA, 19 nt, Homo sapiens
  misc_RNA (1)...(19): siRNA sense strand
gaugccaccugugauuguc

SEQ ID NO: 1093657 - RNA, 19 nt, Homo sapiens
  misc_RNA (1)...(19): siRNA sense strand
acccaggccuugaaagaca

SEQ ID NO: 1093658 - RNA, 19 nt, Homo sapiens
  misc_RNA (1)...(19): siRNA sense strand
ggcuugcacuagagaaagu

SEQ ID NO: 1093659 - RNA, 19 nt, Homo sapiens
  misc_RNA (1)...(19): siRNA sense strand
agaaugaagagcccuaugg

SEQ ID NO: 1093660 - RNA, 19 nt, Homo sapiens
  misc_RNA (1)...(19): siRNA sense strand
ugacugccuuguccuuaac

SEQ ID NO: 1093661 - RNA, 19 nt, Homo sapiens
  misc_RNA (1)...(19): siRNA sense strand
gugaaggagccuguuauca

SEQ ID NO: 1093662 - RNA, 19 nt, Homo sapiens
  misc_RNA (1)...(19): siRNA sense strand
caaugacaacuggcugauu

SEQ ID NO: 1093663 - RNA, 19 nt, Homo sapiens
  misc_RNA (1)...(19): siRNA sense strand
gcaaugacaacuggcugau

SEQ ID NO: 1093664 - RNA, 19 nt, Homo sapiens
  misc_RNA (1)...(19): siRNA sense strand
uagagaaagugccaaaagu

SEQ ID NO: 1093665 - RNA, 19 nt, Homo sapiens
  misc_RNA (1)...(19): siRNA sense strand
gacgagacgagcccacuag

SEQ ID NO: 1093666 - RNA, 19 nt, Homo sapiens
  misc_RNA (1)...(19): siRNA sense strand
guucauuccagcucuuugu

SEQ ID NO: 1093667 - RNA, 19 nt, Homo sapiens
  misc_RNA (1)...(19): siRNA sense strand
ccaggcgaaagucccauuu

SEQ ID NO: 1093668 - RNA, 19 nt, Homo sapiens
  misc_RNA (1)...(19): siRNA sense strand
ccauaaagcugucaagaaa

SEQ ID NO: 1093669 - RNA, 19 nt, Homo sapiens
  misc_RNA (1)...(19): siRNA sense strand
caacaagucccacaucuuu

SEQ ID NO: 1093670 - RNA, 19 nt, Homo sapiens
  misc_RNA (1)...(19): siRNA sense strand
ggugaacucuucuuuacua

SEQ ID NO: 1093671 - RNA, 19 nt, Homo sapiens
  misc_RNA (1)...(19): siRNA sense strand
gaagagcccgguugcauuu

SEQ ID NO: 1093672 - RNA, 19 nt, Homo sapiens
  misc_RNA (1)...(19): siRNA sense strand
caaauggauucuuggagua

SEQ ID NO: 1093673 - RNA, 19 nt, Homo sapiens
  misc_RNA (1)...(19): siRNA sense strand
gaaaagagcugcagcaaac

SEQ ID NO: 1093674 - RNA, 19 nt, Homo sapiens
  misc_RNA (1)...(19): siRNA sense strand
gauccugccuguccuggua

SEQ ID NO: 1093675 - RNA, 19 nt, Homo sapiens
  misc_RNA (1)...(19): siRNA sense strand
ggacggugcuagugagaga

SEQ ID NO: 1093676 - RNA, 19 nt, Homo sapiens
  misc_RNA (1)...(19): siRNA sense strand
ccagagauuugauuucguu

SEQ ID NO: 1093677 - RNA, 19 nt, Homo sapiens
  misc_RNA (1)...(19): siRNA sense strand
ggaaggaccaggaugaaga

SEQ ID NO: 1093678 - RNA, 19 nt, Homo sapiens
  misc_RNA (1)...(19): siRNA sense strand
ggagucaucucuuucuaca

SEQ ID NO: 1093679 - RNA, 19 nt, Homo sapiens
  misc_RNA (1)...(19): siRNA sense strand
ccaagggucuuaccgaugu

SEQ ID NO: 1093680 - RNA, 19 nt, Homo sapiens
  misc_RNA (1)...(19): siRNA sense strand
caaaucagaggaaucaauu

SEQ ID NO: 1093681 - RNA, 19 nt, Homo sapiens
  misc_RNA (1)...(19): siRNA sense strand
caaggugaacucuucuuua

SEQ ID NO: 1093682 - RNA, 19 nt, Homo sapiens
  misc_RNA (1)...(19): siRNA sense strand
ugacggagguggacaaucu

SEQ ID NO: 1093683 - RNA, 19 nt, Homo sapiens
  misc_RNA (1)...(19): siRNA sense strand
gaaccuugccuucaugaug

SEQ ID NO: 1093684 - RNA, 19 nt, Homo sapiens
  misc_RNA (1)...(19): siRNA sense strand
gaucugaugccggaauaua

SEQ ID NO: 1093685 - RNA, 19 nt, Homo sapiens
  misc_RNA (1)...(19): siRNA sense strand
aagcaggagucaucucuuu

SEQ ID NO: 1093686 - RNA, 19 nt, Homo sapiens
  misc_RNA (1)...(19): siRNA sense strand
gaagggaaaggccaugcua

SEQ ID NO: 1093687 - RNA, 19 nt, Homo sapiens
  misc_RNA (1)...(19): siRNA sense strand
ggaccaggaugaagaucug

SEQ ID NO: 1093688 - RNA, 19 nt, Homo sapiens
  misc_RNA (1)...(19): siRNA sense strand
cacagcaccucuagucauu

SEQ ID NO: 1093689 - RNA, 19 nt, Homo sapiens
  misc_RNA (1)...(19): siRNA sense strand
ccaaacucauccuuucuga

SEQ ID NO: 1093690 - RNA, 19 nt, Homo sapiens
  misc_RNA (1)...(19): siRNA sense strand
ccucaucccucucgucuuc

SEQ ID NO: 1093691 - RNA, 19 nt, Homo sapiens
  misc_RNA (1)...(19): siRNA sense strand
cagcaccucuagucauuug

SEQ ID NO: 1093692 - RNA, 19 nt, Homo sapiens
  misc_RNA (1)...(19): siRNA sense strand
gagauuugauuucguuguc

SEQ ID NO: 1093693 - RNA, 19 nt, Homo sapiens
  misc_RNA (1)...(19): siRNA sense strand
uggacaaucuucuuucaga

SEQ ID NO: 1093694 - RNA, 19 nt, Homo sapiens
  misc_RNA (1)...(19): siRNA sense strand
agucaucucuuucuacaau

SEQ ID NO: 1093695 - RNA, 19 nt, Homo sapiens
  misc_RNA (1)...(19): siRNA sense strand
ugccuuaucuggaagcaaa

SEQ ID NO: 1093696 - RNA, 19 nt, Homo sapiens
  misc_RNA (1)...(19): siRNA sense strand
gguggacaaucuucuuuca

SEQ ID NO: 1093697 - RNA, 19 nt, Homo sapiens
  misc_RNA (1)...(19): siRNA sense strand
gacaagaccaaauggauuc

SEQ ID NO: 1093698 - RNA, 19 nt, Homo sapiens
  misc_RNA (1)...(19): siRNA sense strand
caaguuggaaaucugagua

SEQ ID NO: 1093699 - RNA, 19 nt, Homo sapiens
  misc_RNA (1)...(19): siRNA sense strand
aaacacagcaccucuaguc

SEQ ID NO: 1093700 - RNA, 19 nt, Homo sapiens
  misc_RNA (1)...(19): siRNA sense strand
ucccacaucuuuacuuuca

SEQ ID NO: 1093701 - RNA, 19 nt, Homo sapiens
  misc_RNA (1)...(19): siRNA sense strand
gagacaagaccaaauggau

SEQ ID NO: 1093702 - RNA, 19 nt, Homo sapiens
  misc_RNA (1)...(19): siRNA sense strand
agacacagcacaucccaaa

SEQ ID NO: 1093703 - RNA, 19 nt, Homo sapiens
  misc_RNA (1)...(19): siRNA sense strand
gcaaagaagagcaaaagaa

SEQ ID NO: 1093704 - RNA, 19 nt, Homo sapiens
  misc_RNA (1)...(19): siRNA sense strand
uuggaaaucugaguaaaga

SEQ ID NO: 1093705 - RNA, 19 nt, Homo sapiens
  misc_RNA (1)...(19): siRNA sense strand
gagaagagcccgguugcau

SEQ ID NO: 1093706 - RNA, 19 nt, Homo sapiens
  misc_RNA (1)...(19): siRNA sense strand
guaaagaggacaccgugau

SEQ ID NO: 1093707 - RNA, 19 nt, Homo sapiens
  misc_RNA (1)...(19): siRNA sense strand
gagguggacaaucuucuuu

SEQ ID NO: 1093708 - RNA, 19 nt, Homo sapiens
  misc_RNA (1)...(19): siRNA sense strand
caaagaagagcaaaagaaa

SEQ ID NO: 1093709 - RNA, 19 nt, Homo sapiens
  misc_RNA (1)...(19): siRNA sense strand
gaagaucugaugccggaau

SEQ ID NO: 1093710 - RNA, 19 nt, Homo sapiens
  misc_RNA (1)...(19): siRNA sense strand
aaggugaacucuucuuuac

SEQ ID NO: 1093711 - RNA, 19 nt, Homo sapiens
  misc_RNA (1)...(19): siRNA sense strand
gggaaaggccaugcuaaug

SEQ ID NO: 1093712 - RNA, 19 nt, Homo sapiens
  misc_RNA (1)...(19): siRNA sense strand
acacaaaucagaggaauca

SEQ ID NO: 1093713 - RNA, 19 nt, Homo sapiens
  misc_RNA (1)...(19): siRNA sense strand
gaaggaccaggaugaagau

SEQ ID NO: 1093714 - RNA, 19 nt, Homo sapiens
  misc_RNA (1)...(19): siRNA sense strand
aagaucugaugccggaaua

SEQ ID NO: 1093715 - RNA, 19 nt, Homo sapiens
  misc_RNA (1)...(19): siRNA sense strand
caggagucaucucuuucua

SEQ ID NO: 1093716 - RNA, 19 nt, Homo sapiens
  misc_RNA (1)...(19): siRNA sense strand
gaggaccaaagauguguaa

SEQ ID NO: 1093717 - RNA, 19 nt, Homo sapiens
  misc_RNA (1)...(19): siRNA sense strand
agacaagaccaaauggauu

SEQ ID NO: 1093718 - RNA, 19 nt, Homo sapiens
  misc_RNA (1)...(19): siRNA sense strand
ggauuuuccuggacuauga

SEQ ID NO: 1093719 - RNA, 19 nt, Homo sapiens
  misc_RNA (1)...(19): siRNA sense strand
gccuuugccuuaucuggaa

SEQ ID NO: 1093720 - RNA, 19 nt, Homo sapiens
  misc_RNA (1)...(19): siRNA sense strand
ucaaggugaacucuucuuu

SEQ ID NO: 1093721 - RNA, 19 nt, Homo sapiens
  misc_RNA (1)...(19): siRNA sense strand
ucuacaaugugaccaacaa

SEQ ID NO: 1093722 - RNA, 19 nt, Homo sapiens
  misc_RNA (1)...(19): siRNA sense strand
cagaccuccuuccgccuua

SEQ ID NO: 1093723 - RNA, 19 nt, Homo sapiens
  misc_RNA (1)...(19): siRNA sense strand
uucccaggcuguucacaua

SEQ ID NO: 1093724 - RNA, 19 nt, Homo sapiens
  misc_RNA (1)...(19): siRNA sense strand
ggagacaagaccaaaugga

SEQ ID NO: 1093725 - RNA, 19 nt, Homo sapiens
  misc_RNA (1)...(19): siRNA sense strand
auaaagcugucaagaaacu

SEQ ID NO: 1093726 - RNA, 19 nt, Homo sapiens
  misc_RNA (1)...(19): siRNA sense strand
ccccagagcugaaggauau

SEQ ID NO: 1093727 - RNA, 19 nt, Homo sapiens
  misc_RNA (1)...(19): siRNA sense strand
gcaccucuagucauuuguu

SEQ ID NO: 1093728 - RNA, 19 nt, Homo sapiens
  misc_RNA (1)...(19): siRNA sense strand
ggagguggacaaucuucuu

SEQ ID NO: 1093729 - RNA, 19 nt, Homo sapiens
  misc_RNA (1)...(19): siRNA sense strand
cuacacaaaucagaggaau

SEQ ID NO: 1093730 - RNA, 19 nt, Homo sapiens
  misc_RNA (1)...(19): siRNA sense strand
uuacuuucacccacaauuu

SEQ ID NO: 1093731 - RNA, 19 nt, Homo sapiens
  misc_RNA (1)...(19): siRNA sense strand
gggaggacggugcuaguga

SEQ ID NO: 1093732 - RNA, 19 nt, Homo sapiens
  misc_RNA (1)...(19): siRNA sense strand
uuucagaccaugcuaaaga

SEQ ID NO: 1093733 - RNA, 19 nt, Homo sapiens
  misc_RNA (1)...(19): siRNA sense strand
agucccacaucuuuacuuu

SEQ ID NO: 1093734 - RNA, 19 nt, Homo sapiens
  misc_RNA (1)...(19): siRNA sense strand
ggaccaaagauguguaagg

SEQ ID NO: 1093735 - RNA, 19 nt, Homo sapiens
  misc_RNA (1)...(19): siRNA sense strand
cccaggcuguucacauauu

SEQ ID NO: 1093736 - RNA, 19 nt, Homo sapiens
  misc_RNA (1)...(19): siRNA sense strand
gcaggagucaucucuuucu

SEQ ID NO: 1093737 - RNA, 19 nt, Homo sapiens
  misc_RNA (1)...(19): siRNA sense strand
uggaguauguagugaguca

SEQ ID NO: 1093738 - RNA, 19 nt, Homo sapiens
  misc_RNA (1)...(19): siRNA sense strand
ccaggcuguucacauauuc

SEQ ID NO: 1093739 - RNA, 19 nt, Homo sapiens
  misc_RNA (1)...(19): siRNA sense strand
ucuagucauuuguucagaa

SEQ ID NO: 1093740 - RNA, 19 nt, Homo sapiens
  misc_RNA (1)...(19): siRNA sense strand
gacagagucgugggaauga

SEQ ID NO: 1093741 - RNA, 19 nt, Homo sapiens
  misc_RNA (1)...(19): siRNA sense strand
ccuaggcucugaguacuuc

SEQ ID NO: 1093742 - RNA, 19 nt, Homo sapiens
  misc_RNA (1)...(19): siRNA sense strand
agaagagcccgguugcauu

SEQ ID NO: 1093743 - RNA, 19 nt, Homo sapiens
  misc_RNA (1)...(19): siRNA sense strand
ccugguacuucucaucaug

SEQ ID NO: 1093744 - RNA, 19 nt, Homo sapiens
  misc_RNA (1)...(19): siRNA sense strand
agugagagaugcccaagag

SEQ ID NO: 1093745 - RNA, 19 nt, Homo sapiens
  misc_RNA (1)...(19): siRNA sense strand
uguaaggcuuggagacaga

SEQ ID NO: 1093746 - RNA, 19 nt, Homo sapiens
  misc_RNA (1)...(19): siRNA sense strand
uaaagaggacaccgugauc

SEQ ID NO: 1093747 - RNA, 19 nt, Homo sapiens
  misc_RNA (1)...(19): siRNA sense strand
gaagcaggagucaucucuu

SEQ ID NO: 1093748 - RNA, 19 nt, Homo sapiens
  misc_RNA (1)...(19): siRNA sense strand
ccaacaagucccacaucuu

SEQ ID NO: 1093749 - RNA, 19 nt, Homo sapiens
  misc_RNA (1)...(19): siRNA sense strand
gcaaacucaggcuggagaa

SEQ ID NO: 1093750 - RNA, 19 nt, Homo sapiens
  misc_RNA (1)...(19): siRNA sense strand
acaaaucagaggaaucaau

SEQ ID NO: 1093751 - RNA, 19 nt, Homo sapiens
  misc_RNA (1)...(19): siRNA sense strand
aaacucaggcuggagaaga

SEQ ID NO: 1093752 - RNA, 19 nt, Homo sapiens
  misc_RNA (1)...(19): siRNA sense strand
caucccaaacucauccuuu

SEQ ID NO: 1093753 - RNA, 19 nt, Homo sapiens
  misc_RNA (1)...(19): siRNA sense strand
ccagagcugaaggauauaa

SEQ ID NO: 1093754 - RNA, 19 nt, Homo sapiens
  misc_RNA (1)...(19): siRNA sense strand
aaucagaggaaucaauugu

SEQ ID NO: 1093755 - RNA, 19 nt, Homo sapiens
  misc_RNA (1)...(19): siRNA sense strand
aagcuucucuaugaacaug

SEQ ID NO: 1093756 - RNA, 19 nt, Homo sapiens
  misc_RNA (1)...(19): siRNA sense strand
gugagucagugagcaggaa

SEQ ID NO: 1093757 - RNA, 19 nt, Homo sapiens
  misc_RNA (1)...(19): siRNA sense strand
guauguagugagucaguga

SEQ ID NO: 1093758 - RNA, 19 nt, Homo sapiens
  misc_RNA (1)...(19): siRNA sense strand
ggugugccuuugccuuauc

SEQ ID NO: 1093759 - RNA, 19 nt, Homo sapiens
  misc_RNA (1)...(19): siRNA sense strand
uccauaaagcugucaagaa

SEQ ID NO: 1093760 - RNA, 19 nt, Homo sapiens
  misc_RNA (1)...(19): siRNA sense strand
ggaagcaaagaagagcaaa

SEQ ID NO: 1093761 - RNA, 19 nt, Homo sapiens
  misc_RNA (1)...(19): siRNA sense strand
aacaagucccacaucuuua

SEQ ID NO: 1093762 - RNA, 19 nt, Homo sapiens
  misc_RNA (1)...(19): siRNA sense strand
ucaucucuuucuacaaugu

SEQ ID NO: 1093763 - RNA, 19 nt, Homo sapiens
  misc_RNA (1)...(19): siRNA sense strand
uucagaccaugcuaaagaa

SEQ ID NO: 1093764 - RNA, 19 nt, Homo sapiens
  misc_RNA (1)...(19): siRNA sense strand
cauccuaggcucugaguac

SEQ ID NO: 1093765 - RNA, 19 nt, Homo sapiens
  misc_RNA (1)...(19): siRNA sense strand
cagcacaucccaaacucau

SEQ ID NO: 1093766 - RNA, 19 nt, Homo sapiens
  misc_RNA (1)...(19): siRNA sense strand
cagaacuacacaaaucaga

SEQ ID NO: 1093767 - RNA, 19 nt, Homo sapiens
  misc_RNA (1)...(19): siRNA sense strand
gaccaacaagucccacauc

SEQ ID NO: 1093768 - RNA, 19 nt, Homo sapiens
  misc_RNA (1)...(19): siRNA sense strand
gcaaggaagucauccagua

SEQ ID NO: 1093769 - RNA, 19 nt, Homo sapiens
  misc_RNA (1)...(19): siRNA sense strand
gagaagagcugaugacaca

SEQ ID NO: 1093770 - RNA, 19 nt, Homo sapiens
  misc_RNA (1)...(19): siRNA sense strand
caaaggagaugaugauuca

SEQ ID NO: 1093771 - RNA, 19 nt, Homo sapiens
  misc_RNA (1)...(19): siRNA sense strand
cauaauagguccugcauug

SEQ ID NO: 1093772 - RNA, 19 nt, Homo sapiens
  misc_RNA (1)...(19): siRNA sense strand
gaaaggaaagcuaaggaaa

SEQ ID NO: 1093773 - RNA, 19 nt, Homo sapiens
  misc_RNA (1)...(19): siRNA sense strand
gauaaagaucucaagguua

SEQ ID NO: 1093774 - RNA, 19 nt, Homo sapiens
  misc_RNA (1)...(19): siRNA sense strand
caagagagaauaccauuug

SEQ ID NO: 1093775 - RNA, 19 nt, Homo sapiens
  misc_RNA (1)...(19): siRNA sense strand
ugauaaagaucucaagguu

SEQ ID NO: 1093776 - RNA, 19 nt, Homo sapiens
  misc_RNA (1)...(19): siRNA sense strand
gaagucauccaguaagaaa

SEQ ID NO: 1093777 - RNA, 19 nt, Homo sapiens
  misc_RNA (1)...(19): siRNA sense strand
gaagaugaggauauuauug

SEQ ID NO: 1093778 - RNA, 19 nt, Homo sapiens
  misc_RNA (1)...(19): siRNA sense strand
gaacagcggaggacgaaga

SEQ ID NO: 1093779 - RNA, 19 nt, Homo sapiens
  misc_RNA (1)...(19): siRNA sense strand
gaacuaaacaccagauuuu

SEQ ID NO: 1093780 - RNA, 19 nt, Homo sapiens
  misc_RNA (1)...(19): siRNA sense strand
gagacuggcugagcaggua

SEQ ID NO: 1093781 - RNA, 19 nt, Homo sapiens
  misc_RNA (1)...(19): siRNA sense strand
aaauaagccucaagagaga

SEQ ID NO: 1093782 - RNA, 19 nt, Homo sapiens
  misc_RNA (1)...(19): siRNA sense strand
uaaggcugcugaagacaaa

SEQ ID NO: 1093783 - RNA, 19 nt, Homo sapiens
  misc_RNA (1)...(19): siRNA sense strand
agaaggaaaucaagaaucu

SEQ ID NO: 1093784 - RNA, 19 nt, Homo sapiens
  misc_RNA (1)...(19): siRNA sense strand
gaagaaggaaaucaagaau

SEQ ID NO: 1093785 - RNA, 19 nt, Homo sapiens
  misc_RNA (1)...(19): siRNA sense strand
ggaaaggaaagcuaaggaa

SEQ ID NO: 1093786 - RNA, 19 nt, Homo sapiens
  misc_RNA (1)...(19): siRNA sense strand
ccaccugguuucauuaaau

SEQ ID NO: 1093787 - RNA, 19 nt, Homo sapiens
  misc_RNA (1)...(19): siRNA sense strand
cagaaucucuuauggacau

SEQ ID NO: 1093788 - RNA, 19 nt, Homo sapiens
  misc_RNA (1)...(19): siRNA sense strand
caaggaagucauccaguaa

SEQ ID NO: 1093789 - RNA, 19 nt, Homo sapiens
  misc_RNA (1)...(19): siRNA sense strand
gaacuuccuccagaaauga

SEQ ID NO: 1093790 - RNA, 19 nt, Homo sapiens
  misc_RNA (1)...(19): siRNA sense strand
ggaaacagacagcagugaa

SEQ ID NO: 1093791 - RNA, 19 nt, Homo sapiens
  misc_RNA (1)...(19): siRNA sense strand
aaggaccaguuaacuauaa

SEQ ID NO: 1093792 - RNA, 19 nt, Homo sapiens
  misc_RNA (1)...(19): siRNA sense strand
cggcaaaggcaauauguuu

SEQ ID NO: 1093793 - RNA, 19 nt, Homo sapiens
  misc_RNA (1)...(19): siRNA sense strand
gcccagagaaugaaagaaa

SEQ ID NO: 1093794 - RNA, 19 nt, Homo sapiens
  misc_RNA (1)...(19): siRNA sense strand
gaaaucaagaaucugaaga

SEQ ID NO: 1093795 - RNA, 19 nt, Homo sapiens
  misc_RNA (1)...(19): siRNA sense strand
gaguaaggcugcugaagac

SEQ ID NO: 1093796 - RNA, 19 nt, Homo sapiens
  misc_RNA (1)...(19): siRNA sense strand
gaucagaaucucuuaugga

SEQ ID NO: 1093797 - RNA, 19 nt, Homo sapiens
  misc_RNA (1)...(19): siRNA sense strand
gcagugaagaugaggauau

SEQ ID NO: 1093798 - RNA, 19 nt, Homo sapiens
  misc_RNA (1)...(19): siRNA sense strand
cgaagaaggaaaucaagaa

SEQ ID NO: 1093799 - RNA, 19 nt, Homo sapiens
  misc_RNA (1)...(19): siRNA sense strand
cuaaacccauuguaagaga

SEQ ID NO: 1093800 - RNA, 19 nt, Homo sapiens
  misc_RNA (1)...(19): siRNA sense strand
agacagcgaugaagacagu

SEQ ID NO: 1093801 - RNA, 19 nt, Homo sapiens
  misc_RNA (1)...(19): siRNA sense strand
guacgaagaaggaaaucaa

SEQ ID NO: 1093802 - RNA, 19 nt, Homo sapiens
  misc_RNA (1)...(19): siRNA sense strand
ugaacuuccuccagaaaug

SEQ ID NO: 1093803 - RNA, 19 nt, Homo sapiens
  misc_RNA (1)...(19): siRNA sense strand
ggaaagcuaaggaaacaca

SEQ ID NO: 1093804 - RNA, 19 nt, Homo sapiens
  misc_RNA (1)...(19): siRNA sense strand
cugagcagguaucuucaua

SEQ ID NO: 1093805 - RNA, 19 nt, Homo sapiens
  misc_RNA (1)...(19): siRNA sense strand
uaauguaacgacagaguuu

SEQ ID NO: 1093806 - RNA, 19 nt, Homo sapiens
  misc_RNA (1)...(19): siRNA sense strand
cagugaagaugaggauauu

SEQ ID NO: 1093807 - RNA, 19 nt, Homo sapiens
  misc_RNA (1)...(19): siRNA sense strand
gugaagaugaggauauuau

SEQ ID NO: 1093808 - RNA, 19 nt, Homo sapiens
  misc_RNA (1)...(19): siRNA sense strand
guaagaaagaugaagaaca

SEQ ID NO: 1093809 - RNA, 19 nt, Homo sapiens
  misc_RNA (1)...(19): siRNA sense strand
aaggaaagcuaaggaaaca

SEQ ID NO: 1093810 - RNA, 19 nt, Homo sapiens
  misc_RNA (1)...(19): siRNA sense strand
gaagaugacagugguccaa

SEQ ID NO: 1093811 - RNA, 19 nt, Homo sapiens
  misc_RNA (1)...(19): siRNA sense strand
ucucaagguuaaucgguuu

SEQ ID NO: 1093812 - RNA, 19 nt, Homo sapiens
  misc_RNA (1)...(19): siRNA sense strand
gaccaaaggagaugaugau

SEQ ID NO: 1093813 - RNA, 19 nt, Homo sapiens
  misc_RNA (1)...(19): siRNA sense strand
gaaacagacagcagugaag

SEQ ID NO: 1093814 - RNA, 19 nt, Homo sapiens
  misc_RNA (1)...(19): siRNA sense strand
ugacgaugaugaugaugau

SEQ ID NO: 1093815 - RNA, 19 nt, Homo sapiens
  misc_RNA (1)...(19): siRNA sense strand
guuaaucgguuugaugaag

SEQ ID NO: 1093816 - RNA, 19 nt, Homo sapiens
  misc_RNA (1)...(19): siRNA sense strand
ugauucaucuaaacccauu

SEQ ID NO: 1093817 - RNA, 19 nt, Homo sapiens
  misc_RNA (1)...(19): siRNA sense strand
ugaugaugaugauggguuu

SEQ ID NO: 1093818 - RNA, 19 nt, Homo sapiens
  misc_RNA (1)...(19): siRNA sense strand
caaaaggaccaguuaacua

SEQ ID NO: 1093819 - RNA, 19 nt, Homo sapiens
  misc_RNA (1)...(19): siRNA sense strand
uaaggaaacacaagaagca

SEQ ID NO: 1093820 - RNA, 19 nt, Homo sapiens
  misc_RNA (1)...(19): siRNA sense strand
gauagggaaaggaaagcua

SEQ ID NO: 1093821 - RNA, 19 nt, Homo sapiens
  misc_RNA (1)...(19): siRNA sense strand
ccaaaggagaugaugauuc

SEQ ID NO: 1093822 - RNA, 19 nt, Homo sapiens
  misc_RNA (1)...(19): siRNA sense strand
aagagagaauaccauuuga

SEQ ID NO: 1093823 - RNA, 19 nt, Homo sapiens
  misc_RNA (1)...(19): siRNA sense strand
ggaagucauccaguaagaa

SEQ ID NO: 1093824 - RNA, 19 nt, Homo sapiens
  misc_RNA (1)...(19): siRNA sense strand
ggaaaucaagaaucugaag

SEQ ID NO: 1093825 - RNA, 19 nt, Homo sapiens
  misc_RNA (1)...(19): siRNA sense strand
cagagaugauccaggacaa

SEQ ID NO: 1093826 - RNA, 19 nt, Homo sapiens
  misc_RNA (1)...(19): siRNA sense strand
caucuaaacccauuguaag

SEQ ID NO: 1093827 - RNA, 19 nt, Homo sapiens
  misc_RNA (1)...(19): siRNA sense strand
guaacgacagaguuugaaa

SEQ ID NO: 1093828 - RNA, 19 nt, Homo sapiens
  misc_RNA (1)...(19): siRNA sense strand
agaacuaaacaccagauuu

SEQ ID NO: 1093829 - RNA, 19 nt, Homo sapiens
  misc_RNA (1)...(19): siRNA sense strand
agaguaaggcugcugaaga

SEQ ID NO: 1093830 - RNA, 19 nt, Homo sapiens
  misc_RNA (1)...(19): siRNA sense strand
ccaguaagaaagaugaaga

SEQ ID NO: 1093831 - RNA, 19 nt, Homo sapiens
  misc_RNA (1)...(19): siRNA sense strand
gccaaggacuuuuaagaga

SEQ ID NO: 1093832 - RNA, 19 nt, Homo sapiens
  misc_RNA (1)...(19): siRNA sense strand
gcaagaaaacagaggaaaa

SEQ ID NO: 1093833 - RNA, 19 nt, Homo sapiens
  misc_RNA (1)...(19): siRNA sense strand
cauuugaccgugauaaaga

SEQ ID NO: 1093834 - RNA, 19 nt, Homo sapiens
  misc_RNA (1)...(19): siRNA sense strand
guaaggcugcugaagacaa

SEQ ID NO: 1093835 - RNA, 19 nt, Homo sapiens
  misc_RNA (1)...(19): siRNA sense strand
gacugaacuuccuccagaa

SEQ ID NO: 1093836 - RNA, 19 nt, Homo sapiens
  misc_RNA (1)...(19): siRNA sense strand
ucaucuaaacccauuguaa

SEQ ID NO: 1093837 - RNA, 19 nt, Homo sapiens
  misc_RNA (1)...(19): siRNA sense strand
agacaguaguucuuuguac

SEQ ID NO: 1093838 - RNA, 19 nt, Homo sapiens
  misc_RNA (1)...(19): siRNA sense strand
ugaugacgaugaugaugau

SEQ ID NO: 1093839 - RNA, 19 nt, Homo sapiens
  misc_RNA (1)...(19): siRNA sense strand
acuauaauguaacgacaga

SEQ ID NO: 1093840 - RNA, 19 nt, Homo sapiens
  misc_RNA (1)...(19): siRNA sense strand
aaaggaccaguuaacuaua

SEQ ID NO: 1093841 - RNA, 19 nt, Homo sapiens
  misc_RNA (1)...(19): siRNA sense strand
ggacaacaggaaacagaca

SEQ ID NO: 1093842 - RNA, 19 nt, Homo sapiens
  misc_RNA (1)...(19): siRNA sense strand
ccaaggacuuuuaagagaa

SEQ ID NO: 1093843 - RNA, 19 nt, Homo sapiens
  misc_RNA (1)...(19): siRNA sense strand
cuccagaaaugaaagacuu

SEQ ID NO: 1093844 - RNA, 19 nt, Homo sapiens
  misc_RNA (1)...(19): siRNA sense strand
agacagcagugaagaugag

SEQ ID NO: 1093845 - RNA, 19 nt, Homo sapiens
  misc_RNA (1)...(19): siRNA sense strand
gacagauacuccagcugau

SEQ ID NO: 1093846 - RNA, 19 nt, Homo sapiens
  misc_RNA (1)...(19): siRNA sense strand
ucaagagagaauaccauuu

SEQ ID NO: 1093847 - RNA, 19 nt, Homo sapiens
  misc_RNA (1)...(19): siRNA sense strand
aaggaaaucaagaaucuga

SEQ ID NO: 1093848 - RNA, 19 nt, Homo sapiens
  misc_RNA (1)...(19): siRNA sense strand
aagcaguaguucagauuca

SEQ ID NO: 1093849 - RNA, 19 nt, Homo sapiens
  misc_RNA (1)...(19): siRNA sense strand
gggaaaggaaagcuaagga

SEQ ID NO: 1093850 - RNA, 19 nt, Homo sapiens
  misc_RNA (1)...(19): siRNA sense strand
caccugguuucauuaaauc

SEQ ID NO: 1093851 - RNA, 19 nt, Homo sapiens
  misc_RNA (1)...(19): siRNA sense strand
ucacacggcaaaggcaaua

SEQ ID NO: 1093852 - RNA, 19 nt, Homo sapiens
  misc_RNA (1)...(19): siRNA sense strand
aaacagacagcagugaaga

SEQ ID NO: 1093853 - RNA, 19 nt, Homo sapiens
  misc_RNA (1)...(19): siRNA sense strand
gauccaggacaacaggaaa

SEQ ID NO: 1093854 - RNA, 19 nt, Homo sapiens
  misc_RNA (1)...(19): siRNA sense strand
gagaugauccaggacaaca

SEQ ID NO: 1093855 - RNA, 19 nt, Homo sapiens
  misc_RNA (1)...(19): siRNA sense strand
gagaacuaaacaccagauu

SEQ ID NO: 1093856 - RNA, 19 nt, Homo sapiens
  misc_RNA (1)...(19): siRNA sense strand
guaguucagauucaucaga

SEQ ID NO: 1093857 - RNA, 19 nt, Homo sapiens
  misc_RNA (1)...(19): siRNA sense strand
aggaagucauccaguaaga

SEQ ID NO: 1093858 - RNA, 19 nt, Homo sapiens
  misc_RNA (1)...(19): siRNA sense strand
acagauacuccagcugaua

SEQ ID NO: 1093859 - RNA, 19 nt, Homo sapiens
  misc_RNA (1)...(19): siRNA sense strand
gaccaguuaacuauaaugu

SEQ ID NO: 1093860 - RNA, 19 nt, Homo sapiens
  misc_RNA (1)...(19): siRNA sense strand
caggacaacaggaaacaga

SEQ ID NO: 1093861 - RNA, 19 nt, Homo sapiens
  misc_RNA (1)...(19): siRNA sense strand
uggcugagcagguaucuuc

SEQ ID NO: 1093862 - RNA, 19 nt, Homo sapiens
  misc_RNA (1)...(19): siRNA sense strand
gaaagcuaaggaaacacaa

SEQ ID NO: 1093863 - RNA, 19 nt, Homo sapiens
  misc_RNA (1)...(19): siRNA sense strand
cagcugauagggaaaggaa

SEQ ID NO: 1093864 - RNA, 19 nt, Homo sapiens
  misc_RNA (1)...(19): siRNA sense strand
ucaggaugaugacgaugau

SEQ ID NO: 1093865 - RNA, 19 nt, Homo sapiens
  misc_RNA (1)...(19): siRNA sense strand
gccaccugguuucauuaaa

SEQ ID NO: 1093866 - RNA, 19 nt, Homo sapiens
  misc_RNA (1)...(19): siRNA sense strand
aaacacaagaagcaaggaa

SEQ ID NO: 1093867 - RNA, 19 nt, Homo sapiens
  misc_RNA (1)...(19): siRNA sense strand
caguaguucuuuguacgaa

SEQ ID NO: 1093868 - RNA, 19 nt, Homo sapiens
  misc_RNA (1)...(19): siRNA sense strand
gcacauaacuuuacagaug

SEQ ID NO: 1093869 - RNA, 19 nt, Homo sapiens
  misc_RNA (1)...(19): siRNA sense strand
caagagaacugaauaaugu

SEQ ID NO: 1093870 - RNA, 19 nt, Homo sapiens
  misc_RNA (1)...(19): siRNA sense strand
ggaauuagaagcuuaugua

SEQ ID NO: 1093871 - RNA, 19 nt, Homo sapiens
  misc_RNA (1)...(19): siRNA sense strand
cauaagagcuuugagacua

SEQ ID NO: 1093872 - RNA, 19 nt, Homo sapiens
  misc_RNA (1)...(19): siRNA sense strand
ggaaugggcuauuaagcaa

SEQ ID NO: 1093873 - RNA, 19 nt, Homo sapiens
  misc_RNA (1)...(19): siRNA sense strand
uaagcaagguauccuguua

SEQ ID NO: 1093874 - RNA, 19 nt, Homo sapiens
  misc_RNA (1)...(19): siRNA sense strand
cgacucgacucauuacaua

SEQ ID NO: 1093875 - RNA, 19 nt, Homo sapiens
  misc_RNA (1)...(19): siRNA sense strand
uuacuaaccucgugagaaa

SEQ ID NO: 1093876 - RNA, 19 nt, Homo sapiens
  misc_RNA (1)...(19): siRNA sense strand
caacagaagucaagagaac

SEQ ID NO: 1093877 - RNA, 19 nt, Homo sapiens
  misc_RNA (1)...(19): siRNA sense strand
gagcugggccuuggacuua

SEQ ID NO: 1093878 - RNA, 19 nt, Homo sapiens
  misc_RNA (1)...(19): siRNA sense strand
caacuucuauuuagugauc

SEQ ID NO: 1093879 - RNA, 19 nt, Homo sapiens
  misc_RNA (1)...(19): siRNA sense strand
gaagugauuuccagaggau

SEQ ID NO: 1093880 - RNA, 19 nt, Homo sapiens
  misc_RNA (1)...(19): siRNA sense strand
uucauuagcuugcucguua

SEQ ID NO: 1093881 - RNA, 19 nt, Homo sapiens
  misc_RNA (1)...(19): siRNA sense strand
aaacugcuacgaagaaaua

SEQ ID NO: 1093882 - RNA, 19 nt, Homo sapiens
  misc_RNA (1)...(19): siRNA sense strand
aaagaugacuuacuucaca

SEQ ID NO: 1093883 - RNA, 19 nt, Homo sapiens
  misc_RNA (1)...(19): siRNA sense strand
gaagaggccauuucucaga

SEQ ID NO: 1093884 - RNA, 19 nt, Homo sapiens
  misc_RNA (1)...(19): siRNA sense strand
ucaagaaaccgaagugauu

SEQ ID NO: 1093885 - RNA, 19 nt, Homo sapiens
  misc_RNA (1)...(19): siRNA sense strand
gaagauauggccacaaaca

SEQ ID NO: 1093886 - RNA, 19 nt, Homo sapiens
  misc_RNA (1)...(19): siRNA sense strand
caaguuggauauuggauuc

SEQ ID NO: 1093887 - RNA, 19 nt, Homo sapiens
  misc_RNA (1)...(19): siRNA sense strand
gcacuucugccucaucgua

SEQ ID NO: 1093888 - RNA, 19 nt, Homo sapiens
  misc_RNA (1)...(19): siRNA sense strand
ccaagagggugcuccaaga

SEQ ID NO: 1093889 - RNA, 19 nt, Homo sapiens
  misc_RNA (1)...(19): siRNA sense strand
uggaagauauggccacaaa

SEQ ID NO: 1093890 - RNA, 19 nt, Homo sapiens
  misc_RNA (1)...(19): siRNA sense strand
gacagaagcgugagcauga

SEQ ID NO: 1093891 - RNA, 19 nt, Homo sapiens
  misc_RNA (1)...(19): siRNA sense strand
cacaagaacuagugucaga

SEQ ID NO: 1093892 - RNA, 19 nt, Homo sapiens
  misc_RNA (1)...(19): siRNA sense strand
ggaagcacauaacuuuaca

SEQ ID NO: 1093893 - RNA, 19 nt, Homo sapiens
  misc_RNA (1)...(19): siRNA sense strand
aaacccacauuguacagua

SEQ ID NO: 1093894 - RNA, 19 nt, Homo sapiens
  misc_RNA (1)...(19): siRNA sense strand
gggaagaggccauuucuca

SEQ ID NO: 1093895 - RNA, 19 nt, Homo sapiens
  misc_RNA (1)...(19): siRNA sense strand
agaggaagcacauaacuuu

SEQ ID NO: 1093896 - RNA, 19 nt, Homo sapiens
  misc_RNA (1)...(19): siRNA sense strand
gcacagaguucagaguucu

SEQ ID NO: 1093897 - RNA, 19 nt, Homo sapiens
  misc_RNA (1)...(19): siRNA sense strand
gaggaagcacauaacuuua

SEQ ID NO: 1093898 - RNA, 19 nt, Homo sapiens
  misc_RNA (1)...(19): siRNA sense strand
gagggugcuccaagaauua

SEQ ID NO: 1093899 - RNA, 19 nt, Homo sapiens
  misc_RNA (1)...(19): siRNA sense strand
gcaauaagaaagaugacuu

SEQ ID NO: 1093900 - RNA, 19 nt, Homo sapiens
  misc_RNA (1)...(19): siRNA sense strand
ggacaccuuccaacacuuu

SEQ ID NO: 1093901 - RNA, 19 nt, Homo sapiens
  misc_RNA (1)...(19): siRNA sense strand
caagaaaccgaagugauuu

SEQ ID NO: 1093902 - RNA, 19 nt, Homo sapiens
  misc_RNA (1)...(19): siRNA sense strand
gaggacagccaaacuacaa

SEQ ID NO: 1093903 - RNA, 19 nt, Homo sapiens
  misc_RNA (1)...(19): siRNA sense strand
cuacgaagaaauacagaua

SEQ ID NO: 1093904 - RNA, 19 nt, Homo sapiens
  misc_RNA (1)...(19): siRNA sense strand
cauccuagaacagaaauua

SEQ ID NO: 1093905 - RNA, 19 nt, Homo sapiens
  misc_RNA (1)...(19): siRNA sense strand
cagaagaggaagcacauaa

SEQ ID NO: 1093906 - RNA, 19 nt, Homo sapiens
  misc_RNA (1)...(19): siRNA sense strand
gagcaggaauuagaagcuu

SEQ ID NO: 1093907 - RNA, 19 nt, Homo sapiens
  misc_RNA (1)...(19): siRNA sense strand
gcugcuugcccauuuaaua

SEQ ID NO: 1093908 - RNA, 19 nt, Homo sapiens
  misc_RNA (1)...(19): siRNA sense strand
uaaaguccgcauggaauua

SEQ ID NO: 1093909 - RNA, 19 nt, Homo sapiens
  misc_RNA (1)...(19): siRNA sense strand
gacaaacugcuacgaagaa

SEQ ID NO: 1093910 - RNA, 19 nt, Homo sapiens
  misc_RNA (1)...(19): siRNA sense strand
gcgcagcuaugaguucuau

SEQ ID NO: 1093911 - RNA, 19 nt, Homo sapiens
  misc_RNA (1)...(19): siRNA sense strand
uaucuuaucugaugugacu

SEQ ID NO: 1093912 - RNA, 19 nt, Homo sapiens
  misc_RNA (1)...(19): siRNA sense strand
ucucaucggucuucggaaa

SEQ ID NO: 1093913 - RNA, 19 nt, Homo sapiens
  misc_RNA (1)...(19): siRNA sense strand
guaaaguccgcauggaauu

SEQ ID NO: 1093914 - RNA, 19 nt, Homo sapiens
  misc_RNA (1)...(19): siRNA sense strand
agagggugcuccaagaauu

SEQ ID NO: 1093915 - RNA, 19 nt, Homo sapiens
  misc_RNA (1)...(19): siRNA sense strand
aagagcagauuucagaaga

SEQ ID NO: 1093916 - RNA, 19 nt, Homo sapiens
  misc_RNA (1)...(19): siRNA sense strand
ggagugauucuauuugugu

SEQ ID NO: 1093917 - RNA, 19 nt, Homo sapiens
  misc_RNA (1)...(19): siRNA sense strand
cagaggagcaggaauuaga

SEQ ID NO: 1093918 - RNA, 19 nt, Homo sapiens
  misc_RNA (1)...(19): siRNA sense strand
gcagccuacucuacacauu

SEQ ID NO: 1093919 - RNA, 19 nt, Homo sapiens
  misc_RNA (1)...(19): siRNA sense strand
gugacaauguaaccaacua

SEQ ID NO: 1093920 - RNA, 19 nt, Homo sapiens
  misc_RNA (1)...(19): siRNA sense strand
ggucauaagagcuuugaga

SEQ ID NO: 1093921 - RNA, 19 nt, Homo sapiens
  misc_RNA (1)...(19): siRNA sense strand
cagaaaggcagaaguggaa

SEQ ID NO: 1093922 - RNA, 19 nt, Homo sapiens
  misc_RNA (1)...(19): siRNA sense strand
gugcugggauuuaaagcuu

SEQ ID NO: 1093923 - RNA, 19 nt, Homo sapiens
  misc_RNA (1)...(19): siRNA sense strand
aaggcuagcuacccuauau

SEQ ID NO: 1093924 - RNA, 19 nt, Homo sapiens
  misc_RNA (1)...(19): siRNA sense strand
auacagcguucauuuggaa

SEQ ID NO: 1093925 - RNA, 19 nt, Homo sapiens
  misc_RNA (1)...(19): siRNA sense strand
gcagauuucagaagaggaa

SEQ ID NO: 1093926 - RNA, 19 nt, Homo sapiens
  misc_RNA (1)...(19): siRNA sense strand
gaagacaaagagagacaga

SEQ ID NO: 1093927 - RNA, 19 nt, Homo sapiens
  misc_RNA (1)...(19): siRNA sense strand
ucaagaagacaaagagaga

SEQ ID NO: 1093928 - RNA, 19 nt, Homo sapiens
  misc_RNA (1)...(19): siRNA sense strand
gcuugcagcuccaucugaa

SEQ ID NO: 1093929 - RNA, 19 nt, Homo sapiens
  misc_RNA (1)...(19): siRNA sense strand
ugaguucuaucgguacuuu

SEQ ID NO: 1093930 - RNA, 19 nt, Homo sapiens
  misc_RNA (1)...(19): siRNA sense strand
gagugauucuauuugugua

SEQ ID NO: 1093931 - RNA, 19 nt, Homo sapiens
  misc_RNA (1)...(19): siRNA sense strand
ucaagagaacugaauaaug

SEQ ID NO: 1093932 - RNA, 19 nt, Homo sapiens
  misc_RNA (1)...(19): siRNA sense strand
gaagucaagagaacugaau

SEQ ID NO: 1093933 - RNA, 19 nt, Homo sapiens
  misc_RNA (1)...(19): siRNA sense strand
gaagagcagauuucagaag

SEQ ID NO: 1093934 - RNA, 19 nt, Homo sapiens
  misc_RNA (1)...(19): siRNA sense strand
cucaaggaaugggcuauua

SEQ ID NO: 1093935 - RNA, 19 nt, Homo sapiens
  misc_RNA (1)...(19): siRNA sense strand
gcagggcaaucucaacaac

SEQ ID NO: 1093936 - RNA, 19 nt, Homo sapiens
  misc_RNA (1)...(19): siRNA sense strand
gguaaaguccgcauggaau

SEQ ID NO: 1093937 - RNA, 19 nt, Homo sapiens
  misc_RNA (1)...(19): siRNA sense strand
caucugaaagcauuacuga

SEQ ID NO: 1093938 - RNA, 19 nt, Homo sapiens
  misc_RNA (1)...(19): siRNA sense strand
ugggaucucucaaugcuau

SEQ ID NO: 1093939 - RNA, 19 nt, Homo sapiens
  misc_RNA (1)...(19): siRNA sense strand
ucaaggaaugggcuauuaa

SEQ ID NO: 1093940 - RNA, 19 nt, Homo sapiens
  misc_RNA (1)...(19): siRNA sense strand
guacuaaagaaacacaaga

SEQ ID NO: 1093941 - RNA, 19 nt, Homo sapiens
  misc_RNA (1)...(19): siRNA sense strand
ugaugugacucaaggucua

SEQ ID NO: 1093942 - RNA, 19 nt, Homo sapiens
  misc_RNA (1)...(19): siRNA sense strand
gaagaggaagcacauaacu

SEQ ID NO: 1093943 - RNA, 19 nt, Homo sapiens
  misc_RNA (1)...(19): siRNA sense strand
caagagggugcuccaagaa

SEQ ID NO: 1093944 - RNA, 19 nt, Homo sapiens
  misc_RNA (1)...(19): siRNA sense strand
gggagugauucuauuugug

SEQ ID NO: 1093945 - RNA, 19 nt, Homo sapiens
  misc_RNA (1)...(19): siRNA sense strand
gaauuagaagcuuauguag

SEQ ID NO: 1093946 - RNA, 19 nt, Homo sapiens
  misc_RNA (1)...(19): siRNA sense strand
gaaaagcuuguuuguacua

SEQ ID NO: 1093947 - RNA, 19 nt, Homo sapiens
  misc_RNA (1)...(19): siRNA sense strand
gauuccgacucgacucauu

SEQ ID NO: 1093948 - RNA, 19 nt, Homo sapiens
  misc_RNA (1)...(19): siRNA sense strand
gguuagcccuauuacuuuc

SEQ ID NO: 1093949 - RNA, 19 nt, Homo sapiens
  misc_RNA (1)...(19): siRNA sense strand
cuucacaaguuggauauug

SEQ ID NO: 1093950 - RNA, 19 nt, Homo sapiens
  misc_RNA (1)...(19): siRNA sense strand
cgacaaacugcuacgaaga

SEQ ID NO: 1093951 - RNA, 19 nt, Homo sapiens
  misc_RNA (1)...(19): siRNA sense strand
aaacuacaagugacccuaa

SEQ ID NO: 1093952 - RNA, 19 nt, Homo sapiens
  misc_RNA (1)...(19): siRNA sense strand
gaagcgugagcaugaagaa

SEQ ID NO: 1093953 - RNA, 19 nt, Homo sapiens
  misc_RNA (1)...(19): siRNA sense strand
gcaggaauuagaagcuuau

SEQ ID NO: 1093954 - RNA, 19 nt, Homo sapiens
  misc_RNA (1)...(19): siRNA sense strand
acaaacugcuacgaagaaa

SEQ ID NO: 1093955 - RNA, 19 nt, Homo sapiens
  misc_RNA (1)...(19): siRNA sense strand
ucugaaagcauuacugaau

SEQ ID NO: 1093956 - RNA, 19 nt, Homo sapiens
  misc_RNA (1)...(19): siRNA sense strand
gcaaggcuagcuacccuau

SEQ ID NO: 1093957 - RNA, 19 nt, Homo sapiens
  misc_RNA (1)...(19): siRNA sense strand
ccacaaacagccgagcuuu

SEQ ID NO: 1093958 - RNA, 19 nt, Homo sapiens
  misc_RNA (1)...(19): siRNA sense strand
ucuaagagccaacuuccaa

SEQ ID NO: 1093959 - RNA, 19 nt, Homo sapiens
  misc_RNA (1)...(19): siRNA sense strand
uuacgucucauucaagaaa

SEQ ID NO: 1093960 - RNA, 19 nt, Homo sapiens
  misc_RNA (1)...(19): siRNA sense strand
uauuugggaucucucaaug

SEQ ID NO: 1093961 - RNA, 19 nt, Homo sapiens
  misc_RNA (1)...(19): siRNA sense strand
gagcaugaagaauccaaga

SEQ ID NO: 1093962 - RNA, 19 nt, Homo sapiens
  misc_RNA (1)...(19): siRNA sense strand
ucagaucgacaaacugcua

SEQ ID NO: 1093963 - RNA, 19 nt, Homo sapiens
  misc_RNA (1)...(19): siRNA sense strand
ccuccugggcccuuacuua

SEQ ID NO: 1093964 - RNA, 19 nt, Homo sapiens
  misc_RNA (1)...(19): siRNA sense strand
cagugcugcuugcccauuu

SEQ ID NO: 1093965 - RNA, 19 nt, Homo sapiens
  misc_RNA (1)...(19): siRNA sense strand
cugcuugcccauuuaauaa

SEQ ID NO: 1093966 - RNA, 19 nt, Homo sapiens
  misc_RNA (1)...(19): siRNA sense strand
gaagcagccuacucuacac

SEQ ID NO: 1093967 - RNA, 19 nt, Homo sapiens
  misc_RNA (1)...(19): siRNA sense strand
ugaagcagccuacucuaca

SEQ ID NO: 1093968 - RNA, 19 nt, Homo sapiens
  misc_RNA (1)...(19): siRNA sense strand
cgagacagcucuggacaua

SEQ ID NO: 1093969 - RNA, 19 nt, Homo sapiens
  misc_RNA (1)...(19): siRNA sense strand
gaaggacuaugaagccaaa

SEQ ID NO: 1093970 - RNA, 19 nt, Homo sapiens
  misc_RNA (1)...(19): siRNA sense strand
ggaagaagcaccacaagga

SEQ ID NO: 1093971 - RNA, 19 nt, Homo sapiens
  misc_RNA (1)...(19): siRNA sense strand
gaacucgucuugcauuugg

SEQ ID NO: 1093972 - RNA, 19 nt, Homo sapiens
  misc_RNA (1)...(19): siRNA sense strand
gaaacacgagcuucaauga

SEQ ID NO: 1093973 - RNA, 19 nt, Homo sapiens
  misc_RNA (1)...(19): siRNA sense strand
gaacacggcucugcacuac

SEQ ID NO: 1093974 - RNA, 19 nt, Homo sapiens
  misc_RNA (1)...(19): siRNA sense strand
ggacuacuccuggguaauu

SEQ ID NO: 1093975 - RNA, 19 nt, Homo sapiens
  misc_RNA (1)...(19): siRNA sense strand
gagggacacugcagcuuga

SEQ ID NO: 1093976 - RNA, 19 nt, Homo sapiens
  misc_RNA (1)...(19): siRNA sense strand
gaacucaggauguggcuau

SEQ ID NO: 1093977 - RNA, 19 nt, Homo sapiens
  misc_RNA (1)...(19): siRNA sense strand
caagaaaagugacggaauu

SEQ ID NO: 1093978 - RNA, 19 nt, Homo sapiens
  misc_RNA (1)...(19): siRNA sense strand
ccacaggcuuccuaaacuu

SEQ ID NO: 1093979 - RNA, 19 nt, Homo sapiens
  misc_RNA (1)...(19): siRNA sense strand
ggacauagccaggaagaag

SEQ ID NO: 1093980 - RNA, 19 nt, Homo sapiens
  misc_RNA (1)...(19): siRNA sense strand
gccaaacccugaggagaaa

SEQ ID NO: 1093981 - RNA, 19 nt, Homo sapiens
  misc_RNA (1)...(19): siRNA sense strand
ggaaguguggagucaagua

SEQ ID NO: 1093982 - RNA, 19 nt, Homo sapiens
  misc_RNA (1)...(19): siRNA sense strand
ggaaacacgagcuucaaug

SEQ ID NO: 1093983 - RNA, 19 nt, Homo sapiens
  misc_RNA (1)...(19): siRNA sense strand
ggaacacggcucugcacua

SEQ ID NO: 1093984 - RNA, 19 nt, Homo sapiens
  misc_RNA (1)...(19): siRNA sense strand
gagaggccguggaauccuu

SEQ ID NO: 1093985 - RNA, 19 nt, Homo sapiens
  misc_RNA (1)...(19): siRNA sense strand
caacaagaccuaugagacu

SEQ ID NO: 1093986 - RNA, 19 nt, Homo sapiens
  misc_RNA (1)...(19): siRNA sense strand
caaccggacguaccacuuu

SEQ ID NO: 1093987 - RNA, 19 nt, Homo sapiens
  misc_RNA (1)...(19): siRNA sense strand
ggccaaacccugaggagaa

SEQ ID NO: 1093988 - RNA, 19 nt, Homo sapiens
  misc_RNA (1)...(19): siRNA sense strand
ccacguggcucagcaccaa

SEQ ID NO: 1093989 - RNA, 19 nt, Homo sapiens
  misc_RNA (1)...(19): siRNA sense strand
gcacuacgcagcacucuac

SEQ ID NO: 1093990 - RNA, 19 nt, Homo sapiens
  misc_RNA (1)...(19): siRNA sense strand
uggccaagcuggagaagga

SEQ ID NO: 1093991 - RNA, 19 nt, Homo sapiens
  misc_RNA (1)...(19): siRNA sense strand
gaaguguggagucaaguau

SEQ ID NO: 1093992 - RNA, 19 nt, Homo sapiens
  misc_RNA (1)...(19): siRNA sense strand
ggacagccauuugcaacag

SEQ ID NO: 1093993 - RNA, 19 nt, Homo sapiens
  misc_RNA (1)...(19): siRNA sense strand
ggagaucguucugaagucu

SEQ ID NO: 1093994 - RNA, 19 nt, Homo sapiens
  misc_RNA (1)...(19): siRNA sense strand
gaacaccugagccggaaga

SEQ ID NO: 1093995 - RNA, 19 nt, Homo sapiens
  misc_RNA (1)...(19): siRNA sense strand
gagggacggucgacaggau

SEQ ID NO: 1093996 - RNA, 19 nt, Homo sapiens
  misc_RNA (1)...(19): siRNA sense strand
cggaagaacucaggaugug

SEQ ID NO: 1093997 - RNA, 19 nt, Homo sapiens
  misc_RNA (1)...(19): siRNA sense strand
gaacugggcgugcgcuuuu

SEQ ID NO: 1093998 - RNA, 19 nt, Homo sapiens
  misc_RNA (1)...(19): siRNA sense strand
caguggagaucguucugaa

SEQ ID NO: 1093999 - RNA, 19 nt, Homo sapiens
  misc_RNA (1)...(19): siRNA sense strand
uggcaucacugaaggagau

SEQ ID NO: 1094000 - RNA, 19 nt, Homo sapiens
  misc_RNA (1)...(19): siRNA sense strand
cugcugacgugccaaguga

SEQ ID NO: 1094001 - RNA, 19 nt, Homo sapiens
  misc_RNA (1)...(19): siRNA sense strand
ggucauggaggcccagcua

SEQ ID NO: 1094002 - RNA, 19 nt, Homo sapiens
  misc_RNA (1)...(19): siRNA sense strand
gcggagcccugaagauggu

SEQ ID NO: 1094003 - RNA, 19 nt, Homo sapiens
  misc_RNA (1)...(19): siRNA sense strand
gacuacuccuggguaauuu

SEQ ID NO: 1094004 - RNA, 19 nt, Homo sapiens
  misc_RNA (1)...(19): siRNA sense strand
cuucagagccucaucaagu

SEQ ID NO: 1094005 - RNA, 19 nt, Homo sapiens
  misc_RNA (1)...(19): siRNA sense strand
ccaagggugugcaagacau

SEQ ID NO: 1094006 - RNA, 19 nt, Homo sapiens
  misc_RNA (1)...(19): siRNA sense strand
guggacuacuccuggguaa

SEQ ID NO: 1094007 - RNA, 19 nt, Homo sapiens
  misc_RNA (1)...(19): siRNA sense strand
gaagagcaggccugggaau

SEQ ID NO: 1094008 - RNA, 19 nt, Homo sapiens
  misc_RNA (1)...(19): siRNA sense strand
caagccauccugcagagaa

SEQ ID NO: 1094009 - RNA, 19 nt, Homo sapiens
  misc_RNA (1)...(19): siRNA sense strand
agacagcucuggacauagc

SEQ ID NO: 1094010 - RNA, 19 nt, Homo sapiens
  misc_RNA (1)...(19): siRNA sense strand
guaccgagaggccguggaa

SEQ ID NO: 1094011 - RNA, 19 nt, Homo sapiens
  misc_RNA (1)...(19): siRNA sense strand
gaccuuugccuucccucua

SEQ ID NO: 1094012 - RNA, 19 nt, Homo sapiens
  misc_RNA (1)...(19): siRNA sense strand
cgagguugcugcgcucuuc

SEQ ID NO: 1094013 - RNA, 19 nt, Homo sapiens
  misc_RNA (1)...(19): siRNA sense strand
gaaggagauggcucaagga

SEQ ID NO: 1094014 - RNA, 19 nt, Homo sapiens
  misc_RNA (1)...(19): siRNA sense strand
gccucaagcugcugcugaa

SEQ ID NO: 1094015 - RNA, 19 nt, Homo sapiens
  misc_RNA (1)...(19): siRNA sense strand
gagcaggccugggaauagc

SEQ ID NO: 1094016 - RNA, 19 nt, Homo sapiens
  misc_RNA (1)...(19): siRNA sense strand
gggugucaguguugcagaa

SEQ ID NO: 1094017 - RNA, 19 nt, Homo sapiens
  misc_RNA (1)...(19): siRNA sense strand
cccaggacaugcagagaga

SEQ ID NO: 1094018 - RNA, 19 nt, Homo sapiens
  misc_RNA (1)...(19): siRNA sense strand
gcugugcgggcaauccaua

SEQ ID NO: 1094019 - RNA, 19 nt, Homo sapiens
  misc_RNA (1)...(19): siRNA sense strand
ccgcagggacuacauuaug

SEQ ID NO: 1094020 - RNA, 19 nt, Homo sapiens
  misc_RNA (1)...(19): siRNA sense strand
gggaaacacgagcuucaau

SEQ ID NO: 1094021 - RNA, 19 nt, Homo sapiens
  misc_RNA (1)...(19): siRNA sense strand
gugaggaggaugaggaaga

SEQ ID NO: 1094022 - RNA, 19 nt, Homo sapiens
  misc_RNA (1)...(19): siRNA sense strand
gagcuuugguuggcacagu

SEQ ID NO: 1094023 - RNA, 19 nt, Homo sapiens
  misc_RNA (1)...(19): siRNA sense strand
uucagagccucaucaaguu

SEQ ID NO: 1094024 - RNA, 19 nt, Homo sapiens
  misc_RNA (1)...(19): siRNA sense strand
gguccaagggugugcaaga

SEQ ID NO: 1094025 - RNA, 19 nt, Homo sapiens
  misc_RNA (1)...(19): siRNA sense strand
ucagcaacaagaccuauga

SEQ ID NO: 1094026 - RNA, 19 nt, Homo sapiens
  misc_RNA (1)...(19): siRNA sense strand
ccaggaagaagcaccacaa

SEQ ID NO: 1094027 - RNA, 19 nt, Homo sapiens
  misc_RNA (1)...(19): siRNA sense strand
ggaggacgagcuacagaag

SEQ ID NO: 1094028 - RNA, 19 nt, Homo sapiens
  misc_RNA (1)...(19): siRNA sense strand
gaagucuccagccugaguu

SEQ ID NO: 1094029 - RNA, 19 nt, Homo sapiens
  misc_RNA (1)...(19): siRNA sense strand
aaacucuucucggacuuug

SEQ ID NO: 1094030 - RNA, 19 nt, Homo sapiens
  misc_RNA (1)...(19): siRNA sense strand
caaggcaacaagcaguuug

SEQ ID NO: 1094031 - RNA, 19 nt, Homo sapiens
  misc_RNA (1)...(19): siRNA sense strand
aggcauggaaggacuauga

SEQ ID NO: 1094032 - RNA, 19 nt, Homo sapiens
  misc_RNA (1)...(19): siRNA sense strand
ucugguggauuucaucauc

SEQ ID NO: 1094033 - RNA, 19 nt, Homo sapiens
  misc_RNA (1)...(19): siRNA sense strand
caucucacacagcacgaua

SEQ ID NO: 1094034 - RNA, 19 nt, Homo sapiens
  misc_RNA (1)...(19): siRNA sense strand
aaaugaagcaggcgagaca

SEQ ID NO: 1094035 - RNA, 19 nt, Homo sapiens
  misc_RNA (1)...(19): siRNA sense strand
gggcgagagugaggacugu

SEQ ID NO: 1094036 - RNA, 19 nt, Homo sapiens
  misc_RNA (1)...(19): siRNA sense strand
ccacgcccagcacaacuuu

SEQ ID NO: 1094037 - RNA, 19 nt, Homo sapiens
  misc_RNA (1)...(19): siRNA sense strand
guggagaucguucugaagu

SEQ ID NO: 1094038 - RNA, 19 nt, Homo sapiens
  misc_RNA (1)...(19): siRNA sense strand
acgcagcacucuacaacca

SEQ ID NO: 1094039 - RNA, 19 nt, Homo sapiens
  misc_RNA (1)...(19): siRNA sense strand
acuacauuauggccaagua

SEQ ID NO: 1094040 - RNA, 19 nt, Homo sapiens
  misc_RNA (1)...(19): siRNA sense strand
gcagaacagcaaggacgaa

SEQ ID NO: 1094041 - RNA, 19 nt, Homo sapiens
  misc_RNA (1)...(19): siRNA sense strand
ccaaggcaacaagcaguuu

SEQ ID NO: 1094042 - RNA, 19 nt, Homo sapiens
  misc_RNA (1)...(19): siRNA sense strand
gaaaagugacggaauucga

SEQ ID NO: 1094043 - RNA, 19 nt, Homo sapiens
  misc_RNA (1)...(19): siRNA sense strand
gccauccugcagagaauaa

SEQ ID NO: 1094044 - RNA, 19 nt, Homo sapiens
  misc_RNA (1)...(19): siRNA sense strand
gaaggcauggaaggacuau

SEQ ID NO: 1094045 - RNA, 19 nt, Homo sapiens
  misc_RNA (1)...(19): siRNA sense strand
ugaggaggaugaggaagag

SEQ ID NO: 1094046 - RNA, 19 nt, Homo sapiens
  misc_RNA (1)...(19): siRNA sense strand
cgcagggacuacauuaugg

SEQ ID NO: 1094047 - RNA, 19 nt, Homo sapiens
  misc_RNA (1)...(19): siRNA sense strand
ugcagucacucaccuugga

SEQ ID NO: 1094048 - RNA, 19 nt, Homo sapiens
  misc_RNA (1)...(19): siRNA sense strand
aagagcaggccugggaaua

SEQ ID NO: 1094049 - RNA, 19 nt, Homo sapiens
  misc_RNA (1)...(19): siRNA sense strand
ucacacagcacgauaaacc

SEQ ID NO: 1094050 - RNA, 19 nt, Homo sapiens
  misc_RNA (1)...(19): siRNA sense strand
aaggaaguguggagucaag

SEQ ID NO: 1094051 - RNA, 19 nt, Homo sapiens
  misc_RNA (1)...(19): siRNA sense strand
guucagcgucgccgaguuc

SEQ ID NO: 1094052 - RNA, 19 nt, Homo sapiens
  misc_RNA (1)...(19): siRNA sense strand
ugccuucccucuacaugug

SEQ ID NO: 1094053 - RNA, 19 nt, Homo sapiens
  misc_RNA (1)...(19): siRNA sense strand
caccugagccggaagaacu

SEQ ID NO: 1094054 - RNA, 19 nt, Homo sapiens
  misc_RNA (1)...(19): siRNA sense strand
gggagagccagaugaagca

SEQ ID NO: 1094055 - RNA, 19 nt, Homo sapiens
  misc_RNA (1)...(19): siRNA sense strand
ucucacacagcacgauaaa

SEQ ID NO: 1094056 - RNA, 19 nt, Homo sapiens
  misc_RNA (1)...(19): siRNA sense strand
gugggaggcuggacaucag

SEQ ID NO: 1094057 - RNA, 19 nt, Homo sapiens
  misc_RNA (1)...(19): siRNA sense strand
gguuggcacaguaaaugaa

SEQ ID NO: 1094058 - RNA, 19 nt, Homo sapiens
  misc_RNA (1)...(19): siRNA sense strand
gcucaucgcggaggugaag

SEQ ID NO: 1094059 - RNA, 19 nt, Homo sapiens
  misc_RNA (1)...(19): siRNA sense strand
aggcgugggugucaguguu

SEQ ID NO: 1094060 - RNA, 19 nt, Homo sapiens
  misc_RNA (1)...(19): siRNA sense strand
cgaacugggcgugcgcuuu

SEQ ID NO: 1094061 - RNA, 19 nt, Homo sapiens
  misc_RNA (1)...(19): siRNA sense strand
ggaggaugaggaagagaag

SEQ ID NO: 1094062 - RNA, 19 nt, Homo sapiens
  misc_RNA (1)...(19): siRNA sense strand
ucaaagaacuugucucuaa

SEQ ID NO: 1094063 - RNA, 19 nt, Homo sapiens
  misc_RNA (1)...(19): siRNA sense strand
gaguuaggauuccaaauua

SEQ ID NO: 1094064 - RNA, 19 nt, Homo sapiens
  misc_RNA (1)...(19): siRNA sense strand
gaaauggaaucucacugua

SEQ ID NO: 1094065 - RNA, 19 nt, Homo sapiens
  misc_RNA (1)...(19): siRNA sense strand
caugaugacuguccuaaua

SEQ ID NO: 1094066 - RNA, 19 nt, Homo sapiens
  misc_RNA (1)...(19): siRNA sense strand
gaacuugucucuaaauucu

SEQ ID NO: 1094067 - RNA, 19 nt, Homo sapiens
  misc_RNA (1)...(19): siRNA sense strand
gauagcaaaugggaaauaa

SEQ ID NO: 1094068 - RNA, 19 nt, Homo sapiens
  misc_RNA (1)...(19): siRNA sense strand
gauuacagauuguuuguug

SEQ ID NO: 1094069 - RNA, 19 nt, Homo sapiens
  misc_RNA (1)...(19): siRNA sense strand
ccaucgaccuguucaaaua

SEQ ID NO: 1094070 - RNA, 19 nt, Homo sapiens
  misc_RNA (1)...(19): siRNA sense strand
ggaaacaaguguaauaacu

SEQ ID NO: 1094071 - RNA, 19 nt, Homo sapiens
  misc_RNA (1)...(19): siRNA sense strand
gccaauaucuggaauagug

SEQ ID NO: 1094072 - RNA, 19 nt, Homo sapiens
  misc_RNA (1)...(19): siRNA sense strand
gaagagucaucaccuaaau

SEQ ID NO: 1094073 - RNA, 19 nt, Homo sapiens
  misc_RNA (1)...(19): siRNA sense strand
agaaagagauguugagaau

SEQ ID NO: 1094074 - RNA, 19 nt, Homo sapiens
  misc_RNA (1)...(19): siRNA sense strand
caaagaacuugucucuaaa

SEQ ID NO: 1094075 - RNA, 19 nt, Homo sapiens
  misc_RNA (1)...(19): siRNA sense strand
gcaauucccaucaccaaua

SEQ ID NO: 1094076 - RNA, 19 nt, Homo sapiens
  misc_RNA (1)...(19): siRNA sense strand
gaugguaaaucuacaacaa

SEQ ID NO: 1094077 - RNA, 19 nt, Homo sapiens
  misc_RNA (1)...(19): siRNA sense strand
guacacacauuaccugaug

SEQ ID NO: 1094078 - RNA, 19 nt, Homo sapiens
  misc_RNA (1)...(19): siRNA sense strand
gaagaaauguaucaacacu

SEQ ID NO: 1094079 - RNA, 19 nt, Homo sapiens
  misc_RNA (1)...(19): siRNA sense strand
gaaguagcauauguuauug

SEQ ID NO: 1094080 - RNA, 19 nt, Homo sapiens
  misc_RNA (1)...(19): siRNA sense strand
gcagagaggcaaagaagaa

SEQ ID NO: 1094081 - RNA, 19 nt, Homo sapiens
  misc_RNA (1)...(19): siRNA sense strand
gaagaaggaguuuaugguu

SEQ ID NO: 1094082 - RNA, 19 nt, Homo sapiens
  misc_RNA (1)...(19): siRNA sense strand
aagaaacacucuaagacua

SEQ ID NO: 1094083 - RNA, 19 nt, Homo sapiens
  misc_RNA (1)...(19): siRNA sense strand
aaagagauguugagaaugg

SEQ ID NO: 1094084 - RNA, 19 nt, Homo sapiens
  misc_RNA (1)...(19): siRNA sense strand
gaaauaaagcgcugucagu

SEQ ID NO: 1094085 - RNA, 19 nt, Homo sapiens
  misc_RNA (1)...(19): siRNA sense strand
guacauuacuacuguuugu

SEQ ID NO: 1094086 - RNA, 19 nt, Homo sapiens
  misc_RNA (1)...(19): siRNA sense strand
auacuuggcuaccauguaa

SEQ ID NO: 1094087 - RNA, 19 nt, Homo sapiens
  misc_RNA (1)...(19): siRNA sense strand
ggaaaacgcuuaucaagag

SEQ ID NO: 1094088 - RNA, 19 nt, Homo sapiens
  misc_RNA (1)...(19): siRNA sense strand
caaagaagaagaaggaguu

SEQ ID NO: 1094089 - RNA, 19 nt, Homo sapiens
  misc_RNA (1)...(19): siRNA sense strand
caacaacaauggaagacau

SEQ ID NO: 1094090 - RNA, 19 nt, Homo sapiens
  misc_RNA (1)...(19): siRNA sense strand
ggaaucucacuguacauua

SEQ ID NO: 1094091 - RNA, 19 nt, Homo sapiens
  misc_RNA (1)...(19): siRNA sense strand
uaaacccacuccuucaauu

SEQ ID NO: 1094092 - RNA, 19 nt, Homo sapiens
  misc_RNA (1)...(19): siRNA sense strand
gaagaugucguugcaaaga

SEQ ID NO: 1094093 - RNA, 19 nt, Homo sapiens
  misc_RNA (1)...(19): siRNA sense strand
caaagaagggcgagacuau

SEQ ID NO: 1094094 - RNA, 19 nt, Homo sapiens
  misc_RNA (1)...(19): siRNA sense strand
caauugaaguagcauaugu

SEQ ID NO: 1094095 - RNA, 19 nt, Homo sapiens
  misc_RNA (1)...(19): siRNA sense strand
caacaacuguagcugacuu

SEQ ID NO: 1094096 - RNA, 19 nt, Homo sapiens
  misc_RNA (1)...(19): siRNA sense strand
gauaaauacugcaacaacu

SEQ ID NO: 1094097 - RNA, 19 nt, Homo sapiens
  misc_RNA (1)...(19): siRNA sense strand
gaaucucacuguacauuac

SEQ ID NO: 1094098 - RNA, 19 nt, Homo sapiens
  misc_RNA (1)...(19): siRNA sense strand
gaacucaucauuguuugaa

SEQ ID NO: 1094099 - RNA, 19 nt, Homo sapiens
  misc_RNA (1)...(19): siRNA sense strand
agagucaucaccuaaauua

SEQ ID NO: 1094100 - RNA, 19 nt, Homo sapiens
  misc_RNA (1)...(19): siRNA sense strand
ggaagagucaucaccuaaa

SEQ ID NO: 1094101 - RNA, 19 nt, Homo sapiens
  misc_RNA (1)...(19): siRNA sense strand
uaaugcaccugauagcaaa

SEQ ID NO: 1094102 - RNA, 19 nt, Homo sapiens
  misc_RNA (1)...(19): siRNA sense strand
cgaaguccuuguuguaaga

SEQ ID NO: 1094103 - RNA, 19 nt, Homo sapiens
  misc_RNA (1)...(19): siRNA sense strand
aagaaggaguuuaugguuu

SEQ ID NO: 1094104 - RNA, 19 nt, Homo sapiens
  misc_RNA (1)...(19): siRNA sense strand
auaaagcgcugucaguguu

SEQ ID NO: 1094105 - RNA, 19 nt, Homo sapiens
  misc_RNA (1)...(19): siRNA sense strand
gcagcaaauuuagaagaaa

SEQ ID NO: 1094106 - RNA, 19 nt, Homo sapiens
  misc_RNA (1)...(19): siRNA sense strand
ggcagcaaauuuagaagaa

SEQ ID NO: 1094107 - RNA, 19 nt, Homo sapiens
  misc_RNA (1)...(19): siRNA sense strand
gagccuauuccaaguuaua

SEQ ID NO: 1094108 - RNA, 19 nt, Homo sapiens
  misc_RNA (1)...(19): siRNA sense strand
gcaauaauagugacaucuu

SEQ ID NO: 1094109 - RNA, 19 nt, Homo sapiens
  misc_RNA (1)...(19): siRNA sense strand
uaaauuacccagacaguca

SEQ ID NO: 1094110 - RNA, 19 nt, Homo sapiens
  misc_RNA (1)...(19): siRNA sense strand
gaaacaaguguaauaacug

SEQ ID NO: 1094111 - RNA, 19 nt, Homo sapiens
  misc_RNA (1)...(19): siRNA sense strand
ucgaagaugucguugcaaa

SEQ ID NO: 1094112 - RNA, 19 nt, Homo sapiens
  misc_RNA (1)...(19): siRNA sense strand
gagaacucaucauuguuug

SEQ ID NO: 1094113 - RNA, 19 nt, Homo sapiens
  misc_RNA (1)...(19): siRNA sense strand
uaucuggaauagugccuua

SEQ ID NO: 1094114 - RNA, 19 nt, Homo sapiens
  misc_RNA (1)...(19): siRNA sense strand
aaacuaaggagaaauggaa

SEQ ID NO: 1094115 - RNA, 19 nt, Homo sapiens
  misc_RNA (1)...(19): siRNA sense strand
uaccugaugugaaagcuuu

SEQ ID NO: 1094116 - RNA, 19 nt, Homo sapiens
  misc_RNA (1)...(19): siRNA sense strand
gaggcaaggcagcaaauuu

SEQ ID NO: 1094117 - RNA, 19 nt, Homo sapiens
  misc_RNA (1)...(19): siRNA sense strand
uaagaacgcuugguuucau

SEQ ID NO: 1094118 - RNA, 19 nt, Homo sapiens
  misc_RNA (1)...(19): siRNA sense strand
cauaagaaacacucuaaga

SEQ ID NO: 1094119 - RNA, 19 nt, Homo sapiens
  misc_RNA (1)...(19): siRNA sense strand
uagaugauguuucagacuu

SEQ ID NO: 1094120 - RNA, 19 nt, Homo sapiens
  misc_RNA (1)...(19): siRNA sense strand
caaggcagcaaauuuagaa

SEQ ID NO: 1094121 - RNA, 19 nt, Homo sapiens
  misc_RNA (1)...(19): siRNA sense strand
aggcaaggcagcaaauuua

SEQ ID NO: 1094122 - RNA, 19 nt, Homo sapiens
  misc_RNA (1)...(19): siRNA sense strand
uagaagauaucaggaagga

SEQ ID NO: 1094123 - RNA, 19 nt, Homo sapiens
  misc_RNA (1)...(19): siRNA sense strand
gguguacaauaugcaauaa

SEQ ID NO: 1094124 - RNA, 19 nt, Homo sapiens
  misc_RNA (1)...(19): siRNA sense strand
cauguggacuucagagaga

SEQ ID NO: 1094125 - RNA, 19 nt, Homo sapiens
  misc_RNA (1)...(19): siRNA sense strand
gcaaagaagggcgagacua

SEQ ID NO: 1094126 - RNA, 19 nt, Homo sapiens
  misc_RNA (1)...(19): siRNA sense strand
guuggaaacaaguguaaua

SEQ ID NO: 1094127 - RNA, 19 nt, Homo sapiens
  misc_RNA (1)...(19): siRNA sense strand
gagaaucuuuacuaugaag

SEQ ID NO: 1094128 - RNA, 19 nt, Homo sapiens
  misc_RNA (1)...(19): siRNA sense strand
gaauuucugagucucuuaa

SEQ ID NO: 1094129 - RNA, 19 nt, Homo sapiens
  misc_RNA (1)...(19): siRNA sense strand
gaaccuugcuuguguuuuc

SEQ ID NO: 1094130 - RNA, 19 nt, Homo sapiens
  misc_RNA (1)...(19): siRNA sense strand
gguauuaucuacaauucag

SEQ ID NO: 1094131 - RNA, 19 nt, Homo sapiens
  misc_RNA (1)...(19): siRNA sense strand
gaagggcgagacuauaaug

SEQ ID NO: 1094132 - RNA, 19 nt, Homo sapiens
  misc_RNA (1)...(19): siRNA sense strand
gagaauguauuuuccaguu

SEQ ID NO: 1094133 - RNA, 19 nt, Homo sapiens
  misc_RNA (1)...(19): siRNA sense strand
ccuaauaaauacggagaaa

SEQ ID NO: 1094134 - RNA, 19 nt, Homo sapiens
  misc_RNA (1)...(19): siRNA sense strand
uaacugccuuguuuaugga

SEQ ID NO: 1094135 - RNA, 19 nt, Homo sapiens
  misc_RNA (1)...(19): siRNA sense strand
cgaccuguucaaauaauua

SEQ ID NO: 1094136 - RNA, 19 nt, Homo sapiens
  misc_RNA (1)...(19): siRNA sense strand
agaguuaggauuccaaauu

SEQ ID NO: 1094137 - RNA, 19 nt, Homo sapiens
  misc_RNA (1)...(19): siRNA sense strand
aagaagggcgagacuauaa

SEQ ID NO: 1094138 - RNA, 19 nt, Homo sapiens
  misc_RNA (1)...(19): siRNA sense strand
guucgaagaugucguugca

SEQ ID NO: 1094139 - RNA, 19 nt, Homo sapiens
  misc_RNA (1)...(19): siRNA sense strand
cucauuacauuggacauua

SEQ ID NO: 1094140 - RNA, 19 nt, Homo sapiens
  misc_RNA (1)...(19): siRNA sense strand
ugaugacuguccuaauaaa

SEQ ID NO: 1094141 - RNA, 19 nt, Homo sapiens
  misc_RNA (1)...(19): siRNA sense strand
uuagaugcauucagaaauc

SEQ ID NO: 1094142 - RNA, 19 nt, Homo sapiens
  misc_RNA (1)...(19): siRNA sense strand
gaauagugccuuagaugca

SEQ ID NO: 1094143 - RNA, 19 nt, Homo sapiens
  misc_RNA (1)...(19): siRNA sense strand
aaguaaaccuggugacuca

SEQ ID NO: 1094144 - RNA, 19 nt, Homo sapiens
  misc_RNA (1)...(19): siRNA sense strand
gaugucaaguggaauuugg

SEQ ID NO: 1094145 - RNA, 19 nt, Homo sapiens
  misc_RNA (1)...(19): siRNA sense strand
cuucagagagaauguauuu

SEQ ID NO: 1094146 - RNA, 19 nt, Homo sapiens
  misc_RNA (1)...(19): siRNA sense strand
gaaaguucucauuacauug

SEQ ID NO: 1094147 - RNA, 19 nt, Homo sapiens
  misc_RNA (1)...(19): siRNA sense strand
caacuguagcugacuuaaa

SEQ ID NO: 1094148 - RNA, 19 nt, Homo sapiens
  misc_RNA (1)...(19): siRNA sense strand
uuguuuaacugccuuguuu

SEQ ID NO: 1094149 - RNA, 19 nt, Homo sapiens
  misc_RNA (1)...(19): siRNA sense strand
gcaaggcagcaaauuuaga

SEQ ID NO: 1094150 - RNA, 19 nt, Homo sapiens
  misc_RNA (1)...(19): siRNA sense strand
agaagaagaaggaguuuau

SEQ ID NO: 1094151 - RNA, 19 nt, Homo sapiens
  misc_RNA (1)...(19): siRNA sense strand
aagaacgcuugguuucaua

SEQ ID NO: 1094152 - RNA, 19 nt, Homo sapiens
  misc_RNA (1)...(19): siRNA sense strand
uuacgaaguccuuguugua

SEQ ID NO: 1094153 - RNA, 19 nt, Homo sapiens
  misc_RNA (1)...(19): siRNA sense strand
ggaauuuauugagccuauu

SEQ ID NO: 1094154 - RNA, 19 nt, Homo sapiens
  misc_RNA (1)...(19): siRNA sense strand
guagcauccugugucauaa

SEQ ID NO: 1094155 - RNA, 19 nt, Homo sapiens
  misc_RNA (1)...(19): siRNA sense strand
caggauaaauacugcaaca

SEQ ID NO: 1094156 - RNA, 19 nt, Homo sapiens
  misc_RNA (1)...(19): siRNA sense strand
gaugauguuucagacuuug

SEQ ID NO: 1094157 - RNA, 19 nt, Homo sapiens
  misc_RNA (1)...(19): siRNA sense strand
ugccuuagaugcauucaga

SEQ ID NO: 1094158 - RNA, 19 nt, Homo sapiens
  misc_RNA (1)...(19): siRNA sense strand
cagauuguuuguuggaaga

SEQ ID NO: 1094159 - RNA, 19 nt, Homo sapiens
  misc_RNA (1)...(19): siRNA sense strand
auagugacaucuuucagaa

SEQ ID NO: 1094160 - RNA, 19 nt, Homo sapiens
  misc_RNA (1)...(19): siRNA sense strand
gaagaagaaggaguuuaug

SEQ ID NO: 1094161 - RNA, 19 nt, Homo sapiens
  misc_RNA (1)...(19): siRNA sense strand
gagaggcaaagaagaagaa

SEQ ID NO: 1094162 - RNA, 19 nt, Homo sapiens
  misc_RNA (1)...(19): siRNA sense strand
caagaaaugcugucacuuu

SEQ ID NO: 1094163 - RNA, 19 nt, Homo sapiens
  misc_RNA (1)...(19): siRNA sense strand
gaagagaugccuacucgaa

SEQ ID NO: 1094164 - RNA, 19 nt, Homo sapiens
  misc_RNA (1)...(19): siRNA sense strand
gaaccacuaccauacauuu

SEQ ID NO: 1094165 - RNA, 19 nt, Homo sapiens
  misc_RNA (1)...(19): siRNA sense strand
ggacccagcugaugaccuu

SEQ ID NO: 1094166 - RNA, 19 nt, Homo sapiens
  misc_RNA (1)...(19): siRNA sense strand
aaccugagauuucugaaua

SEQ ID NO: 1094167 - RNA, 19 nt, Homo sapiens
  misc_RNA (1)...(19): siRNA sense strand
gguagaaauuuccugguuu

SEQ ID NO: 1094168 - RNA, 19 nt, Homo sapiens
  misc_RNA (1)...(19): siRNA sense strand
gaacagcuguggccauugc

SEQ ID NO: 1094169 - RNA, 19 nt, Homo sapiens
  misc_RNA (1)...(19): siRNA sense strand
ccacucacauguccuggua

SEQ ID NO: 1094170 - RNA, 19 nt, Homo sapiens
  misc_RNA (1)...(19): siRNA sense strand
ccaaagacuugcccuggaa

SEQ ID NO: 1094171 - RNA, 19 nt, Homo sapiens
  misc_RNA (1)...(19): siRNA sense strand
gaagccauauuugaauuga

SEQ ID NO: 1094172 - RNA, 19 nt, Homo sapiens
  misc_RNA (1)...(19): siRNA sense strand
ccagaaccuucaugaugua

SEQ ID NO: 1094173 - RNA, 19 nt, Homo sapiens
  misc_RNA (1)...(19): siRNA sense strand
caacacaaaccugagauuu

SEQ ID NO: 1094174 - RNA, 19 nt, Homo sapiens
  misc_RNA (1)...(19): siRNA sense strand
gcagugagcuuggccuaca

SEQ ID NO: 1094175 - RNA, 19 nt, Homo sapiens
  misc_RNA (1)...(19): siRNA sense strand
gaaccuucaugauguaucu

SEQ ID NO: 1094176 - RNA, 19 nt, Homo sapiens
  misc_RNA (1)...(19): siRNA sense strand
gauuuggaauggagagaaa

SEQ ID NO: 1094177 - RNA, 19 nt, Homo sapiens
  misc_RNA (1)...(19): siRNA sense strand
ggucaaggcuggugguucu

SEQ ID NO: 1094178 - RNA, 19 nt, Homo sapiens
  misc_RNA (1)...(19): siRNA sense strand
uuuaagcucuugacagaaa

SEQ ID NO: 1094179 - RNA, 19 nt, Homo sapiens
  misc_RNA (1)...(19): siRNA sense strand
gugaagccauauuugaauu

SEQ ID NO: 1094180 - RNA, 19 nt, Homo sapiens
  misc_RNA (1)...(19): siRNA sense strand
gagaaaggcagcccaagug

SEQ ID NO: 1094181 - RNA, 19 nt, Homo sapiens
  misc_RNA (1)...(19): siRNA sense strand
ggagaggauuaccaggaaa

SEQ ID NO: 1094182 - RNA, 19 nt, Homo sapiens
  misc_RNA (1)...(19): siRNA sense strand
gagcuuggccuacagugaa

SEQ ID NO: 1094183 - RNA, 19 nt, Homo sapiens
  misc_RNA (1)...(19): siRNA sense strand
gcauucagauuugggagaa

SEQ ID NO: 1094184 - RNA, 19 nt, Homo sapiens
  misc_RNA (1)...(19): siRNA sense strand
gagaaccacuaccauacau

SEQ ID NO: 1094185 - RNA, 19 nt, Homo sapiens
  misc_RNA (1)...(19): siRNA sense strand
gaaauagcguugaaaaugg

SEQ ID NO: 1094186 - RNA, 19 nt, Homo sapiens
  misc_RNA (1)...(19): siRNA sense strand
acacaaaccugagauuucu

SEQ ID NO: 1094187 - RNA, 19 nt, Homo sapiens
  misc_RNA (1)...(19): siRNA sense strand
ggccuacagugaagccaua

SEQ ID NO: 1094188 - RNA, 19 nt, Homo sapiens
  misc_RNA (1)...(19): siRNA sense strand
gcaugcauuucugagguua

SEQ ID NO: 1094189 - RNA, 19 nt, Homo sapiens
  misc_RNA (1)...(19): siRNA sense strand
cagcagaacggccaugauu

SEQ ID NO: 1094190 - RNA, 19 nt, Homo sapiens
  misc_RNA (1)...(19): siRNA sense strand
gaaauggaaggagaugauu

SEQ ID NO: 1094191 - RNA, 19 nt, Homo sapiens
  misc_RNA (1)...(19): siRNA sense strand
agaaguagccccagaaaua

SEQ ID NO: 1094192 - RNA, 19 nt, Homo sapiens
  misc_RNA (1)...(19): siRNA sense strand
ugaccuugcugccgacauu

SEQ ID NO: 1094193 - RNA, 19 nt, Homo sapiens
  misc_RNA (1)...(19): siRNA sense strand
ggacauuccagcagcuauu

SEQ ID NO: 1094194 - RNA, 19 nt, Homo sapiens
  misc_RNA (1)...(19): siRNA sense strand
gaaaucuccuccgcugugu

SEQ ID NO: 1094195 - RNA, 19 nt, Homo sapiens
  misc_RNA (1)...(19): siRNA sense strand
cagcuauucugcaugcauu

SEQ ID NO: 1094196 - RNA, 19 nt, Homo sapiens
  misc_RNA (1)...(19): siRNA sense strand
guuaauuccugugcugaaa

SEQ ID NO: 1094197 - RNA, 19 nt, Homo sapiens
  misc_RNA (1)...(19): siRNA sense strand
acaaauugcuguacuccau

SEQ ID NO: 1094198 - RNA, 19 nt, Homo sapiens
  misc_RNA (1)...(19): siRNA sense strand
ggaauggagagaaauggaa

SEQ ID NO: 1094199 - RNA, 19 nt, Homo sapiens
  misc_RNA (1)...(19): siRNA sense strand
cuacagugaagccauauuu

SEQ ID NO: 1094200 - RNA, 19 nt, Homo sapiens
  misc_RNA (1)...(19): siRNA sense strand
gaaccuguggccuuucuga

SEQ ID NO: 1094201 - RNA, 19 nt, Homo sapiens
  misc_RNA (1)...(19): siRNA sense strand
guagaaauuuccugguuuu

SEQ ID NO: 1094202 - RNA, 19 nt, Homo sapiens
  misc_RNA (1)...(19): siRNA sense strand
gaaaauagaccacucacau

SEQ ID NO: 1094203 - RNA, 19 nt, Homo sapiens
  misc_RNA (1)...(19): siRNA sense strand
gaccggauggagaggauua

SEQ ID NO: 1094204 - RNA, 19 nt, Homo sapiens
  misc_RNA (1)...(19): siRNA sense strand
ggagaaaggcagcccaagu

SEQ ID NO: 1094205 - RNA, 19 nt, Homo sapiens
  misc_RNA (1)...(19): siRNA sense strand
uuauggagaugguacaaau

SEQ ID NO: 1094206 - RNA, 19 nt, Homo sapiens
  misc_RNA (1)...(19): siRNA sense strand
aguuuaagcucuugacaga

SEQ ID NO: 1094207 - RNA, 19 nt, Homo sapiens
  misc_RNA (1)...(19): siRNA sense strand
ggacaaugauuuuccaaca

SEQ ID NO: 1094208 - RNA, 19 nt, Homo sapiens
  misc_RNA (1)...(19): siRNA sense strand
ggagaaccacuaccauaca

SEQ ID NO: 1094209 - RNA, 19 nt, Homo sapiens
  misc_RNA (1)...(19): siRNA sense strand
gaaaugcugucacuuuugg

SEQ ID NO: 1094210 - RNA, 19 nt, Homo sapiens
  misc_RNA (1)...(19): siRNA sense strand
gaaauaaaagcaucagaga

SEQ ID NO: 1094211 - RNA, 19 nt, Homo sapiens
  misc_RNA (1)...(19): siRNA sense strand
uaccagaaccuucaugaug

SEQ ID NO: 1094212 - RNA, 19 nt, Homo sapiens
  misc_RNA (1)...(19): siRNA sense strand
gcaacacaaaccugagauu

SEQ ID NO: 1094213 - RNA, 19 nt, Homo sapiens
  misc_RNA (1)...(19): siRNA sense strand
gaggugacaucgggucuca

SEQ ID NO: 1094214 - RNA, 19 nt, Homo sapiens
  misc_RNA (1)...(19): siRNA sense strand
gaagggaggacuuggacau

SEQ ID NO: 1094215 - RNA, 19 nt, Homo sapiens
  misc_RNA (1)...(19): siRNA sense strand
gaaguagccccagaaauaa

SEQ ID NO: 1094216 - RNA, 19 nt, Homo sapiens
  misc_RNA (1)...(19): siRNA sense strand
ucaguaagaaggaauacaa

SEQ ID NO: 1094217 - RNA, 19 nt, Homo sapiens
  misc_RNA (1)...(19): siRNA sense strand
ucaugcagcucaucacagu

SEQ ID NO: 1094218 - RNA, 19 nt, Homo sapiens
  misc_RNA (1)...(19): siRNA sense strand
uggagaggauuaccaggaa

SEQ ID NO: 1094219 - RNA, 19 nt, Homo sapiens
  misc_RNA (1)...(19): siRNA sense strand
gcacugacagcgacagcuu

SEQ ID NO: 1094220 - RNA, 19 nt, Homo sapiens
  misc_RNA (1)...(19): siRNA sense strand
gugggaagcgcaacacaaa

SEQ ID NO: 1094221 - RNA, 19 nt, Homo sapiens
  misc_RNA (1)...(19): siRNA sense strand
aacaagaaauagcguugaa

SEQ ID NO: 1094222 - RNA, 19 nt, Homo sapiens
  misc_RNA (1)...(19): siRNA sense strand
cagcccagauggagaaaca

SEQ ID NO: 1094223 - RNA, 19 nt, Homo sapiens
  misc_RNA (1)...(19): siRNA sense strand
ugaaggagucaaccacaaa

SEQ ID NO: 1094224 - RNA, 19 nt, Homo sapiens
  misc_RNA (1)...(19): siRNA sense strand
caauaucaguaagaaggaa

SEQ ID NO: 1094225 - RNA, 19 nt, Homo sapiens
  misc_RNA (1)...(19): siRNA sense strand
gcauggacgucaguagcaa

SEQ ID NO: 1094226 - RNA, 19 nt, Homo sapiens
  misc_RNA (1)...(19): siRNA sense strand
gauuucggauggguuggua

SEQ ID NO: 1094227 - RNA, 19 nt, Homo sapiens
  misc_RNA (1)...(19): siRNA sense strand
acagugaagccauauuuga

SEQ ID NO: 1094228 - RNA, 19 nt, Homo sapiens
  misc_RNA (1)...(19): siRNA sense strand
acaguuuccugcaacaaga

SEQ ID NO: 1094229 - RNA, 19 nt, Homo sapiens
  misc_RNA (1)...(19): siRNA sense strand
cgaguuccguuauggagau

SEQ ID NO: 1094230 - RNA, 19 nt, Homo sapiens
  misc_RNA (1)...(19): siRNA sense strand
gaaguugcaggcccucaau

SEQ ID NO: 1094231 - RNA, 19 nt, Homo sapiens
  misc_RNA (1)...(19): siRNA sense strand
aaauagaccacucacaugu

SEQ ID NO: 1094232 - RNA, 19 nt, Homo sapiens
  misc_RNA (1)...(19): siRNA sense strand
aaauugcuguacuccauga

SEQ ID NO: 1094233 - RNA, 19 nt, Homo sapiens
  misc_RNA (1)...(19): siRNA sense strand
ugguagaaauuuccugguu

SEQ ID NO: 1094234 - RNA, 19 nt, Homo sapiens
  misc_RNA (1)...(19): siRNA sense strand
ggagaaggagagccagaug

SEQ ID NO: 1094235 - RNA, 19 nt, Homo sapiens
  misc_RNA (1)...(19): siRNA sense strand
gaaggagagccagauggaa

SEQ ID NO: 1094236 - RNA, 19 nt, Homo sapiens
  misc_RNA (1)...(19): siRNA sense strand
acgaacagcuguggccauu

SEQ ID NO: 1094237 - RNA, 19 nt, Homo sapiens
  misc_RNA (1)...(19): siRNA sense strand
accagaaccuucaugaugu

SEQ ID NO: 1094238 - RNA, 19 nt, Homo sapiens
  misc_RNA (1)...(19): siRNA sense strand
acucacauguccugguaaa

SEQ ID NO: 1094239 - RNA, 19 nt, Homo sapiens
  misc_RNA (1)...(19): siRNA sense strand
ccuccgcuguguuuauauu

SEQ ID NO: 1094240 - RNA, 19 nt, Homo sapiens
  misc_RNA (1)...(19): siRNA sense strand
cccagaaccuguggccuuu

SEQ ID NO: 1094241 - RNA, 19 nt, Homo sapiens
  misc_RNA (1)...(19): siRNA sense strand
gggaggacuuggacauuuu

SEQ ID NO: 1094242 - RNA, 19 nt, Homo sapiens
  misc_RNA (1)...(19): siRNA sense strand
ccacuaccauacauuucug

SEQ ID NO: 1094243 - RNA, 19 nt, Homo sapiens
  misc_RNA (1)...(19): siRNA sense strand
cagugaagccauauuugaa

SEQ ID NO: 1094244 - RNA, 19 nt, Homo sapiens
  misc_RNA (1)...(19): siRNA sense strand
guguuuauauugacugaca

SEQ ID NO: 1094245 - RNA, 19 nt, Homo sapiens
  misc_RNA (1)...(19): siRNA sense strand
agggaggacuuggacauuu

SEQ ID NO: 1094246 - RNA, 19 nt, Homo sapiens
  misc_RNA (1)...(19): siRNA sense strand
agacguaccagguccagaa

SEQ ID NO: 1094247 - RNA, 19 nt, Homo sapiens
  misc_RNA (1)...(19): siRNA sense strand
caagagacagcuccuggau

SEQ ID NO: 1094248 - RNA, 19 nt, Homo sapiens
  misc_RNA (1)...(19): siRNA sense strand
ugagugagaagcaguacuu

SEQ ID NO: 1094249 - RNA, 19 nt, Homo sapiens
  misc_RNA (1)...(19): siRNA sense strand
cggauggguugguagaaau

SEQ ID NO: 1094250 - RNA, 19 nt, Homo sapiens
  misc_RNA (1)...(19): siRNA sense strand
gcaucgggaccucaacuug

SEQ ID NO: 1094251 - RNA, 19 nt, Homo sapiens
  misc_RNA (1)...(19): siRNA sense strand
aagaaaugcugucacuuuu

SEQ ID NO: 1094252 - RNA, 19 nt, Homo sapiens
  misc_RNA (1)...(19): siRNA sense strand
ucggagaaccacuaccaua

SEQ ID NO: 1094253 - RNA, 19 nt, Homo sapiens
  misc_RNA (1)...(19): siRNA sense strand
gcagaucaguuuugacagu

SEQ ID NO: 1094254 - RNA, 19 nt, Homo sapiens
  misc_RNA (1)...(19): siRNA sense strand
caagaaauagcguugaaaa

SEQ ID NO: 1094255 - RNA, 19 nt, Homo sapiens
  misc_RNA (1)...(19): siRNA sense strand
ccacacuccucaacaccau

SEQ ID NO: 1094256 - RNA, 19 nt, Homo sapiens
  misc_RNA (1)...(19): siRNA sense strand
ucggauggguugguagaaa

SEQ ID NO: 1094257 - RNA, 19 nt, Homo sapiens
  misc_RNA (1)...(19): siRNA sense strand
ggaaguugcaggcccucaa

SEQ ID NO: 1094258 - RNA, 19 nt, Homo sapiens
  misc_RNA (1)...(19): siRNA sense strand
gauugcgaguuccguuaug

SEQ ID NO: 1094259 - RNA, 19 nt, Homo sapiens
  misc_RNA (1)...(19): siRNA sense strand
gcgcaacacaaaccugaga

SEQ ID NO: 1094260 - RNA, 19 nt, Homo sapiens
  misc_RNA (1)...(19): siRNA sense strand
ggccauugcagauuuggaa

SEQ ID NO: 1094261 - RNA, 19 nt, Homo sapiens
  misc_RNA (1)...(19): siRNA sense strand
ggauggguugguagaaauu

SEQ ID NO: 1094262 - RNA, 19 nt, Homo sapiens
  misc_RNA (1)...(19): siRNA sense strand
gcagaaaucuuuggauaua

SEQ ID NO: 1094263 - RNA, 19 nt, Homo sapiens
  misc_RNA (1)...(19): siRNA sense strand
caacaaagacccacagaua

SEQ ID NO: 1094264 - RNA, 19 nt, Homo sapiens
  misc_RNA (1)...(19): siRNA sense strand
gauaauaugucauccuuga

SEQ ID NO: 1094265 - RNA, 19 nt, Homo sapiens
  misc_RNA (1)...(19): siRNA sense strand
gagcaucacuuacacuuga

SEQ ID NO: 1094266 - RNA, 19 nt, Homo sapiens
  misc_RNA (1)...(19): siRNA sense strand
cagcagaaaucuuuggaua

SEQ ID NO: 1094267 - RNA, 19 nt, Homo sapiens
  misc_RNA (1)...(19): siRNA sense strand
gaggacggguuacagaaua

SEQ ID NO: 1094268 - RNA, 19 nt, Homo sapiens
  misc_RNA (1)...(19): siRNA sense strand
ggacacagaugaacgugau

SEQ ID NO: 1094269 - RNA, 19 nt, Homo sapiens
  misc_RNA (1)...(19): siRNA sense strand
gcaggguaauccuuucuuu

SEQ ID NO: 1094270 - RNA, 19 nt, Homo sapiens
  misc_RNA (1)...(19): siRNA sense strand
gcacagccaccaacuacua

SEQ ID NO: 1094271 - RNA, 19 nt, Homo sapiens
  misc_RNA (1)...(19): siRNA sense strand
ggagcaacuucauauaaug

SEQ ID NO: 1094272 - RNA, 19 nt, Homo sapiens
  misc_RNA (1)...(19): siRNA sense strand
ccaaaucaguggcuuaauc

SEQ ID NO: 1094273 - RNA, 19 nt, Homo sapiens
  misc_RNA (1)...(19): siRNA sense strand
gcuuugauaccaagaauua

SEQ ID NO: 1094274 - RNA, 19 nt, Homo sapiens
  misc_RNA (1)...(19): siRNA sense strand
cagacacacugauggauaa

SEQ ID NO: 1094275 - RNA, 19 nt, Homo sapiens
  misc_RNA (1)...(19): siRNA sense strand
ccucagaaacccaaaguua

SEQ ID NO: 1094276 - RNA, 19 nt, Homo sapiens
  misc_RNA (1)...(19): siRNA sense strand
cauaagaaguugggaauca

SEQ ID NO: 1094277 - RNA, 19 nt, Homo sapiens
  misc_RNA (1)...(19): siRNA sense strand
gcacacaccuguugcuacu

SEQ ID NO: 1094278 - RNA, 19 nt, Homo sapiens
  misc_RNA (1)...(19): siRNA sense strand
caacagaaaccaaaucagu

SEQ ID NO: 1094279 - RNA, 19 nt, Homo sapiens
  misc_RNA (1)...(19): siRNA sense strand
caacaugcccguuaauaca

SEQ ID NO: 1094280 - RNA, 19 nt, Homo sapiens
  misc_RNA (1)...(19): siRNA sense strand
gcaaagcagacccaacaaa

SEQ ID NO: 1094281 - RNA, 19 nt, Homo sapiens
  misc_RNA (1)...(19): siRNA sense strand
ggauauaggaaaucaaaug

SEQ ID NO: 1094282 - RNA, 19 nt, Homo sapiens
  misc_RNA (1)...(19): siRNA sense strand
aaauaaagaggacggguua

SEQ ID NO: 1094283 - RNA, 19 nt, Homo sapiens
  misc_RNA (1)...(19): siRNA sense strand
acacacugauggauaauau

SEQ ID NO: 1094284 - RNA, 19 nt, Homo sapiens
  misc_RNA (1)...(19): siRNA sense strand
ccucaagguucuccaacua

SEQ ID NO: 1094285 - RNA, 19 nt, Homo sapiens
  misc_RNA (1)...(19): siRNA sense strand
gauuggagucugaacauaa

SEQ ID NO: 1094286 - RNA, 19 nt, Homo sapiens
  misc_RNA (1)...(19): siRNA sense strand
ccaguuaucacaacagaaa

SEQ ID NO: 1094287 - RNA, 19 nt, Homo sapiens
  misc_RNA (1)...(19): siRNA sense strand
ggauucaacaugcccguua

SEQ ID NO: 1094288 - RNA, 19 nt, Homo sapiens
  misc_RNA (1)...(19): siRNA sense strand
ggaaucagcaaauugacaa

SEQ ID NO: 1094289 - RNA, 19 nt, Homo sapiens
  misc_RNA (1)...(19): siRNA sense strand
caagaugacucugggaaca

SEQ ID NO: 1094290 - RNA, 19 nt, Homo sapiens
  misc_RNA (1)...(19): siRNA sense strand
gauucaacaugcccguuaa

SEQ ID NO: 1094291 - RNA, 19 nt, Homo sapiens
  misc_RNA (1)...(19): siRNA sense strand
aauaugggcuuucagacuu

SEQ ID NO: 1094292 - RNA, 19 nt, Homo sapiens
  misc_RNA (1)...(19): siRNA sense strand
gggcauugguaugauguuu

SEQ ID NO: 1094293 - RNA, 19 nt, Homo sapiens
  misc_RNA (1)...(19): siRNA sense strand
gaauguuucugaggagaug

SEQ ID NO: 1094294 - RNA, 19 nt, Homo sapiens
  misc_RNA (1)...(19): siRNA sense strand
cauaaaagagcaucacuua

SEQ ID NO: 1094295 - RNA, 19 nt, Homo sapiens
  misc_RNA (1)...(19): siRNA sense strand
aagagcagcuggccggaaa

SEQ ID NO: 1094296 - RNA, 19 nt, Homo sapiens
  misc_RNA (1)...(19): siRNA sense strand
caaaucaguggcuuaauca

SEQ ID NO: 1094297 - RNA, 19 nt, Homo sapiens
  misc_RNA (1)...(19): siRNA sense strand
ggagaugaaaguuacaaau

SEQ ID NO: 1094298 - RNA, 19 nt, Homo sapiens
  misc_RNA (1)...(19): siRNA sense strand
agacuaaacuggagcaacu

SEQ ID NO: 1094299 - RNA, 19 nt, Homo sapiens
  misc_RNA (1)...(19): siRNA sense strand
gaugauauccuacccuucu

SEQ ID NO: 1094300 - RNA, 19 nt, Homo sapiens
  misc_RNA (1)...(19): siRNA sense strand
caaguacuuucgcuucugu

SEQ ID NO: 1094301 - RNA, 19 nt, Homo sapiens
  misc_RNA (1)...(19): siRNA sense strand
uaaacagacuaaggacuug

SEQ ID NO: 1094302 - RNA, 19 nt, Homo sapiens
  misc_RNA (1)...(19): siRNA sense strand
gcagugaguccgaaaauaa

SEQ ID NO: 1094303 - RNA, 19 nt, Homo sapiens
  misc_RNA (1)...(19): siRNA sense strand
ucagcaaauugacaaaguu

SEQ ID NO: 1094304 - RNA, 19 nt, Homo sapiens
  misc_RNA (1)...(19): siRNA sense strand
gguuuguacuugaugauau

SEQ ID NO: 1094305 - RNA, 19 nt, Homo sapiens
  misc_RNA (1)...(19): siRNA sense strand
uggagcaacuucauauaau

SEQ ID NO: 1094306 - RNA, 19 nt, Homo sapiens
  misc_RNA (1)...(19): siRNA sense strand
uuaauagauuggagucuga

SEQ ID NO: 1094307 - RNA, 19 nt, Homo sapiens
  misc_RNA (1)...(19): siRNA sense strand
aaacuggagcaacuucaua

SEQ ID NO: 1094308 - RNA, 19 nt, Homo sapiens
  misc_RNA (1)...(19): siRNA sense strand
agauaugucugcccuuaau

SEQ ID NO: 1094309 - RNA, 19 nt, Homo sapiens
  misc_RNA (1)...(19): siRNA sense strand
acaaagacccacagauaug

SEQ ID NO: 1094310 - RNA, 19 nt, Homo sapiens
  misc_RNA (1)...(19): siRNA sense strand
caacugauaauacaaagag

SEQ ID NO: 1094311 - RNA, 19 nt, Homo sapiens
  misc_RNA (1)...(19): siRNA sense strand
uaaaucuucugcuucaagu

SEQ ID NO: 1094312 - RNA, 19 nt, Homo sapiens
  misc_RNA (1)...(19): siRNA sense strand
caaagcagacccaacaaag

SEQ ID NO: 1094313 - RNA, 19 nt, Homo sapiens
  misc_RNA (1)...(19): siRNA sense strand
gcaguucagcuagcaauga

SEQ ID NO: 1094314 - RNA, 19 nt, Homo sapiens
  misc_RNA (1)...(19): siRNA sense strand
ucaagguucuccaacuaug

SEQ ID NO: 1094315 - RNA, 19 nt, Homo sapiens
  misc_RNA (1)...(19): siRNA sense strand
caagugcacacaccuguug

SEQ ID NO: 1094316 - RNA, 19 nt, Homo sapiens
  misc_RNA (1)...(19): siRNA sense strand
caggguaauccuuucuuua

SEQ ID NO: 1094317 - RNA, 19 nt, Homo sapiens
  misc_RNA (1)...(19): siRNA sense strand
ugccaaacuucaaugcuuu

SEQ ID NO: 1094318 - RNA, 19 nt, Homo sapiens
  misc_RNA (1)...(19): siRNA sense strand
ggaaaaguguugccucauc

SEQ ID NO: 1094319 - RNA, 19 nt, Homo sapiens
  misc_RNA (1)...(19): siRNA sense strand
guucagcuagcaaugauuu

SEQ ID NO: 1094320 - RNA, 19 nt, Homo sapiens
  misc_RNA (1)...(19): siRNA sense strand
ccaacuacuaugaccaaua

SEQ ID NO: 1094321 - RNA, 19 nt, Homo sapiens
  misc_RNA (1)...(19): siRNA sense strand
ugucugcccuuaauaaucu

SEQ ID NO: 1094322 - RNA, 19 nt, Homo sapiens
  misc_RNA (1)...(19): siRNA sense strand
gauaugucugcccuuaaua

SEQ ID NO: 1094323 - RNA, 19 nt, Homo sapiens
  misc_RNA (1)...(19): siRNA sense strand
gaacaagagcaggcacaga

SEQ ID NO: 1094324 - RNA, 19 nt, Homo sapiens
  misc_RNA (1)...(19): siRNA sense strand
ucacuuacacuugaagaaa

SEQ ID NO: 1094325 - RNA, 19 nt, Homo sapiens
  misc_RNA (1)...(19): siRNA sense strand
gaacagcagaaaucuuugg

SEQ ID NO: 1094326 - RNA, 19 nt, Homo sapiens
  misc_RNA (1)...(19): siRNA sense strand
gcaacuucauauaaugcaa

SEQ ID NO: 1094327 - RNA, 19 nt, Homo sapiens
  misc_RNA (1)...(19): siRNA sense strand
aaaguguugccucaucuua

SEQ ID NO: 1094328 - RNA, 19 nt, Homo sapiens
  misc_RNA (1)...(19): siRNA sense strand
gugcaaagcagacccaaca

SEQ ID NO: 1094329 - RNA, 19 nt, Homo sapiens
  misc_RNA (1)...(19): siRNA sense strand
aggguaauccuuucuuuaa

SEQ ID NO: 1094330 - RNA, 19 nt, Homo sapiens
  misc_RNA (1)...(19): siRNA sense strand
ucaguggcuuaaucaguuu

SEQ ID NO: 1094331 - RNA, 19 nt, Homo sapiens
  misc_RNA (1)...(19): siRNA sense strand
gcaugaaccaguuaucaca

SEQ ID NO: 1094332 - RNA, 19 nt, Homo sapiens
  misc_RNA (1)...(19): siRNA sense strand
cagcaaauugacaaaguuu

SEQ ID NO: 1094333 - RNA, 19 nt, Homo sapiens
  misc_RNA (1)...(19): siRNA sense strand
uacaacaaauuccauccaa

SEQ ID NO: 1094334 - RNA, 19 nt, Homo sapiens
  misc_RNA (1)...(19): siRNA sense strand
uaugggcaguucaguaaug

SEQ ID NO: 1094335 - RNA, 19 nt, Homo sapiens
  misc_RNA (1)...(19): siRNA sense strand
uaucacaacagaaaccaaa

SEQ ID NO: 1094336 - RNA, 19 nt, Homo sapiens
  misc_RNA (1)...(19): siRNA sense strand
ugaccagccuuucuguuag

SEQ ID NO: 1094337 - RNA, 19 nt, Homo sapiens
  misc_RNA (1)...(19): siRNA sense strand
aguguugccucaucuuauu

SEQ ID NO: 1094338 - RNA, 19 nt, Homo sapiens
  misc_RNA (1)...(19): siRNA sense strand
gaacgugauaggacaaucu

SEQ ID NO: 1094339 - RNA, 19 nt, Homo sapiens
  misc_RNA (1)...(19): siRNA sense strand
caaagacccacagauaugu

SEQ ID NO: 1094340 - RNA, 19 nt, Homo sapiens
  misc_RNA (1)...(19): siRNA sense strand
gaccagccuuucuguuagu

SEQ ID NO: 1094341 - RNA, 19 nt, Homo sapiens
  misc_RNA (1)...(19): siRNA sense strand
acuaaggacuugacagaca

SEQ ID NO: 1094342 - RNA, 19 nt, Homo sapiens
  misc_RNA (1)...(19): siRNA sense strand
acacaccuguugcuacugu

SEQ ID NO: 1094343 - RNA, 19 nt, Homo sapiens
  misc_RNA (1)...(19): siRNA sense strand
uugaccagccuuucuguua

SEQ ID NO: 1094344 - RNA, 19 nt, Homo sapiens
  misc_RNA (1)...(19): siRNA sense strand
ucauuagugugcuuaggaa

SEQ ID NO: 1094345 - RNA, 19 nt, Homo sapiens
  misc_RNA (1)...(19): siRNA sense strand
acagacacacugauggaua

SEQ ID NO: 1094346 - RNA, 19 nt, Homo sapiens
  misc_RNA (1)...(19): siRNA sense strand
agacuaaggacuugacaga

SEQ ID NO: 1094347 - RNA, 19 nt, Homo sapiens
  misc_RNA (1)...(19): siRNA sense strand
uuaaacagacuaaggacuu

SEQ ID NO: 1094348 - RNA, 19 nt, Homo sapiens
  misc_RNA (1)...(19): siRNA sense strand
uuagugugcuuaggaaaga

SEQ ID NO: 1094349 - RNA, 19 nt, Homo sapiens
  misc_RNA (1)...(19): siRNA sense strand
aaaccaaaucaguggcuua

SEQ ID NO: 1094350 - RNA, 19 nt, Homo sapiens
  misc_RNA (1)...(19): siRNA sense strand
cuacccuucuuacaacaaa

SEQ ID NO: 1094351 - RNA, 19 nt, Homo sapiens
  misc_RNA (1)...(19): siRNA sense strand
cguguaaauucauuagugu

SEQ ID NO: 1094352 - RNA, 19 nt, Homo sapiens
  misc_RNA (1)...(19): siRNA sense strand
uauccuacccuucuuacaa

SEQ ID NO: 1094353 - RNA, 19 nt, Homo sapiens
  misc_RNA (1)...(19): siRNA sense strand
uaaaagagcaucacuuaca

SEQ ID NO: 1094354 - RNA, 19 nt, Homo sapiens
  misc_RNA (1)...(19): siRNA sense strand
gcaagaacagcagaaaucu

SEQ ID NO: 1094355 - RNA, 19 nt, Homo sapiens
  misc_RNA (1)...(19): siRNA sense strand
gaaaaguguugccucaucu

SEQ ID NO: 1094356 - RNA, 19 nt, Homo sapiens
  misc_RNA (1)...(19): siRNA sense strand
aaagaggacggguuacaga

SEQ ID NO: 1094357 - RNA, 19 nt, Homo sapiens
  misc_RNA (1)...(19): siRNA sense strand
gccaauaugggcuuucaga

SEQ ID NO: 1094358 - RNA, 19 nt, Homo sapiens
  misc_RNA (1)...(19): siRNA sense strand
aaagcagacccaacaaaga

SEQ ID NO: 1094359 - RNA, 19 nt, Homo sapiens
  misc_RNA (1)...(19): siRNA sense strand
cccuaaaucuucugcuuca

SEQ ID NO: 1094360 - RNA, 19 nt, Homo sapiens
  misc_RNA (1)...(19): siRNA sense strand
guaugcaggguaauccuuu

SEQ ID NO: 1094361 - RNA, 19 nt, Homo sapiens
  misc_RNA (1)...(19): siRNA sense strand
acuaugggcaguucaguaa

SEQ ID NO: 1094362 - RNA, 19 nt, Homo sapiens
  misc_RNA (1)...(19): siRNA sense strand
gaugaagacucucagguua

SEQ ID NO: 1094363 - RNA, 19 nt, Homo sapiens
  misc_RNA (1)...(19): siRNA sense strand
gaacaugacuucccuaaaa

SEQ ID NO: 1094364 - RNA, 19 nt, Homo sapiens
  misc_RNA (1)...(19): siRNA sense strand
caagaaagauauuccaaug

SEQ ID NO: 1094365 - RNA, 19 nt, Homo sapiens
  misc_RNA (1)...(19): siRNA sense strand
caaacuggaugaacagaaa

SEQ ID NO: 1094366 - RNA, 19 nt, Homo sapiens
  misc_RNA (1)...(19): siRNA sense strand
acaaagggaucuuccagua

SEQ ID NO: 1094367 - RNA, 19 nt, Homo sapiens
  misc_RNA (1)...(19): siRNA sense strand
gcaggaagcucuggaggaa

SEQ ID NO: 1094368 - RNA, 19 nt, Homo sapiens
  misc_RNA (1)...(19): siRNA sense strand
gaagaguauuggaacauga

SEQ ID NO: 1094369 - RNA, 19 nt, Homo sapiens
  misc_RNA (1)...(19): siRNA sense strand
ccaaaguacugaugaauag

SEQ ID NO: 1094370 - RNA, 19 nt, Homo sapiens
  misc_RNA (1)...(19): siRNA sense strand
gacaagaggucaagcaauc

SEQ ID NO: 1094371 - RNA, 19 nt, Homo sapiens
  misc_RNA (1)...(19): siRNA sense strand
gggcuucgcugaucauaga

SEQ ID NO: 1094372 - RNA, 19 nt, Homo sapiens
  misc_RNA (1)...(19): siRNA sense strand
gcgaagugguguuugaauu

SEQ ID NO: 1094373 - RNA, 19 nt, Homo sapiens
  misc_RNA (1)...(19): siRNA sense strand
cauagacgauggaaacauu

SEQ ID NO: 1094374 - RNA, 19 nt, Homo sapiens
  misc_RNA (1)...(19): siRNA sense strand
gccauucagucccagauua

SEQ ID NO: 1094375 - RNA, 19 nt, Homo sapiens
  misc_RNA (1)...(19): siRNA sense strand
cgaagugguguuugaauua

SEQ ID NO: 1094376 - RNA, 19 nt, Homo sapiens
  misc_RNA (1)...(19): siRNA sense strand
gaacgagaguuugccauuc

SEQ ID NO: 1094377 - RNA, 19 nt, Homo sapiens
  misc_RNA (1)...(19): siRNA sense strand
uaaacuggcuucagcuaga

SEQ ID NO: 1094378 - RNA, 19 nt, Homo sapiens
  misc_RNA (1)...(19): siRNA sense strand
gcacgcagccugagugaga

SEQ ID NO: 1094379 - RNA, 19 nt, Homo sapiens
  misc_RNA (1)...(19): siRNA sense strand
ucagcuagaucgaagagua

SEQ ID NO: 1094380 - RNA, 19 nt, Homo sapiens
  misc_RNA (1)...(19): siRNA sense strand
ugaagaaacugcaggagau

SEQ ID NO: 1094381 - RNA, 19 nt, Homo sapiens
  misc_RNA (1)...(19): siRNA sense strand
caucaagucugggaagaaa

SEQ ID NO: 1094382 - RNA, 19 nt, Homo sapiens
  misc_RNA (1)...(19): siRNA sense strand
aaagggaucuuccaguaug

SEQ ID NO: 1094383 - RNA, 19 nt, Homo sapiens
  misc_RNA (1)...(19): siRNA sense strand
caguaugacuaccaugaua

SEQ ID NO: 1094384 - RNA, 19 nt, Homo sapiens
  misc_RNA (1)...(19): siRNA sense strand
gaagcuggaacuccuagua

SEQ ID NO: 1094385 - RNA, 19 nt, Homo sapiens
  misc_RNA (1)...(19): siRNA sense strand
gaagugguguuugaauuag

SEQ ID NO: 1094386 - RNA, 19 nt, Homo sapiens
  misc_RNA (1)...(19): siRNA sense strand
gaaagcagaguaaguccaa

SEQ ID NO: 1094387 - RNA, 19 nt, Homo sapiens
  misc_RNA (1)...(19): siRNA sense strand
cagaugcccuuguucuuga

SEQ ID NO: 1094388 - RNA, 19 nt, Homo sapiens
  misc_RNA (1)...(19): siRNA sense strand
gaggaaacccugcgucaga

SEQ ID NO: 1094389 - RNA, 19 nt, Homo sapiens
  misc_RNA (1)...(19): siRNA sense strand
gcaagcugccaguagaaua

SEQ ID NO: 1094390 - RNA, 19 nt, Homo sapiens
  misc_RNA (1)...(19): siRNA sense strand
gucaagcaaucguaaacua

SEQ ID NO: 1094391 - RNA, 19 nt, Homo sapiens
  misc_RNA (1)...(19): siRNA sense strand
ugacuaccaugauaaagug

SEQ ID NO: 1094392 - RNA, 19 nt, Homo sapiens
  misc_RNA (1)...(19): siRNA sense strand
gaucauagacgauggaaac

SEQ ID NO: 1094393 - RNA, 19 nt, Homo sapiens
  misc_RNA (1)...(19): siRNA sense strand
gaugaaacgggacacuuaa

SEQ ID NO: 1094394 - RNA, 19 nt, Homo sapiens
  misc_RNA (1)...(19): siRNA sense strand
ggagugaguccucuuuaga

SEQ ID NO: 1094395 - RNA, 19 nt, Homo sapiens
  misc_RNA (1)...(19): siRNA sense strand
ggaacgagaguuugccauu

SEQ ID NO: 1094396 - RNA, 19 nt, Homo sapiens
  misc_RNA (1)...(19): siRNA sense strand
ggaugaagacucucagguu

SEQ ID NO: 1094397 - RNA, 19 nt, Homo sapiens
  misc_RNA (1)...(19): siRNA sense strand
ugaaugcacugaagaaacu

SEQ ID NO: 1094398 - RNA, 19 nt, Homo sapiens
  misc_RNA (1)...(19): siRNA sense strand
ggaggaaccacccauuguu

SEQ ID NO: 1094399 - RNA, 19 nt, Homo sapiens
  misc_RNA (1)...(19): siRNA sense strand
ccucgaagcuggccaacau

SEQ ID NO: 1094400 - RNA, 19 nt, Homo sapiens
  misc_RNA (1)...(19): siRNA sense strand
aagaagcgcuccucucaca

SEQ ID NO: 1094401 - RNA, 19 nt, Homo sapiens
  misc_RNA (1)...(19): siRNA sense strand
ggaguacuuuggaauagca

SEQ ID NO: 1094402 - RNA, 19 nt, Homo sapiens
  misc_RNA (1)...(19): siRNA sense strand
ucagcugccuuaccucaaa

SEQ ID NO: 1094403 - RNA, 19 nt, Homo sapiens
  misc_RNA (1)...(19): siRNA sense strand
gaagaaacugcaggagauu

SEQ ID NO: 1094404 - RNA, 19 nt, Homo sapiens
  misc_RNA (1)...(19): siRNA sense strand
ucaagaagcgcuccucuca

SEQ ID NO: 1094405 - RNA, 19 nt, Homo sapiens
  misc_RNA (1)...(19): siRNA sense strand
uagaugaacccuaugagaa

SEQ ID NO: 1094406 - RNA, 19 nt, Homo sapiens
  misc_RNA (1)...(19): siRNA sense strand
ugaguccucuuuagaugaa

SEQ ID NO: 1094407 - RNA, 19 nt, Homo sapiens
  misc_RNA (1)...(19): siRNA sense strand
aaagugaagccaagaaaga

SEQ ID NO: 1094408 - RNA, 19 nt, Homo sapiens
  misc_RNA (1)...(19): siRNA sense strand
gcucgacaccgucaaguga

SEQ ID NO: 1094409 - RNA, 19 nt, Homo sapiens
  misc_RNA (1)...(19): siRNA sense strand
gcuucucacuucaaucuga

SEQ ID NO: 1094410 - RNA, 19 nt, Homo sapiens
  misc_RNA (1)...(19): siRNA sense strand
ucauugagcacuacaagaa

SEQ ID NO: 1094411 - RNA, 19 nt, Homo sapiens
  misc_RNA (1)...(19): siRNA sense strand
ccagagggcuucgcugauc

SEQ ID NO: 1094412 - RNA, 19 nt, Homo sapiens
  misc_RNA (1)...(19): siRNA sense strand
agaugaaacgggacacuua

SEQ ID NO: 1094413 - RNA, 19 nt, Homo sapiens
  misc_RNA (1)...(19): siRNA sense strand
cgaagaguauuggaacaug

SEQ ID NO: 1094414 - RNA, 19 nt, Homo sapiens
  misc_RNA (1)...(19): siRNA sense strand
ucaccaaaguacugaugaa

SEQ ID NO: 1094415 - RNA, 19 nt, Homo sapiens
  misc_RNA (1)...(19): siRNA sense strand
ggagugacuugaagaagcu

SEQ ID NO: 1094416 - RNA, 19 nt, Homo sapiens
  misc_RNA (1)...(19): siRNA sense strand
gauaaagugaagccaagaa

SEQ ID NO: 1094417 - RNA, 19 nt, Homo sapiens
  misc_RNA (1)...(19): siRNA sense strand
ugagugagaucgccaucga

SEQ ID NO: 1094418 - RNA, 19 nt, Homo sapiens
  misc_RNA (1)...(19): siRNA sense strand
gcucucggccugcugauga

SEQ ID NO: 1094419 - RNA, 19 nt, Homo sapiens
  misc_RNA (1)...(19): siRNA sense strand
cagguuaccagcacaauau

SEQ ID NO: 1094420 - RNA, 19 nt, Homo sapiens
  misc_RNA (1)...(19): siRNA sense strand
ccucucagaugcccuuguu

SEQ ID NO: 1094421 - RNA, 19 nt, Homo sapiens
  misc_RNA (1)...(19): siRNA sense strand
gcgaaguccugcaucuaca

SEQ ID NO: 1094422 - RNA, 19 nt, Homo sapiens
  misc_RNA (1)...(19): siRNA sense strand
caaagggaucuuccaguau

SEQ ID NO: 1094423 - RNA, 19 nt, Homo sapiens
  misc_RNA (1)...(19): siRNA sense strand
acagcgaagugguguuuga

SEQ ID NO: 1094424 - RNA, 19 nt, Homo sapiens
  misc_RNA (1)...(19): siRNA sense strand
ugugucagguucuauauag

SEQ ID NO: 1094425 - RNA, 19 nt, Homo sapiens
  misc_RNA (1)...(19): siRNA sense strand
caagcugccaguagaauau

SEQ ID NO: 1094426 - RNA, 19 nt, Homo sapiens
  misc_RNA (1)...(19): siRNA sense strand
caaggagcuuauugacguu

SEQ ID NO: 1094427 - RNA, 19 nt, Homo sapiens
  misc_RNA (1)...(19): siRNA sense strand
caauggagacaguuggaaa

SEQ ID NO: 1094428 - RNA, 19 nt, Homo sapiens
  misc_RNA (1)...(19): siRNA sense strand
acgcagggcuucagugaca

SEQ ID NO: 1094429 - RNA, 19 nt, Homo sapiens
  misc_RNA (1)...(19): siRNA sense strand
gaaacgggacacuuaaacu

SEQ ID NO: 1094430 - RNA, 19 nt, Homo sapiens
  misc_RNA (1)...(19): siRNA sense strand
cgucaaggcucaguucaag

SEQ ID NO: 1094431 - RNA, 19 nt, Homo sapiens
  misc_RNA (1)...(19): siRNA sense strand
gcagaugaacgccaacuac

SEQ ID NO: 1094432 - RNA, 19 nt, Homo sapiens
  misc_RNA (1)...(19): siRNA sense strand
ccuaugagaaggucaagaa

SEQ ID NO: 1094433 - RNA, 19 nt, Homo sapiens
  misc_RNA (1)...(19): siRNA sense strand
gaaaaugcaaucaaugaga

SEQ ID NO: 1094434 - RNA, 19 nt, Homo sapiens
  misc_RNA (1)...(19): siRNA sense strand
aauaggaacagccuucaaa

SEQ ID NO: 1094435 - RNA, 19 nt, Homo sapiens
  misc_RNA (1)...(19): siRNA sense strand
acagagucauugagcacua

SEQ ID NO: 1094436 - RNA, 19 nt, Homo sapiens
  misc_RNA (1)...(19): siRNA sense strand
guaugacuaccaugauaaa

SEQ ID NO: 1094437 - RNA, 19 nt, Homo sapiens
  misc_RNA (1)...(19): siRNA sense strand
gaaggacaagcagggcaua

SEQ ID NO: 1094438 - RNA, 19 nt, Homo sapiens
  misc_RNA (1)...(19): siRNA sense strand
ugacagcgaagugguguuu

SEQ ID NO: 1094439 - RNA, 19 nt, Homo sapiens
  misc_RNA (1)...(19): siRNA sense strand
acagaaaacucacccauuc

SEQ ID NO: 1094440 - RNA, 19 nt, Homo sapiens
  misc_RNA (1)...(19): siRNA sense strand
gacagcggcucgcaguaca

SEQ ID NO: 1094441 - RNA, 19 nt, Homo sapiens
  misc_RNA (1)...(19): siRNA sense strand
guucggagaagaauaggaa

SEQ ID NO: 1094442 - RNA, 19 nt, Homo sapiens
  misc_RNA (1)...(19): siRNA sense strand
ccuuguggcuucucacuuc

SEQ ID NO: 1094443 - RNA, 19 nt, Homo sapiens
  misc_RNA (1)...(19): siRNA sense strand
ccacgcagggcuucaguga

SEQ ID NO: 1094444 - RNA, 19 nt, Homo sapiens
  misc_RNA (1)...(19): siRNA sense strand
ccaagaaagauauuccaau

SEQ ID NO: 1094445 - RNA, 19 nt, Homo sapiens
  misc_RNA (1)...(19): siRNA sense strand
ccuacgggguucacuauua

SEQ ID NO: 1094446 - RNA, 19 nt, Homo sapiens
  misc_RNA (1)...(19): siRNA sense strand
gcaaucguaaacuacauga

SEQ ID NO: 1094447 - RNA, 19 nt, Homo sapiens
  misc_RNA (1)...(19): siRNA sense strand
gcacacgugguaugcaugu

SEQ ID NO: 1094448 - RNA, 19 nt, Homo sapiens
  misc_RNA (1)...(19): siRNA sense strand
gaauaggaacagccuucaa

SEQ ID NO: 1094449 - RNA, 19 nt, Homo sapiens
  misc_RNA (1)...(19): siRNA sense strand
aaccuguacuucagagaaa

SEQ ID NO: 1094450 - RNA, 19 nt, Homo sapiens
  misc_RNA (1)...(19): siRNA sense strand
uccgacagaugcacuauca

SEQ ID NO: 1094451 - RNA, 19 nt, Homo sapiens
  misc_RNA (1)...(19): siRNA sense strand
auggaaacauugccaguga

SEQ ID NO: 1094452 - RNA, 19 nt, Homo sapiens
  misc_RNA (1)...(19): siRNA sense strand
aggaaaaccucguaucuga

SEQ ID NO: 1094453 - RNA, 19 nt, Homo sapiens
  misc_RNA (1)...(19): siRNA sense strand
gggaggaaccacccauugu

SEQ ID NO: 1094454 - RNA, 19 nt, Homo sapiens
  misc_RNA (1)...(19): siRNA sense strand
aacgagaguuugccauuca

SEQ ID NO: 1094455 - RNA, 19 nt, Homo sapiens
  misc_RNA (1)...(19): siRNA sense strand
ucaagacguccaacuccua

SEQ ID NO: 1094456 - RNA, 19 nt, Homo sapiens
  misc_RNA (1)...(19): siRNA sense strand
gagugaguccucuuuagau

SEQ ID NO: 1094457 - RNA, 19 nt, Homo sapiens
  misc_RNA (1)...(19): siRNA sense strand
ucagaugcccuuguucuug

SEQ ID NO: 1094458 - RNA, 19 nt, Homo sapiens
  misc_RNA (1)...(19): siRNA sense strand
aaacugaagaaacaaagga

SEQ ID NO: 1094459 - RNA, 19 nt, Homo sapiens
  misc_RNA (1)...(19): siRNA sense strand
ggccacgucagcugccuua

SEQ ID NO: 1094460 - RNA, 19 nt, Homo sapiens
  misc_RNA (1)...(19): siRNA sense strand
ggaaacauugccagugaag

SEQ ID NO: 1094461 - RNA, 19 nt, Homo sapiens
  misc_RNA (1)...(19): siRNA sense strand
gaaaaccucguaucugaau

SEQ ID NO: 1094462 - RNA, 19 nt, Homo sapiens
  misc_RNA (1)...(19): siRNA sense strand
ccaaagaacuagcagagaa

SEQ ID NO: 1094463 - RNA, 19 nt, Homo sapiens
  misc_RNA (1)...(19): siRNA sense strand
gcacaucuccgucaacuuc

SEQ ID NO: 1094464 - RNA, 19 nt, Homo sapiens
  misc_RNA (1)...(19): siRNA sense strand
gaaaugcccacucuacaug

SEQ ID NO: 1094465 - RNA, 19 nt, Homo sapiens
  misc_RNA (1)...(19): siRNA sense strand
ggacacugcuucucaacca

SEQ ID NO: 1094466 - RNA, 19 nt, Homo sapiens
  misc_RNA (1)...(19): siRNA sense strand
gcacaggaacccacuacaa

SEQ ID NO: 1094467 - RNA, 19 nt, Homo sapiens
  misc_RNA (1)...(19): siRNA sense strand
gccaguacgugcuguguga

SEQ ID NO: 1094468 - RNA, 19 nt, Homo sapiens
  misc_RNA (1)...(19): siRNA sense strand
ccaucgagcuccuguacuu

SEQ ID NO: 1094469 - RNA, 19 nt, Homo sapiens
  misc_RNA (1)...(19): siRNA sense strand
cgccauggcugaucugguu

SEQ ID NO: 1094470 - RNA, 19 nt, Homo sapiens
  misc_RNA (1)...(19): siRNA sense strand
ccaagucccuguacaucug

SEQ ID NO: 1094471 - RNA, 19 nt, Homo sapiens
  misc_RNA (1)...(19): siRNA sense strand
ggagaaaaccaaagaacua

SEQ ID NO: 1094472 - RNA, 19 nt, Homo sapiens
  misc_RNA (1)...(19): siRNA sense strand
ggaaacagccaagaagauc

SEQ ID NO: 1094473 - RNA, 19 nt, Homo sapiens
  misc_RNA (1)...(19): siRNA sense strand
ggacuucugcuacgucuuc

SEQ ID NO: 1094474 - RNA, 19 nt, Homo sapiens
  misc_RNA (1)...(19): siRNA sense strand
gcagaaaugcccacucuac

SEQ ID NO: 1094475 - RNA, 19 nt, Homo sapiens
  misc_RNA (1)...(19): siRNA sense strand
cagcagaaaugcccacucu

SEQ ID NO: 1094476 - RNA, 19 nt, Homo sapiens
  misc_RNA (1)...(19): siRNA sense strand
uggaggagguggugcugua

SEQ ID NO: 1094477 - RNA, 19 nt, Homo sapiens
  misc_RNA (1)...(19): siRNA sense strand
gggacgcacuucaucaugu

SEQ ID NO: 1094478 - RNA, 19 nt, Homo sapiens
  misc_RNA (1)...(19): siRNA sense strand
ggacgcugagcuacaagua

SEQ ID NO: 1094479 - RNA, 19 nt, Homo sapiens
  misc_RNA (1)...(19): siRNA sense strand
ggacgcacuucaucauguc

SEQ ID NO: 1094480 - RNA, 19 nt, Homo sapiens
  misc_RNA (1)...(19): siRNA sense strand
ucuacuaccugcugcuauu

SEQ ID NO: 1094481 - RNA, 19 nt, Homo sapiens
  misc_RNA (1)...(19): siRNA sense strand
gggcccagcucauccagau

SEQ ID NO: 1094482 - RNA, 19 nt, Homo sapiens
  misc_RNA (1)...(19): siRNA sense strand
guucuggaguccuacgaaa

SEQ ID NO: 1094483 - RNA, 19 nt, Homo sapiens
  misc_RNA (1)...(19): siRNA sense strand
cagccaagaagauccauuu

SEQ ID NO: 1094484 - RNA, 19 nt, Homo sapiens
  misc_RNA (1)...(19): siRNA sense strand
cccgugagcuggugaagga

SEQ ID NO: 1094485 - RNA, 19 nt, Homo sapiens
  misc_RNA (1)...(19): siRNA sense strand
gcucuacguccgccacuuu

SEQ ID NO: 1094486 - RNA, 19 nt, Homo sapiens
  misc_RNA (1)...(19): siRNA sense strand
gagcguacucuucccuuga

SEQ ID NO: 1094487 - RNA, 19 nt, Homo sapiens
  misc_RNA (1)...(19): siRNA sense strand
cagaggaucaugacguuga

SEQ ID NO: 1094488 - RNA, 19 nt, Homo sapiens
  misc_RNA (1)...(19): siRNA sense strand
gguuugagcugaggaagag

SEQ ID NO: 1094489 - RNA, 19 nt, Homo sapiens
  misc_RNA (1)...(19): siRNA sense strand
gaugcucgccuaccucuuc

SEQ ID NO: 1094490 - RNA, 19 nt, Homo sapiens
  misc_RNA (1)...(19): siRNA sense strand
ucgccuaccucuucuucuu

SEQ ID NO: 1094491 - RNA, 19 nt, Homo sapiens
  misc_RNA (1)...(19): siRNA sense strand
cgucauggcgggaagaaga

SEQ ID NO: 1094492 - RNA, 19 nt, Homo sapiens
  misc_RNA (1)...(19): siRNA sense strand
caccaucacggcagggaua

SEQ ID NO: 1094493 - RNA, 19 nt, Homo sapiens
  misc_RNA (1)...(19): siRNA sense strand
gcgcacaucuccgucaacu

SEQ ID NO: 1094494 - RNA, 19 nt, Homo sapiens
  misc_RNA (1)...(19): siRNA sense strand
ccaccaagagcaaacugaa

SEQ ID NO: 1094495 - RNA, 19 nt, Homo sapiens
  misc_RNA (1)...(19): siRNA sense strand
gaaguccgacguggaaaca

SEQ ID NO: 1094496 - RNA, 19 nt, Homo sapiens
  misc_RNA (1)...(19): siRNA sense strand
gggcgcacaucuccgucaa

SEQ ID NO: 1094497 - RNA, 19 nt, Homo sapiens
  misc_RNA (1)...(19): siRNA sense strand
ugcagaggaucaugacguu

SEQ ID NO: 1094498 - RNA, 19 nt, Homo sapiens
  misc_RNA (1)...(19): siRNA sense strand
caaagaacuagcagagaag

SEQ ID NO: 1094499 - RNA, 19 nt, Homo sapiens
  misc_RNA (1)...(19): siRNA sense strand
ccucuugauccaggaauua

SEQ ID NO: 1094500 - RNA, 19 nt, Homo sapiens
  misc_RNA (1)...(19): siRNA sense strand
ugagagcuguggaccugau

SEQ ID NO: 1094501 - RNA, 19 nt, Homo sapiens
  misc_RNA (1)...(19): siRNA sense strand
acaggaacccacuacaaga

SEQ ID NO: 1094502 - RNA, 19 nt, Homo sapiens
  misc_RNA (1)...(19): siRNA sense strand
caucacaggcucgaaggaa

SEQ ID NO: 1094503 - RNA, 19 nt, Homo sapiens
  misc_RNA (1)...(19): siRNA sense strand
cagaaaugcccacucuaca

SEQ ID NO: 1094504 - RNA, 19 nt, Homo sapiens
  misc_RNA (1)...(19): siRNA sense strand
cggcagagccagcuguugu

SEQ ID NO: 1094505 - RNA, 19 nt, Homo sapiens
  misc_RNA (1)...(19): siRNA sense strand
gacuugcagcccauucuuu

SEQ ID NO: 1094506 - RNA, 19 nt, Homo sapiens
  misc_RNA (1)...(19): siRNA sense strand
ucuacuaugucuccaaguc

SEQ ID NO: 1094507 - RNA, 19 nt, Homo sapiens
  misc_RNA (1)...(19): siRNA sense strand
gcagugcgucuacuauguc

SEQ ID NO: 1094508 - RNA, 19 nt, Homo sapiens
  misc_RNA (1)...(19): siRNA sense strand
guggaaacagccaagaaga

SEQ ID NO: 1094509 - RNA, 19 nt, Homo sapiens
  misc_RNA (1)...(19): siRNA sense strand
cacaggaacccacuacaag

SEQ ID NO: 1094510 - RNA, 19 nt, Homo sapiens
  misc_RNA (1)...(19): siRNA sense strand
ggaaaagcgcucccagaga

SEQ ID NO: 1094511 - RNA, 19 nt, Homo sapiens
  misc_RNA (1)...(19): siRNA sense strand
cagcagugcgucuacuaug

SEQ ID NO: 1094512 - RNA, 19 nt, Homo sapiens
  misc_RNA (1)...(19): siRNA sense strand
agaaaugcccacucuacau

SEQ ID NO: 1094513 - RNA, 19 nt, Homo sapiens
  misc_RNA (1)...(19): siRNA sense strand
ucgagcuccuguacuuuau

SEQ ID NO: 1094514 - RNA, 19 nt, Homo sapiens
  misc_RNA (1)...(19): siRNA sense strand
gcucgaaggaaucgcuguu

SEQ ID NO: 1094515 - RNA, 19 nt, Homo sapiens
  misc_RNA (1)...(19): siRNA sense strand
cagagaagcaggcgcaacu

SEQ ID NO: 1094516 - RNA, 19 nt, Homo sapiens
  misc_RNA (1)...(19): siRNA sense strand
gagcuccuguacuuuaucc

SEQ ID NO: 1094517 - RNA, 19 nt, Homo sapiens
  misc_RNA (1)...(19): siRNA sense strand
ccgggacacugcuucucaa

SEQ ID NO: 1094518 - RNA, 19 nt, Homo sapiens
  misc_RNA (1)...(19): siRNA sense strand
ggagguuugagcugaggaa

SEQ ID NO: 1094519 - RNA, 19 nt, Homo sapiens
  misc_RNA (1)...(19): siRNA sense strand
gaggagcagcuggacauca

SEQ ID NO: 1094520 - RNA, 19 nt, Homo sapiens
  misc_RNA (1)...(19): siRNA sense strand
gcucuacuaccugcugcua

SEQ ID NO: 1094521 - RNA, 19 nt, Homo sapiens
  misc_RNA (1)...(19): siRNA sense strand
ucgaaggaaucgcuguucu

SEQ ID NO: 1094522 - RNA, 19 nt, Homo sapiens
  misc_RNA (1)...(19): siRNA sense strand
ggaaggagaugaauaugaa

SEQ ID NO: 1094523 - RNA, 19 nt, Homo sapiens
  misc_RNA (1)...(19): siRNA sense strand
gaagagauguuuccagaug

SEQ ID NO: 1094524 - RNA, 19 nt, Homo sapiens
  misc_RNA (1)...(19): siRNA sense strand
gaaaguagaugaagaagcu

SEQ ID NO: 1094525 - RNA, 19 nt, Homo sapiens
  misc_RNA (1)...(19): siRNA sense strand
ggaagaauaugaaacuaug

SEQ ID NO: 1094526 - RNA, 19 nt, Homo sapiens
  misc_RNA (1)...(19): siRNA sense strand
ggaaacacccagaacuuua

SEQ ID NO: 1094527 - RNA, 19 nt, Homo sapiens
  misc_RNA (1)...(19): siRNA sense strand
gaacaguacacuugaauga

SEQ ID NO: 1094528 - RNA, 19 nt, Homo sapiens
  misc_RNA (1)...(19): siRNA sense strand
gaacagaagaugucaguau

SEQ ID NO: 1094529 - RNA, 19 nt, Homo sapiens
  misc_RNA (1)...(19): siRNA sense strand
gucaauagguugcugcaua

SEQ ID NO: 1094530 - RNA, 19 nt, Homo sapiens
  misc_RNA (1)...(19): siRNA sense strand
caaggaagagcucauauuu

SEQ ID NO: 1094531 - RNA, 19 nt, Homo sapiens
  misc_RNA (1)...(19): siRNA sense strand
caaaggauuucuugaagga

SEQ ID NO: 1094532 - RNA, 19 nt, Homo sapiens
  misc_RNA (1)...(19): siRNA sense strand
gagcugagguuggcuggua

SEQ ID NO: 1094533 - RNA, 19 nt, Homo sapiens
  misc_RNA (1)...(19): siRNA sense strand
gaacacccuugauugcauu

SEQ ID NO: 1094534 - RNA, 19 nt, Homo sapiens
  misc_RNA (1)...(19): siRNA sense strand
gagguuggcugguauguca

SEQ ID NO: 1094535 - RNA, 19 nt, Homo sapiens
  misc_RNA (1)...(19): siRNA sense strand
ggaaaguucuaagguggua

SEQ ID NO: 1094536 - RNA, 19 nt, Homo sapiens
  misc_RNA (1)...(19): siRNA sense strand
gagaggaugugcugugguu

SEQ ID NO: 1094537 - RNA, 19 nt, Homo sapiens
  misc_RNA (1)...(19): siRNA sense strand
gaagaugucaguauugaau

SEQ ID NO: 1094538 - RNA, 19 nt, Homo sapiens
  misc_RNA (1)...(19): siRNA sense strand
caagagaguuguucugagu

SEQ ID NO: 1094539 - RNA, 19 nt, Homo sapiens
  misc_RNA (1)...(19): siRNA sense strand
aggaagagcucauauuuca

SEQ ID NO: 1094540 - RNA, 19 nt, Homo sapiens
  misc_RNA (1)...(19): siRNA sense strand
ggagacccuuucccuuuaa

SEQ ID NO: 1094541 - RNA, 19 nt, Homo sapiens
  misc_RNA (1)...(19): siRNA sense strand
gagaggacauaucaaggaa

SEQ ID NO: 1094542 - RNA, 19 nt, Homo sapiens
  misc_RNA (1)...(19): siRNA sense strand
uuaccaagcugaauggauu

SEQ ID NO: 1094543 - RNA, 19 nt, Homo sapiens
  misc_RNA (1)...(19): siRNA sense strand
ggaagaagcuaaguaaagc

SEQ ID NO: 1094544 - RNA, 19 nt, Homo sapiens
  misc_RNA (1)...(19): siRNA sense strand
cagaagaugucaguauuga

SEQ ID NO: 1094545 - RNA, 19 nt, Homo sapiens
  misc_RNA (1)...(19): siRNA sense strand
ucaagauuaugcucgaaua

SEQ ID NO: 1094546 - RNA, 19 nt, Homo sapiens
  misc_RNA (1)...(19): siRNA sense strand
cggagacccuuucccuuua

SEQ ID NO: 1094547 - RNA, 19 nt, Homo sapiens
  misc_RNA (1)...(19): siRNA sense strand
ccaaaggaacauccaguua

SEQ ID NO: 1094548 - RNA, 19 nt, Homo sapiens
  misc_RNA (1)...(19): siRNA sense strand
gcucgaauauuucaguuuc

SEQ ID NO: 1094549 - RNA, 19 nt, Homo sapiens
  misc_RNA (1)...(19): siRNA sense strand
gaaacacccagaacuuuau

SEQ ID NO: 1094550 - RNA, 19 nt, Homo sapiens
  misc_RNA (1)...(19): siRNA sense strand
gcaguuggcuaaccagaag

SEQ ID NO: 1094551 - RNA, 19 nt, Homo sapiens
  misc_RNA (1)...(19): siRNA sense strand
ugaagaagaggaagaauau

SEQ ID NO: 1094552 - RNA, 19 nt, Homo sapiens
  misc_RNA (1)...(19): siRNA sense strand
gaggaugugcugugguuua

SEQ ID NO: 1094553 - RNA, 19 nt, Homo sapiens
  misc_RNA (1)...(19): siRNA sense strand
ucaauagguugcugcauau

SEQ ID NO: 1094554 - RNA, 19 nt, Homo sapiens
  misc_RNA (1)...(19): siRNA sense strand
gggagucugugcaugauga

SEQ ID NO: 1094555 - RNA, 19 nt, Homo sapiens
  misc_RNA (1)...(19): siRNA sense strand
gaagaggaagaauaugaaa

SEQ ID NO: 1094556 - RNA, 19 nt, Homo sapiens
  misc_RNA (1)...(19): siRNA sense strand
ugauguggcugcucgaauu

SEQ ID NO: 1094557 - RNA, 19 nt, Homo sapiens
  misc_RNA (1)...(19): siRNA sense strand
ccaugcagcugcuucaaga

SEQ ID NO: 1094558 - RNA, 19 nt, Homo sapiens
  misc_RNA (1)...(19): siRNA sense strand
gcaagaaggugagaaaaga

SEQ ID NO: 1094559 - RNA, 19 nt, Homo sapiens
  misc_RNA (1)...(19): siRNA sense strand
gaggaagaauaugaaacua

SEQ ID NO: 1094560 - RNA, 19 nt, Homo sapiens
  misc_RNA (1)...(19): siRNA sense strand
ggucuuaaaguccuaauga

SEQ ID NO: 1094561 - RNA, 19 nt, Homo sapiens
  misc_RNA (1)...(19): siRNA sense strand
ccaggaagaagcuaaguaa

SEQ ID NO: 1094562 - RNA, 19 nt, Homo sapiens
  misc_RNA (1)...(19): siRNA sense strand
gugaagaagaggaagaaua

SEQ ID NO: 1094563 - RNA, 19 nt, Homo sapiens
  misc_RNA (1)...(19): siRNA sense strand
ggagaggacauaucaagga

SEQ ID NO: 1094564 - RNA, 19 nt, Homo sapiens
  misc_RNA (1)...(19): siRNA sense strand
ggaacacccuugauugcau

SEQ ID NO: 1094565 - RNA, 19 nt, Homo sapiens
  misc_RNA (1)...(19): siRNA sense strand
ggacagcaccggugauuac

SEQ ID NO: 1094566 - RNA, 19 nt, Homo sapiens
  misc_RNA (1)...(19): siRNA sense strand
aaagugagauuucuucaac

SEQ ID NO: 1094567 - RNA, 19 nt, Homo sapiens
  misc_RNA (1)...(19): siRNA sense strand
caagaaagacuggaagaga

SEQ ID NO: 1094568 - RNA, 19 nt, Homo sapiens
  misc_RNA (1)...(19): siRNA sense strand
ggcaaaggauuucuugaag

SEQ ID NO: 1094569 - RNA, 19 nt, Homo sapiens
  misc_RNA (1)...(19): siRNA sense strand
gaugaucuguaugauaaga

SEQ ID NO: 1094570 - RNA, 19 nt, Homo sapiens
  misc_RNA (1)...(19): siRNA sense strand
ggaugagaguagugaagaa

SEQ ID NO: 1094571 - RNA, 19 nt, Homo sapiens
  misc_RNA (1)...(19): siRNA sense strand
gggaaacacccagaacuuu

SEQ ID NO: 1094572 - RNA, 19 nt, Homo sapiens
  misc_RNA (1)...(19): siRNA sense strand
gucaguagauccagacaga

SEQ ID NO: 1094573 - RNA, 19 nt, Homo sapiens
  misc_RNA (1)...(19): siRNA sense strand
acaguacacuugaaugaau

SEQ ID NO: 1094574 - RNA, 19 nt, Homo sapiens
  misc_RNA (1)...(19): siRNA sense strand
aaaccuuccucaagauuau

SEQ ID NO: 1094575 - RNA, 19 nt, Homo sapiens
  misc_RNA (1)...(19): siRNA sense strand
aaacuccucuuguuagaca

SEQ ID NO: 1094576 - RNA, 19 nt, Homo sapiens
  misc_RNA (1)...(19): siRNA sense strand
gcuaaaaucucaagacaca

SEQ ID NO: 1094577 - RNA, 19 nt, Homo sapiens
  misc_RNA (1)...(19): siRNA sense strand
ggucauccuuucaaaauuu

SEQ ID NO: 1094578 - RNA, 19 nt, Homo sapiens
  misc_RNA (1)...(19): siRNA sense strand
aacagaagaugucaguauu

SEQ ID NO: 1094579 - RNA, 19 nt, Homo sapiens
  misc_RNA (1)...(19): siRNA sense strand
gggaaggagaugaauauga

SEQ ID NO: 1094580 - RNA, 19 nt, Homo sapiens
  misc_RNA (1)...(19): siRNA sense strand
gcaauggagauuugugcua

SEQ ID NO: 1094581 - RNA, 19 nt, Homo sapiens
  misc_RNA (1)...(19): siRNA sense strand
gaaggcagacccugguaga

SEQ ID NO: 1094582 - RNA, 19 nt, Homo sapiens
  misc_RNA (1)...(19): siRNA sense strand
cacaugaaaugcagcuuug

SEQ ID NO: 1094583 - RNA, 19 nt, Homo sapiens
  misc_RNA (1)...(19): siRNA sense strand
gaagagcucauauuucacu

SEQ ID NO: 1094584 - RNA, 19 nt, Homo sapiens
  misc_RNA (1)...(19): siRNA sense strand
ggaucugcacguuguguua

SEQ ID NO: 1094585 - RNA, 19 nt, Homo sapiens
  misc_RNA (1)...(19): siRNA sense strand
guacugaugaaccuguaua

SEQ ID NO: 1094586 - RNA, 19 nt, Homo sapiens
  misc_RNA (1)...(19): siRNA sense strand
caagacacaguacugauga

SEQ ID NO: 1094587 - RNA, 19 nt, Homo sapiens
  misc_RNA (1)...(19): siRNA sense strand
cuuaagagcuuccggacau

SEQ ID NO: 1094588 - RNA, 19 nt, Homo sapiens
  misc_RNA (1)...(19): siRNA sense strand
aagaaagacuggaagagau

SEQ ID NO: 1094589 - RNA, 19 nt, Homo sapiens
  misc_RNA (1)...(19): siRNA sense strand
cagcaccggugauuacugu

SEQ ID NO: 1094590 - RNA, 19 nt, Homo sapiens
  misc_RNA (1)...(19): siRNA sense strand
gcugguaugucacacuuca

SEQ ID NO: 1094591 - RNA, 19 nt, Homo sapiens
  misc_RNA (1)...(19): siRNA sense strand
acagaggccuuaagagcuu

SEQ ID NO: 1094592 - RNA, 19 nt, Homo sapiens
  misc_RNA (1)...(19): siRNA sense strand
caagauagggacacuggaa

SEQ ID NO: 1094593 - RNA, 19 nt, Homo sapiens
  misc_RNA (1)...(19): siRNA sense strand
gcagaauaaagcucauaaa

SEQ ID NO: 1094594 - RNA, 19 nt, Homo sapiens
  misc_RNA (1)...(19): siRNA sense strand
ccacaugaaaugcagcuuu

SEQ ID NO: 1094595 - RNA, 19 nt, Homo sapiens
  misc_RNA (1)...(19): siRNA sense strand
ccaaggaagagcucauauu

SEQ ID NO: 1094596 - RNA, 19 nt, Homo sapiens
  misc_RNA (1)...(19): siRNA sense strand
aagaagaggaagaauauga

SEQ ID NO: 1094597 - RNA, 19 nt, Homo sapiens
  misc_RNA (1)...(19): siRNA sense strand
gaugugcugugguuuaaac

SEQ ID NO: 1094598 - RNA, 19 nt, Homo sapiens
  misc_RNA (1)...(19): siRNA sense strand
ugaagaagcugaggcaaaa

SEQ ID NO: 1094599 - RNA, 19 nt, Homo sapiens
  misc_RNA (1)...(19): siRNA sense strand
caugaugaucuguaugaua

SEQ ID NO: 1094600 - RNA, 19 nt, Homo sapiens
  misc_RNA (1)...(19): siRNA sense strand
gcaguaguacguuacaugu

SEQ ID NO: 1094601 - RNA, 19 nt, Homo sapiens
  misc_RNA (1)...(19): siRNA sense strand
caaaggaacauccaguuac

SEQ ID NO: 1094602 - RNA, 19 nt, Homo sapiens
  misc_RNA (1)...(19): siRNA sense strand
gaaauacagaggccuuaag

SEQ ID NO: 1094603 - RNA, 19 nt, Homo sapiens
  misc_RNA (1)...(19): siRNA sense strand
uaagcaagaaggugagaaa

SEQ ID NO: 1094604 - RNA, 19 nt, Homo sapiens
  misc_RNA (1)...(19): siRNA sense strand
caguacacuugaaugaauu

SEQ ID NO: 1094605 - RNA, 19 nt, Homo sapiens
  misc_RNA (1)...(19): siRNA sense strand
gaauggucaucaagagagu

SEQ ID NO: 1094606 - RNA, 19 nt, Homo sapiens
  misc_RNA (1)...(19): siRNA sense strand
cuuccgagccucaccuuua

SEQ ID NO: 1094607 - RNA, 19 nt, Homo sapiens
  misc_RNA (1)...(19): siRNA sense strand
cagaauaaagcucauaaag

SEQ ID NO: 1094608 - RNA, 19 nt, Homo sapiens
  misc_RNA (1)...(19): siRNA sense strand
ccggagacccuuucccuuu

SEQ ID NO: 1094609 - RNA, 19 nt, Homo sapiens
  misc_RNA (1)...(19): siRNA sense strand
aguaguacguuacauguuc

SEQ ID NO: 1094610 - RNA, 19 nt, Homo sapiens
  misc_RNA (1)...(19): siRNA sense strand
gaguggucauccuuucaaa

SEQ ID NO: 1094611 - RNA, 19 nt, Homo sapiens
  misc_RNA (1)...(19): siRNA sense strand
caacacugaaccugugaaa

SEQ ID NO: 1094612 - RNA, 19 nt, Homo sapiens
  misc_RNA (1)...(19): siRNA sense strand
augaugauauggaacauga

SEQ ID NO: 1094613 - RNA, 19 nt, Homo sapiens
  misc_RNA (1)...(19): siRNA sense strand
gagacccuuucccuuuaaa

SEQ ID NO: 1094614 - RNA, 19 nt, Homo sapiens
  misc_RNA (1)...(19): siRNA sense strand
gaauuaaaccccaaaagga

SEQ ID NO: 1094615 - RNA, 19 nt, Homo sapiens
  misc_RNA (1)...(19): siRNA sense strand
agagauguuuccagaugaa

SEQ ID NO: 1094616 - RNA, 19 nt, Homo sapiens
  misc_RNA (1)...(19): siRNA sense strand
ugaugaaccuguauaaacg

SEQ ID NO: 1094617 - RNA, 19 nt, Homo sapiens
  misc_RNA (1)...(19): siRNA sense strand
uaaacaagaaagacuggaa

SEQ ID NO: 1094618 - RNA, 19 nt, Homo sapiens
  misc_RNA (1)...(19): siRNA sense strand
gacagaauggucaucaaga

SEQ ID NO: 1094619 - RNA, 19 nt, Homo sapiens
  misc_RNA (1)...(19): siRNA sense strand
ucuaugcgccaaucacuuu

SEQ ID NO: 1094620 - RNA, 19 nt, Homo sapiens
  misc_RNA (1)...(19): siRNA sense strand
gauaagaaaguagaugaag

SEQ ID NO: 1094621 - RNA, 19 nt, Homo sapiens
  misc_RNA (1)...(19): siRNA sense strand
gcuacaggccaucuuaugu

SEQ ID NO: 1094622 - RNA, 19 nt, Homo sapiens
  misc_RNA (1)...(19): siRNA sense strand
gaagagcacugaugaagaa

SEQ ID NO: 1094623 - RNA, 19 nt, Homo sapiens
  misc_RNA (1)...(19): siRNA sense strand
gaagagaguaucagaguuu

SEQ ID NO: 1094624 - RNA, 19 nt, Homo sapiens
  misc_RNA (1)...(19): siRNA sense strand
gaagauaaaguccuauuug

SEQ ID NO: 1094625 - RNA, 19 nt, Homo sapiens
  misc_RNA (1)...(19): siRNA sense strand
caacagccaccaucacuua

SEQ ID NO: 1094626 - RNA, 19 nt, Homo sapiens
  misc_RNA (1)...(19): siRNA sense strand
ggaaugauagugauuauga

SEQ ID NO: 1094627 - RNA, 19 nt, Homo sapiens
  misc_RNA (1)...(19): siRNA sense strand
gaacaagccuuuaguuuuc

SEQ ID NO: 1094628 - RNA, 19 nt, Homo sapiens
  misc_RNA (1)...(19): siRNA sense strand
guacacagauaaagacaau

SEQ ID NO: 1094629 - RNA, 19 nt, Homo sapiens
  misc_RNA (1)...(19): siRNA sense strand
ugacagugaugaugaugua

SEQ ID NO: 1094630 - RNA, 19 nt, Homo sapiens
  misc_RNA (1)...(19): siRNA sense strand
gaacuucuuuguaaacuac

SEQ ID NO: 1094631 - RNA, 19 nt, Homo sapiens
  misc_RNA (1)...(19): siRNA sense strand
gaaccagccuccaccacuu

SEQ ID NO: 1094632 - RNA, 19 nt, Homo sapiens
  misc_RNA (1)...(19): siRNA sense strand
gcuacaaaguacacagaua

SEQ ID NO: 1094633 - RNA, 19 nt, Homo sapiens
  misc_RNA (1)...(19): siRNA sense strand
uugcugaucucccuaauuu

SEQ ID NO: 1094634 - RNA, 19 nt, Homo sapiens
  misc_RNA (1)...(19): siRNA sense strand
gaacaaccuguccaaacua

SEQ ID NO: 1094635 - RNA, 19 nt, Homo sapiens
  misc_RNA (1)...(19): siRNA sense strand
gcaaaugcuuccagauaag

SEQ ID NO: 1094636 - RNA, 19 nt, Homo sapiens
  misc_RNA (1)...(19): siRNA sense strand
caaaguacacagauaaaga

SEQ ID NO: 1094637 - RNA, 19 nt, Homo sapiens
  misc_RNA (1)...(19): siRNA sense strand
gaagaaacacauccaaugg

SEQ ID NO: 1094638 - RNA, 19 nt, Homo sapiens
  misc_RNA (1)...(19): siRNA sense strand
ggaagauaaaguccuauuu

SEQ ID NO: 1094639 - RNA, 19 nt, Homo sapiens
  misc_RNA (1)...(19): siRNA sense strand
uaucagaguuuacaacauc

SEQ ID NO: 1094640 - RNA, 19 nt, Homo sapiens
  misc_RNA (1)...(19): siRNA sense strand
gcucguaaacuagcuaaua

SEQ ID NO: 1094641 - RNA, 19 nt, Homo sapiens
  misc_RNA (1)...(19): siRNA sense strand
cuacaaaguacacagauaa

SEQ ID NO: 1094642 - RNA, 19 nt, Homo sapiens
  misc_RNA (1)...(19): siRNA sense strand
ccgcaaauaugguaaagau

SEQ ID NO: 1094643 - RNA, 19 nt, Homo sapiens
  misc_RNA (1)...(19): siRNA sense strand
ggaagaagagaguaucaga

SEQ ID NO: 1094644 - RNA, 19 nt, Homo sapiens
  misc_RNA (1)...(19): siRNA sense strand
ccuaagggcauguauuuaa

SEQ ID NO: 1094645 - RNA, 19 nt, Homo sapiens
  misc_RNA (1)...(19): siRNA sense strand
uaucccagaugccaaauug

SEQ ID NO: 1094646 - RNA, 19 nt, Homo sapiens
  misc_RNA (1)...(19): siRNA sense strand
uaacuuagaggagguauug

SEQ ID NO: 1094647 - RNA, 19 nt, Homo sapiens
  misc_RNA (1)...(19): siRNA sense strand
gaagaugugguagcaguuu

SEQ ID NO: 1094648 - RNA, 19 nt, Homo sapiens
  misc_RNA (1)...(19): siRNA sense strand
gcauaaacauaacauugag

SEQ ID NO: 1094649 - RNA, 19 nt, Homo sapiens
  misc_RNA (1)...(19): siRNA sense strand
ggaagagcacugaugaaga

SEQ ID NO: 1094650 - RNA, 19 nt, Homo sapiens
  misc_RNA (1)...(19): siRNA sense strand
gaacccaggcuucuaaugg

SEQ ID NO: 1094651 - RNA, 19 nt, Homo sapiens
  misc_RNA (1)...(19): siRNA sense strand
acagugcacuuaaacagaa

SEQ ID NO: 1094652 - RNA, 19 nt, Homo sapiens
  misc_RNA (1)...(19): siRNA sense strand
gauaaaguccuauuugaac

SEQ ID NO: 1094653 - RNA, 19 nt, Homo sapiens
  misc_RNA (1)...(19): siRNA sense strand
ggcauaaacauaacauuga

SEQ ID NO: 1094654 - RNA, 19 nt, Homo sapiens
  misc_RNA (1)...(19): siRNA sense strand
caccaucacuuauuggaau

SEQ ID NO: 1094655 - RNA, 19 nt, Homo sapiens
  misc_RNA (1)...(19): siRNA sense strand
ugaacaaccuguccaaacu

SEQ ID NO: 1094656 - RNA, 19 nt, Homo sapiens
  misc_RNA (1)...(19): siRNA sense strand
aauggaagguggaauugaa

SEQ ID NO: 1094657 - RNA, 19 nt, Homo sapiens
  misc_RNA (1)...(19): siRNA sense strand
gaaaauggaagguggaauu

SEQ ID NO: 1094658 - RNA, 19 nt, Homo sapiens
  misc_RNA (1)...(19): siRNA sense strand
caccuaagggcauguauuu

SEQ ID NO: 1094659 - RNA, 19 nt, Homo sapiens
  misc_RNA (1)...(19): siRNA sense strand
ggaugaauacauugcaauu

SEQ ID NO: 1094660 - RNA, 19 nt, Homo sapiens
  misc_RNA (1)...(19): siRNA sense strand
cagccaccaucacuuauug

SEQ ID NO: 1094661 - RNA, 19 nt, Homo sapiens
  misc_RNA (1)...(19): siRNA sense strand
gcaagguguccgcaaauau

SEQ ID NO: 1094662 - RNA, 19 nt, Homo sapiens
  misc_RNA (1)...(19): siRNA sense strand
ucaaaccuccugagucaaa

SEQ ID NO: 1094663 - RNA, 19 nt, Homo sapiens
  misc_RNA (1)...(19): siRNA sense strand
ggaaaagcauggcuacaau

SEQ ID NO: 1094664 - RNA, 19 nt, Homo sapiens
  misc_RNA (1)...(19): siRNA sense strand
aguaaacagugcacuuaaa

SEQ ID NO: 1094665 - RNA, 19 nt, Homo sapiens
  misc_RNA (1)...(19): siRNA sense strand
gauuggacuuggaagaaga

SEQ ID NO: 1094666 - RNA, 19 nt, Homo sapiens
  misc_RNA (1)...(19): siRNA sense strand
ucgccaggcucguaaacua

SEQ ID NO: 1094667 - RNA, 19 nt, Homo sapiens
  misc_RNA (1)...(19): siRNA sense strand
gaacaggcacuuggcaugu

SEQ ID NO: 1094668 - RNA, 19 nt, Homo sapiens
  misc_RNA (1)...(19): siRNA sense strand
caagguguccgcaaauaug

SEQ ID NO: 1094669 - RNA, 19 nt, Homo sapiens
  misc_RNA (1)...(19): siRNA sense strand
gcugaucucccuaauuuca

SEQ ID NO: 1094670 - RNA, 19 nt, Homo sapiens
  misc_RNA (1)...(19): siRNA sense strand
gagcacugaugaagaagag

SEQ ID NO: 1094671 - RNA, 19 nt, Homo sapiens
  misc_RNA (1)...(19): siRNA sense strand
aagagaguaucagaguuua

SEQ ID NO: 1094672 - RNA, 19 nt, Homo sapiens
  misc_RNA (1)...(19): siRNA sense strand
auucaaaccuccugaguca

SEQ ID NO: 1094673 - RNA, 19 nt, Homo sapiens
  misc_RNA (1)...(19): siRNA sense strand
gcacuuggcauguuguucu

SEQ ID NO: 1094674 - RNA, 19 nt, Homo sapiens
  misc_RNA (1)...(19): siRNA sense strand
uggugaugcuucuacuuua

SEQ ID NO: 1094675 - RNA, 19 nt, Homo sapiens
  misc_RNA (1)...(19): siRNA sense strand
uguccaaacuagcaagauu

SEQ ID NO: 1094676 - RNA, 19 nt, Homo sapiens
  misc_RNA (1)...(19): siRNA sense strand
ugaugaugauguagaagaa

SEQ ID NO: 1094677 - RNA, 19 nt, Homo sapiens
  misc_RNA (1)...(19): siRNA sense strand
gcucggaucccugaauuug

SEQ ID NO: 1094678 - RNA, 19 nt, Homo sapiens
  misc_RNA (1)...(19): siRNA sense strand
gcauguuguucuggcauaa

SEQ ID NO: 1094679 - RNA, 19 nt, Homo sapiens
  misc_RNA (1)...(19): siRNA sense strand
ucacaggauucagcaaaug

SEQ ID NO: 1094680 - RNA, 19 nt, Homo sapiens
  misc_RNA (1)...(19): siRNA sense strand
gcagcaggcucgguucauc

SEQ ID NO: 1094681 - RNA, 19 nt, Homo sapiens
  misc_RNA (1)...(19): siRNA sense strand
ggugaugcuucuacuuuag

SEQ ID NO: 1094682 - RNA, 19 nt, Homo sapiens
  misc_RNA (1)...(19): siRNA sense strand
ugaggcaacuggacaugga

SEQ ID NO: 1094683 - RNA, 19 nt, Homo sapiens
  misc_RNA (1)...(19): siRNA sense strand
ggcauguuguucuggcaua

SEQ ID NO: 1094684 - RNA, 19 nt, Homo sapiens
  misc_RNA (1)...(19): siRNA sense strand
ccaggaagaugugguagca

SEQ ID NO: 1094685 - RNA, 19 nt, Homo sapiens
  misc_RNA (1)...(19): siRNA sense strand
caacaucgccaucauucuc

SEQ ID NO: 1094686 - RNA, 19 nt, Homo sapiens
  misc_RNA (1)...(19): siRNA sense strand
ggacuuggaagaagagagu

SEQ ID NO: 1094687 - RNA, 19 nt, Homo sapiens
  misc_RNA (1)...(19): siRNA sense strand
agaagaaacacauccaaug

SEQ ID NO: 1094688 - RNA, 19 nt, Homo sapiens
  misc_RNA (1)...(19): siRNA sense strand
agaagucccuugcugaucu

SEQ ID NO: 1094689 - RNA, 19 nt, Homo sapiens
  misc_RNA (1)...(19): siRNA sense strand
ggagugggaagcagaacaa

SEQ ID NO: 1094690 - RNA, 19 nt, Homo sapiens
  misc_RNA (1)...(19): siRNA sense strand
gaugaauacauugcaauug

SEQ ID NO: 1094691 - RNA, 19 nt, Homo sapiens
  misc_RNA (1)...(19): siRNA sense strand
gaagguggaauugaagaau

SEQ ID NO: 1094692 - RNA, 19 nt, Homo sapiens
  misc_RNA (1)...(19): siRNA sense strand
ggaagguggaauugaagaa

SEQ ID NO: 1094693 - RNA, 19 nt, Homo sapiens
  misc_RNA (1)...(19): siRNA sense strand
ccaauggaugggaaugaua

SEQ ID NO: 1094694 - RNA, 19 nt, Homo sapiens
  misc_RNA (1)...(19): siRNA sense strand
ggaugggaaugauagugau

SEQ ID NO: 1094695 - RNA, 19 nt, Homo sapiens
  misc_RNA (1)...(19): siRNA sense strand
caagacuguuggccaagug

SEQ ID NO: 1094696 - RNA, 19 nt, Homo sapiens
  misc_RNA (1)...(19): siRNA sense strand
agaagagaguaucagaguu

SEQ ID NO: 1094697 - RNA, 19 nt, Homo sapiens
  misc_RNA (1)...(19): siRNA sense strand
ccagauaagacaauugcaa

SEQ ID NO: 1094698 - RNA, 19 nt, Homo sapiens
  misc_RNA (1)...(19): siRNA sense strand
ugcaagguguccgcaaaua

SEQ ID NO: 1094699 - RNA, 19 nt, Homo sapiens
  misc_RNA (1)...(19): siRNA sense strand
aagcucggaucccugaauu

SEQ ID NO: 1094700 - RNA, 19 nt, Homo sapiens
  misc_RNA (1)...(19): siRNA sense strand
cagugaugaugauguagaa

SEQ ID NO: 1094701 - RNA, 19 nt, Homo sapiens
  misc_RNA (1)...(19): siRNA sense strand
ggacaguggaagauaaagu

SEQ ID NO: 1094702 - RNA, 19 nt, Homo sapiens
  misc_RNA (1)...(19): siRNA sense strand
gagaguaucagaguuuaca

SEQ ID NO: 1094703 - RNA, 19 nt, Homo sapiens
  misc_RNA (1)...(19): siRNA sense strand
uggcauaaacauaacauug

SEQ ID NO: 1094704 - RNA, 19 nt, Homo sapiens
  misc_RNA (1)...(19): siRNA sense strand
gggaagagcacugaugaag

SEQ ID NO: 1094705 - RNA, 19 nt, Homo sapiens
  misc_RNA (1)...(19): siRNA sense strand
guaaacagugcacuuaaac

SEQ ID NO: 1094706 - RNA, 19 nt, Homo sapiens
  misc_RNA (1)...(19): siRNA sense strand
gguagcaguuuccuguagu

SEQ ID NO: 1094707 - RNA, 19 nt, Homo sapiens
  misc_RNA (1)...(19): siRNA sense strand
aguggaagauaaaguccua

SEQ ID NO: 1094708 - RNA, 19 nt, Homo sapiens
  misc_RNA (1)...(19): siRNA sense strand
ucacucccuuuccggauga

SEQ ID NO: 1094709 - RNA, 19 nt, Homo sapiens
  misc_RNA (1)...(19): siRNA sense strand
cagccuccaccaccucuua

SEQ ID NO: 1094710 - RNA, 19 nt, Homo sapiens
  misc_RNA (1)...(19): siRNA sense strand
cagggaagagcacugauga

SEQ ID NO: 1094711 - RNA, 19 nt, Homo sapiens
  misc_RNA (1)...(19): siRNA sense strand
gguaaagauuuucaagcua

SEQ ID NO: 1094712 - RNA, 19 nt, Homo sapiens
  misc_RNA (1)...(19): siRNA sense strand
aacauaacauugagaaguc

SEQ ID NO: 1094713 - RNA, 19 nt, Homo sapiens
  misc_RNA (1)...(19): siRNA sense strand
gaauucaaaccuccugagu

SEQ ID NO: 1094714 - RNA, 19 nt, Homo sapiens
  misc_RNA (1)...(19): siRNA sense strand
ggacauggaguugaucucu

SEQ ID NO: 1094715 - RNA, 19 nt, Homo sapiens
  misc_RNA (1)...(19): siRNA sense strand
caaaugcuuccagauaaga

SEQ ID NO: 1094716 - RNA, 19 nt, Homo sapiens
  misc_RNA (1)...(19): siRNA sense strand
ugaacaagccuuuaguuuu

SEQ ID NO: 1094717 - RNA, 19 nt, Homo sapiens
  misc_RNA (1)...(19): siRNA sense strand
uggaguugaucucucuaaa

SEQ ID NO: 1094718 - RNA, 19 nt, Homo sapiens
  misc_RNA (1)...(19): siRNA sense strand
caaggaacccaggcuucua

SEQ ID NO: 1094719 - RNA, 19 nt, Homo sapiens
  misc_RNA (1)...(19): siRNA sense strand
gugggaagcagaacaagga

SEQ ID NO: 1094720 - RNA, 19 nt, Homo sapiens
  misc_RNA (1)...(19): siRNA sense strand
gauguaauuggcaacaaga

SEQ ID NO: 1094721 - RNA, 19 nt, Homo sapiens
  misc_RNA (1)...(19): siRNA sense strand
ucaagcuauugcagaugua

SEQ ID NO: 1094722 - RNA, 19 nt, Homo sapiens
  misc_RNA (1)...(19): siRNA sense strand
gccauuaccugaaauauuu

SEQ ID NO: 1094723 - RNA, 19 nt, Homo sapiens
  misc_RNA (1)...(19): siRNA sense strand
gaaagaagugggagaaaua

SEQ ID NO: 1094724 - RNA, 19 nt, Homo sapiens
  misc_RNA (1)...(19): siRNA sense strand
gaagagccauuaccugaaa

SEQ ID NO: 1094725 - RNA, 19 nt, Homo sapiens
  misc_RNA (1)...(19): siRNA sense strand
ugacacagaugaaacauuu

SEQ ID NO: 1094726 - RNA, 19 nt, Homo sapiens
  misc_RNA (1)...(19): siRNA sense strand
gaaagaagaacaacccaua

SEQ ID NO: 1094727 - RNA, 19 nt, Homo sapiens
  misc_RNA (1)...(19): siRNA sense strand
caaagcauaugcaguuuaa

SEQ ID NO: 1094728 - RNA, 19 nt, Homo sapiens
  misc_RNA (1)...(19): siRNA sense strand
gaagagagagcaaaucaaa

SEQ ID NO: 1094729 - RNA, 19 nt, Homo sapiens
  misc_RNA (1)...(19): siRNA sense strand
gaaaauggcuauauucuug

SEQ ID NO: 1094730 - RNA, 19 nt, Homo sapiens
  misc_RNA (1)...(19): siRNA sense strand
gaacaugacaaguuaauga

SEQ ID NO: 1094731 - RNA, 19 nt, Homo sapiens
  misc_RNA (1)...(19): siRNA sense strand
gugaaucucuucucuauga

SEQ ID NO: 1094732 - RNA, 19 nt, Homo sapiens
  misc_RNA (1)...(19): siRNA sense strand
ggaaggaucauauuuagaa

SEQ ID NO: 1094733 - RNA, 19 nt, Homo sapiens
  misc_RNA (1)...(19): siRNA sense strand
gaagaacaacccauacuaa

SEQ ID NO: 1094734 - RNA, 19 nt, Homo sapiens
  misc_RNA (1)...(19): siRNA sense strand
agacacugcugauguaaua

SEQ ID NO: 1094735 - RNA, 19 nt, Homo sapiens
  misc_RNA (1)...(19): siRNA sense strand
gaagggauaugcuuaugug

SEQ ID NO: 1094736 - RNA, 19 nt, Homo sapiens
  misc_RNA (1)...(19): siRNA sense strand
gauguagucuccuaugaaa

SEQ ID NO: 1094737 - RNA, 19 nt, Homo sapiens
  misc_RNA (1)...(19): siRNA sense strand
aagagaacaugacaaguua

SEQ ID NO: 1094738 - RNA, 19 nt, Homo sapiens
  misc_RNA (1)...(19): siRNA sense strand
ucagagagcuucuucuaug

SEQ ID NO: 1094739 - RNA, 19 nt, Homo sapiens
  misc_RNA (1)...(19): siRNA sense strand
gaacaacccauacuaagga

SEQ ID NO: 1094740 - RNA, 19 nt, Homo sapiens
  misc_RNA (1)...(19): siRNA sense strand
gagagcaaaucaaagcuuu

SEQ ID NO: 1094741 - RNA, 19 nt, Homo sapiens
  misc_RNA (1)...(19): siRNA sense strand
gaaucaagaucuccuguuc

SEQ ID NO: 1094742 - RNA, 19 nt, Homo sapiens
  misc_RNA (1)...(19): siRNA sense strand
gaacaguaagccuaauaua

SEQ ID NO: 1094743 - RNA, 19 nt, Homo sapiens
  misc_RNA (1)...(19): siRNA sense strand
gaaugaaacuggaaauaac

SEQ ID NO: 1094744 - RNA, 19 nt, Homo sapiens
  misc_RNA (1)...(19): siRNA sense strand
ggacugcucuguucgaauc

SEQ ID NO: 1094745 - RNA, 19 nt, Homo sapiens
  misc_RNA (1)...(19): siRNA sense strand
gaguaaagaucaaacuguu

SEQ ID NO: 1094746 - RNA, 19 nt, Homo sapiens
  misc_RNA (1)...(19): siRNA sense strand
gaugaaacauuuaccaaag

SEQ ID NO: 1094747 - RNA, 19 nt, Homo sapiens
  misc_RNA (1)...(19): siRNA sense strand
gaaggaaguuugaguucau

SEQ ID NO: 1094748 - RNA, 19 nt, Homo sapiens
  misc_RNA (1)...(19): siRNA sense strand
ggagaaaucaguuacauca

SEQ ID NO: 1094749 - RNA, 19 nt, Homo sapiens
  misc_RNA (1)...(19): siRNA sense strand
ggacgacaguaucgccaua

SEQ ID NO: 1094750 - RNA, 19 nt, Homo sapiens
  misc_RNA (1)...(19): siRNA sense strand
ggaccugugugucaguuaa

SEQ ID NO: 1094751 - RNA, 19 nt, Homo sapiens
  misc_RNA (1)...(19): siRNA sense strand
gaaaucaguuacaucaaag

SEQ ID NO: 1094752 - RNA, 19 nt, Homo sapiens
  misc_RNA (1)...(19): siRNA sense strand
ucaaagacaugugcauaaa

SEQ ID NO: 1094753 - RNA, 19 nt, Homo sapiens
  misc_RNA (1)...(19): siRNA sense strand
gaaauaaaggcacggaaga

SEQ ID NO: 1094754 - RNA, 19 nt, Homo sapiens
  misc_RNA (1)...(19): siRNA sense strand
ggaggaagaagagccauua

SEQ ID NO: 1094755 - RNA, 19 nt, Homo sapiens
  misc_RNA (1)...(19): siRNA sense strand
gcaaaacaaucacuacuga

SEQ ID NO: 1094756 - RNA, 19 nt, Homo sapiens
  misc_RNA (1)...(19): siRNA sense strand
ggaaggaaguuugaguuca

SEQ ID NO: 1094757 - RNA, 19 nt, Homo sapiens
  misc_RNA (1)...(19): siRNA sense strand
gcagugauuucaaagaaca

SEQ ID NO: 1094758 - RNA, 19 nt, Homo sapiens
  misc_RNA (1)...(19): siRNA sense strand
gagagcuucuucuaugauu

SEQ ID NO: 1094759 - RNA, 19 nt, Homo sapiens
  misc_RNA (1)...(19): siRNA sense strand
ggaggaaguuaagaagaaa

SEQ ID NO: 1094760 - RNA, 19 nt, Homo sapiens
  misc_RNA (1)...(19): siRNA sense strand
gaagaugacacagaugaaa

SEQ ID NO: 1094761 - RNA, 19 nt, Homo sapiens
  misc_RNA (1)...(19): siRNA sense strand
ggaagguggucugaucaaa

SEQ ID NO: 1094762 - RNA, 19 nt, Homo sapiens
  misc_RNA (1)...(19): siRNA sense strand
caagaucuccuguucaaga

SEQ ID NO: 1094763 - RNA, 19 nt, Homo sapiens
  misc_RNA (1)...(19): siRNA sense strand
ggaaccagaugaucaggau

SEQ ID NO: 1094764 - RNA, 19 nt, Homo sapiens
  misc_RNA (1)...(19): siRNA sense strand
aauagacacugcugaugua

SEQ ID NO: 1094765 - RNA, 19 nt, Homo sapiens
  misc_RNA (1)...(19): siRNA sense strand
ugaaggaauuggcgucauu

SEQ ID NO: 1094766 - RNA, 19 nt, Homo sapiens
  misc_RNA (1)...(19): siRNA sense strand
aaagagaacaugacaaguu

SEQ ID NO: 1094767 - RNA, 19 nt, Homo sapiens
  misc_RNA (1)...(19): siRNA sense strand
aaacuucacuggagcacaa

SEQ ID NO: 1094768 - RNA, 19 nt, Homo sapiens
  misc_RNA (1)...(19): siRNA sense strand
agauugagccuauuaauga

SEQ ID NO: 1094769 - RNA, 19 nt, Homo sapiens
  misc_RNA (1)...(19): siRNA sense strand
gaucaggccacaucaaguu

SEQ ID NO: 1094770 - RNA, 19 nt, Homo sapiens
  misc_RNA (1)...(19): siRNA sense strand
ucucugaggucuucuaaau

SEQ ID NO: 1094771 - RNA, 19 nt, Homo sapiens
  misc_RNA (1)...(19): siRNA sense strand
ggaagaagcagaggaggaa

SEQ ID NO: 1094772 - RNA, 19 nt, Homo sapiens
  misc_RNA (1)...(19): siRNA sense strand
cagcagagaugggagaaga

SEQ ID NO: 1094773 - RNA, 19 nt, Homo sapiens
  misc_RNA (1)...(19): siRNA sense strand
aaagggaguugaaggagaa

SEQ ID NO: 1094774 - RNA, 19 nt, Homo sapiens
  misc_RNA (1)...(19): siRNA sense strand
gaacuggaaagaagaacaa

SEQ ID NO: 1094775 - RNA, 19 nt, Homo sapiens
  misc_RNA (1)...(19): siRNA sense strand
gagaagggauaugcuuaug

SEQ ID NO: 1094776 - RNA, 19 nt, Homo sapiens
  misc_RNA (1)...(19): siRNA sense strand
cauaugcaguuuaaacgaa

SEQ ID NO: 1094777 - RNA, 19 nt, Homo sapiens
  misc_RNA (1)...(19): siRNA sense strand
gacucuggauucaaacaua

SEQ ID NO: 1094778 - RNA, 19 nt, Homo sapiens
  misc_RNA (1)...(19): siRNA sense strand
ugaaagaagugggagaaau

SEQ ID NO: 1094779 - RNA, 19 nt, Homo sapiens
  misc_RNA (1)...(19): siRNA sense strand
gacaaucccauccaaacua

SEQ ID NO: 1094780 - RNA, 19 nt, Homo sapiens
  misc_RNA (1)...(19): siRNA sense strand
gaaugugaaucucuucucu

SEQ ID NO: 1094781 - RNA, 19 nt, Homo sapiens
  misc_RNA (1)...(19): siRNA sense strand
agauggauauguuaggaua

SEQ ID NO: 1094782 - RNA, 19 nt, Homo sapiens
  misc_RNA (1)...(19): siRNA sense strand
gaucuccuguucaagaaga

SEQ ID NO: 1094783 - RNA, 19 nt, Homo sapiens
  misc_RNA (1)...(19): siRNA sense strand
ggaaccaacuaaucuuucu

SEQ ID NO: 1094784 - RNA, 19 nt, Homo sapiens
  misc_RNA (1)...(19): siRNA sense strand
gcaaagcacuacaguaccu

SEQ ID NO: 1094785 - RNA, 19 nt, Homo sapiens
  misc_RNA (1)...(19): siRNA sense strand
gagucuauguccuaaauca

SEQ ID NO: 1094786 - RNA, 19 nt, Homo sapiens
  misc_RNA (1)...(19): siRNA sense strand
aagcagugauuucaaagaa

SEQ ID NO: 1094787 - RNA, 19 nt, Homo sapiens
  misc_RNA (1)...(19): siRNA sense strand
uauggaagcuugaccuuag

SEQ ID NO: 1094788 - RNA, 19 nt, Homo sapiens
  misc_RNA (1)...(19): siRNA sense strand
gagauugagccuauuaaug

SEQ ID NO: 1094789 - RNA, 19 nt, Homo sapiens
  misc_RNA (1)...(19): siRNA sense strand
cagagagcuucuucuauga

SEQ ID NO: 1094790 - RNA, 19 nt, Homo sapiens
  misc_RNA (1)...(19): siRNA sense strand
auacauagcugggaaccaa

SEQ ID NO: 1094791 - RNA, 19 nt, Homo sapiens
  misc_RNA (1)...(19): siRNA sense strand
ucugaggucuucuaaauca

SEQ ID NO: 1094792 - RNA, 19 nt, Homo sapiens
  misc_RNA (1)...(19): siRNA sense strand
gauugagccuauuaaugaa

SEQ ID NO: 1094793 - RNA, 19 nt, Homo sapiens
  misc_RNA (1)...(19): siRNA sense strand
uagcaguggugaaggaauu

SEQ ID NO: 1094794 - RNA, 19 nt, Homo sapiens
  misc_RNA (1)...(19): siRNA sense strand
guaacuugcuggccucugu

SEQ ID NO: 1094795 - RNA, 19 nt, Homo sapiens
  misc_RNA (1)...(19): siRNA sense strand
auuauaagccgauugguua

SEQ ID NO: 1094796 - RNA, 19 nt, Homo sapiens
  misc_RNA (1)...(19): siRNA sense strand
gaagagcagcuuacuacau

SEQ ID NO: 1094797 - RNA, 19 nt, Homo sapiens
  misc_RNA (1)...(19): siRNA sense strand
gaagauggaguuguucgaa

SEQ ID NO: 1094798 - RNA, 19 nt, Homo sapiens
  misc_RNA (1)...(19): siRNA sense strand
gaauuuaugcuaaggaaag

SEQ ID NO: 1094799 - RNA, 19 nt, Homo sapiens
  misc_RNA (1)...(19): siRNA sense strand
gaaguggaaagggauuaua

SEQ ID NO: 1094800 - RNA, 19 nt, Homo sapiens
  misc_RNA (1)...(19): siRNA sense strand
ucacugcuuuagcuuauga

SEQ ID NO: 1094801 - RNA, 19 nt, Homo sapiens
  misc_RNA (1)...(19): siRNA sense strand
ccaaagcauaugcaguuua

SEQ ID NO: 1094802 - RNA, 19 nt, Homo sapiens
  misc_RNA (1)...(19): siRNA sense strand
aagagcagcuuacuacauc

SEQ ID NO: 1094803 - RNA, 19 nt, Homo sapiens
  misc_RNA (1)...(19): siRNA sense strand
gaaaagagggagagacaaa

SEQ ID NO: 1094804 - RNA, 19 nt, Homo sapiens
  misc_RNA (1)...(19): siRNA sense strand
gaaucucuucucuaugaua

SEQ ID NO: 1094805 - RNA, 19 nt, Homo sapiens
  misc_RNA (1)...(19): siRNA sense strand
gaaguuugaguucauuuca

SEQ ID NO: 1094806 - RNA, 19 nt, Homo sapiens
  misc_RNA (1)...(19): siRNA sense strand
aaacgaacaguaagccuaa

SEQ ID NO: 1094807 - RNA, 19 nt, Homo sapiens
  misc_RNA (1)...(19): siRNA sense strand
caaacuaucacuuucaaca

SEQ ID NO: 1094808 - RNA, 19 nt, Homo sapiens
  misc_RNA (1)...(19): siRNA sense strand
agaggaugaucaugaugua

SEQ ID NO: 1094809 - RNA, 19 nt, Homo sapiens
  misc_RNA (1)...(19): siRNA sense strand
gcaagaagaggaugaucau

SEQ ID NO: 1094810 - RNA, 19 nt, Homo sapiens
  misc_RNA (1)...(19): siRNA sense strand
gauuauaagccgauugguu

SEQ ID NO: 1094811 - RNA, 19 nt, Homo sapiens
  misc_RNA (1)...(19): siRNA sense strand
ggaguaaagaucaaacugu

SEQ ID NO: 1094812 - RNA, 19 nt, Homo sapiens
  misc_RNA (1)...(19): siRNA sense strand
gaaggaucauauuuagaag

SEQ ID NO: 1094813 - RNA, 19 nt, Homo sapiens
  misc_RNA (1)...(19): siRNA sense strand
uaacuacagcgguaacuug

SEQ ID NO: 1094814 - RNA, 19 nt, Homo sapiens
  misc_RNA (1)...(19): siRNA sense strand
uaucagagagcuucuucua

SEQ ID NO: 1094815 - RNA, 19 nt, Homo sapiens
  misc_RNA (1)...(19): siRNA sense strand
gaggaacguuuggaaggaa

SEQ ID NO: 1094816 - RNA, 19 nt, Homo sapiens
  misc_RNA (1)...(19): siRNA sense strand
aggaggaaguuaagaagaa

SEQ ID NO: 1094817 - RNA, 19 nt, Homo sapiens
  misc_RNA (1)...(19): siRNA sense strand
ucacacuuguacauucuuu

SEQ ID NO: 1094818 - RNA, 19 nt, Homo sapiens
  misc_RNA (1)...(19): siRNA sense strand
gaaguucuggguuucuuug

SEQ ID NO: 1094819 - RNA, 19 nt, Homo sapiens
  misc_RNA (1)...(19): siRNA sense strand
agaagaggaugaucaugau

SEQ ID NO: 1094820 - RNA, 19 nt, Homo sapiens
  misc_RNA (1)...(19): siRNA sense strand
agauggaguuguucgaauu

SEQ ID NO: 1094821 - RNA, 19 nt, Homo sapiens
  misc_RNA (1)...(19): siRNA sense strand
ggagguacugcccuuguuu

SEQ ID NO: 1094822 - RNA, 19 nt, Homo sapiens
  misc_RNA (1)...(19): siRNA sense strand
ggacacagaugcaagagau

SEQ ID NO: 1094823 - RNA, 19 nt, Homo sapiens
  misc_RNA (1)...(19): siRNA sense strand
gaacagacacccaucauca

SEQ ID NO: 1094824 - RNA, 19 nt, Homo sapiens
  misc_RNA (1)...(19): siRNA sense strand
gaauguggaugaugcaaug

SEQ ID NO: 1094825 - RNA, 19 nt, Homo sapiens
  misc_RNA (1)...(19): siRNA sense strand
ucacaggcgucucugauuu

SEQ ID NO: 1094826 - RNA, 19 nt, Homo sapiens
  misc_RNA (1)...(19): siRNA sense strand
cagagggacuucagcuuaa

SEQ ID NO: 1094827 - RNA, 19 nt, Homo sapiens
  misc_RNA (1)...(19): siRNA sense strand
uaccauggcuggcuuguug

SEQ ID NO: 1094828 - RNA, 19 nt, Homo sapiens
  misc_RNA (1)...(19): siRNA sense strand
gggagagccugcacaaugu

SEQ ID NO: 1094829 - RNA, 19 nt, Homo sapiens
  misc_RNA (1)...(19): siRNA sense strand
gaaacugccuccuguccau

SEQ ID NO: 1094830 - RNA, 19 nt, Homo sapiens
  misc_RNA (1)...(19): siRNA sense strand
ccacaggucuggaugucaa

SEQ ID NO: 1094831 - RNA, 19 nt, Homo sapiens
  misc_RNA (1)...(19): siRNA sense strand
ucagagggacuucagcuua

SEQ ID NO: 1094832 - RNA, 19 nt, Homo sapiens
  misc_RNA (1)...(19): siRNA sense strand
gcaccaugacuaagcauaa

SEQ ID NO: 1094833 - RNA, 19 nt, Homo sapiens
  misc_RNA (1)...(19): siRNA sense strand
caaugacagugcugccuaa

SEQ ID NO: 1094834 - RNA, 19 nt, Homo sapiens
  misc_RNA (1)...(19): siRNA sense strand
ugacagugcugccuaaacu

SEQ ID NO: 1094835 - RNA, 19 nt, Homo sapiens
  misc_RNA (1)...(19): siRNA sense strand
acaccaaccucgugacaga

SEQ ID NO: 1094836 - RNA, 19 nt, Homo sapiens
  misc_RNA (1)...(19): siRNA sense strand
gaagcagucaucccugaaa

SEQ ID NO: 1094837 - RNA, 19 nt, Homo sapiens
  misc_RNA (1)...(19): siRNA sense strand
ggagacagcugcuuuugug

SEQ ID NO: 1094838 - RNA, 19 nt, Homo sapiens
  misc_RNA (1)...(19): siRNA sense strand
ggacacugccugaaguaga

SEQ ID NO: 1094839 - RNA, 19 nt, Homo sapiens
  misc_RNA (1)...(19): siRNA sense strand
agaaggaagugaucacauc

SEQ ID NO: 1094840 - RNA, 19 nt, Homo sapiens
  misc_RNA (1)...(19): siRNA sense strand
ccagauuucuacuguguca

SEQ ID NO: 1094841 - RNA, 19 nt, Homo sapiens
  misc_RNA (1)...(19): siRNA sense strand
ggauggagacagcugcuuu

SEQ ID NO: 1094842 - RNA, 19 nt, Homo sapiens
  misc_RNA (1)...(19): siRNA sense strand
caucaugaacauccucuuu

SEQ ID NO: 1094843 - RNA, 19 nt, Homo sapiens
  misc_RNA (1)...(19): siRNA sense strand
cccagcagcuucagcaaga

SEQ ID NO: 1094844 - RNA, 19 nt, Homo sapiens
  misc_RNA (1)...(19): siRNA sense strand
cgaaacaaccacuuuagca

SEQ ID NO: 1094845 - RNA, 19 nt, Homo sapiens
  misc_RNA (1)...(19): siRNA sense strand
ugagccagauuucuacugu

SEQ ID NO: 1094846 - RNA, 19 nt, Homo sapiens
  misc_RNA (1)...(19): siRNA sense strand
gacacugccugaaguagag

SEQ ID NO: 1094847 - RNA, 19 nt, Homo sapiens
  misc_RNA (1)...(19): siRNA sense strand
gggugaacuuagcgucuuu

SEQ ID NO: 1094848 - RNA, 19 nt, Homo sapiens
  misc_RNA (1)...(19): siRNA sense strand
ggaugucaaugugcgauuc

SEQ ID NO: 1094849 - RNA, 19 nt, Homo sapiens
  misc_RNA (1)...(19): siRNA sense strand
ggagaacagacacccauca

SEQ ID NO: 1094850 - RNA, 19 nt, Homo sapiens
  misc_RNA (1)...(19): siRNA sense strand
gaacauccucuuucuucag

SEQ ID NO: 1094851 - RNA, 19 nt, Homo sapiens
  misc_RNA (1)...(19): siRNA sense strand
gaucaucaccugcaaacac

SEQ ID NO: 1094852 - RNA, 19 nt, Homo sapiens
  misc_RNA (1)...(19): siRNA sense strand
ggccgaagcacgagucaga

SEQ ID NO: 1094853 - RNA, 19 nt, Homo sapiens
  misc_RNA (1)...(19): siRNA sense strand
ugggagagccugcacaaug

SEQ ID NO: 1094854 - RNA, 19 nt, Homo sapiens
  misc_RNA (1)...(19): siRNA sense strand
gcaagaggaguaucaacag

SEQ ID NO: 1094855 - RNA, 19 nt, Homo sapiens
  misc_RNA (1)...(19): siRNA sense strand
aaaagcagcugcagguaga

SEQ ID NO: 1094856 - RNA, 19 nt, Homo sapiens
  misc_RNA (1)...(19): siRNA sense strand
ucaugaacauccucuuucu

SEQ ID NO: 1094857 - RNA, 19 nt, Homo sapiens
  misc_RNA (1)...(19): siRNA sense strand
gagaacagacacccaucau

SEQ ID NO: 1094858 - RNA, 19 nt, Homo sapiens
  misc_RNA (1)...(19): siRNA sense strand
gcagaaggaagugaucaca

SEQ ID NO: 1094859 - RNA, 19 nt, Homo sapiens
  misc_RNA (1)...(19): siRNA sense strand
gacuucagcuuaauuuuca

SEQ ID NO: 1094860 - RNA, 19 nt, Homo sapiens
  misc_RNA (1)...(19): siRNA sense strand
gagggacuucagcuuaauu

SEQ ID NO: 1094861 - RNA, 19 nt, Homo sapiens
  misc_RNA (1)...(19): siRNA sense strand
uauaccuacuggucacuga

SEQ ID NO: 1094862 - RNA, 19 nt, Homo sapiens
  misc_RNA (1)...(19): siRNA sense strand
caaggggccuggagcagaa

SEQ ID NO: 1094863 - RNA, 19 nt, Homo sapiens
  misc_RNA (1)...(19): siRNA sense strand
ccugaaguagagacaauaa

SEQ ID NO: 1094864 - RNA, 19 nt, Homo sapiens
  misc_RNA (1)...(19): siRNA sense strand
cacuuuagcaccaugacua

SEQ ID NO: 1094865 - RNA, 19 nt, Homo sapiens
  misc_RNA (1)...(19): siRNA sense strand
gccagcagaccaagcuuug

SEQ ID NO: 1094866 - RNA, 19 nt, Homo sapiens
  misc_RNA (1)...(19): siRNA sense strand
ggacuucagcuuaauuuuc

SEQ ID NO: 1094867 - RNA, 19 nt, Homo sapiens
  misc_RNA (1)...(19): siRNA sense strand
ugaaguagagacaauaagg

SEQ ID NO: 1094868 - RNA, 19 nt, Homo sapiens
  misc_RNA (1)...(19): siRNA sense strand
ggaggagcaagucguaugg

SEQ ID NO: 1094869 - RNA, 19 nt, Homo sapiens
  misc_RNA (1)...(19): siRNA sense strand
ucaggacacagaugcaaga

SEQ ID NO: 1094870 - RNA, 19 nt, Homo sapiens
  misc_RNA (1)...(19): siRNA sense strand
acaggaggagcaagucgua

SEQ ID NO: 1094871 - RNA, 19 nt, Homo sapiens
  misc_RNA (1)...(19): siRNA sense strand
agccagauuucuacugugu

SEQ ID NO: 1094872 - RNA, 19 nt, Homo sapiens
  misc_RNA (1)...(19): siRNA sense strand
gaggaucaucaccugcaaa

SEQ ID NO: 1094873 - RNA, 19 nt, Homo sapiens
  misc_RNA (1)...(19): siRNA sense strand
gacagccugagccagauuu

SEQ ID NO: 1094874 - RNA, 19 nt, Homo sapiens
  misc_RNA (1)...(19): siRNA sense strand
caccaugacuaagcauaag

SEQ ID NO: 1094875 - RNA, 19 nt, Homo sapiens
  misc_RNA (1)...(19): siRNA sense strand
gaccuaccacggacugugu

SEQ ID NO: 1094876 - RNA, 19 nt, Homo sapiens
  misc_RNA (1)...(19): siRNA sense strand
aggcauaccucuguaccau

SEQ ID NO: 1094877 - RNA, 19 nt, Homo sapiens
  misc_RNA (1)...(19): siRNA sense strand
cagugucuuugaccugcua

SEQ ID NO: 1094878 - RNA, 19 nt, Homo sapiens
  misc_RNA (1)...(19): siRNA sense strand
ggccacaggucuggauguc

SEQ ID NO: 1094879 - RNA, 19 nt, Homo sapiens
  misc_RNA (1)...(19): siRNA sense strand
gcuuguugauccacagagu

SEQ ID NO: 1094880 - RNA, 19 nt, Homo sapiens
  misc_RNA (1)...(19): siRNA sense strand
cgugacagaaggccugauu

SEQ ID NO: 1094881 - RNA, 19 nt, Homo sapiens
  misc_RNA (1)...(19): siRNA sense strand
cgagugcagugucuuugac

SEQ ID NO: 1094882 - RNA, 19 nt, Homo sapiens
  misc_RNA (1)...(19): siRNA sense strand
augaacauccucuuucuuc

SEQ ID NO: 1094883 - RNA, 19 nt, Homo sapiens
  misc_RNA (1)...(19): siRNA sense strand
ugacagaaggccugauugc

SEQ ID NO: 1094884 - RNA, 19 nt, Homo sapiens
  misc_RNA (1)...(19): siRNA sense strand
ugccugaaguagagacaau

SEQ ID NO: 1094885 - RNA, 19 nt, Homo sapiens
  misc_RNA (1)...(19): siRNA sense strand
agagggacuucagcuuaau

SEQ ID NO: 1094886 - RNA, 19 nt, Homo sapiens
  misc_RNA (1)...(19): siRNA sense strand
aacauccucuuucuucagu

SEQ ID NO: 1094887 - RNA, 19 nt, Homo sapiens
  misc_RNA (1)...(19): siRNA sense strand
gaugauauauugcuacaga

SEQ ID NO: 1094888 - RNA, 19 nt, Homo sapiens
  misc_RNA (1)...(19): siRNA sense strand
gaacgacucuggccucuac

SEQ ID NO: 1094889 - RNA, 19 nt, Homo sapiens
  misc_RNA (1)...(19): siRNA sense strand
ucucagaaaucaugaugua

SEQ ID NO: 1094890 - RNA, 19 nt, Homo sapiens
  misc_RNA (1)...(19): siRNA sense strand
cgguaaagauuuccuuauu

SEQ ID NO: 1094891 - RNA, 19 nt, Homo sapiens
  misc_RNA (1)...(19): siRNA sense strand
gaagaggcagcccaagaaa

SEQ ID NO: 1094892 - RNA, 19 nt, Homo sapiens
  misc_RNA (1)...(19): siRNA sense strand
gagaugauauauugcuaca

SEQ ID NO: 1094893 - RNA, 19 nt, Homo sapiens
  misc_RNA (1)...(19): siRNA sense strand
gcgcaucggcccuuuguga

SEQ ID NO: 1094894 - RNA, 19 nt, Homo sapiens
  misc_RNA (1)...(19): siRNA sense strand
cgaagaggcagcccaagaa

SEQ ID NO: 1094895 - RNA, 19 nt, Homo sapiens
  misc_RNA (1)...(19): siRNA sense strand
ggagaacucugcgguacca

SEQ ID NO: 1094896 - RNA, 19 nt, Homo sapiens
  misc_RNA (1)...(19): siRNA sense strand
guacauccuucuggucuuc

SEQ ID NO: 1094897 - RNA, 19 nt, Homo sapiens
  misc_RNA (1)...(19): siRNA sense strand
aaacgcgucugacuaccuu

SEQ ID NO: 1094898 - RNA, 19 nt, Homo sapiens
  misc_RNA (1)...(19): siRNA sense strand
cgagggcgguaaagauuuc

SEQ ID NO: 1094899 - RNA, 19 nt, Homo sapiens
  misc_RNA (1)...(19): siRNA sense strand
caucggcccuuugugaaga

SEQ ID NO: 1094900 - RNA, 19 nt, Homo sapiens
  misc_RNA (1)...(19): siRNA sense strand
caucugagaacaaggagaa

SEQ ID NO: 1094901 - RNA, 19 nt, Homo sapiens
  misc_RNA (1)...(19): siRNA sense strand
cagaaaucaugauguacau

SEQ ID NO: 1094902 - RNA, 19 nt, Homo sapiens
  misc_RNA (1)...(19): siRNA sense strand
uggcuucucucgugcuuau

SEQ ID NO: 1094903 - RNA, 19 nt, Homo sapiens
  misc_RNA (1)...(19): siRNA sense strand
ucagaaaucaugauguaca

SEQ ID NO: 1094904 - RNA, 19 nt, Homo sapiens
  misc_RNA (1)...(19): siRNA sense strand
caaugugucccgggaguuu

SEQ ID NO: 1094905 - RNA, 19 nt, Homo sapiens
  misc_RNA (1)...(19): siRNA sense strand
cccgggaguuugaguuuga

SEQ ID NO: 1094906 - RNA, 19 nt, Homo sapiens
  misc_RNA (1)...(19): siRNA sense strand
cgguaccaguggaggaaua

SEQ ID NO: 1094907 - RNA, 19 nt, Homo sapiens
  misc_RNA (1)...(19): siRNA sense strand
ccaugaagcugcgcugcau

SEQ ID NO: 1094908 - RNA, 19 nt, Homo sapiens
  misc_RNA (1)...(19): siRNA sense strand
ucgagaugauauauugcua

SEQ ID NO: 1094909 - RNA, 19 nt, Homo sapiens
  misc_RNA (1)...(19): siRNA sense strand
gugcucaacgucacucuga

SEQ ID NO: 1094910 - RNA, 19 nt, Homo sapiens
  misc_RNA (1)...(19): siRNA sense strand
ggcgguaaagauuuccuua

SEQ ID NO: 1094911 - RNA, 19 nt, Homo sapiens
  misc_RNA (1)...(19): siRNA sense strand
gauauauugcuacagaaag

SEQ ID NO: 1094912 - RNA, 19 nt, Homo sapiens
  misc_RNA (1)...(19): siRNA sense strand
gcgguaaagauuuccuuau

SEQ ID NO: 1094913 - RNA, 19 nt, Homo sapiens
  misc_RNA (1)...(19): siRNA sense strand
ccgaagaggcagcccaaga

SEQ ID NO: 1094914 - RNA, 19 nt, Homo sapiens
  misc_RNA (1)...(19): siRNA sense strand
ggucucagaaaucaugaug

SEQ ID NO: 1094915 - RNA, 19 nt, Homo sapiens
  misc_RNA (1)...(19): siRNA sense strand
gcuacagaaaggucucaaa

SEQ ID NO: 1094916 - RNA, 19 nt, Homo sapiens
  misc_RNA (1)...(19): siRNA sense strand
gaagacgacgcggcugauc

SEQ ID NO: 1094917 - RNA, 19 nt, Homo sapiens
  misc_RNA (1)...(19): siRNA sense strand
caucccaucugagaacaag

SEQ ID NO: 1094918 - RNA, 19 nt, Homo sapiens
  misc_RNA (1)...(19): siRNA sense strand
cccgagggcgguaaagauu

SEQ ID NO: 1094919 - RNA, 19 nt, Homo sapiens
  misc_RNA (1)...(19): siRNA sense strand
ccuuguggcugcucaucga

SEQ ID NO: 1094920 - RNA, 19 nt, Homo sapiens
  misc_RNA (1)...(19): siRNA sense strand
ccgagggcgguaaagauuu

SEQ ID NO: 1094921 - RNA, 19 nt, Homo sapiens
  misc_RNA (1)...(19): siRNA sense strand
ccucuacaccugcaaugug

SEQ ID NO: 1094922 - RNA, 19 nt, Homo sapiens
  misc_RNA (1)...(19): siRNA sense strand
gcaaugugucccgggaguu

SEQ ID NO: 1094923 - RNA, 19 nt, Homo sapiens
  misc_RNA (1)...(19): siRNA sense strand
gaacuucacuccuuacuua

SEQ ID NO: 1094924 - RNA, 19 nt, Homo sapiens
  misc_RNA (1)...(19): siRNA sense strand
gagacacucuggcauauuu

SEQ ID NO: 1094925 - RNA, 19 nt, Homo sapiens
  misc_RNA (1)...(19): siRNA sense strand
cggaagagcuuauuaugaa

SEQ ID NO: 1094926 - RNA, 19 nt, Homo sapiens
  misc_RNA (1)...(19): siRNA sense strand
ggaaucucguggaguauua

SEQ ID NO: 1094927 - RNA, 19 nt, Homo sapiens
  misc_RNA (1)...(19): siRNA sense strand
gaagagggaugguaugaag

SEQ ID NO: 1094928 - RNA, 19 nt, Homo sapiens
  misc_RNA (1)...(19): siRNA sense strand
gcugaaagacuguggcuua

SEQ ID NO: 1094929 - RNA, 19 nt, Homo sapiens
  misc_RNA (1)...(19): siRNA sense strand
ucaagcaacuuaccagcua

SEQ ID NO: 1094930 - RNA, 19 nt, Homo sapiens
  misc_RNA (1)...(19): siRNA sense strand
gaaagacuguggcuuaucg

SEQ ID NO: 1094931 - RNA, 19 nt, Homo sapiens
  misc_RNA (1)...(19): siRNA sense strand
gcaagacacuuaaaauuug

SEQ ID NO: 1094932 - RNA, 19 nt, Homo sapiens
  misc_RNA (1)...(19): siRNA sense strand
ggagugauguacuaugaug

SEQ ID NO: 1094933 - RNA, 19 nt, Homo sapiens
  misc_RNA (1)...(19): siRNA sense strand
ggagaaagaccaucaagca

SEQ ID NO: 1094934 - RNA, 19 nt, Homo sapiens
  misc_RNA (1)...(19): siRNA sense strand
gaaagaccaucaagcaacu

SEQ ID NO: 1094935 - RNA, 19 nt, Homo sapiens
  misc_RNA (1)...(19): siRNA sense strand
gaagaagcauuagaacagu

SEQ ID NO: 1094936 - RNA, 19 nt, Homo sapiens
  misc_RNA (1)...(19): siRNA sense strand
ccaaggagcccaaggaguu

SEQ ID NO: 1094937 - RNA, 19 nt, Homo sapiens
  misc_RNA (1)...(19): siRNA sense strand
gaaggaaagaauacugaaa

SEQ ID NO: 1094938 - RNA, 19 nt, Homo sapiens
  misc_RNA (1)...(19): siRNA sense strand
uacaaaguguguugcauuu

SEQ ID NO: 1094939 - RNA, 19 nt, Homo sapiens
  misc_RNA (1)...(19): siRNA sense strand
ccuacgaggucaacuauau

SEQ ID NO: 1094940 - RNA, 19 nt, Homo sapiens
  misc_RNA (1)...(19): siRNA sense strand
aagggaaucucguggagua

SEQ ID NO: 1094941 - RNA, 19 nt, Homo sapiens
  misc_RNA (1)...(19): siRNA sense strand
uaggagugauguacuauga

SEQ ID NO: 1094942 - RNA, 19 nt, Homo sapiens
  misc_RNA (1)...(19): siRNA sense strand
caaccgcuaaacacuauua

SEQ ID NO: 1094943 - RNA, 19 nt, Homo sapiens
  misc_RNA (1)...(19): siRNA sense strand
aaacaaccgcuaaacacua

SEQ ID NO: 1094944 - RNA, 19 nt, Homo sapiens
  misc_RNA (1)...(19): siRNA sense strand
cauugcagcucuugaagga

SEQ ID NO: 1094945 - RNA, 19 nt, Homo sapiens
  misc_RNA (1)...(19): siRNA sense strand
guaugaagaagcauuagaa

SEQ ID NO: 1094946 - RNA, 19 nt, Homo sapiens
  misc_RNA (1)...(19): siRNA sense strand
uuacacccaugcuaauuug

SEQ ID NO: 1094947 - RNA, 19 nt, Homo sapiens
  misc_RNA (1)...(19): siRNA sense strand
gguguuaaacgaucaaaug

SEQ ID NO: 1094948 - RNA, 19 nt, Homo sapiens
  misc_RNA (1)...(19): siRNA sense strand
ggaagagcuuauuaugaag

SEQ ID NO: 1094949 - RNA, 19 nt, Homo sapiens
  misc_RNA (1)...(19): siRNA sense strand
ucccaaagcaagacacuua

SEQ ID NO: 1094950 - RNA, 19 nt, Homo sapiens
  misc_RNA (1)...(19): siRNA sense strand
gagaaagaccaucaagcaa

SEQ ID NO: 1094951 - RNA, 19 nt, Homo sapiens
  misc_RNA (1)...(19): siRNA sense strand
ugugaaggcucaaaguaug

SEQ ID NO: 1094952 - RNA, 19 nt, Homo sapiens
  misc_RNA (1)...(19): siRNA sense strand
gaaacaaccgcuaaacacu

SEQ ID NO: 1094953 - RNA, 19 nt, Homo sapiens
  misc_RNA (1)...(19): siRNA sense strand
ccaaaaggaucgcugacua

SEQ ID NO: 1094954 - RNA, 19 nt, Homo sapiens
  misc_RNA (1)...(19): siRNA sense strand
cgaagcauguggcaaugga

SEQ ID NO: 1094955 - RNA, 19 nt, Homo sapiens
  misc_RNA (1)...(19): siRNA sense strand
ggaaacgucuaugcucaag

SEQ ID NO: 1094956 - RNA, 19 nt, Homo sapiens
  misc_RNA (1)...(19): siRNA sense strand
ggaaagaauacugaaagga

SEQ ID NO: 1094957 - RNA, 19 nt, Homo sapiens
  misc_RNA (1)...(19): siRNA sense strand
cagcuuggcuugggcauca

SEQ ID NO: 1094958 - RNA, 19 nt, Homo sapiens
  misc_RNA (1)...(19): siRNA sense strand
aaggaucgcugacuaugau

SEQ ID NO: 1094959 - RNA, 19 nt, Homo sapiens
  misc_RNA (1)...(19): siRNA sense strand
caaggagcccaaggaguua

SEQ ID NO: 1094960 - RNA, 19 nt, Homo sapiens
  misc_RNA (1)...(19): siRNA sense strand
gggaugguaugaagaagca

SEQ ID NO: 1094961 - RNA, 19 nt, Homo sapiens
  misc_RNA (1)...(19): siRNA sense strand
gaagaaaucaaggagaaag

SEQ ID NO: 1094962 - RNA, 19 nt, Homo sapiens
  misc_RNA (1)...(19): siRNA sense strand
gagcuuauuaugaaggaaa

SEQ ID NO: 1094963 - RNA, 19 nt, Homo sapiens
  misc_RNA (1)...(19): siRNA sense strand
uugcagcucuugaaggaaa

SEQ ID NO: 1094964 - RNA, 19 nt, Homo sapiens
  misc_RNA (1)...(19): siRNA sense strand
ccgcuaaacacuauuauuc

SEQ ID NO: 1094965 - RNA, 19 nt, Homo sapiens
  misc_RNA (1)...(19): siRNA sense strand
gcauggcaauggcauccuu

SEQ ID NO: 1094966 - RNA, 19 nt, Homo sapiens
  misc_RNA (1)...(19): siRNA sense strand
agaaagggguggacuauau

SEQ ID NO: 1094967 - RNA, 19 nt, Homo sapiens
  misc_RNA (1)...(19): siRNA sense strand
gggaugaaacaaccgcuaa

SEQ ID NO: 1094968 - RNA, 19 nt, Homo sapiens
  misc_RNA (1)...(19): siRNA sense strand
aaaguaugcucgggcugua

SEQ ID NO: 1094969 - RNA, 19 nt, Homo sapiens
  misc_RNA (1)...(19): siRNA sense strand
ucuaaagcuugucgucuga

SEQ ID NO: 1094970 - RNA, 19 nt, Homo sapiens
  misc_RNA (1)...(19): siRNA sense strand
ugaagaagcauuagaacag

SEQ ID NO: 1094971 - RNA, 19 nt, Homo sapiens
  misc_RNA (1)...(19): siRNA sense strand
aacaaccgcuaaacacuau

SEQ ID NO: 1094972 - RNA, 19 nt, Homo sapiens
  misc_RNA (1)...(19): siRNA sense strand
caaccaaggagcccaagga

SEQ ID NO: 1094973 - RNA, 19 nt, Homo sapiens
  misc_RNA (1)...(19): siRNA sense strand
caauggaaaucccaaagcu

SEQ ID NO: 1094974 - RNA, 19 nt, Homo sapiens
  misc_RNA (1)...(19): siRNA sense strand
gugaaaaguugcccaagaa

SEQ ID NO: 1094975 - RNA, 19 nt, Homo sapiens
  misc_RNA (1)...(19): siRNA sense strand
uaaacgaucaaaugaggaa

SEQ ID NO: 1094976 - RNA, 19 nt, Homo sapiens
  misc_RNA (1)...(19): siRNA sense strand
cauuagaacaguuugaaga

SEQ ID NO: 1094977 - RNA, 19 nt, Homo sapiens
  misc_RNA (1)...(19): siRNA sense strand
ggaugaaacaaccgcuaaa

SEQ ID NO: 1094978 - RNA, 19 nt, Homo sapiens
  misc_RNA (1)...(19): siRNA sense strand
caaaguguguugcauuuuc

SEQ ID NO: 1094979 - RNA, 19 nt, Homo sapiens
  misc_RNA (1)...(19): siRNA sense strand
ucccaaagcuagugugaag

SEQ ID NO: 1094980 - RNA, 19 nt, Homo sapiens
  misc_RNA (1)...(19): siRNA sense strand
ccaaagcaagacacuuaaa

SEQ ID NO: 1094981 - RNA, 19 nt, Homo sapiens
  misc_RNA (1)...(19): siRNA sense strand
caaaugaggaagcugaaag

SEQ ID NO: 1094982 - RNA, 19 nt, Homo sapiens
  misc_RNA (1)...(19): siRNA sense strand
augcuaauuugguggauaa

SEQ ID NO: 1094983 - RNA, 19 nt, Homo sapiens
  misc_RNA (1)...(19): siRNA sense strand
uuacaaaguguguugcauu

SEQ ID NO: 1094984 - RNA, 19 nt, Homo sapiens
  misc_RNA (1)...(19): siRNA sense strand
ggaaaucccaaagcuagug

SEQ ID NO: 1094985 - RNA, 19 nt, Homo sapiens
  misc_RNA (1)...(19): siRNA sense strand
cacuugggcucauguacuu

SEQ ID NO: 1094986 - RNA, 19 nt, Homo sapiens
  misc_RNA (1)...(19): siRNA sense strand
uaaagcuugucgucugaau

SEQ ID NO: 1094987 - RNA, 19 nt, Homo sapiens
  misc_RNA (1)...(19): siRNA sense strand
gggcucauguacuuguaug

SEQ ID NO: 1094988 - RNA, 19 nt, Homo sapiens
  misc_RNA (1)...(19): siRNA sense strand
cuucacuccuuacuuauuc

SEQ ID NO: 1094989 - RNA, 19 nt, Homo sapiens
  misc_RNA (1)...(19): siRNA sense strand
cgucuaugcucaagggaau

SEQ ID NO: 1094990 - RNA, 19 nt, Homo sapiens
  misc_RNA (1)...(19): siRNA sense strand
aaggagacacucuggcaua

SEQ ID NO: 1094991 - RNA, 19 nt, Homo sapiens
  misc_RNA (1)...(19): siRNA sense strand
ggagacacucuggcauauu

SEQ ID NO: 1094992 - RNA, 19 nt, Homo sapiens
  misc_RNA (1)...(19): siRNA sense strand
gguggacuauaugaagaaa

SEQ ID NO: 1094993 - RNA, 19 nt, Homo sapiens
  misc_RNA (1)...(19): siRNA sense strand
cugcagugcuuaagagaag

SEQ ID NO: 1094994 - RNA, 19 nt, Homo sapiens
  misc_RNA (1)...(19): siRNA sense strand
agaacaguuugaagaaauc

SEQ ID NO: 1094995 - RNA, 19 nt, Homo sapiens
  misc_RNA (1)...(19): siRNA sense strand
caugcuaauuugguggaua

SEQ ID NO: 1094996 - RNA, 19 nt, Homo sapiens
  misc_RNA (1)...(19): siRNA sense strand
gcacuugggcucauguacu

SEQ ID NO: 1094997 - RNA, 19 nt, Homo sapiens
  misc_RNA (1)...(19): siRNA sense strand
ucggaagagcuuauuauga

SEQ ID NO: 1094998 - RNA, 19 nt, Homo sapiens
  misc_RNA (1)...(19): siRNA sense strand
ucaaggagaaagaccauca

SEQ ID NO: 1094999 - RNA, 19 nt, Homo sapiens
  misc_RNA (1)...(19): siRNA sense strand
gaugguaugaagaagcauu

SEQ ID NO: 1095000 - RNA, 19 nt, Homo sapiens
  misc_RNA (1)...(19): siRNA sense strand
gaaaucccaaagcuagugu

SEQ ID NO: 1095001 - RNA, 19 nt, Homo sapiens
  misc_RNA (1)...(19): siRNA sense strand
gcuuaucgcagcagacaau

SEQ ID NO: 1095002 - RNA, 19 nt, Homo sapiens
  misc_RNA (1)...(19): siRNA sense strand
cugaaagacuguggcuuau

SEQ ID NO: 1095003 - RNA, 19 nt, Homo sapiens
  misc_RNA (1)...(19): siRNA sense strand
guguuaaacgaucaaauga

SEQ ID NO: 1095004 - RNA, 19 nt, Homo sapiens
  misc_RNA (1)...(19): siRNA sense strand
aagaagcauuagaacaguu

SEQ ID NO: 1095005 - RNA, 19 nt, Homo sapiens
  misc_RNA (1)...(19): siRNA sense strand
gguaugaagaagcauuaga

SEQ ID NO: 1095006 - RNA, 19 nt, Homo sapiens
  misc_RNA (1)...(19): siRNA sense strand
gugugaaggcucaaaguau

SEQ ID NO: 1095007 - RNA, 19 nt, Homo sapiens
  misc_RNA (1)...(19): siRNA sense strand
ggcaauggcauccuucuac

SEQ ID NO: 1095008 - RNA, 19 nt, Homo sapiens
  misc_RNA (1)...(19): siRNA sense strand
gggaaucucguggaguauu

SEQ ID NO: 1095009 - RNA, 19 nt, Homo sapiens
  misc_RNA (1)...(19): siRNA sense strand
uacgaggucaacuauauuu

SEQ ID NO: 1095010 - RNA, 19 nt, Homo sapiens
  misc_RNA (1)...(19): siRNA sense strand
cuuaagagaagcagcagaa

SEQ ID NO: 1095011 - RNA, 19 nt, Homo sapiens
  misc_RNA (1)...(19): siRNA sense strand
uuacuggcauuccgaagca

SEQ ID NO: 1095012 - RNA, 19 nt, Homo sapiens
  misc_RNA (1)...(19): siRNA sense strand
gaacaguuugaagaaauca

SEQ ID NO: 1095013 - RNA, 19 nt, Homo sapiens
  misc_RNA (1)...(19): siRNA sense strand
aaaggaucgcugacuauga

SEQ ID NO: 1095014 - RNA, 19 nt, Homo sapiens
  misc_RNA (1)...(19): siRNA sense strand
cugauuacacccaugcuaa

SEQ ID NO: 1095015 - RNA, 19 nt, Homo sapiens
  misc_RNA (1)...(19): siRNA sense strand
agagggaugguaugaagaa

SEQ ID NO: 1095016 - RNA, 19 nt, Homo sapiens
  misc_RNA (1)...(19): siRNA sense strand
ugaaacaaccgcuaaacac

SEQ ID NO: 1095017 - RNA, 19 nt, Homo sapiens
  misc_RNA (1)...(19): siRNA sense strand
caaagcaagacacuuaaaa

SEQ ID NO: 1095018 - RNA, 19 nt, Homo sapiens
  misc_RNA (1)...(19): siRNA sense strand
agaagcauuagaacaguuu

SEQ ID NO: 1095019 - RNA, 19 nt, Homo sapiens
  misc_RNA (1)...(19): siRNA sense strand
aaaugaggaagcugaaaga

SEQ ID NO: 1095020 - RNA, 19 nt, Homo sapiens
  misc_RNA (1)...(19): siRNA sense strand
cuacgaggucaacuauauu

SEQ ID NO: 1095021 - RNA, 19 nt, Homo sapiens
  misc_RNA (1)...(19): siRNA sense strand
gcccugcagugcuuaagag

SEQ ID NO: 1095022 - RNA, 19 nt, Homo sapiens
  misc_RNA (1)...(19): siRNA sense strand
cgcaaggugucuucagcuu

SEQ ID NO: 1095023 - RNA, 19 nt, Homo sapiens
  misc_RNA (1)...(19): siRNA sense strand
ggacugaccuugaagagaa

SEQ ID NO: 1095024 - RNA, 19 nt, Homo sapiens
  misc_RNA (1)...(19): siRNA sense strand
gaagagagcagaagccaua

SEQ ID NO: 1095025 - RNA, 19 nt, Homo sapiens
  misc_RNA (1)...(19): siRNA sense strand
ccaaacaacuucauucauu

SEQ ID NO: 1095026 - RNA, 19 nt, Homo sapiens
  misc_RNA (1)...(19): siRNA sense strand
agaauuagcucgaauagaa

SEQ ID NO: 1095027 - RNA, 19 nt, Homo sapiens
  misc_RNA (1)...(19): siRNA sense strand
ggaaagaaauugcagacuu

SEQ ID NO: 1095028 - RNA, 19 nt, Homo sapiens
  misc_RNA (1)...(19): siRNA sense strand
gaaagaaauugcagacuuc

SEQ ID NO: 1095029 - RNA, 19 nt, Homo sapiens
  misc_RNA (1)...(19): siRNA sense strand
gagaaaguaucuuauguug

SEQ ID NO: 1095030 - RNA, 19 nt, Homo sapiens
  misc_RNA (1)...(19): siRNA sense strand
aaaggaacgugaagaaaua

SEQ ID NO: 1095031 - RNA, 19 nt, Homo sapiens
  misc_RNA (1)...(19): siRNA sense strand
gcacaggucuccaggaaau

SEQ ID NO: 1095032 - RNA, 19 nt, Homo sapiens
  misc_RNA (1)...(19): siRNA sense strand
aaacagaccuuugaagauu

SEQ ID NO: 1095033 - RNA, 19 nt, Homo sapiens
  misc_RNA (1)...(19): siRNA sense strand
gcagacaacccuauccuua

SEQ ID NO: 1095034 - RNA, 19 nt, Homo sapiens
  misc_RNA (1)...(19): siRNA sense strand
ggaggaagaccaagacaua

SEQ ID NO: 1095035 - RNA, 19 nt, Homo sapiens
  misc_RNA (1)...(19): siRNA sense strand
ggacauuucuaccagcuuu

SEQ ID NO: 1095036 - RNA, 19 nt, Homo sapiens
  misc_RNA (1)...(19): siRNA sense strand
gaaaugugaugggcaguuu

SEQ ID NO: 1095037 - RNA, 19 nt, Homo sapiens
  misc_RNA (1)...(19): siRNA sense strand
gaagaaaggcccauuaaag

SEQ ID NO: 1095038 - RNA, 19 nt, Homo sapiens
  misc_RNA (1)...(19): siRNA sense strand
ucuaccagcuuuccuauua

SEQ ID NO: 1095039 - RNA, 19 nt, Homo sapiens
  misc_RNA (1)...(19): siRNA sense strand
ggaauaagacacaagguaa

SEQ ID NO: 1095040 - RNA, 19 nt, Homo sapiens
  misc_RNA (1)...(19): siRNA sense strand
gaucuggauuugucugaua

SEQ ID NO: 1095041 - RNA, 19 nt, Homo sapiens
  misc_RNA (1)...(19): siRNA sense strand
gaaagugacagaacagauu

SEQ ID NO: 1095042 - RNA, 19 nt, Homo sapiens
  misc_RNA (1)...(19): siRNA sense strand
aagaaugggugccguguua

SEQ ID NO: 1095043 - RNA, 19 nt, Homo sapiens
  misc_RNA (1)...(19): siRNA sense strand
gaacagaaguuggagucaa

SEQ ID NO: 1095044 - RNA, 19 nt, Homo sapiens
  misc_RNA (1)...(19): siRNA sense strand
caaagaaaguaaacuagug

SEQ ID NO: 1095045 - RNA, 19 nt, Homo sapiens
  misc_RNA (1)...(19): siRNA sense strand
ggaaacagaccuuugaaga

SEQ ID NO: 1095046 - RNA, 19 nt, Homo sapiens
  misc_RNA (1)...(19): siRNA sense strand
aaacauaagucaagaccaa

SEQ ID NO: 1095047 - RNA, 19 nt, Homo sapiens
  misc_RNA (1)...(19): siRNA sense strand
gugaagaaauacagacuuu

SEQ ID NO: 1095048 - RNA, 19 nt, Homo sapiens
  misc_RNA (1)...(19): siRNA sense strand
caaacaacuucauucauug

SEQ ID NO: 1095049 - RNA, 19 nt, Homo sapiens
  misc_RNA (1)...(19): siRNA sense strand
caauggaacucgaaaggaa

SEQ ID NO: 1095050 - RNA, 19 nt, Homo sapiens
  misc_RNA (1)...(19): siRNA sense strand
acaagcugcugaugaaaua

SEQ ID NO: 1095051 - RNA, 19 nt, Homo sapiens
  misc_RNA (1)...(19): siRNA sense strand
gaacuuggacugaccuuga

SEQ ID NO: 1095052 - RNA, 19 nt, Homo sapiens
  misc_RNA (1)...(19): siRNA sense strand
ggauuugucugauaaagau

SEQ ID NO: 1095053 - RNA, 19 nt, Homo sapiens
  misc_RNA (1)...(19): siRNA sense strand
gaagaagcaggaacaauug

SEQ ID NO: 1095054 - RNA, 19 nt, Homo sapiens
  misc_RNA (1)...(19): siRNA sense strand
ccucagaaguggcuaauau

SEQ ID NO: 1095055 - RNA, 19 nt, Homo sapiens
  misc_RNA (1)...(19): siRNA sense strand
gagcaaagcaacuucugua

SEQ ID NO: 1095056 - RNA, 19 nt, Homo sapiens
  misc_RNA (1)...(19): siRNA sense strand
ugaaagaaguacaacagaa

SEQ ID NO: 1095057 - RNA, 19 nt, Homo sapiens
  misc_RNA (1)...(19): siRNA sense strand
ccacugaacuucccagauc

SEQ ID NO: 1095058 - RNA, 19 nt, Homo sapiens
  misc_RNA (1)...(19): siRNA sense strand
aaacgugcgucuccuaauu

SEQ ID NO: 1095059 - RNA, 19 nt, Homo sapiens
  misc_RNA (1)...(19): siRNA sense strand
gagaacgcaucuuuagcua

SEQ ID NO: 1095060 - RNA, 19 nt, Homo sapiens
  misc_RNA (1)...(19): siRNA sense strand
agaacaagcugcugaugaa

SEQ ID NO: 1095061 - RNA, 19 nt, Homo sapiens
  misc_RNA (1)...(19): siRNA sense strand
cauuaaagcugcuauugga

SEQ ID NO: 1095062 - RNA, 19 nt, Homo sapiens
  misc_RNA (1)...(19): siRNA sense strand
gagcagcuguggacauuuc

SEQ ID NO: 1095063 - RNA, 19 nt, Homo sapiens
  misc_RNA (1)...(19): siRNA sense strand
gaagccagauacaaauguu

SEQ ID NO: 1095064 - RNA, 19 nt, Homo sapiens
  misc_RNA (1)...(19): siRNA sense strand
gcaagaacuuuuccagaua

SEQ ID NO: 1095065 - RNA, 19 nt, Homo sapiens
  misc_RNA (1)...(19): siRNA sense strand
guccucagcugaugaauug

SEQ ID NO: 1095066 - RNA, 19 nt, Homo sapiens
  misc_RNA (1)...(19): siRNA sense strand
gaacugcucauggagauuu

SEQ ID NO: 1095067 - RNA, 19 nt, Homo sapiens
  misc_RNA (1)...(19): siRNA sense strand
agacaacccuauccuuaaa

SEQ ID NO: 1095068 - RNA, 19 nt, Homo sapiens
  misc_RNA (1)...(19): siRNA sense strand
gaagguuuagcuagauuua

SEQ ID NO: 1095069 - RNA, 19 nt, Homo sapiens
  misc_RNA (1)...(19): siRNA sense strand
gaaacagaccuuugaagau

SEQ ID NO: 1095070 - RNA, 19 nt, Homo sapiens
  misc_RNA (1)...(19): siRNA sense strand
gaccaucacugucacuuuc

SEQ ID NO: 1095071 - RNA, 19 nt, Homo sapiens
  misc_RNA (1)...(19): siRNA sense strand
gggaaugaauccacuuaug

SEQ ID NO: 1095072 - RNA, 19 nt, Homo sapiens
  misc_RNA (1)...(19): siRNA sense strand
gaugaagguguuccaaaua

SEQ ID NO: 1095073 - RNA, 19 nt, Homo sapiens
  misc_RNA (1)...(19): siRNA sense strand
gcagaucccauuagucauu

SEQ ID NO: 1095074 - RNA, 19 nt, Homo sapiens
  misc_RNA (1)...(19): siRNA sense strand
agaaguggcuaauauugaa

SEQ ID NO: 1095075 - RNA, 19 nt, Homo sapiens
  misc_RNA (1)...(19): siRNA sense strand
gagaagguuuagcuagauu

SEQ ID NO: 1095076 - RNA, 19 nt, Homo sapiens
  misc_RNA (1)...(19): siRNA sense strand
aaacaacccuuacaaacca

SEQ ID NO: 1095077 - RNA, 19 nt, Homo sapiens
  misc_RNA (1)...(19): siRNA sense strand
ggauaagaguuaaggacaa

SEQ ID NO: 1095078 - RNA, 19 nt, Homo sapiens
  misc_RNA (1)...(19): siRNA sense strand
ggacaagaagaaagcauuu

SEQ ID NO: 1095079 - RNA, 19 nt, Homo sapiens
  misc_RNA (1)...(19): siRNA sense strand
gagcagaaguccuccuaca

SEQ ID NO: 1095080 - RNA, 19 nt, Homo sapiens
  misc_RNA (1)...(19): siRNA sense strand
gaaugcacgugacgaugaa

SEQ ID NO: 1095081 - RNA, 19 nt, Homo sapiens
  misc_RNA (1)...(19): siRNA sense strand
gaauaagacacaagguaaa

SEQ ID NO: 1095082 - RNA, 19 nt, Homo sapiens
  misc_RNA (1)...(19): siRNA sense strand
ggagaaaguaucuuauguu

SEQ ID NO: 1095083 - RNA, 19 nt, Homo sapiens
  misc_RNA (1)...(19): siRNA sense strand
ggaagcaaaugauaagaac

SEQ ID NO: 1095084 - RNA, 19 nt, Homo sapiens
  misc_RNA (1)...(19): siRNA sense strand
cagacaugcuacccuaaua

SEQ ID NO: 1095085 - RNA, 19 nt, Homo sapiens
  misc_RNA (1)...(19): siRNA sense strand
gaagagaauuuguguaacc

SEQ ID NO: 1095086 - RNA, 19 nt, Homo sapiens
  misc_RNA (1)...(19): siRNA sense strand
ggaaugcacgugacgauga

SEQ ID NO: 1095087 - RNA, 19 nt, Homo sapiens
  misc_RNA (1)...(19): siRNA sense strand
gcgagcagcuguggacauu

SEQ ID NO: 1095088 - RNA, 19 nt, Homo sapiens
  misc_RNA (1)...(19): siRNA sense strand
uagcuaaacuucgcauuga

SEQ ID NO: 1095089 - RNA, 19 nt, Homo sapiens
  misc_RNA (1)...(19): siRNA sense strand
gaacagccuuguaaaauca

SEQ ID NO: 1095090 - RNA, 19 nt, Homo sapiens
  misc_RNA (1)...(19): siRNA sense strand
uaagggagaccaugaaaga

SEQ ID NO: 1095091 - RNA, 19 nt, Homo sapiens
  misc_RNA (1)...(19): siRNA sense strand
gaaugggugccguguuaua

SEQ ID NO: 1095092 - RNA, 19 nt, Homo sapiens
  misc_RNA (1)...(19): siRNA sense strand
gaaagaaguacaacagaag

SEQ ID NO: 1095093 - RNA, 19 nt, Homo sapiens
  misc_RNA (1)...(19): siRNA sense strand
ucccagauccugaauauaa

SEQ ID NO: 1095094 - RNA, 19 nt, Homo sapiens
  misc_RNA (1)...(19): siRNA sense strand
gaggauagcccacaagucu

SEQ ID NO: 1095095 - RNA, 19 nt, Homo sapiens
  misc_RNA (1)...(19): siRNA sense strand
caaaagagcacuucugaaa

SEQ ID NO: 1095096 - RNA, 19 nt, Homo sapiens
  misc_RNA (1)...(19): siRNA sense strand
gcaaagcaacuucuguaga

SEQ ID NO: 1095097 - RNA, 19 nt, Homo sapiens
  misc_RNA (1)...(19): siRNA sense strand
agaagaagcaggaacaauu

SEQ ID NO: 1095098 - RNA, 19 nt, Homo sapiens
  misc_RNA (1)...(19): siRNA sense strand
gaagauuacuuagaagaac

SEQ ID NO: 1095099 - RNA, 19 nt, Homo sapiens
  misc_RNA (1)...(19): siRNA sense strand
gaacuucccagauccugaa

SEQ ID NO: 1095100 - RNA, 19 nt, Homo sapiens
  misc_RNA (1)...(19): siRNA sense strand
cgaugaagguguuccaaau

SEQ ID NO: 1095101 - RNA, 19 nt, Homo sapiens
  misc_RNA (1)...(19): siRNA sense strand
gaaguguaguaacaggaaa

SEQ ID NO: 1095102 - RNA, 19 nt, Homo sapiens
  misc_RNA (1)...(19): siRNA sense strand
ggagaagguuuagcuagau

SEQ ID NO: 1095103 - RNA, 19 nt, Homo sapiens
  misc_RNA (1)...(19): siRNA sense strand
ggaagcagaaggaccauug

SEQ ID NO: 1095104 - RNA, 19 nt, Homo sapiens
  misc_RNA (1)...(19): siRNA sense strand
gggagaaagugacagaaca

SEQ ID NO: 1095105 - RNA, 19 nt, Homo sapiens
  misc_RNA (1)...(19): siRNA sense strand
aaacuuauuuccugaugga

SEQ ID NO: 1095106 - RNA, 19 nt, Homo sapiens
  misc_RNA (1)...(19): siRNA sense strand
gaagacaaauccggcagau

SEQ ID NO: 1095107 - RNA, 19 nt, Homo sapiens
  misc_RNA (1)...(19): siRNA sense strand
gagcaagaacugaagcaaa

SEQ ID NO: 1095108 - RNA, 19 nt, Homo sapiens
  misc_RNA (1)...(19): siRNA sense strand
caaggaggguaauguguca

SEQ ID NO: 1095109 - RNA, 19 nt, Homo sapiens
  misc_RNA (1)...(19): siRNA sense strand
aaagaaaggagaccaaaug

SEQ ID NO: 1095110 - RNA, 19 nt, Homo sapiens
  misc_RNA (1)...(19): siRNA sense strand
gacacaagguaaagacaga

SEQ ID NO: 1095111 - RNA, 19 nt, Homo sapiens
  misc_RNA (1)...(19): siRNA sense strand
gcaaagaaaguaaacuagu

SEQ ID NO: 1095112 - RNA, 19 nt, Homo sapiens
  misc_RNA (1)...(19): siRNA sense strand
aaacauacccguccaacau

SEQ ID NO: 1095113 - RNA, 19 nt, Homo sapiens
  misc_RNA (1)...(19): siRNA sense strand
ggccaaagagaacuacaua

SEQ ID NO: 1095114 - RNA, 19 nt, Homo sapiens
  misc_RNA (1)...(19): siRNA sense strand
acacagaccuccgggaaga

SEQ ID NO: 1095115 - RNA, 19 nt, Homo sapiens
  misc_RNA (1)...(19): siRNA sense strand
gcagaaguccuccuacauc

SEQ ID NO: 1095116 - RNA, 19 nt, Homo sapiens
  misc_RNA (1)...(19): siRNA sense strand
ggaaugaauccacuuaugg

SEQ ID NO: 1095117 - RNA, 19 nt, Homo sapiens
  misc_RNA (1)...(19): siRNA sense strand
agacagacuuccucuuuca

SEQ ID NO: 1095118 - RNA, 19 nt, Homo sapiens
  misc_RNA (1)...(19): siRNA sense strand
gaccuuugaagauuacuua

SEQ ID NO: 1095119 - RNA, 19 nt, Homo sapiens
  misc_RNA (1)...(19): siRNA sense strand
ucauggagauuuugucuua

SEQ ID NO: 1095120 - RNA, 19 nt, Homo sapiens
  misc_RNA (1)...(19): siRNA sense strand
uaaagcugcuauuggagaa

SEQ ID NO: 1095121 - RNA, 19 nt, Homo sapiens
  misc_RNA (1)...(19): siRNA sense strand
gagaugaggaagcuacaaa

SEQ ID NO: 1095122 - RNA, 19 nt, Homo sapiens
  misc_RNA (1)...(19): siRNA sense strand
uuagagaccagaucaaauu

SEQ ID NO: 1095123 - RNA, 19 nt, Homo sapiens
  misc_RNA (1)...(19): siRNA sense strand
caaagaagaugaagaguuu

SEQ ID NO: 1095124 - RNA, 19 nt, Homo sapiens
  misc_RNA (1)...(19): siRNA sense strand
gaagacaaguucucuaguu

SEQ ID NO: 1095125 - RNA, 19 nt, Homo sapiens
  misc_RNA (1)...(19): siRNA sense strand
ggucugaucuggugucuaa

SEQ ID NO: 1095126 - RNA, 19 nt, Homo sapiens
  misc_RNA (1)...(19): siRNA sense strand
caaagaaccugaaauacug

SEQ ID NO: 1095127 - RNA, 19 nt, Homo sapiens
  misc_RNA (1)...(19): siRNA sense strand
caaguaagauuaugagguu

SEQ ID NO: 1095128 - RNA, 19 nt, Homo sapiens
  misc_RNA (1)...(19): siRNA sense strand
gguggaaccuuaagacuuu

SEQ ID NO: 1095129 - RNA, 19 nt, Homo sapiens
  misc_RNA (1)...(19): siRNA sense strand
gaaagcgaaucuggaauaa

SEQ ID NO: 1095130 - RNA, 19 nt, Homo sapiens
  misc_RNA (1)...(19): siRNA sense strand
caagaugacuuuaugucua

SEQ ID NO: 1095131 - RNA, 19 nt, Homo sapiens
  misc_RNA (1)...(19): siRNA sense strand
gauaagcucucagauauuc

SEQ ID NO: 1095132 - RNA, 19 nt, Homo sapiens
  misc_RNA (1)...(19): siRNA sense strand
ggagcagucugaaggauuu

SEQ ID NO: 1095133 - RNA, 19 nt, Homo sapiens
  misc_RNA (1)...(19): siRNA sense strand
caaggacucuggauugauu

SEQ ID NO: 1095134 - RNA, 19 nt, Homo sapiens
  misc_RNA (1)...(19): siRNA sense strand
caagaucucuggauaucaa

SEQ ID NO: 1095135 - RNA, 19 nt, Homo sapiens
  misc_RNA (1)...(19): siRNA sense strand
caagagagauagaacugaa

SEQ ID NO: 1095136 - RNA, 19 nt, Homo sapiens
  misc_RNA (1)...(19): siRNA sense strand
cuaagaagauccaaaugaa

SEQ ID NO: 1095137 - RNA, 19 nt, Homo sapiens
  misc_RNA (1)...(19): siRNA sense strand
caacagagacagaguuuau

SEQ ID NO: 1095138 - RNA, 19 nt, Homo sapiens
  misc_RNA (1)...(19): siRNA sense strand
gaagugaggacccuaagaa

SEQ ID NO: 1095139 - RNA, 19 nt, Homo sapiens
  misc_RNA (1)...(19): siRNA sense strand
gcacaaguauuaaguacag

SEQ ID NO: 1095140 - RNA, 19 nt, Homo sapiens
  misc_RNA (1)...(19): siRNA sense strand
agaagaaacuggagcaaga

SEQ ID NO: 1095141 - RNA, 19 nt, Homo sapiens
  misc_RNA (1)...(19): siRNA sense strand
gcaaagaagaugaagaguu

SEQ ID NO: 1095142 - RNA, 19 nt, Homo sapiens
  misc_RNA (1)...(19): siRNA sense strand
ggaaagcaauaacaacuac

SEQ ID NO: 1095143 - RNA, 19 nt, Homo sapiens
  misc_RNA (1)...(19): siRNA sense strand
gaucuggugucuaagaaga

SEQ ID NO: 1095144 - RNA, 19 nt, Homo sapiens
  misc_RNA (1)...(19): siRNA sense strand
gauuuauucuggcaucuaa

SEQ ID NO: 1095145 - RNA, 19 nt, Homo sapiens
  misc_RNA (1)...(19): siRNA sense strand
cgaaagcgaaucuggaaua

SEQ ID NO: 1095146 - RNA, 19 nt, Homo sapiens
  misc_RNA (1)...(19): siRNA sense strand
gagaaauacuggucugauc

SEQ ID NO: 1095147 - RNA, 19 nt, Homo sapiens
  misc_RNA (1)...(19): siRNA sense strand
gcugcucacuguugaagua

SEQ ID NO: 1095148 - RNA, 19 nt, Homo sapiens
  misc_RNA (1)...(19): siRNA sense strand
uugauaagcucucagauau

SEQ ID NO: 1095149 - RNA, 19 nt, Homo sapiens
  misc_RNA (1)...(19): siRNA sense strand
gugaaugccuugcuuggaa

SEQ ID NO: 1095150 - RNA, 19 nt, Homo sapiens
  misc_RNA (1)...(19): siRNA sense strand
gaaaaucuaugaccucuca

SEQ ID NO: 1095151 - RNA, 19 nt, Homo sapiens
  misc_RNA (1)...(19): siRNA sense strand
cggauacaguguccuauaa

SEQ ID NO: 1095152 - RNA, 19 nt, Homo sapiens
  misc_RNA (1)...(19): siRNA sense strand
caucgaacaaguaagauua

SEQ ID NO: 1095153 - RNA, 19 nt, Homo sapiens
  misc_RNA (1)...(19): siRNA sense strand
gcucauaaauaucacaagu

SEQ ID NO: 1095154 - RNA, 19 nt, Homo sapiens
  misc_RNA (1)...(19): siRNA sense strand
gcacacagcagacacaaca

SEQ ID NO: 1095155 - RNA, 19 nt, Homo sapiens
  misc_RNA (1)...(19): siRNA sense strand
gagauaccaucgccauuca

SEQ ID NO: 1095156 - RNA, 19 nt, Homo sapiens
  misc_RNA (1)...(19): siRNA sense strand
aaagaggaaugguuuagga

SEQ ID NO: 1095157 - RNA, 19 nt, Homo sapiens
  misc_RNA (1)...(19): siRNA sense strand
cgaccgagguggagccaaa

SEQ ID NO: 1095158 - RNA, 19 nt, Homo sapiens
  misc_RNA (1)...(19): siRNA sense strand
uacaauggguccuuucuga

SEQ ID NO: 1095159 - RNA, 19 nt, Homo sapiens
  misc_RNA (1)...(19): siRNA sense strand
ggaaugguuuaggagauuu

SEQ ID NO: 1095160 - RNA, 19 nt, Homo sapiens
  misc_RNA (1)...(19): siRNA sense strand
guugauaagcucucagaua

SEQ ID NO: 1095161 - RNA, 19 nt, Homo sapiens
  misc_RNA (1)...(19): siRNA sense strand
uuacaacuaugauccagaa

SEQ ID NO: 1095162 - RNA, 19 nt, Homo sapiens
  misc_RNA (1)...(19): siRNA sense strand
ucagcaagaugacuuuaug

SEQ ID NO: 1095163 - RNA, 19 nt, Homo sapiens
  misc_RNA (1)...(19): siRNA sense strand
acagagacagaguuuauua

SEQ ID NO: 1095164 - RNA, 19 nt, Homo sapiens
  misc_RNA (1)...(19): siRNA sense strand
uaagccaccugauuccaaa

SEQ ID NO: 1095165 - RNA, 19 nt, Homo sapiens
  misc_RNA (1)...(19): siRNA sense strand
gauggaugaaugagauuua

SEQ ID NO: 1095166 - RNA, 19 nt, Homo sapiens
  misc_RNA (1)...(19): siRNA sense strand
caccaagugcucauaaaua

SEQ ID NO: 1095167 - RNA, 19 nt, Homo sapiens
  misc_RNA (1)...(19): siRNA sense strand
gaagugaccacccaaaguc

SEQ ID NO: 1095168 - RNA, 19 nt, Homo sapiens
  misc_RNA (1)...(19): siRNA sense strand
gcccaaagccuuaucuuca

SEQ ID NO: 1095169 - RNA, 19 nt, Homo sapiens
  misc_RNA (1)...(19): siRNA sense strand
cuucagaacucuccaaucu

SEQ ID NO: 1095170 - RNA, 19 nt, Homo sapiens
  misc_RNA (1)...(19): siRNA sense strand
gaaauuggcaaagaagguu

SEQ ID NO: 1095171 - RNA, 19 nt, Homo sapiens
  misc_RNA (1)...(19): siRNA sense strand
ccugaagguuggagaaauu

SEQ ID NO: 1095172 - RNA, 19 nt, Homo sapiens
  misc_RNA (1)...(19): siRNA sense strand
caagugcucauaaauauca

SEQ ID NO: 1095173 - RNA, 19 nt, Homo sapiens
  misc_RNA (1)...(19): siRNA sense strand
acguugggcuucuuuauaa

SEQ ID NO: 1095174 - RNA, 19 nt, Homo sapiens
  misc_RNA (1)...(19): siRNA sense strand
gagcaaagaagaugaagag

SEQ ID NO: 1095175 - RNA, 19 nt, Homo sapiens
  misc_RNA (1)...(19): siRNA sense strand
gauacuaaacgacgccuuu

SEQ ID NO: 1095176 - RNA, 19 nt, Homo sapiens
  misc_RNA (1)...(19): siRNA sense strand
ggucaucgaacaaguaaga

SEQ ID NO: 1095177 - RNA, 19 nt, Homo sapiens
  misc_RNA (1)...(19): siRNA sense strand
ggaggucaucgaacaagua

SEQ ID NO: 1095178 - RNA, 19 nt, Homo sapiens
  misc_RNA (1)...(19): siRNA sense strand
gaacacaagaucucuggau

SEQ ID NO: 1095179 - RNA, 19 nt, Homo sapiens
  misc_RNA (1)...(19): siRNA sense strand
uaaugugugucuaugugua

SEQ ID NO: 1095180 - RNA, 19 nt, Homo sapiens
  misc_RNA (1)...(19): siRNA sense strand
gacguugggcuucuuuaua

SEQ ID NO: 1095181 - RNA, 19 nt, Homo sapiens
  misc_RNA (1)...(19): siRNA sense strand
ucucagacagcaagauuua

SEQ ID NO: 1095182 - RNA, 19 nt, Homo sapiens
  misc_RNA (1)...(19): siRNA sense strand
gaccgaguaugguaugguu

SEQ ID NO: 1095183 - RNA, 19 nt, Homo sapiens
  misc_RNA (1)...(19): siRNA sense strand
gaacaaguaagauuaugag

SEQ ID NO: 1095184 - RNA, 19 nt, Homo sapiens
  misc_RNA (1)...(19): siRNA sense strand
gaggaaugguuuaggagau

SEQ ID NO: 1095185 - RNA, 19 nt, Homo sapiens
  misc_RNA (1)...(19): siRNA sense strand
aauaacaacuacagcauca

SEQ ID NO: 1095186 - RNA, 19 nt, Homo sapiens
  misc_RNA (1)...(19): siRNA sense strand
aaaccuaccaugcgacuuu

SEQ ID NO: 1095187 - RNA, 19 nt, Homo sapiens
  misc_RNA (1)...(19): siRNA sense strand
acacugaggacuucgauuu

SEQ ID NO: 1095188 - RNA, 19 nt, Homo sapiens
  misc_RNA (1)...(19): siRNA sense strand
gcagcacaaguauuaagua

SEQ ID NO: 1095189 - RNA, 19 nt, Homo sapiens
  misc_RNA (1)...(19): siRNA sense strand
ggacagcgaugaggaaucc

SEQ ID NO: 1095190 - RNA, 19 nt, Homo sapiens
  misc_RNA (1)...(19): siRNA sense strand
ugaccaaacuagguaaaga

SEQ ID NO: 1095191 - RNA, 19 nt, Homo sapiens
  misc_RNA (1)...(19): siRNA sense strand
aacacaagaucucuggaua

SEQ ID NO: 1095192 - RNA, 19 nt, Homo sapiens
  misc_RNA (1)...(19): siRNA sense strand
accaagugcucauaaauau

SEQ ID NO: 1095193 - RNA, 19 nt, Homo sapiens
  misc_RNA (1)...(19): siRNA sense strand
uauaaugugugucuaugug

SEQ ID NO: 1095194 - RNA, 19 nt, Homo sapiens
  misc_RNA (1)...(19): siRNA sense strand
cacaggcacuugaugaaga

SEQ ID NO: 1095195 - RNA, 19 nt, Homo sapiens
  misc_RNA (1)...(19): siRNA sense strand
cgacugaccgaguauggua

SEQ ID NO: 1095196 - RNA, 19 nt, Homo sapiens
  misc_RNA (1)...(19): siRNA sense strand
ucaaagaaccugaaauacu

SEQ ID NO: 1095197 - RNA, 19 nt, Homo sapiens
  misc_RNA (1)...(19): siRNA sense strand
gacaaguucucuaguucug

SEQ ID NO: 1095198 - RNA, 19 nt, Homo sapiens
  misc_RNA (1)...(19): siRNA sense strand
ugggagaacuggccgagaa

SEQ ID NO: 1095199 - RNA, 19 nt, Homo sapiens
  misc_RNA (1)...(19): siRNA sense strand
ggacuucgauuuggaaacg

SEQ ID NO: 1095200 - RNA, 19 nt, Homo sapiens
  misc_RNA (1)...(19): siRNA sense strand
uuugugaacuguacacuga

SEQ ID NO: 1095201 - RNA, 19 nt, Homo sapiens
  misc_RNA (1)...(19): siRNA sense strand
uccagcagcacaaguauua

SEQ ID NO: 1095202 - RNA, 19 nt, Homo sapiens
  misc_RNA (1)...(19): siRNA sense strand
aaauaaagcuccccuacuu

SEQ ID NO: 1095203 - RNA, 19 nt, Homo sapiens
  misc_RNA (1)...(19): siRNA sense strand
aagcgaaucuggaauaaaa

SEQ ID NO: 1095204 - RNA, 19 nt, Homo sapiens
  misc_RNA (1)...(19): siRNA sense strand
cacaagaucucuggauauc

SEQ ID NO: 1095205 - RNA, 19 nt, Homo sapiens
  misc_RNA (1)...(19): siRNA sense strand
cagaggugcucgcggaaga

SEQ ID NO: 1095206 - RNA, 19 nt, Homo sapiens
  misc_RNA (1)...(19): siRNA sense strand
ccaccugauuccaaacuga

SEQ ID NO: 1095207 - RNA, 19 nt, Homo sapiens
  misc_RNA (1)...(19): siRNA sense strand
cagacuggauagagaagaa

SEQ ID NO: 1095208 - RNA, 19 nt, Homo sapiens
  misc_RNA (1)...(19): siRNA sense strand
uggagaaauuggcaaagaa

SEQ ID NO: 1095209 - RNA, 19 nt, Homo sapiens
  misc_RNA (1)...(19): siRNA sense strand
ucaaggaggaggaguguga

SEQ ID NO: 1095210 - RNA, 19 nt, Homo sapiens
  misc_RNA (1)...(19): siRNA sense strand
ggaagauggugugguccuu

SEQ ID NO: 1095211 - RNA, 19 nt, Homo sapiens
  misc_RNA (1)...(19): siRNA sense strand
gugacagacuggauagaga

SEQ ID NO: 1095212 - RNA, 19 nt, Homo sapiens
  misc_RNA (1)...(19): siRNA sense strand
gaggucaucgaacaaguaa

SEQ ID NO: 1095213 - RNA, 19 nt, Homo sapiens
  misc_RNA (1)...(19): siRNA sense strand
ucuaagaagauccaaauga

SEQ ID NO: 1095214 - RNA, 19 nt, Homo sapiens
  misc_RNA (1)...(19): siRNA sense strand
uaaagucggaaaucaagaa

SEQ ID NO: 1095215 - RNA, 19 nt, Homo sapiens
  misc_RNA (1)...(19): siRNA sense strand
gaaugguuuaggagauuua

SEQ ID NO: 1095216 - RNA, 19 nt, Homo sapiens
  misc_RNA (1)...(19): siRNA sense strand
ggagggccagcuacaauga

SEQ ID NO: 1095217 - RNA, 19 nt, Homo sapiens
  misc_RNA (1)...(19): siRNA sense strand
ggaugaaugagauuuacaa

SEQ ID NO: 1095218 - RNA, 19 nt, Homo sapiens
  misc_RNA (1)...(19): siRNA sense strand
cugaagggauggaugaaug

SEQ ID NO: 1095219 - RNA, 19 nt, Homo sapiens
  misc_RNA (1)...(19): siRNA sense strand
gggugucucuggagguaaa

SEQ ID NO: 1095220 - RNA, 19 nt, Homo sapiens
  misc_RNA (1)...(19): siRNA sense strand
gcugaaagcucggccaaaa

SEQ ID NO: 1095221 - RNA, 19 nt, Homo sapiens
  misc_RNA (1)...(19): siRNA sense strand
ccaaaugaaacucagcaaa

SEQ ID NO: 1095222 - RNA, 19 nt, Homo sapiens
  misc_RNA (1)...(19): siRNA sense strand
gaagaaguugccagagguu

SEQ ID NO: 1095223 - RNA, 19 nt, Homo sapiens
  misc_RNA (1)...(19): siRNA sense strand
caaaugagcuuaugcugua

SEQ ID NO: 1095224 - RNA, 19 nt, Homo sapiens
  misc_RNA (1)...(19): siRNA sense strand
ggacaucuauugccuuuaa

SEQ ID NO: 1095225 - RNA, 19 nt, Homo sapiens
  misc_RNA (1)...(19): siRNA sense strand
gaccacagaucgauacgua

SEQ ID NO: 1095226 - RNA, 19 nt, Homo sapiens
  misc_RNA (1)...(19): siRNA sense strand
gaaguaugaugaaguuaug

SEQ ID NO: 1095227 - RNA, 19 nt, Homo sapiens
  misc_RNA (1)...(19): siRNA sense strand
ggaaauuaccguuuacaaa

SEQ ID NO: 1095228 - RNA, 19 nt, Homo sapiens
  misc_RNA (1)...(19): siRNA sense strand
ggaacaaauuggacacauu

SEQ ID NO: 1095229 - RNA, 19 nt, Homo sapiens
  misc_RNA (1)...(19): siRNA sense strand
guagagagguugcugugaa

SEQ ID NO: 1095230 - RNA, 19 nt, Homo sapiens
  misc_RNA (1)...(19): siRNA sense strand
gaagaccacuaguucaaug

SEQ ID NO: 1095231 - RNA, 19 nt, Homo sapiens
  misc_RNA (1)...(19): siRNA sense strand
gaauacauaugucugugaa

SEQ ID NO: 1095232 - RNA, 19 nt, Homo sapiens
  misc_RNA (1)...(19): siRNA sense strand
gaacuaaagccauauacug

SEQ ID NO: 1095233 - RNA, 19 nt, Homo sapiens
  misc_RNA (1)...(19): siRNA sense strand
ugaagguggugaaucguua

SEQ ID NO: 1095234 - RNA, 19 nt, Homo sapiens
  misc_RNA (1)...(19): siRNA sense strand
aaagaucgauggaugaaug

SEQ ID NO: 1095235 - RNA, 19 nt, Homo sapiens
  misc_RNA (1)...(19): siRNA sense strand
gaagaacuaaagccauaua

SEQ ID NO: 1095236 - RNA, 19 nt, Homo sapiens
  misc_RNA (1)...(19): siRNA sense strand
acaaagauguggcucgaaa

SEQ ID NO: 1095237 - RNA, 19 nt, Homo sapiens
  misc_RNA (1)...(19): siRNA sense strand
cauuggaaauuaccguuua

SEQ ID NO: 1095238 - RNA, 19 nt, Homo sapiens
  misc_RNA (1)...(19): siRNA sense strand
ucagaaguaugaugaaguu

SEQ ID NO: 1095239 - RNA, 19 nt, Homo sapiens
  misc_RNA (1)...(19): siRNA sense strand
guacaguauugucaucaaa

SEQ ID NO: 1095240 - RNA, 19 nt, Homo sapiens
  misc_RNA (1)...(19): siRNA sense strand
gaaguacgaauaaugaaga

SEQ ID NO: 1095241 - RNA, 19 nt, Homo sapiens
  misc_RNA (1)...(19): siRNA sense strand
ccacgacugucacuuaaug

SEQ ID NO: 1095242 - RNA, 19 nt, Homo sapiens
  misc_RNA (1)...(19): siRNA sense strand
cuaaugacaugaugagaga

SEQ ID NO: 1095243 - RNA, 19 nt, Homo sapiens
  misc_RNA (1)...(19): siRNA sense strand
aggaagaacuaaagccaua

SEQ ID NO: 1095244 - RNA, 19 nt, Homo sapiens
  misc_RNA (1)...(19): siRNA sense strand
ggaagaggguaaagauucu

SEQ ID NO: 1095245 - RNA, 19 nt, Homo sapiens
  misc_RNA (1)...(19): siRNA sense strand
cguauucccuucuauaugu

SEQ ID NO: 1095246 - RNA, 19 nt, Homo sapiens
  misc_RNA (1)...(19): siRNA sense strand
aacgucaacugguauaaua

SEQ ID NO: 1095247 - RNA, 19 nt, Homo sapiens
  misc_RNA (1)...(19): siRNA sense strand
cuucaacuauuccaaguaa

SEQ ID NO: 1095248 - RNA, 19 nt, Homo sapiens
  misc_RNA (1)...(19): siRNA sense strand
cgagaaguacgaauaauga

SEQ ID NO: 1095249 - RNA, 19 nt, Homo sapiens
  misc_RNA (1)...(19): siRNA sense strand
uaacugugauuaugagcaa

SEQ ID NO: 1095250 - RNA, 19 nt, Homo sapiens
  misc_RNA (1)...(19): siRNA sense strand
caacugguauaauaagcaa

SEQ ID NO: 1095251 - RNA, 19 nt, Homo sapiens
  misc_RNA (1)...(19): siRNA sense strand
caagaaggaauacauaugu

SEQ ID NO: 1095252 - RNA, 19 nt, Homo sapiens
  misc_RNA (1)...(19): siRNA sense strand
gcaagaaggaauacauaug

SEQ ID NO: 1095253 - RNA, 19 nt, Homo sapiens
  misc_RNA (1)...(19): siRNA sense strand
gcgaauaucugggacaucu

SEQ ID NO: 1095254 - RNA, 19 nt, Homo sapiens
  misc_RNA (1)...(19): siRNA sense strand
agaaguaucucagcaaauc

SEQ ID NO: 1095255 - RNA, 19 nt, Homo sapiens
  misc_RNA (1)...(19): siRNA sense strand
ggagguagcauggcaagaa

SEQ ID NO: 1095256 - RNA, 19 nt, Homo sapiens
  misc_RNA (1)...(19): siRNA sense strand
gaagaaugaaagagaaaga

SEQ ID NO: 1095257 - RNA, 19 nt, Homo sapiens
  misc_RNA (1)...(19): siRNA sense strand
gaaagaggagugggacaaa

SEQ ID NO: 1095258 - RNA, 19 nt, Homo sapiens
  misc_RNA (1)...(19): siRNA sense strand
gaaagaggcccgugcaaaa

SEQ ID NO: 1095259 - RNA, 19 nt, Homo sapiens
  misc_RNA (1)...(19): siRNA sense strand
caaguaacaauguguauuc

SEQ ID NO: 1095260 - RNA, 19 nt, Homo sapiens
  misc_RNA (1)...(19): siRNA sense strand
gaaaaccaccugaauuuga

SEQ ID NO: 1095261 - RNA, 19 nt, Homo sapiens
  misc_RNA (1)...(19): siRNA sense strand
cgagggaaguaccguauuc

SEQ ID NO: 1095262 - RNA, 19 nt, Homo sapiens
  misc_RNA (1)...(19): siRNA sense strand
gaauaucugggacaucuau

SEQ ID NO: 1095263 - RNA, 19 nt, Homo sapiens
  misc_RNA (1)...(19): siRNA sense strand
gauggaagucugcaaguug

SEQ ID NO: 1095264 - RNA, 19 nt, Homo sapiens
  misc_RNA (1)...(19): siRNA sense strand
gaauguuggucaugaagag

SEQ ID NO: 1095265 - RNA, 19 nt, Homo sapiens
  misc_RNA (1)...(19): siRNA sense strand
gaacagccucacauuggaa

SEQ ID NO: 1095266 - RNA, 19 nt, Homo sapiens
  misc_RNA (1)...(19): siRNA sense strand
ggaaaagacagcagccuua

SEQ ID NO: 1095267 - RNA, 19 nt, Homo sapiens
  misc_RNA (1)...(19): siRNA sense strand
gcuaaauccuaccagucua

SEQ ID NO: 1095268 - RNA, 19 nt, Homo sapiens
  misc_RNA (1)...(19): siRNA sense strand
gaugaacagccucacauug

SEQ ID NO: 1095269 - RNA, 19 nt, Homo sapiens
  misc_RNA (1)...(19): siRNA sense strand
gauacugaaucauccuaau

SEQ ID NO: 1095270 - RNA, 19 nt, Homo sapiens
  misc_RNA (1)...(19): siRNA sense strand
uagagagguugcugugaaa

SEQ ID NO: 1095271 - RNA, 19 nt, Homo sapiens
  misc_RNA (1)...(19): siRNA sense strand
caaauuggcaagacacguu

SEQ ID NO: 1095272 - RNA, 19 nt, Homo sapiens
  misc_RNA (1)...(19): siRNA sense strand
gcaagacacguucuaacug

SEQ ID NO: 1095273 - RNA, 19 nt, Homo sapiens
  misc_RNA (1)...(19): siRNA sense strand
cuaguucaauggacccuaa

SEQ ID NO: 1095274 - RNA, 19 nt, Homo sapiens
  misc_RNA (1)...(19): siRNA sense strand
caaauuuguucgcagaagu

SEQ ID NO: 1095275 - RNA, 19 nt, Homo sapiens
  misc_RNA (1)...(19): siRNA sense strand
gaaaggaccacagaucgau

SEQ ID NO: 1095276 - RNA, 19 nt, Homo sapiens
  misc_RNA (1)...(19): siRNA sense strand
ggaauacauaugucuguga

SEQ ID NO: 1095277 - RNA, 19 nt, Homo sapiens
  misc_RNA (1)...(19): siRNA sense strand
agaggcagcuuggaacaaa

SEQ ID NO: 1095278 - RNA, 19 nt, Homo sapiens
  misc_RNA (1)...(19): siRNA sense strand
gaaguaugaugggccugaa

SEQ ID NO: 1095279 - RNA, 19 nt, Homo sapiens
  misc_RNA (1)...(19): siRNA sense strand
uaucugcuguacaguauug

SEQ ID NO: 1095280 - RNA, 19 nt, Homo sapiens
  misc_RNA (1)...(19): siRNA sense strand
gaacgucaacugguauaau

SEQ ID NO: 1095281 - RNA, 19 nt, Homo sapiens
  misc_RNA (1)...(19): siRNA sense strand
caaggaagaggguaaagau

SEQ ID NO: 1095282 - RNA, 19 nt, Homo sapiens
  misc_RNA (1)...(19): siRNA sense strand
caauagggaagggaaauuu

SEQ ID NO: 1095283 - RNA, 19 nt, Homo sapiens
  misc_RNA (1)...(19): siRNA sense strand
uguggaaagugaacagaaa

SEQ ID NO: 1095284 - RNA, 19 nt, Homo sapiens
  misc_RNA (1)...(19): siRNA sense strand
cuaacaguguggaaaguga

SEQ ID NO: 1095285 - RNA, 19 nt, Homo sapiens
  misc_RNA (1)...(19): siRNA sense strand
cgaauaaugaagauacuga

SEQ ID NO: 1095286 - RNA, 19 nt, Homo sapiens
  misc_RNA (1)...(19): siRNA sense strand
gaaaaguguuagaugcaaa

SEQ ID NO: 1095287 - RNA, 19 nt, Homo sapiens
  misc_RNA (1)...(19): siRNA sense strand
guaugaagaccacuaguuc

SEQ ID NO: 1095288 - RNA, 19 nt, Homo sapiens
  misc_RNA (1)...(19): siRNA sense strand
ccaugaaacgggugcauuu

SEQ ID NO: 1095289 - RNA, 19 nt, Homo sapiens
  misc_RNA (1)...(19): siRNA sense strand
uuacuuaguugcccaugga

SEQ ID NO: 1095290 - RNA, 19 nt, Homo sapiens
  misc_RNA (1)...(19): siRNA sense strand
ugaacagccucacauugga

SEQ ID NO: 1095291 - RNA, 19 nt, Homo sapiens
  misc_RNA (1)...(19): siRNA sense strand
ucuauugccuuuaagaaca

SEQ ID NO: 1095292 - RNA, 19 nt, Homo sapiens
  misc_RNA (1)...(19): siRNA sense strand
aaagagaggcagcuuggaa

SEQ ID NO: 1095293 - RNA, 19 nt, Homo sapiens
  misc_RNA (1)...(19): siRNA sense strand
ugggacaucuauugccuuu

SEQ ID NO: 1095294 - RNA, 19 nt, Homo sapiens
  misc_RNA (1)...(19): siRNA sense strand
ucacacugccaaccauuaa

SEQ ID NO: 1095295 - RNA, 19 nt, Homo sapiens
  misc_RNA (1)...(19): siRNA sense strand
aguggaaacuugugucaga

SEQ ID NO: 1095296 - RNA, 19 nt, Homo sapiens
  misc_RNA (1)...(19): siRNA sense strand
guacgaauaaugaagauac

SEQ ID NO: 1095297 - RNA, 19 nt, Homo sapiens
  misc_RNA (1)...(19): siRNA sense strand
ggauggauauacugaacca

SEQ ID NO: 1095298 - RNA, 19 nt, Homo sapiens
  misc_RNA (1)...(19): siRNA sense strand
ugcacgagaugaaauaaau

SEQ ID NO: 1095299 - RNA, 19 nt, Homo sapiens
  misc_RNA (1)...(19): siRNA sense strand
uguagaaacuccauuacgu

SEQ ID NO: 1095300 - RNA, 19 nt, Homo sapiens
  misc_RNA (1)...(19): siRNA sense strand
gagaaguacgaauaaugaa

SEQ ID NO: 1095301 - RNA, 19 nt, Homo sapiens
  misc_RNA (1)...(19): siRNA sense strand
gagacaaggaagaggguaa

SEQ ID NO: 1095302 - RNA, 19 nt, Homo sapiens
  misc_RNA (1)...(19): siRNA sense strand
aaagacggcucugaagcuu

SEQ ID NO: 1095303 - RNA, 19 nt, Homo sapiens
  misc_RNA (1)...(19): siRNA sense strand
gagguagcauggcaagaag

SEQ ID NO: 1095304 - RNA, 19 nt, Homo sapiens
  misc_RNA (1)...(19): siRNA sense strand
gaucgauggaugaauguug

SEQ ID NO: 1095305 - RNA, 19 nt, Homo sapiens
  misc_RNA (1)...(19): siRNA sense strand
agacaaaacucagcuaaau

SEQ ID NO: 1095306 - RNA, 19 nt, Homo sapiens
  misc_RNA (1)...(19): siRNA sense strand
ggacccuaaugacaugaug

SEQ ID NO: 1095307 - RNA, 19 nt, Homo sapiens
  misc_RNA (1)...(19): siRNA sense strand
ggauuucaaugacacaaaa

SEQ ID NO: 1095308 - RNA, 19 nt, Homo sapiens
  misc_RNA (1)...(19): siRNA sense strand
ucaugaagaggaagaacua

SEQ ID NO: 1095309 - RNA, 19 nt, Homo sapiens
  misc_RNA (1)...(19): siRNA sense strand
cagcuuggaacaaauaaug

SEQ ID NO: 1095310 - RNA, 19 nt, Homo sapiens
  misc_RNA (1)...(19): siRNA sense strand
cgucauucucuauacauua

SEQ ID NO: 1095311 - RNA, 19 nt, Homo sapiens
  misc_RNA (1)...(19): siRNA sense strand
gucauucucuauacauuag

SEQ ID NO: 1095312 - RNA, 19 nt, Homo sapiens
  misc_RNA (1)...(19): siRNA sense strand
uagaaaaccaccugaauuu

SEQ ID NO: 1095313 - RNA, 19 nt, Homo sapiens
  misc_RNA (1)...(19): siRNA sense strand
gauccggauuucaaugaca

SEQ ID NO: 1095314 - RNA, 19 nt, Homo sapiens
  misc_RNA (1)...(19): siRNA sense strand
ugccacgacugucacuuaa

SEQ ID NO: 1095315 - RNA, 19 nt, Homo sapiens
  misc_RNA (1)...(19): siRNA sense strand
agccucacauuggaaauua

SEQ ID NO: 1095316 - RNA, 19 nt, Homo sapiens
  misc_RNA (1)...(19): siRNA sense strand
ccgaagcacuuuccauggu

SEQ ID NO: 1095317 - RNA, 19 nt, Homo sapiens
  misc_RNA (1)...(19): siRNA sense strand
acauaugucugugaaagga

SEQ ID NO: 1095318 - RNA, 19 nt, Homo sapiens
  misc_RNA (1)...(19): siRNA sense strand
aguagugacuuaaacaaca

SEQ ID NO: 1095319 - RNA, 19 nt, Homo sapiens
  misc_RNA (1)...(19): siRNA sense strand
cgagaugaaauaaaugaug

SEQ ID NO: 1095320 - RNA, 19 nt, Homo sapiens
  misc_RNA (1)...(19): siRNA sense strand
gcacgagaugaaauaaaug

SEQ ID NO: 1095321 - RNA, 19 nt, Homo sapiens
  misc_RNA (1)...(19): siRNA sense strand
guucaauggacccuaauga

SEQ ID NO: 1095322 - RNA, 19 nt, Homo sapiens
  misc_RNA (1)...(19): siRNA sense strand
ucaauggacccuaaugaca

SEQ ID NO: 1095323 - RNA, 19 nt, Homo sapiens
  misc_RNA (1)...(19): siRNA sense strand
gaagaacuuugaucaggaa

SEQ ID NO: 1095324 - RNA, 19 nt, Homo sapiens
  misc_RNA (1)...(19): siRNA sense strand
gaacuuugaucaggaagga

SEQ ID NO: 1095325 - RNA, 19 nt, Homo sapiens
  misc_RNA (1)...(19): siRNA sense strand
gcuuagagguguacgagaa

SEQ ID NO: 1095326 - RNA, 19 nt, Homo sapiens
  misc_RNA (1)...(19): siRNA sense strand
guggaacacugcaaauuau

SEQ ID NO: 1095327 - RNA, 19 nt, Homo sapiens
  misc_RNA (1)...(19): siRNA sense strand
gcacggauaccaaaucugu

SEQ ID NO: 1095328 - RNA, 19 nt, Homo sapiens
  misc_RNA (1)...(19): siRNA sense strand
ggauuaugauguugaugaa

SEQ ID NO: 1095329 - RNA, 19 nt, Homo sapiens
  misc_RNA (1)...(19): siRNA sense strand
gaagaggacaugaugaauc

SEQ ID NO: 1095330 - RNA, 19 nt, Homo sapiens
  misc_RNA (1)...(19): siRNA sense strand
ccaaauaccagaauuacau

SEQ ID NO: 1095331 - RNA, 19 nt, Homo sapiens
  misc_RNA (1)...(19): siRNA sense strand
ugccauggcugccguaaga

SEQ ID NO: 1095332 - RNA, 19 nt, Homo sapiens
  misc_RNA (1)...(19): siRNA sense strand
uguggaacacugcaaauua

SEQ ID NO: 1095333 - RNA, 19 nt, Homo sapiens
  misc_RNA (1)...(19): siRNA sense strand
guuccaaauaccagaauua

SEQ ID NO: 1095334 - RNA, 19 nt, Homo sapiens
  misc_RNA (1)...(19): siRNA sense strand
ggaacacugcaaauuauuc

SEQ ID NO: 1095335 - RNA, 19 nt, Homo sapiens
  misc_RNA (1)...(19): siRNA sense strand
ggucccacguggcuacuug

SEQ ID NO: 1095336 - RNA, 19 nt, Homo sapiens
  misc_RNA (1)...(19): siRNA sense strand
uccaaaccguuacaccuuu

SEQ ID NO: 1095337 - RNA, 19 nt, Homo sapiens
  misc_RNA (1)...(19): siRNA sense strand
cacugcaaauuauuccaua

SEQ ID NO: 1095338 - RNA, 19 nt, Homo sapiens
  misc_RNA (1)...(19): siRNA sense strand
gugugaaggccaccauuaa

SEQ ID NO: 1095339 - RNA, 19 nt, Homo sapiens
  misc_RNA (1)...(19): siRNA sense strand
ccaaaccguuacaccuuuc

SEQ ID NO: 1095340 - RNA, 19 nt, Homo sapiens
  misc_RNA (1)...(19): siRNA sense strand
cauuaaggaugcaucucuu

SEQ ID NO: 1095341 - RNA, 19 nt, Homo sapiens
  misc_RNA (1)...(19): siRNA sense strand
aggaaggacuuguggaaca

SEQ ID NO: 1095342 - RNA, 19 nt, Homo sapiens
  misc_RNA (1)...(19): siRNA sense strand
gaugaagaggacaugauga

SEQ ID NO: 1095343 - RNA, 19 nt, Homo sapiens
  misc_RNA (1)...(19): siRNA sense strand
gaaggccaccauuaaggau

SEQ ID NO: 1095344 - RNA, 19 nt, Homo sapiens
  misc_RNA (1)...(19): siRNA sense strand
uagcacggauaccaaaucu

SEQ ID NO: 1095345 - RNA, 19 nt, Homo sapiens
  misc_RNA (1)...(19): siRNA sense strand
ucaggaaggacuuguggaa

SEQ ID NO: 1095346 - RNA, 19 nt, Homo sapiens
  misc_RNA (1)...(19): siRNA sense strand
guccugagaagaacuuuga

SEQ ID NO: 1095347 - RNA, 19 nt, Homo sapiens
  misc_RNA (1)...(19): siRNA sense strand
auaccagaauuacaucaug

SEQ ID NO: 1095348 - RNA, 19 nt, Homo sapiens
  misc_RNA (1)...(19): siRNA sense strand
ccauagcacggauaccaaa

SEQ ID NO: 1095349 - RNA, 19 nt, Homo sapiens
  misc_RNA (1)...(19): siRNA sense strand
ggaaggacuuguggaacac

SEQ ID NO: 1095350 - RNA, 19 nt, Homo sapiens
  misc_RNA (1)...(19): siRNA sense strand
ugaaggccaccauuaagga

SEQ ID NO: 1095351 - RNA, 19 nt, Homo sapiens
  misc_RNA (1)...(19): siRNA sense strand
uggauuaugauguugauga

SEQ ID NO: 1095352 - RNA, 19 nt, Homo sapiens
  misc_RNA (1)...(19): siRNA sense strand
caaauaccagaauuacauc

SEQ ID NO: 1095353 - RNA, 19 nt, Homo sapiens
  misc_RNA (1)...(19): siRNA sense strand
ccgcagcgccaacuucaga

SEQ ID NO: 1095354 - RNA, 19 nt, Homo sapiens
  misc_RNA (1)...(19): siRNA sense strand
gcccugcggacacgucuuu

SEQ ID NO: 1095355 - RNA, 19 nt, Homo sapiens
  misc_RNA (1)...(19): siRNA sense strand
gaacacugcaaauuauucc

SEQ ID NO: 1095356 - RNA, 19 nt, Homo sapiens
  misc_RNA (1)...(19): siRNA sense strand
ugaugaagaggacaugaug

SEQ ID NO: 1095357 - RNA, 19 nt, Homo sapiens
  misc_RNA (1)...(19): siRNA sense strand
caucauggaaggugugaag

SEQ ID NO: 1095358 - RNA, 19 nt, Homo sapiens
  misc_RNA (1)...(19): siRNA sense strand
cguuacaccuuuccuuguc

SEQ ID NO: 1095359 - RNA, 19 nt, Homo sapiens
  misc_RNA (1)...(19): siRNA sense strand
guggcuacuuguuccaaau

SEQ ID NO: 1095360 - RNA, 19 nt, Homo sapiens
  misc_RNA (1)...(19): siRNA sense strand
acacuuuuguggauuauga

SEQ ID NO: 1095361 - RNA, 19 nt, Homo sapiens
  misc_RNA (1)...(19): siRNA sense strand
gaaugucugaagccgaaga

SEQ ID NO: 1095362 - RNA, 19 nt, Homo sapiens
  misc_RNA (1)...(19): siRNA sense strand
uggcuacuuguuccaaaua

SEQ ID NO: 1095363 - RNA, 19 nt, Homo sapiens
  misc_RNA (1)...(19): siRNA sense strand
cauggcugccguaagaauu

SEQ ID NO: 1095364 - RNA, 19 nt, Homo sapiens
  misc_RNA (1)...(19): siRNA sense strand
cugagaagaacuuugauca

SEQ ID NO: 1095365 - RNA, 19 nt, Homo sapiens
  misc_RNA (1)...(19): siRNA sense strand
ccagaauuacaucauggaa

SEQ ID NO: 1095366 - RNA, 19 nt, Homo sapiens
  misc_RNA (1)...(19): siRNA sense strand
uguccuuacuguccugaga

SEQ ID NO: 1095367 - RNA, 19 nt, Homo sapiens
  misc_RNA (1)...(19): siRNA sense strand
cguggcuacuuguuccaaa

SEQ ID NO: 1095368 - RNA, 19 nt, Homo sapiens
  misc_RNA (1)...(19): siRNA sense strand
gcagcgccaacuucagaga

SEQ ID NO: 1095369 - RNA, 19 nt, Homo sapiens
  misc_RNA (1)...(19): siRNA sense strand
ucugugguuuguccgauau

SEQ ID NO: 1095370 - RNA, 19 nt, Homo sapiens
  misc_RNA (1)...(19): siRNA sense strand
acaccuuuccuuguccuua

SEQ ID NO: 1095371 - RNA, 19 nt, Homo sapiens
  misc_RNA (1)...(19): siRNA sense strand
ccauuaaggaugcaucucu

SEQ ID NO: 1095372 - RNA, 19 nt, Homo sapiens
  misc_RNA (1)...(19): siRNA sense strand
gugaaggccaccauuaagg

SEQ ID NO: 1095373 - RNA, 19 nt, Homo sapiens
  misc_RNA (1)...(19): siRNA sense strand
cuaccgagcuugcaaguuu

SEQ ID NO: 1095374 - RNA, 19 nt, Homo sapiens
  misc_RNA (1)...(19): siRNA sense strand
gaauuacccaucaucauua

SEQ ID NO: 1095375 - RNA, 19 nt, Homo sapiens
  misc_RNA (1)...(19): siRNA sense strand
gggaagaucauucauaauu

SEQ ID NO: 1095376 - RNA, 19 nt, Homo sapiens
  misc_RNA (1)...(19): siRNA sense strand
ggaauuacccaucaucauu

SEQ ID NO: 1095377 - RNA, 19 nt, Homo sapiens
  misc_RNA (1)...(19): siRNA sense strand
gcagaguggugucuagauu

SEQ ID NO: 1095378 - RNA, 19 nt, Homo sapiens
  misc_RNA (1)...(19): siRNA sense strand
gguagucaaugcuauuauu

SEQ ID NO: 1095379 - RNA, 19 nt, Homo sapiens
  misc_RNA (1)...(19): siRNA sense strand
gaaacccaguauugauuau

SEQ ID NO: 1095380 - RNA, 19 nt, Homo sapiens
  misc_RNA (1)...(19): siRNA sense strand
acgggaagaucauucauaa

SEQ ID NO: 1095381 - RNA, 19 nt, Homo sapiens
  misc_RNA (1)...(19): siRNA sense strand
ccagagacaucacgguuuc

SEQ ID NO: 1095382 - RNA, 19 nt, Homo sapiens
  misc_RNA (1)...(19): siRNA sense strand
gaaauggugaaacccagua

SEQ ID NO: 1095383 - RNA, 19 nt, Homo sapiens
  misc_RNA (1)...(19): siRNA sense strand
cauuugaacuugacucuuc

SEQ ID NO: 1095384 - RNA, 19 nt, Homo sapiens
  misc_RNA (1)...(19): siRNA sense strand
cugaugagcugcuuuaugg

SEQ ID NO: 1095385 - RNA, 19 nt, Homo sapiens
  misc_RNA (1)...(19): siRNA sense strand
gaggagaaguacuugaaag

SEQ ID NO: 1095386 - RNA, 19 nt, Homo sapiens
  misc_RNA (1)...(19): siRNA sense strand
ugaaacccaguauugauua

SEQ ID NO: 1095387 - RNA, 19 nt, Homo sapiens
  misc_RNA (1)...(19): siRNA sense strand
uuaaagagguagucaaugc

SEQ ID NO: 1095388 - RNA, 19 nt, Homo sapiens
  misc_RNA (1)...(19): siRNA sense strand
cguacaaggucuuuaagga

SEQ ID NO: 1095389 - RNA, 19 nt, Homo sapiens
  misc_RNA (1)...(19): siRNA sense strand
uaagacggauccagaccaa

SEQ ID NO: 1095390 - RNA, 19 nt, Homo sapiens
  misc_RNA (1)...(19): siRNA sense strand
ucacgcaggauaagaagua

SEQ ID NO: 1095391 - RNA, 19 nt, Homo sapiens
  misc_RNA (1)...(19): siRNA sense strand
gaaagaggccauggagugu

SEQ ID NO: 1095392 - RNA, 19 nt, Homo sapiens
  misc_RNA (1)...(19): siRNA sense strand
caugacugcucugcuuaua

SEQ ID NO: 1095393 - RNA, 19 nt, Homo sapiens
  misc_RNA (1)...(19): siRNA sense strand
uggcuggaauuuacuauau

SEQ ID NO: 1095394 - RNA, 19 nt, Homo sapiens
  misc_RNA (1)...(19): siRNA sense strand
aaagaacacuucggaaucu

SEQ ID NO: 1095395 - RNA, 19 nt, Homo sapiens
  misc_RNA (1)...(19): siRNA sense strand
gcuggaauuuacuauaugu

SEQ ID NO: 1095396 - RNA, 19 nt, Homo sapiens
  misc_RNA (1)...(19): siRNA sense strand
uggcauggcuggaauuuac

SEQ ID NO: 1095397 - RNA, 19 nt, Homo sapiens
  misc_RNA (1)...(19): siRNA sense strand
gagguagucaaugcuauua

SEQ ID NO: 1095398 - RNA, 19 nt, Homo sapiens
  misc_RNA (1)...(19): siRNA sense strand
ugagucagcuauuaaagag

SEQ ID NO: 1095399 - RNA, 19 nt, Homo sapiens
  misc_RNA (1)...(19): siRNA sense strand
gaacacuucggaaucugaa

SEQ ID NO: 1095400 - RNA, 19 nt, Homo sapiens
  misc_RNA (1)...(19): siRNA sense strand
aggcauggcuggcgcuauu

SEQ ID NO: 1095401 - RNA, 19 nt, Homo sapiens
  misc_RNA (1)...(19): siRNA sense strand
cagaguggugucuagauua

SEQ ID NO: 1095402 - RNA, 19 nt, Homo sapiens
  misc_RNA (1)...(19): siRNA sense strand
ggaggagaaguacuugaaa

SEQ ID NO: 1095403 - RNA, 19 nt, Homo sapiens
  misc_RNA (1)...(19): siRNA sense strand
gugaaacccaguauugauu

SEQ ID NO: 1095404 - RNA, 19 nt, Homo sapiens
  misc_RNA (1)...(19): siRNA sense strand
ggcuggcgcuauucacuuu

SEQ ID NO: 1095405 - RNA, 19 nt, Homo sapiens
  misc_RNA (1)...(19): siRNA sense strand
gacgggaagaucauucaua

SEQ ID NO: 1095406 - RNA, 19 nt, Homo sapiens
  misc_RNA (1)...(19): siRNA sense strand
gcggaagggcuacgggaua

SEQ ID NO: 1095407 - RNA, 19 nt, Homo sapiens
  misc_RNA (1)...(19): siRNA sense strand
ugacagaaauggugaaacc

SEQ ID NO: 1095408 - RNA, 19 nt, Homo sapiens
  misc_RNA (1)...(19): siRNA sense strand
caucacgguuuccagcauu

SEQ ID NO: 1095409 - RNA, 19 nt, Homo sapiens
  misc_RNA (1)...(19): siRNA sense strand
ugacugcucugcuuauacu

SEQ ID NO: 1095410 - RNA, 19 nt, Homo sapiens
  misc_RNA (1)...(19): siRNA sense strand
gugugugagucagcuauua

SEQ ID NO: 1095411 - RNA, 19 nt, Homo sapiens
  misc_RNA (1)...(19): siRNA sense strand
ggacaggcauagcccuuuu

SEQ ID NO: 1095412 - RNA, 19 nt, Homo sapiens
  misc_RNA (1)...(19): siRNA sense strand
guaccugaacacagagaua

SEQ ID NO: 1095413 - RNA, 19 nt, Homo sapiens
  misc_RNA (1)...(19): siRNA sense strand
gcgagaccaugucaaagag

SEQ ID NO: 1095414 - RNA, 19 nt, Homo sapiens
  misc_RNA (1)...(19): siRNA sense strand
ggcgagaccaugucaaaga

SEQ ID NO: 1095415 - RNA, 19 nt, Homo sapiens
  misc_RNA (1)...(19): siRNA sense strand
cggaagggcuacgggauau

SEQ ID NO: 1095416 - RNA, 19 nt, Homo sapiens
  misc_RNA (1)...(19): siRNA sense strand
uaaugcagccggcagcaaa

SEQ ID NO: 1095417 - RNA, 19 nt, Homo sapiens
  misc_RNA (1)...(19): siRNA sense strand
gaguguagcgaugugauuu

SEQ ID NO: 1095418 - RNA, 19 nt, Homo sapiens
  misc_RNA (1)...(19): siRNA sense strand
ggaguguagcgaugugauu

SEQ ID NO: 1095419 - RNA, 19 nt, Homo sapiens
  misc_RNA (1)...(19): siRNA sense strand
uguuggagcugugauuuau

SEQ ID NO: 1095420 - RNA, 19 nt, Homo sapiens
  misc_RNA (1)...(19): siRNA sense strand
ggugaaacccaguauugau

SEQ ID NO: 1095421 - RNA, 19 nt, Homo sapiens
  misc_RNA (1)...(19): siRNA sense strand
aagaaaccuugacagaaau

SEQ ID NO: 1095422 - RNA, 19 nt, Homo sapiens
  misc_RNA (1)...(19): siRNA sense strand
gugagucagcuauuaaaga

SEQ ID NO: 1095423 - RNA, 19 nt, Homo sapiens
  misc_RNA (1)...(19): siRNA sense strand
ggacgggcagguuaucugu

SEQ ID NO: 1095424 - RNA, 19 nt, Homo sapiens
  misc_RNA (1)...(19): siRNA sense strand
cagcaaaaguggaccaaga

SEQ ID NO: 1095425 - RNA, 19 nt, Homo sapiens
  misc_RNA (1)...(19): siRNA sense strand
caucaggacgggaagauca

SEQ ID NO: 1095426 - RNA, 19 nt, Homo sapiens
  misc_RNA (1)...(19): siRNA sense strand
uuaaggaggagaaguacuu

SEQ ID NO: 1095427 - RNA, 19 nt, Homo sapiens
  misc_RNA (1)...(19): siRNA sense strand
aaagagguagucaaugcua

SEQ ID NO: 1095428 - RNA, 19 nt, Homo sapiens
  misc_RNA (1)...(19): siRNA sense strand
uaucacaaacucagaagug

SEQ ID NO: 1095429 - RNA, 19 nt, Homo sapiens
  misc_RNA (1)...(19): siRNA sense strand
gaucgguugucugccaaga

SEQ ID NO: 1095430 - RNA, 19 nt, Homo sapiens
  misc_RNA (1)...(19): siRNA sense strand
cuauucacuuucucucuga

SEQ ID NO: 1095431 - RNA, 19 nt, Homo sapiens
  misc_RNA (1)...(19): siRNA sense strand
ggcuggaauuuacuauaug

SEQ ID NO: 1095432 - RNA, 19 nt, Homo sapiens
  misc_RNA (1)...(19): siRNA sense strand
ggagaaguacuugaaagag

SEQ ID NO: 1095433 - RNA, 19 nt, Homo sapiens
  misc_RNA (1)...(19): siRNA sense strand
ucgguugucugccaagaau

SEQ ID NO: 1095434 - RNA, 19 nt, Homo sapiens
  misc_RNA (1)...(19): siRNA sense strand
gacccuauucgcucuuuga

SEQ ID NO: 1095435 - RNA, 19 nt, Homo sapiens
  misc_RNA (1)...(19): siRNA sense strand
aaagaucuucugcagcaaa

SEQ ID NO: 1095436 - RNA, 19 nt, Homo sapiens
  misc_RNA (1)...(19): siRNA sense strand
acgggcagguuaucuguau

SEQ ID NO: 1095437 - RNA, 19 nt, Homo sapiens
  misc_RNA (1)...(19): siRNA sense strand
gaucuucugcagcaaaugg

SEQ ID NO: 1095438 - RNA, 19 nt, Homo sapiens
  misc_RNA (1)...(19): siRNA sense strand
gcauggcuggaauuuacua

SEQ ID NO: 1095439 - RNA, 19 nt, Homo sapiens
  misc_RNA (1)...(19): siRNA sense strand
uugaaucggguaagacuuu

SEQ ID NO: 1095440 - RNA, 19 nt, Homo sapiens
  misc_RNA (1)...(19): siRNA sense strand
ugaaucggguaagacuuug

SEQ ID NO: 1095441 - RNA, 19 nt, Homo sapiens
  misc_RNA (1)...(19): siRNA sense strand
agaguggugucuagauuac

SEQ ID NO: 1095442 - RNA, 19 nt, Homo sapiens
  misc_RNA (1)...(19): siRNA sense strand
ggauaagaaguaccucuac

SEQ ID NO: 1095443 - RNA, 19 nt, Homo sapiens
  misc_RNA (1)...(19): siRNA sense strand
aagaggccauggaguguag

SEQ ID NO: 1095444 - RNA, 19 nt, Homo sapiens
  misc_RNA (1)...(19): siRNA sense strand
ucuuuaaggaggagaagua

SEQ ID NO: 1095445 - RNA, 19 nt, Homo sapiens
  misc_RNA (1)...(19): siRNA sense strand
gcuguuggagcugugauuu

SEQ ID NO: 1095446 - RNA, 19 nt, Homo sapiens
  misc_RNA (1)...(19): siRNA sense strand
gggaauuacccaucaucau

SEQ ID NO: 1095447 - RNA, 19 nt, Homo sapiens
  misc_RNA (1)...(19): siRNA sense strand
aacccaguauugauuaugu

SEQ ID NO: 1095448 - RNA, 19 nt, Homo sapiens
  misc_RNA (1)...(19): siRNA sense strand
cagacccuauucgcucuuu

SEQ ID NO: 1095449 - RNA, 19 nt, Homo sapiens
  misc_RNA (1)...(19): siRNA sense strand
aagagguagucaaugcuau

SEQ ID NO: 1095450 - RNA, 19 nt, Homo sapiens
  misc_RNA (1)...(19): siRNA sense strand
aaagaggccauggagugua

SEQ ID NO: 1095451 - RNA, 19 nt, Homo sapiens
  misc_RNA (1)...(19): siRNA sense strand
aagaucuucugcagcaaau

SEQ ID NO: 1095452 - RNA, 19 nt, Homo sapiens
  misc_RNA (1)...(19): siRNA sense strand
ugugugagucagcuauuaa

SEQ ID NO: 1095453 - RNA, 19 nt, Homo sapiens
  misc_RNA (1)...(19): siRNA sense strand
auuccuuccugucccuuua

SEQ ID NO: 1095454 - RNA, 19 nt, Homo sapiens
  misc_RNA (1)...(19): siRNA sense strand
aggcguacaaggucuuuaa

SEQ ID NO: 1095455 - RNA, 19 nt, Homo sapiens
  misc_RNA (1)...(19): siRNA sense strand
ugucaagggaagaaagaaa

SEQ ID NO: 1095456 - RNA, 19 nt, Homo sapiens
  misc_RNA (1)...(19): siRNA sense strand
uuuauggacgggcagguua

SEQ ID NO: 1095457 - RNA, 19 nt, Homo sapiens
  misc_RNA (1)...(19): siRNA sense strand
ggauccagaccaaaauuaa

SEQ ID NO: 1095458 - RNA, 19 nt, Homo sapiens
  misc_RNA (1)...(19): siRNA sense strand
gaagggcuacgggauaugc

SEQ ID NO: 1095459 - RNA, 19 nt, Homo sapiens
  misc_RNA (1)...(19): siRNA sense strand
uaaagaucuucugcagcaa

SEQ ID NO: 1095460 - RNA, 19 nt, Homo sapiens
  misc_RNA (1)...(19): siRNA sense strand
gcaaaaguggaccaagaaa

SEQ ID NO: 1095461 - RNA, 19 nt, Homo sapiens
  misc_RNA (1)...(19): siRNA sense strand
cagggucaccuuccucugu

SEQ ID NO: 1095462 - RNA, 19 nt, Homo sapiens
  misc_RNA (1)...(19): siRNA sense strand
gcugcccgcuguuguacca

SEQ ID NO: 1095463 - RNA, 19 nt, Homo sapiens
  misc_RNA (1)...(19): siRNA sense strand
agagguagucaaugcuauu

SEQ ID NO: 1095464 - RNA, 19 nt, Homo sapiens
  misc_RNA (1)...(19): siRNA sense strand
gguugucugccaagaauca

SEQ ID NO: 1095465 - RNA, 19 nt, Homo sapiens
  misc_RNA (1)...(19): siRNA sense strand
guccaggcaccguguguga

SEQ ID NO: 1095466 - RNA, 19 nt, Homo sapiens
  misc_RNA (1)...(19): siRNA sense strand
uaccgagcuugcaaguuug

SEQ ID NO: 1095467 - RNA, 19 nt, Homo sapiens
  misc_RNA (1)...(19): siRNA sense strand
uaccgucucacgcaggaua

SEQ ID NO: 1095468 - RNA, 19 nt, Homo sapiens
  misc_RNA (1)...(19): siRNA sense strand
aggagaaguacuugaaaga

SEQ ID NO: 1095469 - RNA, 19 nt, Homo sapiens
  misc_RNA (1)...(19): siRNA sense strand
gcaggcguacaaggucuuu

SEQ ID NO: 1095470 - RNA, 19 nt, Homo sapiens
  misc_RNA (1)...(19): siRNA sense strand
cggguaagacuuugucaag

SEQ ID NO: 1095471 - RNA, 19 nt, Homo sapiens
  misc_RNA (1)...(19): siRNA sense strand
gaaauacccucccaacaaa

SEQ ID NO: 1095472 - RNA, 19 nt, Homo sapiens
  misc_RNA (1)...(19): siRNA sense strand
gaagaagacuguuauugaa

SEQ ID NO: 1095473 - RNA, 19 nt, Homo sapiens
  misc_RNA (1)...(19): siRNA sense strand
gggaugaccugaagaagaa

SEQ ID NO: 1095474 - RNA, 19 nt, Homo sapiens
  misc_RNA (1)...(19): siRNA sense strand
gagaaagggacgcuuauaa

SEQ ID NO: 1095475 - RNA, 19 nt, Homo sapiens
  misc_RNA (1)...(19): siRNA sense strand
gaaagggacgcuuauaaga

SEQ ID NO: 1095476 - RNA, 19 nt, Homo sapiens
  misc_RNA (1)...(19): siRNA sense strand
cgaaauacccucccaacaa

SEQ ID NO: 1095477 - RNA, 19 nt, Homo sapiens
  misc_RNA (1)...(19): siRNA sense strand
ugauuaagguguucacauu

SEQ ID NO: 1095478 - RNA, 19 nt, Homo sapiens
  misc_RNA (1)...(19): siRNA sense strand
cugcaacuauuuagcuuua

SEQ ID NO: 1095479 - RNA, 19 nt, Homo sapiens
  misc_RNA (1)...(19): siRNA sense strand
agaagaagacuguuauuga

SEQ ID NO: 1095480 - RNA, 19 nt, Homo sapiens
  misc_RNA (1)...(19): siRNA sense strand
gaucugggaugaccugaag

SEQ ID NO: 1095481 - RNA, 19 nt, Homo sapiens
  misc_RNA (1)...(19): siRNA sense strand
gaagaagaagacuguuauu

SEQ ID NO: 1095482 - RNA, 19 nt, Homo sapiens
  misc_RNA (1)...(19): siRNA sense strand
cuauuuagcuuuaguuggu

SEQ ID NO: 1095483 - RNA, 19 nt, Homo sapiens
  misc_RNA (1)...(19): siRNA sense strand
gacggcagcuacuacaaau

SEQ ID NO: 1095484 - RNA, 19 nt, Homo sapiens
  misc_RNA (1)...(19): siRNA sense strand
uuauuucgcugcaacuauu

SEQ ID NO: 1095485 - RNA, 19 nt, Homo sapiens
  misc_RNA (1)...(19): siRNA sense strand
aaagggacgcuuauaagaa

SEQ ID NO: 1095486 - RNA, 19 nt, Homo sapiens
  misc_RNA (1)...(19): siRNA sense strand
gccaauauuuacugcauca

SEQ ID NO: 1095487 - RNA, 19 nt, Homo sapiens
  misc_RNA (1)...(19): siRNA sense strand
aagggacgcuuauaagaau

SEQ ID NO: 1095488 - RNA, 19 nt, Homo sapiens
  misc_RNA (1)...(19): siRNA sense strand
ccaguuuccuuccaaaaua

SEQ ID NO: 1095489 - RNA, 19 nt, Homo sapiens
  misc_RNA (1)...(19): siRNA sense strand
ugaagaagaagacuguuau

SEQ ID NO: 1095490 - RNA, 19 nt, Homo sapiens
  misc_RNA (1)...(19): siRNA sense strand
gaucucaagcagccaauau

SEQ ID NO: 1095491 - RNA, 19 nt, Homo sapiens
  misc_RNA (1)...(19): siRNA sense strand
caaacgccgucauugcaau

SEQ ID NO: 1095492 - RNA, 19 nt, Homo sapiens
  misc_RNA (1)...(19): siRNA sense strand
gcgaagaggaucucaagca

SEQ ID NO: 1095493 - RNA, 19 nt, Homo sapiens
  misc_RNA (1)...(19): siRNA sense strand
cgagaaagggacgcuuaua

SEQ ID NO: 1095494 - RNA, 19 nt, Homo sapiens
  misc_RNA (1)...(19): siRNA sense strand
ggacgcuuauaagaauauu

SEQ ID NO: 1095495 - RNA, 19 nt, Homo sapiens
  misc_RNA (1)...(19): siRNA sense strand
ccaacaaaguaaugaucug

SEQ ID NO: 1095496 - RNA, 19 nt, Homo sapiens
  misc_RNA (1)...(19): siRNA sense strand
cugaagaagaagacuguua

SEQ ID NO: 1095497 - RNA, 19 nt, Homo sapiens
  misc_RNA (1)...(19): siRNA sense strand
ucucaagcagccaauauuu

SEQ ID NO: 1095498 - RNA, 19 nt, Homo sapiens
  misc_RNA (1)...(19): siRNA sense strand
gucaaacugcggcgagaua

SEQ ID NO: 1095499 - RNA, 19 nt, Homo sapiens
  misc_RNA (1)...(19): siRNA sense strand
cagccaauauuuacugcau

SEQ ID NO: 1095500 - RNA, 19 nt, Homo sapiens
  misc_RNA (1)...(19): siRNA sense strand
ucaagcagccaauauuuac

SEQ ID NO: 1095501 - RNA, 19 nt, Homo sapiens
  misc_RNA (1)...(19): siRNA sense strand
cucaagcagccaauauuua

SEQ ID NO: 1095502 - RNA, 19 nt, Homo sapiens
  misc_RNA (1)...(19): siRNA sense strand
aaacugcggcgagauagaa

SEQ ID NO: 1095503 - RNA, 19 nt, Homo sapiens
  misc_RNA (1)...(19): siRNA sense strand
gcaacugcauccgagaaag

SEQ ID NO: 1095504 - RNA, 19 nt, Homo sapiens
  misc_RNA (1)...(19): siRNA sense strand
ggaacaagaauugcaacug

SEQ ID NO: 1095505 - RNA, 19 nt, Homo sapiens
  misc_RNA (1)...(19): siRNA sense strand
gauagaauuguggugguuu

SEQ ID NO: 1095506 - RNA, 19 nt, Homo sapiens
  misc_RNA (1)...(19): siRNA sense strand
gcggcgagauagaauugug

SEQ ID NO: 1095507 - RNA, 19 nt, Homo sapiens
  misc_RNA (1)...(19): siRNA sense strand
agaaagggacgcuuauaag

SEQ ID NO: 1095508 - RNA, 19 nt, Homo sapiens
  misc_RNA (1)...(19): siRNA sense strand
cggcagcuacuacaaauuc

SEQ ID NO: 1095509 - RNA, 19 nt, Homo sapiens
  misc_RNA (1)...(19): siRNA sense strand
caaaauacuucaguuccaa

SEQ ID NO: 1095510 - RNA, 19 nt, Homo sapiens
  misc_RNA (1)...(19): siRNA sense strand
gcagacggcagcuacuaca

SEQ ID NO: 1095511 - RNA, 19 nt, Homo sapiens
  misc_RNA (1)...(19): siRNA sense strand
gagccaaacgccgucauug

SEQ ID NO: 1095512 - RNA, 19 nt, Homo sapiens
  misc_RNA (1)...(19): siRNA sense strand
gugcauuugugccuuugga

SEQ ID NO: 1095513 - RNA, 19 nt, Homo sapiens
  misc_RNA (1)...(19): siRNA sense strand
aagaagaagacuguuauug

SEQ ID NO: 1095514 - RNA, 19 nt, Homo sapiens
  misc_RNA (1)...(19): siRNA sense strand
agacggcagcuacuacaaa

SEQ ID NO: 1095515 - RNA, 19 nt, Homo sapiens
  misc_RNA (1)...(19): siRNA sense strand
gccaaacgccgucauugca

SEQ ID NO: 1095516 - RNA, 19 nt, Homo sapiens
  misc_RNA (1)...(19): siRNA sense strand
gcagggaacaagaauugca

SEQ ID NO: 1095517 - RNA, 19 nt, Homo sapiens
  misc_RNA (1)...(19): siRNA sense strand
gauuaagguguucacauuc

SEQ ID NO: 1095518 - RNA, 19 nt, Homo sapiens
  misc_RNA (1)...(19): siRNA sense strand
uucuagagaugaccgauga

SEQ ID NO: 1095519 - RNA, 19 nt, Homo sapiens
  misc_RNA (1)...(19): siRNA sense strand
auuaagguguucacauuca

SEQ ID NO: 1095520 - RNA, 19 nt, Homo sapiens
  misc_RNA (1)...(19): siRNA sense strand
ccaaacgccgucauugcaa

SEQ ID NO: 1095521 - RNA, 19 nt, Homo sapiens
  misc_RNA (1)...(19): siRNA sense strand
cugcagggaacaagaauug

SEQ ID NO: 1095522 - RNA, 19 nt, Homo sapiens
  misc_RNA (1)...(19): siRNA sense strand
gauacuucaucagggcauu

SEQ ID NO: 1095523 - RNA, 19 nt, Homo sapiens
  misc_RNA (1)...(19): siRNA sense strand
cagccaguuuccuuccaaa

SEQ ID NO: 1095524 - RNA, 19 nt, Homo sapiens
  misc_RNA (1)...(19): siRNA sense strand
caucagggcauuuaaucca

SEQ ID NO: 1095525 - RNA, 19 nt, Homo sapiens
  misc_RNA (1)...(19): siRNA sense strand
agauagaauuguggugguu

SEQ ID NO: 1095526 - RNA, 19 nt, Homo sapiens
  misc_RNA (1)...(19): siRNA sense strand
agaagucaaggcagucaaa

SEQ ID NO: 1095527 - RNA, 19 nt, Homo sapiens
  misc_RNA (1)...(19): siRNA sense strand
gaauuguggugguuuugga

SEQ ID NO: 1095528 - RNA, 19 nt, Homo sapiens
  misc_RNA (1)...(19): siRNA sense strand
agagaugaccgaugacaag

SEQ ID NO: 1095529 - RNA, 19 nt, Homo sapiens
  misc_RNA (1)...(19): siRNA sense strand
ucagccaguuuccuuccaa

SEQ ID NO: 1095530 - RNA, 19 nt, Homo sapiens
  misc_RNA (1)...(19): siRNA sense strand
caaccugcagggaacaaga

SEQ ID NO: 1095531 - RNA, 19 nt, Homo sapiens
  misc_RNA (1)...(19): siRNA sense strand
uguguccuuugucccaaua

SEQ ID NO: 1095532 - RNA, 19 nt, Homo sapiens
  misc_RNA (1)...(19): siRNA sense strand
ugggaugaccugaagaaga

SEQ ID NO: 1095533 - RNA, 19 nt, Homo sapiens
  misc_RNA (1)...(19): siRNA sense strand
caaacugcggcgagauaga

SEQ ID NO: 1095534 - RNA, 19 nt, Homo sapiens
  misc_RNA (1)...(19): siRNA sense strand
ucaguugcacgucuucgaa

SEQ ID NO: 1095535 - RNA, 19 nt, Homo sapiens
  misc_RNA (1)...(19): siRNA sense strand
cuacuacaaauuccuguuc

SEQ ID NO: 1095536 - RNA, 19 nt, Homo sapiens
  misc_RNA (1)...(19): siRNA sense strand
gugcagacggcagcuacua

SEQ ID NO: 1095537 - RNA, 19 nt, Homo sapiens
  misc_RNA (1)...(19): siRNA sense strand
caacugcauccgagaaagg

SEQ ID NO: 1095538 - RNA, 19 nt, Homo sapiens
  misc_RNA (1)...(19): siRNA sense strand
gaacugcgaagaggaucuc

SEQ ID NO: 1095539 - RNA, 19 nt, Homo sapiens
  misc_RNA (1)...(19): siRNA sense strand
guccuuugucccaauagua

SEQ ID NO: 1095540 - RNA, 19 nt, Homo sapiens
  misc_RNA (1)...(19): siRNA sense strand
aaacgccgucauugcaauu

SEQ ID NO: 1095541 - RNA, 19 nt, Homo sapiens
  misc_RNA (1)...(19): siRNA sense strand
gcugcaacuauuuagcuuu

SEQ ID NO: 1095542 - RNA, 19 nt, Homo sapiens
  misc_RNA (1)...(19): siRNA sense strand
ggccucagccaguuuccuu

SEQ ID NO: 1095543 - RNA, 19 nt, Homo sapiens
  misc_RNA (1)...(19): siRNA sense strand
gggacgcuuauaagaauau

SEQ ID NO: 1095544 - RNA, 19 nt, Homo sapiens
  misc_RNA (1)...(19): siRNA sense strand
aaguaaugaucugggauga

SEQ ID NO: 1095545 - RNA, 19 nt, Homo sapiens
  misc_RNA (1)...(19): siRNA sense strand
uacuacaaauuccuguuca

SEQ ID NO: 1095546 - RNA, 19 nt, Homo sapiens
  misc_RNA (1)...(19): siRNA sense strand
guuauuucgcugcaacuau

SEQ ID NO: 1095547 - RNA, 19 nt, Homo sapiens
  misc_RNA (1)...(19): siRNA sense strand
aggaauaaacaguccaguu

SEQ ID NO: 1095548 - RNA, 19 nt, Homo sapiens
  misc_RNA (1)...(19): siRNA sense strand
aaacgcagguucuuauuaa

SEQ ID NO: 1095549 - RNA, 19 nt, Homo sapiens
  misc_RNA (1)...(19): siRNA sense strand
ccacagaauuauacagaua

SEQ ID NO: 1095550 - RNA, 19 nt, Homo sapiens
  misc_RNA (1)...(19): siRNA sense strand
gauaguaguuccucuucua

SEQ ID NO: 1095551 - RNA, 19 nt, Homo sapiens
  misc_RNA (1)...(19): siRNA sense strand
gcuaguaacagaaacauua

SEQ ID NO: 1095552 - RNA, 19 nt, Homo sapiens
  misc_RNA (1)...(19): siRNA sense strand
ccuaauagcucuucagaau

SEQ ID NO: 1095553 - RNA, 19 nt, Homo sapiens
  misc_RNA (1)...(19): siRNA sense strand
caacagaaauguagagagu

SEQ ID NO: 1095554 - RNA, 19 nt, Homo sapiens
  misc_RNA (1)...(19): siRNA sense strand
caagacagcuaguaacaga

SEQ ID NO: 1095555 - RNA, 19 nt, Homo sapiens
  misc_RNA (1)...(19): siRNA sense strand
aaagaaagcugaagagagu

SEQ ID NO: 1095556 - RNA, 19 nt, Homo sapiens
  misc_RNA (1)...(19): siRNA sense strand
gaugaacgguuaacaacaa

SEQ ID NO: 1095557 - RNA, 19 nt, Homo sapiens
  misc_RNA (1)...(19): siRNA sense strand
gagacuagcccuaccauaa

SEQ ID NO: 1095558 - RNA, 19 nt, Homo sapiens
  misc_RNA (1)...(19): siRNA sense strand
gaagaaccacagaauuaua

SEQ ID NO: 1095559 - RNA, 19 nt, Homo sapiens
  misc_RNA (1)...(19): siRNA sense strand
ggaauagguucuacaguuc

SEQ ID NO: 1095560 - RNA, 19 nt, Homo sapiens
  misc_RNA (1)...(19): siRNA sense strand
gcaguuauaucaagugcaa

SEQ ID NO: 1095561 - RNA, 19 nt, Homo sapiens
  misc_RNA (1)...(19): siRNA sense strand
aaucaaagcucuguuagaa

SEQ ID NO: 1095562 - RNA, 19 nt, Homo sapiens
  misc_RNA (1)...(19): siRNA sense strand
aagaagaaccacagaauua

SEQ ID NO: 1095563 - RNA, 19 nt, Homo sapiens
  misc_RNA (1)...(19): siRNA sense strand
gcuaaaugcuggaggagaa

SEQ ID NO: 1095564 - RNA, 19 nt, Homo sapiens
  misc_RNA (1)...(19): siRNA sense strand
aagcugacaucaccaguua

SEQ ID NO: 1095565 - RNA, 19 nt, Homo sapiens
  misc_RNA (1)...(19): siRNA sense strand
ggagcaaucacccacauua

SEQ ID NO: 1095566 - RNA, 19 nt, Homo sapiens
  misc_RNA (1)...(19): siRNA sense strand
gcaaagccagcuauccuua

SEQ ID NO: 1095567 - RNA, 19 nt, Homo sapiens
  misc_RNA (1)...(19): siRNA sense strand
ggagagcaguaaacgauga

SEQ ID NO: 1095568 - RNA, 19 nt, Homo sapiens
  misc_RNA (1)...(19): siRNA sense strand
gcaagauaauuagcaguaa

SEQ ID NO: 1095569 - RNA, 19 nt, Homo sapiens
  misc_RNA (1)...(19): siRNA sense strand
gucaacagcuggaugauga

SEQ ID NO: 1095570 - RNA, 19 nt, Homo sapiens
  misc_RNA (1)...(19): siRNA sense strand
gaaguacuguuuaugucaa

SEQ ID NO: 1095571 - RNA, 19 nt, Homo sapiens
  misc_RNA (1)...(19): siRNA sense strand
aguaaacgaugaacgguua

SEQ ID NO: 1095572 - RNA, 19 nt, Homo sapiens
  misc_RNA (1)...(19): siRNA sense strand
uugaagagauggacacuuu

SEQ ID NO: 1095573 - RNA, 19 nt, Homo sapiens
  misc_RNA (1)...(19): siRNA sense strand
caagacaacccacuauuga

SEQ ID NO: 1095574 - RNA, 19 nt, Homo sapiens
  misc_RNA (1)...(19): siRNA sense strand
gagcauugccaacuccuua

SEQ ID NO: 1095575 - RNA, 19 nt, Homo sapiens
  misc_RNA (1)...(19): siRNA sense strand
gcgaggaacuuggaacuga

SEQ ID NO: 1095576 - RNA, 19 nt, Homo sapiens
  misc_RNA (1)...(19): siRNA sense strand
gaacccagcccuucucaga

SEQ ID NO: 1095577 - RNA, 19 nt, Homo sapiens
  misc_RNA (1)...(19): siRNA sense strand
caacacagaagguuauuau

SEQ ID NO: 1095578 - RNA, 19 nt, Homo sapiens
  misc_RNA (1)...(19): siRNA sense strand
gaaaaugucuuugauggaa

SEQ ID NO: 1095579 - RNA, 19 nt, Homo sapiens
  misc_RNA (1)...(19): siRNA sense strand
caaacaagacagcuaguaa

SEQ ID NO: 1095580 - RNA, 19 nt, Homo sapiens
  misc_RNA (1)...(19): siRNA sense strand
cagcagggaugaaugcaaa

SEQ ID NO: 1095581 - RNA, 19 nt, Homo sapiens
  misc_RNA (1)...(19): siRNA sense strand
gaagccaccaguuguuaua

SEQ ID NO: 1095582 - RNA, 19 nt, Homo sapiens
  misc_RNA (1)...(19): siRNA sense strand
cuaaacaacuucacuaguc

SEQ ID NO: 1095583 - RNA, 19 nt, Homo sapiens
  misc_RNA (1)...(19): siRNA sense strand
gaagagaguccagcagaaa

SEQ ID NO: 1095584 - RNA, 19 nt, Homo sapiens
  misc_RNA (1)...(19): siRNA sense strand
gcuaaacagcagaaacuua

SEQ ID NO: 1095585 - RNA, 19 nt, Homo sapiens
  misc_RNA (1)...(19): siRNA sense strand
uaauagcucuucagaaugg

SEQ ID NO: 1095586 - RNA, 19 nt, Homo sapiens
  misc_RNA (1)...(19): siRNA sense strand
gauggaagcucagauugau

SEQ ID NO: 1095587 - RNA, 19 nt, Homo sapiens
  misc_RNA (1)...(19): siRNA sense strand
gugcaauuaugacaacuaa

SEQ ID NO: 1095588 - RNA, 19 nt, Homo sapiens
  misc_RNA (1)...(19): siRNA sense strand
ccacaugucuccuguaaaa

SEQ ID NO: 1095589 - RNA, 19 nt, Homo sapiens
  misc_RNA (1)...(19): siRNA sense strand
uaugacaacuaaacuggua

SEQ ID NO: 1095590 - RNA, 19 nt, Homo sapiens
  misc_RNA (1)...(19): siRNA sense strand
ggaggcauaugcuggaguu

SEQ ID NO: 1095591 - RNA, 19 nt, Homo sapiens
  misc_RNA (1)...(19): siRNA sense strand
guacccaaaucauuagcua

SEQ ID NO: 1095592 - RNA, 19 nt, Homo sapiens
  misc_RNA (1)...(19): siRNA sense strand
ccaaaccgccuuuacugua

SEQ ID NO: 1095593 - RNA, 19 nt, Homo sapiens
  misc_RNA (1)...(19): siRNA sense strand
cugaauacaucacuacuga

SEQ ID NO: 1095594 - RNA, 19 nt, Homo sapiens
  misc_RNA (1)...(19): siRNA sense strand
gaacgguuaacaacaauug

SEQ ID NO: 1095595 - RNA, 19 nt, Homo sapiens
  misc_RNA (1)...(19): siRNA sense strand
aagcucagauugauacaaa

SEQ ID NO: 1095596 - RNA, 19 nt, Homo sapiens
  misc_RNA (1)...(19): siRNA sense strand
gcugguaauucaucuauuc

SEQ ID NO: 1095597 - RNA, 19 nt, Homo sapiens
  misc_RNA (1)...(19): siRNA sense strand
aggaauagguucuacaguu

SEQ ID NO: 1095598 - RNA, 19 nt, Homo sapiens
  misc_RNA (1)...(19): siRNA sense strand
caacaacacagaagguuau

SEQ ID NO: 1095599 - RNA, 19 nt, Homo sapiens
  misc_RNA (1)...(19): siRNA sense strand
agacucagcugcaagugaa

SEQ ID NO: 1095600 - RNA, 19 nt, Homo sapiens
  misc_RNA (1)...(19): siRNA sense strand
gacuagcccuaccauaauu

SEQ ID NO: 1095601 - RNA, 19 nt, Homo sapiens
  misc_RNA (1)...(19): siRNA sense strand
uaauaugucuggaccuaau

SEQ ID NO: 1095602 - RNA, 19 nt, Homo sapiens
  misc_RNA (1)...(19): siRNA sense strand
uaaacaacuucacuaguca

SEQ ID NO: 1095603 - RNA, 19 nt, Homo sapiens
  misc_RNA (1)...(19): siRNA sense strand
acccaaggauccucuguua

SEQ ID NO: 1095604 - RNA, 19 nt, Homo sapiens
  misc_RNA (1)...(19): siRNA sense strand
gguagagucagaacuagua

SEQ ID NO: 1095605 - RNA, 19 nt, Homo sapiens
  misc_RNA (1)...(19): siRNA sense strand
ucaaagcucuguuagaacu

SEQ ID NO: 1095606 - RNA, 19 nt, Homo sapiens
  misc_RNA (1)...(19): siRNA sense strand
cauugaaggucgucgauug

SEQ ID NO: 1095607 - RNA, 19 nt, Homo sapiens
  misc_RNA (1)...(19): siRNA sense strand
gagcuaaacaacuucacua

SEQ ID NO: 1095608 - RNA, 19 nt, Homo sapiens
  misc_RNA (1)...(19): siRNA sense strand
acuaguagcugaauacauc

SEQ ID NO: 1095609 - RNA, 19 nt, Homo sapiens
  misc_RNA (1)...(19): siRNA sense strand
uagcaucauuacaguagua

SEQ ID NO: 1095610 - RNA, 19 nt, Homo sapiens
  misc_RNA (1)...(19): siRNA sense strand
uaaacaacaucaacagucu

SEQ ID NO: 1095611 - RNA, 19 nt, Homo sapiens
  misc_RNA (1)...(19): siRNA sense strand
uaauacaguugcaguaaca

SEQ ID NO: 1095612 - RNA, 19 nt, Homo sapiens
  misc_RNA (1)...(19): siRNA sense strand
ccaaguggaaguacuguuu

SEQ ID NO: 1095613 - RNA, 19 nt, Homo sapiens
  misc_RNA (1)...(19): siRNA sense strand
gagaguccagcagaaauua

SEQ ID NO: 1095614 - RNA, 19 nt, Homo sapiens
  misc_RNA (1)...(19): siRNA sense strand
gauccucuguuacaaagau

SEQ ID NO: 1095615 - RNA, 19 nt, Homo sapiens
  misc_RNA (1)...(19): siRNA sense strand
gccuguaguucauguaauu

SEQ ID NO: 1095616 - RNA, 19 nt, Homo sapiens
  misc_RNA (1)...(19): siRNA sense strand
guaccaacgucagucauug

SEQ ID NO: 1095617 - RNA, 19 nt, Homo sapiens
  misc_RNA (1)...(19): siRNA sense strand
cacagaagguuauuauagu

SEQ ID NO: 1095618 - RNA, 19 nt, Homo sapiens
  misc_RNA (1)...(19): siRNA sense strand
caaguggaaguacuguuua

SEQ ID NO: 1095619 - RNA, 19 nt, Homo sapiens
  misc_RNA (1)...(19): siRNA sense strand
gaaguucggagagcaguaa

SEQ ID NO: 1095620 - RNA, 19 nt, Homo sapiens
  misc_RNA (1)...(19): siRNA sense strand
gcagcuauccagcauaaug

SEQ ID NO: 1095621 - RNA, 19 nt, Homo sapiens
  misc_RNA (1)...(19): siRNA sense strand
caacuucacuagucaacag

SEQ ID NO: 1095622 - RNA, 19 nt, Homo sapiens
  misc_RNA (1)...(19): siRNA sense strand
gaagagauggacacuuuag

SEQ ID NO: 1095623 - RNA, 19 nt, Homo sapiens
  misc_RNA (1)...(19): siRNA sense strand
gcaauuaugacaacuaaac

SEQ ID NO: 1095624 - RNA, 19 nt, Homo sapiens
  misc_RNA (1)...(19): siRNA sense strand
caacaaacacaacaacaca

SEQ ID NO: 1095625 - RNA, 19 nt, Homo sapiens
  misc_RNA (1)...(19): siRNA sense strand
ggaaguacuguuuauguca

SEQ ID NO: 1095626 - RNA, 19 nt, Homo sapiens
  misc_RNA (1)...(19): siRNA sense strand
gcacggaggauggaacuga

SEQ ID NO: 1095627 - RNA, 19 nt, Homo sapiens
  misc_RNA (1)...(19): siRNA sense strand
ugaagagaguccagcagaa

SEQ ID NO: 1095628 - RNA, 19 nt, Homo sapiens
  misc_RNA (1)...(19): siRNA sense strand
gcacaaacucccgcaaaug

SEQ ID NO: 1095629 - RNA, 19 nt, Homo sapiens
  misc_RNA (1)...(19): siRNA sense strand
ccaagacaacccacuauug

SEQ ID NO: 1095630 - RNA, 19 nt, Homo sapiens
  misc_RNA (1)...(19): siRNA sense strand
ucacaacguugcuaaaugc

SEQ ID NO: 1095631 - RNA, 19 nt, Homo sapiens
  misc_RNA (1)...(19): siRNA sense strand
ggcaagauaauuagcagua

SEQ ID NO: 1095632 - RNA, 19 nt, Homo sapiens
  misc_RNA (1)...(19): siRNA sense strand
aguaguacccaaaucauua

SEQ ID NO: 1095633 - RNA, 19 nt, Homo sapiens
  misc_RNA (1)...(19): siRNA sense strand
acagugagcccauccauug

SEQ ID NO: 1095634 - RNA, 19 nt, Homo sapiens
  misc_RNA (1)...(19): siRNA sense strand
gcaacucuacccaccagua

SEQ ID NO: 1095635 - RNA, 19 nt, Homo sapiens
  misc_RNA (1)...(19): siRNA sense strand
caacaucaacagucuccua

SEQ ID NO: 1095636 - RNA, 19 nt, Homo sapiens
  misc_RNA (1)...(19): siRNA sense strand
caucaacacagacaacaaa

SEQ ID NO: 1095637 - RNA, 19 nt, Homo sapiens
  misc_RNA (1)...(19): siRNA sense strand
aguguaagcuguucagaug

SEQ ID NO: 1095638 - RNA, 19 nt, Homo sapiens
  misc_RNA (1)...(19): siRNA sense strand
ucacagaccgcaacacaga

SEQ ID NO: 1095639 - RNA, 19 nt, Homo sapiens
  misc_RNA (1)...(19): siRNA sense strand
gagcaggacauagacagua

SEQ ID NO: 1095640 - RNA, 19 nt, Homo sapiens
  misc_RNA (1)...(19): siRNA sense strand
ccaaggauccucuguuaca

SEQ ID NO: 1095641 - RNA, 19 nt, Homo sapiens
  misc_RNA (1)...(19): siRNA sense strand
ggaacagacucagcugcaa

SEQ ID NO: 1095642 - RNA, 19 nt, Homo sapiens
  misc_RNA (1)...(19): siRNA sense strand
cuaagcagcaguuauauca

SEQ ID NO: 1095643 - RNA, 19 nt, Homo sapiens
  misc_RNA (1)...(19): siRNA sense strand
caauggagcaggacauaga

SEQ ID NO: 1095644 - RNA, 19 nt, Homo sapiens
  misc_RNA (1)...(19): siRNA sense strand
cagcagaaauuaucaucca

SEQ ID NO: 1095645 - RNA, 19 nt, Homo sapiens
  misc_RNA (1)...(19): siRNA sense strand
uggcagggauggcgaauuc

SEQ ID NO: 1095646 - RNA, 19 nt, Homo sapiens
  misc_RNA (1)...(19): siRNA sense strand
agaaggcucuugccacuag

SEQ ID NO: 1095647 - RNA, 19 nt, Homo sapiens
  misc_RNA (1)...(19): siRNA sense strand
gcagcuuccuaccuuaaug

SEQ ID NO: 1095648 - RNA, 19 nt, Homo sapiens
  misc_RNA (1)...(19): siRNA sense strand
gcaaggcggcucuguuugu

SEQ ID NO: 1095649 - RNA, 19 nt, Homo sapiens
  misc_RNA (1)...(19): siRNA sense strand
ggagaccgacauccucuuu

SEQ ID NO: 1095650 - RNA, 19 nt, Homo sapiens
  misc_RNA (1)...(19): siRNA sense strand
gagcaucgcagacuugaca

SEQ ID NO: 1095651 - RNA, 19 nt, Homo sapiens
  misc_RNA (1)...(19): siRNA sense strand
ggagagcaucgcagacuug

SEQ ID NO: 1095652 - RNA, 19 nt, Homo sapiens
  misc_RNA (1)...(19): siRNA sense strand
cggcaaggcggcucuguuu

SEQ ID NO: 1095653 - RNA, 19 nt, Homo sapiens
  misc_RNA (1)...(19): siRNA sense strand
caaggcggcucuguuugug

SEQ ID NO: 1095654 - RNA, 19 nt, Homo sapiens
  misc_RNA (1)...(19): siRNA sense strand
agaccgacauccucuuugg

SEQ ID NO: 1095655 - RNA, 19 nt, Homo sapiens
  misc_RNA (1)...(19): siRNA sense strand
ucgagugcaucacggagaa

SEQ ID NO: 1095656 - RNA, 19 nt, Homo sapiens
  misc_RNA (1)...(19): siRNA sense strand
gagagcaucgcagacuuga

SEQ ID NO: 1095657 - RNA, 19 nt, Homo sapiens
  misc_RNA (1)...(19): siRNA sense strand
ucacggagaacuucagcau

SEQ ID NO: 1095658 - RNA, 19 nt, Homo sapiens
  misc_RNA (1)...(19): siRNA sense strand
gcugcggcaugaccacugu

SEQ ID NO: 1095659 - RNA, 19 nt, Homo sapiens
  misc_RNA (1)...(19): siRNA sense strand
gagaccgacauccucuuug

SEQ ID NO: 1095660 - RNA, 19 nt, Homo sapiens
  misc_RNA (1)...(19): siRNA sense strand
uggagagcaucgcagacuu

SEQ ID NO: 1095661 - RNA, 19 nt, Homo sapiens
  misc_RNA (1)...(19): siRNA sense strand
gggcuacgacgagcacuuc

SEQ ID NO: 1095662 - RNA, 19 nt, Homo sapiens
  misc_RNA (1)...(19): siRNA sense strand
gcaagagccuggacgcauu

SEQ ID NO: 1095663 - RNA, 19 nt, Homo sapiens
  misc_RNA (1)...(19): siRNA sense strand
ggccaaagcugccuucaag

SEQ ID NO: 1095664 - RNA, 19 nt, Homo sapiens
  misc_RNA (1)...(19): siRNA sense strand
ggagcuuccuguccaaauu

SEQ ID NO: 1095665 - RNA, 19 nt, Homo sapiens
  misc_RNA (1)...(19): siRNA sense strand
gaacgacugugcccagaag

SEQ ID NO: 1095666 - RNA, 19 nt, Homo sapiens
  misc_RNA (1)...(19): siRNA sense strand
ggagaaggauguccaugca

SEQ ID NO: 1095667 - RNA, 19 nt, Homo sapiens
  misc_RNA (1)...(19): siRNA sense strand
gcucugcggucucacugua

SEQ ID NO: 1095668 - RNA, 19 nt, Homo sapiens
  misc_RNA (1)...(19): siRNA sense strand
gagcaaccgcuuuguagaa

SEQ ID NO: 1095669 - RNA, 19 nt, Homo sapiens
  misc_RNA (1)...(19): siRNA sense strand
ucaaagagccagccgagaa

SEQ ID NO: 1095670 - RNA, 19 nt, Homo sapiens
  misc_RNA (1)...(19): siRNA sense strand
ugaaggagcuggagaucuc

SEQ ID NO: 1095671 - RNA, 19 nt, Homo sapiens
  misc_RNA (1)...(19): siRNA sense strand
gacccacgcugaaggaguu

SEQ ID NO: 1095672 - RNA, 19 nt, Homo sapiens
  misc_RNA (1)...(19): siRNA sense strand
gcagaguggucagagagaa

SEQ ID NO: 1095673 - RNA, 19 nt, Homo sapiens
  misc_RNA (1)...(19): siRNA sense strand
cacaaccucuacucaauga

SEQ ID NO: 1095674 - RNA, 19 nt, Homo sapiens
  misc_RNA (1)...(19): siRNA sense strand
gaaguggucagcagacaug

SEQ ID NO: 1095675 - RNA, 19 nt, Homo sapiens
  misc_RNA (1)...(19): siRNA sense strand
ggaggagauucagaucaaa

SEQ ID NO: 1095676 - RNA, 19 nt, Homo sapiens
  misc_RNA (1)...(19): siRNA sense strand
cacuguagauccugagaaa

SEQ ID NO: 1095677 - RNA, 19 nt, Homo sapiens
  misc_RNA (1)...(19): siRNA sense strand
cgacccagcuggaggaagu

SEQ ID NO: 1095678 - RNA, 19 nt, Homo sapiens
  misc_RNA (1)...(19): siRNA sense strand
cauccuggcuuacaucgau

SEQ ID NO: 1095679 - RNA, 19 nt, Homo sapiens
  misc_RNA (1)...(19): siRNA sense strand
uggaggagauucagaucaa

SEQ ID NO: 1095680 - RNA, 19 nt, Homo sapiens
  misc_RNA (1)...(19): siRNA sense strand
ggccuggacuacauguauu

SEQ ID NO: 1095681 - RNA, 19 nt, Homo sapiens
  misc_RNA (1)...(19): siRNA sense strand
ucacucaccucaagcugau

SEQ ID NO: 1095682 - RNA, 19 nt, Homo sapiens
  misc_RNA (1)...(19): siRNA sense strand
gagaaguggucagcagaca

SEQ ID NO: 1095683 - RNA, 19 nt, Homo sapiens
  misc_RNA (1)...(19): siRNA sense strand
ccugagcgcugaggaguau

SEQ ID NO: 1095684 - RNA, 19 nt, Homo sapiens
  misc_RNA (1)...(19): siRNA sense strand
ucgauggacuggagacaga

SEQ ID NO: 1095685 - RNA, 19 nt, Homo sapiens
  misc_RNA (1)...(19): siRNA sense strand
caagugagccgugcuaguc

SEQ ID NO: 1095686 - RNA, 19 nt, Homo sapiens
  misc_RNA (1)...(19): siRNA sense strand
caacagaaaccaacauucc

SEQ ID NO: 1095687 - RNA, 19 nt, Homo sapiens
  misc_RNA (1)...(19): siRNA sense strand
gcgcuugggcugccucauu

SEQ ID NO: 1095688 - RNA, 19 nt, Homo sapiens
  misc_RNA (1)...(19): siRNA sense strand
uggaggaaguggagaagga

SEQ ID NO: 1095689 - RNA, 19 nt, Homo sapiens
  misc_RNA (1)...(19): siRNA sense strand
gagcuuccuguccaaauug

SEQ ID NO: 1095690 - RNA, 19 nt, Homo sapiens
  misc_RNA (1)...(19): siRNA sense strand
ugacagaugggacgacgaa

SEQ ID NO: 1095691 - RNA, 19 nt, Homo sapiens
  misc_RNA (1)...(19): siRNA sense strand
cgcuugggcugccucauuu

SEQ ID NO: 1095692 - RNA, 19 nt, Homo sapiens
  misc_RNA (1)...(19): siRNA sense strand
caugagcaaccgcuuugua

SEQ ID NO: 1095693 - RNA, 19 nt, Homo sapiens
  misc_RNA (1)...(19): siRNA sense strand
ccacaaccucuacucaaug

SEQ ID NO: 1095694 - RNA, 19 nt, Homo sapiens
  misc_RNA (1)...(19): siRNA sense strand
gcugaccgccuucgaguuc

SEQ ID NO: 1095695 - RNA, 19 nt, Homo sapiens
  misc_RNA (1)...(19): siRNA sense strand
cccacaaccucuacucaau

SEQ ID NO: 1095696 - RNA, 19 nt, Homo sapiens
  misc_RNA (1)...(19): siRNA sense strand
ccaacauccuggcuuacau

SEQ ID NO: 1095697 - RNA, 19 nt, Homo sapiens
  misc_RNA (1)...(19): siRNA sense strand
gggccuggacuacauguau

SEQ ID NO: 1095698 - RNA, 19 nt, Homo sapiens
  misc_RNA (1)...(19): siRNA sense strand
gagccgugcuagucagagu

SEQ ID NO: 1095699 - RNA, 19 nt, Homo sapiens
  misc_RNA (1)...(19): siRNA sense strand
caaccacugcccaacagaa

SEQ ID NO: 1095700 - RNA, 19 nt, Homo sapiens
  misc_RNA (1)...(19): siRNA sense strand
gagcugaugaagcacuuug

SEQ ID NO: 1095701 - RNA, 19 nt, Homo sapiens
  misc_RNA (1)...(19): siRNA sense strand
caaagagccagccgagaag

SEQ ID NO: 1095702 - RNA, 19 nt, Homo sapiens
  misc_RNA (1)...(19): siRNA sense strand
caacauccuggcuuacauc

SEQ ID NO: 1095703 - RNA, 19 nt, Homo sapiens
  misc_RNA (1)...(19): siRNA sense strand
agcaaccgcuuuguagaaa

SEQ ID NO: 1095704 - RNA, 19 nt, Homo sapiens
  misc_RNA (1)...(19): siRNA sense strand
aaacgcuggugccccauua

SEQ ID NO: 1095705 - RNA, 19 nt, Homo sapiens
  misc_RNA (1)...(19): siRNA sense strand
gcagccucauccacaacaa

SEQ ID NO: 1095706 - RNA, 19 nt, Homo sapiens
  misc_RNA (1)...(19): siRNA sense strand
guccuuaccucugccuuca

SEQ ID NO: 1095707 - RNA, 19 nt, Homo sapiens
  misc_RNA (1)...(19): siRNA sense strand
ggacgcauucccugaggau

SEQ ID NO: 1095708 - RNA, 19 nt, Homo sapiens
  misc_RNA (1)...(19): siRNA sense strand
gggagcagacggucaaguc

SEQ ID NO: 1095709 - RNA, 19 nt, Homo sapiens
  misc_RNA (1)...(19): siRNA sense strand
ugcagcagauggagcaguu

SEQ ID NO: 1095710 - RNA, 19 nt, Homo sapiens
  misc_RNA (1)...(19): siRNA sense strand
uguagaaaccaaccucuuc

SEQ ID NO: 1095711 - RNA, 19 nt, Homo sapiens
  misc_RNA (1)...(19): siRNA sense strand
ccaaagacccacgcugaag

SEQ ID NO: 1095712 - RNA, 19 nt, Homo sapiens
  misc_RNA (1)...(19): siRNA sense strand
gaaaccaacauuccccaaa

SEQ ID NO: 1095713 - RNA, 19 nt, Homo sapiens
  misc_RNA (1)...(19): siRNA sense strand
ggauuucugucggcacaag

SEQ ID NO: 1095714 - RNA, 19 nt, Homo sapiens
  misc_RNA (1)...(19): siRNA sense strand
acgcauucccugaggauuu

SEQ ID NO: 1095715 - RNA, 19 nt, Homo sapiens
  misc_RNA (1)...(19): siRNA sense strand
gaggagauucagaucaaag

SEQ ID NO: 1095716 - RNA, 19 nt, Homo sapiens
  misc_RNA (1)...(19): siRNA sense strand
gcaaccgcuuuguagaaac

SEQ ID NO: 1095717 - RNA, 19 nt, Homo sapiens
  misc_RNA (1)...(19): siRNA sense strand
ucaaggccauucggagcuu

SEQ ID NO: 1095718 - RNA, 19 nt, Homo sapiens
  misc_RNA (1)...(19): siRNA sense strand
ggcuacaggccaaggauga

SEQ ID NO: 1095719 - RNA, 19 nt, Homo sapiens
  misc_RNA (1)...(19): siRNA sense strand
gaguaucagcagaagauca

SEQ ID NO: 1095720 - RNA, 19 nt, Homo sapiens
  misc_RNA (1)...(19): siRNA sense strand
gauggacuggagacagaaa

SEQ ID NO: 1095721 - RNA, 19 nt, Homo sapiens
  misc_RNA (1)...(19): siRNA sense strand
caacgacugcagccucauc

SEQ ID NO: 1095722 - RNA, 19 nt, Homo sapiens
  misc_RNA (1)...(19): siRNA sense strand
acagaugggacgacgaaga

SEQ ID NO: 1095723 - RNA, 19 nt, Homo sapiens
  misc_RNA (1)...(19): siRNA sense strand
caacagucaacacccagau

SEQ ID NO: 1095724 - RNA, 19 nt, Homo sapiens
  misc_RNA (1)...(19): siRNA sense strand
caagagccuggacgcauuc

SEQ ID NO: 1095725 - RNA, 19 nt, Homo sapiens
  misc_RNA (1)...(19): siRNA sense strand
uccaggagcugagcaagag

SEQ ID NO: 1095726 - RNA, 19 nt, Homo sapiens
  misc_RNA (1)...(19): siRNA sense strand
ccaacagaaaccaacauuc

SEQ ID NO: 1095727 - RNA, 19 nt, Homo sapiens
  misc_RNA (1)...(19): siRNA sense strand
cuguagauccugagaaauc

SEQ ID NO: 1095728 - RNA, 19 nt, Homo sapiens
  misc_RNA (1)...(19): siRNA sense strand
caaccucuacucaaugaac

SEQ ID NO: 1095729 - RNA, 19 nt, Homo sapiens
  misc_RNA (1)...(19): siRNA sense strand
ucaauguggagcugaugaa

SEQ ID NO: 1095730 - RNA, 19 nt, Homo sapiens
  misc_RNA (1)...(19): siRNA sense strand
cgcauucccugaggauuuc

SEQ ID NO: 1095731 - RNA, 19 nt, Homo sapiens
  misc_RNA (1)...(19): siRNA sense strand
ucagcuuccuggucaacga

SEQ ID NO: 1095732 - RNA, 19 nt, Homo sapiens
  misc_RNA (1)...(19): siRNA sense strand
gagccagccgagaagcaaa

SEQ ID NO: 1095733 - RNA, 19 nt, Homo sapiens
  misc_RNA (1)...(19): siRNA sense strand
aaagacccacgcugaagga

SEQ ID NO: 1095734 - RNA, 19 nt, Homo sapiens
  misc_RNA (1)...(19): siRNA sense strand
gaacucaccucaaagagaa

SEQ ID NO: 1095735 - RNA, 19 nt, Homo sapiens
  misc_RNA (1)...(19): siRNA sense strand
gagaagaccuacgaaugua

SEQ ID NO: 1095736 - RNA, 19 nt, Homo sapiens
  misc_RNA (1)...(19): siRNA sense strand
ggagagaaguccacugaau

SEQ ID NO: 1095737 - RNA, 19 nt, Homo sapiens
  misc_RNA (1)...(19): siRNA sense strand
gagagaaguccacugaaua

SEQ ID NO: 1095738 - RNA, 19 nt, Homo sapiens
  misc_RNA (1)...(19): siRNA sense strand
cgaaaccaguccauccuua

SEQ ID NO: 1095739 - RNA, 19 nt, Homo sapiens
  misc_RNA (1)...(19): siRNA sense strand
ugaauacgcucacuuguuc

SEQ ID NO: 1095740 - RNA, 19 nt, Homo sapiens
  misc_RNA (1)...(19): siRNA sense strand
ggaaacacauuaggauuca

SEQ ID NO: 1095741 - RNA, 19 nt, Homo sapiens
  misc_RNA (1)...(19): siRNA sense strand
ggagaagaccuacgaaugu

SEQ ID NO: 1095742 - RNA, 19 nt, Homo sapiens
  misc_RNA (1)...(19): siRNA sense strand
cgcaagaacucaccucaaa

SEQ ID NO: 1095743 - RNA, 19 nt, Homo sapiens
  misc_RNA (1)...(19): siRNA sense strand
ggauucacaucgucaagaa

SEQ ID NO: 1095744 - RNA, 19 nt, Homo sapiens
  misc_RNA (1)...(19): siRNA sense strand
cgagaggccuuacaagugu

SEQ ID NO: 1095745 - RNA, 19 nt, Homo sapiens
  misc_RNA (1)...(19): siRNA sense strand
ucaaagagcacgugaggaa

SEQ ID NO: 1095746 - RNA, 19 nt, Homo sapiens
  misc_RNA (1)...(19): siRNA sense strand
gaaaccaguccauccuuaa

SEQ ID NO: 1095747 - RNA, 19 nt, Homo sapiens
  misc_RNA (1)...(19): siRNA sense strand
gggagaagcccuacgaaug

SEQ ID NO: 1095748 - RNA, 19 nt, Homo sapiens
  misc_RNA (1)...(19): siRNA sense strand
caagaacucaccucaaaga

SEQ ID NO: 1095749 - RNA, 19 nt, Homo sapiens
  misc_RNA (1)...(19): siRNA sense strand
gaagaccuacgaauguaaa

SEQ ID NO: 1095750 - RNA, 19 nt, Homo sapiens
  misc_RNA (1)...(19): siRNA sense strand
gcguucaccuuguaaagaa

SEQ ID NO: 1095751 - RNA, 19 nt, Homo sapiens
  misc_RNA (1)...(19): siRNA sense strand
caugagcguucaccuugua

SEQ ID NO: 1095752 - RNA, 19 nt, Homo sapiens
  misc_RNA (1)...(19): siRNA sense strand
caagaaacccguggaaugu

SEQ ID NO: 1095753 - RNA, 19 nt, Homo sapiens
  misc_RNA (1)...(19): siRNA sense strand
caagagagacgcuacgaau

SEQ ID NO: 1095754 - RNA, 19 nt, Homo sapiens
  misc_RNA (1)...(19): siRNA sense strand
gcaccucacucagcacaug

SEQ ID NO: 1095755 - RNA, 19 nt, Homo sapiens
  misc_RNA (1)...(19): siRNA sense strand
ggagaaaccguacgaaugc

SEQ ID NO: 1095756 - RNA, 19 nt, Homo sapiens
  misc_RNA (1)...(19): siRNA sense strand
gggagaaaccguacgaaug

SEQ ID NO: 1095757 - RNA, 19 nt, Homo sapiens
  misc_RNA (1)...(19): siRNA sense strand
ucaagaaacccguggaaug

SEQ ID NO: 1095758 - RNA, 19 nt, Homo sapiens
  misc_RNA (1)...(19): siRNA sense strand
agagaaaacuguacaaaga

SEQ ID NO: 1095759 - RNA, 19 nt, Homo sapiens
  misc_RNA (1)...(19): siRNA sense strand
gcacaugagcguucaccuu

SEQ ID NO: 1095760 - RNA, 19 nt, Homo sapiens
  misc_RNA (1)...(19): siRNA sense strand
ccagggcgcuugugcagau

SEQ ID NO: 1095761 - RNA, 19 nt, Homo sapiens
  misc_RNA (1)...(19): siRNA sense strand
ggaggaaacacauuaggau

SEQ ID NO: 1095762 - RNA, 19 nt, Homo sapiens
  misc_RNA (1)...(19): siRNA sense strand
gaguggcccuugcuggauu

SEQ ID NO: 1095763 - RNA, 19 nt, Homo sapiens
  misc_RNA (1)...(19): siRNA sense strand
guacgaaugcgaucacugu

SEQ ID NO: 1095764 - RNA, 19 nt, Homo sapiens
  misc_RNA (1)...(19): siRNA sense strand
gaggaaacacauuaggauu

SEQ ID NO: 1095765 - RNA, 19 nt, Homo sapiens
  misc_RNA (1)...(19): siRNA sense strand
gcgagaggccuuacaagug

SEQ ID NO: 1095766 - RNA, 19 nt, Homo sapiens
  misc_RNA (1)...(19): siRNA sense strand
ggagaagcccuacgaaugc

SEQ ID NO: 1095767 - RNA, 19 nt, Homo sapiens
  misc_RNA (1)...(19): siRNA sense strand
gaccuacgaauguaaagaa

SEQ ID NO: 1095768 - RNA, 19 nt, Homo sapiens
  misc_RNA (1)...(19): siRNA sense strand
gagaagcucuuugugucau

SEQ ID NO: 1095769 - RNA, 19 nt, Homo sapiens
  misc_RNA (1)...(19): siRNA sense strand
agacucacaugaacucuca

SEQ ID NO: 1095770 - RNA, 19 nt, Homo sapiens
  misc_RNA (1)...(19): siRNA sense strand
agaugucgcuguggacuuu

SEQ ID NO: 1095771 - RNA, 19 nt, Homo sapiens
  misc_RNA (1)...(19): siRNA sense strand
ggaaauccuuuggcgaucu

SEQ ID NO: 1095772 - RNA, 19 nt, Homo sapiens
  misc_RNA (1)...(19): siRNA sense strand
gagccggucuuggagagaa

SEQ ID NO: 1095773 - RNA, 19 nt, Homo sapiens
  misc_RNA (1)...(19): siRNA sense strand
ggaagauacacacgcaaga

SEQ ID NO: 1095774 - RNA, 19 nt, Homo sapiens
  misc_RNA (1)...(19): siRNA sense strand
gacucagaauuuccuguuu

SEQ ID NO: 1095775 - RNA, 19 nt, Homo sapiens
  misc_RNA (1)...(19): siRNA sense strand
gcacacaggaagauacaca

SEQ ID NO: 1095776 - RNA, 19 nt, Homo sapiens
  misc_RNA (1)...(19): siRNA sense strand
gcacaagaagaaccacaug

SEQ ID NO: 1095777 - RNA, 19 nt, Homo sapiens
  misc_RNA (1)...(19): siRNA sense strand
cuacgaauguaaagaaugc

SEQ ID NO: 1095778 - RNA, 19 nt, Homo sapiens
  misc_RNA (1)...(19): siRNA sense strand
agaaacgaguugaguguag

SEQ ID NO: 1095779 - RNA, 19 nt, Homo sapiens
  misc_RNA (1)...(19): siRNA sense strand
guaaagaaacgaguugagu

SEQ ID NO: 1095780 - RNA, 19 nt, Homo sapiens
  misc_RNA (1)...(19): siRNA sense strand
gcaagagagacgcuacgaa

SEQ ID NO: 1095781 - RNA, 19 nt, Homo sapiens
  misc_RNA (1)...(19): siRNA sense strand
gaaacgcccagugguguga

SEQ ID NO: 1095782 - RNA, 19 nt, Homo sapiens
  misc_RNA (1)...(19): siRNA sense strand
cuacgagugucacgacugu

SEQ ID NO: 1095783 - RNA, 19 nt, Homo sapiens
  misc_RNA (1)...(19): siRNA sense strand
gaaauccuuuggcgaucuc

SEQ ID NO: 1095784 - RNA, 19 nt, Homo sapiens
  misc_RNA (1)...(19): siRNA sense strand
caacuuuaauuugcacaag

SEQ ID NO: 1095785 - RNA, 19 nt, Homo sapiens
  misc_RNA (1)...(19): siRNA sense strand
ccaguggugugacgaugga

SEQ ID NO: 1095786 - RNA, 19 nt, Homo sapiens
  misc_RNA (1)...(19): siRNA sense strand
aaagaaacgaguugagugu

SEQ ID NO: 1095787 - RNA, 19 nt, Homo sapiens
  misc_RNA (1)...(19): siRNA sense strand
gauacacacgcaagagaga

SEQ ID NO: 1095788 - RNA, 19 nt, Homo sapiens
  misc_RNA (1)...(19): siRNA sense strand
gaagauacacacgcaagag

SEQ ID NO: 1095789 - RNA, 19 nt, Homo sapiens
  misc_RNA (1)...(19): siRNA sense strand
ccucaucgcacacaagaga

SEQ ID NO: 1095790 - RNA, 19 nt, Homo sapiens
  misc_RNA (1)...(19): siRNA sense strand
ggcccuugcuggauucuuc

SEQ ID NO: 1095791 - RNA, 19 nt, Homo sapiens
  misc_RNA (1)...(19): siRNA sense strand
ggaggcacaugagcguuca

SEQ ID NO: 1095792 - RNA, 19 nt, Homo sapiens
  misc_RNA (1)...(19): siRNA sense strand
ggaaggcacgcuggcaaga

SEQ ID NO: 1095793 - RNA, 19 nt, Homo sapiens
  misc_RNA (1)...(19): siRNA sense strand
acucagaauuuccuguuuc

SEQ ID NO: 1095794 - RNA, 19 nt, Homo sapiens
  misc_RNA (1)...(19): siRNA sense strand
gcaagaacucaccucaaag

SEQ ID NO: 1095795 - RNA, 19 nt, Homo sapiens
  misc_RNA (1)...(19): siRNA sense strand
gaacuacagcaaccucacu

SEQ ID NO: 1095796 - RNA, 19 nt, Homo sapiens
  misc_RNA (1)...(19): siRNA sense strand
uggagaagaccuacgaaug

SEQ ID NO: 1095797 - RNA, 19 nt, Homo sapiens
  misc_RNA (1)...(19): siRNA sense strand
guaaagaaugcgggaaauc

SEQ ID NO: 1095798 - RNA, 19 nt, Homo sapiens
  misc_RNA (1)...(19): siRNA sense strand
guggucacuucuuauggaa

SEQ ID NO: 1095799 - RNA, 19 nt, Homo sapiens
  misc_RNA (1)...(19): siRNA sense strand
acacuggagagaaaccaua

SEQ ID NO: 1095800 - RNA, 19 nt, Homo sapiens
  misc_RNA (1)...(19): siRNA sense strand
agaacucaccucaaagaga

SEQ ID NO: 1095801 - RNA, 19 nt, Homo sapiens
  misc_RNA (1)...(19): siRNA sense strand
ccacguccacccaggauuc

SEQ ID NO: 1095802 - RNA, 19 nt, Homo sapiens
  misc_RNA (1)...(19): siRNA sense strand
ccucaggagccacgugaaa

SEQ ID NO: 1095803 - RNA, 19 nt, Homo sapiens
  misc_RNA (1)...(19): siRNA sense strand
aagauguaaugcuggagaa

SEQ ID NO: 1095804 - RNA, 19 nt, Homo sapiens
  misc_RNA (1)...(19): siRNA sense strand
aaagagcacgugaggaauc

SEQ ID NO: 1095805 - RNA, 19 nt, Homo sapiens
  misc_RNA (1)...(19): siRNA sense strand
auguaaugcuggagaacua

SEQ ID NO: 1095806 - RNA, 19 nt, Homo sapiens
  misc_RNA (1)...(19): siRNA sense strand
ggcauggacccucaucuca

SEQ ID NO: 1095807 - RNA, 19 nt, Homo sapiens
  misc_RNA (1)...(19): siRNA sense strand
cugaauacgcucacuuguu

SEQ ID NO: 1095808 - RNA, 19 nt, Homo sapiens
  misc_RNA (1)...(19): siRNA sense strand
cauggacccucaucucacu

SEQ ID NO: 1095809 - RNA, 19 nt, Homo sapiens
  misc_RNA (1)...(19): siRNA sense strand
gcaaggccuucaggaacca

SEQ ID NO: 1095810 - RNA, 19 nt, Homo sapiens
  misc_RNA (1)...(19): siRNA sense strand
acagcaaccucacuucacu

SEQ ID NO: 1095811 - RNA, 19 nt, Homo sapiens
  misc_RNA (1)...(19): siRNA sense strand
uguaaagaaugcgggaaau

SEQ ID NO: 1095812 - RNA, 19 nt, Homo sapiens
  misc_RNA (1)...(19): siRNA sense strand
gaauuuccuguuucuucaa

SEQ ID NO: 1095813 - RNA, 19 nt, Homo sapiens
  misc_RNA (1)...(19): siRNA sense strand
ggcgagaggccuuacaagu

SEQ ID NO: 1095814 - RNA, 19 nt, Homo sapiens
  misc_RNA (1)...(19): siRNA sense strand
gaaugucaucagugccaaa

SEQ ID NO: 1095815 - RNA, 19 nt, Homo sapiens
  misc_RNA (1)...(19): siRNA sense strand
cuacagcaaccucacuuca

SEQ ID NO: 1095816 - RNA, 19 nt, Homo sapiens
  misc_RNA (1)...(19): siRNA sense strand
gagcguucaccuuguaaag

SEQ ID NO: 1095817 - RNA, 19 nt, Homo sapiens
  misc_RNA (1)...(19): siRNA sense strand
ucccggaggaaacacauua

SEQ ID NO: 1095818 - RNA, 19 nt, Homo sapiens
  misc_RNA (1)...(19): siRNA sense strand
agaagaccuacgaauguaa

SEQ ID NO: 1095819 - RNA, 19 nt, Homo sapiens
  misc_RNA (1)...(19): siRNA sense strand
agagaggcccuacgagugu

SEQ ID NO: 1095820 - RNA, 19 nt, Homo sapiens
  misc_RNA (1)...(19): siRNA sense strand
gcauguacgacgggagaaa

SEQ ID NO: 1095821 - RNA, 19 nt, Homo sapiens
  misc_RNA (1)...(19): siRNA sense strand
ccuuaagacucacaugaac

SEQ ID NO: 1095822 - RNA, 19 nt, Homo sapiens
  misc_RNA (1)...(19): siRNA sense strand
agaaugcgggaaauccuuu

SEQ ID NO: 1095823 - RNA, 19 nt, Homo sapiens
  misc_RNA (1)...(19): siRNA sense strand
agagaaguccacugaauac

SEQ ID NO: 1095824 - RNA, 19 nt, Homo sapiens
  misc_RNA (1)...(19): siRNA sense strand
cauaggcuccaaccugaau

SEQ ID NO: 1095825 - RNA, 19 nt, Homo sapiens
  misc_RNA (1)...(19): siRNA sense strand
gcauaggcuccaaccugaa

SEQ ID NO: 1095826 - RNA, 19 nt, Homo sapiens
  misc_RNA (1)...(19): siRNA sense strand
ucggugacuuuccaagaug

SEQ ID NO: 1095827 - RNA, 19 nt, Homo sapiens
  misc_RNA (1)...(19): siRNA sense strand
aagagcacgugaggaauca

SEQ ID NO: 1095828 - RNA, 19 nt, Homo sapiens
  misc_RNA (1)...(19): siRNA sense strand
gcgggaaagccuucaacga

SEQ ID NO: 1095829 - RNA, 19 nt, Homo sapiens
  misc_RNA (1)...(19): siRNA sense strand
gacccucucggcccugaaa

SEQ ID NO: 1095830 - RNA, 19 nt, Homo sapiens
  misc_RNA (1)...(19): siRNA sense strand
ggaaccagucaacgcugaa

SEQ ID NO: 1095831 - RNA, 19 nt, Homo sapiens
  misc_RNA (1)...(19): siRNA sense strand
aaacacauuaggauucaca

SEQ ID NO: 1095832 - RNA, 19 nt, Homo sapiens
  misc_RNA (1)...(19): siRNA sense strand
gaucucugcgggaaagcuu

SEQ ID NO: 1095833 - RNA, 19 nt, Homo sapiens
  misc_RNA (1)...(19): siRNA sense strand
cccagaauuuggaccuguu

SEQ ID NO: 1095834 - RNA, 19 nt, Homo sapiens
  misc_RNA (1)...(19): siRNA sense strand
ggacaaggauccuauggaa

SEQ ID NO: 1095835 - RNA, 19 nt, Homo sapiens
  misc_RNA (1)...(19): siRNA sense strand
gaucgaagauggagagaga

SEQ ID NO: 1095836 - RNA, 19 nt, Homo sapiens
  misc_RNA (1)...(19): siRNA sense strand
ggaagaaggugucgugaag

SEQ ID NO: 1095837 - RNA, 19 nt, Homo sapiens
  misc_RNA (1)...(19): siRNA sense strand
ucaaggaugucuaugauga

SEQ ID NO: 1095838 - RNA, 19 nt, Homo sapiens
  misc_RNA (1)...(19): siRNA sense strand
ggaggaggaugucaaguuc

SEQ ID NO: 1095839 - RNA, 19 nt, Homo sapiens
  misc_RNA (1)...(19): siRNA sense strand
gaggacaccuuccacuuug

SEQ ID NO: 1095840 - RNA, 19 nt, Homo sapiens
  misc_RNA (1)...(19): siRNA sense strand
gcugcgagcucucuucaaa

SEQ ID NO: 1095841 - RNA, 19 nt, Homo sapiens
  misc_RNA (1)...(19): siRNA sense strand
gcaaaugggccagacgaua

SEQ ID NO: 1095842 - RNA, 19 nt, Homo sapiens
  misc_RNA (1)...(19): siRNA sense strand
gaagcuucauuaugccuuu

SEQ ID NO: 1095843 - RNA, 19 nt, Homo sapiens
  misc_RNA (1)...(19): siRNA sense strand
cuacuuugcucuaaacaga

SEQ ID NO: 1095844 - RNA, 19 nt, Homo sapiens
  misc_RNA (1)...(19): siRNA sense strand
gcagauccuucccaguuug

SEQ ID NO: 1095845 - RNA, 19 nt, Homo sapiens
  misc_RNA (1)...(19): siRNA sense strand
cuaaagacgucguguccaa

SEQ ID NO: 1095846 - RNA, 19 nt, Homo sapiens
  misc_RNA (1)...(19): siRNA sense strand
ggcagauccuucccaguuu

SEQ ID NO: 1095847 - RNA, 19 nt, Homo sapiens
  misc_RNA (1)...(19): siRNA sense strand
cgccaucccuucuuuguga

SEQ ID NO: 1095848 - RNA, 19 nt, Homo sapiens
  misc_RNA (1)...(19): siRNA sense strand
uaagcgccaucccuucuuu

SEQ ID NO: 1095849 - RNA, 19 nt, Homo sapiens
  misc_RNA (1)...(19): siRNA sense strand
ccaaagaggucauguucac

SEQ ID NO: 1095850 - RNA, 19 nt, Homo sapiens
  misc_RNA (1)...(19): siRNA sense strand
caagcgaugugugcauaaa

SEQ ID NO: 1095851 - RNA, 19 nt, Homo sapiens
  misc_RNA (1)...(19): siRNA sense strand
ucacccggcucuccaaaga

SEQ ID NO: 1095852 - RNA, 19 nt, Homo sapiens
  misc_RNA (1)...(19): siRNA sense strand
ccaccuacuuugcucuaaa

SEQ ID NO: 1095853 - RNA, 19 nt, Homo sapiens
  misc_RNA (1)...(19): siRNA sense strand
gagaguaccuguccccaaa

SEQ ID NO: 1095854 - RNA, 19 nt, Homo sapiens
  misc_RNA (1)...(19): siRNA sense strand
aaggaaagcucuaccugau

SEQ ID NO: 1095855 - RNA, 19 nt, Homo sapiens
  misc_RNA (1)...(19): siRNA sense strand
gcagaggcaugaagagacu

SEQ ID NO: 1095856 - RNA, 19 nt, Homo sapiens
  misc_RNA (1)...(19): siRNA sense strand
gaaggagggcuuugagaag

SEQ ID NO: 1095857 - RNA, 19 nt, Homo sapiens
  misc_RNA (1)...(19): siRNA sense strand
ggaacgggcugcucaugac

SEQ ID NO: 1095858 - RNA, 19 nt, Homo sapiens
  misc_RNA (1)...(19): siRNA sense strand
gagcuggccuuggcuuuag

SEQ ID NO: 1095859 - RNA, 19 nt, Homo sapiens
  misc_RNA (1)...(19): siRNA sense strand
gggcagcucuacgccauga

SEQ ID NO: 1095860 - RNA, 19 nt, Homo sapiens
  misc_RNA (1)...(19): siRNA sense strand
gaucggcagugggaaguau

SEQ ID NO: 1095861 - RNA, 19 nt, Homo sapiens
  misc_RNA (1)...(19): siRNA sense strand
ccucaaggaugucuaugau

SEQ ID NO: 1095862 - RNA, 19 nt, Homo sapiens
  misc_RNA (1)...(19): siRNA sense strand
uaagaaagccacccuaaaa

SEQ ID NO: 1095863 - RNA, 19 nt, Homo sapiens
  misc_RNA (1)...(19): siRNA sense strand
gcagguucuucucugugua

SEQ ID NO: 1095864 - RNA, 19 nt, Homo sapiens
  misc_RNA (1)...(19): siRNA sense strand
gcuaugaugcggcguguga

SEQ ID NO: 1095865 - RNA, 19 nt, Homo sapiens
  misc_RNA (1)...(19): siRNA sense strand
ugaggacaccuuccacuuu

SEQ ID NO: 1095866 - RNA, 19 nt, Homo sapiens
  misc_RNA (1)...(19): siRNA sense strand
ggaagucgcgcuccaagag

SEQ ID NO: 1095867 - RNA, 19 nt, Homo sapiens
  misc_RNA (1)...(19): siRNA sense strand
caucagccaucaugugaag

SEQ ID NO: 1095868 - RNA, 19 nt, Homo sapiens
  misc_RNA (1)...(19): siRNA sense strand
gaccugagcaugaagaagu

SEQ ID NO: 1095869 - RNA, 19 nt, Homo sapiens
  misc_RNA (1)...(19): siRNA sense strand
ucaccaagaccauggacua

SEQ ID NO: 1095870 - RNA, 19 nt, Homo sapiens
  misc_RNA (1)...(19): siRNA sense strand
gaugauggcaaguuugugu

SEQ ID NO: 1095871 - RNA, 19 nt, Homo sapiens
  misc_RNA (1)...(19): siRNA sense strand
cuaugaugauggcaaguuu

SEQ ID NO: 1095872 - RNA, 19 nt, Homo sapiens
  misc_RNA (1)...(19): siRNA sense strand
agcaagaucugcacaaagu

SEQ ID NO: 1095873 - RNA, 19 nt, Homo sapiens
  misc_RNA (1)...(19): siRNA sense strand
gcucaucaccuguuuagag

SEQ ID NO: 1095874 - RNA, 19 nt, Homo sapiens
  misc_RNA (1)...(19): siRNA sense strand
ggccuuggcuuuagaccau

SEQ ID NO: 1095875 - RNA, 19 nt, Homo sapiens
  misc_RNA (1)...(19): siRNA sense strand
aagaaggugucgugaagga

SEQ ID NO: 1095876 - RNA, 19 nt, Homo sapiens
  misc_RNA (1)...(19): siRNA sense strand
gaaacugggacucgauauc

SEQ ID NO: 1095877 - RNA, 19 nt, Homo sapiens
  misc_RNA (1)...(19): siRNA sense strand
gggaaacugggacucgaua

SEQ ID NO: 1095878 - RNA, 19 nt, Homo sapiens
  misc_RNA (1)...(19): siRNA sense strand
caaaugggccagacgauac

SEQ ID NO: 1095879 - RNA, 19 nt, Homo sapiens
  misc_RNA (1)...(19): siRNA sense strand
ugaaggagggcuuugagaa

SEQ ID NO: 1095880 - RNA, 19 nt, Homo sapiens
  misc_RNA (1)...(19): siRNA sense strand
aggaggaugucaaguucua

SEQ ID NO: 1095881 - RNA, 19 nt, Homo sapiens
  misc_RNA (1)...(19): siRNA sense strand
cgaguaacauccuguacag

SEQ ID NO: 1095882 - RNA, 19 nt, Homo sapiens
  misc_RNA (1)...(19): siRNA sense strand
gaaagccacccuaaaaguu

SEQ ID NO: 1095883 - RNA, 19 nt, Homo sapiens
  misc_RNA (1)...(19): siRNA sense strand
gggaacgggcugcucauga

SEQ ID NO: 1095884 - RNA, 19 nt, Homo sapiens
  misc_RNA (1)...(19): siRNA sense strand
ggaacaacauccacuucac

SEQ ID NO: 1095885 - RNA, 19 nt, Homo sapiens
  misc_RNA (1)...(19): siRNA sense strand
acagcaagaucugcacaaa

SEQ ID NO: 1095886 - RNA, 19 nt, Homo sapiens
  misc_RNA (1)...(19): siRNA sense strand
ugaguaaggaggccauuga

SEQ ID NO: 1095887 - RNA, 19 nt, Homo sapiens
  misc_RNA (1)...(19): siRNA sense strand
cgugugacaucuggaguuu

SEQ ID NO: 1095888 - RNA, 19 nt, Homo sapiens
  misc_RNA (1)...(19): siRNA sense strand
gaacaucaucacccucaag

SEQ ID NO: 1095889 - RNA, 19 nt, Homo sapiens
  misc_RNA (1)...(19): siRNA sense strand
gcaagcgaugugugcauaa

SEQ ID NO: 1095890 - RNA, 19 nt, Homo sapiens
  misc_RNA (1)...(19): siRNA sense strand
acaaggauccuauggaaag

SEQ ID NO: 1095891 - RNA, 19 nt, Homo sapiens
  misc_RNA (1)...(19): siRNA sense strand
gcucagcgcagaggcauga

SEQ ID NO: 1095892 - RNA, 19 nt, Homo sapiens
  misc_RNA (1)...(19): siRNA sense strand
acaccaugcuggcaggauu

SEQ ID NO: 1095893 - RNA, 19 nt, Homo sapiens
  misc_RNA (1)...(19): siRNA sense strand
caucuuggcagaagugaau

SEQ ID NO: 1095894 - RNA, 19 nt, Homo sapiens
  misc_RNA (1)...(19): siRNA sense strand
ugaaggagauagacaucag

SEQ ID NO: 1095895 - RNA, 19 nt, Homo sapiens
  misc_RNA (1)...(19): siRNA sense strand
gaccugaagccgaguaaca

SEQ ID NO: 1095896 - RNA, 19 nt, Homo sapiens
  misc_RNA (1)...(19): siRNA sense strand
caucaccuguuuagaggau

SEQ ID NO: 1095897 - RNA, 19 nt, Homo sapiens
  misc_RNA (1)...(19): siRNA sense strand
gcgggacgaucgaguacau

SEQ ID NO: 1095898 - RNA, 19 nt, Homo sapiens
  misc_RNA (1)...(19): siRNA sense strand
gaagaggggcacauuaaga

SEQ ID NO: 1095899 - RNA, 19 nt, Homo sapiens
  misc_RNA (1)...(19): siRNA sense strand
cgaugcaagugcucaaaca

SEQ ID NO: 1095900 - RNA, 19 nt, Homo sapiens
  misc_RNA (1)...(19): siRNA sense strand
caucaucacccucaaggau

SEQ ID NO: 1095901 - RNA, 19 nt, Homo sapiens
  misc_RNA (1)...(19): siRNA sense strand
gggaacaacauccacuuca

SEQ ID NO: 1095902 - RNA, 19 nt, Homo sapiens
  misc_RNA (1)...(19): siRNA sense strand
gcacaaagucccaguucac

SEQ ID NO: 1095903 - RNA, 19 nt, Homo sapiens
  misc_RNA (1)...(19): siRNA sense strand
guuuagaggauucagcuuu

SEQ ID NO: 1095904 - RNA, 19 nt, Homo sapiens
  misc_RNA (1)...(19): siRNA sense strand
uuaagaaagccacccuaaa

SEQ ID NO: 1095905 - RNA, 19 nt, Homo sapiens
  misc_RNA (1)...(19): siRNA sense strand
uuuagaggauucagcuuug

SEQ ID NO: 1095906 - RNA, 19 nt, Homo sapiens
  misc_RNA (1)...(19): siRNA sense strand
gacaaggauccuauggaaa

SEQ ID NO: 1095907 - RNA, 19 nt, Homo sapiens
  misc_RNA (1)...(19): siRNA sense strand
gaguaugccgugaagauca

SEQ ID NO: 1095908 - RNA, 19 nt, Homo sapiens
  misc_RNA (1)...(19): siRNA sense strand
cacauuaagaucacagauu

SEQ ID NO: 1095909 - RNA, 19 nt, Homo sapiens
  misc_RNA (1)...(19): siRNA sense strand
ggccagcacccgaacauca

SEQ ID NO: 1095910 - RNA, 19 nt, Homo sapiens
  misc_RNA (1)...(19): siRNA sense strand
ccauggcucucauccucaa

SEQ ID NO: 1095911 - RNA, 19 nt, Homo sapiens
  misc_RNA (1)...(19): siRNA sense strand
cggaggaggaugucaaguu

SEQ ID NO: 1095912 - RNA, 19 nt, Homo sapiens
  misc_RNA (1)...(19): siRNA sense strand
gcgcagaggcaugaagaga

SEQ ID NO: 1095913 - RNA, 19 nt, Homo sapiens
  misc_RNA (1)...(19): siRNA sense strand
gauaucugacgcagcuaaa

SEQ ID NO: 1095914 - RNA, 19 nt, Homo sapiens
  misc_RNA (1)...(19): siRNA sense strand
ggaaacugggacucgauau

SEQ ID NO: 1095915 - RNA, 19 nt, Homo sapiens
  misc_RNA (1)...(19): siRNA sense strand
ugugacaucuggaguuugg

SEQ ID NO: 1095916 - RNA, 19 nt, Homo sapiens
  misc_RNA (1)...(19): siRNA sense strand
ccugaagcgucaaggcuau

SEQ ID NO: 1095917 - RNA, 19 nt, Homo sapiens
  misc_RNA (1)...(19): siRNA sense strand
aggcagauccuucccaguu

SEQ ID NO: 1095918 - RNA, 19 nt, Homo sapiens
  misc_RNA (1)...(19): siRNA sense strand
cggaagagauugagauccu

SEQ ID NO: 1095919 - RNA, 19 nt, Homo sapiens
  misc_RNA (1)...(19): siRNA sense strand
ugagcuggccuuggcuuua

SEQ ID NO: 1095920 - RNA, 19 nt, Homo sapiens
  misc_RNA (1)...(19): siRNA sense strand
agauagacaucagccauca

SEQ ID NO: 1095921 - RNA, 19 nt, Homo sapiens
  misc_RNA (1)...(19): siRNA sense strand
agagacaucuuggcagaag

SEQ ID NO: 1095922 - RNA, 19 nt, Homo sapiens
  misc_RNA (1)...(19): siRNA sense strand
uaucugacgcagcuaaaga

SEQ ID NO: 1095923 - RNA, 19 nt, Homo sapiens
  misc_RNA (1)...(19): siRNA sense strand
caaacgcucaucaccuguu

SEQ ID NO: 1095924 - RNA, 19 nt, Homo sapiens
  misc_RNA (1)...(19): siRNA sense strand
ugacggaguggaggaaauu

SEQ ID NO: 1095925 - RNA, 19 nt, Homo sapiens
  misc_RNA (1)...(19): siRNA sense strand
gaucugaagccugagaaca

SEQ ID NO: 1095926 - RNA, 19 nt, Homo sapiens
  misc_RNA (1)...(19): siRNA sense strand
gaacgggcugcucaugaca

SEQ ID NO: 1095927 - RNA, 19 nt, Homo sapiens
  misc_RNA (1)...(19): siRNA sense strand
cuuaagaaagccacccuaa

SEQ ID NO: 1095928 - RNA, 19 nt, Homo sapiens
  misc_RNA (1)...(19): siRNA sense strand
gaugaagaggggcacauua

SEQ ID NO: 1095929 - RNA, 19 nt, Homo sapiens
  misc_RNA (1)...(19): siRNA sense strand
aguuugagcugcugaaggu

SEQ ID NO: 1095930 - RNA, 19 nt, Homo sapiens
  misc_RNA (1)...(19): siRNA sense strand
ccugcuacacggccaauuu

SEQ ID NO: 1095931 - RNA, 19 nt, Homo sapiens
  misc_RNA (1)...(19): siRNA sense strand
ccaagaccauggacuaccu

SEQ ID NO: 1095932 - RNA, 19 nt, Homo sapiens
  misc_RNA (1)...(19): siRNA sense strand
cgauaucugacgcagcuaa

SEQ ID NO: 1095933 - RNA, 19 nt, Homo sapiens
  misc_RNA (1)...(19): siRNA sense strand
aaagacgucguguccaaga

SEQ ID NO: 1095934 - RNA, 19 nt, Homo sapiens
  misc_RNA (1)...(19): siRNA sense strand
gggaagaggaugugauuua

SEQ ID NO: 1095935 - RNA, 19 nt, Homo sapiens
  misc_RNA (1)...(19): siRNA sense strand
ggaagaggaugugauuuau

SEQ ID NO: 1095936 - RNA, 19 nt, Homo sapiens
  misc_RNA (1)...(19): siRNA sense strand
gaagagagagagacaagaa

SEQ ID NO: 1095937 - RNA, 19 nt, Homo sapiens
  misc_RNA (1)...(19): siRNA sense strand
uaaagcaaguugacucuau

SEQ ID NO: 1095938 - RNA, 19 nt, Homo sapiens
  misc_RNA (1)...(19): siRNA sense strand
gaagaggaugugauuuaua

SEQ ID NO: 1095939 - RNA, 19 nt, Homo sapiens
  misc_RNA (1)...(19): siRNA sense strand
ucgggaaacuccuaacaua

SEQ ID NO: 1095940 - RNA, 19 nt, Homo sapiens
  misc_RNA (1)...(19): siRNA sense strand
aaaggaagauccagcaaau

SEQ ID NO: 1095941 - RNA, 19 nt, Homo sapiens
  misc_RNA (1)...(19): siRNA sense strand
caaguugacucuauugucu

SEQ ID NO: 1095942 - RNA, 19 nt, Homo sapiens
  misc_RNA (1)...(19): siRNA sense strand
gaacacagaguacgacaca

SEQ ID NO: 1095943 - RNA, 19 nt, Homo sapiens
  misc_RNA (1)...(19): siRNA sense strand
gaagagaguggacauuugu

SEQ ID NO: 1095944 - RNA, 19 nt, Homo sapiens
  misc_RNA (1)...(19): siRNA sense strand
gcaaacugaagaagaauga

SEQ ID NO: 1095945 - RNA, 19 nt, Homo sapiens
  misc_RNA (1)...(19): siRNA sense strand
gccaaugagucccauaaug

SEQ ID NO: 1095946 - RNA, 19 nt, Homo sapiens
  misc_RNA (1)...(19): siRNA sense strand
caacaugccucacccucau

SEQ ID NO: 1095947 - RNA, 19 nt, Homo sapiens
  misc_RNA (1)...(19): siRNA sense strand
gggaaacuccuaacauaug

SEQ ID NO: 1095948 - RNA, 19 nt, Homo sapiens
  misc_RNA (1)...(19): siRNA sense strand
gacaagaagaguacauuga

SEQ ID NO: 1095949 - RNA, 19 nt, Homo sapiens
  misc_RNA (1)...(19): siRNA sense strand
aagaguacauugaagagaa

SEQ ID NO: 1095950 - RNA, 19 nt, Homo sapiens
  misc_RNA (1)...(19): siRNA sense strand
gcaccugugugaccaaucu

SEQ ID NO: 1095951 - RNA, 19 nt, Homo sapiens
  misc_RNA (1)...(19): siRNA sense strand
agaagagaguggacauuug

SEQ ID NO: 1095952 - RNA, 19 nt, Homo sapiens
  misc_RNA (1)...(19): siRNA sense strand
aaagcaaguugacucuauu

SEQ ID NO: 1095953 - RNA, 19 nt, Homo sapiens
  misc_RNA (1)...(19): siRNA sense strand
ggaaacuccuaacauaugc

SEQ ID NO: 1095954 - RNA, 19 nt, Homo sapiens
  misc_RNA (1)...(19): siRNA sense strand
gagaguagacuucccagau

SEQ ID NO: 1095955 - RNA, 19 nt, Homo sapiens
  misc_RNA (1)...(19): siRNA sense strand
caagaagaguacauugaag

SEQ ID NO: 1095956 - RNA, 19 nt, Homo sapiens
  misc_RNA (1)...(19): siRNA sense strand
acucagggaucuacuaugu

SEQ ID NO: 1095957 - RNA, 19 nt, Homo sapiens
  misc_RNA (1)...(19): siRNA sense strand
acacaaucccucacacuaa

SEQ ID NO: 1095958 - RNA, 19 nt, Homo sapiens
  misc_RNA (1)...(19): siRNA sense strand
gagagagacaagaagagua

SEQ ID NO: 1095959 - RNA, 19 nt, Homo sapiens
  misc_RNA (1)...(19): siRNA sense strand
aagaggaugugauuuauac

SEQ ID NO: 1095960 - RNA, 19 nt, Homo sapiens
  misc_RNA (1)...(19): siRNA sense strand
gacacaaucccucacacua

SEQ ID NO: 1095961 - RNA, 19 nt, Homo sapiens
  misc_RNA (1)...(19): siRNA sense strand
cacaaucccucacacuaau

SEQ ID NO: 1095962 - RNA, 19 nt, Homo sapiens
  misc_RNA (1)...(19): siRNA sense strand
agaguagacuucccagaug

SEQ ID NO: 1095963 - RNA, 19 nt, Homo sapiens
  misc_RNA (1)...(19): siRNA sense strand
uaaaggaagauccagcaaa

SEQ ID NO: 1095964 - RNA, 19 nt, Homo sapiens
  misc_RNA (1)...(19): siRNA sense strand
gaagaagagaguggacauu

SEQ ID NO: 1095965 - RNA, 19 nt, Homo sapiens
  misc_RNA (1)...(19): siRNA sense strand
acaagaagaguacauugaa

SEQ ID NO: 1095966 - RNA, 19 nt, Homo sapiens
  misc_RNA (1)...(19): siRNA sense strand
gcuauuugccuaugagaau

SEQ ID NO: 1095967 - RNA, 19 nt, Homo sapiens
  misc_RNA (1)...(19): siRNA sense strand
gaagaguacauugaagaga

SEQ ID NO: 1095968 - RNA, 19 nt, Homo sapiens
  misc_RNA (1)...(19): siRNA sense strand
aagaauggcaccuguguga

SEQ ID NO: 1095969 - RNA, 19 nt, Homo sapiens
  misc_RNA (1)...(19): siRNA sense strand
ccuaugagaauguuaucua

SEQ ID NO: 1095970 - RNA, 19 nt, Homo sapiens
  misc_RNA (1)...(19): siRNA sense strand
ggaacccugucagcagaaa

SEQ ID NO: 1095971 - RNA, 19 nt, Homo sapiens
  misc_RNA (1)...(19): siRNA sense strand
gagaaagugauaugaccuu

SEQ ID NO: 1095972 - RNA, 19 nt, Homo sapiens
  misc_RNA (1)...(19): siRNA sense strand
gagacaagaagaguacauu

SEQ ID NO: 1095973 - RNA, 19 nt, Homo sapiens
  misc_RNA (1)...(19): siRNA sense strand
gaaagugauaugaccuuca

SEQ ID NO: 1095974 - RNA, 19 nt, Homo sapiens
  misc_RNA (1)...(19): siRNA sense strand
gcaaguugacucuauuguc

SEQ ID NO: 1095975 - RNA, 19 nt, Homo sapiens
  misc_RNA (1)...(19): siRNA sense strand
aagaagagaguggacauuu

SEQ ID NO: 1095976 - RNA, 19 nt, Homo sapiens
  misc_RNA (1)...(19): siRNA sense strand
ccaugggucugcagagcaa

SEQ ID NO: 1095977 - RNA, 19 nt, Homo sapiens
  misc_RNA (1)...(19): siRNA sense strand
ucuauugucuggaccuuca

SEQ ID NO: 1095978 - RNA, 19 nt, Homo sapiens
  misc_RNA (1)...(19): siRNA sense strand
gugaaggugcugcugauga

SEQ ID NO: 1095979 - RNA, 19 nt, Homo sapiens
  misc_RNA (1)...(19): siRNA sense strand
gagagaacacagaguacga

SEQ ID NO: 1095980 - RNA, 19 nt, Homo sapiens
  misc_RNA (1)...(19): siRNA sense strand
guacuggggcuauuucuuu

SEQ ID NO: 1095981 - RNA, 19 nt, Homo sapiens
  misc_RNA (1)...(19): siRNA sense strand
gccucacccucaucuauau

SEQ ID NO: 1095982 - RNA, 19 nt, Homo sapiens
  misc_RNA (1)...(19): siRNA sense strand
cagcaaauacgguuuacuc

SEQ ID NO: 1095983 - RNA, 19 nt, Homo sapiens
  misc_RNA (1)...(19): siRNA sense strand
gaaguccaaaguaaagcaa

SEQ ID NO: 1095984 - RNA, 19 nt, Homo sapiens
  misc_RNA (1)...(19): siRNA sense strand
cuaugagaauguuaucuag

SEQ ID NO: 1095985 - RNA, 19 nt, Homo sapiens
  misc_RNA (1)...(19): siRNA sense strand
aagaagaguacauugaaga

SEQ ID NO: 1095986 - RNA, 19 nt, Homo sapiens
  misc_RNA (1)...(19): siRNA sense strand
ggucugcagagcaauaaga

SEQ ID NO: 1095987 - RNA, 19 nt, Homo sapiens
  misc_RNA (1)...(19): siRNA sense strand
agacacaccaaggcuauuu

SEQ ID NO: 1095988 - RNA, 19 nt, Homo sapiens
  misc_RNA (1)...(19): siRNA sense strand
gauggaaaauccccacuca

SEQ ID NO: 1095989 - RNA, 19 nt, Homo sapiens
  misc_RNA (1)...(19): siRNA sense strand
acacagaguacgacacaau

SEQ ID NO: 1095990 - RNA, 19 nt, Homo sapiens
  misc_RNA (1)...(19): siRNA sense strand
cagccaaugagucccauaa

SEQ ID NO: 1095991 - RNA, 19 nt, Homo sapiens
  misc_RNA (1)...(19): siRNA sense strand
gaucuacuauguggggaua

SEQ ID NO: 1095992 - RNA, 19 nt, Homo sapiens
  misc_RNA (1)...(19): siRNA sense strand
ccagacacaccaaggcuau

SEQ ID NO: 1095993 - RNA, 19 nt, Homo sapiens
  misc_RNA (1)...(19): siRNA sense strand
ccucuggacccgugaaaga

SEQ ID NO: 1095994 - RNA, 19 nt, Homo sapiens
  misc_RNA (1)...(19): siRNA sense strand
ccaaaguaaagcaaguuga

SEQ ID NO: 1095995 - RNA, 19 nt, Homo sapiens
  misc_RNA (1)...(19): siRNA sense strand
ucuacgagcaccugucaaa

SEQ ID NO: 1095996 - RNA, 19 nt, Homo sapiens
  misc_RNA (1)...(19): siRNA sense strand
guaaagcaaguugacucua

SEQ ID NO: 1095997 - RNA, 19 nt, Homo sapiens
  misc_RNA (1)...(19): siRNA sense strand
ccugcucagucucuuugua

SEQ ID NO: 1095998 - RNA, 19 nt, Homo sapiens
  misc_RNA (1)...(19): siRNA sense strand
ugaaggugcugcugaugac

SEQ ID NO: 1095999 - RNA, 19 nt, Homo sapiens
  misc_RNA (1)...(19): siRNA sense strand
cugcagagcaauaagaaug

SEQ ID NO: 1096000 - RNA, 19 nt, Homo sapiens
  misc_RNA (1)...(19): siRNA sense strand
caaaguaaagcaaguugac

SEQ ID NO: 1096001 - RNA, 19 nt, Homo sapiens
  misc_RNA (1)...(19): siRNA sense strand
cuggagagaacacagagua

SEQ ID NO: 1096002 - RNA, 19 nt, Homo sapiens
  misc_RNA (1)...(19): siRNA sense strand
ccucaucuauauccuuugg

SEQ ID NO: 1096003 - RNA, 19 nt, Homo sapiens
  misc_RNA (1)...(19): siRNA sense strand
gucuggaccuucaacacaa

SEQ ID NO: 1096004 - RNA, 19 nt, Homo sapiens
  misc_RNA (1)...(19): siRNA sense strand
agagagagagacaagaaga

SEQ ID NO: 1096005 - RNA, 19 nt, Homo sapiens
  misc_RNA (1)...(19): siRNA sense strand
ccuccugugucuccuguug

SEQ ID NO: 1096006 - RNA, 19 nt, Homo sapiens
  misc_RNA (1)...(19): siRNA sense strand
acccucaucuauauccuuu

SEQ ID NO: 1096007 - RNA, 19 nt, Homo sapiens
  misc_RNA (1)...(19): siRNA sense strand
aggaguacgugcugcaugu

SEQ ID NO: 1096008 - RNA, 19 nt, Homo sapiens
  misc_RNA (1)...(19): siRNA sense strand
aagaaugacucagggaucu

SEQ ID NO: 1096009 - RNA, 19 nt, Homo sapiens
  misc_RNA (1)...(19): siRNA sense strand
gcuggucgguuccguuggu

SEQ ID NO: 1096010 - RNA, 19 nt, Homo sapiens
  misc_RNA (1)...(19): siRNA sense strand
ggauauacagcucaucacu

SEQ ID NO: 1096011 - RNA, 19 nt, Homo sapiens
  misc_RNA (1)...(19): siRNA sense strand
ugacucagggaucuacuau

SEQ ID NO: 1096012 - RNA, 19 nt, Homo sapiens
  misc_RNA (1)...(19): siRNA sense strand
ucacacuaauagaacaauc

SEQ ID NO: 1096013 - RNA, 19 nt, Homo sapiens
  misc_RNA (1)...(19): siRNA sense strand
agacaagaagaguacauug

SEQ ID NO: 1096014 - RNA, 19 nt, Homo sapiens
  misc_RNA (1)...(19): siRNA sense strand
cgggaaacuccuaacauau

SEQ ID NO: 1096015 - RNA, 19 nt, Homo sapiens
  misc_RNA (1)...(19): siRNA sense strand
cguaauagggagagaguag

SEQ ID NO: 1096016 - RNA, 19 nt, Homo sapiens
  misc_RNA (1)...(19): siRNA sense strand
guaauagggagagaguaga

SEQ ID NO: 1096017 - RNA, 19 nt, Homo sapiens
  misc_RNA (1)...(19): siRNA sense strand
aggaagauccagcaaauac

SEQ ID NO: 1096018 - RNA, 19 nt, Homo sapiens
  misc_RNA (1)...(19): siRNA sense strand
acaaucccucacacuaaua

SEQ ID NO: 1096019 - RNA, 19 nt, Homo sapiens
  misc_RNA (1)...(19): siRNA sense strand
gagagagagacaagaagag

SEQ ID NO: 1096020 - RNA, 19 nt, Homo sapiens
  misc_RNA (1)...(19): siRNA sense strand
gauccagcaaauacgguuu

SEQ ID NO: 1096021 - RNA, 19 nt, Homo sapiens
  misc_RNA (1)...(19): siRNA sense strand
ugccucacccucaucuaua

SEQ ID NO: 1096022 - RNA, 19 nt, Homo sapiens
  misc_RNA (1)...(19): siRNA sense strand
ccccugaaguccaaaguaa

SEQ ID NO: 1096023 - RNA, 19 nt, Homo sapiens
  misc_RNA (1)...(19): siRNA sense strand
agaguacauugaagagaag

SEQ ID NO: 1096024 - RNA, 19 nt, Homo sapiens
  misc_RNA (1)...(19): siRNA sense strand
aguacgugcugcaugucua

SEQ ID NO: 1096025 - RNA, 19 nt, Homo sapiens
  misc_RNA (1)...(19): siRNA sense strand
cuauuugccuaugagaaug

SEQ ID NO: 1096026 - RNA, 19 nt, Homo sapiens
  misc_RNA (1)...(19): siRNA sense strand
aaggaagauccagcaaaua

SEQ ID NO: 1096027 - RNA, 19 nt, Homo sapiens
  misc_RNA (1)...(19): siRNA sense strand
gaaugacucagggaucuac

SEQ ID NO: 1096028 - RNA, 19 nt, Homo sapiens
  misc_RNA (1)...(19): siRNA sense strand
gcaccugucaaagccuaaa

SEQ ID NO: 1096029 - RNA, 19 nt, Homo sapiens
  misc_RNA (1)...(19): siRNA sense strand
ggcaaggccuucaacaaga

SEQ ID NO: 1096030 - RNA, 19 nt, Homo sapiens
  misc_RNA (1)...(19): siRNA sense strand
gcacuucagaccucaguaa

SEQ ID NO: 1096031 - RNA, 19 nt, Homo sapiens
  misc_RNA (1)...(19): siRNA sense strand
ggcaaggccuucagcaaga

SEQ ID NO: 1096032 - RNA, 19 nt, Homo sapiens
  misc_RNA (1)...(19): siRNA sense strand
gucaugaacugaaggcauu

SEQ ID NO: 1096033 - RNA, 19 nt, Homo sapiens
  misc_RNA (1)...(19): siRNA sense strand
gaacuucuccagcacuuca

SEQ ID NO: 1096034 - RNA, 19 nt, Homo sapiens
  misc_RNA (1)...(19): siRNA sense strand
gcucgucccugauaaagca

SEQ ID NO: 1096035 - RNA, 19 nt, Homo sapiens
  misc_RNA (1)...(19): siRNA sense strand
gcaaggccuucagcaagaa

SEQ ID NO: 1096036 - RNA, 19 nt, Homo sapiens
  misc_RNA (1)...(19): siRNA sense strand
gcaaggccuucaacaagag

SEQ ID NO: 1096037 - RNA, 19 nt, Homo sapiens
  misc_RNA (1)...(19): siRNA sense strand
gaagcucgucccugauaaa

SEQ ID NO: 1096038 - RNA, 19 nt, Homo sapiens
  misc_RNA (1)...(19): siRNA sense strand
cgaagcucgucccugauaa

SEQ ID NO: 1096039 - RNA, 19 nt, Homo sapiens
  misc_RNA (1)...(19): siRNA sense strand
gcaaggccuucagccagaa

SEQ ID NO: 1096040 - RNA, 19 nt, Homo sapiens
  misc_RNA (1)...(19): siRNA sense strand
gaaccacaccggcgagaag

SEQ ID NO: 1096041 - RNA, 19 nt, Homo sapiens
  misc_RNA (1)...(19): siRNA sense strand
ccgaagcucgucccugaua

SEQ ID NO: 1096042 - RNA, 19 nt, Homo sapiens
  misc_RNA (1)...(19): siRNA sense strand
ccagagcgccuaccucauc

SEQ ID NO: 1096043 - RNA, 19 nt, Homo sapiens
  misc_RNA (1)...(19): siRNA sense strand
ugauaaagcaccaaaggau

SEQ ID NO: 1096044 - RNA, 19 nt, Homo sapiens
  misc_RNA (1)...(19): siRNA sense strand
ccagagcuccuaccucauc

SEQ ID NO: 1096045 - RNA, 19 nt, Homo sapiens
  misc_RNA (1)...(19): siRNA sense strand
gcucaguacccgcauguca

SEQ ID NO: 1096046 - RNA, 19 nt, Homo sapiens
  misc_RNA (1)...(19): siRNA sense strand
caagaacuccucccucacu

SEQ ID NO: 1096047 - RNA, 19 nt, Homo sapiens
  misc_RNA (1)...(19): siRNA sense strand
gcucgucccucaccaucca

SEQ ID NO: 1096048 - RNA, 19 nt, Homo sapiens
  misc_RNA (1)...(19): siRNA sense strand
cggcaaggccuucaacaag

SEQ ID NO: 1096049 - RNA, 19 nt, Homo sapiens
  misc_RNA (1)...(19): siRNA sense strand
gcggcaaggccuucaacaa

SEQ ID NO: 1096050 - RNA, 19 nt, Homo sapiens
  misc_RNA (1)...(19): siRNA sense strand
gugcagagugggagccauu

SEQ ID NO: 1096051 - RNA, 19 nt, Homo sapiens
  misc_RNA (1)...(19): siRNA sense strand
gccagaacaugcaccucau

SEQ ID NO: 1096052 - RNA, 19 nt, Homo sapiens
  misc_RNA (1)...(19): siRNA sense strand
gcaccagcgcuuccacauc

SEQ ID NO: 1096053 - RNA, 19 nt, Homo sapiens
  misc_RNA (1)...(19): siRNA sense strand
gaguguggcaaggccuuua

SEQ ID NO: 1096054 - RNA, 19 nt, Homo sapiens
  misc_RNA (1)...(19): siRNA sense strand
ggcgagaagccguaugugu

SEQ ID NO: 1096055 - RNA, 19 nt, Homo sapiens
  misc_RNA (1)...(19): siRNA sense strand
gauccacaccggcgagaag

SEQ ID NO: 1096056 - RNA, 19 nt, Homo sapiens
  misc_RNA (1)...(19): siRNA sense strand
ugacauuucggaagacaag

SEQ ID NO: 1096057 - RNA, 19 nt, Homo sapiens
  misc_RNA (1)...(19): siRNA sense strand
aaaagccguuugaguguga

SEQ ID NO: 1096058 - RNA, 19 nt, Homo sapiens
  misc_RNA (1)...(19): siRNA sense strand
ggagaaaagccguuugagu

SEQ ID NO: 1096059 - RNA, 19 nt, Homo sapiens
  misc_RNA (1)...(19): siRNA sense strand
ugggagccauugggaauuc

SEQ ID NO: 1096060 - RNA, 19 nt, Homo sapiens
  misc_RNA (1)...(19): siRNA sense strand
gcggcaaggccuucagcaa

SEQ ID NO: 1096061 - RNA, 19 nt, Homo sapiens
  misc_RNA (1)...(19): siRNA sense strand
ggaaccacaccggcgagaa

SEQ ID NO: 1096062 - RNA, 19 nt, Homo sapiens
  misc_RNA (1)...(19): siRNA sense strand
gaaacauacuguacaagaa

SEQ ID NO: 1096063 - RNA, 19 nt, Homo sapiens
  misc_RNA (1)...(19): siRNA sense strand
gaaaugaaggccugaaauu

SEQ ID NO: 1096064 - RNA, 19 nt, Homo sapiens
  misc_RNA (1)...(19): siRNA sense strand
caagagagguuuagaacau

SEQ ID NO: 1096065 - RNA, 19 nt, Homo sapiens
  misc_RNA (1)...(19): siRNA sense strand
caauagguguugacuuuaa

SEQ ID NO: 1096066 - RNA, 19 nt, Homo sapiens
  misc_RNA (1)...(19): siRNA sense strand
ggaaauaaggcuaaacuug

SEQ ID NO: 1096067 - RNA, 19 nt, Homo sapiens
  misc_RNA (1)...(19): siRNA sense strand
guucacagaugauacguuu

SEQ ID NO: 1096068 - RNA, 19 nt, Homo sapiens
  misc_RNA (1)...(19): siRNA sense strand
ggaaacauacuguacaaga

SEQ ID NO: 1096069 - RNA, 19 nt, Homo sapiens
  misc_RNA (1)...(19): siRNA sense strand
gaaagcauuccauguuauu

SEQ ID NO: 1096070 - RNA, 19 nt, Homo sapiens
  misc_RNA (1)...(19): siRNA sense strand
gaaagugagaaccagaaua

SEQ ID NO: 1096071 - RNA, 19 nt, Homo sapiens
  misc_RNA (1)...(19): siRNA sense strand
gaacauuaacucccagcua

SEQ ID NO: 1096072 - RNA, 19 nt, Homo sapiens
  misc_RNA (1)...(19): siRNA sense strand
aaagugagaaccagaauaa

SEQ ID NO: 1096073 - RNA, 19 nt, Homo sapiens
  misc_RNA (1)...(19): siRNA sense strand
acgaaagcauuccauguua

SEQ ID NO: 1096074 - RNA, 19 nt, Homo sapiens
  misc_RNA (1)...(19): siRNA sense strand
gaauaaaggagucaaacug

SEQ ID NO: 1096075 - RNA, 19 nt, Homo sapiens
  misc_RNA (1)...(19): siRNA sense strand
agagagguuuagaacauua

SEQ ID NO: 1096076 - RNA, 19 nt, Homo sapiens
  misc_RNA (1)...(19): siRNA sense strand
cgaaagcauuccauguuau

SEQ ID NO: 1096077 - RNA, 19 nt, Homo sapiens
  misc_RNA (1)...(19): siRNA sense strand
ugaagucgauagaaaugaa

SEQ ID NO: 1096078 - RNA, 19 nt, Homo sapiens
  misc_RNA (1)...(19): siRNA sense strand
ugcacaggguguuauauua

SEQ ID NO: 1096079 - RNA, 19 nt, Homo sapiens
  misc_RNA (1)...(19): siRNA sense strand
uaaacaugcuaguuggaaa

SEQ ID NO: 1096080 - RNA, 19 nt, Homo sapiens
  misc_RNA (1)...(19): siRNA sense strand
caugcuaguuggaaauaaa

SEQ ID NO: 1096081 - RNA, 19 nt, Homo sapiens
  misc_RNA (1)...(19): siRNA sense strand
ucacagaugauacguuuga

SEQ ID NO: 1096082 - RNA, 19 nt, Homo sapiens
  misc_RNA (1)...(19): siRNA sense strand
aggcuaaacuugcaauaug

SEQ ID NO: 1096083 - RNA, 19 nt, Homo sapiens
  misc_RNA (1)...(19): siRNA sense strand
ggaggagccuguggugguu

SEQ ID NO: 1096084 - RNA, 19 nt, Homo sapiens
  misc_RNA (1)...(19): siRNA sense strand
gcacaggguguuauauuag

SEQ ID NO: 1096085 - RNA, 19 nt, Homo sapiens
  misc_RNA (1)...(19): siRNA sense strand
cauuaacucccagcuauua

SEQ ID NO: 1096086 - RNA, 19 nt, Homo sapiens
  misc_RNA (1)...(19): siRNA sense strand
gcacgaaagcauuccaugu

SEQ ID NO: 1096087 - RNA, 19 nt, Homo sapiens
  misc_RNA (1)...(19): siRNA sense strand
gaugucacaagaagagaua

SEQ ID NO: 1096088 - RNA, 19 nt, Homo sapiens
  misc_RNA (1)...(19): siRNA sense strand
gaaauuugcacgaaagcau

SEQ ID NO: 1096089 - RNA, 19 nt, Homo sapiens
  misc_RNA (1)...(19): siRNA sense strand
cacaagaagagauacauuu

SEQ ID NO: 1096090 - RNA, 19 nt, Homo sapiens
  misc_RNA (1)...(19): siRNA sense strand
aacauuaacucccagcuau

SEQ ID NO: 1096091 - RNA, 19 nt, Homo sapiens
  misc_RNA (1)...(19): siRNA sense strand
ggauacugcuggucaagag

SEQ ID NO: 1096092 - RNA, 19 nt, Homo sapiens
  misc_RNA (1)...(19): siRNA sense strand
aaugaaggccugaaauuug

SEQ ID NO: 1096093 - RNA, 19 nt, Homo sapiens
  misc_RNA (1)...(19): siRNA sense strand
gaauuggaaacauacugua

SEQ ID NO: 1096094 - RNA, 19 nt, Homo sapiens
  misc_RNA (1)...(19): siRNA sense strand
ggauggaaauaaggcuaaa

SEQ ID NO: 1096095 - RNA, 19 nt, Homo sapiens
  misc_RNA (1)...(19): siRNA sense strand
acaaugugccuuugaagaa

SEQ ID NO: 1096096 - RNA, 19 nt, Homo sapiens
  misc_RNA (1)...(19): siRNA sense strand
aaauaaggcuaaacuugca

SEQ ID NO: 1096097 - RNA, 19 nt, Homo sapiens
  misc_RNA (1)...(19): siRNA sense strand
aaacuugcaauaugggaua

SEQ ID NO: 1096098 - RNA, 19 nt, Homo sapiens
  misc_RNA (1)...(19): siRNA sense strand
uaaaggagucaaacuguca

SEQ ID NO: 1096099 - RNA, 19 nt, Homo sapiens
  misc_RNA (1)...(19): siRNA sense strand
cuggauaauugguuaaaug

SEQ ID NO: 1096100 - RNA, 19 nt, Homo sapiens
  misc_RNA (1)...(19): siRNA sense strand
ggucaagagagguuuagaa

SEQ ID NO: 1096101 - RNA, 19 nt, Homo sapiens
  misc_RNA (1)...(19): siRNA sense strand
ugacauaguaaacaugcua

SEQ ID NO: 1096102 - RNA, 19 nt, Homo sapiens
  misc_RNA (1)...(19): siRNA sense strand
guaaacaugcuaguuggaa

SEQ ID NO: 1096103 - RNA, 19 nt, Homo sapiens
  misc_RNA (1)...(19): siRNA sense strand
caagaagagauacauuugu

SEQ ID NO: 1096104 - RNA, 19 nt, Homo sapiens
  misc_RNA (1)...(19): siRNA sense strand
gugcacaggguguuauauu

SEQ ID NO: 1096105 - RNA, 19 nt, Homo sapiens
  misc_RNA (1)...(19): siRNA sense strand
cacgaaagcauuccauguu

SEQ ID NO: 1096106 - RNA, 19 nt, Homo sapiens
  misc_RNA (1)...(19): siRNA sense strand
ggccugaaauuugcacgaa

SEQ ID NO: 1096107 - RNA, 19 nt, Homo sapiens
  misc_RNA (1)...(19): siRNA sense strand
acaagaagagauacauuug

SEQ ID NO: 1096108 - RNA, 19 nt, Homo sapiens
  misc_RNA (1)...(19): siRNA sense strand
gguuauugcucuguguuau

SEQ ID NO: 1096109 - RNA, 19 nt, Homo sapiens
  misc_RNA (1)...(19): siRNA sense strand
guuauugcucuguguuaua

SEQ ID NO: 1096110 - RNA, 19 nt, Homo sapiens
  misc_RNA (1)...(19): siRNA sense strand
guacaagaaaugacauagu

SEQ ID NO: 1096111 - RNA, 19 nt, Homo sapiens
  misc_RNA (1)...(19): siRNA sense strand
ggaaagugagaaccagaau

SEQ ID NO: 1096112 - RNA, 19 nt, Homo sapiens
  misc_RNA (1)...(19): siRNA sense strand
uguacaaugugccuuugaa

SEQ ID NO: 1096113 - RNA, 19 nt, Homo sapiens
  misc_RNA (1)...(19): siRNA sense strand
uuaacucccagcuauuaua

SEQ ID NO: 1096114 - RNA, 19 nt, Homo sapiens
  misc_RNA (1)...(19): siRNA sense strand
ggagucaaacugucacaca

SEQ ID NO: 1096115 - RNA, 19 nt, Homo sapiens
  misc_RNA (1)...(19): siRNA sense strand
ucacaagaagagauacauu

SEQ ID NO: 1096116 - RNA, 19 nt, Homo sapiens
  misc_RNA (1)...(19): siRNA sense strand
ggcuaaacuugcaauaugg

SEQ ID NO: 1096117 - RNA, 19 nt, Homo sapiens
  misc_RNA (1)...(19): siRNA sense strand
gggaaagugagaaccagaa

SEQ ID NO: 1096118 - RNA, 19 nt, Homo sapiens
  misc_RNA (1)...(19): siRNA sense strand
gagagguuuagaacauuaa

SEQ ID NO: 1096119 - RNA, 19 nt, Homo sapiens
  misc_RNA (1)...(19): siRNA sense strand
aagagagguuuagaacauu

SEQ ID NO: 1096120 - RNA, 19 nt, Homo sapiens
  misc_RNA (1)...(19): siRNA sense strand
gugcuaaccacccugaaga

SEQ ID NO: 1096121 - RNA, 19 nt, Homo sapiens
  misc_RNA (1)...(19): siRNA sense strand
auaguaaacaugcuaguug

SEQ ID NO: 1096122 - RNA, 19 nt, Homo sapiens
  misc_RNA (1)...(19): siRNA sense strand
ccugaaauuugcacgaaag

SEQ ID NO: 1096123 - RNA, 19 nt, Homo sapiens
  misc_RNA (1)...(19): siRNA sense strand
cacaggguguuauauuagu

SEQ ID NO: 1096124 - RNA, 19 nt, Homo sapiens
  misc_RNA (1)...(19): siRNA sense strand
gguguacaaugugccuuug

SEQ ID NO: 1096125 - RNA, 19 nt, Homo sapiens
  misc_RNA (1)...(19): siRNA sense strand
gccugaaauuugcacgaaa

SEQ ID NO: 1096126 - RNA, 19 nt, Homo sapiens
  misc_RNA (1)...(19): siRNA sense strand
ccagccugcucuugagguu

SEQ ID NO: 1096127 - RNA, 19 nt, Homo sapiens
  misc_RNA (1)...(19): siRNA sense strand
uuuaugaugucacaagaag

SEQ ID NO: 1096128 - RNA, 19 nt, Homo sapiens
  misc_RNA (1)...(19): siRNA sense strand
aauaaaggagucaaacugu

SEQ ID NO: 1096129 - RNA, 19 nt, Homo sapiens
  misc_RNA (1)...(19): siRNA sense strand
ccagaauaaaggagucaaa

SEQ ID NO: 1096130 - RNA, 19 nt, Homo sapiens
  misc_RNA (1)...(19): siRNA sense strand
ggacugugggaaagugaga

SEQ ID NO: 1096131 - RNA, 19 nt, Homo sapiens
  misc_RNA (1)...(19): siRNA sense strand
caaugugccuuugaagaac

SEQ ID NO: 1096132 - RNA, 19 nt, Homo sapiens
  misc_RNA (1)...(19): siRNA sense strand
uagaaaugaaggccugaaa

SEQ ID NO: 1096133 - RNA, 19 nt, Homo sapiens
  misc_RNA (1)...(19): siRNA sense strand
uuggaaacauacuguacaa

SEQ ID NO: 1096134 - RNA, 19 nt, Homo sapiens
  misc_RNA (1)...(19): siRNA sense strand
acaauagguguugacuuua

SEQ ID NO: 1096135 - RNA, 19 nt, Homo sapiens
  misc_RNA (1)...(19): siRNA sense strand
gugagaaccagaauaaagg

SEQ ID NO: 1096136 - RNA, 19 nt, Homo sapiens
  misc_RNA (1)...(19): siRNA sense strand
uaaggaaaaucgugaaguc

SEQ ID NO: 1096137 - RNA, 19 nt, Homo sapiens
  misc_RNA (1)...(19): siRNA sense strand
cauaguaaacaugcuaguu

SEQ ID NO: 1096138 - RNA, 19 nt, Homo sapiens
  misc_RNA (1)...(19): siRNA sense strand
acaggguguuauauuaguu

SEQ ID NO: 1096139 - RNA, 19 nt, Homo sapiens
  misc_RNA (1)...(19): siRNA sense strand
ugauacguuugauccagaa

SEQ ID NO: 1096140 - RNA, 19 nt, Homo sapiens
  misc_RNA (1)...(19): siRNA sense strand
aaacaugcuaguuggaaau

SEQ ID NO: 1096141 - RNA, 19 nt, Homo sapiens
  misc_RNA (1)...(19): siRNA sense strand
ugaauuggaaacauacugu

SEQ ID NO: 1096142 - RNA, 19 nt, Homo sapiens
  misc_RNA (1)...(19): siRNA sense strand
agaaaugaaggccugaaau

SEQ ID NO: 1096143 - RNA, 19 nt, Homo sapiens
  misc_RNA (1)...(19): siRNA sense strand
uaaggcuaaacuugcaaua

SEQ ID NO: 1096144 - RNA, 19 nt, Homo sapiens
  misc_RNA (1)...(19): siRNA sense strand
ugaagaacuuguugaaaag

SEQ ID NO: 1096145 - RNA, 19 nt, Homo sapiens
  misc_RNA (1)...(19): siRNA sense strand
uacaaugugccuuugaaga

SEQ ID NO: 1096146 - RNA, 19 nt, Homo sapiens
  misc_RNA (1)...(19): siRNA sense strand
guguugacuuuaaggugaa

SEQ ID NO: 1096147 - RNA, 19 nt, Homo sapiens
  misc_RNA (1)...(19): siRNA sense strand
uaaccacccugaagauccu

SEQ ID NO: 1096148 - RNA, 19 nt, Homo sapiens
  misc_RNA (1)...(19): siRNA sense strand
gcuggucaagagagguuua

SEQ ID NO: 1096149 - RNA, 19 nt, Homo sapiens
  misc_RNA (1)...(19): siRNA sense strand
gcaaguccagccugcucuu

SEQ ID NO: 1096150 - RNA, 19 nt, Homo sapiens
  misc_RNA (1)...(19): siRNA sense strand
cagggaagaaggccaagga

SEQ ID NO: 1096151 - RNA, 19 nt, Homo sapiens
  misc_RNA (1)...(19): siRNA sense strand
ucuugagguucacagauga

SEQ ID NO: 1096152 - RNA, 19 nt, Homo sapiens
  misc_RNA (1)...(19): siRNA sense strand
caggguguuauauuaguuu

SEQ ID NO: 1096153 - RNA, 19 nt, Homo sapiens
  misc_RNA (1)...(19): siRNA sense strand
gaggagccuguggugguua

SEQ ID NO: 1096154 - RNA, 19 nt, Homo sapiens
  misc_RNA (1)...(19): siRNA sense strand
aaccugugaugguguacaa

SEQ ID NO: 1096155 - RNA, 19 nt, Homo sapiens
  misc_RNA (1)...(19): siRNA sense strand
uacguuugauccagaacuu

SEQ ID NO: 1096156 - RNA, 19 nt, Homo sapiens
  misc_RNA (1)...(19): siRNA sense strand
aaauuugcacgaaagcauu

SEQ ID NO: 1096157 - RNA, 19 nt, Homo sapiens
  misc_RNA (1)...(19): siRNA sense strand
guacaaugugccuuugaag

SEQ ID NO: 1096158 - RNA, 19 nt, Homo sapiens
  misc_RNA (1)...(19): siRNA sense strand
cgugaagucgauagaaaug

SEQ ID NO: 1096159 - RNA, 19 nt, Homo sapiens
  misc_RNA (1)...(19): siRNA sense strand
ggugguuauugcucugugu

SEQ ID NO: 1096160 - RNA, 19 nt, Homo sapiens
  misc_RNA (1)...(19): siRNA sense strand
gaagucgauagaaaugaag

SEQ ID NO: 1096161 - RNA, 19 nt, Homo sapiens
  misc_RNA (1)...(19): siRNA sense strand
gagccuguggugguuauug

SEQ ID NO: 1096162 - RNA, 19 nt, Homo sapiens
  misc_RNA (1)...(19): siRNA sense strand
gcaaagacccuaaucaguu

SEQ ID NO: 1096163 - RNA, 19 nt, Homo sapiens
  misc_RNA (1)...(19): siRNA sense strand
caaagacccuaaucaguuu

SEQ ID NO: 1096164 - RNA, 19 nt, Homo sapiens
  misc_RNA (1)...(19): siRNA sense strand
ccuaaucaguuuaccauuu

SEQ ID NO: 1096165 - RNA, 19 nt, Homo sapiens
  misc_RNA (1)...(19): siRNA sense strand
ggacccaucacucccauua

SEQ ID NO: 1096166 - RNA, 19 nt, Homo sapiens
  misc_RNA (1)...(19): siRNA sense strand
acagagggcugcugagaug

SEQ ID NO: 1096167 - RNA, 19 nt, Homo sapiens
  misc_RNA (1)...(19): siRNA sense strand
cuaaucaguuuaccauuuc

SEQ ID NO: 1096168 - RNA, 19 nt, Homo sapiens
  misc_RNA (1)...(19): siRNA sense strand
gcacacucccaucccuuua

SEQ ID NO: 1096169 - RNA, 19 nt, Homo sapiens
  misc_RNA (1)...(19): siRNA sense strand
ugucagugcugcaaauaug

SEQ ID NO: 1096170 - RNA, 19 nt, Homo sapiens
  misc_RNA (1)...(19): siRNA sense strand
auauguaacugguucauca

SEQ ID NO: 1096171 - RNA, 19 nt, Homo sapiens
  misc_RNA (1)...(19): siRNA sense strand
guaacugguucaucaaugc

SEQ ID NO: 1096172 - RNA, 19 nt, Homo sapiens
  misc_RNA (1)...(19): siRNA sense strand
gggacuggcuguacuugca

SEQ ID NO: 1096173 - RNA, 19 nt, Homo sapiens
  misc_RNA (1)...(19): siRNA sense strand
caggagaagcugagccuuu

SEQ ID NO: 1096174 - RNA, 19 nt, Homo sapiens
  misc_RNA (1)...(19): siRNA sense strand
ccaaggagucggugaagau

SEQ ID NO: 1096175 - RNA, 19 nt, Homo sapiens
  misc_RNA (1)...(19): siRNA sense strand
cugcugagauggagcuuca

SEQ ID NO: 1096176 - RNA, 19 nt, Homo sapiens
  misc_RNA (1)...(19): siRNA sense strand
ggcaaagacccuaaucagu

SEQ ID NO: 1096177 - RNA, 19 nt, Homo sapiens
  misc_RNA (1)...(19): siRNA sense strand
uguaacugguucaucaaug

SEQ ID NO: 1096178 - RNA, 19 nt, Homo sapiens
  misc_RNA (1)...(19): siRNA sense strand
aggagaagcugagccuuuc

SEQ ID NO: 1096179 - RNA, 19 nt, Homo sapiens
  misc_RNA (1)...(19): siRNA sense strand
ggguaaggccucagaugug

SEQ ID NO: 1096180 - RNA, 19 nt, Homo sapiens
  misc_RNA (1)...(19): siRNA sense strand
ucagugcugcaaauaugua

SEQ ID NO: 1096181 - RNA, 19 nt, Homo sapiens
  misc_RNA (1)...(19): siRNA sense strand
ucccaucccuuuagucucu

SEQ ID NO: 1096182 - RNA, 19 nt, Homo sapiens
  misc_RNA (1)...(19): siRNA sense strand
ugaucuaggugaggacgaa

SEQ ID NO: 1096183 - RNA, 19 nt, Homo sapiens
  misc_RNA (1)...(19): siRNA sense strand
gaagcagcaggacccauca

SEQ ID NO: 1096184 - RNA, 19 nt, Homo sapiens
  misc_RNA (1)...(19): siRNA sense strand
cuacagagggcugcugaga

SEQ ID NO: 1096185 - RNA, 19 nt, Homo sapiens
  misc_RNA (1)...(19): siRNA sense strand
ccucagagcaggagaagcu

SEQ ID NO: 1096186 - RNA, 19 nt, Homo sapiens
  misc_RNA (1)...(19): siRNA sense strand
cagguggacucuucaacac

SEQ ID NO: 1096187 - RNA, 19 nt, Homo sapiens
  misc_RNA (1)...(19): siRNA sense strand
acacucccaucccuuuagu

SEQ ID NO: 1096188 - RNA, 19 nt, Homo sapiens
  misc_RNA (1)...(19): siRNA sense strand
guacuugcaccgcuacaac

SEQ ID NO: 1096189 - RNA, 19 nt, Homo sapiens
  misc_RNA (1)...(19): siRNA sense strand
ucggaaggauggcaaagac

SEQ ID NO: 1096190 - RNA, 19 nt, Homo sapiens
  misc_RNA (1)...(19): siRNA sense strand
aaagacccuaaucaguuua

SEQ ID NO: 1096191 - RNA, 19 nt, Homo sapiens
  misc_RNA (1)...(19): siRNA sense strand
gaaacgaacucgcuuagaa

SEQ ID NO: 1096192 - RNA, 19 nt, Homo sapiens
  misc_RNA (1)...(19): siRNA sense strand
guacuaaucucucugaauu

SEQ ID NO: 1096193 - RNA, 19 nt, Homo sapiens
  misc_RNA (1)...(19): siRNA sense strand
guacuuuccuguagaguua

SEQ ID NO: 1096194 - RNA, 19 nt, Homo sapiens
  misc_RNA (1)...(19): siRNA sense strand
guaaagauguugccaagau

SEQ ID NO: 1096195 - RNA, 19 nt, Homo sapiens
  misc_RNA (1)...(19): siRNA sense strand
gaagcuggcuguucaguuc

SEQ ID NO: 1096196 - RNA, 19 nt, Homo sapiens
  misc_RNA (1)...(19): siRNA sense strand
acagaaagaugccugaauu

SEQ ID NO: 1096197 - RNA, 19 nt, Homo sapiens
  misc_RNA (1)...(19): siRNA sense strand
gaagcagauuggagagaua

SEQ ID NO: 1096198 - RNA, 19 nt, Homo sapiens
  misc_RNA (1)...(19): siRNA sense strand
guacucaccuucagcaaga

SEQ ID NO: 1096199 - RNA, 19 nt, Homo sapiens
  misc_RNA (1)...(19): siRNA sense strand
ccauggaguuggagaauaa

SEQ ID NO: 1096200 - RNA, 19 nt, Homo sapiens
  misc_RNA (1)...(19): siRNA sense strand
gaaagaugccugaauucaa

SEQ ID NO: 1096201 - RNA, 19 nt, Homo sapiens
  misc_RNA (1)...(19): siRNA sense strand
uacccgaucuucugacuua

SEQ ID NO: 1096202 - RNA, 19 nt, Homo sapiens
  misc_RNA (1)...(19): siRNA sense strand
cagcuacucucaagucauu

SEQ ID NO: 1096203 - RNA, 19 nt, Homo sapiens
  misc_RNA (1)...(19): siRNA sense strand
ccacaggaguugaugaaga

SEQ ID NO: 1096204 - RNA, 19 nt, Homo sapiens
  misc_RNA (1)...(19): siRNA sense strand
ggucugaauugcuguggua

SEQ ID NO: 1096205 - RNA, 19 nt, Homo sapiens
  misc_RNA (1)...(19): siRNA sense strand
cugaagccauuaccauuua

SEQ ID NO: 1096206 - RNA, 19 nt, Homo sapiens
  misc_RNA (1)...(19): siRNA sense strand
gcauugaguguccagauua

SEQ ID NO: 1096207 - RNA, 19 nt, Homo sapiens
  misc_RNA (1)...(19): siRNA sense strand
gaauugcugugguauuuag

SEQ ID NO: 1096208 - RNA, 19 nt, Homo sapiens
  misc_RNA (1)...(19): siRNA sense strand
ucagcuaguucacuuaauu

SEQ ID NO: 1096209 - RNA, 19 nt, Homo sapiens
  misc_RNA (1)...(19): siRNA sense strand
caauguagcagauaaauca

SEQ ID NO: 1096210 - RNA, 19 nt, Homo sapiens
  misc_RNA (1)...(19): siRNA sense strand
ucaugcaccugacucuuua

SEQ ID NO: 1096211 - RNA, 19 nt, Homo sapiens
  misc_RNA (1)...(19): siRNA sense strand
gcacaaagucagaguuaau

SEQ ID NO: 1096212 - RNA, 19 nt, Homo sapiens
  misc_RNA (1)...(19): siRNA sense strand
ggagucagccuuacagaug

SEQ ID NO: 1096213 - RNA, 19 nt, Homo sapiens
  misc_RNA (1)...(19): siRNA sense strand
gaauauggaucagcuccuu

SEQ ID NO: 1096214 - RNA, 19 nt, Homo sapiens
  misc_RNA (1)...(19): siRNA sense strand
gcaaucgucuuaguacuca

SEQ ID NO: 1096215 - RNA, 19 nt, Homo sapiens
  misc_RNA (1)...(19): siRNA sense strand
uaaagauguugccaagauu

SEQ ID NO: 1096216 - RNA, 19 nt, Homo sapiens
  misc_RNA (1)...(19): siRNA sense strand
gaucacaucaauuucauga

SEQ ID NO: 1096217 - RNA, 19 nt, Homo sapiens
  misc_RNA (1)...(19): siRNA sense strand
gaauggcucccacuacuga

SEQ ID NO: 1096218 - RNA, 19 nt, Homo sapiens
  misc_RNA (1)...(19): siRNA sense strand
ucacguggaucacaucaau

SEQ ID NO: 1096219 - RNA, 19 nt, Homo sapiens
  misc_RNA (1)...(19): siRNA sense strand
gaaugaaggaguaaugaau

SEQ ID NO: 1096220 - RNA, 19 nt, Homo sapiens
  misc_RNA (1)...(19): siRNA sense strand
ucacaucaauuucaugaag

SEQ ID NO: 1096221 - RNA, 19 nt, Homo sapiens
  misc_RNA (1)...(19): siRNA sense strand
gcagagaaggauaugaauu

SEQ ID NO: 1096222 - RNA, 19 nt, Homo sapiens
  misc_RNA (1)...(19): siRNA sense strand
ggaacuauauacccucgau

SEQ ID NO: 1096223 - RNA, 19 nt, Homo sapiens
  misc_RNA (1)...(19): siRNA sense strand
ucacaaacaggaaccagua

SEQ ID NO: 1096224 - RNA, 19 nt, Homo sapiens
  misc_RNA (1)...(19): siRNA sense strand
gggcuuccuuugcaaugua

SEQ ID NO: 1096225 - RNA, 19 nt, Homo sapiens
  misc_RNA (1)...(19): siRNA sense strand
cugaauugcugugguauuu

SEQ ID NO: 1096226 - RNA, 19 nt, Homo sapiens
  misc_RNA (1)...(19): siRNA sense strand
aguagucgcuccuuaguga

SEQ ID NO: 1096227 - RNA, 19 nt, Homo sapiens
  misc_RNA (1)...(19): siRNA sense strand
cagguuagcucaggagaga

SEQ ID NO: 1096228 - RNA, 19 nt, Homo sapiens
  misc_RNA (1)...(19): siRNA sense strand
gagucagccuuacagauga

SEQ ID NO: 1096229 - RNA, 19 nt, Homo sapiens
  misc_RNA (1)...(19): siRNA sense strand
aaagaugccugaauucaac

SEQ ID NO: 1096230 - RNA, 19 nt, Homo sapiens
  misc_RNA (1)...(19): siRNA sense strand
caaacaggaaccaguauug

SEQ ID NO: 1096231 - RNA, 19 nt, Homo sapiens
  misc_RNA (1)...(19): siRNA sense strand
agaaguguuugauuccuuu

SEQ ID NO: 1096232 - RNA, 19 nt, Homo sapiens
  misc_RNA (1)...(19): siRNA sense strand
ccaagauucuguggucauu

SEQ ID NO: 1096233 - RNA, 19 nt, Homo sapiens
  misc_RNA (1)...(19): siRNA sense strand
uaugggagaugaauaugga

SEQ ID NO: 1096234 - RNA, 19 nt, Homo sapiens
  misc_RNA (1)...(19): siRNA sense strand
guucacagcuauaaugcau

SEQ ID NO: 1096235 - RNA, 19 nt, Homo sapiens
  misc_RNA (1)...(19): siRNA sense strand
cagagaaggauaugaauuc

SEQ ID NO: 1096236 - RNA, 19 nt, Homo sapiens
  misc_RNA (1)...(19): siRNA sense strand
ggcauugaguguccagauu

SEQ ID NO: 1096237 - RNA, 19 nt, Homo sapiens
  misc_RNA (1)...(19): siRNA sense strand
uguaagauaccgagcauuu

SEQ ID NO: 1096238 - RNA, 19 nt, Homo sapiens
  misc_RNA (1)...(19): siRNA sense strand
guggcacacugucgaagua

SEQ ID NO: 1096239 - RNA, 19 nt, Homo sapiens
  misc_RNA (1)...(19): siRNA sense strand
agauacagcucuuugauac

SEQ ID NO: 1096240 - RNA, 19 nt, Homo sapiens
  misc_RNA (1)...(19): siRNA sense strand
cauuuggaacucugaauua

SEQ ID NO: 1096241 - RNA, 19 nt, Homo sapiens
  misc_RNA (1)...(19): siRNA sense strand
ggacugcacaauaugaaga

SEQ ID NO: 1096242 - RNA, 19 nt, Homo sapiens
  misc_RNA (1)...(19): siRNA sense strand
ucuccaggcucaagucauu

SEQ ID NO: 1096243 - RNA, 19 nt, Homo sapiens
  misc_RNA (1)...(19): siRNA sense strand
cacauuagccucugccauu

SEQ ID NO: 1096244 - RNA, 19 nt, Homo sapiens
  misc_RNA (1)...(19): siRNA sense strand
gaagaggacguagaagugu

SEQ ID NO: 1096245 - RNA, 19 nt, Homo sapiens
  misc_RNA (1)...(19): siRNA sense strand
aaacgaacucgcuuagaaa

SEQ ID NO: 1096246 - RNA, 19 nt, Homo sapiens
  misc_RNA (1)...(19): siRNA sense strand
aauuaaggcuugagcaugu

SEQ ID NO: 1096247 - RNA, 19 nt, Homo sapiens
  misc_RNA (1)...(19): siRNA sense strand
uggcugaucucuggaggua

SEQ ID NO: 1096248 - RNA, 19 nt, Homo sapiens
  misc_RNA (1)...(19): siRNA sense strand
acuaaucucucugaauuug

SEQ ID NO: 1096249 - RNA, 19 nt, Homo sapiens
  misc_RNA (1)...(19): siRNA sense strand
ggacaggacccuccagaac

SEQ ID NO: 1096250 - RNA, 19 nt, Homo sapiens
  misc_RNA (1)...(19): siRNA sense strand
ccuguagaguuaauugauu

SEQ ID NO: 1096251 - RNA, 19 nt, Homo sapiens
  misc_RNA (1)...(19): siRNA sense strand
aagauucuguggucauuug

SEQ ID NO: 1096252 - RNA, 19 nt, Homo sapiens
  misc_RNA (1)...(19): siRNA sense strand
ccacccagguuuggaauuc

SEQ ID NO: 1096253 - RNA, 19 nt, Homo sapiens
  misc_RNA (1)...(19): siRNA sense strand
ggaaagcaagaggacauuu

SEQ ID NO: 1096254 - RNA, 19 nt, Homo sapiens
  misc_RNA (1)...(19): siRNA sense strand
uagcagagaaggauaugaa

SEQ ID NO: 1096255 - RNA, 19 nt, Homo sapiens
  misc_RNA (1)...(19): siRNA sense strand
ggaguacuuuccuguagag

SEQ ID NO: 1096256 - RNA, 19 nt, Homo sapiens
  misc_RNA (1)...(19): siRNA sense strand
gcagugcccacccagguuu

SEQ ID NO: 1096257 - RNA, 19 nt, Homo sapiens
  misc_RNA (1)...(19): siRNA sense strand
guuaagaacauauguagca

SEQ ID NO: 1096258 - RNA, 19 nt, Homo sapiens
  misc_RNA (1)...(19): siRNA sense strand
ggagguugguaccaucugu

SEQ ID NO: 1096259 - RNA, 19 nt, Homo sapiens
  misc_RNA (1)...(19): siRNA sense strand
ucucagcuccugucuguuu

SEQ ID NO: 1096260 - RNA, 19 nt, Homo sapiens
  misc_RNA (1)...(19): siRNA sense strand
ccuuacagaugauuugaug

SEQ ID NO: 1096261 - RNA, 19 nt, Homo sapiens
  misc_RNA (1)...(19): siRNA sense strand
caaguacuaaucucucuga

SEQ ID NO: 1096262 - RNA, 19 nt, Homo sapiens
  misc_RNA (1)...(19): siRNA sense strand
ugaagccauuaccauuuaa

SEQ ID NO: 1096263 - RNA, 19 nt, Homo sapiens
  misc_RNA (1)...(19): siRNA sense strand
gccuuacgcuuccugaaug

SEQ ID NO: 1096264 - RNA, 19 nt, Homo sapiens
  misc_RNA (1)...(19): siRNA sense strand
gauagcuccucagcgaauu

SEQ ID NO: 1096265 - RNA, 19 nt, Homo sapiens
  misc_RNA (1)...(19): siRNA sense strand
ucacagcuauaaugcaucu

SEQ ID NO: 1096266 - RNA, 19 nt, Homo sapiens
  misc_RNA (1)...(19): siRNA sense strand
gucaagcaccauaugauuu

SEQ ID NO: 1096267 - RNA, 19 nt, Homo sapiens
  misc_RNA (1)...(19): siRNA sense strand
uguaugagaccaaguguug

SEQ ID NO: 1096268 - RNA, 19 nt, Homo sapiens
  misc_RNA (1)...(19): siRNA sense strand
cuucucagcuccugucugu

SEQ ID NO: 1096269 - RNA, 19 nt, Homo sapiens
  misc_RNA (1)...(19): siRNA sense strand
ggacguagaaguguuugau

SEQ ID NO: 1096270 - RNA, 19 nt, Homo sapiens
  misc_RNA (1)...(19): siRNA sense strand
ucagaaggugaacuaauuu

SEQ ID NO: 1096271 - RNA, 19 nt, Homo sapiens
  misc_RNA (1)...(19): siRNA sense strand
ugaagaggacguagaagug

SEQ ID NO: 1096272 - RNA, 19 nt, Homo sapiens
  misc_RNA (1)...(19): siRNA sense strand
gguuuggaauucagcaaga

SEQ ID NO: 1096273 - RNA, 19 nt, Homo sapiens
  misc_RNA (1)...(19): siRNA sense strand
gacaggacccuccagaaca

SEQ ID NO: 1096274 - RNA, 19 nt, Homo sapiens
  misc_RNA (1)...(19): siRNA sense strand
agacuuggcuugugcuaac

SEQ ID NO: 1096275 - RNA, 19 nt, Homo sapiens
  misc_RNA (1)...(19): siRNA sense strand
caaagucagaguuaaucaa

SEQ ID NO: 1096276 - RNA, 19 nt, Homo sapiens
  misc_RNA (1)...(19): siRNA sense strand
uacagaggcaaucgucuua

SEQ ID NO: 1096277 - RNA, 19 nt, Homo sapiens
  misc_RNA (1)...(19): siRNA sense strand
uagaaguguuugauuccuu

SEQ ID NO: 1096278 - RNA, 19 nt, Homo sapiens
  misc_RNA (1)...(19): siRNA sense strand
ccugaagccauuaccauuu

SEQ ID NO: 1096279 - RNA, 19 nt, Homo sapiens
  misc_RNA (1)...(19): siRNA sense strand
guccaggguuugucagguu

SEQ ID NO: 1096280 - RNA, 19 nt, Homo sapiens
  misc_RNA (1)...(19): siRNA sense strand
ugaagcagauuggagagau

SEQ ID NO: 1096281 - RNA, 19 nt, Homo sapiens
  misc_RNA (1)...(19): siRNA sense strand
guuaaaauguuccguuuca

SEQ ID NO: 1096282 - RNA, 19 nt, Homo sapiens
  misc_RNA (1)...(19): siRNA sense strand
ucugaguagucgcuccuua

SEQ ID NO: 1096283 - RNA, 19 nt, Homo sapiens
  misc_RNA (1)...(19): siRNA sense strand
ugucucagcuaguucacuu

SEQ ID NO: 1096284 - RNA, 19 nt, Homo sapiens
  misc_RNA (1)...(19): siRNA sense strand
ucaauuucaugaagcagau

SEQ ID NO: 1096285 - RNA, 19 nt, Homo sapiens
  misc_RNA (1)...(19): siRNA sense strand
ccucugccauucugccaaa

SEQ ID NO: 1096286 - RNA, 19 nt, Homo sapiens
  misc_RNA (1)...(19): siRNA sense strand
ggagaauaaggcagcugua

SEQ ID NO: 1096287 - RNA, 19 nt, Homo sapiens
  misc_RNA (1)...(19): siRNA sense strand
caaauuaaggcuugagcau

SEQ ID NO: 1096288 - RNA, 19 nt, Homo sapiens
  misc_RNA (1)...(19): siRNA sense strand
cgucaagcaccauaugauu

SEQ ID NO: 1096289 - RNA, 19 nt, Homo sapiens
  misc_RNA (1)...(19): siRNA sense strand
cacaggaguugaugaagag

SEQ ID NO: 1096290 - RNA, 19 nt, Homo sapiens
  misc_RNA (1)...(19): siRNA sense strand
ugccugaauucaaccagua

SEQ ID NO: 1096291 - RNA, 19 nt, Homo sapiens
  misc_RNA (1)...(19): siRNA sense strand
ggaaacagcuuuagugaug

SEQ ID NO: 1096292 - RNA, 19 nt, Homo sapiens
  misc_RNA (1)...(19): siRNA sense strand
gagcagcuauuuccugaua

SEQ ID NO: 1096293 - RNA, 19 nt, Homo sapiens
  misc_RNA (1)...(19): siRNA sense strand
cuacaaagccucagggaua

SEQ ID NO: 1096294 - RNA, 19 nt, Homo sapiens
  misc_RNA (1)...(19): siRNA sense strand
gcugaagccuggaaacaaa

SEQ ID NO: 1096295 - RNA, 19 nt, Homo sapiens
  misc_RNA (1)...(19): siRNA sense strand
gagcacagcagccuuacua

SEQ ID NO: 1096296 - RNA, 19 nt, Homo sapiens
  misc_RNA (1)...(19): siRNA sense strand
gaaacagcuuuagugauga

SEQ ID NO: 1096297 - RNA, 19 nt, Homo sapiens
  misc_RNA (1)...(19): siRNA sense strand
gaaugugggugucaacaag

SEQ ID NO: 1096298 - RNA, 19 nt, Homo sapiens
  misc_RNA (1)...(19): siRNA sense strand
gagaaccacccuacccaua

SEQ ID NO: 1096299 - RNA, 19 nt, Homo sapiens
  misc_RNA (1)...(19): siRNA sense strand
ccaacaaucuccaaaauga

SEQ ID NO: 1096300 - RNA, 19 nt, Homo sapiens
  misc_RNA (1)...(19): siRNA sense strand
aagcucaucuccuugaauu

SEQ ID NO: 1096301 - RNA, 19 nt, Homo sapiens
  misc_RNA (1)...(19): siRNA sense strand
gauacacuguggaacuauu

SEQ ID NO: 1096302 - RNA, 19 nt, Homo sapiens
  misc_RNA (1)...(19): siRNA sense strand
cagauacacuguggaacua

SEQ ID NO: 1096303 - RNA, 19 nt, Homo sapiens
  misc_RNA (1)...(19): siRNA sense strand
caugugcacucucgucuga

SEQ ID NO: 1096304 - RNA, 19 nt, Homo sapiens
  misc_RNA (1)...(19): siRNA sense strand
ugacagagacgcaguuugu

SEQ ID NO: 1096305 - RNA, 19 nt, Homo sapiens
  misc_RNA (1)...(19): siRNA sense strand
aacagaagcucaacagugu

SEQ ID NO: 1096306 - RNA, 19 nt, Homo sapiens
  misc_RNA (1)...(19): siRNA sense strand
aaacagagccagcagaaca

SEQ ID NO: 1096307 - RNA, 19 nt, Homo sapiens
  misc_RNA (1)...(19): siRNA sense strand
gagacuccaucuagcuuug

SEQ ID NO: 1096308 - RNA, 19 nt, Homo sapiens
  misc_RNA (1)...(19): siRNA sense strand
gcuacacacuugaaugcaa

SEQ ID NO: 1096309 - RNA, 19 nt, Homo sapiens
  misc_RNA (1)...(19): siRNA sense strand
uacaaagccucagggauaa

SEQ ID NO: 1096310 - RNA, 19 nt, Homo sapiens
  misc_RNA (1)...(19): siRNA sense strand
gagauggccagucuaaaga

SEQ ID NO: 1096311 - RNA, 19 nt, Homo sapiens
  misc_RNA (1)...(19): siRNA sense strand
ggauggacuucguguagau

SEQ ID NO: 1096312 - RNA, 19 nt, Homo sapiens
  misc_RNA (1)...(19): siRNA sense strand
caacaaaauucuccacaga

SEQ ID NO: 1096313 - RNA, 19 nt, Homo sapiens
  misc_RNA (1)...(19): siRNA sense strand
gcacagcagccuuacuaau

SEQ ID NO: 1096314 - RNA, 19 nt, Homo sapiens
  misc_RNA (1)...(19): siRNA sense strand
ccaaagcucaucuccuuga

SEQ ID NO: 1096315 - RNA, 19 nt, Homo sapiens
  misc_RNA (1)...(19): siRNA sense strand
gcucaacaguguguggauu

SEQ ID NO: 1096316 - RNA, 19 nt, Homo sapiens
  misc_RNA (1)...(19): siRNA sense strand
ggccuaagcagcacucuga

SEQ ID NO: 1096317 - RNA, 19 nt, Homo sapiens
  misc_RNA (1)...(19): siRNA sense strand
ucagagcacagcagccuua

SEQ ID NO: 1096318 - RNA, 19 nt, Homo sapiens
  misc_RNA (1)...(19): siRNA sense strand
gccaggaacugcuaaacca

SEQ ID NO: 1096319 - RNA, 19 nt, Homo sapiens
  misc_RNA (1)...(19): siRNA sense strand
gaguggcguugcuuacuau

SEQ ID NO: 1096320 - RNA, 19 nt, Homo sapiens
  misc_RNA (1)...(19): siRNA sense strand
agaguggcguugcuuacua

SEQ ID NO: 1096321 - RNA, 19 nt, Homo sapiens
  misc_RNA (1)...(19): siRNA sense strand
caaagcucaucuccuugaa

SEQ ID NO: 1096322 - RNA, 19 nt, Homo sapiens
  misc_RNA (1)...(19): siRNA sense strand
gggccuggaugcugaaaca

SEQ ID NO: 1096323 - RNA, 19 nt, Homo sapiens
  misc_RNA (1)...(19): siRNA sense strand
guguagaucugcugacgau

SEQ ID NO: 1096324 - RNA, 19 nt, Homo sapiens
  misc_RNA (1)...(19): siRNA sense strand
cuccacagaugaagaauuc

SEQ ID NO: 1096325 - RNA, 19 nt, Homo sapiens
  misc_RNA (1)...(19): siRNA sense strand
gggacgagcuauggccauu

SEQ ID NO: 1096326 - RNA, 19 nt, Homo sapiens
  misc_RNA (1)...(19): siRNA sense strand
ugacaggcauaacgcugaa

SEQ ID NO: 1096327 - RNA, 19 nt, Homo sapiens
  misc_RNA (1)...(19): siRNA sense strand
cagcagccuuacuaaucua

SEQ ID NO: 1096328 - RNA, 19 nt, Homo sapiens
  misc_RNA (1)...(19): siRNA sense strand
gaaaacaugcuauauccaa

SEQ ID NO: 1096329 - RNA, 19 nt, Homo sapiens
  misc_RNA (1)...(19): siRNA sense strand
gaaccacccuacccauagc

SEQ ID NO: 1096330 - RNA, 19 nt, Homo sapiens
  misc_RNA (1)...(19): siRNA sense strand
gcucaucuccuugaauuca

SEQ ID NO: 1096331 - RNA, 19 nt, Homo sapiens
  misc_RNA (1)...(19): siRNA sense strand
uaagcugauucccauguug

SEQ ID NO: 1096332 - RNA, 19 nt, Homo sapiens
  misc_RNA (1)...(19): siRNA sense strand
ccaucuagcuuugucuuca

SEQ ID NO: 1096333 - RNA, 19 nt, Homo sapiens
  misc_RNA (1)...(19): siRNA sense strand
cgucgccucuucgucuuua

SEQ ID NO: 1096334 - RNA, 19 nt, Homo sapiens
  misc_RNA (1)...(19): siRNA sense strand
aaaaggggcugcuucaugu

SEQ ID NO: 1096335 - RNA, 19 nt, Homo sapiens
  misc_RNA (1)...(19): siRNA sense strand
cacaauggguugccugucu

SEQ ID NO: 1096336 - RNA, 19 nt, Homo sapiens
  misc_RNA (1)...(19): siRNA sense strand
agacgcaguuuguguuauc

SEQ ID NO: 1096337 - RNA, 19 nt, Homo sapiens
  misc_RNA (1)...(19): siRNA sense strand
auccaaagcucaucuccuu

SEQ ID NO: 1096338 - RNA, 19 nt, Homo sapiens
  misc_RNA (1)...(19): siRNA sense strand
gaaagccaacaaucuccaa

SEQ ID NO: 1096339 - RNA, 19 nt, Homo sapiens
  misc_RNA (1)...(19): siRNA sense strand
aagcugggcuccugucuac

SEQ ID NO: 1096340 - RNA, 19 nt, Homo sapiens
  misc_RNA (1)...(19): siRNA sense strand
cuaagcagcacucugaaug

SEQ ID NO: 1096341 - RNA, 19 nt, Homo sapiens
  misc_RNA (1)...(19): siRNA sense strand
gagcaggugggacgagcua

SEQ ID NO: 1096342 - RNA, 19 nt, Homo sapiens
  misc_RNA (1)...(19): siRNA sense strand
gcaguuuguguuauccuuu

SEQ ID NO: 1096343 - RNA, 19 nt, Homo sapiens
  misc_RNA (1)...(19): siRNA sense strand
caucuagcuuugucuucaa

SEQ ID NO: 1096344 - RNA, 19 nt, Homo sapiens
  misc_RNA (1)...(19): siRNA sense strand
gagacgcaguuuguguuau

SEQ ID NO: 1096345 - RNA, 19 nt, Homo sapiens
  misc_RNA (1)...(19): siRNA sense strand
cacagcagccuuacuaauc

SEQ ID NO: 1096346 - RNA, 19 nt, Homo sapiens
  misc_RNA (1)...(19): siRNA sense strand
ucaauggcuuucuggacuu

SEQ ID NO: 1096347 - RNA, 19 nt, Homo sapiens
  misc_RNA (1)...(19): siRNA sense strand
caaagagaguggcguugcu

SEQ ID NO: 1096348 - RNA, 19 nt, Homo sapiens
  misc_RNA (1)...(19): siRNA sense strand
cagaggcugucaugguaau

SEQ ID NO: 1096349 - RNA, 19 nt, Homo sapiens
  misc_RNA (1)...(19): siRNA sense strand
ucuacugccugauucauuc

SEQ ID NO: 1096350 - RNA, 19 nt, Homo sapiens
  misc_RNA (1)...(19): siRNA sense strand
ccuggaugcugaaacaugu

SEQ ID NO: 1096351 - RNA, 19 nt, Homo sapiens
  misc_RNA (1)...(19): siRNA sense strand
aagcagagcaagcuguauu

SEQ ID NO: 1096352 - RNA, 19 nt, Homo sapiens
  misc_RNA (1)...(19): siRNA sense strand
ccacagcuacacacuugaa

SEQ ID NO: 1096353 - RNA, 19 nt, Homo sapiens
  misc_RNA (1)...(19): siRNA sense strand
gauaauccacagcuacaca

SEQ ID NO: 1096354 - RNA, 19 nt, Homo sapiens
  misc_RNA (1)...(19): siRNA sense strand
cccuggauaccaucuauua

SEQ ID NO: 1096355 - RNA, 19 nt, Homo sapiens
  misc_RNA (1)...(19): siRNA sense strand
acacuugaaugcaacuaca

SEQ ID NO: 1096356 - RNA, 19 nt, Homo sapiens
  misc_RNA (1)...(19): siRNA sense strand
caguuuguguuauccuuug

SEQ ID NO: 1096357 - RNA, 19 nt, Homo sapiens
  misc_RNA (1)...(19): siRNA sense strand
cagcagaacagaagcucaa

SEQ ID NO: 1096358 - RNA, 19 nt, Homo sapiens
  misc_RNA (1)...(19): siRNA sense strand
acaaacagagccagcagaa

SEQ ID NO: 1096359 - RNA, 19 nt, Homo sapiens
  misc_RNA (1)...(19): siRNA sense strand
uauccuuuguucaucguuu

SEQ ID NO: 1096360 - RNA, 19 nt, Homo sapiens
  misc_RNA (1)...(19): siRNA sense strand
caaaccagaggcugucaug

SEQ ID NO: 1096361 - RNA, 19 nt, Homo sapiens
  misc_RNA (1)...(19): siRNA sense strand
acagcagccuuacuaaucu

SEQ ID NO: 1096362 - RNA, 19 nt, Homo sapiens
  misc_RNA (1)...(19): siRNA sense strand
cagagaagaauauguaugc

SEQ ID NO: 1096363 - RNA, 19 nt, Homo sapiens
  misc_RNA (1)...(19): siRNA sense strand
agagacgcaguuuguguua

SEQ ID NO: 1096364 - RNA, 19 nt, Homo sapiens
  misc_RNA (1)...(19): siRNA sense strand
guacggaaacagcuuuagu

SEQ ID NO: 1096365 - RNA, 19 nt, Homo sapiens
  misc_RNA (1)...(19): siRNA sense strand
ucaacaguguguggauuau

SEQ ID NO: 1096366 - RNA, 19 nt, Homo sapiens
  misc_RNA (1)...(19): siRNA sense strand
gaggauauucuucuuaagc

SEQ ID NO: 1096367 - RNA, 19 nt, Homo sapiens
  misc_RNA (1)...(19): siRNA sense strand
gaugacagagacgcaguuu

SEQ ID NO: 1096368 - RNA, 19 nt, Homo sapiens
  misc_RNA (1)...(19): siRNA sense strand
uggcguugcuuacuaugug

SEQ ID NO: 1096369 - RNA, 19 nt, Homo sapiens
  misc_RNA (1)...(19): siRNA sense strand
gggagcuccuuugcuauuc

SEQ ID NO: 1096370 - RNA, 19 nt, Homo sapiens
  misc_RNA (1)...(19): siRNA sense strand
aagcagcacucugaaugug

SEQ ID NO: 1096371 - RNA, 19 nt, Homo sapiens
  misc_RNA (1)...(19): siRNA sense strand
cagagacgcaguuuguguu

SEQ ID NO: 1096372 - RNA, 19 nt, Homo sapiens
  misc_RNA (1)...(19): siRNA sense strand
ggagcuccuuugcuauucu

SEQ ID NO: 1096373 - RNA, 19 nt, Homo sapiens
  misc_RNA (1)...(19): siRNA sense strand
uuaagcugauucccauguu

SEQ ID NO: 1096374 - RNA, 19 nt, Homo sapiens
  misc_RNA (1)...(19): siRNA sense strand
gaacuccacccaaaaguca

SEQ ID NO: 1096375 - RNA, 19 nt, Homo sapiens
  misc_RNA (1)...(19): siRNA sense strand
agagauggccagucuaaag

SEQ ID NO: 1096376 - RNA, 19 nt, Homo sapiens
  misc_RNA (1)...(19): siRNA sense strand
caaaaggggcugcuucaug

SEQ ID NO: 1096377 - RNA, 19 nt, Homo sapiens
  misc_RNA (1)...(19): siRNA sense strand
ccuucgaacuccacccaaa

SEQ ID NO: 1096378 - RNA, 19 nt, Homo sapiens
  misc_RNA (1)...(19): siRNA sense strand
auccacagcuacacacuug

SEQ ID NO: 1096379 - RNA, 19 nt, Homo sapiens
  misc_RNA (1)...(19): siRNA sense strand
acaagcagagcaagcugua

SEQ ID NO: 1096380 - RNA, 19 nt, Homo sapiens
  misc_RNA (1)...(19): siRNA sense strand
ccguagagauggccagucu

SEQ ID NO: 1096381 - RNA, 19 nt, Homo sapiens
  misc_RNA (1)...(19): siRNA sense strand
aaacagcuuuagugaugag

SEQ ID NO: 1096382 - RNA, 19 nt, Homo sapiens
  misc_RNA (1)...(19): siRNA sense strand
ccagauacacuguggaacu

SEQ ID NO: 1096383 - RNA, 19 nt, Homo sapiens
  misc_RNA (1)...(19): siRNA sense strand
gacgagcuauggccauugc

SEQ ID NO: 1096384 - RNA, 19 nt, Homo sapiens
  misc_RNA (1)...(19): siRNA sense strand
gcaggugggacgagcuaug

SEQ ID NO: 1096385 - RNA, 19 nt, Homo sapiens
  misc_RNA (1)...(19): siRNA sense strand
cugaugcuccuguuucuga

SEQ ID NO: 1096386 - RNA, 19 nt, Homo sapiens
  misc_RNA (1)...(19): siRNA sense strand
caagcugggcuccugucua

SEQ ID NO: 1096387 - RNA, 19 nt, Homo sapiens
  misc_RNA (1)...(19): siRNA sense strand
aucgggagcuccuuugcua

SEQ ID NO: 1096388 - RNA, 19 nt, Homo sapiens
  misc_RNA (1)...(19): siRNA sense strand
cggcccaccuuugagauga

SEQ ID NO: 1096389 - RNA, 19 nt, Homo sapiens
  misc_RNA (1)...(19): siRNA sense strand
cgggagcuccuuugcuauu

SEQ ID NO: 1096390 - RNA, 19 nt, Homo sapiens
  misc_RNA (1)...(19): siRNA sense strand
acaaaauucuccacagaug

SEQ ID NO: 1096391 - RNA, 19 nt, Homo sapiens
  misc_RNA (1)...(19): siRNA sense strand
gaaguacucuuguuugaaa

SEQ ID NO: 1096392 - RNA, 19 nt, Homo sapiens
  misc_RNA (1)...(19): siRNA sense strand
gaacagguacuuacaauuu

SEQ ID NO: 1096393 - RNA, 19 nt, Homo sapiens
  misc_RNA (1)...(19): siRNA sense strand
ggaagaaccucgaggagaa

SEQ ID NO: 1096394 - RNA, 19 nt, Homo sapiens
  misc_RNA (1)...(19): siRNA sense strand
uagagaagcuggauguaua

SEQ ID NO: 1096395 - RNA, 19 nt, Homo sapiens
  misc_RNA (1)...(19): siRNA sense strand
gaacagaggacaguaagua

SEQ ID NO: 1096396 - RNA, 19 nt, Homo sapiens
  misc_RNA (1)...(19): siRNA sense strand
aaagaagccuguauuguuu

SEQ ID NO: 1096397 - RNA, 19 nt, Homo sapiens
  misc_RNA (1)...(19): siRNA sense strand
guacucaucuucuugguuu

SEQ ID NO: 1096398 - RNA, 19 nt, Homo sapiens
  misc_RNA (1)...(19): siRNA sense strand
gcaggaaacucaucucuuc

SEQ ID NO: 1096399 - RNA, 19 nt, Homo sapiens
  misc_RNA (1)...(19): siRNA sense strand
gaaguuagccacugauauu

SEQ ID NO: 1096400 - RNA, 19 nt, Homo sapiens
  misc_RNA (1)...(19): siRNA sense strand
uaacacaagugaugaaaga

SEQ ID NO: 1096401 - RNA, 19 nt, Homo sapiens
  misc_RNA (1)...(19): siRNA sense strand
uggcagaacuugacauuaa

SEQ ID NO: 1096402 - RNA, 19 nt, Homo sapiens
  misc_RNA (1)...(19): siRNA sense strand
gaagauucagccaauauua

SEQ ID NO: 1096403 - RNA, 19 nt, Homo sapiens
  misc_RNA (1)...(19): siRNA sense strand
gugauaacauucagcaaua

SEQ ID NO: 1096404 - RNA, 19 nt, Homo sapiens
  misc_RNA (1)...(19): siRNA sense strand
guacuuauguggauuggaa

SEQ ID NO: 1096405 - RNA, 19 nt, Homo sapiens
  misc_RNA (1)...(19): siRNA sense strand
gaaaugaaaguuccagauu

SEQ ID NO: 1096406 - RNA, 19 nt, Homo sapiens
  misc_RNA (1)...(19): siRNA sense strand
caaacuggcucaacaagau

SEQ ID NO: 1096407 - RNA, 19 nt, Homo sapiens
  misc_RNA (1)...(19): siRNA sense strand
ggaaaugaccuuaaaucuu

SEQ ID NO: 1096408 - RNA, 19 nt, Homo sapiens
  misc_RNA (1)...(19): siRNA sense strand
gaucuuggaaccaugauua

SEQ ID NO: 1096409 - RNA, 19 nt, Homo sapiens
  misc_RNA (1)...(19): siRNA sense strand
gaacuugacauuaaacuuc

SEQ ID NO: 1096410 - RNA, 19 nt, Homo sapiens
  misc_RNA (1)...(19): siRNA sense strand
ugacaugauuaaccucuua

SEQ ID NO: 1096411 - RNA, 19 nt, Homo sapiens
  misc_RNA (1)...(19): siRNA sense strand
ggagagcucugucuuugau

SEQ ID NO: 1096412 - RNA, 19 nt, Homo sapiens
  misc_RNA (1)...(19): siRNA sense strand
caacaguacuagcagauug

SEQ ID NO: 1096413 - RNA, 19 nt, Homo sapiens
  misc_RNA (1)...(19): siRNA sense strand
ugacguggaugaaaugaaa

SEQ ID NO: 1096414 - RNA, 19 nt, Homo sapiens
  misc_RNA (1)...(19): siRNA sense strand
gaaguaaacaagucaguga

SEQ ID NO: 1096415 - RNA, 19 nt, Homo sapiens
  misc_RNA (1)...(19): siRNA sense strand
gaacuacaucucaacagua

SEQ ID NO: 1096416 - RNA, 19 nt, Homo sapiens
  misc_RNA (1)...(19): siRNA sense strand
gcaguuagaagaacaggua

SEQ ID NO: 1096417 - RNA, 19 nt, Homo sapiens
  misc_RNA (1)...(19): siRNA sense strand
gcagaagaaucaaagcaau

SEQ ID NO: 1096418 - RNA, 19 nt, Homo sapiens
  misc_RNA (1)...(19): siRNA sense strand
guauacaucuaccaagaaa

SEQ ID NO: 1096419 - RNA, 19 nt, Homo sapiens
  misc_RNA (1)...(19): siRNA sense strand
gguuauaacugacagguau

SEQ ID NO: 1096420 - RNA, 19 nt, Homo sapiens
  misc_RNA (1)...(19): siRNA sense strand
acaguuaaauucuggcaua

SEQ ID NO: 1096421 - RNA, 19 nt, Homo sapiens
  misc_RNA (1)...(19): siRNA sense strand
ggaaucaucuuguacucau

SEQ ID NO: 1096422 - RNA, 19 nt, Homo sapiens
  misc_RNA (1)...(19): siRNA sense strand
acaaaccucagaugaauua

SEQ ID NO: 1096423 - RNA, 19 nt, Homo sapiens
  misc_RNA (1)...(19): siRNA sense strand
gcaaaugcuuguagagaag

SEQ ID NO: 1096424 - RNA, 19 nt, Homo sapiens
  misc_RNA (1)...(19): siRNA sense strand
ggcaaaugcuuguagagaa

SEQ ID NO: 1096425 - RNA, 19 nt, Homo sapiens
  misc_RNA (1)...(19): siRNA sense strand
cuacaaaccucagaugaau

SEQ ID NO: 1096426 - RNA, 19 nt, Homo sapiens
  misc_RNA (1)...(19): siRNA sense strand
gauaugacucggaaucuuu

SEQ ID NO: 1096427 - RNA, 19 nt, Homo sapiens
  misc_RNA (1)...(19): siRNA sense strand
ggagaaaagugacauaaau

SEQ ID NO: 1096428 - RNA, 19 nt, Homo sapiens
  misc_RNA (1)...(19): siRNA sense strand
gcagcuuuguuucuccuua

SEQ ID NO: 1096429 - RNA, 19 nt, Homo sapiens
  misc_RNA (1)...(19): siRNA sense strand
ggauaucacugacguggau

SEQ ID NO: 1096430 - RNA, 19 nt, Homo sapiens
  misc_RNA (1)...(19): siRNA sense strand
gaacuaagugauaacauuc

SEQ ID NO: 1096431 - RNA, 19 nt, Homo sapiens
  misc_RNA (1)...(19): siRNA sense strand
cagaagagguucagguauc

SEQ ID NO: 1096432 - RNA, 19 nt, Homo sapiens
  misc_RNA (1)...(19): siRNA sense strand
gcaagagaccagaaaauua

SEQ ID NO: 1096433 - RNA, 19 nt, Homo sapiens
  misc_RNA (1)...(19): siRNA sense strand
aaaugaaaguuccagauug

SEQ ID NO: 1096434 - RNA, 19 nt, Homo sapiens
  misc_RNA (1)...(19): siRNA sense strand
gaagaacagguacuuacaa

SEQ ID NO: 1096435 - RNA, 19 nt, Homo sapiens
  misc_RNA (1)...(19): siRNA sense strand
gauguugagauucuacuua

SEQ ID NO: 1096436 - RNA, 19 nt, Homo sapiens
  misc_RNA (1)...(19): siRNA sense strand
ucacugacguggaugaaau

SEQ ID NO: 1096437 - RNA, 19 nt, Homo sapiens
  misc_RNA (1)...(19): siRNA sense strand
uggaaaccauacugaauuu

SEQ ID NO: 1096438 - RNA, 19 nt, Homo sapiens
  misc_RNA (1)...(19): siRNA sense strand
uaaagaugcugcaaaauug

SEQ ID NO: 1096439 - RNA, 19 nt, Homo sapiens
  misc_RNA (1)...(19): siRNA sense strand
ccacugauauuccuugucu

SEQ ID NO: 1096440 - RNA, 19 nt, Homo sapiens
  misc_RNA (1)...(19): siRNA sense strand
gaagagaucgaacgucauc

SEQ ID NO: 1096441 - RNA, 19 nt, Homo sapiens
  misc_RNA (1)...(19): siRNA sense strand
gagaagauucagccaauau

SEQ ID NO: 1096442 - RNA, 19 nt, Homo sapiens
  misc_RNA (1)...(19): siRNA sense strand
agacuaauguguuaagcaa

SEQ ID NO: 1096443 - RNA, 19 nt, Homo sapiens
  misc_RNA (1)...(19): siRNA sense strand
aggacaagcuuacaaguga

SEQ ID NO: 1096444 - RNA, 19 nt, Homo sapiens
  misc_RNA (1)...(19): siRNA sense strand
caugagagccacaguuaaa

SEQ ID NO: 1096445 - RNA, 19 nt, Homo sapiens
  misc_RNA (1)...(19): siRNA sense strand
ggcagaacuugacauuaaa

SEQ ID NO: 1096446 - RNA, 19 nt, Homo sapiens
  misc_RNA (1)...(19): siRNA sense strand
caaagcaacucccagaaaa

SEQ ID NO: 1096447 - RNA, 19 nt, Homo sapiens
  misc_RNA (1)...(19): siRNA sense strand
gaacguuuaaagcaugaua

SEQ ID NO: 1096448 - RNA, 19 nt, Homo sapiens
  misc_RNA (1)...(19): siRNA sense strand
gauauuccuugucugcuau

SEQ ID NO: 1096449 - RNA, 19 nt, Homo sapiens
  misc_RNA (1)...(19): siRNA sense strand
gagggaaccggcagacuaa

SEQ ID NO: 1096450 - RNA, 19 nt, Homo sapiens
  misc_RNA (1)...(19): siRNA sense strand
auggugaucucccuucuua

SEQ ID NO: 1096451 - RNA, 19 nt, Homo sapiens
  misc_RNA (1)...(19): siRNA sense strand
cagaaggacuuaguagaug

SEQ ID NO: 1096452 - RNA, 19 nt, Homo sapiens
  misc_RNA (1)...(19): siRNA sense strand
ggaugaaguacucuuguuu

SEQ ID NO: 1096453 - RNA, 19 nt, Homo sapiens
  misc_RNA (1)...(19): siRNA sense strand
uaagcaagccagaauggua

SEQ ID NO: 1096454 - RNA, 19 nt, Homo sapiens
  misc_RNA (1)...(19): siRNA sense strand
guucagguaucacuucaga

SEQ ID NO: 1096455 - RNA, 19 nt, Homo sapiens
  misc_RNA (1)...(19): siRNA sense strand
cagaugaauuacuuacuga

SEQ ID NO: 1096456 - RNA, 19 nt, Homo sapiens
  misc_RNA (1)...(19): siRNA sense strand
gaaguuggaaaugaccuua

SEQ ID NO: 1096457 - RNA, 19 nt, Homo sapiens
  misc_RNA (1)...(19): siRNA sense strand
ggacaaauuggccuaauac

SEQ ID NO: 1096458 - RNA, 19 nt, Homo sapiens
  misc_RNA (1)...(19): siRNA sense strand
gcacuacugcugaaagaug

SEQ ID NO: 1096459 - RNA, 19 nt, Homo sapiens
  misc_RNA (1)...(19): siRNA sense strand
uaggacagcuagccucuau

SEQ ID NO: 1096460 - RNA, 19 nt, Homo sapiens
  misc_RNA (1)...(19): siRNA sense strand
guaugcauauucuaucaga

SEQ ID NO: 1096461 - RNA, 19 nt, Homo sapiens
  misc_RNA (1)...(19): siRNA sense strand
ccaaagcaacucccagaaa

SEQ ID NO: 1096462 - RNA, 19 nt, Homo sapiens
  misc_RNA (1)...(19): siRNA sense strand
caauaucugaugaccaaua

SEQ ID NO: 1096463 - RNA, 19 nt, Homo sapiens
  misc_RNA (1)...(19): siRNA sense strand
cuucaggaaucaucuugua

SEQ ID NO: 1096464 - RNA, 19 nt, Homo sapiens
  misc_RNA (1)...(19): siRNA sense strand
gacguuacgagaccauuua

SEQ ID NO: 1096465 - RNA, 19 nt, Homo sapiens
  misc_RNA (1)...(19): siRNA sense strand
acucuacucuugguuauaa

SEQ ID NO: 1096466 - RNA, 19 nt, Homo sapiens
  misc_RNA (1)...(19): siRNA sense strand
ucagaugaauuacuuacug

SEQ ID NO: 1096467 - RNA, 19 nt, Homo sapiens
  misc_RNA (1)...(19): siRNA sense strand
auacugaauuucuggauga

SEQ ID NO: 1096468 - RNA, 19 nt, Homo sapiens
  misc_RNA (1)...(19): siRNA sense strand
ggagguguuugcagagaau

SEQ ID NO: 1096469 - RNA, 19 nt, Homo sapiens
  misc_RNA (1)...(19): siRNA sense strand
gagaaguuagccacugaua

SEQ ID NO: 1096470 - RNA, 19 nt, Homo sapiens
  misc_RNA (1)...(19): siRNA sense strand
gccaauauuagacaaagua

SEQ ID NO: 1096471 - RNA, 19 nt, Homo sapiens
  misc_RNA (1)...(19): siRNA sense strand
ugagaagauucagccaaua

SEQ ID NO: 1096472 - RNA, 19 nt, Homo sapiens
  misc_RNA (1)...(19): siRNA sense strand
cuacuuaauuugaggacaa

SEQ ID NO: 1096473 - RNA, 19 nt, Homo sapiens
  misc_RNA (1)...(19): siRNA sense strand
cagcugcaguuugauauga

SEQ ID NO: 1096474 - RNA, 19 nt, Homo sapiens
  misc_RNA (1)...(19): siRNA sense strand
ggaguuacagaaggacuua

SEQ ID NO: 1096475 - RNA, 19 nt, Homo sapiens
  misc_RNA (1)...(19): siRNA sense strand
gauaaacucauagaacaga

SEQ ID NO: 1096476 - RNA, 19 nt, Homo sapiens
  misc_RNA (1)...(19): siRNA sense strand
cacaagugaugaaagaaga

SEQ ID NO: 1096477 - RNA, 19 nt, Homo sapiens
  misc_RNA (1)...(19): siRNA sense strand
agaaggacuuaguagauga

SEQ ID NO: 1096478 - RNA, 19 nt, Homo sapiens
  misc_RNA (1)...(19): siRNA sense strand
aaugaaaguuccagauugu

SEQ ID NO: 1096479 - RNA, 19 nt, Homo sapiens
  misc_RNA (1)...(19): siRNA sense strand
aaaauggacucaaugcuuu

SEQ ID NO: 1096480 - RNA, 19 nt, Homo sapiens
  misc_RNA (1)...(19): siRNA sense strand
gguugacgguggagagaaa

SEQ ID NO: 1096481 - RNA, 19 nt, Homo sapiens
  misc_RNA (1)...(19): siRNA sense strand
gaugaaguacucuuguuug

SEQ ID NO: 1096482 - RNA, 19 nt, Homo sapiens
  misc_RNA (1)...(19): siRNA sense strand
ugauauuccuugucugcua

SEQ ID NO: 1096483 - RNA, 19 nt, Homo sapiens
  misc_RNA (1)...(19): siRNA sense strand
acauuaaacuucaggaauc

SEQ ID NO: 1096484 - RNA, 19 nt, Homo sapiens
  misc_RNA (1)...(19): siRNA sense strand
ggacaagcuuacaagugau

SEQ ID NO: 1096485 - RNA, 19 nt, Homo sapiens
  misc_RNA (1)...(19): siRNA sense strand
gcugugaacuacaucucaa

SEQ ID NO: 1096486 - RNA, 19 nt, Homo sapiens
  misc_RNA (1)...(19): siRNA sense strand
ccggcagacuaauguguua

SEQ ID NO: 1096487 - RNA, 19 nt, Homo sapiens
  misc_RNA (1)...(19): siRNA sense strand
aggacaaauuggccuaaua

SEQ ID NO: 1096488 - RNA, 19 nt, Homo sapiens
  misc_RNA (1)...(19): siRNA sense strand
ugaacuacaucucaacagu

SEQ ID NO: 1096489 - RNA, 19 nt, Homo sapiens
  misc_RNA (1)...(19): siRNA sense strand
acucaaugcuuuccucaga

SEQ ID NO: 1096490 - RNA, 19 nt, Homo sapiens
  misc_RNA (1)...(19): siRNA sense strand
aaacaagucagugaaggua

SEQ ID NO: 1096491 - RNA, 19 nt, Homo sapiens
  misc_RNA (1)...(19): siRNA sense strand
caacauagagucugagauu

SEQ ID NO: 1096492 - RNA, 19 nt, Homo sapiens
  misc_RNA (1)...(19): siRNA sense strand
gcaaggaccugcagcacau

SEQ ID NO: 1096493 - RNA, 19 nt, Homo sapiens
  misc_RNA (1)...(19): siRNA sense strand
gggacuacauugccuauga

SEQ ID NO: 1096494 - RNA, 19 nt, Homo sapiens
  misc_RNA (1)...(19): siRNA sense strand
guuguagaguugaaaguua

SEQ ID NO: 1096495 - RNA, 19 nt, Homo sapiens
  misc_RNA (1)...(19): siRNA sense strand
gaaagaggccaucaagauc

SEQ ID NO: 1096496 - RNA, 19 nt, Homo sapiens
  misc_RNA (1)...(19): siRNA sense strand
ccaaagaagcggagaaaga

SEQ ID NO: 1096497 - RNA, 19 nt, Homo sapiens
  misc_RNA (1)...(19): siRNA sense strand
gagaucaggcaacacuuua

SEQ ID NO: 1096498 - RNA, 19 nt, Homo sapiens
  misc_RNA (1)...(19): siRNA sense strand
agaccaagcugaaacuaga

SEQ ID NO: 1096499 - RNA, 19 nt, Homo sapiens
  misc_RNA (1)...(19): siRNA sense strand
ggugugggcugacaacuca

SEQ ID NO: 1096500 - RNA, 19 nt, Homo sapiens
  misc_RNA (1)...(19): siRNA sense strand
ugaagcgccuguugaagaa

SEQ ID NO: 1096501 - RNA, 19 nt, Homo sapiens
  misc_RNA (1)...(19): siRNA sense strand
ggagaucaggcaacacuuu

SEQ ID NO: 1096502 - RNA, 19 nt, Homo sapiens
  misc_RNA (1)...(19): siRNA sense strand
agaagacccuggacaaugu

SEQ ID NO: 1096503 - RNA, 19 nt, Homo sapiens
  misc_RNA (1)...(19): siRNA sense strand
gagacuucgugguagauaa

SEQ ID NO: 1096504 - RNA, 19 nt, Homo sapiens
  misc_RNA (1)...(19): siRNA sense strand
gcaucauggucaagacuuu

SEQ ID NO: 1096505 - RNA, 19 nt, Homo sapiens
  misc_RNA (1)...(19): siRNA sense strand
ugaaagaggccaucaagau

SEQ ID NO: 1096506 - RNA, 19 nt, Homo sapiens
  misc_RNA (1)...(19): siRNA sense strand
gacuuuagguuccguacaa

SEQ ID NO: 1096507 - RNA, 19 nt, Homo sapiens
  misc_RNA (1)...(19): siRNA sense strand
acaagaggaagaagaauaa

SEQ ID NO: 1096508 - RNA, 19 nt, Homo sapiens
  misc_RNA (1)...(19): siRNA sense strand
uaaaaucacucgagacuuc

SEQ ID NO: 1096509 - RNA, 19 nt, Homo sapiens
  misc_RNA (1)...(19): siRNA sense strand
ucaagaagcuacaggaaaa

SEQ ID NO: 1096510 - RNA, 19 nt, Homo sapiens
  misc_RNA (1)...(19): siRNA sense strand
aggaagaugugaguguuua

SEQ ID NO: 1096511 - RNA, 19 nt, Homo sapiens
  misc_RNA (1)...(19): siRNA sense strand
cagcacaucuggcccuuca

SEQ ID NO: 1096512 - RNA, 19 nt, Homo sapiens
  misc_RNA (1)...(19): siRNA sense strand
acagagagguggacaagca

SEQ ID NO: 1096513 - RNA, 19 nt, Homo sapiens
  misc_RNA (1)...(19): siRNA sense strand
uuacauggauuaccaagag

SEQ ID NO: 1096514 - RNA, 19 nt, Homo sapiens
  misc_RNA (1)...(19): siRNA sense strand
guugaaaguuacauggauu

SEQ ID NO: 1096515 - RNA, 19 nt, Homo sapiens
  misc_RNA (1)...(19): siRNA sense strand
gcacggugaucgacgucaa

SEQ ID NO: 1096516 - RNA, 19 nt, Homo sapiens
  misc_RNA (1)...(19): siRNA sense strand
gugaagcgccuguugaaga

SEQ ID NO: 1096517 - RNA, 19 nt, Homo sapiens
  misc_RNA (1)...(19): siRNA sense strand
cgacucgggucucuucuuc

SEQ ID NO: 1096518 - RNA, 19 nt, Homo sapiens
  misc_RNA (1)...(19): siRNA sense strand
cacaagaggaagaagaaua

SEQ ID NO: 1096519 - RNA, 19 nt, Homo sapiens
  misc_RNA (1)...(19): siRNA sense strand
aaaguuacauggauuacca

SEQ ID NO: 1096520 - RNA, 19 nt, Homo sapiens
  misc_RNA (1)...(19): siRNA sense strand
ggucugauccugguaaaug

SEQ ID NO: 1096521 - RNA, 19 nt, Homo sapiens
  misc_RNA (1)...(19): siRNA sense strand
guaccugcauggugaagug

SEQ ID NO: 1096522 - RNA, 19 nt, Homo sapiens
  misc_RNA (1)...(19): siRNA sense strand
guucugcccuggagacuuc

SEQ ID NO: 1096523 - RNA, 19 nt, Homo sapiens
  misc_RNA (1)...(19): siRNA sense strand
gcaaacacaagaggaagaa

SEQ ID NO: 1096524 - RNA, 19 nt, Homo sapiens
  misc_RNA (1)...(19): siRNA sense strand
gcacaucuggcccuucaug

SEQ ID NO: 1096525 - RNA, 19 nt, Homo sapiens
  misc_RNA (1)...(19): siRNA sense strand
ggaagcagugcccgacgua

SEQ ID NO: 1096526 - RNA, 19 nt, Homo sapiens
  misc_RNA (1)...(19): siRNA sense strand
gaaggagaccaagcugaaa

SEQ ID NO: 1096527 - RNA, 19 nt, Homo sapiens
  misc_RNA (1)...(19): siRNA sense strand
gggaaggucuacgacuuga

SEQ ID NO: 1096528 - RNA, 19 nt, Homo sapiens
  misc_RNA (1)...(19): siRNA sense strand
uggaagaggugcagguugu

SEQ ID NO: 1096529 - RNA, 19 nt, Homo sapiens
  misc_RNA (1)...(19): siRNA sense strand
acaaugagauggcgcugau

SEQ ID NO: 1096530 - RNA, 19 nt, Homo sapiens
  misc_RNA (1)...(19): siRNA sense strand
gaaggugaagcgccuguug

SEQ ID NO: 1096531 - RNA, 19 nt, Homo sapiens
  misc_RNA (1)...(19): siRNA sense strand
gauggccucuacuuguuug

SEQ ID NO: 1096532 - RNA, 19 nt, Homo sapiens
  misc_RNA (1)...(19): siRNA sense strand
acaagaaccugaggaugga

SEQ ID NO: 1096533 - RNA, 19 nt, Homo sapiens
  misc_RNA (1)...(19): siRNA sense strand
gaccucagccgacgugaug

SEQ ID NO: 1096534 - RNA, 19 nt, Homo sapiens
  misc_RNA (1)...(19): siRNA sense strand
caaagaagcggagaaagag

SEQ ID NO: 1096535 - RNA, 19 nt, Homo sapiens
  misc_RNA (1)...(19): siRNA sense strand
guaaaugaaccauacuaca

SEQ ID NO: 1096536 - RNA, 19 nt, Homo sapiens
  misc_RNA (1)...(19): siRNA sense strand
ucaagaagacccuggacaa

SEQ ID NO: 1096537 - RNA, 19 nt, Homo sapiens
  misc_RNA (1)...(19): siRNA sense strand
ugaaggagaccaagcugaa

SEQ ID NO: 1096538 - RNA, 19 nt, Homo sapiens
  misc_RNA (1)...(19): siRNA sense strand
gaaggucuacgacuugaag

SEQ ID NO: 1096539 - RNA, 19 nt, Homo sapiens
  misc_RNA (1)...(19): siRNA sense strand
ucaagcagcaugugaagga

SEQ ID NO: 1096540 - RNA, 19 nt, Homo sapiens
  misc_RNA (1)...(19): siRNA sense strand
gaagccaacucgggagaag

SEQ ID NO: 1096541 - RNA, 19 nt, Homo sapiens
  misc_RNA (1)...(19): siRNA sense strand
caagauugccugggaaugu

SEQ ID NO: 1096542 - RNA, 19 nt, Homo sapiens
  misc_RNA (1)...(19): siRNA sense strand
gaaacuagaggaccguucu

SEQ ID NO: 1096543 - RNA, 19 nt, Homo sapiens
  misc_RNA (1)...(19): siRNA sense strand
caucuggcccuucauguau

SEQ ID NO: 1096544 - RNA, 19 nt, Homo sapiens
  misc_RNA (1)...(19): siRNA sense strand
ggacagagagguggacaag

SEQ ID NO: 1096545 - RNA, 19 nt, Homo sapiens
  misc_RNA (1)...(19): siRNA sense strand
gaggaagaugugaguguuu

SEQ ID NO: 1096546 - RNA, 19 nt, Homo sapiens
  misc_RNA (1)...(19): siRNA sense strand
gaacuuaaagcgcaaacac

SEQ ID NO: 1096547 - RNA, 19 nt, Homo sapiens
  misc_RNA (1)...(19): siRNA sense strand
ggaagacccagacaagaag

SEQ ID NO: 1096548 - RNA, 19 nt, Homo sapiens
  misc_RNA (1)...(19): siRNA sense strand
agaaccagaucauccugaa

SEQ ID NO: 1096549 - RNA, 19 nt, Homo sapiens
  misc_RNA (1)...(19): siRNA sense strand
gguagagccagccaagauu

SEQ ID NO: 1096550 - RNA, 19 nt, Homo sapiens
  misc_RNA (1)...(19): siRNA sense strand
ggugcagguuguagaguug

SEQ ID NO: 1096551 - RNA, 19 nt, Homo sapiens
  misc_RNA (1)...(19): siRNA sense strand
cuucuucgaugauuccuau

SEQ ID NO: 1096552 - RNA, 19 nt, Homo sapiens
  misc_RNA (1)...(19): siRNA sense strand
ggacuacauugccuaugac

SEQ ID NO: 1096553 - RNA, 19 nt, Homo sapiens
  misc_RNA (1)...(19): siRNA sense strand
ggauggccucuacuuguuu

SEQ ID NO: 1096554 - RNA, 19 nt, Homo sapiens
  misc_RNA (1)...(19): siRNA sense strand
caagaagacccuggacaau

SEQ ID NO: 1096555 - RNA, 19 nt, Homo sapiens
  misc_RNA (1)...(19): siRNA sense strand
aaacacaagaggaagaaga

SEQ ID NO: 1096556 - RNA, 19 nt, Homo sapiens
  misc_RNA (1)...(19): siRNA sense strand
gcaccaacugcaucaucua

SEQ ID NO: 1096557 - RNA, 19 nt, Homo sapiens
  misc_RNA (1)...(19): siRNA sense strand
uggaagacccagacaagaa

SEQ ID NO: 1096558 - RNA, 19 nt, Homo sapiens
  misc_RNA (1)...(19): siRNA sense strand
cagaucauccugaagcuau

SEQ ID NO: 1096559 - RNA, 19 nt, Homo sapiens
  misc_RNA (1)...(19): siRNA sense strand
caucaucuaucccgucaac

SEQ ID NO: 1096560 - RNA, 19 nt, Homo sapiens
  misc_RNA (1)...(19): siRNA sense strand
ccaaggguuucaucaagag

SEQ ID NO: 1096561 - RNA, 19 nt, Homo sapiens
  misc_RNA (1)...(19): siRNA sense strand
cuucucagcucucaucaag

SEQ ID NO: 1096562 - RNA, 19 nt, Homo sapiens
  misc_RNA (1)...(19): siRNA sense strand
acauagagucugagauuga

SEQ ID NO: 1096563 - RNA, 19 nt, Homo sapiens
  misc_RNA (1)...(19): siRNA sense strand
guagagccagccaagauug

SEQ ID NO: 1096564 - RNA, 19 nt, Homo sapiens
  misc_RNA (1)...(19): siRNA sense strand
ggaagaggugcagguugua

SEQ ID NO: 1096565 - RNA, 19 nt, Homo sapiens
  misc_RNA (1)...(19): siRNA sense strand
ggucucuucuucgaugauu

SEQ ID NO: 1096566 - RNA, 19 nt, Homo sapiens
  misc_RNA (1)...(19): siRNA sense strand
gccaggugcuccaugaaca

SEQ ID NO: 1096567 - RNA, 19 nt, Homo sapiens
  misc_RNA (1)...(19): siRNA sense strand
caggauggcuccguggaau

SEQ ID NO: 1096568 - RNA, 19 nt, Homo sapiens
  misc_RNA (1)...(19): siRNA sense strand
caaggucugauccugguaa

SEQ ID NO: 1096569 - RNA, 19 nt, Homo sapiens
  misc_RNA (1)...(19): siRNA sense strand
agaggaagaugugaguguu

SEQ ID NO: 1096570 - RNA, 19 nt, Homo sapiens
  misc_RNA (1)...(19): siRNA sense strand
ggagacuucgugguagaua

SEQ ID NO: 1096571 - RNA, 19 nt, Homo sapiens
  misc_RNA (1)...(19): siRNA sense strand
uuaaagcgcaaacacaaga

SEQ ID NO: 1096572 - RNA, 19 nt, Homo sapiens
  misc_RNA (1)...(19): siRNA sense strand
aggauggccucuacuuguu

SEQ ID NO: 1096573 - RNA, 19 nt, Homo sapiens
  misc_RNA (1)...(19): siRNA sense strand
uguacaacauagagucuga

SEQ ID NO: 1096574 - RNA, 19 nt, Homo sapiens
  misc_RNA (1)...(19): siRNA sense strand
gcacuuguacaacauagag

SEQ ID NO: 1096575 - RNA, 19 nt, Homo sapiens
  misc_RNA (1)...(19): siRNA sense strand
gcugaccacccugacuuua

SEQ ID NO: 1096576 - RNA, 19 nt, Homo sapiens
  misc_RNA (1)...(19): siRNA sense strand
ggaaggcuaugaaaacagu

SEQ ID NO: 1096577 - RNA, 19 nt, Homo sapiens
  misc_RNA (1)...(19): siRNA sense strand
gagcaggacgcagaugaug

SEQ ID NO: 1096578 - RNA, 19 nt, Homo sapiens
  misc_RNA (1)...(19): siRNA sense strand
uccaaggguuucaucaaga

SEQ ID NO: 1096579 - RNA, 19 nt, Homo sapiens
  misc_RNA (1)...(19): siRNA sense strand
ggugaucgacgucaacauc

SEQ ID NO: 1096580 - RNA, 19 nt, Homo sapiens
  misc_RNA (1)...(19): siRNA sense strand
ggacaagggaguggugauc

SEQ ID NO: 1096581 - RNA, 19 nt, Homo sapiens
  misc_RNA (1)...(19): siRNA sense strand
ggacgagcaccccaagaua

SEQ ID NO: 1096582 - RNA, 19 nt, Homo sapiens
  misc_RNA (1)...(19): siRNA sense strand
gcugggagacggacaaugg

SEQ ID NO: 1096583 - RNA, 19 nt, Homo sapiens
  misc_RNA (1)...(19): siRNA sense strand
gcaggauggcuccguggaa

SEQ ID NO: 1096584 - RNA, 19 nt, Homo sapiens
  misc_RNA (1)...(19): siRNA sense strand
gcaggacgcagaugaugag

SEQ ID NO: 1096585 - RNA, 19 nt, Homo sapiens
  misc_RNA (1)...(19): siRNA sense strand
aagaguggcuacccugaca

SEQ ID NO: 1096586 - RNA, 19 nt, Homo sapiens
  misc_RNA (1)...(19): siRNA sense strand
gagagccucaagaacauga

SEQ ID NO: 1096587 - RNA, 19 nt, Homo sapiens
  misc_RNA (1)...(19): siRNA sense strand
uggagagccucaagaacau

SEQ ID NO: 1096588 - RNA, 19 nt, Homo sapiens
  misc_RNA (1)...(19): siRNA sense strand
cccaugcccugcuggagaa

SEQ ID NO: 1096589 - RNA, 19 nt, Homo sapiens
  misc_RNA (1)...(19): siRNA sense strand
ucugcuaccucucccaaug

SEQ ID NO: 1096590 - RNA, 19 nt, Homo sapiens
  misc_RNA (1)...(19): siRNA sense strand
caucaagaagcuacaggaa

SEQ ID NO: 1096591 - RNA, 19 nt, Homo sapiens
  misc_RNA (1)...(19): siRNA sense strand
ccaaccaggugacgaaaua

SEQ ID NO: 1096592 - RNA, 19 nt, Homo sapiens
  misc_RNA (1)...(19): siRNA sense strand
cgaauucucuucccacauu

SEQ ID NO: 1096593 - RNA, 19 nt, Homo sapiens
  misc_RNA (1)...(19): siRNA sense strand
gaacucggguggcuaugaa

SEQ ID NO: 1096594 - RNA, 19 nt, Homo sapiens
  misc_RNA (1)...(19): siRNA sense strand
gaaguucccuggccuuugu

SEQ ID NO: 1096595 - RNA, 19 nt, Homo sapiens
  misc_RNA (1)...(19): siRNA sense strand
gggagaagcccuuuaaaug

SEQ ID NO: 1096596 - RNA, 19 nt, Homo sapiens
  misc_RNA (1)...(19): siRNA sense strand
ggagaagcccuuuaaaugu

SEQ ID NO: 1096597 - RNA, 19 nt, Homo sapiens
  misc_RNA (1)...(19): siRNA sense strand
gagaagcccuuuaaauguc

SEQ ID NO: 1096598 - RNA, 19 nt, Homo sapiens
  misc_RNA (1)...(19): siRNA sense strand
guacagcgaugaggaguca

SEQ ID NO: 1096599 - RNA, 19 nt, Homo sapiens
  misc_RNA (1)...(19): siRNA sense strand
gcacugccguauccucuuc

SEQ ID NO: 1096600 - RNA, 19 nt, Homo sapiens
  misc_RNA (1)...(19): siRNA sense strand
ccucugagcggccaacuuu

SEQ ID NO: 1096601 - RNA, 19 nt, Homo sapiens
  misc_RNA (1)...(19): siRNA sense strand
ccaauagccucaccaaacg

SEQ ID NO: 1096602 - RNA, 19 nt, Homo sapiens
  misc_RNA (1)...(19): siRNA sense strand
gggcugccauggcuucaga

SEQ ID NO: 1096603 - RNA, 19 nt, Homo sapiens
  misc_RNA (1)...(19): siRNA sense strand
ugccauaacuaccuacaga

SEQ ID NO: 1096604 - RNA, 19 nt, Homo sapiens
  misc_RNA (1)...(19): siRNA sense strand
caacaucugugguuaucac

SEQ ID NO: 1096605 - RNA, 19 nt, Homo sapiens
  misc_RNA (1)...(19): siRNA sense strand
acaaggagcggugccauaa

SEQ ID NO: 1096606 - RNA, 19 nt, Homo sapiens
  misc_RNA (1)...(19): siRNA sense strand
gccaauagccucaccaaac

SEQ ID NO: 1096607 - RNA, 19 nt, Homo sapiens
  misc_RNA (1)...(19): siRNA sense strand
ggacuccacagacacagaa

SEQ ID NO: 1096608 - RNA, 19 nt, Homo sapiens
  misc_RNA (1)...(19): siRNA sense strand
gaacucacgccugucauca

SEQ ID NO: 1096609 - RNA, 19 nt, Homo sapiens
  misc_RNA (1)...(19): siRNA sense strand
ucucagaccuccccuauga

SEQ ID NO: 1096610 - RNA, 19 nt, Homo sapiens
  misc_RNA (1)...(19): siRNA sense strand
ccaauugcaucucagaacu

SEQ ID NO: 1096611 - RNA, 19 nt, Homo sapiens
  misc_RNA (1)...(19): siRNA sense strand
gaauucucuucccacauug

SEQ ID NO: 1096612 - RNA, 19 nt, Homo sapiens
  misc_RNA (1)...(19): siRNA sense strand
ccagccaccucccaccauu

SEQ ID NO: 1096613 - RNA, 19 nt, Homo sapiens
  misc_RNA (1)...(19): siRNA sense strand
gaaagcaaccacgaagauc

SEQ ID NO: 1096614 - RNA, 19 nt, Homo sapiens
  misc_RNA (1)...(19): siRNA sense strand
ccacagacacagaaagcaa

SEQ ID NO: 1096615 - RNA, 19 nt, Homo sapiens
  misc_RNA (1)...(19): siRNA sense strand
uuaaaugucccuucugcaa

SEQ ID NO: 1096616 - RNA, 19 nt, Homo sapiens
  misc_RNA (1)...(19): siRNA sense strand
gauuguggaagauucauug

SEQ ID NO: 1096617 - RNA, 19 nt, Homo sapiens
  misc_RNA (1)...(19): siRNA sense strand
gccaggaccgguacgaauu

SEQ ID NO: 1096618 - RNA, 19 nt, Homo sapiens
  misc_RNA (1)...(19): siRNA sense strand
uguggaagauucauugucu

SEQ ID NO: 1096619 - RNA, 19 nt, Homo sapiens
  misc_RNA (1)...(19): siRNA sense strand
gaccacgucauguucacua

SEQ ID NO: 1096620 - RNA, 19 nt, Homo sapiens
  misc_RNA (1)...(19): siRNA sense strand
gcggugccauaacuaccua

SEQ ID NO: 1096621 - RNA, 19 nt, Homo sapiens
  misc_RNA (1)...(19): siRNA sense strand
agccagcacucuucuccua

SEQ ID NO: 1096622 - RNA, 19 nt, Homo sapiens
  misc_RNA (1)...(19): siRNA sense strand
auggcaagcucaaguguga

SEQ ID NO: 1096623 - RNA, 19 nt, Homo sapiens
  misc_RNA (1)...(19): siRNA sense strand
gcggccaacuuucaucgau

SEQ ID NO: 1096624 - RNA, 19 nt, Homo sapiens
  misc_RNA (1)...(19): siRNA sense strand
ucgaucgucuggccaauag

SEQ ID NO: 1096625 - RNA, 19 nt, Homo sapiens
  misc_RNA (1)...(19): siRNA sense strand
ugaaaaggauguggaguug

SEQ ID NO: 1096626 - RNA, 19 nt, Homo sapiens
  misc_RNA (1)...(19): siRNA sense strand
agaaagcaaccacgaagau

SEQ ID NO: 1096627 - RNA, 19 nt, Homo sapiens
  misc_RNA (1)...(19): siRNA sense strand
cacaaggagcggugccaua

SEQ ID NO: 1096628 - RNA, 19 nt, Homo sapiens
  misc_RNA (1)...(19): siRNA sense strand
aaaggacgacagcgugauu

SEQ ID NO: 1096629 - RNA, 19 nt, Homo sapiens
  misc_RNA (1)...(19): siRNA sense strand
gacccaacgugcucauggu

SEQ ID NO: 1096630 - RNA, 19 nt, Homo sapiens
  misc_RNA (1)...(19): siRNA sense strand
ucagaacucacgccuguca

SEQ ID NO: 1096631 - RNA, 19 nt, Homo sapiens
  misc_RNA (1)...(19): siRNA sense strand
aaaugucccuucugcaacu

SEQ ID NO: 1096632 - RNA, 19 nt, Homo sapiens
  misc_RNA (1)...(19): siRNA sense strand
auaacuaccuacagagucu

SEQ ID NO: 1096633 - RNA, 19 nt, Homo sapiens
  misc_RNA (1)...(19): siRNA sense strand
ggaccgguacgaauucucu

SEQ ID NO: 1096634 - RNA, 19 nt, Homo sapiens
  misc_RNA (1)...(19): siRNA sense strand
cagaaagcaaccacgaaga

SEQ ID NO: 1096635 - RNA, 19 nt, Homo sapiens
  misc_RNA (1)...(19): siRNA sense strand
gcuacaaacagcagaguac

SEQ ID NO: 1096636 - RNA, 19 nt, Homo sapiens
  misc_RNA (1)...(19): siRNA sense strand
gagugcaacaucugugguu

SEQ ID NO: 1096637 - RNA, 19 nt, Homo sapiens
  misc_RNA (1)...(19): siRNA sense strand
gagaguggugagccuguga

SEQ ID NO: 1096638 - RNA, 19 nt, Homo sapiens
  misc_RNA (1)...(19): siRNA sense strand
ugccaggacuccacagaca

SEQ ID NO: 1096639 - RNA, 19 nt, Homo sapiens
  misc_RNA (1)...(19): siRNA sense strand
aaggagcggugccauaacu

SEQ ID NO: 1096640 - RNA, 19 nt, Homo sapiens
  misc_RNA (1)...(19): siRNA sense strand
uggaagauucauugucuga

SEQ ID NO: 1096641 - RNA, 19 nt, Homo sapiens
  misc_RNA (1)...(19): siRNA sense strand
ggacgacagcgugauugug

SEQ ID NO: 1096642 - RNA, 19 nt, Homo sapiens
  misc_RNA (1)...(19): siRNA sense strand
cgacagcgugauuguggaa

SEQ ID NO: 1096643 - RNA, 19 nt, Homo sapiens
  misc_RNA (1)...(19): siRNA sense strand
ucuccuagccgcucacuca

SEQ ID NO: 1096644 - RNA, 19 nt, Homo sapiens
  misc_RNA (1)...(19): siRNA sense strand
gcacaagcgcagucacacu

SEQ ID NO: 1096645 - RNA, 19 nt, Homo sapiens
  misc_RNA (1)...(19): siRNA sense strand
ccaauggcaagcucaagug

SEQ ID NO: 1096646 - RNA, 19 nt, Homo sapiens
  misc_RNA (1)...(19): siRNA sense strand
agugcaacaucugugguua

SEQ ID NO: 1096647 - RNA, 19 nt, Homo sapiens
  misc_RNA (1)...(19): siRNA sense strand
gcgugauuguggaagauuc

SEQ ID NO: 1096648 - RNA, 19 nt, Homo sapiens
  misc_RNA (1)...(19): siRNA sense strand
ccaacagccagcacucuuc

SEQ ID NO: 1096649 - RNA, 19 nt, Homo sapiens
  misc_RNA (1)...(19): siRNA sense strand
acagcgugauuguggaaga

SEQ ID NO: 1096650 - RNA, 19 nt, Homo sapiens
  misc_RNA (1)...(19): siRNA sense strand
caacagccagcacucuucu

SEQ ID NO: 1096651 - RNA, 19 nt, Homo sapiens
  misc_RNA (1)...(19): siRNA sense strand
gucaucagcucugucuaca

SEQ ID NO: 1096652 - RNA, 19 nt, Homo sapiens
  misc_RNA (1)...(19): siRNA sense strand
uacgugaccuggagauggu

SEQ ID NO: 1096653 - RNA, 19 nt, Homo sapiens
  misc_RNA (1)...(19): siRNA sense strand
agcuuuaccugcccucuug

SEQ ID NO: 1096654 - RNA, 19 nt, Homo sapiens
  misc_RNA (1)...(19): siRNA sense strand
ggagauguacagcgaugag

SEQ ID NO: 1096655 - RNA, 19 nt, Homo sapiens
  misc_RNA (1)...(19): siRNA sense strand
ccaccaauugcaucucaga

SEQ ID NO: 1096656 - RNA, 19 nt, Homo sapiens
  misc_RNA (1)...(19): siRNA sense strand
ccaggaccgguacgaauuc

SEQ ID NO: 1096657 - RNA, 19 nt, Homo sapiens
  misc_RNA (1)...(19): siRNA sense strand
ugcaacaucugugguuauc

SEQ ID NO: 1096658 - RNA, 19 nt, Homo sapiens
  misc_RNA (1)...(19): siRNA sense strand
gugcaacaucugugguuau

SEQ ID NO: 1096659 - RNA, 19 nt, Homo sapiens
  misc_RNA (1)...(19): siRNA sense strand
ccauaacuaccuacagagu

SEQ ID NO: 1096660 - RNA, 19 nt, Homo sapiens
  misc_RNA (1)...(19): siRNA sense strand
gaagaagacugacuuugga

SEQ ID NO: 1096661 - RNA, 19 nt, Homo sapiens
  misc_RNA (1)...(19): siRNA sense strand
ugacagacuucuucaguuu

SEQ ID NO: 1096662 - RNA, 19 nt, Homo sapiens
  misc_RNA (1)...(19): siRNA sense strand
guucugacccugaaauuua

SEQ ID NO: 1096663 - RNA, 19 nt, Homo sapiens
  misc_RNA (1)...(19): siRNA sense strand
ucacaucuguucauucguu

SEQ ID NO: 1096664 - RNA, 19 nt, Homo sapiens
  misc_RNA (1)...(19): siRNA sense strand
ucacuggaaucaagaagaa

SEQ ID NO: 1096665 - RNA, 19 nt, Homo sapiens
  misc_RNA (1)...(19): siRNA sense strand
aaacauggaguucguauug

SEQ ID NO: 1096666 - RNA, 19 nt, Homo sapiens
  misc_RNA (1)...(19): siRNA sense strand
gcacugaaucucuuauuuc

SEQ ID NO: 1096667 - RNA, 19 nt, Homo sapiens
  misc_RNA (1)...(19): siRNA sense strand
ccucguagcugacagacuu

SEQ ID NO: 1096668 - RNA, 19 nt, Homo sapiens
  misc_RNA (1)...(19): siRNA sense strand
gaaucaagaagaagacuga

SEQ ID NO: 1096669 - RNA, 19 nt, Homo sapiens
  misc_RNA (1)...(19): siRNA sense strand
gaaauuuacuaugcaccuu

SEQ ID NO: 1096670 - RNA, 19 nt, Homo sapiens
  misc_RNA (1)...(19): siRNA sense strand
gguagucacuggaaucaag

SEQ ID NO: 1096671 - RNA, 19 nt, Homo sapiens
  misc_RNA (1)...(19): siRNA sense strand
cgucaugguuuguggauau

SEQ ID NO: 1096672 - RNA, 19 nt, Homo sapiens
  misc_RNA (1)...(19): siRNA sense strand
gaagacugacuuuggagaa

SEQ ID NO: 1096673 - RNA, 19 nt, Homo sapiens
  misc_RNA (1)...(19): siRNA sense strand
gaccuuuccuucacuguuc

SEQ ID NO: 1096674 - RNA, 19 nt, Homo sapiens
  misc_RNA (1)...(19): siRNA sense strand
aaacuucuccuuugccauu

SEQ ID NO: 1096675 - RNA, 19 nt, Homo sapiens
  misc_RNA (1)...(19): siRNA sense strand
ucucucagauaaugcagua

SEQ ID NO: 1096676 - RNA, 19 nt, Homo sapiens
  misc_RNA (1)...(19): siRNA sense strand
ggauaugcccauuuggaaa

SEQ ID NO: 1096677 - RNA, 19 nt, Homo sapiens
  misc_RNA (1)...(19): siRNA sense strand
caagaagaagacugacuuu

SEQ ID NO: 1096678 - RNA, 19 nt, Homo sapiens
  misc_RNA (1)...(19): siRNA sense strand
acaggaaccagacaaauga

SEQ ID NO: 1096679 - RNA, 19 nt, Homo sapiens
  misc_RNA (1)...(19): siRNA sense strand
caaaugaugucuucaaaac

SEQ ID NO: 1096680 - RNA, 19 nt, Homo sapiens
  misc_RNA (1)...(19): siRNA sense strand
ggaaccagacaaaugaugu

SEQ ID NO: 1096681 - RNA, 19 nt, Homo sapiens
  misc_RNA (1)...(19): siRNA sense strand
ucaagaagaagacugacuu

SEQ ID NO: 1096682 - RNA, 19 nt, Homo sapiens
  misc_RNA (1)...(19): siRNA sense strand
cuggauccaugucuuuaaa

SEQ ID NO: 1096683 - RNA, 19 nt, Homo sapiens
  misc_RNA (1)...(19): siRNA sense strand
cccuggauguuauuuauau

SEQ ID NO: 1096684 - RNA, 19 nt, Homo sapiens
  misc_RNA (1)...(19): siRNA sense strand
cacaucuguucauucguua

SEQ ID NO: 1096685 - RNA, 19 nt, Homo sapiens
  misc_RNA (1)...(19): siRNA sense strand
ccucacaucuguucauucg

SEQ ID NO: 1096686 - RNA, 19 nt, Homo sapiens
  misc_RNA (1)...(19): siRNA sense strand
agaagaagacugacuuugg

SEQ ID NO: 1096687 - RNA, 19 nt, Homo sapiens
  misc_RNA (1)...(19): siRNA sense strand
cauucuggcuuuauguaau

SEQ ID NO: 1096688 - RNA, 19 nt, Homo sapiens
  misc_RNA (1)...(19): siRNA sense strand
ggauccaugucuuuaaagg

SEQ ID NO: 1096689 - RNA, 19 nt, Homo sapiens
  misc_RNA (1)...(19): siRNA sense strand
gaugggauucgucaugguu

SEQ ID NO: 1096690 - RNA, 19 nt, Homo sapiens
  misc_RNA (1)...(19): siRNA sense strand
cgagaugggauucgucaug

SEQ ID NO: 1096691 - RNA, 19 nt, Homo sapiens
  misc_RNA (1)...(19): siRNA sense strand
uaacaggaaccagacaaau

SEQ ID NO: 1096692 - RNA, 19 nt, Homo sapiens
  misc_RNA (1)...(19): siRNA sense strand
aagacugacuuuggagaaa

SEQ ID NO: 1096693 - RNA, 19 nt, Homo sapiens
  misc_RNA (1)...(19): siRNA sense strand
ucuguucauucguuaugua

SEQ ID NO: 1096694 - RNA, 19 nt, Homo sapiens
  misc_RNA (1)...(19): siRNA sense strand
agcacugaaucucuuauuu

SEQ ID NO: 1096695 - RNA, 19 nt, Homo sapiens
  misc_RNA (1)...(19): siRNA sense strand
uuucuucccuggauguuau

SEQ ID NO: 1096696 - RNA, 19 nt, Homo sapiens
  misc_RNA (1)...(19): siRNA sense strand
gcagacuuguagcacugaa

SEQ ID NO: 1096697 - RNA, 19 nt, Homo sapiens
  misc_RNA (1)...(19): siRNA sense strand
ugacuuuggagaaaucauu

SEQ ID NO: 1096698 - RNA, 19 nt, Homo sapiens
  misc_RNA (1)...(19): siRNA sense strand
agacugacuuuggagaaau

SEQ ID NO: 1096699 - RNA, 19 nt, Homo sapiens
  misc_RNA (1)...(19): siRNA sense strand
cuacugugauucccguugu

SEQ ID NO: 1096700 - RNA, 19 nt, Homo sapiens
  misc_RNA (1)...(19): siRNA sense strand
gcuggauccaugucuuuaa

SEQ ID NO: 1096701 - RNA, 19 nt, Homo sapiens
  misc_RNA (1)...(19): siRNA sense strand
uagccucuguuauugaugu

SEQ ID NO: 1096702 - RNA, 19 nt, Homo sapiens
  misc_RNA (1)...(19): siRNA sense strand
guaauuggcauguggucau

SEQ ID NO: 1096703 - RNA, 19 nt, Homo sapiens
  misc_RNA (1)...(19): siRNA sense strand
uucgugcucucucagauaa

SEQ ID NO: 1096704 - RNA, 19 nt, Homo sapiens
  misc_RNA (1)...(19): siRNA sense strand
acauggaguucguauugau

SEQ ID NO: 1096705 - RNA, 19 nt, Homo sapiens
  misc_RNA (1)...(19): siRNA sense strand
uagcuggauccaugucuuu

SEQ ID NO: 1096706 - RNA, 19 nt, Homo sapiens
  misc_RNA (1)...(19): siRNA sense strand
uaccucacaucuguucauu

SEQ ID NO: 1096707 - RNA, 19 nt, Homo sapiens
  misc_RNA (1)...(19): siRNA sense strand
gauaugcccauuuggaaaa

SEQ ID NO: 1096708 - RNA, 19 nt, Homo sapiens
  misc_RNA (1)...(19): siRNA sense strand
guggauaugcccauuugga

SEQ ID NO: 1096709 - RNA, 19 nt, Homo sapiens
  misc_RNA (1)...(19): siRNA sense strand
gacugacuuuggagaaauc

SEQ ID NO: 1096710 - RNA, 19 nt, Homo sapiens
  misc_RNA (1)...(19): siRNA sense strand
ccauucuggcuuuauguaa

SEQ ID NO: 1096711 - RNA, 19 nt, Homo sapiens
  misc_RNA (1)...(19): siRNA sense strand
ccucuguuauugauguaga

SEQ ID NO: 1096712 - RNA, 19 nt, Homo sapiens
  misc_RNA (1)...(19): siRNA sense strand
gggcgguagucacuggaau

SEQ ID NO: 1096713 - RNA, 19 nt, Homo sapiens
  misc_RNA (1)...(19): siRNA sense strand
gguucugacccugaaauuu

SEQ ID NO: 1096714 - RNA, 19 nt, Homo sapiens
  misc_RNA (1)...(19): siRNA sense strand
guagcugacagacuucuuc

SEQ ID NO: 1096715 - RNA, 19 nt, Homo sapiens
  misc_RNA (1)...(19): siRNA sense strand
ccacaauucagcaaaauga

SEQ ID NO: 1096716 - RNA, 19 nt, Homo sapiens
  misc_RNA (1)...(19): siRNA sense strand
uccuggacuucacaucaua

SEQ ID NO: 1096717 - RNA, 19 nt, Homo sapiens
  misc_RNA (1)...(19): siRNA sense strand
aacaggaaccagacaaaug

SEQ ID NO: 1096718 - RNA, 19 nt, Homo sapiens
  misc_RNA (1)...(19): siRNA sense strand
caucaucuuuaccucacau

SEQ ID NO: 1096719 - RNA, 19 nt, Homo sapiens
  misc_RNA (1)...(19): siRNA sense strand
uggauaugcccauuuggaa

SEQ ID NO: 1096720 - RNA, 19 nt, Homo sapiens
  misc_RNA (1)...(19): siRNA sense strand
cgugcucucucagauaaug

SEQ ID NO: 1096721 - RNA, 19 nt, Homo sapiens
  misc_RNA (1)...(19): siRNA sense strand
augcuuuacugcagacuug

SEQ ID NO: 1096722 - RNA, 19 nt, Homo sapiens
  misc_RNA (1)...(19): siRNA sense strand
uuauugauguagaccacuu

SEQ ID NO: 1096723 - RNA, 19 nt, Homo sapiens
  misc_RNA (1)...(19): siRNA sense strand
aacauggaguucguauuga

SEQ ID NO: 1096724 - RNA, 19 nt, Homo sapiens
  misc_RNA (1)...(19): siRNA sense strand
uuaacaggaaccagacaaa

SEQ ID NO: 1096725 - RNA, 19 nt, Homo sapiens
  misc_RNA (1)...(19): siRNA sense strand
caucuguucauucguuaug

SEQ ID NO: 1096726 - RNA, 19 nt, Homo sapiens
  misc_RNA (1)...(19): siRNA sense strand
cuagcuggauccaugucuu

SEQ ID NO: 1096727 - RNA, 19 nt, Homo sapiens
  misc_RNA (1)...(19): siRNA sense strand
acccugaaauuuacuaugc

SEQ ID NO: 1096728 - RNA, 19 nt, Homo sapiens
  misc_RNA (1)...(19): siRNA sense strand
uuguggauaugcccauuug

SEQ ID NO: 1096729 - RNA, 19 nt, Homo sapiens
  misc_RNA (1)...(19): siRNA sense strand
uauccuggacuucacauca

SEQ ID NO: 1096730 - RNA, 19 nt, Homo sapiens
  misc_RNA (1)...(19): siRNA sense strand
ggugcuuucuucccuggau

SEQ ID NO: 1096731 - RNA, 19 nt, Homo sapiens
  misc_RNA (1)...(19): siRNA sense strand
guagucacuggaaucaaga

SEQ ID NO: 1096732 - RNA, 19 nt, Homo sapiens
  misc_RNA (1)...(19): siRNA sense strand
gcuucgugcucucucagau

SEQ ID NO: 1096733 - RNA, 19 nt, Homo sapiens
  misc_RNA (1)...(19): siRNA sense strand
uucccuggauguuauuuau

SEQ ID NO: 1096734 - RNA, 19 nt, Homo sapiens
  misc_RNA (1)...(19): siRNA sense strand
gacucauggugcuuucuuc

SEQ ID NO: 1096735 - RNA, 19 nt, Homo sapiens
  misc_RNA (1)...(19): siRNA sense strand
uagcacugaaucucuuauu

SEQ ID NO: 1096736 - RNA, 19 nt, Homo sapiens
  misc_RNA (1)...(19): siRNA sense strand
ggaaguagcuggaaauauu

SEQ ID NO: 1096737 - RNA, 19 nt, Homo sapiens
  misc_RNA (1)...(19): siRNA sense strand
gaacuugacuaccucauua

SEQ ID NO: 1096738 - RNA, 19 nt, Homo sapiens
  misc_RNA (1)...(19): siRNA sense strand
gaagaagugcuacauaauu

SEQ ID NO: 1096739 - RNA, 19 nt, Homo sapiens
  misc_RNA (1)...(19): siRNA sense strand
ugaaggaucuacugucuaa

SEQ ID NO: 1096740 - RNA, 19 nt, Homo sapiens
  misc_RNA (1)...(19): siRNA sense strand
aaacugaccugcccugaaa

SEQ ID NO: 1096741 - RNA, 19 nt, Homo sapiens
  misc_RNA (1)...(19): siRNA sense strand
gaagcaagauacaccuaaa

SEQ ID NO: 1096742 - RNA, 19 nt, Homo sapiens
  misc_RNA (1)...(19): siRNA sense strand
guuggaagcuguagagaaa

SEQ ID NO: 1096743 - RNA, 19 nt, Homo sapiens
  misc_RNA (1)...(19): siRNA sense strand
gaagcaaacuccaaagucu

SEQ ID NO: 1096744 - RNA, 19 nt, Homo sapiens
  misc_RNA (1)...(19): siRNA sense strand
ugacagaaguagauuauuc

SEQ ID NO: 1096745 - RNA, 19 nt, Homo sapiens
  misc_RNA (1)...(19): siRNA sense strand
gcacuuacguuuucauuuu

SEQ ID NO: 1096746 - RNA, 19 nt, Homo sapiens
  misc_RNA (1)...(19): siRNA sense strand
ucaaaugcuugcuugguua

SEQ ID NO: 1096747 - RNA, 19 nt, Homo sapiens
  misc_RNA (1)...(19): siRNA sense strand
ucaagagacugcaaauuau

SEQ ID NO: 1096748 - RNA, 19 nt, Homo sapiens
  misc_RNA (1)...(19): siRNA sense strand
gaacagaacaccaccaagu

SEQ ID NO: 1096749 - RNA, 19 nt, Homo sapiens
  misc_RNA (1)...(19): siRNA sense strand
acaaguaucucaagcauca

SEQ ID NO: 1096750 - RNA, 19 nt, Homo sapiens
  misc_RNA (1)...(19): siRNA sense strand
ugauggaacuauucaagua

SEQ ID NO: 1096751 - RNA, 19 nt, Homo sapiens
  misc_RNA (1)...(19): siRNA sense strand
gaacacagaacccaaagau

SEQ ID NO: 1096752 - RNA, 19 nt, Homo sapiens
  misc_RNA (1)...(19): siRNA sense strand
caacugccaucuauacaug

SEQ ID NO: 1096753 - RNA, 19 nt, Homo sapiens
  misc_RNA (1)...(19): siRNA sense strand
cagcaagccucauaccaaa

SEQ ID NO: 1096754 - RNA, 19 nt, Homo sapiens
  misc_RNA (1)...(19): siRNA sense strand
ggagauuaauaaccaauuc

SEQ ID NO: 1096755 - RNA, 19 nt, Homo sapiens
  misc_RNA (1)...(19): siRNA sense strand
ggacucauaugccuuaaac

SEQ ID NO: 1096756 - RNA, 19 nt, Homo sapiens
  misc_RNA (1)...(19): siRNA sense strand
agaccaaccuauuguguuu

SEQ ID NO: 1096757 - RNA, 19 nt, Homo sapiens
  misc_RNA (1)...(19): siRNA sense strand
caaagaagcaaacuccaaa

SEQ ID NO: 1096758 - RNA, 19 nt, Homo sapiens
  misc_RNA (1)...(19): siRNA sense strand
gaacagaggaaacaagaca

SEQ ID NO: 1096759 - RNA, 19 nt, Homo sapiens
  misc_RNA (1)...(19): siRNA sense strand
gauacaaccacaagaguuu

SEQ ID NO: 1096760 - RNA, 19 nt, Homo sapiens
  misc_RNA (1)...(19): siRNA sense strand
agagaaauaugaagaagug

SEQ ID NO: 1096761 - RNA, 19 nt, Homo sapiens
  misc_RNA (1)...(19): siRNA sense strand
caacgaaaccuuuaacagu

SEQ ID NO: 1096762 - RNA, 19 nt, Homo sapiens
  misc_RNA (1)...(19): siRNA sense strand
gaaauaugaagaagugcua

SEQ ID NO: 1096763 - RNA, 19 nt, Homo sapiens
  misc_RNA (1)...(19): siRNA sense strand
cucaagagacugcaaauua

SEQ ID NO: 1096764 - RNA, 19 nt, Homo sapiens
  misc_RNA (1)...(19): siRNA sense strand
ggaaacaagacaccucaaa

SEQ ID NO: 1096765 - RNA, 19 nt, Homo sapiens
  misc_RNA (1)...(19): siRNA sense strand
gaaagaaaugaaagucuga

SEQ ID NO: 1096766 - RNA, 19 nt, Homo sapiens
  misc_RNA (1)...(19): siRNA sense strand
caggcuaucuucuuuauca

SEQ ID NO: 1096767 - RNA, 19 nt, Homo sapiens
  misc_RNA (1)...(19): siRNA sense strand
ucacagauuucuccaaagu

SEQ ID NO: 1096768 - RNA, 19 nt, Homo sapiens
  misc_RNA (1)...(19): siRNA sense strand
gagccuagaucuacuaaaa

SEQ ID NO: 1096769 - RNA, 19 nt, Homo sapiens
  misc_RNA (1)...(19): siRNA sense strand
ucaccuggcuacaaucaaa

SEQ ID NO: 1096770 - RNA, 19 nt, Homo sapiens
  misc_RNA (1)...(19): siRNA sense strand
ccaggaaguugaacacaga

SEQ ID NO: 1096771 - RNA, 19 nt, Homo sapiens
  misc_RNA (1)...(19): siRNA sense strand
ggucuacucugccggaaga

SEQ ID NO: 1096772 - RNA, 19 nt, Homo sapiens
  misc_RNA (1)...(19): siRNA sense strand
gcuaauacaaucagagaaa

SEQ ID NO: 1096773 - RNA, 19 nt, Homo sapiens
  misc_RNA (1)...(19): siRNA sense strand
ggaggaagaaaugcuaaua

SEQ ID NO: 1096774 - RNA, 19 nt, Homo sapiens
  misc_RNA (1)...(19): siRNA sense strand
uggaagcuguagagaaaua

SEQ ID NO: 1096775 - RNA, 19 nt, Homo sapiens
  misc_RNA (1)...(19): siRNA sense strand
guuccaagcuagagaguau

SEQ ID NO: 1096776 - RNA, 19 nt, Homo sapiens
  misc_RNA (1)...(19): siRNA sense strand
ccaaagcuguggccaguuc

SEQ ID NO: 1096777 - RNA, 19 nt, Homo sapiens
  misc_RNA (1)...(19): siRNA sense strand
gaccugcccugaaagaaau

SEQ ID NO: 1096778 - RNA, 19 nt, Homo sapiens
  misc_RNA (1)...(19): siRNA sense strand
guacaaguaucucaagcau

SEQ ID NO: 1096779 - RNA, 19 nt, Homo sapiens
  misc_RNA (1)...(19): siRNA sense strand
gaaagaacaagauccaaag

SEQ ID NO: 1096780 - RNA, 19 nt, Homo sapiens
  misc_RNA (1)...(19): siRNA sense strand
augaagaagugcuacauaa

SEQ ID NO: 1096781 - RNA, 19 nt, Homo sapiens
  misc_RNA (1)...(19): siRNA sense strand
caaaaucuguccagucaaa

SEQ ID NO: 1096782 - RNA, 19 nt, Homo sapiens
  misc_RNA (1)...(19): siRNA sense strand
ggaccacucccauguguga

SEQ ID NO: 1096783 - RNA, 19 nt, Homo sapiens
  misc_RNA (1)...(19): siRNA sense strand
caguucagcugcagaaaga

SEQ ID NO: 1096784 - RNA, 19 nt, Homo sapiens
  misc_RNA (1)...(19): siRNA sense strand
guugggauaugcuuacuga

SEQ ID NO: 1096785 - RNA, 19 nt, Homo sapiens
  misc_RNA (1)...(19): siRNA sense strand
ggaagaaaugcuaauacaa

SEQ ID NO: 1096786 - RNA, 19 nt, Homo sapiens
  misc_RNA (1)...(19): siRNA sense strand
ggaagcaagauacaccuaa

SEQ ID NO: 1096787 - RNA, 19 nt, Homo sapiens
  misc_RNA (1)...(19): siRNA sense strand
uaacagacgcuauaugaca

SEQ ID NO: 1096788 - RNA, 19 nt, Homo sapiens
  misc_RNA (1)...(19): siRNA sense strand
ucauaugccuuaaacacaa

SEQ ID NO: 1096789 - RNA, 19 nt, Homo sapiens
  misc_RNA (1)...(19): siRNA sense strand
cuggaaauauucuacguuu

SEQ ID NO: 1096790 - RNA, 19 nt, Homo sapiens
  misc_RNA (1)...(19): siRNA sense strand
ggagcaauuuauggaagua

SEQ ID NO: 1096791 - RNA, 19 nt, Homo sapiens
  misc_RNA (1)...(19): siRNA sense strand
acacagaacccaaagaugu

SEQ ID NO: 1096792 - RNA, 19 nt, Homo sapiens
  misc_RNA (1)...(19): siRNA sense strand
gcaguuuccuuagaacaga

SEQ ID NO: 1096793 - RNA, 19 nt, Homo sapiens
  misc_RNA (1)...(19): siRNA sense strand
ccaugaaacugcuagcaau

SEQ ID NO: 1096794 - RNA, 19 nt, Homo sapiens
  misc_RNA (1)...(19): siRNA sense strand
gugaauggcacuuacguuu

SEQ ID NO: 1096795 - RNA, 19 nt, Homo sapiens
  misc_RNA (1)...(19): siRNA sense strand
ggugggagauuaauaacca

SEQ ID NO: 1096796 - RNA, 19 nt, Homo sapiens
  misc_RNA (1)...(19): siRNA sense strand
cguaugagaccuauauuga

SEQ ID NO: 1096797 - RNA, 19 nt, Homo sapiens
  misc_RNA (1)...(19): siRNA sense strand
gaagacugaaucugucaaa

SEQ ID NO: 1096798 - RNA, 19 nt, Homo sapiens
  misc_RNA (1)...(19): siRNA sense strand
uuauaaggaucgccugaaa

SEQ ID NO: 1096799 - RNA, 19 nt, Homo sapiens
  misc_RNA (1)...(19): siRNA sense strand
gaucaggcuucuucuggau

SEQ ID NO: 1096800 - RNA, 19 nt, Homo sapiens
  misc_RNA (1)...(19): siRNA sense strand
gcaagccucauaccaaaug

SEQ ID NO: 1096801 - RNA, 19 nt, Homo sapiens
  misc_RNA (1)...(19): siRNA sense strand
gaucuacugucuaaauugc

SEQ ID NO: 1096802 - RNA, 19 nt, Homo sapiens
  misc_RNA (1)...(19): siRNA sense strand
agucacagauuucuccaaa

SEQ ID NO: 1096803 - RNA, 19 nt, Homo sapiens
  misc_RNA (1)...(19): siRNA sense strand
gaugcgaguugccuucuca

SEQ ID NO: 1096804 - RNA, 19 nt, Homo sapiens
  misc_RNA (1)...(19): siRNA sense strand
agaggacucccuucaauuu

SEQ ID NO: 1096805 - RNA, 19 nt, Homo sapiens
  misc_RNA (1)...(19): siRNA sense strand
gauggaacuauucaaguaa

SEQ ID NO: 1096806 - RNA, 19 nt, Homo sapiens
  misc_RNA (1)...(19): siRNA sense strand
gcuacuucuucuccaguua

SEQ ID NO: 1096807 - RNA, 19 nt, Homo sapiens
  misc_RNA (1)...(19): siRNA sense strand
ggaaguaccacuggaggaa

SEQ ID NO: 1096808 - RNA, 19 nt, Homo sapiens
  misc_RNA (1)...(19): siRNA sense strand
agaacaagauccaaagaag

SEQ ID NO: 1096809 - RNA, 19 nt, Homo sapiens
  misc_RNA (1)...(19): siRNA sense strand
caaacaaggcgaagagcaa

SEQ ID NO: 1096810 - RNA, 19 nt, Homo sapiens
  misc_RNA (1)...(19): siRNA sense strand
gacugaaucugucaaagag

SEQ ID NO: 1096811 - RNA, 19 nt, Homo sapiens
  misc_RNA (1)...(19): siRNA sense strand
gaaguagcuggaaauauuc

SEQ ID NO: 1096812 - RNA, 19 nt, Homo sapiens
  misc_RNA (1)...(19): siRNA sense strand
cgagcucacuucuguggaa

SEQ ID NO: 1096813 - RNA, 19 nt, Homo sapiens
  misc_RNA (1)...(19): siRNA sense strand
gacaaaccuucaagugcaa

SEQ ID NO: 1096814 - RNA, 19 nt, Homo sapiens
  misc_RNA (1)...(19): siRNA sense strand
caagacaccucaaaacuca

SEQ ID NO: 1096815 - RNA, 19 nt, Homo sapiens
  misc_RNA (1)...(19): siRNA sense strand
uugacuaccucauuaaguu

SEQ ID NO: 1096816 - RNA, 19 nt, Homo sapiens
  misc_RNA (1)...(19): siRNA sense strand
ggaaguacaaguaucucaa

SEQ ID NO: 1096817 - RNA, 19 nt, Homo sapiens
  misc_RNA (1)...(19): siRNA sense strand
ucaaacuggaggauuauaa

SEQ ID NO: 1096818 - RNA, 19 nt, Homo sapiens
  misc_RNA (1)...(19): siRNA sense strand
cugaacaacuuaggagaaa

SEQ ID NO: 1096819 - RNA, 19 nt, Homo sapiens
  misc_RNA (1)...(19): siRNA sense strand
cguagcaucuaaagaacaa

SEQ ID NO: 1096820 - RNA, 19 nt, Homo sapiens
  misc_RNA (1)...(19): siRNA sense strand
gaacuuguaacuuuaugca

SEQ ID NO: 1096821 - RNA, 19 nt, Homo sapiens
  misc_RNA (1)...(19): siRNA sense strand
cuuaacagacgcuauauga

SEQ ID NO: 1096822 - RNA, 19 nt, Homo sapiens
  misc_RNA (1)...(19): siRNA sense strand
gaacucaggcuauuuugaa

SEQ ID NO: 1096823 - RNA, 19 nt, Homo sapiens
  misc_RNA (1)...(19): siRNA sense strand
ugaauggugcaguguauuu

SEQ ID NO: 1096824 - RNA, 19 nt, Homo sapiens
  misc_RNA (1)...(19): siRNA sense strand
guagagaaauaugaagaag

SEQ ID NO: 1096825 - RNA, 19 nt, Homo sapiens
  misc_RNA (1)...(19): siRNA sense strand
agauacaccuaaauccaaa

SEQ ID NO: 1096826 - RNA, 19 nt, Homo sapiens
  misc_RNA (1)...(19): siRNA sense strand
gguaucagccuaugccaau

SEQ ID NO: 1096827 - RNA, 19 nt, Homo sapiens
  misc_RNA (1)...(19): siRNA sense strand
gaauggcacuuacguuuuc

SEQ ID NO: 1096828 - RNA, 19 nt, Homo sapiens
  misc_RNA (1)...(19): siRNA sense strand
gauccaguauugaggaaag

SEQ ID NO: 1096829 - RNA, 19 nt, Homo sapiens
  misc_RNA (1)...(19): siRNA sense strand
uaacaucacagucacagau

SEQ ID NO: 1096830 - RNA, 19 nt, Homo sapiens
  misc_RNA (1)...(19): siRNA sense strand
agaaagaacaagauccaaa

SEQ ID NO: 1096831 - RNA, 19 nt, Homo sapiens
  misc_RNA (1)...(19): siRNA sense strand
gcagaaagaacaagaucca

SEQ ID NO: 1096832 - RNA, 19 nt, Homo sapiens
  misc_RNA (1)...(19): siRNA sense strand
gaacaacuuaggagaaacu

SEQ ID NO: 1096833 - RNA, 19 nt, Homo sapiens
  misc_RNA (1)...(19): siRNA sense strand
gaacuauucaaguaagcaa

SEQ ID NO: 1096834 - RNA, 19 nt, Homo sapiens
  misc_RNA (1)...(19): siRNA sense strand
gaacaaacuguccauucuc

SEQ ID NO: 1096835 - RNA, 19 nt, Homo sapiens
  misc_RNA (1)...(19): siRNA sense strand
uccgaaggauccaguauug

SEQ ID NO: 1096836 - RNA, 19 nt, Homo sapiens
  misc_RNA (1)...(19): siRNA sense strand
gaacuugacuaccucauua

SEQ ID NO: 1096837 - RNA, 19 nt, Homo sapiens
  misc_RNA (1)...(19): siRNA sense strand
gaagaagugcuacauaauu

SEQ ID NO: 1096838 - RNA, 19 nt, Homo sapiens
  misc_RNA (1)...(19): siRNA sense strand
ugaaggaucuacugucuaa

SEQ ID NO: 1096839 - RNA, 19 nt, Homo sapiens
  misc_RNA (1)...(19): siRNA sense strand
aaacugaccugcccugaaa

SEQ ID NO: 1096840 - RNA, 19 nt, Homo sapiens
  misc_RNA (1)...(19): siRNA sense strand
guuggaagcuguagagaaa

SEQ ID NO: 1096841 - RNA, 19 nt, Homo sapiens
  misc_RNA (1)...(19): siRNA sense strand
acaaguaucucaagcauca

SEQ ID NO: 1096842 - RNA, 19 nt, Homo sapiens
  misc_RNA (1)...(19): siRNA sense strand
ggacucauaugccuuaaac

SEQ ID NO: 1096843 - RNA, 19 nt, Homo sapiens
  misc_RNA (1)...(19): siRNA sense strand
agagaaauaugaagaagug

SEQ ID NO: 1096844 - RNA, 19 nt, Homo sapiens
  misc_RNA (1)...(19): siRNA sense strand
gaaauaugaagaagugcua

SEQ ID NO: 1096845 - RNA, 19 nt, Homo sapiens
  misc_RNA (1)...(19): siRNA sense strand
gaaagaaaugaaagucuga

SEQ ID NO: 1096846 - RNA, 19 nt, Homo sapiens
  misc_RNA (1)...(19): siRNA sense strand
gagccuagaucuacuaaaa

SEQ ID NO: 1096847 - RNA, 19 nt, Homo sapiens
  misc_RNA (1)...(19): siRNA sense strand
uggaagcuguagagaaaua

SEQ ID NO: 1096848 - RNA, 19 nt, Homo sapiens
  misc_RNA (1)...(19): siRNA sense strand
gaccugcccugaaagaaau

SEQ ID NO: 1096849 - RNA, 19 nt, Homo sapiens
  misc_RNA (1)...(19): siRNA sense strand
guacaaguaucucaagcau

SEQ ID NO: 1096850 - RNA, 19 nt, Homo sapiens
  misc_RNA (1)...(19): siRNA sense strand
augaagaagugcuacauaa

SEQ ID NO: 1096851 - RNA, 19 nt, Homo sapiens
  misc_RNA (1)...(19): siRNA sense strand
ucauaugccuuaaacacaa

SEQ ID NO: 1096852 - RNA, 19 nt, Homo sapiens
  misc_RNA (1)...(19): siRNA sense strand
cguaugagaccuauauuga

SEQ ID NO: 1096853 - RNA, 19 nt, Homo sapiens
  misc_RNA (1)...(19): siRNA sense strand
uuauaaggaucgccugaaa

SEQ ID NO: 1096854 - RNA, 19 nt, Homo sapiens
  misc_RNA (1)...(19): siRNA sense strand
cgagcucacuucuguggaa

SEQ ID NO: 1096855 - RNA, 19 nt, Homo sapiens
  misc_RNA (1)...(19): siRNA sense strand
ggaaguacaaguaucucaa

SEQ ID NO: 1096856 - RNA, 19 nt, Homo sapiens
  misc_RNA (1)...(19): siRNA sense strand
uugacuaccucauuaaguu

SEQ ID NO: 1096857 - RNA, 19 nt, Homo sapiens
  misc_RNA (1)...(19): siRNA sense strand
ucaaacuggaggauuauaa

SEQ ID NO: 1096858 - RNA, 19 nt, Homo sapiens
  misc_RNA (1)...(19): siRNA sense strand
ugaauggugcaguguauuu

SEQ ID NO: 1096859 - RNA, 19 nt, Homo sapiens
  misc_RNA (1)...(19): siRNA sense strand
guagagaaauaugaagaag

SEQ ID NO: 1096860 - RNA, 19 nt, Homo sapiens
  misc_RNA (1)...(19): siRNA sense strand
guaugagaccuauauugaa

SEQ ID NO: 1096861 - RNA, 19 nt, Homo sapiens
  misc_RNA (1)...(19): siRNA sense strand
caaaagaacuugacuaccu

SEQ ID NO: 1096862 - RNA, 19 nt, Homo sapiens
  misc_RNA (1)...(19): siRNA sense strand
cauaugccuuaaacacaaa

SEQ ID NO: 1096863 - RNA, 19 nt, Homo sapiens
  misc_RNA (1)...(19): siRNA sense strand
guuucgagcucacuucugu

SEQ ID NO: 1096864 - RNA, 19 nt, Homo sapiens
  misc_RNA (1)...(19): siRNA sense strand
gaaguacaaguaucucaag

SEQ ID NO: 1096865 - RNA, 19 nt, Homo sapiens
  misc_RNA (1)...(19): siRNA sense strand
gaaagagaggggaauauga

SEQ ID NO: 1096866 - RNA, 19 nt, Homo sapiens
  misc_RNA (1)...(19): siRNA sense strand
gagcucacuucuguggaaa

SEQ ID NO: 1096867 - RNA, 19 nt, Homo sapiens
  misc_RNA (1)...(19): siRNA sense strand
gaagugcuacauaauuugg

SEQ ID NO: 1096868 - RNA, 19 nt, Homo sapiens
  misc_RNA (1)...(19): siRNA sense strand
ugaccugcccugaaagaaa

SEQ ID NO: 1096869 - RNA, 19 nt, Homo sapiens
  misc_RNA (1)...(19): siRNA sense strand
gcaguguauuugccuucaa

SEQ ID NO: 1096870 - RNA, 19 nt, Homo sapiens
  misc_RNA (1)...(19): siRNA sense strand
ugaagaagugcuacauaau

SEQ ID NO: 1096871 - RNA, 19 nt, Homo sapiens
  misc_RNA (1)...(19): siRNA sense strand
acaaacacuugaaggaucu

SEQ ID NO: 1096872 - RNA, 19 nt, Homo sapiens
  misc_RNA (1)...(19): siRNA sense strand
gaauggugcaguguauuug

SEQ ID NO: 1096873 - RNA, 19 nt, Homo sapiens
  misc_RNA (1)...(19): siRNA sense strand
ggaguggucuagacuuucc

SEQ ID NO: 1096874 - RNA, 19 nt, Homo sapiens
  misc_RNA (1)...(19): siRNA sense strand
gcuucgaacuauacuucaa

SEQ ID NO: 1096875 - RNA, 19 nt, Homo sapiens
  misc_RNA (1)...(19): siRNA sense strand
agcucaaacuggaggauua

SEQ ID NO: 1096876 - RNA, 19 nt, Homo sapiens
  misc_RNA (1)...(19): siRNA sense strand
agggaguggucuagacuuu

SEQ ID NO: 1096877 - RNA, 19 nt, Homo sapiens
  misc_RNA (1)...(19): siRNA sense strand
ccuucagccucaucuguuu

SEQ ID NO: 1096878 - RNA, 19 nt, Homo sapiens
  misc_RNA (1)...(19): siRNA sense strand
ugacuaccucauuaaguuu

SEQ ID NO: 1096879 - RNA, 19 nt, Homo sapiens
  misc_RNA (1)...(19): siRNA sense strand
ccucaucuguuucaauggu

SEQ ID NO: 1096880 - RNA, 19 nt, Homo sapiens
  misc_RNA (1)...(19): siRNA sense strand
ucaaguucaguauguauug

SEQ ID NO: 1096881 - RNA, 19 nt, Homo sapiens
  misc_RNA (1)...(19): siRNA sense strand
aauggacucauaugccuua

SEQ ID NO: 1096882 - RNA, 19 nt, Homo sapiens
  misc_RNA (1)...(19): siRNA sense strand
gcguaugagaccuauauug

SEQ ID NO: 1096883 - RNA, 19 nt, Homo sapiens
  misc_RNA (1)...(19): siRNA sense strand
caaacuggaggauuauaag

SEQ ID NO: 1096884 - RNA, 19 nt, Homo sapiens
  misc_RNA (1)...(19): siRNA sense strand
aagcguaugagaccuauau

SEQ ID NO: 1096885 - RNA, 19 nt, Homo sapiens
  misc_RNA (1)...(19): siRNA sense strand
agccucaucuguuucaaug

SEQ ID NO: 1096886 - RNA, 19 nt, Homo sapiens
  misc_RNA (1)...(19): siRNA sense strand
ggaauuugccaaggagcuu

SEQ ID NO: 1096887 - RNA, 19 nt, Homo sapiens
  misc_RNA (1)...(19): siRNA sense strand
gaagcuguagagaaauaug

SEQ ID NO: 1096888 - RNA, 19 nt, Homo sapiens
  misc_RNA (1)...(19): siRNA sense strand
ccaagcguaugagaccuau

SEQ ID NO: 1096889 - RNA, 19 nt, Homo sapiens
  misc_RNA (1)...(19): siRNA sense strand
aaaguggagagcaucuuaa

SEQ ID NO: 1096890 - RNA, 19 nt, Homo sapiens
  misc_RNA (1)...(19): siRNA sense strand
cuugaaggaucuacugucu

SEQ ID NO: 1096891 - RNA, 19 nt, Homo sapiens
  misc_RNA (1)...(19): siRNA sense strand
ggaaagagaggggaauaug

SEQ ID NO: 1096892 - RNA, 19 nt, Homo sapiens
  misc_RNA (1)...(19): siRNA sense strand
uuugaauggugcaguguau

SEQ ID NO: 1096893 - RNA, 19 nt, Homo sapiens
  misc_RNA (1)...(19): siRNA sense strand
caaaagaaggcccagagaa

SEQ ID NO: 1096894 - RNA, 19 nt, Homo sapiens
  misc_RNA (1)...(19): siRNA sense strand
gcucaaacuggaggauuau

SEQ ID NO: 1096895 - RNA, 19 nt, Homo sapiens
  misc_RNA (1)...(19): siRNA sense strand
guggagagcaucuuaaucc

SEQ ID NO: 1096896 - RNA, 19 nt, Homo sapiens
  misc_RNA (1)...(19): siRNA sense strand
aaaaguggagagcaucuua

SEQ ID NO: 1096897 - RNA, 19 nt, Homo sapiens
  misc_RNA (1)...(19): siRNA sense strand
agaacuugacuaccucauu

SEQ ID NO: 1096898 - RNA, 19 nt, Homo sapiens
  misc_RNA (1)...(19): siRNA sense strand
caguauguauugcagaacu

SEQ ID NO: 1096899 - RNA, 19 nt, Homo sapiens
  misc_RNA (1)...(19): siRNA sense strand
acuugaggcugagaagaaa

SEQ ID NO: 1096900 - RNA, 19 nt, Homo sapiens
  misc_RNA (1)...(19): siRNA sense strand
acuggaggauuauaaggau

SEQ ID NO: 1096901 - RNA, 19 nt, Homo sapiens
  misc_RNA (1)...(19): siRNA sense strand
ggaagcuguagagaaauau

SEQ ID NO: 1096902 - RNA, 19 nt, Homo sapiens
  misc_RNA (1)...(19): siRNA sense strand
cugugucccucuaguccua

SEQ ID NO: 1096903 - RNA, 19 nt, Homo sapiens
  misc_RNA (1)...(19): siRNA sense strand
uuaagggaguggucuagac

SEQ ID NO: 1096904 - RNA, 19 nt, Homo sapiens
  misc_RNA (1)...(19): siRNA sense strand
caaguucaguauguauugc

SEQ ID NO: 1096905 - RNA, 19 nt, Homo sapiens
  misc_RNA (1)...(19): siRNA sense strand
agaagugcuacauaauuug

SEQ ID NO: 1096906 - RNA, 19 nt, Homo sapiens
  misc_RNA (1)...(19): siRNA sense strand
gcaaaagaaggcccagaga

SEQ ID NO: 1096907 - RNA, 19 nt, Homo sapiens
  misc_RNA (1)...(19): siRNA sense strand
gacacaggagcacguacaa

SEQ ID NO: 1096908 - RNA, 19 nt, Homo sapiens
  misc_RNA (1)...(19): siRNA sense strand
ugacacaggagcacguaca

SEQ ID NO: 1096909 - RNA, 19 nt, Homo sapiens
  misc_RNA (1)...(19): siRNA sense strand
uucaguauguauugcagaa

SEQ ID NO: 1096910 - RNA, 19 nt, Homo sapiens
  misc_RNA (1)...(19): siRNA sense strand
aagcuucgaacuauacuuc

SEQ ID NO: 1096911 - RNA, 19 nt, Homo sapiens
  misc_RNA (1)...(19): siRNA sense strand
gaagacaagaagaagauua

SEQ ID NO: 1096912 - RNA, 19 nt, Homo sapiens
  misc_RNA (1)...(19): siRNA sense strand
agaagaagauuaagacaga

SEQ ID NO: 1096913 - RNA, 19 nt, Homo sapiens
  misc_RNA (1)...(19): siRNA sense strand
ucaaaggcaucaugaagaa

SEQ ID NO: 1096914 - RNA, 19 nt, Homo sapiens
  misc_RNA (1)...(19): siRNA sense strand
gaaaaucccgacauaauua

SEQ ID NO: 1096915 - RNA, 19 nt, Homo sapiens
  misc_RNA (1)...(19): siRNA sense strand
gcacgaaaaucccgacaua

SEQ ID NO: 1096916 - RNA, 19 nt, Homo sapiens
  misc_RNA (1)...(19): siRNA sense strand
ccaaacugcugguggaauu

SEQ ID NO: 1096917 - RNA, 19 nt, Homo sapiens
  misc_RNA (1)...(19): siRNA sense strand
gaaguucacuaaggagcua

SEQ ID NO: 1096918 - RNA, 19 nt, Homo sapiens
  misc_RNA (1)...(19): siRNA sense strand
uaucagaaguggaaacaga

SEQ ID NO: 1096919 - RNA, 19 nt, Homo sapiens
  misc_RNA (1)...(19): siRNA sense strand
gcauguggcuguggaaaug

SEQ ID NO: 1096920 - RNA, 19 nt, Homo sapiens
  misc_RNA (1)...(19): siRNA sense strand
caacacccauccagaggaa

SEQ ID NO: 1096921 - RNA, 19 nt, Homo sapiens
  misc_RNA (1)...(19): siRNA sense strand
cuaaggagcuaggcaaguu

SEQ ID NO: 1096922 - RNA, 19 nt, Homo sapiens
  misc_RNA (1)...(19): siRNA sense strand
caaguucacuggccucaag

SEQ ID NO: 1096923 - RNA, 19 nt, Homo sapiens
  misc_RNA (1)...(19): siRNA sense strand
gcccagcacugcaggagaa

SEQ ID NO: 1096924 - RNA, 19 nt, Homo sapiens
  misc_RNA (1)...(19): siRNA sense strand
cagagcagcugcaggagau

SEQ ID NO: 1096925 - RNA, 19 nt, Homo sapiens
  misc_RNA (1)...(19): siRNA sense strand
ggaagaccaucccggugau

SEQ ID NO: 1096926 - RNA, 19 nt, Homo sapiens
  misc_RNA (1)...(19): siRNA sense strand
gacaagaagaagauuaaga

SEQ ID NO: 1096927 - RNA, 19 nt, Homo sapiens
  misc_RNA (1)...(19): siRNA sense strand
gccugaagcugcagagugu

SEQ ID NO: 1096928 - RNA, 19 nt, Homo sapiens
  misc_RNA (1)...(19): siRNA sense strand
ccucaagacugcccugauc

SEQ ID NO: 1096929 - RNA, 19 nt, Homo sapiens
  misc_RNA (1)...(19): siRNA sense strand
gagcugcgcccacaucuac

SEQ ID NO: 1096930 - RNA, 19 nt, Homo sapiens
  misc_RNA (1)...(19): siRNA sense strand
gacaggaagacaagaagaa

SEQ ID NO: 1096931 - RNA, 19 nt, Homo sapiens
  misc_RNA (1)...(19): siRNA sense strand
ggacaggaagacaagaaga

SEQ ID NO: 1096932 - RNA, 19 nt, Homo sapiens
  misc_RNA (1)...(19): siRNA sense strand
ccacucucauugugacuga

SEQ ID NO: 1096933 - RNA, 19 nt, Homo sapiens
  misc_RNA (1)...(19): siRNA sense strand
agaagcagccugagaagga

SEQ ID NO: 1096934 - RNA, 19 nt, Homo sapiens
  misc_RNA (1)...(19): siRNA sense strand
cgaagcaccacgccgagua

SEQ ID NO: 1096935 - RNA, 19 nt, Homo sapiens
  misc_RNA (1)...(19): siRNA sense strand
gagagaguguggaggacau

SEQ ID NO: 1096936 - RNA, 19 nt, Homo sapiens
  misc_RNA (1)...(19): siRNA sense strand
agaacaagaagaagaagaa

SEQ ID NO: 1096937 - RNA, 19 nt, Homo sapiens
  misc_RNA (1)...(19): siRNA sense strand
caggauggaagaccaguuu

SEQ ID NO: 1096938 - RNA, 19 nt, Homo sapiens
  misc_RNA (1)...(19): siRNA sense strand
ggacggcgaguuugagauc

SEQ ID NO: 1096939 - RNA, 19 nt, Homo sapiens
  misc_RNA (1)...(19): siRNA sense strand
ccaagcagcagauccugaa

SEQ ID NO: 1096940 - RNA, 19 nt, Homo sapiens
  misc_RNA (1)...(19): siRNA sense strand
gcaagaugcggaagaggau

SEQ ID NO: 1096941 - RNA, 19 nt, Homo sapiens
  misc_RNA (1)...(19): siRNA sense strand
gaucaaucucgccaaauuc

SEQ ID NO: 1096942 - RNA, 19 nt, Homo sapiens
  misc_RNA (1)...(19): siRNA sense strand
gaagcugggaccuggaaga

SEQ ID NO: 1096943 - RNA, 19 nt, Homo sapiens
  misc_RNA (1)...(19): siRNA sense strand
agcgagaccuguaucagaa

SEQ ID NO: 1096944 - RNA, 19 nt, Homo sapiens
  misc_RNA (1)...(19): siRNA sense strand
ggaaugcaccucggaugug

SEQ ID NO: 1096945 - RNA, 19 nt, Homo sapiens
  misc_RNA (1)...(19): siRNA sense strand
guaagaagaagcgguuugu

SEQ ID NO: 1096946 - RNA, 19 nt, Homo sapiens
  misc_RNA (1)...(19): siRNA sense strand
uggaauacgugguguucga

SEQ ID NO: 1096947 - RNA, 19 nt, Homo sapiens
  misc_RNA (1)...(19): siRNA sense strand
gagcuacccgguguucaaa

SEQ ID NO: 1096948 - RNA, 19 nt, Homo sapiens
  misc_RNA (1)...(19): siRNA sense strand
ggaccaggaauucuacauc

SEQ ID NO: 1096949 - RNA, 19 nt, Homo sapiens
  misc_RNA (1)...(19): siRNA sense strand
caagagggccaaggagaug

SEQ ID NO: 1096950 - RNA, 19 nt, Homo sapiens
  misc_RNA (1)...(19): siRNA sense strand
cgacagcccgcaagaucaa

SEQ ID NO: 1096951 - RNA, 19 nt, Homo sapiens
  misc_RNA (1)...(19): siRNA sense strand
gcccagaacaagaagaaga

SEQ ID NO: 1096952 - RNA, 19 nt, Homo sapiens
  misc_RNA (1)...(19): siRNA sense strand
gaagaccccugcccaccuu

SEQ ID NO: 1096953 - RNA, 19 nt, Homo sapiens
  misc_RNA (1)...(19): siRNA sense strand
acaagaagaagaagaaguc

SEQ ID NO: 1096954 - RNA, 19 nt, Homo sapiens
  misc_RNA (1)...(19): siRNA sense strand
caagugggaccguaagaag

SEQ ID NO: 1096955 - RNA, 19 nt, Homo sapiens
  misc_RNA (1)...(19): siRNA sense strand
gugcuccacucucauugug

SEQ ID NO: 1096956 - RNA, 19 nt, Homo sapiens
  misc_RNA (1)...(19): siRNA sense strand
cgaaaaucccgacauaauu

SEQ ID NO: 1096957 - RNA, 19 nt, Homo sapiens
  misc_RNA (1)...(19): siRNA sense strand
ggaagacaagaagaagauu

SEQ ID NO: 1096958 - RNA, 19 nt, Homo sapiens
  misc_RNA (1)...(19): siRNA sense strand
gaacaagaagaagaagaag

SEQ ID NO: 1096959 - RNA, 19 nt, Homo sapiens
  misc_RNA (1)...(19): siRNA sense strand
aauacgugguguucgauga

SEQ ID NO: 1096960 - RNA, 19 nt, Homo sapiens
  misc_RNA (1)...(19): siRNA sense strand
ggaaacagaaacagaaaau

SEQ ID NO: 1096961 - RNA, 19 nt, Homo sapiens
  misc_RNA (1)...(19): siRNA sense strand
gaccaucccggugaucuug

SEQ ID NO: 1096962 - RNA, 19 nt, Homo sapiens
  misc_RNA (1)...(19): siRNA sense strand
gaggacggcgaguuugaga

SEQ ID NO: 1096963 - RNA, 19 nt, Homo sapiens
  misc_RNA (1)...(19): siRNA sense strand
ggaggcaucgcuggagcua

SEQ ID NO: 1096964 - RNA, 19 nt, Homo sapiens
  misc_RNA (1)...(19): siRNA sense strand
guggaaacagaaacagaaa

SEQ ID NO: 1096965 - RNA, 19 nt, Homo sapiens
  misc_RNA (1)...(19): siRNA sense strand
caagaagaagauuaagaca

SEQ ID NO: 1096966 - RNA, 19 nt, Homo sapiens
  misc_RNA (1)...(19): siRNA sense strand
ggagaagcagccugagaag

SEQ ID NO: 1096967 - RNA, 19 nt, Homo sapiens
  misc_RNA (1)...(19): siRNA sense strand
uggacagcauaaagaacua

SEQ ID NO: 1096968 - RNA, 19 nt, Homo sapiens
  misc_RNA (1)...(19): siRNA sense strand
gauggugcgugcccagaac

SEQ ID NO: 1096969 - RNA, 19 nt, Homo sapiens
  misc_RNA (1)...(19): siRNA sense strand
gacgggcaguggcaagaca

SEQ ID NO: 1096970 - RNA, 19 nt, Homo sapiens
  misc_RNA (1)...(19): siRNA sense strand
cgagaccuguaucagaagu

SEQ ID NO: 1096971 - RNA, 19 nt, Homo sapiens
  misc_RNA (1)...(19): siRNA sense strand
aagcgagaccuguaucaga

SEQ ID NO: 1096972 - RNA, 19 nt, Homo sapiens
  misc_RNA (1)...(19): siRNA sense strand
acaagaagaagauuaagac

SEQ ID NO: 1096973 - RNA, 19 nt, Homo sapiens
  misc_RNA (1)...(19): siRNA sense strand
gcagcgggaccaggaauuc

SEQ ID NO: 1096974 - RNA, 19 nt, Homo sapiens
  misc_RNA (1)...(19): siRNA sense strand
gcuacccgguguucaaagg

SEQ ID NO: 1096975 - RNA, 19 nt, Homo sapiens
  misc_RNA (1)...(19): siRNA sense strand
ucaagagggccaaggagau

SEQ ID NO: 1096976 - RNA, 19 nt, Homo sapiens
  misc_RNA (1)...(19): siRNA sense strand
ggcuugacguggauaccaa

SEQ ID NO: 1096977 - RNA, 19 nt, Homo sapiens
  misc_RNA (1)...(19): siRNA sense strand
caaacugcugguggaauuu

SEQ ID NO: 1096978 - RNA, 19 nt, Homo sapiens
  misc_RNA (1)...(19): siRNA sense strand
aggagaagcagccugagaa

SEQ ID NO: 1096979 - RNA, 19 nt, Homo sapiens
  misc_RNA (1)...(19): siRNA sense strand
ucagaaguggaaacagaaa

SEQ ID NO: 1096980 - RNA, 19 nt, Homo sapiens
  misc_RNA (1)...(19): siRNA sense strand
gauggaagaccaguuugca

SEQ ID NO: 1096981 - RNA, 19 nt, Homo sapiens
  misc_RNA (1)...(19): siRNA sense strand
caggacaggaagacaagaa

SEQ ID NO: 1096982 - RNA, 19 nt, Homo sapiens
  misc_RNA (1)...(19): siRNA sense strand
ugagcuacccgguguucaa

SEQ ID NO: 1096983 - RNA, 19 nt, Homo sapiens
  misc_RNA (1)...(19): siRNA sense strand
caggaagacaagaagaaga

SEQ ID NO: 1096984 - RNA, 19 nt, Homo sapiens
  misc_RNA (1)...(19): siRNA sense strand
ucaagugggaccguaagaa

SEQ ID NO: 1096985 - RNA, 19 nt, Homo sapiens
  misc_RNA (1)...(19): siRNA sense strand
gagaguguggaggacauuu

SEQ ID NO: 1096986 - RNA, 19 nt, Homo sapiens
  misc_RNA (1)...(19): siRNA sense strand
gaagcaccacgccgaguac

SEQ ID NO: 1096987 - RNA, 19 nt, Homo sapiens
  misc_RNA (1)...(19): siRNA sense strand
cagaacaagaagaagaaga

SEQ ID NO: 1096988 - RNA, 19 nt, Homo sapiens
  misc_RNA (1)...(19): siRNA sense strand
guggagacaggauggaaga

SEQ ID NO: 1096989 - RNA, 19 nt, Homo sapiens
  misc_RNA (1)...(19): siRNA sense strand
gaagcugcagaguguggaa

SEQ ID NO: 1096990 - RNA, 19 nt, Homo sapiens
  misc_RNA (1)...(19): siRNA sense strand
caucagcagcuccuacaag

SEQ ID NO: 1096991 - RNA, 19 nt, Homo sapiens
  misc_RNA (1)...(19): siRNA sense strand
gaaguggcacagccuacuc

SEQ ID NO: 1096992 - RNA, 19 nt, Homo sapiens
  misc_RNA (1)...(19): siRNA sense strand
ucaacgagcagcugaagac

SEQ ID NO: 1096993 - RNA, 19 nt, Homo sapiens
  misc_RNA (1)...(19): siRNA sense strand
gggacagucaggacaggaa

SEQ ID NO: 1096994 - RNA, 19 nt, Homo sapiens
  misc_RNA (1)...(19): siRNA sense strand
ggaauacgugguguucgau

SEQ ID NO: 1096995 - RNA, 19 nt, Homo sapiens
  misc_RNA (1)...(19): siRNA sense strand
gugcccagaacaagaagaa

SEQ ID NO: 1096996 - RNA, 19 nt, Homo sapiens
  misc_RNA (1)...(19): siRNA sense strand
acaaugucaucaacuacag

SEQ ID NO: 1096997 - RNA, 19 nt, Homo sapiens
  misc_RNA (1)...(19): siRNA sense strand
cccagaacaagaagaagaa

SEQ ID NO: 1096998 - RNA, 19 nt, Homo sapiens
  misc_RNA (1)...(19): siRNA sense strand
ggaaauagcuaaucagaaa

SEQ ID NO: 1096999 - RNA, 19 nt, Homo sapiens
  misc_RNA (1)...(19): siRNA sense strand
gcaagagccuguuguggua

SEQ ID NO: 1097000 - RNA, 19 nt, Homo sapiens
  misc_RNA (1)...(19): siRNA sense strand
gaagaaaccugccacagau

SEQ ID NO: 1097001 - RNA, 19 nt, Homo sapiens
  misc_RNA (1)...(19): siRNA sense strand
cauuggagcuucucauuua

SEQ ID NO: 1097002 - RNA, 19 nt, Homo sapiens
  misc_RNA (1)...(19): siRNA sense strand
gaacugauacagggaaaua

SEQ ID NO: 1097003 - RNA, 19 nt, Homo sapiens
  misc_RNA (1)...(19): siRNA sense strand
ugacgaaucuagaacauga

SEQ ID NO: 1097004 - RNA, 19 nt, Homo sapiens
  misc_RNA (1)...(19): siRNA sense strand
ggaagaaaccugccacaga

SEQ ID NO: 1097005 - RNA, 19 nt, Homo sapiens
  misc_RNA (1)...(19): siRNA sense strand
gaaguagaaccaauggaua

SEQ ID NO: 1097006 - RNA, 19 nt, Homo sapiens
  misc_RNA (1)...(19): siRNA sense strand
gccagagacuccaugcuua

SEQ ID NO: 1097007 - RNA, 19 nt, Homo sapiens
  misc_RNA (1)...(19): siRNA sense strand
caacagggccaucccagua

SEQ ID NO: 1097008 - RNA, 19 nt, Homo sapiens
  misc_RNA (1)...(19): siRNA sense strand
ggaaauaugcagaggugua

SEQ ID NO: 1097009 - RNA, 19 nt, Homo sapiens
  misc_RNA (1)...(19): siRNA sense strand
gauguccaguucuaaagua

SEQ ID NO: 1097010 - RNA, 19 nt, Homo sapiens
  misc_RNA (1)...(19): siRNA sense strand
gaugaucuccaccgaauaa

SEQ ID NO: 1097011 - RNA, 19 nt, Homo sapiens
  misc_RNA (1)...(19): siRNA sense strand
agaagaaggugacaugaug

SEQ ID NO: 1097012 - RNA, 19 nt, Homo sapiens
  misc_RNA (1)...(19): siRNA sense strand
gaaauaugcagagguguaa

SEQ ID NO: 1097013 - RNA, 19 nt, Homo sapiens
  misc_RNA (1)...(19): siRNA sense strand
gagacuguauccaaucaaa

SEQ ID NO: 1097014 - RNA, 19 nt, Homo sapiens
  misc_RNA (1)...(19): siRNA sense strand
ccucugugcugcccaguua

SEQ ID NO: 1097015 - RNA, 19 nt, Homo sapiens
  misc_RNA (1)...(19): siRNA sense strand
gcagauggagccacaauug

SEQ ID NO: 1097016 - RNA, 19 nt, Homo sapiens
  misc_RNA (1)...(19): siRNA sense strand
gguguaaacuugugaugga

SEQ ID NO: 1097017 - RNA, 19 nt, Homo sapiens
  misc_RNA (1)...(19): siRNA sense strand
gaaagaagaaguagaacca

SEQ ID NO: 1097018 - RNA, 19 nt, Homo sapiens
  misc_RNA (1)...(19): siRNA sense strand
ccgaauaaacgaacugaua

SEQ ID NO: 1097019 - RNA, 19 nt, Homo sapiens
  misc_RNA (1)...(19): siRNA sense strand
gaaguccacugccaagagu

SEQ ID NO: 1097020 - RNA, 19 nt, Homo sapiens
  misc_RNA (1)...(19): siRNA sense strand
gcugugauguccaguucua

SEQ ID NO: 1097021 - RNA, 19 nt, Homo sapiens
  misc_RNA (1)...(19): siRNA sense strand
gaaccaauggauaucauga

SEQ ID NO: 1097022 - RNA, 19 nt, Homo sapiens
  misc_RNA (1)...(19): siRNA sense strand
aaacagcacugaugaugag

SEQ ID NO: 1097023 - RNA, 19 nt, Homo sapiens
  misc_RNA (1)...(19): siRNA sense strand
cuacaaaugugcaaauguc

SEQ ID NO: 1097024 - RNA, 19 nt, Homo sapiens
  misc_RNA (1)...(19): siRNA sense strand
gcacaucauucaccaacca

SEQ ID NO: 1097025 - RNA, 19 nt, Homo sapiens
  misc_RNA (1)...(19): siRNA sense strand
caucaugacuacaaaugug

SEQ ID NO: 1097026 - RNA, 19 nt, Homo sapiens
  misc_RNA (1)...(19): siRNA sense strand
gcagagguguaaacuugug

SEQ ID NO: 1097027 - RNA, 19 nt, Homo sapiens
  misc_RNA (1)...(19): siRNA sense strand
gaaucacacuaccaucuca

SEQ ID NO: 1097028 - RNA, 19 nt, Homo sapiens
  misc_RNA (1)...(19): siRNA sense strand
ccaguaaccugcaucacau

SEQ ID NO: 1097029 - RNA, 19 nt, Homo sapiens
  misc_RNA (1)...(19): siRNA sense strand
ugaggaaggugugagauau

SEQ ID NO: 1097030 - RNA, 19 nt, Homo sapiens
  misc_RNA (1)...(19): siRNA sense strand
ccaaggaguauauugauga

SEQ ID NO: 1097031 - RNA, 19 nt, Homo sapiens
  misc_RNA (1)...(19): siRNA sense strand
caugugaucucaacagaag

SEQ ID NO: 1097032 - RNA, 19 nt, Homo sapiens
  misc_RNA (1)...(19): siRNA sense strand
gauacagccugcaccacuu

SEQ ID NO: 1097033 - RNA, 19 nt, Homo sapiens
  misc_RNA (1)...(19): siRNA sense strand
ucaacaguuuccucgguua

SEQ ID NO: 1097034 - RNA, 19 nt, Homo sapiens
  misc_RNA (1)...(19): siRNA sense strand
augcagagguguaaacuug

SEQ ID NO: 1097035 - RNA, 19 nt, Homo sapiens
  misc_RNA (1)...(19): siRNA sense strand
gagaguagcaucccucaag

SEQ ID NO: 1097036 - RNA, 19 nt, Homo sapiens
  misc_RNA (1)...(19): siRNA sense strand
gaaauccacgugucuaugg

SEQ ID NO: 1097037 - RNA, 19 nt, Homo sapiens
  misc_RNA (1)...(19): siRNA sense strand
ccucacagcugccaaaugc

SEQ ID NO: 1097038 - RNA, 19 nt, Homo sapiens
  misc_RNA (1)...(19): siRNA sense strand
uaaccugcaucacaucaug

SEQ ID NO: 1097039 - RNA, 19 nt, Homo sapiens
  misc_RNA (1)...(19): siRNA sense strand
uagcaucccucaagcuuca

SEQ ID NO: 1097040 - RNA, 19 nt, Homo sapiens
  misc_RNA (1)...(19): siRNA sense strand
cgagaugucacaacaagaa

SEQ ID NO: 1097041 - RNA, 19 nt, Homo sapiens
  misc_RNA (1)...(19): siRNA sense strand
ggucaaagaggagaagaaa

SEQ ID NO: 1097042 - RNA, 19 nt, Homo sapiens
  misc_RNA (1)...(19): siRNA sense strand
ggaguauauugaugaggaa

SEQ ID NO: 1097043 - RNA, 19 nt, Homo sapiens
  misc_RNA (1)...(19): siRNA sense strand
gauaucaugaggccaguuu

SEQ ID NO: 1097044 - RNA, 19 nt, Homo sapiens
  misc_RNA (1)...(19): siRNA sense strand
cgagaggaguagccugauu

SEQ ID NO: 1097045 - RNA, 19 nt, Homo sapiens
  misc_RNA (1)...(19): siRNA sense strand
ccaguuccguguccacuau

SEQ ID NO: 1097046 - RNA, 19 nt, Homo sapiens
  misc_RNA (1)...(19): siRNA sense strand
gaaagcaacagcaugugau

SEQ ID NO: 1097047 - RNA, 19 nt, Homo sapiens
  misc_RNA (1)...(19): siRNA sense strand
uaaagaccguguccugaag

SEQ ID NO: 1097048 - RNA, 19 nt, Homo sapiens
  misc_RNA (1)...(19): siRNA sense strand
caaaugugcaaaugucuau

SEQ ID NO: 1097049 - RNA, 19 nt, Homo sapiens
  misc_RNA (1)...(19): siRNA sense strand
gcacugaugaugagaaguc

SEQ ID NO: 1097050 - RNA, 19 nt, Homo sapiens
  misc_RNA (1)...(19): siRNA sense strand
caaacagcacugaugauga

SEQ ID NO: 1097051 - RNA, 19 nt, Homo sapiens
  misc_RNA (1)...(19): siRNA sense strand
gcaacagcaugugaucuca

SEQ ID NO: 1097052 - RNA, 19 nt, Homo sapiens
  misc_RNA (1)...(19): siRNA sense strand
ccaccgaccauuccaacua

SEQ ID NO: 1097053 - RNA, 19 nt, Homo sapiens
  misc_RNA (1)...(19): siRNA sense strand
gcuccaaacucugccauca

SEQ ID NO: 1097054 - RNA, 19 nt, Homo sapiens
  misc_RNA (1)...(19): siRNA sense strand
aaacagcagcuucauacaa

SEQ ID NO: 1097055 - RNA, 19 nt, Homo sapiens
  misc_RNA (1)...(19): siRNA sense strand
aacagcagcuucauacaau

SEQ ID NO: 1097056 - RNA, 19 nt, Homo sapiens
  misc_RNA (1)...(19): siRNA sense strand
ccagagacuccaugcuuaa

SEQ ID NO: 1097057 - RNA, 19 nt, Homo sapiens
  misc_RNA (1)...(19): siRNA sense strand
agacaaacagcacugauga

SEQ ID NO: 1097058 - RNA, 19 nt, Homo sapiens
  misc_RNA (1)...(19): siRNA sense strand
ccguucaguuccaauauuu

SEQ ID NO: 1097059 - RNA, 19 nt, Homo sapiens
  misc_RNA (1)...(19): siRNA sense strand
caaguaccauuguuaccau

SEQ ID NO: 1097060 - RNA, 19 nt, Homo sapiens
  misc_RNA (1)...(19): siRNA sense strand
ccagggagcacaugaguuc

SEQ ID NO: 1097061 - RNA, 19 nt, Homo sapiens
  misc_RNA (1)...(19): siRNA sense strand
caaauugaagcgaaaggaa

SEQ ID NO: 1097062 - RNA, 19 nt, Homo sapiens
  misc_RNA (1)...(19): siRNA sense strand
gagacaaacagcacugaug

SEQ ID NO: 1097063 - RNA, 19 nt, Homo sapiens
  misc_RNA (1)...(19): siRNA sense strand
gaagcaagagccuguugug

SEQ ID NO: 1097064 - RNA, 19 nt, Homo sapiens
  misc_RNA (1)...(19): siRNA sense strand
caagaacgggacugucaaa

SEQ ID NO: 1097065 - RNA, 19 nt, Homo sapiens
  misc_RNA (1)...(19): siRNA sense strand
cgaaagcaacagcauguga

SEQ ID NO: 1097066 - RNA, 19 nt, Homo sapiens
  misc_RNA (1)...(19): siRNA sense strand
gcagugguguuggcagaug

SEQ ID NO: 1097067 - RNA, 19 nt, Homo sapiens
  misc_RNA (1)...(19): siRNA sense strand
caucacaucaugacuacaa

SEQ ID NO: 1097068 - RNA, 19 nt, Homo sapiens
  misc_RNA (1)...(19): siRNA sense strand
ggccaacccuauuagcaau

SEQ ID NO: 1097069 - RNA, 19 nt, Homo sapiens
  misc_RNA (1)...(19): siRNA sense strand
uuacuuugcuucgucacua

SEQ ID NO: 1097070 - RNA, 19 nt, Homo sapiens
  misc_RNA (1)...(19): siRNA sense strand
gaagaaguagaaccaaugg

SEQ ID NO: 1097071 - RNA, 19 nt, Homo sapiens
  misc_RNA (1)...(19): siRNA sense strand
caucgggccucucccaauc

SEQ ID NO: 1097072 - RNA, 19 nt, Homo sapiens
  misc_RNA (1)...(19): siRNA sense strand
gagacuccaugcuuaaggu

SEQ ID NO: 1097073 - RNA, 19 nt, Homo sapiens
  misc_RNA (1)...(19): siRNA sense strand
gaauaaacgaacugauaca

SEQ ID NO: 1097074 - RNA, 19 nt, Homo sapiens
  misc_RNA (1)...(19): siRNA sense strand
gagaggaguagccugauuc

SEQ ID NO: 1097075 - RNA, 19 nt, Homo sapiens
  misc_RNA (1)...(19): siRNA sense strand
aagcuaugcugcaggaaau

SEQ ID NO: 1097076 - RNA, 19 nt, Homo sapiens
  misc_RNA (1)...(19): siRNA sense strand
gaggccaguuucugcaguu

SEQ ID NO: 1097077 - RNA, 19 nt, Homo sapiens
  misc_RNA (1)...(19): siRNA sense strand
aagaagaaguagaaccaau

SEQ ID NO: 1097078 - RNA, 19 nt, Homo sapiens
  misc_RNA (1)...(19): siRNA sense strand
gacuacaaaugugcaaaug

SEQ ID NO: 1097079 - RNA, 19 nt, Homo sapiens
  misc_RNA (1)...(19): siRNA sense strand
gugacaugauggagacaaa

SEQ ID NO: 1097080 - RNA, 19 nt, Homo sapiens
  misc_RNA (1)...(19): siRNA sense strand
caccgaccauuccaacuau

SEQ ID NO: 1097081 - RNA, 19 nt, Homo sapiens
  misc_RNA (1)...(19): siRNA sense strand
gugccaaacccaagucuga

SEQ ID NO: 1097082 - RNA, 19 nt, Homo sapiens
  misc_RNA (1)...(19): siRNA sense strand
guucuaaaguaaccacagu

SEQ ID NO: 1097083 - RNA, 19 nt, Homo sapiens
  misc_RNA (1)...(19): siRNA sense strand
cugcuacagucaaugauga

SEQ ID NO: 1097084 - RNA, 19 nt, Homo sapiens
  misc_RNA (1)...(19): siRNA sense strand
caagcauacuccggaagaa

SEQ ID NO: 1097085 - RNA, 19 nt, Homo sapiens
  misc_RNA (1)...(19): siRNA sense strand
gcaaccaacaccauuccuu

SEQ ID NO: 1097086 - RNA, 19 nt, Homo sapiens
  misc_RNA (1)...(19): siRNA sense strand
gauaaacccagcugcuaca

SEQ ID NO: 1097087 - RNA, 19 nt, Homo sapiens
  misc_RNA (1)...(19): siRNA sense strand
gaucucaacagaagaaggu

SEQ ID NO: 1097088 - RNA, 19 nt, Homo sapiens
  misc_RNA (1)...(19): siRNA sense strand
gaccgucuguucccguuca

SEQ ID NO: 1097089 - RNA, 19 nt, Homo sapiens
  misc_RNA (1)...(19): siRNA sense strand
cagcagaucacgcacacuu

SEQ ID NO: 1097090 - RNA, 19 nt, Homo sapiens
  misc_RNA (1)...(19): siRNA sense strand
cacgagaugucacaacaag

SEQ ID NO: 1097091 - RNA, 19 nt, Homo sapiens
  misc_RNA (1)...(19): siRNA sense strand
cgaauaaacgaacugauac

SEQ ID NO: 1097092 - RNA, 19 nt, Homo sapiens
  misc_RNA (1)...(19): siRNA sense strand
uacuacagcugacgaaucu

SEQ ID NO: 1097093 - RNA, 19 nt, Homo sapiens
  misc_RNA (1)...(19): siRNA sense strand
caggaaauagcuaaucaga

SEQ ID NO: 1097094 - RNA, 19 nt, Homo sapiens
  misc_RNA (1)...(19): siRNA sense strand
ugccacagauggugccaaa

SEQ ID NO: 1097095 - RNA, 19 nt, Homo sapiens
  misc_RNA (1)...(19): siRNA sense strand
gagaagcaagagccuguug

SEQ ID NO: 1097096 - RNA, 19 nt, Homo sapiens
  misc_RNA (1)...(19): siRNA sense strand
gaugucacaacaagaauca

SEQ ID NO: 1097097 - RNA, 19 nt, Homo sapiens
  misc_RNA (1)...(19): siRNA sense strand
gcugacgaaucuagaacau

SEQ ID NO: 1097098 - RNA, 19 nt, Homo sapiens
  misc_RNA (1)...(19): siRNA sense strand
gaagauaacucaagaauug

SEQ ID NO: 1097099 - RNA, 19 nt, Homo sapiens
  misc_RNA (1)...(19): siRNA sense strand
gagaauuacugcuuaguua

SEQ ID NO: 1097100 - RNA, 19 nt, Homo sapiens
  misc_RNA (1)...(19): siRNA sense strand
gaacuuaaaucucucaaag

SEQ ID NO: 1097101 - RNA, 19 nt, Homo sapiens
  misc_RNA (1)...(19): siRNA sense strand
ggaaggaacuuaaaucucu

SEQ ID NO: 1097102 - RNA, 19 nt, Homo sapiens
  misc_RNA (1)...(19): siRNA sense strand
gaagccaacugaaaugauu

SEQ ID NO: 1097103 - RNA, 19 nt, Homo sapiens
  misc_RNA (1)...(19): siRNA sense strand
ggagaaggcuagaaagguu

SEQ ID NO: 1097104 - RNA, 19 nt, Homo sapiens
  misc_RNA (1)...(19): siRNA sense strand
uaagauggauucagcauga

SEQ ID NO: 1097105 - RNA, 19 nt, Homo sapiens
  misc_RNA (1)...(19): siRNA sense strand
gcagaagaccagccuguua

SEQ ID NO: 1097106 - RNA, 19 nt, Homo sapiens
  misc_RNA (1)...(19): siRNA sense strand
gaagucaagucauguuugu

SEQ ID NO: 1097107 - RNA, 19 nt, Homo sapiens
  misc_RNA (1)...(19): siRNA sense strand
ggacuuaaguuccuugucu

SEQ ID NO: 1097108 - RNA, 19 nt, Homo sapiens
  misc_RNA (1)...(19): siRNA sense strand
gaaaugauuccucugugua

SEQ ID NO: 1097109 - RNA, 19 nt, Homo sapiens
  misc_RNA (1)...(19): siRNA sense strand
ggaccuaacuggcgagcaa

SEQ ID NO: 1097110 - RNA, 19 nt, Homo sapiens
  misc_RNA (1)...(19): siRNA sense strand
cuaaauaaccugaguaguu

SEQ ID NO: 1097111 - RNA, 19 nt, Homo sapiens
  misc_RNA (1)...(19): siRNA sense strand
gaaaugcccugggaaucaa

SEQ ID NO: 1097112 - RNA, 19 nt, Homo sapiens
  misc_RNA (1)...(19): siRNA sense strand
cagagaccauccucaauuu

SEQ ID NO: 1097113 - RNA, 19 nt, Homo sapiens
  misc_RNA (1)...(19): siRNA sense strand
aaauaucccucacaugaaa

SEQ ID NO: 1097114 - RNA, 19 nt, Homo sapiens
  misc_RNA (1)...(19): siRNA sense strand
agaaauaucccucacauga

SEQ ID NO: 1097115 - RNA, 19 nt, Homo sapiens
  misc_RNA (1)...(19): siRNA sense strand
cagaucagcauuuguauuu

SEQ ID NO: 1097116 - RNA, 19 nt, Homo sapiens
  misc_RNA (1)...(19): siRNA sense strand
ggaggaaucaauuguguaa

SEQ ID NO: 1097117 - RNA, 19 nt, Homo sapiens
  misc_RNA (1)...(19): siRNA sense strand
gaacuaugauccaccucaa

SEQ ID NO: 1097118 - RNA, 19 nt, Homo sapiens
  misc_RNA (1)...(19): siRNA sense strand
gaucacguguauuuggaua

SEQ ID NO: 1097119 - RNA, 19 nt, Homo sapiens
  misc_RNA (1)...(19): siRNA sense strand
gcaagugggaugugcauuu

SEQ ID NO: 1097120 - RNA, 19 nt, Homo sapiens
  misc_RNA (1)...(19): siRNA sense strand
gaaauaucccucacaugaa

SEQ ID NO: 1097121 - RNA, 19 nt, Homo sapiens
  misc_RNA (1)...(19): siRNA sense strand
acaaauaugcuucgucuaa

SEQ ID NO: 1097122 - RNA, 19 nt, Homo sapiens
  misc_RNA (1)...(19): siRNA sense strand
caacugaggugucuguucu

SEQ ID NO: 1097123 - RNA, 19 nt, Homo sapiens
  misc_RNA (1)...(19): siRNA sense strand
gagagaauguauauuugga

SEQ ID NO: 1097124 - RNA, 19 nt, Homo sapiens
  misc_RNA (1)...(19): siRNA sense strand
ggaaaccacacaggacuua

SEQ ID NO: 1097125 - RNA, 19 nt, Homo sapiens
  misc_RNA (1)...(19): siRNA sense strand
guaaaagccucgguucuua

SEQ ID NO: 1097126 - RNA, 19 nt, Homo sapiens
  misc_RNA (1)...(19): siRNA sense strand
uacaaucccugcuauuauu

SEQ ID NO: 1097127 - RNA, 19 nt, Homo sapiens
  misc_RNA (1)...(19): siRNA sense strand
agaaacucaugucugauua

SEQ ID NO: 1097128 - RNA, 19 nt, Homo sapiens
  misc_RNA (1)...(19): siRNA sense strand
uuacuucaguucugcauaa

SEQ ID NO: 1097129 - RNA, 19 nt, Homo sapiens
  misc_RNA (1)...(19): siRNA sense strand
guacuuugcuacuagauag

SEQ ID NO: 1097130 - RNA, 19 nt, Homo sapiens
  misc_RNA (1)...(19): siRNA sense strand
uuaaacugcucucagaauu

SEQ ID NO: 1097131 - RNA, 19 nt, Homo sapiens
  misc_RNA (1)...(19): siRNA sense strand
guagaaauaucccucacau

SEQ ID NO: 1097132 - RNA, 19 nt, Homo sapiens
  misc_RNA (1)...(19): siRNA sense strand
ugaaagaaacaaagccaua

SEQ ID NO: 1097133 - RNA, 19 nt, Homo sapiens
  misc_RNA (1)...(19): siRNA sense strand
gaacacaacagcagauuuu

SEQ ID NO: 1097134 - RNA, 19 nt, Homo sapiens
  misc_RNA (1)...(19): siRNA sense strand
caagugggaugugcauuug

SEQ ID NO: 1097135 - RNA, 19 nt, Homo sapiens
  misc_RNA (1)...(19): siRNA sense strand
ccugagagaauguauauuu

SEQ ID NO: 1097136 - RNA, 19 nt, Homo sapiens
  misc_RNA (1)...(19): siRNA sense strand
uaauucagauuucccaguu

SEQ ID NO: 1097137 - RNA, 19 nt, Homo sapiens
  misc_RNA (1)...(19): siRNA sense strand
uggccacacuugaauauuu

SEQ ID NO: 1097138 - RNA, 19 nt, Homo sapiens
  misc_RNA (1)...(19): siRNA sense strand
uagcagaucagcauuugua

SEQ ID NO: 1097139 - RNA, 19 nt, Homo sapiens
  misc_RNA (1)...(19): siRNA sense strand
gaauguauauuuggagaag

SEQ ID NO: 1097140 - RNA, 19 nt, Homo sapiens
  misc_RNA (1)...(19): siRNA sense strand
uagauuggauucucaacuu

SEQ ID NO: 1097141 - RNA, 19 nt, Homo sapiens
  misc_RNA (1)...(19): siRNA sense strand
uagcugauauuguucauag

SEQ ID NO: 1097142 - RNA, 19 nt, Homo sapiens
  misc_RNA (1)...(19): siRNA sense strand
aaggauugcuuuggaauuu

SEQ ID NO: 1097143 - RNA, 19 nt, Homo sapiens
  misc_RNA (1)...(19): siRNA sense strand
agaguccaguuucaucuua

SEQ ID NO: 1097144 - RNA, 19 nt, Homo sapiens
  misc_RNA (1)...(19): siRNA sense strand
gaagaaaugauugcuacuu

SEQ ID NO: 1097145 - RNA, 19 nt, Homo sapiens
  misc_RNA (1)...(19): siRNA sense strand
cgaaacaacugaaacuacu

SEQ ID NO: 1097146 - RNA, 19 nt, Homo sapiens
  misc_RNA (1)...(19): siRNA sense strand
gaaacucaugucugauuaa

SEQ ID NO: 1097147 - RNA, 19 nt, Homo sapiens
  misc_RNA (1)...(19): siRNA sense strand
cagaagaccagccuguuaa

SEQ ID NO: 1097148 - RNA, 19 nt, Homo sapiens
  misc_RNA (1)...(19): siRNA sense strand
guacuaggaggaaucaauu

SEQ ID NO: 1097149 - RNA, 19 nt, Homo sapiens
  misc_RNA (1)...(19): siRNA sense strand
cuuagagaauuacugcuua

SEQ ID NO: 1097150 - RNA, 19 nt, Homo sapiens
  misc_RNA (1)...(19): siRNA sense strand
gcuauaaaccauuagaguu

SEQ ID NO: 1097151 - RNA, 19 nt, Homo sapiens
  misc_RNA (1)...(19): siRNA sense strand
uaauaugacugcgaaacaa

SEQ ID NO: 1097152 - RNA, 19 nt, Homo sapiens
  misc_RNA (1)...(19): siRNA sense strand
ccucgguucuuacgccuua

SEQ ID NO: 1097153 - RNA, 19 nt, Homo sapiens
  misc_RNA (1)...(19): siRNA sense strand
uaagagcuauuuguccauu

SEQ ID NO: 1097154 - RNA, 19 nt, Homo sapiens
  misc_RNA (1)...(19): siRNA sense strand
ucagagaccauccucaauu

SEQ ID NO: 1097155 - RNA, 19 nt, Homo sapiens
  misc_RNA (1)...(19): siRNA sense strand
gaaaugauugcuacuuuac

SEQ ID NO: 1097156 - RNA, 19 nt, Homo sapiens
  misc_RNA (1)...(19): siRNA sense strand
ugcgaaacuuagagaauua

SEQ ID NO: 1097157 - RNA, 19 nt, Homo sapiens
  misc_RNA (1)...(19): siRNA sense strand
cauuagaguuguugaagau

SEQ ID NO: 1097158 - RNA, 19 nt, Homo sapiens
  misc_RNA (1)...(19): siRNA sense strand
ugaaaugauuccucugugu

SEQ ID NO: 1097159 - RNA, 19 nt, Homo sapiens
  misc_RNA (1)...(19): siRNA sense strand
aacaacaacugaugaacaa

SEQ ID NO: 1097160 - RNA, 19 nt, Homo sapiens
  misc_RNA (1)...(19): siRNA sense strand
gaaccacuaauuauucaga

SEQ ID NO: 1097161 - RNA, 19 nt, Homo sapiens
  misc_RNA (1)...(19): siRNA sense strand
caacaacaacugaugaaca

SEQ ID NO: 1097162 - RNA, 19 nt, Homo sapiens
  misc_RNA (1)...(19): siRNA sense strand
gcauggagaaggcuagaaa

SEQ ID NO: 1097163 - RNA, 19 nt, Homo sapiens
  misc_RNA (1)...(19): siRNA sense strand
gaccauccucaauuucuua

SEQ ID NO: 1097164 - RNA, 19 nt, Homo sapiens
  misc_RNA (1)...(19): siRNA sense strand
gcuagaaagguuugauauu

SEQ ID NO: 1097165 - RNA, 19 nt, Homo sapiens
  misc_RNA (1)...(19): siRNA sense strand
ccgcuucugucaacaauau

SEQ ID NO: 1097166 - RNA, 19 nt, Homo sapiens
  misc_RNA (1)...(19): siRNA sense strand
ggucaacauaucuucuuua

SEQ ID NO: 1097167 - RNA, 19 nt, Homo sapiens
  misc_RNA (1)...(19): siRNA sense strand
guacagaugaggagcaaau

SEQ ID NO: 1097168 - RNA, 19 nt, Homo sapiens
  misc_RNA (1)...(19): siRNA sense strand
caucaguugugaaccacua

SEQ ID NO: 1097169 - RNA, 19 nt, Homo sapiens
  misc_RNA (1)...(19): siRNA sense strand
acauuuggauggcuauaaa

SEQ ID NO: 1097170 - RNA, 19 nt, Homo sapiens
  misc_RNA (1)...(19): siRNA sense strand
ugaauaaguguacagauga

SEQ ID NO: 1097171 - RNA, 19 nt, Homo sapiens
  misc_RNA (1)...(19): siRNA sense strand
cauuugauaugcuuuggaa

SEQ ID NO: 1097172 - RNA, 19 nt, Homo sapiens
  misc_RNA (1)...(19): siRNA sense strand
gagaagucaagucauguuu

SEQ ID NO: 1097173 - RNA, 19 nt, Homo sapiens
  misc_RNA (1)...(19): siRNA sense strand
cuauggcacugucaacaaa

SEQ ID NO: 1097174 - RNA, 19 nt, Homo sapiens
  misc_RNA (1)...(19): siRNA sense strand
ggaacacaacagcagauuu

SEQ ID NO: 1097175 - RNA, 19 nt, Homo sapiens
  misc_RNA (1)...(19): siRNA sense strand
gugcaagaguccaguuuca

SEQ ID NO: 1097176 - RNA, 19 nt, Homo sapiens
  misc_RNA (1)...(19): siRNA sense strand
gaauaaguguacagaugag

SEQ ID NO: 1097177 - RNA, 19 nt, Homo sapiens
  misc_RNA (1)...(19): siRNA sense strand
ggagauauggaaagcagaa

SEQ ID NO: 1097178 - RNA, 19 nt, Homo sapiens
  misc_RNA (1)...(19): siRNA sense strand
guaaucauccugcuagcuu

SEQ ID NO: 1097179 - RNA, 19 nt, Homo sapiens
  misc_RNA (1)...(19): siRNA sense strand
aaauaugcuucgucuaaga

SEQ ID NO: 1097180 - RNA, 19 nt, Homo sapiens
  misc_RNA (1)...(19): siRNA sense strand
uaaacugcucucagaauuu

SEQ ID NO: 1097181 - RNA, 19 nt, Homo sapiens
  misc_RNA (1)...(19): siRNA sense strand
caaauaugcuucgucuaag

SEQ ID NO: 1097182 - RNA, 19 nt, Homo sapiens
  misc_RNA (1)...(19): siRNA sense strand
ucacuauggucgucagaga

SEQ ID NO: 1097183 - RNA, 19 nt, Homo sapiens
  misc_RNA (1)...(19): siRNA sense strand
gcaaugggagauauggaaa

SEQ ID NO: 1097184 - RNA, 19 nt, Homo sapiens
  misc_RNA (1)...(19): siRNA sense strand
gcagaucagcauuuguauu

SEQ ID NO: 1097185 - RNA, 19 nt, Homo sapiens
  misc_RNA (1)...(19): siRNA sense strand
ccacuaauuauucagauga

SEQ ID NO: 1097186 - RNA, 19 nt, Homo sapiens
  misc_RNA (1)...(19): siRNA sense strand
ggagaagucaagucauguu

SEQ ID NO: 1097187 - RNA, 19 nt, Homo sapiens
  misc_RNA (1)...(19): siRNA sense strand
gcaagaguccaguuucauc

SEQ ID NO: 1097188 - RNA, 19 nt, Homo sapiens
  misc_RNA (1)...(19): siRNA sense strand
acuuaaaucucucaaagga

SEQ ID NO: 1097189 - RNA, 19 nt, Homo sapiens
  misc_RNA (1)...(19): siRNA sense strand
uagagucauugguuacaaa

SEQ ID NO: 1097190 - RNA, 19 nt, Homo sapiens
  misc_RNA (1)...(19): siRNA sense strand
auauuaaacugcucucaga

SEQ ID NO: 1097191 - RNA, 19 nt, Homo sapiens
  misc_RNA (1)...(19): siRNA sense strand
gagaguguuucaauuucga

SEQ ID NO: 1097192 - RNA, 19 nt, Homo sapiens
  misc_RNA (1)...(19): siRNA sense strand
ccauuagaguuguugaaga

SEQ ID NO: 1097193 - RNA, 19 nt, Homo sapiens
  misc_RNA (1)...(19): siRNA sense strand
caaccacuauuagaaagau

SEQ ID NO: 1097194 - RNA, 19 nt, Homo sapiens
  misc_RNA (1)...(19): siRNA sense strand
ccacacaggacuuaaguuc

SEQ ID NO: 1097195 - RNA, 19 nt, Homo sapiens
  misc_RNA (1)...(19): siRNA sense strand
gaaagaaacaaagccauac

SEQ ID NO: 1097196 - RNA, 19 nt, Homo sapiens
  misc_RNA (1)...(19): siRNA sense strand
caacacagcaacaguuugg

SEQ ID NO: 1097197 - RNA, 19 nt, Homo sapiens
  misc_RNA (1)...(19): siRNA sense strand
cuauaaaccauuagaguug

SEQ ID NO: 1097198 - RNA, 19 nt, Homo sapiens
  misc_RNA (1)...(19): siRNA sense strand
gaaaucagaccaucuauug

SEQ ID NO: 1097199 - RNA, 19 nt, Homo sapiens
  misc_RNA (1)...(19): siRNA sense strand
gaucaggccucgcauugua

SEQ ID NO: 1097200 - RNA, 19 nt, Homo sapiens
  misc_RNA (1)...(19): siRNA sense strand
ggacgcaccuggauuuaau

SEQ ID NO: 1097201 - RNA, 19 nt, Homo sapiens
  misc_RNA (1)...(19): siRNA sense strand
gcaccuggauuuaauugaa

SEQ ID NO: 1097202 - RNA, 19 nt, Homo sapiens
  misc_RNA (1)...(19): siRNA sense strand
acaggaaagucaccauuua

SEQ ID NO: 1097203 - RNA, 19 nt, Homo sapiens
  misc_RNA (1)...(19): siRNA sense strand
caagaacuuugcuaacgua

SEQ ID NO: 1097204 - RNA, 19 nt, Homo sapiens
  misc_RNA (1)...(19): siRNA sense strand
cagagauucuuccuuuaua

SEQ ID NO: 1097205 - RNA, 19 nt, Homo sapiens
  misc_RNA (1)...(19): siRNA sense strand
guagauauguucuccuaug

SEQ ID NO: 1097206 - RNA, 19 nt, Homo sapiens
  misc_RNA (1)...(19): siRNA sense strand
gaauggugcucuacgaguu

SEQ ID NO: 1097207 - RNA, 19 nt, Homo sapiens
  misc_RNA (1)...(19): siRNA sense strand
gcagacagccuucuucuca

SEQ ID NO: 1097208 - RNA, 19 nt, Homo sapiens
  misc_RNA (1)...(19): siRNA sense strand
gauauguucuccuauggaa

SEQ ID NO: 1097209 - RNA, 19 nt, Homo sapiens
  misc_RNA (1)...(19): siRNA sense strand
gaacaggaaagucaccauu

SEQ ID NO: 1097210 - RNA, 19 nt, Homo sapiens
  misc_RNA (1)...(19): siRNA sense strand
cgccagagauucuuccuuu

SEQ ID NO: 1097211 - RNA, 19 nt, Homo sapiens
  misc_RNA (1)...(19): siRNA sense strand
cagaggguauuuaagauga

SEQ ID NO: 1097212 - RNA, 19 nt, Homo sapiens
  misc_RNA (1)...(19): siRNA sense strand
ggccgugccuguuauuaaa

SEQ ID NO: 1097213 - RNA, 19 nt, Homo sapiens
  misc_RNA (1)...(19): siRNA sense strand
ggacacaugcucacccaaa

SEQ ID NO: 1097214 - RNA, 19 nt, Homo sapiens
  misc_RNA (1)...(19): siRNA sense strand
gccaucagcuuccucauag

SEQ ID NO: 1097215 - RNA, 19 nt, Homo sapiens
  misc_RNA (1)...(19): siRNA sense strand
gcacaucaacaucaagcua

SEQ ID NO: 1097216 - RNA, 19 nt, Homo sapiens
  misc_RNA (1)...(19): siRNA sense strand
agaaaucgcuguagcacau

SEQ ID NO: 1097217 - RNA, 19 nt, Homo sapiens
  misc_RNA (1)...(19): siRNA sense strand
gaaagucaccauuuacagu

SEQ ID NO: 1097218 - RNA, 19 nt, Homo sapiens
  misc_RNA (1)...(19): siRNA sense strand
gagauggaccugcagcuuu

SEQ ID NO: 1097219 - RNA, 19 nt, Homo sapiens
  misc_RNA (1)...(19): siRNA sense strand
gcagaggaucuuuaauauu

SEQ ID NO: 1097220 - RNA, 19 nt, Homo sapiens
  misc_RNA (1)...(19): siRNA sense strand
aaagaaaucagaccaucua

SEQ ID NO: 1097221 - RNA, 19 nt, Homo sapiens
  misc_RNA (1)...(19): siRNA sense strand
gucaagcgcuuccacauca

SEQ ID NO: 1097222 - RNA, 19 nt, Homo sapiens
  misc_RNA (1)...(19): siRNA sense strand
cugcagaggaucuuuaaua

SEQ ID NO: 1097223 - RNA, 19 nt, Homo sapiens
  misc_RNA (1)...(19): siRNA sense strand
cagaggaugugcaguacuu

SEQ ID NO: 1097224 - RNA, 19 nt, Homo sapiens
  misc_RNA (1)...(19): siRNA sense strand
gccagagauucuuccuuua

SEQ ID NO: 1097225 - RNA, 19 nt, Homo sapiens
  misc_RNA (1)...(19): siRNA sense strand
gagaucaggccucgcauug

SEQ ID NO: 1097226 - RNA, 19 nt, Homo sapiens
  misc_RNA (1)...(19): siRNA sense strand
caacaggccuuggauacuc

SEQ ID NO: 1097227 - RNA, 19 nt, Homo sapiens
  misc_RNA (1)...(19): siRNA sense strand
caugagauuuccugcaaga

SEQ ID NO: 1097228 - RNA, 19 nt, Homo sapiens
  misc_RNA (1)...(19): siRNA sense strand
aggaaucacucacugacua

SEQ ID NO: 1097229 - RNA, 19 nt, Homo sapiens
  misc_RNA (1)...(19): siRNA sense strand
acaacgacaucaaggacua

SEQ ID NO: 1097230 - RNA, 19 nt, Homo sapiens
  misc_RNA (1)...(19): siRNA sense strand
ccgagucauugccgucuua

SEQ ID NO: 1097231 - RNA, 19 nt, Homo sapiens
  misc_RNA (1)...(19): siRNA sense strand
gaaaagaggaguccaggaa

SEQ ID NO: 1097232 - RNA, 19 nt, Homo sapiens
  misc_RNA (1)...(19): siRNA sense strand
gccaacagguccaaguuca

SEQ ID NO: 1097233 - RNA, 19 nt, Homo sapiens
  misc_RNA (1)...(19): siRNA sense strand
uacaugagauuuccugcaa

SEQ ID NO: 1097234 - RNA, 19 nt, Homo sapiens
  misc_RNA (1)...(19): siRNA sense strand
gaaaagcggaggaaugaaa

SEQ ID NO: 1097235 - RNA, 19 nt, Homo sapiens
  misc_RNA (1)...(19): siRNA sense strand
ugcagaggaucuuuaauau

SEQ ID NO: 1097236 - RNA, 19 nt, Homo sapiens
  misc_RNA (1)...(19): siRNA sense strand
cuauuuggcucuccgaaug

SEQ ID NO: 1097237 - RNA, 19 nt, Homo sapiens
  misc_RNA (1)...(19): siRNA sense strand
ggccucgcauuguauauga

SEQ ID NO: 1097238 - RNA, 19 nt, Homo sapiens
  misc_RNA (1)...(19): siRNA sense strand
gacaucaccuucaaacacu

SEQ ID NO: 1097239 - RNA, 19 nt, Homo sapiens
  misc_RNA (1)...(19): siRNA sense strand
gaagauccucgccgucaga

SEQ ID NO: 1097240 - RNA, 19 nt, Homo sapiens
  misc_RNA (1)...(19): siRNA sense strand
uggccuaccugcacaagaa

SEQ ID NO: 1097241 - RNA, 19 nt, Homo sapiens
  misc_RNA (1)...(19): siRNA sense strand
ccagagauucuuccuuuau

SEQ ID NO: 1097242 - RNA, 19 nt, Homo sapiens
  misc_RNA (1)...(19): siRNA sense strand
aaucagaggaugugcagua

SEQ ID NO: 1097243 - RNA, 19 nt, Homo sapiens
  misc_RNA (1)...(19): siRNA sense strand
gaccaucuauuggcaggaa

SEQ ID NO: 1097244 - RNA, 19 nt, Homo sapiens
  misc_RNA (1)...(19): siRNA sense strand
ucacggaccacgucaauuc

SEQ ID NO: 1097245 - RNA, 19 nt, Homo sapiens
  misc_RNA (1)...(19): siRNA sense strand
gaauuccuaccuggucuua

SEQ ID NO: 1097246 - RNA, 19 nt, Homo sapiens
  misc_RNA (1)...(19): siRNA sense strand
acaucaagcuaucugacua

SEQ ID NO: 1097247 - RNA, 19 nt, Homo sapiens
  misc_RNA (1)...(19): siRNA sense strand
ccgaaugucugcagaggau

SEQ ID NO: 1097248 - RNA, 19 nt, Homo sapiens
  misc_RNA (1)...(19): siRNA sense strand
ucaaggagcacaucaacau

SEQ ID NO: 1097249 - RNA, 19 nt, Homo sapiens
  misc_RNA (1)...(19): siRNA sense strand
ggaacuacacgguggugaa

SEQ ID NO: 1097250 - RNA, 19 nt, Homo sapiens
  misc_RNA (1)...(19): siRNA sense strand
uguagcacauucagaguga

SEQ ID NO: 1097251 - RNA, 19 nt, Homo sapiens
  misc_RNA (1)...(19): siRNA sense strand
gagauguuaucgucauugg

SEQ ID NO: 1097252 - RNA, 19 nt, Homo sapiens
  misc_RNA (1)...(19): siRNA sense strand
gcaguggcaccgucaucua

SEQ ID NO: 1097253 - RNA, 19 nt, Homo sapiens
  misc_RNA (1)...(19): siRNA sense strand
ggauuucgaggcagucauu

SEQ ID NO: 1097254 - RNA, 19 nt, Homo sapiens
  misc_RNA (1)...(19): siRNA sense strand
ccaccgaugccaugaagaa

SEQ ID NO: 1097255 - RNA, 19 nt, Homo sapiens
  misc_RNA (1)...(19): siRNA sense strand
gaagaaaagcggaggaaug

SEQ ID NO: 1097256 - RNA, 19 nt, Homo sapiens
  misc_RNA (1)...(19): siRNA sense strand
ccagggaguucgacauuuu

SEQ ID NO: 1097257 - RNA, 19 nt, Homo sapiens
  misc_RNA (1)...(19): siRNA sense strand
ucauuggccuggagaagga

SEQ ID NO: 1097258 - RNA, 19 nt, Homo sapiens
  misc_RNA (1)...(19): siRNA sense strand
ccauucagaggguauuuaa

SEQ ID NO: 1097259 - RNA, 19 nt, Homo sapiens
  misc_RNA (1)...(19): siRNA sense strand
gccagggaguucgacauuu

SEQ ID NO: 1097260 - RNA, 19 nt, Homo sapiens
  misc_RNA (1)...(19): siRNA sense strand
gaugagaagguagauaugu

SEQ ID NO: 1097261 - RNA, 19 nt, Homo sapiens
  misc_RNA (1)...(19): siRNA sense strand
uucaaacacuuacaugaga

SEQ ID NO: 1097262 - RNA, 19 nt, Homo sapiens
  misc_RNA (1)...(19): siRNA sense strand
ucaagaacuuugcuaacgu

SEQ ID NO: 1097263 - RNA, 19 nt, Homo sapiens
  misc_RNA (1)...(19): siRNA sense strand
gagcagaagaccucaggau

SEQ ID NO: 1097264 - RNA, 19 nt, Homo sapiens
  misc_RNA (1)...(19): siRNA sense strand
acacgguggugaacacaga

SEQ ID NO: 1097265 - RNA, 19 nt, Homo sapiens
  misc_RNA (1)...(19): siRNA sense strand
ucaaacacuuacaugagau

SEQ ID NO: 1097266 - RNA, 19 nt, Homo sapiens
  misc_RNA (1)...(19): siRNA sense strand
ucauggaggugcagaggau

SEQ ID NO: 1097267 - RNA, 19 nt, Homo sapiens
  misc_RNA (1)...(19): siRNA sense strand
cauuguauaugaugagaag

SEQ ID NO: 1097268 - RNA, 19 nt, Homo sapiens
  misc_RNA (1)...(19): siRNA sense strand
ccgaugccaugaagaacuu

SEQ ID NO: 1097269 - RNA, 19 nt, Homo sapiens
  misc_RNA (1)...(19): siRNA sense strand
caucagcuuccucauagaa

SEQ ID NO: 1097270 - RNA, 19 nt, Homo sapiens
  misc_RNA (1)...(19): siRNA sense strand
gccacaggcuucccagaca

SEQ ID NO: 1097271 - RNA, 19 nt, Homo sapiens
  misc_RNA (1)...(19): siRNA sense strand
gaccugaagucggacaaca

SEQ ID NO: 1097272 - RNA, 19 nt, Homo sapiens
  misc_RNA (1)...(19): siRNA sense strand
acaccgugcuguccgagaa

SEQ ID NO: 1097273 - RNA, 19 nt, Homo sapiens
  misc_RNA (1)...(19): siRNA sense strand
gcaguacuucgacauggaa

SEQ ID NO: 1097274 - RNA, 19 nt, Homo sapiens
  misc_RNA (1)...(19): siRNA sense strand
caucaccuucaaacacuua

SEQ ID NO: 1097275 - RNA, 19 nt, Homo sapiens
  misc_RNA (1)...(19): siRNA sense strand
gaagggcuccuggucacuu

SEQ ID NO: 1097276 - RNA, 19 nt, Homo sapiens
  misc_RNA (1)...(19): siRNA sense strand
ucacgcagcagacggaaga

SEQ ID NO: 1097277 - RNA, 19 nt, Homo sapiens
  misc_RNA (1)...(19): siRNA sense strand
ccggcacccugcuccauuu

SEQ ID NO: 1097278 - RNA, 19 nt, Homo sapiens
  misc_RNA (1)...(19): siRNA sense strand
gcucugaggucugguacag

SEQ ID NO: 1097279 - RNA, 19 nt, Homo sapiens
  misc_RNA (1)...(19): siRNA sense strand
agacagccuucuucucauc

SEQ ID NO: 1097280 - RNA, 19 nt, Homo sapiens
  misc_RNA (1)...(19): siRNA sense strand
ccuauggaauggugcucua

SEQ ID NO: 1097281 - RNA, 19 nt, Homo sapiens
  misc_RNA (1)...(19): siRNA sense strand
agguagauauguucuccua

SEQ ID NO: 1097282 - RNA, 19 nt, Homo sapiens
  misc_RNA (1)...(19): siRNA sense strand
aaagucaccauuuacaguu

SEQ ID NO: 1097283 - RNA, 19 nt, Homo sapiens
  misc_RNA (1)...(19): siRNA sense strand
cccguuggcuucuggcaaa

SEQ ID NO: 1097284 - RNA, 19 nt, Homo sapiens
  misc_RNA (1)...(19): siRNA sense strand
ggagauggaccugcagcuu

SEQ ID NO: 1097285 - RNA, 19 nt, Homo sapiens
  misc_RNA (1)...(19): siRNA sense strand
ccauggagguggucaacag

SEQ ID NO: 1097286 - RNA, 19 nt, Homo sapiens
  misc_RNA (1)...(19): siRNA sense strand
uguauaugaugagaaggua

SEQ ID NO: 1097287 - RNA, 19 nt, Homo sapiens
  misc_RNA (1)...(19): siRNA sense strand
ggaaagucaccauuuacag

SEQ ID NO: 1097288 - RNA, 19 nt, Homo sapiens
  misc_RNA (1)...(19): siRNA sense strand
cgucagagaccucauuugg

SEQ ID NO: 1097289 - RNA, 19 nt, Homo sapiens
  misc_RNA (1)...(19): siRNA sense strand
cagaagaccucaggaugcu

SEQ ID NO: 1097290 - RNA, 19 nt, Homo sapiens
  misc_RNA (1)...(19): siRNA sense strand
caaacacuuacaugagauu

SEQ ID NO: 1097291 - RNA, 19 nt, Homo sapiens
  misc_RNA (1)...(19): siRNA sense strand
cgaggacucagacaugcua

SEQ ID NO: 1097292 - RNA, 19 nt, Homo sapiens
  misc_RNA (1)...(19): siRNA sense strand
aaagaggaguccaggaacu

SEQ ID NO: 1097293 - RNA, 19 nt, Homo sapiens
  misc_RNA (1)...(19): siRNA sense strand
ucccagacaucaccuucaa

SEQ ID NO: 1097294 - RNA, 19 nt, Homo sapiens
  misc_RNA (1)...(19): siRNA sense strand
ccacaggcuucccagacau

SEQ ID NO: 1097295 - RNA, 19 nt, Homo sapiens
  misc_RNA (1)...(19): siRNA sense strand
augagaagguagauauguu

SEQ ID NO: 1097296 - RNA, 19 nt, Homo sapiens
  misc_RNA (1)...(19): siRNA sense strand
guggagauguuaucgucau

SEQ ID NO: 1097297 - RNA, 19 nt, Homo sapiens
  misc_RNA (1)...(19): siRNA sense strand
cgacaggucugagcaugac

SEQ ID NO: 1097298 - RNA, 19 nt, Homo sapiens
  misc_RNA (1)...(19): siRNA sense strand
gagcguaccuacacuguua

SEQ ID NO: 1097299 - RNA, 19 nt, Homo sapiens
  misc_RNA (1)...(19): siRNA sense strand
ggaaucugcugcacgaaua

SEQ ID NO: 1097300 - RNA, 19 nt, Homo sapiens
  misc_RNA (1)...(19): siRNA sense strand
guagaaaguucacuauuug

SEQ ID NO: 1097301 - RNA, 19 nt, Homo sapiens
  misc_RNA (1)...(19): siRNA sense strand
cagaagaaaccgaauauua

SEQ ID NO: 1097302 - RNA, 19 nt, Homo sapiens
  misc_RNA (1)...(19): siRNA sense strand
guaagaaccugucccuuug

SEQ ID NO: 1097303 - RNA, 19 nt, Homo sapiens
  misc_RNA (1)...(19): siRNA sense strand
ggacaugucuuggcaguug

SEQ ID NO: 1097304 - RNA, 19 nt, Homo sapiens
  misc_RNA (1)...(19): siRNA sense strand
caaggucgcuggugacauu

SEQ ID NO: 1097305 - RNA, 19 nt, Homo sapiens
  misc_RNA (1)...(19): siRNA sense strand
uaaagaaguuccuaucgaa

SEQ ID NO: 1097306 - RNA, 19 nt, Homo sapiens
  misc_RNA (1)...(19): siRNA sense strand
cguagaaaguucacuauuu

SEQ ID NO: 1097307 - RNA, 19 nt, Homo sapiens
  misc_RNA (1)...(19): siRNA sense strand
gaacauaauccucuucuuc

SEQ ID NO: 1097308 - RNA, 19 nt, Homo sapiens
  misc_RNA (1)...(19): siRNA sense strand
caacccaccucuagaaguu

SEQ ID NO: 1097309 - RNA, 19 nt, Homo sapiens
  misc_RNA (1)...(19): siRNA sense strand
gcacaaacaauaauucuca

SEQ ID NO: 1097310 - RNA, 19 nt, Homo sapiens
  misc_RNA (1)...(19): siRNA sense strand
cagaagacaucaugguuga

SEQ ID NO: 1097311 - RNA, 19 nt, Homo sapiens
  misc_RNA (1)...(19): siRNA sense strand
gaaccugucccuuugcuuu

SEQ ID NO: 1097312 - RNA, 19 nt, Homo sapiens
  misc_RNA (1)...(19): siRNA sense strand
gaagagacaccaguggaua

SEQ ID NO: 1097313 - RNA, 19 nt, Homo sapiens
  misc_RNA (1)...(19): siRNA sense strand
gagcucaucgggcagauua

SEQ ID NO: 1097314 - RNA, 19 nt, Homo sapiens
  misc_RNA (1)...(19): siRNA sense strand
gaagaaggccuggauuuca

SEQ ID NO: 1097315 - RNA, 19 nt, Homo sapiens
  misc_RNA (1)...(19): siRNA sense strand
caacauagcgaaagcacuu

SEQ ID NO: 1097316 - RNA, 19 nt, Homo sapiens
  misc_RNA (1)...(19): siRNA sense strand
cagaugaccuagaagaaga

SEQ ID NO: 1097317 - RNA, 19 nt, Homo sapiens
  misc_RNA (1)...(19): siRNA sense strand
gauccuuucugcaguaaga

SEQ ID NO: 1097318 - RNA, 19 nt, Homo sapiens
  misc_RNA (1)...(19): siRNA sense strand
cacagugacuccagcauuu

SEQ ID NO: 1097319 - RNA, 19 nt, Homo sapiens
  misc_RNA (1)...(19): siRNA sense strand
gacgagcagucuaucauga

SEQ ID NO: 1097320 - RNA, 19 nt, Homo sapiens
  misc_RNA (1)...(19): siRNA sense strand
ugacuuacguggcacaguu

SEQ ID NO: 1097321 - RNA, 19 nt, Homo sapiens
  misc_RNA (1)...(19): siRNA sense strand
cccacgaccucuucuauuu

SEQ ID NO: 1097322 - RNA, 19 nt, Homo sapiens
  misc_RNA (1)...(19): siRNA sense strand
gaacgcagcagaucuggau

SEQ ID NO: 1097323 - RNA, 19 nt, Homo sapiens
  misc_RNA (1)...(19): siRNA sense strand
uaacagcgaccuaauagau

SEQ ID NO: 1097324 - RNA, 19 nt, Homo sapiens
  misc_RNA (1)...(19): siRNA sense strand
gagaggagcguggcaauau

SEQ ID NO: 1097325 - RNA, 19 nt, Homo sapiens
  misc_RNA (1)...(19): siRNA sense strand
acagcgaccuaauagauuu

SEQ ID NO: 1097326 - RNA, 19 nt, Homo sapiens
  misc_RNA (1)...(19): siRNA sense strand
gcgaagaaggccuggauuu

SEQ ID NO: 1097327 - RNA, 19 nt, Homo sapiens
  misc_RNA (1)...(19): siRNA sense strand
gaagaaaccgaauauuaac

SEQ ID NO: 1097328 - RNA, 19 nt, Homo sapiens
  misc_RNA (1)...(19): siRNA sense strand
gaaaguucacuauuuguag

SEQ ID NO: 1097329 - RNA, 19 nt, Homo sapiens
  misc_RNA (1)...(19): siRNA sense strand
gaaagaaucaaucaguagu

SEQ ID NO: 1097330 - RNA, 19 nt, Homo sapiens
  misc_RNA (1)...(19): siRNA sense strand
gcagaaacucuccaucuuc

SEQ ID NO: 1097331 - RNA, 19 nt, Homo sapiens
  misc_RNA (1)...(19): siRNA sense strand
acgaaagaaucaaucagua

SEQ ID NO: 1097332 - RNA, 19 nt, Homo sapiens
  misc_RNA (1)...(19): siRNA sense strand
agaaauggaucucgaagag

SEQ ID NO: 1097333 - RNA, 19 nt, Homo sapiens
  misc_RNA (1)...(19): siRNA sense strand
guuggaagccgaagauauu

SEQ ID NO: 1097334 - RNA, 19 nt, Homo sapiens
  misc_RNA (1)...(19): siRNA sense strand
cgauucagauaaagaaguu

SEQ ID NO: 1097335 - RNA, 19 nt, Homo sapiens
  misc_RNA (1)...(19): siRNA sense strand
ugacagaagaaaccgaaua

SEQ ID NO: 1097336 - RNA, 19 nt, Homo sapiens
  misc_RNA (1)...(19): siRNA sense strand
gcaaaauccuaauggcuuu

SEQ ID NO: 1097337 - RNA, 19 nt, Homo sapiens
  misc_RNA (1)...(19): siRNA sense strand
cgccagagccucaaguuaa

SEQ ID NO: 1097338 - RNA, 19 nt, Homo sapiens
  misc_RNA (1)...(19): siRNA sense strand
guggagggcacaaacaaua

SEQ ID NO: 1097339 - RNA, 19 nt, Homo sapiens
  misc_RNA (1)...(19): siRNA sense strand
agccggauaugauguauuu

SEQ ID NO: 1097340 - RNA, 19 nt, Homo sapiens
  misc_RNA (1)...(19): siRNA sense strand
caagaaaacaguucacuuu

SEQ ID NO: 1097341 - RNA, 19 nt, Homo sapiens
  misc_RNA (1)...(19): siRNA sense strand
gugcagaagaggaccuuua

SEQ ID NO: 1097342 - RNA, 19 nt, Homo sapiens
  misc_RNA (1)...(19): siRNA sense strand
aagaaggccuggauuucaa

SEQ ID NO: 1097343 - RNA, 19 nt, Homo sapiens
  misc_RNA (1)...(19): siRNA sense strand
ggaacauaauccucuucuu

SEQ ID NO: 1097344 - RNA, 19 nt, Homo sapiens
  misc_RNA (1)...(19): siRNA sense strand
gacagaagaaaccgaauau

SEQ ID NO: 1097345 - RNA, 19 nt, Homo sapiens
  misc_RNA (1)...(19): siRNA sense strand
aagaggaccuuuacacgau

SEQ ID NO: 1097346 - RNA, 19 nt, Homo sapiens
  misc_RNA (1)...(19): siRNA sense strand
aaagggagaccaaagagaa

SEQ ID NO: 1097347 - RNA, 19 nt, Homo sapiens
  misc_RNA (1)...(19): siRNA sense strand
gaacaggagagcaaagucu

SEQ ID NO: 1097348 - RNA, 19 nt, Homo sapiens
  misc_RNA (1)...(19): siRNA sense strand
auaaagaaguuccuaucga

SEQ ID NO: 1097349 - RNA, 19 nt, Homo sapiens
  misc_RNA (1)...(19): siRNA sense strand
uaagauggacaaacaugaa

SEQ ID NO: 1097350 - RNA, 19 nt, Homo sapiens
  misc_RNA (1)...(19): siRNA sense strand
gcccaagaguggcaaagga

SEQ ID NO: 1097351 - RNA, 19 nt, Homo sapiens
  misc_RNA (1)...(19): siRNA sense strand
gaaaacaguucacuuugag

SEQ ID NO: 1097352 - RNA, 19 nt, Homo sapiens
  misc_RNA (1)...(19): siRNA sense strand
gagcaaagucuucguucug

SEQ ID NO: 1097353 - RNA, 19 nt, Homo sapiens
  misc_RNA (1)...(19): siRNA sense strand
aguaagaaccugucccuuu

SEQ ID NO: 1097354 - RNA, 19 nt, Homo sapiens
  misc_RNA (1)...(19): siRNA sense strand
acucauaggucuucggaau

SEQ ID NO: 1097355 - RNA, 19 nt, Homo sapiens
  misc_RNA (1)...(19): siRNA sense strand
uuuggaggcuuauguagaa

SEQ ID NO: 1097356 - RNA, 19 nt, Homo sapiens
  misc_RNA (1)...(19): siRNA sense strand
gggcacagacucagacuca

SEQ ID NO: 1097357 - RNA, 19 nt, Homo sapiens
  misc_RNA (1)...(19): siRNA sense strand
ccacguagaaaguucacua

SEQ ID NO: 1097358 - RNA, 19 nt, Homo sapiens
  misc_RNA (1)...(19): siRNA sense strand
ccgagagcaugaaggaauu

SEQ ID NO: 1097359 - RNA, 19 nt, Homo sapiens
  misc_RNA (1)...(19): siRNA sense strand
gaagacaucaugguugaca

SEQ ID NO: 1097360 - RNA, 19 nt, Homo sapiens
  misc_RNA (1)...(19): siRNA sense strand
uagaggagggagacuauuu

SEQ ID NO: 1097361 - RNA, 19 nt, Homo sapiens
  misc_RNA (1)...(19): siRNA sense strand
uaauggugcuuuagagagu

SEQ ID NO: 1097362 - RNA, 19 nt, Homo sapiens
  misc_RNA (1)...(19): siRNA sense strand
ggagagcaaagucuucguu

SEQ ID NO: 1097363 - RNA, 19 nt, Homo sapiens
  misc_RNA (1)...(19): siRNA sense strand
gcagauggcaacccuucuu

SEQ ID NO: 1097364 - RNA, 19 nt, Homo sapiens
  misc_RNA (1)...(19): siRNA sense strand
caaaguuccuucaccucau

SEQ ID NO: 1097365 - RNA, 19 nt, Homo sapiens
  misc_RNA (1)...(19): siRNA sense strand
gcacagacucagacucauc

SEQ ID NO: 1097366 - RNA, 19 nt, Homo sapiens
  misc_RNA (1)...(19): siRNA sense strand
gccaacagcucaggagaag

SEQ ID NO: 1097367 - RNA, 19 nt, Homo sapiens
  misc_RNA (1)...(19): siRNA sense strand
aaguuaagauggacaaaca

SEQ ID NO: 1097368 - RNA, 19 nt, Homo sapiens
  misc_RNA (1)...(19): siRNA sense strand
gaguucaugcaccagauua

SEQ ID NO: 1097369 - RNA, 19 nt, Homo sapiens
  misc_RNA (1)...(19): siRNA sense strand
gaaaauuccacacgagaaa

SEQ ID NO: 1097370 - RNA, 19 nt, Homo sapiens
  misc_RNA (1)...(19): siRNA sense strand
ggagugggcuggcuuuccu

SEQ ID NO: 1097371 - RNA, 19 nt, Homo sapiens
  misc_RNA (1)...(19): siRNA sense strand
uuuggaagauagcaaugua

SEQ ID NO: 1097372 - RNA, 19 nt, Homo sapiens
  misc_RNA (1)...(19): siRNA sense strand
gcgaccaggugcuguaucu

SEQ ID NO: 1097373 - RNA, 19 nt, Homo sapiens
  misc_RNA (1)...(19): siRNA sense strand
gccagagccucaaguuaag

SEQ ID NO: 1097374 - RNA, 19 nt, Homo sapiens
  misc_RNA (1)...(19): siRNA sense strand
gacaaaaccugacgaggau

SEQ ID NO: 1097375 - RNA, 19 nt, Homo sapiens
  misc_RNA (1)...(19): siRNA sense strand
uugaagccaucccauuaaa

SEQ ID NO: 1097376 - RNA, 19 nt, Homo sapiens
  misc_RNA (1)...(19): siRNA sense strand
gaaggaauuccgccuggau

SEQ ID NO: 1097377 - RNA, 19 nt, Homo sapiens
  misc_RNA (1)...(19): siRNA sense strand
caggcaaccucagcagaaa

SEQ ID NO: 1097378 - RNA, 19 nt, Homo sapiens
  misc_RNA (1)...(19): siRNA sense strand
cgaaagaaucaaucaguag

SEQ ID NO: 1097379 - RNA, 19 nt, Homo sapiens
  misc_RNA (1)...(19): siRNA sense strand
ggaagagggagaagacgau

SEQ ID NO: 1097380 - RNA, 19 nt, Homo sapiens
  misc_RNA (1)...(19): siRNA sense strand
ccaccacccuccaaagucu

SEQ ID NO: 1097381 - RNA, 19 nt, Homo sapiens
  misc_RNA (1)...(19): siRNA sense strand
ccuacacuguuaaccauga

SEQ ID NO: 1097382 - RNA, 19 nt, Homo sapiens
  misc_RNA (1)...(19): siRNA sense strand
cacaguuucuagaacguuu

SEQ ID NO: 1097383 - RNA, 19 nt, Homo sapiens
  misc_RNA (1)...(19): siRNA sense strand
gcaaagggagaccaaagag

SEQ ID NO: 1097384 - RNA, 19 nt, Homo sapiens
  misc_RNA (1)...(19): siRNA sense strand
cgaagaaggccuggauuuc

SEQ ID NO: 1097385 - RNA, 19 nt, Homo sapiens
  misc_RNA (1)...(19): siRNA sense strand
gccgauuccuuccagauca

SEQ ID NO: 1097386 - RNA, 19 nt, Homo sapiens
  misc_RNA (1)...(19): siRNA sense strand
cauugaugcagcagaaaua

SEQ ID NO: 1097387 - RNA, 19 nt, Homo sapiens
  misc_RNA (1)...(19): siRNA sense strand
guaacgaaagaaucaauca

SEQ ID NO: 1097388 - RNA, 19 nt, Homo sapiens
  misc_RNA (1)...(19): siRNA sense strand
gugcaacccaccucuagaa

SEQ ID NO: 1097389 - RNA, 19 nt, Homo sapiens
  misc_RNA (1)...(19): siRNA sense strand
caaagggagaccaaagaga

SEQ ID NO: 1097390 - RNA, 19 nt, Homo sapiens
  misc_RNA (1)...(19): siRNA sense strand
ucaaagguuuccgucauuc

SEQ ID NO: 1097391 - RNA, 19 nt, Homo sapiens
  misc_RNA (1)...(19): siRNA sense strand
ucucaaagguuuccgucau

SEQ ID NO: 1097392 - RNA, 19 nt, Homo sapiens
  misc_RNA (1)...(19): siRNA sense strand
ucaggacuccggagaagaa

SEQ ID NO: 1097393 - RNA, 19 nt, Homo sapiens
  misc_RNA (1)...(19): siRNA sense strand
aaaguuccuucaccucaug

SEQ ID NO: 1097394 - RNA, 19 nt, Homo sapiens
  misc_RNA (1)...(19): siRNA sense strand
agaaaacaguucacuuuga

SEQ ID NO: 1097395 - RNA, 19 nt, Homo sapiens
  misc_RNA (1)...(19): siRNA sense strand
ucuccagaauccuccauuu

SEQ ID NO: 1097396 - RNA, 19 nt, Homo sapiens
  misc_RNA (1)...(19): siRNA sense strand
ggaguuggaagccgaagau

SEQ ID NO: 1097397 - RNA, 19 nt, Homo sapiens
  misc_RNA (1)...(19): siRNA sense strand
gaaguguucaauccucaga

SEQ ID NO: 1097398 - RNA, 19 nt, Homo sapiens
  misc_RNA (1)...(19): siRNA sense strand
gcaaggagaugaugaagga

SEQ ID NO: 1097399 - RNA, 19 nt, Homo sapiens
  misc_RNA (1)...(19): siRNA sense strand
ccaagaaguugcucaagua

SEQ ID NO: 1097400 - RNA, 19 nt, Homo sapiens
  misc_RNA (1)...(19): siRNA sense strand
gcuggagaauggcgacaua

SEQ ID NO: 1097401 - RNA, 19 nt, Homo sapiens
  misc_RNA (1)...(19): siRNA sense strand
ggagaauggcgacauaaau

SEQ ID NO: 1097402 - RNA, 19 nt, Homo sapiens
  misc_RNA (1)...(19): siRNA sense strand
cccacuaccuucugccuua

SEQ ID NO: 1097403 - RNA, 19 nt, Homo sapiens
  misc_RNA (1)...(19): siRNA sense strand
gagaauggcgacauaaauc

SEQ ID NO: 1097404 - RNA, 19 nt, Homo sapiens
  misc_RNA (1)...(19): siRNA sense strand
gaagcacaccgugguagua

SEQ ID NO: 1097405 - RNA, 19 nt, Homo sapiens
  misc_RNA (1)...(19): siRNA sense strand
gcucagugauccagguguu

SEQ ID NO: 1097406 - RNA, 19 nt, Homo sapiens
  misc_RNA (1)...(19): siRNA sense strand
gcuacgugauucuggauau

SEQ ID NO: 1097407 - RNA, 19 nt, Homo sapiens
  misc_RNA (1)...(19): siRNA sense strand
cgaguggagugucaccaaa

SEQ ID NO: 1097408 - RNA, 19 nt, Homo sapiens
  misc_RNA (1)...(19): siRNA sense strand
agaaguugcucaaguacau

SEQ ID NO: 1097409 - RNA, 19 nt, Homo sapiens
  misc_RNA (1)...(19): siRNA sense strand
gaaggagacguucaaguac

SEQ ID NO: 1097410 - RNA, 19 nt, Homo sapiens
  misc_RNA (1)...(19): siRNA sense strand
ggauaccgcuacgugauuc

SEQ ID NO: 1097411 - RNA, 19 nt, Homo sapiens
  misc_RNA (1)...(19): siRNA sense strand
gagauucgcaaggagauga

SEQ ID NO: 1097412 - RNA, 19 nt, Homo sapiens
  misc_RNA (1)...(19): siRNA sense strand
gggauaccgcuacgugauu

SEQ ID NO: 1097413 - RNA, 19 nt, Homo sapiens
  misc_RNA (1)...(19): siRNA sense strand
gcacaccgugguaguauac

SEQ ID NO: 1097414 - RNA, 19 nt, Homo sapiens
  misc_RNA (1)...(19): siRNA sense strand
gcugggcugugcggugauu

SEQ ID NO: 1097415 - RNA, 19 nt, Homo sapiens
  misc_RNA (1)...(19): siRNA sense strand
aggagacguucaaguacuu

SEQ ID NO: 1097416 - RNA, 19 nt, Homo sapiens
  misc_RNA (1)...(19): siRNA sense strand
accaagaaguugcucaagu

SEQ ID NO: 1097417 - RNA, 19 nt, Homo sapiens
  misc_RNA (1)...(19): siRNA sense strand
cuucggcacugaggucuug

SEQ ID NO: 1097418 - RNA, 19 nt, Homo sapiens
  misc_RNA (1)...(19): siRNA sense strand
caugaagcacaccguggua

SEQ ID NO: 1097419 - RNA, 19 nt, Homo sapiens
  misc_RNA (1)...(19): siRNA sense strand
uguuugagaccaagaaguu

SEQ ID NO: 1097420 - RNA, 19 nt, Homo sapiens
  misc_RNA (1)...(19): siRNA sense strand
uggagaauggcgacauaaa

SEQ ID NO: 1097421 - RNA, 19 nt, Homo sapiens
  misc_RNA (1)...(19): siRNA sense strand
gcgaguggagugucaccaa

SEQ ID NO: 1097422 - RNA, 19 nt, Homo sapiens
  misc_RNA (1)...(19): siRNA sense strand
gaaguugcucaaguacaug

SEQ ID NO: 1097423 - RNA, 19 nt, Homo sapiens
  misc_RNA (1)...(19): siRNA sense strand
caagaaguugcucaaguac

SEQ ID NO: 1097424 - RNA, 19 nt, Homo sapiens
  misc_RNA (1)...(19): siRNA sense strand
aaggagacguucaaguacu

SEQ ID NO: 1097425 - RNA, 19 nt, Homo sapiens
  misc_RNA (1)...(19): siRNA sense strand
ucuaccugcucacccacua

SEQ ID NO: 1097426 - RNA, 19 nt, Homo sapiens
  misc_RNA (1)...(19): siRNA sense strand
gcagagaucuaccauguaa

SEQ ID NO: 1097427 - RNA, 19 nt, Homo sapiens
  misc_RNA (1)...(19): siRNA sense strand
caacagcacuuaugggauu

SEQ ID NO: 1097428 - RNA, 19 nt, Homo sapiens
  misc_RNA (1)...(19): siRNA sense strand
gcagcaagcuccugaugaa

SEQ ID NO: 1097429 - RNA, 19 nt, Homo sapiens
  misc_RNA (1)...(19): siRNA sense strand
gaaccacaauguuaacaau

SEQ ID NO: 1097430 - RNA, 19 nt, Homo sapiens
  misc_RNA (1)...(19): siRNA sense strand
gggcagagaucuaccaugu

SEQ ID NO: 1097431 - RNA, 19 nt, Homo sapiens
  misc_RNA (1)...(19): siRNA sense strand
gcaacaacauggacaaauc

SEQ ID NO: 1097432 - RNA, 19 nt, Homo sapiens
  misc_RNA (1)...(19): siRNA sense strand
ggagcgcacuagaguuuaa

SEQ ID NO: 1097433 - RNA, 19 nt, Homo sapiens
  misc_RNA (1)...(19): siRNA sense strand
gaacagggagcaagagguu

SEQ ID NO: 1097434 - RNA, 19 nt, Homo sapiens
  misc_RNA (1)...(19): siRNA sense strand
ggaauugucaucuuuggaa

SEQ ID NO: 1097435 - RNA, 19 nt, Homo sapiens
  misc_RNA (1)...(19): siRNA sense strand
cagcuggguuggacugaua

SEQ ID NO: 1097436 - RNA, 19 nt, Homo sapiens
  misc_RNA (1)...(19): siRNA sense strand
gcaagcuccugaugaaauc

SEQ ID NO: 1097437 - RNA, 19 nt, Homo sapiens
  misc_RNA (1)...(19): siRNA sense strand
ggagccaaauucuaccauu

SEQ ID NO: 1097438 - RNA, 19 nt, Homo sapiens
  misc_RNA (1)...(19): siRNA sense strand
gagccaaauucuaccauuc

SEQ ID NO: 1097439 - RNA, 19 nt, Homo sapiens
  misc_RNA (1)...(19): siRNA sense strand
ugaaguagcagcaaggaaa

SEQ ID NO: 1097440 - RNA, 19 nt, Homo sapiens
  misc_RNA (1)...(19): siRNA sense strand
gcccauacauguuuauucu

SEQ ID NO: 1097441 - RNA, 19 nt, Homo sapiens
  misc_RNA (1)...(19): siRNA sense strand
aaacuuagcucuggaugag

SEQ ID NO: 1097442 - RNA, 19 nt, Homo sapiens
  misc_RNA (1)...(19): siRNA sense strand
ggaugaggcugggcagaga

SEQ ID NO: 1097443 - RNA, 19 nt, Homo sapiens
  misc_RNA (1)...(19): siRNA sense strand
gagagauccugcauacagu

SEQ ID NO: 1097444 - RNA, 19 nt, Homo sapiens
  misc_RNA (1)...(19): siRNA sense strand
gaagguguuuucguaaaua

SEQ ID NO: 1097445 - RNA, 19 nt, Homo sapiens
  misc_RNA (1)...(19): siRNA sense strand
gaaacuuagcucuggauga

SEQ ID NO: 1097446 - RNA, 19 nt, Homo sapiens
  misc_RNA (1)...(19): siRNA sense strand
acugauagcugucauaugc

SEQ ID NO: 1097447 - RNA, 19 nt, Homo sapiens
  misc_RNA (1)...(19): siRNA sense strand
caacauggacaaaucagau

SEQ ID NO: 1097448 - RNA, 19 nt, Homo sapiens
  misc_RNA (1)...(19): siRNA sense strand
gcugucauaugcuauuugu

SEQ ID NO: 1097449 - RNA, 19 nt, Homo sapiens
  misc_RNA (1)...(19): siRNA sense strand
caacaacauggacaaauca

SEQ ID NO: 1097450 - RNA, 19 nt, Homo sapiens
  misc_RNA (1)...(19): siRNA sense strand
uaaauacgcuuggccuucu

SEQ ID NO: 1097451 - RNA, 19 nt, Homo sapiens
  misc_RNA (1)...(19): siRNA sense strand
ggacugauagcugucauau

SEQ ID NO: 1097452 - RNA, 19 nt, Homo sapiens
  misc_RNA (1)...(19): siRNA sense strand
caaauucuaccauucuuca

SEQ ID NO: 1097453 - RNA, 19 nt, Homo sapiens
  misc_RNA (1)...(19): siRNA sense strand
uuugagaaccacaauguua

SEQ ID NO: 1097454 - RNA, 19 nt, Homo sapiens
  misc_RNA (1)...(19): siRNA sense strand
ccugagagauccugcauac

SEQ ID NO: 1097455 - RNA, 19 nt, Homo sapiens
  misc_RNA (1)...(19): siRNA sense strand
gccagaagguguuuucgua

SEQ ID NO: 1097456 - RNA, 19 nt, Homo sapiens
  misc_RNA (1)...(19): siRNA sense strand
cuaccauucuucauccaaa

SEQ ID NO: 1097457 - RNA, 19 nt, Homo sapiens
  misc_RNA (1)...(19): siRNA sense strand
cuuaugggauugacagaga

SEQ ID NO: 1097458 - RNA, 19 nt, Homo sapiens
  misc_RNA (1)...(19): siRNA sense strand
gaugggagcgcacuagagu

SEQ ID NO: 1097459 - RNA, 19 nt, Homo sapiens
  misc_RNA (1)...(19): siRNA sense strand
cuaaggagccaaauucuac

SEQ ID NO: 1097460 - RNA, 19 nt, Homo sapiens
  misc_RNA (1)...(19): siRNA sense strand
gccaaauucuaccauucuu

SEQ ID NO: 1097461 - RNA, 19 nt, Homo sapiens
  misc_RNA (1)...(19): siRNA sense strand
ggauugacagagaaacuga

SEQ ID NO: 1097462 - RNA, 19 nt, Homo sapiens
  misc_RNA (1)...(19): siRNA sense strand
gcaucgccaucaucgucua

SEQ ID NO: 1097463 - RNA, 19 nt, Homo sapiens
  misc_RNA (1)...(19): siRNA sense strand
caccagaccgcaauggaaa

SEQ ID NO: 1097464 - RNA, 19 nt, Homo sapiens
  misc_RNA (1)...(19): siRNA sense strand
ugagagauccugcauacag

SEQ ID NO: 1097465 - RNA, 19 nt, Homo sapiens
  misc_RNA (1)...(19): siRNA sense strand
uagccaauauguacagucu

SEQ ID NO: 1097466 - RNA, 19 nt, Homo sapiens
  misc_RNA (1)...(19): siRNA sense strand
ccuaaggagccaaauucua

SEQ ID NO: 1097467 - RNA, 19 nt, Homo sapiens
  misc_RNA (1)...(19): siRNA sense strand
gauccugcauacaguacau

SEQ ID NO: 1097468 - RNA, 19 nt, Homo sapiens
  misc_RNA (1)...(19): siRNA sense strand
ugggagcgcacuagaguuu

SEQ ID NO: 1097469 - RNA, 19 nt, Homo sapiens
  misc_RNA (1)...(19): siRNA sense strand
ggucaccggcuucgucuuc

SEQ ID NO: 1097470 - RNA, 19 nt, Homo sapiens
  misc_RNA (1)...(19): siRNA sense strand
uacagcuucuuucagguuu

SEQ ID NO: 1097471 - RNA, 19 nt, Homo sapiens
  misc_RNA (1)...(19): siRNA sense strand
auccauccaugcaggguua

SEQ ID NO: 1097472 - RNA, 19 nt, Homo sapiens
  misc_RNA (1)...(19): siRNA sense strand
cagaagguguuuucguaaa

SEQ ID NO: 1097473 - RNA, 19 nt, Homo sapiens
  misc_RNA (1)...(19): siRNA sense strand
uugagaaccacaauguuaa

SEQ ID NO: 1097474 - RNA, 19 nt, Homo sapiens
  misc_RNA (1)...(19): siRNA sense strand
caaauggaggcacugaaca

SEQ ID NO: 1097475 - RNA, 19 nt, Homo sapiens
  misc_RNA (1)...(19): siRNA sense strand
ucaccagaccgcaauggaa

SEQ ID NO: 1097476 - RNA, 19 nt, Homo sapiens
  misc_RNA (1)...(19): siRNA sense strand
ugacagagaaacugauuuu

SEQ ID NO: 1097477 - RNA, 19 nt, Homo sapiens
  misc_RNA (1)...(19): siRNA sense strand
gauugcaacagcacuuaug

SEQ ID NO: 1097478 - RNA, 19 nt, Homo sapiens
  misc_RNA (1)...(19): siRNA sense strand
gugauugcaacagcacuua

SEQ ID NO: 1097479 - RNA, 19 nt, Homo sapiens
  misc_RNA (1)...(19): siRNA sense strand
caauggaaacguccuaagg

SEQ ID NO: 1097480 - RNA, 19 nt, Homo sapiens
  misc_RNA (1)...(19): siRNA sense strand
gcugccauucuugcaauua

SEQ ID NO: 1097481 - RNA, 19 nt, Homo sapiens
  misc_RNA (1)...(19): siRNA sense strand
ccaaauggaggcacugaac

SEQ ID NO: 1097482 - RNA, 19 nt, Homo sapiens
  misc_RNA (1)...(19): siRNA sense strand
gcaauggaaacguccuaag

SEQ ID NO: 1097483 - RNA, 19 nt, Homo sapiens
  misc_RNA (1)...(19): siRNA sense strand
ggcagagaucuaccaugua

SEQ ID NO: 1097484 - RNA, 19 nt, Homo sapiens
  misc_RNA (1)...(19): siRNA sense strand
cugccauucuugcaauuau

SEQ ID NO: 1097485 - RNA, 19 nt, Homo sapiens
  misc_RNA (1)...(19): siRNA sense strand
gggagcgcacuagaguuua

SEQ ID NO: 1097486 - RNA, 19 nt, Homo sapiens
  misc_RNA (1)...(19): siRNA sense strand
gaaguagcagcaaggaaaa

SEQ ID NO: 1097487 - RNA, 19 nt, Homo sapiens
  misc_RNA (1)...(19): siRNA sense strand
uuacagcuucuuucagguu

SEQ ID NO: 1097488 - RNA, 19 nt, Homo sapiens
  misc_RNA (1)...(19): siRNA sense strand
cauaugcuauuuguuacag

SEQ ID NO: 1097489 - RNA, 19 nt, Homo sapiens
  misc_RNA (1)...(19): siRNA sense strand
ucuccgagcauuucucaug

SEQ ID NO: 1097490 - RNA, 19 nt, Homo sapiens
  misc_RNA (1)...(19): siRNA sense strand
gagaaccacaauguuaaca

SEQ ID NO: 1097491 - RNA, 19 nt, Homo sapiens
  misc_RNA (1)...(19): siRNA sense strand
gucauaugcuauuuguuac

SEQ ID NO: 1097492 - RNA, 19 nt, Homo sapiens
  misc_RNA (1)...(19): siRNA sense strand
agagauccugcauacagua

SEQ ID NO: 1097493 - RNA, 19 nt, Homo sapiens
  misc_RNA (1)...(19): siRNA sense strand
uaccauucuucauccaaau

SEQ ID NO: 1097494 - RNA, 19 nt, Homo sapiens
  misc_RNA (1)...(19): siRNA sense strand
ccaaauucuaccauucuuc

SEQ ID NO: 1097495 - RNA, 19 nt, Homo sapiens
  misc_RNA (1)...(19): siRNA sense strand
gggaugggagcgcacuaga

SEQ ID NO: 1097496 - RNA, 19 nt, Homo sapiens
  misc_RNA (1)...(19): siRNA sense strand
gaggcugggcagagaucua

SEQ ID NO: 1097497 - RNA, 19 nt, Homo sapiens
  misc_RNA (1)...(19): siRNA sense strand
ccguggaccuggaaaugca

SEQ ID NO: 1097498 - RNA, 19 nt, Homo sapiens
  misc_RNA (1)...(19): siRNA sense strand
ucaaagcucuggagaauua

SEQ ID NO: 1097499 - RNA, 19 nt, Homo sapiens
  misc_RNA (1)...(19): siRNA sense strand
gaaauuagguggucaaauc

SEQ ID NO: 1097500 - RNA, 19 nt, Homo sapiens
  misc_RNA (1)...(19): siRNA sense strand
gaagauuccugcacuauuu

SEQ ID NO: 1097501 - RNA, 19 nt, Homo sapiens
  misc_RNA (1)...(19): siRNA sense strand
gaagaaagacagcaauuua

SEQ ID NO: 1097502 - RNA, 19 nt, Homo sapiens
  misc_RNA (1)...(19): siRNA sense strand
gaacugaacacuaaaguaa

SEQ ID NO: 1097503 - RNA, 19 nt, Homo sapiens
  misc_RNA (1)...(19): siRNA sense strand
ggaaaugaguuagcuauaa

SEQ ID NO: 1097504 - RNA, 19 nt, Homo sapiens
  misc_RNA (1)...(19): siRNA sense strand
gaaagaaaccaaaugagua

SEQ ID NO: 1097505 - RNA, 19 nt, Homo sapiens
  misc_RNA (1)...(19): siRNA sense strand
gaaagaggguuaauuuauc

SEQ ID NO: 1097506 - RNA, 19 nt, Homo sapiens
  misc_RNA (1)...(19): siRNA sense strand
gaacgaccauuaacccuuu

SEQ ID NO: 1097507 - RNA, 19 nt, Homo sapiens
  misc_RNA (1)...(19): siRNA sense strand
aaacaacucuucugggaua

SEQ ID NO: 1097508 - RNA, 19 nt, Homo sapiens
  misc_RNA (1)...(19): siRNA sense strand
ggauaaagcuagauucuuc

SEQ ID NO: 1097509 - RNA, 19 nt, Homo sapiens
  misc_RNA (1)...(19): siRNA sense strand
aaaggugacugaagaaaua

SEQ ID NO: 1097510 - RNA, 19 nt, Homo sapiens
  misc_RNA (1)...(19): siRNA sense strand
gaugaaagcagucaagaua

SEQ ID NO: 1097511 - RNA, 19 nt, Homo sapiens
  misc_RNA (1)...(19): siRNA sense strand
gaaauguucucaaauguag

SEQ ID NO: 1097512 - RNA, 19 nt, Homo sapiens
  misc_RNA (1)...(19): siRNA sense strand
gcaaagaagacuauaguuu

SEQ ID NO: 1097513 - RNA, 19 nt, Homo sapiens
  misc_RNA (1)...(19): siRNA sense strand
uagaagaucuggaagaauu

SEQ ID NO: 1097514 - RNA, 19 nt, Homo sapiens
  misc_RNA (1)...(19): siRNA sense strand
gagcuuggauuuaagauau

SEQ ID NO: 1097515 - RNA, 19 nt, Homo sapiens
  misc_RNA (1)...(19): siRNA sense strand
gaagaaaucaaguucagua

SEQ ID NO: 1097516 - RNA, 19 nt, Homo sapiens
  misc_RNA (1)...(19): siRNA sense strand
gcaaauacuugugauauca

SEQ ID NO: 1097517 - RNA, 19 nt, Homo sapiens
  misc_RNA (1)...(19): siRNA sense strand
ggaaggaauuuacugaaga

SEQ ID NO: 1097518 - RNA, 19 nt, Homo sapiens
  misc_RNA (1)...(19): siRNA sense strand
gggaaagagugcaagauaa

SEQ ID NO: 1097519 - RNA, 19 nt, Homo sapiens
  misc_RNA (1)...(19): siRNA sense strand
caaacaagguguaaacuca

SEQ ID NO: 1097520 - RNA, 19 nt, Homo sapiens
  misc_RNA (1)...(19): siRNA sense strand
aagaagagcugaauuggaa

SEQ ID NO: 1097521 - RNA, 19 nt, Homo sapiens
  misc_RNA (1)...(19): siRNA sense strand
gaaggaauuuacugaagaa

SEQ ID NO: 1097522 - RNA, 19 nt, Homo sapiens
  misc_RNA (1)...(19): siRNA sense strand
gcagaaagaccuuaaugaa

SEQ ID NO: 1097523 - RNA, 19 nt, Homo sapiens
  misc_RNA (1)...(19): siRNA sense strand
uaaauucucucucugaguu

SEQ ID NO: 1097524 - RNA, 19 nt, Homo sapiens
  misc_RNA (1)...(19): siRNA sense strand
ggaaauagcagaaauguac

SEQ ID NO: 1097525 - RNA, 19 nt, Homo sapiens
  misc_RNA (1)...(19): siRNA sense strand
ccagugaacuuauaggaaa

SEQ ID NO: 1097526 - RNA, 19 nt, Homo sapiens
  misc_RNA (1)...(19): siRNA sense strand
uagcagaaauguacaacua

SEQ ID NO: 1097527 - RNA, 19 nt, Homo sapiens
  misc_RNA (1)...(19): siRNA sense strand
gaacauggccuugauaaca

SEQ ID NO: 1097528 - RNA, 19 nt, Homo sapiens
  misc_RNA (1)...(19): siRNA sense strand
ggaaagagugcaagauaaa

SEQ ID NO: 1097529 - RNA, 19 nt, Homo sapiens
  misc_RNA (1)...(19): siRNA sense strand
gaaacaauccagagacaaa

SEQ ID NO: 1097530 - RNA, 19 nt, Homo sapiens
  misc_RNA (1)...(19): siRNA sense strand
caaauucuaucucaguuga

SEQ ID NO: 1097531 - RNA, 19 nt, Homo sapiens
  misc_RNA (1)...(19): siRNA sense strand
gaaaugcagagauguagua

SEQ ID NO: 1097532 - RNA, 19 nt, Homo sapiens
  misc_RNA (1)...(19): siRNA sense strand
gaaagacagcaauuuauga

SEQ ID NO: 1097533 - RNA, 19 nt, Homo sapiens
  misc_RNA (1)...(19): siRNA sense strand
gacccaacauuuaguuuaa

SEQ ID NO: 1097534 - RNA, 19 nt, Homo sapiens
  misc_RNA (1)...(19): siRNA sense strand
aaaugaagcuccaauugaa

SEQ ID NO: 1097535 - RNA, 19 nt, Homo sapiens
  misc_RNA (1)...(19): siRNA sense strand
gaaauugucagaaacagaa

SEQ ID NO: 1097536 - RNA, 19 nt, Homo sapiens
  misc_RNA (1)...(19): siRNA sense strand
caugcaaacucuagagaua

SEQ ID NO: 1097537 - RNA, 19 nt, Homo sapiens
  misc_RNA (1)...(19): siRNA sense strand
aaagaaagaugaugacaca

SEQ ID NO: 1097538 - RNA, 19 nt, Homo sapiens
  misc_RNA (1)...(19): siRNA sense strand
gcgcaauaauguauacuuu

SEQ ID NO: 1097539 - RNA, 19 nt, Homo sapiens
  misc_RNA (1)...(19): siRNA sense strand
gaaaucaaguucaguacuc

SEQ ID NO: 1097540 - RNA, 19 nt, Homo sapiens
  misc_RNA (1)...(19): siRNA sense strand
gaagauauagcaaaugaug

SEQ ID NO: 1097541 - RNA, 19 nt, Homo sapiens
  misc_RNA (1)...(19): siRNA sense strand
caaaugagaagacacaauu

SEQ ID NO: 1097542 - RNA, 19 nt, Homo sapiens
  misc_RNA (1)...(19): siRNA sense strand
gcaacuaauucaaauguca

SEQ ID NO: 1097543 - RNA, 19 nt, Homo sapiens
  misc_RNA (1)...(19): siRNA sense strand
ucagagagcccuauuagaa

SEQ ID NO: 1097544 - RNA, 19 nt, Homo sapiens
  misc_RNA (1)...(19): siRNA sense strand
ggaaauguucucaaaugua

SEQ ID NO: 1097545 - RNA, 19 nt, Homo sapiens
  misc_RNA (1)...(19): siRNA sense strand
gaugauggguguuguuugu

SEQ ID NO: 1097546 - RNA, 19 nt, Homo sapiens
  misc_RNA (1)...(19): siRNA sense strand
gaggauaucagucauuaaa

SEQ ID NO: 1097547 - RNA, 19 nt, Homo sapiens
  misc_RNA (1)...(19): siRNA sense strand
agaaauagcgauacccuua

SEQ ID NO: 1097548 - RNA, 19 nt, Homo sapiens
  misc_RNA (1)...(19): siRNA sense strand
uaaacgaccuguaauccuu

SEQ ID NO: 1097549 - RNA, 19 nt, Homo sapiens
  misc_RNA (1)...(19): siRNA sense strand
ggacuuuccugaucaaucu

SEQ ID NO: 1097550 - RNA, 19 nt, Homo sapiens
  misc_RNA (1)...(19): siRNA sense strand
ugaauugucuugcuaggaa

SEQ ID NO: 1097551 - RNA, 19 nt, Homo sapiens
  misc_RNA (1)...(19): siRNA sense strand
ugaaugaugugcuaggaaa

SEQ ID NO: 1097552 - RNA, 19 nt, Homo sapiens
  misc_RNA (1)...(19): siRNA sense strand
gcagccaacuuaucggaaa

SEQ ID NO: 1097553 - RNA, 19 nt, Homo sapiens
  misc_RNA (1)...(19): siRNA sense strand
gaagagauccaaccaacga

SEQ ID NO: 1097554 - RNA, 19 nt, Homo sapiens
  misc_RNA (1)...(19): siRNA sense strand
agaaaugacuuuaguugga

SEQ ID NO: 1097555 - RNA, 19 nt, Homo sapiens
  misc_RNA (1)...(19): siRNA sense strand
gauaacauguccuucuuag

SEQ ID NO: 1097556 - RNA, 19 nt, Homo sapiens
  misc_RNA (1)...(19): siRNA sense strand
guucucaaauguagaguuu

SEQ ID NO: 1097557 - RNA, 19 nt, Homo sapiens
  misc_RNA (1)...(19): siRNA sense strand
acaagugacccaacauuua

SEQ ID NO: 1097558 - RNA, 19 nt, Homo sapiens
  misc_RNA (1)...(19): siRNA sense strand
aaaauaagcuccccuaaga

SEQ ID NO: 1097559 - RNA, 19 nt, Homo sapiens
  misc_RNA (1)...(19): siRNA sense strand
gaacugaagacaugcuuug

SEQ ID NO: 1097560 - RNA, 19 nt, Homo sapiens
  misc_RNA (1)...(19): siRNA sense strand
gaaauagcgauacccuuaa

SEQ ID NO: 1097561 - RNA, 19 nt, Homo sapiens
  misc_RNA (1)...(19): siRNA sense strand
cuaaacagauggagaauac

SEQ ID NO: 1097562 - RNA, 19 nt, Homo sapiens
  misc_RNA (1)...(19): siRNA sense strand
gaaauuaguagcgacgaua

SEQ ID NO: 1097563 - RNA, 19 nt, Homo sapiens
  misc_RNA (1)...(19): siRNA sense strand
caagaaacaaguagaggua

SEQ ID NO: 1097564 - RNA, 19 nt, Homo sapiens
  misc_RNA (1)...(19): siRNA sense strand
gaacagaaacaaauuacuc

SEQ ID NO: 1097565 - RNA, 19 nt, Homo sapiens
  misc_RNA (1)...(19): siRNA sense strand
caaagauucuggaacugaa

SEQ ID NO: 1097566 - RNA, 19 nt, Homo sapiens
  misc_RNA (1)...(19): siRNA sense strand
gcauaccaguuaaagauau

SEQ ID NO: 1097567 - RNA, 19 nt, Homo sapiens
  misc_RNA (1)...(19): siRNA sense strand
gcagcccaguuaaaugaua

SEQ ID NO: 1097568 - RNA, 19 nt, Homo sapiens
  misc_RNA (1)...(19): siRNA sense strand
cagaaagaccuuaaugaaa

SEQ ID NO: 1097569 - RNA, 19 nt, Homo sapiens
  misc_RNA (1)...(19): siRNA sense strand
aagaggauaucagucauua

SEQ ID NO: 1097570 - RNA, 19 nt, Homo sapiens
  misc_RNA (1)...(19): siRNA sense strand
ucagucagcagcuaauuua

SEQ ID NO: 1097571 - RNA, 19 nt, Homo sapiens
  misc_RNA (1)...(19): siRNA sense strand
uaacauguccuucuuagau

SEQ ID NO: 1097572 - RNA, 19 nt, Homo sapiens
  misc_RNA (1)...(19): siRNA sense strand
uaaaacaacugcaggaaaa

SEQ ID NO: 1097573 - RNA, 19 nt, Homo sapiens
  misc_RNA (1)...(19): siRNA sense strand
ugacacaucuaccugcaaa

SEQ ID NO: 1097574 - RNA, 19 nt, Homo sapiens
  misc_RNA (1)...(19): siRNA sense strand
gagagucgucuuugcaaua

SEQ ID NO: 1097575 - RNA, 19 nt, Homo sapiens
  misc_RNA (1)...(19): siRNA sense strand
aaagcuagauucuuccaaa

SEQ ID NO: 1097576 - RNA, 19 nt, Homo sapiens
  misc_RNA (1)...(19): siRNA sense strand
gaaaccaaaugaguauuca

SEQ ID NO: 1097577 - RNA, 19 nt, Homo sapiens
  misc_RNA (1)...(19): siRNA sense strand
uaucugauccugagaauga

SEQ ID NO: 1097578 - RNA, 19 nt, Homo sapiens
  misc_RNA (1)...(19): siRNA sense strand
ucucugaguucauggauaa

SEQ ID NO: 1097579 - RNA, 19 nt, Homo sapiens
  misc_RNA (1)...(19): siRNA sense strand
cagacuaaaucuacaaaug

SEQ ID NO: 1097580 - RNA, 19 nt, Homo sapiens
  misc_RNA (1)...(19): siRNA sense strand
gaacuuauaggaaaugagu

SEQ ID NO: 1097581 - RNA, 19 nt, Homo sapiens
  misc_RNA (1)...(19): siRNA sense strand
aagcgugacuuccuaauga

SEQ ID NO: 1097582 - RNA, 19 nt, Homo sapiens
  misc_RNA (1)...(19): siRNA sense strand
ggaagaaauugucagaaac

SEQ ID NO: 1097583 - RNA, 19 nt, Homo sapiens
  misc_RNA (1)...(19): siRNA sense strand
gaaguaggaagagaugaua

SEQ ID NO: 1097584 - RNA, 19 nt, Homo sapiens
  misc_RNA (1)...(19): siRNA sense strand
gcagaaaacauucaagaua

SEQ ID NO: 1097585 - RNA, 19 nt, Homo sapiens
  misc_RNA (1)...(19): siRNA sense strand
gguaauagacaagcuagua

SEQ ID NO: 1097586 - RNA, 19 nt, Homo sapiens
  misc_RNA (1)...(19): siRNA sense strand
gagucgaucucuucucuau

SEQ ID NO: 1097587 - RNA, 19 nt, Homo sapiens
  misc_RNA (1)...(19): siRNA sense strand
gaaagagaacagccauuga

SEQ ID NO: 1097588 - RNA, 19 nt, Homo sapiens
  misc_RNA (1)...(19): siRNA sense strand
gaaggaagaauggcauaaa

SEQ ID NO: 1097589 - RNA, 19 nt, Homo sapiens
  misc_RNA (1)...(19): siRNA sense strand
aaagaaacguguagaccuu

SEQ ID NO: 1097590 - RNA, 19 nt, Homo sapiens
  misc_RNA (1)...(19): siRNA sense strand
gcagaaauguacaacuagu

SEQ ID NO: 1097591 - RNA, 19 nt, Homo sapiens
  misc_RNA (1)...(19): siRNA sense strand
ugaugaagaugcuggguuu

SEQ ID NO: 1097592 - RNA, 19 nt, Homo sapiens
  misc_RNA (1)...(19): siRNA sense strand
gcgcagugguagacaaauu

SEQ ID NO: 1097593 - RNA, 19 nt, Homo sapiens
  misc_RNA (1)...(19): siRNA sense strand
gaagaaauugucagaaaca

SEQ ID NO: 1097594 - RNA, 19 nt, Homo sapiens
  misc_RNA (1)...(19): siRNA sense strand
caauuuguguuccuucuga

SEQ ID NO: 1097595 - RNA, 19 nt, Homo sapiens
  misc_RNA (1)...(19): siRNA sense strand
aggaagaaauugucagaaa

SEQ ID NO: 1097596 - RNA, 19 nt, Homo sapiens
  misc_RNA (1)...(19): siRNA sense strand
ugaggagguugauguaauu

SEQ ID NO: 1097597 - RNA, 19 nt, Homo sapiens
  misc_RNA (1)...(19): siRNA sense strand
gcaauacuguccuuauaac

SEQ ID NO: 1097598 - RNA, 19 nt, Homo sapiens
  misc_RNA (1)...(19): siRNA sense strand
uaacagaccacuuccaaua

SEQ ID NO: 1097599 - RNA, 19 nt, Homo sapiens
  misc_RNA (1)...(19): siRNA sense strand
gcaacaacaucuuaacaga

SEQ ID NO: 1097600 - RNA, 19 nt, Homo sapiens
  misc_RNA (1)...(19): siRNA sense strand
gaaccgcuaugauguguag

SEQ ID NO: 1097601 - RNA, 19 nt, Homo sapiens
  misc_RNA (1)...(19): siRNA sense strand
cagcagaccugagcagcaa

SEQ ID NO: 1097602 - RNA, 19 nt, Homo sapiens
  misc_RNA (1)...(19): siRNA sense strand
cggcagagcuacccaaacu

SEQ ID NO: 1097603 - RNA, 19 nt, Homo sapiens
  misc_RNA (1)...(19): siRNA sense strand
ccacaacggccuccucuuc

SEQ ID NO: 1097604 - RNA, 19 nt, Homo sapiens
  misc_RNA (1)...(19): siRNA sense strand
caucuuaacagaccacuuc

SEQ ID NO: 1097605 - RNA, 19 nt, Homo sapiens
  misc_RNA (1)...(19): siRNA sense strand
gaagcagagcaccaaggua

SEQ ID NO: 1097606 - RNA, 19 nt, Homo sapiens
  misc_RNA (1)...(19): siRNA sense strand
aagcagagcaccaagguau

SEQ ID NO: 1097607 - RNA, 19 nt, Homo sapiens
  misc_RNA (1)...(19): siRNA sense strand
ucuauaacaagaccaagua

SEQ ID NO: 1097608 - RNA, 19 nt, Homo sapiens
  misc_RNA (1)...(19): siRNA sense strand
ggucgccaaugccaccaaa

SEQ ID NO: 1097609 - RNA, 19 nt, Homo sapiens
  misc_RNA (1)...(19): siRNA sense strand
acagaccacuuccaauaca

SEQ ID NO: 1097610 - RNA, 19 nt, Homo sapiens
  misc_RNA (1)...(19): siRNA sense strand
uaacuuugcccagaauguu

SEQ ID NO: 1097611 - RNA, 19 nt, Homo sapiens
  misc_RNA (1)...(19): siRNA sense strand
ugguggaccucucggcuuu

SEQ ID NO: 1097612 - RNA, 19 nt, Homo sapiens
  misc_RNA (1)...(19): siRNA sense strand
cgacuugaccuacgucuac

SEQ ID NO: 1097613 - RNA, 19 nt, Homo sapiens
  misc_RNA (1)...(19): siRNA sense strand
caaaccagcaagccaggaa

SEQ ID NO: 1097614 - RNA, 19 nt, Homo sapiens
  misc_RNA (1)...(19): siRNA sense strand
cacgccgucuucuuuauga

SEQ ID NO: 1097615 - RNA, 19 nt, Homo sapiens
  misc_RNA (1)...(19): siRNA sense strand
gcuacucggucgccaaugc

SEQ ID NO: 1097616 - RNA, 19 nt, Homo sapiens
  misc_RNA (1)...(19): siRNA sense strand
gccacgccgucuucuuuau

SEQ ID NO: 1097617 - RNA, 19 nt, Homo sapiens
  misc_RNA (1)...(19): siRNA sense strand
gcagagcaccaagguauac

SEQ ID NO: 1097618 - RNA, 19 nt, Homo sapiens
  misc_RNA (1)...(19): siRNA sense strand
gcagcgacuugaccuacgu

SEQ ID NO: 1097619 - RNA, 19 nt, Homo sapiens
  misc_RNA (1)...(19): siRNA sense strand
cagcggcuucuguaacuuu

SEQ ID NO: 1097620 - RNA, 19 nt, Homo sapiens
  misc_RNA (1)...(19): siRNA sense strand
ucaccgaguugucuuuuga

SEQ ID NO: 1097621 - RNA, 19 nt, Homo sapiens
  misc_RNA (1)...(19): siRNA sense strand
uaacaagaccaaguacgau

SEQ ID NO: 1097622 - RNA, 19 nt, Homo sapiens
  misc_RNA (1)...(19): siRNA sense strand
gagcuacucggucgccaau

SEQ ID NO: 1097623 - RNA, 19 nt, Homo sapiens
  misc_RNA (1)...(19): siRNA sense strand
aagguauacuugucacuca

SEQ ID NO: 1097624 - RNA, 19 nt, Homo sapiens
  misc_RNA (1)...(19): siRNA sense strand
agagcuacccaaacucgua

SEQ ID NO: 1097625 - RNA, 19 nt, Homo sapiens
  misc_RNA (1)...(19): siRNA sense strand
gggucuuccucuauaacaa

SEQ ID NO: 1097626 - RNA, 19 nt, Homo sapiens
  misc_RNA (1)...(19): siRNA sense strand
gucagcggcuucuguaacu

SEQ ID NO: 1097627 - RNA, 19 nt, Homo sapiens
  misc_RNA (1)...(19): siRNA sense strand
cugccacgccgucuucuuu

SEQ ID NO: 1097628 - RNA, 19 nt, Homo sapiens
  misc_RNA (1)...(19): siRNA sense strand
guaacuuugcccagaaugu

SEQ ID NO: 1097629 - RNA, 19 nt, Homo sapiens
  misc_RNA (1)...(19): siRNA sense strand
guacgaugcaaaccagcaa

SEQ ID NO: 1097630 - RNA, 19 nt, Homo sapiens
  misc_RNA (1)...(19): siRNA sense strand
ccacgccgucuucuuuaug

SEQ ID NO: 1097631 - RNA, 19 nt, Homo sapiens
  misc_RNA (1)...(19): siRNA sense strand
ggccgcaacaacaucuuaa

SEQ ID NO: 1097632 - RNA, 19 nt, Homo sapiens
  misc_RNA (1)...(19): siRNA sense strand
ccaaguacgaugcaaacca

SEQ ID NO: 1097633 - RNA, 19 nt, Homo sapiens
  misc_RNA (1)...(19): siRNA sense strand
gaccaaguacgaugcaaac

SEQ ID NO: 1097634 - RNA, 19 nt, Homo sapiens
  misc_RNA (1)...(19): siRNA sense strand
caacguccugggcaugaug

SEQ ID NO: 1097635 - RNA, 19 nt, Homo sapiens
  misc_RNA (1)...(19): siRNA sense strand
cuuaacagaccacuuccaa

SEQ ID NO: 1097636 - RNA, 19 nt, Homo sapiens
  misc_RNA (1)...(19): siRNA sense strand
auaacaagaccaaguacga

SEQ ID NO: 1097637 - RNA, 19 nt, Homo sapiens
  misc_RNA (1)...(19): siRNA sense strand
gaagagaaaucccucaugu

SEQ ID NO: 1097638 - RNA, 19 nt, Homo sapiens
  misc_RNA (1)...(19): siRNA sense strand
ggagcaggaugucuuauuu

SEQ ID NO: 1097639 - RNA, 19 nt, Homo sapiens
  misc_RNA (1)...(19): siRNA sense strand
gaagaaggguggagcuaug

SEQ ID NO: 1097640 - RNA, 19 nt, Homo sapiens
  misc_RNA (1)...(19): siRNA sense strand
gaucgaauaugaugaagau

SEQ ID NO: 1097641 - RNA, 19 nt, Homo sapiens
  misc_RNA (1)...(19): siRNA sense strand
gcaaugagaugguguucug

SEQ ID NO: 1097642 - RNA, 19 nt, Homo sapiens
  misc_RNA (1)...(19): siRNA sense strand
gauugacacugacaccuua

SEQ ID NO: 1097643 - RNA, 19 nt, Homo sapiens
  misc_RNA (1)...(19): siRNA sense strand
gggaaugccugaacuagau

SEQ ID NO: 1097644 - RNA, 19 nt, Homo sapiens
  misc_RNA (1)...(19): siRNA sense strand
ccaaagcacagcucacaua

SEQ ID NO: 1097645 - RNA, 19 nt, Homo sapiens
  misc_RNA (1)...(19): siRNA sense strand
caggaugucuuauuuagga

SEQ ID NO: 1097646 - RNA, 19 nt, Homo sapiens
  misc_RNA (1)...(19): siRNA sense strand
gcacagcucacauaggaaa

SEQ ID NO: 1097647 - RNA, 19 nt, Homo sapiens
  misc_RNA (1)...(19): siRNA sense strand
aagcacagcucacauagga

SEQ ID NO: 1097648 - RNA, 19 nt, Homo sapiens
  misc_RNA (1)...(19): siRNA sense strand
gagcaggaugucuuauuua

SEQ ID NO: 1097649 - RNA, 19 nt, Homo sapiens
  misc_RNA (1)...(19): siRNA sense strand
cgaauaugaugaagauguu

SEQ ID NO: 1097650 - RNA, 19 nt, Homo sapiens
  misc_RNA (1)...(19): siRNA sense strand
gcuaugaccucaaugacau

SEQ ID NO: 1097651 - RNA, 19 nt, Homo sapiens
  misc_RNA (1)...(19): siRNA sense strand
ggcuggaacugaccaauga

SEQ ID NO: 1097652 - RNA, 19 nt, Homo sapiens
  misc_RNA (1)...(19): siRNA sense strand
gguugugucugaagagaaa

SEQ ID NO: 1097653 - RNA, 19 nt, Homo sapiens
  misc_RNA (1)...(19): siRNA sense strand
ugccugaacuagaugaaua

SEQ ID NO: 1097654 - RNA, 19 nt, Homo sapiens
  misc_RNA (1)...(19): siRNA sense strand
ggaacugaccaaugaagaa

SEQ ID NO: 1097655 - RNA, 19 nt, Homo sapiens
  misc_RNA (1)...(19): siRNA sense strand
caccaggccuguuauggaa

SEQ ID NO: 1097656 - RNA, 19 nt, Homo sapiens
  misc_RNA (1)...(19): siRNA sense strand
gagaugguguucugugaca

SEQ ID NO: 1097657 - RNA, 19 nt, Homo sapiens
  misc_RNA (1)...(19): siRNA sense strand
ugaugaagauguugucugu

SEQ ID NO: 1097658 - RNA, 19 nt, Homo sapiens
  misc_RNA (1)...(19): siRNA sense strand
ggguaaugauugacacuga

SEQ ID NO: 1097659 - RNA, 19 nt, Homo sapiens
  misc_RNA (1)...(19): siRNA sense strand
agaaaucccucauguucau

SEQ ID NO: 1097660 - RNA, 19 nt, Homo sapiens
  misc_RNA (1)...(19): siRNA sense strand
gcaccaggccuguuaugga

SEQ ID NO: 1097661 - RNA, 19 nt, Homo sapiens
  misc_RNA (1)...(19): siRNA sense strand
gaacugaccaaugaagaau

SEQ ID NO: 1097662 - RNA, 19 nt, Homo sapiens
  misc_RNA (1)...(19): siRNA sense strand
agaaguacaucgugucauc

SEQ ID NO: 1097663 - RNA, 19 nt, Homo sapiens
  misc_RNA (1)...(19): siRNA sense strand
agagaaaucccucauguuc

SEQ ID NO: 1097664 - RNA, 19 nt, Homo sapiens
  misc_RNA (1)...(19): siRNA sense strand
cagcgaugcuacgacaaua

SEQ ID NO: 1097665 - RNA, 19 nt, Homo sapiens
  misc_RNA (1)...(19): siRNA sense strand
augaagauguugucuguga

SEQ ID NO: 1097666 - RNA, 19 nt, Homo sapiens
  misc_RNA (1)...(19): siRNA sense strand
gaagauguugucugugaug

SEQ ID NO: 1097667 - RNA, 19 nt, Homo sapiens
  misc_RNA (1)...(19): siRNA sense strand
ggaugaguacuauguguug

SEQ ID NO: 1097668 - RNA, 19 nt, Homo sapiens
  misc_RNA (1)...(19): siRNA sense strand
uggauuuccuguaccagua

SEQ ID NO: 1097669 - RNA, 19 nt, Homo sapiens
  misc_RNA (1)...(19): siRNA sense strand
gagaaaucccucauguuca

SEQ ID NO: 1097670 - RNA, 19 nt, Homo sapiens
  misc_RNA (1)...(19): siRNA sense strand
acugaccaaugaagaauuu

SEQ ID NO: 1097671 - RNA, 19 nt, Homo sapiens
  misc_RNA (1)...(19): siRNA sense strand
cugaggaaguaguggauuu

SEQ ID NO: 1097672 - RNA, 19 nt, Homo sapiens
  misc_RNA (1)...(19): siRNA sense strand
gaauccggaugaguacuau

SEQ ID NO: 1097673 - RNA, 19 nt, Homo sapiens
  misc_RNA (1)...(19): siRNA sense strand
gcaguuggaggaugaguuc

SEQ ID NO: 1097674 - RNA, 19 nt, Homo sapiens
  misc_RNA (1)...(19): siRNA sense strand
gauguugucugugaugucu

SEQ ID NO: 1097675 - RNA, 19 nt, Homo sapiens
  misc_RNA (1)...(19): siRNA sense strand
ugacaaaugcaacaucugu

SEQ ID NO: 1097676 - RNA, 19 nt, Homo sapiens
  misc_RNA (1)...(19): siRNA sense strand
ccucugcaaugagaaguuu

SEQ ID NO: 1097677 - RNA, 19 nt, Homo sapiens
  misc_RNA (1)...(19): siRNA sense strand
uggagaggguaaugauuga

SEQ ID NO: 1097678 - RNA, 19 nt, Homo sapiens
  misc_RNA (1)...(19): siRNA sense strand
uuaggaggcugcagcuguu

SEQ ID NO: 1097679 - RNA, 19 nt, Homo sapiens
  misc_RNA (1)...(19): siRNA sense strand
gcggcugccugaggaagua

SEQ ID NO: 1097680 - RNA, 19 nt, Homo sapiens
  misc_RNA (1)...(19): siRNA sense strand
ucaucaggcccaagaagua

SEQ ID NO: 1097681 - RNA, 19 nt, Homo sapiens
  misc_RNA (1)...(19): siRNA sense strand
gggagcaggaugucuuauu

SEQ ID NO: 1097682 - RNA, 19 nt, Homo sapiens
  misc_RNA (1)...(19): siRNA sense strand
ugaggauucugacgacaau

SEQ ID NO: 1097683 - RNA, 19 nt, Homo sapiens
  misc_RNA (1)...(19): siRNA sense strand
ccaaugaagaauuuaagga

SEQ ID NO: 1097684 - RNA, 19 nt, Homo sapiens
  misc_RNA (1)...(19): siRNA sense strand
cacguuagcugugcucugu

SEQ ID NO: 1097685 - RNA, 19 nt, Homo sapiens
  misc_RNA (1)...(19): siRNA sense strand
caagaaguacaucguguca

SEQ ID NO: 1097686 - RNA, 19 nt, Homo sapiens
  misc_RNA (1)...(19): siRNA sense strand
gcagcgaugcuacgacaau

SEQ ID NO: 1097687 - RNA, 19 nt, Homo sapiens
  misc_RNA (1)...(19): siRNA sense strand
gaugggaaugccugaacua

SEQ ID NO: 1097688 - RNA, 19 nt, Homo sapiens
  misc_RNA (1)...(19): siRNA sense strand
ccugaucacugccaugaag

SEQ ID NO: 1097689 - RNA, 19 nt, Homo sapiens
  misc_RNA (1)...(19): siRNA sense strand
gcgggagcaggaugucuua

SEQ ID NO: 1097690 - RNA, 19 nt, Homo sapiens
  misc_RNA (1)...(19): siRNA sense strand
gaaagaugaagaggacaau

SEQ ID NO: 1097691 - RNA, 19 nt, Homo sapiens
  misc_RNA (1)...(19): siRNA sense strand
caaguccuauugcccaaag

SEQ ID NO: 1097692 - RNA, 19 nt, Homo sapiens
  misc_RNA (1)...(19): siRNA sense strand
gaaugaugaagucaaguuc

SEQ ID NO: 1097693 - RNA, 19 nt, Homo sapiens
  misc_RNA (1)...(19): siRNA sense strand
agagaaugaugaagucaag

SEQ ID NO: 1097694 - RNA, 19 nt, Homo sapiens
  misc_RNA (1)...(19): siRNA sense strand
gcuacgacaauaugaauca

SEQ ID NO: 1097695 - RNA, 19 nt, Homo sapiens
  misc_RNA (1)...(19): siRNA sense strand
aauggcagccugucaacua

SEQ ID NO: 1097696 - RNA, 19 nt, Homo sapiens
  misc_RNA (1)...(19): siRNA sense strand
ugaaguugcaugacuccua

SEQ ID NO: 1097697 - RNA, 19 nt, Homo sapiens
  misc_RNA (1)...(19): siRNA sense strand
ugaagaauuuaaggagaug

SEQ ID NO: 1097698 - RNA, 19 nt, Homo sapiens
  misc_RNA (1)...(19): siRNA sense strand
guuauggaauccucaaggu

SEQ ID NO: 1097699 - RNA, 19 nt, Homo sapiens
  misc_RNA (1)...(19): siRNA sense strand
gguguucugugacaaaugc

SEQ ID NO: 1097700 - RNA, 19 nt, Homo sapiens
  misc_RNA (1)...(19): siRNA sense strand
gaccugaucacugccauga

SEQ ID NO: 1097701 - RNA, 19 nt, Homo sapiens
  misc_RNA (1)...(19): siRNA sense strand
gaugguguucugugacaaa

SEQ ID NO: 1097702 - RNA, 19 nt, Homo sapiens
  misc_RNA (1)...(19): siRNA sense strand
ccaggguugugucugaaga

SEQ ID NO: 1097703 - RNA, 19 nt, Homo sapiens
  misc_RNA (1)...(19): siRNA sense strand
caaagcacagcucacauag

SEQ ID NO: 1097704 - RNA, 19 nt, Homo sapiens
  misc_RNA (1)...(19): siRNA sense strand
ucacugccaugaaguugca

SEQ ID NO: 1097705 - RNA, 19 nt, Homo sapiens
  misc_RNA (1)...(19): siRNA sense strand
uagcagagaaugaugaagu

SEQ ID NO: 1097706 - RNA, 19 nt, Homo sapiens
  misc_RNA (1)...(19): siRNA sense strand
ugaauccggaugaguacua

SEQ ID NO: 1097707 - RNA, 19 nt, Homo sapiens
  misc_RNA (1)...(19): siRNA sense strand
gcgaugcuacgacaauaug

SEQ ID NO: 1097708 - RNA, 19 nt, Homo sapiens
  misc_RNA (1)...(19): siRNA sense strand
uggccaggguugugucuga

SEQ ID NO: 1097709 - RNA, 19 nt, Homo sapiens
  misc_RNA (1)...(19): siRNA sense strand
ugaagaggaaggucaacuu

SEQ ID NO: 1097710 - RNA, 19 nt, Homo sapiens
  misc_RNA (1)...(19): siRNA sense strand
cuacuuggucccagaauuc

SEQ ID NO: 1097711 - RNA, 19 nt, Homo sapiens
  misc_RNA (1)...(19): siRNA sense strand
ggugaggacggcaaugaga

SEQ ID NO: 1097712 - RNA, 19 nt, Homo sapiens
  misc_RNA (1)...(19): siRNA sense strand
ugaccucaaugacauggau

SEQ ID NO: 1097713 - RNA, 19 nt, Homo sapiens
  misc_RNA (1)...(19): siRNA sense strand
gaaguacaucgugucauca

SEQ ID NO: 1097714 - RNA, 19 nt, Homo sapiens
  misc_RNA (1)...(19): siRNA sense strand
acuggaaguugaagaggaa

SEQ ID NO: 1097715 - RNA, 19 nt, Homo sapiens
  misc_RNA (1)...(19): siRNA sense strand
aggaugaguucuacaccuu

SEQ ID NO: 1097716 - RNA, 19 nt, Homo sapiens
  misc_RNA (1)...(19): siRNA sense strand
gaugcuacgacaauaugaa

SEQ ID NO: 1097717 - RNA, 19 nt, Homo sapiens
  misc_RNA (1)...(19): siRNA sense strand
gaucacugccaugaaguug

SEQ ID NO: 1097718 - RNA, 19 nt, Homo sapiens
  misc_RNA (1)...(19): siRNA sense strand
gcagcagugaggauucuga

SEQ ID NO: 1097719 - RNA, 19 nt, Homo sapiens
  misc_RNA (1)...(19): siRNA sense strand
agaaugaugaagucaaguu

SEQ ID NO: 1097720 - RNA, 19 nt, Homo sapiens
  misc_RNA (1)...(19): siRNA sense strand
ggcagccugucaacuacuu

SEQ ID NO: 1097721 - RNA, 19 nt, Homo sapiens
  misc_RNA (1)...(19): siRNA sense strand
caucuuagcagagaaugau

SEQ ID NO: 1097722 - RNA, 19 nt, Homo sapiens
  misc_RNA (1)...(19): siRNA sense strand
ugucugcuguguccgaaga

SEQ ID NO: 1097723 - RNA, 19 nt, Homo sapiens
  misc_RNA (1)...(19): siRNA sense strand
caacuacuuggucccagaa

SEQ ID NO: 1097724 - RNA, 19 nt, Homo sapiens
  misc_RNA (1)...(19): siRNA sense strand
ccaggccuguuauggaauc

SEQ ID NO: 1097725 - RNA, 19 nt, Homo sapiens
  misc_RNA (1)...(19): siRNA sense strand
gagaggguaaugauugaca

SEQ ID NO: 1097726 - RNA, 19 nt, Homo sapiens
  misc_RNA (1)...(19): siRNA sense strand
ucaaguucaaguccuauug

SEQ ID NO: 1097727 - RNA, 19 nt, Homo sapiens
  misc_RNA (1)...(19): siRNA sense strand
cgaagaaggguggagcuau

SEQ ID NO: 1097728 - RNA, 19 nt, Homo sapiens
  misc_RNA (1)...(19): siRNA sense strand
ucgaauaugaugaagaugu

SEQ ID NO: 1097729 - RNA, 19 nt, Homo sapiens
  misc_RNA (1)...(19): siRNA sense strand
agcaggaugucuuauuuag

SEQ ID NO: 1097730 - RNA, 19 nt, Homo sapiens
  misc_RNA (1)...(19): siRNA sense strand
aguaguggauuuccuguac

SEQ ID NO: 1097731 - RNA, 19 nt, Homo sapiens
  misc_RNA (1)...(19): siRNA sense strand
agacaggaaugggagaaag

SEQ ID NO: 1097732 - RNA, 19 nt, Homo sapiens
  misc_RNA (1)...(19): siRNA sense strand
gaaggguggagcuaugaag

SEQ ID NO: 1097733 - RNA, 19 nt, Homo sapiens
  misc_RNA (1)...(19): siRNA sense strand
acaaaugcaacaucugugu

SEQ ID NO: 1097734 - RNA, 19 nt, Homo sapiens
  misc_RNA (1)...(19): siRNA sense strand
cuggagaggguaaugauug

SEQ ID NO: 1097735 - RNA, 19 nt, Homo sapiens
  misc_RNA (1)...(19): siRNA sense strand
ugcagcaguuggaggauga

SEQ ID NO: 1097736 - RNA, 19 nt, Homo sapiens
  misc_RNA (1)...(19): siRNA sense strand
ggagacaggaaugggagaa

SEQ ID NO: 1097737 - RNA, 19 nt, Homo sapiens
  misc_RNA (1)...(19): siRNA sense strand
gauauuaacuuaccaaggu

SEQ ID NO: 1097738 - RNA, 19 nt, Homo sapiens
  misc_RNA (1)...(19): siRNA sense strand
ccacacauuucaaucauga

SEQ ID NO: 1097739 - RNA, 19 nt, Homo sapiens
  misc_RNA (1)...(19): siRNA sense strand
ggucaacacugguccucua

SEQ ID NO: 1097740 - RNA, 19 nt, Homo sapiens
  misc_RNA (1)...(19): siRNA sense strand
ggagaaggaggucgccaua

SEQ ID NO: 1097741 - RNA, 19 nt, Homo sapiens
  misc_RNA (1)...(19): siRNA sense strand
cauaaucguugaccagaga

SEQ ID NO: 1097742 - RNA, 19 nt, Homo sapiens
  misc_RNA (1)...(19): siRNA sense strand
agaaggaggucgccauaau

SEQ ID NO: 1097743 - RNA, 19 nt, Homo sapiens
  misc_RNA (1)...(19): siRNA sense strand
agacgcagaucccgauauu

SEQ ID NO: 1097744 - RNA, 19 nt, Homo sapiens
  misc_RNA (1)...(19): siRNA sense strand
uggcuucgcuggagcagua

SEQ ID NO: 1097745 - RNA, 19 nt, Homo sapiens
  misc_RNA (1)...(19): siRNA sense strand
gaacuugcaccagaagauu

SEQ ID NO: 1097746 - RNA, 19 nt, Homo sapiens
  misc_RNA (1)...(19): siRNA sense strand
cauaaggaguuugauucua

SEQ ID NO: 1097747 - RNA, 19 nt, Homo sapiens
  misc_RNA (1)...(19): siRNA sense strand
ggaggaggccuuggagaaa

SEQ ID NO: 1097748 - RNA, 19 nt, Homo sapiens
  misc_RNA (1)...(19): siRNA sense strand
acgcagaucccgauauuaa

SEQ ID NO: 1097749 - RNA, 19 nt, Homo sapiens
  misc_RNA (1)...(19): siRNA sense strand
ggaggucgccauaaucguu

SEQ ID NO: 1097750 - RNA, 19 nt, Homo sapiens
  misc_RNA (1)...(19): siRNA sense strand
gaucagagaacuagagucu

SEQ ID NO: 1097751 - RNA, 19 nt, Homo sapiens
  misc_RNA (1)...(19): siRNA sense strand
ccagagguccaucacauuu

SEQ ID NO: 1097752 - RNA, 19 nt, Homo sapiens
  misc_RNA (1)...(19): siRNA sense strand
ccagaagauuguugaagau

SEQ ID NO: 1097753 - RNA, 19 nt, Homo sapiens
  misc_RNA (1)...(19): siRNA sense strand
gagcugcugauggcaauua

SEQ ID NO: 1097754 - RNA, 19 nt, Homo sapiens
  misc_RNA (1)...(19): siRNA sense strand
ggaagcugcucaggcauuc

SEQ ID NO: 1097755 - RNA, 19 nt, Homo sapiens
  misc_RNA (1)...(19): siRNA sense strand
gaaggaggucgccauaauc

SEQ ID NO: 1097756 - RNA, 19 nt, Homo sapiens
  misc_RNA (1)...(19): siRNA sense strand
gcagacaccuagauuugac

SEQ ID NO: 1097757 - RNA, 19 nt, Homo sapiens
  misc_RNA (1)...(19): siRNA sense strand
ccagaacuguugggaauca

SEQ ID NO: 1097758 - RNA, 19 nt, Homo sapiens
  misc_RNA (1)...(19): siRNA sense strand
gaagauuguugaagaugcu

SEQ ID NO: 1097759 - RNA, 19 nt, Homo sapiens
  misc_RNA (1)...(19): siRNA sense strand
guaaagaugagcugcugaa

SEQ ID NO: 1097760 - RNA, 19 nt, Homo sapiens
  misc_RNA (1)...(19): siRNA sense strand
caccugcucuguaaagaug

SEQ ID NO: 1097761 - RNA, 19 nt, Homo sapiens
  misc_RNA (1)...(19): siRNA sense strand
ggacaugguggccuucuuc

SEQ ID NO: 1097762 - RNA, 19 nt, Homo sapiens
  misc_RNA (1)...(19): siRNA sense strand
ccaaacaucagaaauacau

SEQ ID NO: 1097763 - RNA, 19 nt, Homo sapiens
  misc_RNA (1)...(19): siRNA sense strand
cgacguggaggcugacuuu

SEQ ID NO: 1097764 - RNA, 19 nt, Homo sapiens
  misc_RNA (1)...(19): siRNA sense strand
gcaaaggcuccaccugguu

SEQ ID NO: 1097765 - RNA, 19 nt, Homo sapiens
  misc_RNA (1)...(19): siRNA sense strand
gaaaccaaacaucagaaau

SEQ ID NO: 1097766 - RNA, 19 nt, Homo sapiens
  misc_RNA (1)...(19): siRNA sense strand
gaagaucagagaacuagag

SEQ ID NO: 1097767 - RNA, 19 nt, Homo sapiens
  misc_RNA (1)...(19): siRNA sense strand
ccuggaaucucaucaacug

SEQ ID NO: 1097768 - RNA, 19 nt, Homo sapiens
  misc_RNA (1)...(19): siRNA sense strand
aaagaaaccaaacaucaga

SEQ ID NO: 1097769 - RNA, 19 nt, Homo sapiens
  misc_RNA (1)...(19): siRNA sense strand
gagcaagguguucugaaga

SEQ ID NO: 1097770 - RNA, 19 nt, Homo sapiens
  misc_RNA (1)...(19): siRNA sense strand
gaggaggccuuggagaaag

SEQ ID NO: 1097771 - RNA, 19 nt, Homo sapiens
  misc_RNA (1)...(19): siRNA sense strand
auaaggaguuugauucuac

SEQ ID NO: 1097772 - RNA, 19 nt, Homo sapiens
  misc_RNA (1)...(19): siRNA sense strand
cgucauugcugguguuucu

SEQ ID NO: 1097773 - RNA, 19 nt, Homo sapiens
  misc_RNA (1)...(19): siRNA sense strand
cauagagcgugccggaaga

SEQ ID NO: 1097774 - RNA, 19 nt, Homo sapiens
  misc_RNA (1)...(19): siRNA sense strand
accagaagauuguugaaga

SEQ ID NO: 1097775 - RNA, 19 nt, Homo sapiens
  misc_RNA (1)...(19): siRNA sense strand
caaaagaaaccaaacauca

SEQ ID NO: 1097776 - RNA, 19 nt, Homo sapiens
  misc_RNA (1)...(19): siRNA sense strand
caucacauuucccaagauc

SEQ ID NO: 1097777 - RNA, 19 nt, Homo sapiens
  misc_RNA (1)...(19): siRNA sense strand
ugagcaagguguucugaag

SEQ ID NO: 1097778 - RNA, 19 nt, Homo sapiens
  misc_RNA (1)...(19): siRNA sense strand
ggcaauuacuacaaugcaa

SEQ ID NO: 1097779 - RNA, 19 nt, Homo sapiens
  misc_RNA (1)...(19): siRNA sense strand
gauggcaauuacuacaaug

SEQ ID NO: 1097780 - RNA, 19 nt, Homo sapiens
  misc_RNA (1)...(19): siRNA sense strand
ccgcagacaccuagauuug

SEQ ID NO: 1097781 - RNA, 19 nt, Homo sapiens
  misc_RNA (1)...(19): siRNA sense strand
gaagacgcagaucccgaua

SEQ ID NO: 1097782 - RNA, 19 nt, Homo sapiens
  misc_RNA (1)...(19): siRNA sense strand
cccaagauccucugcacua

SEQ ID NO: 1097783 - RNA, 19 nt, Homo sapiens
  misc_RNA (1)...(19): siRNA sense strand
gagaaggaggucgccauaa

SEQ ID NO: 1097784 - RNA, 19 nt, Homo sapiens
  misc_RNA (1)...(19): siRNA sense strand
gcacuugguugaccccauu

SEQ ID NO: 1097785 - RNA, 19 nt, Homo sapiens
  misc_RNA (1)...(19): siRNA sense strand
ggaacuugcaccagaagau

SEQ ID NO: 1097786 - RNA, 19 nt, Homo sapiens
  misc_RNA (1)...(19): siRNA sense strand
agaucccgauauuaacuua

SEQ ID NO: 1097787 - RNA, 19 nt, Homo sapiens
  misc_RNA (1)...(19): siRNA sense strand
gccauaaggaguuugauuc

SEQ ID NO: 1097788 - RNA, 19 nt, Homo sapiens
  misc_RNA (1)...(19): siRNA sense strand
ugauggcaauuacuacaau

SEQ ID NO: 1097789 - RNA, 19 nt, Homo sapiens
  misc_RNA (1)...(19): siRNA sense strand
cggagcagcugaaggacau

SEQ ID NO: 1097790 - RNA, 19 nt, Homo sapiens
  misc_RNA (1)...(19): siRNA sense strand
gcagaucccgauauuaacu

SEQ ID NO: 1097791 - RNA, 19 nt, Homo sapiens
  misc_RNA (1)...(19): siRNA sense strand
aucccaggcugcacaguua

SEQ ID NO: 1097792 - RNA, 19 nt, Homo sapiens
  misc_RNA (1)...(19): siRNA sense strand
uaaggaguuugauucuaca

SEQ ID NO: 1097793 - RNA, 19 nt, Homo sapiens
  misc_RNA (1)...(19): siRNA sense strand
caacacccacgccgagaug

SEQ ID NO: 1097794 - RNA, 19 nt, Homo sapiens
  misc_RNA (1)...(19): siRNA sense strand
gcccucccgucggucauua

SEQ ID NO: 1097795 - RNA, 19 nt, Homo sapiens
  misc_RNA (1)...(19): siRNA sense strand
uugggcaccugcucuguaa

SEQ ID NO: 1097796 - RNA, 19 nt, Homo sapiens
  misc_RNA (1)...(19): siRNA sense strand
gggcgacccagaacuguug

SEQ ID NO: 1097797 - RNA, 19 nt, Homo sapiens
  misc_RNA (1)...(19): siRNA sense strand
gcaggucacagccagacaa

SEQ ID NO: 1097798 - RNA, 19 nt, Homo sapiens
  misc_RNA (1)...(19): siRNA sense strand
gaacuguugggaaucaaag

SEQ ID NO: 1097799 - RNA, 19 nt, Homo sapiens
  misc_RNA (1)...(19): siRNA sense strand
cgccuucccucugccauaa

SEQ ID NO: 1097800 - RNA, 19 nt, Homo sapiens
  misc_RNA (1)...(19): siRNA sense strand
cagaagaucagagaacuag

SEQ ID NO: 1097801 - RNA, 19 nt, Homo sapiens
  misc_RNA (1)...(19): siRNA sense strand
aaccaaacaucagaaauac

SEQ ID NO: 1097802 - RNA, 19 nt, Homo sapiens
  misc_RNA (1)...(19): siRNA sense strand
acgccgagaugauccagaa

SEQ ID NO: 1097803 - RNA, 19 nt, Homo sapiens
  misc_RNA (1)...(19): siRNA sense strand
gagaucaggccuggacuca

SEQ ID NO: 1097804 - RNA, 19 nt, Homo sapiens
  misc_RNA (1)...(19): siRNA sense strand
ggucacagccagacaacag

SEQ ID NO: 1097805 - RNA, 19 nt, Homo sapiens
  misc_RNA (1)...(19): siRNA sense strand
ucaugagccuccagaagag

SEQ ID NO: 1097806 - RNA, 19 nt, Homo sapiens
  misc_RNA (1)...(19): siRNA sense strand
gcaccugcucuguaaagau

SEQ ID NO: 1097807 - RNA, 19 nt, Homo sapiens
  misc_RNA (1)...(19): siRNA sense strand
cagcaucgcgucagucucu

SEQ ID NO: 1097808 - RNA, 19 nt, Homo sapiens
  misc_RNA (1)...(19): siRNA sense strand
agaaaccaaacaucagaaa

SEQ ID NO: 1097809 - RNA, 19 nt, Homo sapiens
  misc_RNA (1)...(19): siRNA sense strand
ccaagauccucugcacuac

SEQ ID NO: 1097810 - RNA, 19 nt, Homo sapiens
  misc_RNA (1)...(19): siRNA sense strand
ucccgucggucauuaagga

SEQ ID NO: 1097811 - RNA, 19 nt, Homo sapiens
  misc_RNA (1)...(19): siRNA sense strand
ucagaagaucagagaacua

SEQ ID NO: 1097812 - RNA, 19 nt, Homo sapiens
  misc_RNA (1)...(19): siRNA sense strand
cgucggucauuaaggaaga

SEQ ID NO: 1097813 - RNA, 19 nt, Homo sapiens
  misc_RNA (1)...(19): siRNA sense strand
ccucugccauaaggaguuu

SEQ ID NO: 1097814 - RNA, 19 nt, Homo sapiens
  misc_RNA (1)...(19): siRNA sense strand
gcaccagaagauuguugaa

SEQ ID NO: 1097815 - RNA, 19 nt, Homo sapiens
  misc_RNA (1)...(19): siRNA sense strand
ugaggcccauucccaagga

SEQ ID NO: 1097816 - RNA, 19 nt, Homo sapiens
  misc_RNA (1)...(19): siRNA sense strand
uggaggaggccuuggagaa

SEQ ID NO: 1097817 - RNA, 19 nt, Homo sapiens
  misc_RNA (1)...(19): siRNA sense strand
uccaucacauuucccaaga

SEQ ID NO: 1097818 - RNA, 19 nt, Homo sapiens
  misc_RNA (1)...(19): siRNA sense strand
ggccagagugagccagaaa

SEQ ID NO: 1097819 - RNA, 19 nt, Homo sapiens
  misc_RNA (1)...(19): siRNA sense strand
ucauugcugguguuucuaa

SEQ ID NO: 1097820 - RNA, 19 nt, Homo sapiens
  misc_RNA (1)...(19): siRNA sense strand
ccaagguggaucaguggaa

SEQ ID NO: 1097821 - RNA, 19 nt, Homo sapiens
  misc_RNA (1)...(19): siRNA sense strand
uacaaugcaaggaagauga

SEQ ID NO: 1097822 - RNA, 19 nt, Homo sapiens
  misc_RNA (1)...(19): siRNA sense strand
gcugauggcaauuacuaca

SEQ ID NO: 1097823 - RNA, 19 nt, Homo sapiens
  misc_RNA (1)...(19): siRNA sense strand
cugcugauggcaauuacua

SEQ ID NO: 1097824 - RNA, 19 nt, Homo sapiens
  misc_RNA (1)...(19): siRNA sense strand
gaauuccagagguccauca

SEQ ID NO: 1097825 - RNA, 19 nt, Homo sapiens
  misc_RNA (1)...(19): siRNA sense strand
acucggagcagcugaagga

SEQ ID NO: 1097826 - RNA, 19 nt, Homo sapiens
  misc_RNA (1)...(19): siRNA sense strand
acaaugcaaggaagaugaa

SEQ ID NO: 1097827 - RNA, 19 nt, Homo sapiens
  misc_RNA (1)...(19): siRNA sense strand
gggcaccugcucuguaaag

SEQ ID NO: 1097828 - RNA, 19 nt, Homo sapiens
  misc_RNA (1)...(19): siRNA sense strand
caagauccucugcacuaca

SEQ ID NO: 1097829 - RNA, 19 nt, Homo sapiens
  misc_RNA (1)...(19): siRNA sense strand
gagcuugggauggguaaag

SEQ ID NO: 1097830 - RNA, 19 nt, Homo sapiens
  misc_RNA (1)...(19): siRNA sense strand
aagagcugcugauggcaau

SEQ ID NO: 1097831 - RNA, 19 nt, Homo sapiens
  misc_RNA (1)...(19): siRNA sense strand
gacgcagaucccgauauua

SEQ ID NO: 1097832 - RNA, 19 nt, Homo sapiens
  misc_RNA (1)...(19): siRNA sense strand
ccauaaggaguuugauucu

SEQ ID NO: 1097833 - RNA, 19 nt, Homo sapiens
  misc_RNA (1)...(19): siRNA sense strand
gggccagagugagccagaa

SEQ ID NO: 1097834 - RNA, 19 nt, Homo sapiens
  misc_RNA (1)...(19): siRNA sense strand
ggcaccugcucuguaaaga

SEQ ID NO: 1097835 - RNA, 19 nt, Homo sapiens
  misc_RNA (1)...(19): siRNA sense strand
cagaagauuguugaagaug

SEQ ID NO: 1097836 - RNA, 19 nt, Homo sapiens
  misc_RNA (1)...(19): siRNA sense strand
ugggauggguaaagucaag

SEQ ID NO: 1097837 - RNA, 19 nt, Homo sapiens
  misc_RNA (1)...(19): siRNA sense strand
ggaaugccaucaaaucuuu

SEQ ID NO: 1097838 - RNA, 19 nt, Homo sapiens
  misc_RNA (1)...(19): siRNA sense strand
gagaaacccuauaaaugua

SEQ ID NO: 1097839 - RNA, 19 nt, Homo sapiens
  misc_RNA (1)...(19): siRNA sense strand
gcaugaaguuggaaagaua

SEQ ID NO: 1097840 - RNA, 19 nt, Homo sapiens
  misc_RNA (1)...(19): siRNA sense strand
gagaaacgcuuuauaugca

SEQ ID NO: 1097841 - RNA, 19 nt, Homo sapiens
  misc_RNA (1)...(19): siRNA sense strand
gagaaacccuuuaaaugug

SEQ ID NO: 1097842 - RNA, 19 nt, Homo sapiens
  misc_RNA (1)...(19): siRNA sense strand
gaauuaagcccuaugaaug

SEQ ID NO: 1097843 - RNA, 19 nt, Homo sapiens
  misc_RNA (1)...(19): siRNA sense strand
ggagagaaacgcuuuauau

SEQ ID NO: 1097844 - RNA, 19 nt, Homo sapiens
  misc_RNA (1)...(19): siRNA sense strand
ggguaugacucuuuccuua

SEQ ID NO: 1097845 - RNA, 19 nt, Homo sapiens
  misc_RNA (1)...(19): siRNA sense strand
gagagaaacccuuuaaaug

SEQ ID NO: 1097846 - RNA, 19 nt, Homo sapiens
  misc_RNA (1)...(19): siRNA sense strand
ugagaaaucuugaaagcaa

SEQ ID NO: 1097847 - RNA, 19 nt, Homo sapiens
  misc_RNA (1)...(19): siRNA sense strand
gcucuuaccuuauucaaca

SEQ ID NO: 1097848 - RNA, 19 nt, Homo sapiens
  misc_RNA (1)...(19): siRNA sense strand
ccagauggcucaccuuguu

SEQ ID NO: 1097849 - RNA, 19 nt, Homo sapiens
  misc_RNA (1)...(19): siRNA sense strand
ggagagaaacccuuuaaau

SEQ ID NO: 1097850 - RNA, 19 nt, Homo sapiens
  misc_RNA (1)...(19): siRNA sense strand
aaccagagcccaucauuua

SEQ ID NO: 1097851 - RNA, 19 nt, Homo sapiens
  misc_RNA (1)...(19): siRNA sense strand
ggacaucagaggacucaua

SEQ ID NO: 1097852 - RNA, 19 nt, Homo sapiens
  misc_RNA (1)...(19): siRNA sense strand
gcucagcccuuacgaaaca

SEQ ID NO: 1097853 - RNA, 19 nt, Homo sapiens
  misc_RNA (1)...(19): siRNA sense strand
gcucagcccucacuaaaca

SEQ ID NO: 1097854 - RNA, 19 nt, Homo sapiens
  misc_RNA (1)...(19): siRNA sense strand
gagaguucaucccuuauug

SEQ ID NO: 1097855 - RNA, 19 nt, Homo sapiens
  misc_RNA (1)...(19): siRNA sense strand
gcucaaaguuggagaugug

SEQ ID NO: 1097856 - RNA, 19 nt, Homo sapiens
  misc_RNA (1)...(19): siRNA sense strand
gcacaccggagaacucaua

SEQ ID NO: 1097857 - RNA, 19 nt, Homo sapiens
  misc_RNA (1)...(19): siRNA sense strand
ggaauuaagcccuaugaau

SEQ ID NO: 1097858 - RNA, 19 nt, Homo sapiens
  misc_RNA (1)...(19): siRNA sense strand
uauaaggaaugccaucaaa

SEQ ID NO: 1097859 - RNA, 19 nt, Homo sapiens
  misc_RNA (1)...(19): siRNA sense strand
ugagaaacccuauaaaugu

SEQ ID NO: 1097860 - RNA, 19 nt, Homo sapiens
  misc_RNA (1)...(19): siRNA sense strand
ccauauaacugucaggaau

SEQ ID NO: 1097861 - RNA, 19 nt, Homo sapiens
  misc_RNA (1)...(19): siRNA sense strand
gcacuuacacugcagagaa

SEQ ID NO: 1097862 - RNA, 19 nt, Homo sapiens
  misc_RNA (1)...(19): siRNA sense strand
caaauguacugaugcuguu

SEQ ID NO: 1097863 - RNA, 19 nt, Homo sapiens
  misc_RNA (1)...(19): siRNA sense strand
cagauggucuucaugcaaa

SEQ ID NO: 1097864 - RNA, 19 nt, Homo sapiens
  misc_RNA (1)...(19): siRNA sense strand
gaaacccuaugacuacaau

SEQ ID NO: 1097865 - RNA, 19 nt, Homo sapiens
  misc_RNA (1)...(19): siRNA sense strand
caaguacuaucccagagaa

SEQ ID NO: 1097866 - RNA, 19 nt, Homo sapiens
  misc_RNA (1)...(19): siRNA sense strand
gagagaaacgcuuuauaug

SEQ ID NO: 1097867 - RNA, 19 nt, Homo sapiens
  misc_RNA (1)...(19): siRNA sense strand
gaauacaaacuggagauaa

SEQ ID NO: 1097868 - RNA, 19 nt, Homo sapiens
  misc_RNA (1)...(19): siRNA sense strand
gagaaaagcccuacaaaug

SEQ ID NO: 1097869 - RNA, 19 nt, Homo sapiens
  misc_RNA (1)...(19): siRNA sense strand
ggaauucucaucuuauugu

SEQ ID NO: 1097870 - RNA, 19 nt, Homo sapiens
  misc_RNA (1)...(19): siRNA sense strand
gagaaaucuugaaagcaaa

SEQ ID NO: 1097871 - RNA, 19 nt, Homo sapiens
  misc_RNA (1)...(19): siRNA sense strand
gcuguuaaaucuuucaauc

SEQ ID NO: 1097872 - RNA, 19 nt, Homo sapiens
  misc_RNA (1)...(19): siRNA sense strand
agagaaacccuuuaaaugu

SEQ ID NO: 1097873 - RNA, 19 nt, Homo sapiens
  misc_RNA (1)...(19): siRNA sense strand
gaacucucaucuuauugga

SEQ ID NO: 1097874 - RNA, 19 nt, Homo sapiens
  misc_RNA (1)...(19): siRNA sense strand
guacugaugcuguuaaauc

SEQ ID NO: 1097875 - RNA, 19 nt, Homo sapiens
  misc_RNA (1)...(19): siRNA sense strand
gugagaaacccuauaaaug

SEQ ID NO: 1097876 - RNA, 19 nt, Homo sapiens
  misc_RNA (1)...(19): siRNA sense strand
aacuggaacucucaucuua

SEQ ID NO: 1097877 - RNA, 19 nt, Homo sapiens
  misc_RNA (1)...(19): siRNA sense strand
gggcagaguuuagccagaa

SEQ ID NO: 1097878 - RNA, 19 nt, Homo sapiens
  misc_RNA (1)...(19): siRNA sense strand
ggagagaaaccauauaacu

SEQ ID NO: 1097879 - RNA, 19 nt, Homo sapiens
  misc_RNA (1)...(19): siRNA sense strand
cagagaaacccuaugacua

SEQ ID NO: 1097880 - RNA, 19 nt, Homo sapiens
  misc_RNA (1)...(19): siRNA sense strand
ggagaaaaccaguauaauu

SEQ ID NO: 1097881 - RNA, 19 nt, Homo sapiens
  misc_RNA (1)...(19): siRNA sense strand
gagaauucauacaggagaa

SEQ ID NO: 1097882 - RNA, 19 nt, Homo sapiens
  misc_RNA (1)...(19): siRNA sense strand
aggaaucgcucagcccuua

SEQ ID NO: 1097883 - RNA, 19 nt, Homo sapiens
  misc_RNA (1)...(19): siRNA sense strand
guagagaaagcguauaaau

SEQ ID NO: 1097884 - RNA, 19 nt, Homo sapiens
  misc_RNA (1)...(19): siRNA sense strand
gaucauaaaggaauucaca

SEQ ID NO: 1097885 - RNA, 19 nt, Homo sapiens
  misc_RNA (1)...(19): siRNA sense strand
gaaccagaguacagcuaug

SEQ ID NO: 1097886 - RNA, 19 nt, Homo sapiens
  misc_RNA (1)...(19): siRNA sense strand
guucaucccuuauuguaca

SEQ ID NO: 1097887 - RNA, 19 nt, Homo sapiens
  misc_RNA (1)...(19): siRNA sense strand
ggugagaaacccuauaaau

SEQ ID NO: 1097888 - RNA, 19 nt, Homo sapiens
  misc_RNA (1)...(19): siRNA sense strand
ggaaaauccuucagucaga

SEQ ID NO: 1097889 - RNA, 19 nt, Homo sapiens
  misc_RNA (1)...(19): siRNA sense strand
gagagaaaccauauaacug

SEQ ID NO: 1097890 - RNA, 19 nt, Homo sapiens
  misc_RNA (1)...(19): siRNA sense strand
ucaacgcacuuguccagaa

SEQ ID NO: 1097891 - RNA, 19 nt, Homo sapiens
  misc_RNA (1)...(19): siRNA sense strand
gaguucaucccuuauugua

SEQ ID NO: 1097892 - RNA, 19 nt, Homo sapiens
  misc_RNA (1)...(19): siRNA sense strand
caacauacaagcacuuaca

SEQ ID NO: 1097893 - RNA, 19 nt, Homo sapiens
  misc_RNA (1)...(19): siRNA sense strand
caacgcacuuguccagaau

SEQ ID NO: 1097894 - RNA, 19 nt, Homo sapiens
  misc_RNA (1)...(19): siRNA sense strand
gagaagagccguggucagu

SEQ ID NO: 1097895 - RNA, 19 nt, Homo sapiens
  misc_RNA (1)...(19): siRNA sense strand
gugaagagaaacugaauug

SEQ ID NO: 1097896 - RNA, 19 nt, Homo sapiens
  misc_RNA (1)...(19): siRNA sense strand
gaacucauacuggagagaa

SEQ ID NO: 1097897 - RNA, 19 nt, Homo sapiens
  misc_RNA (1)...(19): siRNA sense strand
gaauaaaacccuaugaaug

SEQ ID NO: 1097898 - RNA, 19 nt, Homo sapiens
  misc_RNA (1)...(19): siRNA sense strand
ggaauucacacaggagaaa

SEQ ID NO: 1097899 - RNA, 19 nt, Homo sapiens
  misc_RNA (1)...(19): siRNA sense strand
gagaugugacucagccaua

SEQ ID NO: 1097900 - RNA, 19 nt, Homo sapiens
  misc_RNA (1)...(19): siRNA sense strand
agccagaacuuaaacuuug

SEQ ID NO: 1097901 - RNA, 19 nt, Homo sapiens
  misc_RNA (1)...(19): siRNA sense strand
ggugagaaaucuugaaagc

SEQ ID NO: 1097902 - RNA, 19 nt, Homo sapiens
  misc_RNA (1)...(19): siRNA sense strand
agaaacccuuuaaauguga

SEQ ID NO: 1097903 - RNA, 19 nt, Homo sapiens
  misc_RNA (1)...(19): siRNA sense strand
cuggaacucucaucuuauu

SEQ ID NO: 1097904 - RNA, 19 nt, Homo sapiens
  misc_RNA (1)...(19): siRNA sense strand
gaacggacucacacuggaa

SEQ ID NO: 1097905 - RNA, 19 nt, Homo sapiens
  misc_RNA (1)...(19): siRNA sense strand
cugaugcuguuaaaucuuu

SEQ ID NO: 1097906 - RNA, 19 nt, Homo sapiens
  misc_RNA (1)...(19): siRNA sense strand
ugacucagccauaauguau

SEQ ID NO: 1097907 - RNA, 19 nt, Homo sapiens
  misc_RNA (1)...(19): siRNA sense strand
gggauguaaagaccaauua

SEQ ID NO: 1097908 - RNA, 19 nt, Homo sapiens
  misc_RNA (1)...(19): siRNA sense strand
ucagagcugucaccuuguu

SEQ ID NO: 1097909 - RNA, 19 nt, Homo sapiens
  misc_RNA (1)...(19): siRNA sense strand
caucagagaaugcauagug

SEQ ID NO: 1097910 - RNA, 19 nt, Homo sapiens
  misc_RNA (1)...(19): siRNA sense strand
ggacucacacuggaauaaa

SEQ ID NO: 1097911 - RNA, 19 nt, Homo sapiens
  misc_RNA (1)...(19): siRNA sense strand
guacaccuaagaaaccaua

SEQ ID NO: 1097912 - RNA, 19 nt, Homo sapiens
  misc_RNA (1)...(19): siRNA sense strand
gcagauggucuucaugcaa

SEQ ID NO: 1097913 - RNA, 19 nt, Homo sapiens
  misc_RNA (1)...(19): siRNA sense strand
agacaucaaaggacucaua

SEQ ID NO: 1097914 - RNA, 19 nt, Homo sapiens
  misc_RNA (1)...(19): siRNA sense strand
gagcaaaaccauauaaaug

SEQ ID NO: 1097915 - RNA, 19 nt, Homo sapiens
  misc_RNA (1)...(19): siRNA sense strand
agagaaaccuuuugaaugu

SEQ ID NO: 1097916 - RNA, 19 nt, Homo sapiens
  misc_RNA (1)...(19): siRNA sense strand
gagcaggcauguccucaac

SEQ ID NO: 1097917 - RNA, 19 nt, Homo sapiens
  misc_RNA (1)...(19): siRNA sense strand
cuggagcucuuaccuuauu

SEQ ID NO: 1097918 - RNA, 19 nt, Homo sapiens
  misc_RNA (1)...(19): siRNA sense strand
gaacacccaaggcuucaug

SEQ ID NO: 1097919 - RNA, 19 nt, Homo sapiens
  misc_RNA (1)...(19): siRNA sense strand
cagaaugggugagaaaucu

SEQ ID NO: 1097920 - RNA, 19 nt, Homo sapiens
  misc_RNA (1)...(19): siRNA sense strand
gcaaguacuaucccagaga

SEQ ID NO: 1097921 - RNA, 19 nt, Homo sapiens
  misc_RNA (1)...(19): siRNA sense strand
uggcaaagcauucagagaa

SEQ ID NO: 1097922 - RNA, 19 nt, Homo sapiens
  misc_RNA (1)...(19): siRNA sense strand
uaaggaaugccaucaaauc

SEQ ID NO: 1097923 - RNA, 19 nt, Homo sapiens
  misc_RNA (1)...(19): siRNA sense strand
gauguaaagaccaauuaga

SEQ ID NO: 1097924 - RNA, 19 nt, Homo sapiens
  misc_RNA (1)...(19): siRNA sense strand
gaacucacacgggagagaa

SEQ ID NO: 1097925 - RNA, 19 nt, Homo sapiens
  misc_RNA (1)...(19): siRNA sense strand
gagaaacccuaugacuaca

SEQ ID NO: 1097926 - RNA, 19 nt, Homo sapiens
  misc_RNA (1)...(19): siRNA sense strand
uaaccagagcccaucauuu

SEQ ID NO: 1097927 - RNA, 19 nt, Homo sapiens
  misc_RNA (1)...(19): siRNA sense strand
guacagcuaugaggcagau

SEQ ID NO: 1097928 - RNA, 19 nt, Homo sapiens
  misc_RNA (1)...(19): siRNA sense strand
gaaugggugagaaaucuug

SEQ ID NO: 1097929 - RNA, 19 nt, Homo sapiens
  misc_RNA (1)...(19): siRNA sense strand
ucacucagcccuacuucaa

SEQ ID NO: 1097930 - RNA, 19 nt, Homo sapiens
  misc_RNA (1)...(19): siRNA sense strand
gagauaauucauucuggaa

SEQ ID NO: 1097931 - RNA, 19 nt, Homo sapiens
  misc_RNA (1)...(19): siRNA sense strand
ucaggaauguggcaaagca

SEQ ID NO: 1097932 - RNA, 19 nt, Homo sapiens
  misc_RNA (1)...(19): siRNA sense strand
gcagagaaacccuaugacu

SEQ ID NO: 1097933 - RNA, 19 nt, Homo sapiens
  misc_RNA (1)...(19): siRNA sense strand
uaaacuuuguuccaucuca

SEQ ID NO: 1097934 - RNA, 19 nt, Homo sapiens
  misc_RNA (1)...(19): siRNA sense strand
caaccuauuuacccugcaa

SEQ ID NO: 1097935 - RNA, 19 nt, Homo sapiens
  misc_RNA (1)...(19): siRNA sense strand
agagaaaccauauaacugu

SEQ ID NO: 1097936 - RNA, 19 nt, Homo sapiens
  misc_RNA (1)...(19): siRNA sense strand
cgggagagaaaccauauaa

SEQ ID NO: 1097937 - RNA, 19 nt, Homo sapiens
  misc_RNA (1)...(19): siRNA sense strand
ucaaagaucugcccacuag

SEQ ID NO: 1097938 - RNA, 19 nt, Homo sapiens
  misc_RNA (1)...(19): siRNA sense strand
ggagugaagugucuuguuc

SEQ ID NO: 1097939 - RNA, 19 nt, Homo sapiens
  misc_RNA (1)...(19): siRNA sense strand
ggagauagcuugggugucu

SEQ ID NO: 1097940 - RNA, 19 nt, Homo sapiens
  misc_RNA (1)...(19): siRNA sense strand
gaagggaaccuggcucuuu

SEQ ID NO: 1097941 - RNA, 19 nt, Homo sapiens
  misc_RNA (1)...(19): siRNA sense strand
ggagauugauaccuaugaa

SEQ ID NO: 1097942 - RNA, 19 nt, Homo sapiens
  misc_RNA (1)...(19): siRNA sense strand
ugacaaggcagcuguguuu

SEQ ID NO: 1097943 - RNA, 19 nt, Homo sapiens
  misc_RNA (1)...(19): siRNA sense strand
ucaggcaacucccaagaaa

SEQ ID NO: 1097944 - RNA, 19 nt, Homo sapiens
  misc_RNA (1)...(19): siRNA sense strand
uggaaucuaucaccaauga

SEQ ID NO: 1097945 - RNA, 19 nt, Homo sapiens
  misc_RNA (1)...(19): siRNA sense strand
gaaguauuguguccaucaa

SEQ ID NO: 1097946 - RNA, 19 nt, Homo sapiens
  misc_RNA (1)...(19): siRNA sense strand
gcacgcaggccguaucuau

SEQ ID NO: 1097947 - RNA, 19 nt, Homo sapiens
  misc_RNA (1)...(19): siRNA sense strand
gaauggcacaggcaaguuu

SEQ ID NO: 1097948 - RNA, 19 nt, Homo sapiens
  misc_RNA (1)...(19): siRNA sense strand
gggaugauauugaggagau

SEQ ID NO: 1097949 - RNA, 19 nt, Homo sapiens
  misc_RNA (1)...(19): siRNA sense strand
cagauuggcugggaaguau

SEQ ID NO: 1097950 - RNA, 19 nt, Homo sapiens
  misc_RNA (1)...(19): siRNA sense strand
gaagugucuuguuccagaa

SEQ ID NO: 1097951 - RNA, 19 nt, Homo sapiens
  misc_RNA (1)...(19): siRNA sense strand
acaagugucuagccucaaa

SEQ ID NO: 1097952 - RNA, 19 nt, Homo sapiens
  misc_RNA (1)...(19): siRNA sense strand
gaaggcaccuagccaacca

SEQ ID NO: 1097953 - RNA, 19 nt, Homo sapiens
  misc_RNA (1)...(19): siRNA sense strand
gcacauggaauccuugagu

SEQ ID NO: 1097954 - RNA, 19 nt, Homo sapiens
  misc_RNA (1)...(19): siRNA sense strand
caagugggcaucaaucaga

SEQ ID NO: 1097955 - RNA, 19 nt, Homo sapiens
  misc_RNA (1)...(19): siRNA sense strand
gagcggagacuggagauga

SEQ ID NO: 1097956 - RNA, 19 nt, Homo sapiens
  misc_RNA (1)...(19): siRNA sense strand
ucccaaguauuuccuauga

SEQ ID NO: 1097957 - RNA, 19 nt, Homo sapiens
  misc_RNA (1)...(19): siRNA sense strand
uugaggagauugauaccua

SEQ ID NO: 1097958 - RNA, 19 nt, Homo sapiens
  misc_RNA (1)...(19): siRNA sense strand
caagaaaagugguuuaaag

SEQ ID NO: 1097959 - RNA, 19 nt, Homo sapiens
  misc_RNA (1)...(19): siRNA sense strand
caggugacauuacggaguu

SEQ ID NO: 1097960 - RNA, 19 nt, Homo sapiens
  misc_RNA (1)...(19): siRNA sense strand
gcaccuagccaaccaugau

SEQ ID NO: 1097961 - RNA, 19 nt, Homo sapiens
  misc_RNA (1)...(19): siRNA sense strand
ggagaugacaggugugugu

SEQ ID NO: 1097962 - RNA, 19 nt, Homo sapiens
  misc_RNA (1)...(19): siRNA sense strand
caggcaaguuugucaagaa

SEQ ID NO: 1097963 - RNA, 19 nt, Homo sapiens
  misc_RNA (1)...(19): siRNA sense strand
ggaaguauuguguccauca

SEQ ID NO: 1097964 - RNA, 19 nt, Homo sapiens
  misc_RNA (1)...(19): siRNA sense strand
uaugaaaggagaaguggua

SEQ ID NO: 1097965 - RNA, 19 nt, Homo sapiens
  misc_RNA (1)...(19): siRNA sense strand
uaaagaauggccagaugaa

SEQ ID NO: 1097966 - RNA, 19 nt, Homo sapiens
  misc_RNA (1)...(19): siRNA sense strand
gucaucaacugccuggauu

SEQ ID NO: 1097967 - RNA, 19 nt, Homo sapiens
  misc_RNA (1)...(19): siRNA sense strand
gcacaacuccuggucaucu

SEQ ID NO: 1097968 - RNA, 19 nt, Homo sapiens
  misc_RNA (1)...(19): siRNA sense strand
caaggcagcuguguuugag

SEQ ID NO: 1097969 - RNA, 19 nt, Homo sapiens
  misc_RNA (1)...(19): siRNA sense strand
gugaagagccaggauguug

SEQ ID NO: 1097970 - RNA, 19 nt, Homo sapiens
  misc_RNA (1)...(19): siRNA sense strand
ggagaucccagacacagau

SEQ ID NO: 1097971 - RNA, 19 nt, Homo sapiens
  misc_RNA (1)...(19): siRNA sense strand
gccaggauguugccguuuc

SEQ ID NO: 1097972 - RNA, 19 nt, Homo sapiens
  misc_RNA (1)...(19): siRNA sense strand
gagauugauaccuaugaaa

SEQ ID NO: 1097973 - RNA, 19 nt, Homo sapiens
  misc_RNA (1)...(19): siRNA sense strand
gcacaggcaaguuugucaa

SEQ ID NO: 1097974 - RNA, 19 nt, Homo sapiens
  misc_RNA (1)...(19): siRNA sense strand
gaaccgggcaccaguacuc

SEQ ID NO: 1097975 - RNA, 19 nt, Homo sapiens
  misc_RNA (1)...(19): siRNA sense strand
cauagacccuccugugcau

SEQ ID NO: 1097976 - RNA, 19 nt, Homo sapiens
  misc_RNA (1)...(19): siRNA sense strand
cacaacuccuggucaucua

SEQ ID NO: 1097977 - RNA, 19 nt, Homo sapiens
  misc_RNA (1)...(19): siRNA sense strand
acgcaggccguaucuauuu

SEQ ID NO: 1097978 - RNA, 19 nt, Homo sapiens
  misc_RNA (1)...(19): siRNA sense strand
gcaccaguacucagcauag

SEQ ID NO: 1097979 - RNA, 19 nt, Homo sapiens
  misc_RNA (1)...(19): siRNA sense strand
gaugaagaauaaagaugac

SEQ ID NO: 1097980 - RNA, 19 nt, Homo sapiens
  misc_RNA (1)...(19): siRNA sense strand
agaauggccagaugaagaa

SEQ ID NO: 1097981 - RNA, 19 nt, Homo sapiens
  misc_RNA (1)...(19): siRNA sense strand
aagaauggccagaugaaga

SEQ ID NO: 1097982 - RNA, 19 nt, Homo sapiens
  misc_RNA (1)...(19): siRNA sense strand
guagcaggcacccaaauca

SEQ ID NO: 1097983 - RNA, 19 nt, Homo sapiens
  misc_RNA (1)...(19): siRNA sense strand
gagauagcuugggugucua

SEQ ID NO: 1097984 - RNA, 19 nt, Homo sapiens
  misc_RNA (1)...(19): siRNA sense strand
caacuaccacucgcccuuu

SEQ ID NO: 1097985 - RNA, 19 nt, Homo sapiens
  misc_RNA (1)...(19): siRNA sense strand
gacccaaggccaacaagug

SEQ ID NO: 1097986 - RNA, 19 nt, Homo sapiens
  misc_RNA (1)...(19): siRNA sense strand
ugaggagauugauaccuau

SEQ ID NO: 1097987 - RNA, 19 nt, Homo sapiens
  misc_RNA (1)...(19): siRNA sense strand
uuuaaagaauggccagaug

SEQ ID NO: 1097988 - RNA, 19 nt, Homo sapiens
  misc_RNA (1)...(19): siRNA sense strand
uuaaagaauggccagauga

SEQ ID NO: 1097989 - RNA, 19 nt, Homo sapiens
  misc_RNA (1)...(19): siRNA sense strand
uaagaggacagaugugaag

SEQ ID NO: 1097990 - RNA, 19 nt, Homo sapiens
  misc_RNA (1)...(19): siRNA sense strand
ugucuagccucaaagaucu

SEQ ID NO: 1097991 - RNA, 19 nt, Homo sapiens
  misc_RNA (1)...(19): siRNA sense strand
cugguugucccaaguauuu

SEQ ID NO: 1097992 - RNA, 19 nt, Homo sapiens
  misc_RNA (1)...(19): siRNA sense strand
ggagacaaccaacauuuug

SEQ ID NO: 1097993 - RNA, 19 nt, Homo sapiens
  misc_RNA (1)...(19): siRNA sense strand
guguggaccucaugugaag

SEQ ID NO: 1097994 - RNA, 19 nt, Homo sapiens
  misc_RNA (1)...(19): siRNA sense strand
gcagugccccucagaauau

SEQ ID NO: 1097995 - RNA, 19 nt, Homo sapiens
  misc_RNA (1)...(19): siRNA sense strand
gcccuuuggcugcaaguuu

SEQ ID NO: 1097996 - RNA, 19 nt, Homo sapiens
  misc_RNA (1)...(19): siRNA sense strand
ccagaaccgggcaccagua

SEQ ID NO: 1097997 - RNA, 19 nt, Homo sapiens
  misc_RNA (1)...(19): siRNA sense strand
acaaggcagcuguguuuga

SEQ ID NO: 1097998 - RNA, 19 nt, Homo sapiens
  misc_RNA (1)...(19): siRNA sense strand
auggccagaugaagaauaa

SEQ ID NO: 1097999 - RNA, 19 nt, Homo sapiens
  misc_RNA (1)...(19): siRNA sense strand
ccuaagaggacagauguga

SEQ ID NO: 1098000 - RNA, 19 nt, Homo sapiens
  misc_RNA (1)...(19): siRNA sense strand
aaagugguuuaaagaaugg

SEQ ID NO: 1098001 - RNA, 19 nt, Homo sapiens
  misc_RNA (1)...(19): siRNA sense strand
agcaugggcugacccuuga

SEQ ID NO: 1098002 - RNA, 19 nt, Homo sapiens
  misc_RNA (1)...(19): siRNA sense strand
cacggacucuggccugguu

SEQ ID NO: 1098003 - RNA, 19 nt, Homo sapiens
  misc_RNA (1)...(19): siRNA sense strand
guaccgccaugaugagaac

SEQ ID NO: 1098004 - RNA, 19 nt, Homo sapiens
  misc_RNA (1)...(19): siRNA sense strand
cuucagggcaggugacauu

SEQ ID NO: 1098005 - RNA, 19 nt, Homo sapiens
  misc_RNA (1)...(19): siRNA sense strand
ccucagaauaucccuaaga

SEQ ID NO: 1098006 - RNA, 19 nt, Homo sapiens
  misc_RNA (1)...(19): siRNA sense strand
caccaguacucagcauaga

SEQ ID NO: 1098007 - RNA, 19 nt, Homo sapiens
  misc_RNA (1)...(19): siRNA sense strand
ggucaucaacugccuggau

SEQ ID NO: 1098008 - RNA, 19 nt, Homo sapiens
  misc_RNA (1)...(19): siRNA sense strand
caggguaucagcuguggaa

SEQ ID NO: 1098009 - RNA, 19 nt, Homo sapiens
  misc_RNA (1)...(19): siRNA sense strand
gauuggcugggaaguauug

SEQ ID NO: 1098010 - RNA, 19 nt, Homo sapiens
  misc_RNA (1)...(19): siRNA sense strand
acaggcacauggaauccuu

SEQ ID NO: 1098011 - RNA, 19 nt, Homo sapiens
  misc_RNA (1)...(19): siRNA sense strand
agaccuucaucaaacagaa

SEQ ID NO: 1098012 - RNA, 19 nt, Homo sapiens
  misc_RNA (1)...(19): siRNA sense strand
gcgaucaacccugguacaa

SEQ ID NO: 1098013 - RNA, 19 nt, Homo sapiens
  misc_RNA (1)...(19): siRNA sense strand
cggcacaacuccuggucau

SEQ ID NO: 1098014 - RNA, 19 nt, Homo sapiens
  misc_RNA (1)...(19): siRNA sense strand
cccuuuggcugcaaguuug

SEQ ID NO: 1098015 - RNA, 19 nt, Homo sapiens
  misc_RNA (1)...(19): siRNA sense strand
ggaggugggcaucaacuac

SEQ ID NO: 1098016 - RNA, 19 nt, Homo sapiens
  misc_RNA (1)...(19): siRNA sense strand
uuggagaccuucaucaaac

SEQ ID NO: 1098017 - RNA, 19 nt, Homo sapiens
  misc_RNA (1)...(19): siRNA sense strand
cagaugaagaauaaagaug

SEQ ID NO: 1098018 - RNA, 19 nt, Homo sapiens
  misc_RNA (1)...(19): siRNA sense strand
uaacagguugaaucccaaa

SEQ ID NO: 1098019 - RNA, 19 nt, Homo sapiens
  misc_RNA (1)...(19): siRNA sense strand
auaauggagugaagugucu

SEQ ID NO: 1098020 - RNA, 19 nt, Homo sapiens
  misc_RNA (1)...(19): siRNA sense strand
acaggcaaguuugucaaga

SEQ ID NO: 1098021 - RNA, 19 nt, Homo sapiens
  misc_RNA (1)...(19): siRNA sense strand
cuggagacaaccaacauuu

SEQ ID NO: 1098022 - RNA, 19 nt, Homo sapiens
  misc_RNA (1)...(19): siRNA sense strand
gccagaugaagaauaaaga

SEQ ID NO: 1098023 - RNA, 19 nt, Homo sapiens
  misc_RNA (1)...(19): siRNA sense strand
gcacccaaaucaggcaacu

SEQ ID NO: 1098024 - RNA, 19 nt, Homo sapiens
  misc_RNA (1)...(19): siRNA sense strand
ccagaugaagaauaaagau

SEQ ID NO: 1098025 - RNA, 19 nt, Homo sapiens
  misc_RNA (1)...(19): siRNA sense strand
uagcuugggugucuaucag

SEQ ID NO: 1098026 - RNA, 19 nt, Homo sapiens
  misc_RNA (1)...(19): siRNA sense strand
acagauuggcugggaagua

SEQ ID NO: 1098027 - RNA, 19 nt, Homo sapiens
  misc_RNA (1)...(19): siRNA sense strand
cagcuguguuugaggagau

SEQ ID NO: 1098028 - RNA, 19 nt, Homo sapiens
  misc_RNA (1)...(19): siRNA sense strand
uggagaccuucaucaaaca

SEQ ID NO: 1098029 - RNA, 19 nt, Homo sapiens
  misc_RNA (1)...(19): siRNA sense strand
gccaagugggcaucaauca

SEQ ID NO: 1098030 - RNA, 19 nt, Homo sapiens
  misc_RNA (1)...(19): siRNA sense strand
caagacccaaggccaacaa

SEQ ID NO: 1098031 - RNA, 19 nt, Homo sapiens
  misc_RNA (1)...(19): siRNA sense strand
cuaagaggacagaugugaa

SEQ ID NO: 1098032 - RNA, 19 nt, Homo sapiens
  misc_RNA (1)...(19): siRNA sense strand
gaagucgaacagggcauug

SEQ ID NO: 1098033 - RNA, 19 nt, Homo sapiens
  misc_RNA (1)...(19): siRNA sense strand
ccaauuuugucaagauguu

SEQ ID NO: 1098034 - RNA, 19 nt, Homo sapiens
  misc_RNA (1)...(19): siRNA sense strand
aagggaaccuggcucuuuu

SEQ ID NO: 1098035 - RNA, 19 nt, Homo sapiens
  misc_RNA (1)...(19): siRNA sense strand
ggccagaugaagaauaaag

SEQ ID NO: 1098036 - RNA, 19 nt, Homo sapiens
  misc_RNA (1)...(19): siRNA sense strand
gcaggccguaucuauuugu

SEQ ID NO: 1098037 - RNA, 19 nt, Homo sapiens
  misc_RNA (1)...(19): siRNA sense strand
gaacagaccuacaggaaug

SEQ ID NO: 1098038 - RNA, 19 nt, Homo sapiens
  misc_RNA (1)...(19): siRNA sense strand
gaacagggcucagcaaaug

SEQ ID NO: 1098039 - RNA, 19 nt, Homo sapiens
  misc_RNA (1)...(19): siRNA sense strand
gagaagaccugcaggaguu

SEQ ID NO: 1098040 - RNA, 19 nt, Homo sapiens
  misc_RNA (1)...(19): siRNA sense strand
gagaggccaugcuccauuu

SEQ ID NO: 1098041 - RNA, 19 nt, Homo sapiens
  misc_RNA (1)...(19): siRNA sense strand
gaaacuuuguagaacgaua

SEQ ID NO: 1098042 - RNA, 19 nt, Homo sapiens
  misc_RNA (1)...(19): siRNA sense strand
gggaaugcguguacacuga

SEQ ID NO: 1098043 - RNA, 19 nt, Homo sapiens
  misc_RNA (1)...(19): siRNA sense strand
gaacgauacaaguuacuaa

SEQ ID NO: 1098044 - RNA, 19 nt, Homo sapiens
  misc_RNA (1)...(19): siRNA sense strand
cgauacaaguuacuaagaa

SEQ ID NO: 1098045 - RNA, 19 nt, Homo sapiens
  misc_RNA (1)...(19): siRNA sense strand
guacauggcagacacauuc

SEQ ID NO: 1098046 - RNA, 19 nt, Homo sapiens
  misc_RNA (1)...(19): siRNA sense strand
gaacagaggauccugaacu

SEQ ID NO: 1098047 - RNA, 19 nt, Homo sapiens
  misc_RNA (1)...(19): siRNA sense strand
ggauguguauggauuugaa

SEQ ID NO: 1098048 - RNA, 19 nt, Homo sapiens
  misc_RNA (1)...(19): siRNA sense strand
gaacuuccacaucuucuau

SEQ ID NO: 1098049 - RNA, 19 nt, Homo sapiens
  misc_RNA (1)...(19): siRNA sense strand
gggaguaccucagagaaga

SEQ ID NO: 1098050 - RNA, 19 nt, Homo sapiens
  misc_RNA (1)...(19): siRNA sense strand
guucaugacugacucuaug

SEQ ID NO: 1098051 - RNA, 19 nt, Homo sapiens
  misc_RNA (1)...(19): siRNA sense strand
gcaggucaauggccacaau

SEQ ID NO: 1098052 - RNA, 19 nt, Homo sapiens
  misc_RNA (1)...(19): siRNA sense strand
agaccuaccuccuagagaa

SEQ ID NO: 1098053 - RNA, 19 nt, Homo sapiens
  misc_RNA (1)...(19): siRNA sense strand
uggcagaaguggagaauca

SEQ ID NO: 1098054 - RNA, 19 nt, Homo sapiens
  misc_RNA (1)...(19): siRNA sense strand
ggaccaagguguucaugac

SEQ ID NO: 1098055 - RNA, 19 nt, Homo sapiens
  misc_RNA (1)...(19): siRNA sense strand
ccaagguguucaugacuga

SEQ ID NO: 1098056 - RNA, 19 nt, Homo sapiens
  misc_RNA (1)...(19): siRNA sense strand
ccucagggaucgauaaagu

SEQ ID NO: 1098057 - RNA, 19 nt, Homo sapiens
  misc_RNA (1)...(19): siRNA sense strand
cguguacacugaggaauaa

SEQ ID NO: 1098058 - RNA, 19 nt, Homo sapiens
  misc_RNA (1)...(19): siRNA sense strand
gccauucguuccugguuaa

SEQ ID NO: 1098059 - RNA, 19 nt, Homo sapiens
  misc_RNA (1)...(19): siRNA sense strand
gauacaaguuacuaagaag

SEQ ID NO: 1098060 - RNA, 19 nt, Homo sapiens
  misc_RNA (1)...(19): siRNA sense strand
gcagacagcagcagguguu

SEQ ID NO: 1098061 - RNA, 19 nt, Homo sapiens
  misc_RNA (1)...(19): siRNA sense strand
gcagagaggauagaacaga

SEQ ID NO: 1098062 - RNA, 19 nt, Homo sapiens
  misc_RNA (1)...(19): siRNA sense strand
caacaucuuuaagguccua

SEQ ID NO: 1098063 - RNA, 19 nt, Homo sapiens
  misc_RNA (1)...(19): siRNA sense strand
guagaacgauacaaguuac

SEQ ID NO: 1098064 - RNA, 19 nt, Homo sapiens
  misc_RNA (1)...(19): siRNA sense strand
gaacuccaacccugucaug

SEQ ID NO: 1098065 - RNA, 19 nt, Homo sapiens
  misc_RNA (1)...(19): siRNA sense strand
acaacagucuggaacaguu

SEQ ID NO: 1098066 - RNA, 19 nt, Homo sapiens
  misc_RNA (1)...(19): siRNA sense strand
uaacaacagcagucgcuuu

SEQ ID NO: 1098067 - RNA, 19 nt, Homo sapiens
  misc_RNA (1)...(19): siRNA sense strand
gggagguccugcuguacaa

SEQ ID NO: 1098068 - RNA, 19 nt, Homo sapiens
  misc_RNA (1)...(19): siRNA sense strand
gagccgcaguccagaccua

SEQ ID NO: 1098069 - RNA, 19 nt, Homo sapiens
  misc_RNA (1)...(19): siRNA sense strand
caacuacgccaaugagaag

SEQ ID NO: 1098070 - RNA, 19 nt, Homo sapiens
  misc_RNA (1)...(19): siRNA sense strand
caagauugcagagaggaua

SEQ ID NO: 1098071 - RNA, 19 nt, Homo sapiens
  misc_RNA (1)...(19): siRNA sense strand
cuacagcauuacaggcuuu

SEQ ID NO: 1098072 - RNA, 19 nt, Homo sapiens
  misc_RNA (1)...(19): siRNA sense strand
ucagggaucgauaaaguuu

SEQ ID NO: 1098073 - RNA, 19 nt, Homo sapiens
  misc_RNA (1)...(19): siRNA sense strand
caauacggcuaugggugua

SEQ ID NO: 1098074 - RNA, 19 nt, Homo sapiens
  misc_RNA (1)...(19): siRNA sense strand
ucauaggccugcuggaugu

SEQ ID NO: 1098075 - RNA, 19 nt, Homo sapiens
  misc_RNA (1)...(19): siRNA sense strand
gcuuagaagaggauuguuu

SEQ ID NO: 1098076 - RNA, 19 nt, Homo sapiens
  misc_RNA (1)...(19): siRNA sense strand
ccagucaaccagucuauug

SEQ ID NO: 1098077 - RNA, 19 nt, Homo sapiens
  misc_RNA (1)...(19): siRNA sense strand
ucaccgaaacuuuguagaa

SEQ ID NO: 1098078 - RNA, 19 nt, Homo sapiens
  misc_RNA (1)...(19): siRNA sense strand
gagacugccuggccaaacu

SEQ ID NO: 1098079 - RNA, 19 nt, Homo sapiens
  misc_RNA (1)...(19): siRNA sense strand
gcguguacacugaggaaua

SEQ ID NO: 1098080 - RNA, 19 nt, Homo sapiens
  misc_RNA (1)...(19): siRNA sense strand
ggugaauccugugacacua

SEQ ID NO: 1098081 - RNA, 19 nt, Homo sapiens
  misc_RNA (1)...(19): siRNA sense strand
gagauggugcagauuagaa

SEQ ID NO: 1098082 - RNA, 19 nt, Homo sapiens
  misc_RNA (1)...(19): siRNA sense strand
agaacaacaucuuuaaggu

SEQ ID NO: 1098083 - RNA, 19 nt, Homo sapiens
  misc_RNA (1)...(19): siRNA sense strand
gugaacagaccuacaggaa

SEQ ID NO: 1098084 - RNA, 19 nt, Homo sapiens
  misc_RNA (1)...(19): siRNA sense strand
gcugacaucugcccugaac

SEQ ID NO: 1098085 - RNA, 19 nt, Homo sapiens
  misc_RNA (1)...(19): siRNA sense strand
gaucuaugcgcgguuguuu

SEQ ID NO: 1098086 - RNA, 19 nt, Homo sapiens
  misc_RNA (1)...(19): siRNA sense strand
gaguggugcuggaaagaca

SEQ ID NO: 1098087 - RNA, 19 nt, Homo sapiens
  misc_RNA (1)...(19): siRNA sense strand
gauggaugaugccaaguac

SEQ ID NO: 1098088 - RNA, 19 nt, Homo sapiens
  misc_RNA (1)...(19): siRNA sense strand
gaaccagucaaccagucua

SEQ ID NO: 1098089 - RNA, 19 nt, Homo sapiens
  misc_RNA (1)...(19): siRNA sense strand
ccaccucaccugcaucuug

SEQ ID NO: 1098090 - RNA, 19 nt, Homo sapiens
  misc_RNA (1)...(19): siRNA sense strand
gagcuuagaagaggauugu

SEQ ID NO: 1098091 - RNA, 19 nt, Homo sapiens
  misc_RNA (1)...(19): siRNA sense strand
gcccauauccugccaaagg

SEQ ID NO: 1098092 - RNA, 19 nt, Homo sapiens
  misc_RNA (1)...(19): siRNA sense strand
cgauggaugaugccaagua

SEQ ID NO: 1098093 - RNA, 19 nt, Homo sapiens
  misc_RNA (1)...(19): siRNA sense strand
ugggagagccacaagauug

SEQ ID NO: 1098094 - RNA, 19 nt, Homo sapiens
  misc_RNA (1)...(19): siRNA sense strand
ggaaagacacaggcugauc

SEQ ID NO: 1098095 - RNA, 19 nt, Homo sapiens
  misc_RNA (1)...(19): siRNA sense strand
uuacaggcuuuaaucagau

SEQ ID NO: 1098096 - RNA, 19 nt, Homo sapiens
  misc_RNA (1)...(19): siRNA sense strand
gaaguggagaaucagaaug

SEQ ID NO: 1098097 - RNA, 19 nt, Homo sapiens
  misc_RNA (1)...(19): siRNA sense strand
uuccacaucuucuaucaga

SEQ ID NO: 1098098 - RNA, 19 nt, Homo sapiens
  misc_RNA (1)...(19): siRNA sense strand
ugaauccugugacacuaga

SEQ ID NO: 1098099 - RNA, 19 nt, Homo sapiens
  misc_RNA (1)...(19): siRNA sense strand
ggagagaguggugcuggaa

SEQ ID NO: 1098100 - RNA, 19 nt, Homo sapiens
  misc_RNA (1)...(19): siRNA sense strand
ccuucacccuacagcauua

SEQ ID NO: 1098101 - RNA, 19 nt, Homo sapiens
  misc_RNA (1)...(19): siRNA sense strand
gguguaggcagcuuucaga

SEQ ID NO: 1098102 - RNA, 19 nt, Homo sapiens
  misc_RNA (1)...(19): siRNA sense strand
gcagaaguggagaaucaga

SEQ ID NO: 1098103 - RNA, 19 nt, Homo sapiens
  misc_RNA (1)...(19): siRNA sense strand
guacacugaggaauaacaa

SEQ ID NO: 1098104 - RNA, 19 nt, Homo sapiens
  misc_RNA (1)...(19): siRNA sense strand
uggccugccuugcugcuaa

SEQ ID NO: 1098105 - RNA, 19 nt, Homo sapiens
  misc_RNA (1)...(19): siRNA sense strand
cagcccauauccugccaaa

SEQ ID NO: 1098106 - RNA, 19 nt, Homo sapiens
  misc_RNA (1)...(19): siRNA sense strand
ccgaaacuuuguagaacga

SEQ ID NO: 1098107 - RNA, 19 nt, Homo sapiens
  misc_RNA (1)...(19): siRNA sense strand
ucaacuacgccaaugagaa

SEQ ID NO: 1098108 - RNA, 19 nt, Homo sapiens
  misc_RNA (1)...(19): siRNA sense strand
cuggagauggugcagauua

SEQ ID NO: 1098109 - RNA, 19 nt, Homo sapiens
  misc_RNA (1)...(19): siRNA sense strand
ccagagaggagcuuagaag

SEQ ID NO: 1098110 - RNA, 19 nt, Homo sapiens
  misc_RNA (1)...(19): siRNA sense strand
gaaugucaagagccugauu

SEQ ID NO: 1098111 - RNA, 19 nt, Homo sapiens
  misc_RNA (1)...(19): siRNA sense strand
cgcccgagcuaaugagaga

SEQ ID NO: 1098112 - RNA, 19 nt, Homo sapiens
  misc_RNA (1)...(19): siRNA sense strand
cagaacaacaucuuuaagg

SEQ ID NO: 1098113 - RNA, 19 nt, Homo sapiens
  misc_RNA (1)...(19): siRNA sense strand
gcagucgcuuugggaaguu

SEQ ID NO: 1098114 - RNA, 19 nt, Homo sapiens
  misc_RNA (1)...(19): siRNA sense strand
gcacccugguagccuugaa

SEQ ID NO: 1098115 - RNA, 19 nt, Homo sapiens
  misc_RNA (1)...(19): siRNA sense strand
gcuggaugguguggaagaa

SEQ ID NO: 1098116 - RNA, 19 nt, Homo sapiens
  misc_RNA (1)...(19): siRNA sense strand
agagcuggaugguguggaa

SEQ ID NO: 1098117 - RNA, 19 nt, Homo sapiens
  misc_RNA (1)...(19): siRNA sense strand
uggccaaacugaucuaugc

SEQ ID NO: 1098118 - RNA, 19 nt, Homo sapiens
  misc_RNA (1)...(19): siRNA sense strand
gaugccaaguacucuguca

SEQ ID NO: 1098119 - RNA, 19 nt, Homo sapiens
  misc_RNA (1)...(19): siRNA sense strand
gagagaguggugcuggaaa

SEQ ID NO: 1098120 - RNA, 19 nt, Homo sapiens
  misc_RNA (1)...(19): siRNA sense strand
cauggaagcuuuugggaau

SEQ ID NO: 1098121 - RNA, 19 nt, Homo sapiens
  misc_RNA (1)...(19): siRNA sense strand
ucuaugcgcgguuguuuga

SEQ ID NO: 1098122 - RNA, 19 nt, Homo sapiens
  misc_RNA (1)...(19): siRNA sense strand
gaccuaccuccuagagaaa

SEQ ID NO: 1098123 - RNA, 19 nt, Homo sapiens
  misc_RNA (1)...(19): siRNA sense strand
ugcuggagcuucuggaaug

SEQ ID NO: 1098124 - RNA, 19 nt, Homo sapiens
  misc_RNA (1)...(19): siRNA sense strand
gcaucaacuacgccaauga

SEQ ID NO: 1098125 - RNA, 19 nt, Homo sapiens
  misc_RNA (1)...(19): siRNA sense strand
ggagauggugcagauuaga

SEQ ID NO: 1098126 - RNA, 19 nt, Homo sapiens
  misc_RNA (1)...(19): siRNA sense strand
cagagaggagcuuagaaga

SEQ ID NO: 1098127 - RNA, 19 nt, Homo sapiens
  misc_RNA (1)...(19): siRNA sense strand
agccauucguuccugguua

SEQ ID NO: 1098128 - RNA, 19 nt, Homo sapiens
  misc_RNA (1)...(19): siRNA sense strand
caccgaaacuuuguagaac

SEQ ID NO: 1098129 - RNA, 19 nt, Homo sapiens
  misc_RNA (1)...(19): siRNA sense strand
ugaaucauuuccugacaac

SEQ ID NO: 1098130 - RNA, 19 nt, Homo sapiens
  misc_RNA (1)...(19): siRNA sense strand
cccagaacaacaucuuuaa

SEQ ID NO: 1098131 - RNA, 19 nt, Homo sapiens
  misc_RNA (1)...(19): siRNA sense strand
acccagaacaacaucuuua

SEQ ID NO: 1098132 - RNA, 19 nt, Homo sapiens
  misc_RNA (1)...(19): siRNA sense strand
acgucucgcugccuaauga

SEQ ID NO: 1098133 - RNA, 19 nt, Homo sapiens
  misc_RNA (1)...(19): siRNA sense strand
agggaucgauaaaguuuca

SEQ ID NO: 1098134 - RNA, 19 nt, Homo sapiens
  misc_RNA (1)...(19): siRNA sense strand
ggccugccuugcugcuaaa

SEQ ID NO: 1098135 - RNA, 19 nt, Homo sapiens
  misc_RNA (1)...(19): siRNA sense strand
gcucauccaggcagccauu

SEQ ID NO: 1098136 - RNA, 19 nt, Homo sapiens
  misc_RNA (1)...(19): siRNA sense strand
agaggauccugaacuccaa

SEQ ID NO: 1098137 - RNA, 19 nt, Homo sapiens
  misc_RNA (1)...(19): siRNA sense strand
guaaugaagugguaacuaa

SEQ ID NO: 1098138 - RNA, 19 nt, Homo sapiens
  misc_RNA (1)...(19): siRNA sense strand
caacaaaugugucauccua

SEQ ID NO: 1098139 - RNA, 19 nt, Homo sapiens
  misc_RNA (1)...(19): siRNA sense strand
gaaaguggccaauauaauu

SEQ ID NO: 1098140 - RNA, 19 nt, Homo sapiens
  misc_RNA (1)...(19): siRNA sense strand
ccacauaccuucaauagga

SEQ ID NO: 1098141 - RNA, 19 nt, Homo sapiens
  misc_RNA (1)...(19): siRNA sense strand
ugaaagagaugcugcaauu

SEQ ID NO: 1098142 - RNA, 19 nt, Homo sapiens
  misc_RNA (1)...(19): siRNA sense strand
ggaagaaacucagcuuuga

SEQ ID NO: 1098143 - RNA, 19 nt, Homo sapiens
  misc_RNA (1)...(19): siRNA sense strand
gcagacagauggacaauuc

SEQ ID NO: 1098144 - RNA, 19 nt, Homo sapiens
  misc_RNA (1)...(19): siRNA sense strand
ugaaaucccuuauccagua

SEQ ID NO: 1098145 - RNA, 19 nt, Homo sapiens
  misc_RNA (1)...(19): siRNA sense strand
cgacagaucucaacuagug

SEQ ID NO: 1098146 - RNA, 19 nt, Homo sapiens
  misc_RNA (1)...(19): siRNA sense strand
gcccugaccugguuaauaa

SEQ ID NO: 1098147 - RNA, 19 nt, Homo sapiens
  misc_RNA (1)...(19): siRNA sense strand
gcucagaguugauaugaaa

SEQ ID NO: 1098148 - RNA, 19 nt, Homo sapiens
  misc_RNA (1)...(19): siRNA sense strand
gcaugaaguuguuggauaa

SEQ ID NO: 1098149 - RNA, 19 nt, Homo sapiens
  misc_RNA (1)...(19): siRNA sense strand
caaugaagccuauguuaua

SEQ ID NO: 1098150 - RNA, 19 nt, Homo sapiens
  misc_RNA (1)...(19): siRNA sense strand
gaucaagucugcaauaagu

SEQ ID NO: 1098151 - RNA, 19 nt, Homo sapiens
  misc_RNA (1)...(19): siRNA sense strand
ccauagagcuuaaaugugu

SEQ ID NO: 1098152 - RNA, 19 nt, Homo sapiens
  misc_RNA (1)...(19): siRNA sense strand
gaucagguguguuuccuuu

SEQ ID NO: 1098153 - RNA, 19 nt, Homo sapiens
  misc_RNA (1)...(19): siRNA sense strand
gaaaugaagaugcucagua

SEQ ID NO: 1098154 - RNA, 19 nt, Homo sapiens
  misc_RNA (1)...(19): siRNA sense strand
cagcaaagguuauuaaagu

SEQ ID NO: 1098155 - RNA, 19 nt, Homo sapiens
  misc_RNA (1)...(19): siRNA sense strand
gaaaagaacuauagacuuc

SEQ ID NO: 1098156 - RNA, 19 nt, Homo sapiens
  misc_RNA (1)...(19): siRNA sense strand
uaaacuagcugauggugaa

SEQ ID NO: 1098157 - RNA, 19 nt, Homo sapiens
  misc_RNA (1)...(19): siRNA sense strand
ggaagaagcacccgacauu

SEQ ID NO: 1098158 - RNA, 19 nt, Homo sapiens
  misc_RNA (1)...(19): siRNA sense strand
gagaugacauacauauuug

SEQ ID NO: 1098159 - RNA, 19 nt, Homo sapiens
  misc_RNA (1)...(19): siRNA sense strand
guggacaacuugguuauua

SEQ ID NO: 1098160 - RNA, 19 nt, Homo sapiens
  misc_RNA (1)...(19): siRNA sense strand
ggaaacagagcccagauuu

SEQ ID NO: 1098161 - RNA, 19 nt, Homo sapiens
  misc_RNA (1)...(19): siRNA sense strand
gagaauagauuggauugga

SEQ ID NO: 1098162 - RNA, 19 nt, Homo sapiens
  misc_RNA (1)...(19): siRNA sense strand
uaacagaugcuauagauga

SEQ ID NO: 1098163 - RNA, 19 nt, Homo sapiens
  misc_RNA (1)...(19): siRNA sense strand
caacugaaauugauugagu

SEQ ID NO: 1098164 - RNA, 19 nt, Homo sapiens
  misc_RNA (1)...(19): siRNA sense strand
gaaccuucaugauaaaguu

SEQ ID NO: 1098165 - RNA, 19 nt, Homo sapiens
  misc_RNA (1)...(19): siRNA sense strand
gcuaacagaugcuauagau

SEQ ID NO: 1098166 - RNA, 19 nt, Homo sapiens
  misc_RNA (1)...(19): siRNA sense strand
gaacuucgaaccuucauga

SEQ ID NO: 1098167 - RNA, 19 nt, Homo sapiens
  misc_RNA (1)...(19): siRNA sense strand
ggagauguaugaacugugu

SEQ ID NO: 1098168 - RNA, 19 nt, Homo sapiens
  misc_RNA (1)...(19): siRNA sense strand
aagcauaucuuaccuuaga

SEQ ID NO: 1098169 - RNA, 19 nt, Homo sapiens
  misc_RNA (1)...(19): siRNA sense strand
caaagaagguugggauuuc

SEQ ID NO: 1098170 - RNA, 19 nt, Homo sapiens
  misc_RNA (1)...(19): siRNA sense strand
ucacugcacuguuuacuug

SEQ ID NO: 1098171 - RNA, 19 nt, Homo sapiens
  misc_RNA (1)...(19): siRNA sense strand
gugaagauguuuaccugua

SEQ ID NO: 1098172 - RNA, 19 nt, Homo sapiens
  misc_RNA (1)...(19): siRNA sense strand
aaagagacaugcgagaaua

SEQ ID NO: 1098173 - RNA, 19 nt, Homo sapiens
  misc_RNA (1)...(19): siRNA sense strand
uagauaagcuggccaggaa

SEQ ID NO: 1098174 - RNA, 19 nt, Homo sapiens
  misc_RNA (1)...(19): siRNA sense strand
gaagcuaacagaugcuaua

SEQ ID NO: 1098175 - RNA, 19 nt, Homo sapiens
  misc_RNA (1)...(19): siRNA sense strand
gcacaucagugaacaagag

SEQ ID NO: 1098176 - RNA, 19 nt, Homo sapiens
  misc_RNA (1)...(19): siRNA sense strand
gcaagugauucuuaaagga

SEQ ID NO: 1098177 - RNA, 19 nt, Homo sapiens
  misc_RNA (1)...(19): siRNA sense strand
gaugaccgauuuauuugaa

SEQ ID NO: 1098178 - RNA, 19 nt, Homo sapiens
  misc_RNA (1)...(19): siRNA sense strand
aacaagagaugaccgauuu

SEQ ID NO: 1098179 - RNA, 19 nt, Homo sapiens
  misc_RNA (1)...(19): siRNA sense strand
gaaaauguccccaaaguaa

SEQ ID NO: 1098180 - RNA, 19 nt, Homo sapiens
  misc_RNA (1)...(19): siRNA sense strand
ggauuuagcacuucacaaa

SEQ ID NO: 1098181 - RNA, 19 nt, Homo sapiens
  misc_RNA (1)...(19): siRNA sense strand
gaagauguuuaccuguauu

SEQ ID NO: 1098182 - RNA, 19 nt, Homo sapiens
  misc_RNA (1)...(19): siRNA sense strand
cuucgaaccuucaugauaa

SEQ ID NO: 1098183 - RNA, 19 nt, Homo sapiens
  misc_RNA (1)...(19): siRNA sense strand
ggugaacuuuccuuugaua

SEQ ID NO: 1098184 - RNA, 19 nt, Homo sapiens
  misc_RNA (1)...(19): siRNA sense strand
cgagaugacauacauauuu

SEQ ID NO: 1098185 - RNA, 19 nt, Homo sapiens
  misc_RNA (1)...(19): siRNA sense strand
ggcaugaaguuguuggaua

SEQ ID NO: 1098186 - RNA, 19 nt, Homo sapiens
  misc_RNA (1)...(19): siRNA sense strand
caggauaaguccagaagaa

SEQ ID NO: 1098187 - RNA, 19 nt, Homo sapiens
  misc_RNA (1)...(19): siRNA sense strand
caucagagguuuccagcuu

SEQ ID NO: 1098188 - RNA, 19 nt, Homo sapiens
  misc_RNA (1)...(19): siRNA sense strand
ggauaaguccagaagaaua

SEQ ID NO: 1098189 - RNA, 19 nt, Homo sapiens
  misc_RNA (1)...(19): siRNA sense strand
gaaagagaugcugcaauua

SEQ ID NO: 1098190 - RNA, 19 nt, Homo sapiens
  misc_RNA (1)...(19): siRNA sense strand
ugaaacaacugcugcugaa

SEQ ID NO: 1098191 - RNA, 19 nt, Homo sapiens
  misc_RNA (1)...(19): siRNA sense strand
guggugaacuuuccuuuga

SEQ ID NO: 1098192 - RNA, 19 nt, Homo sapiens
  misc_RNA (1)...(19): siRNA sense strand
ggauuuccauucucaauuc

SEQ ID NO: 1098193 - RNA, 19 nt, Homo sapiens
  misc_RNA (1)...(19): siRNA sense strand
caaaguguauuccuguaga

SEQ ID NO: 1098194 - RNA, 19 nt, Homo sapiens
  misc_RNA (1)...(19): siRNA sense strand
acacaaugcucaucaacuu

SEQ ID NO: 1098195 - RNA, 19 nt, Homo sapiens
  misc_RNA (1)...(19): siRNA sense strand
gaaaucaggaggaaacaga

SEQ ID NO: 1098196 - RNA, 19 nt, Homo sapiens
  misc_RNA (1)...(19): siRNA sense strand
gagcaaaacucucaucaga

SEQ ID NO: 1098197 - RNA, 19 nt, Homo sapiens
  misc_RNA (1)...(19): siRNA sense strand
ggacaauguugcaacugaa

SEQ ID NO: 1098198 - RNA, 19 nt, Homo sapiens
  misc_RNA (1)...(19): siRNA sense strand
gcaaugaagccuauguuau

SEQ ID NO: 1098199 - RNA, 19 nt, Homo sapiens
  misc_RNA (1)...(19): siRNA sense strand
ggauaaaggaacaagauuu

SEQ ID NO: 1098200 - RNA, 19 nt, Homo sapiens
  misc_RNA (1)...(19): siRNA sense strand
ggacacaguaaauuucuuu

SEQ ID NO: 1098201 - RNA, 19 nt, Homo sapiens
  misc_RNA (1)...(19): siRNA sense strand
gaacaggacauaagcagau

SEQ ID NO: 1098202 - RNA, 19 nt, Homo sapiens
  misc_RNA (1)...(19): siRNA sense strand
cagcaugaauguagaucua

SEQ ID NO: 1098203 - RNA, 19 nt, Homo sapiens
  misc_RNA (1)...(19): siRNA sense strand
agagaugaccgauuuauuu

SEQ ID NO: 1098204 - RNA, 19 nt, Homo sapiens
  misc_RNA (1)...(19): siRNA sense strand
caucugaacuggaagacuu

SEQ ID NO: 1098205 - RNA, 19 nt, Homo sapiens
  misc_RNA (1)...(19): siRNA sense strand
gcaguggacaugauuauug

SEQ ID NO: 1098206 - RNA, 19 nt, Homo sapiens
  misc_RNA (1)...(19): siRNA sense strand
gcaggagucacuaaacuuu

SEQ ID NO: 1098207 - RNA, 19 nt, Homo sapiens
  misc_RNA (1)...(19): siRNA sense strand
gcgaucaagucugcaauaa

SEQ ID NO: 1098208 - RNA, 19 nt, Homo sapiens
  misc_RNA (1)...(19): siRNA sense strand
cucaagaucugcuucuaua

SEQ ID NO: 1098209 - RNA, 19 nt, Homo sapiens
  misc_RNA (1)...(19): siRNA sense strand
cagaugcuauagaugaaua

SEQ ID NO: 1098210 - RNA, 19 nt, Homo sapiens
  misc_RNA (1)...(19): siRNA sense strand
gggcguagaugaagaugau

SEQ ID NO: 1098211 - RNA, 19 nt, Homo sapiens
  misc_RNA (1)...(19): siRNA sense strand
guugauaacucugcagauu

SEQ ID NO: 1098212 - RNA, 19 nt, Homo sapiens
  misc_RNA (1)...(19): siRNA sense strand
gcaugaauguagaucuauu

SEQ ID NO: 1098213 - RNA, 19 nt, Homo sapiens
  misc_RNA (1)...(19): siRNA sense strand
uaaagagguuauccaguga

SEQ ID NO: 1098214 - RNA, 19 nt, Homo sapiens
  misc_RNA (1)...(19): siRNA sense strand
ucacuugucaucccauuua

SEQ ID NO: 1098215 - RNA, 19 nt, Homo sapiens
  misc_RNA (1)...(19): siRNA sense strand
aagaagacauguguaauga

SEQ ID NO: 1098216 - RNA, 19 nt, Homo sapiens
  misc_RNA (1)...(19): siRNA sense strand
uaacagccuuccauccaaa

SEQ ID NO: 1098217 - RNA, 19 nt, Homo sapiens
  misc_RNA (1)...(19): siRNA sense strand
uaacuuaacagaucccaaa

SEQ ID NO: 1098218 - RNA, 19 nt, Homo sapiens
  misc_RNA (1)...(19): siRNA sense strand
gccaguaacuuaacagauc

SEQ ID NO: 1098219 - RNA, 19 nt, Homo sapiens
  misc_RNA (1)...(19): siRNA sense strand
aaacaggaccauagaauug

SEQ ID NO: 1098220 - RNA, 19 nt, Homo sapiens
  misc_RNA (1)...(19): siRNA sense strand
uuagaguacucaacuguuu

SEQ ID NO: 1098221 - RNA, 19 nt, Homo sapiens
  misc_RNA (1)...(19): siRNA sense strand
gauccaugcucuccuacaa

SEQ ID NO: 1098222 - RNA, 19 nt, Homo sapiens
  misc_RNA (1)...(19): siRNA sense strand
gcaugaagcaaguagagua

SEQ ID NO: 1098223 - RNA, 19 nt, Homo sapiens
  misc_RNA (1)...(19): siRNA sense strand
ggaaagagcaggagucacu

SEQ ID NO: 1098224 - RNA, 19 nt, Homo sapiens
  misc_RNA (1)...(19): siRNA sense strand
gaucucaacuaguggugaa

SEQ ID NO: 1098225 - RNA, 19 nt, Homo sapiens
  misc_RNA (1)...(19): siRNA sense strand
uuacagcucuuuguugaaa

SEQ ID NO: 1098226 - RNA, 19 nt, Homo sapiens
  misc_RNA (1)...(19): siRNA sense strand
aauaggagcugcauguguu

SEQ ID NO: 1098227 - RNA, 19 nt, Homo sapiens
  misc_RNA (1)...(19): siRNA sense strand
gaaaguggauccccagcua

SEQ ID NO: 1098228 - RNA, 19 nt, Homo sapiens
  misc_RNA (1)...(19): siRNA sense strand
cagaauacuuccuguaaca

SEQ ID NO: 1098229 - RNA, 19 nt, Homo sapiens
  misc_RNA (1)...(19): siRNA sense strand
gcccagcuaucaucauuga

SEQ ID NO: 1098230 - RNA, 19 nt, Homo sapiens
  misc_RNA (1)...(19): siRNA sense strand
gaacuuaacagccuuccau

SEQ ID NO: 1098231 - RNA, 19 nt, Homo sapiens
  misc_RNA (1)...(19): siRNA sense strand
gaagaaaucaggaggaaac

SEQ ID NO: 1098232 - RNA, 19 nt, Homo sapiens
  misc_RNA (1)...(19): siRNA sense strand
ggacaacuugguuauuaaa

SEQ ID NO: 1098233 - RNA, 19 nt, Homo sapiens
  misc_RNA (1)...(19): siRNA sense strand
gggaucaacuaacacaaga

SEQ ID NO: 1098234 - RNA, 19 nt, Homo sapiens
  misc_RNA (1)...(19): siRNA sense strand
guaaaggagagcaauauau

SEQ ID NO: 1098235 - RNA, 19 nt, Homo sapiens
  misc_RNA (1)...(19): siRNA sense strand
gauaccagcauuggauuua

SEQ ID NO: 1098236 - RNA, 19 nt, Homo sapiens
  misc_RNA (1)...(19): siRNA sense strand
ggaagaucauggaaaauaa

SEQ ID NO: 1098237 - RNA, 19 nt, Homo sapiens
  misc_RNA (1)...(19): siRNA sense strand
gagacccuguggccacuuu

SEQ ID NO: 1098238 - RNA, 19 nt, Homo sapiens
  misc_RNA (1)...(19): siRNA sense strand
gcuccucucuggccgacau

SEQ ID NO: 1098239 - RNA, 19 nt, Homo sapiens
  misc_RNA (1)...(19): siRNA sense strand
ugcagacgauggugacaga

SEQ ID NO: 1098240 - RNA, 19 nt, Homo sapiens
  misc_RNA (1)...(19): siRNA sense strand
gcgccaacguucaccucau

SEQ ID NO: 1098241 - RNA, 19 nt, Homo sapiens
  misc_RNA (1)...(19): siRNA sense strand
cgccaacguucaccucauc

SEQ ID NO: 1098242 - RNA, 19 nt, Homo sapiens
  misc_RNA (1)...(19): siRNA sense strand
cguggagauucaaguggaa

SEQ ID NO: 1098243 - RNA, 19 nt, Homo sapiens
  misc_RNA (1)...(19): siRNA sense strand
gaacagauuucaucaaguu

SEQ ID NO: 1098244 - RNA, 19 nt, Homo sapiens
  misc_RNA (1)...(19): siRNA sense strand
gagcagggauugauucaua

SEQ ID NO: 1098245 - RNA, 19 nt, Homo sapiens
  misc_RNA (1)...(19): siRNA sense strand
gaacaaccauccucugaaa

SEQ ID NO: 1098246 - RNA, 19 nt, Homo sapiens
  misc_RNA (1)...(19): siRNA sense strand
gauaagagcuguccuagag

SEQ ID NO: 1098247 - RNA, 19 nt, Homo sapiens
  misc_RNA (1)...(19): siRNA sense strand
ggacuuggauggaugcuuu

SEQ ID NO: 1098248 - RNA, 19 nt, Homo sapiens
  misc_RNA (1)...(19): siRNA sense strand
gaagauggguugagguuca

SEQ ID NO: 1098249 - RNA, 19 nt, Homo sapiens
  misc_RNA (1)...(19): siRNA sense strand
ggagaaggaugagcuauga

SEQ ID NO: 1098250 - RNA, 19 nt, Homo sapiens
  misc_RNA (1)...(19): siRNA sense strand
gaagugcuccucucugaua

SEQ ID NO: 1098251 - RNA, 19 nt, Homo sapiens
  misc_RNA (1)...(19): siRNA sense strand
gugaauauaugcaguggua

SEQ ID NO: 1098252 - RNA, 19 nt, Homo sapiens
  misc_RNA (1)...(19): siRNA sense strand
gaacacaaccucggaauau

SEQ ID NO: 1098253 - RNA, 19 nt, Homo sapiens
  misc_RNA (1)...(19): siRNA sense strand
gcucaucuguuaccucuuu

SEQ ID NO: 1098254 - RNA, 19 nt, Homo sapiens
  misc_RNA (1)...(19): siRNA sense strand
ccacuaacccugagcauuu

SEQ ID NO: 1098255 - RNA, 19 nt, Homo sapiens
  misc_RNA (1)...(19): siRNA sense strand
gaaugaagauauagaagca

SEQ ID NO: 1098256 - RNA, 19 nt, Homo sapiens
  misc_RNA (1)...(19): siRNA sense strand
caaagaaggaaguaucaua

SEQ ID NO: 1098257 - RNA, 19 nt, Homo sapiens
  misc_RNA (1)...(19): siRNA sense strand
gccuauagacuccauauua

SEQ ID NO: 1098258 - RNA, 19 nt, Homo sapiens
  misc_RNA (1)...(19): siRNA sense strand
gaaacaaacaucagaguuc

SEQ ID NO: 1098259 - RNA, 19 nt, Homo sapiens
  misc_RNA (1)...(19): siRNA sense strand
agacuggaaugaagauaua

SEQ ID NO: 1098260 - RNA, 19 nt, Homo sapiens
  misc_RNA (1)...(19): siRNA sense strand
ggaagacacuuauugaaaa

SEQ ID NO: 1098261 - RNA, 19 nt, Homo sapiens
  misc_RNA (1)...(19): siRNA sense strand
ggagaugauugaauuguca

SEQ ID NO: 1098262 - RNA, 19 nt, Homo sapiens
  misc_RNA (1)...(19): siRNA sense strand
ugacacugauugauucuuu

SEQ ID NO: 1098263 - RNA, 19 nt, Homo sapiens
  misc_RNA (1)...(19): siRNA sense strand
gagauuucauggccacuaa

SEQ ID NO: 1098264 - RNA, 19 nt, Homo sapiens
  misc_RNA (1)...(19): siRNA sense strand
cuucuuggcugaaauguuu

SEQ ID NO: 1098265 - RNA, 19 nt, Homo sapiens
  misc_RNA (1)...(19): siRNA sense strand
gauauuagaccugcuauug

SEQ ID NO: 1098266 - RNA, 19 nt, Homo sapiens
  misc_RNA (1)...(19): siRNA sense strand
gcaaucaugcugaaagaaa

SEQ ID NO: 1098267 - RNA, 19 nt, Homo sapiens
  misc_RNA (1)...(19): siRNA sense strand
gggaagacacuuauugaaa

SEQ ID NO: 1098268 - RNA, 19 nt, Homo sapiens
  misc_RNA (1)...(19): siRNA sense strand
gggcgugacuauaaauauu

SEQ ID NO: 1098269 - RNA, 19 nt, Homo sapiens
  misc_RNA (1)...(19): siRNA sense strand
guugaaagccuaugucuug

SEQ ID NO: 1098270 - RNA, 19 nt, Homo sapiens
  misc_RNA (1)...(19): siRNA sense strand
uagaagugcuccucucuga

SEQ ID NO: 1098271 - RNA, 19 nt, Homo sapiens
  misc_RNA (1)...(19): siRNA sense strand
ggaaucaaguacuggaaau

SEQ ID NO: 1098272 - RNA, 19 nt, Homo sapiens
  misc_RNA (1)...(19): siRNA sense strand
uagagugccuugcggauuu

SEQ ID NO: 1098273 - RNA, 19 nt, Homo sapiens
  misc_RNA (1)...(19): siRNA sense strand
uaccacagauuucagagua

SEQ ID NO: 1098274 - RNA, 19 nt, Homo sapiens
  misc_RNA (1)...(19): siRNA sense strand
uggcaaagcaguuagguua

SEQ ID NO: 1098275 - RNA, 19 nt, Homo sapiens
  misc_RNA (1)...(19): siRNA sense strand
ugaauuugcugcuuuaagu

SEQ ID NO: 1098276 - RNA, 19 nt, Homo sapiens
  misc_RNA (1)...(19): siRNA sense strand
caaaucaaagcaucucuaa

SEQ ID NO: 1098277 - RNA, 19 nt, Homo sapiens
  misc_RNA (1)...(19): siRNA sense strand
ccaaauggcaaagcaguua

SEQ ID NO: 1098278 - RNA, 19 nt, Homo sapiens
  misc_RNA (1)...(19): siRNA sense strand
ggaucugucuaaacauaaa

SEQ ID NO: 1098279 - RNA, 19 nt, Homo sapiens
  misc_RNA (1)...(19): siRNA sense strand
uauuagaccugcuauugaa

SEQ ID NO: 1098280 - RNA, 19 nt, Homo sapiens
  misc_RNA (1)...(19): siRNA sense strand
guaccuugauccuugaauu

SEQ ID NO: 1098281 - RNA, 19 nt, Homo sapiens
  misc_RNA (1)...(19): siRNA sense strand
gcaaagcaguuagguuaca

SEQ ID NO: 1098282 - RNA, 19 nt, Homo sapiens
  misc_RNA (1)...(19): siRNA sense strand
ggacaggaacugagacaga

SEQ ID NO: 1098283 - RNA, 19 nt, Homo sapiens
  misc_RNA (1)...(19): siRNA sense strand
acagcgaaguaguaauuua

SEQ ID NO: 1098284 - RNA, 19 nt, Homo sapiens
  misc_RNA (1)...(19): siRNA sense strand
gcaacaauauuugaggaau

SEQ ID NO: 1098285 - RNA, 19 nt, Homo sapiens
  misc_RNA (1)...(19): siRNA sense strand
uccacgagcuguacaaauu

SEQ ID NO: 1098286 - RNA, 19 nt, Homo sapiens
  misc_RNA (1)...(19): siRNA sense strand
cagauccucuuuccuaaug

SEQ ID NO: 1098287 - RNA, 19 nt, Homo sapiens
  misc_RNA (1)...(19): siRNA sense strand
gacaguaacuucgauugga

SEQ ID NO: 1098288 - RNA, 19 nt, Homo sapiens
  misc_RNA (1)...(19): siRNA sense strand
ucagaguggugaacagauu

SEQ ID NO: 1098289 - RNA, 19 nt, Homo sapiens
  misc_RNA (1)...(19): siRNA sense strand
gauuacaucuuuacaacag

SEQ ID NO: 1098290 - RNA, 19 nt, Homo sapiens
  misc_RNA (1)...(19): siRNA sense strand
cacaggagcaacaauauuu

SEQ ID NO: 1098291 - RNA, 19 nt, Homo sapiens
  misc_RNA (1)...(19): siRNA sense strand
gaagauauagaagcauuug

SEQ ID NO: 1098292 - RNA, 19 nt, Homo sapiens
  misc_RNA (1)...(19): siRNA sense strand
guacagauuuagauaacca

SEQ ID NO: 1098293 - RNA, 19 nt, Homo sapiens
  misc_RNA (1)...(19): siRNA sense strand
gaccugcuauugaaacuca

SEQ ID NO: 1098294 - RNA, 19 nt, Homo sapiens
  misc_RNA (1)...(19): siRNA sense strand
ugcaggagaugauugaauu

SEQ ID NO: 1098295 - RNA, 19 nt, Homo sapiens
  misc_RNA (1)...(19): siRNA sense strand
caugagacuacaaaucuua

SEQ ID NO: 1098296 - RNA, 19 nt, Homo sapiens
  misc_RNA (1)...(19): siRNA sense strand
uaaagagacaagaggauuu

SEQ ID NO: 1098297 - RNA, 19 nt, Homo sapiens
  misc_RNA (1)...(19): siRNA sense strand
uagaaauccugaagaagau

SEQ ID NO: 1098298 - RNA, 19 nt, Homo sapiens
  misc_RNA (1)...(19): siRNA sense strand
ccuauagacuccauauuag

SEQ ID NO: 1098299 - RNA, 19 nt, Homo sapiens
  misc_RNA (1)...(19): siRNA sense strand
guacaaugaugaacuucuc

SEQ ID NO: 1098300 - RNA, 19 nt, Homo sapiens
  misc_RNA (1)...(19): siRNA sense strand
uagcagauauggacaaugc

SEQ ID NO: 1098301 - RNA, 19 nt, Homo sapiens
  misc_RNA (1)...(19): siRNA sense strand
cuggaucugucuaaacaua

SEQ ID NO: 1098302 - RNA, 19 nt, Homo sapiens
  misc_RNA (1)...(19): siRNA sense strand
uuagaaauccugaagaaga

SEQ ID NO: 1098303 - RNA, 19 nt, Homo sapiens
  misc_RNA (1)...(19): siRNA sense strand
ugacauagaagauuacauc

SEQ ID NO: 1098304 - RNA, 19 nt, Homo sapiens
  misc_RNA (1)...(19): siRNA sense strand
guagggaagacacuuauug

SEQ ID NO: 1098305 - RNA, 19 nt, Homo sapiens
  misc_RNA (1)...(19): siRNA sense strand
ggaaauguuugaucaugcu

SEQ ID NO: 1098306 - RNA, 19 nt, Homo sapiens
  misc_RNA (1)...(19): siRNA sense strand
agacagcgaaguaguaauu

SEQ ID NO: 1098307 - RNA, 19 nt, Homo sapiens
  misc_RNA (1)...(19): siRNA sense strand
cacuaacccugagcauuua

SEQ ID NO: 1098308 - RNA, 19 nt, Homo sapiens
  misc_RNA (1)...(19): siRNA sense strand
caagaacaaucagaaacug

SEQ ID NO: 1098309 - RNA, 19 nt, Homo sapiens
  misc_RNA (1)...(19): siRNA sense strand
gaaaggauacagaugacau

SEQ ID NO: 1098310 - RNA, 19 nt, Homo sapiens
  misc_RNA (1)...(19): siRNA sense strand
gauggcaggugauggaaag

SEQ ID NO: 1098311 - RNA, 19 nt, Homo sapiens
  misc_RNA (1)...(19): siRNA sense strand
gacaggaacugagacagau

SEQ ID NO: 1098312 - RNA, 19 nt, Homo sapiens
  misc_RNA (1)...(19): siRNA sense strand
aauccaagcugcuaguuca

SEQ ID NO: 1098313 - RNA, 19 nt, Homo sapiens
  misc_RNA (1)...(19): siRNA sense strand
uaacuucgauuggacuugu

SEQ ID NO: 1098314 - RNA, 19 nt, Homo sapiens
  misc_RNA (1)...(19): siRNA sense strand
gauuuaacacacacuauga

SEQ ID NO: 1098315 - RNA, 19 nt, Homo sapiens
  misc_RNA (1)...(19): siRNA sense strand
ccagaaucauuaucucuag

SEQ ID NO: 1098316 - RNA, 19 nt, Homo sapiens
  misc_RNA (1)...(19): siRNA sense strand
gguccaacaugcaauccaa

SEQ ID NO: 1098317 - RNA, 19 nt, Homo sapiens
  misc_RNA (1)...(19): siRNA sense strand
aacagaagcuugggaauca

SEQ ID NO: 1098318 - RNA, 19 nt, Homo sapiens
  misc_RNA (1)...(19): siRNA sense strand
caaagcaguuagguuacaa

SEQ ID NO: 1098319 - RNA, 19 nt, Homo sapiens
  misc_RNA (1)...(19): siRNA sense strand
gcuccucucugauaaagca

SEQ ID NO: 1098320 - RNA, 19 nt, Homo sapiens
  misc_RNA (1)...(19): siRNA sense strand
aaacaaacaucagaguucu

SEQ ID NO: 1098321 - RNA, 19 nt, Homo sapiens
  misc_RNA (1)...(19): siRNA sense strand
uggugaauguacagauuua

SEQ ID NO: 1098322 - RNA, 19 nt, Homo sapiens
  misc_RNA (1)...(19): siRNA sense strand
gcugauaaagaagacauua

SEQ ID NO: 1098323 - RNA, 19 nt, Homo sapiens
  misc_RNA (1)...(19): siRNA sense strand
ucaaguacuggaaauguuu

SEQ ID NO: 1098324 - RNA, 19 nt, Homo sapiens
  misc_RNA (1)...(19): siRNA sense strand
ccagccaccucuucuacuu

SEQ ID NO: 1098325 - RNA, 19 nt, Homo sapiens
  misc_RNA (1)...(19): siRNA sense strand
gcgaaguaguaauuuagug

SEQ ID NO: 1098326 - RNA, 19 nt, Homo sapiens
  misc_RNA (1)...(19): siRNA sense strand
uauaugcagugguacaaug

SEQ ID NO: 1098327 - RNA, 19 nt, Homo sapiens
  misc_RNA (1)...(19): siRNA sense strand
ugaugaacuucuccaaaug

SEQ ID NO: 1098328 - RNA, 19 nt, Homo sapiens
  misc_RNA (1)...(19): siRNA sense strand
cauauuagcagacuggaau

SEQ ID NO: 1098329 - RNA, 19 nt, Homo sapiens
  misc_RNA (1)...(19): siRNA sense strand
uaaccagcuucaagaacaa

SEQ ID NO: 1098330 - RNA, 19 nt, Homo sapiens
  misc_RNA (1)...(19): siRNA sense strand
ucaggagguugauuugguu

SEQ ID NO: 1098331 - RNA, 19 nt, Homo sapiens
  misc_RNA (1)...(19): siRNA sense strand
guagggaggagaaacagaa

SEQ ID NO: 1098332 - RNA, 19 nt, Homo sapiens
  misc_RNA (1)...(19): siRNA sense strand
cagaggcagugaugggaaa

SEQ ID NO: 1098333 - RNA, 19 nt, Homo sapiens
  misc_RNA (1)...(19): siRNA sense strand
ggcuggaucugucuaaaca

SEQ ID NO: 1098334 - RNA, 19 nt, Homo sapiens
  misc_RNA (1)...(19): siRNA sense strand
ccuugaauuugcugcuuua

SEQ ID NO: 1098335 - RNA, 19 nt, Homo sapiens
  misc_RNA (1)...(19): siRNA sense strand
gccagaauuugcagaaagu

SEQ ID NO: 1098336 - RNA, 19 nt, Homo sapiens
  misc_RNA (1)...(19): siRNA sense strand
ggccagaauuugcagaaag

SEQ ID NO: 1098337 - RNA, 19 nt, Homo sapiens
  misc_RNA (1)...(19): siRNA sense strand
acucagauccucuuuccua

SEQ ID NO: 1098338 - RNA, 19 nt, Homo sapiens
  misc_RNA (1)...(19): siRNA sense strand
aacacaaccucggaauaua

SEQ ID NO: 1098339 - RNA, 19 nt, Homo sapiens
  misc_RNA (1)...(19): siRNA sense strand
gaagucaugaggacagaau

SEQ ID NO: 1098340 - RNA, 19 nt, Homo sapiens
  misc_RNA (1)...(19): siRNA sense strand
gcuauugaaacucaugaaa

SEQ ID NO: 1098341 - RNA, 19 nt, Homo sapiens
  misc_RNA (1)...(19): siRNA sense strand
caaagaggacagugcaugu

SEQ ID NO: 1098342 - RNA, 19 nt, Homo sapiens
  misc_RNA (1)...(19): siRNA sense strand
auauaaagcuacaggagau

SEQ ID NO: 1098343 - RNA, 19 nt, Homo sapiens
  misc_RNA (1)...(19): siRNA sense strand
gaaggccaccagaucauga

SEQ ID NO: 1098344 - RNA, 19 nt, Homo sapiens
  misc_RNA (1)...(19): siRNA sense strand
gcccauugcugcccuacug

SEQ ID NO: 1098345 - RNA, 19 nt, Homo sapiens
  misc_RNA (1)...(19): siRNA sense strand
cuaugaggauuucaacaug

SEQ ID NO: 1098346 - RNA, 19 nt, Homo sapiens
  misc_RNA (1)...(19): siRNA sense strand
guuccuggcugcccucaau

SEQ ID NO: 1098347 - RNA, 19 nt, Homo sapiens
  misc_RNA (1)...(19): siRNA sense strand
gcuaugaggauuucaacau

SEQ ID NO: 1098348 - RNA, 19 nt, Homo sapiens
  misc_RNA (1)...(19): siRNA sense strand
uacaggagcuaugaggauu

SEQ ID NO: 1098349 - RNA, 19 nt, Homo sapiens
  misc_RNA (1)...(19): siRNA sense strand
ccuacuggcugcugguguu

SEQ ID NO: 1098350 - RNA, 19 nt, Homo sapiens
  misc_RNA (1)...(19): siRNA sense strand
gaucaugagggacuucuac

SEQ ID NO: 1098351 - RNA, 19 nt, Homo sapiens
  misc_RNA (1)...(19): siRNA sense strand
caggagcuaugaggauuuc

SEQ ID NO: 1098352 - RNA, 19 nt, Homo sapiens
  misc_RNA (1)...(19): siRNA sense strand
ggagcuaugaggauuucaa

SEQ ID NO: 1098353 - RNA, 19 nt, Homo sapiens
  misc_RNA (1)...(19): siRNA sense strand
gucccaagaccauccauga

SEQ ID NO: 1098354 - RNA, 19 nt, Homo sapiens
  misc_RNA (1)...(19): siRNA sense strand
ccugggagguuggcucuuc

SEQ ID NO: 1098355 - RNA, 19 nt, Homo sapiens
  misc_RNA (1)...(19): siRNA sense strand
ccagcagcauggaaguugu

SEQ ID NO: 1098356 - RNA, 19 nt, Homo sapiens
  misc_RNA (1)...(19): siRNA sense strand
ucagcgccauuucggcuau

SEQ ID NO: 1098357 - RNA, 19 nt, Homo sapiens
  misc_RNA (1)...(19): siRNA sense strand
gaacgugaucgaggcuugu

SEQ ID NO: 1098358 - RNA, 19 nt, Homo sapiens
  misc_RNA (1)...(19): siRNA sense strand
cuacaggagcuaugaggau

SEQ ID NO: 1098359 - RNA, 19 nt, Homo sapiens
  misc_RNA (1)...(19): siRNA sense strand
uacgauggaucacccuaca

SEQ ID NO: 1098360 - RNA, 19 nt, Homo sapiens
  misc_RNA (1)...(19): siRNA sense strand
gagcccauguggucaucca

SEQ ID NO: 1098361 - RNA, 19 nt, Homo sapiens
  misc_RNA (1)...(19): siRNA sense strand
gggagcugcgggucuuuga

SEQ ID NO: 1098362 - RNA, 19 nt, Homo sapiens
  misc_RNA (1)...(19): siRNA sense strand
acaaggcucagcgccauuu

SEQ ID NO: 1098363 - RNA, 19 nt, Homo sapiens
  misc_RNA (1)...(19): siRNA sense strand
gcaacgaagacaccccaua

SEQ ID NO: 1098364 - RNA, 19 nt, Homo sapiens
  misc_RNA (1)...(19): siRNA sense strand
gggucuaugugggcaaugu

SEQ ID NO: 1098365 - RNA, 19 nt, Homo sapiens
  misc_RNA (1)...(19): siRNA sense strand
caagaaggaugauggauaa

SEQ ID NO: 1098366 - RNA, 19 nt, Homo sapiens
  misc_RNA (1)...(19): siRNA sense strand
ggacaggcaucucuaauga

SEQ ID NO: 1098367 - RNA, 19 nt, Homo sapiens
  misc_RNA (1)...(19): siRNA sense strand
gaaagcuucuucaccaaua

SEQ ID NO: 1098368 - RNA, 19 nt, Homo sapiens
  misc_RNA (1)...(19): siRNA sense strand
gaaagacucucaaacaaca

SEQ ID NO: 1098369 - RNA, 19 nt, Homo sapiens
  misc_RNA (1)...(19): siRNA sense strand
cagaacagcuggugaauga

SEQ ID NO: 1098370 - RNA, 19 nt, Homo sapiens
  misc_RNA (1)...(19): siRNA sense strand
gcaggaggauucuuuguuu

SEQ ID NO: 1098371 - RNA, 19 nt, Homo sapiens
  misc_RNA (1)...(19): siRNA sense strand
gagaaaggauucccagcua

SEQ ID NO: 1098372 - RNA, 19 nt, Homo sapiens
  misc_RNA (1)...(19): siRNA sense strand
gaacagcuggugaaugaua

SEQ ID NO: 1098373 - RNA, 19 nt, Homo sapiens
  misc_RNA (1)...(19): siRNA sense strand
gaugagacuucacgacuuu

SEQ ID NO: 1098374 - RNA, 19 nt, Homo sapiens
  misc_RNA (1)...(19): siRNA sense strand
caaaugaccuuguggaagu

SEQ ID NO: 1098375 - RNA, 19 nt, Homo sapiens
  misc_RNA (1)...(19): siRNA sense strand
gcaagaaggaugauggaua

SEQ ID NO: 1098376 - RNA, 19 nt, Homo sapiens
  misc_RNA (1)...(19): siRNA sense strand
caaagucuguggagcagua

SEQ ID NO: 1098377 - RNA, 19 nt, Homo sapiens
  misc_RNA (1)...(19): siRNA sense strand
gcaagaacccuucaggaaa

SEQ ID NO: 1098378 - RNA, 19 nt, Homo sapiens
  misc_RNA (1)...(19): siRNA sense strand
gaacccagcauuaaucauu

SEQ ID NO: 1098379 - RNA, 19 nt, Homo sapiens
  misc_RNA (1)...(19): siRNA sense strand
caacaggauucccaaagaa

SEQ ID NO: 1098380 - RNA, 19 nt, Homo sapiens
  misc_RNA (1)...(19): siRNA sense strand
ggaaagaacacccaccaaa

SEQ ID NO: 1098381 - RNA, 19 nt, Homo sapiens
  misc_RNA (1)...(19): siRNA sense strand
ggagaagacuguaucuauc

SEQ ID NO: 1098382 - RNA, 19 nt, Homo sapiens
  misc_RNA (1)...(19): siRNA sense strand
gcacuaaacucuaccuaac

SEQ ID NO: 1098383 - RNA, 19 nt, Homo sapiens
  misc_RNA (1)...(19): siRNA sense strand
caauaaagcagucacauga

SEQ ID NO: 1098384 - RNA, 19 nt, Homo sapiens
  misc_RNA (1)...(19): siRNA sense strand
gauaauaacagcaauaugg

SEQ ID NO: 1098385 - RNA, 19 nt, Homo sapiens
  misc_RNA (1)...(19): siRNA sense strand
guucugagcugggaaacua

SEQ ID NO: 1098386 - RNA, 19 nt, Homo sapiens
  misc_RNA (1)...(19): siRNA sense strand
gcacaacagucugaaggaa

SEQ ID NO: 1098387 - RNA, 19 nt, Homo sapiens
  misc_RNA (1)...(19): siRNA sense strand
agggauacuucuagaauua

SEQ ID NO: 1098388 - RNA, 19 nt, Homo sapiens
  misc_RNA (1)...(19): siRNA sense strand
uaaagugguucagucauuu

SEQ ID NO: 1098389 - RNA, 19 nt, Homo sapiens
  misc_RNA (1)...(19): siRNA sense strand
ggcaauguguccaaguaua

SEQ ID NO: 1098390 - RNA, 19 nt, Homo sapiens
  misc_RNA (1)...(19): siRNA sense strand
ggucaguucuguaacgaaa

SEQ ID NO: 1098391 - RNA, 19 nt, Homo sapiens
  misc_RNA (1)...(19): siRNA sense strand
guagagaacccagcauuaa

SEQ ID NO: 1098392 - RNA, 19 nt, Homo sapiens
  misc_RNA (1)...(19): siRNA sense strand
uaacugcaguaguaaagaa

SEQ ID NO: 1098393 - RNA, 19 nt, Homo sapiens
  misc_RNA (1)...(19): siRNA sense strand
ucaaagacaugugauacaa

SEQ ID NO: 1098394 - RNA, 19 nt, Homo sapiens
  misc_RNA (1)...(19): siRNA sense strand
gaagcuggauagaacuuau

SEQ ID NO: 1098395 - RNA, 19 nt, Homo sapiens
  misc_RNA (1)...(19): siRNA sense strand
gaggaaagacucucaaaca

SEQ ID NO: 1098396 - RNA, 19 nt, Homo sapiens
  misc_RNA (1)...(19): siRNA sense strand
gaaggaugauggauaaacu

SEQ ID NO: 1098397 - RNA, 19 nt, Homo sapiens
  misc_RNA (1)...(19): siRNA sense strand
ggaggaggaacucaaagua

SEQ ID NO: 1098398 - RNA, 19 nt, Homo sapiens
  misc_RNA (1)...(19): siRNA sense strand
acaaugacuucuuaucuga

SEQ ID NO: 1098399 - RNA, 19 nt, Homo sapiens
  misc_RNA (1)...(19): siRNA sense strand
ucagcacaaugacuucuua

SEQ ID NO: 1098400 - RNA, 19 nt, Homo sapiens
  misc_RNA (1)...(19): siRNA sense strand
aaagacaugugauacaaug

SEQ ID NO: 1098401 - RNA, 19 nt, Homo sapiens
  misc_RNA (1)...(19): siRNA sense strand
gcaaagagcaaugacaaug

SEQ ID NO: 1098402 - RNA, 19 nt, Homo sapiens
  misc_RNA (1)...(19): siRNA sense strand
gcaccugacuuacacaucu

SEQ ID NO: 1098403 - RNA, 19 nt, Homo sapiens
  misc_RNA (1)...(19): siRNA sense strand
gcaucaagcugcaaaauug

SEQ ID NO: 1098404 - RNA, 19 nt, Homo sapiens
  misc_RNA (1)...(19): siRNA sense strand
gaagauaaacaucaagaag

SEQ ID NO: 1098405 - RNA, 19 nt, Homo sapiens
  misc_RNA (1)...(19): siRNA sense strand
aaagggaacccgagaauga

SEQ ID NO: 1098406 - RNA, 19 nt, Homo sapiens
  misc_RNA (1)...(19): siRNA sense strand
gaaccacaaugcugagagu

SEQ ID NO: 1098407 - RNA, 19 nt, Homo sapiens
  misc_RNA (1)...(19): siRNA sense strand
acaggcaucucuaaugaaa

SEQ ID NO: 1098408 - RNA, 19 nt, Homo sapiens
  misc_RNA (1)...(19): siRNA sense strand
cagcacaucuucugcacaa

SEQ ID NO: 1098409 - RNA, 19 nt, Homo sapiens
  misc_RNA (1)...(19): siRNA sense strand
ccacuaauuuggccaacuu

SEQ ID NO: 1098410 - RNA, 19 nt, Homo sapiens
  misc_RNA (1)...(19): siRNA sense strand
gcauaaagcaauugagaau

SEQ ID NO: 1098411 - RNA, 19 nt, Homo sapiens
  misc_RNA (1)...(19): siRNA sense strand
cagaagauugagacuauua

SEQ ID NO: 1098412 - RNA, 19 nt, Homo sapiens
  misc_RNA (1)...(19): siRNA sense strand
ugaaugauauccugagaca

SEQ ID NO: 1098413 - RNA, 19 nt, Homo sapiens
  misc_RNA (1)...(19): siRNA sense strand
gauagaccauuuagaaacu

SEQ ID NO: 1098414 - RNA, 19 nt, Homo sapiens
  misc_RNA (1)...(19): siRNA sense strand
gaauaaagugguucaguca

SEQ ID NO: 1098415 - RNA, 19 nt, Homo sapiens
  misc_RNA (1)...(19): siRNA sense strand
gcagucacaugagccagua

SEQ ID NO: 1098416 - RNA, 19 nt, Homo sapiens
  misc_RNA (1)...(19): siRNA sense strand
gcacaaugacuucuuaucu

SEQ ID NO: 1098417 - RNA, 19 nt, Homo sapiens
  misc_RNA (1)...(19): siRNA sense strand
cauccuagcuauaaaccaa

SEQ ID NO: 1098418 - RNA, 19 nt, Homo sapiens
  misc_RNA (1)...(19): siRNA sense strand
ccagacagcuucucacaac

SEQ ID NO: 1098419 - RNA, 19 nt, Homo sapiens
  misc_RNA (1)...(19): siRNA sense strand
caagaaauccuggagaaga

SEQ ID NO: 1098420 - RNA, 19 nt, Homo sapiens
  misc_RNA (1)...(19): siRNA sense strand
acuccuaacugcaguagua

SEQ ID NO: 1098421 - RNA, 19 nt, Homo sapiens
  misc_RNA (1)...(19): siRNA sense strand
gggaaacuaugucauuaag

SEQ ID NO: 1098422 - RNA, 19 nt, Homo sapiens
  misc_RNA (1)...(19): siRNA sense strand
acaguuugcucuugaaaug

SEQ ID NO: 1098423 - RNA, 19 nt, Homo sapiens
  misc_RNA (1)...(19): siRNA sense strand
caagaacccuucaggaaaa

SEQ ID NO: 1098424 - RNA, 19 nt, Homo sapiens
  misc_RNA (1)...(19): siRNA sense strand
ccaaggaguugccaaagca

SEQ ID NO: 1098425 - RNA, 19 nt, Homo sapiens
  misc_RNA (1)...(19): siRNA sense strand
cagaacaagcggauagaua

SEQ ID NO: 1098426 - RNA, 19 nt, Homo sapiens
  misc_RNA (1)...(19): siRNA sense strand
gcaauguguccaaguauau

SEQ ID NO: 1098427 - RNA, 19 nt, Homo sapiens
  misc_RNA (1)...(19): siRNA sense strand
gaauucagcucgagaugcu

SEQ ID NO: 1098428 - RNA, 19 nt, Homo sapiens
  misc_RNA (1)...(19): siRNA sense strand
ccaaauaagcggcauaaag

SEQ ID NO: 1098429 - RNA, 19 nt, Homo sapiens
  misc_RNA (1)...(19): siRNA sense strand
caaagaaauuacagugagu

SEQ ID NO: 1098430 - RNA, 19 nt, Homo sapiens
  misc_RNA (1)...(19): siRNA sense strand
gagacaggcuuuggcaguu

SEQ ID NO: 1098431 - RNA, 19 nt, Homo sapiens
  misc_RNA (1)...(19): siRNA sense strand
gaaacaagaggaagucaag

SEQ ID NO: 1098432 - RNA, 19 nt, Homo sapiens
  misc_RNA (1)...(19): siRNA sense strand
uacaagaaauccuggagaa

SEQ ID NO: 1098433 - RNA, 19 nt, Homo sapiens
  misc_RNA (1)...(19): siRNA sense strand
gaacaugaaauugaaguca

SEQ ID NO: 1098434 - RNA, 19 nt, Homo sapiens
  misc_RNA (1)...(19): siRNA sense strand
agauaaacaucaagaagga

SEQ ID NO: 1098435 - RNA, 19 nt, Homo sapiens
  misc_RNA (1)...(19): siRNA sense strand
aagaaauccuggagaagaa

SEQ ID NO: 1098436 - RNA, 19 nt, Homo sapiens
  misc_RNA (1)...(19): siRNA sense strand
gagcuacgaacaaugcuaa

SEQ ID NO: 1098437 - RNA, 19 nt, Homo sapiens
  misc_RNA (1)...(19): siRNA sense strand
acuaaacucuaccuaacua

SEQ ID NO: 1098438 - RNA, 19 nt, Homo sapiens
  misc_RNA (1)...(19): siRNA sense strand
gcagaagauugagacuauu

SEQ ID NO: 1098439 - RNA, 19 nt, Homo sapiens
  misc_RNA (1)...(19): siRNA sense strand
auaaguggaugguauaugu

SEQ ID NO: 1098440 - RNA, 19 nt, Homo sapiens
  misc_RNA (1)...(19): siRNA sense strand
caaauaagcggcauaaagc

SEQ ID NO: 1098441 - RNA, 19 nt, Homo sapiens
  misc_RNA (1)...(19): siRNA sense strand
cgaaauacuggaagggaua

SEQ ID NO: 1098442 - RNA, 19 nt, Homo sapiens
  misc_RNA (1)...(19): siRNA sense strand
aaacaaacacaugggaaua

SEQ ID NO: 1098443 - RNA, 19 nt, Homo sapiens
  misc_RNA (1)...(19): siRNA sense strand
acaacaggauucccaaaga

SEQ ID NO: 1098444 - RNA, 19 nt, Homo sapiens
  misc_RNA (1)...(19): siRNA sense strand
gaacaguuugcucuugaaa

SEQ ID NO: 1098445 - RNA, 19 nt, Homo sapiens
  misc_RNA (1)...(19): siRNA sense strand
aagaggaagucaaguucua

SEQ ID NO: 1098446 - RNA, 19 nt, Homo sapiens
  misc_RNA (1)...(19): siRNA sense strand
auaaagugguucagucauu

SEQ ID NO: 1098447 - RNA, 19 nt, Homo sapiens
  misc_RNA (1)...(19): siRNA sense strand
accaugagcugcaagauug

SEQ ID NO: 1098448 - RNA, 19 nt, Homo sapiens
  misc_RNA (1)...(19): siRNA sense strand
caucaucuccugccaauca

SEQ ID NO: 1098449 - RNA, 19 nt, Homo sapiens
  misc_RNA (1)...(19): siRNA sense strand
acaaacacaugggaauauu

SEQ ID NO: 1098450 - RNA, 19 nt, Homo sapiens
  misc_RNA (1)...(19): siRNA sense strand
gaaggagcaggaagagaaa

SEQ ID NO: 1098451 - RNA, 19 nt, Homo sapiens
  misc_RNA (1)...(19): siRNA sense strand
caucuuacauccucaagca

SEQ ID NO: 1098452 - RNA, 19 nt, Homo sapiens
  misc_RNA (1)...(19): siRNA sense strand
ggaaucaagcgaaccauca

SEQ ID NO: 1098453 - RNA, 19 nt, Homo sapiens
  misc_RNA (1)...(19): siRNA sense strand
gaauuacuggcucccauaa

SEQ ID NO: 1098454 - RNA, 19 nt, Homo sapiens
  misc_RNA (1)...(19): siRNA sense strand
aggaaagacucucaaacaa

SEQ ID NO: 1098455 - RNA, 19 nt, Homo sapiens
  misc_RNA (1)...(19): siRNA sense strand
gaaagaacacccaccaaaa

SEQ ID NO: 1098456 - RNA, 19 nt, Homo sapiens
  misc_RNA (1)...(19): siRNA sense strand
gcggaaugcugaucucaca

SEQ ID NO: 1098457 - RNA, 19 nt, Homo sapiens
  misc_RNA (1)...(19): siRNA sense strand
guauauaccuccggauaag

SEQ ID NO: 1098458 - RNA, 19 nt, Homo sapiens
  misc_RNA (1)...(19): siRNA sense strand
uggaggaccugcaacaguu

SEQ ID NO: 1098459 - RNA, 19 nt, Homo sapiens
  misc_RNA (1)...(19): siRNA sense strand
uacuauggcuggaacauug

SEQ ID NO: 1098460 - RNA, 19 nt, Homo sapiens
  misc_RNA (1)...(19): siRNA sense strand
caaagaaaccgacccugau

SEQ ID NO: 1098461 - RNA, 19 nt, Homo sapiens
  misc_RNA (1)...(19): siRNA sense strand
ugcagaagauugagacuau

SEQ ID NO: 1098462 - RNA, 19 nt, Homo sapiens
  misc_RNA (1)...(19): siRNA sense strand
gcaggaggaggaacucaaa

SEQ ID NO: 1098463 - RNA, 19 nt, Homo sapiens
  misc_RNA (1)...(19): siRNA sense strand
gaagaauaaggaacaugaa

SEQ ID NO: 1098464 - RNA, 19 nt, Homo sapiens
  misc_RNA (1)...(19): siRNA sense strand
aaacacaugggaauauuga

SEQ ID NO: 1098465 - RNA, 19 nt, Homo sapiens
  misc_RNA (1)...(19): siRNA sense strand
uagaagagaccucaugaca

SEQ ID NO: 1098466 - RNA, 19 nt, Homo sapiens
  misc_RNA (1)...(19): siRNA sense strand
caugacagcuggaguucuc

SEQ ID NO: 1098467 - RNA, 19 nt, Homo sapiens
  misc_RNA (1)...(19): siRNA sense strand
ccugauggcuauagaagag

SEQ ID NO: 1098468 - RNA, 19 nt, Homo sapiens
  misc_RNA (1)...(19): siRNA sense strand
uauagaagagaccucauga

SEQ ID NO: 1098469 - RNA, 19 nt, Homo sapiens
  misc_RNA (1)...(19): siRNA sense strand
ggaccugauggcuauagaa

SEQ ID NO: 1098470 - RNA, 19 nt, Homo sapiens
  misc_RNA (1)...(19): siRNA sense strand
ccucaugacagcuggaguu

SEQ ID NO: 1098471 - RNA, 19 nt, Homo sapiens
  misc_RNA (1)...(19): siRNA sense strand
cccaaucuuguaccaauuu

SEQ ID NO: 1098472 - RNA, 19 nt, Homo sapiens
  misc_RNA (1)...(19): siRNA sense strand
gaccugauggcuauagaag

SEQ ID NO: 1098473 - RNA, 19 nt, Homo sapiens
  misc_RNA (1)...(19): siRNA sense strand
gggaccugcuggagcuuca

SEQ ID NO: 1098474 - RNA, 19 nt, Homo sapiens
  misc_RNA (1)...(19): siRNA sense strand
uguuugguguccuugguuu

SEQ ID NO: 1098475 - RNA, 19 nt, Homo sapiens
  misc_RNA (1)...(19): siRNA sense strand
ucacugguguugcuuugcu

SEQ ID NO: 1098476 - RNA, 19 nt, Homo sapiens
  misc_RNA (1)...(19): siRNA sense strand
ggaguucucuggggacugu

SEQ ID NO: 1098477 - RNA, 19 nt, Homo sapiens
  misc_RNA (1)...(19): siRNA sense strand
cuauagaagagaccucaug

SEQ ID NO: 1098478 - RNA, 19 nt, Homo sapiens
  misc_RNA (1)...(19): siRNA sense strand
gaugucacccuugggaaca

SEQ ID NO: 1098479 - RNA, 19 nt, Homo sapiens
  misc_RNA (1)...(19): siRNA sense strand
uagaagagaccucaugaca

SEQ ID NO: 1098480 - RNA, 19 nt, Homo sapiens
  misc_RNA (1)...(19): siRNA sense strand
caugacagcuggaguucuc

SEQ ID NO: 1098481 - RNA, 19 nt, Homo sapiens
  misc_RNA (1)...(19): siRNA sense strand
ccugauggcuauagaagag

SEQ ID NO: 1098482 - RNA, 19 nt, Homo sapiens
  misc_RNA (1)...(19): siRNA sense strand
uauagaagagaccucauga

SEQ ID NO: 1098483 - RNA, 19 nt, Homo sapiens
  misc_RNA (1)...(19): siRNA sense strand
ggaccugauggcuauagaa

SEQ ID NO: 1098484 - RNA, 19 nt, Homo sapiens
  misc_RNA (1)...(19): siRNA sense strand
ccucaugacagcuggaguu

SEQ ID NO: 1098485 - RNA, 19 nt, Homo sapiens
  misc_RNA (1)...(19): siRNA sense strand
cccaaucuuguaccaauuu

SEQ ID NO: 1098486 - RNA, 19 nt, Homo sapiens
  misc_RNA (1)...(19): siRNA sense strand
gaccugauggcuauagaag

SEQ ID NO: 1098487 - RNA, 19 nt, Homo sapiens
  misc_RNA (1)...(19): siRNA sense strand
gggaccugcuggagcuuca

SEQ ID NO: 1098488 - RNA, 19 nt, Homo sapiens
  misc_RNA (1)...(19): siRNA sense strand
uguuugguguccuugguuu

SEQ ID NO: 1098489 - RNA, 19 nt, Homo sapiens
  misc_RNA (1)...(19): siRNA sense strand
ucacugguguugcuuugcu

SEQ ID NO: 1098490 - RNA, 19 nt, Homo sapiens
  misc_RNA (1)...(19): siRNA sense strand
ggaguucucuggggacugu

SEQ ID NO: 1098491 - RNA, 19 nt, Homo sapiens
  misc_RNA (1)...(19): siRNA sense strand
cuauagaagagaccucaug

SEQ ID NO: 1098492 - RNA, 19 nt, Homo sapiens
  misc_RNA (1)...(19): siRNA sense strand
gaugucacccuugggaaca

SEQ ID NO: 1098493 - RNA, 19 nt, Homo sapiens
  misc_RNA (1)...(19): siRNA sense strand
cccaaucuuguaccaauuu

SEQ ID NO: 1098494 - RNA, 19 nt, Homo sapiens
  misc_RNA (1)...(19): siRNA sense strand
gggaccugcuggagcuuca

SEQ ID NO: 1098495 - RNA, 19 nt, Homo sapiens
  misc_RNA (1)...(19): siRNA sense strand
gaugucacccuugggaaca

SEQ ID NO: 1098496 - RNA, 19 nt, Homo sapiens
  misc_RNA (1)...(19): siRNA sense strand
gaacacgggugcuggcuau

SEQ ID NO: 1098497 - RNA, 19 nt, Homo sapiens
  misc_RNA (1)...(19): siRNA sense strand
gcaacugccuuccaaguca

SEQ ID NO: 1098498 - RNA, 19 nt, Homo sapiens
  misc_RNA (1)...(19): siRNA sense strand
guacaccgcuuuggaaaca

SEQ ID NO: 1098499 - RNA, 19 nt, Homo sapiens
  misc_RNA (1)...(19): siRNA sense strand
gcagacacuuugcccaaug

SEQ ID NO: 1098500 - RNA, 19 nt, Homo sapiens
  misc_RNA (1)...(19): siRNA sense strand
caucaucuauggugccaaa

SEQ ID NO: 1098501 - RNA, 19 nt, Homo sapiens
  misc_RNA (1)...(19): siRNA sense strand
gaaacugcaucguggucuu

SEQ ID NO: 1098502 - RNA, 19 nt, Homo sapiens
  misc_RNA (1)...(19): siRNA sense strand
gcucaacaauacaguaaca

SEQ ID NO: 1098503 - RNA, 19 nt, Homo sapiens
  misc_RNA (1)...(19): siRNA sense strand
cagauguucuuuauucaug

SEQ ID NO: 1098504 - RNA, 19 nt, Homo sapiens
  misc_RNA (1)...(19): siRNA sense strand
aaacagccuucaucccauu

SEQ ID NO: 1098505 - RNA, 19 nt, Homo sapiens
  misc_RNA (1)...(19): siRNA sense strand
guaaugaaguuggccuaug

SEQ ID NO: 1098506 - RNA, 19 nt, Homo sapiens
  misc_RNA (1)...(19): siRNA sense strand
gauuagagaaagcccauuu

SEQ ID NO: 1098507 - RNA, 19 nt, Homo sapiens
  misc_RNA (1)...(19): siRNA sense strand
ccacauccaccaugccuaa

SEQ ID NO: 1098508 - RNA, 19 nt, Homo sapiens
  misc_RNA (1)...(19): siRNA sense strand
ccauugaccuggccuuauc

SEQ ID NO: 1098509 - RNA, 19 nt, Homo sapiens
  misc_RNA (1)...(19): siRNA sense strand
uuacccagauguucuuuau

SEQ ID NO: 1098510 - RNA, 19 nt, Homo sapiens
  misc_RNA (1)...(19): siRNA sense strand
acccagauguucuuuauuc

SEQ ID NO: 1098511 - RNA, 19 nt, Homo sapiens
  misc_RNA (1)...(19): siRNA sense strand
ccaccaggauguaaugaag

SEQ ID NO: 1098512 - RNA, 19 nt, Homo sapiens
  misc_RNA (1)...(19): siRNA sense strand
guauguaguggcaauguuu

SEQ ID NO: 1098513 - RNA, 19 nt, Homo sapiens
  misc_RNA (1)...(19): siRNA sense strand
ccauggccuuugaccguua

SEQ ID NO: 1098514 - RNA, 19 nt, Homo sapiens
  misc_RNA (1)...(19): siRNA sense strand
caugccaccuuugugcuua

SEQ ID NO: 1098515 - RNA, 19 nt, Homo sapiens
  misc_RNA (1)...(19): siRNA sense strand
gaccuggccuuauccacau

SEQ ID NO: 1098516 - RNA, 19 nt, Homo sapiens
  misc_RNA (1)...(19): siRNA sense strand
cuucacacaugccaccuuu

SEQ ID NO: 1098517 - RNA, 19 nt, Homo sapiens
  misc_RNA (1)...(19): siRNA sense strand
uaaugaaguuggccuaugc

SEQ ID NO: 1098518 - RNA, 19 nt, Homo sapiens
  misc_RNA (1)...(19): siRNA sense strand
ccuaagauccuugcccuuu

SEQ ID NO: 1098519 - RNA, 19 nt, Homo sapiens
  misc_RNA (1)...(19): siRNA sense strand
cccgagagauuagcuuuga

SEQ ID NO: 1098520 - RNA, 19 nt, Homo sapiens
  misc_RNA (1)...(19): siRNA sense strand
cugcagugcucaacaauac

SEQ ID NO: 1098521 - RNA, 19 nt, Homo sapiens
  misc_RNA (1)...(19): siRNA sense strand
ggucaugggcguggacgua

SEQ ID NO: 1098522 - RNA, 19 nt, Homo sapiens
  misc_RNA (1)...(19): siRNA sense strand
caucguggucuucaucgua

SEQ ID NO: 1098523 - RNA, 19 nt, Homo sapiens
  misc_RNA (1)...(19): siRNA sense strand
gggcguggacguaauguuc

SEQ ID NO: 1098524 - RNA, 19 nt, Homo sapiens
  misc_RNA (1)...(19): siRNA sense strand
ucaucuccuuguccuauuu

SEQ ID NO: 1098525 - RNA, 19 nt, Homo sapiens
  misc_RNA (1)...(19): siRNA sense strand
ucaagcggcuggccuucug

SEQ ID NO: 1098526 - RNA, 19 nt, Homo sapiens
  misc_RNA (1)...(19): siRNA sense strand
gugcucaacaauacaguaa

SEQ ID NO: 1098527 - RNA, 19 nt, Homo sapiens
  misc_RNA (1)...(19): siRNA sense strand
caagaucagcugugacaag

SEQ ID NO: 1098528 - RNA, 19 nt, Homo sapiens
  misc_RNA (1)...(19): siRNA sense strand
ugucaucaaucccaucauc

SEQ ID NO: 1098529 - RNA, 19 nt, Homo sapiens
  misc_RNA (1)...(19): siRNA sense strand
cuuauuggccucucaguug

SEQ ID NO: 1098530 - RNA, 19 nt, Homo sapiens
  misc_RNA (1)...(19): siRNA sense strand
ucacacaugccaccuuugu

SEQ ID NO: 1098531 - RNA, 19 nt, Homo sapiens
  misc_RNA (1)...(19): siRNA sense strand
gguacucgccuucuaugug

SEQ ID NO: 1098532 - RNA, 19 nt, Homo sapiens
  misc_RNA (1)...(19): siRNA sense strand
aaugugguauauggucuua

SEQ ID NO: 1098533 - RNA, 19 nt, Homo sapiens
  misc_RNA (1)...(19): siRNA sense strand
gcuccgauguaccucuuuc

SEQ ID NO: 1098534 - RNA, 19 nt, Homo sapiens
  misc_RNA (1)...(19): siRNA sense strand
caucaaucccaucaucuau

SEQ ID NO: 1098535 - RNA, 19 nt, Homo sapiens
  misc_RNA (1)...(19): siRNA sense strand
gcugcagugcucaacaaua

SEQ ID NO: 1098536 - RNA, 19 nt, Homo sapiens
  misc_RNA (1)...(19): siRNA sense strand
cauccaccaugccuaagau

SEQ ID NO: 1098537 - RNA, 19 nt, Homo sapiens
  misc_RNA (1)...(19): siRNA sense strand
ucaucaaucccaucaucua

SEQ ID NO: 1098538 - RNA, 19 nt, Homo sapiens
  misc_RNA (1)...(19): siRNA sense strand
ccuuugugcuuauugguau

SEQ ID NO: 1098539 - RNA, 19 nt, Homo sapiens
  misc_RNA (1)...(19): siRNA sense strand
ccauguauguaguggcaau

SEQ ID NO: 1098540 - RNA, 19 nt, Homo sapiens
  misc_RNA (1)...(19): siRNA sense strand
uacaguaacagcccagauu

SEQ ID NO: 1098541 - RNA, 19 nt, Homo sapiens
  misc_RNA (1)...(19): siRNA sense strand
cagacacuuugcccaaugu

SEQ ID NO: 1098542 - RNA, 19 nt, Homo sapiens
  misc_RNA (1)...(19): siRNA sense strand
gcugcugccuccugucauc

SEQ ID NO: 1098543 - RNA, 19 nt, Homo sapiens
  misc_RNA (1)...(19): siRNA sense strand
cacgggugcuggcuauguu

SEQ ID NO: 1098544 - RNA, 19 nt, Homo sapiens
  misc_RNA (1)...(19): siRNA sense strand
gguccgcggaucccucuuu

SEQ ID NO: 1098545 - RNA, 19 nt, Homo sapiens
  misc_RNA (1)...(19): siRNA sense strand
uaguggcaauguuuggaaa

SEQ ID NO: 1098546 - RNA, 19 nt, Homo sapiens
  misc_RNA (1)...(19): siRNA sense strand
cauugugcguguugucaug

SEQ ID NO: 1098547 - RNA, 19 nt, Homo sapiens
  misc_RNA (1)...(19): siRNA sense strand
guucaucuccuuguccuau

SEQ ID NO: 1098548 - RNA, 19 nt, Homo sapiens
  misc_RNA (1)...(19): siRNA sense strand
guaguggcaauguuuggaa

SEQ ID NO: 1098549 - RNA, 19 nt, Homo sapiens
  misc_RNA (1)...(19): siRNA sense strand
accaggauguaaugaaguu

SEQ ID NO: 1098550 - RNA, 19 nt, Homo sapiens
  misc_RNA (1)...(19): siRNA sense strand
guuguacaccgcuuuggaa

SEQ ID NO: 1098551 - RNA, 19 nt, Homo sapiens
  misc_RNA (1)...(19): siRNA sense strand
guaauguucaucuccuugu

SEQ ID NO: 1098552 - RNA, 19 nt, Homo sapiens
  misc_RNA (1)...(19): siRNA sense strand
acaguaacagcccagauug

SEQ ID NO: 1098553 - RNA, 19 nt, Homo sapiens
  misc_RNA (1)...(19): siRNA sense strand
caccaugccuaagauccuu

SEQ ID NO: 1098554 - RNA, 19 nt, Homo sapiens
  misc_RNA (1)...(19): siRNA sense strand
uguauguaguggcaauguu

SEQ ID NO: 1098555 - RNA, 19 nt, Homo sapiens
  misc_RNA (1)...(19): siRNA sense strand
uuauuggccucucaguugu

SEQ ID NO: 1098556 - RNA, 19 nt, Homo sapiens
  misc_RNA (1)...(19): siRNA sense strand
ccaccuuugugcuuauugg

SEQ ID NO: 1098557 - RNA, 19 nt, Homo sapiens
  misc_RNA (1)...(19): siRNA sense strand
cuaagauccuugcccuuuu

SEQ ID NO: 1098558 - RNA, 19 nt, Homo sapiens
  misc_RNA (1)...(19): siRNA sense strand
aaaccaaacagaucagaac

SEQ ID NO: 1098559 - RNA, 19 nt, Homo sapiens
  misc_RNA (1)...(19): siRNA sense strand
gugugguacucgccuucua

SEQ ID NO: 1098560 - RNA, 19 nt, Homo sapiens
  misc_RNA (1)...(19): siRNA sense strand
gcccuuuucugguuugauu

SEQ ID NO: 1098561 - RNA, 19 nt, Homo sapiens
  misc_RNA (1)...(19): siRNA sense strand
cuggcuauguucaagauca

SEQ ID NO: 1098562 - RNA, 19 nt, Homo sapiens
  misc_RNA (1)...(19): siRNA sense strand
ccacugccucugcugauca

SEQ ID NO: 1098563 - RNA, 19 nt, Homo sapiens
  misc_RNA (1)...(19): siRNA sense strand
uaagauccuugcccuuuuc

SEQ ID NO: 1098564 - RNA, 19 nt, Homo sapiens
  misc_RNA (1)...(19): siRNA sense strand
ggccuaugcagacacuuug

SEQ ID NO: 1098565 - RNA, 19 nt, Homo sapiens
  misc_RNA (1)...(19): siRNA sense strand
cccagauguucuuuauuca

SEQ ID NO: 1098566 - RNA, 19 nt, Homo sapiens
  misc_RNA (1)...(19): siRNA sense strand
gagaagaucuugagguuaa

SEQ ID NO: 1098567 - RNA, 19 nt, Homo sapiens
  misc_RNA (1)...(19): siRNA sense strand
gauaaagaguggaagagua

SEQ ID NO: 1098568 - RNA, 19 nt, Homo sapiens
  misc_RNA (1)...(19): siRNA sense strand
agaagaagcugaaaguaaa

SEQ ID NO: 1098569 - RNA, 19 nt, Homo sapiens
  misc_RNA (1)...(19): siRNA sense strand
uaaaugcucuuccuacuau

SEQ ID NO: 1098570 - RNA, 19 nt, Homo sapiens
  misc_RNA (1)...(19): siRNA sense strand
gaaggagacuggaugauag

SEQ ID NO: 1098571 - RNA, 19 nt, Homo sapiens
  misc_RNA (1)...(19): siRNA sense strand
ggaaggagacuggaugaua

SEQ ID NO: 1098572 - RNA, 19 nt, Homo sapiens
  misc_RNA (1)...(19): siRNA sense strand
gagacuggaugauagaauu

SEQ ID NO: 1098573 - RNA, 19 nt, Homo sapiens
  misc_RNA (1)...(19): siRNA sense strand
gggagaagaucuugagguu

SEQ ID NO: 1098574 - RNA, 19 nt, Homo sapiens
  misc_RNA (1)...(19): siRNA sense strand
ggacugaguggacgguuua

SEQ ID NO: 1098575 - RNA, 19 nt, Homo sapiens
  misc_RNA (1)...(19): siRNA sense strand
aagaagauguuucagaaga

SEQ ID NO: 1098576 - RNA, 19 nt, Homo sapiens
  misc_RNA (1)...(19): siRNA sense strand
gaagaagaagcugaaagua

SEQ ID NO: 1098577 - RNA, 19 nt, Homo sapiens
  misc_RNA (1)...(19): siRNA sense strand
gaccacagccauacccaua

SEQ ID NO: 1098578 - RNA, 19 nt, Homo sapiens
  misc_RNA (1)...(19): siRNA sense strand
gaucuugagguuaauauug

SEQ ID NO: 1098579 - RNA, 19 nt, Homo sapiens
  misc_RNA (1)...(19): siRNA sense strand
gagcaacguucgcgucauc

SEQ ID NO: 1098580 - RNA, 19 nt, Homo sapiens
  misc_RNA (1)...(19): siRNA sense strand
aagaagaagcugaaaguaa

SEQ ID NO: 1098581 - RNA, 19 nt, Homo sapiens
  misc_RNA (1)...(19): siRNA sense strand
gaccuuggauugccagugu

SEQ ID NO: 1098582 - RNA, 19 nt, Homo sapiens
  misc_RNA (1)...(19): siRNA sense strand
ggacgugccauaacuacuu

SEQ ID NO: 1098583 - RNA, 19 nt, Homo sapiens
  misc_RNA (1)...(19): siRNA sense strand
gcagauugccuuuguccuu

SEQ ID NO: 1098584 - RNA, 19 nt, Homo sapiens
  misc_RNA (1)...(19): siRNA sense strand
uuaggacucuguaugauau

SEQ ID NO: 1098585 - RNA, 19 nt, Homo sapiens
  misc_RNA (1)...(19): siRNA sense strand
gacgagaacuggagagaac

SEQ ID NO: 1098586 - RNA, 19 nt, Homo sapiens
  misc_RNA (1)...(19): siRNA sense strand
gaagauguuucagaagaag

SEQ ID NO: 1098587 - RNA, 19 nt, Homo sapiens
  misc_RNA (1)...(19): siRNA sense strand
gaagaucuugagguuaaua

SEQ ID NO: 1098588 - RNA, 19 nt, Homo sapiens
  misc_RNA (1)...(19): siRNA sense strand
ggagaagaucuugagguua

SEQ ID NO: 1098589 - RNA, 19 nt, Homo sapiens
  misc_RNA (1)...(19): siRNA sense strand
guaaagaaggaacaaacaa

SEQ ID NO: 1098590 - RNA, 19 nt, Homo sapiens
  misc_RNA (1)...(19): siRNA sense strand
gacgugccauaacuacuuu

SEQ ID NO: 1098591 - RNA, 19 nt, Homo sapiens
  misc_RNA (1)...(19): siRNA sense strand
caucauuggccacagauaa

SEQ ID NO: 1098592 - RNA, 19 nt, Homo sapiens
  misc_RNA (1)...(19): siRNA sense strand
agaagauguuucagaagaa

SEQ ID NO: 1098593 - RNA, 19 nt, Homo sapiens
  misc_RNA (1)...(19): siRNA sense strand
gaaaguaaagaaggaacaa

SEQ ID NO: 1098594 - RNA, 19 nt, Homo sapiens
  misc_RNA (1)...(19): siRNA sense strand
caaccggaaugggaaaguu

SEQ ID NO: 1098595 - RNA, 19 nt, Homo sapiens
  misc_RNA (1)...(19): siRNA sense strand
guauugagcccguuucauc

SEQ ID NO: 1098596 - RNA, 19 nt, Homo sapiens
  misc_RNA (1)...(19): siRNA sense strand
gaguggacgguuuaucaua

SEQ ID NO: 1098597 - RNA, 19 nt, Homo sapiens
  misc_RNA (1)...(19): siRNA sense strand
acaagaggcggaugaagaa

SEQ ID NO: 1098598 - RNA, 19 nt, Homo sapiens
  misc_RNA (1)...(19): siRNA sense strand
cauaaaugcucuuccuacu

SEQ ID NO: 1098599 - RNA, 19 nt, Homo sapiens
  misc_RNA (1)...(19): siRNA sense strand
ucagcacucuuucagcuau

SEQ ID NO: 1098600 - RNA, 19 nt, Homo sapiens
  misc_RNA (1)...(19): siRNA sense strand
guucuguucugaugaguag

SEQ ID NO: 1098601 - RNA, 19 nt, Homo sapiens
  misc_RNA (1)...(19): siRNA sense strand
ugauauuuguggcagauug

SEQ ID NO: 1098602 - RNA, 19 nt, Homo sapiens
  misc_RNA (1)...(19): siRNA sense strand
gaagaagauguuucagaag

SEQ ID NO: 1098603 - RNA, 19 nt, Homo sapiens
  misc_RNA (1)...(19): siRNA sense strand
ggacuguuauuaggacucu

SEQ ID NO: 1098604 - RNA, 19 nt, Homo sapiens
  misc_RNA (1)...(19): siRNA sense strand
agaagaagaagcugaaagu

SEQ ID NO: 1098605 - RNA, 19 nt, Homo sapiens
  misc_RNA (1)...(19): siRNA sense strand
ggaacaagaggcggaugaa

SEQ ID NO: 1098606 - RNA, 19 nt, Homo sapiens
  misc_RNA (1)...(19): siRNA sense strand
ggacgagaacuggagagaa

SEQ ID NO: 1098607 - RNA, 19 nt, Homo sapiens
  misc_RNA (1)...(19): siRNA sense strand
auaaagaguggaagaguau

SEQ ID NO: 1098608 - RNA, 19 nt, Homo sapiens
  misc_RNA (1)...(19): siRNA sense strand
gaagaagcugaaaguaaag

SEQ ID NO: 1098609 - RNA, 19 nt, Homo sapiens
  misc_RNA (1)...(19): siRNA sense strand
gguuaauauugcgaaagua

SEQ ID NO: 1098610 - RNA, 19 nt, Homo sapiens
  misc_RNA (1)...(19): siRNA sense strand
uauugaagaccuuggauug

SEQ ID NO: 1098611 - RNA, 19 nt, Homo sapiens
  misc_RNA (1)...(19): siRNA sense strand
gguccagguucuguucuga

SEQ ID NO: 1098612 - RNA, 19 nt, Homo sapiens
  misc_RNA (1)...(19): siRNA sense strand
uaucauaaaugcucuuccu

SEQ ID NO: 1098613 - RNA, 19 nt, Homo sapiens
  misc_RNA (1)...(19): siRNA sense strand
gaacaagaggcggaugaag

SEQ ID NO: 1098614 - RNA, 19 nt, Homo sapiens
  misc_RNA (1)...(19): siRNA sense strand
ggacucuguaugauauuug

SEQ ID NO: 1098615 - RNA, 19 nt, Homo sapiens
  misc_RNA (1)...(19): siRNA sense strand
uuauuaggacucuguauga

SEQ ID NO: 1098616 - RNA, 19 nt, Homo sapiens
  misc_RNA (1)...(19): siRNA sense strand
guucugaugaguaguaugu

SEQ ID NO: 1098617 - RNA, 19 nt, Homo sapiens
  misc_RNA (1)...(19): siRNA sense strand
gaucaggacgugccauaac

SEQ ID NO: 1098618 - RNA, 19 nt, Homo sapiens
  misc_RNA (1)...(19): siRNA sense strand
aacaagaggcggaugaaga

SEQ ID NO: 1098619 - RNA, 19 nt, Homo sapiens
  misc_RNA (1)...(19): siRNA sense strand
gaaucugcacaaccuuuga

SEQ ID NO: 1098620 - RNA, 19 nt, Homo sapiens
  misc_RNA (1)...(19): siRNA sense strand
guuauuaggacucuguaug

SEQ ID NO: 1098621 - RNA, 19 nt, Homo sapiens
  misc_RNA (1)...(19): siRNA sense strand
auaaaugcucuuccuacua

SEQ ID NO: 1098622 - RNA, 19 nt, Homo sapiens
  misc_RNA (1)...(19): siRNA sense strand
aaagaaggaacaaacaaag

SEQ ID NO: 1098623 - RNA, 19 nt, Homo sapiens
  misc_RNA (1)...(19): siRNA sense strand
uaguaugucagcacucuuu

SEQ ID NO: 1098624 - RNA, 19 nt, Homo sapiens
  misc_RNA (1)...(19): siRNA sense strand
uaagugauaaagaguggaa

SEQ ID NO: 1098625 - RNA, 19 nt, Homo sapiens
  misc_RNA (1)...(19): siRNA sense strand
guuaauauugcgaaaguag

SEQ ID NO: 1098626 - RNA, 19 nt, Homo sapiens
  misc_RNA (1)...(19): siRNA sense strand
gaaggaacaaacaaagacu

SEQ ID NO: 1098627 - RNA, 19 nt, Homo sapiens
  misc_RNA (1)...(19): siRNA sense strand
agaggcggaugaagaagau

SEQ ID NO: 1098628 - RNA, 19 nt, Homo sapiens
  misc_RNA (1)...(19): siRNA sense strand
ggaucaggacgugccauaa

SEQ ID NO: 1098629 - RNA, 19 nt, Homo sapiens
  misc_RNA (1)...(19): siRNA sense strand
ugagguuaauauugcgaaa

SEQ ID NO: 1098630 - RNA, 19 nt, Homo sapiens
  misc_RNA (1)...(19): siRNA sense strand
guccaucauuggccacaga

SEQ ID NO: 1098631 - RNA, 19 nt, Homo sapiens
  misc_RNA (1)...(19): siRNA sense strand
gaagcugaaaguaaagaag

SEQ ID NO: 1098632 - RNA, 19 nt, Homo sapiens
  misc_RNA (1)...(19): siRNA sense strand
ggagacuggaugauagaau

SEQ ID NO: 1098633 - RNA, 19 nt, Homo sapiens
  misc_RNA (1)...(19): siRNA sense strand
aaagaguggaagaguauug

SEQ ID NO: 1098634 - RNA, 19 nt, Homo sapiens
  misc_RNA (1)...(19): siRNA sense strand
cgaaaguagaugucacaga

SEQ ID NO: 1098635 - RNA, 19 nt, Homo sapiens
  misc_RNA (1)...(19): siRNA sense strand
ggaaaguuuugcugaaugg

SEQ ID NO: 1098636 - RNA, 19 nt, Homo sapiens
  misc_RNA (1)...(19): siRNA sense strand
aagaaggaacaaacaaaga

SEQ ID NO: 1098637 - RNA, 19 nt, Homo sapiens
  misc_RNA (1)...(19): siRNA sense strand
gacucuguaugauauuugu

SEQ ID NO: 1098638 - RNA, 19 nt, Homo sapiens
  misc_RNA (1)...(19): siRNA sense strand
ucugaugaguaguauguca

SEQ ID NO: 1098639 - RNA, 19 nt, Homo sapiens
  misc_RNA (1)...(19): siRNA sense strand
guggugcccugcuugucaa

SEQ ID NO: 1098640 - RNA, 19 nt, Homo sapiens
  misc_RNA (1)...(19): siRNA sense strand
cuacuuuauugaagaccuu

SEQ ID NO: 1098641 - RNA, 19 nt, Homo sapiens
  misc_RNA (1)...(19): siRNA sense strand
gggaaaguuuugcugaaug

SEQ ID NO: 1098642 - RNA, 19 nt, Homo sapiens
  misc_RNA (1)...(19): siRNA sense strand
uaugauauuuguggcagau

SEQ ID NO: 1098643 - RNA, 19 nt, Homo sapiens
  misc_RNA (1)...(19): siRNA sense strand
agacuggaugauagaauuu

SEQ ID NO: 1098644 - RNA, 19 nt, Homo sapiens
  misc_RNA (1)...(19): siRNA sense strand
caaggacuaagaaggacuu

SEQ ID NO: 1098645 - RNA, 19 nt, Homo sapiens
  misc_RNA (1)...(19): siRNA sense strand
uauuaggacucuguaugau

SEQ ID NO: 1098646 - RNA, 19 nt, Homo sapiens
  misc_RNA (1)...(19): siRNA sense strand
ucaggacgugccauaacua

SEQ ID NO: 1098647 - RNA, 19 nt, Homo sapiens
  misc_RNA (1)...(19): siRNA sense strand
cagaaugccauaagacaac

SEQ ID NO: 1098648 - RNA, 19 nt, Homo sapiens
  misc_RNA (1)...(19): siRNA sense strand
cugaguggacgguuuauca

SEQ ID NO: 1098649 - RNA, 19 nt, Homo sapiens
  misc_RNA (1)...(19): siRNA sense strand
acagaaugccauaagacaa

SEQ ID NO: 1098650 - RNA, 19 nt, Homo sapiens
  misc_RNA (1)...(19): siRNA sense strand
cacagaaugccauaagaca

SEQ ID NO: 1098651 - RNA, 19 nt, Homo sapiens
  misc_RNA (1)...(19): siRNA sense strand
agguuaauauugcgaaagu

SEQ ID NO: 1098652 - RNA, 19 nt, Homo sapiens
  misc_RNA (1)...(19): siRNA sense strand
auuaggacucuguaugaua

SEQ ID NO: 1098653 - RNA, 19 nt, Homo sapiens
  misc_RNA (1)...(19): siRNA sense strand
ucuuucagcuaucuaugug

SEQ ID NO: 1098654 - RNA, 19 nt, Homo sapiens
  misc_RNA (1)...(19): siRNA sense strand
gcccguuucaucaugguuu

SEQ ID NO: 1098655 - RNA, 19 nt, Homo sapiens
  misc_RNA (1)...(19): siRNA sense strand
ccacagaaugccauaagac

SEQ ID NO: 1098656 - RNA, 19 nt, Homo sapiens
  misc_RNA (1)...(19): siRNA sense strand
uccacagaaugccauaaga

SEQ ID NO: 1098657 - RNA, 19 nt, Homo sapiens
  misc_RNA (1)...(19): siRNA sense strand
gcgcagaccacagccauac

SEQ ID NO: 1098658 - RNA, 19 nt, Homo sapiens
  misc_RNA (1)...(19): siRNA sense strand
cagguucuguucugaugag

SEQ ID NO: 1098659 - RNA, 19 nt, Homo sapiens
  misc_RNA (1)...(19): siRNA sense strand
uccagguucuguucugaug

SEQ ID NO: 1098660 - RNA, 19 nt, Homo sapiens
  misc_RNA (1)...(19): siRNA sense strand
gauugccuuuguccuucaa

SEQ ID NO: 1098661 - RNA, 19 nt, Homo sapiens
  misc_RNA (1)...(19): siRNA sense strand
uggaucaggacgugccaua

SEQ ID NO: 1098662 - RNA, 19 nt, Homo sapiens
  misc_RNA (1)...(19): siRNA sense strand
gaaugacgauuacuacuag

SEQ ID NO: 1098663 - RNA, 19 nt, Homo sapiens
  misc_RNA (1)...(19): siRNA sense strand
gugaagagaaugacgauua

SEQ ID NO: 1098664 - RNA, 19 nt, Homo sapiens
  misc_RNA (1)...(19): siRNA sense strand
ggaggaggcugagagugaa

SEQ ID NO: 1098665 - RNA, 19 nt, Homo sapiens
  misc_RNA (1)...(19): siRNA sense strand
gcaaugcccugggucaagu

SEQ ID NO: 1098666 - RNA, 19 nt, Homo sapiens
  misc_RNA (1)...(19): siRNA sense strand
gaucgugucacauccauau

SEQ ID NO: 1098667 - RNA, 19 nt, Homo sapiens
  misc_RNA (1)...(19): siRNA sense strand
uaugacacuuggaauguga

SEQ ID NO: 1098668 - RNA, 19 nt, Homo sapiens
  misc_RNA (1)...(19): siRNA sense strand
agaaugacgauuacuacua

SEQ ID NO: 1098669 - RNA, 19 nt, Homo sapiens
  misc_RNA (1)...(19): siRNA sense strand
ugaagagaaugacgauuac

SEQ ID NO: 1098670 - RNA, 19 nt, Homo sapiens
  misc_RNA (1)...(19): siRNA sense strand
ggcaggaugugaucuuugg

SEQ ID NO: 1098671 - RNA, 19 nt, Homo sapiens
  misc_RNA (1)...(19): siRNA sense strand
gaucuuuggcugugaagug

SEQ ID NO: 1098672 - RNA, 19 nt, Homo sapiens
  misc_RNA (1)...(19): siRNA sense strand
ggaaggauggcuuggacau

SEQ ID NO: 1098673 - RNA, 19 nt, Homo sapiens
  misc_RNA (1)...(19): siRNA sense strand
aagagaaugacgauuacua

SEQ ID NO: 1098674 - RNA, 19 nt, Homo sapiens
  misc_RNA (1)...(19): siRNA sense strand
ucacauccauaugacacuu

SEQ ID NO: 1098675 - RNA, 19 nt, Homo sapiens
  misc_RNA (1)...(19): siRNA sense strand
cauaugacacuuggaaugu

SEQ ID NO: 1098676 - RNA, 19 nt, Homo sapiens
  misc_RNA (1)...(19): siRNA sense strand
ccauaugacacuuggaaug

SEQ ID NO: 1098677 - RNA, 19 nt, Homo sapiens
  misc_RNA (1)...(19): siRNA sense strand
ugacagggcaggaugugau

SEQ ID NO: 1098678 - RNA, 19 nt, Homo sapiens
  misc_RNA (1)...(19): siRNA sense strand
ggaggaaggauggcuugga

SEQ ID NO: 1098679 - RNA, 19 nt, Homo sapiens
  misc_RNA (1)...(19): siRNA sense strand
aggaggaggcugagaguga

SEQ ID NO: 1098680 - RNA, 19 nt, Homo sapiens
  misc_RNA (1)...(19): siRNA sense strand
cagcugcgaucacuaaacc

SEQ ID NO: 1098681 - RNA, 19 nt, Homo sapiens
  misc_RNA (1)...(19): siRNA sense strand
cuuuggcugugaaguguuu

SEQ ID NO: 1098682 - RNA, 19 nt, Homo sapiens
  misc_RNA (1)...(19): siRNA sense strand
cugaccagcugaacucuac

SEQ ID NO: 1098683 - RNA, 19 nt, Homo sapiens
  misc_RNA (1)...(19): siRNA sense strand
gagaaugacgauuacuacu

SEQ ID NO: 1098684 - RNA, 19 nt, Homo sapiens
  misc_RNA (1)...(19): siRNA sense strand
gggcaggaugugaucuuug

SEQ ID NO: 1098685 - RNA, 19 nt, Homo sapiens
  misc_RNA (1)...(19): siRNA sense strand
gguccgacggucacaccua

SEQ ID NO: 1098686 - RNA, 19 nt, Homo sapiens
  misc_RNA (1)...(19): siRNA sense strand
ggcugagagugaagagaau

SEQ ID NO: 1098687 - RNA, 19 nt, Homo sapiens
  misc_RNA (1)...(19): siRNA sense strand
gcuuugaacucacacauua

SEQ ID NO: 1098688 - RNA, 19 nt, Homo sapiens
  misc_RNA (1)...(19): siRNA sense strand
guggagggcuggcaaguga

SEQ ID NO: 1098689 - RNA, 19 nt, Homo sapiens
  misc_RNA (1)...(19): siRNA sense strand
ccacccagcugaccaugaa

SEQ ID NO: 1098690 - RNA, 19 nt, Homo sapiens
  misc_RNA (1)...(19): siRNA sense strand
ggaugcagauguacaacuc

SEQ ID NO: 1098691 - RNA, 19 nt, Homo sapiens
  misc_RNA (1)...(19): siRNA sense strand
gacgguauaucaaguaggu

SEQ ID NO: 1098692 - RNA, 19 nt, Homo sapiens
  misc_RNA (1)...(19): siRNA sense strand
caugaacguuccuuuccaa

SEQ ID NO: 1098693 - RNA, 19 nt, Homo sapiens
  misc_RNA (1)...(19): siRNA sense strand
cauggucuguguaugaguu

SEQ ID NO: 1098694 - RNA, 19 nt, Homo sapiens
  misc_RNA (1)...(19): siRNA sense strand
gugcaggccagaguaauuu

SEQ ID NO: 1098695 - RNA, 19 nt, Homo sapiens
  misc_RNA (1)...(19): siRNA sense strand
ccaagccauucacuucaug

SEQ ID NO: 1098696 - RNA, 19 nt, Homo sapiens
  misc_RNA (1)...(19): siRNA sense strand
guguaugaguucuucaaau

SEQ ID NO: 1098697 - RNA, 19 nt, Homo sapiens
  misc_RNA (1)...(19): siRNA sense strand
guccuuggcuuugaacuca

SEQ ID NO: 1098698 - RNA, 19 nt, Homo sapiens
  misc_RNA (1)...(19): siRNA sense strand
ccauucacuucaugaccua

SEQ ID NO: 1098699 - RNA, 19 nt, Homo sapiens
  misc_RNA (1)...(19): siRNA sense strand
gcaaaacacugcucaacac

SEQ ID NO: 1098700 - RNA, 19 nt, Homo sapiens
  misc_RNA (1)...(19): siRNA sense strand
ggugcaggccagaguaauu

SEQ ID NO: 1098701 - RNA, 19 nt, Homo sapiens
  misc_RNA (1)...(19): siRNA sense strand
ucgcauggucuguguauga

SEQ ID NO: 1098702 - RNA, 19 nt, Homo sapiens
  misc_RNA (1)...(19): siRNA sense strand
agcagaggaugcagaugua

SEQ ID NO: 1098703 - RNA, 19 nt, Homo sapiens
  misc_RNA (1)...(19): siRNA sense strand
gaccaugaacguuccuuuc

SEQ ID NO: 1098704 - RNA, 19 nt, Homo sapiens
  misc_RNA (1)...(19): siRNA sense strand
ucaggacgguauaucaagu

SEQ ID NO: 1098705 - RNA, 19 nt, Homo sapiens
  misc_RNA (1)...(19): siRNA sense strand
cacauuacaggacauauca

SEQ ID NO: 1098706 - RNA, 19 nt, Homo sapiens
  misc_RNA (1)...(19): siRNA sense strand
ucacacauuacaggacaua

SEQ ID NO: 1098707 - RNA, 19 nt, Homo sapiens
  misc_RNA (1)...(19): siRNA sense strand
aagcagaggaugcagaugu

SEQ ID NO: 1098708 - RNA, 19 nt, Homo sapiens
  misc_RNA (1)...(19): siRNA sense strand
guacgggcaguguggcaaa

SEQ ID NO: 1098709 - RNA, 19 nt, Homo sapiens
  misc_RNA (1)...(19): siRNA sense strand
caggacgguauaucaagua

SEQ ID NO: 1098710 - RNA, 19 nt, Homo sapiens
  misc_RNA (1)...(19): siRNA sense strand
gauguacaacucaccauac

SEQ ID NO: 1098711 - RNA, 19 nt, Homo sapiens
  misc_RNA (1)...(19): siRNA sense strand
ccaugaacguuccuuucca

SEQ ID NO: 1098712 - RNA, 19 nt, Homo sapiens
  misc_RNA (1)...(19): siRNA sense strand
agauguacaacucaccaua

SEQ ID NO: 1098713 - RNA, 19 nt, Homo sapiens
  misc_RNA (1)...(19): siRNA sense strand
cugcggaaguggucaagca

SEQ ID NO: 1098714 - RNA, 19 nt, Homo sapiens
  misc_RNA (1)...(19): siRNA sense strand
caucgcauggucuguguau

SEQ ID NO: 1098715 - RNA, 19 nt, Homo sapiens
  misc_RNA (1)...(19): siRNA sense strand
guucuucaaauaccuaauc

SEQ ID NO: 1098716 - RNA, 19 nt, Homo sapiens
  misc_RNA (1)...(19): siRNA sense strand
ucaagcagaggaugcagau

SEQ ID NO: 1098717 - RNA, 19 nt, Homo sapiens
  misc_RNA (1)...(19): siRNA sense strand
acacauuacaggacauauc

SEQ ID NO: 1098718 - RNA, 19 nt, Homo sapiens
  misc_RNA (1)...(19): siRNA sense strand
gggaagacaucacucauga

SEQ ID NO: 1098719 - RNA, 19 nt, Homo sapiens
  misc_RNA (1)...(19): siRNA sense strand
ggaagaaaguguugcugaa

SEQ ID NO: 1098720 - RNA, 19 nt, Homo sapiens
  misc_RNA (1)...(19): siRNA sense strand
cuagauagcuggagagaug

SEQ ID NO: 1098721 - RNA, 19 nt, Homo sapiens
  misc_RNA (1)...(19): siRNA sense strand
guacaaagccacaauagga

SEQ ID NO: 1098722 - RNA, 19 nt, Homo sapiens
  misc_RNA (1)...(19): siRNA sense strand
aaacaacauucccuacuuu

SEQ ID NO: 1098723 - RNA, 19 nt, Homo sapiens
  misc_RNA (1)...(19): siRNA sense strand
aaacggagguggagcugua

SEQ ID NO: 1098724 - RNA, 19 nt, Homo sapiens
  misc_RNA (1)...(19): siRNA sense strand
ggacacagcaggacaggaa

SEQ ID NO: 1098725 - RNA, 19 nt, Homo sapiens
  misc_RNA (1)...(19): siRNA sense strand
aaacaagauugaccucgaa

SEQ ID NO: 1098726 - RNA, 19 nt, Homo sapiens
  misc_RNA (1)...(19): siRNA sense strand
gagcugacuuucugaccaa

SEQ ID NO: 1098727 - RNA, 19 nt, Homo sapiens
  misc_RNA (1)...(19): siRNA sense strand
aauaggagcugacuuucug

SEQ ID NO: 1098728 - RNA, 19 nt, Homo sapiens
  misc_RNA (1)...(19): siRNA sense strand
cacaauaggagcugacuuu

SEQ ID NO: 1098729 - RNA, 19 nt, Homo sapiens
  misc_RNA (1)...(19): siRNA sense strand
cuaucaaacuggacaagaa

SEQ ID NO: 1098730 - RNA, 19 nt, Homo sapiens
  misc_RNA (1)...(19): siRNA sense strand
agacaucacucaugaacca

SEQ ID NO: 1098731 - RNA, 19 nt, Homo sapiens
  misc_RNA (1)...(19): siRNA sense strand
acagacaaguggccacaaa

SEQ ID NO: 1098732 - RNA, 19 nt, Homo sapiens
  misc_RNA (1)...(19): siRNA sense strand
gaaccaguaugugaauaag

SEQ ID NO: 1098733 - RNA, 19 nt, Homo sapiens
  misc_RNA (1)...(19): siRNA sense strand
guacaacgaauuuccugaa

SEQ ID NO: 1098734 - RNA, 19 nt, Homo sapiens
  misc_RNA (1)...(19): siRNA sense strand
gaagacaucacucaugaac

SEQ ID NO: 1098735 - RNA, 19 nt, Homo sapiens
  misc_RNA (1)...(19): siRNA sense strand
caucacucaugaaccagua

SEQ ID NO: 1098736 - RNA, 19 nt, Homo sapiens
  misc_RNA (1)...(19): siRNA sense strand
gccaaggccucggcagaaa

SEQ ID NO: 1098737 - RNA, 19 nt, Homo sapiens
  misc_RNA (1)...(19): siRNA sense strand
ggagcuguacaacgaauuu

SEQ ID NO: 1098738 - RNA, 19 nt, Homo sapiens
  misc_RNA (1)...(19): siRNA sense strand
gaaauucagcaaucaguac

SEQ ID NO: 1098739 - RNA, 19 nt, Homo sapiens
  misc_RNA (1)...(19): siRNA sense strand
cgaauuuccugaaccuauc

SEQ ID NO: 1098740 - RNA, 19 nt, Homo sapiens
  misc_RNA (1)...(19): siRNA sense strand
guucugguauuugauguga

SEQ ID NO: 1098741 - RNA, 19 nt, Homo sapiens
  misc_RNA (1)...(19): siRNA sense strand
caacgaauuuccugaaccu

SEQ ID NO: 1098742 - RNA, 19 nt, Homo sapiens
  misc_RNA (1)...(19): siRNA sense strand
accaguaugugaauaagaa

SEQ ID NO: 1098743 - RNA, 19 nt, Homo sapiens
  misc_RNA (1)...(19): siRNA sense strand
gcugcguucugguauuuga

SEQ ID NO: 1098744 - RNA, 19 nt, Homo sapiens
  misc_RNA (1)...(19): siRNA sense strand
gaagaaaguguugcugaag

SEQ ID NO: 1098745 - RNA, 19 nt, Homo sapiens
  misc_RNA (1)...(19): siRNA sense strand
ugaaccaguaugugaauaa

SEQ ID NO: 1098746 - RNA, 19 nt, Homo sapiens
  misc_RNA (1)...(19): siRNA sense strand
gaaaacuucccauuuguug

SEQ ID NO: 1098747 - RNA, 19 nt, Homo sapiens
  misc_RNA (1)...(19): siRNA sense strand
ccugaaaacuucccauuug

SEQ ID NO: 1098748 - RNA, 19 nt, Homo sapiens
  misc_RNA (1)...(19): siRNA sense strand
caacauucccuacuuugag

SEQ ID NO: 1098749 - RNA, 19 nt, Homo sapiens
  misc_RNA (1)...(19): siRNA sense strand
ggaagacaucacucaugaa

SEQ ID NO: 1098750 - RNA, 19 nt, Homo sapiens
  misc_RNA (1)...(19): siRNA sense strand
ucaaacuggacaagaauga

SEQ ID NO: 1098751 - RNA, 19 nt, Homo sapiens
  misc_RNA (1)...(19): siRNA sense strand
aaaguguugcugaagguua

SEQ ID NO: 1098752 - RNA, 19 nt, Homo sapiens
  misc_RNA (1)...(19): siRNA sense strand
ucaguacaaagccacaaua

SEQ ID NO: 1098753 - RNA, 19 nt, Homo sapiens
  misc_RNA (1)...(19): siRNA sense strand
aaacuucccauuuguugug

SEQ ID NO: 1098754 - RNA, 19 nt, Homo sapiens
  misc_RNA (1)...(19): siRNA sense strand
ccaaggaggccaucaacgu

SEQ ID NO: 1098755 - RNA, 19 nt, Homo sapiens
  misc_RNA (1)...(19): siRNA sense strand
agaaauucagcaaucagua

SEQ ID NO: 1098756 - RNA, 19 nt, Homo sapiens
  misc_RNA (1)...(19): siRNA sense strand
gaaugcacuuaagcaggaa

SEQ ID NO: 1098757 - RNA, 19 nt, Homo sapiens
  misc_RNA (1)...(19): siRNA sense strand
agaaaguguugcugaaggu

SEQ ID NO: 1098758 - RNA, 19 nt, Homo sapiens
  misc_RNA (1)...(19): siRNA sense strand
cugcugcguucugguauuu

SEQ ID NO: 1098759 - RNA, 19 nt, Homo sapiens
  misc_RNA (1)...(19): siRNA sense strand
agacugcugcguucuggua

SEQ ID NO: 1098760 - RNA, 19 nt, Homo sapiens
  misc_RNA (1)...(19): siRNA sense strand
gcuagucacaaugcagaua

SEQ ID NO: 1098761 - RNA, 19 nt, Homo sapiens
  misc_RNA (1)...(19): siRNA sense strand
gaaaguguugcugaagguu

SEQ ID NO: 1098762 - RNA, 19 nt, Homo sapiens
  misc_RNA (1)...(19): siRNA sense strand
aacauucccuacuuugaga

SEQ ID NO: 1098763 - RNA, 19 nt, Homo sapiens
  misc_RNA (1)...(19): siRNA sense strand
aaaacaacauucccuacuu

SEQ ID NO: 1098764 - RNA, 19 nt, Homo sapiens
  misc_RNA (1)...(19): siRNA sense strand
guuaucauccugggagauu

SEQ ID NO: 1098765 - RNA, 19 nt, Homo sapiens
  misc_RNA (1)...(19): siRNA sense strand
agguggagcuguacaacga

SEQ ID NO: 1098766 - RNA, 19 nt, Homo sapiens
  misc_RNA (1)...(19): siRNA sense strand
aggaggugaugguggauga

SEQ ID NO: 1098767 - RNA, 19 nt, Homo sapiens
  misc_RNA (1)...(19): siRNA sense strand
uagcuggagagaugaguuu

SEQ ID NO: 1098768 - RNA, 19 nt, Homo sapiens
  misc_RNA (1)...(19): siRNA sense strand
acaacauucccuacuuuga

SEQ ID NO: 1098769 - RNA, 19 nt, Homo sapiens
  misc_RNA (1)...(19): siRNA sense strand
uaucaaacuggacaagaau

SEQ ID NO: 1098770 - RNA, 19 nt, Homo sapiens
  misc_RNA (1)...(19): siRNA sense strand
gaauuuccugaaccuauca

SEQ ID NO: 1098771 - RNA, 19 nt, Homo sapiens
  misc_RNA (1)...(19): siRNA sense strand
caauaggagcugacuuucu

SEQ ID NO: 1098772 - RNA, 19 nt, Homo sapiens
  misc_RNA (1)...(19): siRNA sense strand
aaguguugcugaagguuau

SEQ ID NO: 1098773 - RNA, 19 nt, Homo sapiens
  misc_RNA (1)...(19): siRNA sense strand
auucagcaaucaguacaaa

SEQ ID NO: 1098774 - RNA, 19 nt, Homo sapiens
  misc_RNA (1)...(19): siRNA sense strand
ucaugaaccaguaugugaa

SEQ ID NO: 1098775 - RNA, 19 nt, Homo sapiens
  misc_RNA (1)...(19): siRNA sense strand
cauuuguuguguugggaaa

SEQ ID NO: 1098776 - RNA, 19 nt, Homo sapiens
  misc_RNA (1)...(19): siRNA sense strand
guggagcuguacaacgaau

SEQ ID NO: 1098777 - RNA, 19 nt, Homo sapiens
  misc_RNA (1)...(19): siRNA sense strand
caugaaccaguaugugaau

SEQ ID NO: 1098778 - RNA, 19 nt, Homo sapiens
  misc_RNA (1)...(19): siRNA sense strand
cucaugaaccaguauguga

SEQ ID NO: 1098779 - RNA, 19 nt, Homo sapiens
  misc_RNA (1)...(19): siRNA sense strand
gaucgaagcuggacacguu

SEQ ID NO: 1098780 - RNA, 19 nt, Homo sapiens
  misc_RNA (1)...(19): siRNA sense strand
gcacuauugucaccagaaa

SEQ ID NO: 1098781 - RNA, 19 nt, Homo sapiens
  misc_RNA (1)...(19): siRNA sense strand
ggaaguaccgggucccuuu

SEQ ID NO: 1098782 - RNA, 19 nt, Homo sapiens
  misc_RNA (1)...(19): siRNA sense strand
caucaagauugcugacuuu

SEQ ID NO: 1098783 - RNA, 19 nt, Homo sapiens
  misc_RNA (1)...(19): siRNA sense strand
ggucacaaguugccaucua

SEQ ID NO: 1098784 - RNA, 19 nt, Homo sapiens
  misc_RNA (1)...(19): siRNA sense strand
gagguugccaucaagauua

SEQ ID NO: 1098785 - RNA, 19 nt, Homo sapiens
  misc_RNA (1)...(19): siRNA sense strand
gugaggaguugaagccaua

SEQ ID NO: 1098786 - RNA, 19 nt, Homo sapiens
  misc_RNA (1)...(19): siRNA sense strand
aagcugaccuccaaacuga

SEQ ID NO: 1098787 - RNA, 19 nt, Homo sapiens
  misc_RNA (1)...(19): siRNA sense strand
gagcaaaucaugaaagaca

SEQ ID NO: 1098788 - RNA, 19 nt, Homo sapiens
  misc_RNA (1)...(19): siRNA sense strand
ucaccaagcugaccuccaa

SEQ ID NO: 1098789 - RNA, 19 nt, Homo sapiens
  misc_RNA (1)...(19): siRNA sense strand
guacgcaagugcuggagaa

SEQ ID NO: 1098790 - RNA, 19 nt, Homo sapiens
  misc_RNA (1)...(19): siRNA sense strand
ccaccaaccucuucaccaa

SEQ ID NO: 1098791 - RNA, 19 nt, Homo sapiens
  misc_RNA (1)...(19): siRNA sense strand
caagagaauugaggugaug

SEQ ID NO: 1098792 - RNA, 19 nt, Homo sapiens
  misc_RNA (1)...(19): siRNA sense strand
cgagaaguccgcaucauga

SEQ ID NO: 1098793 - RNA, 19 nt, Homo sapiens
  misc_RNA (1)...(19): siRNA sense strand
ggaucaacaucggcuauga

SEQ ID NO: 1098794 - RNA, 19 nt, Homo sapiens
  misc_RNA (1)...(19): siRNA sense strand
gcuguacucucgagcaaau

SEQ ID NO: 1098795 - RNA, 19 nt, Homo sapiens
  misc_RNA (1)...(19): siRNA sense strand
cuaaacggcagaacucuaa

SEQ ID NO: 1098796 - RNA, 19 nt, Homo sapiens
  misc_RNA (1)...(19): siRNA sense strand
aaagacaaauggaucaaca

SEQ ID NO: 1098797 - RNA, 19 nt, Homo sapiens
  misc_RNA (1)...(19): siRNA sense strand
caucaagauuaucgacaaa

SEQ ID NO: 1098798 - RNA, 19 nt, Homo sapiens
  misc_RNA (1)...(19): siRNA sense strand
gcaaaucaugaaagacaaa

SEQ ID NO: 1098799 - RNA, 19 nt, Homo sapiens
  misc_RNA (1)...(19): siRNA sense strand
gcccgucacuguugccaaa

SEQ ID NO: 1098800 - RNA, 19 nt, Homo sapiens
  misc_RNA (1)...(19): siRNA sense strand
ggagguugccaucaagauu

SEQ ID NO: 1098801 - RNA, 19 nt, Homo sapiens
  misc_RNA (1)...(19): siRNA sense strand
gcaaagggcagcggaguuc

SEQ ID NO: 1098802 - RNA, 19 nt, Homo sapiens
  misc_RNA (1)...(19): siRNA sense strand
ccaucaagauuaucgacaa

SEQ ID NO: 1098803 - RNA, 19 nt, Homo sapiens
  misc_RNA (1)...(19): siRNA sense strand
gaagcucuuugaggugauu

SEQ ID NO: 1098804 - RNA, 19 nt, Homo sapiens
  misc_RNA (1)...(19): siRNA sense strand
cuggagaaguguuugacua

SEQ ID NO: 1098805 - RNA, 19 nt, Homo sapiens
  misc_RNA (1)...(19): siRNA sense strand
gcgcaggcauagcgauuuc

SEQ ID NO: 1098806 - RNA, 19 nt, Homo sapiens
  misc_RNA (1)...(19): siRNA sense strand
ucgagcaaaucaugaaaga

SEQ ID NO: 1098807 - RNA, 19 nt, Homo sapiens
  misc_RNA (1)...(19): siRNA sense strand
agacgaaccugagagaauc

SEQ ID NO: 1098808 - RNA, 19 nt, Homo sapiens
  misc_RNA (1)...(19): siRNA sense strand
gcuaugagggugaggaguu

SEQ ID NO: 1098809 - RNA, 19 nt, Homo sapiens
  misc_RNA (1)...(19): siRNA sense strand
ccaagagaauugaggugau

SEQ ID NO: 1098810 - RNA, 19 nt, Homo sapiens
  misc_RNA (1)...(19): siRNA sense strand
cagaagcuguuccgagaag

SEQ ID NO: 1098811 - RNA, 19 nt, Homo sapiens
  misc_RNA (1)...(19): siRNA sense strand
gagaaguccgcaucaugaa

SEQ ID NO: 1098812 - RNA, 19 nt, Homo sapiens
  misc_RNA (1)...(19): siRNA sense strand
agacugagaagacgcugua

SEQ ID NO: 1098813 - RNA, 19 nt, Homo sapiens
  misc_RNA (1)...(19): siRNA sense strand
cgcaagugcuggagaagug

SEQ ID NO: 1098814 - RNA, 19 nt, Homo sapiens
  misc_RNA (1)...(19): siRNA sense strand
caacaucgugaagcucuuu

SEQ ID NO: 1098815 - RNA, 19 nt, Homo sapiens
  misc_RNA (1)...(19): siRNA sense strand
caccuacguuugcacagaa

SEQ ID NO: 1098816 - RNA, 19 nt, Homo sapiens
  misc_RNA (1)...(19): siRNA sense strand
gagagcauccugcggagau

SEQ ID NO: 1098817 - RNA, 19 nt, Homo sapiens
  misc_RNA (1)...(19): siRNA sense strand
caagcuggcucggcacauc

SEQ ID NO: 1098818 - RNA, 19 nt, Homo sapiens
  misc_RNA (1)...(19): siRNA sense strand
ggaguuccucuuccaccua

SEQ ID NO: 1098819 - RNA, 19 nt, Homo sapiens
  misc_RNA (1)...(19): siRNA sense strand
gccaaguuccgacagauug

SEQ ID NO: 1098820 - RNA, 19 nt, Homo sapiens
  misc_RNA (1)...(19): siRNA sense strand
ccgggucccuuucuacaug

SEQ ID NO: 1098821 - RNA, 19 nt, Homo sapiens
  misc_RNA (1)...(19): siRNA sense strand
gagaaguguuugacuaccu

SEQ ID NO: 1098822 - RNA, 19 nt, Homo sapiens
  misc_RNA (1)...(19): siRNA sense strand
cagacgaaccugagagaau

SEQ ID NO: 1098823 - RNA, 19 nt, Homo sapiens
  misc_RNA (1)...(19): siRNA sense strand
gagccaaguuccgacagau

SEQ ID NO: 1098824 - RNA, 19 nt, Homo sapiens
  misc_RNA (1)...(19): siRNA sense strand
cgagccaaguuccgacaga

SEQ ID NO: 1098825 - RNA, 19 nt, Homo sapiens
  misc_RNA (1)...(19): siRNA sense strand
caucuaccuugggaucaaa

SEQ ID NO: 1098826 - RNA, 19 nt, Homo sapiens
  misc_RNA (1)...(19): siRNA sense strand
gcagaagcuguuccgagaa

SEQ ID NO: 1098827 - RNA, 19 nt, Homo sapiens
  misc_RNA (1)...(19): siRNA sense strand
acaucaagauugcugacuu

SEQ ID NO: 1098828 - RNA, 19 nt, Homo sapiens
  misc_RNA (1)...(19): siRNA sense strand
gaggccaacaucaagauug

SEQ ID NO: 1098829 - RNA, 19 nt, Homo sapiens
  misc_RNA (1)...(19): siRNA sense strand
uuucggcugugcacuauug

SEQ ID NO: 1098830 - RNA, 19 nt, Homo sapiens
  misc_RNA (1)...(19): siRNA sense strand
gaaguaccgggucccuuuc

SEQ ID NO: 1098831 - RNA, 19 nt, Homo sapiens
  misc_RNA (1)...(19): siRNA sense strand
gaacucuaaccgcuguguu

SEQ ID NO: 1098832 - RNA, 19 nt, Homo sapiens
  misc_RNA (1)...(19): siRNA sense strand
gucgggagguugccaucaa

SEQ ID NO: 1098833 - RNA, 19 nt, Homo sapiens
  misc_RNA (1)...(19): siRNA sense strand
acaccuacguuugcacaga

SEQ ID NO: 1098834 - RNA, 19 nt, Homo sapiens
  misc_RNA (1)...(19): siRNA sense strand
gagcauccugcggagauuu

SEQ ID NO: 1098835 - RNA, 19 nt, Homo sapiens
  misc_RNA (1)...(19): siRNA sense strand
uugaggugauugagacuga

SEQ ID NO: 1098836 - RNA, 19 nt, Homo sapiens
  misc_RNA (1)...(19): siRNA sense strand
ccaucuaccuugggaucaa

SEQ ID NO: 1098837 - RNA, 19 nt, Homo sapiens
  misc_RNA (1)...(19): siRNA sense strand
uacccucgaucccucuaaa

SEQ ID NO: 1098838 - RNA, 19 nt, Homo sapiens
  misc_RNA (1)...(19): siRNA sense strand
caagcugaccuccaaacug

SEQ ID NO: 1098839 - RNA, 19 nt, Homo sapiens
  misc_RNA (1)...(19): siRNA sense strand
cagcggaguuccucuucca

SEQ ID NO: 1098840 - RNA, 19 nt, Homo sapiens
  misc_RNA (1)...(19): siRNA sense strand
ggaguugaagccauacaca

SEQ ID NO: 1098841 - RNA, 19 nt, Homo sapiens
  misc_RNA (1)...(19): siRNA sense strand
ccagaaguacaacgaagug

SEQ ID NO: 1098842 - RNA, 19 nt, Homo sapiens
  misc_RNA (1)...(19): siRNA sense strand
gaaagacaaauggaucaac

SEQ ID NO: 1098843 - RNA, 19 nt, Homo sapiens
  misc_RNA (1)...(19): siRNA sense strand
gcagacgaaccugagagaa

SEQ ID NO: 1098844 - RNA, 19 nt, Homo sapiens
  misc_RNA (1)...(19): siRNA sense strand
cccaacaaccucccuccua

SEQ ID NO: 1098845 - RNA, 19 nt, Homo sapiens
  misc_RNA (1)...(19): siRNA sense strand
cuaugagggugaggaguug

SEQ ID NO: 1098846 - RNA, 19 nt, Homo sapiens
  misc_RNA (1)...(19): siRNA sense strand
gaaggcugagaaccucuug

SEQ ID NO: 1098847 - RNA, 19 nt, Homo sapiens
  misc_RNA (1)...(19): siRNA sense strand
cuacacacgggaagaaauc

SEQ ID NO: 1098848 - RNA, 19 nt, Homo sapiens
  misc_RNA (1)...(19): siRNA sense strand
gaucaacaucggcuaugag

SEQ ID NO: 1098849 - RNA, 19 nt, Homo sapiens
  misc_RNA (1)...(19): siRNA sense strand
ccgcagaaacaccuacguu

SEQ ID NO: 1098850 - RNA, 19 nt, Homo sapiens
  misc_RNA (1)...(19): siRNA sense strand
gaagcuguuccgagaaguc

SEQ ID NO: 1098851 - RNA, 19 nt, Homo sapiens
  misc_RNA (1)...(19): siRNA sense strand
ccgagaaguccgcaucaug

SEQ ID NO: 1098852 - RNA, 19 nt, Homo sapiens
  misc_RNA (1)...(19): siRNA sense strand
gcuacacacgggaagaaau

SEQ ID NO: 1098853 - RNA, 19 nt, Homo sapiens
  misc_RNA (1)...(19): siRNA sense strand
gggcuacacacgggaagaa

SEQ ID NO: 1098854 - RNA, 19 nt, Homo sapiens
  misc_RNA (1)...(19): siRNA sense strand
agacaaauggaucaacauc

SEQ ID NO: 1098855 - RNA, 19 nt, Homo sapiens
  misc_RNA (1)...(19): siRNA sense strand
gccugggagucauccugua

SEQ ID NO: 1098856 - RNA, 19 nt, Homo sapiens
  misc_RNA (1)...(19): siRNA sense strand
ggugauggaguacgcaagu

SEQ ID NO: 1098857 - RNA, 19 nt, Homo sapiens
  misc_RNA (1)...(19): siRNA sense strand
gucacaaguugccaucuac

SEQ ID NO: 1098858 - RNA, 19 nt, Homo sapiens
  misc_RNA (1)...(19): siRNA sense strand
cgacaccaccaacggaaca

SEQ ID NO: 1098859 - RNA, 19 nt, Homo sapiens
  misc_RNA (1)...(19): siRNA sense strand
ugaccagccagaaguacaa

SEQ ID NO: 1098860 - RNA, 19 nt, Homo sapiens
  misc_RNA (1)...(19): siRNA sense strand
gcaugaugacccgcagaaa

SEQ ID NO: 1098861 - RNA, 19 nt, Homo sapiens
  misc_RNA (1)...(19): siRNA sense strand
cagcgcaggcauagcgauu

SEQ ID NO: 1098862 - RNA, 19 nt, Homo sapiens
  misc_RNA (1)...(19): siRNA sense strand
ccaacaucgugaagcucuu

SEQ ID NO: 1098863 - RNA, 19 nt, Homo sapiens
  misc_RNA (1)...(19): siRNA sense strand
guugccaaaugggaaagaa

SEQ ID NO: 1098864 - RNA, 19 nt, Homo sapiens
  misc_RNA (1)...(19): siRNA sense strand
gaagaaaacucagcuaaau

SEQ ID NO: 1098865 - RNA, 19 nt, Homo sapiens
  misc_RNA (1)...(19): siRNA sense strand
cacugaaucugguuauaaa

SEQ ID NO: 1098866 - RNA, 19 nt, Homo sapiens
  misc_RNA (1)...(19): siRNA sense strand
ucacugaaucugguuauaa

SEQ ID NO: 1098867 - RNA, 19 nt, Homo sapiens
  misc_RNA (1)...(19): siRNA sense strand
gggaagagucuaccaaucu

SEQ ID NO: 1098868 - RNA, 19 nt, Homo sapiens
  misc_RNA (1)...(19): siRNA sense strand
agaaggaucuguagcuuuu

SEQ ID NO: 1098869 - RNA, 19 nt, Homo sapiens
  misc_RNA (1)...(19): siRNA sense strand
aaccuuaucuugcacuaga

SEQ ID NO: 1098870 - RNA, 19 nt, Homo sapiens
  misc_RNA (1)...(19): siRNA sense strand
ucagcuaaauuuccuguag

SEQ ID NO: 1098871 - RNA, 19 nt, Homo sapiens
  misc_RNA (1)...(19): siRNA sense strand
gcacuagaaggaucuguag

SEQ ID NO: 1098872 - RNA, 19 nt, Homo sapiens
  misc_RNA (1)...(19): siRNA sense strand
gagagaaacuggggaugaa

SEQ ID NO: 1098873 - RNA, 19 nt, Homo sapiens
  misc_RNA (1)...(19): siRNA sense strand
aaacucagcuaaauuuccu

SEQ ID NO: 1098874 - RNA, 19 nt, Homo sapiens
  misc_RNA (1)...(19): siRNA sense strand
cuagaaggaucuguagcuu

SEQ ID NO: 1098875 - RNA, 19 nt, Homo sapiens
  misc_RNA (1)...(19): siRNA sense strand
gauaccgaaucaacacaag

SEQ ID NO: 1098876 - RNA, 19 nt, Homo sapiens
  misc_RNA (1)...(19): siRNA sense strand
aaucauggucugucacuga

SEQ ID NO: 1098877 - RNA, 19 nt, Homo sapiens
  misc_RNA (1)...(19): siRNA sense strand
uagaaggaucuguagcuuu

SEQ ID NO: 1098878 - RNA, 19 nt, Homo sapiens
  misc_RNA (1)...(19): siRNA sense strand
gagaaugggguucaggaua

SEQ ID NO: 1098879 - RNA, 19 nt, Homo sapiens
  misc_RNA (1)...(19): siRNA sense strand
cauggucugucacugaauc

SEQ ID NO: 1098880 - RNA, 19 nt, Homo sapiens
  misc_RNA (1)...(19): siRNA sense strand
gucacugaaucugguuaua

SEQ ID NO: 1098881 - RNA, 19 nt, Homo sapiens
  misc_RNA (1)...(19): siRNA sense strand
gguucaggauaccgaauca

SEQ ID NO: 1098882 - RNA, 19 nt, Homo sapiens
  misc_RNA (1)...(19): siRNA sense strand
ggauaccgaaucaacacaa

SEQ ID NO: 1098883 - RNA, 19 nt, Homo sapiens
  misc_RNA (1)...(19): siRNA sense strand
cuuaaaucauggucuguca

SEQ ID NO: 1098884 - RNA, 19 nt, Homo sapiens
  misc_RNA (1)...(19): siRNA sense strand
ggagagauuuugacacacu

SEQ ID NO: 1098885 - RNA, 19 nt, Homo sapiens
  misc_RNA (1)...(19): siRNA sense strand
gcuguaugcugggaagagu

SEQ ID NO: 1098886 - RNA, 19 nt, Homo sapiens
  misc_RNA (1)...(19): siRNA sense strand
uaccgaaucaacacaagaa

SEQ ID NO: 1098887 - RNA, 19 nt, Homo sapiens
  misc_RNA (1)...(19): siRNA sense strand
ugggaagagucuaccaauc

SEQ ID NO: 1098888 - RNA, 19 nt, Homo sapiens
  misc_RNA (1)...(19): siRNA sense strand
aaggagagauuuugacaca

SEQ ID NO: 1098889 - RNA, 19 nt, Homo sapiens
  misc_RNA (1)...(19): siRNA sense strand
gaacgaggguggccacuac

SEQ ID NO: 1098890 - RNA, 19 nt, Homo sapiens
  misc_RNA (1)...(19): siRNA sense strand
caagcagggugacgaaguu

SEQ ID NO: 1098891 - RNA, 19 nt, Homo sapiens
  misc_RNA (1)...(19): siRNA sense strand
ccagggcccucaggaauga

SEQ ID NO: 1098892 - RNA, 19 nt, Homo sapiens
  misc_RNA (1)...(19): siRNA sense strand
ggaaugaugggacgaaugg

SEQ ID NO: 1098893 - RNA, 19 nt, Homo sapiens
  misc_RNA (1)...(19): siRNA sense strand
ggacagacagccucuuuac

SEQ ID NO: 1098894 - RNA, 19 nt, Homo sapiens
  misc_RNA (1)...(19): siRNA sense strand
caaagacggccaagaugga

SEQ ID NO: 1098895 - RNA, 19 nt, Homo sapiens
  misc_RNA (1)...(19): siRNA sense strand
acaagauucugaugaacga

SEQ ID NO: 1098896 - RNA, 19 nt, Homo sapiens
  misc_RNA (1)...(19): siRNA sense strand
uugacaagauucugaugaa

SEQ ID NO: 1098897 - RNA, 19 nt, Homo sapiens
  misc_RNA (1)...(19): siRNA sense strand
gaggguggccacuacaaug

SEQ ID NO: 1098898 - RNA, 19 nt, Homo sapiens
  misc_RNA (1)...(19): siRNA sense strand
gaaguuuggcugcagaucu

SEQ ID NO: 1098899 - RNA, 19 nt, Homo sapiens
  misc_RNA (1)...(19): siRNA sense strand
ggaaagccaggaccaaagg

SEQ ID NO: 1098900 - RNA, 19 nt, Homo sapiens
  misc_RNA (1)...(19): siRNA sense strand
gcucuucuaugacccuuac

SEQ ID NO: 1098901 - RNA, 19 nt, Homo sapiens
  misc_RNA (1)...(19): siRNA sense strand
uuacgggcuuccuaaucua

SEQ ID NO: 1098902 - RNA, 19 nt, Homo sapiens
  misc_RNA (1)...(19): siRNA sense strand
gcaguggccauaccaaguc

SEQ ID NO: 1098903 - RNA, 19 nt, Homo sapiens
  misc_RNA (1)...(19): siRNA sense strand
ccugggaucuacuacuuca

SEQ ID NO: 1098904 - RNA, 19 nt, Homo sapiens
  misc_RNA (1)...(19): siRNA sense strand
acaucacgcuggccaacaa

SEQ ID NO: 1098905 - RNA, 19 nt, Homo sapiens
  misc_RNA (1)...(19): siRNA sense strand
gcagggacuuccggaaagg

SEQ ID NO: 1098906 - RNA, 19 nt, Homo sapiens
  misc_RNA (1)...(19): siRNA sense strand
cuacuucaccuacgacauc

SEQ ID NO: 1098907 - RNA, 19 nt, Homo sapiens
  misc_RNA (1)...(19): siRNA sense strand
aaguuuggcugcagaucuu

SEQ ID NO: 1098908 - RNA, 19 nt, Homo sapiens
  misc_RNA (1)...(19): siRNA sense strand
ggcaaagacggccaagaug

SEQ ID NO: 1098909 - RNA, 19 nt, Homo sapiens
  misc_RNA (1)...(19): siRNA sense strand
gacccuuacuggacagaca

SEQ ID NO: 1098910 - RNA, 19 nt, Homo sapiens
  misc_RNA (1)...(19): siRNA sense strand
ugccugggaucuacuacuu

SEQ ID NO: 1098911 - RNA, 19 nt, Homo sapiens
  misc_RNA (1)...(19): siRNA sense strand
gggaaagccaggaccaaag

SEQ ID NO: 1098912 - RNA, 19 nt, Homo sapiens
  misc_RNA (1)...(19): siRNA sense strand
gaaaggcuccccucaacug

SEQ ID NO: 1098913 - RNA, 19 nt, Homo sapiens
  misc_RNA (1)...(19): siRNA sense strand
ggacagcggagaggaaggu

SEQ ID NO: 1098914 - RNA, 19 nt, Homo sapiens
  misc_RNA (1)...(19): siRNA sense strand
uuuacgggcuuccuaaucu

SEQ ID NO: 1098915 - RNA, 19 nt, Homo sapiens
  misc_RNA (1)...(19): siRNA sense strand
gguggccacuacaaugcuu

SEQ ID NO: 1098916 - RNA, 19 nt, Homo sapiens
  misc_RNA (1)...(19): siRNA sense strand
ccaccauccuggcucucaa

SEQ ID NO: 1098917 - RNA, 19 nt, Homo sapiens
  misc_RNA (1)...(19): siRNA sense strand
caacaccggcaaccacgau

SEQ ID NO: 1098918 - RNA, 19 nt, Homo sapiens
  misc_RNA (1)...(19): siRNA sense strand
gcagggugacgaaguuugg

SEQ ID NO: 1098919 - RNA, 19 nt, Homo sapiens
  misc_RNA (1)...(19): siRNA sense strand
ggccauaccaagucagcuu

SEQ ID NO: 1098920 - RNA, 19 nt, Homo sapiens
  misc_RNA (1)...(19): siRNA sense strand
gaacgggcucuucuaugac

SEQ ID NO: 1098921 - RNA, 19 nt, Homo sapiens
  misc_RNA (1)...(19): siRNA sense strand
ccaucggccuggugcacaa

SEQ ID NO: 1098922 - RNA, 19 nt, Homo sapiens
  misc_RNA (1)...(19): siRNA sense strand
ucgcagggacuuccggaaa

SEQ ID NO: 1098923 - RNA, 19 nt, Homo sapiens
  misc_RNA (1)...(19): siRNA sense strand
gcggcugcccaucaaguuu

SEQ ID NO: 1098924 - RNA, 19 nt, Homo sapiens
  misc_RNA (1)...(19): siRNA sense strand
gagcggcugcccaucaagu

SEQ ID NO: 1098925 - RNA, 19 nt, Homo sapiens
  misc_RNA (1)...(19): siRNA sense strand
ggaucuacuacuucaccua

SEQ ID NO: 1098926 - RNA, 19 nt, Homo sapiens
  misc_RNA (1)...(19): siRNA sense strand
ugacaagauucugaugaac

SEQ ID NO: 1098927 - RNA, 19 nt, Homo sapiens
  misc_RNA (1)...(19): siRNA sense strand
gccauaccaagucagcuuu

SEQ ID NO: 1098928 - RNA, 19 nt, Homo sapiens
  misc_RNA (1)...(19): siRNA sense strand
uggacagacagccucuuua

SEQ ID NO: 1098929 - RNA, 19 nt, Homo sapiens
  misc_RNA (1)...(19): siRNA sense strand
cgcagggacuuccggaaag

SEQ ID NO: 1098930 - RNA, 19 nt, Homo sapiens
  misc_RNA (1)...(19): siRNA sense strand
ggucuuugcuguccuuuac

SEQ ID NO: 1098931 - RNA, 19 nt, Homo sapiens
  misc_RNA (1)...(19): siRNA sense strand
ggagcgcuacuauuacgua

SEQ ID NO: 1098932 - RNA, 19 nt, Homo sapiens
  misc_RNA (1)...(19): siRNA sense strand
cuccagcucugcccucuuu

SEQ ID NO: 1098933 - RNA, 19 nt, Homo sapiens
  misc_RNA (1)...(19): siRNA sense strand
ggauguugcuucggaaucu

SEQ ID NO: 1098934 - RNA, 19 nt, Homo sapiens
  misc_RNA (1)...(19): siRNA sense strand
gaaaauuugucuucgucuu

SEQ ID NO: 1098935 - RNA, 19 nt, Homo sapiens
  misc_RNA (1)...(19): siRNA sense strand
ccgaaucccaggccagaua

SEQ ID NO: 1098936 - RNA, 19 nt, Homo sapiens
  misc_RNA (1)...(19): siRNA sense strand
gagcucagcaagcaguuug

SEQ ID NO: 1098937 - RNA, 19 nt, Homo sapiens
  misc_RNA (1)...(19): siRNA sense strand
caccuggauuggcuacuuu

SEQ ID NO: 1098938 - RNA, 19 nt, Homo sapiens
  misc_RNA (1)...(19): siRNA sense strand
uuccaacccuuucuucuau

SEQ ID NO: 1098939 - RNA, 19 nt, Homo sapiens
  misc_RNA (1)...(19): siRNA sense strand
ggaaagcagcggugguucu

SEQ ID NO: 1098940 - RNA, 19 nt, Homo sapiens
  misc_RNA (1)...(19): siRNA sense strand
gcucagcccauuucaacug

SEQ ID NO: 1098941 - RNA, 19 nt, Homo sapiens
  misc_RNA (1)...(19): siRNA sense strand
gcuguugacuuccgaaucc

SEQ ID NO: 1098942 - RNA, 19 nt, Homo sapiens
  misc_RNA (1)...(19): siRNA sense strand
caguuugucugcuucuuca

SEQ ID NO: 1098943 - RNA, 19 nt, Homo sapiens
  misc_RNA (1)...(19): siRNA sense strand
ucaccuggauuggcuacuu

SEQ ID NO: 1098944 - RNA, 19 nt, Homo sapiens
  misc_RNA (1)...(19): siRNA sense strand
auguggagcgcuacuauua

SEQ ID NO: 1098945 - RNA, 19 nt, Homo sapiens
  misc_RNA (1)...(19): siRNA sense strand
caauguggagcgcuacuau

SEQ ID NO: 1098946 - RNA, 19 nt, Homo sapiens
  misc_RNA (1)...(19): siRNA sense strand
ggagccaccugcuguugac

SEQ ID NO: 1098947 - RNA, 19 nt, Homo sapiens
  misc_RNA (1)...(19): siRNA sense strand
gaaagcagcggugguucuc

SEQ ID NO: 1098948 - RNA, 19 nt, Homo sapiens
  misc_RNA (1)...(19): siRNA sense strand
gcaacucaccagcgacauc

SEQ ID NO: 1098949 - RNA, 19 nt, Homo sapiens
  misc_RNA (1)...(19): siRNA sense strand
caacucaccagcgacauca

SEQ ID NO: 1098950 - RNA, 19 nt, Homo sapiens
  misc_RNA (1)...(19): siRNA sense strand
ggugucagccaucaaugug

SEQ ID NO: 1098951 - RNA, 19 nt, Homo sapiens
  misc_RNA (1)...(19): siRNA sense strand
cggaaucuguggcccucuu

SEQ ID NO: 1098952 - RNA, 19 nt, Homo sapiens
  misc_RNA (1)...(19): siRNA sense strand
gguggucuuugcuguccuu

SEQ ID NO: 1098953 - RNA, 19 nt, Homo sapiens
  misc_RNA (1)...(19): siRNA sense strand
cgccucuacuuguuucuga

SEQ ID NO: 1098954 - RNA, 19 nt, Homo sapiens
  misc_RNA (1)...(19): siRNA sense strand
gccaccugcuguugacuuc

SEQ ID NO: 1098955 - RNA, 19 nt, Homo sapiens
  misc_RNA (1)...(19): siRNA sense strand
cuuccaacccuuucuucua

SEQ ID NO: 1098956 - RNA, 19 nt, Homo sapiens
  misc_RNA (1)...(19): siRNA sense strand
ccaacccuuucuucuaugg

SEQ ID NO: 1098957 - RNA, 19 nt, Homo sapiens
  misc_RNA (1)...(19): siRNA sense strand
uuucugagcgugugcuuug

SEQ ID NO: 1098958 - RNA, 19 nt, Homo sapiens
  misc_RNA (1)...(19): siRNA sense strand
gugcucagcccauuucaac

SEQ ID NO: 1098959 - RNA, 19 nt, Homo sapiens
  misc_RNA (1)...(19): siRNA sense strand
ccucauacuuguggucuac

SEQ ID NO: 1098960 - RNA, 19 nt, Homo sapiens
  misc_RNA (1)...(19): siRNA sense strand
guggagcgcuacuauuacg

SEQ ID NO: 1098961 - RNA, 19 nt, Homo sapiens
  misc_RNA (1)...(19): siRNA sense strand
cggcaacgcuccgaaucuc

SEQ ID NO: 1098962 - RNA, 19 nt, Homo sapiens
  misc_RNA (1)...(19): siRNA sense strand
ucuguugguugcccuacuu

SEQ ID NO: 1098963 - RNA, 19 nt, Homo sapiens
  misc_RNA (1)...(19): siRNA sense strand
ggucuacugcagcauguuc

SEQ ID NO: 1098964 - RNA, 19 nt, Homo sapiens
  misc_RNA (1)...(19): siRNA sense strand
caccagcgacaucaucaug

SEQ ID NO: 1098965 - RNA, 19 nt, Homo sapiens
  misc_RNA (1)...(19): siRNA sense strand
ccagcucugcccucuuuga

SEQ ID NO: 1098966 - RNA, 19 nt, Homo sapiens
  misc_RNA (1)...(19): siRNA sense strand
ggagcucagcaagcaguuu

SEQ ID NO: 1098967 - RNA, 19 nt, Homo sapiens
  misc_RNA (1)...(19): siRNA sense strand
gaugaaaccuauagugaua

SEQ ID NO: 1098968 - RNA, 19 nt, Homo sapiens
  misc_RNA (1)...(19): siRNA sense strand
gaaaugggaugcucacaaa

SEQ ID NO: 1098969 - RNA, 19 nt, Homo sapiens
  misc_RNA (1)...(19): siRNA sense strand
agaagaagcuaguucauua

SEQ ID NO: 1098970 - RNA, 19 nt, Homo sapiens
  misc_RNA (1)...(19): siRNA sense strand
gaaagacucuguaguagga

SEQ ID NO: 1098971 - RNA, 19 nt, Homo sapiens
  misc_RNA (1)...(19): siRNA sense strand
gaaaggaauucugcuauuu

SEQ ID NO: 1098972 - RNA, 19 nt, Homo sapiens
  misc_RNA (1)...(19): siRNA sense strand
uaaaggcaguguuucauua

SEQ ID NO: 1098973 - RNA, 19 nt, Homo sapiens
  misc_RNA (1)...(19): siRNA sense strand
gaagagaguucaccuguuc

SEQ ID NO: 1098974 - RNA, 19 nt, Homo sapiens
  misc_RNA (1)...(19): siRNA sense strand
uaaaggagcugcuguuaau

SEQ ID NO: 1098975 - RNA, 19 nt, Homo sapiens
  misc_RNA (1)...(19): siRNA sense strand
gaacagucgucguauuauu

SEQ ID NO: 1098976 - RNA, 19 nt, Homo sapiens
  misc_RNA (1)...(19): siRNA sense strand
gaugaaaguuccugggaua

SEQ ID NO: 1098977 - RNA, 19 nt, Homo sapiens
  misc_RNA (1)...(19): siRNA sense strand
guaaacaugugcaaucaaa

SEQ ID NO: 1098978 - RNA, 19 nt, Homo sapiens
  misc_RNA (1)...(19): siRNA sense strand
caaaacagcucuccucaua

SEQ ID NO: 1098979 - RNA, 19 nt, Homo sapiens
  misc_RNA (1)...(19): siRNA sense strand
gaggauugcuuuagugauu

SEQ ID NO: 1098980 - RNA, 19 nt, Homo sapiens
  misc_RNA (1)...(19): siRNA sense strand
ucacaaaucuccaaucugu

SEQ ID NO: 1098981 - RNA, 19 nt, Homo sapiens
  misc_RNA (1)...(19): siRNA sense strand
gaaggaaaguucuguugga

SEQ ID NO: 1098982 - RNA, 19 nt, Homo sapiens
  misc_RNA (1)...(19): siRNA sense strand
gaaagagauucguucagaa

SEQ ID NO: 1098983 - RNA, 19 nt, Homo sapiens
  misc_RNA (1)...(19): siRNA sense strand
aagaagaacuccuagauga

SEQ ID NO: 1098984 - RNA, 19 nt, Homo sapiens
  misc_RNA (1)...(19): siRNA sense strand
ggacugauuugucucuuga

SEQ ID NO: 1098985 - RNA, 19 nt, Homo sapiens
  misc_RNA (1)...(19): siRNA sense strand
gaaagcaagucaacaccaa

SEQ ID NO: 1098986 - RNA, 19 nt, Homo sapiens
  misc_RNA (1)...(19): siRNA sense strand
gagaagaaaucguguccuu

SEQ ID NO: 1098987 - RNA, 19 nt, Homo sapiens
  misc_RNA (1)...(19): siRNA sense strand
gaagauaaacaccgauauu

SEQ ID NO: 1098988 - RNA, 19 nt, Homo sapiens
  misc_RNA (1)...(19): siRNA sense strand
ggaguaauauaaagucaga

SEQ ID NO: 1098989 - RNA, 19 nt, Homo sapiens
  misc_RNA (1)...(19): siRNA sense strand
gaacaaauagccacaagug

SEQ ID NO: 1098990 - RNA, 19 nt, Homo sapiens
  misc_RNA (1)...(19): siRNA sense strand
gaaaguuccugggauaaug

SEQ ID NO: 1098991 - RNA, 19 nt, Homo sapiens
  misc_RNA (1)...(19): siRNA sense strand
gcaguagacucacagaaau

SEQ ID NO: 1098992 - RNA, 19 nt, Homo sapiens
  misc_RNA (1)...(19): siRNA sense strand
gaucgcaauucacuucuaa

SEQ ID NO: 1098993 - RNA, 19 nt, Homo sapiens
  misc_RNA (1)...(19): siRNA sense strand
guaauggccuaaagacuga

SEQ ID NO: 1098994 - RNA, 19 nt, Homo sapiens
  misc_RNA (1)...(19): siRNA sense strand
ggacggacauuucgagauc

SEQ ID NO: 1098995 - RNA, 19 nt, Homo sapiens
  misc_RNA (1)...(19): siRNA sense strand
ucagauggcacuuuaauaa

SEQ ID NO: 1098996 - RNA, 19 nt, Homo sapiens
  misc_RNA (1)...(19): siRNA sense strand
aggaagaagugcacgauua

SEQ ID NO: 1098997 - RNA, 19 nt, Homo sapiens
  misc_RNA (1)...(19): siRNA sense strand
caugaaagacucuguagua

SEQ ID NO: 1098998 - RNA, 19 nt, Homo sapiens
  misc_RNA (1)...(19): siRNA sense strand
ccaaucagguguaaacaug

SEQ ID NO: 1098999 - RNA, 19 nt, Homo sapiens
  misc_RNA (1)...(19): siRNA sense strand
gcacucagccuuagauugu

SEQ ID NO: 1099000 - RNA, 19 nt, Homo sapiens
  misc_RNA (1)...(19): siRNA sense strand
ugaggauggugaagauuua

SEQ ID NO: 1099001 - RNA, 19 nt, Homo sapiens
  misc_RNA (1)...(19): siRNA sense strand
gggaagacuuggauagcua

SEQ ID NO: 1099002 - RNA, 19 nt, Homo sapiens
  misc_RNA (1)...(19): siRNA sense strand
gaagguagcagcugaucuu

SEQ ID NO: 1099003 - RNA, 19 nt, Homo sapiens
  misc_RNA (1)...(19): siRNA sense strand
aaucauauccugugcauuu

SEQ ID NO: 1099004 - RNA, 19 nt, Homo sapiens
  misc_RNA (1)...(19): siRNA sense strand
ugaagaaccuguagauagu

SEQ ID NO: 1099005 - RNA, 19 nt, Homo sapiens
  misc_RNA (1)...(19): siRNA sense strand
guacuugcauucaucauca

SEQ ID NO: 1099006 - RNA, 19 nt, Homo sapiens
  misc_RNA (1)...(19): siRNA sense strand
caaagugcaaugugaauuu

SEQ ID NO: 1099007 - RNA, 19 nt, Homo sapiens
  misc_RNA (1)...(19): siRNA sense strand
gcacuuacaacgacauauu

SEQ ID NO: 1099008 - RNA, 19 nt, Homo sapiens
  misc_RNA (1)...(19): siRNA sense strand
gaagaagcuaguucauuaa

SEQ ID NO: 1099009 - RNA, 19 nt, Homo sapiens
  misc_RNA (1)...(19): siRNA sense strand
gaauaaaggcaguguuuca

SEQ ID NO: 1099010 - RNA, 19 nt, Homo sapiens
  misc_RNA (1)...(19): siRNA sense strand
agaaagagauucguucaga

SEQ ID NO: 1099011 - RNA, 19 nt, Homo sapiens
  misc_RNA (1)...(19): siRNA sense strand
aaacagcucuccucauaag

SEQ ID NO: 1099012 - RNA, 19 nt, Homo sapiens
  misc_RNA (1)...(19): siRNA sense strand
gaagaagaagggcugaauu

SEQ ID NO: 1099013 - RNA, 19 nt, Homo sapiens
  misc_RNA (1)...(19): siRNA sense strand
cugaagaacugucaaagga

SEQ ID NO: 1099014 - RNA, 19 nt, Homo sapiens
  misc_RNA (1)...(19): siRNA sense strand
aaagagagcggaguucaua

SEQ ID NO: 1099015 - RNA, 19 nt, Homo sapiens
  misc_RNA (1)...(19): siRNA sense strand
ggaucaaccucacaaucaa

SEQ ID NO: 1099016 - RNA, 19 nt, Homo sapiens
  misc_RNA (1)...(19): siRNA sense strand
aaagaaaugugaagagagu

SEQ ID NO: 1099017 - RNA, 19 nt, Homo sapiens
  misc_RNA (1)...(19): siRNA sense strand
ugucaaacaucauuucaga

SEQ ID NO: 1099018 - RNA, 19 nt, Homo sapiens
  misc_RNA (1)...(19): siRNA sense strand
gaagaaaucguguccuuac

SEQ ID NO: 1099019 - RNA, 19 nt, Homo sapiens
  misc_RNA (1)...(19): siRNA sense strand
guaaagagaguaauuaagg

SEQ ID NO: 1099020 - RNA, 19 nt, Homo sapiens
  misc_RNA (1)...(19): siRNA sense strand
gcaauucacuucuaaaaca

SEQ ID NO: 1099021 - RNA, 19 nt, Homo sapiens
  misc_RNA (1)...(19): siRNA sense strand
ucacacuccuccuuaacua

SEQ ID NO: 1099022 - RNA, 19 nt, Homo sapiens
  misc_RNA (1)...(19): siRNA sense strand
gcaagucaacaccaaguuu

SEQ ID NO: 1099023 - RNA, 19 nt, Homo sapiens
  misc_RNA (1)...(19): siRNA sense strand
gcucacaaaucuccaaucu

SEQ ID NO: 1099024 - RNA, 19 nt, Homo sapiens
  misc_RNA (1)...(19): siRNA sense strand
caaccacauuuccaaagaa

SEQ ID NO: 1099025 - RNA, 19 nt, Homo sapiens
  misc_RNA (1)...(19): siRNA sense strand
acuaagacuuccaauauga

SEQ ID NO: 1099026 - RNA, 19 nt, Homo sapiens
  misc_RNA (1)...(19): siRNA sense strand
ggacuugacuaugcacuca

SEQ ID NO: 1099027 - RNA, 19 nt, Homo sapiens
  misc_RNA (1)...(19): siRNA sense strand
gcauugaacagucgucgua

SEQ ID NO: 1099028 - RNA, 19 nt, Homo sapiens
  misc_RNA (1)...(19): siRNA sense strand
gaagaugaaaccuauagug

SEQ ID NO: 1099029 - RNA, 19 nt, Homo sapiens
  misc_RNA (1)...(19): siRNA sense strand
aaaaucagcuaccuacaua

SEQ ID NO: 1099030 - RNA, 19 nt, Homo sapiens
  misc_RNA (1)...(19): siRNA sense strand
gaagacagaaguugaugga

SEQ ID NO: 1099031 - RNA, 19 nt, Homo sapiens
  misc_RNA (1)...(19): siRNA sense strand
uauggucacuucugauauu

SEQ ID NO: 1099032 - RNA, 19 nt, Homo sapiens
  misc_RNA (1)...(19): siRNA sense strand
caaucuguguucugaauga

SEQ ID NO: 1099033 - RNA, 19 nt, Homo sapiens
  misc_RNA (1)...(19): siRNA sense strand
gguguuggguuaucaaauc

SEQ ID NO: 1099034 - RNA, 19 nt, Homo sapiens
  misc_RNA (1)...(19): siRNA sense strand
uaaggaaucuaagaaggaa

SEQ ID NO: 1099035 - RNA, 19 nt, Homo sapiens
  misc_RNA (1)...(19): siRNA sense strand
gaagcgaacauuuggauca

SEQ ID NO: 1099036 - RNA, 19 nt, Homo sapiens
  misc_RNA (1)...(19): siRNA sense strand
gaacucugcuuuaaaacaa

SEQ ID NO: 1099037 - RNA, 19 nt, Homo sapiens
  misc_RNA (1)...(19): siRNA sense strand
gccauaugcuuguagagaa

SEQ ID NO: 1099038 - RNA, 19 nt, Homo sapiens
  misc_RNA (1)...(19): siRNA sense strand
uaaaaugacuguugucguu

SEQ ID NO: 1099039 - RNA, 19 nt, Homo sapiens
  misc_RNA (1)...(19): siRNA sense strand
gaaccuguagauagugaua

SEQ ID NO: 1099040 - RNA, 19 nt, Homo sapiens
  misc_RNA (1)...(19): siRNA sense strand
gagagaagacagaaguuga

SEQ ID NO: 1099041 - RNA, 19 nt, Homo sapiens
  misc_RNA (1)...(19): siRNA sense strand
gcucuguggugguugguuu

SEQ ID NO: 1099042 - RNA, 19 nt, Homo sapiens
  misc_RNA (1)...(19): siRNA sense strand
ugaaugagaugaugcaaaa

SEQ ID NO: 1099043 - RNA, 19 nt, Homo sapiens
  misc_RNA (1)...(19): siRNA sense strand
gugguugguuugauacuaa

SEQ ID NO: 1099044 - RNA, 19 nt, Homo sapiens
  misc_RNA (1)...(19): siRNA sense strand
ggaggccagucuagucuau

SEQ ID NO: 1099045 - RNA, 19 nt, Homo sapiens
  misc_RNA (1)...(19): siRNA sense strand
cgaggacccuugucuguuc

SEQ ID NO: 1099046 - RNA, 19 nt, Homo sapiens
  misc_RNA (1)...(19): siRNA sense strand
uaaagaagaacuccuagau

SEQ ID NO: 1099047 - RNA, 19 nt, Homo sapiens
  misc_RNA (1)...(19): siRNA sense strand
gagcaggauuaagcuauga

SEQ ID NO: 1099048 - RNA, 19 nt, Homo sapiens
  misc_RNA (1)...(19): siRNA sense strand
gugaagagagugauucuga

SEQ ID NO: 1099049 - RNA, 19 nt, Homo sapiens
  misc_RNA (1)...(19): siRNA sense strand
gaagauuuauuggugaaag

SEQ ID NO: 1099050 - RNA, 19 nt, Homo sapiens
  misc_RNA (1)...(19): siRNA sense strand
gaagaacuccuagaugaca

SEQ ID NO: 1099051 - RNA, 19 nt, Homo sapiens
  misc_RNA (1)...(19): siRNA sense strand
gcagaugcuucauugucaa

SEQ ID NO: 1099052 - RNA, 19 nt, Homo sapiens
  misc_RNA (1)...(19): siRNA sense strand
gcuguaaagagaguaauua

SEQ ID NO: 1099053 - RNA, 19 nt, Homo sapiens
  misc_RNA (1)...(19): siRNA sense strand
ucaaccacauuuccaaaga

SEQ ID NO: 1099054 - RNA, 19 nt, Homo sapiens
  misc_RNA (1)...(19): siRNA sense strand
uauguaagauguguccuuu

SEQ ID NO: 1099055 - RNA, 19 nt, Homo sapiens
  misc_RNA (1)...(19): siRNA sense strand
ccagucuagucuauuuaua

SEQ ID NO: 1099056 - RNA, 19 nt, Homo sapiens
  misc_RNA (1)...(19): siRNA sense strand
gugaugacuuuauaucuca

SEQ ID NO: 1099057 - RNA, 19 nt, Homo sapiens
  misc_RNA (1)...(19): siRNA sense strand
cgauauuacuggugcuaaa

SEQ ID NO: 1099058 - RNA, 19 nt, Homo sapiens
  misc_RNA (1)...(19): siRNA sense strand
ucauaagccugacgccaaa

SEQ ID NO: 1099059 - RNA, 19 nt, Homo sapiens
  misc_RNA (1)...(19): siRNA sense strand
ucaaguaauucucacaaca

SEQ ID NO: 1099060 - RNA, 19 nt, Homo sapiens
  misc_RNA (1)...(19): siRNA sense strand
uguaagauguguccuuuua

SEQ ID NO: 1099061 - RNA, 19 nt, Homo sapiens
  misc_RNA (1)...(19): siRNA sense strand
guacaaagugcaaugugaa

SEQ ID NO: 1099062 - RNA, 19 nt, Homo sapiens
  misc_RNA (1)...(19): siRNA sense strand
ucaguagggaguaauauaa

SEQ ID NO: 1099063 - RNA, 19 nt, Homo sapiens
  misc_RNA (1)...(19): siRNA sense strand
gaugaagacuuagaaucug

SEQ ID NO: 1099064 - RNA, 19 nt, Homo sapiens
  misc_RNA (1)...(19): siRNA sense strand
uacaugauccucagcauuu

SEQ ID NO: 1099065 - RNA, 19 nt, Homo sapiens
  misc_RNA (1)...(19): siRNA sense strand
aaacagaagaugaaaguuc

SEQ ID NO: 1099066 - RNA, 19 nt, Homo sapiens
  misc_RNA (1)...(19): siRNA sense strand
ccgaagagccaucauucua

SEQ ID NO: 1099067 - RNA, 19 nt, Homo sapiens
  misc_RNA (1)...(19): siRNA sense strand
gaacugaacuuccaaugaa

SEQ ID NO: 1099068 - RNA, 19 nt, Homo sapiens
  misc_RNA (1)...(19): siRNA sense strand
gcagagaccuccuaguauu

SEQ ID NO: 1099069 - RNA, 19 nt, Homo sapiens
  misc_RNA (1)...(19): siRNA sense strand
gagcccagcuagaauuaua

SEQ ID NO: 1099070 - RNA, 19 nt, Homo sapiens
  misc_RNA (1)...(19): siRNA sense strand
ggaaauaguugacaaacag

SEQ ID NO: 1099071 - RNA, 19 nt, Homo sapiens
  misc_RNA (1)...(19): siRNA sense strand
gaagagacuuacuuuaaca

SEQ ID NO: 1099072 - RNA, 19 nt, Homo sapiens
  misc_RNA (1)...(19): siRNA sense strand
ggagauaucugaaguugac

SEQ ID NO: 1099073 - RNA, 19 nt, Homo sapiens
  misc_RNA (1)...(19): siRNA sense strand
ggacagaugccaauagguu

SEQ ID NO: 1099074 - RNA, 19 nt, Homo sapiens
  misc_RNA (1)...(19): siRNA sense strand
ccacaaauuugaaagacaa

SEQ ID NO: 1099075 - RNA, 19 nt, Homo sapiens
  misc_RNA (1)...(19): siRNA sense strand
cagcagagaccuccuagua

SEQ ID NO: 1099076 - RNA, 19 nt, Homo sapiens
  misc_RNA (1)...(19): siRNA sense strand
guaaccagcaugucaauaa

SEQ ID NO: 1099077 - RNA, 19 nt, Homo sapiens
  misc_RNA (1)...(19): siRNA sense strand
uaacuuacaugcccagugu

SEQ ID NO: 1099078 - RNA, 19 nt, Homo sapiens
  misc_RNA (1)...(19): siRNA sense strand
gaaaagacauggaaauaca

SEQ ID NO: 1099079 - RNA, 19 nt, Homo sapiens
  misc_RNA (1)...(19): siRNA sense strand
ccagaaacaucuuuaccaa

SEQ ID NO: 1099080 - RNA, 19 nt, Homo sapiens
  misc_RNA (1)...(19): siRNA sense strand
ccaugaaccuuccagcauu

SEQ ID NO: 1099081 - RNA, 19 nt, Homo sapiens
  misc_RNA (1)...(19): siRNA sense strand
gaaugguugucagaguuua

SEQ ID NO: 1099082 - RNA, 19 nt, Homo sapiens
  misc_RNA (1)...(19): siRNA sense strand
guaaauccuuugaacaagu

SEQ ID NO: 1099083 - RNA, 19 nt, Homo sapiens
  misc_RNA (1)...(19): siRNA sense strand
aagaagaacugauggagau

SEQ ID NO: 1099084 - RNA, 19 nt, Homo sapiens
  misc_RNA (1)...(19): siRNA sense strand
gguuugaaguguugacauu

SEQ ID NO: 1099085 - RNA, 19 nt, Homo sapiens
  misc_RNA (1)...(19): siRNA sense strand
ccaacuuccucucgaauau

SEQ ID NO: 1099086 - RNA, 19 nt, Homo sapiens
  misc_RNA (1)...(19): siRNA sense strand
ucucgaauaucaagaaaug

SEQ ID NO: 1099087 - RNA, 19 nt, Homo sapiens
  misc_RNA (1)...(19): siRNA sense strand
agaaagaacugaacuucca

SEQ ID NO: 1099088 - RNA, 19 nt, Homo sapiens
  misc_RNA (1)...(19): siRNA sense strand
cagcgacuguauuuaguaa

SEQ ID NO: 1099089 - RNA, 19 nt, Homo sapiens
  misc_RNA (1)...(19): siRNA sense strand
acagggacauaccaaagua

SEQ ID NO: 1099090 - RNA, 19 nt, Homo sapiens
  misc_RNA (1)...(19): siRNA sense strand
gaacaagucagugguguca

SEQ ID NO: 1099091 - RNA, 19 nt, Homo sapiens
  misc_RNA (1)...(19): siRNA sense strand
ucaagaaucuguguuugug

SEQ ID NO: 1099092 - RNA, 19 nt, Homo sapiens
  misc_RNA (1)...(19): siRNA sense strand
gauuccaucuuuauccaaa

SEQ ID NO: 1099093 - RNA, 19 nt, Homo sapiens
  misc_RNA (1)...(19): siRNA sense strand
gaaucuguguuuguggaua

SEQ ID NO: 1099094 - RNA, 19 nt, Homo sapiens
  misc_RNA (1)...(19): siRNA sense strand
acaaugcugccuuaacuua

SEQ ID NO: 1099095 - RNA, 19 nt, Homo sapiens
  misc_RNA (1)...(19): siRNA sense strand
caaaccaucuguauaccau

SEQ ID NO: 1099096 - RNA, 19 nt, Homo sapiens
  misc_RNA (1)...(19): siRNA sense strand
gaaucgguuugaaguguug

SEQ ID NO: 1099097 - RNA, 19 nt, Homo sapiens
  misc_RNA (1)...(19): siRNA sense strand
aaacaguagucacaauugu

SEQ ID NO: 1099098 - RNA, 19 nt, Homo sapiens
  misc_RNA (1)...(19): siRNA sense strand
agaauuaacaggucaagaa

SEQ ID NO: 1099099 - RNA, 19 nt, Homo sapiens
  misc_RNA (1)...(19): siRNA sense strand
gucaccagcucuuugaauu

SEQ ID NO: 1099100 - RNA, 19 nt, Homo sapiens
  misc_RNA (1)...(19): siRNA sense strand
cagagaccuccuaguauua

SEQ ID NO: 1099101 - RNA, 19 nt, Homo sapiens
  misc_RNA (1)...(19): siRNA sense strand
ggaaugguugucagaguuu

SEQ ID NO: 1099102 - RNA, 19 nt, Homo sapiens
  misc_RNA (1)...(19): siRNA sense strand
ugaagagacuuacuuuaac

SEQ ID NO: 1099103 - RNA, 19 nt, Homo sapiens
  misc_RNA (1)...(19): siRNA sense strand
gcacagaaucgguuugaag

SEQ ID NO: 1099104 - RNA, 19 nt, Homo sapiens
  misc_RNA (1)...(19): siRNA sense strand
caaagugaguugcuagaac

SEQ ID NO: 1099105 - RNA, 19 nt, Homo sapiens
  misc_RNA (1)...(19): siRNA sense strand
gaccgcagcgacuguauuu

SEQ ID NO: 1099106 - RNA, 19 nt, Homo sapiens
  misc_RNA (1)...(19): siRNA sense strand
cagaaucgguuugaagugu

SEQ ID NO: 1099107 - RNA, 19 nt, Homo sapiens
  misc_RNA (1)...(19): siRNA sense strand
ccacauaacccgucaucug

SEQ ID NO: 1099108 - RNA, 19 nt, Homo sapiens
  misc_RNA (1)...(19): siRNA sense strand
gaggaaugguugucagagu

SEQ ID NO: 1099109 - RNA, 19 nt, Homo sapiens
  misc_RNA (1)...(19): siRNA sense strand
uuacaaugcugccuuaacu

SEQ ID NO: 1099110 - RNA, 19 nt, Homo sapiens
  misc_RNA (1)...(19): siRNA sense strand
gcagcgacuguauuuagua

SEQ ID NO: 1099111 - RNA, 19 nt, Homo sapiens
  misc_RNA (1)...(19): siRNA sense strand
auuaacaggucaagaagaa

SEQ ID NO: 1099112 - RNA, 19 nt, Homo sapiens
  misc_RNA (1)...(19): siRNA sense strand
gaagaacugauggagauau

SEQ ID NO: 1099113 - RNA, 19 nt, Homo sapiens
  misc_RNA (1)...(19): siRNA sense strand
caaacaguagucacaauug

SEQ ID NO: 1099114 - RNA, 19 nt, Homo sapiens
  misc_RNA (1)...(19): siRNA sense strand
guguuacaaugcugccuua

SEQ ID NO: 1099115 - RNA, 19 nt, Homo sapiens
  misc_RNA (1)...(19): siRNA sense strand
ucaaucaggucagcagaga

SEQ ID NO: 1099116 - RNA, 19 nt, Homo sapiens
  misc_RNA (1)...(19): siRNA sense strand
aagcaaaacuggaggaaaa

SEQ ID NO: 1099117 - RNA, 19 nt, Homo sapiens
  misc_RNA (1)...(19): siRNA sense strand
uaacaagccaaguauagga

SEQ ID NO: 1099118 - RNA, 19 nt, Homo sapiens
  misc_RNA (1)...(19): siRNA sense strand
caugaaccuuccagcauug

SEQ ID NO: 1099119 - RNA, 19 nt, Homo sapiens
  misc_RNA (1)...(19): siRNA sense strand
ucaaacaguagucacaauu

SEQ ID NO: 1099120 - RNA, 19 nt, Homo sapiens
  misc_RNA (1)...(19): siRNA sense strand
ggaaauacagaauuaacag

SEQ ID NO: 1099121 - RNA, 19 nt, Homo sapiens
  misc_RNA (1)...(19): siRNA sense strand
auacagagcccagcuagaa

SEQ ID NO: 1099122 - RNA, 19 nt, Homo sapiens
  misc_RNA (1)...(19): siRNA sense strand
gaaguguugacauuccuuu

SEQ ID NO: 1099123 - RNA, 19 nt, Homo sapiens
  misc_RNA (1)...(19): siRNA sense strand
gcaguaaccagcaugucaa

SEQ ID NO: 1099124 - RNA, 19 nt, Homo sapiens
  misc_RNA (1)...(19): siRNA sense strand
gaaagaacugaacuuccaa

SEQ ID NO: 1099125 - RNA, 19 nt, Homo sapiens
  misc_RNA (1)...(19): siRNA sense strand
guaguaacaagccaaguau

SEQ ID NO: 1099126 - RNA, 19 nt, Homo sapiens
  misc_RNA (1)...(19): siRNA sense strand
guucaagaaucuguguuug

SEQ ID NO: 1099127 - RNA, 19 nt, Homo sapiens
  misc_RNA (1)...(19): siRNA sense strand
uaaccagcaugucaauaag

SEQ ID NO: 1099128 - RNA, 19 nt, Homo sapiens
  misc_RNA (1)...(19): siRNA sense strand
agaaugggaucuagcucaa

SEQ ID NO: 1099129 - RNA, 19 nt, Homo sapiens
  misc_RNA (1)...(19): siRNA sense strand
gaacugauggagauaucug

SEQ ID NO: 1099130 - RNA, 19 nt, Homo sapiens
  misc_RNA (1)...(19): siRNA sense strand
uauccaaaccaucuguaua

SEQ ID NO: 1099131 - RNA, 19 nt, Homo sapiens
  misc_RNA (1)...(19): siRNA sense strand
ccuccuaguauuagcauua

SEQ ID NO: 1099132 - RNA, 19 nt, Homo sapiens
  misc_RNA (1)...(19): siRNA sense strand
gacagaugccaauagguuu

SEQ ID NO: 1099133 - RNA, 19 nt, Homo sapiens
  misc_RNA (1)...(19): siRNA sense strand
uaaauccuuugaacaaguc

SEQ ID NO: 1099134 - RNA, 19 nt, Homo sapiens
  misc_RNA (1)...(19): siRNA sense strand
gaauuaacaggucaagaag

SEQ ID NO: 1099135 - RNA, 19 nt, Homo sapiens
  misc_RNA (1)...(19): siRNA sense strand
caaacagggacauaccaaa

SEQ ID NO: 1099136 - RNA, 19 nt, Homo sapiens
  misc_RNA (1)...(19): siRNA sense strand
agccauugcugguugcuaa

SEQ ID NO: 1099137 - RNA, 19 nt, Homo sapiens
  misc_RNA (1)...(19): siRNA sense strand
cagagcccagcuagaauua

SEQ ID NO: 1099138 - RNA, 19 nt, Homo sapiens
  misc_RNA (1)...(19): siRNA sense strand
agcacuggaugauauuaua

SEQ ID NO: 1099139 - RNA, 19 nt, Homo sapiens
  misc_RNA (1)...(19): siRNA sense strand
ccagcucuuugaauucuau

SEQ ID NO: 1099140 - RNA, 19 nt, Homo sapiens
  misc_RNA (1)...(19): siRNA sense strand
agacuuacuuuaacaacca

SEQ ID NO: 1099141 - RNA, 19 nt, Homo sapiens
  misc_RNA (1)...(19): siRNA sense strand
gacauuaccagaaacaucu

SEQ ID NO: 1099142 - RNA, 19 nt, Homo sapiens
  misc_RNA (1)...(19): siRNA sense strand
gacauggaaauacagaauu

SEQ ID NO: 1099143 - RNA, 19 nt, Homo sapiens
  misc_RNA (1)...(19): siRNA sense strand
gcaaauguuaacagggauu

SEQ ID NO: 1099144 - RNA, 19 nt, Homo sapiens
  misc_RNA (1)...(19): siRNA sense strand
gcacuaucccagcaugguu

SEQ ID NO: 1099145 - RNA, 19 nt, Homo sapiens
  misc_RNA (1)...(19): siRNA sense strand
uguaguaacaagccaagua

SEQ ID NO: 1099146 - RNA, 19 nt, Homo sapiens
  misc_RNA (1)...(19): siRNA sense strand
cagaaacaucuuuaccaaa

SEQ ID NO: 1099147 - RNA, 19 nt, Homo sapiens
  misc_RNA (1)...(19): siRNA sense strand
ugauggagauaucugaagu

SEQ ID NO: 1099148 - RNA, 19 nt, Homo sapiens
  misc_RNA (1)...(19): siRNA sense strand
uaacagggauuuauuuugc

SEQ ID NO: 1099149 - RNA, 19 nt, Homo sapiens
  misc_RNA (1)...(19): siRNA sense strand
aggaaugguugucagaguu

SEQ ID NO: 1099150 - RNA, 19 nt, Homo sapiens
  misc_RNA (1)...(19): siRNA sense strand
aaccaucuguauaccauga

SEQ ID NO: 1099151 - RNA, 19 nt, Homo sapiens
  misc_RNA (1)...(19): siRNA sense strand
acaagucaguggugucaca

SEQ ID NO: 1099152 - RNA, 19 nt, Homo sapiens
  misc_RNA (1)...(19): siRNA sense strand
aucuugagcuucucucuuu

SEQ ID NO: 1099153 - RNA, 19 nt, Homo sapiens
  misc_RNA (1)...(19): siRNA sense strand
acaccaacuuccucucgaa

SEQ ID NO: 1099154 - RNA, 19 nt, Homo sapiens
  misc_RNA (1)...(19): siRNA sense strand
gauucauggugcaaauguu

SEQ ID NO: 1099155 - RNA, 19 nt, Homo sapiens
  misc_RNA (1)...(19): siRNA sense strand
uggaaauaguugacaaaca

SEQ ID NO: 1099156 - RNA, 19 nt, Homo sapiens
  misc_RNA (1)...(19): siRNA sense strand
agaacugaacuuccaauga

SEQ ID NO: 1099157 - RNA, 19 nt, Homo sapiens
  misc_RNA (1)...(19): siRNA sense strand
guaccagccagucggguuu

SEQ ID NO: 1099158 - RNA, 19 nt, Homo sapiens
  misc_RNA (1)...(19): siRNA sense strand
cccaugaaaucuaauaagg

SEQ ID NO: 1099159 - RNA, 19 nt, Homo sapiens
  misc_RNA (1)...(19): siRNA sense strand
ggucccaugaaaucuaaua

SEQ ID NO: 1099160 - RNA, 19 nt, Homo sapiens
  misc_RNA (1)...(19): siRNA sense strand
caggauaccaguuucuuca

SEQ ID NO: 1099161 - RNA, 19 nt, Homo sapiens
  misc_RNA (1)...(19): siRNA sense strand
guagcaggauaccaguuuc

SEQ ID NO: 1099162 - RNA, 19 nt, Homo sapiens
  misc_RNA (1)...(19): siRNA sense strand
caggauucauggugcaaau

SEQ ID NO: 1099163 - RNA, 19 nt, Homo sapiens
  misc_RNA (1)...(19): siRNA sense strand
ucacuuugcucgaaaacaa

SEQ ID NO: 1099164 - RNA, 19 nt, Homo sapiens
  misc_RNA (1)...(19): siRNA sense strand
guagucacaauuguaguaa

SEQ ID NO: 1099165 - RNA, 19 nt, Homo sapiens
  misc_RNA (1)...(19): siRNA sense strand
ggucauagguggaaaagac

SEQ ID NO: 1099166 - RNA, 19 nt, Homo sapiens
  misc_RNA (1)...(19): siRNA sense strand
gaaagggguuguggaggaa

SEQ ID NO: 1099167 - RNA, 19 nt, Homo sapiens
  misc_RNA (1)...(19): siRNA sense strand
ggaccuaccuccaucauca

SEQ ID NO: 1099168 - RNA, 19 nt, Homo sapiens
  misc_RNA (1)...(19): siRNA sense strand
gaaagaagcccaggcacua

SEQ ID NO: 1099169 - RNA, 19 nt, Homo sapiens
  misc_RNA (1)...(19): siRNA sense strand
gaagauacccaccugaguu

SEQ ID NO: 1099170 - RNA, 19 nt, Homo sapiens
  misc_RNA (1)...(19): siRNA sense strand
guacugacuuuaacauaga

SEQ ID NO: 1099171 - RNA, 19 nt, Homo sapiens
  misc_RNA (1)...(19): siRNA sense strand
cagacuggcuuccaaguaa

SEQ ID NO: 1099172 - RNA, 19 nt, Homo sapiens
  misc_RNA (1)...(19): siRNA sense strand
gcauuccucuucuauggua

SEQ ID NO: 1099173 - RNA, 19 nt, Homo sapiens
  misc_RNA (1)...(19): siRNA sense strand
uaagguggcugguugauag

SEQ ID NO: 1099174 - RNA, 19 nt, Homo sapiens
  misc_RNA (1)...(19): siRNA sense strand
caucaugacugggcuguuu

SEQ ID NO: 1099175 - RNA, 19 nt, Homo sapiens
  misc_RNA (1)...(19): siRNA sense strand
gaccaaagcauuccucuuc

SEQ ID NO: 1099176 - RNA, 19 nt, Homo sapiens
  misc_RNA (1)...(19): siRNA sense strand
ccaaagcauuccucuucua

SEQ ID NO: 1099177 - RNA, 19 nt, Homo sapiens
  misc_RNA (1)...(19): siRNA sense strand
caaaagugcuauucuugua

SEQ ID NO: 1099178 - RNA, 19 nt, Homo sapiens
  misc_RNA (1)...(19): siRNA sense strand
acaauuacaucgacgcauu

SEQ ID NO: 1099179 - RNA, 19 nt, Homo sapiens
  misc_RNA (1)...(19): siRNA sense strand
gcagaugcuuguuucuuca

SEQ ID NO: 1099180 - RNA, 19 nt, Homo sapiens
  misc_RNA (1)...(19): siRNA sense strand
uaacauagauagcuuaccu

SEQ ID NO: 1099181 - RNA, 19 nt, Homo sapiens
  misc_RNA (1)...(19): siRNA sense strand
gguacugacuuuaacauag

SEQ ID NO: 1099182 - RNA, 19 nt, Homo sapiens
  misc_RNA (1)...(19): siRNA sense strand
gcauugaaguccugaaguc

SEQ ID NO: 1099183 - RNA, 19 nt, Homo sapiens
  misc_RNA (1)...(19): siRNA sense strand
gguagucccuguauauuac

SEQ ID NO: 1099184 - RNA, 19 nt, Homo sapiens
  misc_RNA (1)...(19): siRNA sense strand
ggguagucccuguauauua

SEQ ID NO: 1099185 - RNA, 19 nt, Homo sapiens
  misc_RNA (1)...(19): siRNA sense strand
cagcaggcauucccacuug

SEQ ID NO: 1099186 - RNA, 19 nt, Homo sapiens
  misc_RNA (1)...(19): siRNA sense strand
cuacaucacugagaaguuc

SEQ ID NO: 1099187 - RNA, 19 nt, Homo sapiens
  misc_RNA (1)...(19): siRNA sense strand
guaugaggccuauguagaa

SEQ ID NO: 1099188 - RNA, 19 nt, Homo sapiens
  misc_RNA (1)...(19): siRNA sense strand
gugcuauucuuguaucaga

SEQ ID NO: 1099189 - RNA, 19 nt, Homo sapiens
  misc_RNA (1)...(19): siRNA sense strand
gaagucacuccgauaccua

SEQ ID NO: 1099190 - RNA, 19 nt, Homo sapiens
  misc_RNA (1)...(19): siRNA sense strand
gaaaagaaaaugggaauug

SEQ ID NO: 1099191 - RNA, 19 nt, Homo sapiens
  misc_RNA (1)...(19): siRNA sense strand
uucgcgagcugaugacuua

SEQ ID NO: 1099192 - RNA, 19 nt, Homo sapiens
  misc_RNA (1)...(19): siRNA sense strand
gcccagagcccacaguguu

SEQ ID NO: 1099193 - RNA, 19 nt, Homo sapiens
  misc_RNA (1)...(19): siRNA sense strand
caaagcauuccucuucuau

SEQ ID NO: 1099194 - RNA, 19 nt, Homo sapiens
  misc_RNA (1)...(19): siRNA sense strand
gagaaugcaguuugugaug

SEQ ID NO: 1099195 - RNA, 19 nt, Homo sapiens
  misc_RNA (1)...(19): siRNA sense strand
gaacaauccaagaaagaag

SEQ ID NO: 1099196 - RNA, 19 nt, Homo sapiens
  misc_RNA (1)...(19): siRNA sense strand
agaaugcaguuugugauga

SEQ ID NO: 1099197 - RNA, 19 nt, Homo sapiens
  misc_RNA (1)...(19): siRNA sense strand
ucacaugaccaaagcauuc

SEQ ID NO: 1099198 - RNA, 19 nt, Homo sapiens
  misc_RNA (1)...(19): siRNA sense strand
uccgauaccuaguuccuuu

SEQ ID NO: 1099199 - RNA, 19 nt, Homo sapiens
  misc_RNA (1)...(19): siRNA sense strand
uauggugaauguuuacgaa

SEQ ID NO: 1099200 - RNA, 19 nt, Homo sapiens
  misc_RNA (1)...(19): siRNA sense strand
gggcuaauaucaggcuuca

SEQ ID NO: 1099201 - RNA, 19 nt, Homo sapiens
  misc_RNA (1)...(19): siRNA sense strand
aagcauuccucuucuaugg

SEQ ID NO: 1099202 - RNA, 19 nt, Homo sapiens
  misc_RNA (1)...(19): siRNA sense strand
ggaagcaccuacgcauuuu

SEQ ID NO: 1099203 - RNA, 19 nt, Homo sapiens
  misc_RNA (1)...(19): siRNA sense strand
gaaugcaguuugugaugac

SEQ ID NO: 1099204 - RNA, 19 nt, Homo sapiens
  misc_RNA (1)...(19): siRNA sense strand
gccacuaacuacccaauac

SEQ ID NO: 1099205 - RNA, 19 nt, Homo sapiens
  misc_RNA (1)...(19): siRNA sense strand
gaggaagcaccuacgcauu

SEQ ID NO: 1099206 - RNA, 19 nt, Homo sapiens
  misc_RNA (1)...(19): siRNA sense strand
uaggaucauugcacaguau

SEQ ID NO: 1099207 - RNA, 19 nt, Homo sapiens
  misc_RNA (1)...(19): siRNA sense strand
ucacuccgauaccuaguuc

SEQ ID NO: 1099208 - RNA, 19 nt, Homo sapiens
  misc_RNA (1)...(19): siRNA sense strand
aggaagcaccuacgcauuu

SEQ ID NO: 1099209 - RNA, 19 nt, Homo sapiens
  misc_RNA (1)...(19): siRNA sense strand
ugaagggugagaucucuaa

SEQ ID NO: 1099210 - RNA, 19 nt, Homo sapiens
  misc_RNA (1)...(19): siRNA sense strand
aaagugcuauucuuguauc

SEQ ID NO: 1099211 - RNA, 19 nt, Homo sapiens
  misc_RNA (1)...(19): siRNA sense strand
caucagacagggacagcua

SEQ ID NO: 1099212 - RNA, 19 nt, Homo sapiens
  misc_RNA (1)...(19): siRNA sense strand
gugaucaccuuguucaacu

SEQ ID NO: 1099213 - RNA, 19 nt, Homo sapiens
  misc_RNA (1)...(19): siRNA sense strand
caauuacaucgacgcauuu

SEQ ID NO: 1099214 - RNA, 19 nt, Homo sapiens
  misc_RNA (1)...(19): siRNA sense strand
cgaggucgauuccuauggu

SEQ ID NO: 1099215 - RNA, 19 nt, Homo sapiens
  misc_RNA (1)...(19): siRNA sense strand
gcuuguuucuucaccauca

SEQ ID NO: 1099216 - RNA, 19 nt, Homo sapiens
  misc_RNA (1)...(19): siRNA sense strand
cuaccuccaucaucacaug

SEQ ID NO: 1099217 - RNA, 19 nt, Homo sapiens
  misc_RNA (1)...(19): siRNA sense strand
caucgacgcauuugagugu

SEQ ID NO: 1099218 - RNA, 19 nt, Homo sapiens
  misc_RNA (1)...(19): siRNA sense strand
ucuaugguacugacuuuaa

SEQ ID NO: 1099219 - RNA, 19 nt, Homo sapiens
  misc_RNA (1)...(19): siRNA sense strand
uauccuagcuuuugagaau

SEQ ID NO: 1099220 - RNA, 19 nt, Homo sapiens
  misc_RNA (1)...(19): siRNA sense strand
gccgauggcuuuuauagga

SEQ ID NO: 1099221 - RNA, 19 nt, Homo sapiens
  misc_RNA (1)...(19): siRNA sense strand
cuucuaugguacugacuuu

SEQ ID NO: 1099222 - RNA, 19 nt, Homo sapiens
  misc_RNA (1)...(19): siRNA sense strand
aaagaagcccaggcacuaa

SEQ ID NO: 1099223 - RNA, 19 nt, Homo sapiens
  misc_RNA (1)...(19): siRNA sense strand
ugaacaauccaagaaagaa

SEQ ID NO: 1099224 - RNA, 19 nt, Homo sapiens
  misc_RNA (1)...(19): siRNA sense strand
aaugggaauuggacagcua

SEQ ID NO: 1099225 - RNA, 19 nt, Homo sapiens
  misc_RNA (1)...(19): siRNA sense strand
aaagaugggaggcagaaga

SEQ ID NO: 1099226 - RNA, 19 nt, Homo sapiens
  misc_RNA (1)...(19): siRNA sense strand
gcugaagggugagaucucu

SEQ ID NO: 1099227 - RNA, 19 nt, Homo sapiens
  misc_RNA (1)...(19): siRNA sense strand
uuccuauggugaauguuua

SEQ ID NO: 1099228 - RNA, 19 nt, Homo sapiens
  misc_RNA (1)...(19): siRNA sense strand
cauucccacuugccacuaa

SEQ ID NO: 1099229 - RNA, 19 nt, Homo sapiens
  misc_RNA (1)...(19): siRNA sense strand
ccagugaucaccuuguuca

SEQ ID NO: 1099230 - RNA, 19 nt, Homo sapiens
  misc_RNA (1)...(19): siRNA sense strand
cagauuguaugaggccuau

SEQ ID NO: 1099231 - RNA, 19 nt, Homo sapiens
  misc_RNA (1)...(19): siRNA sense strand
accaaggugugggcuaaua

SEQ ID NO: 1099232 - RNA, 19 nt, Homo sapiens
  misc_RNA (1)...(19): siRNA sense strand
gacagggacagcuauguuc

SEQ ID NO: 1099233 - RNA, 19 nt, Homo sapiens
  misc_RNA (1)...(19): siRNA sense strand
gcuuugaacaauccaagaa

SEQ ID NO: 1099234 - RNA, 19 nt, Homo sapiens
  misc_RNA (1)...(19): siRNA sense strand
ccacaguguuugcuuucuc

SEQ ID NO: 1099235 - RNA, 19 nt, Homo sapiens
  misc_RNA (1)...(19): siRNA sense strand
gauuguaugaggccuaugu

SEQ ID NO: 1099236 - RNA, 19 nt, Homo sapiens
  misc_RNA (1)...(19): siRNA sense strand
aaccagugaucaccuuguu

SEQ ID NO: 1099237 - RNA, 19 nt, Homo sapiens
  misc_RNA (1)...(19): siRNA sense strand
gguggcugguugauaggaa

SEQ ID NO: 1099238 - RNA, 19 nt, Homo sapiens
  misc_RNA (1)...(19): siRNA sense strand
gcaccuacgcauuuuaauu

SEQ ID NO: 1099239 - RNA, 19 nt, Homo sapiens
  misc_RNA (1)...(19): siRNA sense strand
gaugggaggcagaagauac

SEQ ID NO: 1099240 - RNA, 19 nt, Homo sapiens
  misc_RNA (1)...(19): siRNA sense strand
aauaucaggcuucaggaaa

SEQ ID NO: 1099241 - RNA, 19 nt, Homo sapiens
  misc_RNA (1)...(19): siRNA sense strand
caaccaggacaauuacauc

SEQ ID NO: 1099242 - RNA, 19 nt, Homo sapiens
  misc_RNA (1)...(19): siRNA sense strand
gaucauugcacaguauaag

SEQ ID NO: 1099243 - RNA, 19 nt, Homo sapiens
  misc_RNA (1)...(19): siRNA sense strand
agacagggacagcuauguu

SEQ ID NO: 1099244 - RNA, 19 nt, Homo sapiens
  misc_RNA (1)...(19): siRNA sense strand
uugcuccgcugguguaugu

SEQ ID NO: 1099245 - RNA, 19 nt, Homo sapiens
  misc_RNA (1)...(19): siRNA sense strand
ucaacuacacugccacguu

SEQ ID NO: 1099246 - RNA, 19 nt, Homo sapiens
  misc_RNA (1)...(19): siRNA sense strand
auaaaccagugaucaccuu

SEQ ID NO: 1099247 - RNA, 19 nt, Homo sapiens
  misc_RNA (1)...(19): siRNA sense strand
cacaguguuugcuuucuca

SEQ ID NO: 1099248 - RNA, 19 nt, Homo sapiens
  misc_RNA (1)...(19): siRNA sense strand
ucauugcacaguauaaguu

SEQ ID NO: 1099249 - RNA, 19 nt, Homo sapiens
  misc_RNA (1)...(19): siRNA sense strand
auaggaucauugcacagua

SEQ ID NO: 1099250 - RNA, 19 nt, Homo sapiens
  misc_RNA (1)...(19): siRNA sense strand
gcgagcugaugacuuacau

SEQ ID NO: 1099251 - RNA, 19 nt, Homo sapiens
  misc_RNA (1)...(19): siRNA sense strand
ugaucaccuuguucaacua

SEQ ID NO: 1099252 - RNA, 19 nt, Homo sapiens
  misc_RNA (1)...(19): siRNA sense strand
ugaggccuauguagaaugg

SEQ ID NO: 1099253 - RNA, 19 nt, Homo sapiens
  misc_RNA (1)...(19): siRNA sense strand
uaugaggccuauguagaau

SEQ ID NO: 1099254 - RNA, 19 nt, Homo sapiens
  misc_RNA (1)...(19): siRNA sense strand
uguaugaggccuauguaga

SEQ ID NO: 1099255 - RNA, 19 nt, Homo sapiens
  misc_RNA (1)...(19): siRNA sense strand
acagacuggcuuccaagua

SEQ ID NO: 1099256 - RNA, 19 nt, Homo sapiens
  misc_RNA (1)...(19): siRNA sense strand
ggaucauugcacaguauaa

SEQ ID NO: 1099257 - RNA, 19 nt, Homo sapiens
  misc_RNA (1)...(19): siRNA sense strand
gagcauugaaguccugaag

SEQ ID NO: 1099258 - RNA, 19 nt, Homo sapiens
  misc_RNA (1)...(19): siRNA sense strand
ggucgauuccuauggugaa

SEQ ID NO: 1099259 - RNA, 19 nt, Homo sapiens
  misc_RNA (1)...(19): siRNA sense strand
uaauaucaggcuucaggaa

SEQ ID NO: 1099260 - RNA, 19 nt, Homo sapiens
  misc_RNA (1)...(19): siRNA sense strand
uauggaugccgauggcuuu

SEQ ID NO: 1099261 - RNA, 19 nt, Homo sapiens
  misc_RNA (1)...(19): siRNA sense strand
cgacgcauuugaguguaug

SEQ ID NO: 1099262 - RNA, 19 nt, Homo sapiens
  misc_RNA (1)...(19): siRNA sense strand
cuaagguggcugguugaua

SEQ ID NO: 1099263 - RNA, 19 nt, Homo sapiens
  misc_RNA (1)...(19): siRNA sense strand
ggacagcuaccccauuaug

SEQ ID NO: 1099264 - RNA, 19 nt, Homo sapiens
  misc_RNA (1)...(19): siRNA sense strand
ccaaggugugggcuaauau

SEQ ID NO: 1099265 - RNA, 19 nt, Homo sapiens
  misc_RNA (1)...(19): siRNA sense strand
cgacuggauucugaugaca

SEQ ID NO: 1099266 - RNA, 19 nt, Homo sapiens
  misc_RNA (1)...(19): siRNA sense strand
gaagcugaagggugagauc

SEQ ID NO: 1099267 - RNA, 19 nt, Homo sapiens
  misc_RNA (1)...(19): siRNA sense strand
gagaaacccuuuaaaugua

SEQ ID NO: 1099268 - RNA, 19 nt, Homo sapiens
  misc_RNA (1)...(19): siRNA sense strand
ggaaaggucuuaauaguag

SEQ ID NO: 1099269 - RNA, 19 nt, Homo sapiens
  misc_RNA (1)...(19): siRNA sense strand
ccacaagccucauauauca

SEQ ID NO: 1099270 - RNA, 19 nt, Homo sapiens
  misc_RNA (1)...(19): siRNA sense strand
ugagaaaccuuaugaaugu

SEQ ID NO: 1099271 - RNA, 19 nt, Homo sapiens
  misc_RNA (1)...(19): siRNA sense strand
ugagaaaccuuauaagugu

SEQ ID NO: 1099272 - RNA, 19 nt, Homo sapiens
  misc_RNA (1)...(19): siRNA sense strand
gagaaacacuaugaaugua

SEQ ID NO: 1099273 - RNA, 19 nt, Homo sapiens
  misc_RNA (1)...(19): siRNA sense strand
gauaaacccuaugaaugua

SEQ ID NO: 1099274 - RNA, 19 nt, Homo sapiens
  misc_RNA (1)...(19): siRNA sense strand
gggaaggccuuuaguguau

SEQ ID NO: 1099275 - RNA, 19 nt, Homo sapiens
  misc_RNA (1)...(19): siRNA sense strand
ggagaaacacuaugaaugu

SEQ ID NO: 1099276 - RNA, 19 nt, Homo sapiens
  misc_RNA (1)...(19): siRNA sense strand
uaagaaacccuaugaaugu

SEQ ID NO: 1099277 - RNA, 19 nt, Homo sapiens
  misc_RNA (1)...(19): siRNA sense strand
gagaaacccuacgaaugua

SEQ ID NO: 1099278 - RNA, 19 nt, Homo sapiens
  misc_RNA (1)...(19): siRNA sense strand
guaagaaacccuaugaaug

SEQ ID NO: 1099279 - RNA, 19 nt, Homo sapiens
  misc_RNA (1)...(19): siRNA sense strand
ggagagaaacccuauguau

SEQ ID NO: 1099280 - RNA, 19 nt, Homo sapiens
  misc_RNA (1)...(19): siRNA sense strand
ccucauaucuuguuauaca

SEQ ID NO: 1099281 - RNA, 19 nt, Homo sapiens
  misc_RNA (1)...(19): siRNA sense strand
guacaucagagaauucaua

SEQ ID NO: 1099282 - RNA, 19 nt, Homo sapiens
  misc_RNA (1)...(19): siRNA sense strand
ccucauaucuuguuagaca

SEQ ID NO: 1099283 - RNA, 19 nt, Homo sapiens
  misc_RNA (1)...(19): siRNA sense strand
gggaaaggucuuaauagua

SEQ ID NO: 1099284 - RNA, 19 nt, Homo sapiens
  misc_RNA (1)...(19): siRNA sense strand
ugagaaacccuuuaaaugu

SEQ ID NO: 1099285 - RNA, 19 nt, Homo sapiens
  misc_RNA (1)...(19): siRNA sense strand
gccauaaacucacuauaca

SEQ ID NO: 1099286 - RNA, 19 nt, Homo sapiens
  misc_RNA (1)...(19): siRNA sense strand
ugagaaacccuacaaaugu

SEQ ID NO: 1099287 - RNA, 19 nt, Homo sapiens
  misc_RNA (1)...(19): siRNA sense strand
ugaaguacaucagagaauu

SEQ ID NO: 1099288 - RNA, 19 nt, Homo sapiens
  misc_RNA (1)...(19): siRNA sense strand
gguaagagacccuuugaau

SEQ ID NO: 1099289 - RNA, 19 nt, Homo sapiens
  misc_RNA (1)...(19): siRNA sense strand
gagagaaacccuauguaug

SEQ ID NO: 1099290 - RNA, 19 nt, Homo sapiens
  misc_RNA (1)...(19): siRNA sense strand
caacuuacugcaccucaua

SEQ ID NO: 1099291 - RNA, 19 nt, Homo sapiens
  misc_RNA (1)...(19): siRNA sense strand
cgacaucaggguauucaua

SEQ ID NO: 1099292 - RNA, 19 nt, Homo sapiens
  misc_RNA (1)...(19): siRNA sense strand
ugagaaacccuacgaaugu

SEQ ID NO: 1099293 - RNA, 19 nt, Homo sapiens
  misc_RNA (1)...(19): siRNA sense strand
ggcaaggccuuucgucaug

SEQ ID NO: 1099294 - RNA, 19 nt, Homo sapiens
  misc_RNA (1)...(19): siRNA sense strand
gugagaaacccuuuaaaug

SEQ ID NO: 1099295 - RNA, 19 nt, Homo sapiens
  misc_RNA (1)...(19): siRNA sense strand
gagaaaccuuaugaaugua

SEQ ID NO: 1099296 - RNA, 19 nt, Homo sapiens
  misc_RNA (1)...(19): siRNA sense strand
guaagagacccuuugaaug

SEQ ID NO: 1099297 - RNA, 19 nt, Homo sapiens
  misc_RNA (1)...(19): siRNA sense strand
gguaagaaacccuaugaau

SEQ ID NO: 1099298 - RNA, 19 nt, Homo sapiens
  misc_RNA (1)...(19): siRNA sense strand
agucaugcuucacaucuua

SEQ ID NO: 1099299 - RNA, 19 nt, Homo sapiens
  misc_RNA (1)...(19): siRNA sense strand
agagaaacccuauguaugu

SEQ ID NO: 1099300 - RNA, 19 nt, Homo sapiens
  misc_RNA (1)...(19): siRNA sense strand
gugagaaacccuacaaaug

SEQ ID NO: 1099301 - RNA, 19 nt, Homo sapiens
  misc_RNA (1)...(19): siRNA sense strand
aauaguagccaugaacuua

SEQ ID NO: 1099302 - RNA, 19 nt, Homo sapiens
  misc_RNA (1)...(19): siRNA sense strand
ugauaaacccuaugaaugu

SEQ ID NO: 1099303 - RNA, 19 nt, Homo sapiens
  misc_RNA (1)...(19): siRNA sense strand
gggaaggguuuuaguuaua

SEQ ID NO: 1099304 - RNA, 19 nt, Homo sapiens
  misc_RNA (1)...(19): siRNA sense strand
gaaacccuauguaugucaa

SEQ ID NO: 1099305 - RNA, 19 nt, Homo sapiens
  misc_RNA (1)...(19): siRNA sense strand
ggugagaaacccuuuaaau

SEQ ID NO: 1099306 - RNA, 19 nt, Homo sapiens
  misc_RNA (1)...(19): siRNA sense strand
uaagagacccuuugaaugc

SEQ ID NO: 1099307 - RNA, 19 nt, Homo sapiens
  misc_RNA (1)...(19): siRNA sense strand
gaaaaguccuaugaaugua

SEQ ID NO: 1099308 - RNA, 19 nt, Homo sapiens
  misc_RNA (1)...(19): siRNA sense strand
gaauucauaccagugauaa

SEQ ID NO: 1099309 - RNA, 19 nt, Homo sapiens
  misc_RNA (1)...(19): siRNA sense strand
gggaaguccuuucguugug

SEQ ID NO: 1099310 - RNA, 19 nt, Homo sapiens
  misc_RNA (1)...(19): siRNA sense strand
gugauaaacccuaugaaug

SEQ ID NO: 1099311 - RNA, 19 nt, Homo sapiens
  misc_RNA (1)...(19): siRNA sense strand
gugagaaaccuuaugaaug

SEQ ID NO: 1099312 - RNA, 19 nt, Homo sapiens
  misc_RNA (1)...(19): siRNA sense strand
gggagaaacacuaugaaug

SEQ ID NO: 1099313 - RNA, 19 nt, Homo sapiens
  misc_RNA (1)...(19): siRNA sense strand
ccucauacauuugaaagug

SEQ ID NO: 1099314 - RNA, 19 nt, Homo sapiens
  misc_RNA (1)...(19): siRNA sense strand
aagaaacccuaugaaugua

SEQ ID NO: 1099315 - RNA, 19 nt, Homo sapiens
  misc_RNA (1)...(19): siRNA sense strand
gccaugaacuuaguauaca

SEQ ID NO: 1099316 - RNA, 19 nt, Homo sapiens
  misc_RNA (1)...(19): siRNA sense strand
uaaagcccaucagaauauu

SEQ ID NO: 1099317 - RNA, 19 nt, Homo sapiens
  misc_RNA (1)...(19): siRNA sense strand
uuaaagcccaucagaauau

SEQ ID NO: 1099318 - RNA, 19 nt, Homo sapiens
  misc_RNA (1)...(19): siRNA sense strand
guacuuaaagcccaucaga

SEQ ID NO: 1099319 - RNA, 19 nt, Homo sapiens
  misc_RNA (1)...(19): siRNA sense strand
uaguguaucuggacaacuu

SEQ ID NO: 1099320 - RNA, 19 nt, Homo sapiens
  misc_RNA (1)...(19): siRNA sense strand
gcacaccuugcccaucaua

SEQ ID NO: 1099321 - RNA, 19 nt, Homo sapiens
  misc_RNA (1)...(19): siRNA sense strand
ugccucauaucuuguuaua

SEQ ID NO: 1099322 - RNA, 19 nt, Homo sapiens
  misc_RNA (1)...(19): siRNA sense strand
gaaaucccuauauguguga

SEQ ID NO: 1099323 - RNA, 19 nt, Homo sapiens
  misc_RNA (1)...(19): siRNA sense strand
ugauggaaaucccuauaug

SEQ ID NO: 1099324 - RNA, 19 nt, Homo sapiens
  misc_RNA (1)...(19): siRNA sense strand
ggugagaaaccuuaugaau

SEQ ID NO: 1099325 - RNA, 19 nt, Homo sapiens
  misc_RNA (1)...(19): siRNA sense strand
gagaaacccuauguauguc

SEQ ID NO: 1099326 - RNA, 19 nt, Homo sapiens
  misc_RNA (1)...(19): siRNA sense strand
gaaguacaucagagaauuc

SEQ ID NO: 1099327 - RNA, 19 nt, Homo sapiens
  misc_RNA (1)...(19): siRNA sense strand
caucauagaguucauacug

SEQ ID NO: 1099328 - RNA, 19 nt, Homo sapiens
  misc_RNA (1)...(19): siRNA sense strand
ugggaaaggucuuaauagu

SEQ ID NO: 1099329 - RNA, 19 nt, Homo sapiens
  misc_RNA (1)...(19): siRNA sense strand
gcucaauucaucccuuaaa

SEQ ID NO: 1099330 - RNA, 19 nt, Homo sapiens
  misc_RNA (1)...(19): siRNA sense strand
gauggaaaucccuauaugu

SEQ ID NO: 1099331 - RNA, 19 nt, Homo sapiens
  misc_RNA (1)...(19): siRNA sense strand
aguaguggccaucaacuua

SEQ ID NO: 1099332 - RNA, 19 nt, Homo sapiens
  misc_RNA (1)...(19): siRNA sense strand
ggugagaaacccuacaaau

SEQ ID NO: 1099333 - RNA, 19 nt, Homo sapiens
  misc_RNA (1)...(19): siRNA sense strand
uuacugcaccucauacauu

SEQ ID NO: 1099334 - RNA, 19 nt, Homo sapiens
  misc_RNA (1)...(19): siRNA sense strand
gaaacccuaugaauguaac

SEQ ID NO: 1099335 - RNA, 19 nt, Homo sapiens
  misc_RNA (1)...(19): siRNA sense strand
auacaucgcagaguucaua

SEQ ID NO: 1099336 - RNA, 19 nt, Homo sapiens
  misc_RNA (1)...(19): siRNA sense strand
uacugcaccucauacauuu

SEQ ID NO: 1099337 - RNA, 19 nt, Homo sapiens
  misc_RNA (1)...(19): siRNA sense strand
acagaauucauacugguua

SEQ ID NO: 1099338 - RNA, 19 nt, Homo sapiens
  misc_RNA (1)...(19): siRNA sense strand
cuauguaugucaagagugu

SEQ ID NO: 1099339 - RNA, 19 nt, Homo sapiens
  misc_RNA (1)...(19): siRNA sense strand
cuacgaauguaaggaaugu

SEQ ID NO: 1099340 - RNA, 19 nt, Homo sapiens
  misc_RNA (1)...(19): siRNA sense strand
cuuaaagcccaucagaaua

SEQ ID NO: 1099341 - RNA, 19 nt, Homo sapiens
  misc_RNA (1)...(19): siRNA sense strand
acaaaugcgggaagucuuu

SEQ ID NO: 1099342 - RNA, 19 nt, Homo sapiens
  misc_RNA (1)...(19): siRNA sense strand
cauaaacucacuauacauc

SEQ ID NO: 1099343 - RNA, 19 nt, Homo sapiens
  misc_RNA (1)...(19): siRNA sense strand
gaaggccuuuaguguaucu

SEQ ID NO: 1099344 - RNA, 19 nt, Homo sapiens
  misc_RNA (1)...(19): siRNA sense strand
cacuauacaucgcagaguu

SEQ ID NO: 1099345 - RNA, 19 nt, Homo sapiens
  misc_RNA (1)...(19): siRNA sense strand
cguugugccucauaucuug

SEQ ID NO: 1099346 - RNA, 19 nt, Homo sapiens
  misc_RNA (1)...(19): siRNA sense strand
gauccauccuugaaguaca

SEQ ID NO: 1099347 - RNA, 19 nt, Homo sapiens
  misc_RNA (1)...(19): siRNA sense strand
gcuuagauccauccuugaa

SEQ ID NO: 1099348 - RNA, 19 nt, Homo sapiens
  misc_RNA (1)...(19): siRNA sense strand
cuauaugugugaagagugu

SEQ ID NO: 1099349 - RNA, 19 nt, Homo sapiens
  misc_RNA (1)...(19): siRNA sense strand
guugagaaaccuuauaagu

SEQ ID NO: 1099350 - RNA, 19 nt, Homo sapiens
  misc_RNA (1)...(19): siRNA sense strand
aggcucaauucaucccuua

SEQ ID NO: 1099351 - RNA, 19 nt, Homo sapiens
  misc_RNA (1)...(19): siRNA sense strand
gcugauggaaaucccuaua

SEQ ID NO: 1099352 - RNA, 19 nt, Homo sapiens
  misc_RNA (1)...(19): siRNA sense strand
ccagugauaaacccuauga

SEQ ID NO: 1099353 - RNA, 19 nt, Homo sapiens
  misc_RNA (1)...(19): siRNA sense strand
caacaaaugcgggaagucu

SEQ ID NO: 1099354 - RNA, 19 nt, Homo sapiens
  misc_RNA (1)...(19): siRNA sense strand
gcaccucauacauuugaaa

SEQ ID NO: 1099355 - RNA, 19 nt, Homo sapiens
  misc_RNA (1)...(19): siRNA sense strand
gaauucauacugguuacaa

SEQ ID NO: 1099356 - RNA, 19 nt, Homo sapiens
  misc_RNA (1)...(19): siRNA sense strand
cauaacagaauucauacug

SEQ ID NO: 1099357 - RNA, 19 nt, Homo sapiens
  misc_RNA (1)...(19): siRNA sense strand
ccuuuaggcucaauucauc

SEQ ID NO: 1099358 - RNA, 19 nt, Homo sapiens
  misc_RNA (1)...(19): siRNA sense strand
cacugugccucauaucuug

SEQ ID NO: 1099359 - RNA, 19 nt, Homo sapiens
  misc_RNA (1)...(19): siRNA sense strand
gagaauucauaccagugau

SEQ ID NO: 1099360 - RNA, 19 nt, Homo sapiens
  misc_RNA (1)...(19): siRNA sense strand
gccacaagccucauauauc

SEQ ID NO: 1099361 - RNA, 19 nt, Homo sapiens
  misc_RNA (1)...(19): siRNA sense strand
gcccaucagaauauucaua

SEQ ID NO: 1099362 - RNA, 19 nt, Homo sapiens
  misc_RNA (1)...(19): siRNA sense strand
ugggaaggccuuuagugua

SEQ ID NO: 1099363 - RNA, 19 nt, Homo sapiens
  misc_RNA (1)...(19): siRNA sense strand
gaaugugggaaggccuuua

SEQ ID NO: 1099364 - RNA, 19 nt, Homo sapiens
  misc_RNA (1)...(19): siRNA sense strand
uguaacaaaugcagaaggu

SEQ ID NO: 1099365 - RNA, 19 nt, Homo sapiens
  misc_RNA (1)...(19): siRNA sense strand
ugugggaaaggucuuaaua

SEQ ID NO: 1099366 - RNA, 19 nt, Homo sapiens
  misc_RNA (1)...(19): siRNA sense strand
ggugaaaaguccuaugaau

SEQ ID NO: 1099367 - RNA, 19 nt, Homo sapiens
  misc_RNA (1)...(19): siRNA sense strand
ggaaggaguuugcagagaa

SEQ ID NO: 1099368 - RNA, 19 nt, Homo sapiens
  misc_RNA (1)...(19): siRNA sense strand
gaaagugggccgacagaug

SEQ ID NO: 1099369 - RNA, 19 nt, Homo sapiens
  misc_RNA (1)...(19): siRNA sense strand
ugacaggccugaugaccaa

SEQ ID NO: 1099370 - RNA, 19 nt, Homo sapiens
  misc_RNA (1)...(19): siRNA sense strand
gaaggaguuugcagagaag

SEQ ID NO: 1099371 - RNA, 19 nt, Homo sapiens
  misc_RNA (1)...(19): siRNA sense strand
gcagguuggucccgagaug

SEQ ID NO: 1099372 - RNA, 19 nt, Homo sapiens
  misc_RNA (1)...(19): siRNA sense strand
acgaggagaugcugagcua

SEQ ID NO: 1099373 - RNA, 19 nt, Homo sapiens
  misc_RNA (1)...(19): siRNA sense strand
ugaggaagcucugcagaag

SEQ ID NO: 1099374 - RNA, 19 nt, Homo sapiens
  misc_RNA (1)...(19): siRNA sense strand
uggccaagcugcacugugu

SEQ ID NO: 1099375 - RNA, 19 nt, Homo sapiens
  misc_RNA (1)...(19): siRNA sense strand
gaggagaugcugagcuaug

SEQ ID NO: 1099376 - RNA, 19 nt, Homo sapiens
  misc_RNA (1)...(19): siRNA sense strand
aggaagcucugcagaagug

SEQ ID NO: 1099377 - RNA, 19 nt, Homo sapiens
  misc_RNA (1)...(19): siRNA sense strand
gacaagaguaaccagcuuu

SEQ ID NO: 1099378 - RNA, 19 nt, Homo sapiens
  misc_RNA (1)...(19): siRNA sense strand
gccgagggcacgucuauga

SEQ ID NO: 1099379 - RNA, 19 nt, Homo sapiens
  misc_RNA (1)...(19): siRNA sense strand
cagagagccuguacaugca

SEQ ID NO: 1099380 - RNA, 19 nt, Homo sapiens
  misc_RNA (1)...(19): siRNA sense strand
gaugauggcagugaacuca

SEQ ID NO: 1099381 - RNA, 19 nt, Homo sapiens
  misc_RNA (1)...(19): siRNA sense strand
gaacccagagacugcauca

SEQ ID NO: 1099382 - RNA, 19 nt, Homo sapiens
  misc_RNA (1)...(19): siRNA sense strand
gcugaagucugugcuuucu

SEQ ID NO: 1099383 - RNA, 19 nt, Homo sapiens
  misc_RNA (1)...(19): siRNA sense strand
agacaagaguaaccagcuu

SEQ ID NO: 1099384 - RNA, 19 nt, Homo sapiens
  misc_RNA (1)...(19): siRNA sense strand
aguggcaucucuuccauug

SEQ ID NO: 1099385 - RNA, 19 nt, Homo sapiens
  misc_RNA (1)...(19): siRNA sense strand
gaugaggacagccugacuu

SEQ ID NO: 1099386 - RNA, 19 nt, Homo sapiens
  misc_RNA (1)...(19): siRNA sense strand
gagcaacgacacccugagu

SEQ ID NO: 1099387 - RNA, 19 nt, Homo sapiens
  misc_RNA (1)...(19): siRNA sense strand
cagcagcgcaggcgugaau

SEQ ID NO: 1099388 - RNA, 19 nt, Homo sapiens
  misc_RNA (1)...(19): siRNA sense strand
uggcaucucuuccauugag

SEQ ID NO: 1099389 - RNA, 19 nt, Homo sapiens
  misc_RNA (1)...(19): siRNA sense strand
ggagagcuacgaggagaug

SEQ ID NO: 1099390 - RNA, 19 nt, Homo sapiens
  misc_RNA (1)...(19): siRNA sense strand
gcaugugagcccuguccua

SEQ ID NO: 1099391 - RNA, 19 nt, Homo sapiens
  misc_RNA (1)...(19): siRNA sense strand
agaggaggcugcugauggu

SEQ ID NO: 1099392 - RNA, 19 nt, Homo sapiens
  misc_RNA (1)...(19): siRNA sense strand
gcaaggcauggagcuguuu

SEQ ID NO: 1099393 - RNA, 19 nt, Homo sapiens
  misc_RNA (1)...(19): siRNA sense strand
gcaaugcagagagccugua

SEQ ID NO: 1099394 - RNA, 19 nt, Homo sapiens
  misc_RNA (1)...(19): siRNA sense strand
gauggugacaggccugaug

SEQ ID NO: 1099395 - RNA, 19 nt, Homo sapiens
  misc_RNA (1)...(19): siRNA sense strand
cuacagugaccaggacuuu

SEQ ID NO: 1099396 - RNA, 19 nt, Homo sapiens
  misc_RNA (1)...(19): siRNA sense strand
cggaaggaguuugcagaga

SEQ ID NO: 1099397 - RNA, 19 nt, Homo sapiens
  misc_RNA (1)...(19): siRNA sense strand
ccaugacgguggccgagau

SEQ ID NO: 1099398 - RNA, 19 nt, Homo sapiens
  misc_RNA (1)...(19): siRNA sense strand
gcuggucgguccugaaagc

SEQ ID NO: 1099399 - RNA, 19 nt, Homo sapiens
  misc_RNA (1)...(19): siRNA sense strand
gcaugagcuucuucgacau

SEQ ID NO: 1099400 - RNA, 19 nt, Homo sapiens
  misc_RNA (1)...(19): siRNA sense strand
uguucgaccuggacaaugu

SEQ ID NO: 1099401 - RNA, 19 nt, Homo sapiens
  misc_RNA (1)...(19): siRNA sense strand
ccucgaugauggcagugaa

SEQ ID NO: 1099402 - RNA, 19 nt, Homo sapiens
  misc_RNA (1)...(19): siRNA sense strand
agucugugcuuucuucaag

SEQ ID NO: 1099403 - RNA, 19 nt, Homo sapiens
  misc_RNA (1)...(19): siRNA sense strand
uugcugaagucugugcuuu

SEQ ID NO: 1099404 - RNA, 19 nt, Homo sapiens
  misc_RNA (1)...(19): siRNA sense strand
ugaccaaggcugagaagag

SEQ ID NO: 1099405 - RNA, 19 nt, Homo sapiens
  misc_RNA (1)...(19): siRNA sense strand
gggaaagugggccgacaga

SEQ ID NO: 1099406 - RNA, 19 nt, Homo sapiens
  misc_RNA (1)...(19): siRNA sense strand
ugaguggcaucucuuccau

SEQ ID NO: 1099407 - RNA, 19 nt, Homo sapiens
  misc_RNA (1)...(19): siRNA sense strand
agucacagcggaaggaguu

SEQ ID NO: 1099408 - RNA, 19 nt, Homo sapiens
  misc_RNA (1)...(19): siRNA sense strand
ggcuucaucucccauuucu

SEQ ID NO: 1099409 - RNA, 19 nt, Homo sapiens
  misc_RNA (1)...(19): siRNA sense strand
cccugcagcuggugaagga

SEQ ID NO: 1099410 - RNA, 19 nt, Homo sapiens
  misc_RNA (1)...(19): siRNA sense strand
ccauugagcccagcaagca

SEQ ID NO: 1099411 - RNA, 19 nt, Homo sapiens
  misc_RNA (1)...(19): siRNA sense strand
acccagagacugcaucaga

SEQ ID NO: 1099412 - RNA, 19 nt, Homo sapiens
  misc_RNA (1)...(19): siRNA sense strand
gaggaagcucugcagaagu

SEQ ID NO: 1099413 - RNA, 19 nt, Homo sapiens
  misc_RNA (1)...(19): siRNA sense strand
guaccugagggacauguuc

SEQ ID NO: 1099414 - RNA, 19 nt, Homo sapiens
  misc_RNA (1)...(19): siRNA sense strand
cuucaucucccauuucuac

SEQ ID NO: 1099415 - RNA, 19 nt, Homo sapiens
  misc_RNA (1)...(19): siRNA sense strand
gaagaaagaaguugaauca

SEQ ID NO: 1099416 - RNA, 19 nt, Homo sapiens
  misc_RNA (1)...(19): siRNA sense strand
gcaaugaggaugugacuaa

SEQ ID NO: 1099417 - RNA, 19 nt, Homo sapiens
  misc_RNA (1)...(19): siRNA sense strand
agaaggagaugaucaagaa

SEQ ID NO: 1099418 - RNA, 19 nt, Homo sapiens
  misc_RNA (1)...(19): siRNA sense strand
gaaggaauaugcugaaagg

SEQ ID NO: 1099419 - RNA, 19 nt, Homo sapiens
  misc_RNA (1)...(19): siRNA sense strand
ggauauauuuccuuacuca

SEQ ID NO: 1099420 - RNA, 19 nt, Homo sapiens
  misc_RNA (1)...(19): siRNA sense strand
ggaagaagauaagccaaga

SEQ ID NO: 1099421 - RNA, 19 nt, Homo sapiens
  misc_RNA (1)...(19): siRNA sense strand
gaaagaagcagcagaucga

SEQ ID NO: 1099422 - RNA, 19 nt, Homo sapiens
  misc_RNA (1)...(19): siRNA sense strand
gacuaaagcaguugacaua

SEQ ID NO: 1099423 - RNA, 19 nt, Homo sapiens
  misc_RNA (1)...(19): siRNA sense strand
ggagauagauaacaaucca

SEQ ID NO: 1099424 - RNA, 19 nt, Homo sapiens
  misc_RNA (1)...(19): siRNA sense strand
cagcaucuguuaaucuaaa

SEQ ID NO: 1099425 - RNA, 19 nt, Homo sapiens
  misc_RNA (1)...(19): siRNA sense strand
gaacucaugagacugcuuu

SEQ ID NO: 1099426 - RNA, 19 nt, Homo sapiens
  misc_RNA (1)...(19): siRNA sense strand
gaaaggccaacaugagaaa

SEQ ID NO: 1099427 - RNA, 19 nt, Homo sapiens
  misc_RNA (1)...(19): siRNA sense strand
ucgccaagaugaaagguua

SEQ ID NO: 1099428 - RNA, 19 nt, Homo sapiens
  misc_RNA (1)...(19): siRNA sense strand
agagugacaucauuacuga

SEQ ID NO: 1099429 - RNA, 19 nt, Homo sapiens
  misc_RNA (1)...(19): siRNA sense strand
gcaacuaaacaaucaaaug

SEQ ID NO: 1099430 - RNA, 19 nt, Homo sapiens
  misc_RNA (1)...(19): siRNA sense strand
ggaugugacuaaagcaguu

SEQ ID NO: 1099431 - RNA, 19 nt, Homo sapiens
  misc_RNA (1)...(19): siRNA sense strand
caaacaaacuacccauuuu

SEQ ID NO: 1099432 - RNA, 19 nt, Homo sapiens
  misc_RNA (1)...(19): siRNA sense strand
gcaagaggaacaaauggaa

SEQ ID NO: 1099433 - RNA, 19 nt, Homo sapiens
  misc_RNA (1)...(19): siRNA sense strand
acaaacaaacuacccauuu

SEQ ID NO: 1099434 - RNA, 19 nt, Homo sapiens
  misc_RNA (1)...(19): siRNA sense strand
ugacauaacuacuccaaaa

SEQ ID NO: 1099435 - RNA, 19 nt, Homo sapiens
  misc_RNA (1)...(19): siRNA sense strand
gaagauaccgaccaugaag

SEQ ID NO: 1099436 - RNA, 19 nt, Homo sapiens
  misc_RNA (1)...(19): siRNA sense strand
ggcagcaacuaaacaauca

SEQ ID NO: 1099437 - RNA, 19 nt, Homo sapiens
  misc_RNA (1)...(19): siRNA sense strand
ucagagagugacaucauua

SEQ ID NO: 1099438 - RNA, 19 nt, Homo sapiens
  misc_RNA (1)...(19): siRNA sense strand
ggaagauaccgaccaugaa

SEQ ID NO: 1099439 - RNA, 19 nt, Homo sapiens
  misc_RNA (1)...(19): siRNA sense strand
uaugggagauagauaacaa

SEQ ID NO: 1099440 - RNA, 19 nt, Homo sapiens
  misc_RNA (1)...(19): siRNA sense strand
guaaagccacccacaaaca

SEQ ID NO: 1099441 - RNA, 19 nt, Homo sapiens
  misc_RNA (1)...(19): siRNA sense strand
aggaacaaauggaaacuga

SEQ ID NO: 1099442 - RNA, 19 nt, Homo sapiens
  misc_RNA (1)...(19): siRNA sense strand
caagcaagaggaacaaaug

SEQ ID NO: 1099443 - RNA, 19 nt, Homo sapiens
  misc_RNA (1)...(19): siRNA sense strand
agacgaaguuccugaugga

SEQ ID NO: 1099444 - RNA, 19 nt, Homo sapiens
  misc_RNA (1)...(19): siRNA sense strand
caaugaggaugugacuaaa

SEQ ID NO: 1099445 - RNA, 19 nt, Homo sapiens
  misc_RNA (1)...(19): siRNA sense strand
caacuaaacaaucaaaugc

SEQ ID NO: 1099446 - RNA, 19 nt, Homo sapiens
  misc_RNA (1)...(19): siRNA sense strand
gaagguuuaugggagauag

SEQ ID NO: 1099447 - RNA, 19 nt, Homo sapiens
  misc_RNA (1)...(19): siRNA sense strand
gaagaagauaagccaagaa

SEQ ID NO: 1099448 - RNA, 19 nt, Homo sapiens
  misc_RNA (1)...(19): siRNA sense strand
cagaaggaauaugcugaaa

SEQ ID NO: 1099449 - RNA, 19 nt, Homo sapiens
  misc_RNA (1)...(19): siRNA sense strand
gaagauaagccaagaaaag

SEQ ID NO: 1099450 - RNA, 19 nt, Homo sapiens
  misc_RNA (1)...(19): siRNA sense strand
caagaggaacaaauggaaa

SEQ ID NO: 1099451 - RNA, 19 nt, Homo sapiens
  misc_RNA (1)...(19): siRNA sense strand
gcaagcaagaggaacaaau

SEQ ID NO: 1099452 - RNA, 19 nt, Homo sapiens
  misc_RNA (1)...(19): siRNA sense strand
ggaagaaagaaguugaauc

SEQ ID NO: 1099453 - RNA, 19 nt, Homo sapiens
  misc_RNA (1)...(19): siRNA sense strand
uaaagccacccacaaacaa

SEQ ID NO: 1099454 - RNA, 19 nt, Homo sapiens
  misc_RNA (1)...(19): siRNA sense strand
cuaaagcaguugacauaac

SEQ ID NO: 1099455 - RNA, 19 nt, Homo sapiens
  misc_RNA (1)...(19): siRNA sense strand
gccagaaggaagaagauaa

SEQ ID NO: 1099456 - RNA, 19 nt, Homo sapiens
  misc_RNA (1)...(19): siRNA sense strand
acaaucaaaugcaucaucu

SEQ ID NO: 1099457 - RNA, 19 nt, Homo sapiens
  misc_RNA (1)...(19): siRNA sense strand
gagagugacaucauuacug

SEQ ID NO: 1099458 - RNA, 19 nt, Homo sapiens
  misc_RNA (1)...(19): siRNA sense strand
ggaccaaaggauauauuuc

SEQ ID NO: 1099459 - RNA, 19 nt, Homo sapiens
  misc_RNA (1)...(19): siRNA sense strand
aagaagauaagccaagaaa

SEQ ID NO: 1099460 - RNA, 19 nt, Homo sapiens
  misc_RNA (1)...(19): siRNA sense strand
aaucaaaugcaucaucuga

SEQ ID NO: 1099461 - RNA, 19 nt, Homo sapiens
  misc_RNA (1)...(19): siRNA sense strand
caaacuacccauuuucuuu

SEQ ID NO: 1099462 - RNA, 19 nt, Homo sapiens
  misc_RNA (1)...(19): siRNA sense strand
aaaggaagauaccgaccau

SEQ ID NO: 1099463 - RNA, 19 nt, Homo sapiens
  misc_RNA (1)...(19): siRNA sense strand
ggaaaaguauggcaaacca

SEQ ID NO: 1099464 - RNA, 19 nt, Homo sapiens
  misc_RNA (1)...(19): siRNA sense strand
aaaagugaguccuaaaaga

SEQ ID NO: 1099465 - RNA, 19 nt, Homo sapiens
  misc_RNA (1)...(19): siRNA sense strand
aaguauggcaaaccaaaua

SEQ ID NO: 1099466 - RNA, 19 nt, Homo sapiens
  misc_RNA (1)...(19): siRNA sense strand
gaagaggacaaaaguaaga

SEQ ID NO: 1099467 - RNA, 19 nt, Homo sapiens
  misc_RNA (1)...(19): siRNA sense strand
ugaagaagaaggagaugau

SEQ ID NO: 1099468 - RNA, 19 nt, Homo sapiens
  misc_RNA (1)...(19): siRNA sense strand
gucaacaggcagcaacuaa

SEQ ID NO: 1099469 - RNA, 19 nt, Homo sapiens
  misc_RNA (1)...(19): siRNA sense strand
ugaaaggccaacaugagaa

SEQ ID NO: 1099470 - RNA, 19 nt, Homo sapiens
  misc_RNA (1)...(19): siRNA sense strand
ucaagaaggugaaaagaag

SEQ ID NO: 1099471 - RNA, 19 nt, Homo sapiens
  misc_RNA (1)...(19): siRNA sense strand
gaagaagaaggagaugauc

SEQ ID NO: 1099472 - RNA, 19 nt, Homo sapiens
  misc_RNA (1)...(19): siRNA sense strand
ugacaucauuacugaagag

SEQ ID NO: 1099473 - RNA, 19 nt, Homo sapiens
  misc_RNA (1)...(19): siRNA sense strand
gaaagagaaaggcagaaaa

SEQ ID NO: 1099474 - RNA, 19 nt, Homo sapiens
  misc_RNA (1)...(19): siRNA sense strand
caacaggcagcaacuaaac

SEQ ID NO: 1099475 - RNA, 19 nt, Homo sapiens
  misc_RNA (1)...(19): siRNA sense strand
ucaacaggcagcaacuaaa

SEQ ID NO: 1099476 - RNA, 19 nt, Homo sapiens
  misc_RNA (1)...(19): siRNA sense strand
caagaaaagagccggauaa

SEQ ID NO: 1099477 - RNA, 19 nt, Homo sapiens
  misc_RNA (1)...(19): siRNA sense strand
ugagaaagaagcagcagau

SEQ ID NO: 1099478 - RNA, 19 nt, Homo sapiens
  misc_RNA (1)...(19): siRNA sense strand
gcugaaaggccaacaugag

SEQ ID NO: 1099479 - RNA, 19 nt, Homo sapiens
  misc_RNA (1)...(19): siRNA sense strand
agaagaaggagaugaucaa

SEQ ID NO: 1099480 - RNA, 19 nt, Homo sapiens
  misc_RNA (1)...(19): siRNA sense strand
cagcaacuaaacaaucaaa

SEQ ID NO: 1099481 - RNA, 19 nt, Homo sapiens
  misc_RNA (1)...(19): siRNA sense strand
gcucacagaaggaauaugc

SEQ ID NO: 1099482 - RNA, 19 nt, Homo sapiens
  misc_RNA (1)...(19): siRNA sense strand
aggaagauaccgaccauga

SEQ ID NO: 1099483 - RNA, 19 nt, Homo sapiens
  misc_RNA (1)...(19): siRNA sense strand
agaaagagaaaggcagaaa

SEQ ID NO: 1099484 - RNA, 19 nt, Homo sapiens
  misc_RNA (1)...(19): siRNA sense strand
gaccaaaggauauauuucc

SEQ ID NO: 1099485 - RNA, 19 nt, Homo sapiens
  misc_RNA (1)...(19): siRNA sense strand
gaagaaggagaugaucaag

SEQ ID NO: 1099486 - RNA, 19 nt, Homo sapiens
  misc_RNA (1)...(19): siRNA sense strand
ggaggcaggaguagugaca

SEQ ID NO: 1099487 - RNA, 19 nt, Homo sapiens
  misc_RNA (1)...(19): siRNA sense strand
guauggcaaaccaaauaaa

SEQ ID NO: 1099488 - RNA, 19 nt, Homo sapiens
  misc_RNA (1)...(19): siRNA sense strand
ccagaaggaagaagauaag

SEQ ID NO: 1099489 - RNA, 19 nt, Homo sapiens
  misc_RNA (1)...(19): siRNA sense strand
ggaugaagagggccagaag

SEQ ID NO: 1099490 - RNA, 19 nt, Homo sapiens
  misc_RNA (1)...(19): siRNA sense strand
gacaacagcaacagcaucu

SEQ ID NO: 1099491 - RNA, 19 nt, Homo sapiens
  misc_RNA (1)...(19): siRNA sense strand
ggaguagugacaacagcaa

SEQ ID NO: 1099492 - RNA, 19 nt, Homo sapiens
  misc_RNA (1)...(19): siRNA sense strand
gauaacaauccaaaaguga

SEQ ID NO: 1099493 - RNA, 19 nt, Homo sapiens
  misc_RNA (1)...(19): siRNA sense strand
gaagaaaaggaaacuagug

SEQ ID NO: 1099494 - RNA, 19 nt, Homo sapiens
  misc_RNA (1)...(19): siRNA sense strand
gauguugaaguugaagaaa

SEQ ID NO: 1099495 - RNA, 19 nt, Homo sapiens
  misc_RNA (1)...(19): siRNA sense strand
gcuguaaagccacccacaa

SEQ ID NO: 1099496 - RNA, 19 nt, Homo sapiens
  misc_RNA (1)...(19): siRNA sense strand
cugaaaggccaacaugaga

SEQ ID NO: 1099497 - RNA, 19 nt, Homo sapiens
  misc_RNA (1)...(19): siRNA sense strand
caaccuccgauucugaaga

SEQ ID NO: 1099498 - RNA, 19 nt, Homo sapiens
  misc_RNA (1)...(19): siRNA sense strand
ggccagaaggaagaagaua

SEQ ID NO: 1099499 - RNA, 19 nt, Homo sapiens
  misc_RNA (1)...(19): siRNA sense strand
gugacaucauuacugaaga

SEQ ID NO: 1099500 - RNA, 19 nt, Homo sapiens
  misc_RNA (1)...(19): siRNA sense strand
ugaggaggcaggaguagug

SEQ ID NO: 1099501 - RNA, 19 nt, Homo sapiens
  misc_RNA (1)...(19): siRNA sense strand
gaaagguuauccccauugg

SEQ ID NO: 1099502 - RNA, 19 nt, Homo sapiens
  misc_RNA (1)...(19): siRNA sense strand
ccauuggccagcucgagua

SEQ ID NO: 1099503 - RNA, 19 nt, Homo sapiens
  misc_RNA (1)...(19): siRNA sense strand
aaaagcagccuaagaagga

SEQ ID NO: 1099504 - RNA, 19 nt, Homo sapiens
  misc_RNA (1)...(19): siRNA sense strand
gcccuguccuucagagagu

SEQ ID NO: 1099505 - RNA, 19 nt, Homo sapiens
  misc_RNA (1)...(19): siRNA sense strand
gacccaaaaugguaaaaca

SEQ ID NO: 1099506 - RNA, 19 nt, Homo sapiens
  misc_RNA (1)...(19): siRNA sense strand
cuguaaagccacccacaaa

SEQ ID NO: 1099507 - RNA, 19 nt, Homo sapiens
  misc_RNA (1)...(19): siRNA sense strand
aaagccacccacaaacaaa

SEQ ID NO: 1099508 - RNA, 19 nt, Homo sapiens
  misc_RNA (1)...(19): siRNA sense strand
aaacagggguuacuucaac

SEQ ID NO: 1099509 - RNA, 19 nt, Homo sapiens
  misc_RNA (1)...(19): siRNA sense strand
acagaaggaauaugcugaa

SEQ ID NO: 1099510 - RNA, 19 nt, Homo sapiens
  misc_RNA (1)...(19): siRNA sense strand
ggugggaggaacuuucaga

SEQ ID NO: 1099511 - RNA, 19 nt, Homo sapiens
  misc_RNA (1)...(19): siRNA sense strand
agauaccgaccaugaagaa

SEQ ID NO: 1099512 - RNA, 19 nt, Homo sapiens
  misc_RNA (1)...(19): siRNA sense strand
guagacgaaguuccugaug

SEQ ID NO: 1099513 - RNA, 19 nt, Homo sapiens
  misc_RNA (1)...(19): siRNA sense strand
gaugaucaagaaggugaaa

SEQ ID NO: 1099514 - RNA, 19 nt, Homo sapiens
  misc_RNA (1)...(19): siRNA sense strand
ugaagagggccagaaggaa

SEQ ID NO: 1099515 - RNA, 19 nt, Homo sapiens
  misc_RNA (1)...(19): siRNA sense strand
gaagaaagaaguugaauca

SEQ ID NO: 1099516 - RNA, 19 nt, Homo sapiens
  misc_RNA (1)...(19): siRNA sense strand
gcaaugaggaugugacuaa

SEQ ID NO: 1099517 - RNA, 19 nt, Homo sapiens
  misc_RNA (1)...(19): siRNA sense strand
agaaggagaugaucaagaa

SEQ ID NO: 1099518 - RNA, 19 nt, Homo sapiens
  misc_RNA (1)...(19): siRNA sense strand
gaaggaauaugcugaaagg

SEQ ID NO: 1099519 - RNA, 19 nt, Homo sapiens
  misc_RNA (1)...(19): siRNA sense strand
ggauauauuuccuuacuca

SEQ ID NO: 1099520 - RNA, 19 nt, Homo sapiens
  misc_RNA (1)...(19): siRNA sense strand
ggaagaagauaagccaaga

SEQ ID NO: 1099521 - RNA, 19 nt, Homo sapiens
  misc_RNA (1)...(19): siRNA sense strand
gaaagaagcagcagaucga

SEQ ID NO: 1099522 - RNA, 19 nt, Homo sapiens
  misc_RNA (1)...(19): siRNA sense strand
gacuaaagcaguugacaua

SEQ ID NO: 1099523 - RNA, 19 nt, Homo sapiens
  misc_RNA (1)...(19): siRNA sense strand
ggagauagauaacaaucca

SEQ ID NO: 1099524 - RNA, 19 nt, Homo sapiens
  misc_RNA (1)...(19): siRNA sense strand
cagcaucuguuaaucuaaa

SEQ ID NO: 1099525 - RNA, 19 nt, Homo sapiens
  misc_RNA (1)...(19): siRNA sense strand
gaacucaugagacugcuuu

SEQ ID NO: 1099526 - RNA, 19 nt, Homo sapiens
  misc_RNA (1)...(19): siRNA sense strand
gaaaggccaacaugagaaa

SEQ ID NO: 1099527 - RNA, 19 nt, Homo sapiens
  misc_RNA (1)...(19): siRNA sense strand
ucgccaagaugaaagguua

SEQ ID NO: 1099528 - RNA, 19 nt, Homo sapiens
  misc_RNA (1)...(19): siRNA sense strand
agagugacaucauuacuga

SEQ ID NO: 1099529 - RNA, 19 nt, Homo sapiens
  misc_RNA (1)...(19): siRNA sense strand
gcaacuaaacaaucaaaug

SEQ ID NO: 1099530 - RNA, 19 nt, Homo sapiens
  misc_RNA (1)...(19): siRNA sense strand
ggaugugacuaaagcaguu

SEQ ID NO: 1099531 - RNA, 19 nt, Homo sapiens
  misc_RNA (1)...(19): siRNA sense strand
caaacaaacuacccauuuu

SEQ ID NO: 1099532 - RNA, 19 nt, Homo sapiens
  misc_RNA (1)...(19): siRNA sense strand
gcaagaggaacaaauggaa

SEQ ID NO: 1099533 - RNA, 19 nt, Homo sapiens
  misc_RNA (1)...(19): siRNA sense strand
acaaacaaacuacccauuu

SEQ ID NO: 1099534 - RNA, 19 nt, Homo sapiens
  misc_RNA (1)...(19): siRNA sense strand
ugacauaacuacuccaaaa

SEQ ID NO: 1099535 - RNA, 19 nt, Homo sapiens
  misc_RNA (1)...(19): siRNA sense strand
gaagauaccgaccaugaag

SEQ ID NO: 1099536 - RNA, 19 nt, Homo sapiens
  misc_RNA (1)...(19): siRNA sense strand
ggcagcaacuaaacaauca

SEQ ID NO: 1099537 - RNA, 19 nt, Homo sapiens
  misc_RNA (1)...(19): siRNA sense strand
ucagagagugacaucauua

SEQ ID NO: 1099538 - RNA, 19 nt, Homo sapiens
  misc_RNA (1)...(19): siRNA sense strand
ggaagauaccgaccaugaa

SEQ ID NO: 1099539 - RNA, 19 nt, Homo sapiens
  misc_RNA (1)...(19): siRNA sense strand
uaugggagauagauaacaa

SEQ ID NO: 1099540 - RNA, 19 nt, Homo sapiens
  misc_RNA (1)...(19): siRNA sense strand
guaaagccacccacaaaca

SEQ ID NO: 1099541 - RNA, 19 nt, Homo sapiens
  misc_RNA (1)...(19): siRNA sense strand
aggaacaaauggaaacuga

SEQ ID NO: 1099542 - RNA, 19 nt, Homo sapiens
  misc_RNA (1)...(19): siRNA sense strand
caagcaagaggaacaaaug

SEQ ID NO: 1099543 - RNA, 19 nt, Homo sapiens
  misc_RNA (1)...(19): siRNA sense strand
agacgaaguuccugaugga

SEQ ID NO: 1099544 - RNA, 19 nt, Homo sapiens
  misc_RNA (1)...(19): siRNA sense strand
caaugaggaugugacuaaa

SEQ ID NO: 1099545 - RNA, 19 nt, Homo sapiens
  misc_RNA (1)...(19): siRNA sense strand
caacuaaacaaucaaaugc

SEQ ID NO: 1099546 - RNA, 19 nt, Homo sapiens
  misc_RNA (1)...(19): siRNA sense strand
gaagguuuaugggagauag

SEQ ID NO: 1099547 - RNA, 19 nt, Homo sapiens
  misc_RNA (1)...(19): siRNA sense strand
gaagaagauaagccaagaa

SEQ ID NO: 1099548 - RNA, 19 nt, Homo sapiens
  misc_RNA (1)...(19): siRNA sense strand
cagaaggaauaugcugaaa

SEQ ID NO: 1099549 - RNA, 19 nt, Homo sapiens
  misc_RNA (1)...(19): siRNA sense strand
gaagauaagccaagaaaag

SEQ ID NO: 1099550 - RNA, 19 nt, Homo sapiens
  misc_RNA (1)...(19): siRNA sense strand
caagaggaacaaauggaaa

SEQ ID NO: 1099551 - RNA, 19 nt, Homo sapiens
  misc_RNA (1)...(19): siRNA sense strand
gcaagcaagaggaacaaau

SEQ ID NO: 1099552 - RNA, 19 nt, Homo sapiens
  misc_RNA (1)...(19): siRNA sense strand
ggaagaaagaaguugaauc

SEQ ID NO: 1099553 - RNA, 19 nt, Homo sapiens
  misc_RNA (1)...(19): siRNA sense strand
uaaagccacccacaaacaa

SEQ ID NO: 1099554 - RNA, 19 nt, Homo sapiens
  misc_RNA (1)...(19): siRNA sense strand
cuaaagcaguugacauaac

SEQ ID NO: 1099555 - RNA, 19 nt, Homo sapiens
  misc_RNA (1)...(19): siRNA sense strand
gccagaaggaagaagauaa

SEQ ID NO: 1099556 - RNA, 19 nt, Homo sapiens
  misc_RNA (1)...(19): siRNA sense strand
acaaucaaaugcaucaucu

SEQ ID NO: 1099557 - RNA, 19 nt, Homo sapiens
  misc_RNA (1)...(19): siRNA sense strand
gagagugacaucauuacug

SEQ ID NO: 1099558 - RNA, 19 nt, Homo sapiens
  misc_RNA (1)...(19): siRNA sense strand
cuacagaagucaagauucc

SEQ ID NO: 1099559 - RNA, 19 nt, Homo sapiens
  misc_RNA (1)...(19): siRNA sense strand
ggaccaaaggauauauuuc

SEQ ID NO: 1099560 - RNA, 19 nt, Homo sapiens
  misc_RNA (1)...(19): siRNA sense strand
aagaagauaagccaagaaa

SEQ ID NO: 1099561 - RNA, 19 nt, Homo sapiens
  misc_RNA (1)...(19): siRNA sense strand
aaucaaaugcaucaucuga

SEQ ID NO: 1099562 - RNA, 19 nt, Homo sapiens
  misc_RNA (1)...(19): siRNA sense strand
caaacuacccauuuucuuu

SEQ ID NO: 1099563 - RNA, 19 nt, Homo sapiens
  misc_RNA (1)...(19): siRNA sense strand
aaaggaagauaccgaccau

SEQ ID NO: 1099564 - RNA, 19 nt, Homo sapiens
  misc_RNA (1)...(19): siRNA sense strand
ggaaaaguauggcaaacca

SEQ ID NO: 1099565 - RNA, 19 nt, Homo sapiens
  misc_RNA (1)...(19): siRNA sense strand
aaaagugaguccuaaaaga

SEQ ID NO: 1099566 - RNA, 19 nt, Homo sapiens
  misc_RNA (1)...(19): siRNA sense strand
aaguauggcaaaccaaaua

SEQ ID NO: 1099567 - RNA, 19 nt, Homo sapiens
  misc_RNA (1)...(19): siRNA sense strand
gaagaggacaaaaguaaga

SEQ ID NO: 1099568 - RNA, 19 nt, Homo sapiens
  misc_RNA (1)...(19): siRNA sense strand
ugaagaagaaggagaugau

SEQ ID NO: 1099569 - RNA, 19 nt, Homo sapiens
  misc_RNA (1)...(19): siRNA sense strand
gucaacaggcagcaacuaa

SEQ ID NO: 1099570 - RNA, 19 nt, Homo sapiens
  misc_RNA (1)...(19): siRNA sense strand
ugaaaggccaacaugagaa

SEQ ID NO: 1099571 - RNA, 19 nt, Homo sapiens
  misc_RNA (1)...(19): siRNA sense strand
ucaagaaggugaaaagaag

SEQ ID NO: 1099572 - RNA, 19 nt, Homo sapiens
  misc_RNA (1)...(19): siRNA sense strand
gaagaagaaggagaugauc

SEQ ID NO: 1099573 - RNA, 19 nt, Homo sapiens
  misc_RNA (1)...(19): siRNA sense strand
ugacaucauuacugaagag

SEQ ID NO: 1099574 - RNA, 19 nt, Homo sapiens
  misc_RNA (1)...(19): siRNA sense strand
gaaagagaaaggcagaaaa

SEQ ID NO: 1099575 - RNA, 19 nt, Homo sapiens
  misc_RNA (1)...(19): siRNA sense strand
caacaggcagcaacuaaac

SEQ ID NO: 1099576 - RNA, 19 nt, Homo sapiens
  misc_RNA (1)...(19): siRNA sense strand
ucaacaggcagcaacuaaa

SEQ ID NO: 1099577 - RNA, 19 nt, Homo sapiens
  misc_RNA (1)...(19): siRNA sense strand
caagaaaagagccggauaa

SEQ ID NO: 1099578 - RNA, 19 nt, Homo sapiens
  misc_RNA (1)...(19): siRNA sense strand
ugagaaagaagcagcagau

SEQ ID NO: 1099579 - RNA, 19 nt, Homo sapiens
  misc_RNA (1)...(19): siRNA sense strand
gcugaaaggccaacaugag

SEQ ID NO: 1099580 - RNA, 19 nt, Homo sapiens
  misc_RNA (1)...(19): siRNA sense strand
agaagaaggagaugaucaa

SEQ ID NO: 1099581 - RNA, 19 nt, Homo sapiens
  misc_RNA (1)...(19): siRNA sense strand
cagcaacuaaacaaucaaa

SEQ ID NO: 1099582 - RNA, 19 nt, Homo sapiens
  misc_RNA (1)...(19): siRNA sense strand
gcucacagaaggaauaugc

SEQ ID NO: 1099583 - RNA, 19 nt, Homo sapiens
  misc_RNA (1)...(19): siRNA sense strand
aggaagauaccgaccauga

SEQ ID NO: 1099584 - RNA, 19 nt, Homo sapiens
  misc_RNA (1)...(19): siRNA sense strand
agaaagagaaaggcagaaa

SEQ ID NO: 1099585 - RNA, 19 nt, Homo sapiens
  misc_RNA (1)...(19): siRNA sense strand
gaccaaaggauauauuucc

SEQ ID NO: 1099586 - RNA, 19 nt, Homo sapiens
  misc_RNA (1)...(19): siRNA sense strand
gaagaaggagaugaucaag

SEQ ID NO: 1099587 - RNA, 19 nt, Homo sapiens
  misc_RNA (1)...(19): siRNA sense strand
ggaggcaggaguagugaca

SEQ ID NO: 1099588 - RNA, 19 nt, Homo sapiens
  misc_RNA (1)...(19): siRNA sense strand
guauggcaaaccaaauaaa

SEQ ID NO: 1099589 - RNA, 19 nt, Homo sapiens
  misc_RNA (1)...(19): siRNA sense strand
ccagaaggaagaagauaag

SEQ ID NO: 1099590 - RNA, 19 nt, Homo sapiens
  misc_RNA (1)...(19): siRNA sense strand
ggaugaagagggccagaag

SEQ ID NO: 1099591 - RNA, 19 nt, Homo sapiens
  misc_RNA (1)...(19): siRNA sense strand
gacaacagcaacagcaucu

SEQ ID NO: 1099592 - RNA, 19 nt, Homo sapiens
  misc_RNA (1)...(19): siRNA sense strand
ggaguagugacaacagcaa

SEQ ID NO: 1099593 - RNA, 19 nt, Homo sapiens
  misc_RNA (1)...(19): siRNA sense strand
gauaacaauccaaaaguga

SEQ ID NO: 1099594 - RNA, 19 nt, Homo sapiens
  misc_RNA (1)...(19): siRNA sense strand
gaagaaaaggaaacuagug

SEQ ID NO: 1099595 - RNA, 19 nt, Homo sapiens
  misc_RNA (1)...(19): siRNA sense strand
gauguugaaguugaagaaa

SEQ ID NO: 1099596 - RNA, 19 nt, Homo sapiens
  misc_RNA (1)...(19): siRNA sense strand
gaaagguuauccccauugg

SEQ ID NO: 1099597 - RNA, 19 nt, Homo sapiens
  misc_RNA (1)...(19): siRNA sense strand
cugaaaggccaacaugaga

SEQ ID NO: 1099598 - RNA, 19 nt, Homo sapiens
  misc_RNA (1)...(19): siRNA sense strand
caaccuccgauucugaaga

SEQ ID NO: 1099599 - RNA, 19 nt, Homo sapiens
  misc_RNA (1)...(19): siRNA sense strand
ggccagaaggaagaagaua

SEQ ID NO: 1099600 - RNA, 19 nt, Homo sapiens
  misc_RNA (1)...(19): siRNA sense strand
gugacaucauuacugaaga

SEQ ID NO: 1099601 - RNA, 19 nt, Homo sapiens
  misc_RNA (1)...(19): siRNA sense strand
gcuguaaagccacccacaa

SEQ ID NO: 1099602 - RNA, 19 nt, Homo sapiens
  misc_RNA (1)...(19): siRNA sense strand
ugaggaggcaggaguagug

SEQ ID NO: 1099603 - RNA, 19 nt, Homo sapiens
  misc_RNA (1)...(19): siRNA sense strand
ccauuggccagcucgagua

SEQ ID NO: 1099604 - RNA, 19 nt, Homo sapiens
  misc_RNA (1)...(19): siRNA sense strand
aaaagcagccuaagaagga

SEQ ID NO: 1099605 - RNA, 19 nt, Homo sapiens
  misc_RNA (1)...(19): siRNA sense strand
gcccuguccuucagagagu

SEQ ID NO: 1099606 - RNA, 19 nt, Homo sapiens
  misc_RNA (1)...(19): siRNA sense strand
gacccaaaaugguaaaaca

SEQ ID NO: 1099607 - RNA, 19 nt, Homo sapiens
  misc_RNA (1)...(19): siRNA sense strand
cuguaaagccacccacaaa

SEQ ID NO: 1099608 - RNA, 19 nt, Homo sapiens
  misc_RNA (1)...(19): siRNA sense strand
aaagccacccacaaacaaa

SEQ ID NO: 1099609 - RNA, 19 nt, Homo sapiens
  misc_RNA (1)...(19): siRNA sense strand
aaacagggguuacuucaac

SEQ ID NO: 1099610 - RNA, 19 nt, Homo sapiens
  misc_RNA (1)...(19): siRNA sense strand
acagaaggaauaugcugaa

SEQ ID NO: 1099611 - RNA, 19 nt, Homo sapiens
  misc_RNA (1)...(19): siRNA sense strand
ggugggaggaacuuucaga

SEQ ID NO: 1099612 - RNA, 19 nt, Homo sapiens
  misc_RNA (1)...(19): siRNA sense strand
ugaagagggccagaaggaa

SEQ ID NO: 1099613 - RNA, 19 nt, Homo sapiens
  misc_RNA (1)...(19): siRNA sense strand
guagacgaaguuccugaug

SEQ ID NO: 1099614 - RNA, 19 nt, Homo sapiens
  misc_RNA (1)...(19): siRNA sense strand
gaugaucaagaaggugaaa

SEQ ID NO: 1099615 - RNA, 19 nt, Homo sapiens
  misc_RNA (1)...(19): siRNA sense strand
gaaccacuaugaucauuga

SEQ ID NO: 1099616 - RNA, 19 nt, Homo sapiens
  misc_RNA (1)...(19): siRNA sense strand
aaagaucgcuuccagcuaa

SEQ ID NO: 1099617 - RNA, 19 nt, Homo sapiens
  misc_RNA (1)...(19): siRNA sense strand
gaagggaacugugguguau

SEQ ID NO: 1099618 - RNA, 19 nt, Homo sapiens
  misc_RNA (1)...(19): siRNA sense strand
gaacggacggcucccauua

SEQ ID NO: 1099619 - RNA, 19 nt, Homo sapiens
  misc_RNA (1)...(19): siRNA sense strand
caacagcucucucgaguac

SEQ ID NO: 1099620 - RNA, 19 nt, Homo sapiens
  misc_RNA (1)...(19): siRNA sense strand
gcuaacggauugccagauu

SEQ ID NO: 1099621 - RNA, 19 nt, Homo sapiens
  misc_RNA (1)...(19): siRNA sense strand
ggaaugacgucugcugaug

SEQ ID NO: 1099622 - RNA, 19 nt, Homo sapiens
  misc_RNA (1)...(19): siRNA sense strand
ccagaaggcuguaggaaag

SEQ ID NO: 1099623 - RNA, 19 nt, Homo sapiens
  misc_RNA (1)...(19): siRNA sense strand
ucagauugaugacaacauu

SEQ ID NO: 1099624 - RNA, 19 nt, Homo sapiens
  misc_RNA (1)...(19): siRNA sense strand
uaacggauugccagauuua

SEQ ID NO: 1099625 - RNA, 19 nt, Homo sapiens
  misc_RNA (1)...(19): siRNA sense strand
ggacaaggcuguggucacu

SEQ ID NO: 1099626 - RNA, 19 nt, Homo sapiens
  misc_RNA (1)...(19): siRNA sense strand
uaaauuccuuccucgugua

SEQ ID NO: 1099627 - RNA, 19 nt, Homo sapiens
  misc_RNA (1)...(19): siRNA sense strand
uggaagcgcuugugaagga

SEQ ID NO: 1099628 - RNA, 19 nt, Homo sapiens
  misc_RNA (1)...(19): siRNA sense strand
caaaggagguaaaauuguu

SEQ ID NO: 1099629 - RNA, 19 nt, Homo sapiens
  misc_RNA (1)...(19): siRNA sense strand
gaucaaaggagguaaaauu

SEQ ID NO: 1099630 - RNA, 19 nt, Homo sapiens
  misc_RNA (1)...(19): siRNA sense strand
gaaugacgucugcugauga

SEQ ID NO: 1099631 - RNA, 19 nt, Homo sapiens
  misc_RNA (1)...(19): siRNA sense strand
gaucauugaccacguuguu

SEQ ID NO: 1099632 - RNA, 19 nt, Homo sapiens
  misc_RNA (1)...(19): siRNA sense strand
gugcucagauugaugacaa

SEQ ID NO: 1099633 - RNA, 19 nt, Homo sapiens
  misc_RNA (1)...(19): siRNA sense strand
gggaaccacuaugaucauu

SEQ ID NO: 1099634 - RNA, 19 nt, Homo sapiens
  misc_RNA (1)...(19): siRNA sense strand
ggacaacuucacccugauu

SEQ ID NO: 1099635 - RNA, 19 nt, Homo sapiens
  misc_RNA (1)...(19): siRNA sense strand
ugacgucugcugaugauuu

SEQ ID NO: 1099636 - RNA, 19 nt, Homo sapiens
  misc_RNA (1)...(19): siRNA sense strand
ccaacugcccgcuguauau

SEQ ID NO: 1099637 - RNA, 19 nt, Homo sapiens
  misc_RNA (1)...(19): siRNA sense strand
gaugaccagucguucuaug

SEQ ID NO: 1099638 - RNA, 19 nt, Homo sapiens
  misc_RNA (1)...(19): siRNA sense strand
gauggaagcgcuugugaag

SEQ ID NO: 1099639 - RNA, 19 nt, Homo sapiens
  misc_RNA (1)...(19): siRNA sense strand
uccaaccacuccagacuuu

SEQ ID NO: 1099640 - RNA, 19 nt, Homo sapiens
  misc_RNA (1)...(19): siRNA sense strand
ccagauuuaugaaguacug

SEQ ID NO: 1099641 - RNA, 19 nt, Homo sapiens
  misc_RNA (1)...(19): siRNA sense strand
cuaacggauugccagauuu

SEQ ID NO: 1099642 - RNA, 19 nt, Homo sapiens
  misc_RNA (1)...(19): siRNA sense strand
cagcaccaaugcagccaaa

SEQ ID NO: 1099643 - RNA, 19 nt, Homo sapiens
  misc_RNA (1)...(19): siRNA sense strand
gacgucugcugaugauuuc

SEQ ID NO: 1099644 - RNA, 19 nt, Homo sapiens
  misc_RNA (1)...(19): siRNA sense strand
ccacacucguuuccagaug

SEQ ID NO: 1099645 - RNA, 19 nt, Homo sapiens
  misc_RNA (1)...(19): siRNA sense strand
cugggaagauggaugagaa

SEQ ID NO: 1099646 - RNA, 19 nt, Homo sapiens
  misc_RNA (1)...(19): siRNA sense strand
gcuuccagcuaacggauug

SEQ ID NO: 1099647 - RNA, 19 nt, Homo sapiens
  misc_RNA (1)...(19): siRNA sense strand
gagauggaagcgcuuguga

SEQ ID NO: 1099648 - RNA, 19 nt, Homo sapiens
  misc_RNA (1)...(19): siRNA sense strand
ugacuacucucugcaugug

SEQ ID NO: 1099649 - RNA, 19 nt, Homo sapiens
  misc_RNA (1)...(19): siRNA sense strand
gaucaagcaaauaggagaa

SEQ ID NO: 1099650 - RNA, 19 nt, Homo sapiens
  misc_RNA (1)...(19): siRNA sense strand
ucacugggaagauggauga

SEQ ID NO: 1099651 - RNA, 19 nt, Homo sapiens
  misc_RNA (1)...(19): siRNA sense strand
cggauugccagauuuauga

SEQ ID NO: 1099652 - RNA, 19 nt, Homo sapiens
  misc_RNA (1)...(19): siRNA sense strand
caaagaucgcuuccagcua

SEQ ID NO: 1099653 - RNA, 19 nt, Homo sapiens
  misc_RNA (1)...(19): siRNA sense strand
caaugcagccaaagucuuc

SEQ ID NO: 1099654 - RNA, 19 nt, Homo sapiens
  misc_RNA (1)...(19): siRNA sense strand
uaugaucauugaccacguu

SEQ ID NO: 1099655 - RNA, 19 nt, Homo sapiens
  misc_RNA (1)...(19): siRNA sense strand
acagcucucucgaguacaa

SEQ ID NO: 1099656 - RNA, 19 nt, Homo sapiens
  misc_RNA (1)...(19): siRNA sense strand
ggaacggacggcucccauu

SEQ ID NO: 1099657 - RNA, 19 nt, Homo sapiens
  misc_RNA (1)...(19): siRNA sense strand
cauggaagauggguugauc

SEQ ID NO: 1099658 - RNA, 19 nt, Homo sapiens
  misc_RNA (1)...(19): siRNA sense strand
gggaaugggccgacagcaa

SEQ ID NO: 1099659 - RNA, 19 nt, Homo sapiens
  misc_RNA (1)...(19): siRNA sense strand
gcaccaaugcagccaaagu

SEQ ID NO: 1099660 - RNA, 19 nt, Homo sapiens
  misc_RNA (1)...(19): siRNA sense strand
ggaaccacuaugaucauug

SEQ ID NO: 1099661 - RNA, 19 nt, Homo sapiens
  misc_RNA (1)...(19): siRNA sense strand
aaccaucucugccaagaca

SEQ ID NO: 1099662 - RNA, 19 nt, Homo sapiens
  misc_RNA (1)...(19): siRNA sense strand
uaugaaguacugaguguga

SEQ ID NO: 1099663 - RNA, 19 nt, Homo sapiens
  misc_RNA (1)...(19): siRNA sense strand
guuuaacacugcccagaag

SEQ ID NO: 1099664 - RNA, 19 nt, Homo sapiens
  misc_RNA (1)...(19): siRNA sense strand
cagaggagcagcagaggau

SEQ ID NO: 1099665 - RNA, 19 nt, Homo sapiens
  misc_RNA (1)...(19): siRNA sense strand
gcaaauaggagaaaaucug

SEQ ID NO: 1099666 - RNA, 19 nt, Homo sapiens
  misc_RNA (1)...(19): siRNA sense strand
cagacuuucucaacuccuu

SEQ ID NO: 1099667 - RNA, 19 nt, Homo sapiens
  misc_RNA (1)...(19): siRNA sense strand
gaguacaacaucuuugaag

SEQ ID NO: 1099668 - RNA, 19 nt, Homo sapiens
  misc_RNA (1)...(19): siRNA sense strand
ucccauuacuggagcaaga

SEQ ID NO: 1099669 - RNA, 19 nt, Homo sapiens
  misc_RNA (1)...(19): siRNA sense strand
gauggaugagaaccaguuu

SEQ ID NO: 1099670 - RNA, 19 nt, Homo sapiens
  misc_RNA (1)...(19): siRNA sense strand
gcccauugcacguuuaaca

SEQ ID NO: 1099671 - RNA, 19 nt, Homo sapiens
  misc_RNA (1)...(19): siRNA sense strand
agaagggaacuguggugua

SEQ ID NO: 1099672 - RNA, 19 nt, Homo sapiens
  misc_RNA (1)...(19): siRNA sense strand
aagauggguugaucaagca

SEQ ID NO: 1099673 - RNA, 19 nt, Homo sapiens
  misc_RNA (1)...(19): siRNA sense strand
uugccagauuuaugaagua

SEQ ID NO: 1099674 - RNA, 19 nt, Homo sapiens
  misc_RNA (1)...(19): siRNA sense strand
aaugacgucugcugaugau

SEQ ID NO: 1099675 - RNA, 19 nt, Homo sapiens
  misc_RNA (1)...(19): siRNA sense strand
cagucuggauucaguuugu

SEQ ID NO: 1099676 - RNA, 19 nt, Homo sapiens
  misc_RNA (1)...(19): siRNA sense strand
caggcuggcugagcugaga

SEQ ID NO: 1099677 - RNA, 19 nt, Homo sapiens
  misc_RNA (1)...(19): siRNA sense strand
ucgaguacaacaucuuuga

SEQ ID NO: 1099678 - RNA, 19 nt, Homo sapiens
  misc_RNA (1)...(19): siRNA sense strand
cccagaaggcuguaggaaa

SEQ ID NO: 1099679 - RNA, 19 nt, Homo sapiens
  misc_RNA (1)...(19): siRNA sense strand
caggaggagugaagaccau

SEQ ID NO: 1099680 - RNA, 19 nt, Homo sapiens
  misc_RNA (1)...(19): siRNA sense strand
uuuaugaaguacugagugu

SEQ ID NO: 1099681 - RNA, 19 nt, Homo sapiens
  misc_RNA (1)...(19): siRNA sense strand
uuaaugaugaccagucguu

SEQ ID NO: 1099682 - RNA, 19 nt, Homo sapiens
  misc_RNA (1)...(19): siRNA sense strand
gggaaugacgucugcugau

SEQ ID NO: 1099683 - RNA, 19 nt, Homo sapiens
  misc_RNA (1)...(19): siRNA sense strand
gacggcacccugcauguca

SEQ ID NO: 1099684 - RNA, 19 nt, Homo sapiens
  misc_RNA (1)...(19): siRNA sense strand
cgaguacaacaucuuugaa

SEQ ID NO: 1099685 - RNA, 19 nt, Homo sapiens
  misc_RNA (1)...(19): siRNA sense strand
ggaagauggaugagaacca

SEQ ID NO: 1099686 - RNA, 19 nt, Homo sapiens
  misc_RNA (1)...(19): siRNA sense strand
gcacugaggagcggauguc

SEQ ID NO: 1099687 - RNA, 19 nt, Homo sapiens
  misc_RNA (1)...(19): siRNA sense strand
ggaagcgcuugugaaggau

SEQ ID NO: 1099688 - RNA, 19 nt, Homo sapiens
  misc_RNA (1)...(19): siRNA sense strand
ggagauggaagcgcuugug

SEQ ID NO: 1099689 - RNA, 19 nt, Homo sapiens
  misc_RNA (1)...(19): siRNA sense strand
ggguugaucaagcaaauag

SEQ ID NO: 1099690 - RNA, 19 nt, Homo sapiens
  misc_RNA (1)...(19): siRNA sense strand
gaccaacugcccgcuguau

SEQ ID NO: 1099691 - RNA, 19 nt, Homo sapiens
  misc_RNA (1)...(19): siRNA sense strand
gcccuucccugauuuuguu

SEQ ID NO: 1099692 - RNA, 19 nt, Homo sapiens
  misc_RNA (1)...(19): siRNA sense strand
ccaaugcagccaaagucuu

SEQ ID NO: 1099693 - RNA, 19 nt, Homo sapiens
  misc_RNA (1)...(19): siRNA sense strand
agacauauacauggaagau

SEQ ID NO: 1099694 - RNA, 19 nt, Homo sapiens
  misc_RNA (1)...(19): siRNA sense strand
caaauaggagaaaaucuga

SEQ ID NO: 1099695 - RNA, 19 nt, Homo sapiens
  misc_RNA (1)...(19): siRNA sense strand
caaccacuccagacuuucu

SEQ ID NO: 1099696 - RNA, 19 nt, Homo sapiens
  misc_RNA (1)...(19): siRNA sense strand
caacugcccgcuguauauc

SEQ ID NO: 1099697 - RNA, 19 nt, Homo sapiens
  misc_RNA (1)...(19): siRNA sense strand
guugaucaagcaaauagga

SEQ ID NO: 1099698 - RNA, 19 nt, Homo sapiens
  misc_RNA (1)...(19): siRNA sense strand
guuuccagaugccugauca

SEQ ID NO: 1099699 - RNA, 19 nt, Homo sapiens
  misc_RNA (1)...(19): siRNA sense strand
augcagacauauacaugga

SEQ ID NO: 1099700 - RNA, 19 nt, Homo sapiens
  misc_RNA (1)...(19): siRNA sense strand
gauccaaccacuccagacu

SEQ ID NO: 1099701 - RNA, 19 nt, Homo sapiens
  misc_RNA (1)...(19): siRNA sense strand
ggauugccagauuuaugaa

SEQ ID NO: 1099702 - RNA, 19 nt, Homo sapiens
  misc_RNA (1)...(19): siRNA sense strand
uggaugagaaccaguuugu

SEQ ID NO: 1099703 - RNA, 19 nt, Homo sapiens
  misc_RNA (1)...(19): siRNA sense strand
agacgucuccugccaagca

SEQ ID NO: 1099704 - RNA, 19 nt, Homo sapiens
  misc_RNA (1)...(19): siRNA sense strand
ucucgaguacaacaucuuu

SEQ ID NO: 1099705 - RNA, 19 nt, Homo sapiens
  misc_RNA (1)...(19): siRNA sense strand
gcccaaguccacgcagaaa

SEQ ID NO: 1099706 - RNA, 19 nt, Homo sapiens
  misc_RNA (1)...(19): siRNA sense strand
cagccaaagucuucaaccu

SEQ ID NO: 1099707 - RNA, 19 nt, Homo sapiens
  misc_RNA (1)...(19): siRNA sense strand
gacaacuucacccugauuc

SEQ ID NO: 1099708 - RNA, 19 nt, Homo sapiens
  misc_RNA (1)...(19): siRNA sense strand
guaggaaaggacaacuuca

SEQ ID NO: 1099709 - RNA, 19 nt, Homo sapiens
  misc_RNA (1)...(19): siRNA sense strand
agaaggcuguaggaaagga

SEQ ID NO: 1099710 - RNA, 19 nt, Homo sapiens
  misc_RNA (1)...(19): siRNA sense strand
gaagugcgccugagaggaa

SEQ ID NO: 1099711 - RNA, 19 nt, Homo sapiens
  misc_RNA (1)...(19): siRNA sense strand
gaaauugaaggcucaguga

SEQ ID NO: 1099712 - RNA, 19 nt, Homo sapiens
  misc_RNA (1)...(19): siRNA sense strand
caacuuagccaagacaauu

SEQ ID NO: 1099713 - RNA, 19 nt, Homo sapiens
  misc_RNA (1)...(19): siRNA sense strand
gcuuccaacugcuuauaua

SEQ ID NO: 1099714 - RNA, 19 nt, Homo sapiens
  misc_RNA (1)...(19): siRNA sense strand
uggaacagcugaacauugu

SEQ ID NO: 1099715 - RNA, 19 nt, Homo sapiens
  misc_RNA (1)...(19): siRNA sense strand
gaagaaagagguccauggu

SEQ ID NO: 1099716 - RNA, 19 nt, Homo sapiens
  misc_RNA (1)...(19): siRNA sense strand
gaacggagcagccgcuucu

SEQ ID NO: 1099717 - RNA, 19 nt, Homo sapiens
  misc_RNA (1)...(19): siRNA sense strand
gcugaacauugugcucaua

SEQ ID NO: 1099718 - RNA, 19 nt, Homo sapiens
  misc_RNA (1)...(19): siRNA sense strand
guacccaucccaacacuga

SEQ ID NO: 1099719 - RNA, 19 nt, Homo sapiens
  misc_RNA (1)...(19): siRNA sense strand
uauauucaguccacuaugg

SEQ ID NO: 1099720 - RNA, 19 nt, Homo sapiens
  misc_RNA (1)...(19): siRNA sense strand
caagacaauugggcagguu

SEQ ID NO: 1099721 - RNA, 19 nt, Homo sapiens
  misc_RNA (1)...(19): siRNA sense strand
uuugaagccuuucugaaga

SEQ ID NO: 1099722 - RNA, 19 nt, Homo sapiens
  misc_RNA (1)...(19): siRNA sense strand
gccuggagcuggugaagca

SEQ ID NO: 1099723 - RNA, 19 nt, Homo sapiens
  misc_RNA (1)...(19): siRNA sense strand
caacugcuuauauauggaa

SEQ ID NO: 1099724 - RNA, 19 nt, Homo sapiens
  misc_RNA (1)...(19): siRNA sense strand
gauuauauucaguccacua

SEQ ID NO: 1099725 - RNA, 19 nt, Homo sapiens
  misc_RNA (1)...(19): siRNA sense strand
cagggucucuccaacuuag

SEQ ID NO: 1099726 - RNA, 19 nt, Homo sapiens
  misc_RNA (1)...(19): siRNA sense strand
gaacauugugcucauagac

SEQ ID NO: 1099727 - RNA, 19 nt, Homo sapiens
  misc_RNA (1)...(19): siRNA sense strand
gaucucaccaccuccaaca

SEQ ID NO: 1099728 - RNA, 19 nt, Homo sapiens
  misc_RNA (1)...(19): siRNA sense strand
gaguuucauuucagcacuu

SEQ ID NO: 1099729 - RNA, 19 nt, Homo sapiens
  misc_RNA (1)...(19): siRNA sense strand
ugaacauugugcucauaga

SEQ ID NO: 1099730 - RNA, 19 nt, Homo sapiens
  misc_RNA (1)...(19): siRNA sense strand
cccagggucucuccaacuu

SEQ ID NO: 1099731 - RNA, 19 nt, Homo sapiens
  misc_RNA (1)...(19): siRNA sense strand
acauugugcucauagacuu

SEQ ID NO: 1099732 - RNA, 19 nt, Homo sapiens
  misc_RNA (1)...(19): siRNA sense strand
cggagcagccgcuucuuga

SEQ ID NO: 1099733 - RNA, 19 nt, Homo sapiens
  misc_RNA (1)...(19): siRNA sense strand
uccaacugcuuauauaugg

SEQ ID NO: 1099734 - RNA, 19 nt, Homo sapiens
  misc_RNA (1)...(19): siRNA sense strand
uggaauaucugccccaguu

SEQ ID NO: 1099735 - RNA, 19 nt, Homo sapiens
  misc_RNA (1)...(19): siRNA sense strand
ugacuguucgagauuauau

SEQ ID NO: 1099736 - RNA, 19 nt, Homo sapiens
  misc_RNA (1)...(19): siRNA sense strand
aagccuuucugaagagcua

SEQ ID NO: 1099737 - RNA, 19 nt, Homo sapiens
  misc_RNA (1)...(19): siRNA sense strand
ccuccaacaugcuccugaa

SEQ ID NO: 1099738 - RNA, 19 nt, Homo sapiens
  misc_RNA (1)...(19): siRNA sense strand
ccagggucucuccaacuua

SEQ ID NO: 1099739 - RNA, 19 nt, Homo sapiens
  misc_RNA (1)...(19): siRNA sense strand
cugcuuauauauggaagaa

SEQ ID NO: 1099740 - RNA, 19 nt, Homo sapiens
  misc_RNA (1)...(19): siRNA sense strand
cagcacuuccagaggauaa

SEQ ID NO: 1099741 - RNA, 19 nt, Homo sapiens
  misc_RNA (1)...(19): siRNA sense strand
guuugaagccuuucugaag

SEQ ID NO: 1099742 - RNA, 19 nt, Homo sapiens
  misc_RNA (1)...(19): siRNA sense strand
ccaacugcuuauauaugga

SEQ ID NO: 1099743 - RNA, 19 nt, Homo sapiens
  misc_RNA (1)...(19): siRNA sense strand
uggcucgaaugcacgauga

SEQ ID NO: 1099744 - RNA, 19 nt, Homo sapiens
  misc_RNA (1)...(19): siRNA sense strand
ccaacaugcuccugaaacc

SEQ ID NO: 1099745 - RNA, 19 nt, Homo sapiens
  misc_RNA (1)...(19): siRNA sense strand
cuacuccaccuccuccaaa

SEQ ID NO: 1099746 - RNA, 19 nt, Homo sapiens
  misc_RNA (1)...(19): siRNA sense strand
cgccugagaggaagaaaga

SEQ ID NO: 1099747 - RNA, 19 nt, Homo sapiens
  misc_RNA (1)...(19): siRNA sense strand
guucgagauuauauucagu

SEQ ID NO: 1099748 - RNA, 19 nt, Homo sapiens
  misc_RNA (1)...(19): siRNA sense strand
gacuuugggcugaguuuca

SEQ ID NO: 1099749 - RNA, 19 nt, Homo sapiens
  misc_RNA (1)...(19): siRNA sense strand
gaagauggcuuuaaagaau

SEQ ID NO: 1099750 - RNA, 19 nt, Homo sapiens
  misc_RNA (1)...(19): siRNA sense strand
gggagaagauggcuuuaaa

SEQ ID NO: 1099751 - RNA, 19 nt, Homo sapiens
  misc_RNA (1)...(19): siRNA sense strand
ggaaucagcugcccuugug

SEQ ID NO: 1099752 - RNA, 19 nt, Homo sapiens
  misc_RNA (1)...(19): siRNA sense strand
gcucaggaguucaaaguuu

SEQ ID NO: 1099753 - RNA, 19 nt, Homo sapiens
  misc_RNA (1)...(19): siRNA sense strand
gaaccagaauauucagaaa

SEQ ID NO: 1099754 - RNA, 19 nt, Homo sapiens
  misc_RNA (1)...(19): siRNA sense strand
gaacccauaugaagaagug

SEQ ID NO: 1099755 - RNA, 19 nt, Homo sapiens
  misc_RNA (1)...(19): siRNA sense strand
gaaaguguccagcauauuc

SEQ ID NO: 1099756 - RNA, 19 nt, Homo sapiens
  misc_RNA (1)...(19): siRNA sense strand
gaaguuauuucagaccauu

SEQ ID NO: 1099757 - RNA, 19 nt, Homo sapiens
  misc_RNA (1)...(19): siRNA sense strand
ccucaagucugguuacauu

SEQ ID NO: 1099758 - RNA, 19 nt, Homo sapiens
  misc_RNA (1)...(19): siRNA sense strand
gagaagauggcuuuaaaga

SEQ ID NO: 1099759 - RNA, 19 nt, Homo sapiens
  misc_RNA (1)...(19): siRNA sense strand
ggaagaugcuuugcucugu

SEQ ID NO: 1099760 - RNA, 19 nt, Homo sapiens
  misc_RNA (1)...(19): siRNA sense strand
gagaagugauaaaccaaau

SEQ ID NO: 1099761 - RNA, 19 nt, Homo sapiens
  misc_RNA (1)...(19): siRNA sense strand
gcaggcagcucaggaguuc

SEQ ID NO: 1099762 - RNA, 19 nt, Homo sapiens
  misc_RNA (1)...(19): siRNA sense strand
gaaaccagaauauucagaa

SEQ ID NO: 1099763 - RNA, 19 nt, Homo sapiens
  misc_RNA (1)...(19): siRNA sense strand
ggaaacagcggaugauucu

SEQ ID NO: 1099764 - RNA, 19 nt, Homo sapiens
  misc_RNA (1)...(19): siRNA sense strand
cagcugcccuuguggcuuu

SEQ ID NO: 1099765 - RNA, 19 nt, Homo sapiens
  misc_RNA (1)...(19): siRNA sense strand
ggaaugugauaccaagugu

SEQ ID NO: 1099766 - RNA, 19 nt, Homo sapiens
  misc_RNA (1)...(19): siRNA sense strand
gcaaaggaaugugauacca

SEQ ID NO: 1099767 - RNA, 19 nt, Homo sapiens
  misc_RNA (1)...(19): siRNA sense strand
gguucaauguggcuuaauu

SEQ ID NO: 1099768 - RNA, 19 nt, Homo sapiens
  misc_RNA (1)...(19): siRNA sense strand
gaagaaguggaccaagaaa

SEQ ID NO: 1099769 - RNA, 19 nt, Homo sapiens
  misc_RNA (1)...(19): siRNA sense strand
ggcaagcucugugugauug

SEQ ID NO: 1099770 - RNA, 19 nt, Homo sapiens
  misc_RNA (1)...(19): siRNA sense strand
caaguggcuucuucgacua

SEQ ID NO: 1099771 - RNA, 19 nt, Homo sapiens
  misc_RNA (1)...(19): siRNA sense strand
caagucugguuacauugaa

SEQ ID NO: 1099772 - RNA, 19 nt, Homo sapiens
  misc_RNA (1)...(19): siRNA sense strand
ucagaaaccagaauauuca

SEQ ID NO: 1099773 - RNA, 19 nt, Homo sapiens
  misc_RNA (1)...(19): siRNA sense strand
gaaccaugauaccaacuac

SEQ ID NO: 1099774 - RNA, 19 nt, Homo sapiens
  misc_RNA (1)...(19): siRNA sense strand
ggagugcgagcucuugaaa

SEQ ID NO: 1099775 - RNA, 19 nt, Homo sapiens
  misc_RNA (1)...(19): siRNA sense strand
gauaccaacuacagcuuuc

SEQ ID NO: 1099776 - RNA, 19 nt, Homo sapiens
  misc_RNA (1)...(19): siRNA sense strand
caacuacagcuuucagguu

SEQ ID NO: 1099777 - RNA, 19 nt, Homo sapiens
  misc_RNA (1)...(19): siRNA sense strand
aaaccaaggugaggacaga

SEQ ID NO: 1099778 - RNA, 19 nt, Homo sapiens
  misc_RNA (1)...(19): siRNA sense strand
uaucuucaauccagagaga

SEQ ID NO: 1099779 - RNA, 19 nt, Homo sapiens
  misc_RNA (1)...(19): siRNA sense strand
cuagaagaauauacggaaa

SEQ ID NO: 1099780 - RNA, 19 nt, Homo sapiens
  misc_RNA (1)...(19): siRNA sense strand
gcaagcauaagcugccaaa

SEQ ID NO: 1099781 - RNA, 19 nt, Homo sapiens
  misc_RNA (1)...(19): siRNA sense strand
caggaaaccuuaaaagaga

SEQ ID NO: 1099782 - RNA, 19 nt, Homo sapiens
  misc_RNA (1)...(19): siRNA sense strand
agagagaagugauaaacca

SEQ ID NO: 1099783 - RNA, 19 nt, Homo sapiens
  misc_RNA (1)...(19): siRNA sense strand
gcaagugauccuucaguuc

SEQ ID NO: 1099784 - RNA, 19 nt, Homo sapiens
  misc_RNA (1)...(19): siRNA sense strand
ugaagaaguggaccaagaa

SEQ ID NO: 1099785 - RNA, 19 nt, Homo sapiens
  misc_RNA (1)...(19): siRNA sense strand
cagcauauucugaaagaug

SEQ ID NO: 1099786 - RNA, 19 nt, Homo sapiens
  misc_RNA (1)...(19): siRNA sense strand
aaagugaacccauaugaag

SEQ ID NO: 1099787 - RNA, 19 nt, Homo sapiens
  misc_RNA (1)...(19): siRNA sense strand
caacaugaaaccuuaaacu

SEQ ID NO: 1099788 - RNA, 19 nt, Homo sapiens
  misc_RNA (1)...(19): siRNA sense strand
cgggaucgguggaggaaga

SEQ ID NO: 1099789 - RNA, 19 nt, Homo sapiens
  misc_RNA (1)...(19): siRNA sense strand
uaaaccaaaugcaagugau

SEQ ID NO: 1099790 - RNA, 19 nt, Homo sapiens
  misc_RNA (1)...(19): siRNA sense strand
gaagugauaaaccaaaugc

SEQ ID NO: 1099791 - RNA, 19 nt, Homo sapiens
  misc_RNA (1)...(19): siRNA sense strand
caaaggaaugugauaccaa

SEQ ID NO: 1099792 - RNA, 19 nt, Homo sapiens
  misc_RNA (1)...(19): siRNA sense strand
gacagacgagugccacaaa

SEQ ID NO: 1099793 - RNA, 19 nt, Homo sapiens
  misc_RNA (1)...(19): siRNA sense strand
uugaaaguguccagcauau

SEQ ID NO: 1099794 - RNA, 19 nt, Homo sapiens
  misc_RNA (1)...(19): siRNA sense strand
agaagauggcuuuaaagaa

SEQ ID NO: 1099795 - RNA, 19 nt, Homo sapiens
  misc_RNA (1)...(19): siRNA sense strand
augaagaaguggaccaaga

SEQ ID NO: 1099796 - RNA, 19 nt, Homo sapiens
  misc_RNA (1)...(19): siRNA sense strand
ccacccacauuucauggau

SEQ ID NO: 1099797 - RNA, 19 nt, Homo sapiens
  misc_RNA (1)...(19): siRNA sense strand
gaagacaucagagaaacca

SEQ ID NO: 1099798 - RNA, 19 nt, Homo sapiens
  misc_RNA (1)...(19): siRNA sense strand
gggcaagcucugugugauu

SEQ ID NO: 1099799 - RNA, 19 nt, Homo sapiens
  misc_RNA (1)...(19): siRNA sense strand
ggacagacgagugccacaa

SEQ ID NO: 1099800 - RNA, 19 nt, Homo sapiens
  misc_RNA (1)...(19): siRNA sense strand
gagagaagugauaaaccaa

SEQ ID NO: 1099801 - RNA, 19 nt, Homo sapiens
  misc_RNA (1)...(19): siRNA sense strand
cagguucaauguggcuuaa

SEQ ID NO: 1099802 - RNA, 19 nt, Homo sapiens
  misc_RNA (1)...(19): siRNA sense strand
uccagcauauucugaaaga

SEQ ID NO: 1099803 - RNA, 19 nt, Homo sapiens
  misc_RNA (1)...(19): siRNA sense strand
ggagaagauggcuuuaaag

SEQ ID NO: 1099804 - RNA, 19 nt, Homo sapiens
  misc_RNA (1)...(19): siRNA sense strand
agugcgagcucuugaaagu

SEQ ID NO: 1099805 - RNA, 19 nt, Homo sapiens
  misc_RNA (1)...(19): siRNA sense strand
cugguuacauugaaagugu

SEQ ID NO: 1099806 - RNA, 19 nt, Homo sapiens
  misc_RNA (1)...(19): siRNA sense strand
gugguggccuacaaagaug

SEQ ID NO: 1099807 - RNA, 19 nt, Homo sapiens
  misc_RNA (1)...(19): siRNA sense strand
gcaaguuguggcauacaug

SEQ ID NO: 1099808 - RNA, 19 nt, Homo sapiens
  misc_RNA (1)...(19): siRNA sense strand
ugacaacccacugcaaguu

SEQ ID NO: 1099809 - RNA, 19 nt, Homo sapiens
  misc_RNA (1)...(19): siRNA sense strand
ggacuguguggcugaguau

SEQ ID NO: 1099810 - RNA, 19 nt, Homo sapiens
  misc_RNA (1)...(19): siRNA sense strand
aaaugcaagugauccuuca

SEQ ID NO: 1099811 - RNA, 19 nt, Homo sapiens
  misc_RNA (1)...(19): siRNA sense strand
agcauaagcugccaaacca

SEQ ID NO: 1099812 - RNA, 19 nt, Homo sapiens
  misc_RNA (1)...(19): siRNA sense strand
gaauauucagaaaccagaa

SEQ ID NO: 1099813 - RNA, 19 nt, Homo sapiens
  misc_RNA (1)...(19): siRNA sense strand
agacaucagagaaaccaaa

SEQ ID NO: 1099814 - RNA, 19 nt, Homo sapiens
  misc_RNA (1)...(19): siRNA sense strand
ccacgaagccuuggaaagc

SEQ ID NO: 1099815 - RNA, 19 nt, Homo sapiens
  misc_RNA (1)...(19): siRNA sense strand
aaugugauaccaaguguga

SEQ ID NO: 1099816 - RNA, 19 nt, Homo sapiens
  misc_RNA (1)...(19): siRNA sense strand
ugcaagugauccuucaguu

SEQ ID NO: 1099817 - RNA, 19 nt, Homo sapiens
  misc_RNA (1)...(19): siRNA sense strand
cacugcaaguuguggcaua

SEQ ID NO: 1099818 - RNA, 19 nt, Homo sapiens
  misc_RNA (1)...(19): siRNA sense strand
gauuggaagacaucagaga

SEQ ID NO: 1099819 - RNA, 19 nt, Homo sapiens
  misc_RNA (1)...(19): siRNA sense strand
uggacuguguggcugagua

SEQ ID NO: 1099820 - RNA, 19 nt, Homo sapiens
  misc_RNA (1)...(19): siRNA sense strand
ggacccgugagcaagcaua

SEQ ID NO: 1099821 - RNA, 19 nt, Homo sapiens
  misc_RNA (1)...(19): siRNA sense strand
ucugugugauugauuggaa

SEQ ID NO: 1099822 - RNA, 19 nt, Homo sapiens
  misc_RNA (1)...(19): siRNA sense strand
ugaaccaugauaccaacua

SEQ ID NO: 1099823 - RNA, 19 nt, Homo sapiens
  misc_RNA (1)...(19): siRNA sense strand
cuacagcuuucagguucaa

SEQ ID NO: 1099824 - RNA, 19 nt, Homo sapiens
  misc_RNA (1)...(19): siRNA sense strand
caccugcccacccacauuu

SEQ ID NO: 1099825 - RNA, 19 nt, Homo sapiens
  misc_RNA (1)...(19): siRNA sense strand
ccagagagaagugauaaac

SEQ ID NO: 1099826 - RNA, 19 nt, Homo sapiens
  misc_RNA (1)...(19): siRNA sense strand
agagaagugauaaaccaaa

SEQ ID NO: 1099827 - RNA, 19 nt, Homo sapiens
  misc_RNA (1)...(19): siRNA sense strand
aagaauacacuucaaacgu

SEQ ID NO: 1099828 - RNA, 19 nt, Homo sapiens
  misc_RNA (1)...(19): siRNA sense strand
agaaccagaauauucagaa

SEQ ID NO: 1099829 - RNA, 19 nt, Homo sapiens
  misc_RNA (1)...(19): siRNA sense strand
caagcucugugugauugau

SEQ ID NO: 1099830 - RNA, 19 nt, Homo sapiens
  misc_RNA (1)...(19): siRNA sense strand
uguccagcauauucugaaa

SEQ ID NO: 1099831 - RNA, 19 nt, Homo sapiens
  misc_RNA (1)...(19): siRNA sense strand
cauugaaaguguccagcau

SEQ ID NO: 1099832 - RNA, 19 nt, Homo sapiens
  misc_RNA (1)...(19): siRNA sense strand
gguggaggaagaugcuuug

SEQ ID NO: 1099833 - RNA, 19 nt, Homo sapiens
  misc_RNA (1)...(19): siRNA sense strand
ugauaccaacuacagcuuu

SEQ ID NO: 1099834 - RNA, 19 nt, Homo sapiens
  misc_RNA (1)...(19): siRNA sense strand
uaggucugcuggacugugu

SEQ ID NO: 1099835 - RNA, 19 nt, Homo sapiens
  misc_RNA (1)...(19): siRNA sense strand
cagcucaggaguucaaagu

SEQ ID NO: 1099836 - RNA, 19 nt, Homo sapiens
  misc_RNA (1)...(19): siRNA sense strand
ugaaaguguccagcauauu

SEQ ID NO: 1099837 - RNA, 19 nt, Homo sapiens
  misc_RNA (1)...(19): siRNA sense strand
gauaaaccaaaugcaagug

SEQ ID NO: 1099838 - RNA, 19 nt, Homo sapiens
  misc_RNA (1)...(19): siRNA sense strand
gauccuucaguuccuuuga

SEQ ID NO: 1099839 - RNA, 19 nt, Homo sapiens
  misc_RNA (1)...(19): siRNA sense strand
ucagguucaauguggcuua

SEQ ID NO: 1099840 - RNA, 19 nt, Homo sapiens
  misc_RNA (1)...(19): siRNA sense strand
gugauugauuggaagacau

SEQ ID NO: 1099841 - RNA, 19 nt, Homo sapiens
  misc_RNA (1)...(19): siRNA sense strand
gacccgugagcaagcauaa

SEQ ID NO: 1099842 - RNA, 19 nt, Homo sapiens
  misc_RNA (1)...(19): siRNA sense strand
cacgaagccuuggaaagca

SEQ ID NO: 1099843 - RNA, 19 nt, Homo sapiens
  misc_RNA (1)...(19): siRNA sense strand
ugauaaaccaaaugcaagu

SEQ ID NO: 1099844 - RNA, 19 nt, Homo sapiens
  misc_RNA (1)...(19): siRNA sense strand
ucaccugcccacccacauu

SEQ ID NO: 1099845 - RNA, 19 nt, Homo sapiens
  misc_RNA (1)...(19): siRNA sense strand
uggaagacaucagagaaac

SEQ ID NO: 1099846 - RNA, 19 nt, Homo sapiens
  misc_RNA (1)...(19): siRNA sense strand
cagggcaagcucuguguga

SEQ ID NO: 1099847 - RNA, 19 nt, Homo sapiens
  misc_RNA (1)...(19): siRNA sense strand
cgaagccuuggaaagcaua

SEQ ID NO: 1099848 - RNA, 19 nt, Homo sapiens
  misc_RNA (1)...(19): siRNA sense strand
agugaacccauaugaagaa

SEQ ID NO: 1099849 - RNA, 19 nt, Homo sapiens
  misc_RNA (1)...(19): siRNA sense strand
ugaagagccugacgaauaa

SEQ ID NO: 1099850 - RNA, 19 nt, Homo sapiens
  misc_RNA (1)...(19): siRNA sense strand
ucagauuucuccaacaaua

SEQ ID NO: 1099851 - RNA, 19 nt, Homo sapiens
  misc_RNA (1)...(19): siRNA sense strand
cugaagagccugacgaaua

SEQ ID NO: 1099852 - RNA, 19 nt, Homo sapiens
  misc_RNA (1)...(19): siRNA sense strand
gcacaaggccagcuucugu

SEQ ID NO: 1099853 - RNA, 19 nt, Homo sapiens
  misc_RNA (1)...(19): siRNA sense strand
gcacagagagcuccuugga

SEQ ID NO: 1099854 - RNA, 19 nt, Homo sapiens
  misc_RNA (1)...(19): siRNA sense strand
cuacgcaugugccaacuuu

SEQ ID NO: 1099855 - RNA, 19 nt, Homo sapiens
  misc_RNA (1)...(19): siRNA sense strand
uaacaugggcuuucagaau

SEQ ID NO: 1099856 - RNA, 19 nt, Homo sapiens
  misc_RNA (1)...(19): siRNA sense strand
gaacagcgucucaggaaca

SEQ ID NO: 1099857 - RNA, 19 nt, Homo sapiens
  misc_RNA (1)...(19): siRNA sense strand
ccguggaggugaaguauga

SEQ ID NO: 1099858 - RNA, 19 nt, Homo sapiens
  misc_RNA (1)...(19): siRNA sense strand
ccaucuggcuggacaaugu

SEQ ID NO: 1099859 - RNA, 19 nt, Homo sapiens
  misc_RNA (1)...(19): siRNA sense strand
ccaaagacuggacgcgaua

SEQ ID NO: 1099860 - RNA, 19 nt, Homo sapiens
  misc_RNA (1)...(19): siRNA sense strand
gcaggagacggccuacuug

SEQ ID NO: 1099861 - RNA, 19 nt, Homo sapiens
  misc_RNA (1)...(19): siRNA sense strand
gggagcgugugcagugaaa

SEQ ID NO: 1099862 - RNA, 19 nt, Homo sapiens
  misc_RNA (1)...(19): siRNA sense strand
ggacuggcccuacggauac

SEQ ID NO: 1099863 - RNA, 19 nt, Homo sapiens
  misc_RNA (1)...(19): siRNA sense strand
cgugugugaugacaacuuu

SEQ ID NO: 1099864 - RNA, 19 nt, Homo sapiens
  misc_RNA (1)...(19): siRNA sense strand
gacaaagccacaacgcaaa

SEQ ID NO: 1099865 - RNA, 19 nt, Homo sapiens
  misc_RNA (1)...(19): siRNA sense strand
gaugacaacuuugcuaucc

SEQ ID NO: 1099866 - RNA, 19 nt, Homo sapiens
  misc_RNA (1)...(19): siRNA sense strand
ggguggauaucacagaugu

SEQ ID NO: 1099867 - RNA, 19 nt, Homo sapiens
  misc_RNA (1)...(19): siRNA sense strand
gaugaacgcccagcuagug

SEQ ID NO: 1099868 - RNA, 19 nt, Homo sapiens
  misc_RNA (1)...(19): siRNA sense strand
ggguggaagugcucaugaa

SEQ ID NO: 1099869 - RNA, 19 nt, Homo sapiens
  misc_RNA (1)...(19): siRNA sense strand
gaaagucugggaucugaag

SEQ ID NO: 1099870 - RNA, 19 nt, Homo sapiens
  misc_RNA (1)...(19): siRNA sense strand
gaaguggcagagucagauu

SEQ ID NO: 1099871 - RNA, 19 nt, Homo sapiens
  misc_RNA (1)...(19): siRNA sense strand
agucagauuucuccaacaa

SEQ ID NO: 1099872 - RNA, 19 nt, Homo sapiens
  misc_RNA (1)...(19): siRNA sense strand
caucguggcuaccuuucug

SEQ ID NO: 1099873 - RNA, 19 nt, Homo sapiens
  misc_RNA (1)...(19): siRNA sense strand
aacaugggcuuucagaauc

SEQ ID NO: 1099874 - RNA, 19 nt, Homo sapiens
  misc_RNA (1)...(19): siRNA sense strand
aggaaagucugggaucuga

SEQ ID NO: 1099875 - RNA, 19 nt, Homo sapiens
  misc_RNA (1)...(19): siRNA sense strand
ccacagcauugaggucuuc

SEQ ID NO: 1099876 - RNA, 19 nt, Homo sapiens
  misc_RNA (1)...(19): siRNA sense strand
gaagggucccagaaugguu

SEQ ID NO: 1099877 - RNA, 19 nt, Homo sapiens
  misc_RNA (1)...(19): siRNA sense strand
cagccacccucuuucuguu

SEQ ID NO: 1099878 - RNA, 19 nt, Homo sapiens
  misc_RNA (1)...(19): siRNA sense strand
gaacugccucuccaagucu

SEQ ID NO: 1099879 - RNA, 19 nt, Homo sapiens
  misc_RNA (1)...(19): siRNA sense strand
gaauucauacccagccaau

SEQ ID NO: 1099880 - RNA, 19 nt, Homo sapiens
  misc_RNA (1)...(19): siRNA sense strand
caggaacaaccucaucuga

SEQ ID NO: 1099881 - RNA, 19 nt, Homo sapiens
  misc_RNA (1)...(19): siRNA sense strand
agaacugccucuccaaguc

SEQ ID NO: 1099882 - RNA, 19 nt, Homo sapiens
  misc_RNA (1)...(19): siRNA sense strand
gagcaggaacagcgucuca

SEQ ID NO: 1099883 - RNA, 19 nt, Homo sapiens
  misc_RNA (1)...(19): siRNA sense strand
ggugaugaacgcccagcua

SEQ ID NO: 1099884 - RNA, 19 nt, Homo sapiens
  misc_RNA (1)...(19): siRNA sense strand
gagccguggaggugaagua

SEQ ID NO: 1099885 - RNA, 19 nt, Homo sapiens
  misc_RNA (1)...(19): siRNA sense strand
ugacgaauaagaacuccuu

SEQ ID NO: 1099886 - RNA, 19 nt, Homo sapiens
  misc_RNA (1)...(19): siRNA sense strand
ggcauuaccacagcauuga

SEQ ID NO: 1099887 - RNA, 19 nt, Homo sapiens
  misc_RNA (1)...(19): siRNA sense strand
gggucuggcugcacaacug

SEQ ID NO: 1099888 - RNA, 19 nt, Homo sapiens
  misc_RNA (1)...(19): siRNA sense strand
uggacaaugugcagugugu

SEQ ID NO: 1099889 - RNA, 19 nt, Homo sapiens
  misc_RNA (1)...(19): siRNA sense strand
uggacuggcccuacggaua

SEQ ID NO: 1099890 - RNA, 19 nt, Homo sapiens
  misc_RNA (1)...(19): siRNA sense strand
gugaugacaacuuugcuau

SEQ ID NO: 1099891 - RNA, 19 nt, Homo sapiens
  misc_RNA (1)...(19): siRNA sense strand
gauugccaguggguggaua

SEQ ID NO: 1099892 - RNA, 19 nt, Homo sapiens
  misc_RNA (1)...(19): siRNA sense strand
ggaagggucccagaauggu

SEQ ID NO: 1099893 - RNA, 19 nt, Homo sapiens
  misc_RNA (1)...(19): siRNA sense strand
ccacacagggaauucauac

SEQ ID NO: 1099894 - RNA, 19 nt, Homo sapiens
  misc_RNA (1)...(19): siRNA sense strand
cauccaugccuacaaggaa

SEQ ID NO: 1099895 - RNA, 19 nt, Homo sapiens
  misc_RNA (1)...(19): siRNA sense strand
cugaaacugucuccaaugc

SEQ ID NO: 1099896 - RNA, 19 nt, Homo sapiens
  misc_RNA (1)...(19): siRNA sense strand
cagugccgcugcaaguaug

SEQ ID NO: 1099897 - RNA, 19 nt, Homo sapiens
  misc_RNA (1)...(19): siRNA sense strand
ggacgcgauagcuggguuu

SEQ ID NO: 1099898 - RNA, 19 nt, Homo sapiens
  misc_RNA (1)...(19): siRNA sense strand
gcuggacaaugugcagugu

SEQ ID NO: 1099899 - RNA, 19 nt, Homo sapiens
  misc_RNA (1)...(19): siRNA sense strand
ggaaagucugggaucugaa

SEQ ID NO: 1099900 - RNA, 19 nt, Homo sapiens
  misc_RNA (1)...(19): siRNA sense strand
gcuggaccaugaacaacag

SEQ ID NO: 1099901 - RNA, 19 nt, Homo sapiens
  misc_RNA (1)...(19): siRNA sense strand
acaugggcuuucagaauca

SEQ ID NO: 1099902 - RNA, 19 nt, Homo sapiens
  misc_RNA (1)...(19): siRNA sense strand
aggaacagcgucucaggaa

SEQ ID NO: 1099903 - RNA, 19 nt, Homo sapiens
  misc_RNA (1)...(19): siRNA sense strand
cagauuucuccaacaauau

SEQ ID NO: 1099904 - RNA, 19 nt, Homo sapiens
  misc_RNA (1)...(19): siRNA sense strand
cuaccggcaugacauugau

SEQ ID NO: 1099905 - RNA, 19 nt, Homo sapiens
  misc_RNA (1)...(19): siRNA sense strand
gggcccacagugccaagua

SEQ ID NO: 1099906 - RNA, 19 nt, Homo sapiens
  misc_RNA (1)...(19): siRNA sense strand
caagucugcggaucacaug

SEQ ID NO: 1099907 - RNA, 19 nt, Homo sapiens
  misc_RNA (1)...(19): siRNA sense strand
guggguggauaucacagau

SEQ ID NO: 1099908 - RNA, 19 nt, Homo sapiens
  misc_RNA (1)...(19): siRNA sense strand
gccacacagggaauucaua

SEQ ID NO: 1099909 - RNA, 19 nt, Homo sapiens
  misc_RNA (1)...(19): siRNA sense strand
gcgcuucuccacacagauc

SEQ ID NO: 1099910 - RNA, 19 nt, Homo sapiens
  misc_RNA (1)...(19): siRNA sense strand
caacugccacacagggaau

SEQ ID NO: 1099911 - RNA, 19 nt, Homo sapiens
  misc_RNA (1)...(19): siRNA sense strand
gccagugccaagcagcaua

SEQ ID NO: 1099912 - RNA, 19 nt, Homo sapiens
  misc_RNA (1)...(19): siRNA sense strand
gaccuccucacucucaaug

SEQ ID NO: 1099913 - RNA, 19 nt, Homo sapiens
  misc_RNA (1)...(19): siRNA sense strand
acuacgaccuccucacucu

SEQ ID NO: 1099914 - RNA, 19 nt, Homo sapiens
  misc_RNA (1)...(19): siRNA sense strand
ccacuacgaccuccucacu

SEQ ID NO: 1099915 - RNA, 19 nt, Homo sapiens
  misc_RNA (1)...(19): siRNA sense strand
cccaggagguggugaugag

SEQ ID NO: 1099916 - RNA, 19 nt, Homo sapiens
  misc_RNA (1)...(19): siRNA sense strand
ucaggugcaaugucccuaa

SEQ ID NO: 1099917 - RNA, 19 nt, Homo sapiens
  misc_RNA (1)...(19): siRNA sense strand
ccagccacccucuuucugu

SEQ ID NO: 1099918 - RNA, 19 nt, Homo sapiens
  misc_RNA (1)...(19): siRNA sense strand
ccuaacaugggcuuucaga

SEQ ID NO: 1099919 - RNA, 19 nt, Homo sapiens
  misc_RNA (1)...(19): siRNA sense strand
gaacagaacuuccuuaaca

SEQ ID NO: 1099920 - RNA, 19 nt, Homo sapiens
  misc_RNA (1)...(19): siRNA sense strand
gcagagaccuuugacauua

SEQ ID NO: 1099921 - RNA, 19 nt, Homo sapiens
  misc_RNA (1)...(19): siRNA sense strand
gaagauugcugaacacauu

SEQ ID NO: 1099922 - RNA, 19 nt, Homo sapiens
  misc_RNA (1)...(19): siRNA sense strand
ggaaauaccauucaguuug

SEQ ID NO: 1099923 - RNA, 19 nt, Homo sapiens
  misc_RNA (1)...(19): siRNA sense strand
gcaauaaugcagaaguuua

SEQ ID NO: 1099924 - RNA, 19 nt, Homo sapiens
  misc_RNA (1)...(19): siRNA sense strand
aaacccagcuucagacuuu

SEQ ID NO: 1099925 - RNA, 19 nt, Homo sapiens
  misc_RNA (1)...(19): siRNA sense strand
gaacuuccuuaacaacaaa

SEQ ID NO: 1099926 - RNA, 19 nt, Homo sapiens
  misc_RNA (1)...(19): siRNA sense strand
gcacgacgcuuccacaagu

SEQ ID NO: 1099927 - RNA, 19 nt, Homo sapiens
  misc_RNA (1)...(19): siRNA sense strand
gaagaagcaucacaggaau

SEQ ID NO: 1099928 - RNA, 19 nt, Homo sapiens
  misc_RNA (1)...(19): siRNA sense strand
ggacagagagggcugguuu

SEQ ID NO: 1099929 - RNA, 19 nt, Homo sapiens
  misc_RNA (1)...(19): siRNA sense strand
gccaugaacuggacauuga

SEQ ID NO: 1099930 - RNA, 19 nt, Homo sapiens
  misc_RNA (1)...(19): siRNA sense strand
gcgggaggauuguaagaua

SEQ ID NO: 1099931 - RNA, 19 nt, Homo sapiens
  misc_RNA (1)...(19): siRNA sense strand
caagaaaugcugauauuga

SEQ ID NO: 1099932 - RNA, 19 nt, Homo sapiens
  misc_RNA (1)...(19): siRNA sense strand
gcagacaaauaaagaugaa

SEQ ID NO: 1099933 - RNA, 19 nt, Homo sapiens
  misc_RNA (1)...(19): siRNA sense strand
agaagaaugugaagcuuaa

SEQ ID NO: 1099934 - RNA, 19 nt, Homo sapiens
  misc_RNA (1)...(19): siRNA sense strand
ccugauggcuuugaaauuu

SEQ ID NO: 1099935 - RNA, 19 nt, Homo sapiens
  misc_RNA (1)...(19): siRNA sense strand
ggacuauuguggcaaaguu

SEQ ID NO: 1099936 - RNA, 19 nt, Homo sapiens
  misc_RNA (1)...(19): siRNA sense strand
gaaauaccauucaguuugc

SEQ ID NO: 1099937 - RNA, 19 nt, Homo sapiens
  misc_RNA (1)...(19): siRNA sense strand
cacauuaucuccaaagcua

SEQ ID NO: 1099938 - RNA, 19 nt, Homo sapiens
  misc_RNA (1)...(19): siRNA sense strand
ggauuaaguuggacagaga

SEQ ID NO: 1099939 - RNA, 19 nt, Homo sapiens
  misc_RNA (1)...(19): siRNA sense strand
gagaagaaugugaagcuua

SEQ ID NO: 1099940 - RNA, 19 nt, Homo sapiens
  misc_RNA (1)...(19): siRNA sense strand
ccaauuagauuccuguaca

SEQ ID NO: 1099941 - RNA, 19 nt, Homo sapiens
  misc_RNA (1)...(19): siRNA sense strand
ugaagacaaucacugcaua

SEQ ID NO: 1099942 - RNA, 19 nt, Homo sapiens
  misc_RNA (1)...(19): siRNA sense strand
gacaugcgcagacaaauaa

SEQ ID NO: 1099943 - RNA, 19 nt, Homo sapiens
  misc_RNA (1)...(19): siRNA sense strand
ggaggacuauuguggcaaa

SEQ ID NO: 1099944 - RNA, 19 nt, Homo sapiens
  misc_RNA (1)...(19): siRNA sense strand
aaacacaucuucuuuacca

SEQ ID NO: 1099945 - RNA, 19 nt, Homo sapiens
  misc_RNA (1)...(19): siRNA sense strand
acacagagccaauuagauu

SEQ ID NO: 1099946 - RNA, 19 nt, Homo sapiens
  misc_RNA (1)...(19): siRNA sense strand
uaacugcacauaaggauuu

SEQ ID NO: 1099947 - RNA, 19 nt, Homo sapiens
  misc_RNA (1)...(19): siRNA sense strand
ggaaauagaacagaacuuc

SEQ ID NO: 1099948 - RNA, 19 nt, Homo sapiens
  misc_RNA (1)...(19): siRNA sense strand
gaacuggacauugaugaaa

SEQ ID NO: 1099949 - RNA, 19 nt, Homo sapiens
  misc_RNA (1)...(19): siRNA sense strand
gacaaucacugcauauuuu

SEQ ID NO: 1099950 - RNA, 19 nt, Homo sapiens
  misc_RNA (1)...(19): siRNA sense strand
gaaaacacauuaucuccaa

SEQ ID NO: 1099951 - RNA, 19 nt, Homo sapiens
  misc_RNA (1)...(19): siRNA sense strand
caacagcuaagugaaguua

SEQ ID NO: 1099952 - RNA, 19 nt, Homo sapiens
  misc_RNA (1)...(19): siRNA sense strand
gcuagaaauuacagagaaa

SEQ ID NO: 1099953 - RNA, 19 nt, Homo sapiens
  misc_RNA (1)...(19): siRNA sense strand
gcauaggccuggaugaaag

SEQ ID NO: 1099954 - RNA, 19 nt, Homo sapiens
  misc_RNA (1)...(19): siRNA sense strand
uggcaaaguuggcaagaaa

SEQ ID NO: 1099955 - RNA, 19 nt, Homo sapiens
  misc_RNA (1)...(19): siRNA sense strand
uagaugaaauugugcaaga

SEQ ID NO: 1099956 - RNA, 19 nt, Homo sapiens
  misc_RNA (1)...(19): siRNA sense strand
gaucauagugaaauacuug

SEQ ID NO: 1099957 - RNA, 19 nt, Homo sapiens
  misc_RNA (1)...(19): siRNA sense strand
gaggaaauaccauucaguu

SEQ ID NO: 1099958 - RNA, 19 nt, Homo sapiens
  misc_RNA (1)...(19): siRNA sense strand
ggcagaaacugaagcugaa

SEQ ID NO: 1099959 - RNA, 19 nt, Homo sapiens
  misc_RNA (1)...(19): siRNA sense strand
uagcaacuguuccagauga

SEQ ID NO: 1099960 - RNA, 19 nt, Homo sapiens
  misc_RNA (1)...(19): siRNA sense strand
ugacagugguucccuucua

SEQ ID NO: 1099961 - RNA, 19 nt, Homo sapiens
  misc_RNA (1)...(19): siRNA sense strand
ugaaauagcugcuguuccu

SEQ ID NO: 1099962 - RNA, 19 nt, Homo sapiens
  misc_RNA (1)...(19): siRNA sense strand
gcugaacucaugagaagua

SEQ ID NO: 1099963 - RNA, 19 nt, Homo sapiens
  misc_RNA (1)...(19): siRNA sense strand
acaaugaugucuccugaug

SEQ ID NO: 1099964 - RNA, 19 nt, Homo sapiens
  misc_RNA (1)...(19): siRNA sense strand
ugggauagcagauaagaua

SEQ ID NO: 1099965 - RNA, 19 nt, Homo sapiens
  misc_RNA (1)...(19): siRNA sense strand
ugagagugauugccauuga

SEQ ID NO: 1099966 - RNA, 19 nt, Homo sapiens
  misc_RNA (1)...(19): siRNA sense strand
agaagaagaccaagaagaa

SEQ ID NO: 1099967 - RNA, 19 nt, Homo sapiens
  misc_RNA (1)...(19): siRNA sense strand
ggagcaacauuauagucaa

SEQ ID NO: 1099968 - RNA, 19 nt, Homo sapiens
  misc_RNA (1)...(19): siRNA sense strand
uaggauaacugcacauaag

SEQ ID NO: 1099969 - RNA, 19 nt, Homo sapiens
  misc_RNA (1)...(19): siRNA sense strand
ugaagaagcaucacaggaa

SEQ ID NO: 1099970 - RNA, 19 nt, Homo sapiens
  misc_RNA (1)...(19): siRNA sense strand
aaugauagcucugguacaa

SEQ ID NO: 1099971 - RNA, 19 nt, Homo sapiens
  misc_RNA (1)...(19): siRNA sense strand
gagaacaccagaacauaug

SEQ ID NO: 1099972 - RNA, 19 nt, Homo sapiens
  misc_RNA (1)...(19): siRNA sense strand
caagugugacguuguagua

SEQ ID NO: 1099973 - RNA, 19 nt, Homo sapiens
  misc_RNA (1)...(19): siRNA sense strand
gcuagcaacuguuccagau

SEQ ID NO: 1099974 - RNA, 19 nt, Homo sapiens
  misc_RNA (1)...(19): siRNA sense strand
ugaaagagacagcuugcua

SEQ ID NO: 1099975 - RNA, 19 nt, Homo sapiens
  misc_RNA (1)...(19): siRNA sense strand
ggucagguauuuagagaag

SEQ ID NO: 1099976 - RNA, 19 nt, Homo sapiens
  misc_RNA (1)...(19): siRNA sense strand
caaagugaaccacguaaug

SEQ ID NO: 1099977 - RNA, 19 nt, Homo sapiens
  misc_RNA (1)...(19): siRNA sense strand
uaacacagagccaauuaga

SEQ ID NO: 1099978 - RNA, 19 nt, Homo sapiens
  misc_RNA (1)...(19): siRNA sense strand
gagggcaaguggaaauaga

SEQ ID NO: 1099979 - RNA, 19 nt, Homo sapiens
  misc_RNA (1)...(19): siRNA sense strand
uccaagaaaugcugauauu

SEQ ID NO: 1099980 - RNA, 19 nt, Homo sapiens
  misc_RNA (1)...(19): siRNA sense strand
uaucgauccuguuaagauu

SEQ ID NO: 1099981 - RNA, 19 nt, Homo sapiens
  misc_RNA (1)...(19): siRNA sense strand
gucaagcacuaucuucuga

SEQ ID NO: 1099982 - RNA, 19 nt, Homo sapiens
  misc_RNA (1)...(19): siRNA sense strand
gaacucaugagaaguaugg

SEQ ID NO: 1099983 - RNA, 19 nt, Homo sapiens
  misc_RNA (1)...(19): siRNA sense strand
gaugagcaggauuguguua

SEQ ID NO: 1099984 - RNA, 19 nt, Homo sapiens
  misc_RNA (1)...(19): siRNA sense strand
agaaucacaugacagcaaa

SEQ ID NO: 1099985 - RNA, 19 nt, Homo sapiens
  misc_RNA (1)...(19): siRNA sense strand
gaagacaaucacugcauau

SEQ ID NO: 1099986 - RNA, 19 nt, Homo sapiens
  misc_RNA (1)...(19): siRNA sense strand
gaagaggagccaugaacug

SEQ ID NO: 1099987 - RNA, 19 nt, Homo sapiens
  misc_RNA (1)...(19): siRNA sense strand
aaacagaagcugaugacaa

SEQ ID NO: 1099988 - RNA, 19 nt, Homo sapiens
  misc_RNA (1)...(19): siRNA sense strand
caauugaacaguaugagaa

SEQ ID NO: 1099989 - RNA, 19 nt, Homo sapiens
  misc_RNA (1)...(19): siRNA sense strand
gaugucuccugauggcuuu

SEQ ID NO: 1099990 - RNA, 19 nt, Homo sapiens
  misc_RNA (1)...(19): siRNA sense strand
ccgagaagauugcugaaca

SEQ ID NO: 1099991 - RNA, 19 nt, Homo sapiens
  misc_RNA (1)...(19): siRNA sense strand
acaaacacaucuucuuuac

SEQ ID NO: 1099992 - RNA, 19 nt, Homo sapiens
  misc_RNA (1)...(19): siRNA sense strand
augugaagcuuaagucuaa

SEQ ID NO: 1099993 - RNA, 19 nt, Homo sapiens
  misc_RNA (1)...(19): siRNA sense strand
gauaaugauagcucuggua

SEQ ID NO: 1099994 - RNA, 19 nt, Homo sapiens
  misc_RNA (1)...(19): siRNA sense strand
gugaaauacuugauggaau

SEQ ID NO: 1099995 - RNA, 19 nt, Homo sapiens
  misc_RNA (1)...(19): siRNA sense strand
agacaaucacugcauauuu

SEQ ID NO: 1099996 - RNA, 19 nt, Homo sapiens
  misc_RNA (1)...(19): siRNA sense strand
ugcagaaguuuaugggaua

SEQ ID NO: 1099997 - RNA, 19 nt, Homo sapiens
  misc_RNA (1)...(19): siRNA sense strand
cuucaagugugacguugua

SEQ ID NO: 1099998 - RNA, 19 nt, Homo sapiens
  misc_RNA (1)...(19): siRNA sense strand
aacugaagcugaagugaaa

SEQ ID NO: 1099999 - RNA, 19 nt, Homo sapiens
  misc_RNA (1)...(19): siRNA sense strand
agacaugcgcagacaaaua

SEQ ID NO: 1100000 - RNA, 19 nt, Homo sapiens
  misc_RNA (1)...(19): siRNA sense strand
ucagguauuuagagaagaa

SEQ ID NO: 1100001 - RNA, 19 nt, Homo sapiens
  misc_RNA (1)...(19): siRNA sense strand
gguggaaucccaaauuuca

SEQ ID NO: 1100002 - RNA, 19 nt, Homo sapiens
  misc_RNA (1)...(19): siRNA sense strand
guaagauacugugccuuug

SEQ ID NO: 1100003 - RNA, 19 nt, Homo sapiens
  misc_RNA (1)...(19): siRNA sense strand
gagaugaaagugaggaaga

SEQ ID NO: 1100004 - RNA, 19 nt, Homo sapiens
  misc_RNA (1)...(19): siRNA sense strand
gaaccaaugaggaaagcaa

SEQ ID NO: 1100005 - RNA, 19 nt, Homo sapiens
  misc_RNA (1)...(19): siRNA sense strand
uaagugaaguuaguagcaa

SEQ ID NO: 1100006 - RNA, 19 nt, Homo sapiens
  misc_RNA (1)...(19): siRNA sense strand
gcaacauuauagucaacuu

SEQ ID NO: 1100007 - RNA, 19 nt, Homo sapiens
  misc_RNA (1)...(19): siRNA sense strand
uuuaaaggcugauguugug

SEQ ID NO: 1100008 - RNA, 19 nt, Homo sapiens
  misc_RNA (1)...(19): siRNA sense strand
gaauucagaggaaguaaca

SEQ ID NO: 1100009 - RNA, 19 nt, Homo sapiens
  misc_RNA (1)...(19): siRNA sense strand
gauaaggaucauagugaaa

SEQ ID NO: 1100010 - RNA, 19 nt, Homo sapiens
  misc_RNA (1)...(19): siRNA sense strand
gaagaggaaggugguuauu

SEQ ID NO: 1100011 - RNA, 19 nt, Homo sapiens
  misc_RNA (1)...(19): siRNA sense strand
cagauaagauagaguucau

SEQ ID NO: 1100012 - RNA, 19 nt, Homo sapiens
  misc_RNA (1)...(19): siRNA sense strand
ggagacuaauaauccagaa

SEQ ID NO: 1100013 - RNA, 19 nt, Homo sapiens
  misc_RNA (1)...(19): siRNA sense strand
gcaaacacaagcaaagaca

SEQ ID NO: 1100014 - RNA, 19 nt, Homo sapiens
  misc_RNA (1)...(19): siRNA sense strand
gagcaaacacaagcaaaga

SEQ ID NO: 1100015 - RNA, 19 nt, Homo sapiens
  misc_RNA (1)...(19): siRNA sense strand
caauuagauuccuguacaa

SEQ ID NO: 1100016 - RNA, 19 nt, Homo sapiens
  misc_RNA (1)...(19): siRNA sense strand
aacagaagcugaugacaag

SEQ ID NO: 1100017 - RNA, 19 nt, Homo sapiens
  misc_RNA (1)...(19): siRNA sense strand
ccacuucaauuugguagga

SEQ ID NO: 1100018 - RNA, 19 nt, Homo sapiens
  misc_RNA (1)...(19): siRNA sense strand
cagaugagcaggauugugu

SEQ ID NO: 1100019 - RNA, 19 nt, Homo sapiens
  misc_RNA (1)...(19): siRNA sense strand
gaaguuugcucuaaaggaa

SEQ ID NO: 1100020 - RNA, 19 nt, Homo sapiens
  misc_RNA (1)...(19): siRNA sense strand
caacaucucugaccugugu

SEQ ID NO: 1100021 - RNA, 19 nt, Homo sapiens
  misc_RNA (1)...(19): siRNA sense strand
ggaagaagauaucaguaga

SEQ ID NO: 1100022 - RNA, 19 nt, Homo sapiens
  misc_RNA (1)...(19): siRNA sense strand
ggaggaaguuugcucuaaa

SEQ ID NO: 1100023 - RNA, 19 nt, Homo sapiens
  misc_RNA (1)...(19): siRNA sense strand
ggaccaaccuacccuugaa

SEQ ID NO: 1100024 - RNA, 19 nt, Homo sapiens
  misc_RNA (1)...(19): siRNA sense strand
ggaagacccugcugugcuu

SEQ ID NO: 1100025 - RNA, 19 nt, Homo sapiens
  misc_RNA (1)...(19): siRNA sense strand
aaaugucucuucucccuua

SEQ ID NO: 1100026 - RNA, 19 nt, Homo sapiens
  misc_RNA (1)...(19): siRNA sense strand
gaucugaaccggaguuuau

SEQ ID NO: 1100027 - RNA, 19 nt, Homo sapiens
  misc_RNA (1)...(19): siRNA sense strand
gaaggacuuucaccgaaug

SEQ ID NO: 1100028 - RNA, 19 nt, Homo sapiens
  misc_RNA (1)...(19): siRNA sense strand
gaaccggaguuuauugaag

SEQ ID NO: 1100029 - RNA, 19 nt, Homo sapiens
  misc_RNA (1)...(19): siRNA sense strand
gcagccagauugcaaagau

SEQ ID NO: 1100030 - RNA, 19 nt, Homo sapiens
  misc_RNA (1)...(19): siRNA sense strand
gaagaagauaucaguagaa

SEQ ID NO: 1100031 - RNA, 19 nt, Homo sapiens
  misc_RNA (1)...(19): siRNA sense strand
caacuuccuuugucauuag

SEQ ID NO: 1100032 - RNA, 19 nt, Homo sapiens
  misc_RNA (1)...(19): siRNA sense strand
gaggaaguuugcucuaaag

SEQ ID NO: 1100033 - RNA, 19 nt, Homo sapiens
  misc_RNA (1)...(19): siRNA sense strand
ccaggaaguucaaaugucu

SEQ ID NO: 1100034 - RNA, 19 nt, Homo sapiens
  misc_RNA (1)...(19): siRNA sense strand
ggaauggaagccacuguga

SEQ ID NO: 1100035 - RNA, 19 nt, Homo sapiens
  misc_RNA (1)...(19): siRNA sense strand
cagccagauugcaaagaua

SEQ ID NO: 1100036 - RNA, 19 nt, Homo sapiens
  misc_RNA (1)...(19): siRNA sense strand
gaagauaucaguagaaaag

SEQ ID NO: 1100037 - RNA, 19 nt, Homo sapiens
  misc_RNA (1)...(19): siRNA sense strand
gaaugaaacagagucaaga

SEQ ID NO: 1100038 - RNA, 19 nt, Homo sapiens
  misc_RNA (1)...(19): siRNA sense strand
aaacccagcccucugauug

SEQ ID NO: 1100039 - RNA, 19 nt, Homo sapiens
  misc_RNA (1)...(19): siRNA sense strand
gcuuaucacugagguccua

SEQ ID NO: 1100040 - RNA, 19 nt, Homo sapiens
  misc_RNA (1)...(19): siRNA sense strand
ggaaguuugcucuaaagga

SEQ ID NO: 1100041 - RNA, 19 nt, Homo sapiens
  misc_RNA (1)...(19): siRNA sense strand
gaaacccagcccucugauu

SEQ ID NO: 1100042 - RNA, 19 nt, Homo sapiens
  misc_RNA (1)...(19): siRNA sense strand
cugcugugcuuaucacuga

SEQ ID NO: 1100043 - RNA, 19 nt, Homo sapiens
  misc_RNA (1)...(19): siRNA sense strand
cgaaguguaguaagaagaa

SEQ ID NO: 1100044 - RNA, 19 nt, Homo sapiens
  misc_RNA (1)...(19): siRNA sense strand
cagcagcuuugcagacaug

SEQ ID NO: 1100045 - RNA, 19 nt, Homo sapiens
  misc_RNA (1)...(19): siRNA sense strand
gaggaugacugcgucucuu

SEQ ID NO: 1100046 - RNA, 19 nt, Homo sapiens
  misc_RNA (1)...(19): siRNA sense strand
gaaguguaguaagaagaau

SEQ ID NO: 1100047 - RNA, 19 nt, Homo sapiens
  misc_RNA (1)...(19): siRNA sense strand
gcagcgcaaugccucuguu

SEQ ID NO: 1100048 - RNA, 19 nt, Homo sapiens
  misc_RNA (1)...(19): siRNA sense strand
gaccuguguuugagagaug

SEQ ID NO: 1100049 - RNA, 19 nt, Homo sapiens
  misc_RNA (1)...(19): siRNA sense strand
gcugacaucgccuggauug

SEQ ID NO: 1100050 - RNA, 19 nt, Homo sapiens
  misc_RNA (1)...(19): siRNA sense strand
aggaggaaguuugcucuaa

SEQ ID NO: 1100051 - RNA, 19 nt, Homo sapiens
  misc_RNA (1)...(19): siRNA sense strand
uugcagacaugauggguau

SEQ ID NO: 1100052 - RNA, 19 nt, Homo sapiens
  misc_RNA (1)...(19): siRNA sense strand
gcccuaagccgcacuacug

SEQ ID NO: 1100053 - RNA, 19 nt, Homo sapiens
  misc_RNA (1)...(19): siRNA sense strand
cggaugaagaggagacaua

SEQ ID NO: 1100054 - RNA, 19 nt, Homo sapiens
  misc_RNA (1)...(19): siRNA sense strand
ucauuccacucuacaacuu

SEQ ID NO: 1100055 - RNA, 19 nt, Homo sapiens
  misc_RNA (1)...(19): siRNA sense strand
uuucuuaucuccaggaagu

SEQ ID NO: 1100056 - RNA, 19 nt, Homo sapiens
  misc_RNA (1)...(19): siRNA sense strand
ggaugaagaggagacauau

SEQ ID NO: 1100057 - RNA, 19 nt, Homo sapiens
  misc_RNA (1)...(19): siRNA sense strand
gauaguggcagcugaugca

SEQ ID NO: 1100058 - RNA, 19 nt, Homo sapiens
  misc_RNA (1)...(19): siRNA sense strand
gcucuaaaggaagaagaua

SEQ ID NO: 1100059 - RNA, 19 nt, Homo sapiens
  misc_RNA (1)...(19): siRNA sense strand
caugauggguauccugaag

SEQ ID NO: 1100060 - RNA, 19 nt, Homo sapiens
  misc_RNA (1)...(19): siRNA sense strand
gccagcagcuuugcagaca

SEQ ID NO: 1100061 - RNA, 19 nt, Homo sapiens
  misc_RNA (1)...(19): siRNA sense strand
uugcaaaccagaacacaaa

SEQ ID NO: 1100062 - RNA, 19 nt, Homo sapiens
  misc_RNA (1)...(19): siRNA sense strand
gaagacccugcugugcuua

SEQ ID NO: 1100063 - RNA, 19 nt, Homo sapiens
  misc_RNA (1)...(19): siRNA sense strand
ugaaacagagucaagaucu

SEQ ID NO: 1100064 - RNA, 19 nt, Homo sapiens
  misc_RNA (1)...(19): siRNA sense strand
aaaggaagaagauaucagu

SEQ ID NO: 1100065 - RNA, 19 nt, Homo sapiens
  misc_RNA (1)...(19): siRNA sense strand
ggauugcugcggaugaaga

SEQ ID NO: 1100066 - RNA, 19 nt, Homo sapiens
  misc_RNA (1)...(19): siRNA sense strand
gcucgaaguguaguaagaa

SEQ ID NO: 1100067 - RNA, 19 nt, Homo sapiens
  misc_RNA (1)...(19): siRNA sense strand
guccaaggccagcagcuuu

SEQ ID NO: 1100068 - RNA, 19 nt, Homo sapiens
  misc_RNA (1)...(19): siRNA sense strand
gauccucauuccacucuac

SEQ ID NO: 1100069 - RNA, 19 nt, Homo sapiens
  misc_RNA (1)...(19): siRNA sense strand
ggaugacugcgucucuuug

SEQ ID NO: 1100070 - RNA, 19 nt, Homo sapiens
  misc_RNA (1)...(19): siRNA sense strand
gggaccaaccuacccuuga

SEQ ID NO: 1100071 - RNA, 19 nt, Homo sapiens
  misc_RNA (1)...(19): siRNA sense strand
cgaaugaaacagagucaag

SEQ ID NO: 1100072 - RNA, 19 nt, Homo sapiens
  misc_RNA (1)...(19): siRNA sense strand
ggaggucccugagcuucca

SEQ ID NO: 1100073 - RNA, 19 nt, Homo sapiens
  misc_RNA (1)...(19): siRNA sense strand
auuaacgccagauuucuua

SEQ ID NO: 1100074 - RNA, 19 nt, Homo sapiens
  misc_RNA (1)...(19): siRNA sense strand
gaugacugcgucucuuugu

SEQ ID NO: 1100075 - RNA, 19 nt, Homo sapiens
  misc_RNA (1)...(19): siRNA sense strand
gauuucuuaucuccaggaa

SEQ ID NO: 1100076 - RNA, 19 nt, Homo sapiens
  misc_RNA (1)...(19): siRNA sense strand
ccacuugcgcagccagauu

SEQ ID NO: 1100077 - RNA, 19 nt, Homo sapiens
  misc_RNA (1)...(19): siRNA sense strand
gcagcuucggcuucauuaa

SEQ ID NO: 1100078 - RNA, 19 nt, Homo sapiens
  misc_RNA (1)...(19): siRNA sense strand
gaugaagaggagacauaug

SEQ ID NO: 1100079 - RNA, 19 nt, Homo sapiens
  misc_RNA (1)...(19): siRNA sense strand
caagaucugaaccggaguu

SEQ ID NO: 1100080 - RNA, 19 nt, Homo sapiens
  misc_RNA (1)...(19): siRNA sense strand
cagcuuugcagacaugaug

SEQ ID NO: 1100081 - RNA, 19 nt, Homo sapiens
  misc_RNA (1)...(19): siRNA sense strand
ugaugcagcuucggcuuca

SEQ ID NO: 1100082 - RNA, 19 nt, Homo sapiens
  misc_RNA (1)...(19): siRNA sense strand
cauuaacgccagauuucuu

SEQ ID NO: 1100083 - RNA, 19 nt, Homo sapiens
  misc_RNA (1)...(19): siRNA sense strand
uggcugacaucgccuggau

SEQ ID NO: 1100084 - RNA, 19 nt, Homo sapiens
  misc_RNA (1)...(19): siRNA sense strand
uggaaacccagcccucuga

SEQ ID NO: 1100085 - RNA, 19 nt, Homo sapiens
  misc_RNA (1)...(19): siRNA sense strand
ugacaucaccgaggagaca

SEQ ID NO: 1100086 - RNA, 19 nt, Homo sapiens
  misc_RNA (1)...(19): siRNA sense strand
cuucauuaacgccagauuu

SEQ ID NO: 1100087 - RNA, 19 nt, Homo sapiens
  misc_RNA (1)...(19): siRNA sense strand
ucucugaccuguguuugag

SEQ ID NO: 1100088 - RNA, 19 nt, Homo sapiens
  misc_RNA (1)...(19): siRNA sense strand
ucuaaaggaagaagauauc

SEQ ID NO: 1100089 - RNA, 19 nt, Homo sapiens
  misc_RNA (1)...(19): siRNA sense strand
ccacugugaccaucccaau

SEQ ID NO: 1100090 - RNA, 19 nt, Homo sapiens
  misc_RNA (1)...(19): siRNA sense strand
aaagauaguggcagcugau

SEQ ID NO: 1100091 - RNA, 19 nt, Homo sapiens
  misc_RNA (1)...(19): siRNA sense strand
uccaggaaguucaaauguc

SEQ ID NO: 1100092 - RNA, 19 nt, Homo sapiens
  misc_RNA (1)...(19): siRNA sense strand
ggaccgagcucuuggaugu

SEQ ID NO: 1100093 - RNA, 19 nt, Homo sapiens
  misc_RNA (1)...(19): siRNA sense strand
gcucuuggauguucuugga

SEQ ID NO: 1100094 - RNA, 19 nt, Homo sapiens
  misc_RNA (1)...(19): siRNA sense strand
ucuccaaccugucccagua

SEQ ID NO: 1100095 - RNA, 19 nt, Homo sapiens
  misc_RNA (1)...(19): siRNA sense strand
gcgcggagaagaacagcua

SEQ ID NO: 1100096 - RNA, 19 nt, Homo sapiens
  misc_RNA (1)...(19): siRNA sense strand
uguacauccugcacaagua

SEQ ID NO: 1100097 - RNA, 19 nt, Homo sapiens
  misc_RNA (1)...(19): siRNA sense strand
caggcugacugagagauuu

SEQ ID NO: 1100098 - RNA, 19 nt, Homo sapiens
  misc_RNA (1)...(19): siRNA sense strand
gcguguacauccugcacaa

SEQ ID NO: 1100099 - RNA, 19 nt, Homo sapiens
  misc_RNA (1)...(19): siRNA sense strand
caaccugucccaguauuuc

SEQ ID NO: 1100100 - RNA, 19 nt, Homo sapiens
  misc_RNA (1)...(19): siRNA sense strand
acccugggcuucacuuuca

SEQ ID NO: 1100101 - RNA, 19 nt, Homo sapiens
  misc_RNA (1)...(19): siRNA sense strand
uggagcaccuggagaagca

SEQ ID NO: 1100102 - RNA, 19 nt, Homo sapiens
  misc_RNA (1)...(19): siRNA sense strand
gcugggaguggauauguuc

SEQ ID NO: 1100103 - RNA, 19 nt, Homo sapiens
  misc_RNA (1)...(19): siRNA sense strand
ggucagacugcucaacauc

SEQ ID NO: 1100104 - RNA, 19 nt, Homo sapiens
  misc_RNA (1)...(19): siRNA sense strand
uggagacacuguggaaagu

SEQ ID NO: 1100105 - RNA, 19 nt, Homo sapiens
  misc_RNA (1)...(19): siRNA sense strand
ccaaccugucccaguauuu

SEQ ID NO: 1100106 - RNA, 19 nt, Homo sapiens
  misc_RNA (1)...(19): siRNA sense strand
gagcgucagcagccuguuc

SEQ ID NO: 1100107 - RNA, 19 nt, Homo sapiens
  misc_RNA (1)...(19): siRNA sense strand
cgugguggccgucuacuuc

SEQ ID NO: 1100108 - RNA, 19 nt, Homo sapiens
  misc_RNA (1)...(19): siRNA sense strand
guggagacacuguggaaag

SEQ ID NO: 1100109 - RNA, 19 nt, Homo sapiens
  misc_RNA (1)...(19): siRNA sense strand
guggccgucuacuucauga

SEQ ID NO: 1100110 - RNA, 19 nt, Homo sapiens
  misc_RNA (1)...(19): siRNA sense strand
uggauguucuuggacuuga

SEQ ID NO: 1100111 - RNA, 19 nt, Homo sapiens
  misc_RNA (1)...(19): siRNA sense strand
caaaggcucuuguauauua

SEQ ID NO: 1100112 - RNA, 19 nt, Homo sapiens
  misc_RNA (1)...(19): siRNA sense strand
ggaaggaagugacauugua

SEQ ID NO: 1100113 - RNA, 19 nt, Homo sapiens
  misc_RNA (1)...(19): siRNA sense strand
uaagaaagcugcugacaug

SEQ ID NO: 1100114 - RNA, 19 nt, Homo sapiens
  misc_RNA (1)...(19): siRNA sense strand
gaaacaaacauucgagaua

SEQ ID NO: 1100115 - RNA, 19 nt, Homo sapiens
  misc_RNA (1)...(19): siRNA sense strand
ccagaaagcugcugaacaa

SEQ ID NO: 1100116 - RNA, 19 nt, Homo sapiens
  misc_RNA (1)...(19): siRNA sense strand
gaauacggcugccugauga

SEQ ID NO: 1100117 - RNA, 19 nt, Homo sapiens
  misc_RNA (1)...(19): siRNA sense strand
gaauuaagcucggagacua

SEQ ID NO: 1100118 - RNA, 19 nt, Homo sapiens
  misc_RNA (1)...(19): siRNA sense strand
ggcaaaggcucuuguauau

SEQ ID NO: 1100119 - RNA, 19 nt, Homo sapiens
  misc_RNA (1)...(19): siRNA sense strand
ggagaggaguucaaguuaa

SEQ ID NO: 1100120 - RNA, 19 nt, Homo sapiens
  misc_RNA (1)...(19): siRNA sense strand
cgagagagauguuugagaa

SEQ ID NO: 1100121 - RNA, 19 nt, Homo sapiens
  misc_RNA (1)...(19): siRNA sense strand
gcaccgauguagauuauga

SEQ ID NO: 1100122 - RNA, 19 nt, Homo sapiens
  misc_RNA (1)...(19): siRNA sense strand
gauaucagcuuucuagagu

SEQ ID NO: 1100123 - RNA, 19 nt, Homo sapiens
  misc_RNA (1)...(19): siRNA sense strand
gaagauaucagcuuucuag

SEQ ID NO: 1100124 - RNA, 19 nt, Homo sapiens
  misc_RNA (1)...(19): siRNA sense strand
aaacaggccuugaaguauu

SEQ ID NO: 1100125 - RNA, 19 nt, Homo sapiens
  misc_RNA (1)...(19): siRNA sense strand
caagagagauuauaaacag

SEQ ID NO: 1100126 - RNA, 19 nt, Homo sapiens
  misc_RNA (1)...(19): siRNA sense strand
gcaguggaguuguuuaaga

SEQ ID NO: 1100127 - RNA, 19 nt, Homo sapiens
  misc_RNA (1)...(19): siRNA sense strand
gagaggaguucaaguuaau

SEQ ID NO: 1100128 - RNA, 19 nt, Homo sapiens
  misc_RNA (1)...(19): siRNA sense strand
gaaagugucacagaagaua

SEQ ID NO: 1100129 - RNA, 19 nt, Homo sapiens
  misc_RNA (1)...(19): siRNA sense strand
guaucaaacuggaaugaaa

SEQ ID NO: 1100130 - RNA, 19 nt, Homo sapiens
  misc_RNA (1)...(19): siRNA sense strand
gagaaaggacugggcauua

SEQ ID NO: 1100131 - RNA, 19 nt, Homo sapiens
  misc_RNA (1)...(19): siRNA sense strand
ccaaucauguugcuaguga

SEQ ID NO: 1100132 - RNA, 19 nt, Homo sapiens
  misc_RNA (1)...(19): siRNA sense strand
gcagcaagcaugaaccaua

SEQ ID NO: 1100133 - RNA, 19 nt, Homo sapiens
  misc_RNA (1)...(19): siRNA sense strand
gagagaagcaagcauugua

SEQ ID NO: 1100134 - RNA, 19 nt, Homo sapiens
  misc_RNA (1)...(19): siRNA sense strand
gcucuuggcuuucuguaug

SEQ ID NO: 1100135 - RNA, 19 nt, Homo sapiens
  misc_RNA (1)...(19): siRNA sense strand
gcaggaagcagaaaugaug

SEQ ID NO: 1100136 - RNA, 19 nt, Homo sapiens
  misc_RNA (1)...(19): siRNA sense strand
agaagaggcugcuaagaga

SEQ ID NO: 1100137 - RNA, 19 nt, Homo sapiens
  misc_RNA (1)...(19): siRNA sense strand
agaaaggacugggcauuaa

SEQ ID NO: 1100138 - RNA, 19 nt, Homo sapiens
  misc_RNA (1)...(19): siRNA sense strand
gcauaucgguaucuccaaa

SEQ ID NO: 1100139 - RNA, 19 nt, Homo sapiens
  misc_RNA (1)...(19): siRNA sense strand
gagcuuugcuacauuggaa

SEQ ID NO: 1100140 - RNA, 19 nt, Homo sapiens
  misc_RNA (1)...(19): siRNA sense strand
aguaguugcuggucaaaua

SEQ ID NO: 1100141 - RNA, 19 nt, Homo sapiens
  misc_RNA (1)...(19): siRNA sense strand
gaaaggacugggcauuaaa

SEQ ID NO: 1100142 - RNA, 19 nt, Homo sapiens
  misc_RNA (1)...(19): siRNA sense strand
ggaauggccuaccucuaug

SEQ ID NO: 1100143 - RNA, 19 nt, Homo sapiens
  misc_RNA (1)...(19): siRNA sense strand
gggaaagugucacagaaga

SEQ ID NO: 1100144 - RNA, 19 nt, Homo sapiens
  misc_RNA (1)...(19): siRNA sense strand
uaaggaguaugaugaaugu

SEQ ID NO: 1100145 - RNA, 19 nt, Homo sapiens
  misc_RNA (1)...(19): siRNA sense strand
gaggaguucaaguuaauua

SEQ ID NO: 1100146 - RNA, 19 nt, Homo sapiens
  misc_RNA (1)...(19): siRNA sense strand
agacagcucuccacuacuu

SEQ ID NO: 1100147 - RNA, 19 nt, Homo sapiens
  misc_RNA (1)...(19): siRNA sense strand
ccaaagcccuggagagagu

SEQ ID NO: 1100148 - RNA, 19 nt, Homo sapiens
  misc_RNA (1)...(19): siRNA sense strand
gggagaggaguucaaguua

SEQ ID NO: 1100149 - RNA, 19 nt, Homo sapiens
  misc_RNA (1)...(19): siRNA sense strand
gcuagaagaagauuugauu

SEQ ID NO: 1100150 - RNA, 19 nt, Homo sapiens
  misc_RNA (1)...(19): siRNA sense strand
cacagaagauaucagcuuu

SEQ ID NO: 1100151 - RNA, 19 nt, Homo sapiens
  misc_RNA (1)...(19): siRNA sense strand
gaucuagcccuuaaguauu

SEQ ID NO: 1100152 - RNA, 19 nt, Homo sapiens
  misc_RNA (1)...(19): siRNA sense strand
ggacagagugggcuuggaa

SEQ ID NO: 1100153 - RNA, 19 nt, Homo sapiens
  misc_RNA (1)...(19): siRNA sense strand
gagagcauuugacuacuuc

SEQ ID NO: 1100154 - RNA, 19 nt, Homo sapiens
  misc_RNA (1)...(19): siRNA sense strand
uaggugagaaugaaacuua

SEQ ID NO: 1100155 - RNA, 19 nt, Homo sapiens
  misc_RNA (1)...(19): siRNA sense strand
gcucuccacuacuuuaaga

SEQ ID NO: 1100156 - RNA, 19 nt, Homo sapiens
  misc_RNA (1)...(19): siRNA sense strand
ccagagcuuugcuacauug

SEQ ID NO: 1100157 - RNA, 19 nt, Homo sapiens
  misc_RNA (1)...(19): siRNA sense strand
gcauuggagucaagagaga

SEQ ID NO: 1100158 - RNA, 19 nt, Homo sapiens
  misc_RNA (1)...(19): siRNA sense strand
ggugauuacuugccacaga

SEQ ID NO: 1100159 - RNA, 19 nt, Homo sapiens
  misc_RNA (1)...(19): siRNA sense strand
gcauuaaacaggauauuca

SEQ ID NO: 1100160 - RNA, 19 nt, Homo sapiens
  misc_RNA (1)...(19): siRNA sense strand
cgauguagauuaugaaacu

SEQ ID NO: 1100161 - RNA, 19 nt, Homo sapiens
  misc_RNA (1)...(19): siRNA sense strand
gcuaugaaguggcacaaag

SEQ ID NO: 1100162 - RNA, 19 nt, Homo sapiens
  misc_RNA (1)...(19): siRNA sense strand
auaaacaggccuugaagua

SEQ ID NO: 1100163 - RNA, 19 nt, Homo sapiens
  misc_RNA (1)...(19): siRNA sense strand
ucuaauagcccacaugguu

SEQ ID NO: 1100164 - RNA, 19 nt, Homo sapiens
  misc_RNA (1)...(19): siRNA sense strand
gauucaauauuaccaguuc

SEQ ID NO: 1100165 - RNA, 19 nt, Homo sapiens
  misc_RNA (1)...(19): siRNA sense strand
ugggaacagucauagcuua

SEQ ID NO: 1100166 - RNA, 19 nt, Homo sapiens
  misc_RNA (1)...(19): siRNA sense strand
gcuauacuguggcuagaau

SEQ ID NO: 1100167 - RNA, 19 nt, Homo sapiens
  misc_RNA (1)...(19): siRNA sense strand
aaacuuaucccagagcuuu

SEQ ID NO: 1100168 - RNA, 19 nt, Homo sapiens
  misc_RNA (1)...(19): siRNA sense strand
ggaguaugaugaauguaca

SEQ ID NO: 1100169 - RNA, 19 nt, Homo sapiens
  misc_RNA (1)...(19): siRNA sense strand
gaacagucauagcuuacag

SEQ ID NO: 1100170 - RNA, 19 nt, Homo sapiens
  misc_RNA (1)...(19): siRNA sense strand
gcuauaaagauggcgauua

SEQ ID NO: 1100171 - RNA, 19 nt, Homo sapiens
  misc_RNA (1)...(19): siRNA sense strand
caguggaguuguuuaagaa

SEQ ID NO: 1100172 - RNA, 19 nt, Homo sapiens
  misc_RNA (1)...(19): siRNA sense strand
gauaaggaguaugaugaau

SEQ ID NO: 1100173 - RNA, 19 nt, Homo sapiens
  misc_RNA (1)...(19): siRNA sense strand
gugcacaagcuauguuuaa

SEQ ID NO: 1100174 - RNA, 19 nt, Homo sapiens
  misc_RNA (1)...(19): siRNA sense strand
uuacaaugcugcagugauc

SEQ ID NO: 1100175 - RNA, 19 nt, Homo sapiens
  misc_RNA (1)...(19): siRNA sense strand
uaucuuggcuuucuauaac

SEQ ID NO: 1100176 - RNA, 19 nt, Homo sapiens
  misc_RNA (1)...(19): siRNA sense strand
gcuaacaggaggcucagua

SEQ ID NO: 1100177 - RNA, 19 nt, Homo sapiens
  misc_RNA (1)...(19): siRNA sense strand
gaguagaacagaaucauca

SEQ ID NO: 1100178 - RNA, 19 nt, Homo sapiens
  misc_RNA (1)...(19): siRNA sense strand
caacacagugcacaagcua

SEQ ID NO: 1100179 - RNA, 19 nt, Homo sapiens
  misc_RNA (1)...(19): siRNA sense strand
gcucggagacuaccauuuc

SEQ ID NO: 1100180 - RNA, 19 nt, Homo sapiens
  misc_RNA (1)...(19): siRNA sense strand
cuauaaagauggcgauuac

SEQ ID NO: 1100181 - RNA, 19 nt, Homo sapiens
  misc_RNA (1)...(19): siRNA sense strand
ggaguuguuuaagaaugua

SEQ ID NO: 1100182 - RNA, 19 nt, Homo sapiens
  misc_RNA (1)...(19): siRNA sense strand
uaaccuagcucagaugcau

SEQ ID NO: 1100183 - RNA, 19 nt, Homo sapiens
  misc_RNA (1)...(19): siRNA sense strand
acagacugcucuuggcuuu

SEQ ID NO: 1100184 - RNA, 19 nt, Homo sapiens
  misc_RNA (1)...(19): siRNA sense strand
gaccugagugggaccuuua

SEQ ID NO: 1100185 - RNA, 19 nt, Homo sapiens
  misc_RNA (1)...(19): siRNA sense strand
ggaccugagugggaccuuu

SEQ ID NO: 1100186 - RNA, 19 nt, Homo sapiens
  misc_RNA (1)...(19): siRNA sense strand
cagcccagaugcacaaguu

SEQ ID NO: 1100187 - RNA, 19 nt, Homo sapiens
  misc_RNA (1)...(19): siRNA sense strand
uaaacaggauauucaccuu

SEQ ID NO: 1100188 - RNA, 19 nt, Homo sapiens
  misc_RNA (1)...(19): siRNA sense strand
ugggauauaugcaugagaa

SEQ ID NO: 1100189 - RNA, 19 nt, Homo sapiens
  misc_RNA (1)...(19): siRNA sense strand
aaucugcccugacucacua

SEQ ID NO: 1100190 - RNA, 19 nt, Homo sapiens
  misc_RNA (1)...(19): siRNA sense strand
gcaaaggcucuuguauauu

SEQ ID NO: 1100191 - RNA, 19 nt, Homo sapiens
  misc_RNA (1)...(19): siRNA sense strand
uagauaaggaguaugauga

SEQ ID NO: 1100192 - RNA, 19 nt, Homo sapiens
  misc_RNA (1)...(19): siRNA sense strand
cacaagcuauguuuaaucu

SEQ ID NO: 1100193 - RNA, 19 nt, Homo sapiens
  misc_RNA (1)...(19): siRNA sense strand
gcacaagcuauguuuaauc

SEQ ID NO: 1100194 - RNA, 19 nt, Homo sapiens
  misc_RNA (1)...(19): siRNA sense strand
gugauuacuugccacagaa

SEQ ID NO: 1100195 - RNA, 19 nt, Homo sapiens
  misc_RNA (1)...(19): siRNA sense strand
gaaugaaaauccuuaaugg

SEQ ID NO: 1100196 - RNA, 19 nt, Homo sapiens
  misc_RNA (1)...(19): siRNA sense strand
aggcaaaggcucuuguaua

SEQ ID NO: 1100197 - RNA, 19 nt, Homo sapiens
  misc_RNA (1)...(19): siRNA sense strand
ggaaacaaacauucgagau

SEQ ID NO: 1100198 - RNA, 19 nt, Homo sapiens
  misc_RNA (1)...(19): siRNA sense strand
guaaaggaccauacuacug

SEQ ID NO: 1100199 - RNA, 19 nt, Homo sapiens
  misc_RNA (1)...(19): siRNA sense strand
gacauuguaccucagagua

SEQ ID NO: 1100200 - RNA, 19 nt, Homo sapiens
  misc_RNA (1)...(19): siRNA sense strand
aaacaaggacuaugaagag

SEQ ID NO: 1100201 - RNA, 19 nt, Homo sapiens
  misc_RNA (1)...(19): siRNA sense strand
caaugcagccuuuauucuu

SEQ ID NO: 1100202 - RNA, 19 nt, Homo sapiens
  misc_RNA (1)...(19): siRNA sense strand
ucagggaggccauaucuug

SEQ ID NO: 1100203 - RNA, 19 nt, Homo sapiens
  misc_RNA (1)...(19): siRNA sense strand
gaagaagaggcugcuaaga

SEQ ID NO: 1100204 - RNA, 19 nt, Homo sapiens
  misc_RNA (1)...(19): siRNA sense strand
cagcaagcaugaaccauac

SEQ ID NO: 1100205 - RNA, 19 nt, Homo sapiens
  misc_RNA (1)...(19): siRNA sense strand
gcagcagccaccacaguaa

SEQ ID NO: 1100206 - RNA, 19 nt, Homo sapiens
  misc_RNA (1)...(19): siRNA sense strand
gagucaagagagauuauaa

SEQ ID NO: 1100207 - RNA, 19 nt, Homo sapiens
  misc_RNA (1)...(19): siRNA sense strand
ggaguucaaguuaauuaug

SEQ ID NO: 1100208 - RNA, 19 nt, Homo sapiens
  misc_RNA (1)...(19): siRNA sense strand
aaagauguauucggaagga

SEQ ID NO: 1100209 - RNA, 19 nt, Homo sapiens
  misc_RNA (1)...(19): siRNA sense strand
ucagagagcauuugacuac

SEQ ID NO: 1100210 - RNA, 19 nt, Homo sapiens
  misc_RNA (1)...(19): siRNA sense strand
guggaaugcuagaagaaga

SEQ ID NO: 1100211 - RNA, 19 nt, Homo sapiens
  misc_RNA (1)...(19): siRNA sense strand
ccacagagcuuaccucaua

SEQ ID NO: 1100212 - RNA, 19 nt, Homo sapiens
  misc_RNA (1)...(19): siRNA sense strand
gaaguuagaccaccauuua

SEQ ID NO: 1100213 - RNA, 19 nt, Homo sapiens
  misc_RNA (1)...(19): siRNA sense strand
caacuuagccagcgcaaua

SEQ ID NO: 1100214 - RNA, 19 nt, Homo sapiens
  misc_RNA (1)...(19): siRNA sense strand
gcagcaaguuaguggauua

SEQ ID NO: 1100215 - RNA, 19 nt, Homo sapiens
  misc_RNA (1)...(19): siRNA sense strand
ugacagagauuacgaagau

SEQ ID NO: 1100216 - RNA, 19 nt, Homo sapiens
  misc_RNA (1)...(19): siRNA sense strand
uccaagaccuccuuaauaa

SEQ ID NO: 1100217 - RNA, 19 nt, Homo sapiens
  misc_RNA (1)...(19): siRNA sense strand
gguaacccuucccuuauua

SEQ ID NO: 1100218 - RNA, 19 nt, Homo sapiens
  misc_RNA (1)...(19): siRNA sense strand
uuacgaagaugaaccagua

SEQ ID NO: 1100219 - RNA, 19 nt, Homo sapiens
  misc_RNA (1)...(19): siRNA sense strand
ccacaugccucuaccaaug

SEQ ID NO: 1100220 - RNA, 19 nt, Homo sapiens
  misc_RNA (1)...(19): siRNA sense strand
ucacacgaauguuugcuua

SEQ ID NO: 1100221 - RNA, 19 nt, Homo sapiens
  misc_RNA (1)...(19): siRNA sense strand
caagaggaaugacaaacaa

SEQ ID NO: 1100222 - RNA, 19 nt, Homo sapiens
  misc_RNA (1)...(19): siRNA sense strand
gacaguggaugaaguagaa

SEQ ID NO: 1100223 - RNA, 19 nt, Homo sapiens
  misc_RNA (1)...(19): siRNA sense strand
caacagcagcagcaaguua

SEQ ID NO: 1100224 - RNA, 19 nt, Homo sapiens
  misc_RNA (1)...(19): siRNA sense strand
gaugacaccucaaguuauc

SEQ ID NO: 1100225 - RNA, 19 nt, Homo sapiens
  misc_RNA (1)...(19): siRNA sense strand
cagcagauauugcgcagaa

SEQ ID NO: 1100226 - RNA, 19 nt, Homo sapiens
  misc_RNA (1)...(19): siRNA sense strand
uaaaacaucucaacaguga

SEQ ID NO: 1100227 - RNA, 19 nt, Homo sapiens
  misc_RNA (1)...(19): siRNA sense strand
gcagugcgucauaaucuua

SEQ ID NO: 1100228 - RNA, 19 nt, Homo sapiens
  misc_RNA (1)...(19): siRNA sense strand
uauaagaacgcagaaguua

SEQ ID NO: 1100229 - RNA, 19 nt, Homo sapiens
  misc_RNA (1)...(19): siRNA sense strand
gaagugacaagugcucaua

SEQ ID NO: 1100230 - RNA, 19 nt, Homo sapiens
  misc_RNA (1)...(19): siRNA sense strand
caagaccuccuuaauaaug

SEQ ID NO: 1100231 - RNA, 19 nt, Homo sapiens
  misc_RNA (1)...(19): siRNA sense strand
gaaaagcagcuaacacuaa

SEQ ID NO: 1100232 - RNA, 19 nt, Homo sapiens
  misc_RNA (1)...(19): siRNA sense strand
gcagcagcuucaagaguuu

SEQ ID NO: 1100233 - RNA, 19 nt, Homo sapiens
  misc_RNA (1)...(19): siRNA sense strand
gcaacaaucacagcaguuu

SEQ ID NO: 1100234 - RNA, 19 nt, Homo sapiens
  misc_RNA (1)...(19): siRNA sense strand
gccaaggccuucugacaau

SEQ ID NO: 1100235 - RNA, 19 nt, Homo sapiens
  misc_RNA (1)...(19): siRNA sense strand
uaagaacgcagaaguuaga

SEQ ID NO: 1100236 - RNA, 19 nt, Homo sapiens
  misc_RNA (1)...(19): siRNA sense strand
gaagcagugugcgaagauu

SEQ ID NO: 1100237 - RNA, 19 nt, Homo sapiens
  misc_RNA (1)...(19): siRNA sense strand
cagcagcucuggaaagaag

SEQ ID NO: 1100238 - RNA, 19 nt, Homo sapiens
  misc_RNA (1)...(19): siRNA sense strand
gcaaguuaguggauuaaaa

SEQ ID NO: 1100239 - RNA, 19 nt, Homo sapiens
  misc_RNA (1)...(19): siRNA sense strand
gcccuugaaucuaguauca

SEQ ID NO: 1100240 - RNA, 19 nt, Homo sapiens
  misc_RNA (1)...(19): siRNA sense strand
ccucagcccuugaaucuag

SEQ ID NO: 1100241 - RNA, 19 nt, Homo sapiens
  misc_RNA (1)...(19): siRNA sense strand
gaagaaaccacaggcaaca

SEQ ID NO: 1100242 - RNA, 19 nt, Homo sapiens
  misc_RNA (1)...(19): siRNA sense strand
aggcagaucuccuaugcaa

SEQ ID NO: 1100243 - RNA, 19 nt, Homo sapiens
  misc_RNA (1)...(19): siRNA sense strand
gcucaaggcaugauuccaa

SEQ ID NO: 1100244 - RNA, 19 nt, Homo sapiens
  misc_RNA (1)...(19): siRNA sense strand
gcaaguggccaggcuguga

SEQ ID NO: 1100245 - RNA, 19 nt, Homo sapiens
  misc_RNA (1)...(19): siRNA sense strand
agaaugcagugcgucauaa

SEQ ID NO: 1100246 - RNA, 19 nt, Homo sapiens
  misc_RNA (1)...(19): siRNA sense strand
gaucugaccacgacaugug

SEQ ID NO: 1100247 - RNA, 19 nt, Homo sapiens
  misc_RNA (1)...(19): siRNA sense strand
cagcuaacacuaaaugaga

SEQ ID NO: 1100248 - RNA, 19 nt, Homo sapiens
  misc_RNA (1)...(19): siRNA sense strand
ggacaugguguaugcaagu

SEQ ID NO: 1100249 - RNA, 19 nt, Homo sapiens
  misc_RNA (1)...(19): siRNA sense strand
ggacaguggaugaaguaga

SEQ ID NO: 1100250 - RNA, 19 nt, Homo sapiens
  misc_RNA (1)...(19): siRNA sense strand
gagcaugcgcuggacgaua

SEQ ID NO: 1100251 - RNA, 19 nt, Homo sapiens
  misc_RNA (1)...(19): siRNA sense strand
ccaggcagaucuccuaugc

SEQ ID NO: 1100252 - RNA, 19 nt, Homo sapiens
  misc_RNA (1)...(19): siRNA sense strand
uauaacugguucacacgaa

SEQ ID NO: 1100253 - RNA, 19 nt, Homo sapiens
  misc_RNA (1)...(19): siRNA sense strand
aaucuaguaucaaguguca

SEQ ID NO: 1100254 - RNA, 19 nt, Homo sapiens
  misc_RNA (1)...(19): siRNA sense strand
ugacccaccugcaugugaa

SEQ ID NO: 1100255 - RNA, 19 nt, Homo sapiens
  misc_RNA (1)...(19): siRNA sense strand
gcgcuggacgauagaagua

SEQ ID NO: 1100256 - RNA, 19 nt, Homo sapiens
  misc_RNA (1)...(19): siRNA sense strand
gcagcaaccacuuacuaga

SEQ ID NO: 1100257 - RNA, 19 nt, Homo sapiens
  misc_RNA (1)...(19): siRNA sense strand
ugguaacccuucccuuauu

SEQ ID NO: 1100258 - RNA, 19 nt, Homo sapiens
  misc_RNA (1)...(19): siRNA sense strand
gucauaaucuuagucuuca

SEQ ID NO: 1100259 - RNA, 19 nt, Homo sapiens
  misc_RNA (1)...(19): siRNA sense strand
aaaagcagcuaacacuaaa

SEQ ID NO: 1100260 - RNA, 19 nt, Homo sapiens
  misc_RNA (1)...(19): siRNA sense strand
ccaaggccuucugacaauu

SEQ ID NO: 1100261 - RNA, 19 nt, Homo sapiens
  misc_RNA (1)...(19): siRNA sense strand
caaccacaguccagauuuu

SEQ ID NO: 1100262 - RNA, 19 nt, Homo sapiens
  misc_RNA (1)...(19): siRNA sense strand
uuccaagaccuccuuaaua

SEQ ID NO: 1100263 - RNA, 19 nt, Homo sapiens
  misc_RNA (1)...(19): siRNA sense strand
ccaagaggaaugacaaaca

SEQ ID NO: 1100264 - RNA, 19 nt, Homo sapiens
  misc_RNA (1)...(19): siRNA sense strand
agaccaccauuuacauaug

SEQ ID NO: 1100265 - RNA, 19 nt, Homo sapiens
  misc_RNA (1)...(19): siRNA sense strand
agugguaacccuucccuua

SEQ ID NO: 1100266 - RNA, 19 nt, Homo sapiens
  misc_RNA (1)...(19): siRNA sense strand
gacaacagccaaccacagu

SEQ ID NO: 1100267 - RNA, 19 nt, Homo sapiens
  misc_RNA (1)...(19): siRNA sense strand
agcagcaccuccugucuuu

SEQ ID NO: 1100268 - RNA, 19 nt, Homo sapiens
  misc_RNA (1)...(19): siRNA sense strand
uuagaccaccauuuacaua

SEQ ID NO: 1100269 - RNA, 19 nt, Homo sapiens
  misc_RNA (1)...(19): siRNA sense strand
gaagucuacagaacccaaa

SEQ ID NO: 1100270 - RNA, 19 nt, Homo sapiens
  misc_RNA (1)...(19): siRNA sense strand
agacaaagaacgccugcaa

SEQ ID NO: 1100271 - RNA, 19 nt, Homo sapiens
  misc_RNA (1)...(19): siRNA sense strand
augaugacaccucaaguua

SEQ ID NO: 1100272 - RNA, 19 nt, Homo sapiens
  misc_RNA (1)...(19): siRNA sense strand
ggaugaaguagaauuccaa

SEQ ID NO: 1100273 - RNA, 19 nt, Homo sapiens
  misc_RNA (1)...(19): siRNA sense strand
aauacaacgugcccauuuc

SEQ ID NO: 1100274 - RNA, 19 nt, Homo sapiens
  misc_RNA (1)...(19): siRNA sense strand
aagaccuccuuaauaauga

SEQ ID NO: 1100275 - RNA, 19 nt, Homo sapiens
  misc_RNA (1)...(19): siRNA sense strand
gaaaccacaggcaacaauc

SEQ ID NO: 1100276 - RNA, 19 nt, Homo sapiens
  misc_RNA (1)...(19): siRNA sense strand
agcagcagcuucaagaguu

SEQ ID NO: 1100277 - RNA, 19 nt, Homo sapiens
  misc_RNA (1)...(19): siRNA sense strand
cggcagcaaccacuuacua

SEQ ID NO: 1100278 - RNA, 19 nt, Homo sapiens
  misc_RNA (1)...(19): siRNA sense strand
gcaauggagcauaccaaca

SEQ ID NO: 1100279 - RNA, 19 nt, Homo sapiens
  misc_RNA (1)...(19): siRNA sense strand
gaugaaguagaauuccaaa

SEQ ID NO: 1100280 - RNA, 19 nt, Homo sapiens
  misc_RNA (1)...(19): siRNA sense strand
cgucauaaucuuagucuuc

SEQ ID NO: 1100281 - RNA, 19 nt, Homo sapiens
  misc_RNA (1)...(19): siRNA sense strand
aagaaugcagugcgucaua

SEQ ID NO: 1100282 - RNA, 19 nt, Homo sapiens
  misc_RNA (1)...(19): siRNA sense strand
caaauacaacgugcccauu

SEQ ID NO: 1100283 - RNA, 19 nt, Homo sapiens
  misc_RNA (1)...(19): siRNA sense strand
caugugaagucuacagaac

SEQ ID NO: 1100284 - RNA, 19 nt, Homo sapiens
  misc_RNA (1)...(19): siRNA sense strand
uaaaaucucccaagaggaa

SEQ ID NO: 1100285 - RNA, 19 nt, Homo sapiens
  misc_RNA (1)...(19): siRNA sense strand
uaugaugacaccucaaguu

SEQ ID NO: 1100286 - RNA, 19 nt, Homo sapiens
  misc_RNA (1)...(19): siRNA sense strand
gugaagcagugugcgaaga

SEQ ID NO: 1100287 - RNA, 19 nt, Homo sapiens
  misc_RNA (1)...(19): siRNA sense strand
caacaaucacagcaguuug

SEQ ID NO: 1100288 - RNA, 19 nt, Homo sapiens
  misc_RNA (1)...(19): siRNA sense strand
caacaacaacaugcuggaa

SEQ ID NO: 1100289 - RNA, 19 nt, Homo sapiens
  misc_RNA (1)...(19): siRNA sense strand
aaucugggacugagacaaa

SEQ ID NO: 1100290 - RNA, 19 nt, Homo sapiens
  misc_RNA (1)...(19): siRNA sense strand
ugagaauaguauaccucua

SEQ ID NO: 1100291 - RNA, 19 nt, Homo sapiens
  misc_RNA (1)...(19): siRNA sense strand
cacaaaagaucagugguaa

SEQ ID NO: 1100292 - RNA, 19 nt, Homo sapiens
  misc_RNA (1)...(19): siRNA sense strand
gaccaccauuuacauaugc

SEQ ID NO: 1100293 - RNA, 19 nt, Homo sapiens
  misc_RNA (1)...(19): siRNA sense strand
gcagguuguacagcaguua

SEQ ID NO: 1100294 - RNA, 19 nt, Homo sapiens
  misc_RNA (1)...(19): siRNA sense strand
gcagcuaacacuaaaugag

SEQ ID NO: 1100295 - RNA, 19 nt, Homo sapiens
  misc_RNA (1)...(19): siRNA sense strand
ccaaccacaguccagauuu

SEQ ID NO: 1100296 - RNA, 19 nt, Homo sapiens
  misc_RNA (1)...(19): siRNA sense strand
gcaagccgugcauccugua

SEQ ID NO: 1100297 - RNA, 19 nt, Homo sapiens
  misc_RNA (1)...(19): siRNA sense strand
uaacccuucccuuauuaaa

SEQ ID NO: 1100298 - RNA, 19 nt, Homo sapiens
  misc_RNA (1)...(19): siRNA sense strand
gugguaacccuucccuuau

SEQ ID NO: 1100299 - RNA, 19 nt, Homo sapiens
  misc_RNA (1)...(19): siRNA sense strand
gaaugcagugcgucauaau

SEQ ID NO: 1100300 - RNA, 19 nt, Homo sapiens
  misc_RNA (1)...(19): siRNA sense strand
cuacccagcaguuggcuuu

SEQ ID NO: 1100301 - RNA, 19 nt, Homo sapiens
  misc_RNA (1)...(19): siRNA sense strand
caauggagcauaccaacag

SEQ ID NO: 1100302 - RNA, 19 nt, Homo sapiens
  misc_RNA (1)...(19): siRNA sense strand
guaacccuucccuuauuaa

SEQ ID NO: 1100303 - RNA, 19 nt, Homo sapiens
  misc_RNA (1)...(19): siRNA sense strand
aaacgaaggccacaaaaga

SEQ ID NO: 1100304 - RNA, 19 nt, Homo sapiens
  misc_RNA (1)...(19): siRNA sense strand
gcucauacugcagaagaaa

SEQ ID NO: 1100305 - RNA, 19 nt, Homo sapiens
  misc_RNA (1)...(19): siRNA sense strand
ugcagcagcucuggaaaga

SEQ ID NO: 1100306 - RNA, 19 nt, Homo sapiens
  misc_RNA (1)...(19): siRNA sense strand
gcaugugaagucuacagaa

SEQ ID NO: 1100307 - RNA, 19 nt, Homo sapiens
  misc_RNA (1)...(19): siRNA sense strand
gaagaugaaccaguaaacg

SEQ ID NO: 1100308 - RNA, 19 nt, Homo sapiens
  misc_RNA (1)...(19): siRNA sense strand
acagagauuacgaagauga

SEQ ID NO: 1100309 - RNA, 19 nt, Homo sapiens
  misc_RNA (1)...(19): siRNA sense strand
acgaauguuugcuuacuuc

SEQ ID NO: 1100310 - RNA, 19 nt, Homo sapiens
  misc_RNA (1)...(19): siRNA sense strand
ggcgguacucagacaaaua

SEQ ID NO: 1100311 - RNA, 19 nt, Homo sapiens
  misc_RNA (1)...(19): siRNA sense strand
ggacaguggacaugaauuu

SEQ ID NO: 1100312 - RNA, 19 nt, Homo sapiens
  misc_RNA (1)...(19): siRNA sense strand
ggagcuggcccaacucaua

SEQ ID NO: 1100313 - RNA, 19 nt, Homo sapiens
  misc_RNA (1)...(19): siRNA sense strand
guucugaccuggagauaga

SEQ ID NO: 1100314 - RNA, 19 nt, Homo sapiens
  misc_RNA (1)...(19): siRNA sense strand
ggaugugacuggagaagau

SEQ ID NO: 1100315 - RNA, 19 nt, Homo sapiens
  misc_RNA (1)...(19): siRNA sense strand
caacuacaccuaugucaug

SEQ ID NO: 1100316 - RNA, 19 nt, Homo sapiens
  misc_RNA (1)...(19): siRNA sense strand
ucauugagcccuauaagaa

SEQ ID NO: 1100317 - RNA, 19 nt, Homo sapiens
  misc_RNA (1)...(19): siRNA sense strand
gcaccuuccucuccugaug

SEQ ID NO: 1100318 - RNA, 19 nt, Homo sapiens
  misc_RNA (1)...(19): siRNA sense strand
caugguaugugaaagcauu

SEQ ID NO: 1100319 - RNA, 19 nt, Homo sapiens
  misc_RNA (1)...(19): siRNA sense strand
gaauuugaaugggaagaug

SEQ ID NO: 1100320 - RNA, 19 nt, Homo sapiens
  misc_RNA (1)...(19): siRNA sense strand
gagcagcgcguagacauga

SEQ ID NO: 1100321 - RNA, 19 nt, Homo sapiens
  misc_RNA (1)...(19): siRNA sense strand
auaagaaaguccugucuca

SEQ ID NO: 1100322 - RNA, 19 nt, Homo sapiens
  misc_RNA (1)...(19): siRNA sense strand
cuucaucaguuccaaauuc

SEQ ID NO: 1100323 - RNA, 19 nt, Homo sapiens
  misc_RNA (1)...(19): siRNA sense strand
cuacaccuaugucauggaa

SEQ ID NO: 1100324 - RNA, 19 nt, Homo sapiens
  misc_RNA (1)...(19): siRNA sense strand
ccucaaugcugucauccuu

SEQ ID NO: 1100325 - RNA, 19 nt, Homo sapiens
  misc_RNA (1)...(19): siRNA sense strand
ugaaugggaagaugaacua

SEQ ID NO: 1100326 - RNA, 19 nt, Homo sapiens
  misc_RNA (1)...(19): siRNA sense strand
caguggacaugaauuugaa

SEQ ID NO: 1100327 - RNA, 19 nt, Homo sapiens
  misc_RNA (1)...(19): siRNA sense strand
gaaaggcugggccgagguu

SEQ ID NO: 1100328 - RNA, 19 nt, Homo sapiens
  misc_RNA (1)...(19): siRNA sense strand
gagcuggcccaacucauau

SEQ ID NO: 1100329 - RNA, 19 nt, Homo sapiens
  misc_RNA (1)...(19): siRNA sense strand
aaaauuaccugcuuguuca

SEQ ID NO: 1100330 - RNA, 19 nt, Homo sapiens
  misc_RNA (1)...(19): siRNA sense strand
gaaaauuaccugcuuguuc

SEQ ID NO: 1100331 - RNA, 19 nt, Homo sapiens
  misc_RNA (1)...(19): siRNA sense strand
ccacggugauggccucaau

SEQ ID NO: 1100332 - RNA, 19 nt, Homo sapiens
  misc_RNA (1)...(19): siRNA sense strand
gcuggacaguggacaugaa

SEQ ID NO: 1100333 - RNA, 19 nt, Homo sapiens
  misc_RNA (1)...(19): siRNA sense strand
gcuggauacgucaguguua

SEQ ID NO: 1100334 - RNA, 19 nt, Homo sapiens
  misc_RNA (1)...(19): siRNA sense strand
guuccaaauucacacgaaa

SEQ ID NO: 1100335 - RNA, 19 nt, Homo sapiens
  misc_RNA (1)...(19): siRNA sense strand
gguuguaugugggauguga

SEQ ID NO: 1100336 - RNA, 19 nt, Homo sapiens
  misc_RNA (1)...(19): siRNA sense strand
gaagcagcauccccaacua

SEQ ID NO: 1100337 - RNA, 19 nt, Homo sapiens
  misc_RNA (1)...(19): siRNA sense strand
acaccuaugucauggaaca

SEQ ID NO: 1100338 - RNA, 19 nt, Homo sapiens
  misc_RNA (1)...(19): siRNA sense strand
gaaaguccugucucaugga

SEQ ID NO: 1100339 - RNA, 19 nt, Homo sapiens
  misc_RNA (1)...(19): siRNA sense strand
gagguuguaugugggaugu

SEQ ID NO: 1100340 - RNA, 19 nt, Homo sapiens
  misc_RNA (1)...(19): siRNA sense strand
aagaaaguccugucucaug

SEQ ID NO: 1100341 - RNA, 19 nt, Homo sapiens
  misc_RNA (1)...(19): siRNA sense strand
gaguugcggcugagucuga

SEQ ID NO: 1100342 - RNA, 19 nt, Homo sapiens
  misc_RNA (1)...(19): siRNA sense strand
cuucggcccuucaucaguu

SEQ ID NO: 1100343 - RNA, 19 nt, Homo sapiens
  misc_RNA (1)...(19): siRNA sense strand
ggcccaaguuccaccucua

SEQ ID NO: 1100344 - RNA, 19 nt, Homo sapiens
  misc_RNA (1)...(19): siRNA sense strand
gcccaaguuccaccucuaa

SEQ ID NO: 1100345 - RNA, 19 nt, Homo sapiens
  misc_RNA (1)...(19): siRNA sense strand
cauugagcccuauaagaaa

SEQ ID NO: 1100346 - RNA, 19 nt, Homo sapiens
  misc_RNA (1)...(19): siRNA sense strand
gcacaagcagggcccaagu

SEQ ID NO: 1100347 - RNA, 19 nt, Homo sapiens
  misc_RNA (1)...(19): siRNA sense strand
acaguggacaugaauuuga

SEQ ID NO: 1100348 - RNA, 19 nt, Homo sapiens
  misc_RNA (1)...(19): siRNA sense strand
uuaccugcuuguucauuug

SEQ ID NO: 1100349 - RNA, 19 nt, Homo sapiens
  misc_RNA (1)...(19): siRNA sense strand
ccuguuaucuacccagaag

SEQ ID NO: 1100350 - RNA, 19 nt, Homo sapiens
  misc_RNA (1)...(19): siRNA sense strand
ucaaugcugucauccuuuu

SEQ ID NO: 1100351 - RNA, 19 nt, Homo sapiens
  misc_RNA (1)...(19): siRNA sense strand
uggaaaugauggagcuuca

SEQ ID NO: 1100352 - RNA, 19 nt, Homo sapiens
  misc_RNA (1)...(19): siRNA sense strand
gacaguggacaugaauuug

SEQ ID NO: 1100353 - RNA, 19 nt, Homo sapiens
  misc_RNA (1)...(19): siRNA sense strand
gcacugcuucggcccuuca

SEQ ID NO: 1100354 - RNA, 19 nt, Homo sapiens
  misc_RNA (1)...(19): siRNA sense strand
ccagugagacagcugaaag

SEQ ID NO: 1100355 - RNA, 19 nt, Homo sapiens
  misc_RNA (1)...(19): siRNA sense strand
ggagcagcgcguagacaug

SEQ ID NO: 1100356 - RNA, 19 nt, Homo sapiens
  misc_RNA (1)...(19): siRNA sense strand
gguauauggugggaacucu

SEQ ID NO: 1100357 - RNA, 19 nt, Homo sapiens
  misc_RNA (1)...(19): siRNA sense strand
auuaccugcuuguucauuu

SEQ ID NO: 1100358 - RNA, 19 nt, Homo sapiens
  misc_RNA (1)...(19): siRNA sense strand
gucauugagcccuauaaga

SEQ ID NO: 1100359 - RNA, 19 nt, Homo sapiens
  misc_RNA (1)...(19): siRNA sense strand
gauagacgaauuggagaca

SEQ ID NO: 1100360 - RNA, 19 nt, Homo sapiens
  misc_RNA (1)...(19): siRNA sense strand
gcaguucugaccuggagau

SEQ ID NO: 1100361 - RNA, 19 nt, Homo sapiens
  misc_RNA (1)...(19): siRNA sense strand
caucaguuccaaauucaca

SEQ ID NO: 1100362 - RNA, 19 nt, Homo sapiens
  misc_RNA (1)...(19): siRNA sense strand
ccuaugucauggaacacuu

SEQ ID NO: 1100363 - RNA, 19 nt, Homo sapiens
  misc_RNA (1)...(19): siRNA sense strand
uggaggguguuccgaaugg

SEQ ID NO: 1100364 - RNA, 19 nt, Homo sapiens
  misc_RNA (1)...(19): siRNA sense strand
gggagcagcgcguagacau

SEQ ID NO: 1100365 - RNA, 19 nt, Homo sapiens
  misc_RNA (1)...(19): siRNA sense strand
cgaauuggagacaccuuca

SEQ ID NO: 1100366 - RNA, 19 nt, Homo sapiens
  misc_RNA (1)...(19): siRNA sense strand
ggacaguggacaugaauuu

SEQ ID NO: 1100367 - RNA, 19 nt, Homo sapiens
  misc_RNA (1)...(19): siRNA sense strand
guucugaccuggagauaga

SEQ ID NO: 1100368 - RNA, 19 nt, Homo sapiens
  misc_RNA (1)...(19): siRNA sense strand
ggaugugacuggagaagau

SEQ ID NO: 1100369 - RNA, 19 nt, Homo sapiens
  misc_RNA (1)...(19): siRNA sense strand
caacuacaccuaugucaug

SEQ ID NO: 1100370 - RNA, 19 nt, Homo sapiens
  misc_RNA (1)...(19): siRNA sense strand
ucauugagcccuauaagaa

SEQ ID NO: 1100371 - RNA, 19 nt, Homo sapiens
  misc_RNA (1)...(19): siRNA sense strand
gcaccuuccucuccugaug

SEQ ID NO: 1100372 - RNA, 19 nt, Homo sapiens
  misc_RNA (1)...(19): siRNA sense strand
gaauuugaaugggaagaug

SEQ ID NO: 1100373 - RNA, 19 nt, Homo sapiens
  misc_RNA (1)...(19): siRNA sense strand
gagcagcgcguagacauga

SEQ ID NO: 1100374 - RNA, 19 nt, Homo sapiens
  misc_RNA (1)...(19): siRNA sense strand
auaagaaaguccugucuca

SEQ ID NO: 1100375 - RNA, 19 nt, Homo sapiens
  misc_RNA (1)...(19): siRNA sense strand
cuacaccuaugucauggaa

SEQ ID NO: 1100376 - RNA, 19 nt, Homo sapiens
  misc_RNA (1)...(19): siRNA sense strand
ccucaaugcugucauccuu

SEQ ID NO: 1100377 - RNA, 19 nt, Homo sapiens
  misc_RNA (1)...(19): siRNA sense strand
ugaaugggaagaugaacua

SEQ ID NO: 1100378 - RNA, 19 nt, Homo sapiens
  misc_RNA (1)...(19): siRNA sense strand
caguggacaugaauuugaa

SEQ ID NO: 1100379 - RNA, 19 nt, Homo sapiens
  misc_RNA (1)...(19): siRNA sense strand
gaaaggcugggccgagguu

SEQ ID NO: 1100380 - RNA, 19 nt, Homo sapiens
  misc_RNA (1)...(19): siRNA sense strand
aaaauuaccugcuuguuca

SEQ ID NO: 1100381 - RNA, 19 nt, Homo sapiens
  misc_RNA (1)...(19): siRNA sense strand
gaaaauuaccugcuuguuc

SEQ ID NO: 1100382 - RNA, 19 nt, Homo sapiens
  misc_RNA (1)...(19): siRNA sense strand
ccacggugauggccucaau

SEQ ID NO: 1100383 - RNA, 19 nt, Homo sapiens
  misc_RNA (1)...(19): siRNA sense strand
gcuggacaguggacaugaa

SEQ ID NO: 1100384 - RNA, 19 nt, Homo sapiens
  misc_RNA (1)...(19): siRNA sense strand
gcuggauacgucaguguua

SEQ ID NO: 1100385 - RNA, 19 nt, Homo sapiens
  misc_RNA (1)...(19): siRNA sense strand
gguuguaugugggauguga

SEQ ID NO: 1100386 - RNA, 19 nt, Homo sapiens
  misc_RNA (1)...(19): siRNA sense strand
gaagcagcauccccaacua

SEQ ID NO: 1100387 - RNA, 19 nt, Homo sapiens
  misc_RNA (1)...(19): siRNA sense strand
acaccuaugucauggaaca

SEQ ID NO: 1100388 - RNA, 19 nt, Homo sapiens
  misc_RNA (1)...(19): siRNA sense strand
gaaaguccugucucaugga

SEQ ID NO: 1100389 - RNA, 19 nt, Homo sapiens
  misc_RNA (1)...(19): siRNA sense strand
gagguuguaugugggaugu

SEQ ID NO: 1100390 - RNA, 19 nt, Homo sapiens
  misc_RNA (1)...(19): siRNA sense strand
aagaaaguccugucucaug

SEQ ID NO: 1100391 - RNA, 19 nt, Homo sapiens
  misc_RNA (1)...(19): siRNA sense strand
gaguugcggcugagucuga

SEQ ID NO: 1100392 - RNA, 19 nt, Homo sapiens
  misc_RNA (1)...(19): siRNA sense strand
ggcccaaguuccaccucua

SEQ ID NO: 1100393 - RNA, 19 nt, Homo sapiens
  misc_RNA (1)...(19): siRNA sense strand
gcccaaguuccaccucuaa

SEQ ID NO: 1100394 - RNA, 19 nt, Homo sapiens
  misc_RNA (1)...(19): siRNA sense strand
cauugagcccuauaagaaa

SEQ ID NO: 1100395 - RNA, 19 nt, Homo sapiens
  misc_RNA (1)...(19): siRNA sense strand
gcacaagcagggcccaagu

SEQ ID NO: 1100396 - RNA, 19 nt, Homo sapiens
  misc_RNA (1)...(19): siRNA sense strand
acaguggacaugaauuuga

SEQ ID NO: 1100397 - RNA, 19 nt, Homo sapiens
  misc_RNA (1)...(19): siRNA sense strand
uuaccugcuuguucauuug

SEQ ID NO: 1100398 - RNA, 19 nt, Homo sapiens
  misc_RNA (1)...(19): siRNA sense strand
ccuguuaucuacccagaag

SEQ ID NO: 1100399 - RNA, 19 nt, Homo sapiens
  misc_RNA (1)...(19): siRNA sense strand
ucaaugcugucauccuuuu

SEQ ID NO: 1100400 - RNA, 19 nt, Homo sapiens
  misc_RNA (1)...(19): siRNA sense strand
uggaaaugauggagcuuca

SEQ ID NO: 1100401 - RNA, 19 nt, Homo sapiens
  misc_RNA (1)...(19): siRNA sense strand
gacaguggacaugaauuug

SEQ ID NO: 1100402 - RNA, 19 nt, Homo sapiens
  misc_RNA (1)...(19): siRNA sense strand
ccagugagacagcugaaag

SEQ ID NO: 1100403 - RNA, 19 nt, Homo sapiens
  misc_RNA (1)...(19): siRNA sense strand
ggagcagcgcguagacaug

SEQ ID NO: 1100404 - RNA, 19 nt, Homo sapiens
  misc_RNA (1)...(19): siRNA sense strand
gguauauggugggaacucu

SEQ ID NO: 1100405 - RNA, 19 nt, Homo sapiens
  misc_RNA (1)...(19): siRNA sense strand
auuaccugcuuguucauuu

SEQ ID NO: 1100406 - RNA, 19 nt, Homo sapiens
  misc_RNA (1)...(19): siRNA sense strand
gauagacgaauuggagaca

SEQ ID NO: 1100407 - RNA, 19 nt, Homo sapiens
  misc_RNA (1)...(19): siRNA sense strand
gucauugagcccuauaaga

SEQ ID NO: 1100408 - RNA, 19 nt, Homo sapiens
  misc_RNA (1)...(19): siRNA sense strand
gcaguucugaccuggagau

SEQ ID NO: 1100409 - RNA, 19 nt, Homo sapiens
  misc_RNA (1)...(19): siRNA sense strand
ccuaugucauggaacacuu

SEQ ID NO: 1100410 - RNA, 19 nt, Homo sapiens
  misc_RNA (1)...(19): siRNA sense strand
uggaggguguuccgaaugg

SEQ ID NO: 1100411 - RNA, 19 nt, Homo sapiens
  misc_RNA (1)...(19): siRNA sense strand
cgaauuggagacaccuuca

SEQ ID NO: 1100412 - RNA, 19 nt, Homo sapiens
  misc_RNA (1)...(19): siRNA sense strand
gggagcagcgcguagacau

SEQ ID NO: 1100413 - RNA, 19 nt, Homo sapiens
  misc_RNA (1)...(19): siRNA sense strand
ggagugaggugaacgauga

SEQ ID NO: 1100414 - RNA, 19 nt, Homo sapiens
  misc_RNA (1)...(19): siRNA sense strand
ccaaggagauccagucugu

SEQ ID NO: 1100415 - RNA, 19 nt, Homo sapiens
  misc_RNA (1)...(19): siRNA sense strand
caaaugaagaguccagaaa

SEQ ID NO: 1100416 - RNA, 19 nt, Homo sapiens
  misc_RNA (1)...(19): siRNA sense strand
gaaggaagucaaauacuca

SEQ ID NO: 1100417 - RNA, 19 nt, Homo sapiens
  misc_RNA (1)...(19): siRNA sense strand
cgaaggaagucaaauacuc

SEQ ID NO: 1100418 - RNA, 19 nt, Homo sapiens
  misc_RNA (1)...(19): siRNA sense strand
gauccagucugucuacauc

SEQ ID NO: 1100419 - RNA, 19 nt, Homo sapiens
  misc_RNA (1)...(19): siRNA sense strand
caacucccaugguggauca

SEQ ID NO: 1100420 - RNA, 19 nt, Homo sapiens
  misc_RNA (1)...(19): siRNA sense strand
ggugaacgaugaccaggau

SEQ ID NO: 1100421 - RNA, 19 nt, Homo sapiens
  misc_RNA (1)...(19): siRNA sense strand
gcugguggcugcuaacgau

SEQ ID NO: 1100422 - RNA, 19 nt, Homo sapiens
  misc_RNA (1)...(19): siRNA sense strand
gcaaaugaagaguccagaa

SEQ ID NO: 1100423 - RNA, 19 nt, Homo sapiens
  misc_RNA (1)...(19): siRNA sense strand
aagcgaaggaagucaaaua

SEQ ID NO: 1100424 - RNA, 19 nt, Homo sapiens
  misc_RNA (1)...(19): siRNA sense strand
gaaaagaagcgaaggaagu

SEQ ID NO: 1100425 - RNA, 19 nt, Homo sapiens
  misc_RNA (1)...(19): siRNA sense strand
caaggccggucugcaaaug

SEQ ID NO: 1100426 - RNA, 19 nt, Homo sapiens
  misc_RNA (1)...(19): siRNA sense strand
gaauccaccugcuucuacu

SEQ ID NO: 1100427 - RNA, 19 nt, Homo sapiens
  misc_RNA (1)...(19): siRNA sense strand
gggcccugcuuucaacaug

SEQ ID NO: 1100428 - RNA, 19 nt, Homo sapiens
  misc_RNA (1)...(19): siRNA sense strand
uaacacaagucccuuuccu

SEQ ID NO: 1100429 - RNA, 19 nt, Homo sapiens
  misc_RNA (1)...(19): siRNA sense strand
gcaaggccggucugcaaau

SEQ ID NO: 1100430 - RNA, 19 nt, Homo sapiens
  misc_RNA (1)...(19): siRNA sense strand
aggaugccauucuguguga

SEQ ID NO: 1100431 - RNA, 19 nt, Homo sapiens
  misc_RNA (1)...(19): siRNA sense strand
ugacugagagcgccuaugg

SEQ ID NO: 1100432 - RNA, 19 nt, Homo sapiens
  misc_RNA (1)...(19): siRNA sense strand
gcugaccacugaagcuucu

SEQ ID NO: 1100433 - RNA, 19 nt, Homo sapiens
  misc_RNA (1)...(19): siRNA sense strand
ugaccaggaugccauucug

SEQ ID NO: 1100434 - RNA, 19 nt, Homo sapiens
  misc_RNA (1)...(19): siRNA sense strand
ggagauccagucugucuac

SEQ ID NO: 1100435 - RNA, 19 nt, Homo sapiens
  misc_RNA (1)...(19): siRNA sense strand
ugcgaucucugccucaaga

SEQ ID NO: 1100436 - RNA, 19 nt, Homo sapiens
  misc_RNA (1)...(19): siRNA sense strand
ccugcauacucacaucuga

SEQ ID NO: 1100437 - RNA, 19 nt, Homo sapiens
  misc_RNA (1)...(19): siRNA sense strand
ggcaaggccggucugcaaa

SEQ ID NO: 1100438 - RNA, 19 nt, Homo sapiens
  misc_RNA (1)...(19): siRNA sense strand
ccaccugcuucuacugcuu

SEQ ID NO: 1100439 - RNA, 19 nt, Homo sapiens
  misc_RNA (1)...(19): siRNA sense strand
ccaggcaacaugaacuuuc

SEQ ID NO: 1100440 - RNA, 19 nt, Homo sapiens
  misc_RNA (1)...(19): siRNA sense strand
ugaggccuccugccagaaa

SEQ ID NO: 1100441 - RNA, 19 nt, Homo sapiens
  misc_RNA (1)...(19): siRNA sense strand
aggccggucugcaaaugaa

SEQ ID NO: 1100442 - RNA, 19 nt, Homo sapiens
  misc_RNA (1)...(19): siRNA sense strand
uaugggcccugcuuucaac

SEQ ID NO: 1100443 - RNA, 19 nt, Homo sapiens
  misc_RNA (1)...(19): siRNA sense strand
gagauccagucugucuaca

SEQ ID NO: 1100444 - RNA, 19 nt, Homo sapiens
  misc_RNA (1)...(19): siRNA sense strand
gaggccuccugccagaaau

SEQ ID NO: 1100445 - RNA, 19 nt, Homo sapiens
  misc_RNA (1)...(19): siRNA sense strand
ggauuuggucccaugaucu

SEQ ID NO: 1100446 - RNA, 19 nt, Homo sapiens
  misc_RNA (1)...(19): siRNA sense strand
ugaauccaccugcuucuac

SEQ ID NO: 1100447 - RNA, 19 nt, Homo sapiens
  misc_RNA (1)...(19): siRNA sense strand
ccaggaugccauucugugu

SEQ ID NO: 1100448 - RNA, 19 nt, Homo sapiens
  misc_RNA (1)...(19): siRNA sense strand
gaacacaccuuacauagug

SEQ ID NO: 1100449 - RNA, 19 nt, Homo sapiens
  misc_RNA (1)...(19): siRNA sense strand
gcaaagaccucaacaccuu

SEQ ID NO: 1100450 - RNA, 19 nt, Homo sapiens
  misc_RNA (1)...(19): siRNA sense strand
caacauagccugcaagaau

SEQ ID NO: 1100451 - RNA, 19 nt, Homo sapiens
  misc_RNA (1)...(19): siRNA sense strand
gacaucaucucagugguuu

SEQ ID NO: 1100452 - RNA, 19 nt, Homo sapiens
  misc_RNA (1)...(19): siRNA sense strand
aacauagccugcaagaaua

SEQ ID NO: 1100453 - RNA, 19 nt, Homo sapiens
  misc_RNA (1)...(19): siRNA sense strand
ugagcaucaucaauaagua

SEQ ID NO: 1100454 - RNA, 19 nt, Homo sapiens
  misc_RNA (1)...(19): siRNA sense strand
caucaucucagugguuuaa

SEQ ID NO: 1100455 - RNA, 19 nt, Homo sapiens
  misc_RNA (1)...(19): siRNA sense strand
gagcucaccucagggaagu

SEQ ID NO: 1100456 - RNA, 19 nt, Homo sapiens
  misc_RNA (1)...(19): siRNA sense strand
ccugaacacaccuuacaua

SEQ ID NO: 1100457 - RNA, 19 nt, Homo sapiens
  misc_RNA (1)...(19): siRNA sense strand
acaaagagaagcaccugaa

SEQ ID NO: 1100458 - RNA, 19 nt, Homo sapiens
  misc_RNA (1)...(19): siRNA sense strand
gagccaagcccaaggacau

SEQ ID NO: 1100459 - RNA, 19 nt, Homo sapiens
  misc_RNA (1)...(19): siRNA sense strand
acacagaacggugcaaaga

SEQ ID NO: 1100460 - RNA, 19 nt, Homo sapiens
  misc_RNA (1)...(19): siRNA sense strand
caaacugcagguacaaaga

SEQ ID NO: 1100461 - RNA, 19 nt, Homo sapiens
  misc_RNA (1)...(19): siRNA sense strand
guacacagaacggugcaaa

SEQ ID NO: 1100462 - RNA, 19 nt, Homo sapiens
  misc_RNA (1)...(19): siRNA sense strand
ugacaucaucucagugguu

SEQ ID NO: 1100463 - RNA, 19 nt, Homo sapiens
  misc_RNA (1)...(19): siRNA sense strand
caucaucaauaaguacaca

SEQ ID NO: 1100464 - RNA, 19 nt, Homo sapiens
  misc_RNA (1)...(19): siRNA sense strand
cugcaagaauagcuguaaa

SEQ ID NO: 1100465 - RNA, 19 nt, Homo sapiens
  misc_RNA (1)...(19): siRNA sense strand
ucagggaaguacccaaacu

SEQ ID NO: 1100466 - RNA, 19 nt, Homo sapiens
  misc_RNA (1)...(19): siRNA sense strand
gagcaucaucaauaaguac

SEQ ID NO: 1100467 - RNA, 19 nt, Homo sapiens
  misc_RNA (1)...(19): siRNA sense strand
aaagagaagcaccugaaca

SEQ ID NO: 1100468 - RNA, 19 nt, Homo sapiens
  misc_RNA (1)...(19): siRNA sense strand
gcagguacaaagagaagca

SEQ ID NO: 1100469 - RNA, 19 nt, Homo sapiens
  misc_RNA (1)...(19): siRNA sense strand
ugaacacaccuuacauagu

SEQ ID NO: 1100470 - RNA, 19 nt, Homo sapiens
  misc_RNA (1)...(19): siRNA sense strand
caucaauaaguacacagaa

SEQ ID NO: 1100471 - RNA, 19 nt, Homo sapiens
  misc_RNA (1)...(19): siRNA sense strand
ccucagggaaguacccaaa

SEQ ID NO: 1100472 - RNA, 19 nt, Homo sapiens
  misc_RNA (1)...(19): siRNA sense strand
ccaaacugcagguacaaag

SEQ ID NO: 1100473 - RNA, 19 nt, Homo sapiens
  misc_RNA (1)...(19): siRNA sense strand
ccugugcacuuggauaaag

SEQ ID NO: 1100474 - RNA, 19 nt, Homo sapiens
  misc_RNA (1)...(19): siRNA sense strand
ccaggguacccacuuguuc

SEQ ID NO: 1100475 - RNA, 19 nt, Homo sapiens
  misc_RNA (1)...(19): siRNA sense strand
caaagagaagcaccugaac

SEQ ID NO: 1100476 - RNA, 19 nt, Homo sapiens
  misc_RNA (1)...(19): siRNA sense strand
caccugaacacaccuuaca

SEQ ID NO: 1100477 - RNA, 19 nt, Homo sapiens
  misc_RNA (1)...(19): siRNA sense strand
gcacuacuuugaaaucgua

SEQ ID NO: 1100478 - RNA, 19 nt, Homo sapiens
  misc_RNA (1)...(19): siRNA sense strand
ggaagcagauguccugguu

SEQ ID NO: 1100479 - RNA, 19 nt, Homo sapiens
  misc_RNA (1)...(19): siRNA sense strand
gauauugcacuacuuugaa

SEQ ID NO: 1100480 - RNA, 19 nt, Homo sapiens
  misc_RNA (1)...(19): siRNA sense strand
gagcggacgguguucaauu

SEQ ID NO: 1100481 - RNA, 19 nt, Homo sapiens
  misc_RNA (1)...(19): siRNA sense strand
ucaauuccaugcugguuuc

SEQ ID NO: 1100482 - RNA, 19 nt, Homo sapiens
  misc_RNA (1)...(19): siRNA sense strand
ggacgguguucaauuccau

SEQ ID NO: 1100483 - RNA, 19 nt, Homo sapiens
  misc_RNA (1)...(19): siRNA sense strand
gcacaucauggcgauauug

SEQ ID NO: 1100484 - RNA, 19 nt, Homo sapiens
  misc_RNA (1)...(19): siRNA sense strand
cgauauugcacuacuuuga

SEQ ID NO: 1100485 - RNA, 19 nt, Homo sapiens
  misc_RNA (1)...(19): siRNA sense strand
ucacggcgcucuacaugcu

SEQ ID NO: 1100486 - RNA, 19 nt, Homo sapiens
  misc_RNA (1)...(19): siRNA sense strand
ucauggcgauauugcacua

SEQ ID NO: 1100487 - RNA, 19 nt, Homo sapiens
  misc_RNA (1)...(19): siRNA sense strand
gcagauguccugguucuac

SEQ ID NO: 1100488 - RNA, 19 nt, Homo sapiens
  misc_RNA (1)...(19): siRNA sense strand
ggucacggcgcucuacaug

SEQ ID NO: 1100489 - RNA, 19 nt, Homo sapiens
  misc_RNA (1)...(19): siRNA sense strand
ggcgauauugcacuacuuu

SEQ ID NO: 1100490 - RNA, 19 nt, Homo sapiens
  misc_RNA (1)...(19): siRNA sense strand
aagcagauguccugguucu

SEQ ID NO: 1100491 - RNA, 19 nt, Homo sapiens
  misc_RNA (1)...(19): siRNA sense strand
cacaggauacgucuucaug

SEQ ID NO: 1100492 - RNA, 19 nt, Homo sapiens
  misc_RNA (1)...(19): siRNA sense strand
cagcacaucauggcgauau

SEQ ID NO: 1100493 - RNA, 19 nt, Homo sapiens
  misc_RNA (1)...(19): siRNA sense strand
acuuugaaaucguacaaug

SEQ ID NO: 1100494 - RNA, 19 nt, Homo sapiens
  misc_RNA (1)...(19): siRNA sense strand
auacacaggauacgucuuc

SEQ ID NO: 1100495 - RNA, 19 nt, Homo sapiens
  misc_RNA (1)...(19): siRNA sense strand
ccaugcugguuuccauugu

SEQ ID NO: 1100496 - RNA, 19 nt, Homo sapiens
  misc_RNA (1)...(19): siRNA sense strand
caugcugguuuccauugug

SEQ ID NO: 1100497 - RNA, 19 nt, Homo sapiens
  misc_RNA (1)...(19): siRNA sense strand
ggucuuaccucagcaguua

SEQ ID NO: 1100498 - RNA, 19 nt, Homo sapiens
  misc_RNA (1)...(19): siRNA sense strand
guacauggcugcuacuucu

SEQ ID NO: 1100499 - RNA, 19 nt, Homo sapiens
  misc_RNA (1)...(19): siRNA sense strand
guacacagcccaugcaucu

SEQ ID NO: 1100500 - RNA, 19 nt, Homo sapiens
  misc_RNA (1)...(19): siRNA sense strand
gcacacccuuuccuucucu

SEQ ID NO: 1100501 - RNA, 19 nt, Homo sapiens
  misc_RNA (1)...(19): siRNA sense strand
gcuccuuccuccagucuug

SEQ ID NO: 1100502 - RNA, 19 nt, Homo sapiens
  misc_RNA (1)...(19): siRNA sense strand
gagggucacagcaggagua

SEQ ID NO: 1100503 - RNA, 19 nt, Homo sapiens
  misc_RNA (1)...(19): siRNA sense strand
gauggcaccuggaccaacu

SEQ ID NO: 1100504 - RNA, 19 nt, Homo sapiens
  misc_RNA (1)...(19): siRNA sense strand
cuggaugccuucaccuaug

SEQ ID NO: 1100505 - RNA, 19 nt, Homo sapiens
  misc_RNA (1)...(19): siRNA sense strand
ucuucaagcugcugcuguu

SEQ ID NO: 1100506 - RNA, 19 nt, Homo sapiens
  misc_RNA (1)...(19): siRNA sense strand
ggaguacacagcccaugca

SEQ ID NO: 1100507 - RNA, 19 nt, Homo sapiens
  misc_RNA (1)...(19): siRNA sense strand
ggucacagcaggaguacac

SEQ ID NO: 1100508 - RNA, 19 nt, Homo sapiens
  misc_RNA (1)...(19): siRNA sense strand
ggagaaagcaggagaauua

SEQ ID NO: 1100509 - RNA, 19 nt, Homo sapiens
  misc_RNA (1)...(19): siRNA sense strand
gaagaaguauugcuguuua

SEQ ID NO: 1100510 - RNA, 19 nt, Homo sapiens
  misc_RNA (1)...(19): siRNA sense strand
gaagaaagcuuugacauca

SEQ ID NO: 1100511 - RNA, 19 nt, Homo sapiens
  misc_RNA (1)...(19): siRNA sense strand
gaagaagaauguacuacua

SEQ ID NO: 1100512 - RNA, 19 nt, Homo sapiens
  misc_RNA (1)...(19): siRNA sense strand
caagauagcucuccaaagu

SEQ ID NO: 1100513 - RNA, 19 nt, Homo sapiens
  misc_RNA (1)...(19): siRNA sense strand
gaaagcaggagaauuaaua

SEQ ID NO: 1100514 - RNA, 19 nt, Homo sapiens
  misc_RNA (1)...(19): siRNA sense strand
guaaacagcuugaagacuu

SEQ ID NO: 1100515 - RNA, 19 nt, Homo sapiens
  misc_RNA (1)...(19): siRNA sense strand
gaaagcuuauuccguauuu

SEQ ID NO: 1100516 - RNA, 19 nt, Homo sapiens
  misc_RNA (1)...(19): siRNA sense strand
ggaaugguguugauacaaa

SEQ ID NO: 1100517 - RNA, 19 nt, Homo sapiens
  misc_RNA (1)...(19): siRNA sense strand
ggaaccaacuucuuuauuc

SEQ ID NO: 1100518 - RNA, 19 nt, Homo sapiens
  misc_RNA (1)...(19): siRNA sense strand
aaacagaaguccugaagaa

SEQ ID NO: 1100519 - RNA, 19 nt, Homo sapiens
  misc_RNA (1)...(19): siRNA sense strand
gcaagacucugguugaaug

SEQ ID NO: 1100520 - RNA, 19 nt, Homo sapiens
  misc_RNA (1)...(19): siRNA sense strand
ggagugagguugaagauuc

SEQ ID NO: 1100521 - RNA, 19 nt, Homo sapiens
  misc_RNA (1)...(19): siRNA sense strand
ccagagggcugcauucaaa

SEQ ID NO: 1100522 - RNA, 19 nt, Homo sapiens
  misc_RNA (1)...(19): siRNA sense strand
gggcagaacugaugagaug

SEQ ID NO: 1100523 - RNA, 19 nt, Homo sapiens
  misc_RNA (1)...(19): siRNA sense strand
gaaccagggucuuugaaug

SEQ ID NO: 1100524 - RNA, 19 nt, Homo sapiens
  misc_RNA (1)...(19): siRNA sense strand
gaccugaucuucuuguaaa

SEQ ID NO: 1100525 - RNA, 19 nt, Homo sapiens
  misc_RNA (1)...(19): siRNA sense strand
ggacuugacuuuggagaaa

SEQ ID NO: 1100526 - RNA, 19 nt, Homo sapiens
  misc_RNA (1)...(19): siRNA sense strand
caacacagaagaaagcuua

SEQ ID NO: 1100527 - RNA, 19 nt, Homo sapiens
  misc_RNA (1)...(19): siRNA sense strand
caacagcucuugcaguuca

SEQ ID NO: 1100528 - RNA, 19 nt, Homo sapiens
  misc_RNA (1)...(19): siRNA sense strand
cagcucagauccuaaguuu

SEQ ID NO: 1100529 - RNA, 19 nt, Homo sapiens
  misc_RNA (1)...(19): siRNA sense strand
ggcaaacuguggucauaua

SEQ ID NO: 1100530 - RNA, 19 nt, Homo sapiens
  misc_RNA (1)...(19): siRNA sense strand
gaacccaaacaacaucuua

SEQ ID NO: 1100531 - RNA, 19 nt, Homo sapiens
  misc_RNA (1)...(19): siRNA sense strand
ggagauaugucuuuguuac

SEQ ID NO: 1100532 - RNA, 19 nt, Homo sapiens
  misc_RNA (1)...(19): siRNA sense strand
gaaacuacacaaagaacua

SEQ ID NO: 1100533 - RNA, 19 nt, Homo sapiens
  misc_RNA (1)...(19): siRNA sense strand
ggacagcaguagcuuugaa

SEQ ID NO: 1100534 - RNA, 19 nt, Homo sapiens
  misc_RNA (1)...(19): siRNA sense strand
ggaagaagaagacgacuau

SEQ ID NO: 1100535 - RNA, 19 nt, Homo sapiens
  misc_RNA (1)...(19): siRNA sense strand
ggaauugugugccgcgauu

SEQ ID NO: 1100536 - RNA, 19 nt, Homo sapiens
  misc_RNA (1)...(19): siRNA sense strand
ucacucagauucccucauu

SEQ ID NO: 1100537 - RNA, 19 nt, Homo sapiens
  misc_RNA (1)...(19): siRNA sense strand
aaagaacuauggcaaauuc

SEQ ID NO: 1100538 - RNA, 19 nt, Homo sapiens
  misc_RNA (1)...(19): siRNA sense strand
ugaguuagaugauggaaug

SEQ ID NO: 1100539 - RNA, 19 nt, Homo sapiens
  misc_RNA (1)...(19): siRNA sense strand
gaagagagaagacaaugug

SEQ ID NO: 1100540 - RNA, 19 nt, Homo sapiens
  misc_RNA (1)...(19): siRNA sense strand
gaauacagcaggaacagaa

SEQ ID NO: 1100541 - RNA, 19 nt, Homo sapiens
  misc_RNA (1)...(19): siRNA sense strand
cauaguaguucaggagaua

SEQ ID NO: 1100542 - RNA, 19 nt, Homo sapiens
  misc_RNA (1)...(19): siRNA sense strand
ggaagccccugauguuuua

SEQ ID NO: 1100543 - RNA, 19 nt, Homo sapiens
  misc_RNA (1)...(19): siRNA sense strand
ggaagaugauggccaagau

SEQ ID NO: 1100544 - RNA, 19 nt, Homo sapiens
  misc_RNA (1)...(19): siRNA sense strand
gcaguucaauccucuggaa

SEQ ID NO: 1100545 - RNA, 19 nt, Homo sapiens
  misc_RNA (1)...(19): siRNA sense strand
ugaaagugguuuagugcua

SEQ ID NO: 1100546 - RNA, 19 nt, Homo sapiens
  misc_RNA (1)...(19): siRNA sense strand
gcucagauccuaaguuuca

SEQ ID NO: 1100547 - RNA, 19 nt, Homo sapiens
  misc_RNA (1)...(19): siRNA sense strand
aaagcaagguagaguuuaa

SEQ ID NO: 1100548 - RNA, 19 nt, Homo sapiens
  misc_RNA (1)...(19): siRNA sense strand
gaagaugauggccaagaua

SEQ ID NO: 1100549 - RNA, 19 nt, Homo sapiens
  misc_RNA (1)...(19): siRNA sense strand
acauucagcuaacguauuu

SEQ ID NO: 1100550 - RNA, 19 nt, Homo sapiens
  misc_RNA (1)...(19): siRNA sense strand
ccaaacaacaucuuauuga

SEQ ID NO: 1100551 - RNA, 19 nt, Homo sapiens
  misc_RNA (1)...(19): siRNA sense strand
aagagaagcugcagcaaug

SEQ ID NO: 1100552 - RNA, 19 nt, Homo sapiens
  misc_RNA (1)...(19): siRNA sense strand
ugaugaaacuguuaucgaa

SEQ ID NO: 1100553 - RNA, 19 nt, Homo sapiens
  misc_RNA (1)...(19): siRNA sense strand
ggagaaaggcauagaggaa

SEQ ID NO: 1100554 - RNA, 19 nt, Homo sapiens
  misc_RNA (1)...(19): siRNA sense strand
aaacuguggucauauauca

SEQ ID NO: 1100555 - RNA, 19 nt, Homo sapiens
  misc_RNA (1)...(19): siRNA sense strand
gaagaacgggaaagucgua

SEQ ID NO: 1100556 - RNA, 19 nt, Homo sapiens
  misc_RNA (1)...(19): siRNA sense strand
gaaagcaagguagaguuua

SEQ ID NO: 1100557 - RNA, 19 nt, Homo sapiens
  misc_RNA (1)...(19): siRNA sense strand
gcaaacaacacagaagaaa

SEQ ID NO: 1100558 - RNA, 19 nt, Homo sapiens
  misc_RNA (1)...(19): siRNA sense strand
caggagauaugucuuuguu

SEQ ID NO: 1100559 - RNA, 19 nt, Homo sapiens
  misc_RNA (1)...(19): siRNA sense strand
uaaacagcuugaagacuuu

SEQ ID NO: 1100560 - RNA, 19 nt, Homo sapiens
  misc_RNA (1)...(19): siRNA sense strand
gggcccaaauccuauagua

SEQ ID NO: 1100561 - RNA, 19 nt, Homo sapiens
  misc_RNA (1)...(19): siRNA sense strand
uggaagagauacagugauu

SEQ ID NO: 1100562 - RNA, 19 nt, Homo sapiens
  misc_RNA (1)...(19): siRNA sense strand
ggaaaccucagcuugauga

SEQ ID NO: 1100563 - RNA, 19 nt, Homo sapiens
  misc_RNA (1)...(19): siRNA sense strand
ccaauauuccugcucuuua

SEQ ID NO: 1100564 - RNA, 19 nt, Homo sapiens
  misc_RNA (1)...(19): siRNA sense strand
gaauaaauacucacacuac

SEQ ID NO: 1100565 - RNA, 19 nt, Homo sapiens
  misc_RNA (1)...(19): siRNA sense strand
auaaguacaucaucucuga

SEQ ID NO: 1100566 - RNA, 19 nt, Homo sapiens
  misc_RNA (1)...(19): siRNA sense strand
gagaagcugugaagagaag

SEQ ID NO: 1100567 - RNA, 19 nt, Homo sapiens
  misc_RNA (1)...(19): siRNA sense strand
cuacaguucucugccaaua

SEQ ID NO: 1100568 - RNA, 19 nt, Homo sapiens
  misc_RNA (1)...(19): siRNA sense strand
ccuagaagguguucaagga

SEQ ID NO: 1100569 - RNA, 19 nt, Homo sapiens
  misc_RNA (1)...(19): siRNA sense strand
uuucaaggguggaauaauu

SEQ ID NO: 1100570 - RNA, 19 nt, Homo sapiens
  misc_RNA (1)...(19): siRNA sense strand
acaguucucugccaauauu

SEQ ID NO: 1100571 - RNA, 19 nt, Homo sapiens
  misc_RNA (1)...(19): siRNA sense strand
gaggcucgcucacucauuc

SEQ ID NO: 1100572 - RNA, 19 nt, Homo sapiens
  misc_RNA (1)...(19): siRNA sense strand
ggaauaaauacucacacua

SEQ ID NO: 1100573 - RNA, 19 nt, Homo sapiens
  misc_RNA (1)...(19): siRNA sense strand
gcaaugggaccuacuaagu

SEQ ID NO: 1100574 - RNA, 19 nt, Homo sapiens
  misc_RNA (1)...(19): siRNA sense strand
ggacagaacagacuuucau

SEQ ID NO: 1100575 - RNA, 19 nt, Homo sapiens
  misc_RNA (1)...(19): siRNA sense strand
gaucugguaucucuuacug

SEQ ID NO: 1100576 - RNA, 19 nt, Homo sapiens
  misc_RNA (1)...(19): siRNA sense strand
cugaagaccugcuacaguu

SEQ ID NO: 1100577 - RNA, 19 nt, Homo sapiens
  misc_RNA (1)...(19): siRNA sense strand
gaacagaaagaccaucauc

SEQ ID NO: 1100578 - RNA, 19 nt, Homo sapiens
  misc_RNA (1)...(19): siRNA sense strand
caaugaauaugggcaagaa

SEQ ID NO: 1100579 - RNA, 19 nt, Homo sapiens
  misc_RNA (1)...(19): siRNA sense strand
gcacuagccuccagguuuu

SEQ ID NO: 1100580 - RNA, 19 nt, Homo sapiens
  misc_RNA (1)...(19): siRNA sense strand
aaugggaccuacuaaguuu

SEQ ID NO: 1100581 - RNA, 19 nt, Homo sapiens
  misc_RNA (1)...(19): siRNA sense strand
ccucuuuccuggcaguuua

SEQ ID NO: 1100582 - RNA, 19 nt, Homo sapiens
  misc_RNA (1)...(19): siRNA sense strand
ccuacuaaguuuacacaaa

SEQ ID NO: 1100583 - RNA, 19 nt, Homo sapiens
  misc_RNA (1)...(19): siRNA sense strand
gaauuggagucaacaagag

SEQ ID NO: 1100584 - RNA, 19 nt, Homo sapiens
  misc_RNA (1)...(19): siRNA sense strand
ggaagggaguugauuuacu

SEQ ID NO: 1100585 - RNA, 19 nt, Homo sapiens
  misc_RNA (1)...(19): siRNA sense strand
acaaagaacuauggcaaau

SEQ ID NO: 1100586 - RNA, 19 nt, Homo sapiens
  misc_RNA (1)...(19): siRNA sense strand
gauaucaaaucucauccau

SEQ ID NO: 1100587 - RNA, 19 nt, Homo sapiens
  misc_RNA (1)...(19): siRNA sense strand
ugacagcgaugccauagag

SEQ ID NO: 1100588 - RNA, 19 nt, Homo sapiens
  misc_RNA (1)...(19): siRNA sense strand
cagaagaaguauugcuguu

SEQ ID NO: 1100589 - RNA, 19 nt, Homo sapiens
  misc_RNA (1)...(19): siRNA sense strand
ucagauucccucauugaua

SEQ ID NO: 1100590 - RNA, 19 nt, Homo sapiens
  misc_RNA (1)...(19): siRNA sense strand
gaacaaugccaagcacaug

SEQ ID NO: 1100591 - RNA, 19 nt, Homo sapiens
  misc_RNA (1)...(19): siRNA sense strand
gcaggagaauuaauaaagc

SEQ ID NO: 1100592 - RNA, 19 nt, Homo sapiens
  misc_RNA (1)...(19): siRNA sense strand
gagagauuauuuggagaaa

SEQ ID NO: 1100593 - RNA, 19 nt, Homo sapiens
  misc_RNA (1)...(19): siRNA sense strand
gaaacugaagccugugauu

SEQ ID NO: 1100594 - RNA, 19 nt, Homo sapiens
  misc_RNA (1)...(19): siRNA sense strand
gaagagauacagugauuuu

SEQ ID NO: 1100595 - RNA, 19 nt, Homo sapiens
  misc_RNA (1)...(19): siRNA sense strand
gguagcccuugaugcuuua

SEQ ID NO: 1100596 - RNA, 19 nt, Homo sapiens
  misc_RNA (1)...(19): siRNA sense strand
guaaggauagcgcaaguga

SEQ ID NO: 1100597 - RNA, 19 nt, Homo sapiens
  misc_RNA (1)...(19): siRNA sense strand
gaagggaaugguguugaua

SEQ ID NO: 1100598 - RNA, 19 nt, Homo sapiens
  misc_RNA (1)...(19): siRNA sense strand
gagauuauuuggagaaagc

SEQ ID NO: 1100599 - RNA, 19 nt, Homo sapiens
  misc_RNA (1)...(19): siRNA sense strand
cagauucccucauugauac

SEQ ID NO: 1100600 - RNA, 19 nt, Homo sapiens
  misc_RNA (1)...(19): siRNA sense strand
gaaccaacuucuuuauucc

SEQ ID NO: 1100601 - RNA, 19 nt, Homo sapiens
  misc_RNA (1)...(19): siRNA sense strand
gcaagcacagacacuuuaa

SEQ ID NO: 1100602 - RNA, 19 nt, Homo sapiens
  misc_RNA (1)...(19): siRNA sense strand
gcauagaggaacugaguga

SEQ ID NO: 1100603 - RNA, 19 nt, Homo sapiens
  misc_RNA (1)...(19): siRNA sense strand
caugaagacugaagggaau

SEQ ID NO: 1100604 - RNA, 19 nt, Homo sapiens
  misc_RNA (1)...(19): siRNA sense strand
caucaucucugaggaguca

SEQ ID NO: 1100605 - RNA, 19 nt, Homo sapiens
  misc_RNA (1)...(19): siRNA sense strand
ccaagcacaugaggagaaa

SEQ ID NO: 1100606 - RNA, 19 nt, Homo sapiens
  misc_RNA (1)...(19): siRNA sense strand
cagcaggaauaaauacuca

SEQ ID NO: 1100607 - RNA, 19 nt, Homo sapiens
  misc_RNA (1)...(19): siRNA sense strand
gaacuucucacuggcaaga

SEQ ID NO: 1100608 - RNA, 19 nt, Homo sapiens
  misc_RNA (1)...(19): siRNA sense strand
ggccaacgaugagaacugu

SEQ ID NO: 1100609 - RNA, 19 nt, Homo sapiens
  misc_RNA (1)...(19): siRNA sense strand
ucugcaggauggcauuuaa

SEQ ID NO: 1100610 - RNA, 19 nt, Homo sapiens
  misc_RNA (1)...(19): siRNA sense strand
cgccaggaauggaaguuca

SEQ ID NO: 1100611 - RNA, 19 nt, Homo sapiens
  misc_RNA (1)...(19): siRNA sense strand
gaugcugcccugacugcaa

SEQ ID NO: 1100612 - RNA, 19 nt, Homo sapiens
  misc_RNA (1)...(19): siRNA sense strand
gcaccagccugcacaccua

SEQ ID NO: 1100613 - RNA, 19 nt, Homo sapiens
  misc_RNA (1)...(19): siRNA sense strand
caacagauaagaaaggaaa

SEQ ID NO: 1100614 - RNA, 19 nt, Homo sapiens
  misc_RNA (1)...(19): siRNA sense strand
gccuuacccuugcagcuua

SEQ ID NO: 1100615 - RNA, 19 nt, Homo sapiens
  misc_RNA (1)...(19): siRNA sense strand
cagagcagccaacagauaa

SEQ ID NO: 1100616 - RNA, 19 nt, Homo sapiens
  misc_RNA (1)...(19): siRNA sense strand
ccagagcagccaacagaua

SEQ ID NO: 1100617 - RNA, 19 nt, Homo sapiens
  misc_RNA (1)...(19): siRNA sense strand
aaugugagaugcugaaaca

SEQ ID NO: 1100618 - RNA, 19 nt, Homo sapiens
  misc_RNA (1)...(19): siRNA sense strand
gcauugaacagaccacaga

SEQ ID NO: 1100619 - RNA, 19 nt, Homo sapiens
  misc_RNA (1)...(19): siRNA sense strand
gcagccaacagauaagaaa

SEQ ID NO: 1100620 - RNA, 19 nt, Homo sapiens
  misc_RNA (1)...(19): siRNA sense strand
cacaccaacuguccuaaga

SEQ ID NO: 1100621 - RNA, 19 nt, Homo sapiens
  misc_RNA (1)...(19): siRNA sense strand
caauaggaaccgucaaugu

SEQ ID NO: 1100622 - RNA, 19 nt, Homo sapiens
  misc_RNA (1)...(19): siRNA sense strand
caacuguccuaagaacaau

SEQ ID NO: 1100623 - RNA, 19 nt, Homo sapiens
  misc_RNA (1)...(19): siRNA sense strand
ccaacuguccuaagaacaa

SEQ ID NO: 1100624 - RNA, 19 nt, Homo sapiens
  misc_RNA (1)...(19): siRNA sense strand
gccaacagauaagaaagga

SEQ ID NO: 1100625 - RNA, 19 nt, Homo sapiens
  misc_RNA (1)...(19): siRNA sense strand
gaagacuaccagagggaaa

SEQ ID NO: 1100626 - RNA, 19 nt, Homo sapiens
  misc_RNA (1)...(19): siRNA sense strand
cuaccgcaguggagagaaa

SEQ ID NO: 1100627 - RNA, 19 nt, Homo sapiens
  misc_RNA (1)...(19): siRNA sense strand
gcaccaagaagucacucaa

SEQ ID NO: 1100628 - RNA, 19 nt, Homo sapiens
  misc_RNA (1)...(19): siRNA sense strand
ccacccgggucaccaauag

SEQ ID NO: 1100629 - RNA, 19 nt, Homo sapiens
  misc_RNA (1)...(19): siRNA sense strand
uccaagagcugugguaugg

SEQ ID NO: 1100630 - RNA, 19 nt, Homo sapiens
  misc_RNA (1)...(19): siRNA sense strand
gcagagaugggcagauugg

SEQ ID NO: 1100631 - RNA, 19 nt, Homo sapiens
  misc_RNA (1)...(19): siRNA sense strand
cagggcaaauagucaagaa

SEQ ID NO: 1100632 - RNA, 19 nt, Homo sapiens
  misc_RNA (1)...(19): siRNA sense strand
uaacugcccagcuccaaga

SEQ ID NO: 1100633 - RNA, 19 nt, Homo sapiens
  misc_RNA (1)...(19): siRNA sense strand
gcaguggagagaaauuuca

SEQ ID NO: 1100634 - RNA, 19 nt, Homo sapiens
  misc_RNA (1)...(19): siRNA sense strand
gccagaagccacccuagga

SEQ ID NO: 1100635 - RNA, 19 nt, Homo sapiens
  misc_RNA (1)...(19): siRNA sense strand
ccuggagagugcugugaaa

SEQ ID NO: 1100636 - RNA, 19 nt, Homo sapiens
  misc_RNA (1)...(19): siRNA sense strand
gagcagccaacagauaaga

SEQ ID NO: 1100637 - RNA, 19 nt, Homo sapiens
  misc_RNA (1)...(19): siRNA sense strand
agaagccacccuaggagua

SEQ ID NO: 1100638 - RNA, 19 nt, Homo sapiens
  misc_RNA (1)...(19): siRNA sense strand
ucaagaagccagugauggu

SEQ ID NO: 1100639 - RNA, 19 nt, Homo sapiens
  misc_RNA (1)...(19): siRNA sense strand
ucaagugucaacugcauug

SEQ ID NO: 1100640 - RNA, 19 nt, Homo sapiens
  misc_RNA (1)...(19): siRNA sense strand
ggagagugcugugaaaagu

SEQ ID NO: 1100641 - RNA, 19 nt, Homo sapiens
  misc_RNA (1)...(19): siRNA sense strand
gcaccugucacaccaacug

SEQ ID NO: 1100642 - RNA, 19 nt, Homo sapiens
  misc_RNA (1)...(19): siRNA sense strand
gguagagggagauaacugu

SEQ ID NO: 1100643 - RNA, 19 nt, Homo sapiens
  misc_RNA (1)...(19): siRNA sense strand
aauaggaaccgucaaugug

SEQ ID NO: 1100644 - RNA, 19 nt, Homo sapiens
  misc_RNA (1)...(19): siRNA sense strand
gaagccacccuaggaguag

SEQ ID NO: 1100645 - RNA, 19 nt, Homo sapiens
  misc_RNA (1)...(19): siRNA sense strand
auaggaaccgucaauguga

SEQ ID NO: 1100646 - RNA, 19 nt, Homo sapiens
  misc_RNA (1)...(19): siRNA sense strand
ccauccaccugcaguucaa

SEQ ID NO: 1100647 - RNA, 19 nt, Homo sapiens
  misc_RNA (1)...(19): siRNA sense strand
gaaccgucaaugugagaug

SEQ ID NO: 1100648 - RNA, 19 nt, Homo sapiens
  misc_RNA (1)...(19): siRNA sense strand
gcccagaugaggaggauuc

SEQ ID NO: 1100649 - RNA, 19 nt, Homo sapiens
  misc_RNA (1)...(19): siRNA sense strand
caccaacuguccuaagaac

SEQ ID NO: 1100650 - RNA, 19 nt, Homo sapiens
  misc_RNA (1)...(19): siRNA sense strand
caccaagaagucacucaaa

SEQ ID NO: 1100651 - RNA, 19 nt, Homo sapiens
  misc_RNA (1)...(19): siRNA sense strand
ggacagcaugcuccaagag

SEQ ID NO: 1100652 - RNA, 19 nt, Homo sapiens
  misc_RNA (1)...(19): siRNA sense strand
ugugagaugcugaaacaga

SEQ ID NO: 1100653 - RNA, 19 nt, Homo sapiens
  misc_RNA (1)...(19): siRNA sense strand
accaagaagucacucaaag

SEQ ID NO: 1100654 - RNA, 19 nt, Homo sapiens
  misc_RNA (1)...(19): siRNA sense strand
gagauaacuguguguucga

SEQ ID NO: 1100655 - RNA, 19 nt, Homo sapiens
  misc_RNA (1)...(19): siRNA sense strand
ccaauaggaaccgucaaug

SEQ ID NO: 1100656 - RNA, 19 nt, Homo sapiens
  misc_RNA (1)...(19): siRNA sense strand
gggagauaacuguguguuc

SEQ ID NO: 1100657 - RNA, 19 nt, Homo sapiens
  misc_RNA (1)...(19): siRNA sense strand
ccgcaguggagagaaauuu

SEQ ID NO: 1100658 - RNA, 19 nt, Homo sapiens
  misc_RNA (1)...(19): siRNA sense strand
ccaagaagucacucaaagc

SEQ ID NO: 1100659 - RNA, 19 nt, Homo sapiens
  misc_RNA (1)...(19): siRNA sense strand
agccagagcagccaacaga

SEQ ID NO: 1100660 - RNA, 19 nt, Homo sapiens
  misc_RNA (1)...(19): siRNA sense strand
ggacaugacuggauauaaa

SEQ ID NO: 1100661 - RNA, 19 nt, Homo sapiens
  misc_RNA (1)...(19): siRNA sense strand
gaagcgagcugguuuaguu

SEQ ID NO: 1100662 - RNA, 19 nt, Homo sapiens
  misc_RNA (1)...(19): siRNA sense strand
uaaagcagcugaacuuaaa

SEQ ID NO: 1100663 - RNA, 19 nt, Homo sapiens
  misc_RNA (1)...(19): siRNA sense strand
gaacuuaaauaacgaaugg

SEQ ID NO: 1100664 - RNA, 19 nt, Homo sapiens
  misc_RNA (1)...(19): siRNA sense strand
ggaauugccucuuaucaug

SEQ ID NO: 1100665 - RNA, 19 nt, Homo sapiens
  misc_RNA (1)...(19): siRNA sense strand
ggauugacgugccuuuaua

SEQ ID NO: 1100666 - RNA, 19 nt, Homo sapiens
  misc_RNA (1)...(19): siRNA sense strand
cgacuggaauugccucuua

SEQ ID NO: 1100667 - RNA, 19 nt, Homo sapiens
  misc_RNA (1)...(19): siRNA sense strand
ggucaacucucagucuuua

SEQ ID NO: 1100668 - RNA, 19 nt, Homo sapiens
  misc_RNA (1)...(19): siRNA sense strand
gaaauuggaguucuacaaa

SEQ ID NO: 1100669 - RNA, 19 nt, Homo sapiens
  misc_RNA (1)...(19): siRNA sense strand
cgaauggacuccugauaaa

SEQ ID NO: 1100670 - RNA, 19 nt, Homo sapiens
  misc_RNA (1)...(19): siRNA sense strand
gaagagcuguaccuaguug

SEQ ID NO: 1100671 - RNA, 19 nt, Homo sapiens
  misc_RNA (1)...(19): siRNA sense strand
gaaugucucucaagcaguu

SEQ ID NO: 1100672 - RNA, 19 nt, Homo sapiens
  misc_RNA (1)...(19): siRNA sense strand
gaacucuacuucugcaaga

SEQ ID NO: 1100673 - RNA, 19 nt, Homo sapiens
  misc_RNA (1)...(19): siRNA sense strand
gaagacagauuuggaccuu

SEQ ID NO: 1100674 - RNA, 19 nt, Homo sapiens
  misc_RNA (1)...(19): siRNA sense strand
ggcagaagcuacagacaaa

SEQ ID NO: 1100675 - RNA, 19 nt, Homo sapiens
  misc_RNA (1)...(19): siRNA sense strand
ugaaaggccugaagacaga

SEQ ID NO: 1100676 - RNA, 19 nt, Homo sapiens
  misc_RNA (1)...(19): siRNA sense strand
uguagaagaugcucuguuu

SEQ ID NO: 1100677 - RNA, 19 nt, Homo sapiens
  misc_RNA (1)...(19): siRNA sense strand
gggauguguuuaccgauua

SEQ ID NO: 1100678 - RNA, 19 nt, Homo sapiens
  misc_RNA (1)...(19): siRNA sense strand
gcaacaagauccgauacuu

SEQ ID NO: 1100679 - RNA, 19 nt, Homo sapiens
  misc_RNA (1)...(19): siRNA sense strand
gcaccaguguucugucaaa

SEQ ID NO: 1100680 - RNA, 19 nt, Homo sapiens
  misc_RNA (1)...(19): siRNA sense strand
caagagauuugcaguguuc

SEQ ID NO: 1100681 - RNA, 19 nt, Homo sapiens
  misc_RNA (1)...(19): siRNA sense strand
ccagaaaugucacccuuga

SEQ ID NO: 1100682 - RNA, 19 nt, Homo sapiens
  misc_RNA (1)...(19): siRNA sense strand
gaaaugaaaggccugaaga

SEQ ID NO: 1100683 - RNA, 19 nt, Homo sapiens
  misc_RNA (1)...(19): siRNA sense strand
gcucaugauuggcguguuu

SEQ ID NO: 1100684 - RNA, 19 nt, Homo sapiens
  misc_RNA (1)...(19): siRNA sense strand
gcuauuucuuuccuacuua

SEQ ID NO: 1100685 - RNA, 19 nt, Homo sapiens
  misc_RNA (1)...(19): siRNA sense strand
caguacagcuuuauaaauc

SEQ ID NO: 1100686 - RNA, 19 nt, Homo sapiens
  misc_RNA (1)...(19): siRNA sense strand
gaagaugcucuguuugaaa

SEQ ID NO: 1100687 - RNA, 19 nt, Homo sapiens
  misc_RNA (1)...(19): siRNA sense strand
uaaaguccauuccugagaa

SEQ ID NO: 1100688 - RNA, 19 nt, Homo sapiens
  misc_RNA (1)...(19): siRNA sense strand
gaacauuucaucuccauuc

SEQ ID NO: 1100689 - RNA, 19 nt, Homo sapiens
  misc_RNA (1)...(19): siRNA sense strand
cagaaccacucuucccuuu

SEQ ID NO: 1100690 - RNA, 19 nt, Homo sapiens
  misc_RNA (1)...(19): siRNA sense strand
ccacugguaugccaaguau

SEQ ID NO: 1100691 - RNA, 19 nt, Homo sapiens
  misc_RNA (1)...(19): siRNA sense strand
gcaagaaacuuaaaacucu

SEQ ID NO: 1100692 - RNA, 19 nt, Homo sapiens
  misc_RNA (1)...(19): siRNA sense strand
gaacgccuguccuuuaguc

SEQ ID NO: 1100693 - RNA, 19 nt, Homo sapiens
  misc_RNA (1)...(19): siRNA sense strand
uagaagaaaucguuagcuu

SEQ ID NO: 1100694 - RNA, 19 nt, Homo sapiens
  misc_RNA (1)...(19): siRNA sense strand
uaucugugcuuuguuagua

SEQ ID NO: 1100695 - RNA, 19 nt, Homo sapiens
  misc_RNA (1)...(19): siRNA sense strand
gaaccacucuucccuuucg

SEQ ID NO: 1100696 - RNA, 19 nt, Homo sapiens
  misc_RNA (1)...(19): siRNA sense strand
cagccuaucuguacuuuca

SEQ ID NO: 1100697 - RNA, 19 nt, Homo sapiens
  misc_RNA (1)...(19): siRNA sense strand
guaccuaguuggcucucua

SEQ ID NO: 1100698 - RNA, 19 nt, Homo sapiens
  misc_RNA (1)...(19): siRNA sense strand
gaauuggaccugaaggaaa

SEQ ID NO: 1100699 - RNA, 19 nt, Homo sapiens
  misc_RNA (1)...(19): siRNA sense strand
ugacgugccuuuauaccuu

SEQ ID NO: 1100700 - RNA, 19 nt, Homo sapiens
  misc_RNA (1)...(19): siRNA sense strand
gaauauuccuuugaguaug

SEQ ID NO: 1100701 - RNA, 19 nt, Homo sapiens
  misc_RNA (1)...(19): siRNA sense strand
gcaguacagcuuuauaaau

SEQ ID NO: 1100702 - RNA, 19 nt, Homo sapiens
  misc_RNA (1)...(19): siRNA sense strand
gauccgauacuuggacuua

SEQ ID NO: 1100703 - RNA, 19 nt, Homo sapiens
  misc_RNA (1)...(19): siRNA sense strand
agacuggaauugaugauau

SEQ ID NO: 1100704 - RNA, 19 nt, Homo sapiens
  misc_RNA (1)...(19): siRNA sense strand
gacgugccuuuauaccuua

SEQ ID NO: 1100705 - RNA, 19 nt, Homo sapiens
  misc_RNA (1)...(19): siRNA sense strand
guuaguaucuauggauuga

SEQ ID NO: 1100706 - RNA, 19 nt, Homo sapiens
  misc_RNA (1)...(19): siRNA sense strand
gauaaucugccuuccgaaa

SEQ ID NO: 1100707 - RNA, 19 nt, Homo sapiens
  misc_RNA (1)...(19): siRNA sense strand
cagcugaacuuaaauaacg

SEQ ID NO: 1100708 - RNA, 19 nt, Homo sapiens
  misc_RNA (1)...(19): siRNA sense strand
ggucaugcaagacaagaua

SEQ ID NO: 1100709 - RNA, 19 nt, Homo sapiens
  misc_RNA (1)...(19): siRNA sense strand
gaaaguugacagugcuaaa

SEQ ID NO: 1100710 - RNA, 19 nt, Homo sapiens
  misc_RNA (1)...(19): siRNA sense strand
uggaagagcuguaccuagu

SEQ ID NO: 1100711 - RNA, 19 nt, Homo sapiens
  misc_RNA (1)...(19): siRNA sense strand
cagcaguacagcuuuauaa

SEQ ID NO: 1100712 - RNA, 19 nt, Homo sapiens
  misc_RNA (1)...(19): siRNA sense strand
uagaagaugcucuguuuga

SEQ ID NO: 1100713 - RNA, 19 nt, Homo sapiens
  misc_RNA (1)...(19): siRNA sense strand
uugagaaggugaagaaguu

SEQ ID NO: 1100714 - RNA, 19 nt, Homo sapiens
  misc_RNA (1)...(19): siRNA sense strand
ccuaaaccaucuccugcua

SEQ ID NO: 1100715 - RNA, 19 nt, Homo sapiens
  misc_RNA (1)...(19): siRNA sense strand
uugaaacucugccuucuga

SEQ ID NO: 1100716 - RNA, 19 nt, Homo sapiens
  misc_RNA (1)...(19): siRNA sense strand
gcgagcugguuuaguugua

SEQ ID NO: 1100717 - RNA, 19 nt, Homo sapiens
  misc_RNA (1)...(19): siRNA sense strand
caucacauguaacaaagug

SEQ ID NO: 1100718 - RNA, 19 nt, Homo sapiens
  misc_RNA (1)...(19): siRNA sense strand
cuaguuggcucucuaaguc

SEQ ID NO: 1100719 - RNA, 19 nt, Homo sapiens
  misc_RNA (1)...(19): siRNA sense strand
ccacacgggcuuuaucuga

SEQ ID NO: 1100720 - RNA, 19 nt, Homo sapiens
  misc_RNA (1)...(19): siRNA sense strand
gagcauauaaagaaacuca

SEQ ID NO: 1100721 - RNA, 19 nt, Homo sapiens
  misc_RNA (1)...(19): siRNA sense strand
gacuggaauugaugauauu

SEQ ID NO: 1100722 - RNA, 19 nt, Homo sapiens
  misc_RNA (1)...(19): siRNA sense strand
ggaauuggaccugaaggaa

SEQ ID NO: 1100723 - RNA, 19 nt, Homo sapiens
  misc_RNA (1)...(19): siRNA sense strand
agacagauuuggaccuuca

SEQ ID NO: 1100724 - RNA, 19 nt, Homo sapiens
  misc_RNA (1)...(19): siRNA sense strand
uauaauagugcucugguuu

SEQ ID NO: 1100725 - RNA, 19 nt, Homo sapiens
  misc_RNA (1)...(19): siRNA sense strand
cucaacaacuuaaagaaga

SEQ ID NO: 1100726 - RNA, 19 nt, Homo sapiens
  misc_RNA (1)...(19): siRNA sense strand
cuucagcaguacagcuuua

SEQ ID NO: 1100727 - RNA, 19 nt, Homo sapiens
  misc_RNA (1)...(19): siRNA sense strand
gguaaucacuuugaaaucc

SEQ ID NO: 1100728 - RNA, 19 nt, Homo sapiens
  misc_RNA (1)...(19): siRNA sense strand
ccugagaaguuuguaguug

SEQ ID NO: 1100729 - RNA, 19 nt, Homo sapiens
  misc_RNA (1)...(19): siRNA sense strand
ggacuuaucguacaaugac

SEQ ID NO: 1100730 - RNA, 19 nt, Homo sapiens
  misc_RNA (1)...(19): siRNA sense strand
ucccagagcauauaaagaa

SEQ ID NO: 1100731 - RNA, 19 nt, Homo sapiens
  misc_RNA (1)...(19): siRNA sense strand
acagacaaaugcccauaau

SEQ ID NO: 1100732 - RNA, 19 nt, Homo sapiens
  misc_RNA (1)...(19): siRNA sense strand
ucaggagacuggaauugau

SEQ ID NO: 1100733 - RNA, 19 nt, Homo sapiens
  misc_RNA (1)...(19): siRNA sense strand
ugacagaauuccggcaguu

SEQ ID NO: 1100734 - RNA, 19 nt, Homo sapiens
  misc_RNA (1)...(19): siRNA sense strand
cugagaaguuuguaguuga

SEQ ID NO: 1100735 - RNA, 19 nt, Homo sapiens
  misc_RNA (1)...(19): siRNA sense strand
gaugauauuccagauguga

SEQ ID NO: 1100736 - RNA, 19 nt, Homo sapiens
  misc_RNA (1)...(19): siRNA sense strand
agaagaugcucuguuugaa

SEQ ID NO: 1100737 - RNA, 19 nt, Homo sapiens
  misc_RNA (1)...(19): siRNA sense strand
ccaagagauuugcaguguu

SEQ ID NO: 1100738 - RNA, 19 nt, Homo sapiens
  misc_RNA (1)...(19): siRNA sense strand
gacccucucuauuccaaga

SEQ ID NO: 1100739 - RNA, 19 nt, Homo sapiens
  misc_RNA (1)...(19): siRNA sense strand
acucuucccuuucgaaugu

SEQ ID NO: 1100740 - RNA, 19 nt, Homo sapiens
  misc_RNA (1)...(19): siRNA sense strand
cuggaacgccuguccuuua

SEQ ID NO: 1100741 - RNA, 19 nt, Homo sapiens
  misc_RNA (1)...(19): siRNA sense strand
ggugaugcucaacaacuua

SEQ ID NO: 1100742 - RNA, 19 nt, Homo sapiens
  misc_RNA (1)...(19): siRNA sense strand
gcacagcuagacaaucuuc

SEQ ID NO: 1100743 - RNA, 19 nt, Homo sapiens
  misc_RNA (1)...(19): siRNA sense strand
guauuucccuuaccuuguc

SEQ ID NO: 1100744 - RNA, 19 nt, Homo sapiens
  misc_RNA (1)...(19): siRNA sense strand
ggaaaugaaaggccugaag

SEQ ID NO: 1100745 - RNA, 19 nt, Homo sapiens
  misc_RNA (1)...(19): siRNA sense strand
gaaauccucccuccugaac

SEQ ID NO: 1100746 - RNA, 19 nt, Homo sapiens
  misc_RNA (1)...(19): siRNA sense strand
cuacaucccagagcauaua

SEQ ID NO: 1100747 - RNA, 19 nt, Homo sapiens
  misc_RNA (1)...(19): siRNA sense strand
agaagaaaucguuagcuuu

SEQ ID NO: 1100748 - RNA, 19 nt, Homo sapiens
  misc_RNA (1)...(19): siRNA sense strand
ggaagagcuguaccuaguu

SEQ ID NO: 1100749 - RNA, 19 nt, Homo sapiens
  misc_RNA (1)...(19): siRNA sense strand
gagacuggaauugaugaua

SEQ ID NO: 1100750 - RNA, 19 nt, Homo sapiens
  misc_RNA (1)...(19): siRNA sense strand
ugcuaucugugcuuuguua

SEQ ID NO: 1100751 - RNA, 19 nt, Homo sapiens
  misc_RNA (1)...(19): siRNA sense strand
ucgccagacuguacuuaaa

SEQ ID NO: 1100752 - RNA, 19 nt, Homo sapiens
  misc_RNA (1)...(19): siRNA sense strand
guccauuccugagaaguuu

SEQ ID NO: 1100753 - RNA, 19 nt, Homo sapiens
  misc_RNA (1)...(19): siRNA sense strand
cacacgggcuuuaucugaa

SEQ ID NO: 1100754 - RNA, 19 nt, Homo sapiens
  misc_RNA (1)...(19): siRNA sense strand
acgaauggacuccugauaa

SEQ ID NO: 1100755 - RNA, 19 nt, Homo sapiens
  misc_RNA (1)...(19): siRNA sense strand
uggcacacuuguucucaaa

SEQ ID NO: 1100756 - RNA, 19 nt, Homo sapiens
  misc_RNA (1)...(19): siRNA sense strand
ggaagaacaacaugaacag

SEQ ID NO: 1100757 - RNA, 19 nt, Homo sapiens
  misc_RNA (1)...(19): siRNA sense strand
gagcugguuuaguuguaga

SEQ ID NO: 1100758 - RNA, 19 nt, Homo sapiens
  misc_RNA (1)...(19): siRNA sense strand
gaaggaaaacaaucugaaa

SEQ ID NO: 1100759 - RNA, 19 nt, Homo sapiens
  misc_RNA (1)...(19): siRNA sense strand
ggaaaacaaucugaaaucu

SEQ ID NO: 1100760 - RNA, 19 nt, Homo sapiens
  misc_RNA (1)...(19): siRNA sense strand
gaacugcacuauugucuca

SEQ ID NO: 1100761 - RNA, 19 nt, Homo sapiens
  misc_RNA (1)...(19): siRNA sense strand
gcaagguggugacuaagaa

SEQ ID NO: 1100762 - RNA, 19 nt, Homo sapiens
  misc_RNA (1)...(19): siRNA sense strand
gcaaauaugcuaucuguag

SEQ ID NO: 1100763 - RNA, 19 nt, Homo sapiens
  misc_RNA (1)...(19): siRNA sense strand
gaagaaggccaaugaagug

SEQ ID NO: 1100764 - RNA, 19 nt, Homo sapiens
  misc_RNA (1)...(19): siRNA sense strand
ggacuuaucucagaaaauu

SEQ ID NO: 1100765 - RNA, 19 nt, Homo sapiens
  misc_RNA (1)...(19): siRNA sense strand
cagccaagcuuguugcaaa

SEQ ID NO: 1100766 - RNA, 19 nt, Homo sapiens
  misc_RNA (1)...(19): siRNA sense strand
ugacauggcugacacuugu

SEQ ID NO: 1100767 - RNA, 19 nt, Homo sapiens
  misc_RNA (1)...(19): siRNA sense strand
uggaggaacugcacuauug

SEQ ID NO: 1100768 - RNA, 19 nt, Homo sapiens
  misc_RNA (1)...(19): siRNA sense strand
ggaagaaggccaaugaagu

SEQ ID NO: 1100769 - RNA, 19 nt, Homo sapiens
  misc_RNA (1)...(19): siRNA sense strand
caggagaacucacaaugga

SEQ ID NO: 1100770 - RNA, 19 nt, Homo sapiens
  misc_RNA (1)...(19): siRNA sense strand
gcaggugcagaucauauua

SEQ ID NO: 1100771 - RNA, 19 nt, Homo sapiens
  misc_RNA (1)...(19): siRNA sense strand
ggaccuacaugcuucucaa

SEQ ID NO: 1100772 - RNA, 19 nt, Homo sapiens
  misc_RNA (1)...(19): siRNA sense strand
ccaugcagcugacaaacuu

SEQ ID NO: 1100773 - RNA, 19 nt, Homo sapiens
  misc_RNA (1)...(19): siRNA sense strand
caccaggacuuaucucaga

SEQ ID NO: 1100774 - RNA, 19 nt, Homo sapiens
  misc_RNA (1)...(19): siRNA sense strand
gcaguaguagucaccaaua

SEQ ID NO: 1100775 - RNA, 19 nt, Homo sapiens
  misc_RNA (1)...(19): siRNA sense strand
cuacaugcuucucaaauuc

SEQ ID NO: 1100776 - RNA, 19 nt, Homo sapiens
  misc_RNA (1)...(19): siRNA sense strand
uaggcaagguggugacuaa

SEQ ID NO: 1100777 - RNA, 19 nt, Homo sapiens
  misc_RNA (1)...(19): siRNA sense strand
ccuacaugcuucucaaauu

SEQ ID NO: 1100778 - RNA, 19 nt, Homo sapiens
  misc_RNA (1)...(19): siRNA sense strand
caucuugacucauggaauc

SEQ ID NO: 1100779 - RNA, 19 nt, Homo sapiens
  misc_RNA (1)...(19): siRNA sense strand
gauuaaugccugcaagauu

SEQ ID NO: 1100780 - RNA, 19 nt, Homo sapiens
  misc_RNA (1)...(19): siRNA sense strand
gcagaagccaucaggagaa

SEQ ID NO: 1100781 - RNA, 19 nt, Homo sapiens
  misc_RNA (1)...(19): siRNA sense strand
ucagccaugucccuuuaua

SEQ ID NO: 1100782 - RNA, 19 nt, Homo sapiens
  misc_RNA (1)...(19): siRNA sense strand
ccaagcuuguugcaaauau

SEQ ID NO: 1100783 - RNA, 19 nt, Homo sapiens
  misc_RNA (1)...(19): siRNA sense strand
uaaaguggauaagggagaa

SEQ ID NO: 1100784 - RNA, 19 nt, Homo sapiens
  misc_RNA (1)...(19): siRNA sense strand
caacaacgcaugcuuugag

SEQ ID NO: 1100785 - RNA, 19 nt, Homo sapiens
  misc_RNA (1)...(19): siRNA sense strand
auuaaugccugcaagauug

SEQ ID NO: 1100786 - RNA, 19 nt, Homo sapiens
  misc_RNA (1)...(19): siRNA sense strand
ggcaggauaagaaagauaa

SEQ ID NO: 1100787 - RNA, 19 nt, Homo sapiens
  misc_RNA (1)...(19): siRNA sense strand
gugauugacaucucuauga

SEQ ID NO: 1100788 - RNA, 19 nt, Homo sapiens
  misc_RNA (1)...(19): siRNA sense strand
caucaacaacgcaugcuuu

SEQ ID NO: 1100789 - RNA, 19 nt, Homo sapiens
  misc_RNA (1)...(19): siRNA sense strand
uugcaaauaugcuaucugu

SEQ ID NO: 1100790 - RNA, 19 nt, Homo sapiens
  misc_RNA (1)...(19): siRNA sense strand
aggacaagaugaagcauug

SEQ ID NO: 1100791 - RNA, 19 nt, Homo sapiens
  misc_RNA (1)...(19): siRNA sense strand
cagaguuuaugccaucuug

SEQ ID NO: 1100792 - RNA, 19 nt, Homo sapiens
  misc_RNA (1)...(19): siRNA sense strand
ugacaucucuaugauccuu

SEQ ID NO: 1100793 - RNA, 19 nt, Homo sapiens
  misc_RNA (1)...(19): siRNA sense strand
aaauacaggugauugacau

SEQ ID NO: 1100794 - RNA, 19 nt, Homo sapiens
  misc_RNA (1)...(19): siRNA sense strand
auucagccaugucccuuua

SEQ ID NO: 1100795 - RNA, 19 nt, Homo sapiens
  misc_RNA (1)...(19): siRNA sense strand
caagcuuguugcaaauaug

SEQ ID NO: 1100796 - RNA, 19 nt, Homo sapiens
  misc_RNA (1)...(19): siRNA sense strand
ugauugacaucucuaugau

SEQ ID NO: 1100797 - RNA, 19 nt, Homo sapiens
  misc_RNA (1)...(19): siRNA sense strand
gacuuugccuugauucaca

SEQ ID NO: 1100798 - RNA, 19 nt, Homo sapiens
  misc_RNA (1)...(19): siRNA sense strand
acuauugucucaccugaug

SEQ ID NO: 1100799 - RNA, 19 nt, Homo sapiens
  misc_RNA (1)...(19): siRNA sense strand
cagaucauauuaucaccau

SEQ ID NO: 1100800 - RNA, 19 nt, Homo sapiens
  misc_RNA (1)...(19): siRNA sense strand
gaggacaagaugaagcauu

SEQ ID NO: 1100801 - RNA, 19 nt, Homo sapiens
  misc_RNA (1)...(19): siRNA sense strand
gagagugaccuccauugca

SEQ ID NO: 1100802 - RNA, 19 nt, Homo sapiens
  misc_RNA (1)...(19): siRNA sense strand
gaauccguuucuuaccuau

SEQ ID NO: 1100803 - RNA, 19 nt, Homo sapiens
  misc_RNA (1)...(19): siRNA sense strand
uaugccaucuugacucaug

SEQ ID NO: 1100804 - RNA, 19 nt, Homo sapiens
  misc_RNA (1)...(19): siRNA sense strand
gaacggaagaaggccaaug

SEQ ID NO: 1100805 - RNA, 19 nt, Homo sapiens
  misc_RNA (1)...(19): siRNA sense strand
ggaggaacugcacuauugu

SEQ ID NO: 1100806 - RNA, 19 nt, Homo sapiens
  misc_RNA (1)...(19): siRNA sense strand
gaacucacaauggagaauc

SEQ ID NO: 1100807 - RNA, 19 nt, Homo sapiens
  misc_RNA (1)...(19): siRNA sense strand
uaagagagugaccuccauu

SEQ ID NO: 1100808 - RNA, 19 nt, Homo sapiens
  misc_RNA (1)...(19): siRNA sense strand
guggcgaaaucaaugacaa

SEQ ID NO: 1100809 - RNA, 19 nt, Homo sapiens
  misc_RNA (1)...(19): siRNA sense strand
uaauggagcuuuugaucau

SEQ ID NO: 1100810 - RNA, 19 nt, Homo sapiens
  misc_RNA (1)...(19): siRNA sense strand
cagagugguuguggcgaaa

SEQ ID NO: 1100811 - RNA, 19 nt, Homo sapiens
  misc_RNA (1)...(19): siRNA sense strand
gcagagccggcuguccuaa

SEQ ID NO: 1100812 - RNA, 19 nt, Homo sapiens
  misc_RNA (1)...(19): siRNA sense strand
ggcaagguggugacuaaga

SEQ ID NO: 1100813 - RNA, 19 nt, Homo sapiens
  misc_RNA (1)...(19): siRNA sense strand
cagccaugucccuuuauaa

SEQ ID NO: 1100814 - RNA, 19 nt, Homo sapiens
  misc_RNA (1)...(19): siRNA sense strand
cuaagagagugaccuccau

SEQ ID NO: 1100815 - RNA, 19 nt, Homo sapiens
  misc_RNA (1)...(19): siRNA sense strand
gccaagcuuguugcaaaua

SEQ ID NO: 1100816 - RNA, 19 nt, Homo sapiens
  misc_RNA (1)...(19): siRNA sense strand
gaagccaucaggagaacuc

SEQ ID NO: 1100817 - RNA, 19 nt, Homo sapiens
  misc_RNA (1)...(19): siRNA sense strand
ucacaaagaacggaagaag

SEQ ID NO: 1100818 - RNA, 19 nt, Homo sapiens
  misc_RNA (1)...(19): siRNA sense strand
caggcugaauguggacuuu

SEQ ID NO: 1100819 - RNA, 19 nt, Homo sapiens
  misc_RNA (1)...(19): siRNA sense strand
gagugguuguggcgaaauc

SEQ ID NO: 1100820 - RNA, 19 nt, Homo sapiens
  misc_RNA (1)...(19): siRNA sense strand
aauguggacuuugccuuga

SEQ ID NO: 1100821 - RNA, 19 nt, Homo sapiens
  misc_RNA (1)...(19): siRNA sense strand
cacaauggagaauccguuu

SEQ ID NO: 1100822 - RNA, 19 nt, Homo sapiens
  misc_RNA (1)...(19): siRNA sense strand
gaccuacaugcuucucaaa

SEQ ID NO: 1100823 - RNA, 19 nt, Homo sapiens
  misc_RNA (1)...(19): siRNA sense strand
uuuaugccaucuugacuca

SEQ ID NO: 1100824 - RNA, 19 nt, Homo sapiens
  misc_RNA (1)...(19): siRNA sense strand
ugccuugauucacaaagaa

SEQ ID NO: 1100825 - RNA, 19 nt, Homo sapiens
  misc_RNA (1)...(19): siRNA sense strand
agagccggcuguccuaaag

SEQ ID NO: 1100826 - RNA, 19 nt, Homo sapiens
  misc_RNA (1)...(19): siRNA sense strand
gccaaucucagccaagcuu

SEQ ID NO: 1100827 - RNA, 19 nt, Homo sapiens
  misc_RNA (1)...(19): siRNA sense strand
gagcuuuugaucaugauua

SEQ ID NO: 1100828 - RNA, 19 nt, Homo sapiens
  misc_RNA (1)...(19): siRNA sense strand
aguagucaccaauaccaua

SEQ ID NO: 1100829 - RNA, 19 nt, Homo sapiens
  misc_RNA (1)...(19): siRNA sense strand
ggcgaaaucaaugacaauu

SEQ ID NO: 1100830 - RNA, 19 nt, Homo sapiens
  misc_RNA (1)...(19): siRNA sense strand
ugauaucccaguagacaau

SEQ ID NO: 1100831 - RNA, 19 nt, Homo sapiens
  misc_RNA (1)...(19): siRNA sense strand
uagcaggugcagaucauau

SEQ ID NO: 1100832 - RNA, 19 nt, Homo sapiens
  misc_RNA (1)...(19): siRNA sense strand
uguggacuuugccuugauu

SEQ ID NO: 1100833 - RNA, 19 nt, Homo sapiens
  misc_RNA (1)...(19): siRNA sense strand
guaguagucaccaauacca

SEQ ID NO: 1100834 - RNA, 19 nt, Homo sapiens
  misc_RNA (1)...(19): siRNA sense strand
caguaguagucaccaauac

SEQ ID NO: 1100835 - RNA, 19 nt, Homo sapiens
  misc_RNA (1)...(19): siRNA sense strand
uguagcaggugcagaucau

SEQ ID NO: 1100836 - RNA, 19 nt, Homo sapiens
  misc_RNA (1)...(19): siRNA sense strand
gagaacucacaauggagaa

SEQ ID NO: 1100837 - RNA, 19 nt, Homo sapiens
  misc_RNA (1)...(19): siRNA sense strand
cuucuccgguccugcuauu

SEQ ID NO: 1100838 - RNA, 19 nt, Homo sapiens
  misc_RNA (1)...(19): siRNA sense strand
guggaggaacugcacuauu

SEQ ID NO: 1100839 - RNA, 19 nt, Homo sapiens
  misc_RNA (1)...(19): siRNA sense strand
gauaucccaguagacaauu

SEQ ID NO: 1100840 - RNA, 19 nt, Homo sapiens
  misc_RNA (1)...(19): siRNA sense strand
cagcucccaccaggacuua

SEQ ID NO: 1100841 - RNA, 19 nt, Homo sapiens
  misc_RNA (1)...(19): siRNA sense strand
ccaggacuuaucucagaaa

SEQ ID NO: 1100842 - RNA, 19 nt, Homo sapiens
  misc_RNA (1)...(19): siRNA sense strand
gacaauuuaauggagcuuu

SEQ ID NO: 1100843 - RNA, 19 nt, Homo sapiens
  misc_RNA (1)...(19): siRNA sense strand
cagagccggcuguccuaaa

SEQ ID NO: 1100844 - RNA, 19 nt, Homo sapiens
  misc_RNA (1)...(19): siRNA sense strand
cagaagccaucaggagaac

SEQ ID NO: 1100845 - RNA, 19 nt, Homo sapiens
  misc_RNA (1)...(19): siRNA sense strand
ccugcuauuucucgcauca

SEQ ID NO: 1100846 - RNA, 19 nt, Homo sapiens
  misc_RNA (1)...(19): siRNA sense strand
caggauaagaaagauaaga

SEQ ID NO: 1100847 - RNA, 19 nt, Homo sapiens
  misc_RNA (1)...(19): siRNA sense strand
gcagcucccaccaggacuu

SEQ ID NO: 1100848 - RNA, 19 nt, Homo sapiens
  misc_RNA (1)...(19): siRNA sense strand
aacggaagaaggccaauga

SEQ ID NO: 1100849 - RNA, 19 nt, Homo sapiens
  misc_RNA (1)...(19): siRNA sense strand
uugccuugauucacaaaga

SEQ ID NO: 1100850 - RNA, 19 nt, Homo sapiens
  misc_RNA (1)...(19): siRNA sense strand
gaacauuaaugaccucaaa

SEQ ID NO: 1100851 - RNA, 19 nt, Homo sapiens
  misc_RNA (1)...(19): siRNA sense strand
gagcaaaggugguagagaa

SEQ ID NO: 1100852 - RNA, 19 nt, Homo sapiens
  misc_RNA (1)...(19): siRNA sense strand
gcacaaguacuuugguuua

SEQ ID NO: 1100853 - RNA, 19 nt, Homo sapiens
  misc_RNA (1)...(19): siRNA sense strand
gagaaggauuagaaaguua

SEQ ID NO: 1100854 - RNA, 19 nt, Homo sapiens
  misc_RNA (1)...(19): siRNA sense strand
ugugaaaucucuccucuua

SEQ ID NO: 1100855 - RNA, 19 nt, Homo sapiens
  misc_RNA (1)...(19): siRNA sense strand
ggagaaggauuagaaaguu

SEQ ID NO: 1100856 - RNA, 19 nt, Homo sapiens
  misc_RNA (1)...(19): siRNA sense strand
gagauguugucaauguuua

SEQ ID NO: 1100857 - RNA, 19 nt, Homo sapiens
  misc_RNA (1)...(19): siRNA sense strand
gaagauuccuuauguggau

SEQ ID NO: 1100858 - RNA, 19 nt, Homo sapiens
  misc_RNA (1)...(19): siRNA sense strand
gaagagaagaacaaaguuu

SEQ ID NO: 1100859 - RNA, 19 nt, Homo sapiens
  misc_RNA (1)...(19): siRNA sense strand
ugaagaagcccaacaggua

SEQ ID NO: 1100860 - RNA, 19 nt, Homo sapiens
  misc_RNA (1)...(19): siRNA sense strand
caaaggaguucuucaccaa

SEQ ID NO: 1100861 - RNA, 19 nt, Homo sapiens
  misc_RNA (1)...(19): siRNA sense strand
gaauguggaugcacgaaug

SEQ ID NO: 1100862 - RNA, 19 nt, Homo sapiens
  misc_RNA (1)...(19): siRNA sense strand
gguagaauauagugagauu

SEQ ID NO: 1100863 - RNA, 19 nt, Homo sapiens
  misc_RNA (1)...(19): siRNA sense strand
ugagagauguugucaaugu

SEQ ID NO: 1100864 - RNA, 19 nt, Homo sapiens
  misc_RNA (1)...(19): siRNA sense strand
gaacauugccaaccauuuc

SEQ ID NO: 1100865 - RNA, 19 nt, Homo sapiens
  misc_RNA (1)...(19): siRNA sense strand
agacaaacccaauggaaua

SEQ ID NO: 1100866 - RNA, 19 nt, Homo sapiens
  misc_RNA (1)...(19): siRNA sense strand
ugaaaucucuccucuuauc

SEQ ID NO: 1100867 - RNA, 19 nt, Homo sapiens
  misc_RNA (1)...(19): siRNA sense strand
gcagaacaauggaaucuac

SEQ ID NO: 1100868 - RNA, 19 nt, Homo sapiens
  misc_RNA (1)...(19): siRNA sense strand
ggcaacaaaugcauuauuc

SEQ ID NO: 1100869 - RNA, 19 nt, Homo sapiens
  misc_RNA (1)...(19): siRNA sense strand
gaaggaugccaaugaugua

SEQ ID NO: 1100870 - RNA, 19 nt, Homo sapiens
  misc_RNA (1)...(19): siRNA sense strand
gaacaauggaaucuacaaa

SEQ ID NO: 1100871 - RNA, 19 nt, Homo sapiens
  misc_RNA (1)...(19): siRNA sense strand
uaaaguagcaguucuucuu

SEQ ID NO: 1100872 - RNA, 19 nt, Homo sapiens
  misc_RNA (1)...(19): siRNA sense strand
gagcauucaugucuauugu

SEQ ID NO: 1100873 - RNA, 19 nt, Homo sapiens
  misc_RNA (1)...(19): siRNA sense strand
uaaccagucuucuuaccaa

SEQ ID NO: 1100874 - RNA, 19 nt, Homo sapiens
  misc_RNA (1)...(19): siRNA sense strand
gcacuugcagcccagaaua

SEQ ID NO: 1100875 - RNA, 19 nt, Homo sapiens
  misc_RNA (1)...(19): siRNA sense strand
gauguaugauguugguuug

SEQ ID NO: 1100876 - RNA, 19 nt, Homo sapiens
  misc_RNA (1)...(19): siRNA sense strand
uaaagaaugcugauaguca

SEQ ID NO: 1100877 - RNA, 19 nt, Homo sapiens
  misc_RNA (1)...(19): siRNA sense strand
gcauucaugucuauugugu

SEQ ID NO: 1100878 - RNA, 19 nt, Homo sapiens
  misc_RNA (1)...(19): siRNA sense strand
caagagcaccuacuacguu

SEQ ID NO: 1100879 - RNA, 19 nt, Homo sapiens
  misc_RNA (1)...(19): siRNA sense strand
cccaacagguagaacuuua

SEQ ID NO: 1100880 - RNA, 19 nt, Homo sapiens
  misc_RNA (1)...(19): siRNA sense strand
guaccaauccaaugugaaa

SEQ ID NO: 1100881 - RNA, 19 nt, Homo sapiens
  misc_RNA (1)...(19): siRNA sense strand
ugugguauaugaaguauug

SEQ ID NO: 1100882 - RNA, 19 nt, Homo sapiens
  misc_RNA (1)...(19): siRNA sense strand
gagagauguugucaauguu

SEQ ID NO: 1100883 - RNA, 19 nt, Homo sapiens
  misc_RNA (1)...(19): siRNA sense strand
agaaguuugugguauauga

SEQ ID NO: 1100884 - RNA, 19 nt, Homo sapiens
  misc_RNA (1)...(19): siRNA sense strand
uuucuucacuguaccauuu

SEQ ID NO: 1100885 - RNA, 19 nt, Homo sapiens
  misc_RNA (1)...(19): siRNA sense strand
gaauaaaguagcaguucuu

SEQ ID NO: 1100886 - RNA, 19 nt, Homo sapiens
  misc_RNA (1)...(19): siRNA sense strand
ucugagagauguugucaau

SEQ ID NO: 1100887 - RNA, 19 nt, Homo sapiens
  misc_RNA (1)...(19): siRNA sense strand
gaaggacuuuuccagauuu

SEQ ID NO: 1100888 - RNA, 19 nt, Homo sapiens
  misc_RNA (1)...(19): siRNA sense strand
cacaaguacuuugguuuaa

SEQ ID NO: 1100889 - RNA, 19 nt, Homo sapiens
  misc_RNA (1)...(19): siRNA sense strand
ggacgacugcuguucaaug

SEQ ID NO: 1100890 - RNA, 19 nt, Homo sapiens
  misc_RNA (1)...(19): siRNA sense strand
ggauguaugauguugguuu

SEQ ID NO: 1100891 - RNA, 19 nt, Homo sapiens
  misc_RNA (1)...(19): siRNA sense strand
cuacuacguuucuggaaug

SEQ ID NO: 1100892 - RNA, 19 nt, Homo sapiens
  misc_RNA (1)...(19): siRNA sense strand
ggauacccaaggacaguua

SEQ ID NO: 1100893 - RNA, 19 nt, Homo sapiens
  misc_RNA (1)...(19): siRNA sense strand
ggaagagaagaacaaaguu

SEQ ID NO: 1100894 - RNA, 19 nt, Homo sapiens
  misc_RNA (1)...(19): siRNA sense strand
ccaauggaauaaagaugga

SEQ ID NO: 1100895 - RNA, 19 nt, Homo sapiens
  misc_RNA (1)...(19): siRNA sense strand
caaacccaauggaauaaag

SEQ ID NO: 1100896 - RNA, 19 nt, Homo sapiens
  misc_RNA (1)...(19): siRNA sense strand
ggaacauugccaaccauuu

SEQ ID NO: 1100897 - RNA, 19 nt, Homo sapiens
  misc_RNA (1)...(19): siRNA sense strand
uugaggagcugaacuucuu

SEQ ID NO: 1100898 - RNA, 19 nt, Homo sapiens
  misc_RNA (1)...(19): siRNA sense strand
caaggacaguuaauuaagc

SEQ ID NO: 1100899 - RNA, 19 nt, Homo sapiens
  misc_RNA (1)...(19): siRNA sense strand
aagagcaccuacuacguuu

SEQ ID NO: 1100900 - RNA, 19 nt, Homo sapiens
  misc_RNA (1)...(19): siRNA sense strand
gacaaacccaauggaauaa

SEQ ID NO: 1100901 - RNA, 19 nt, Homo sapiens
  misc_RNA (1)...(19): siRNA sense strand
aaagaagauuccuuaugug

SEQ ID NO: 1100902 - RNA, 19 nt, Homo sapiens
  misc_RNA (1)...(19): siRNA sense strand
aaacucacguuguccaaag

SEQ ID NO: 1100903 - RNA, 19 nt, Homo sapiens
  misc_RNA (1)...(19): siRNA sense strand
ucaccaagcacaaguacuu

SEQ ID NO: 1100904 - RNA, 19 nt, Homo sapiens
  misc_RNA (1)...(19): siRNA sense strand
agaauuccaugcaccucua

SEQ ID NO: 1100905 - RNA, 19 nt, Homo sapiens
  misc_RNA (1)...(19): siRNA sense strand
gcagacccacgguucauug

SEQ ID NO: 1100906 - RNA, 19 nt, Homo sapiens
  misc_RNA (1)...(19): siRNA sense strand
ccaugcaccucuaaucauc

SEQ ID NO: 1100907 - RNA, 19 nt, Homo sapiens
  misc_RNA (1)...(19): siRNA sense strand
gaaguuugugguauaugaa

SEQ ID NO: 1100908 - RNA, 19 nt, Homo sapiens
  misc_RNA (1)...(19): siRNA sense strand
caacaaaugcauuauucca

SEQ ID NO: 1100909 - RNA, 19 nt, Homo sapiens
  misc_RNA (1)...(19): siRNA sense strand
gaaaguuauguggcagaua

SEQ ID NO: 1100910 - RNA, 19 nt, Homo sapiens
  misc_RNA (1)...(19): siRNA sense strand
ugaaggaugccaaugaugu

SEQ ID NO: 1100911 - RNA, 19 nt, Homo sapiens
  misc_RNA (1)...(19): siRNA sense strand
gcuugaaggaugccaauga

SEQ ID NO: 1100912 - RNA, 19 nt, Homo sapiens
  misc_RNA (1)...(19): siRNA sense strand
guccaaagcugggcaagag

SEQ ID NO: 1100913 - RNA, 19 nt, Homo sapiens
  misc_RNA (1)...(19): siRNA sense strand
ggagcauucaugucuauug

SEQ ID NO: 1100914 - RNA, 19 nt, Homo sapiens
  misc_RNA (1)...(19): siRNA sense strand
caacagguagaacuuuaug

SEQ ID NO: 1100915 - RNA, 19 nt, Homo sapiens
  misc_RNA (1)...(19): siRNA sense strand
gguuugccaucccguaaga

SEQ ID NO: 1100916 - RNA, 19 nt, Homo sapiens
  misc_RNA (1)...(19): siRNA sense strand
ucucuccucuuaucuccua

SEQ ID NO: 1100917 - RNA, 19 nt, Homo sapiens
  misc_RNA (1)...(19): siRNA sense strand
acccaaggacaguuaauua

SEQ ID NO: 1100918 - RNA, 19 nt, Homo sapiens
  misc_RNA (1)...(19): siRNA sense strand
auucaugucuauuguguug

SEQ ID NO: 1100919 - RNA, 19 nt, Homo sapiens
  misc_RNA (1)...(19): siRNA sense strand
acaauggaaucuacaaagg

SEQ ID NO: 1100920 - RNA, 19 nt, Homo sapiens
  misc_RNA (1)...(19): siRNA sense strand
aagcagagcguauccugaa

SEQ ID NO: 1100921 - RNA, 19 nt, Homo sapiens
  misc_RNA (1)...(19): siRNA sense strand
gcucucgccuuccagcaau

SEQ ID NO: 1100922 - RNA, 19 nt, Homo sapiens
  misc_RNA (1)...(19): siRNA sense strand
gcagagcuccaggccauga

SEQ ID NO: 1100923 - RNA, 19 nt, Homo sapiens
  misc_RNA (1)...(19): siRNA sense strand
ccagacaaacccaauggaa

SEQ ID NO: 1100924 - RNA, 19 nt, Homo sapiens
  misc_RNA (1)...(19): siRNA sense strand
cccaaggacaguuaauuaa

SEQ ID NO: 1100925 - RNA, 19 nt, Homo sapiens
  misc_RNA (1)...(19): siRNA sense strand
ggagcagacuguggagcaa

SEQ ID NO: 1100926 - RNA, 19 nt, Homo sapiens
  misc_RNA (1)...(19): siRNA sense strand
uauggcaacaaaugcauua

SEQ ID NO: 1100927 - RNA, 19 nt, Homo sapiens
  misc_RNA (1)...(19): siRNA sense strand
ccaaugauguaccaaucca

SEQ ID NO: 1100928 - RNA, 19 nt, Homo sapiens
  misc_RNA (1)...(19): siRNA sense strand
ccacuaaagaaugcugaua

SEQ ID NO: 1100929 - RNA, 19 nt, Homo sapiens
  misc_RNA (1)...(19): siRNA sense strand
uuugacaucuuccaguuug

SEQ ID NO: 1100930 - RNA, 19 nt, Homo sapiens
  misc_RNA (1)...(19): siRNA sense strand
ccaaccauuucuucacugu

SEQ ID NO: 1100931 - RNA, 19 nt, Homo sapiens
  misc_RNA (1)...(19): siRNA sense strand
ucagaaaggagcagacugu

SEQ ID NO: 1100932 - RNA, 19 nt, Homo sapiens
  misc_RNA (1)...(19): siRNA sense strand
gacccacgguucauuggau

SEQ ID NO: 1100933 - RNA, 19 nt, Homo sapiens
  misc_RNA (1)...(19): siRNA sense strand
aagcacaaguacuuugguu

SEQ ID NO: 1100934 - RNA, 19 nt, Homo sapiens
  misc_RNA (1)...(19): siRNA sense strand
gacgacugcuguucaaugc

SEQ ID NO: 1100935 - RNA, 19 nt, Homo sapiens
  misc_RNA (1)...(19): siRNA sense strand
caauggaaucuacaaagga

SEQ ID NO: 1100936 - RNA, 19 nt, Homo sapiens
  misc_RNA (1)...(19): siRNA sense strand
uaugaaguauugcgagaag

SEQ ID NO: 1100937 - RNA, 19 nt, Homo sapiens
  misc_RNA (1)...(19): siRNA sense strand
gcauuuggagcauucaugu

SEQ ID NO: 1100938 - RNA, 19 nt, Homo sapiens
  misc_RNA (1)...(19): siRNA sense strand
aguagcaguucuucuucua

SEQ ID NO: 1100939 - RNA, 19 nt, Homo sapiens
  misc_RNA (1)...(19): siRNA sense strand
uguggcagauaaagaauuc

SEQ ID NO: 1100940 - RNA, 19 nt, Homo sapiens
  misc_RNA (1)...(19): siRNA sense strand
aaaaggccauugaagguuu

SEQ ID NO: 1100941 - RNA, 19 nt, Homo sapiens
  misc_RNA (1)...(19): siRNA sense strand
ccaaggacaguuaauuaag

SEQ ID NO: 1100942 - RNA, 19 nt, Homo sapiens
  misc_RNA (1)...(19): siRNA sense strand
ugggaaugguggucuuuau

SEQ ID NO: 1100943 - RNA, 19 nt, Homo sapiens
  misc_RNA (1)...(19): siRNA sense strand
ccgaguggauggaguuuac

SEQ ID NO: 1100944 - RNA, 19 nt, Homo sapiens
  misc_RNA (1)...(19): siRNA sense strand
ggaaugguggucuuuaucg

SEQ ID NO: 1100945 - RNA, 19 nt, Homo sapiens
  misc_RNA (1)...(19): siRNA sense strand
gaauuccaugcaccucuaa

SEQ ID NO: 1100946 - RNA, 19 nt, Homo sapiens
  misc_RNA (1)...(19): siRNA sense strand
ccaauccaaugugaaaucu

SEQ ID NO: 1100947 - RNA, 19 nt, Homo sapiens
  misc_RNA (1)...(19): siRNA sense strand
gcaaggcaugcuuugaugu

SEQ ID NO: 1100948 - RNA, 19 nt, Homo sapiens
  misc_RNA (1)...(19): siRNA sense strand
caaaagaagauuccuuaug

SEQ ID NO: 1100949 - RNA, 19 nt, Homo sapiens
  misc_RNA (1)...(19): siRNA sense strand
gaaaacgaacccuacagaa

SEQ ID NO: 1100950 - RNA, 19 nt, Homo sapiens
  misc_RNA (1)...(19): siRNA sense strand
cuaaggagcugccguuaua

SEQ ID NO: 1100951 - RNA, 19 nt, Homo sapiens
  misc_RNA (1)...(19): siRNA sense strand
uaaaggagcuggcacuaga

SEQ ID NO: 1100952 - RNA, 19 nt, Homo sapiens
  misc_RNA (1)...(19): siRNA sense strand
ggaugacagugaacaguua

SEQ ID NO: 1100953 - RNA, 19 nt, Homo sapiens
  misc_RNA (1)...(19): siRNA sense strand
uaagaugggucugaaauuu

SEQ ID NO: 1100954 - RNA, 19 nt, Homo sapiens
  misc_RNA (1)...(19): siRNA sense strand
gccaacagcuucacucuga

SEQ ID NO: 1100955 - RNA, 19 nt, Homo sapiens
  misc_RNA (1)...(19): siRNA sense strand
gaggagccauuuauugaaa

SEQ ID NO: 1100956 - RNA, 19 nt, Homo sapiens
  misc_RNA (1)...(19): siRNA sense strand
gauaccgacuuguuccuua

SEQ ID NO: 1100957 - RNA, 19 nt, Homo sapiens
  misc_RNA (1)...(19): siRNA sense strand
gagaggagccauuuauuga

SEQ ID NO: 1100958 - RNA, 19 nt, Homo sapiens
  misc_RNA (1)...(19): siRNA sense strand
gagagaauacagugaauuu

SEQ ID NO: 1100959 - RNA, 19 nt, Homo sapiens
  misc_RNA (1)...(19): siRNA sense strand
caaagaagagguugagaaa

SEQ ID NO: 1100960 - RNA, 19 nt, Homo sapiens
  misc_RNA (1)...(19): siRNA sense strand
ggaacucacagcuccauua

SEQ ID NO: 1100961 - RNA, 19 nt, Homo sapiens
  misc_RNA (1)...(19): siRNA sense strand
gaaugaggaugacagugaa

SEQ ID NO: 1100962 - RNA, 19 nt, Homo sapiens
  misc_RNA (1)...(19): siRNA sense strand
ggagaggagccauuuauug

SEQ ID NO: 1100963 - RNA, 19 nt, Homo sapiens
  misc_RNA (1)...(19): siRNA sense strand
ggacacgaguuucaagauc

SEQ ID NO: 1100964 - RNA, 19 nt, Homo sapiens
  misc_RNA (1)...(19): siRNA sense strand
gacaaaagcucucaaguuc

SEQ ID NO: 1100965 - RNA, 19 nt, Homo sapiens
  misc_RNA (1)...(19): siRNA sense strand
ggaauggaaugagauuaau

SEQ ID NO: 1100966 - RNA, 19 nt, Homo sapiens
  misc_RNA (1)...(19): siRNA sense strand
gaaaagaaccgcaagauag

SEQ ID NO: 1100967 - RNA, 19 nt, Homo sapiens
  misc_RNA (1)...(19): siRNA sense strand
gaucuuagagcaaaugaau

SEQ ID NO: 1100968 - RNA, 19 nt, Homo sapiens
  misc_RNA (1)...(19): siRNA sense strand
ccaauaagaugggucugaa

SEQ ID NO: 1100969 - RNA, 19 nt, Homo sapiens
  misc_RNA (1)...(19): siRNA sense strand
acucacagcuccauuacuu

SEQ ID NO: 1100970 - RNA, 19 nt, Homo sapiens
  misc_RNA (1)...(19): siRNA sense strand
gagcugccguuauacuguu

SEQ ID NO: 1100971 - RNA, 19 nt, Homo sapiens
  misc_RNA (1)...(19): siRNA sense strand
aagaagagguugagaaagg

SEQ ID NO: 1100972 - RNA, 19 nt, Homo sapiens
  misc_RNA (1)...(19): siRNA sense strand
ggaggaagcucaguaucag

SEQ ID NO: 1100973 - RNA, 19 nt, Homo sapiens
  misc_RNA (1)...(19): siRNA sense strand
uccaugcucuggccaauaa

SEQ ID NO: 1100974 - RNA, 19 nt, Homo sapiens
  misc_RNA (1)...(19): siRNA sense strand
gauggugucucucgcagau

SEQ ID NO: 1100975 - RNA, 19 nt, Homo sapiens
  misc_RNA (1)...(19): siRNA sense strand
caacaaguuugaccaugca

SEQ ID NO: 1100976 - RNA, 19 nt, Homo sapiens
  misc_RNA (1)...(19): siRNA sense strand
ugaaugaggaugacaguga

SEQ ID NO: 1100977 - RNA, 19 nt, Homo sapiens
  misc_RNA (1)...(19): siRNA sense strand
ggaaaagaaccgcaagaua

SEQ ID NO: 1100978 - RNA, 19 nt, Homo sapiens
  misc_RNA (1)...(19): siRNA sense strand
ggagaaaggcaagauugaa

SEQ ID NO: 1100979 - RNA, 19 nt, Homo sapiens
  misc_RNA (1)...(19): siRNA sense strand
ggauggauguggagaaagg

SEQ ID NO: 1100980 - RNA, 19 nt, Homo sapiens
  misc_RNA (1)...(19): siRNA sense strand
gagaaaggcgagacacguu

SEQ ID NO: 1100981 - RNA, 19 nt, Homo sapiens
  misc_RNA (1)...(19): siRNA sense strand
ggacaaaagcucucaaguu

SEQ ID NO: 1100982 - RNA, 19 nt, Homo sapiens
  misc_RNA (1)...(19): siRNA sense strand
caggauggauguggagaaa

SEQ ID NO: 1100983 - RNA, 19 nt, Homo sapiens
  misc_RNA (1)...(19): siRNA sense strand
aaaccaacgucuuuaaugc

SEQ ID NO: 1100984 - RNA, 19 nt, Homo sapiens
  misc_RNA (1)...(19): siRNA sense strand
uuucagagauaccgacuug

SEQ ID NO: 1100985 - RNA, 19 nt, Homo sapiens
  misc_RNA (1)...(19): siRNA sense strand
gcacagauacucuuuuaga

SEQ ID NO: 1100986 - RNA, 19 nt, Homo sapiens
  misc_RNA (1)...(19): siRNA sense strand
aggaugauguccacagaaa

SEQ ID NO: 1100987 - RNA, 19 nt, Homo sapiens
  misc_RNA (1)...(19): siRNA sense strand
uagaccagcuggacacuca

SEQ ID NO: 1100988 - RNA, 19 nt, Homo sapiens
  misc_RNA (1)...(19): siRNA sense strand
ggaggaagagacuaacuca

SEQ ID NO: 1100989 - RNA, 19 nt, Homo sapiens
  misc_RNA (1)...(19): siRNA sense strand
gagaaaggcaagauugaag

SEQ ID NO: 1100990 - RNA, 19 nt, Homo sapiens
  misc_RNA (1)...(19): siRNA sense strand
ucuaagacguccaacaaca

SEQ ID NO: 1100991 - RNA, 19 nt, Homo sapiens
  misc_RNA (1)...(19): siRNA sense strand
augaugagcugaagagugu

SEQ ID NO: 1100992 - RNA, 19 nt, Homo sapiens
  misc_RNA (1)...(19): siRNA sense strand
gagacuggaucaggaggaa

SEQ ID NO: 1100993 - RNA, 19 nt, Homo sapiens
  misc_RNA (1)...(19): siRNA sense strand
gcaaaugaaugaggaugac

SEQ ID NO: 1100994 - RNA, 19 nt, Homo sapiens
  misc_RNA (1)...(19): siRNA sense strand
gaaaaugagugucagaacu

SEQ ID NO: 1100995 - RNA, 19 nt, Homo sapiens
  misc_RNA (1)...(19): siRNA sense strand
gaaagugccaacagcuuca

SEQ ID NO: 1100996 - RNA, 19 nt, Homo sapiens
  misc_RNA (1)...(19): siRNA sense strand
ccaggaugauguccacaga

SEQ ID NO: 1100997 - RNA, 19 nt, Homo sapiens
  misc_RNA (1)...(19): siRNA sense strand
caguuuggcacaaucaaua

SEQ ID NO: 1100998 - RNA, 19 nt, Homo sapiens
  misc_RNA (1)...(19): siRNA sense strand
gaaugcacagauacucuuu

SEQ ID NO: 1100999 - RNA, 19 nt, Homo sapiens
  misc_RNA (1)...(19): siRNA sense strand
ggaaugcacagauacucuu

SEQ ID NO: 1101000 - RNA, 19 nt, Homo sapiens
  misc_RNA (1)...(19): siRNA sense strand
caacagcuucacucugauu

SEQ ID NO: 1101001 - RNA, 19 nt, Homo sapiens
  misc_RNA (1)...(19): siRNA sense strand
gaugauguccacagaaagu

SEQ ID NO: 1101002 - RNA, 19 nt, Homo sapiens
  misc_RNA (1)...(19): siRNA sense strand
ucagagauaccgacuuguu

SEQ ID NO: 1101003 - RNA, 19 nt, Homo sapiens
  misc_RNA (1)...(19): siRNA sense strand
uggaauggaaugagauuaa

SEQ ID NO: 1101004 - RNA, 19 nt, Homo sapiens
  misc_RNA (1)...(19): siRNA sense strand
uuacggaaaccauucauau

SEQ ID NO: 1101005 - RNA, 19 nt, Homo sapiens
  misc_RNA (1)...(19): siRNA sense strand
ucaaguucaugcugacgaa

SEQ ID NO: 1101006 - RNA, 19 nt, Homo sapiens
  misc_RNA (1)...(19): siRNA sense strand
caaaagcucucaaguucau

SEQ ID NO: 1101007 - RNA, 19 nt, Homo sapiens
  misc_RNA (1)...(19): siRNA sense strand
gaacucacagcuccauuac

SEQ ID NO: 1101008 - RNA, 19 nt, Homo sapiens
  misc_RNA (1)...(19): siRNA sense strand
ucagagagaauacagugaa

SEQ ID NO: 1101009 - RNA, 19 nt, Homo sapiens
  misc_RNA (1)...(19): siRNA sense strand
gugcagcaguucaaagaag

SEQ ID NO: 1101010 - RNA, 19 nt, Homo sapiens
  misc_RNA (1)...(19): siRNA sense strand
gaauggaaugagauuaaug

SEQ ID NO: 1101011 - RNA, 19 nt, Homo sapiens
  misc_RNA (1)...(19): siRNA sense strand
caggagaggagccauuuau

SEQ ID NO: 1101012 - RNA, 19 nt, Homo sapiens
  misc_RNA (1)...(19): siRNA sense strand
gagcugaagaguguugaaa

SEQ ID NO: 1101013 - RNA, 19 nt, Homo sapiens
  misc_RNA (1)...(19): siRNA sense strand
gcaagauaguggcagaaaa

SEQ ID NO: 1101014 - RNA, 19 nt, Homo sapiens
  misc_RNA (1)...(19): siRNA sense strand
gagagacccaggaggaaga

SEQ ID NO: 1101015 - RNA, 19 nt, Homo sapiens
  misc_RNA (1)...(19): siRNA sense strand
cagaaaaucucgagaaggu

SEQ ID NO: 1101016 - RNA, 19 nt, Homo sapiens
  misc_RNA (1)...(19): siRNA sense strand
gcaguucaaagaagagguu

SEQ ID NO: 1101017 - RNA, 19 nt, Homo sapiens
  misc_RNA (1)...(19): siRNA sense strand
ggacaacaaguuugaccau

SEQ ID NO: 1101018 - RNA, 19 nt, Homo sapiens
  misc_RNA (1)...(19): siRNA sense strand
cagagagaauacagugaau

SEQ ID NO: 1101019 - RNA, 19 nt, Homo sapiens
  misc_RNA (1)...(19): siRNA sense strand
cagcucaacgucacugaaa

SEQ ID NO: 1101020 - RNA, 19 nt, Homo sapiens
  misc_RNA (1)...(19): siRNA sense strand
caaguuugaccaugcaaug

SEQ ID NO: 1101021 - RNA, 19 nt, Homo sapiens
  misc_RNA (1)...(19): siRNA sense strand
auucauaucuggagucucu

SEQ ID NO: 1101022 - RNA, 19 nt, Homo sapiens
  misc_RNA (1)...(19): siRNA sense strand
gugaacaguuacagaugga

SEQ ID NO: 1101023 - RNA, 19 nt, Homo sapiens
  misc_RNA (1)...(19): siRNA sense strand
ucuuagagcaaaugaauga

SEQ ID NO: 1101024 - RNA, 19 nt, Homo sapiens
  misc_RNA (1)...(19): siRNA sense strand
ugacagacaaaucuaagga

SEQ ID NO: 1101025 - RNA, 19 nt, Homo sapiens
  misc_RNA (1)...(19): siRNA sense strand
ggacaguuuggcacaauca

SEQ ID NO: 1101026 - RNA, 19 nt, Homo sapiens
  misc_RNA (1)...(19): siRNA sense strand
cggaaaccauucauaucug

SEQ ID NO: 1101027 - RNA, 19 nt, Homo sapiens
  misc_RNA (1)...(19): siRNA sense strand
cggcuccuauuccaucaaa

SEQ ID NO: 1101028 - RNA, 19 nt, Homo sapiens
  misc_RNA (1)...(19): siRNA sense strand
uuggagaucuuagagcaaa

SEQ ID NO: 1101029 - RNA, 19 nt, Homo sapiens
  misc_RNA (1)...(19): siRNA sense strand
gcaguggcggcuccuauuc

SEQ ID NO: 1101030 - RNA, 19 nt, Homo sapiens
  misc_RNA (1)...(19): siRNA sense strand
gaaaaccaacgucuuuaau

SEQ ID NO: 1101031 - RNA, 19 nt, Homo sapiens
  misc_RNA (1)...(19): siRNA sense strand
guggagaaaggcaagauug

SEQ ID NO: 1101032 - RNA, 19 nt, Homo sapiens
  misc_RNA (1)...(19): siRNA sense strand
caacgucacugaaaaugag

SEQ ID NO: 1101033 - RNA, 19 nt, Homo sapiens
  misc_RNA (1)...(19): siRNA sense strand
ggagcugccguuauacugu

SEQ ID NO: 1101034 - RNA, 19 nt, Homo sapiens
  misc_RNA (1)...(19): siRNA sense strand
caauaagaugggucugaaa

SEQ ID NO: 1101035 - RNA, 19 nt, Homo sapiens
  misc_RNA (1)...(19): siRNA sense strand
aguuacagauggagcuaaa

SEQ ID NO: 1101036 - RNA, 19 nt, Homo sapiens
  misc_RNA (1)...(19): siRNA sense strand
agaaaggcaagauugaaga

SEQ ID NO: 1101037 - RNA, 19 nt, Homo sapiens
  misc_RNA (1)...(19): siRNA sense strand
agaaaggcgagacacguuu

SEQ ID NO: 1101038 - RNA, 19 nt, Homo sapiens
  misc_RNA (1)...(19): siRNA sense strand
gaugagcugaagaguguug

SEQ ID NO: 1101039 - RNA, 19 nt, Homo sapiens
  misc_RNA (1)...(19): siRNA sense strand
gcuaaaggagcuggcacua

SEQ ID NO: 1101040 - RNA, 19 nt, Homo sapiens
  misc_RNA (1)...(19): siRNA sense strand
ggagaucuuagagcaaaug

SEQ ID NO: 1101041 - RNA, 19 nt, Homo sapiens
  misc_RNA (1)...(19): siRNA sense strand
aauaagaugggucugaaau

SEQ ID NO: 1101042 - RNA, 19 nt, Homo sapiens
  misc_RNA (1)...(19): siRNA sense strand
uggaagacguggaaaagaa

SEQ ID NO: 1101043 - RNA, 19 nt, Homo sapiens
  misc_RNA (1)...(19): siRNA sense strand
ggagcuggaagacguggaa

SEQ ID NO: 1101044 - RNA, 19 nt, Homo sapiens
  misc_RNA (1)...(19): siRNA sense strand
cagaaagugccaacagcuu

SEQ ID NO: 1101045 - RNA, 19 nt, Homo sapiens
  misc_RNA (1)...(19): siRNA sense strand
gcuuggguguccucacaau

SEQ ID NO: 1101046 - RNA, 19 nt, Homo sapiens
  misc_RNA (1)...(19): siRNA sense strand
gaaaggcaagauugaagac

SEQ ID NO: 1101047 - RNA, 19 nt, Homo sapiens
  misc_RNA (1)...(19): siRNA sense strand
ggagaaccucagccgaaga

SEQ ID NO: 1101048 - RNA, 19 nt, Homo sapiens
  misc_RNA (1)...(19): siRNA sense strand
ggagccauuuauugaaacu

SEQ ID NO: 1101049 - RNA, 19 nt, Homo sapiens
  misc_RNA (1)...(19): siRNA sense strand
gaaaggcgagacacguuuu

SEQ ID NO: 1101050 - RNA, 19 nt, Homo sapiens
  misc_RNA (1)...(19): siRNA sense strand
ggacccaucugucuucaaa

SEQ ID NO: 1101051 - RNA, 19 nt, Homo sapiens
  misc_RNA (1)...(19): siRNA sense strand
gaacagauggagucggaua

SEQ ID NO: 1101052 - RNA, 19 nt, Homo sapiens
  misc_RNA (1)...(19): siRNA sense strand
gaacuccagucccuacaga

SEQ ID NO: 1101053 - RNA, 19 nt, Homo sapiens
  misc_RNA (1)...(19): siRNA sense strand
gaaauggguccaccaggaa

SEQ ID NO: 1101054 - RNA, 19 nt, Homo sapiens
  misc_RNA (1)...(19): siRNA sense strand
gaucugcgauggcugcaau

SEQ ID NO: 1101055 - RNA, 19 nt, Homo sapiens
  misc_RNA (1)...(19): siRNA sense strand
gcauugaaguugauaucga

SEQ ID NO: 1101056 - RNA, 19 nt, Homo sapiens
  misc_RNA (1)...(19): siRNA sense strand
ggagucggauaacuguuca

SEQ ID NO: 1101057 - RNA, 19 nt, Homo sapiens
  misc_RNA (1)...(19): siRNA sense strand
ggugaaacacggacacuuc

SEQ ID NO: 1101058 - RNA, 19 nt, Homo sapiens
  misc_RNA (1)...(19): siRNA sense strand
gaaguggacccgucuacag

SEQ ID NO: 1101059 - RNA, 19 nt, Homo sapiens
  misc_RNA (1)...(19): siRNA sense strand
ggacccgucuacaggugaa

SEQ ID NO: 1101060 - RNA, 19 nt, Homo sapiens
  misc_RNA (1)...(19): siRNA sense strand
caaugggccugugguagga

SEQ ID NO: 1101061 - RNA, 19 nt, Homo sapiens
  misc_RNA (1)...(19): siRNA sense strand
uccaugggcuucucugaug

SEQ ID NO: 1101062 - RNA, 19 nt, Homo sapiens
  misc_RNA (1)...(19): siRNA sense strand
gugugaauuuccugaagaa

SEQ ID NO: 1101063 - RNA, 19 nt, Homo sapiens
  misc_RNA (1)...(19): siRNA sense strand
ugaauuuccugaagaacgu

SEQ ID NO: 1101064 - RNA, 19 nt, Homo sapiens
  misc_RNA (1)...(19): siRNA sense strand
cauugaaguugauaucgau

SEQ ID NO: 1101065 - RNA, 19 nt, Homo sapiens
  misc_RNA (1)...(19): siRNA sense strand
gcacaccaagcucgcauuc

SEQ ID NO: 1101066 - RNA, 19 nt, Homo sapiens
  misc_RNA (1)...(19): siRNA sense strand
gaccaagaacuaugacauc

SEQ ID NO: 1101067 - RNA, 19 nt, Homo sapiens
  misc_RNA (1)...(19): siRNA sense strand
gagugugaauuuccugaag

SEQ ID NO: 1101068 - RNA, 19 nt, Homo sapiens
  misc_RNA (1)...(19): siRNA sense strand
ugaaguugauaucgaugug

SEQ ID NO: 1101069 - RNA, 19 nt, Homo sapiens
  misc_RNA (1)...(19): siRNA sense strand
gauggagucggauaacugu

SEQ ID NO: 1101070 - RNA, 19 nt, Homo sapiens
  misc_RNA (1)...(19): siRNA sense strand
ccaugggcuucucugauga

SEQ ID NO: 1101071 - RNA, 19 nt, Homo sapiens
  misc_RNA (1)...(19): siRNA sense strand
cgaaucuacauuaaagaga

SEQ ID NO: 1101072 - RNA, 19 nt, Homo sapiens
  misc_RNA (1)...(19): siRNA sense strand
ggccauguccuacgugaag

SEQ ID NO: 1101073 - RNA, 19 nt, Homo sapiens
  misc_RNA (1)...(19): siRNA sense strand
uuccgaaucuacauuaaag

SEQ ID NO: 1101074 - RNA, 19 nt, Homo sapiens
  misc_RNA (1)...(19): siRNA sense strand
ugacuggacccaucugucu

SEQ ID NO: 1101075 - RNA, 19 nt, Homo sapiens
  misc_RNA (1)...(19): siRNA sense strand
caauggccauguccuacgu

SEQ ID NO: 1101076 - RNA, 19 nt, Homo sapiens
  misc_RNA (1)...(19): siRNA sense strand
gaggauccgagugugaauu

SEQ ID NO: 1101077 - RNA, 19 nt, Homo sapiens
  misc_RNA (1)...(19): siRNA sense strand
cauccaguauucaaagcau

SEQ ID NO: 1101078 - RNA, 19 nt, Homo sapiens
  misc_RNA (1)...(19): siRNA sense strand
ggacaccauccaguauuca

SEQ ID NO: 1101079 - RNA, 19 nt, Homo sapiens
  misc_RNA (1)...(19): siRNA sense strand
gggcauugaaguugauauc

SEQ ID NO: 1101080 - RNA, 19 nt, Homo sapiens
  misc_RNA (1)...(19): siRNA sense strand
agugugaauuuccugaaga

SEQ ID NO: 1101081 - RNA, 19 nt, Homo sapiens
  misc_RNA (1)...(19): siRNA sense strand
caagccgggugggaauguu

SEQ ID NO: 1101082 - RNA, 19 nt, Homo sapiens
  misc_RNA (1)...(19): siRNA sense strand
gcaagccgggugggaaugu

SEQ ID NO: 1101083 - RNA, 19 nt, Homo sapiens
  misc_RNA (1)...(19): siRNA sense strand
gaagaacguuggggagagu

SEQ ID NO: 1101084 - RNA, 19 nt, Homo sapiens
  misc_RNA (1)...(19): siRNA sense strand
ugacaucuuccgaaucuac

SEQ ID NO: 1101085 - RNA, 19 nt, Homo sapiens
  misc_RNA (1)...(19): siRNA sense strand
uaacuguucaggaggagau

SEQ ID NO: 1101086 - RNA, 19 nt, Homo sapiens
  misc_RNA (1)...(19): siRNA sense strand
guucaggaggagaugauga

SEQ ID NO: 1101087 - RNA, 19 nt, Homo sapiens
  misc_RNA (1)...(19): siRNA sense strand
uaggaacccgcuacaagug

SEQ ID NO: 1101088 - RNA, 19 nt, Homo sapiens
  misc_RNA (1)...(19): siRNA sense strand
caucuuccgaaucuacauu

SEQ ID NO: 1101089 - RNA, 19 nt, Homo sapiens
  misc_RNA (1)...(19): siRNA sense strand
ccucugggcauugaaguug

SEQ ID NO: 1101090 - RNA, 19 nt, Homo sapiens
  misc_RNA (1)...(19): siRNA sense strand
gcugauaucucuucuaaau

SEQ ID NO: 1101091 - RNA, 19 nt, Homo sapiens
  misc_RNA (1)...(19): siRNA sense strand
gagagagcaucacaauaua

SEQ ID NO: 1101092 - RNA, 19 nt, Homo sapiens
  misc_RNA (1)...(19): siRNA sense strand
ugaaguugcugcagaauuu

SEQ ID NO: 1101093 - RNA, 19 nt, Homo sapiens
  misc_RNA (1)...(19): siRNA sense strand
uagaugggcuguauacaua

SEQ ID NO: 1101094 - RNA, 19 nt, Homo sapiens
  misc_RNA (1)...(19): siRNA sense strand
gagaugauccugaacauau

SEQ ID NO: 1101095 - RNA, 19 nt, Homo sapiens
  misc_RNA (1)...(19): siRNA sense strand
gccagaagauggauaaaug

SEQ ID NO: 1101096 - RNA, 19 nt, Homo sapiens
  misc_RNA (1)...(19): siRNA sense strand
cauuggagcuggcggcuua

SEQ ID NO: 1101097 - RNA, 19 nt, Homo sapiens
  misc_RNA (1)...(19): siRNA sense strand
gguaaccucuauugaagaa

SEQ ID NO: 1101098 - RNA, 19 nt, Homo sapiens
  misc_RNA (1)...(19): siRNA sense strand
gugcauacauucccuugaa

SEQ ID NO: 1101099 - RNA, 19 nt, Homo sapiens
  misc_RNA (1)...(19): siRNA sense strand
uaacgacacuuucuaucga

SEQ ID NO: 1101100 - RNA, 19 nt, Homo sapiens
  misc_RNA (1)...(19): siRNA sense strand
ccagaacacuguauugagu

SEQ ID NO: 1101101 - RNA, 19 nt, Homo sapiens
  misc_RNA (1)...(19): siRNA sense strand
gaacgaacaaggccaaauc

SEQ ID NO: 1101102 - RNA, 19 nt, Homo sapiens
  misc_RNA (1)...(19): siRNA sense strand
gcaguagcuuccacaaaug

SEQ ID NO: 1101103 - RNA, 19 nt, Homo sapiens
  misc_RNA (1)...(19): siRNA sense strand
agagagagcaucacaauau

SEQ ID NO: 1101104 - RNA, 19 nt, Homo sapiens
  misc_RNA (1)...(19): siRNA sense strand
caauagugcuucucugcaa

SEQ ID NO: 1101105 - RNA, 19 nt, Homo sapiens
  misc_RNA (1)...(19): siRNA sense strand
gugcuucucugcaaaugaa

SEQ ID NO: 1101106 - RNA, 19 nt, Homo sapiens
  misc_RNA (1)...(19): siRNA sense strand
uaaauggcaugcugauauc

SEQ ID NO: 1101107 - RNA, 19 nt, Homo sapiens
  misc_RNA (1)...(19): siRNA sense strand
aaugcacgcuggaacuuua

SEQ ID NO: 1101108 - RNA, 19 nt, Homo sapiens
  misc_RNA (1)...(19): siRNA sense strand
uggauuaucuaaccaauag

SEQ ID NO: 1101109 - RNA, 19 nt, Homo sapiens
  misc_RNA (1)...(19): siRNA sense strand
ugacagaguuccuaauugc

SEQ ID NO: 1101110 - RNA, 19 nt, Homo sapiens
  misc_RNA (1)...(19): siRNA sense strand
caagcuccauugucccuuu

SEQ ID NO: 1101111 - RNA, 19 nt, Homo sapiens
  misc_RNA (1)...(19): siRNA sense strand
guaaaguucuagucauugg

SEQ ID NO: 1101112 - RNA, 19 nt, Homo sapiens
  misc_RNA (1)...(19): siRNA sense strand
gauauggacacuauagaug

SEQ ID NO: 1101113 - RNA, 19 nt, Homo sapiens
  misc_RNA (1)...(19): siRNA sense strand
ugcaguagcuuccacaaau

SEQ ID NO: 1101114 - RNA, 19 nt, Homo sapiens
  misc_RNA (1)...(19): siRNA sense strand
gccuaaagauauuggaaga

SEQ ID NO: 1101115 - RNA, 19 nt, Homo sapiens
  misc_RNA (1)...(19): siRNA sense strand
agaugauccugaacauaua

SEQ ID NO: 1101116 - RNA, 19 nt, Homo sapiens
  misc_RNA (1)...(19): siRNA sense strand
ggagaugauccugaacaua

SEQ ID NO: 1101117 - RNA, 19 nt, Homo sapiens
  misc_RNA (1)...(19): siRNA sense strand
uauguggacuggacucuau

SEQ ID NO: 1101118 - RNA, 19 nt, Homo sapiens
  misc_RNA (1)...(19): siRNA sense strand
uacaggagguuuuggauua

SEQ ID NO: 1101119 - RNA, 19 nt, Homo sapiens
  misc_RNA (1)...(19): siRNA sense strand
gagagcaucacaauauaau

SEQ ID NO: 1101120 - RNA, 19 nt, Homo sapiens
  misc_RNA (1)...(19): siRNA sense strand
gagaagggguuccauuaga

SEQ ID NO: 1101121 - RNA, 19 nt, Homo sapiens
  misc_RNA (1)...(19): siRNA sense strand
uaaaugacagaguuccuaa

SEQ ID NO: 1101122 - RNA, 19 nt, Homo sapiens
  misc_RNA (1)...(19): siRNA sense strand
gacagaagguuuuaaagga

SEQ ID NO: 1101123 - RNA, 19 nt, Homo sapiens
  misc_RNA (1)...(19): siRNA sense strand
cuccaguucuuguuagaua

SEQ ID NO: 1101124 - RNA, 19 nt, Homo sapiens
  misc_RNA (1)...(19): siRNA sense strand
gauggugucuuagauccaa

SEQ ID NO: 1101125 - RNA, 19 nt, Homo sapiens
  misc_RNA (1)...(19): siRNA sense strand
augcugauaucucuucuaa

SEQ ID NO: 1101126 - RNA, 19 nt, Homo sapiens
  misc_RNA (1)...(19): siRNA sense strand
cacuuucuaucgacaauuu

SEQ ID NO: 1101127 - RNA, 19 nt, Homo sapiens
  misc_RNA (1)...(19): siRNA sense strand
gauaaauggcaugcugaua

SEQ ID NO: 1101128 - RNA, 19 nt, Homo sapiens
  misc_RNA (1)...(19): siRNA sense strand
cacuauagauguuuccaau

SEQ ID NO: 1101129 - RNA, 19 nt, Homo sapiens
  misc_RNA (1)...(19): siRNA sense strand
aaucuggccuugucugguu

SEQ ID NO: 1101130 - RNA, 19 nt, Homo sapiens
  misc_RNA (1)...(19): siRNA sense strand
auaaauggcaugcugauau

SEQ ID NO: 1101131 - RNA, 19 nt, Homo sapiens
  misc_RNA (1)...(19): siRNA sense strand
caaucuaaauaggcaguuu

SEQ ID NO: 1101132 - RNA, 19 nt, Homo sapiens
  misc_RNA (1)...(19): siRNA sense strand
ugauguagaugggcuguau

SEQ ID NO: 1101133 - RNA, 19 nt, Homo sapiens
  misc_RNA (1)...(19): siRNA sense strand
guagaugggcuguauacau

SEQ ID NO: 1101134 - RNA, 19 nt, Homo sapiens
  misc_RNA (1)...(19): siRNA sense strand
gaaugcacgcuggaacuuu

SEQ ID NO: 1101135 - RNA, 19 nt, Homo sapiens
  misc_RNA (1)...(19): siRNA sense strand
auacacauuugaagcagaa

SEQ ID NO: 1101136 - RNA, 19 nt, Homo sapiens
  misc_RNA (1)...(19): siRNA sense strand
agauggagaugauccugaa

SEQ ID NO: 1101137 - RNA, 19 nt, Homo sapiens
  misc_RNA (1)...(19): siRNA sense strand
uauggacacuauagauguu

SEQ ID NO: 1101138 - RNA, 19 nt, Homo sapiens
  misc_RNA (1)...(19): siRNA sense strand
ccaaaucucuccaaaacau

SEQ ID NO: 1101139 - RNA, 19 nt, Homo sapiens
  misc_RNA (1)...(19): siRNA sense strand
gaagcagaaagaaaggaaa

SEQ ID NO: 1101140 - RNA, 19 nt, Homo sapiens
  misc_RNA (1)...(19): siRNA sense strand
uggaaugacugcuuguauc

SEQ ID NO: 1101141 - RNA, 19 nt, Homo sapiens
  misc_RNA (1)...(19): siRNA sense strand
guagccagcuuccucaaaa

SEQ ID NO: 1101142 - RNA, 19 nt, Homo sapiens
  misc_RNA (1)...(19): siRNA sense strand
aaagauauuggaagaccua

SEQ ID NO: 1101143 - RNA, 19 nt, Homo sapiens
  misc_RNA (1)...(19): siRNA sense strand
gguguuuaaugauguagau

SEQ ID NO: 1101144 - RNA, 19 nt, Homo sapiens
  misc_RNA (1)...(19): siRNA sense strand
aaugacugcuuguaucgaa

SEQ ID NO: 1101145 - RNA, 19 nt, Homo sapiens
  misc_RNA (1)...(19): siRNA sense strand
ucgguaaccucuauugaag

SEQ ID NO: 1101146 - RNA, 19 nt, Homo sapiens
  misc_RNA (1)...(19): siRNA sense strand
aaugacagaguuccuaauu

SEQ ID NO: 1101147 - RNA, 19 nt, Homo sapiens
  misc_RNA (1)...(19): siRNA sense strand
cuagagagagcaucacaau

SEQ ID NO: 1101148 - RNA, 19 nt, Homo sapiens
  misc_RNA (1)...(19): siRNA sense strand
guuccuaauugcaauguag

SEQ ID NO: 1101149 - RNA, 19 nt, Homo sapiens
  misc_RNA (1)...(19): siRNA sense strand
gauauuggaagaccuaagg

SEQ ID NO: 1101150 - RNA, 19 nt, Homo sapiens
  misc_RNA (1)...(19): siRNA sense strand
agaacacuguauugaguau

SEQ ID NO: 1101151 - RNA, 19 nt, Homo sapiens
  misc_RNA (1)...(19): siRNA sense strand
cagaacacuguauugagua

SEQ ID NO: 1101152 - RNA, 19 nt, Homo sapiens
  misc_RNA (1)...(19): siRNA sense strand
agagagcaucacaauauaa

SEQ ID NO: 1101153 - RNA, 19 nt, Homo sapiens
  misc_RNA (1)...(19): siRNA sense strand
cgaacaaggccaaaucucu

SEQ ID NO: 1101154 - RNA, 19 nt, Homo sapiens
  misc_RNA (1)...(19): siRNA sense strand
uacagucgguaaccucuau

SEQ ID NO: 1101155 - RNA, 19 nt, Homo sapiens
  misc_RNA (1)...(19): siRNA sense strand
ggcugaaguugcugcagaa

SEQ ID NO: 1101156 - RNA, 19 nt, Homo sapiens
  misc_RNA (1)...(19): siRNA sense strand
cauguaaaguucuagucau

SEQ ID NO: 1101157 - RNA, 19 nt, Homo sapiens
  misc_RNA (1)...(19): siRNA sense strand
uagagagagcaucacaaua

SEQ ID NO: 1101158 - RNA, 19 nt, Homo sapiens
  misc_RNA (1)...(19): siRNA sense strand
ggaaugacugcuuguaucg

SEQ ID NO: 1101159 - RNA, 19 nt, Homo sapiens
  misc_RNA (1)...(19): siRNA sense strand
cuaaaugacagaguuccua

SEQ ID NO: 1101160 - RNA, 19 nt, Homo sapiens
  misc_RNA (1)...(19): siRNA sense strand
gaacuggcgguugcugaug

SEQ ID NO: 1101161 - RNA, 19 nt, Homo sapiens
  misc_RNA (1)...(19): siRNA sense strand
gaaaucuccagccaucaca

SEQ ID NO: 1101162 - RNA, 19 nt, Homo sapiens
  misc_RNA (1)...(19): siRNA sense strand
gauuaucuaaccaauagug

SEQ ID NO: 1101163 - RNA, 19 nt, Homo sapiens
  misc_RNA (1)...(19): siRNA sense strand
gaaaacugcccagcuugua

SEQ ID NO: 1101164 - RNA, 19 nt, Homo sapiens
  misc_RNA (1)...(19): siRNA sense strand
agccacaagugcauacauu

SEQ ID NO: 1101165 - RNA, 19 nt, Homo sapiens
  misc_RNA (1)...(19): siRNA sense strand
ggagcagccuuuuggagaa

SEQ ID NO: 1101166 - RNA, 19 nt, Homo sapiens
  misc_RNA (1)...(19): siRNA sense strand
gacacuuucuaucgacaau

SEQ ID NO: 1101167 - RNA, 19 nt, Homo sapiens
  misc_RNA (1)...(19): siRNA sense strand
cagaguuccuaauugcaau

SEQ ID NO: 1101168 - RNA, 19 nt, Homo sapiens
  misc_RNA (1)...(19): siRNA sense strand
ggccaaaucucuccaaaac

SEQ ID NO: 1101169 - RNA, 19 nt, Homo sapiens
  misc_RNA (1)...(19): siRNA sense strand
aauagugcuucucugcaaa

SEQ ID NO: 1101170 - RNA, 19 nt, Homo sapiens
  misc_RNA (1)...(19): siRNA sense strand
gaagaccuaaggcugaagu

SEQ ID NO: 1101171 - RNA, 19 nt, Homo sapiens
  misc_RNA (1)...(19): siRNA sense strand
gacagauucauguuauaga

SEQ ID NO: 1101172 - RNA, 19 nt, Homo sapiens
  misc_RNA (1)...(19): siRNA sense strand
ccacauuucaacaagauuc

SEQ ID NO: 1101173 - RNA, 19 nt, Homo sapiens
  misc_RNA (1)...(19): siRNA sense strand
guuccacauuucaacaaga

SEQ ID NO: 1101174 - RNA, 19 nt, Homo sapiens
  misc_RNA (1)...(19): siRNA sense strand
uagaacacuuuacuuacag

SEQ ID NO: 1101175 - RNA, 19 nt, Homo sapiens
  misc_RNA (1)...(19): siRNA sense strand
uggaagaccuaaggcugaa

SEQ ID NO: 1101176 - RNA, 19 nt, Homo sapiens
  misc_RNA (1)...(19): siRNA sense strand
gauguagaugggcuguaua

SEQ ID NO: 1101177 - RNA, 19 nt, Homo sapiens
  misc_RNA (1)...(19): siRNA sense strand
ggauaaauggcaugcugau

SEQ ID NO: 1101178 - RNA, 19 nt, Homo sapiens
  misc_RNA (1)...(19): siRNA sense strand
uaccagaacacuguauuga

SEQ ID NO: 1101179 - RNA, 19 nt, Homo sapiens
  misc_RNA (1)...(19): siRNA sense strand
gucgguaaccucuauugaa

SEQ ID NO: 1101180 - RNA, 19 nt, Homo sapiens
  misc_RNA (1)...(19): siRNA sense strand
caucacagccacccuagag

SEQ ID NO: 1101181 - RNA, 19 nt, Homo sapiens
  misc_RNA (1)...(19): siRNA sense strand
agacuguacuauucaaacu

SEQ ID NO: 1101182 - RNA, 19 nt, Homo sapiens
  misc_RNA (1)...(19): siRNA sense strand
cauugucccuuugauagau

SEQ ID NO: 1101183 - RNA, 19 nt, Homo sapiens
  misc_RNA (1)...(19): siRNA sense strand
ugaagcagaaagaaaggaa

SEQ ID NO: 1101184 - RNA, 19 nt, Homo sapiens
  misc_RNA (1)...(19): siRNA sense strand
ggagcuggcggcuuaggau

SEQ ID NO: 1101185 - RNA, 19 nt, Homo sapiens
  misc_RNA (1)...(19): siRNA sense strand
ucccuugaauaauuacuug

SEQ ID NO: 1101186 - RNA, 19 nt, Homo sapiens
  misc_RNA (1)...(19): siRNA sense strand
gauccugaacauauacaau

SEQ ID NO: 1101187 - RNA, 19 nt, Homo sapiens
  misc_RNA (1)...(19): siRNA sense strand
acacuguauugaguaugua

SEQ ID NO: 1101188 - RNA, 19 nt, Homo sapiens
  misc_RNA (1)...(19): siRNA sense strand
uaauugcaauguaguucca

SEQ ID NO: 1101189 - RNA, 19 nt, Homo sapiens
  misc_RNA (1)...(19): siRNA sense strand
acuguacuauucaaacuuc

SEQ ID NO: 1101190 - RNA, 19 nt, Homo sapiens
  misc_RNA (1)...(19): siRNA sense strand
gcugauaucucuucuaaau

SEQ ID NO: 1101191 - RNA, 19 nt, Homo sapiens
  misc_RNA (1)...(19): siRNA sense strand
gagagagcaucacaauaua

SEQ ID NO: 1101192 - RNA, 19 nt, Homo sapiens
  misc_RNA (1)...(19): siRNA sense strand
ugaaguugcugcagaauuu

SEQ ID NO: 1101193 - RNA, 19 nt, Homo sapiens
  misc_RNA (1)...(19): siRNA sense strand
uagaugggcuguauacaua

SEQ ID NO: 1101194 - RNA, 19 nt, Homo sapiens
  misc_RNA (1)...(19): siRNA sense strand
gagaugauccugaacauau

SEQ ID NO: 1101195 - RNA, 19 nt, Homo sapiens
  misc_RNA (1)...(19): siRNA sense strand
gccagaagauggauaaaug

SEQ ID NO: 1101196 - RNA, 19 nt, Homo sapiens
  misc_RNA (1)...(19): siRNA sense strand
cauuggagcuggcggcuua

SEQ ID NO: 1101197 - RNA, 19 nt, Homo sapiens
  misc_RNA (1)...(19): siRNA sense strand
gguaaccucuauugaagaa

SEQ ID NO: 1101198 - RNA, 19 nt, Homo sapiens
  misc_RNA (1)...(19): siRNA sense strand
gugcauacauucccuugaa

SEQ ID NO: 1101199 - RNA, 19 nt, Homo sapiens
  misc_RNA (1)...(19): siRNA sense strand
uaacgacacuuucuaucga

SEQ ID NO: 1101200 - RNA, 19 nt, Homo sapiens
  misc_RNA (1)...(19): siRNA sense strand
ccagaacacuguauugagu

SEQ ID NO: 1101201 - RNA, 19 nt, Homo sapiens
  misc_RNA (1)...(19): siRNA sense strand
gaacgaacaaggccaaauc

SEQ ID NO: 1101202 - RNA, 19 nt, Homo sapiens
  misc_RNA (1)...(19): siRNA sense strand
gcaguagcuuccacaaaug

SEQ ID NO: 1101203 - RNA, 19 nt, Homo sapiens
  misc_RNA (1)...(19): siRNA sense strand
agagagagcaucacaauau

SEQ ID NO: 1101204 - RNA, 19 nt, Homo sapiens
  misc_RNA (1)...(19): siRNA sense strand
caauagugcuucucugcaa

SEQ ID NO: 1101205 - RNA, 19 nt, Homo sapiens
  misc_RNA (1)...(19): siRNA sense strand
gugcuucucugcaaaugaa

SEQ ID NO: 1101206 - RNA, 19 nt, Homo sapiens
  misc_RNA (1)...(19): siRNA sense strand
uaaauggcaugcugauauc

SEQ ID NO: 1101207 - RNA, 19 nt, Homo sapiens
  misc_RNA (1)...(19): siRNA sense strand
aaugcacgcuggaacuuua

SEQ ID NO: 1101208 - RNA, 19 nt, Homo sapiens
  misc_RNA (1)...(19): siRNA sense strand
uggauuaucuaaccaauag

SEQ ID NO: 1101209 - RNA, 19 nt, Homo sapiens
  misc_RNA (1)...(19): siRNA sense strand
ugacagaguuccuaauugc

SEQ ID NO: 1101210 - RNA, 19 nt, Homo sapiens
  misc_RNA (1)...(19): siRNA sense strand
caagcuccauugucccuuu

SEQ ID NO: 1101211 - RNA, 19 nt, Homo sapiens
  misc_RNA (1)...(19): siRNA sense strand
guaaaguucuagucauugg

SEQ ID NO: 1101212 - RNA, 19 nt, Homo sapiens
  misc_RNA (1)...(19): siRNA sense strand
gauauggacacuauagaug

SEQ ID NO: 1101213 - RNA, 19 nt, Homo sapiens
  misc_RNA (1)...(19): siRNA sense strand
ugcaguagcuuccacaaau

SEQ ID NO: 1101214 - RNA, 19 nt, Homo sapiens
  misc_RNA (1)...(19): siRNA sense strand
gccuaaagauauuggaaga

SEQ ID NO: 1101215 - RNA, 19 nt, Homo sapiens
  misc_RNA (1)...(19): siRNA sense strand
agaugauccugaacauaua

SEQ ID NO: 1101216 - RNA, 19 nt, Homo sapiens
  misc_RNA (1)...(19): siRNA sense strand
ggagaugauccugaacaua

SEQ ID NO: 1101217 - RNA, 19 nt, Homo sapiens
  misc_RNA (1)...(19): siRNA sense strand
uauguggacuggacucuau

SEQ ID NO: 1101218 - RNA, 19 nt, Homo sapiens
  misc_RNA (1)...(19): siRNA sense strand
uacaggagguuuuggauua

SEQ ID NO: 1101219 - RNA, 19 nt, Homo sapiens
  misc_RNA (1)...(19): siRNA sense strand
gagagcaucacaauauaau

SEQ ID NO: 1101220 - RNA, 19 nt, Homo sapiens
  misc_RNA (1)...(19): siRNA sense strand
gagaagggguuccauuaga

SEQ ID NO: 1101221 - RNA, 19 nt, Homo sapiens
  misc_RNA (1)...(19): siRNA sense strand
uaaaugacagaguuccuaa

SEQ ID NO: 1101222 - RNA, 19 nt, Homo sapiens
  misc_RNA (1)...(19): siRNA sense strand
gacagaagguuuuaaagga

SEQ ID NO: 1101223 - RNA, 19 nt, Homo sapiens
  misc_RNA (1)...(19): siRNA sense strand
cuccaguucuuguuagaua

SEQ ID NO: 1101224 - RNA, 19 nt, Homo sapiens
  misc_RNA (1)...(19): siRNA sense strand
gauggugucuuagauccaa

SEQ ID NO: 1101225 - RNA, 19 nt, Homo sapiens
  misc_RNA (1)...(19): siRNA sense strand
augcugauaucucuucuaa

SEQ ID NO: 1101226 - RNA, 19 nt, Homo sapiens
  misc_RNA (1)...(19): siRNA sense strand
cacuuucuaucgacaauuu

SEQ ID NO: 1101227 - RNA, 19 nt, Homo sapiens
  misc_RNA (1)...(19): siRNA sense strand
gauaaauggcaugcugaua

SEQ ID NO: 1101228 - RNA, 19 nt, Homo sapiens
  misc_RNA (1)...(19): siRNA sense strand
cacuauagauguuuccaau

SEQ ID NO: 1101229 - RNA, 19 nt, Homo sapiens
  misc_RNA (1)...(19): siRNA sense strand
aaucuggccuugucugguu

SEQ ID NO: 1101230 - RNA, 19 nt, Homo sapiens
  misc_RNA (1)...(19): siRNA sense strand
auaaauggcaugcugauau

SEQ ID NO: 1101231 - RNA, 19 nt, Homo sapiens
  misc_RNA (1)...(19): siRNA sense strand
caaucuaaauaggcaguuu

SEQ ID NO: 1101232 - RNA, 19 nt, Homo sapiens
  misc_RNA (1)...(19): siRNA sense strand
ugauguagaugggcuguau

SEQ ID NO: 1101233 - RNA, 19 nt, Homo sapiens
  misc_RNA (1)...(19): siRNA sense strand
guagaugggcuguauacau

SEQ ID NO: 1101234 - RNA, 19 nt, Homo sapiens
  misc_RNA (1)...(19): siRNA sense strand
gaaugcacgcuggaacuuu

SEQ ID NO: 1101235 - RNA, 19 nt, Homo sapiens
  misc_RNA (1)...(19): siRNA sense strand
auacacauuugaagcagaa

SEQ ID NO: 1101236 - RNA, 19 nt, Homo sapiens
  misc_RNA (1)...(19): siRNA sense strand
agauggagaugauccugaa

SEQ ID NO: 1101237 - RNA, 19 nt, Homo sapiens
  misc_RNA (1)...(19): siRNA sense strand
uauggacacuauagauguu

SEQ ID NO: 1101238 - RNA, 19 nt, Homo sapiens
  misc_RNA (1)...(19): siRNA sense strand
ccaaaucucuccaaaacau

SEQ ID NO: 1101239 - RNA, 19 nt, Homo sapiens
  misc_RNA (1)...(19): siRNA sense strand
gaagcagaaagaaaggaaa

SEQ ID NO: 1101240 - RNA, 19 nt, Homo sapiens
  misc_RNA (1)...(19): siRNA sense strand
uggaaugacugcuuguauc

SEQ ID NO: 1101241 - RNA, 19 nt, Homo sapiens
  misc_RNA (1)...(19): siRNA sense strand
guagccagcuuccucaaaa

SEQ ID NO: 1101242 - RNA, 19 nt, Homo sapiens
  misc_RNA (1)...(19): siRNA sense strand
aaagauauuggaagaccua

SEQ ID NO: 1101243 - RNA, 19 nt, Homo sapiens
  misc_RNA (1)...(19): siRNA sense strand
gguguuuaaugauguagau

SEQ ID NO: 1101244 - RNA, 19 nt, Homo sapiens
  misc_RNA (1)...(19): siRNA sense strand
aaugacugcuuguaucgaa

SEQ ID NO: 1101245 - RNA, 19 nt, Homo sapiens
  misc_RNA (1)...(19): siRNA sense strand
ucgguaaccucuauugaag

SEQ ID NO: 1101246 - RNA, 19 nt, Homo sapiens
  misc_RNA (1)...(19): siRNA sense strand
aaugacagaguuccuaauu

SEQ ID NO: 1101247 - RNA, 19 nt, Homo sapiens
  misc_RNA (1)...(19): siRNA sense strand
cuagagagagcaucacaau

SEQ ID NO: 1101248 - RNA, 19 nt, Homo sapiens
  misc_RNA (1)...(19): siRNA sense strand
guuccuaauugcaauguag

SEQ ID NO: 1101249 - RNA, 19 nt, Homo sapiens
  misc_RNA (1)...(19): siRNA sense strand
gauauuggaagaccuaagg

SEQ ID NO: 1101250 - RNA, 19 nt, Homo sapiens
  misc_RNA (1)...(19): siRNA sense strand
agaacacuguauugaguau

SEQ ID NO: 1101251 - RNA, 19 nt, Homo sapiens
  misc_RNA (1)...(19): siRNA sense strand
cagaacacuguauugagua

SEQ ID NO: 1101252 - RNA, 19 nt, Homo sapiens
  misc_RNA (1)...(19): siRNA sense strand
agagagcaucacaauauaa

SEQ ID NO: 1101253 - RNA, 19 nt, Homo sapiens
  misc_RNA (1)...(19): siRNA sense strand
cgaacaaggccaaaucucu

SEQ ID NO: 1101254 - RNA, 19 nt, Homo sapiens
  misc_RNA (1)...(19): siRNA sense strand
uacagucgguaaccucuau

SEQ ID NO: 1101255 - RNA, 19 nt, Homo sapiens
  misc_RNA (1)...(19): siRNA sense strand
ggcugaaguugcugcagaa

SEQ ID NO: 1101256 - RNA, 19 nt, Homo sapiens
  misc_RNA (1)...(19): siRNA sense strand
cauguaaaguucuagucau

SEQ ID NO: 1101257 - RNA, 19 nt, Homo sapiens
  misc_RNA (1)...(19): siRNA sense strand
uagagagagcaucacaaua

SEQ ID NO: 1101258 - RNA, 19 nt, Homo sapiens
  misc_RNA (1)...(19): siRNA sense strand
ggaaugacugcuuguaucg

SEQ ID NO: 1101259 - RNA, 19 nt, Homo sapiens
  misc_RNA (1)...(19): siRNA sense strand
cuaaaugacagaguuccua

SEQ ID NO: 1101260 - RNA, 19 nt, Homo sapiens
  misc_RNA (1)...(19): siRNA sense strand
gaacuggcgguugcugaug

SEQ ID NO: 1101261 - RNA, 19 nt, Homo sapiens
  misc_RNA (1)...(19): siRNA sense strand
gaaaucuccagccaucaca

SEQ ID NO: 1101262 - RNA, 19 nt, Homo sapiens
  misc_RNA (1)...(19): siRNA sense strand
gauuaucuaaccaauagug

SEQ ID NO: 1101263 - RNA, 19 nt, Homo sapiens
  misc_RNA (1)...(19): siRNA sense strand
gaaaacugcccagcuugua

SEQ ID NO: 1101264 - RNA, 19 nt, Homo sapiens
  misc_RNA (1)...(19): siRNA sense strand
agccacaagugcauacauu

SEQ ID NO: 1101265 - RNA, 19 nt, Homo sapiens
  misc_RNA (1)...(19): siRNA sense strand
ggagcagccuuuuggagaa

SEQ ID NO: 1101266 - RNA, 19 nt, Homo sapiens
  misc_RNA (1)...(19): siRNA sense strand
gacacuuucuaucgacaau

SEQ ID NO: 1101267 - RNA, 19 nt, Homo sapiens
  misc_RNA (1)...(19): siRNA sense strand
cagaguuccuaauugcaau

SEQ ID NO: 1101268 - RNA, 19 nt, Homo sapiens
  misc_RNA (1)...(19): siRNA sense strand
ggccaaaucucuccaaaac

SEQ ID NO: 1101269 - RNA, 19 nt, Homo sapiens
  misc_RNA (1)...(19): siRNA sense strand
aauagugcuucucugcaaa

SEQ ID NO: 1101270 - RNA, 19 nt, Homo sapiens
  misc_RNA (1)...(19): siRNA sense strand
gaagaccuaaggcugaagu

SEQ ID NO: 1101271 - RNA, 19 nt, Homo sapiens
  misc_RNA (1)...(19): siRNA sense strand
gacagauucauguuauaga

SEQ ID NO: 1101272 - RNA, 19 nt, Homo sapiens
  misc_RNA (1)...(19): siRNA sense strand
ccacauuucaacaagauuc

SEQ ID NO: 1101273 - RNA, 19 nt, Homo sapiens
  misc_RNA (1)...(19): siRNA sense strand
guuccacauuucaacaaga

SEQ ID NO: 1101274 - RNA, 19 nt, Homo sapiens
  misc_RNA (1)...(19): siRNA sense strand
uagaacacuuuacuuacag

SEQ ID NO: 1101275 - RNA, 19 nt, Homo sapiens
  misc_RNA (1)...(19): siRNA sense strand
uggaagaccuaaggcugaa

SEQ ID NO: 1101276 - RNA, 19 nt, Homo sapiens
  misc_RNA (1)...(19): siRNA sense strand
gauguagaugggcuguaua

SEQ ID NO: 1101277 - RNA, 19 nt, Homo sapiens
  misc_RNA (1)...(19): siRNA sense strand
ggauaaauggcaugcugau

SEQ ID NO: 1101278 - RNA, 19 nt, Homo sapiens
  misc_RNA (1)...(19): siRNA sense strand
uaccagaacacuguauuga

SEQ ID NO: 1101279 - RNA, 19 nt, Homo sapiens
  misc_RNA (1)...(19): siRNA sense strand
gucgguaaccucuauugaa

SEQ ID NO: 1101280 - RNA, 19 nt, Homo sapiens
  misc_RNA (1)...(19): siRNA sense strand
caucacagccacccuagag

SEQ ID NO: 1101281 - RNA, 19 nt, Homo sapiens
  misc_RNA (1)...(19): siRNA sense strand
agacuguacuauucaaacu

SEQ ID NO: 1101282 - RNA, 19 nt, Homo sapiens
  misc_RNA (1)...(19): siRNA sense strand
cauugucccuuugauagau

SEQ ID NO: 1101283 - RNA, 19 nt, Homo sapiens
  misc_RNA (1)...(19): siRNA sense strand
ugaagcagaaagaaaggaa

SEQ ID NO: 1101284 - RNA, 19 nt, Homo sapiens
  misc_RNA (1)...(19): siRNA sense strand
ggagcuggcggcuuaggau

SEQ ID NO: 1101285 - RNA, 19 nt, Homo sapiens
  misc_RNA (1)...(19): siRNA sense strand
ucccuugaauaauuacuug

SEQ ID NO: 1101286 - RNA, 19 nt, Homo sapiens
  misc_RNA (1)...(19): siRNA sense strand
gauccugaacauauacaau

SEQ ID NO: 1101287 - RNA, 19 nt, Homo sapiens
  misc_RNA (1)...(19): siRNA sense strand
acacuguauugaguaugua

SEQ ID NO: 1101288 - RNA, 19 nt, Homo sapiens
  misc_RNA (1)...(19): siRNA sense strand
uaauugcaauguaguucca

SEQ ID NO: 1101289 - RNA, 19 nt, Homo sapiens
  misc_RNA (1)...(19): siRNA sense strand
acuguacuauucaaacuuc

SEQ ID NO: 1101290 - RNA, 19 nt, Homo sapiens
  misc_RNA (1)...(19): siRNA sense strand
gcugauaucucuucuaaau

SEQ ID NO: 1101291 - RNA, 19 nt, Homo sapiens
  misc_RNA (1)...(19): siRNA sense strand
gagagagcaucacaauaua

SEQ ID NO: 1101292 - RNA, 19 nt, Homo sapiens
  misc_RNA (1)...(19): siRNA sense strand
ugaaguugcugcagaauuu

SEQ ID NO: 1101293 - RNA, 19 nt, Homo sapiens
  misc_RNA (1)...(19): siRNA sense strand
uagaugggcuguauacaua

SEQ ID NO: 1101294 - RNA, 19 nt, Homo sapiens
  misc_RNA (1)...(19): siRNA sense strand
gagaugauccugaacauau

SEQ ID NO: 1101295 - RNA, 19 nt, Homo sapiens
  misc_RNA (1)...(19): siRNA sense strand
gccagaagauggauaaaug

SEQ ID NO: 1101296 - RNA, 19 nt, Homo sapiens
  misc_RNA (1)...(19): siRNA sense strand
gguaaccucuauugaagaa

SEQ ID NO: 1101297 - RNA, 19 nt, Homo sapiens
  misc_RNA (1)...(19): siRNA sense strand
gugcauacauucccuugaa

SEQ ID NO: 1101298 - RNA, 19 nt, Homo sapiens
  misc_RNA (1)...(19): siRNA sense strand
uaacgacacuuucuaucga

SEQ ID NO: 1101299 - RNA, 19 nt, Homo sapiens
  misc_RNA (1)...(19): siRNA sense strand
ccagaacacuguauugagu

SEQ ID NO: 1101300 - RNA, 19 nt, Homo sapiens
  misc_RNA (1)...(19): siRNA sense strand
gaacgaacaaggccaaauc

SEQ ID NO: 1101301 - RNA, 19 nt, Homo sapiens
  misc_RNA (1)...(19): siRNA sense strand
gcaguagcuuccacaaaug

SEQ ID NO: 1101302 - RNA, 19 nt, Homo sapiens
  misc_RNA (1)...(19): siRNA sense strand
agagagagcaucacaauau

SEQ ID NO: 1101303 - RNA, 19 nt, Homo sapiens
  misc_RNA (1)...(19): siRNA sense strand
caauagugcuucucugcaa

SEQ ID NO: 1101304 - RNA, 19 nt, Homo sapiens
  misc_RNA (1)...(19): siRNA sense strand
gugcuucucugcaaaugaa

SEQ ID NO: 1101305 - RNA, 19 nt, Homo sapiens
  misc_RNA (1)...(19): siRNA sense strand
uaaauggcaugcugauauc

SEQ ID NO: 1101306 - RNA, 19 nt, Homo sapiens
  misc_RNA (1)...(19): siRNA sense strand
aaugcacgcuggaacuuua

SEQ ID NO: 1101307 - RNA, 19 nt, Homo sapiens
  misc_RNA (1)...(19): siRNA sense strand
uggauuaucuaaccaauag

SEQ ID NO: 1101308 - RNA, 19 nt, Homo sapiens
  misc_RNA (1)...(19): siRNA sense strand
ugacagaguuccuaauugc

SEQ ID NO: 1101309 - RNA, 19 nt, Homo sapiens
  misc_RNA (1)...(19): siRNA sense strand
caagcuccauugucccuuu

SEQ ID NO: 1101310 - RNA, 19 nt, Homo sapiens
  misc_RNA (1)...(19): siRNA sense strand
ugcaguagcuuccacaaau

SEQ ID NO: 1101311 - RNA, 19 nt, Homo sapiens
  misc_RNA (1)...(19): siRNA sense strand
ggagaugauccugaacaua

SEQ ID NO: 1101312 - RNA, 19 nt, Homo sapiens
  misc_RNA (1)...(19): siRNA sense strand
gccuaaagauauuggaaga

SEQ ID NO: 1101313 - RNA, 19 nt, Homo sapiens
  misc_RNA (1)...(19): siRNA sense strand
agaugauccugaacauaua

SEQ ID NO: 1101314 - RNA, 19 nt, Homo sapiens
  misc_RNA (1)...(19): siRNA sense strand
uauguggacuggacucuau

SEQ ID NO: 1101315 - RNA, 19 nt, Homo sapiens
  misc_RNA (1)...(19): siRNA sense strand
uacaggagguuuuggauua

SEQ ID NO: 1101316 - RNA, 19 nt, Homo sapiens
  misc_RNA (1)...(19): siRNA sense strand
gagagcaucacaauauaau

SEQ ID NO: 1101317 - RNA, 19 nt, Homo sapiens
  misc_RNA (1)...(19): siRNA sense strand
gagaagggguuccauuaga

SEQ ID NO: 1101318 - RNA, 19 nt, Homo sapiens
  misc_RNA (1)...(19): siRNA sense strand
uaaaugacagaguuccuaa

SEQ ID NO: 1101319 - RNA, 19 nt, Homo sapiens
  misc_RNA (1)...(19): siRNA sense strand
gacagaagguuuuaaagga

SEQ ID NO: 1101320 - RNA, 19 nt, Homo sapiens
  misc_RNA (1)...(19): siRNA sense strand
gauggugucuuagauccaa

SEQ ID NO: 1101321 - RNA, 19 nt, Homo sapiens
  misc_RNA (1)...(19): siRNA sense strand
augcugauaucucuucuaa

SEQ ID NO: 1101322 - RNA, 19 nt, Homo sapiens
  misc_RNA (1)...(19): siRNA sense strand
cacuuucuaucgacaauuu

SEQ ID NO: 1101323 - RNA, 19 nt, Homo sapiens
  misc_RNA (1)...(19): siRNA sense strand
gauaaauggcaugcugaua

SEQ ID NO: 1101324 - RNA, 19 nt, Homo sapiens
  misc_RNA (1)...(19): siRNA sense strand
auaaauggcaugcugauau

SEQ ID NO: 1101325 - RNA, 19 nt, Homo sapiens
  misc_RNA (1)...(19): siRNA sense strand
caaucuaaauaggcaguuu

SEQ ID NO: 1101326 - RNA, 19 nt, Homo sapiens
  misc_RNA (1)...(19): siRNA sense strand
cacuauagauguuuccaau

SEQ ID NO: 1101327 - RNA, 19 nt, Homo sapiens
  misc_RNA (1)...(19): siRNA sense strand
ugauguagaugggcuguau

SEQ ID NO: 1101328 - RNA, 19 nt, Homo sapiens
  misc_RNA (1)...(19): siRNA sense strand
guagaugggcuguauacau

SEQ ID NO: 1101329 - RNA, 19 nt, Homo sapiens
  misc_RNA (1)...(19): siRNA sense strand
gaaugcacgcuggaacuuu

SEQ ID NO: 1101330 - RNA, 19 nt, Homo sapiens
  misc_RNA (1)...(19): siRNA sense strand
auacacauuugaagcagaa

SEQ ID NO: 1101331 - RNA, 19 nt, Homo sapiens
  misc_RNA (1)...(19): siRNA sense strand
agauggagaugauccugaa

SEQ ID NO: 1101332 - RNA, 19 nt, Homo sapiens
  misc_RNA (1)...(19): siRNA sense strand
gaagcagaaagaaaggaaa

SEQ ID NO: 1101333 - RNA, 19 nt, Homo sapiens
  misc_RNA (1)...(19): siRNA sense strand
ccaaaucucuccaaaacau

SEQ ID NO: 1101334 - RNA, 19 nt, Homo sapiens
  misc_RNA (1)...(19): siRNA sense strand
uggaaugacugcuuguauc

SEQ ID NO: 1101335 - RNA, 19 nt, Homo sapiens
  misc_RNA (1)...(19): siRNA sense strand
guagccagcuuccucaaaa

SEQ ID NO: 1101336 - RNA, 19 nt, Homo sapiens
  misc_RNA (1)...(19): siRNA sense strand
aaugacugcuuguaucgaa

SEQ ID NO: 1101337 - RNA, 19 nt, Homo sapiens
  misc_RNA (1)...(19): siRNA sense strand
gguguuuaaugauguagau

SEQ ID NO: 1101338 - RNA, 19 nt, Homo sapiens
  misc_RNA (1)...(19): siRNA sense strand
aaagauauuggaagaccua

SEQ ID NO: 1101339 - RNA, 19 nt, Homo sapiens
  misc_RNA (1)...(19): siRNA sense strand
ucgguaaccucuauugaag

SEQ ID NO: 1101340 - RNA, 19 nt, Homo sapiens
  misc_RNA (1)...(19): siRNA sense strand
aaugacagaguuccuaauu

SEQ ID NO: 1101341 - RNA, 19 nt, Homo sapiens
  misc_RNA (1)...(19): siRNA sense strand
cuagagagagcaucacaau

SEQ ID NO: 1101342 - RNA, 19 nt, Homo sapiens
  misc_RNA (1)...(19): siRNA sense strand
guuccuaauugcaauguag

SEQ ID NO: 1101343 - RNA, 19 nt, Homo sapiens
  misc_RNA (1)...(19): siRNA sense strand
gauauuggaagaccuaagg

SEQ ID NO: 1101344 - RNA, 19 nt, Homo sapiens
  misc_RNA (1)...(19): siRNA sense strand
agaacacuguauugaguau

SEQ ID NO: 1101345 - RNA, 19 nt, Homo sapiens
  misc_RNA (1)...(19): siRNA sense strand
cagaacacuguauugagua

SEQ ID NO: 1101346 - RNA, 19 nt, Homo sapiens
  misc_RNA (1)...(19): siRNA sense strand
agagagcaucacaauauaa

SEQ ID NO: 1101347 - RNA, 19 nt, Homo sapiens
  misc_RNA (1)...(19): siRNA sense strand
cgaacaaggccaaaucucu

SEQ ID NO: 1101348 - RNA, 19 nt, Homo sapiens
  misc_RNA (1)...(19): siRNA sense strand
uacagucgguaaccucuau

SEQ ID NO: 1101349 - RNA, 19 nt, Homo sapiens
  misc_RNA (1)...(19): siRNA sense strand
ggaaugacugcuuguaucg

SEQ ID NO: 1101350 - RNA, 19 nt, Homo sapiens
  misc_RNA (1)...(19): siRNA sense strand
uagagagagcaucacaaua

SEQ ID NO: 1101351 - RNA, 19 nt, Homo sapiens
  misc_RNA (1)...(19): siRNA sense strand
ggcugaaguugcugcagaa

SEQ ID NO: 1101352 - RNA, 19 nt, Homo sapiens
  misc_RNA (1)...(19): siRNA sense strand
cuaaaugacagaguuccua

SEQ ID NO: 1101353 - RNA, 19 nt, Homo sapiens
  misc_RNA (1)...(19): siRNA sense strand
gaacuggcgguugcugaug

SEQ ID NO: 1101354 - RNA, 19 nt, Homo sapiens
  misc_RNA (1)...(19): siRNA sense strand
gaaaucuccagccaucaca

SEQ ID NO: 1101355 - RNA, 19 nt, Homo sapiens
  misc_RNA (1)...(19): siRNA sense strand
gauuaucuaaccaauagug

SEQ ID NO: 1101356 - RNA, 19 nt, Homo sapiens
  misc_RNA (1)...(19): siRNA sense strand
gacacuuucuaucgacaau

SEQ ID NO: 1101357 - RNA, 19 nt, Homo sapiens
  misc_RNA (1)...(19): siRNA sense strand
gaaaacugcccagcuugua

SEQ ID NO: 1101358 - RNA, 19 nt, Homo sapiens
  misc_RNA (1)...(19): siRNA sense strand
agccacaagugcauacauu

SEQ ID NO: 1101359 - RNA, 19 nt, Homo sapiens
  misc_RNA (1)...(19): siRNA sense strand
ggagcagccuuuuggagaa

SEQ ID NO: 1101360 - RNA, 19 nt, Homo sapiens
  misc_RNA (1)...(19): siRNA sense strand
gaagaccuaaggcugaagu

SEQ ID NO: 1101361 - RNA, 19 nt, Homo sapiens
  misc_RNA (1)...(19): siRNA sense strand
ggccaaaucucuccaaaac

SEQ ID NO: 1101362 - RNA, 19 nt, Homo sapiens
  misc_RNA (1)...(19): siRNA sense strand
aauagugcuucucugcaaa

SEQ ID NO: 1101363 - RNA, 19 nt, Homo sapiens
  misc_RNA (1)...(19): siRNA sense strand
cagaguuccuaauugcaau

SEQ ID NO: 1101364 - RNA, 19 nt, Homo sapiens
  misc_RNA (1)...(19): siRNA sense strand
ccacauuucaacaagauuc

SEQ ID NO: 1101365 - RNA, 19 nt, Homo sapiens
  misc_RNA (1)...(19): siRNA sense strand
ggauaaauggcaugcugau

SEQ ID NO: 1101366 - RNA, 19 nt, Homo sapiens
  misc_RNA (1)...(19): siRNA sense strand
uagaacacuuuacuuacag

SEQ ID NO: 1101367 - RNA, 19 nt, Homo sapiens
  misc_RNA (1)...(19): siRNA sense strand
gauguagaugggcuguaua

SEQ ID NO: 1101368 - RNA, 19 nt, Homo sapiens
  misc_RNA (1)...(19): siRNA sense strand
guuccacauuucaacaaga

SEQ ID NO: 1101369 - RNA, 19 nt, Homo sapiens
  misc_RNA (1)...(19): siRNA sense strand
uggaagaccuaaggcugaa

SEQ ID NO: 1101370 - RNA, 19 nt, Homo sapiens
  misc_RNA (1)...(19): siRNA sense strand
uaccagaacacuguauuga

SEQ ID NO: 1101371 - RNA, 19 nt, Homo sapiens
  misc_RNA (1)...(19): siRNA sense strand
gucgguaaccucuauugaa

SEQ ID NO: 1101372 - RNA, 19 nt, Homo sapiens
  misc_RNA (1)...(19): siRNA sense strand
caucacagccacccuagag

SEQ ID NO: 1101373 - RNA, 19 nt, Homo sapiens
  misc_RNA (1)...(19): siRNA sense strand
agacuguacuauucaaacu

SEQ ID NO: 1101374 - RNA, 19 nt, Homo sapiens
  misc_RNA (1)...(19): siRNA sense strand
cauugucccuuugauagau

SEQ ID NO: 1101375 - RNA, 19 nt, Homo sapiens
  misc_RNA (1)...(19): siRNA sense strand
ugaagcagaaagaaaggaa

SEQ ID NO: 1101376 - RNA, 19 nt, Homo sapiens
  misc_RNA (1)...(19): siRNA sense strand
ucccuugaauaauuacuug

SEQ ID NO: 1101377 - RNA, 19 nt, Homo sapiens
  misc_RNA (1)...(19): siRNA sense strand
gauccugaacauauacaau

SEQ ID NO: 1101378 - RNA, 19 nt, Homo sapiens
  misc_RNA (1)...(19): siRNA sense strand
acacuguauugaguaugua

SEQ ID NO: 1101379 - RNA, 19 nt, Homo sapiens
  misc_RNA (1)...(19): siRNA sense strand
uaauugcaauguaguucca

SEQ ID NO: 1101380 - RNA, 19 nt, Homo sapiens
  misc_RNA (1)...(19): siRNA sense strand
acuguacuauucaaacuuc

SEQ ID NO: 1101381 - RNA, 19 nt, Homo sapiens
  misc_RNA (1)...(19): siRNA sense strand
gcuaccagaacacuguauu

SEQ ID NO: 1101382 - RNA, 19 nt, Homo sapiens
  misc_RNA (1)...(19): siRNA sense strand
ggacagaagguuuuaaagg

SEQ ID NO: 1101383 - RNA, 19 nt, Homo sapiens
  misc_RNA (1)...(19): siRNA sense strand
cauuugaagcagaaagaaa

SEQ ID NO: 1101384 - RNA, 19 nt, Homo sapiens
  misc_RNA (1)...(19): siRNA sense strand
aacacuguauugaguaugu

SEQ ID NO: 1101385 - RNA, 19 nt, Homo sapiens
  misc_RNA (1)...(19): siRNA sense strand
cagaagguuuuaaaggaaa

SEQ ID NO: 1101386 - RNA, 19 nt, Homo sapiens
  misc_RNA (1)...(19): siRNA sense strand
cugaacauauacaauggau

SEQ ID NO: 1101387 - RNA, 19 nt, Homo sapiens
  misc_RNA (1)...(19): siRNA sense strand
uaaccaauagugcuucucu

SEQ ID NO: 1101388 - RNA, 19 nt, Homo sapiens
  misc_RNA (1)...(19): siRNA sense strand
uaucuaaccaauagugcuu

SEQ ID NO: 1101389 - RNA, 19 nt, Homo sapiens
  misc_RNA (1)...(19): siRNA sense strand
aaucauuccugcaguagcu

SEQ ID NO: 1101390 - RNA, 19 nt, Homo sapiens
  misc_RNA (1)...(19): siRNA sense strand
ucaagaagguucacaauga

SEQ ID NO: 1101391 - RNA, 19 nt, Homo sapiens
  misc_RNA (1)...(19): siRNA sense strand
ccagauaacuuccuaaugg

SEQ ID NO: 1101392 - RNA, 19 nt, Homo sapiens
  misc_RNA (1)...(19): siRNA sense strand
gcuaaaggcugcaacaaag

SEQ ID NO: 1101393 - RNA, 19 nt, Homo sapiens
  misc_RNA (1)...(19): siRNA sense strand
caauaugacuacacauuug

SEQ ID NO: 1101394 - RNA, 19 nt, Homo sapiens
  misc_RNA (1)...(19): siRNA sense strand
uauguuagcugaccagaug

SEQ ID NO: 1101395 - RNA, 19 nt, Homo sapiens
  misc_RNA (1)...(19): siRNA sense strand
ggacaauguuaaagcagaa

SEQ ID NO: 1101396 - RNA, 19 nt, Homo sapiens
  misc_RNA (1)...(19): siRNA sense strand
agaguaacaugaaagguuu

SEQ ID NO: 1101397 - RNA, 19 nt, Homo sapiens
  misc_RNA (1)...(19): siRNA sense strand
gaugaucaguagaauugaa

SEQ ID NO: 1101398 - RNA, 19 nt, Homo sapiens
  misc_RNA (1)...(19): siRNA sense strand
gcgauguacuuaaacuauu

SEQ ID NO: 1101399 - RNA, 19 nt, Homo sapiens
  misc_RNA (1)...(19): siRNA sense strand
gggcgucacuguaauaagu

SEQ ID NO: 1101400 - RNA, 19 nt, Homo sapiens
  misc_RNA (1)...(19): siRNA sense strand
uaaaccagauaacuuccua

SEQ ID NO: 1101401 - RNA, 19 nt, Homo sapiens
  misc_RNA (1)...(19): siRNA sense strand
cagaugaucaguagaauug

SEQ ID NO: 1101402 - RNA, 19 nt, Homo sapiens
  misc_RNA (1)...(19): siRNA sense strand
cuccaaggcugaauucauu

SEQ ID NO: 1101403 - RNA, 19 nt, Homo sapiens
  misc_RNA (1)...(19): siRNA sense strand
caaggcaacacauaccaua

SEQ ID NO: 1101404 - RNA, 19 nt, Homo sapiens
  misc_RNA (1)...(19): siRNA sense strand
gcgaggaaguggcagugaa

SEQ ID NO: 1101405 - RNA, 19 nt, Homo sapiens
  misc_RNA (1)...(19): siRNA sense strand
cgauguacuuaaacuauug

SEQ ID NO: 1101406 - RNA, 19 nt, Homo sapiens
  misc_RNA (1)...(19): siRNA sense strand
gagcagagucgccgagaug

SEQ ID NO: 1101407 - RNA, 19 nt, Homo sapiens
  misc_RNA (1)...(19): siRNA sense strand
caaugcacaucuugguauu

SEQ ID NO: 1101408 - RNA, 19 nt, Homo sapiens
  misc_RNA (1)...(19): siRNA sense strand
acacauaccauacagagaa

SEQ ID NO: 1101409 - RNA, 19 nt, Homo sapiens
  misc_RNA (1)...(19): siRNA sense strand
gaccagaugaucaguagaa

SEQ ID NO: 1101410 - RNA, 19 nt, Homo sapiens
  misc_RNA (1)...(19): siRNA sense strand
ggaaguggcagugaagcua

SEQ ID NO: 1101411 - RNA, 19 nt, Homo sapiens
  misc_RNA (1)...(19): siRNA sense strand
cagugaagcuagaaucuca

SEQ ID NO: 1101412 - RNA, 19 nt, Homo sapiens
  misc_RNA (1)...(19): siRNA sense strand
guauugggcgucacuguaa

SEQ ID NO: 1101413 - RNA, 19 nt, Homo sapiens
  misc_RNA (1)...(19): siRNA sense strand
gaauuugcgauguacuuaa

SEQ ID NO: 1101414 - RNA, 19 nt, Homo sapiens
  misc_RNA (1)...(19): siRNA sense strand
cugcagaauuugcgaugua

SEQ ID NO: 1101415 - RNA, 19 nt, Homo sapiens
  misc_RNA (1)...(19): siRNA sense strand
gacauggaaucauuaggau

SEQ ID NO: 1101416 - RNA, 19 nt, Homo sapiens
  misc_RNA (1)...(19): siRNA sense strand
agggaaauauaaacuggua

SEQ ID NO: 1101417 - RNA, 19 nt, Homo sapiens
  misc_RNA (1)...(19): siRNA sense strand
ugacauggaaucauuagga

SEQ ID NO: 1101418 - RNA, 19 nt, Homo sapiens
  misc_RNA (1)...(19): siRNA sense strand
gcgucacuguaauaaguua

SEQ ID NO: 1101419 - RNA, 19 nt, Homo sapiens
  misc_RNA (1)...(19): siRNA sense strand
gaagcuagaaucucagaag

SEQ ID NO: 1101420 - RNA, 19 nt, Homo sapiens
  misc_RNA (1)...(19): siRNA sense strand
gguauugggcgucacugua

SEQ ID NO: 1101421 - RNA, 19 nt, Homo sapiens
  misc_RNA (1)...(19): siRNA sense strand
guccacgccuguugaaguu

SEQ ID NO: 1101422 - RNA, 19 nt, Homo sapiens
  misc_RNA (1)...(19): siRNA sense strand
cauggaaucauuaggauau

SEQ ID NO: 1101423 - RNA, 19 nt, Homo sapiens
  misc_RNA (1)...(19): siRNA sense strand
ggaaucauuaggauauguu

SEQ ID NO: 1101424 - RNA, 19 nt, Homo sapiens
  misc_RNA (1)...(19): siRNA sense strand
aaaccaagaguaacaugaa

SEQ ID NO: 1101425 - RNA, 19 nt, Homo sapiens
  misc_RNA (1)...(19): siRNA sense strand
cagcuauuccgcauucuuu

SEQ ID NO: 1101426 - RNA, 19 nt, Homo sapiens
  misc_RNA (1)...(19): siRNA sense strand
uaaaggcugcaacaaagaa

SEQ ID NO: 1101427 - RNA, 19 nt, Homo sapiens
  misc_RNA (1)...(19): siRNA sense strand
ccacaggcaagcaaacuga

SEQ ID NO: 1101428 - RNA, 19 nt, Homo sapiens
  misc_RNA (1)...(19): siRNA sense strand
ggcuaaaggcugcaacaaa

SEQ ID NO: 1101429 - RNA, 19 nt, Homo sapiens
  misc_RNA (1)...(19): siRNA sense strand
caguagaauugaauaugug

SEQ ID NO: 1101430 - RNA, 19 nt, Homo sapiens
  misc_RNA (1)...(19): siRNA sense strand
cauuaaaccagauaacuuc

SEQ ID NO: 1101431 - RNA, 19 nt, Homo sapiens
  misc_RNA (1)...(19): siRNA sense strand
ucgccgagaugacauggaa

SEQ ID NO: 1101432 - RNA, 19 nt, Homo sapiens
  misc_RNA (1)...(19): siRNA sense strand
gaagauguccacgccuguu

SEQ ID NO: 1101433 - RNA, 19 nt, Homo sapiens
  misc_RNA (1)...(19): siRNA sense strand
aaccaagaguaacaugaaa

SEQ ID NO: 1101434 - RNA, 19 nt, Homo sapiens
  misc_RNA (1)...(19): siRNA sense strand
ggacccugaaccaucaaua

SEQ ID NO: 1101435 - RNA, 19 nt, Homo sapiens
  misc_RNA (1)...(19): siRNA sense strand
ccucuucaauuucuguuca

SEQ ID NO: 1101436 - RNA, 19 nt, Homo sapiens
  misc_RNA (1)...(19): siRNA sense strand
ccaucaauaugacuacaca

SEQ ID NO: 1101437 - RNA, 19 nt, Homo sapiens
  misc_RNA (1)...(19): siRNA sense strand
caggacaaggcaacacaua

SEQ ID NO: 1101438 - RNA, 19 nt, Homo sapiens
  misc_RNA (1)...(19): siRNA sense strand
aaacuguacuuauguuagc

SEQ ID NO: 1101439 - RNA, 19 nt, Homo sapiens
  misc_RNA (1)...(19): siRNA sense strand
aagaguaacaugaaagguu

SEQ ID NO: 1101440 - RNA, 19 nt, Homo sapiens
  misc_RNA (1)...(19): siRNA sense strand
ucaaugcacaucuugguau

SEQ ID NO: 1101441 - RNA, 19 nt, Homo sapiens
  misc_RNA (1)...(19): siRNA sense strand
gacccugaaccaucaauau

SEQ ID NO: 1101442 - RNA, 19 nt, Homo sapiens
  misc_RNA (1)...(19): siRNA sense strand
uaccauacagagaagauaa

SEQ ID NO: 1101443 - RNA, 19 nt, Homo sapiens
  misc_RNA (1)...(19): siRNA sense strand
agaauuugcgauguacuua

SEQ ID NO: 1101444 - RNA, 19 nt, Homo sapiens
  misc_RNA (1)...(19): siRNA sense strand
gggguuuccugcagaauuu

SEQ ID NO: 1101445 - RNA, 19 nt, Homo sapiens
  misc_RNA (1)...(19): siRNA sense strand
acaauguacuagucaugga

SEQ ID NO: 1101446 - RNA, 19 nt, Homo sapiens
  misc_RNA (1)...(19): siRNA sense strand
augcacaucuugguauuga

SEQ ID NO: 1101447 - RNA, 19 nt, Homo sapiens
  misc_RNA (1)...(19): siRNA sense strand
acacagagacauuaaacca

SEQ ID NO: 1101448 - RNA, 19 nt, Homo sapiens
  misc_RNA (1)...(19): siRNA sense strand
guacuagucauggaucuuc

SEQ ID NO: 1101449 - RNA, 19 nt, Homo sapiens
  misc_RNA (1)...(19): siRNA sense strand
agcaagcucuauaagauuc

SEQ ID NO: 1101450 - RNA, 19 nt, Homo sapiens
  misc_RNA (1)...(19): siRNA sense strand
aggcagcuauuccgcauuc

SEQ ID NO: 1101451 - RNA, 19 nt, Homo sapiens
  misc_RNA (1)...(19): siRNA sense strand
ccagaugaucaguagaauu

SEQ ID NO: 1101452 - RNA, 19 nt, Homo sapiens
  misc_RNA (1)...(19): siRNA sense strand
ucugggaccuagccucgaa

SEQ ID NO: 1101453 - RNA, 19 nt, Homo sapiens
  misc_RNA (1)...(19): siRNA sense strand
gcaacacauaccauacaga

SEQ ID NO: 1101454 - RNA, 19 nt, Homo sapiens
  misc_RNA (1)...(19): siRNA sense strand
ugacuacacauuugauugg

SEQ ID NO: 1101455 - RNA, 19 nt, Homo sapiens
  misc_RNA (1)...(19): siRNA sense strand
cagaauuugcgauguacuu

SEQ ID NO: 1101456 - RNA, 19 nt, Homo sapiens
  misc_RNA (1)...(19): siRNA sense strand
uauaaacugguacggaaga

SEQ ID NO: 1101457 - RNA, 19 nt, Homo sapiens
  misc_RNA (1)...(19): siRNA sense strand
gacuacacauuugauugga

SEQ ID NO: 1101458 - RNA, 19 nt, Homo sapiens
  misc_RNA (1)...(19): siRNA sense strand
gcagcuauuccgcauucuu

SEQ ID NO: 1101459 - RNA, 19 nt, Homo sapiens
  misc_RNA (1)...(19): siRNA sense strand
cuaaaggcugcaacaaaga

SEQ ID NO: 1101460 - RNA, 19 nt, Homo sapiens
  misc_RNA (1)...(19): siRNA sense strand
guucaagaagguucacaau

SEQ ID NO: 1101461 - RNA, 19 nt, Homo sapiens
  misc_RNA (1)...(19): siRNA sense strand
gaaccaucaauaugacuac

SEQ ID NO: 1101462 - RNA, 19 nt, Homo sapiens
  misc_RNA (1)...(19): siRNA sense strand
ugaaccaucaauaugacua

SEQ ID NO: 1101463 - RNA, 19 nt, Homo sapiens
  misc_RNA (1)...(19): siRNA sense strand
ugucggagggaaauauaaa

SEQ ID NO: 1101464 - RNA, 19 nt, Homo sapiens
  misc_RNA (1)...(19): siRNA sense strand
ggacaaggcaacacauacc

SEQ ID NO: 1101465 - RNA, 19 nt, Homo sapiens
  misc_RNA (1)...(19): siRNA sense strand
gcuccaaggcugaauucau

SEQ ID NO: 1101466 - RNA, 19 nt, Homo sapiens
  misc_RNA (1)...(19): siRNA sense strand
gagacauuaaaccagauaa

SEQ ID NO: 1101467 - RNA, 19 nt, Homo sapiens
  misc_RNA (1)...(19): siRNA sense strand
gauguccacgccuguugaa

SEQ ID NO: 1101468 - RNA, 19 nt, Homo sapiens
  misc_RNA (1)...(19): siRNA sense strand
ggcaacacauaccauacag

SEQ ID NO: 1101469 - RNA, 19 nt, Homo sapiens
  misc_RNA (1)...(19): siRNA sense strand
gacauuaaaccagauaacu

SEQ ID NO: 1101470 - RNA, 19 nt, Homo sapiens
  misc_RNA (1)...(19): siRNA sense strand
cagagacauuaaaccagau

SEQ ID NO: 1101471 - RNA, 19 nt, Homo sapiens
  misc_RNA (1)...(19): siRNA sense strand
agagacauuaaaccagaua

SEQ ID NO: 1101472 - RNA, 19 nt, Homo sapiens
  misc_RNA (1)...(19): siRNA sense strand
ccacgccuguugaaguuuu

SEQ ID NO: 1101473 - RNA, 19 nt, Homo sapiens
  misc_RNA (1)...(19): siRNA sense strand
gucgugggcuacgcuuuga

SEQ ID NO: 1101474 - RNA, 19 nt, Homo sapiens
  misc_RNA (1)...(19): siRNA sense strand
ccaagaguaacaugaaagg

SEQ ID NO: 1101475 - RNA, 19 nt, Homo sapiens
  misc_RNA (1)...(19): siRNA sense strand
caucaaugcacaucuuggu

SEQ ID NO: 1101476 - RNA, 19 nt, Homo sapiens
  misc_RNA (1)...(19): siRNA sense strand
cccugaaccaucaauauga

SEQ ID NO: 1101477 - RNA, 19 nt, Homo sapiens
  misc_RNA (1)...(19): siRNA sense strand
caucaccaacggcgaggaa

SEQ ID NO: 1101478 - RNA, 19 nt, Homo sapiens
  misc_RNA (1)...(19): siRNA sense strand
ggacaaugcacaaguuauu

SEQ ID NO: 1101479 - RNA, 19 nt, Homo sapiens
  misc_RNA (1)...(19): siRNA sense strand
gccaugggcuucauucuga

SEQ ID NO: 1101480 - RNA, 19 nt, Homo sapiens
  misc_RNA (1)...(19): siRNA sense strand
uguaugacaucaccaauga

SEQ ID NO: 1101481 - RNA, 19 nt, Homo sapiens
  misc_RNA (1)...(19): siRNA sense strand
cuacucagaucaagaccua

SEQ ID NO: 1101482 - RNA, 19 nt, Homo sapiens
  misc_RNA (1)...(19): siRNA sense strand
cagagcagcuuggguuuga

SEQ ID NO: 1101483 - RNA, 19 nt, Homo sapiens
  misc_RNA (1)...(19): siRNA sense strand
caaaggagaacaucagugu

SEQ ID NO: 1101484 - RNA, 19 nt, Homo sapiens
  misc_RNA (1)...(19): siRNA sense strand
aaggagaacaucaguguaa

SEQ ID NO: 1101485 - RNA, 19 nt, Homo sapiens
  misc_RNA (1)...(19): siRNA sense strand
gcuuggguuugauuucuuu

SEQ ID NO: 1101486 - RNA, 19 nt, Homo sapiens
  misc_RNA (1)...(19): siRNA sense strand
cugauucgcuggacacaga

SEQ ID NO: 1101487 - RNA, 19 nt, Homo sapiens
  misc_RNA (1)...(19): siRNA sense strand
uuaaacugcuuaucauugg

SEQ ID NO: 1101488 - RNA, 19 nt, Homo sapiens
  misc_RNA (1)...(19): siRNA sense strand
agacugggcuacucagauc

SEQ ID NO: 1101489 - RNA, 19 nt, Homo sapiens
  misc_RNA (1)...(19): siRNA sense strand
gggugaaacugcagaucug

SEQ ID NO: 1101490 - RNA, 19 nt, Homo sapiens
  misc_RNA (1)...(19): siRNA sense strand
gagcagcuuggguuugauu

SEQ ID NO: 1101491 - RNA, 19 nt, Homo sapiens
  misc_RNA (1)...(19): siRNA sense strand
ggaacaagugugacaugga

SEQ ID NO: 1101492 - RNA, 19 nt, Homo sapiens
  misc_RNA (1)...(19): siRNA sense strand
cuacauguuuaaacugcuu

SEQ ID NO: 1101493 - RNA, 19 nt, Homo sapiens
  misc_RNA (1)...(19): siRNA sense strand
gggcuucauucugauguau

SEQ ID NO: 1101494 - RNA, 19 nt, Homo sapiens
  misc_RNA (1)...(19): siRNA sense strand
ccaucacaacagccuauua

SEQ ID NO: 1101495 - RNA, 19 nt, Homo sapiens
  misc_RNA (1)...(19): siRNA sense strand
ccugguggaugccauuugu

SEQ ID NO: 1101496 - RNA, 19 nt, Homo sapiens
  misc_RNA (1)...(19): siRNA sense strand
gcagagcagcuuggguuug

SEQ ID NO: 1101497 - RNA, 19 nt, Homo sapiens
  misc_RNA (1)...(19): siRNA sense strand
ugacaucaccaaugaagag

SEQ ID NO: 1101498 - RNA, 19 nt, Homo sapiens
  misc_RNA (1)...(19): siRNA sense strand
gagcgguaccggaccauca

SEQ ID NO: 1101499 - RNA, 19 nt, Homo sapiens
  misc_RNA (1)...(19): siRNA sense strand
cagcuuggguuugauuucu

SEQ ID NO: 1101500 - RNA, 19 nt, Homo sapiens
  misc_RNA (1)...(19): siRNA sense strand
gaccaucacaacagccuau

SEQ ID NO: 1101501 - RNA, 19 nt, Homo sapiens
  misc_RNA (1)...(19): siRNA sense strand
augcugggcuccuccaaga

SEQ ID NO: 1101502 - RNA, 19 nt, Homo sapiens
  misc_RNA (1)...(19): siRNA sense strand
uggguuugauuucuuugaa

SEQ ID NO: 1101503 - RNA, 19 nt, Homo sapiens
  misc_RNA (1)...(19): siRNA sense strand
caucacaacagccuauuac

SEQ ID NO: 1101504 - RNA, 19 nt, Homo sapiens
  misc_RNA (1)...(19): siRNA sense strand
gacaaugcacaaguuauuc

SEQ ID NO: 1101505 - RNA, 19 nt, Homo sapiens
  misc_RNA (1)...(19): siRNA sense strand
agugugacauggaggaaga

SEQ ID NO: 1101506 - RNA, 19 nt, Homo sapiens
  misc_RNA (1)...(19): siRNA sense strand
ggaggaagagaggguuguu

SEQ ID NO: 1101507 - RNA, 19 nt, Homo sapiens
  misc_RNA (1)...(19): siRNA sense strand
guccuucaaugcuguccaa

SEQ ID NO: 1101508 - RNA, 19 nt, Homo sapiens
  misc_RNA (1)...(19): siRNA sense strand
cuucaaugcuguccaagac

SEQ ID NO: 1101509 - RNA, 19 nt, Homo sapiens
  misc_RNA (1)...(19): siRNA sense strand
gcuaugcugaugacacguu

SEQ ID NO: 1101510 - RNA, 19 nt, Homo sapiens
  misc_RNA (1)...(19): siRNA sense strand
cugggacaaugcacaaguu

SEQ ID NO: 1101511 - RNA, 19 nt, Homo sapiens
  misc_RNA (1)...(19): siRNA sense strand
ugguaaaacuggagucaaa

SEQ ID NO: 1101512 - RNA, 19 nt, Homo sapiens
  misc_RNA (1)...(19): siRNA sense strand
aaaggagaacaucagugua

SEQ ID NO: 1101513 - RNA, 19 nt, Homo sapiens
  misc_RNA (1)...(19): siRNA sense strand
gggacaaugcacaaguuau

SEQ ID NO: 1101514 - RNA, 19 nt, Homo sapiens
  misc_RNA (1)...(19): siRNA sense strand
ggagaacaucaguguaagg

SEQ ID NO: 1101515 - RNA, 19 nt, Homo sapiens
  misc_RNA (1)...(19): siRNA sense strand
gagucaaagaugccucuga

SEQ ID NO: 1101516 - RNA, 19 nt, Homo sapiens
  misc_RNA (1)...(19): siRNA sense strand
caagacugggcuacucaga

SEQ ID NO: 1101517 - RNA, 19 nt, Homo sapiens
  misc_RNA (1)...(19): siRNA sense strand
ggguuugauuucuuugaag

SEQ ID NO: 1101518 - RNA, 19 nt, Homo sapiens
  misc_RNA (1)...(19): siRNA sense strand
gcagcuuggguuugauuuc

SEQ ID NO: 1101519 - RNA, 19 nt, Homo sapiens
  misc_RNA (1)...(19): siRNA sense strand
ugggacaaugcacaaguua

SEQ ID NO: 1101520 - RNA, 19 nt, Homo sapiens
  misc_RNA (1)...(19): siRNA sense strand
gaccuacuccugggacaau

SEQ ID NO: 1101521 - RNA, 19 nt, Homo sapiens
  misc_RNA (1)...(19): siRNA sense strand
guaccggaccaucacaaca

SEQ ID NO: 1101522 - RNA, 19 nt, Homo sapiens
  misc_RNA (1)...(19): siRNA sense strand
acacagacccgucgaugcu

SEQ ID NO: 1101523 - RNA, 19 nt, Homo sapiens
  misc_RNA (1)...(19): siRNA sense strand
ggccaugggcuucauucug

SEQ ID NO: 1101524 - RNA, 19 nt, Homo sapiens
  misc_RNA (1)...(19): siRNA sense strand
gaagaaaucucuggaauug

SEQ ID NO: 1101525 - RNA, 19 nt, Homo sapiens
  misc_RNA (1)...(19): siRNA sense strand
ggaagugguuggaagagua

SEQ ID NO: 1101526 - RNA, 19 nt, Homo sapiens
  misc_RNA (1)...(19): siRNA sense strand
caucuuauguccaguuuaa

SEQ ID NO: 1101527 - RNA, 19 nt, Homo sapiens
  misc_RNA (1)...(19): siRNA sense strand
agaaaucucuggaauugug

SEQ ID NO: 1101528 - RNA, 19 nt, Homo sapiens
  misc_RNA (1)...(19): siRNA sense strand
gaagauagccauccuuuug

SEQ ID NO: 1101529 - RNA, 19 nt, Homo sapiens
  misc_RNA (1)...(19): siRNA sense strand
gaucuuggacuuuacaaug

SEQ ID NO: 1101530 - RNA, 19 nt, Homo sapiens
  misc_RNA (1)...(19): siRNA sense strand
caugcuagcucaauucauc

SEQ ID NO: 1101531 - RNA, 19 nt, Homo sapiens
  misc_RNA (1)...(19): siRNA sense strand
caaugaagcugugaaaauu

SEQ ID NO: 1101532 - RNA, 19 nt, Homo sapiens
  misc_RNA (1)...(19): siRNA sense strand
gaagugguuggaagaguaa

SEQ ID NO: 1101533 - RNA, 19 nt, Homo sapiens
  misc_RNA (1)...(19): siRNA sense strand
ugaagaaaucucuggaauu

SEQ ID NO: 1101534 - RNA, 19 nt, Homo sapiens
  misc_RNA (1)...(19): siRNA sense strand
caucuuguguacaucuuau

SEQ ID NO: 1101535 - RNA, 19 nt, Homo sapiens
  misc_RNA (1)...(19): siRNA sense strand
gaugaagaaaucucuggaa

SEQ ID NO: 1101536 - RNA, 19 nt, Homo sapiens
  misc_RNA (1)...(19): siRNA sense strand
uaaagaagauagccauccu

SEQ ID NO: 1101537 - RNA, 19 nt, Homo sapiens
  misc_RNA (1)...(19): siRNA sense strand
aagaagauagccauccuuu

SEQ ID NO: 1101538 - RNA, 19 nt, Homo sapiens
  misc_RNA (1)...(19): siRNA sense strand
gccaccaucuuguguacau

SEQ ID NO: 1101539 - RNA, 19 nt, Homo sapiens
  misc_RNA (1)...(19): siRNA sense strand
ggauugugcaacaugauug

SEQ ID NO: 1101540 - RNA, 19 nt, Homo sapiens
  misc_RNA (1)...(19): siRNA sense strand
gggauugugcaacaugauu

SEQ ID NO: 1101541 - RNA, 19 nt, Homo sapiens
  misc_RNA (1)...(19): siRNA sense strand
augaagaaaucucuggaau

SEQ ID NO: 1101542 - RNA, 19 nt, Homo sapiens
  misc_RNA (1)...(19): siRNA sense strand
uuacaaugaagcugugaaa

SEQ ID NO: 1101543 - RNA, 19 nt, Homo sapiens
  misc_RNA (1)...(19): siRNA sense strand
uagcucaauucaucgacaa

SEQ ID NO: 1101544 - RNA, 19 nt, Homo sapiens
  misc_RNA (1)...(19): siRNA sense strand
uagggauugugcaacauga

SEQ ID NO: 1101545 - RNA, 19 nt, Homo sapiens
  misc_RNA (1)...(19): siRNA sense strand
gauugugcaacaugauuga

SEQ ID NO: 1101546 - RNA, 19 nt, Homo sapiens
  misc_RNA (1)...(19): siRNA sense strand
ucuuucagauggagaagga

SEQ ID NO: 1101547 - RNA, 19 nt, Homo sapiens
  misc_RNA (1)...(19): siRNA sense strand
gaaaauuauccaugacuuc

SEQ ID NO: 1101548 - RNA, 19 nt, Homo sapiens
  misc_RNA (1)...(19): siRNA sense strand
gauggaaccccuugaugaa

SEQ ID NO: 1101549 - RNA, 19 nt, Homo sapiens
  misc_RNA (1)...(19): siRNA sense strand
ucucuggaauuguggaagu

SEQ ID NO: 1101550 - RNA, 19 nt, Homo sapiens
  misc_RNA (1)...(19): siRNA sense strand
ugacuucccucaguuuuau

SEQ ID NO: 1101551 - RNA, 19 nt, Homo sapiens
  misc_RNA (1)...(19): siRNA sense strand
ucuuggacuuuacaaugaa

SEQ ID NO: 1101552 - RNA, 19 nt, Homo sapiens
  misc_RNA (1)...(19): siRNA sense strand
ccaugacuucccucaguuu

SEQ ID NO: 1101553 - RNA, 19 nt, Homo sapiens
  misc_RNA (1)...(19): siRNA sense strand
uccaugacuucccucaguu

SEQ ID NO: 1101554 - RNA, 19 nt, Homo sapiens
  misc_RNA (1)...(19): siRNA sense strand
ccggcaugcuagcucaauu

SEQ ID NO: 1101555 - RNA, 19 nt, Homo sapiens
  misc_RNA (1)...(19): siRNA sense strand
cuuuagggauugugcaaca

SEQ ID NO: 1101556 - RNA, 19 nt, Homo sapiens
  misc_RNA (1)...(19): siRNA sense strand
uauguccaguuuaaagaag

SEQ ID NO: 1101557 - RNA, 19 nt, Homo sapiens
  misc_RNA (1)...(19): siRNA sense strand
aucuuggacuuuacaauga

SEQ ID NO: 1101558 - RNA, 19 nt, Homo sapiens
  misc_RNA (1)...(19): siRNA sense strand
gcaguauccuggugaauaa

SEQ ID NO: 1101559 - RNA, 19 nt, Homo sapiens
  misc_RNA (1)...(19): siRNA sense strand
gcaaauggagugugucaua

SEQ ID NO: 1101560 - RNA, 19 nt, Homo sapiens
  misc_RNA (1)...(19): siRNA sense strand
ggaggaaaguccagucuga

SEQ ID NO: 1101561 - RNA, 19 nt, Homo sapiens
  misc_RNA (1)...(19): siRNA sense strand
agaggaagcuuucuaauuc

SEQ ID NO: 1101562 - RNA, 19 nt, Homo sapiens
  misc_RNA (1)...(19): siRNA sense strand
cuacuaaacugcuguguug

SEQ ID NO: 1101563 - RNA, 19 nt, Homo sapiens
  misc_RNA (1)...(19): siRNA sense strand
gaagacacccuaaacaaga

SEQ ID NO: 1101564 - RNA, 19 nt, Homo sapiens
  misc_RNA (1)...(19): siRNA sense strand
gaagagaccaguauagaug

SEQ ID NO: 1101565 - RNA, 19 nt, Homo sapiens
  misc_RNA (1)...(19): siRNA sense strand
caaagagauugaagguaua

SEQ ID NO: 1101566 - RNA, 19 nt, Homo sapiens
  misc_RNA (1)...(19): siRNA sense strand
gagaggaagcuuucuaauu

SEQ ID NO: 1101567 - RNA, 19 nt, Homo sapiens
  misc_RNA (1)...(19): siRNA sense strand
gcaaguauuucuacaagag

SEQ ID NO: 1101568 - RNA, 19 nt, Homo sapiens
  misc_RNA (1)...(19): siRNA sense strand
gaccucgaauucaguauuu

SEQ ID NO: 1101569 - RNA, 19 nt, Homo sapiens
  misc_RNA (1)...(19): siRNA sense strand
gcucagcuccguauuguuu

SEQ ID NO: 1101570 - RNA, 19 nt, Homo sapiens
  misc_RNA (1)...(19): siRNA sense strand
cggcuucucuuaugcauuu

SEQ ID NO: 1101571 - RNA, 19 nt, Homo sapiens
  misc_RNA (1)...(19): siRNA sense strand
ccaauaagaccucgaauuc

SEQ ID NO: 1101572 - RNA, 19 nt, Homo sapiens
  misc_RNA (1)...(19): siRNA sense strand
guaauuggagcuuucauuu

SEQ ID NO: 1101573 - RNA, 19 nt, Homo sapiens
  misc_RNA (1)...(19): siRNA sense strand
gauugcagcuucuuucugu

SEQ ID NO: 1101574 - RNA, 19 nt, Homo sapiens
  misc_RNA (1)...(19): siRNA sense strand
caaaugaaguuaccaaagc

SEQ ID NO: 1101575 - RNA, 19 nt, Homo sapiens
  misc_RNA (1)...(19): siRNA sense strand
ggaagagucagcauuauuc

SEQ ID NO: 1101576 - RNA, 19 nt, Homo sapiens
  misc_RNA (1)...(19): siRNA sense strand
uaaagcaucccuugagaaa

SEQ ID NO: 1101577 - RNA, 19 nt, Homo sapiens
  misc_RNA (1)...(19): siRNA sense strand
ccaaaucaauuacugucuu

SEQ ID NO: 1101578 - RNA, 19 nt, Homo sapiens
  misc_RNA (1)...(19): siRNA sense strand
caaauggagugugucauau

SEQ ID NO: 1101579 - RNA, 19 nt, Homo sapiens
  misc_RNA (1)...(19): siRNA sense strand
gaaacgaucagucuuccaa

SEQ ID NO: 1101580 - RNA, 19 nt, Homo sapiens
  misc_RNA (1)...(19): siRNA sense strand
caacacaaagccaauaaga

SEQ ID NO: 1101581 - RNA, 19 nt, Homo sapiens
  misc_RNA (1)...(19): siRNA sense strand
gggcaucaauuaucgacuu

SEQ ID NO: 1101582 - RNA, 19 nt, Homo sapiens
  misc_RNA (1)...(19): siRNA sense strand
gaccaugauuggcaaguau

SEQ ID NO: 1101583 - RNA, 19 nt, Homo sapiens
  misc_RNA (1)...(19): siRNA sense strand
gaaagcaaacgagcagaaa

SEQ ID NO: 1101584 - RNA, 19 nt, Homo sapiens
  misc_RNA (1)...(19): siRNA sense strand
cgaauucaguauuucuuug

SEQ ID NO: 1101585 - RNA, 19 nt, Homo sapiens
  misc_RNA (1)...(19): siRNA sense strand
caaaucaauuacugucuuc

SEQ ID NO: 1101586 - RNA, 19 nt, Homo sapiens
  misc_RNA (1)...(19): siRNA sense strand
ccaaacaauuaaucaguuc

SEQ ID NO: 1101587 - RNA, 19 nt, Homo sapiens
  misc_RNA (1)...(19): siRNA sense strand
aauguuggcugucauguau

SEQ ID NO: 1101588 - RNA, 19 nt, Homo sapiens
  misc_RNA (1)...(19): siRNA sense strand
ggaagacacccuaaacaag

SEQ ID NO: 1101589 - RNA, 19 nt, Homo sapiens
  misc_RNA (1)...(19): siRNA sense strand
aaaggaaaguaaagaggaa

SEQ ID NO: 1101590 - RNA, 19 nt, Homo sapiens
  misc_RNA (1)...(19): siRNA sense strand
aaacauugauggaccuugu

SEQ ID NO: 1101591 - RNA, 19 nt, Homo sapiens
  misc_RNA (1)...(19): siRNA sense strand
ggaagagaccaguauagau

SEQ ID NO: 1101592 - RNA, 19 nt, Homo sapiens
  misc_RNA (1)...(19): siRNA sense strand
guauccuggugaauaaaua

SEQ ID NO: 1101593 - RNA, 19 nt, Homo sapiens
  misc_RNA (1)...(19): siRNA sense strand
ggaaagauaagucuaaagc

SEQ ID NO: 1101594 - RNA, 19 nt, Homo sapiens
  misc_RNA (1)...(19): siRNA sense strand
ucagguaucuaucucuuca

SEQ ID NO: 1101595 - RNA, 19 nt, Homo sapiens
  misc_RNA (1)...(19): siRNA sense strand
ugacauguauggagacuac

SEQ ID NO: 1101596 - RNA, 19 nt, Homo sapiens
  misc_RNA (1)...(19): siRNA sense strand
gggaagagucagcauuauu

SEQ ID NO: 1101597 - RNA, 19 nt, Homo sapiens
  misc_RNA (1)...(19): siRNA sense strand
gaucagucuuccaaacaau

SEQ ID NO: 1101598 - RNA, 19 nt, Homo sapiens
  misc_RNA (1)...(19): siRNA sense strand
ugagaaagcuggaaaaucu

SEQ ID NO: 1101599 - RNA, 19 nt, Homo sapiens
  misc_RNA (1)...(19): siRNA sense strand
guaucuaucucuucauugg

SEQ ID NO: 1101600 - RNA, 19 nt, Homo sapiens
  misc_RNA (1)...(19): siRNA sense strand
gagacuacaaauacacaua

SEQ ID NO: 1101601 - RNA, 19 nt, Homo sapiens
  misc_RNA (1)...(19): siRNA sense strand
caauuacugucuucuucaa

SEQ ID NO: 1101602 - RNA, 19 nt, Homo sapiens
  misc_RNA (1)...(19): siRNA sense strand
gauauccuccauaauguug

SEQ ID NO: 1101603 - RNA, 19 nt, Homo sapiens
  misc_RNA (1)...(19): siRNA sense strand
caagagaaacgaucagucu

SEQ ID NO: 1101604 - RNA, 19 nt, Homo sapiens
  misc_RNA (1)...(19): siRNA sense strand
gaagucguauagucaugau

SEQ ID NO: 1101605 - RNA, 19 nt, Homo sapiens
  misc_RNA (1)...(19): siRNA sense strand
gaggaagcuuucuaauucu

SEQ ID NO: 1101606 - RNA, 19 nt, Homo sapiens
  misc_RNA (1)...(19): siRNA sense strand
gaaaguaaagaggaagaga

SEQ ID NO: 1101607 - RNA, 19 nt, Homo sapiens
  misc_RNA (1)...(19): siRNA sense strand
caaaagaacagaaagcaaa

SEQ ID NO: 1101608 - RNA, 19 nt, Homo sapiens
  misc_RNA (1)...(19): siRNA sense strand
gauugaagguauauuccau

SEQ ID NO: 1101609 - RNA, 19 nt, Homo sapiens
  misc_RNA (1)...(19): siRNA sense strand
cagaaucuccggaccagaa

SEQ ID NO: 1101610 - RNA, 19 nt, Homo sapiens
  misc_RNA (1)...(19): siRNA sense strand
aauaagaccucgaauucag

SEQ ID NO: 1101611 - RNA, 19 nt, Homo sapiens
  misc_RNA (1)...(19): siRNA sense strand
ccaaggcagggaaagauaa

SEQ ID NO: 1101612 - RNA, 19 nt, Homo sapiens
  misc_RNA (1)...(19): siRNA sense strand
ggcaucaauuaucgacuuu

SEQ ID NO: 1101613 - RNA, 19 nt, Homo sapiens
  misc_RNA (1)...(19): siRNA sense strand
ccuuugguguuucuuagua

SEQ ID NO: 1101614 - RNA, 19 nt, Homo sapiens
  misc_RNA (1)...(19): siRNA sense strand
uggaaaaucuggugugaaa

SEQ ID NO: 1101615 - RNA, 19 nt, Homo sapiens
  misc_RNA (1)...(19): siRNA sense strand
ucuaaagcaucccuugaga

SEQ ID NO: 1101616 - RNA, 19 nt, Homo sapiens
  misc_RNA (1)...(19): siRNA sense strand
ugaccaugauuggcaagua

SEQ ID NO: 1101617 - RNA, 19 nt, Homo sapiens
  misc_RNA (1)...(19): siRNA sense strand
gguaauuggagcuuucauu

SEQ ID NO: 1101618 - RNA, 19 nt, Homo sapiens
  misc_RNA (1)...(19): siRNA sense strand
gccaauaagaccucgaauu

SEQ ID NO: 1101619 - RNA, 19 nt, Homo sapiens
  misc_RNA (1)...(19): siRNA sense strand
cuggaaaugugaucauguu

SEQ ID NO: 1101620 - RNA, 19 nt, Homo sapiens
  misc_RNA (1)...(19): siRNA sense strand
cgaucagucuuccaaacaa

SEQ ID NO: 1101621 - RNA, 19 nt, Homo sapiens
  misc_RNA (1)...(19): siRNA sense strand
gaaagauaagucuaaagca

SEQ ID NO: 1101622 - RNA, 19 nt, Homo sapiens
  misc_RNA (1)...(19): siRNA sense strand
gcaugggcaucaauuaucg

SEQ ID NO: 1101623 - RNA, 19 nt, Homo sapiens
  misc_RNA (1)...(19): siRNA sense strand
ggaagucguauagucauga

SEQ ID NO: 1101624 - RNA, 19 nt, Homo sapiens
  misc_RNA (1)...(19): siRNA sense strand
gucauaugcuagcaccuuu

SEQ ID NO: 1101625 - RNA, 19 nt, Homo sapiens
  misc_RNA (1)...(19): siRNA sense strand
cagcauuauucuagugaga

SEQ ID NO: 1101626 - RNA, 19 nt, Homo sapiens
  misc_RNA (1)...(19): siRNA sense strand
cagcgaagugucauggaua

SEQ ID NO: 1101627 - RNA, 19 nt, Homo sapiens
  misc_RNA (1)...(19): siRNA sense strand
ucagucuuccaaacaauua

SEQ ID NO: 1101628 - RNA, 19 nt, Homo sapiens
  misc_RNA (1)...(19): siRNA sense strand
cagggaaagauaagucuaa

SEQ ID NO: 1101629 - RNA, 19 nt, Homo sapiens
  misc_RNA (1)...(19): siRNA sense strand
ggcgucguccuaauuauuu

SEQ ID NO: 1101630 - RNA, 19 nt, Homo sapiens
  misc_RNA (1)...(19): siRNA sense strand
gugaauaaauauggaaguc

SEQ ID NO: 1101631 - RNA, 19 nt, Homo sapiens
  misc_RNA (1)...(19): siRNA sense strand
uggagugugucauaugcua

SEQ ID NO: 1101632 - RNA, 19 nt, Homo sapiens
  misc_RNA (1)...(19): siRNA sense strand
uaagaccucgaauucagua

SEQ ID NO: 1101633 - RNA, 19 nt, Homo sapiens
  misc_RNA (1)...(19): siRNA sense strand
ggauauccuccauaauguu

SEQ ID NO: 1101634 - RNA, 19 nt, Homo sapiens
  misc_RNA (1)...(19): siRNA sense strand
cagcaacuauacgucugua

SEQ ID NO: 1101635 - RNA, 19 nt, Homo sapiens
  misc_RNA (1)...(19): siRNA sense strand
gggcugggcagugguaauu

SEQ ID NO: 1101636 - RNA, 19 nt, Homo sapiens
  misc_RNA (1)...(19): siRNA sense strand
guaguuaugggaagaguca

SEQ ID NO: 1101637 - RNA, 19 nt, Homo sapiens
  misc_RNA (1)...(19): siRNA sense strand
uuaaucaguuccuggacuu

SEQ ID NO: 1101638 - RNA, 19 nt, Homo sapiens
  misc_RNA (1)...(19): siRNA sense strand
uaaacaagagaaacgauca

SEQ ID NO: 1101639 - RNA, 19 nt, Homo sapiens
  misc_RNA (1)...(19): siRNA sense strand
ggcaaguauuucuacaaga

SEQ ID NO: 1101640 - RNA, 19 nt, Homo sapiens
  misc_RNA (1)...(19): siRNA sense strand
ggagaggaagcuuucuaau

SEQ ID NO: 1101641 - RNA, 19 nt, Homo sapiens
  misc_RNA (1)...(19): siRNA sense strand
uaccaaagcagcagaaucu

SEQ ID NO: 1101642 - RNA, 19 nt, Homo sapiens
  misc_RNA (1)...(19): siRNA sense strand
gggaagccaaaugaaguua

SEQ ID NO: 1101643 - RNA, 19 nt, Homo sapiens
  misc_RNA (1)...(19): siRNA sense strand
gaggaagagaccaguauag

SEQ ID NO: 1101644 - RNA, 19 nt, Homo sapiens
  misc_RNA (1)...(19): siRNA sense strand
gcgggauucuuuggauuug

SEQ ID NO: 1101645 - RNA, 19 nt, Homo sapiens
  misc_RNA (1)...(19): siRNA sense strand
cggcuuccguuguugcaaa

SEQ ID NO: 1101646 - RNA, 19 nt, Homo sapiens
  misc_RNA (1)...(19): siRNA sense strand
caauaagaccucgaauuca

SEQ ID NO: 1101647 - RNA, 19 nt, Homo sapiens
  misc_RNA (1)...(19): siRNA sense strand
gccaacacaaagccaauaa

SEQ ID NO: 1101648 - RNA, 19 nt, Homo sapiens
  misc_RNA (1)...(19): siRNA sense strand
ggaaaugugaucauguuuu

SEQ ID NO: 1101649 - RNA, 19 nt, Homo sapiens
  misc_RNA (1)...(19): siRNA sense strand
ugcuauaccucucuggaaa

SEQ ID NO: 1101650 - RNA, 19 nt, Homo sapiens
  misc_RNA (1)...(19): siRNA sense strand
gcagggaaagauaagucua

SEQ ID NO: 1101651 - RNA, 19 nt, Homo sapiens
  misc_RNA (1)...(19): siRNA sense strand
gucaggcuguggcuugauu

SEQ ID NO: 1101652 - RNA, 19 nt, Homo sapiens
  misc_RNA (1)...(19): siRNA sense strand
ccagcgaagugucauggau

SEQ ID NO: 1101653 - RNA, 19 nt, Homo sapiens
  misc_RNA (1)...(19): siRNA sense strand
gaugcaaauacagaucuua

SEQ ID NO: 1101654 - RNA, 19 nt, Homo sapiens
  misc_RNA (1)...(19): siRNA sense strand
aagcaucccuugagaaagc

SEQ ID NO: 1101655 - RNA, 19 nt, Homo sapiens
  misc_RNA (1)...(19): siRNA sense strand
ggauggagaggaagcuuuc

SEQ ID NO: 1101656 - RNA, 19 nt, Homo sapiens
  misc_RNA (1)...(19): siRNA sense strand
uggcaaguauuucuacaag

SEQ ID NO: 1101657 - RNA, 19 nt, Homo sapiens
  misc_RNA (1)...(19): siRNA sense strand
aaaugaaguuaccaaagca

SEQ ID NO: 1101658 - RNA, 19 nt, Homo sapiens
  misc_RNA (1)...(19): siRNA sense strand
ggauauggguauacuauua

SEQ ID NO: 1101659 - RNA, 19 nt, Homo sapiens
  misc_RNA (1)...(19): siRNA sense strand
caaagcaguugaacagaaa

SEQ ID NO: 1101660 - RNA, 19 nt, Homo sapiens
  misc_RNA (1)...(19): siRNA sense strand
gugcagauguuauuaaaug

SEQ ID NO: 1101661 - RNA, 19 nt, Homo sapiens
  misc_RNA (1)...(19): siRNA sense strand
ugacauagaugaugcaaag

SEQ ID NO: 1101662 - RNA, 19 nt, Homo sapiens
  misc_RNA (1)...(19): siRNA sense strand
cauuugaccuggcaauuaa

SEQ ID NO: 1101663 - RNA, 19 nt, Homo sapiens
  misc_RNA (1)...(19): siRNA sense strand
gagugcagauguuauuaaa

SEQ ID NO: 1101664 - RNA, 19 nt, Homo sapiens
  misc_RNA (1)...(19): siRNA sense strand
ggacaaagcaguugaacag

SEQ ID NO: 1101665 - RNA, 19 nt, Homo sapiens
  misc_RNA (1)...(19): siRNA sense strand
gaccagaaaugcagaacau

SEQ ID NO: 1101666 - RNA, 19 nt, Homo sapiens
  misc_RNA (1)...(19): siRNA sense strand
cauagaugaugcaaaggua

SEQ ID NO: 1101667 - RNA, 19 nt, Homo sapiens
  misc_RNA (1)...(19): siRNA sense strand
ugaagaaugugaauuagca

SEQ ID NO: 1101668 - RNA, 19 nt, Homo sapiens
  misc_RNA (1)...(19): siRNA sense strand
aagcaccgcugcauggaua

SEQ ID NO: 1101669 - RNA, 19 nt, Homo sapiens
  misc_RNA (1)...(19): siRNA sense strand
acaaagcaguugaacagaa

SEQ ID NO: 1101670 - RNA, 19 nt, Homo sapiens
  misc_RNA (1)...(19): siRNA sense strand
cagugaagaaugugaauua

SEQ ID NO: 1101671 - RNA, 19 nt, Homo sapiens
  misc_RNA (1)...(19): siRNA sense strand
ccucgaaccugauauuugu

SEQ ID NO: 1101672 - RNA, 19 nt, Homo sapiens
  misc_RNA (1)...(19): siRNA sense strand
acaaaggucucagccaauu

SEQ ID NO: 1101673 - RNA, 19 nt, Homo sapiens
  misc_RNA (1)...(19): siRNA sense strand
ucaaaccagugaagaaugu

SEQ ID NO: 1101674 - RNA, 19 nt, Homo sapiens
  misc_RNA (1)...(19): siRNA sense strand
gcaccuuguuucaggauau

SEQ ID NO: 1101675 - RNA, 19 nt, Homo sapiens
  misc_RNA (1)...(19): siRNA sense strand
gaggauauggguauacuau

SEQ ID NO: 1101676 - RNA, 19 nt, Homo sapiens
  misc_RNA (1)...(19): siRNA sense strand
ccgaaguggucucauugua

SEQ ID NO: 1101677 - RNA, 19 nt, Homo sapiens
  misc_RNA (1)...(19): siRNA sense strand
gaaaagaggauauggguau

SEQ ID NO: 1101678 - RNA, 19 nt, Homo sapiens
  misc_RNA (1)...(19): siRNA sense strand
gcacuuggacaaagcaguu

SEQ ID NO: 1101679 - RNA, 19 nt, Homo sapiens
  misc_RNA (1)...(19): siRNA sense strand
cuccaacaguuaaugauaa

SEQ ID NO: 1101680 - RNA, 19 nt, Homo sapiens
  misc_RNA (1)...(19): siRNA sense strand
guuccgaaguggucucauu

SEQ ID NO: 1101681 - RNA, 19 nt, Homo sapiens
  misc_RNA (1)...(19): siRNA sense strand
ggauaucuuucagcacuug

SEQ ID NO: 1101682 - RNA, 19 nt, Homo sapiens
  misc_RNA (1)...(19): siRNA sense strand
gcaguugaacagaaacaaa

SEQ ID NO: 1101683 - RNA, 19 nt, Homo sapiens
  misc_RNA (1)...(19): siRNA sense strand
gcaagugccaguaaaugau

SEQ ID NO: 1101684 - RNA, 19 nt, Homo sapiens
  misc_RNA (1)...(19): siRNA sense strand
ggacauccuucagaguugu

SEQ ID NO: 1101685 - RNA, 19 nt, Homo sapiens
  misc_RNA (1)...(19): siRNA sense strand
ugaagaaccacuacaagga

SEQ ID NO: 1101686 - RNA, 19 nt, Homo sapiens
  misc_RNA (1)...(19): siRNA sense strand
uaacagcguacaauuacaa

SEQ ID NO: 1101687 - RNA, 19 nt, Homo sapiens
  misc_RNA (1)...(19): siRNA sense strand
ucauuugaccuggcaauua

SEQ ID NO: 1101688 - RNA, 19 nt, Homo sapiens
  misc_RNA (1)...(19): siRNA sense strand
gaucugaaacaauauugga

SEQ ID NO: 1101689 - RNA, 19 nt, Homo sapiens
  misc_RNA (1)...(19): siRNA sense strand
ggucucagccaauuucuuc

SEQ ID NO: 1101690 - RNA, 19 nt, Homo sapiens
  misc_RNA (1)...(19): siRNA sense strand
gggcuaacaguacaucuga

SEQ ID NO: 1101691 - RNA, 19 nt, Homo sapiens
  misc_RNA (1)...(19): siRNA sense strand
caagugccaguaaaugauu

SEQ ID NO: 1101692 - RNA, 19 nt, Homo sapiens
  misc_RNA (1)...(19): siRNA sense strand
gguguuaaaucuccuuggu

SEQ ID NO: 1101693 - RNA, 19 nt, Homo sapiens
  misc_RNA (1)...(19): siRNA sense strand
acaaaugcaucggaaguuc

SEQ ID NO: 1101694 - RNA, 19 nt, Homo sapiens
  misc_RNA (1)...(19): siRNA sense strand
ucgcagauauggaguuugg

SEQ ID NO: 1101695 - RNA, 19 nt, Homo sapiens
  misc_RNA (1)...(19): siRNA sense strand
cgagugcagauguuauuaa

SEQ ID NO: 1101696 - RNA, 19 nt, Homo sapiens
  misc_RNA (1)...(19): siRNA sense strand
ucucaugggcuacuucaaa

SEQ ID NO: 1101697 - RNA, 19 nt, Homo sapiens
  misc_RNA (1)...(19): siRNA sense strand
gcgcgcugcucucuucuag

SEQ ID NO: 1101698 - RNA, 19 nt, Homo sapiens
  misc_RNA (1)...(19): siRNA sense strand
uuaaaucuccuugguguga

SEQ ID NO: 1101699 - RNA, 19 nt, Homo sapiens
  misc_RNA (1)...(19): siRNA sense strand
gcagauuuaauucaaguag

SEQ ID NO: 1101700 - RNA, 19 nt, Homo sapiens
  misc_RNA (1)...(19): siRNA sense strand
ccagucauccuccaguuug

SEQ ID NO: 1101701 - RNA, 19 nt, Homo sapiens
  misc_RNA (1)...(19): siRNA sense strand
ccaauuucuucuccaguca

SEQ ID NO: 1101702 - RNA, 19 nt, Homo sapiens
  misc_RNA (1)...(19): siRNA sense strand
cgucgcagauauggaguuu

SEQ ID NO: 1101703 - RNA, 19 nt, Homo sapiens
  misc_RNA (1)...(19): siRNA sense strand
aaacaaaugcaucggaagu

SEQ ID NO: 1101704 - RNA, 19 nt, Homo sapiens
  misc_RNA (1)...(19): siRNA sense strand
caaaggucucagccaauuu

SEQ ID NO: 1101705 - RNA, 19 nt, Homo sapiens
  misc_RNA (1)...(19): siRNA sense strand
aaccugauauuugugcuuu

SEQ ID NO: 1101706 - RNA, 19 nt, Homo sapiens
  misc_RNA (1)...(19): siRNA sense strand
gcaccaagacucgcuacga

SEQ ID NO: 1101707 - RNA, 19 nt, Homo sapiens
  misc_RNA (1)...(19): siRNA sense strand
gguguuaccuuuggcuuac

SEQ ID NO: 1101708 - RNA, 19 nt, Homo sapiens
  misc_RNA (1)...(19): siRNA sense strand
ccuccaacaguuaaugaua

SEQ ID NO: 1101709 - RNA, 19 nt, Homo sapiens
  misc_RNA (1)...(19): siRNA sense strand
augaagaucugaagaacca

SEQ ID NO: 1101710 - RNA, 19 nt, Homo sapiens
  misc_RNA (1)...(19): siRNA sense strand
ccgacuggccuuuguggua

SEQ ID NO: 1101711 - RNA, 19 nt, Homo sapiens
  misc_RNA (1)...(19): siRNA sense strand
guggucucauuguaccuua

SEQ ID NO: 1101712 - RNA, 19 nt, Homo sapiens
  misc_RNA (1)...(19): siRNA sense strand
gaagaaugugaauuagcaa

SEQ ID NO: 1101713 - RNA, 19 nt, Homo sapiens
  misc_RNA (1)...(19): siRNA sense strand
cuucagaguugucaaacca

SEQ ID NO: 1101714 - RNA, 19 nt, Homo sapiens
  misc_RNA (1)...(19): siRNA sense strand
cgauccagcugcaccuugu

SEQ ID NO: 1101715 - RNA, 19 nt, Homo sapiens
  misc_RNA (1)...(19): siRNA sense strand
cgccggacgucgcagauau

SEQ ID NO: 1101716 - RNA, 19 nt, Homo sapiens
  misc_RNA (1)...(19): siRNA sense strand
cccuaacagcguacaauua

SEQ ID NO: 1101717 - RNA, 19 nt, Homo sapiens
  misc_RNA (1)...(19): siRNA sense strand
gauggacgggcagcuagua

SEQ ID NO: 1101718 - RNA, 19 nt, Homo sapiens
  misc_RNA (1)...(19): siRNA sense strand
gaugcaaagguauuagaau

SEQ ID NO: 1101719 - RNA, 19 nt, Homo sapiens
  misc_RNA (1)...(19): siRNA sense strand
gaaccugauauuugugcuu

SEQ ID NO: 1101720 - RNA, 19 nt, Homo sapiens
  misc_RNA (1)...(19): siRNA sense strand
ccuaacagcguacaauuac

SEQ ID NO: 1101721 - RNA, 19 nt, Homo sapiens
  misc_RNA (1)...(19): siRNA sense strand
gcagcuggucgcccucauu

SEQ ID NO: 1101722 - RNA, 19 nt, Homo sapiens
  misc_RNA (1)...(19): siRNA sense strand
gaccuccaacaguuaauga

SEQ ID NO: 1101723 - RNA, 19 nt, Homo sapiens
  misc_RNA (1)...(19): siRNA sense strand
uagaugaugcaaagguauu

SEQ ID NO: 1101724 - RNA, 19 nt, Homo sapiens
  misc_RNA (1)...(19): siRNA sense strand
aaaggucucagccaauuuc

SEQ ID NO: 1101725 - RNA, 19 nt, Homo sapiens
  misc_RNA (1)...(19): siRNA sense strand
cgaaguggucucauuguac

SEQ ID NO: 1101726 - RNA, 19 nt, Homo sapiens
  misc_RNA (1)...(19): siRNA sense strand
ggaccagaaaugcagaaca

SEQ ID NO: 1101727 - RNA, 19 nt, Homo sapiens
  misc_RNA (1)...(19): siRNA sense strand
ggaccuccaacaguuaaug

SEQ ID NO: 1101728 - RNA, 19 nt, Homo sapiens
  misc_RNA (1)...(19): siRNA sense strand
aaaagaggauauggguaua

SEQ ID NO: 1101729 - RNA, 19 nt, Homo sapiens
  misc_RNA (1)...(19): siRNA sense strand
ugcaagugccaguaaauga

SEQ ID NO: 1101730 - RNA, 19 nt, Homo sapiens
  misc_RNA (1)...(19): siRNA sense strand
cuacuucaaagacaaggaa

SEQ ID NO: 1101731 - RNA, 19 nt, Homo sapiens
  misc_RNA (1)...(19): siRNA sense strand
gccucgaaccugauauuug

SEQ ID NO: 1101732 - RNA, 19 nt, Homo sapiens
  misc_RNA (1)...(19): siRNA sense strand
gacaaagcaguugaacaga

SEQ ID NO: 1101733 - RNA, 19 nt, Homo sapiens
  misc_RNA (1)...(19): siRNA sense strand
gugcuuuaccacugugaaa

SEQ ID NO: 1101734 - RNA, 19 nt, Homo sapiens
  misc_RNA (1)...(19): siRNA sense strand
cuaacagcguacaauuaca

SEQ ID NO: 1101735 - RNA, 19 nt, Homo sapiens
  misc_RNA (1)...(19): siRNA sense strand
uaaaucuccuuggugugau

SEQ ID NO: 1101736 - RNA, 19 nt, Homo sapiens
  misc_RNA (1)...(19): siRNA sense strand
cagcuggucgcccucauuc

SEQ ID NO: 1101737 - RNA, 19 nt, Homo sapiens
  misc_RNA (1)...(19): siRNA sense strand
gaucugaagaaccacuaca

SEQ ID NO: 1101738 - RNA, 19 nt, Homo sapiens
  misc_RNA (1)...(19): siRNA sense strand
ugauauuugugcuuuacca

SEQ ID NO: 1101739 - RNA, 19 nt, Homo sapiens
  misc_RNA (1)...(19): siRNA sense strand
ucuccuuggugugauguuu

SEQ ID NO: 1101740 - RNA, 19 nt, Homo sapiens
  misc_RNA (1)...(19): siRNA sense strand
ugucaaaccagugaagaau

SEQ ID NO: 1101741 - RNA, 19 nt, Homo sapiens
  misc_RNA (1)...(19): siRNA sense strand
ccgagugcagauguuauua

SEQ ID NO: 1101742 - RNA, 19 nt, Homo sapiens
  misc_RNA (1)...(19): siRNA sense strand
ccugauauuugugcuuuac

SEQ ID NO: 1101743 - RNA, 19 nt, Homo sapiens
  misc_RNA (1)...(19): siRNA sense strand
cuugcgcgcugcucucuuc

SEQ ID NO: 1101744 - RNA, 19 nt, Homo sapiens
  misc_RNA (1)...(19): siRNA sense strand
ugaugcaaagguauuagaa

SEQ ID NO: 1101745 - RNA, 19 nt, Homo sapiens
  misc_RNA (1)...(19): siRNA sense strand
agaugaugcaaagguauua

SEQ ID NO: 1101746 - RNA, 19 nt, Homo sapiens
  misc_RNA (1)...(19): siRNA sense strand
gcaagaaucuguuccuagu

SEQ ID NO: 1101747 - RNA, 19 nt, Homo sapiens
  misc_RNA (1)...(19): siRNA sense strand
uaacacagcugacagaaag

SEQ ID NO: 1101748 - RNA, 19 nt, Homo sapiens
  misc_RNA (1)...(19): siRNA sense strand
gagcugggcggaucaguua

SEQ ID NO: 1101749 - RNA, 19 nt, Homo sapiens
  misc_RNA (1)...(19): siRNA sense strand
ggaaagacccagaaaguca

SEQ ID NO: 1101750 - RNA, 19 nt, Homo sapiens
  misc_RNA (1)...(19): siRNA sense strand
gguuucaucugcccuauuu

SEQ ID NO: 1101751 - RNA, 19 nt, Homo sapiens
  misc_RNA (1)...(19): siRNA sense strand
gaauacaagggccgaguua

SEQ ID NO: 1101752 - RNA, 19 nt, Homo sapiens
  misc_RNA (1)...(19): siRNA sense strand
gagggaaggccaaggauuu

SEQ ID NO: 1101753 - RNA, 19 nt, Homo sapiens
  misc_RNA (1)...(19): siRNA sense strand
ugaaaugcaugugaggaua

SEQ ID NO: 1101754 - RNA, 19 nt, Homo sapiens
  misc_RNA (1)...(19): siRNA sense strand
gcagagagcacuggacuau

SEQ ID NO: 1101755 - RNA, 19 nt, Homo sapiens
  misc_RNA (1)...(19): siRNA sense strand
gagcgggcaugaacacaga

SEQ ID NO: 1101756 - RNA, 19 nt, Homo sapiens
  misc_RNA (1)...(19): siRNA sense strand
guccagagcaucuucagua

SEQ ID NO: 1101757 - RNA, 19 nt, Homo sapiens
  misc_RNA (1)...(19): siRNA sense strand
ggaggacagugauucagau

SEQ ID NO: 1101758 - RNA, 19 nt, Homo sapiens
  misc_RNA (1)...(19): siRNA sense strand
gaaaugcaugugaggauau

SEQ ID NO: 1101759 - RNA, 19 nt, Homo sapiens
  misc_RNA (1)...(19): siRNA sense strand
ggacagugauucagaugac

SEQ ID NO: 1101760 - RNA, 19 nt, Homo sapiens
  misc_RNA (1)...(19): siRNA sense strand
gcaauacccacgcaagaau

SEQ ID NO: 1101761 - RNA, 19 nt, Homo sapiens
  misc_RNA (1)...(19): siRNA sense strand
cagagcaucuucaguagca

SEQ ID NO: 1101762 - RNA, 19 nt, Homo sapiens
  misc_RNA (1)...(19): siRNA sense strand
agagagcacuggacuaugg

SEQ ID NO: 1101763 - RNA, 19 nt, Homo sapiens
  misc_RNA (1)...(19): siRNA sense strand
gcggaucaguuaccaucaa

SEQ ID NO: 1101764 - RNA, 19 nt, Homo sapiens
  misc_RNA (1)...(19): siRNA sense strand
gaagaccagcugugaauac

SEQ ID NO: 1101765 - RNA, 19 nt, Homo sapiens
  misc_RNA (1)...(19): siRNA sense strand
gaaaagggccguugaaagg

SEQ ID NO: 1101766 - RNA, 19 nt, Homo sapiens
  misc_RNA (1)...(19): siRNA sense strand
aaaugcaugugaggauaua

SEQ ID NO: 1101767 - RNA, 19 nt, Homo sapiens
  misc_RNA (1)...(19): siRNA sense strand
gaaagucacccugaauguc

SEQ ID NO: 1101768 - RNA, 19 nt, Homo sapiens
  misc_RNA (1)...(19): siRNA sense strand
gugaauacgugagccucua

SEQ ID NO: 1101769 - RNA, 19 nt, Homo sapiens
  misc_RNA (1)...(19): siRNA sense strand
guaacacagcugacagaaa

SEQ ID NO: 1101770 - RNA, 19 nt, Homo sapiens
  misc_RNA (1)...(19): siRNA sense strand
gaucaguuaccaucaagug

SEQ ID NO: 1101771 - RNA, 19 nt, Homo sapiens
  misc_RNA (1)...(19): siRNA sense strand
ggcuggaucuggaacaugu

SEQ ID NO: 1101772 - RNA, 19 nt, Homo sapiens
  misc_RNA (1)...(19): siRNA sense strand
ggagggaaggccaaggauu

SEQ ID NO: 1101773 - RNA, 19 nt, Homo sapiens
  misc_RNA (1)...(19): siRNA sense strand
caucaaggcagaauacaag

SEQ ID NO: 1101774 - RNA, 19 nt, Homo sapiens
  misc_RNA (1)...(19): siRNA sense strand
cagaaagucacccugaaug

SEQ ID NO: 1101775 - RNA, 19 nt, Homo sapiens
  misc_RNA (1)...(19): siRNA sense strand
gcaaggucccuccaguuca

SEQ ID NO: 1101776 - RNA, 19 nt, Homo sapiens
  misc_RNA (1)...(19): siRNA sense strand
ugccaguucuuccaaauuc

SEQ ID NO: 1101777 - RNA, 19 nt, Homo sapiens
  misc_RNA (1)...(19): siRNA sense strand
gagcagccaaugccugaga

SEQ ID NO: 1101778 - RNA, 19 nt, Homo sapiens
  misc_RNA (1)...(19): siRNA sense strand
ggaucuggaacauguggua

SEQ ID NO: 1101779 - RNA, 19 nt, Homo sapiens
  misc_RNA (1)...(19): siRNA sense strand
ccaaauucguaaccagagu

SEQ ID NO: 1101780 - RNA, 19 nt, Homo sapiens
  misc_RNA (1)...(19): siRNA sense strand
ggcaaggucccuccaguuc

SEQ ID NO: 1101781 - RNA, 19 nt, Homo sapiens
  misc_RNA (1)...(19): siRNA sense strand
ggagcugggcggaucaguu

SEQ ID NO: 1101782 - RNA, 19 nt, Homo sapiens
  misc_RNA (1)...(19): siRNA sense strand
gaaagugacagcggagucu

SEQ ID NO: 1101783 - RNA, 19 nt, Homo sapiens
  misc_RNA (1)...(19): siRNA sense strand
gggcaaggucccuccaguu

SEQ ID NO: 1101784 - RNA, 19 nt, Homo sapiens
  misc_RNA (1)...(19): siRNA sense strand
ccagaaagucacccugaau

SEQ ID NO: 1101785 - RNA, 19 nt, Homo sapiens
  misc_RNA (1)...(19): siRNA sense strand
caugugaggauauaucugu

SEQ ID NO: 1101786 - RNA, 19 nt, Homo sapiens
  misc_RNA (1)...(19): siRNA sense strand
caaauucguaaccagaguu

SEQ ID NO: 1101787 - RNA, 19 nt, Homo sapiens
  misc_RNA (1)...(19): siRNA sense strand
gugaauacgagccaucaug

SEQ ID NO: 1101788 - RNA, 19 nt, Homo sapiens
  misc_RNA (1)...(19): siRNA sense strand
ggagguaacacagcugaca

SEQ ID NO: 1101789 - RNA, 19 nt, Homo sapiens
  misc_RNA (1)...(19): siRNA sense strand
gauggaggacagugauuca

SEQ ID NO: 1101790 - RNA, 19 nt, Homo sapiens
  misc_RNA (1)...(19): siRNA sense strand
gaauguccacagugaauac

SEQ ID NO: 1101791 - RNA, 19 nt, Homo sapiens
  misc_RNA (1)...(19): siRNA sense strand
gauccucccagaaguaaag

SEQ ID NO: 1101792 - RNA, 19 nt, Homo sapiens
  misc_RNA (1)...(19): siRNA sense strand
caaggucccuccaguucac

SEQ ID NO: 1101793 - RNA, 19 nt, Homo sapiens
  misc_RNA (1)...(19): siRNA sense strand
gggaaagacccagaaaguc

SEQ ID NO: 1101794 - RNA, 19 nt, Homo sapiens
  misc_RNA (1)...(19): siRNA sense strand
ugaauguccacagugaaua

SEQ ID NO: 1101795 - RNA, 19 nt, Homo sapiens
  misc_RNA (1)...(19): siRNA sense strand
cccagaaagucacccugaa

SEQ ID NO: 1101796 - RNA, 19 nt, Homo sapiens
  misc_RNA (1)...(19): siRNA sense strand
ugaagaccagcugugaaua

SEQ ID NO: 1101797 - RNA, 19 nt, Homo sapiens
  misc_RNA (1)...(19): siRNA sense strand
acgcaagaaucuguuccua

SEQ ID NO: 1101798 - RNA, 19 nt, Homo sapiens
  misc_RNA (1)...(19): siRNA sense strand
gaaggccaaggauuucaca

SEQ ID NO: 1101799 - RNA, 19 nt, Homo sapiens
  misc_RNA (1)...(19): siRNA sense strand
gugcccacuuccugaaaug

SEQ ID NO: 1101800 - RNA, 19 nt, Homo sapiens
  misc_RNA (1)...(19): siRNA sense strand
agaaagucacccugaaugu

SEQ ID NO: 1101801 - RNA, 19 nt, Homo sapiens
  misc_RNA (1)...(19): siRNA sense strand
ucccagaaguaaagguaga

SEQ ID NO: 1101802 - RNA, 19 nt, Homo sapiens
  misc_RNA (1)...(19): siRNA sense strand
cccugaauguccacaguga

SEQ ID NO: 1101803 - RNA, 19 nt, Homo sapiens
  misc_RNA (1)...(19): siRNA sense strand
cgaccgcgcucccaaaaca

SEQ ID NO: 1101804 - RNA, 19 nt, Homo sapiens
  misc_RNA (1)...(19): siRNA sense strand
cugaagaccagcugugaau

SEQ ID NO: 1101805 - RNA, 19 nt, Homo sapiens
  misc_RNA (1)...(19): siRNA sense strand
gaggacagugauucagaug

SEQ ID NO: 1101806 - RNA, 19 nt, Homo sapiens
  misc_RNA (1)...(19): siRNA sense strand
uaugccaguucuuccaaau

SEQ ID NO: 1101807 - RNA, 19 nt, Homo sapiens
  misc_RNA (1)...(19): siRNA sense strand
aagcaauacccacgcaaga

SEQ ID NO: 1101808 - RNA, 19 nt, Homo sapiens
  misc_RNA (1)...(19): siRNA sense strand
gguauccaccaccaacuuc

SEQ ID NO: 1101809 - RNA, 19 nt, Homo sapiens
  misc_RNA (1)...(19): siRNA sense strand
gcauaugccaguucuucca

SEQ ID NO: 1101810 - RNA, 19 nt, Homo sapiens
  misc_RNA (1)...(19): siRNA sense strand
gguaacacagcugacagaa

SEQ ID NO: 1101811 - RNA, 19 nt, Homo sapiens
  misc_RNA (1)...(19): siRNA sense strand
ccucccagaaguaaaggua

SEQ ID NO: 1101812 - RNA, 19 nt, Homo sapiens
  misc_RNA (1)...(19): siRNA sense strand
caacaucuguaacuucuug

SEQ ID NO: 1101813 - RNA, 19 nt, Homo sapiens
  misc_RNA (1)...(19): siRNA sense strand
gauuugaucuuccauaugg

SEQ ID NO: 1101814 - RNA, 19 nt, Homo sapiens
  misc_RNA (1)...(19): siRNA sense strand
gaaauucaacagcagauug

SEQ ID NO: 1101815 - RNA, 19 nt, Homo sapiens
  misc_RNA (1)...(19): siRNA sense strand
gacaacaucuguaacuucu

SEQ ID NO: 1101816 - RNA, 19 nt, Homo sapiens
  misc_RNA (1)...(19): siRNA sense strand
gcacuaugcuacccucuac

SEQ ID NO: 1101817 - RNA, 19 nt, Homo sapiens
  misc_RNA (1)...(19): siRNA sense strand
cgagagacuuuccaucuag

SEQ ID NO: 1101818 - RNA, 19 nt, Homo sapiens
  misc_RNA (1)...(19): siRNA sense strand
gagugaacuuggaaucuug

SEQ ID NO: 1101819 - RNA, 19 nt, Homo sapiens
  misc_RNA (1)...(19): siRNA sense strand
uggaaacucuggauaagug

SEQ ID NO: 1101820 - RNA, 19 nt, Homo sapiens
  misc_RNA (1)...(19): siRNA sense strand
ugaauuggauuugaucuuc

SEQ ID NO: 1101821 - RNA, 19 nt, Homo sapiens
  misc_RNA (1)...(19): siRNA sense strand
gaucucaacaucaaaguuc

SEQ ID NO: 1101822 - RNA, 19 nt, Homo sapiens
  misc_RNA (1)...(19): siRNA sense strand
ucgagagacuuuccaucua

SEQ ID NO: 1101823 - RNA, 19 nt, Homo sapiens
  misc_RNA (1)...(19): siRNA sense strand
ggaaacaaacaugaaugaa

SEQ ID NO: 1101824 - RNA, 19 nt, Homo sapiens
  misc_RNA (1)...(19): siRNA sense strand
cuggauaaguguuucgaaa

SEQ ID NO: 1101825 - RNA, 19 nt, Homo sapiens
  misc_RNA (1)...(19): siRNA sense strand
ggauaaguguuucgaaaau

SEQ ID NO: 1101826 - RNA, 19 nt, Homo sapiens
  misc_RNA (1)...(19): siRNA sense strand
uggauaaggugcacuacau

SEQ ID NO: 1101827 - RNA, 19 nt, Homo sapiens
  misc_RNA (1)...(19): siRNA sense strand
gaggguggaaguuugauug

SEQ ID NO: 1101828 - RNA, 19 nt, Homo sapiens
  misc_RNA (1)...(19): siRNA sense strand
gcagauuguucgagagacu

SEQ ID NO: 1101829 - RNA, 19 nt, Homo sapiens
  misc_RNA (1)...(19): siRNA sense strand
ggcugugucugcugugaaa

SEQ ID NO: 1101830 - RNA, 19 nt, Homo sapiens
  misc_RNA (1)...(19): siRNA sense strand
agagugaacuuggaaucuu

SEQ ID NO: 1101831 - RNA, 19 nt, Homo sapiens
  misc_RNA (1)...(19): siRNA sense strand
gcuacccucuacuuuguau

SEQ ID NO: 1101832 - RNA, 19 nt, Homo sapiens
  misc_RNA (1)...(19): siRNA sense strand
gaaaaugugugugaauugg

SEQ ID NO: 1101833 - RNA, 19 nt, Homo sapiens
  misc_RNA (1)...(19): siRNA sense strand
gagagacuuuccaucuagu

SEQ ID NO: 1101834 - RNA, 19 nt, Homo sapiens
  misc_RNA (1)...(19): siRNA sense strand
ccucggaacaucaacauug

SEQ ID NO: 1101835 - RNA, 19 nt, Homo sapiens
  misc_RNA (1)...(19): siRNA sense strand
ugacaacaucuguaacuuc

SEQ ID NO: 1101836 - RNA, 19 nt, Homo sapiens
  misc_RNA (1)...(19): siRNA sense strand
uggaaacaaacaugaauga

SEQ ID NO: 1101837 - RNA, 19 nt, Homo sapiens
  misc_RNA (1)...(19): siRNA sense strand
cuaccagcguuucccagaa

SEQ ID NO: 1101838 - RNA, 19 nt, Homo sapiens
  misc_RNA (1)...(19): siRNA sense strand
caacauuggcgaucucaac

SEQ ID NO: 1101839 - RNA, 19 nt, Homo sapiens
  misc_RNA (1)...(19): siRNA sense strand
aaaacaggcuggagaaauc

SEQ ID NO: 1101840 - RNA, 19 nt, Homo sapiens
  misc_RNA (1)...(19): siRNA sense strand
aaaugugugugaauuggau

SEQ ID NO: 1101841 - RNA, 19 nt, Homo sapiens
  misc_RNA (1)...(19): siRNA sense strand
ugguggcucugacuacaaa

SEQ ID NO: 1101842 - RNA, 19 nt, Homo sapiens
  misc_RNA (1)...(19): siRNA sense strand
gaaacucuggauaaguguu

SEQ ID NO: 1101843 - RNA, 19 nt, Homo sapiens
  misc_RNA (1)...(19): siRNA sense strand
ggauuugaucuuccauaug

SEQ ID NO: 1101844 - RNA, 19 nt, Homo sapiens
  misc_RNA (1)...(19): siRNA sense strand
cauuggcgaucucaacauc

SEQ ID NO: 1101845 - RNA, 19 nt, Homo sapiens
  misc_RNA (1)...(19): siRNA sense strand
cagcagauuguucgagaga

SEQ ID NO: 1101846 - RNA, 19 nt, Homo sapiens
  misc_RNA (1)...(19): siRNA sense strand
ggaggguggaaguuugauu

SEQ ID NO: 1101847 - RNA, 19 nt, Homo sapiens
  misc_RNA (1)...(19): siRNA sense strand
gauaaguguuucgaaaaug

SEQ ID NO: 1101848 - RNA, 19 nt, Homo sapiens
  misc_RNA (1)...(19): siRNA sense strand
uacccucuacuuuguauuu

SEQ ID NO: 1101849 - RNA, 19 nt, Homo sapiens
  misc_RNA (1)...(19): siRNA sense strand
ggauaaggugcacuacauc

SEQ ID NO: 1101850 - RNA, 19 nt, Homo sapiens
  misc_RNA (1)...(19): siRNA sense strand
uaugcuacccucuacuuug

SEQ ID NO: 1101851 - RNA, 19 nt, Homo sapiens
  misc_RNA (1)...(19): siRNA sense strand
acaucaaccugccagagau

SEQ ID NO: 1101852 - RNA, 19 nt, Homo sapiens
  misc_RNA (1)...(19): siRNA sense strand
ggugggaugguguuggaaa

SEQ ID NO: 1101853 - RNA, 19 nt, Homo sapiens
  misc_RNA (1)...(19): siRNA sense strand
ucagagagugaacuuggaa

SEQ ID NO: 1101854 - RNA, 19 nt, Homo sapiens
  misc_RNA (1)...(19): siRNA sense strand
cuuggaggguggaaguuug

SEQ ID NO: 1101855 - RNA, 19 nt, Homo sapiens
  misc_RNA (1)...(19): siRNA sense strand
gagagugaacuuggaaucu

SEQ ID NO: 1101856 - RNA, 19 nt, Homo sapiens
  misc_RNA (1)...(19): siRNA sense strand
uaccagcguuucccagaag

SEQ ID NO: 1101857 - RNA, 19 nt, Homo sapiens
  misc_RNA (1)...(19): siRNA sense strand
caucaacauuggcgaucuc

SEQ ID NO: 1101858 - RNA, 19 nt, Homo sapiens
  misc_RNA (1)...(19): siRNA sense strand
caucaaccugccagagauu

SEQ ID NO: 1101859 - RNA, 19 nt, Homo sapiens
  misc_RNA (1)...(19): siRNA sense strand
augcuacccucuacuuugu

SEQ ID NO: 1101860 - RNA, 19 nt, Homo sapiens
  misc_RNA (1)...(19): siRNA sense strand
ggcucugacuacaaacuga

SEQ ID NO: 1101861 - RNA, 19 nt, Homo sapiens
  misc_RNA (1)...(19): siRNA sense strand
gugugugaauuggauuuga

SEQ ID NO: 1101862 - RNA, 19 nt, Homo sapiens
  misc_RNA (1)...(19): siRNA sense strand
uguggaaacucuggauaag

SEQ ID NO: 1101863 - RNA, 19 nt, Homo sapiens
  misc_RNA (1)...(19): siRNA sense strand
guuggaaacaaacaugaau

SEQ ID NO: 1101864 - RNA, 19 nt, Homo sapiens
  misc_RNA (1)...(19): siRNA sense strand
ugugugaauuggauuugau

SEQ ID NO: 1101865 - RNA, 19 nt, Homo sapiens
  misc_RNA (1)...(19): siRNA sense strand
ggaaacucuggauaagugu

SEQ ID NO: 1101866 - RNA, 19 nt, Homo sapiens
  misc_RNA (1)...(19): siRNA sense strand
aaauucaacagcagauugu

SEQ ID NO: 1101867 - RNA, 19 nt, Homo sapiens
  misc_RNA (1)...(19): siRNA sense strand
ucgaaaaugugugugaauu

SEQ ID NO: 1101868 - RNA, 19 nt, Homo sapiens
  misc_RNA (1)...(19): siRNA sense strand
cccaaccugucccaguuug

SEQ ID NO: 1101869 - RNA, 19 nt, Homo sapiens
  misc_RNA (1)...(19): siRNA sense strand
ugggugggaugguguugga

SEQ ID NO: 1101870 - RNA, 19 nt, Homo sapiens
  misc_RNA (1)...(19): siRNA sense strand
gugaauuggauuugaucuu

SEQ ID NO: 1101871 - RNA, 19 nt, Homo sapiens
  misc_RNA (1)...(19): siRNA sense strand
gauuacaucuucucuaugg

SEQ ID NO: 1101872 - RNA, 19 nt, Homo sapiens
  misc_RNA (1)...(19): siRNA sense strand
gaaugugacucugcaaugu

SEQ ID NO: 1101873 - RNA, 19 nt, Homo sapiens
  misc_RNA (1)...(19): siRNA sense strand
gaaacugaccucugugaga

SEQ ID NO: 1101874 - RNA, 19 nt, Homo sapiens
  misc_RNA (1)...(19): siRNA sense strand
guacagaacaccaaaguag

SEQ ID NO: 1101875 - RNA, 19 nt, Homo sapiens
  misc_RNA (1)...(19): siRNA sense strand
agagcgagaucauggagua

SEQ ID NO: 1101876 - RNA, 19 nt, Homo sapiens
  misc_RNA (1)...(19): siRNA sense strand
ggagagaaacccaaacauc

SEQ ID NO: 1101877 - RNA, 19 nt, Homo sapiens
  misc_RNA (1)...(19): siRNA sense strand
aaacugaccucugugagau

SEQ ID NO: 1101878 - RNA, 19 nt, Homo sapiens
  misc_RNA (1)...(19): siRNA sense strand
gcaaccacuugaccuacuu

SEQ ID NO: 1101879 - RNA, 19 nt, Homo sapiens
  misc_RNA (1)...(19): siRNA sense strand
ggacaugugcgagcucaaa

SEQ ID NO: 1101880 - RNA, 19 nt, Homo sapiens
  misc_RNA (1)...(19): siRNA sense strand
ccaucaaggugcacaugaa

SEQ ID NO: 1101881 - RNA, 19 nt, Homo sapiens
  misc_RNA (1)...(19): siRNA sense strand
gagcagccuccacuacaaa

SEQ ID NO: 1101882 - RNA, 19 nt, Homo sapiens
  misc_RNA (1)...(19): siRNA sense strand
ccgacaugcugggagauua

SEQ ID NO: 1101883 - RNA, 19 nt, Homo sapiens
  misc_RNA (1)...(19): siRNA sense strand
agucgaaacugaccucugu

SEQ ID NO: 1101884 - RNA, 19 nt, Homo sapiens
  misc_RNA (1)...(19): siRNA sense strand
gagaaggucuuggggauug

SEQ ID NO: 1101885 - RNA, 19 nt, Homo sapiens
  misc_RNA (1)...(19): siRNA sense strand
caucaucaccuccuuccaa

SEQ ID NO: 1101886 - RNA, 19 nt, Homo sapiens
  misc_RNA (1)...(19): siRNA sense strand
cuaugucccuggcuaccua

SEQ ID NO: 1101887 - RNA, 19 nt, Homo sapiens
  misc_RNA (1)...(19): siRNA sense strand
ucaccugccuuuccuggau

SEQ ID NO: 1101888 - RNA, 19 nt, Homo sapiens
  misc_RNA (1)...(19): siRNA sense strand
ccucuagccuccucugcuu

SEQ ID NO: 1101889 - RNA, 19 nt, Homo sapiens
  misc_RNA (1)...(19): siRNA sense strand
gguacagaacaccaaagua

SEQ ID NO: 1101890 - RNA, 19 nt, Homo sapiens
  misc_RNA (1)...(19): siRNA sense strand
ccacuugaccuacuuugca

SEQ ID NO: 1101891 - RNA, 19 nt, Homo sapiens
  misc_RNA (1)...(19): siRNA sense strand
ugguggauguggacaacua

SEQ ID NO: 1101892 - RNA, 19 nt, Homo sapiens
  misc_RNA (1)...(19): siRNA sense strand
ccucgggacuacaccauca

SEQ ID NO: 1101893 - RNA, 19 nt, Homo sapiens
  misc_RNA (1)...(19): siRNA sense strand
caucuuggcugugcauagg

SEQ ID NO: 1101894 - RNA, 19 nt, Homo sapiens
  misc_RNA (1)...(19): siRNA sense strand
gagaccgucaggagagaaa

SEQ ID NO: 1101895 - RNA, 19 nt, Homo sapiens
  misc_RNA (1)...(19): siRNA sense strand
ggccugccuugucaccauu

SEQ ID NO: 1101896 - RNA, 19 nt, Homo sapiens
  misc_RNA (1)...(19): siRNA sense strand
ugcagagccuggagucgaa

SEQ ID NO: 1101897 - RNA, 19 nt, Homo sapiens
  misc_RNA (1)...(19): siRNA sense strand
gaagaaugugacucugcaa

SEQ ID NO: 1101898 - RNA, 19 nt, Homo sapiens
  misc_RNA (1)...(19): siRNA sense strand
guggagcccucagaacauc

SEQ ID NO: 1101899 - RNA, 19 nt, Homo sapiens
  misc_RNA (1)...(19): siRNA sense strand
uuccaaggcuuccucaucu

SEQ ID NO: 1101900 - RNA, 19 nt, Homo sapiens
  misc_RNA (1)...(19): siRNA sense strand
ucaccaaccugggccucuu

SEQ ID NO: 1101901 - RNA, 19 nt, Homo sapiens
  misc_RNA (1)...(19): siRNA sense strand
caggagagaaacccaaaca

SEQ ID NO: 1101902 - RNA, 19 nt, Homo sapiens
  misc_RNA (1)...(19): siRNA sense strand
ccaaggcuuccucaucuuc

SEQ ID NO: 1101903 - RNA, 19 nt, Homo sapiens
  misc_RNA (1)...(19): siRNA sense strand
gucccuggcuaccuacuca

SEQ ID NO: 1101904 - RNA, 19 nt, Homo sapiens
  misc_RNA (1)...(19): siRNA sense strand
gcgagaucauggaguacuc

SEQ ID NO: 1101905 - RNA, 19 nt, Homo sapiens
  misc_RNA (1)...(19): siRNA sense strand
caaccacuugaccuacuuu

SEQ ID NO: 1101906 - RNA, 19 nt, Homo sapiens
  misc_RNA (1)...(19): siRNA sense strand
agaaugugacucugcaaug

SEQ ID NO: 1101907 - RNA, 19 nt, Homo sapiens
  misc_RNA (1)...(19): siRNA sense strand
cagcuacagccgaagaaug

SEQ ID NO: 1101908 - RNA, 19 nt, Homo sapiens
  misc_RNA (1)...(19): siRNA sense strand
cagcggaaccagacacaca

SEQ ID NO: 1101909 - RNA, 19 nt, Homo sapiens
  misc_RNA (1)...(19): siRNA sense strand
gggccacagggaagacuuu

SEQ ID NO: 1101910 - RNA, 19 nt, Homo sapiens
  misc_RNA (1)...(19): siRNA sense strand
ggaaaccucgggacuacac

SEQ ID NO: 1101911 - RNA, 19 nt, Homo sapiens
  misc_RNA (1)...(19): siRNA sense strand
gugagaccgucaggagaga

SEQ ID NO: 1101912 - RNA, 19 nt, Homo sapiens
  misc_RNA (1)...(19): siRNA sense strand
cuacagccgaagaauguga

SEQ ID NO: 1101913 - RNA, 19 nt, Homo sapiens
  misc_RNA (1)...(19): siRNA sense strand
caccagaccugcgcaucuc

SEQ ID NO: 1101914 - RNA, 19 nt, Homo sapiens
  misc_RNA (1)...(19): siRNA sense strand
gggacuacaccaucaaggu

SEQ ID NO: 1101915 - RNA, 19 nt, Homo sapiens
  misc_RNA (1)...(19): siRNA sense strand
gguggagcccucagaacau

SEQ ID NO: 1101916 - RNA, 19 nt, Homo sapiens
  misc_RNA (1)...(19): siRNA sense strand
aaacauccugcuucugcaa

SEQ ID NO: 1101917 - RNA, 19 nt, Homo sapiens
  misc_RNA (1)...(19): siRNA sense strand
agccuggagucgaaacuga

SEQ ID NO: 1101918 - RNA, 19 nt, Homo sapiens
  misc_RNA (1)...(19): siRNA sense strand
gaaauucaguucagcauca

SEQ ID NO: 1101919 - RNA, 19 nt, Homo sapiens
  misc_RNA (1)...(19): siRNA sense strand
cagcaaagaccucaaauuu

SEQ ID NO: 1101920 - RNA, 19 nt, Homo sapiens
  misc_RNA (1)...(19): siRNA sense strand
gguuugagauucagaagua

SEQ ID NO: 1101921 - RNA, 19 nt, Homo sapiens
  misc_RNA (1)...(19): siRNA sense strand
uaacgaggcuucugcaauc

SEQ ID NO: 1101922 - RNA, 19 nt, Homo sapiens
  misc_RNA (1)...(19): siRNA sense strand
gaucucacuucccugcuaa

SEQ ID NO: 1101923 - RNA, 19 nt, Homo sapiens
  misc_RNA (1)...(19): siRNA sense strand
caaggaggcuggcgagaag

SEQ ID NO: 1101924 - RNA, 19 nt, Homo sapiens
  misc_RNA (1)...(19): siRNA sense strand
ggcaauaguuucagcuuca

SEQ ID NO: 1101925 - RNA, 19 nt, Homo sapiens
  misc_RNA (1)...(19): siRNA sense strand
gcaccaaacaacaguuauu

SEQ ID NO: 1101926 - RNA, 19 nt, Homo sapiens
  misc_RNA (1)...(19): siRNA sense strand
ggaaaggccuggagaaaag

SEQ ID NO: 1101927 - RNA, 19 nt, Homo sapiens
  misc_RNA (1)...(19): siRNA sense strand
gcaacacgcugagagaucu

SEQ ID NO: 1101928 - RNA, 19 nt, Homo sapiens
  misc_RNA (1)...(19): siRNA sense strand
gaggaaaggccuggagaaa

SEQ ID NO: 1101929 - RNA, 19 nt, Homo sapiens
  misc_RNA (1)...(19): siRNA sense strand
caccaaacaacaguuauua

SEQ ID NO: 1101930 - RNA, 19 nt, Homo sapiens
  misc_RNA (1)...(19): siRNA sense strand
gagaaaagguuugagauuc

SEQ ID NO: 1101931 - RNA, 19 nt, Homo sapiens
  misc_RNA (1)...(19): siRNA sense strand
cagcaucaguuccaagaca

SEQ ID NO: 1101932 - RNA, 19 nt, Homo sapiens
  misc_RNA (1)...(19): siRNA sense strand
ugaccaagccggaccgaaa

SEQ ID NO: 1101933 - RNA, 19 nt, Homo sapiens
  misc_RNA (1)...(19): siRNA sense strand
ccaaacaacaguuauuaag

SEQ ID NO: 1101934 - RNA, 19 nt, Homo sapiens
  misc_RNA (1)...(19): siRNA sense strand
ggaauugaccgcauuuuau

SEQ ID NO: 1101935 - RNA, 19 nt, Homo sapiens
  misc_RNA (1)...(19): siRNA sense strand
uaaacucgaacccaagaaa

SEQ ID NO: 1101936 - RNA, 19 nt, Homo sapiens
  misc_RNA (1)...(19): siRNA sense strand
gcaauccugagucccuuaa

SEQ ID NO: 1101937 - RNA, 19 nt, Homo sapiens
  misc_RNA (1)...(19): siRNA sense strand
ucuccaaccugcagaggaa

SEQ ID NO: 1101938 - RNA, 19 nt, Homo sapiens
  misc_RNA (1)...(19): siRNA sense strand
gaacccaagaaauucaguu

SEQ ID NO: 1101939 - RNA, 19 nt, Homo sapiens
  misc_RNA (1)...(19): siRNA sense strand
ccuaugcugugcucacgaa

SEQ ID NO: 1101940 - RNA, 19 nt, Homo sapiens
  misc_RNA (1)...(19): siRNA sense strand
caaacaacaguuauuaagg

SEQ ID NO: 1101941 - RNA, 19 nt, Homo sapiens
  misc_RNA (1)...(19): siRNA sense strand
ggagaaaagguuugagauu

SEQ ID NO: 1101942 - RNA, 19 nt, Homo sapiens
  misc_RNA (1)...(19): siRNA sense strand
ccagcaaagaccucaaauu

SEQ ID NO: 1101943 - RNA, 19 nt, Homo sapiens
  misc_RNA (1)...(19): siRNA sense strand
agaucucacuucccugcua

SEQ ID NO: 1101944 - RNA, 19 nt, Homo sapiens
  misc_RNA (1)...(19): siRNA sense strand
agaaaagguuugagauuca

SEQ ID NO: 1101945 - RNA, 19 nt, Homo sapiens
  misc_RNA (1)...(19): siRNA sense strand
acaccaugccgcagacgua

SEQ ID NO: 1101946 - RNA, 19 nt, Homo sapiens
  misc_RNA (1)...(19): siRNA sense strand
gcaauaguuucagcuucag

SEQ ID NO: 1101947 - RNA, 19 nt, Homo sapiens
  misc_RNA (1)...(19): siRNA sense strand
cuucuacgccuccaacuuc

SEQ ID NO: 1101948 - RNA, 19 nt, Homo sapiens
  misc_RNA (1)...(19): siRNA sense strand
cccaagaaauucaguucag

SEQ ID NO: 1101949 - RNA, 19 nt, Homo sapiens
  misc_RNA (1)...(19): siRNA sense strand
aaagaccucaaauuuggaa

SEQ ID NO: 1101950 - RNA, 19 nt, Homo sapiens
  misc_RNA (1)...(19): siRNA sense strand
cugcaccaaacaacaguua

SEQ ID NO: 1101951 - RNA, 19 nt, Homo sapiens
  misc_RNA (1)...(19): siRNA sense strand
acaaggaggcuggcgagaa

SEQ ID NO: 1101952 - RNA, 19 nt, Homo sapiens
  misc_RNA (1)...(19): siRNA sense strand
gaccaagccggaccgaaag

SEQ ID NO: 1101953 - RNA, 19 nt, Homo sapiens
  misc_RNA (1)...(19): siRNA sense strand
aaacucgaacccaagaaau

SEQ ID NO: 1101954 - RNA, 19 nt, Homo sapiens
  misc_RNA (1)...(19): siRNA sense strand
gaauugaccgcauuuuauc

SEQ ID NO: 1101955 - RNA, 19 nt, Homo sapiens
  misc_RNA (1)...(19): siRNA sense strand
ucaguuccaagacacguuu

SEQ ID NO: 1101956 - RNA, 19 nt, Homo sapiens
  misc_RNA (1)...(19): siRNA sense strand
cagcagcgccagcagucuu

SEQ ID NO: 1101957 - RNA, 19 nt, Homo sapiens
  misc_RNA (1)...(19): siRNA sense strand
uuaacgaggcuucugcaau

SEQ ID NO: 1101958 - RNA, 19 nt, Homo sapiens
  misc_RNA (1)...(19): siRNA sense strand
augcugugcucacgaagga

SEQ ID NO: 1101959 - RNA, 19 nt, Homo sapiens
  misc_RNA (1)...(19): siRNA sense strand
ggacaaagcccuggagaaa

SEQ ID NO: 1101960 - RNA, 19 nt, Homo sapiens
  misc_RNA (1)...(19): siRNA sense strand
gccaagaccuccaagaaga

SEQ ID NO: 1101961 - RNA, 19 nt, Homo sapiens
  misc_RNA (1)...(19): siRNA sense strand
gcaaccaggucuccuaugg

SEQ ID NO: 1101962 - RNA, 19 nt, Homo sapiens
  misc_RNA (1)...(19): siRNA sense strand
acaaagcccuggagaaauc

SEQ ID NO: 1101963 - RNA, 19 nt, Homo sapiens
  misc_RNA (1)...(19): siRNA sense strand
gaacccacguacugucugu

SEQ ID NO: 1101964 - RNA, 19 nt, Homo sapiens
  misc_RNA (1)...(19): siRNA sense strand
gcacacccaaggagaagaa

SEQ ID NO: 1101965 - RNA, 19 nt, Homo sapiens
  misc_RNA (1)...(19): siRNA sense strand
ugguggagcugguggagaa

SEQ ID NO: 1101966 - RNA, 19 nt, Homo sapiens
  misc_RNA (1)...(19): siRNA sense strand
aaagagagggcuuacaaca

SEQ ID NO: 1101967 - RNA, 19 nt, Homo sapiens
  misc_RNA (1)...(19): siRNA sense strand
gagaagaccauggacaaag

SEQ ID NO: 1101968 - RNA, 19 nt, Homo sapiens
  misc_RNA (1)...(19): siRNA sense strand
gcgcuucagucgcgagaca

SEQ ID NO: 1101969 - RNA, 19 nt, Homo sapiens
  misc_RNA (1)...(19): siRNA sense strand
gcguggggcucaaucauaa

SEQ ID NO: 1101970 - RNA, 19 nt, Homo sapiens
  misc_RNA (1)...(19): siRNA sense strand
caacgaacccacguacugu

SEQ ID NO: 1101971 - RNA, 19 nt, Homo sapiens
  misc_RNA (1)...(19): siRNA sense strand
ccaagaccuccaagaagaa

SEQ ID NO: 1101972 - RNA, 19 nt, Homo sapiens
  misc_RNA (1)...(19): siRNA sense strand
ccaacgaacccacguacug

SEQ ID NO: 1101973 - RNA, 19 nt, Homo sapiens
  misc_RNA (1)...(19): siRNA sense strand
gacaaagcccuggagaaau

SEQ ID NO: 1101974 - RNA, 19 nt, Homo sapiens
  misc_RNA (1)...(19): siRNA sense strand
cgagaagaccauggacaaa

SEQ ID NO: 1101975 - RNA, 19 nt, Homo sapiens
  misc_RNA (1)...(19): siRNA sense strand
ggcggaugcugcacugugu

SEQ ID NO: 1101976 - RNA, 19 nt, Homo sapiens
  misc_RNA (1)...(19): siRNA sense strand
gaugaucggcugcgacaac

SEQ ID NO: 1101977 - RNA, 19 nt, Homo sapiens
  misc_RNA (1)...(19): siRNA sense strand
ggccaagaccuccaagaag

SEQ ID NO: 1101978 - RNA, 19 nt, Homo sapiens
  misc_RNA (1)...(19): siRNA sense strand
agaagaccauggacaaagc

SEQ ID NO: 1101979 - RNA, 19 nt, Homo sapiens
  misc_RNA (1)...(19): siRNA sense strand
caacgagaaccgugagaac

SEQ ID NO: 1101980 - RNA, 19 nt, Homo sapiens
  misc_RNA (1)...(19): siRNA sense strand
gagcugggcgacgagaaga

SEQ ID NO: 1101981 - RNA, 19 nt, Homo sapiens
  misc_RNA (1)...(19): siRNA sense strand
gugagaacgcguccagcaa

SEQ ID NO: 1101982 - RNA, 19 nt, Homo sapiens
  misc_RNA (1)...(19): siRNA sense strand
ccacguacugucugugcaa

SEQ ID NO: 1101983 - RNA, 19 nt, Homo sapiens
  misc_RNA (1)...(19): siRNA sense strand
gcgacgagaagauccagau

SEQ ID NO: 1101984 - RNA, 19 nt, Homo sapiens
  misc_RNA (1)...(19): siRNA sense strand
ggacaaagcccuggagaaa

SEQ ID NO: 1101985 - RNA, 19 nt, Homo sapiens
  misc_RNA (1)...(19): siRNA sense strand
gccaagaccuccaagaaga

SEQ ID NO: 1101986 - RNA, 19 nt, Homo sapiens
  misc_RNA (1)...(19): siRNA sense strand
gcaaccaggucuccuaugg

SEQ ID NO: 1101987 - RNA, 19 nt, Homo sapiens
  misc_RNA (1)...(19): siRNA sense strand
acaaagcccuggagaaauc

SEQ ID NO: 1101988 - RNA, 19 nt, Homo sapiens
  misc_RNA (1)...(19): siRNA sense strand
gaacccacguacugucugu

SEQ ID NO: 1101989 - RNA, 19 nt, Homo sapiens
  misc_RNA (1)...(19): siRNA sense strand
gcacacccaaggagaagaa

SEQ ID NO: 1101990 - RNA, 19 nt, Homo sapiens
  misc_RNA (1)...(19): siRNA sense strand
ugguggagcugguggagaa

SEQ ID NO: 1101991 - RNA, 19 nt, Homo sapiens
  misc_RNA (1)...(19): siRNA sense strand
aaagagagggcuuacaaca

SEQ ID NO: 1101992 - RNA, 19 nt, Homo sapiens
  misc_RNA (1)...(19): siRNA sense strand
gagaagaccauggacaaag

SEQ ID NO: 1101993 - RNA, 19 nt, Homo sapiens
  misc_RNA (1)...(19): siRNA sense strand
gcgcuucagucgcgagaca

SEQ ID NO: 1101994 - RNA, 19 nt, Homo sapiens
  misc_RNA (1)...(19): siRNA sense strand
gcguggggcucaaucauaa

SEQ ID NO: 1101995 - RNA, 19 nt, Homo sapiens
  misc_RNA (1)...(19): siRNA sense strand
caacgaacccacguacugu

SEQ ID NO: 1101996 - RNA, 19 nt, Homo sapiens
  misc_RNA (1)...(19): siRNA sense strand
ccaagaccuccaagaagaa

SEQ ID NO: 1101997 - RNA, 19 nt, Homo sapiens
  misc_RNA (1)...(19): siRNA sense strand
ccaacgaacccacguacug

SEQ ID NO: 1101998 - RNA, 19 nt, Homo sapiens
  misc_RNA (1)...(19): siRNA sense strand
gacaaagcccuggagaaau

SEQ ID NO: 1101999 - RNA, 19 nt, Homo sapiens
  misc_RNA (1)...(19): siRNA sense strand
cgagaagaccauggacaaa

SEQ ID NO: 1102000 - RNA, 19 nt, Homo sapiens
  misc_RNA (1)...(19): siRNA sense strand
ggcggaugcugcacugugu

SEQ ID NO: 1102001 - RNA, 19 nt, Homo sapiens
  misc_RNA (1)...(19): siRNA sense strand
gaugaucggcugcgacaac

SEQ ID NO: 1102002 - RNA, 19 nt, Homo sapiens
  misc_RNA (1)...(19): siRNA sense strand
ggccaagaccuccaagaag

SEQ ID NO: 1102003 - RNA, 19 nt, Homo sapiens
  misc_RNA (1)...(19): siRNA sense strand
agaagaccauggacaaagc

SEQ ID NO: 1102004 - RNA, 19 nt, Homo sapiens
  misc_RNA (1)...(19): siRNA sense strand
caacgagaaccgugagaac

SEQ ID NO: 1102005 - RNA, 19 nt, Homo sapiens
  misc_RNA (1)...(19): siRNA sense strand
gagcugggcgacgagaaga

SEQ ID NO: 1102006 - RNA, 19 nt, Homo sapiens
  misc_RNA (1)...(19): siRNA sense strand
gugagaacgcguccagcaa

SEQ ID NO: 1102007 - RNA, 19 nt, Homo sapiens
  misc_RNA (1)...(19): siRNA sense strand
ccacguacugucugugcaa

SEQ ID NO: 1102008 - RNA, 19 nt, Homo sapiens
  misc_RNA (1)...(19): siRNA sense strand
gcgacgagaagauccagau

SEQ ID NO: 1102009 - RNA, 19 nt, Homo sapiens
  misc_RNA (1)...(19): siRNA sense strand
ggacaaagcccuggagaaa

SEQ ID NO: 1102010 - RNA, 19 nt, Homo sapiens
  misc_RNA (1)...(19): siRNA sense strand
gccaagaccuccaagaaga

SEQ ID NO: 1102011 - RNA, 19 nt, Homo sapiens
  misc_RNA (1)...(19): siRNA sense strand
gcaaccaggucuccuaugg

SEQ ID NO: 1102012 - RNA, 19 nt, Homo sapiens
  misc_RNA (1)...(19): siRNA sense strand
acaaagcccuggagaaauc

SEQ ID NO: 1102013 - RNA, 19 nt, Homo sapiens
  misc_RNA (1)...(19): siRNA sense strand
gaacccacguacugucugu

SEQ ID NO: 1102014 - RNA, 19 nt, Homo sapiens
  misc_RNA (1)...(19): siRNA sense strand
gcacacccaaggagaagaa

SEQ ID NO: 1102015 - RNA, 19 nt, Homo sapiens
  misc_RNA (1)...(19): siRNA sense strand
ugguggagcugguggagaa

SEQ ID NO: 1102016 - RNA, 19 nt, Homo sapiens
  misc_RNA (1)...(19): siRNA sense strand
aaagagagggcuuacaaca

SEQ ID NO: 1102017 - RNA, 19 nt, Homo sapiens
  misc_RNA (1)...(19): siRNA sense strand
gagaagaccauggacaaag

SEQ ID NO: 1102018 - RNA, 19 nt, Homo sapiens
  misc_RNA (1)...(19): siRNA sense strand
caacgaacccacguacugu

SEQ ID NO: 1102019 - RNA, 19 nt, Homo sapiens
  misc_RNA (1)...(19): siRNA sense strand
gcguggggcucaaucauaa

SEQ ID NO: 1102020 - RNA, 19 nt, Homo sapiens
  misc_RNA (1)...(19): siRNA sense strand
ccaagaccuccaagaagaa

SEQ ID NO: 1102021 - RNA, 19 nt, Homo sapiens
  misc_RNA (1)...(19): siRNA sense strand
ccaacgaacccacguacug

SEQ ID NO: 1102022 - RNA, 19 nt, Homo sapiens
  misc_RNA (1)...(19): siRNA sense strand
gacaaagcccuggagaaau

SEQ ID NO: 1102023 - RNA, 19 nt, Homo sapiens
  misc_RNA (1)...(19): siRNA sense strand
cgagaagaccauggacaaa

SEQ ID NO: 1102024 - RNA, 19 nt, Homo sapiens
  misc_RNA (1)...(19): siRNA sense strand
gaugaucggcugcgacaac

SEQ ID NO: 1102025 - RNA, 19 nt, Homo sapiens
  misc_RNA (1)...(19): siRNA sense strand
ggccaagaccuccaagaag

SEQ ID NO: 1102026 - RNA, 19 nt, Homo sapiens
  misc_RNA (1)...(19): siRNA sense strand
agaagaccauggacaaagc

SEQ ID NO: 1102027 - RNA, 19 nt, Homo sapiens
  misc_RNA (1)...(19): siRNA sense strand
caacgagaaccgugagaac

SEQ ID NO: 1102028 - RNA, 19 nt, Homo sapiens
  misc_RNA (1)...(19): siRNA sense strand
gagcugggcgacgagaaga

SEQ ID NO: 1102029 - RNA, 19 nt, Homo sapiens
  misc_RNA (1)...(19): siRNA sense strand
gcgacgagaagauccagau

SEQ ID NO: 1102030 - RNA, 19 nt, Homo sapiens
  misc_RNA (1)...(19): siRNA sense strand
gugagaacgcguccagcaa

SEQ ID NO: 1102031 - RNA, 19 nt, Homo sapiens
  misc_RNA (1)...(19): siRNA sense strand
ccacguacugucugugcaa

SEQ ID NO: 1102032 - RNA, 19 nt, Homo sapiens
  misc_RNA (1)...(19): siRNA sense strand
ggacaaagcccuggagaaa

SEQ ID NO: 1102033 - RNA, 19 nt, Homo sapiens
  misc_RNA (1)...(19): siRNA sense strand
gccaagaccuccaagaaga

SEQ ID NO: 1102034 - RNA, 19 nt, Homo sapiens
  misc_RNA (1)...(19): siRNA sense strand
gcaaccaggucuccuaugg

SEQ ID NO: 1102035 - RNA, 19 nt, Homo sapiens
  misc_RNA (1)...(19): siRNA sense strand
acaaagcccuggagaaauc

SEQ ID NO: 1102036 - RNA, 19 nt, Homo sapiens
  misc_RNA (1)...(19): siRNA sense strand
gaacccacguacugucugu

SEQ ID NO: 1102037 - RNA, 19 nt, Homo sapiens
  misc_RNA (1)...(19): siRNA sense strand
gcacacccaaggagaagaa

SEQ ID NO: 1102038 - RNA, 19 nt, Homo sapiens
  misc_RNA (1)...(19): siRNA sense strand
ugguggagcugguggagaa

SEQ ID NO: 1102039 - RNA, 19 nt, Homo sapiens
  misc_RNA (1)...(19): siRNA sense strand
aaagagagggcuuacaaca

SEQ ID NO: 1102040 - RNA, 19 nt, Homo sapiens
  misc_RNA (1)...(19): siRNA sense strand
gagaagaccauggacaaag

SEQ ID NO: 1102041 - RNA, 19 nt, Homo sapiens
  misc_RNA (1)...(19): siRNA sense strand
gcgcuucagucgcgagaca

SEQ ID NO: 1102042 - RNA, 19 nt, Homo sapiens
  misc_RNA (1)...(19): siRNA sense strand
gcguggggcucaaucauaa

SEQ ID NO: 1102043 - RNA, 19 nt, Homo sapiens
  misc_RNA (1)...(19): siRNA sense strand
caacgaacccacguacugu

SEQ ID NO: 1102044 - RNA, 19 nt, Homo sapiens
  misc_RNA (1)...(19): siRNA sense strand
ccaagaccuccaagaagaa

SEQ ID NO: 1102045 - RNA, 19 nt, Homo sapiens
  misc_RNA (1)...(19): siRNA sense strand
ccaacgaacccacguacug

SEQ ID NO: 1102046 - RNA, 19 nt, Homo sapiens
  misc_RNA (1)...(19): siRNA sense strand
gacaaagcccuggagaaau

SEQ ID NO: 1102047 - RNA, 19 nt, Homo sapiens
  misc_RNA (1)...(19): siRNA sense strand
cgagaagaccauggacaaa

SEQ ID NO: 1102048 - RNA, 19 nt, Homo sapiens
  misc_RNA (1)...(19): siRNA sense strand
ggcggaugcugcacugugu

SEQ ID NO: 1102049 - RNA, 19 nt, Homo sapiens
  misc_RNA (1)...(19): siRNA sense strand
gaugaucggcugcgacaac

SEQ ID NO: 1102050 - RNA, 19 nt, Homo sapiens
  misc_RNA (1)...(19): siRNA sense strand
ggccaagaccuccaagaag

SEQ ID NO: 1102051 - RNA, 19 nt, Homo sapiens
  misc_RNA (1)...(19): siRNA sense strand
agaagaccauggacaaagc

SEQ ID NO: 1102052 - RNA, 19 nt, Homo sapiens
  misc_RNA (1)...(19): siRNA sense strand
caacgagaaccgugagaac

SEQ ID NO: 1102053 - RNA, 19 nt, Homo sapiens
  misc_RNA (1)...(19): siRNA sense strand
gagcugggcgacgagaaga

SEQ ID NO: 1102054 - RNA, 19 nt, Homo sapiens
  misc_RNA (1)...(19): siRNA sense strand
gugagaacgcguccagcaa

SEQ ID NO: 1102055 - RNA, 19 nt, Homo sapiens
  misc_RNA (1)...(19): siRNA sense strand
ccacguacugucugugcaa

SEQ ID NO: 1102056 - RNA, 19 nt, Homo sapiens
  misc_RNA (1)...(19): siRNA sense strand
gcgacgagaagauccagau

SEQ ID NO: 1102057 - RNA, 19 nt, Homo sapiens
  misc_RNA (1)...(19): siRNA sense strand
gcaacugaauugaguauaa

SEQ ID NO: 1102058 - RNA, 19 nt, Homo sapiens
  misc_RNA (1)...(19): siRNA sense strand
ccaacgagcugagaaauaa

SEQ ID NO: 1102059 - RNA, 19 nt, Homo sapiens
  misc_RNA (1)...(19): siRNA sense strand
gaaaggagagguacagaaa

SEQ ID NO: 1102060 - RNA, 19 nt, Homo sapiens
  misc_RNA (1)...(19): siRNA sense strand
gaagauuucucucacgaau

SEQ ID NO: 1102061 - RNA, 19 nt, Homo sapiens
  misc_RNA (1)...(19): siRNA sense strand
gcaaaaguaucucauauga

SEQ ID NO: 1102062 - RNA, 19 nt, Homo sapiens
  misc_RNA (1)...(19): siRNA sense strand
gcaguuauguuggaagauu

SEQ ID NO: 1102063 - RNA, 19 nt, Homo sapiens
  misc_RNA (1)...(19): siRNA sense strand
gaaauaaccuccggagcau

SEQ ID NO: 1102064 - RNA, 19 nt, Homo sapiens
  misc_RNA (1)...(19): siRNA sense strand
gaucagaugucaacuucau

SEQ ID NO: 1102065 - RNA, 19 nt, Homo sapiens
  misc_RNA (1)...(19): siRNA sense strand
cagcauaguugaagcaaau

SEQ ID NO: 1102066 - RNA, 19 nt, Homo sapiens
  misc_RNA (1)...(19): siRNA sense strand
gaacaacagauaaauaugg

SEQ ID NO: 1102067 - RNA, 19 nt, Homo sapiens
  misc_RNA (1)...(19): siRNA sense strand
gaaaccaucagcauaguug

SEQ ID NO: 1102068 - RNA, 19 nt, Homo sapiens
  misc_RNA (1)...(19): siRNA sense strand
gcacuggaacaacagauaa

SEQ ID NO: 1102069 - RNA, 19 nt, Homo sapiens
  misc_RNA (1)...(19): siRNA sense strand
gcccagggauuguuucaga

SEQ ID NO: 1102070 - RNA, 19 nt, Homo sapiens
  misc_RNA (1)...(19): siRNA sense strand
caugaaagaucagauguca

SEQ ID NO: 1102071 - RNA, 19 nt, Homo sapiens
  misc_RNA (1)...(19): siRNA sense strand
ggcauuagcugaaagaaaa

SEQ ID NO: 1102072 - RNA, 19 nt, Homo sapiens
  misc_RNA (1)...(19): siRNA sense strand
agauuucucucacgaauug

SEQ ID NO: 1102073 - RNA, 19 nt, Homo sapiens
  misc_RNA (1)...(19): siRNA sense strand
ggacaugaaagaucagaug

SEQ ID NO: 1102074 - RNA, 19 nt, Homo sapiens
  misc_RNA (1)...(19): siRNA sense strand
ucagggacaugaaagauca

SEQ ID NO: 1102075 - RNA, 19 nt, Homo sapiens
  misc_RNA (1)...(19): siRNA sense strand
uaucucauaugaccaguga

SEQ ID NO: 1102076 - RNA, 19 nt, Homo sapiens
  misc_RNA (1)...(19): siRNA sense strand
caacugaauugaguauaag

SEQ ID NO: 1102077 - RNA, 19 nt, Homo sapiens
  misc_RNA (1)...(19): siRNA sense strand
aagaucagaugucaacuuc

SEQ ID NO: 1102078 - RNA, 19 nt, Homo sapiens
  misc_RNA (1)...(19): siRNA sense strand
uagaggaccuugaugaaac

SEQ ID NO: 1102079 - RNA, 19 nt, Homo sapiens
  misc_RNA (1)...(19): siRNA sense strand
ggaccgagagcuccagaga

SEQ ID NO: 1102080 - RNA, 19 nt, Homo sapiens
  misc_RNA (1)...(19): siRNA sense strand
uaaccuugaugcaacugaa

SEQ ID NO: 1102081 - RNA, 19 nt, Homo sapiens
  misc_RNA (1)...(19): siRNA sense strand
uggacaaugugaugaagaa

SEQ ID NO: 1102082 - RNA, 19 nt, Homo sapiens
  misc_RNA (1)...(19): siRNA sense strand
gaaaagccuucauuacaag

SEQ ID NO: 1102083 - RNA, 19 nt, Homo sapiens
  misc_RNA (1)...(19): siRNA sense strand
gugcaggcauuagcugaaa

SEQ ID NO: 1102084 - RNA, 19 nt, Homo sapiens
  misc_RNA (1)...(19): siRNA sense strand
ugccauagccauccucuuu

SEQ ID NO: 1102085 - RNA, 19 nt, Homo sapiens
  misc_RNA (1)...(19): siRNA sense strand
ggaacaacagauaaauaug

SEQ ID NO: 1102086 - RNA, 19 nt, Homo sapiens
  misc_RNA (1)...(19): siRNA sense strand
ggaggaacaggcaguuaug

SEQ ID NO: 1102087 - RNA, 19 nt, Homo sapiens
  misc_RNA (1)...(19): siRNA sense strand
agaaaagccuucauuacaa

SEQ ID NO: 1102088 - RNA, 19 nt, Homo sapiens
  misc_RNA (1)...(19): siRNA sense strand
ugaaagaucagaugucaac

SEQ ID NO: 1102089 - RNA, 19 nt, Homo sapiens
  misc_RNA (1)...(19): siRNA sense strand
gaacuggagcacuggaaca

SEQ ID NO: 1102090 - RNA, 19 nt, Homo sapiens
  misc_RNA (1)...(19): siRNA sense strand
ugaugcaacugaauugagu

SEQ ID NO: 1102091 - RNA, 19 nt, Homo sapiens
  misc_RNA (1)...(19): siRNA sense strand
caguuauguuggaagauuu

SEQ ID NO: 1102092 - RNA, 19 nt, Homo sapiens
  misc_RNA (1)...(19): siRNA sense strand
caacacugcccagggauug

SEQ ID NO: 1102093 - RNA, 19 nt, Homo sapiens
  misc_RNA (1)...(19): siRNA sense strand
agccaauucucauuucauu

SEQ ID NO: 1102094 - RNA, 19 nt, Homo sapiens
  misc_RNA (1)...(19): siRNA sense strand
gaggggagcuggaggaaca

SEQ ID NO: 1102095 - RNA, 19 nt, Homo sapiens
  misc_RNA (1)...(19): siRNA sense strand
acaaugugaugaagaaacu

SEQ ID NO: 1102096 - RNA, 19 nt, Homo sapiens
  misc_RNA (1)...(19): siRNA sense strand
ugaagcaaauccuagaaaa

SEQ ID NO: 1102097 - RNA, 19 nt, Homo sapiens
  misc_RNA (1)...(19): siRNA sense strand
ggaagauuucucucacgaa

SEQ ID NO: 1102098 - RNA, 19 nt, Homo sapiens
  misc_RNA (1)...(19): siRNA sense strand
cuucaucugugcaggcauu

SEQ ID NO: 1102099 - RNA, 19 nt, Homo sapiens
  misc_RNA (1)...(19): siRNA sense strand
caacaagggaagaaaucga

SEQ ID NO: 1102100 - RNA, 19 nt, Homo sapiens
  misc_RNA (1)...(19): siRNA sense strand
gcucauccucuucuuagug

SEQ ID NO: 1102101 - RNA, 19 nt, Homo sapiens
  misc_RNA (1)...(19): siRNA sense strand
ugaaaggagagguacagaa

SEQ ID NO: 1102102 - RNA, 19 nt, Homo sapiens
  misc_RNA (1)...(19): siRNA sense strand
gcaggcauuagcugaaaga

SEQ ID NO: 1102103 - RNA, 19 nt, Homo sapiens
  misc_RNA (1)...(19): siRNA sense strand
cuagaggaccuugaugaaa

SEQ ID NO: 1102104 - RNA, 19 nt, Homo sapiens
  misc_RNA (1)...(19): siRNA sense strand
ccaccaacgagcugagaaa

SEQ ID NO: 1102105 - RNA, 19 nt, Homo sapiens
  misc_RNA (1)...(19): siRNA sense strand
guacagaaagcagucaaca

SEQ ID NO: 1102106 - RNA, 19 nt, Homo sapiens
  misc_RNA (1)...(19): siRNA sense strand
acaaguacucggcaaguug

SEQ ID NO: 1102107 - RNA, 19 nt, Homo sapiens
  misc_RNA (1)...(19): siRNA sense strand
uacaaguacucggcaaguu

SEQ ID NO: 1102108 - RNA, 19 nt, Homo sapiens
  misc_RNA (1)...(19): siRNA sense strand
aaagaucagaugucaacuu

SEQ ID NO: 1102109 - RNA, 19 nt, Homo sapiens
  misc_RNA (1)...(19): siRNA sense strand
caaguacucggcaaguugu

SEQ ID NO: 1102110 - RNA, 19 nt, Homo sapiens
  misc_RNA (1)...(19): siRNA sense strand
cuggaacaacagauaaaua

SEQ ID NO: 1102111 - RNA, 19 nt, Homo sapiens
  misc_RNA (1)...(19): siRNA sense strand
acagaaagcagucaacacu

SEQ ID NO: 1102112 - RNA, 19 nt, Homo sapiens
  misc_RNA (1)...(19): siRNA sense strand
ggacaaugugaugaagaaa

SEQ ID NO: 1102113 - RNA, 19 nt, Homo sapiens
  misc_RNA (1)...(19): siRNA sense strand
cuggagcacuggaacaaca

SEQ ID NO: 1102114 - RNA, 19 nt, Homo sapiens
  misc_RNA (1)...(19): siRNA sense strand
ucagcauaguugaagcaaa

SEQ ID NO: 1102115 - RNA, 19 nt, Homo sapiens
  misc_RNA (1)...(19): siRNA sense strand
ccauagccauccucuuugc

SEQ ID NO: 1102116 - RNA, 19 nt, Homo sapiens
  misc_RNA (1)...(19): siRNA sense strand
cagcaacaagggaagaaau

SEQ ID NO: 1102117 - RNA, 19 nt, Homo sapiens
  misc_RNA (1)...(19): siRNA sense strand
aggcaguuauguuggaaga

SEQ ID NO: 1102118 - RNA, 19 nt, Homo sapiens
  misc_RNA (1)...(19): siRNA sense strand
aaggagagguacagaaagc

SEQ ID NO: 1102119 - RNA, 19 nt, Homo sapiens
  misc_RNA (1)...(19): siRNA sense strand
ggaucuagaggaccuugau

SEQ ID NO: 1102120 - RNA, 19 nt, Homo sapiens
  misc_RNA (1)...(19): siRNA sense strand
gugcucauccucuucuuag

SEQ ID NO: 1102121 - RNA, 19 nt, Homo sapiens
  misc_RNA (1)...(19): siRNA sense strand
acagcaggaugagcaguug

SEQ ID NO: 1102122 - RNA, 19 nt, Homo sapiens
  misc_RNA (1)...(19): siRNA sense strand
gaugcaacugaauugagua

SEQ ID NO: 1102123 - RNA, 19 nt, Homo sapiens
  misc_RNA (1)...(19): siRNA sense strand
gaagcaaauccuagaaaau

SEQ ID NO: 1102124 - RNA, 19 nt, Homo sapiens
  misc_RNA (1)...(19): siRNA sense strand
ucuagaggaccuugaugaa

SEQ ID NO: 1102125 - RNA, 19 nt, Homo sapiens
  misc_RNA (1)...(19): siRNA sense strand
gaucuagaggaccuugaug

SEQ ID NO: 1102126 - RNA, 19 nt, Homo sapiens
  misc_RNA (1)...(19): siRNA sense strand
ccagggauuguuucagaga

SEQ ID NO: 1102127 - RNA, 19 nt, Homo sapiens
  misc_RNA (1)...(19): siRNA sense strand
gccauagccauccucuuug

SEQ ID NO: 1102128 - RNA, 19 nt, Homo sapiens
  misc_RNA (1)...(19): siRNA sense strand
gaauuggagagcacucagu

SEQ ID NO: 1102129 - RNA, 19 nt, Homo sapiens
  misc_RNA (1)...(19): siRNA sense strand
gaggaacaggcaguuaugu

SEQ ID NO: 1102130 - RNA, 19 nt, Homo sapiens
  misc_RNA (1)...(19): siRNA sense strand
gcaucggggugcugaagaa

SEQ ID NO: 1102131 - RNA, 19 nt, Homo sapiens
  misc_RNA (1)...(19): siRNA sense strand
aagaaaagccuucauuaca

SEQ ID NO: 1102132 - RNA, 19 nt, Homo sapiens
  misc_RNA (1)...(19): siRNA sense strand
ccucuuugcaguccuguug

SEQ ID NO: 1102133 - RNA, 19 nt, Homo sapiens
  misc_RNA (1)...(19): siRNA sense strand
ugaugaagaaacuugcaaa

SEQ ID NO: 1102134 - RNA, 19 nt, Homo sapiens
  misc_RNA (1)...(19): siRNA sense strand
ugaaaccaucagcauaguu

SEQ ID NO: 1102135 - RNA, 19 nt, Homo sapiens
  misc_RNA (1)...(19): siRNA sense strand
gcuggacaaugugaugaag

SEQ ID NO: 1102136 - RNA, 19 nt, Homo sapiens
  misc_RNA (1)...(19): siRNA sense strand
gagccaauucucauuucau

SEQ ID NO: 1102137 - RNA, 19 nt, Homo sapiens
  misc_RNA (1)...(19): siRNA sense strand
aaagccuucauuacaagua

SEQ ID NO: 1102138 - RNA, 19 nt, Homo sapiens
  misc_RNA (1)...(19): siRNA sense strand
gacaaugugaugaagaaac

SEQ ID NO: 1102139 - RNA, 19 nt, Homo sapiens
  misc_RNA (1)...(19): siRNA sense strand
accaacgagcugagaaaua

SEQ ID NO: 1102140 - RNA, 19 nt, Homo sapiens
  misc_RNA (1)...(19): siRNA sense strand
aauaaccuccggagcauag

SEQ ID NO: 1102141 - RNA, 19 nt, Homo sapiens
  misc_RNA (1)...(19): siRNA sense strand
uggaggaacaggcaguuau

SEQ ID NO: 1102142 - RNA, 19 nt, Homo sapiens
  misc_RNA (1)...(19): siRNA sense strand
gcaggcacagcagcaguug

SEQ ID NO: 1102143 - RNA, 19 nt, Homo sapiens
  misc_RNA (1)...(19): siRNA sense strand
agagccaauucucauuuca

SEQ ID NO: 1102144 - RNA, 19 nt, Homo sapiens
  misc_RNA (1)...(19): siRNA sense strand
guagacaacaccaaguuua

SEQ ID NO: 1102145 - RNA, 19 nt, Homo sapiens
  misc_RNA (1)...(19): siRNA sense strand
gcagagacccacaccauga

SEQ ID NO: 1102146 - RNA, 19 nt, Homo sapiens
  misc_RNA (1)...(19): siRNA sense strand
ggacaaacccagagaucaa

SEQ ID NO: 1102147 - RNA, 19 nt, Homo sapiens
  misc_RNA (1)...(19): siRNA sense strand
gaagguggccuccagaauc

SEQ ID NO: 1102148 - RNA, 19 nt, Homo sapiens
  misc_RNA (1)...(19): siRNA sense strand
gcuacgugauugcugguua

SEQ ID NO: 1102149 - RNA, 19 nt, Homo sapiens
  misc_RNA (1)...(19): siRNA sense strand
cgugauugcugguuauuau

SEQ ID NO: 1102150 - RNA, 19 nt, Homo sapiens
  misc_RNA (1)...(19): siRNA sense strand
gcucucacccugauugauu

SEQ ID NO: 1102151 - RNA, 19 nt, Homo sapiens
  misc_RNA (1)...(19): siRNA sense strand
gcaaagaucauagcuacgu

SEQ ID NO: 1102152 - RNA, 19 nt, Homo sapiens
  misc_RNA (1)...(19): siRNA sense strand
gcucguggauuucgauaac

SEQ ID NO: 1102153 - RNA, 19 nt, Homo sapiens
  misc_RNA (1)...(19): siRNA sense strand
acacugcgcucaucauggu

SEQ ID NO: 1102154 - RNA, 19 nt, Homo sapiens
  misc_RNA (1)...(19): siRNA sense strand
cuaaugagcgaguaaagga

SEQ ID NO: 1102155 - RNA, 19 nt, Homo sapiens
  misc_RNA (1)...(19): siRNA sense strand
caaacccagagaucaauaa

SEQ ID NO: 1102156 - RNA, 19 nt, Homo sapiens
  misc_RNA (1)...(19): siRNA sense strand
gguagacaacaccaaguuu

SEQ ID NO: 1102157 - RNA, 19 nt, Homo sapiens
  misc_RNA (1)...(19): siRNA sense strand
acaccaaguuuacgaugga

SEQ ID NO: 1102158 - RNA, 19 nt, Homo sapiens
  misc_RNA (1)...(19): siRNA sense strand
uaaaggaugccaguccaaa

SEQ ID NO: 1102159 - RNA, 19 nt, Homo sapiens
  misc_RNA (1)...(19): siRNA sense strand
gagaagguggccuccagaa

SEQ ID NO: 1102160 - RNA, 19 nt, Homo sapiens
  misc_RNA (1)...(19): siRNA sense strand
cuacgugauugcugguuau

SEQ ID NO: 1102161 - RNA, 19 nt, Homo sapiens
  misc_RNA (1)...(19): siRNA sense strand
caccaugacuacugugaag

SEQ ID NO: 1102162 - RNA, 19 nt, Homo sapiens
  misc_RNA (1)...(19): siRNA sense strand
cgccuacgauccacgugua

SEQ ID NO: 1102163 - RNA, 19 nt, Homo sapiens
  misc_RNA (1)...(19): siRNA sense strand
gauugcugguuauuaucaa

SEQ ID NO: 1102164 - RNA, 19 nt, Homo sapiens
  misc_RNA (1)...(19): siRNA sense strand
ucgauaaccaccuggauga

SEQ ID NO: 1102165 - RNA, 19 nt, Homo sapiens
  misc_RNA (1)...(19): siRNA sense strand
ucacccugauugauucaug

SEQ ID NO: 1102166 - RNA, 19 nt, Homo sapiens
  misc_RNA (1)...(19): siRNA sense strand
gauaaccaccuggaugaca

SEQ ID NO: 1102167 - RNA, 19 nt, Homo sapiens
  misc_RNA (1)...(19): siRNA sense strand
gacaacaccaaguuuacga

SEQ ID NO: 1102168 - RNA, 19 nt, Homo sapiens
  misc_RNA (1)...(19): siRNA sense strand
cgacacugcgcucaucaug

SEQ ID NO: 1102169 - RNA, 19 nt, Homo sapiens
  misc_RNA (1)...(19): siRNA sense strand
cggaaugacuggacaaacc

SEQ ID NO: 1102170 - RNA, 19 nt, Homo sapiens
  misc_RNA (1)...(19): siRNA sense strand
aaacccagagaucaauaaa

SEQ ID NO: 1102171 - RNA, 19 nt, Homo sapiens
  misc_RNA (1)...(19): siRNA sense strand
ucaagcuaaugagcgagua

SEQ ID NO: 1102172 - RNA, 19 nt, Homo sapiens
  misc_RNA (1)...(19): siRNA sense strand
acaaacccagagaucaaua

SEQ ID NO: 1102173 - RNA, 19 nt, Homo sapiens
  misc_RNA (1)...(19): siRNA sense strand
gacaaacccagagaucaau

SEQ ID NO: 1102174 - RNA, 19 nt, Homo sapiens
  misc_RNA (1)...(19): siRNA sense strand
gugcagagacccacaccau

SEQ ID NO: 1102175 - RNA, 19 nt, Homo sapiens
  misc_RNA (1)...(19): siRNA sense strand
caagcuaaugagcgaguaa

SEQ ID NO: 1102176 - RNA, 19 nt, Homo sapiens
  misc_RNA (1)...(19): siRNA sense strand
guaaaggaugccaguccaa

SEQ ID NO: 1102177 - RNA, 19 nt, Homo sapiens
  misc_RNA (1)...(19): siRNA sense strand
gauucauggugcaaagauc

SEQ ID NO: 1102178 - RNA, 19 nt, Homo sapiens
  misc_RNA (1)...(19): siRNA sense strand
gagacccacaccaugacua

SEQ ID NO: 1102179 - RNA, 19 nt, Homo sapiens
  misc_RNA (1)...(19): siRNA sense strand
gcugguuauuaucaagcua

SEQ ID NO: 1102180 - RNA, 19 nt, Homo sapiens
  misc_RNA (1)...(19): siRNA sense strand
ggugcaaagaucauagcua

SEQ ID NO: 1102181 - RNA, 19 nt, Homo sapiens
  misc_RNA (1)...(19): siRNA sense strand
uguacgagcaccaugagaa

SEQ ID NO: 1102182 - RNA, 19 nt, Homo sapiens
  misc_RNA (1)...(19): siRNA sense strand
cgagcaccaugagaacaga

SEQ ID NO: 1102183 - RNA, 19 nt, Homo sapiens
  misc_RNA (1)...(19): siRNA sense strand
ggccagaggcacagaggau

SEQ ID NO: 1102184 - RNA, 19 nt, Homo sapiens
  misc_RNA (1)...(19): siRNA sense strand
guacgagcaccaugagaac

SEQ ID NO: 1102185 - RNA, 19 nt, Homo sapiens
  misc_RNA (1)...(19): siRNA sense strand
ccacccaggccuacugcaa

SEQ ID NO: 1102186 - RNA, 19 nt, Homo sapiens
  misc_RNA (1)...(19): siRNA sense strand
uaaccaccuggaugacauu

SEQ ID NO: 1102187 - RNA, 19 nt, Homo sapiens
  misc_RNA (1)...(19): siRNA sense strand
gcagaacucucaagauaaa

SEQ ID NO: 1102188 - RNA, 19 nt, Homo sapiens
  misc_RNA (1)...(19): siRNA sense strand
gugcagaacucucaagaua

SEQ ID NO: 1102189 - RNA, 19 nt, Homo sapiens
  misc_RNA (1)...(19): siRNA sense strand
gaauaagucuccucauauc

SEQ ID NO: 1102190 - RNA, 19 nt, Homo sapiens
  misc_RNA (1)...(19): siRNA sense strand
gaaagaagaaaucccagua

SEQ ID NO: 1102191 - RNA, 19 nt, Homo sapiens
  misc_RNA (1)...(19): siRNA sense strand
agaaagaagugaagguaaa

SEQ ID NO: 1102192 - RNA, 19 nt, Homo sapiens
  misc_RNA (1)...(19): siRNA sense strand
gaacagcaccaaaggaguu

SEQ ID NO: 1102193 - RNA, 19 nt, Homo sapiens
  misc_RNA (1)...(19): siRNA sense strand
gagaagaaaucuaaaucca

SEQ ID NO: 1102194 - RNA, 19 nt, Homo sapiens
  misc_RNA (1)...(19): siRNA sense strand
aaaccuaacuugaacaauc

SEQ ID NO: 1102195 - RNA, 19 nt, Homo sapiens
  misc_RNA (1)...(19): siRNA sense strand
gaagaaaucccaguacaag

SEQ ID NO: 1102196 - RNA, 19 nt, Homo sapiens
  misc_RNA (1)...(19): siRNA sense strand
cagauuagcacgaguuaaa

SEQ ID NO: 1102197 - RNA, 19 nt, Homo sapiens
  misc_RNA (1)...(19): siRNA sense strand
ccucauaucucuaauugca

SEQ ID NO: 1102198 - RNA, 19 nt, Homo sapiens
  misc_RNA (1)...(19): siRNA sense strand
ugaacaaucuccggaaaga

SEQ ID NO: 1102199 - RNA, 19 nt, Homo sapiens
  misc_RNA (1)...(19): siRNA sense strand
guaaugcuuuggugacuuc

SEQ ID NO: 1102200 - RNA, 19 nt, Homo sapiens
  misc_RNA (1)...(19): siRNA sense strand
ggagguagcagaaguagca

SEQ ID NO: 1102201 - RNA, 19 nt, Homo sapiens
  misc_RNA (1)...(19): siRNA sense strand
caacuguaccuuuaaacaa

SEQ ID NO: 1102202 - RNA, 19 nt, Homo sapiens
  misc_RNA (1)...(19): siRNA sense strand
uguagccagugauuauuua

SEQ ID NO: 1102203 - RNA, 19 nt, Homo sapiens
  misc_RNA (1)...(19): siRNA sense strand
ccacuaaugugcagaacuc

SEQ ID NO: 1102204 - RNA, 19 nt, Homo sapiens
  misc_RNA (1)...(19): siRNA sense strand
gaaagcaagaaaccuaaau

SEQ ID NO: 1102205 - RNA, 19 nt, Homo sapiens
  misc_RNA (1)...(19): siRNA sense strand
gcugaaagcaagaaaccua

SEQ ID NO: 1102206 - RNA, 19 nt, Homo sapiens
  misc_RNA (1)...(19): siRNA sense strand
ugaauaagucuccucauau

SEQ ID NO: 1102207 - RNA, 19 nt, Homo sapiens
  misc_RNA (1)...(19): siRNA sense strand
ggaaggcagugauggugau

SEQ ID NO: 1102208 - RNA, 19 nt, Homo sapiens
  misc_RNA (1)...(19): siRNA sense strand
uagcacgaguuaaaccuuu

SEQ ID NO: 1102209 - RNA, 19 nt, Homo sapiens
  misc_RNA (1)...(19): siRNA sense strand
ggauaagauuacuguggaa

SEQ ID NO: 1102210 - RNA, 19 nt, Homo sapiens
  misc_RNA (1)...(19): siRNA sense strand
uaagaaaccagucaauuac

SEQ ID NO: 1102211 - RNA, 19 nt, Homo sapiens
  misc_RNA (1)...(19): siRNA sense strand
aaagaaagaagugaaggua

SEQ ID NO: 1102212 - RNA, 19 nt, Homo sapiens
  misc_RNA (1)...(19): siRNA sense strand
gcacagcagaggaagauuc

SEQ ID NO: 1102213 - RNA, 19 nt, Homo sapiens
  misc_RNA (1)...(19): siRNA sense strand
caacagucaccacuaaugu

SEQ ID NO: 1102214 - RNA, 19 nt, Homo sapiens
  misc_RNA (1)...(19): siRNA sense strand
gaaauacgcaguccuucag

SEQ ID NO: 1102215 - RNA, 19 nt, Homo sapiens
  misc_RNA (1)...(19): siRNA sense strand
uaagauuacuguggaagau

SEQ ID NO: 1102216 - RNA, 19 nt, Homo sapiens
  misc_RNA (1)...(19): siRNA sense strand
gcaacuguaccuuuaaaca

SEQ ID NO: 1102217 - RNA, 19 nt, Homo sapiens
  misc_RNA (1)...(19): siRNA sense strand
cauaagaaaccagucaauu

SEQ ID NO: 1102218 - RNA, 19 nt, Homo sapiens
  misc_RNA (1)...(19): siRNA sense strand
gagugaggauaaugacgaa

SEQ ID NO: 1102219 - RNA, 19 nt, Homo sapiens
  misc_RNA (1)...(19): siRNA sense strand
gaaguugcacuagcuuuau

SEQ ID NO: 1102220 - RNA, 19 nt, Homo sapiens
  misc_RNA (1)...(19): siRNA sense strand
agaaguugcacuagcuuua

SEQ ID NO: 1102221 - RNA, 19 nt, Homo sapiens
  misc_RNA (1)...(19): siRNA sense strand
gaaaucccaguacaagaga

SEQ ID NO: 1102222 - RNA, 19 nt, Homo sapiens
  misc_RNA (1)...(19): siRNA sense strand
ugacagugaugaugauuuu

SEQ ID NO: 1102223 - RNA, 19 nt, Homo sapiens
  misc_RNA (1)...(19): siRNA sense strand
gaaaccagucaauuacuca

SEQ ID NO: 1102224 - RNA, 19 nt, Homo sapiens
  misc_RNA (1)...(19): siRNA sense strand
gucaauuacucacaguuug

SEQ ID NO: 1102225 - RNA, 19 nt, Homo sapiens
  misc_RNA (1)...(19): siRNA sense strand
caaaggaguuaaaacaaga

SEQ ID NO: 1102226 - RNA, 19 nt, Homo sapiens
  misc_RNA (1)...(19): siRNA sense strand
cagcugccgucaaaucaga

SEQ ID NO: 1102227 - RNA, 19 nt, Homo sapiens
  misc_RNA (1)...(19): siRNA sense strand
gaacaaucuccggaaagaa

SEQ ID NO: 1102228 - RNA, 19 nt, Homo sapiens
  misc_RNA (1)...(19): siRNA sense strand
gguaaaauccccaguagaa

SEQ ID NO: 1102229 - RNA, 19 nt, Homo sapiens
  misc_RNA (1)...(19): siRNA sense strand
gugaagauucugaggauga

SEQ ID NO: 1102230 - RNA, 19 nt, Homo sapiens
  misc_RNA (1)...(19): siRNA sense strand
aaacauggcaguaguaaaa

SEQ ID NO: 1102231 - RNA, 19 nt, Homo sapiens
  misc_RNA (1)...(19): siRNA sense strand
aagaagaaaucccaguaca

SEQ ID NO: 1102232 - RNA, 19 nt, Homo sapiens
  misc_RNA (1)...(19): siRNA sense strand
gcaguguagccagugauua

SEQ ID NO: 1102233 - RNA, 19 nt, Homo sapiens
  misc_RNA (1)...(19): siRNA sense strand
guuaaaccuuugcauccaa

SEQ ID NO: 1102234 - RNA, 19 nt, Homo sapiens
  misc_RNA (1)...(19): siRNA sense strand
gccagugauuauuuagauu

SEQ ID NO: 1102235 - RNA, 19 nt, Homo sapiens
  misc_RNA (1)...(19): siRNA sense strand
agauuacuguggaagauga

SEQ ID NO: 1102236 - RNA, 19 nt, Homo sapiens
  misc_RNA (1)...(19): siRNA sense strand
caagauaaaccaaaaccua

SEQ ID NO: 1102237 - RNA, 19 nt, Homo sapiens
  misc_RNA (1)...(19): siRNA sense strand
gguagugucugugaagucu

SEQ ID NO: 1102238 - RNA, 19 nt, Homo sapiens
  misc_RNA (1)...(19): siRNA sense strand
gaaggcagugauggugaua

SEQ ID NO: 1102239 - RNA, 19 nt, Homo sapiens
  misc_RNA (1)...(19): siRNA sense strand
cugcaacuguaccuuuaaa

SEQ ID NO: 1102240 - RNA, 19 nt, Homo sapiens
  misc_RNA (1)...(19): siRNA sense strand
gaagguaaaauccccagua

SEQ ID NO: 1102241 - RNA, 19 nt, Homo sapiens
  misc_RNA (1)...(19): siRNA sense strand
cuccucauaucucuaauug

SEQ ID NO: 1102242 - RNA, 19 nt, Homo sapiens
  misc_RNA (1)...(19): siRNA sense strand
caagagaaaaccccuaaaa

SEQ ID NO: 1102243 - RNA, 19 nt, Homo sapiens
  misc_RNA (1)...(19): siRNA sense strand
ccaacagucaccacuaaug

SEQ ID NO: 1102244 - RNA, 19 nt, Homo sapiens
  misc_RNA (1)...(19): siRNA sense strand
uuccaacagucaccacuaa

SEQ ID NO: 1102245 - RNA, 19 nt, Homo sapiens
  misc_RNA (1)...(19): siRNA sense strand
caguguagccagugauuau

SEQ ID NO: 1102246 - RNA, 19 nt, Homo sapiens
  misc_RNA (1)...(19): siRNA sense strand
cuaggaaaccauuagaaau

SEQ ID NO: 1102247 - RNA, 19 nt, Homo sapiens
  misc_RNA (1)...(19): siRNA sense strand
gaaaagaaaagcagcaucu

SEQ ID NO: 1102248 - RNA, 19 nt, Homo sapiens
  misc_RNA (1)...(19): siRNA sense strand
agaaaccagucaauuacuc

SEQ ID NO: 1102249 - RNA, 19 nt, Homo sapiens
  misc_RNA (1)...(19): siRNA sense strand
uaaaauccccaguagaaaa

SEQ ID NO: 1102250 - RNA, 19 nt, Homo sapiens
  misc_RNA (1)...(19): siRNA sense strand
aaggauggcuuuagaugac

SEQ ID NO: 1102251 - RNA, 19 nt, Homo sapiens
  misc_RNA (1)...(19): siRNA sense strand
cgccuuggcuuguccagau

SEQ ID NO: 1102252 - RNA, 19 nt, Homo sapiens
  misc_RNA (1)...(19): siRNA sense strand
acuaggaaaccauuagaaa

SEQ ID NO: 1102253 - RNA, 19 nt, Homo sapiens
  misc_RNA (1)...(19): siRNA sense strand
ugacacugaaccagacuuu

SEQ ID NO: 1102254 - RNA, 19 nt, Homo sapiens
  misc_RNA (1)...(19): siRNA sense strand
aaacaagaaauccagaaca

SEQ ID NO: 1102255 - RNA, 19 nt, Homo sapiens
  misc_RNA (1)...(19): siRNA sense strand
uaagucuccucauaucucu

SEQ ID NO: 1102256 - RNA, 19 nt, Homo sapiens
  misc_RNA (1)...(19): siRNA sense strand
cuugaacaaucuccggaaa

SEQ ID NO: 1102257 - RNA, 19 nt, Homo sapiens
  misc_RNA (1)...(19): siRNA sense strand
aagaaagaagugaagguaa

SEQ ID NO: 1102258 - RNA, 19 nt, Homo sapiens
  misc_RNA (1)...(19): siRNA sense strand
gugagagugaggauaauga

SEQ ID NO: 1102259 - RNA, 19 nt, Homo sapiens
  misc_RNA (1)...(19): siRNA sense strand
ggugauagugcuaaugaca

SEQ ID NO: 1102260 - RNA, 19 nt, Homo sapiens
  misc_RNA (1)...(19): siRNA sense strand
ggauggcuuuagaugacaa

SEQ ID NO: 1102261 - RNA, 19 nt, Homo sapiens
  misc_RNA (1)...(19): siRNA sense strand
agaagaaaucccaguacaa

SEQ ID NO: 1102262 - RNA, 19 nt, Homo sapiens
  misc_RNA (1)...(19): siRNA sense strand
ccaaaggaguuaaaacaag

SEQ ID NO: 1102263 - RNA, 19 nt, Homo sapiens
  misc_RNA (1)...(19): siRNA sense strand
aacaagaaauccagaacag

SEQ ID NO: 1102264 - RNA, 19 nt, Homo sapiens
  misc_RNA (1)...(19): siRNA sense strand
ggaaaccauuagaaauacg

SEQ ID NO: 1102265 - RNA, 19 nt, Homo sapiens
  misc_RNA (1)...(19): siRNA sense strand
ccacuaggaaaccauuaga

SEQ ID NO: 1102266 - RNA, 19 nt, Homo sapiens
  misc_RNA (1)...(19): siRNA sense strand
cuucagauaccacuaggaa

SEQ ID NO: 1102267 - RNA, 19 nt, Homo sapiens
  misc_RNA (1)...(19): siRNA sense strand
gaaagaagugaagguaaaa

SEQ ID NO: 1102268 - RNA, 19 nt, Homo sapiens
  misc_RNA (1)...(19): siRNA sense strand
guguagccagugauuauuu

SEQ ID NO: 1102269 - RNA, 19 nt, Homo sapiens
  misc_RNA (1)...(19): siRNA sense strand
uaucucuaauugcagugua

SEQ ID NO: 1102270 - RNA, 19 nt, Homo sapiens
  misc_RNA (1)...(19): siRNA sense strand
ugaagauucugaggaugau

SEQ ID NO: 1102271 - RNA, 19 nt, Homo sapiens
  misc_RNA (1)...(19): siRNA sense strand
aaagcaagaaaccuaaaug

SEQ ID NO: 1102272 - RNA, 19 nt, Homo sapiens
  misc_RNA (1)...(19): siRNA sense strand
ugaaagcaagaaaccuaaa

SEQ ID NO: 1102273 - RNA, 19 nt, Homo sapiens
  misc_RNA (1)...(19): siRNA sense strand
ugaggaugauucugauuuu

SEQ ID NO: 1102274 - RNA, 19 nt, Homo sapiens
  misc_RNA (1)...(19): siRNA sense strand
agacauaagaaaccaguca

SEQ ID NO: 1102275 - RNA, 19 nt, Homo sapiens
  misc_RNA (1)...(19): siRNA sense strand
uuagaaauacgcaguccuu

SEQ ID NO: 1102276 - RNA, 19 nt, Homo sapiens
  misc_RNA (1)...(19): siRNA sense strand
ucagauaccacuaggaaac

SEQ ID NO: 1102277 - RNA, 19 nt, Homo sapiens
  misc_RNA (1)...(19): siRNA sense strand
gugaggauaaugacgaaga

SEQ ID NO: 1102278 - RNA, 19 nt, Homo sapiens
  misc_RNA (1)...(19): siRNA sense strand
cugaggaugauucugauuu

SEQ ID NO: 1102279 - RNA, 19 nt, Homo sapiens
  misc_RNA (1)...(19): siRNA sense strand
uguggaagaugauguuggu

SEQ ID NO: 1102280 - RNA, 19 nt, Homo sapiens
  misc_RNA (1)...(19): siRNA sense strand
agaaaucccaguacaagag

SEQ ID NO: 1102281 - RNA, 19 nt, Homo sapiens
  misc_RNA (1)...(19): siRNA sense strand
agaaauacgcaguccuuca

SEQ ID NO: 1102282 - RNA, 19 nt, Homo sapiens
  misc_RNA (1)...(19): siRNA sense strand
aaccuaacuugaacaaucu

SEQ ID NO: 1102283 - RNA, 19 nt, Homo sapiens
  misc_RNA (1)...(19): siRNA sense strand
cuaaugugcagaacucuca

SEQ ID NO: 1102284 - RNA, 19 nt, Homo sapiens
  misc_RNA (1)...(19): siRNA sense strand
uucugcaacuguaccuuua

SEQ ID NO: 1102285 - RNA, 19 nt, Homo sapiens
  misc_RNA (1)...(19): siRNA sense strand
ucugugaagucucccaauc

SEQ ID NO: 1102286 - RNA, 19 nt, Homo sapiens
  misc_RNA (1)...(19): siRNA sense strand
aaagguuucucugucuuca

SEQ ID NO: 1102287 - RNA, 19 nt, Homo sapiens
  misc_RNA (1)...(19): siRNA sense strand
ggacuauucuccauuauuu

SEQ ID NO: 1102288 - RNA, 19 nt, Homo sapiens
  misc_RNA (1)...(19): siRNA sense strand
gaacggagauuugagauau

SEQ ID NO: 1102289 - RNA, 19 nt, Homo sapiens
  misc_RNA (1)...(19): siRNA sense strand
gaaauuugcuugugauugu

SEQ ID NO: 1102290 - RNA, 19 nt, Homo sapiens
  misc_RNA (1)...(19): siRNA sense strand
ggaaucgguuguuucauua

SEQ ID NO: 1102291 - RNA, 19 nt, Homo sapiens
  misc_RNA (1)...(19): siRNA sense strand
gggcuugucuucaauguua

SEQ ID NO: 1102292 - RNA, 19 nt, Homo sapiens
  misc_RNA (1)...(19): siRNA sense strand
ucacucagcuuuauugcua

SEQ ID NO: 1102293 - RNA, 19 nt, Homo sapiens
  misc_RNA (1)...(19): siRNA sense strand
ggucauacauguggauaua

SEQ ID NO: 1102294 - RNA, 19 nt, Homo sapiens
  misc_RNA (1)...(19): siRNA sense strand
caaguaagcagcuauauug

SEQ ID NO: 1102295 - RNA, 19 nt, Homo sapiens
  misc_RNA (1)...(19): siRNA sense strand
gcacaaccuucagagaaua

SEQ ID NO: 1102296 - RNA, 19 nt, Homo sapiens
  misc_RNA (1)...(19): siRNA sense strand
gacggaagcuuugaaauug

SEQ ID NO: 1102297 - RNA, 19 nt, Homo sapiens
  misc_RNA (1)...(19): siRNA sense strand
gacacuaggugcaauuauu

SEQ ID NO: 1102298 - RNA, 19 nt, Homo sapiens
  misc_RNA (1)...(19): siRNA sense strand
gaaauaauccagugacauc

SEQ ID NO: 1102299 - RNA, 19 nt, Homo sapiens
  misc_RNA (1)...(19): siRNA sense strand
cuacauagaccaaaguuaa

SEQ ID NO: 1102300 - RNA, 19 nt, Homo sapiens
  misc_RNA (1)...(19): siRNA sense strand
caaaucaguugccggacua

SEQ ID NO: 1102301 - RNA, 19 nt, Homo sapiens
  misc_RNA (1)...(19): siRNA sense strand
uggaauaacuuacaucuca

SEQ ID NO: 1102302 - RNA, 19 nt, Homo sapiens
  misc_RNA (1)...(19): siRNA sense strand
gauauccucuucucuuguu

SEQ ID NO: 1102303 - RNA, 19 nt, Homo sapiens
  misc_RNA (1)...(19): siRNA sense strand
gaccuuauccacuuguuua

SEQ ID NO: 1102304 - RNA, 19 nt, Homo sapiens
  misc_RNA (1)...(19): siRNA sense strand
ggacauucuucuuuguauu

SEQ ID NO: 1102305 - RNA, 19 nt, Homo sapiens
  misc_RNA (1)...(19): siRNA sense strand
uaauaugcuucguggaaua

SEQ ID NO: 1102306 - RNA, 19 nt, Homo sapiens
  misc_RNA (1)...(19): siRNA sense strand
gaaccagucuguggaaaca

SEQ ID NO: 1102307 - RNA, 19 nt, Homo sapiens
  misc_RNA (1)...(19): siRNA sense strand
ggagcuugguggcuuaauu

SEQ ID NO: 1102308 - RNA, 19 nt, Homo sapiens
  misc_RNA (1)...(19): siRNA sense strand
uuaagagucucaucacuug

SEQ ID NO: 1102309 - RNA, 19 nt, Homo sapiens
  misc_RNA (1)...(19): siRNA sense strand
gagauguaccacuuucuua

SEQ ID NO: 1102310 - RNA, 19 nt, Homo sapiens
  misc_RNA (1)...(19): siRNA sense strand
uggaaucgguuguuucauu

SEQ ID NO: 1102311 - RNA, 19 nt, Homo sapiens
  misc_RNA (1)...(19): siRNA sense strand
ggacauauaauuccacauc

SEQ ID NO: 1102312 - RNA, 19 nt, Homo sapiens
  misc_RNA (1)...(19): siRNA sense strand
gaaucugggucauacaugu

SEQ ID NO: 1102313 - RNA, 19 nt, Homo sapiens
  misc_RNA (1)...(19): siRNA sense strand
ccucuucucuuguugguuu

SEQ ID NO: 1102314 - RNA, 19 nt, Homo sapiens
  misc_RNA (1)...(19): siRNA sense strand
ggaauucuagcuccaauau

SEQ ID NO: 1102315 - RNA, 19 nt, Homo sapiens
  misc_RNA (1)...(19): siRNA sense strand
gcagcuauauuggugcuuu

SEQ ID NO: 1102316 - RNA, 19 nt, Homo sapiens
  misc_RNA (1)...(19): siRNA sense strand
gauuugagauauccucuuc

SEQ ID NO: 1102317 - RNA, 19 nt, Homo sapiens
  misc_RNA (1)...(19): siRNA sense strand
ggaugaagcaaacuuagaa

SEQ ID NO: 1102318 - RNA, 19 nt, Homo sapiens
  misc_RNA (1)...(19): siRNA sense strand
gacuaaccaugaccuauga

SEQ ID NO: 1102319 - RNA, 19 nt, Homo sapiens
  misc_RNA (1)...(19): siRNA sense strand
cagcuaauuugaccaauca

SEQ ID NO: 1102320 - RNA, 19 nt, Homo sapiens
  misc_RNA (1)...(19): siRNA sense strand
ugacggaagcuuugaaauu

SEQ ID NO: 1102321 - RNA, 19 nt, Homo sapiens
  misc_RNA (1)...(19): siRNA sense strand
ggacuaaccaugaccuaug

SEQ ID NO: 1102322 - RNA, 19 nt, Homo sapiens
  misc_RNA (1)...(19): siRNA sense strand
gguuuccacucaaugguua

SEQ ID NO: 1102323 - RNA, 19 nt, Homo sapiens
  misc_RNA (1)...(19): siRNA sense strand
ucauagagauguaccacuu

SEQ ID NO: 1102324 - RNA, 19 nt, Homo sapiens
  misc_RNA (1)...(19): siRNA sense strand
ugacugcuuugccacauuu

SEQ ID NO: 1102325 - RNA, 19 nt, Homo sapiens
  misc_RNA (1)...(19): siRNA sense strand
gcagauagugaaacacauu

SEQ ID NO: 1102326 - RNA, 19 nt, Homo sapiens
  misc_RNA (1)...(19): siRNA sense strand
gagcuugguggcuuaauuu

SEQ ID NO: 1102327 - RNA, 19 nt, Homo sapiens
  misc_RNA (1)...(19): siRNA sense strand
ggauaacuccuacugauuc

SEQ ID NO: 1102328 - RNA, 19 nt, Homo sapiens
  misc_RNA (1)...(19): siRNA sense strand
gguaauaugcuucguggaa

SEQ ID NO: 1102329 - RNA, 19 nt, Homo sapiens
  misc_RNA (1)...(19): siRNA sense strand
acacuaggugcaauuauua

SEQ ID NO: 1102330 - RNA, 19 nt, Homo sapiens
  misc_RNA (1)...(19): siRNA sense strand
gcacuggguuuccacucaa

SEQ ID NO: 1102331 - RNA, 19 nt, Homo sapiens
  misc_RNA (1)...(19): siRNA sense strand
ucaaauacguagagcaaca

SEQ ID NO: 1102332 - RNA, 19 nt, Homo sapiens
  misc_RNA (1)...(19): siRNA sense strand
ggaaacaaaugaugaaaag

SEQ ID NO: 1102333 - RNA, 19 nt, Homo sapiens
  misc_RNA (1)...(19): siRNA sense strand
gucauaaccauaccuauuu

SEQ ID NO: 1102334 - RNA, 19 nt, Homo sapiens
  misc_RNA (1)...(19): siRNA sense strand
caacucagacugcaauugu

SEQ ID NO: 1102335 - RNA, 19 nt, Homo sapiens
  misc_RNA (1)...(19): siRNA sense strand
gggaaaagguuguuuaaag

SEQ ID NO: 1102336 - RNA, 19 nt, Homo sapiens
  misc_RNA (1)...(19): siRNA sense strand
gaccuaugauggaaauaau

SEQ ID NO: 1102337 - RNA, 19 nt, Homo sapiens
  misc_RNA (1)...(19): siRNA sense strand
gccaaauucucauguuuua

SEQ ID NO: 1102338 - RNA, 19 nt, Homo sapiens
  misc_RNA (1)...(19): siRNA sense strand
caugggauauuacagguau

SEQ ID NO: 1102339 - RNA, 19 nt, Homo sapiens
  misc_RNA (1)...(19): siRNA sense strand
ggaaacaauggaauaacuu

SEQ ID NO: 1102340 - RNA, 19 nt, Homo sapiens
  misc_RNA (1)...(19): siRNA sense strand
ggcacaaccuucagagaau

SEQ ID NO: 1102341 - RNA, 19 nt, Homo sapiens
  misc_RNA (1)...(19): siRNA sense strand
acacgugggucauguagga

SEQ ID NO: 1102342 - RNA, 19 nt, Homo sapiens
  misc_RNA (1)...(19): siRNA sense strand
uuacugcugugaugucauu

SEQ ID NO: 1102343 - RNA, 19 nt, Homo sapiens
  misc_RNA (1)...(19): siRNA sense strand
guaauaugcuucguggaau

SEQ ID NO: 1102344 - RNA, 19 nt, Homo sapiens
  misc_RNA (1)...(19): siRNA sense strand
gagcaucaccugagauagu

SEQ ID NO: 1102345 - RNA, 19 nt, Homo sapiens
  misc_RNA (1)...(19): siRNA sense strand
caaacuacauagaccaaag

SEQ ID NO: 1102346 - RNA, 19 nt, Homo sapiens
  misc_RNA (1)...(19): siRNA sense strand
agacugcaauugugaugaa

SEQ ID NO: 1102347 - RNA, 19 nt, Homo sapiens
  misc_RNA (1)...(19): siRNA sense strand
uaaaggaaucugggucaua

SEQ ID NO: 1102348 - RNA, 19 nt, Homo sapiens
  misc_RNA (1)...(19): siRNA sense strand
gcaauugugaugaaaguca

SEQ ID NO: 1102349 - RNA, 19 nt, Homo sapiens
  misc_RNA (1)...(19): siRNA sense strand
gauguaccacuuucuuauu

SEQ ID NO: 1102350 - RNA, 19 nt, Homo sapiens
  misc_RNA (1)...(19): siRNA sense strand
ccagugacaucucauagag

SEQ ID NO: 1102351 - RNA, 19 nt, Homo sapiens
  misc_RNA (1)...(19): siRNA sense strand
guucauggguaauaugcuu

SEQ ID NO: 1102352 - RNA, 19 nt, Homo sapiens
  misc_RNA (1)...(19): siRNA sense strand
ggaaauuugcuugugauug

SEQ ID NO: 1102353 - RNA, 19 nt, Homo sapiens
  misc_RNA (1)...(19): siRNA sense strand
gacauauaauuccacauca

SEQ ID NO: 1102354 - RNA, 19 nt, Homo sapiens
  misc_RNA (1)...(19): siRNA sense strand
uaauuggaaucgguuguuu

SEQ ID NO: 1102355 - RNA, 19 nt, Homo sapiens
  misc_RNA (1)...(19): siRNA sense strand
caccugagauagugggaaa

SEQ ID NO: 1102356 - RNA, 19 nt, Homo sapiens
  misc_RNA (1)...(19): siRNA sense strand
agagaaagauaucaaugca

SEQ ID NO: 1102357 - RNA, 19 nt, Homo sapiens
  misc_RNA (1)...(19): siRNA sense strand
caagagaaagauaucaaug

SEQ ID NO: 1102358 - RNA, 19 nt, Homo sapiens
  misc_RNA (1)...(19): siRNA sense strand
ggaaaagguuguuuaaagg

SEQ ID NO: 1102359 - RNA, 19 nt, Homo sapiens
  misc_RNA (1)...(19): siRNA sense strand
gaauucuagcuccaauaua

SEQ ID NO: 1102360 - RNA, 19 nt, Homo sapiens
  misc_RNA (1)...(19): siRNA sense strand
caagauacugcaauggauu

SEQ ID NO: 1102361 - RNA, 19 nt, Homo sapiens
  misc_RNA (1)...(19): siRNA sense strand
caucuaaggcuaacaucuu

SEQ ID NO: 1102362 - RNA, 19 nt, Homo sapiens
  misc_RNA (1)...(19): siRNA sense strand
ggauauuacagguauucua

SEQ ID NO: 1102363 - RNA, 19 nt, Homo sapiens
  misc_RNA (1)...(19): siRNA sense strand
aaaggaaucugggucauac

SEQ ID NO: 1102364 - RNA, 19 nt, Homo sapiens
  misc_RNA (1)...(19): siRNA sense strand
agauaucaaugcaucagaa

SEQ ID NO: 1102365 - RNA, 19 nt, Homo sapiens
  misc_RNA (1)...(19): siRNA sense strand
gaggaauucuagcuccaau

SEQ ID NO: 1102366 - RNA, 19 nt, Homo sapiens
  misc_RNA (1)...(19): siRNA sense strand
caucuuauugggagucaua

SEQ ID NO: 1102367 - RNA, 19 nt, Homo sapiens
  misc_RNA (1)...(19): siRNA sense strand
guagaucuaagcacuauca

SEQ ID NO: 1102368 - RNA, 19 nt, Homo sapiens
  misc_RNA (1)...(19): siRNA sense strand
uagagcaucaccugagaua

SEQ ID NO: 1102369 - RNA, 19 nt, Homo sapiens
  misc_RNA (1)...(19): siRNA sense strand
agaaauuacucagcccauu

SEQ ID NO: 1102370 - RNA, 19 nt, Homo sapiens
  misc_RNA (1)...(19): siRNA sense strand
ggagucauaaccauaccua

SEQ ID NO: 1102371 - RNA, 19 nt, Homo sapiens
  misc_RNA (1)...(19): siRNA sense strand
gauaacuccuacugauucu

SEQ ID NO: 1102372 - RNA, 19 nt, Homo sapiens
  misc_RNA (1)...(19): siRNA sense strand
gaagcaaacuuagaauccu

SEQ ID NO: 1102373 - RNA, 19 nt, Homo sapiens
  misc_RNA (1)...(19): siRNA sense strand
gauaucaaugcaucagaaa

SEQ ID NO: 1102374 - RNA, 19 nt, Homo sapiens
  misc_RNA (1)...(19): siRNA sense strand
guuggagcuugguggcuua

SEQ ID NO: 1102375 - RNA, 19 nt, Homo sapiens
  misc_RNA (1)...(19): siRNA sense strand
guuaagagucucaucacuu

SEQ ID NO: 1102376 - RNA, 19 nt, Homo sapiens
  misc_RNA (1)...(19): siRNA sense strand
cauauagaacggagauuug

SEQ ID NO: 1102377 - RNA, 19 nt, Homo sapiens
  misc_RNA (1)...(19): siRNA sense strand
aaauggaagugucauggau

SEQ ID NO: 1102378 - RNA, 19 nt, Homo sapiens
  misc_RNA (1)...(19): siRNA sense strand
ggugaaugcccaagagaug

SEQ ID NO: 1102379 - RNA, 19 nt, Homo sapiens
  misc_RNA (1)...(19): siRNA sense strand
caauugugaugaaagucaa

SEQ ID NO: 1102380 - RNA, 19 nt, Homo sapiens
  misc_RNA (1)...(19): siRNA sense strand
gcucugucacucagcuuua

SEQ ID NO: 1102381 - RNA, 19 nt, Homo sapiens
  misc_RNA (1)...(19): siRNA sense strand
ugcaugugcuggaaacaaa

SEQ ID NO: 1102382 - RNA, 19 nt, Homo sapiens
  misc_RNA (1)...(19): siRNA sense strand
aaauguacguggauauugg

SEQ ID NO: 1102383 - RNA, 19 nt, Homo sapiens
  misc_RNA (1)...(19): siRNA sense strand
gaaugcaauagcaaugauu

SEQ ID NO: 1102384 - RNA, 19 nt, Homo sapiens
  misc_RNA (1)...(19): siRNA sense strand
acaaguaagcagcuauauu

SEQ ID NO: 1102385 - RNA, 19 nt, Homo sapiens
  misc_RNA (1)...(19): siRNA sense strand
gguugcaaaucuucaagug

SEQ ID NO: 1102386 - RNA, 19 nt, Homo sapiens
  misc_RNA (1)...(19): siRNA sense strand
caugaccuaugauggaaau

SEQ ID NO: 1102387 - RNA, 19 nt, Homo sapiens
  misc_RNA (1)...(19): siRNA sense strand
gaaauggccucuccuccuu

SEQ ID NO: 1102388 - RNA, 19 nt, Homo sapiens
  misc_RNA (1)...(19): siRNA sense strand
ggacaucgacccagagaaa

SEQ ID NO: 1102389 - RNA, 19 nt, Homo sapiens
  misc_RNA (1)...(19): siRNA sense strand
gaaccaggcucugugauca

SEQ ID NO: 1102390 - RNA, 19 nt, Homo sapiens
  misc_RNA (1)...(19): siRNA sense strand
gacaggagccuacaucaaa

SEQ ID NO: 1102391 - RNA, 19 nt, Homo sapiens
  misc_RNA (1)...(19): siRNA sense strand
ucacagggauggaugcaaa

SEQ ID NO: 1102392 - RNA, 19 nt, Homo sapiens
  misc_RNA (1)...(19): siRNA sense strand
gggaauuccuggacacaaa

SEQ ID NO: 1102393 - RNA, 19 nt, Homo sapiens
  misc_RNA (1)...(19): siRNA sense strand
gugaaacacuccagaccua

SEQ ID NO: 1102394 - RNA, 19 nt, Homo sapiens
  misc_RNA (1)...(19): siRNA sense strand
gaugacccauggcgucuaa

SEQ ID NO: 1102395 - RNA, 19 nt, Homo sapiens
  misc_RNA (1)...(19): siRNA sense strand
gaauguaacccuccagugu

SEQ ID NO: 1102396 - RNA, 19 nt, Homo sapiens
  misc_RNA (1)...(19): siRNA sense strand
gaacucaggagggaaugua

SEQ ID NO: 1102397 - RNA, 19 nt, Homo sapiens
  misc_RNA (1)...(19): siRNA sense strand
gcaggacaguucuaugaca

SEQ ID NO: 1102398 - RNA, 19 nt, Homo sapiens
  misc_RNA (1)...(19): siRNA sense strand
gaugcaaacuuuccuucug

SEQ ID NO: 1102399 - RNA, 19 nt, Homo sapiens
  misc_RNA (1)...(19): siRNA sense strand
gauuuguucuguauaagga

SEQ ID NO: 1102400 - RNA, 19 nt, Homo sapiens
  misc_RNA (1)...(19): siRNA sense strand
agggauggaugcaaacuuu

SEQ ID NO: 1102401 - RNA, 19 nt, Homo sapiens
  misc_RNA (1)...(19): siRNA sense strand
aaacuuuccuucugaccaa

SEQ ID NO: 1102402 - RNA, 19 nt, Homo sapiens
  misc_RNA (1)...(19): siRNA sense strand
gaaaacagcacccuggauu

SEQ ID NO: 1102403 - RNA, 19 nt, Homo sapiens
  misc_RNA (1)...(19): siRNA sense strand
ggcauuugauggcuucauu

SEQ ID NO: 1102404 - RNA, 19 nt, Homo sapiens
  misc_RNA (1)...(19): siRNA sense strand
acucacagguggcauuuga

SEQ ID NO: 1102405 - RNA, 19 nt, Homo sapiens
  misc_RNA (1)...(19): siRNA sense strand
guacaggugcuaugcuuau

SEQ ID NO: 1102406 - RNA, 19 nt, Homo sapiens
  misc_RNA (1)...(19): siRNA sense strand
gaacgugacccugcugugu

SEQ ID NO: 1102407 - RNA, 19 nt, Homo sapiens
  misc_RNA (1)...(19): siRNA sense strand
gcagggcgguaucgcuguu

SEQ ID NO: 1102408 - RNA, 19 nt, Homo sapiens
  misc_RNA (1)...(19): siRNA sense strand
ggcaaacacuggacaucga

SEQ ID NO: 1102409 - RNA, 19 nt, Homo sapiens
  misc_RNA (1)...(19): siRNA sense strand
caggaguaccgucuauaua

SEQ ID NO: 1102410 - RNA, 19 nt, Homo sapiens
  misc_RNA (1)...(19): siRNA sense strand
gguccuagguguuucuaag

SEQ ID NO: 1102411 - RNA, 19 nt, Homo sapiens
  misc_RNA (1)...(19): siRNA sense strand
gccaggagacccaggagua

SEQ ID NO: 1102412 - RNA, 19 nt, Homo sapiens
  misc_RNA (1)...(19): siRNA sense strand
uuugauggcuucauucugu

SEQ ID NO: 1102413 - RNA, 19 nt, Homo sapiens
  misc_RNA (1)...(19): siRNA sense strand
gaucaacguaccaaucuca

SEQ ID NO: 1102414 - RNA, 19 nt, Homo sapiens
  misc_RNA (1)...(19): siRNA sense strand
gaugcuggcuacaacagau

SEQ ID NO: 1102415 - RNA, 19 nt, Homo sapiens
  misc_RNA (1)...(19): siRNA sense strand
caucaaacccacccucuca

SEQ ID NO: 1102416 - RNA, 19 nt, Homo sapiens
  misc_RNA (1)...(19): siRNA sense strand
uaagaagccaucacucuca

SEQ ID NO: 1102417 - RNA, 19 nt, Homo sapiens
  misc_RNA (1)...(19): siRNA sense strand
cgguaucgcuguuacuaug

SEQ ID NO: 1102418 - RNA, 19 nt, Homo sapiens
  misc_RNA (1)...(19): siRNA sense strand
gaacaugcagggcgguauc

SEQ ID NO: 1102419 - RNA, 19 nt, Homo sapiens
  misc_RNA (1)...(19): siRNA sense strand
ccaggaguaccgucuauau

SEQ ID NO: 1102420 - RNA, 19 nt, Homo sapiens
  misc_RNA (1)...(19): siRNA sense strand
augcaaacuuuccuucuga

SEQ ID NO: 1102421 - RNA, 19 nt, Homo sapiens
  misc_RNA (1)...(19): siRNA sense strand
uaagaucaacguaccaauc

SEQ ID NO: 1102422 - RNA, 19 nt, Homo sapiens
  misc_RNA (1)...(19): siRNA sense strand
ucgcaggacaguucuauga

SEQ ID NO: 1102423 - RNA, 19 nt, Homo sapiens
  misc_RNA (1)...(19): siRNA sense strand
gcacacacagccugaggau

SEQ ID NO: 1102424 - RNA, 19 nt, Homo sapiens
  misc_RNA (1)...(19): siRNA sense strand
gguacaggugcuaugcuua

SEQ ID NO: 1102425 - RNA, 19 nt, Homo sapiens
  misc_RNA (1)...(19): siRNA sense strand
gacucgaacucucccuaug

SEQ ID NO: 1102426 - RNA, 19 nt, Homo sapiens
  misc_RNA (1)...(19): siRNA sense strand
ucacgguccugaucugucu

SEQ ID NO: 1102427 - RNA, 19 nt, Homo sapiens
  misc_RNA (1)...(19): siRNA sense strand
ugacaggagccuacaucaa

SEQ ID NO: 1102428 - RNA, 19 nt, Homo sapiens
  misc_RNA (1)...(19): siRNA sense strand
ugacguaugccgaggugaa

SEQ ID NO: 1102429 - RNA, 19 nt, Homo sapiens
  misc_RNA (1)...(19): siRNA sense strand
gaucgcaggacaguucuau

SEQ ID NO: 1102430 - RNA, 19 nt, Homo sapiens
  misc_RNA (1)...(19): siRNA sense strand
ucacagguggcauuugaug

SEQ ID NO: 1102431 - RNA, 19 nt, Homo sapiens
  misc_RNA (1)...(19): siRNA sense strand
ugaggcugcugcaucugaa

SEQ ID NO: 1102432 - RNA, 19 nt, Homo sapiens
  misc_RNA (1)...(19): siRNA sense strand
ccucuaugcugccgugaag

SEQ ID NO: 1102433 - RNA, 19 nt, Homo sapiens
  misc_RNA (1)...(19): siRNA sense strand
aacccuaccugcugacuca

SEQ ID NO: 1102434 - RNA, 19 nt, Homo sapiens
  misc_RNA (1)...(19): siRNA sense strand
caacguaccaaucucaaaa

SEQ ID NO: 1102435 - RNA, 19 nt, Homo sapiens
  misc_RNA (1)...(19): siRNA sense strand
gacccugacucugcagugu

SEQ ID NO: 1102436 - RNA, 19 nt, Homo sapiens
  misc_RNA (1)...(19): siRNA sense strand
gcugaaccaggcucuguga

SEQ ID NO: 1102437 - RNA, 19 nt, Homo sapiens
  misc_RNA (1)...(19): siRNA sense strand
gcucugaugcuggcuacaa

SEQ ID NO: 1102438 - RNA, 19 nt, Homo sapiens
  misc_RNA (1)...(19): siRNA sense strand
aaacagcacccuggauuac

SEQ ID NO: 1102439 - RNA, 19 nt, Homo sapiens
  misc_RNA (1)...(19): siRNA sense strand
aggaguaccgucuauauag

SEQ ID NO: 1102440 - RNA, 19 nt, Homo sapiens
  misc_RNA (1)...(19): siRNA sense strand
ggaauuccuggacacaaag

SEQ ID NO: 1102441 - RNA, 19 nt, Homo sapiens
  misc_RNA (1)...(19): siRNA sense strand
aaaggcugauuuccaacau

SEQ ID NO: 1102442 - RNA, 19 nt, Homo sapiens
  misc_RNA (1)...(19): siRNA sense strand
uaucgcuguuacuauggua

SEQ ID NO: 1102443 - RNA, 19 nt, Homo sapiens
  misc_RNA (1)...(19): siRNA sense strand
cccauggcgucuaagauca

SEQ ID NO: 1102444 - RNA, 19 nt, Homo sapiens
  misc_RNA (1)...(19): siRNA sense strand
ggugaacucaggagggaau

SEQ ID NO: 1102445 - RNA, 19 nt, Homo sapiens
  misc_RNA (1)...(19): siRNA sense strand
aguggucucuacccaguga

SEQ ID NO: 1102446 - RNA, 19 nt, Homo sapiens
  misc_RNA (1)...(19): siRNA sense strand
ugguacaggugcuaugcuu

SEQ ID NO: 1102447 - RNA, 19 nt, Homo sapiens
  misc_RNA (1)...(19): siRNA sense strand
auguaacccuccaguguga

SEQ ID NO: 1102448 - RNA, 19 nt, Homo sapiens
  misc_RNA (1)...(19): siRNA sense strand
ggcgguaucgcuguuacua

SEQ ID NO: 1102449 - RNA, 19 nt, Homo sapiens
  misc_RNA (1)...(19): siRNA sense strand
ccacucuggccauccacua

SEQ ID NO: 1102450 - RNA, 19 nt, Homo sapiens
  misc_RNA (1)...(19): siRNA sense strand
gacguaugccgaggugaaa

SEQ ID NO: 1102451 - RNA, 19 nt, Homo sapiens
  misc_RNA (1)...(19): siRNA sense strand
ucaacguaccaaucucaaa

SEQ ID NO: 1102452 - RNA, 19 nt, Homo sapiens
  misc_RNA (1)...(19): siRNA sense strand
ugacucacagguggcauuu

SEQ ID NO: 1102453 - RNA, 19 nt, Homo sapiens
  misc_RNA (1)...(19): siRNA sense strand
ggugacaggagccuacauc

SEQ ID NO: 1102454 - RNA, 19 nt, Homo sapiens
  misc_RNA (1)...(19): siRNA sense strand
aaacacuccagaccuagga

SEQ ID NO: 1102455 - RNA, 19 nt, Homo sapiens
  misc_RNA (1)...(19): siRNA sense strand
ggagcccacacgaugaaga

SEQ ID NO: 1102456 - RNA, 19 nt, Homo sapiens
  misc_RNA (1)...(19): siRNA sense strand
ucuaagaagccaucacucu

SEQ ID NO: 1102457 - RNA, 19 nt, Homo sapiens
  misc_RNA (1)...(19): siRNA sense strand
acucgaacucucccuauga

SEQ ID NO: 1102458 - RNA, 19 nt, Homo sapiens
  misc_RNA (1)...(19): siRNA sense strand
gauggcuucauucugugua

SEQ ID NO: 1102459 - RNA, 19 nt, Homo sapiens
  misc_RNA (1)...(19): siRNA sense strand
gcauuugauggcuucauuc

SEQ ID NO: 1102460 - RNA, 19 nt, Homo sapiens
  misc_RNA (1)...(19): siRNA sense strand
cacugaggcugcugcaucu

SEQ ID NO: 1102461 - RNA, 19 nt, Homo sapiens
  misc_RNA (1)...(19): siRNA sense strand
gcuaugcuuaugacucgaa

SEQ ID NO: 1102462 - RNA, 19 nt, Homo sapiens
  misc_RNA (1)...(19): siRNA sense strand
caaaggaacuuguuucuuc

SEQ ID NO: 1102463 - RNA, 19 nt, Homo sapiens
  misc_RNA (1)...(19): siRNA sense strand
gcaaagugcuaauugauau

SEQ ID NO: 1102464 - RNA, 19 nt, Homo sapiens
  misc_RNA (1)...(19): siRNA sense strand
gauaacauguuucagauug

SEQ ID NO: 1102465 - RNA, 19 nt, Homo sapiens
  misc_RNA (1)...(19): siRNA sense strand
cagcagagaugauaacaug

SEQ ID NO: 1102466 - RNA, 19 nt, Homo sapiens
  misc_RNA (1)...(19): siRNA sense strand
gaaaugaaaccaggaagaa

SEQ ID NO: 1102467 - RNA, 19 nt, Homo sapiens
  misc_RNA (1)...(19): siRNA sense strand
gaugauaacauguuucaga

SEQ ID NO: 1102468 - RNA, 19 nt, Homo sapiens
  misc_RNA (1)...(19): siRNA sense strand
cgagagcccugucaucuuc

SEQ ID NO: 1102469 - RNA, 19 nt, Homo sapiens
  misc_RNA (1)...(19): siRNA sense strand
ggagccagcugaaggaaca

SEQ ID NO: 1102470 - RNA, 19 nt, Homo sapiens
  misc_RNA (1)...(19): siRNA sense strand
gcagagaugauaacauguu

SEQ ID NO: 1102471 - RNA, 19 nt, Homo sapiens
  misc_RNA (1)...(19): siRNA sense strand
cagagaugauaacauguuu

SEQ ID NO: 1102472 - RNA, 19 nt, Homo sapiens
  misc_RNA (1)...(19): siRNA sense strand
ggcaaagugcuaauugaua

SEQ ID NO: 1102473 - RNA, 19 nt, Homo sapiens
  misc_RNA (1)...(19): siRNA sense strand
gcagugauucugacaguga

SEQ ID NO: 1102474 - RNA, 19 nt, Homo sapiens
  misc_RNA (1)...(19): siRNA sense strand
gagaugauaacauguuuca

SEQ ID NO: 1102475 - RNA, 19 nt, Homo sapiens
  misc_RNA (1)...(19): siRNA sense strand
gauggauccugaaggugaa

SEQ ID NO: 1102476 - RNA, 19 nt, Homo sapiens
  misc_RNA (1)...(19): siRNA sense strand
aaaggaacuuguuucuuca

SEQ ID NO: 1102477 - RNA, 19 nt, Homo sapiens
  misc_RNA (1)...(19): siRNA sense strand
aaggcaaagugcuaauuga

SEQ ID NO: 1102478 - RNA, 19 nt, Homo sapiens
  misc_RNA (1)...(19): siRNA sense strand
ugacagugagguugacaaa

SEQ ID NO: 1102479 - RNA, 19 nt, Homo sapiens
  misc_RNA (1)...(19): siRNA sense strand
uaaaggcaaagugcuaauu

SEQ ID NO: 1102480 - RNA, 19 nt, Homo sapiens
  misc_RNA (1)...(19): siRNA sense strand
ugaaaugaaaccaggaaga

SEQ ID NO: 1102481 - RNA, 19 nt, Homo sapiens
  misc_RNA (1)...(19): siRNA sense strand
aaaggcaaagugcuaauug

SEQ ID NO: 1102482 - RNA, 19 nt, Homo sapiens
  misc_RNA (1)...(19): siRNA sense strand
cagcugaaggaacagauuu

SEQ ID NO: 1102483 - RNA, 19 nt, Homo sapiens
  misc_RNA (1)...(19): siRNA sense strand
uccugaaggugaaaugaaa

SEQ ID NO: 1102484 - RNA, 19 nt, Homo sapiens
  misc_RNA (1)...(19): siRNA sense strand
gggaaaaugagguacguua

SEQ ID NO: 1102485 - RNA, 19 nt, Homo sapiens
  misc_RNA (1)...(19): siRNA sense strand
uagagaauauuggauggau

SEQ ID NO: 1102486 - RNA, 19 nt, Homo sapiens
  misc_RNA (1)...(19): siRNA sense strand
gcagcagcagagaugauaa

SEQ ID NO: 1102487 - RNA, 19 nt, Homo sapiens
  misc_RNA (1)...(19): siRNA sense strand
ggugaaaugaaaccaggaa

SEQ ID NO: 1102488 - RNA, 19 nt, Homo sapiens
  misc_RNA (1)...(19): siRNA sense strand
gauccugaaggugaaauga

SEQ ID NO: 1102489 - RNA, 19 nt, Homo sapiens
  misc_RNA (1)...(19): siRNA sense strand
aaaugaaaccaggaagaaa

SEQ ID NO: 1102490 - RNA, 19 nt, Homo sapiens
  misc_RNA (1)...(19): siRNA sense strand
uggcagugauucugacagu

SEQ ID NO: 1102491 - RNA, 19 nt, Homo sapiens
  misc_RNA (1)...(19): siRNA sense strand
ucaaaggaacuuguuucuu

SEQ ID NO: 1102492 - RNA, 19 nt, Homo sapiens
  misc_RNA (1)...(19): siRNA sense strand
gaaaaugagguacguuagu

SEQ ID NO: 1102493 - RNA, 19 nt, Homo sapiens
  misc_RNA (1)...(19): siRNA sense strand
gagcagcagcagcagagau

SEQ ID NO: 1102494 - RNA, 19 nt, Homo sapiens
  misc_RNA (1)...(19): siRNA sense strand
cuaaaucaaaggaacuugu

SEQ ID NO: 1102495 - RNA, 19 nt, Homo sapiens
  misc_RNA (1)...(19): siRNA sense strand
aaucaaaggaacuuguuuc

SEQ ID NO: 1102496 - RNA, 19 nt, Homo sapiens
  misc_RNA (1)...(19): siRNA sense strand
aaaaugagguacguuagug

SEQ ID NO: 1102497 - RNA, 19 nt, Homo sapiens
  misc_RNA (1)...(19): siRNA sense strand
gcccugucaucuucuaaac

SEQ ID NO: 1102498 - RNA, 19 nt, Homo sapiens
  misc_RNA (1)...(19): siRNA sense strand
uuacaucaauggcaaguuu

SEQ ID NO: 1102499 - RNA, 19 nt, Homo sapiens
  misc_RNA (1)...(19): siRNA sense strand
gcaaguuuaagaaggauaa

SEQ ID NO: 1102500 - RNA, 19 nt, Homo sapiens
  misc_RNA (1)...(19): siRNA sense strand
cuggguaccuuacaucaau

SEQ ID NO: 1102501 - RNA, 19 nt, Homo sapiens
  misc_RNA (1)...(19): siRNA sense strand
accgggagcuggucaagaa

SEQ ID NO: 1102502 - RNA, 19 nt, Homo sapiens
  misc_RNA (1)...(19): siRNA sense strand
ucaauggcaaguuuaagaa

SEQ ID NO: 1102503 - RNA, 19 nt, Homo sapiens
  misc_RNA (1)...(19): siRNA sense strand
ggacuggguaccuuacauc

SEQ ID NO: 1102504 - RNA, 19 nt, Homo sapiens
  misc_RNA (1)...(19): siRNA sense strand
gggagcuggucaagaacug

SEQ ID NO: 1102505 - RNA, 19 nt, Homo sapiens
  misc_RNA (1)...(19): siRNA sense strand
acaucaauggcaaguuuaa

SEQ ID NO: 1102506 - RNA, 19 nt, Homo sapiens
  misc_RNA (1)...(19): siRNA sense strand
gaucuaccaucuaaaucuu

SEQ ID NO: 1102507 - RNA, 19 nt, Homo sapiens
  misc_RNA (1)...(19): siRNA sense strand
ccaaacagaacgaggaauu

SEQ ID NO: 1102508 - RNA, 19 nt, Homo sapiens
  misc_RNA (1)...(19): siRNA sense strand
gcuauggucuguacuuucu

SEQ ID NO: 1102509 - RNA, 19 nt, Homo sapiens
  misc_RNA (1)...(19): siRNA sense strand
guugguacauugugaccua

SEQ ID NO: 1102510 - RNA, 19 nt, Homo sapiens
  misc_RNA (1)...(19): siRNA sense strand
gcucccagaguuuaaauuu

SEQ ID NO: 1102511 - RNA, 19 nt, Homo sapiens
  misc_RNA (1)...(19): siRNA sense strand
guacuuucuucgacgcuuu

SEQ ID NO: 1102512 - RNA, 19 nt, Homo sapiens
  misc_RNA (1)...(19): siRNA sense strand
ggccgauucuggugaugua

SEQ ID NO: 1102513 - RNA, 19 nt, Homo sapiens
  misc_RNA (1)...(19): siRNA sense strand
cgaaggcucccagaguuua

SEQ ID NO: 1102514 - RNA, 19 nt, Homo sapiens
  misc_RNA (1)...(19): siRNA sense strand
gaaggcucccagaguuuaa

SEQ ID NO: 1102515 - RNA, 19 nt, Homo sapiens
  misc_RNA (1)...(19): siRNA sense strand
ggaaaccuucgguggugua

SEQ ID NO: 1102516 - RNA, 19 nt, Homo sapiens
  misc_RNA (1)...(19): siRNA sense strand
gagcuuugucuacaugauu

SEQ ID NO: 1102517 - RNA, 19 nt, Homo sapiens
  misc_RNA (1)...(19): siRNA sense strand
ggccugagcuuugucuaca

SEQ ID NO: 1102518 - RNA, 19 nt, Homo sapiens
  misc_RNA (1)...(19): siRNA sense strand
gaaggcaugcggcuaccaa

SEQ ID NO: 1102519 - RNA, 19 nt, Homo sapiens
  misc_RNA (1)...(19): siRNA sense strand
cuacaugauucgaguuuac

SEQ ID NO: 1102520 - RNA, 19 nt, Homo sapiens
  misc_RNA (1)...(19): siRNA sense strand
cugcaggguugguacauug

SEQ ID NO: 1102521 - RNA, 19 nt, Homo sapiens
  misc_RNA (1)...(19): siRNA sense strand
uaucaguccuggcuagaca

SEQ ID NO: 1102522 - RNA, 19 nt, Homo sapiens
  misc_RNA (1)...(19): siRNA sense strand
ucaucaugcucuucuguau

SEQ ID NO: 1102523 - RNA, 19 nt, Homo sapiens
  misc_RNA (1)...(19): siRNA sense strand
acacugggccugagcuuug

SEQ ID NO: 1102524 - RNA, 19 nt, Homo sapiens
  misc_RNA (1)...(19): siRNA sense strand
ggaucuaccaucuaaaucu

SEQ ID NO: 1102525 - RNA, 19 nt, Homo sapiens
  misc_RNA (1)...(19): siRNA sense strand
uaauggaagacucagauga

SEQ ID NO: 1102526 - RNA, 19 nt, Homo sapiens
  misc_RNA (1)...(19): siRNA sense strand
caggguugguacauuguga

SEQ ID NO: 1102527 - RNA, 19 nt, Homo sapiens
  misc_RNA (1)...(19): siRNA sense strand
cuucggugguguacagauu

SEQ ID NO: 1102528 - RNA, 19 nt, Homo sapiens
  misc_RNA (1)...(19): siRNA sense strand
uggcuauggucuguacuuu

SEQ ID NO: 1102529 - RNA, 19 nt, Homo sapiens
  misc_RNA (1)...(19): siRNA sense strand
caaacagaacgaggaauuc

SEQ ID NO: 1102530 - RNA, 19 nt, Homo sapiens
  misc_RNA (1)...(19): siRNA sense strand
guccuucgcuacccaccaa

SEQ ID NO: 1102531 - RNA, 19 nt, Homo sapiens
  misc_RNA (1)...(19): siRNA sense strand
guggauccuuccuuaaugg

SEQ ID NO: 1102532 - RNA, 19 nt, Homo sapiens
  misc_RNA (1)...(19): siRNA sense strand
ucuacaugauucgaguuua

SEQ ID NO: 1102533 - RNA, 19 nt, Homo sapiens
  misc_RNA (1)...(19): siRNA sense strand
ccugagcuuugucuacaug

SEQ ID NO: 1102534 - RNA, 19 nt, Homo sapiens
  misc_RNA (1)...(19): siRNA sense strand
uucgaaggcucccagaguu

SEQ ID NO: 1102535 - RNA, 19 nt, Homo sapiens
  misc_RNA (1)...(19): siRNA sense strand
aggcaaaucaagcacauga

SEQ ID NO: 1102536 - RNA, 19 nt, Homo sapiens
  misc_RNA (1)...(19): siRNA sense strand
gaugaagaggcaaaucaag

SEQ ID NO: 1102537 - RNA, 19 nt, Homo sapiens
  misc_RNA (1)...(19): siRNA sense strand
cgauucuggugauguacuu

SEQ ID NO: 1102538 - RNA, 19 nt, Homo sapiens
  misc_RNA (1)...(19): siRNA sense strand
uauggucuguacuuucuuc

SEQ ID NO: 1102539 - RNA, 19 nt, Homo sapiens
  misc_RNA (1)...(19): siRNA sense strand
gacuuggacagauuuauca

SEQ ID NO: 1102540 - RNA, 19 nt, Homo sapiens
  misc_RNA (1)...(19): siRNA sense strand
aucaugcucuucuguauca

SEQ ID NO: 1102541 - RNA, 19 nt, Homo sapiens
  misc_RNA (1)...(19): siRNA sense strand
ugaagaggcaaaucaagca

SEQ ID NO: 1102542 - RNA, 19 nt, Homo sapiens
  misc_RNA (1)...(19): siRNA sense strand
cgaugaagaggcaaaucaa

SEQ ID NO: 1102543 - RNA, 19 nt, Homo sapiens
  misc_RNA (1)...(19): siRNA sense strand
aguggauccuuccuuaaug

SEQ ID NO: 1102544 - RNA, 19 nt, Homo sapiens
  misc_RNA (1)...(19): siRNA sense strand
gggcauccuuguggcuaug

SEQ ID NO: 1102545 - RNA, 19 nt, Homo sapiens
  misc_RNA (1)...(19): siRNA sense strand
ucccagaguuuaaauuuug

SEQ ID NO: 1102546 - RNA, 19 nt, Homo sapiens
  misc_RNA (1)...(19): siRNA sense strand
agacuuggacagauuuauc

SEQ ID NO: 1102547 - RNA, 19 nt, Homo sapiens
  misc_RNA (1)...(19): siRNA sense strand
agaggcaaaucaagcacau

SEQ ID NO: 1102548 - RNA, 19 nt, Homo sapiens
  misc_RNA (1)...(19): siRNA sense strand
ucgaaggcucccagaguuu

SEQ ID NO: 1102549 - RNA, 19 nt, Homo sapiens
  misc_RNA (1)...(19): siRNA sense strand
gguacauugugaccuaugc

SEQ ID NO: 1102550 - RNA, 19 nt, Homo sapiens
  misc_RNA (1)...(19): siRNA sense strand
ccgguguucuggccgauuc

SEQ ID NO: 1102551 - RNA, 19 nt, Homo sapiens
  misc_RNA (1)...(19): siRNA sense strand
gaauaaagauccagaggaa

SEQ ID NO: 1102552 - RNA, 19 nt, Homo sapiens
  misc_RNA (1)...(19): siRNA sense strand
caaagaagguguuaacaga

SEQ ID NO: 1102553 - RNA, 19 nt, Homo sapiens
  misc_RNA (1)...(19): siRNA sense strand
caaauuggauggauucaaa

SEQ ID NO: 1102554 - RNA, 19 nt, Homo sapiens
  misc_RNA (1)...(19): siRNA sense strand
gcaauauggucuagccuua

SEQ ID NO: 1102555 - RNA, 19 nt, Homo sapiens
  misc_RNA (1)...(19): siRNA sense strand
gcacagauaucaaacaaca

SEQ ID NO: 1102556 - RNA, 19 nt, Homo sapiens
  misc_RNA (1)...(19): siRNA sense strand
ggaauacguucuuaguuaa

SEQ ID NO: 1102557 - RNA, 19 nt, Homo sapiens
  misc_RNA (1)...(19): siRNA sense strand
gaacguucccuuccauuua

SEQ ID NO: 1102558 - RNA, 19 nt, Homo sapiens
  misc_RNA (1)...(19): siRNA sense strand
ugaaacagcuggaggauug

SEQ ID NO: 1102559 - RNA, 19 nt, Homo sapiens
  misc_RNA (1)...(19): siRNA sense strand
ggauguagcuagaggaauu

SEQ ID NO: 1102560 - RNA, 19 nt, Homo sapiens
  misc_RNA (1)...(19): siRNA sense strand
uggaauacguucuuaguua

SEQ ID NO: 1102561 - RNA, 19 nt, Homo sapiens
  misc_RNA (1)...(19): siRNA sense strand
aaacaucacucagacuuua

SEQ ID NO: 1102562 - RNA, 19 nt, Homo sapiens
  misc_RNA (1)...(19): siRNA sense strand
ggucaaagaucccacagaa

SEQ ID NO: 1102563 - RNA, 19 nt, Homo sapiens
  misc_RNA (1)...(19): siRNA sense strand
acaagaaccugaagaagaa

SEQ ID NO: 1102564 - RNA, 19 nt, Homo sapiens
  misc_RNA (1)...(19): siRNA sense strand
cgacaacaguucuuauuga

SEQ ID NO: 1102565 - RNA, 19 nt, Homo sapiens
  misc_RNA (1)...(19): siRNA sense strand
gaaaauaagugaagaggaa

SEQ ID NO: 1102566 - RNA, 19 nt, Homo sapiens
  misc_RNA (1)...(19): siRNA sense strand
cccauuagcuguaagauuu

SEQ ID NO: 1102567 - RNA, 19 nt, Homo sapiens
  misc_RNA (1)...(19): siRNA sense strand
gaagacugccuccaauaua

SEQ ID NO: 1102568 - RNA, 19 nt, Homo sapiens
  misc_RNA (1)...(19): siRNA sense strand
ccauaucucuuccuucuuu

SEQ ID NO: 1102569 - RNA, 19 nt, Homo sapiens
  misc_RNA (1)...(19): siRNA sense strand
uaaauacccugcaaccaaa

SEQ ID NO: 1102570 - RNA, 19 nt, Homo sapiens
  misc_RNA (1)...(19): siRNA sense strand
gaagaaacuagcagccuua

SEQ ID NO: 1102571 - RNA, 19 nt, Homo sapiens
  misc_RNA (1)...(19): siRNA sense strand
guacuuggcugaaagcaau

SEQ ID NO: 1102572 - RNA, 19 nt, Homo sapiens
  misc_RNA (1)...(19): siRNA sense strand
ucaaagaccuaacuucaau

SEQ ID NO: 1102573 - RNA, 19 nt, Homo sapiens
  misc_RNA (1)...(19): siRNA sense strand
gcacugaugauguggaaua

SEQ ID NO: 1102574 - RNA, 19 nt, Homo sapiens
  misc_RNA (1)...(19): siRNA sense strand
ugauaaagaugguguguug

SEQ ID NO: 1102575 - RNA, 19 nt, Homo sapiens
  misc_RNA (1)...(19): siRNA sense strand
guagccaaguggauauuua

SEQ ID NO: 1102576 - RNA, 19 nt, Homo sapiens
  misc_RNA (1)...(19): siRNA sense strand
gcuggaggauugucucaua

SEQ ID NO: 1102577 - RNA, 19 nt, Homo sapiens
  misc_RNA (1)...(19): siRNA sense strand
caaacaacaugacagagaa

SEQ ID NO: 1102578 - RNA, 19 nt, Homo sapiens
  misc_RNA (1)...(19): siRNA sense strand
ucaaucugcugucuucaua

SEQ ID NO: 1102579 - RNA, 19 nt, Homo sapiens
  misc_RNA (1)...(19): siRNA sense strand
caacaguucuuauugaaag

SEQ ID NO: 1102580 - RNA, 19 nt, Homo sapiens
  misc_RNA (1)...(19): siRNA sense strand
acacagcaaugacaucuuu

SEQ ID NO: 1102581 - RNA, 19 nt, Homo sapiens
  misc_RNA (1)...(19): siRNA sense strand
ggaaacuccuucugaaaca

SEQ ID NO: 1102582 - RNA, 19 nt, Homo sapiens
  misc_RNA (1)...(19): siRNA sense strand
gggaagcacacaaccauua

SEQ ID NO: 1102583 - RNA, 19 nt, Homo sapiens
  misc_RNA (1)...(19): siRNA sense strand
gacaacaguucuuauugaa

SEQ ID NO: 1102584 - RNA, 19 nt, Homo sapiens
  misc_RNA (1)...(19): siRNA sense strand
ugacuuggcucuguuacua

SEQ ID NO: 1102585 - RNA, 19 nt, Homo sapiens
  misc_RNA (1)...(19): siRNA sense strand
gaacuugagucuguugaug

SEQ ID NO: 1102586 - RNA, 19 nt, Homo sapiens
  misc_RNA (1)...(19): siRNA sense strand
gaugguguguugccuguaa

SEQ ID NO: 1102587 - RNA, 19 nt, Homo sapiens
  misc_RNA (1)...(19): siRNA sense strand
aacaacagcuaaacuagua

SEQ ID NO: 1102588 - RNA, 19 nt, Homo sapiens
  misc_RNA (1)...(19): siRNA sense strand
gcccaucaccuucaaguua

SEQ ID NO: 1102589 - RNA, 19 nt, Homo sapiens
  misc_RNA (1)...(19): siRNA sense strand
ccaaugaucuuauggugau

SEQ ID NO: 1102590 - RNA, 19 nt, Homo sapiens
  misc_RNA (1)...(19): siRNA sense strand
gauaaugacuuggcucugu

SEQ ID NO: 1102591 - RNA, 19 nt, Homo sapiens
  misc_RNA (1)...(19): siRNA sense strand
gaaaggaagaaaugcaauu

SEQ ID NO: 1102592 - RNA, 19 nt, Homo sapiens
  misc_RNA (1)...(19): siRNA sense strand
ggaaggaccaaucuccaua

SEQ ID NO: 1102593 - RNA, 19 nt, Homo sapiens
  misc_RNA (1)...(19): siRNA sense strand
gaaacuagcagccuuacug

SEQ ID NO: 1102594 - RNA, 19 nt, Homo sapiens
  misc_RNA (1)...(19): siRNA sense strand
cuauggaguugaccacuua

SEQ ID NO: 1102595 - RNA, 19 nt, Homo sapiens
  misc_RNA (1)...(19): siRNA sense strand
uaacagaaguuuccuugag

SEQ ID NO: 1102596 - RNA, 19 nt, Homo sapiens
  misc_RNA (1)...(19): siRNA sense strand
gaugaaggauugcuacagu

SEQ ID NO: 1102597 - RNA, 19 nt, Homo sapiens
  misc_RNA (1)...(19): siRNA sense strand
ucaaagaucccacagaaga

SEQ ID NO: 1102598 - RNA, 19 nt, Homo sapiens
  misc_RNA (1)...(19): siRNA sense strand
uaucagagauggagaugga

SEQ ID NO: 1102599 - RNA, 19 nt, Homo sapiens
  misc_RNA (1)...(19): siRNA sense strand
gggaggcacuuucucuuga

SEQ ID NO: 1102600 - RNA, 19 nt, Homo sapiens
  misc_RNA (1)...(19): siRNA sense strand
gcuacauacuuaauggaua

SEQ ID NO: 1102601 - RNA, 19 nt, Homo sapiens
  misc_RNA (1)...(19): siRNA sense strand
ccaaguggauauuuaaaca

SEQ ID NO: 1102602 - RNA, 19 nt, Homo sapiens
  misc_RNA (1)...(19): siRNA sense strand
gcuccaagauuguguuuua

SEQ ID NO: 1102603 - RNA, 19 nt, Homo sapiens
  misc_RNA (1)...(19): siRNA sense strand
gacacaccauucucugaua

SEQ ID NO: 1102604 - RNA, 19 nt, Homo sapiens
  misc_RNA (1)...(19): siRNA sense strand
ggaaauauagugauaaagg

SEQ ID NO: 1102605 - RNA, 19 nt, Homo sapiens
  misc_RNA (1)...(19): siRNA sense strand
gaagaagaaggaaauacuu

SEQ ID NO: 1102606 - RNA, 19 nt, Homo sapiens
  misc_RNA (1)...(19): siRNA sense strand
gaagaaagagaugcagaaa

SEQ ID NO: 1102607 - RNA, 19 nt, Homo sapiens
  misc_RNA (1)...(19): siRNA sense strand
gaugauuucggcagaguua

SEQ ID NO: 1102608 - RNA, 19 nt, Homo sapiens
  misc_RNA (1)...(19): siRNA sense strand
gcuguuggcuggagugguu

SEQ ID NO: 1102609 - RNA, 19 nt, Homo sapiens
  misc_RNA (1)...(19): siRNA sense strand
gauguggaauacguucuua

SEQ ID NO: 1102610 - RNA, 19 nt, Homo sapiens
  misc_RNA (1)...(19): siRNA sense strand
gaaguuuccuugagguauc

SEQ ID NO: 1102611 - RNA, 19 nt, Homo sapiens
  misc_RNA (1)...(19): siRNA sense strand
gaauauguggcuuuaggua

SEQ ID NO: 1102612 - RNA, 19 nt, Homo sapiens
  misc_RNA (1)...(19): siRNA sense strand
gcacacaaccauuauuauc

SEQ ID NO: 1102613 - RNA, 19 nt, Homo sapiens
  misc_RNA (1)...(19): siRNA sense strand
gagaacaccaggacaaaug

SEQ ID NO: 1102614 - RNA, 19 nt, Homo sapiens
  misc_RNA (1)...(19): siRNA sense strand
gaaauggggucuacaagau

SEQ ID NO: 1102615 - RNA, 19 nt, Homo sapiens
  misc_RNA (1)...(19): siRNA sense strand
ggauuuagcccaucaccuu

SEQ ID NO: 1102616 - RNA, 19 nt, Homo sapiens
  misc_RNA (1)...(19): siRNA sense strand
gcauugcacugaugaugug

SEQ ID NO: 1102617 - RNA, 19 nt, Homo sapiens
  misc_RNA (1)...(19): siRNA sense strand
gaaacaucacucagacuuu

SEQ ID NO: 1102618 - RNA, 19 nt, Homo sapiens
  misc_RNA (1)...(19): siRNA sense strand
ucgaguagcucaauuccuu

SEQ ID NO: 1102619 - RNA, 19 nt, Homo sapiens
  misc_RNA (1)...(19): siRNA sense strand
augcagaaccuaugaaaua

SEQ ID NO: 1102620 - RNA, 19 nt, Homo sapiens
  misc_RNA (1)...(19): siRNA sense strand
gugaagauguuguuagaag

SEQ ID NO: 1102621 - RNA, 19 nt, Homo sapiens
  misc_RNA (1)...(19): siRNA sense strand
caagugaacguuuaccauu

SEQ ID NO: 1102622 - RNA, 19 nt, Homo sapiens
  misc_RNA (1)...(19): siRNA sense strand
gcacaaauuggauggauuc

SEQ ID NO: 1102623 - RNA, 19 nt, Homo sapiens
  misc_RNA (1)...(19): siRNA sense strand
cauacaaccaccaccauua

SEQ ID NO: 1102624 - RNA, 19 nt, Homo sapiens
  misc_RNA (1)...(19): siRNA sense strand
uaaaggaaaggaagaaaug

SEQ ID NO: 1102625 - RNA, 19 nt, Homo sapiens
  misc_RNA (1)...(19): siRNA sense strand
gaacuggcccuugaacaga

SEQ ID NO: 1102626 - RNA, 19 nt, Homo sapiens
  misc_RNA (1)...(19): siRNA sense strand
uaugagcaguuuccuugua

SEQ ID NO: 1102627 - RNA, 19 nt, Homo sapiens
  misc_RNA (1)...(19): siRNA sense strand
ggugaaagcauaugucugu

SEQ ID NO: 1102628 - RNA, 19 nt, Homo sapiens
  misc_RNA (1)...(19): siRNA sense strand
ugacugagcagaaugaaga

SEQ ID NO: 1102629 - RNA, 19 nt, Homo sapiens
  misc_RNA (1)...(19): siRNA sense strand
caacuuaaaugcagaaccu

SEQ ID NO: 1102630 - RNA, 19 nt, Homo sapiens
  misc_RNA (1)...(19): siRNA sense strand
caacagacugggaagauga

SEQ ID NO: 1102631 - RNA, 19 nt, Homo sapiens
  misc_RNA (1)...(19): siRNA sense strand
aaacccagaugaacccaaa

SEQ ID NO: 1102632 - RNA, 19 nt, Homo sapiens
  misc_RNA (1)...(19): siRNA sense strand
agaggaauauguggcuuua

SEQ ID NO: 1102633 - RNA, 19 nt, Homo sapiens
  misc_RNA (1)...(19): siRNA sense strand
aggcauuacuagagaaaua

SEQ ID NO: 1102634 - RNA, 19 nt, Homo sapiens
  misc_RNA (1)...(19): siRNA sense strand
gcuguaagauuuggacuuc

SEQ ID NO: 1102635 - RNA, 19 nt, Homo sapiens
  misc_RNA (1)...(19): siRNA sense strand
auagaacacuugaagcaaa

SEQ ID NO: 1102636 - RNA, 19 nt, Homo sapiens
  misc_RNA (1)...(19): siRNA sense strand
ggaggauugucucauacuu

SEQ ID NO: 1102637 - RNA, 19 nt, Homo sapiens
  misc_RNA (1)...(19): siRNA sense strand
ggcuuuagguaguuucuuu

SEQ ID NO: 1102638 - RNA, 19 nt, Homo sapiens
  misc_RNA (1)...(19): siRNA sense strand
agacuuuaauggacacuuu

SEQ ID NO: 1102639 - RNA, 19 nt, Homo sapiens
  misc_RNA (1)...(19): siRNA sense strand
agaaggaaauacuugcaaa

SEQ ID NO: 1102640 - RNA, 19 nt, Homo sapiens
  misc_RNA (1)...(19): siRNA sense strand
gcuguauccuggcuauaaa

SEQ ID NO: 1102641 - RNA, 19 nt, Homo sapiens
  misc_RNA (1)...(19): siRNA sense strand
guagcucaauuccuuguga

SEQ ID NO: 1102642 - RNA, 19 nt, Homo sapiens
  misc_RNA (1)...(19): siRNA sense strand
gcaauacgcauguggaaag

SEQ ID NO: 1102643 - RNA, 19 nt, Homo sapiens
  misc_RNA (1)...(19): siRNA sense strand
aagcacacaaccauuauua

SEQ ID NO: 1102644 - RNA, 19 nt, Homo sapiens
  misc_RNA (1)...(19): siRNA sense strand
acacaccauucucugauaa

SEQ ID NO: 1102645 - RNA, 19 nt, Homo sapiens
  misc_RNA (1)...(19): siRNA sense strand
aaaguaagcacgaagaaga

SEQ ID NO: 1102646 - RNA, 19 nt, Homo sapiens
  misc_RNA (1)...(19): siRNA sense strand
ggaagaaaaugaaccacaa

SEQ ID NO: 1102647 - RNA, 19 nt, Homo sapiens
  misc_RNA (1)...(19): siRNA sense strand
gauguuagcagggaugaaa

SEQ ID NO: 1102648 - RNA, 19 nt, Homo sapiens
  misc_RNA (1)...(19): siRNA sense strand
uuccaaggcuuucuguuaa

SEQ ID NO: 1102649 - RNA, 19 nt, Homo sapiens
  misc_RNA (1)...(19): siRNA sense strand
acucagaccuccaaagugu

SEQ ID NO: 1102650 - RNA, 19 nt, Homo sapiens
  misc_RNA (1)...(19): siRNA sense strand
caagagaacaccaggacaa

SEQ ID NO: 1102651 - RNA, 19 nt, Homo sapiens
  misc_RNA (1)...(19): siRNA sense strand
gcaguaaucugaagaagag

SEQ ID NO: 1102652 - RNA, 19 nt, Homo sapiens
  misc_RNA (1)...(19): siRNA sense strand
caacaggucucuggcuauu

SEQ ID NO: 1102653 - RNA, 19 nt, Homo sapiens
  misc_RNA (1)...(19): siRNA sense strand
gaaccuugcucuggaauca

SEQ ID NO: 1102654 - RNA, 19 nt, Homo sapiens
  misc_RNA (1)...(19): siRNA sense strand
gagaagaacucggcuguac

SEQ ID NO: 1102655 - RNA, 19 nt, Homo sapiens
  misc_RNA (1)...(19): siRNA sense strand
gaagaacucggcuguacuu

SEQ ID NO: 1102656 - RNA, 19 nt, Homo sapiens
  misc_RNA (1)...(19): siRNA sense strand
gggaugagcugcugacaac

SEQ ID NO: 1102657 - RNA, 19 nt, Homo sapiens
  misc_RNA (1)...(19): siRNA sense strand
gaaggacugugaccuguac

SEQ ID NO: 1102658 - RNA, 19 nt, Homo sapiens
  misc_RNA (1)...(19): siRNA sense strand
cagaggagcuggccaaggu

SEQ ID NO: 1102659 - RNA, 19 nt, Homo sapiens
  misc_RNA (1)...(19): siRNA sense strand
ggaggugacugagaagaau

SEQ ID NO: 1102660 - RNA, 19 nt, Homo sapiens
  misc_RNA (1)...(19): siRNA sense strand
cagauggacugucguuuua

SEQ ID NO: 1102661 - RNA, 19 nt, Homo sapiens
  misc_RNA (1)...(19): siRNA sense strand
gcucauccguaaccugcua

SEQ ID NO: 1102662 - RNA, 19 nt, Homo sapiens
  misc_RNA (1)...(19): siRNA sense strand
uggaggagauugagaagga

SEQ ID NO: 1102663 - RNA, 19 nt, Homo sapiens
  misc_RNA (1)...(19): siRNA sense strand
uggaagcccuggaguucua

SEQ ID NO: 1102664 - RNA, 19 nt, Homo sapiens
  misc_RNA (1)...(19): siRNA sense strand
ggaggaagccacagacagu

SEQ ID NO: 1102665 - RNA, 19 nt, Homo sapiens
  misc_RNA (1)...(19): siRNA sense strand
gccgagcccuucuacauuc

SEQ ID NO: 1102666 - RNA, 19 nt, Homo sapiens
  misc_RNA (1)...(19): siRNA sense strand
ggacaagggaccagaugga

SEQ ID NO: 1102667 - RNA, 19 nt, Homo sapiens
  misc_RNA (1)...(19): siRNA sense strand
gggcagaggagaaggagaa

SEQ ID NO: 1102668 - RNA, 19 nt, Homo sapiens
  misc_RNA (1)...(19): siRNA sense strand
agaaggagccagacaaugu

SEQ ID NO: 1102669 - RNA, 19 nt, Homo sapiens
  misc_RNA (1)...(19): siRNA sense strand
ugagucggcuggaggaaga

SEQ ID NO: 1102670 - RNA, 19 nt, Homo sapiens
  misc_RNA (1)...(19): siRNA sense strand
ggagaaggagccagacaau

SEQ ID NO: 1102671 - RNA, 19 nt, Homo sapiens
  misc_RNA (1)...(19): siRNA sense strand
gcuccaugauccucgauga

SEQ ID NO: 1102672 - RNA, 19 nt, Homo sapiens
  misc_RNA (1)...(19): siRNA sense strand
ccucagacccuacaguuug

SEQ ID NO: 1102673 - RNA, 19 nt, Homo sapiens
  misc_RNA (1)...(19): siRNA sense strand
cacagagccucaucgagaa

SEQ ID NO: 1102674 - RNA, 19 nt, Homo sapiens
  misc_RNA (1)...(19): siRNA sense strand
gaaggagccagacaaugug

SEQ ID NO: 1102675 - RNA, 19 nt, Homo sapiens
  misc_RNA (1)...(19): siRNA sense strand
ccuagaaguucaggagaaa

SEQ ID NO: 1102676 - RNA, 19 nt, Homo sapiens
  misc_RNA (1)...(19): siRNA sense strand
ggccuggacuuccucaaca

SEQ ID NO: 1102677 - RNA, 19 nt, Homo sapiens
  misc_RNA (1)...(19): siRNA sense strand
ggagaagaacucggcugua

SEQ ID NO: 1102678 - RNA, 19 nt, Homo sapiens
  misc_RNA (1)...(19): siRNA sense strand
cgugaaagcccaagagauc

SEQ ID NO: 1102679 - RNA, 19 nt, Homo sapiens
  misc_RNA (1)...(19): siRNA sense strand
cugagggccugacccaauu

SEQ ID NO: 1102680 - RNA, 19 nt, Homo sapiens
  misc_RNA (1)...(19): siRNA sense strand
gggccugacccaauucuug

SEQ ID NO: 1102681 - RNA, 19 nt, Homo sapiens
  misc_RNA (1)...(19): siRNA sense strand
cagaggagaaggagaagga

SEQ ID NO: 1102682 - RNA, 19 nt, Homo sapiens
  misc_RNA (1)...(19): siRNA sense strand
ggaagccacagacagugaa

SEQ ID NO: 1102683 - RNA, 19 nt, Homo sapiens
  misc_RNA (1)...(19): siRNA sense strand
agaaggagaaggagaagga

SEQ ID NO: 1102684 - RNA, 19 nt, Homo sapiens
  misc_RNA (1)...(19): siRNA sense strand
agaaggagaaggagaagga

SEQ ID NO: 1102685 - RNA, 19 nt, Homo sapiens
  misc_RNA (1)...(19): siRNA sense strand
agaaggagaaggagaagga

SEQ ID NO: 1102686 - RNA, 19 nt, Homo sapiens
  misc_RNA (1)...(19): siRNA sense strand
ggccugacccaauucuuga

SEQ ID NO: 1102687 - RNA, 19 nt, Homo sapiens
  misc_RNA (1)...(19): siRNA sense strand
gagaaggagccagacaaug

SEQ ID NO: 1102688 - RNA, 19 nt, Homo sapiens
  misc_RNA (1)...(19): siRNA sense strand
cccagcagcuccuagaagu

SEQ ID NO: 1102689 - RNA, 19 nt, Homo sapiens
  misc_RNA (1)...(19): siRNA sense strand
gaagccacagacagugaaa

SEQ ID NO: 1102690 - RNA, 19 nt, Homo sapiens
  misc_RNA (1)...(19): siRNA sense strand
gcguguggccuuugggaaa

SEQ ID NO: 1102691 - RNA, 19 nt, Homo sapiens
  misc_RNA (1)...(19): siRNA sense strand
ggaugagaacuacaugauc

SEQ ID NO: 1102692 - RNA, 19 nt, Homo sapiens
  misc_RNA (1)...(19): siRNA sense strand
uagaaguucaggagaaaug

SEQ ID NO: 1102693 - RNA, 19 nt, Homo sapiens
  misc_RNA (1)...(19): siRNA sense strand
gauggaaccaagagagcaa

SEQ ID NO: 1102694 - RNA, 19 nt, Homo sapiens
  misc_RNA (1)...(19): siRNA sense strand
acugugaccuguacaagca

SEQ ID NO: 1102695 - RNA, 19 nt, Homo sapiens
  misc_RNA (1)...(19): siRNA sense strand
gaccagauggacugucguu

SEQ ID NO: 1102696 - RNA, 19 nt, Homo sapiens
  misc_RNA (1)...(19): siRNA sense strand
agaagaauguccgggaagu

SEQ ID NO: 1102697 - RNA, 19 nt, Homo sapiens
  misc_RNA (1)...(19): siRNA sense strand
cagcagcuccuagaaguuc

SEQ ID NO: 1102698 - RNA, 19 nt, Homo sapiens
  misc_RNA (1)...(19): siRNA sense strand
caacuggaggagauugaga

SEQ ID NO: 1102699 - RNA, 19 nt, Homo sapiens
  misc_RNA (1)...(19): siRNA sense strand
uggaagaccugcggcucaa

SEQ ID NO: 1102700 - RNA, 19 nt, Homo sapiens
  misc_RNA (1)...(19): siRNA sense strand
gccugugccuccucccauu

SEQ ID NO: 1102701 - RNA, 19 nt, Homo sapiens
  misc_RNA (1)...(19): siRNA sense strand
ccacuguccuggcccaacu

SEQ ID NO: 1102702 - RNA, 19 nt, Homo sapiens
  misc_RNA (1)...(19): siRNA sense strand
ggauccaguugcaguacuc

SEQ ID NO: 1102703 - RNA, 19 nt, Homo sapiens
  misc_RNA (1)...(19): siRNA sense strand
caagugugcccagcggaaa

SEQ ID NO: 1102704 - RNA, 19 nt, Homo sapiens
  misc_RNA (1)...(19): siRNA sense strand
ucaaggaugagaacuacau

SEQ ID NO: 1102705 - RNA, 19 nt, Homo sapiens
  misc_RNA (1)...(19): siRNA sense strand
gugccgagcccuucuacau

SEQ ID NO: 1102706 - RNA, 19 nt, Homo sapiens
  misc_RNA (1)...(19): siRNA sense strand
cuagaagccugggcaaagg

SEQ ID NO: 1102707 - RNA, 19 nt, Homo sapiens
  misc_RNA (1)...(19): siRNA sense strand
auguggaccuugucucuga

SEQ ID NO: 1102708 - RNA, 19 nt, Homo sapiens
  misc_RNA (1)...(19): siRNA sense strand
gauggacugucguuuuaug

SEQ ID NO: 1102709 - RNA, 19 nt, Homo sapiens
  misc_RNA (1)...(19): siRNA sense strand
caauguggaccuugucucu

SEQ ID NO: 1102710 - RNA, 19 nt, Homo sapiens
  misc_RNA (1)...(19): siRNA sense strand
gaagaauguccgggaaguc

SEQ ID NO: 1102711 - RNA, 19 nt, Homo sapiens
  misc_RNA (1)...(19): siRNA sense strand
acguggaggugacugagaa

SEQ ID NO: 1102712 - RNA, 19 nt, Homo sapiens
  misc_RNA (1)...(19): siRNA sense strand
acaggucucuggcuauucg

SEQ ID NO: 1102713 - RNA, 19 nt, Homo sapiens
  misc_RNA (1)...(19): siRNA sense strand
accaguaccugcaggagau

SEQ ID NO: 1102714 - RNA, 19 nt, Homo sapiens
  misc_RNA (1)...(19): siRNA sense strand
ccaugcccuuugcgugaaa

SEQ ID NO: 1102715 - RNA, 19 nt, Homo sapiens
  misc_RNA (1)...(19): siRNA sense strand
ucaaucggcucuccauccu

SEQ ID NO: 1102716 - RNA, 19 nt, Homo sapiens
  misc_RNA (1)...(19): siRNA sense strand
ucaucgagaaggaccagua

SEQ ID NO: 1102717 - RNA, 19 nt, Homo sapiens
  misc_RNA (1)...(19): siRNA sense strand
ggacugugaccuguacaag

SEQ ID NO: 1102718 - RNA, 19 nt, Homo sapiens
  misc_RNA (1)...(19): siRNA sense strand
ccagauggacugucguuuu

SEQ ID NO: 1102719 - RNA, 19 nt, Homo sapiens
  misc_RNA (1)...(19): siRNA sense strand
gacagcguguggccuuugg

SEQ ID NO: 1102720 - RNA, 19 nt, Homo sapiens
  misc_RNA (1)...(19): siRNA sense strand
agaaggacugugaccugua

SEQ ID NO: 1102721 - RNA, 19 nt, Homo sapiens
  misc_RNA (1)...(19): siRNA sense strand
gccgugaccggauccaguu

SEQ ID NO: 1102722 - RNA, 19 nt, Homo sapiens
  misc_RNA (1)...(19): siRNA sense strand
gaaagcccaagagauccuu

SEQ ID NO: 1102723 - RNA, 19 nt, Homo sapiens
  misc_RNA (1)...(19): siRNA sense strand
gcaggacaagggaccagau

SEQ ID NO: 1102724 - RNA, 19 nt, Homo sapiens
  misc_RNA (1)...(19): siRNA sense strand
ccugagggccugacccaau

SEQ ID NO: 1102725 - RNA, 19 nt, Homo sapiens
  misc_RNA (1)...(19): siRNA sense strand
gcacaaagccugggaaaua

SEQ ID NO: 1102726 - RNA, 19 nt, Homo sapiens
  misc_RNA (1)...(19): siRNA sense strand
gaagacaucugaaaugaau

SEQ ID NO: 1102727 - RNA, 19 nt, Homo sapiens
  misc_RNA (1)...(19): siRNA sense strand
ugaaagagcuugcaagaga

SEQ ID NO: 1102728 - RNA, 19 nt, Homo sapiens
  misc_RNA (1)...(19): siRNA sense strand
gaaggagcaccucgaauua

SEQ ID NO: 1102729 - RNA, 19 nt, Homo sapiens
  misc_RNA (1)...(19): siRNA sense strand
gaaaggcaauaccaagauu

SEQ ID NO: 1102730 - RNA, 19 nt, Homo sapiens
  misc_RNA (1)...(19): siRNA sense strand
ccagggaacuucuugcuuu

SEQ ID NO: 1102731 - RNA, 19 nt, Homo sapiens
  misc_RNA (1)...(19): siRNA sense strand
ccaaacagcuagaggaguu

SEQ ID NO: 1102732 - RNA, 19 nt, Homo sapiens
  misc_RNA (1)...(19): siRNA sense strand
cguagaaacuggaaauuga

SEQ ID NO: 1102733 - RNA, 19 nt, Homo sapiens
  misc_RNA (1)...(19): siRNA sense strand
ugaagaaggugcaucaaug

SEQ ID NO: 1102734 - RNA, 19 nt, Homo sapiens
  misc_RNA (1)...(19): siRNA sense strand
caaacaaugucaaagguau

SEQ ID NO: 1102735 - RNA, 19 nt, Homo sapiens
  misc_RNA (1)...(19): siRNA sense strand
agaaagaggugaugaaugg

SEQ ID NO: 1102736 - RNA, 19 nt, Homo sapiens
  misc_RNA (1)...(19): siRNA sense strand
cagcauaguccaagauaua

SEQ ID NO: 1102737 - RNA, 19 nt, Homo sapiens
  misc_RNA (1)...(19): siRNA sense strand
ugaagaagaugaggcaauu

SEQ ID NO: 1102738 - RNA, 19 nt, Homo sapiens
  misc_RNA (1)...(19): siRNA sense strand
gaauuagucuggcugagau

SEQ ID NO: 1102739 - RNA, 19 nt, Homo sapiens
  misc_RNA (1)...(19): siRNA sense strand
gauacagugugcuuuagaa

SEQ ID NO: 1102740 - RNA, 19 nt, Homo sapiens
  misc_RNA (1)...(19): siRNA sense strand
caagauauccauaguaaca

SEQ ID NO: 1102741 - RNA, 19 nt, Homo sapiens
  misc_RNA (1)...(19): siRNA sense strand
ggauacagaugaugaaagg

SEQ ID NO: 1102742 - RNA, 19 nt, Homo sapiens
  misc_RNA (1)...(19): siRNA sense strand
gaugugguauuaaucaaga

SEQ ID NO: 1102743 - RNA, 19 nt, Homo sapiens
  misc_RNA (1)...(19): siRNA sense strand
gcuuguagaugcaggcuuu

SEQ ID NO: 1102744 - RNA, 19 nt, Homo sapiens
  misc_RNA (1)...(19): siRNA sense strand
ggaaggcugugauucaagu

SEQ ID NO: 1102745 - RNA, 19 nt, Homo sapiens
  misc_RNA (1)...(19): siRNA sense strand
gaguagaagcuaaggauuu

SEQ ID NO: 1102746 - RNA, 19 nt, Homo sapiens
  misc_RNA (1)...(19): siRNA sense strand
gaaguaaaguggacaucag

SEQ ID NO: 1102747 - RNA, 19 nt, Homo sapiens
  misc_RNA (1)...(19): siRNA sense strand
gaaccagauuugugugugu

SEQ ID NO: 1102748 - RNA, 19 nt, Homo sapiens
  misc_RNA (1)...(19): siRNA sense strand
gcaaacaaugucaaaggua

SEQ ID NO: 1102749 - RNA, 19 nt, Homo sapiens
  misc_RNA (1)...(19): siRNA sense strand
ggacaucagccaagguauu

SEQ ID NO: 1102750 - RNA, 19 nt, Homo sapiens
  misc_RNA (1)...(19): siRNA sense strand
cuagaggaguuuauuguga

SEQ ID NO: 1102751 - RNA, 19 nt, Homo sapiens
  misc_RNA (1)...(19): siRNA sense strand
guuccaauaugcaaggaua

SEQ ID NO: 1102752 - RNA, 19 nt, Homo sapiens
  misc_RNA (1)...(19): siRNA sense strand
auacaaagcaucacaaaga

SEQ ID NO: 1102753 - RNA, 19 nt, Homo sapiens
  misc_RNA (1)...(19): siRNA sense strand
ggagucacccuuucaauag

SEQ ID NO: 1102754 - RNA, 19 nt, Homo sapiens
  misc_RNA (1)...(19): siRNA sense strand
cucaagauauccauaguaa

SEQ ID NO: 1102755 - RNA, 19 nt, Homo sapiens
  misc_RNA (1)...(19): siRNA sense strand
cacaaagacugaucucuca

SEQ ID NO: 1102756 - RNA, 19 nt, Homo sapiens
  misc_RNA (1)...(19): siRNA sense strand
ugaaggagcaccucgaauu

SEQ ID NO: 1102757 - RNA, 19 nt, Homo sapiens
  misc_RNA (1)...(19): siRNA sense strand
ugacaccgaugaugaagga

SEQ ID NO: 1102758 - RNA, 19 nt, Homo sapiens
  misc_RNA (1)...(19): siRNA sense strand
gaaacuggaaauugaaaga

SEQ ID NO: 1102759 - RNA, 19 nt, Homo sapiens
  misc_RNA (1)...(19): siRNA sense strand
gaagaugaggcaauucgaa

SEQ ID NO: 1102760 - RNA, 19 nt, Homo sapiens
  misc_RNA (1)...(19): siRNA sense strand
aaacauggauacagaugau

SEQ ID NO: 1102761 - RNA, 19 nt, Homo sapiens
  misc_RNA (1)...(19): siRNA sense strand
gagaaaacauggauacaga

SEQ ID NO: 1102762 - RNA, 19 nt, Homo sapiens
  misc_RNA (1)...(19): siRNA sense strand
gaauggugcuauccuucaa

SEQ ID NO: 1102763 - RNA, 19 nt, Homo sapiens
  misc_RNA (1)...(19): siRNA sense strand
gugcuggaaugauaucaaa

SEQ ID NO: 1102764 - RNA, 19 nt, Homo sapiens
  misc_RNA (1)...(19): siRNA sense strand
guccaaauccugccaauau

SEQ ID NO: 1102765 - RNA, 19 nt, Homo sapiens
  misc_RNA (1)...(19): siRNA sense strand
ggucgaauuucuucagugu

SEQ ID NO: 1102766 - RNA, 19 nt, Homo sapiens
  misc_RNA (1)...(19): siRNA sense strand
gaugaauggugcuauccuu

SEQ ID NO: 1102767 - RNA, 19 nt, Homo sapiens
  misc_RNA (1)...(19): siRNA sense strand
cacaaagccugggaaauau

SEQ ID NO: 1102768 - RNA, 19 nt, Homo sapiens
  misc_RNA (1)...(19): siRNA sense strand
aaacaagucucgauuucgu

SEQ ID NO: 1102769 - RNA, 19 nt, Homo sapiens
  misc_RNA (1)...(19): siRNA sense strand
uggcugagaugcuugaaga

SEQ ID NO: 1102770 - RNA, 19 nt, Homo sapiens
  misc_RNA (1)...(19): siRNA sense strand
gccaagguauuccgaaaca

SEQ ID NO: 1102771 - RNA, 19 nt, Homo sapiens
  misc_RNA (1)...(19): siRNA sense strand
ggccaacuguaacuuaaau

SEQ ID NO: 1102772 - RNA, 19 nt, Homo sapiens
  misc_RNA (1)...(19): siRNA sense strand
guagaugcaggcuuuguuu

SEQ ID NO: 1102773 - RNA, 19 nt, Homo sapiens
  misc_RNA (1)...(19): siRNA sense strand
ugagugugguguuccgaua

SEQ ID NO: 1102774 - RNA, 19 nt, Homo sapiens
  misc_RNA (1)...(19): siRNA sense strand
ucuacuaucuggaacaguu

SEQ ID NO: 1102775 - RNA, 19 nt, Homo sapiens
  misc_RNA (1)...(19): siRNA sense strand
gaaagugacaccgaugaug

SEQ ID NO: 1102776 - RNA, 19 nt, Homo sapiens
  misc_RNA (1)...(19): siRNA sense strand
ccaaauguguggagauugc

SEQ ID NO: 1102777 - RNA, 19 nt, Homo sapiens
  misc_RNA (1)...(19): siRNA sense strand
gcagcauaguccaagauau

SEQ ID NO: 1102778 - RNA, 19 nt, Homo sapiens
  misc_RNA (1)...(19): siRNA sense strand
caaggauaauguugucugu

SEQ ID NO: 1102779 - RNA, 19 nt, Homo sapiens
  misc_RNA (1)...(19): siRNA sense strand
ggagauugccauagaguag

SEQ ID NO: 1102780 - RNA, 19 nt, Homo sapiens
  misc_RNA (1)...(19): siRNA sense strand
cagccaagguauuccgaaa

SEQ ID NO: 1102781 - RNA, 19 nt, Homo sapiens
  misc_RNA (1)...(19): siRNA sense strand
cagauagaguuccagaugu

SEQ ID NO: 1102782 - RNA, 19 nt, Homo sapiens
  misc_RNA (1)...(19): siRNA sense strand
gguguuaggguuugauuug

SEQ ID NO: 1102783 - RNA, 19 nt, Homo sapiens
  misc_RNA (1)...(19): siRNA sense strand
ugcaggugcuggaaugaua

SEQ ID NO: 1102784 - RNA, 19 nt, Homo sapiens
  misc_RNA (1)...(19): siRNA sense strand
cucagaagauggucgaauu

SEQ ID NO: 1102785 - RNA, 19 nt, Homo sapiens
  misc_RNA (1)...(19): siRNA sense strand
aaagugacaccgaugauga

SEQ ID NO: 1102786 - RNA, 19 nt, Homo sapiens
  misc_RNA (1)...(19): siRNA sense strand
aaagacugaucucucaaga

SEQ ID NO: 1102787 - RNA, 19 nt, Homo sapiens
  misc_RNA (1)...(19): siRNA sense strand
gccauagaguagaagcuaa

SEQ ID NO: 1102788 - RNA, 19 nt, Homo sapiens
  misc_RNA (1)...(19): siRNA sense strand
ucagauagaguuccagaug

SEQ ID NO: 1102789 - RNA, 19 nt, Homo sapiens
  misc_RNA (1)...(19): siRNA sense strand
ugaugagcaugucaacaaa

SEQ ID NO: 1102790 - RNA, 19 nt, Homo sapiens
  misc_RNA (1)...(19): siRNA sense strand
caaagccugggaaauauga

SEQ ID NO: 1102791 - RNA, 19 nt, Homo sapiens
  misc_RNA (1)...(19): siRNA sense strand
caaagagauucaugauggu

SEQ ID NO: 1102792 - RNA, 19 nt, Homo sapiens
  misc_RNA (1)...(19): siRNA sense strand
caucagaauacacuucgua

SEQ ID NO: 1102793 - RNA, 19 nt, Homo sapiens
  misc_RNA (1)...(19): siRNA sense strand
gggaacuucuugcuuugug

SEQ ID NO: 1102794 - RNA, 19 nt, Homo sapiens
  misc_RNA (1)...(19): siRNA sense strand
guagaaacuggaaauugaa

SEQ ID NO: 1102795 - RNA, 19 nt, Homo sapiens
  misc_RNA (1)...(19): siRNA sense strand
uggagucacccuuucaaua

SEQ ID NO: 1102796 - RNA, 19 nt, Homo sapiens
  misc_RNA (1)...(19): siRNA sense strand
aauauggaaugcaucagaa

SEQ ID NO: 1102797 - RNA, 19 nt, Homo sapiens
  misc_RNA (1)...(19): siRNA sense strand
guguggagauugccauaga

SEQ ID NO: 1102798 - RNA, 19 nt, Homo sapiens
  misc_RNA (1)...(19): siRNA sense strand
gaugcaggcuuuguuugga

SEQ ID NO: 1102799 - RNA, 19 nt, Homo sapiens
  misc_RNA (1)...(19): siRNA sense strand
cuucauauuucccaagaug

SEQ ID NO: 1102800 - RNA, 19 nt, Homo sapiens
  misc_RNA (1)...(19): siRNA sense strand
cuggaacaguuaauucuga

SEQ ID NO: 1102801 - RNA, 19 nt, Homo sapiens
  misc_RNA (1)...(19): siRNA sense strand
gaugaaggagcaccucgaa

SEQ ID NO: 1102802 - RNA, 19 nt, Homo sapiens
  misc_RNA (1)...(19): siRNA sense strand
ccaacuguaacuuaaauga

SEQ ID NO: 1102803 - RNA, 19 nt, Homo sapiens
  misc_RNA (1)...(19): siRNA sense strand
uagaggaguuuauugugau

SEQ ID NO: 1102804 - RNA, 19 nt, Homo sapiens
  misc_RNA (1)...(19): siRNA sense strand
uaguuuaugucaucccaaa

SEQ ID NO: 1102805 - RNA, 19 nt, Homo sapiens
  misc_RNA (1)...(19): siRNA sense strand
guuguucagucccaaaugu

SEQ ID NO: 1102806 - RNA, 19 nt, Homo sapiens
  misc_RNA (1)...(19): siRNA sense strand
ccagaugugguauuaauca

SEQ ID NO: 1102807 - RNA, 19 nt, Homo sapiens
  misc_RNA (1)...(19): siRNA sense strand
ccaggaacuuggauacagu

SEQ ID NO: 1102808 - RNA, 19 nt, Homo sapiens
  misc_RNA (1)...(19): siRNA sense strand
aaacgucagcgucguagaa

SEQ ID NO: 1102809 - RNA, 19 nt, Homo sapiens
  misc_RNA (1)...(19): siRNA sense strand
agauagaguuccagaugug

SEQ ID NO: 1102810 - RNA, 19 nt, Homo sapiens
  misc_RNA (1)...(19): siRNA sense strand
uccaaauccugccaauauu

SEQ ID NO: 1102811 - RNA, 19 nt, Homo sapiens
  misc_RNA (1)...(19): siRNA sense strand
ggugaugaauggugcuauc

SEQ ID NO: 1102812 - RNA, 19 nt, Homo sapiens
  misc_RNA (1)...(19): siRNA sense strand
cagggaacuucuugcuuug

SEQ ID NO: 1102813 - RNA, 19 nt, Homo sapiens
  misc_RNA (1)...(19): siRNA sense strand
ugaaauauggaaugcauca

SEQ ID NO: 1102814 - RNA, 19 nt, Homo sapiens
  misc_RNA (1)...(19): siRNA sense strand
caacauuuacagagauuca

SEQ ID NO: 1102815 - RNA, 19 nt, Homo sapiens
  misc_RNA (1)...(19): siRNA sense strand
caauaugcaaggauaaugu

SEQ ID NO: 1102816 - RNA, 19 nt, Homo sapiens
  misc_RNA (1)...(19): siRNA sense strand
ucagaagauggucgaauuu

SEQ ID NO: 1102817 - RNA, 19 nt, Homo sapiens
  misc_RNA (1)...(19): siRNA sense strand
uauggaaugcaucagaaua

SEQ ID NO: 1102818 - RNA, 19 nt, Homo sapiens
  misc_RNA (1)...(19): siRNA sense strand
ggauacagugugcuuuaga

SEQ ID NO: 1102819 - RNA, 19 nt, Homo sapiens
  misc_RNA (1)...(19): siRNA sense strand
gcauaguccaagauauaaa

SEQ ID NO: 1102820 - RNA, 19 nt, Homo sapiens
  misc_RNA (1)...(19): siRNA sense strand
ugggaaauaugaaccagau

SEQ ID NO: 1102821 - RNA, 19 nt, Homo sapiens
  misc_RNA (1)...(19): siRNA sense strand
ugugguggauuauguuguu

SEQ ID NO: 1102822 - RNA, 19 nt, Homo sapiens
  misc_RNA (1)...(19): siRNA sense strand
gucaacauuuacagagauu

SEQ ID NO: 1102823 - RNA, 19 nt, Homo sapiens
  misc_RNA (1)...(19): siRNA sense strand
ugagaugcuugaagaccuu

SEQ ID NO: 1102824 - RNA, 19 nt, Homo sapiens
  misc_RNA (1)...(19): siRNA sense strand
ggaaagugacaccgaugau

SEQ ID NO: 1102825 - RNA, 19 nt, Homo sapiens
  misc_RNA (1)...(19): siRNA sense strand
ugaaguaauucgccuguuu

SEQ ID NO: 1102826 - RNA, 19 nt, Homo sapiens
  misc_RNA (1)...(19): siRNA sense strand
cgaaagaugccacucagua

SEQ ID NO: 1102827 - RNA, 19 nt, Homo sapiens
  misc_RNA (1)...(19): siRNA sense strand
gaaagaugccacucaguau

SEQ ID NO: 1102828 - RNA, 19 nt, Homo sapiens
  misc_RNA (1)...(19): siRNA sense strand
caucaugaauggcaucuug

SEQ ID NO: 1102829 - RNA, 19 nt, Homo sapiens
  misc_RNA (1)...(19): siRNA sense strand
aagaugccacucaguauua

SEQ ID NO: 1102830 - RNA, 19 nt, Homo sapiens
  misc_RNA (1)...(19): siRNA sense strand
aaagaugccacucaguauu

SEQ ID NO: 1102831 - RNA, 19 nt, Homo sapiens
  misc_RNA (1)...(19): siRNA sense strand
ugaauggcaucuugcucuu

SEQ ID NO: 1102832 - RNA, 19 nt, Homo sapiens
  misc_RNA (1)...(19): siRNA sense strand
gcaucuugcucuucuucug

SEQ ID NO: 1102833 - RNA, 19 nt, Homo sapiens
  misc_RNA (1)...(19): siRNA sense strand
caugauggccuccuauuac

SEQ ID NO: 1102834 - RNA, 19 nt, Homo sapiens
  misc_RNA (1)...(19): siRNA sense strand
gaaguaauucgccuguuuu

SEQ ID NO: 1102835 - RNA, 19 nt, Homo sapiens
  misc_RNA (1)...(19): siRNA sense strand
ccuccuuuaucuuggaauu

SEQ ID NO: 1102836 - RNA, 19 nt, Homo sapiens
  misc_RNA (1)...(19): siRNA sense strand
gcugcuuucuccaguaugg

SEQ ID NO: 1102837 - RNA, 19 nt, Homo sapiens
  misc_RNA (1)...(19): siRNA sense strand
gcuccuccuuuaucuugga

SEQ ID NO: 1102838 - RNA, 19 nt, Homo sapiens
  misc_RNA (1)...(19): siRNA sense strand
ccuggaagccaucaugaau

SEQ ID NO: 1102839 - RNA, 19 nt, Homo sapiens
  misc_RNA (1)...(19): siRNA sense strand
uccuuuaucuuggaauuga

SEQ ID NO: 1102840 - RNA, 19 nt, Homo sapiens
  misc_RNA (1)...(19): siRNA sense strand
gugcucaccuuggcugcuu

SEQ ID NO: 1102841 - RNA, 19 nt, Homo sapiens
  misc_RNA (1)...(19): siRNA sense strand
gccuugaccuucccaucug

SEQ ID NO: 1102842 - RNA, 19 nt, Homo sapiens
  misc_RNA (1)...(19): siRNA sense strand
uggcugcuuucuccaguau

SEQ ID NO: 1102843 - RNA, 19 nt, Homo sapiens
  misc_RNA (1)...(19): siRNA sense strand
cagcgaaagaugccacuca

SEQ ID NO: 1102844 - RNA, 19 nt, Homo sapiens
  misc_RNA (1)...(19): siRNA sense strand
ccaguauggacacgauuug

SEQ ID NO: 1102845 - RNA, 19 nt, Homo sapiens
  misc_RNA (1)...(19): siRNA sense strand
cuacguacuccgccuggaa

SEQ ID NO: 1102846 - RNA, 19 nt, Homo sapiens
  misc_RNA (1)...(19): siRNA sense strand
aauggcaucuugcucuucu

SEQ ID NO: 1102847 - RNA, 19 nt, Homo sapiens
  misc_RNA (1)...(19): siRNA sense strand
gcacaacucgucgcucuuc

SEQ ID NO: 1102848 - RNA, 19 nt, Homo sapiens
  misc_RNA (1)...(19): siRNA sense strand
acaacaaaguggcuucagu

SEQ ID NO: 1102849 - RNA, 19 nt, Homo sapiens
  misc_RNA (1)...(19): siRNA sense strand
ggacaacaaaguggcuuca

SEQ ID NO: 1102850 - RNA, 19 nt, Homo sapiens
  misc_RNA (1)...(19): siRNA sense strand
gggccgaggacaacaaagu

SEQ ID NO: 1102851 - RNA, 19 nt, Homo sapiens
  misc_RNA (1)...(19): siRNA sense strand
gcucacaggugcuggaguu

SEQ ID NO: 1102852 - RNA, 19 nt, Homo sapiens
  misc_RNA (1)...(19): siRNA sense strand
gcacaacucgucgcucuuc

SEQ ID NO: 1102853 - RNA, 19 nt, Homo sapiens
  misc_RNA (1)...(19): siRNA sense strand
acaacaaaguggcuucagu

SEQ ID NO: 1102854 - RNA, 19 nt, Homo sapiens
  misc_RNA (1)...(19): siRNA sense strand
cacaggugcuggaguugga

SEQ ID NO: 1102855 - RNA, 19 nt, Homo sapiens
  misc_RNA (1)...(19): siRNA sense strand
ggacaacaaaguggcuuca

SEQ ID NO: 1102856 - RNA, 19 nt, Homo sapiens
  misc_RNA (1)...(19): siRNA sense strand
gggccgaggacaacaaagu

SEQ ID NO: 1102857 - RNA, 19 nt, Homo sapiens
  misc_RNA (1)...(19): siRNA sense strand
gaagaaaggccaaggauau

SEQ ID NO: 1102858 - RNA, 19 nt, Homo sapiens
  misc_RNA (1)...(19): siRNA sense strand
gaaaucagucagcgcauua

SEQ ID NO: 1102859 - RNA, 19 nt, Homo sapiens
  misc_RNA (1)...(19): siRNA sense strand
ggaagaaaggccaaggaua

SEQ ID NO: 1102860 - RNA, 19 nt, Homo sapiens
  misc_RNA (1)...(19): siRNA sense strand
ccaaggauauuauaaaugc

SEQ ID NO: 1102861 - RNA, 19 nt, Homo sapiens
  misc_RNA (1)...(19): siRNA sense strand
ggggaaaccucaagauaua

SEQ ID NO: 1102862 - RNA, 19 nt, Homo sapiens
  misc_RNA (1)...(19): siRNA sense strand
gaagagaauccaucugaau

SEQ ID NO: 1102863 - RNA, 19 nt, Homo sapiens
  misc_RNA (1)...(19): siRNA sense strand
gggaaagccucgcgaagau

SEQ ID NO: 1102864 - RNA, 19 nt, Homo sapiens
  misc_RNA (1)...(19): siRNA sense strand
ggccaaggauauuauaaau

SEQ ID NO: 1102865 - RNA, 19 nt, Homo sapiens
  misc_RNA (1)...(19): siRNA sense strand
ggacaagaacggaauuuca

SEQ ID NO: 1102866 - RNA, 19 nt, Homo sapiens
  misc_RNA (1)...(19): siRNA sense strand
gaaaggccaaggauauuau

SEQ ID NO: 1102867 - RNA, 19 nt, Homo sapiens
  misc_RNA (1)...(19): siRNA sense strand
gaaagccucgcgaagauga

SEQ ID NO: 1102868 - RNA, 19 nt, Homo sapiens
  misc_RNA (1)...(19): siRNA sense strand
gaaguuauccaggccauga

SEQ ID NO: 1102869 - RNA, 19 nt, Homo sapiens
  misc_RNA (1)...(19): siRNA sense strand
gauuggcgcacuuuauaua

SEQ ID NO: 1102870 - RNA, 19 nt, Homo sapiens
  misc_RNA (1)...(19): siRNA sense strand
ggaagcagcgcguggaugu

SEQ ID NO: 1102871 - RNA, 19 nt, Homo sapiens
  misc_RNA (1)...(19): siRNA sense strand
ggcacugagucaaauaauu

SEQ ID NO: 1102872 - RNA, 19 nt, Homo sapiens
  misc_RNA (1)...(19): siRNA sense strand
aagagaauccaucugaaua

SEQ ID NO: 1102873 - RNA, 19 nt, Homo sapiens
  misc_RNA (1)...(19): siRNA sense strand
agacagagguggacgacau

SEQ ID NO: 1102874 - RNA, 19 nt, Homo sapiens
  misc_RNA (1)...(19): siRNA sense strand
ggagaggaaaguuuauaug

SEQ ID NO: 1102875 - RNA, 19 nt, Homo sapiens
  misc_RNA (1)...(19): siRNA sense strand
ugaauucggucagaagaga

SEQ ID NO: 1102876 - RNA, 19 nt, Homo sapiens
  misc_RNA (1)...(19): siRNA sense strand
agaggaaaguuuauaugga

SEQ ID NO: 1102877 - RNA, 19 nt, Homo sapiens
  misc_RNA (1)...(19): siRNA sense strand
acgaggacuuggugaauuu

SEQ ID NO: 1102878 - RNA, 19 nt, Homo sapiens
  misc_RNA (1)...(19): siRNA sense strand
gagaggaaaguuuauaugg

SEQ ID NO: 1102879 - RNA, 19 nt, Homo sapiens
  misc_RNA (1)...(19): siRNA sense strand
agaaaggccaaggauauua

SEQ ID NO: 1102880 - RNA, 19 nt, Homo sapiens
  misc_RNA (1)...(19): siRNA sense strand
ugaaaucagucagcgcauu

SEQ ID NO: 1102881 - RNA, 19 nt, Homo sapiens
  misc_RNA (1)...(19): siRNA sense strand
ggaaaccucaagauauaau

SEQ ID NO: 1102882 - RNA, 19 nt, Homo sapiens
  misc_RNA (1)...(19): siRNA sense strand
ggcguggacuuccuuacaa

SEQ ID NO: 1102883 - RNA, 19 nt, Homo sapiens
  misc_RNA (1)...(19): siRNA sense strand
agaagagaauccaucugaa

SEQ ID NO: 1102884 - RNA, 19 nt, Homo sapiens
  misc_RNA (1)...(19): siRNA sense strand
ggaaaguuuauauggacua

SEQ ID NO: 1102885 - RNA, 19 nt, Homo sapiens
  misc_RNA (1)...(19): siRNA sense strand
ucucuacccuaugcuauuu

SEQ ID NO: 1102886 - RNA, 19 nt, Homo sapiens
  misc_RNA (1)...(19): siRNA sense strand
ugucaugccugucccugaa

SEQ ID NO: 1102887 - RNA, 19 nt, Homo sapiens
  misc_RNA (1)...(19): siRNA sense strand
gaacugcgaggcuuaugag

SEQ ID NO: 1102888 - RNA, 19 nt, Homo sapiens
  misc_RNA (1)...(19): siRNA sense strand
cccaauaccuguaacuuuu

SEQ ID NO: 1102889 - RNA, 19 nt, Homo sapiens
  misc_RNA (1)...(19): siRNA sense strand
uggcagcggucaccuuugu

SEQ ID NO: 1102890 - RNA, 19 nt, Homo sapiens
  misc_RNA (1)...(19): siRNA sense strand
aggauuggcgcacuuuaua

SEQ ID NO: 1102891 - RNA, 19 nt, Homo sapiens
  misc_RNA (1)...(19): siRNA sense strand
ggauuggcgcacuuuauau

SEQ ID NO: 1102892 - RNA, 19 nt, Homo sapiens
  misc_RNA (1)...(19): siRNA sense strand
gggaaaccucaagauauaa

SEQ ID NO: 1102893 - RNA, 19 nt, Homo sapiens
  misc_RNA (1)...(19): siRNA sense strand
uacgaggacuuggugaauu

SEQ ID NO: 1102894 - RNA, 19 nt, Homo sapiens
  misc_RNA (1)...(19): siRNA sense strand
cgccggagaggaaaguuua

SEQ ID NO: 1102895 - RNA, 19 nt, Homo sapiens
  misc_RNA (1)...(19): siRNA sense strand
ccaucugaauagccaguuu

SEQ ID NO: 1102896 - RNA, 19 nt, Homo sapiens
  misc_RNA (1)...(19): siRNA sense strand
gagaauccaucugaauagc

SEQ ID NO: 1102897 - RNA, 19 nt, Homo sapiens
  misc_RNA (1)...(19): siRNA sense strand
auucuguggugaaacauuu

SEQ ID NO: 1102898 - RNA, 19 nt, Homo sapiens
  misc_RNA (1)...(19): siRNA sense strand
ccaucaugcuggccaacaa

SEQ ID NO: 1102899 - RNA, 19 nt, Homo sapiens
  misc_RNA (1)...(19): siRNA sense strand
acgcaaaccagaccucaaa

SEQ ID NO: 1102900 - RNA, 19 nt, Homo sapiens
  misc_RNA (1)...(19): siRNA sense strand
gcguggacuuccuuacaau

SEQ ID NO: 1102901 - RNA, 19 nt, Homo sapiens
  misc_RNA (1)...(19): siRNA sense strand
ugagggacguccgcgacua

SEQ ID NO: 1102902 - RNA, 19 nt, Homo sapiens
  misc_RNA (1)...(19): siRNA sense strand
gacaagaacggaauuucag

SEQ ID NO: 1102903 - RNA, 19 nt, Homo sapiens
  misc_RNA (1)...(19): siRNA sense strand
ggaaagccucgcgaagaug

SEQ ID NO: 1102904 - RNA, 19 nt, Homo sapiens
  misc_RNA (1)...(19): siRNA sense strand
aaaggccaaggauauuaua

SEQ ID NO: 1102905 - RNA, 19 nt, Homo sapiens
  misc_RNA (1)...(19): siRNA sense strand
acaacucgccggagaggaa

SEQ ID NO: 1102906 - RNA, 19 nt, Homo sapiens
  misc_RNA (1)...(19): siRNA sense strand
gcauuaaagcccugaacca

SEQ ID NO: 1102907 - RNA, 19 nt, Homo sapiens
  misc_RNA (1)...(19): siRNA sense strand
aagaaaggccaaggauauu

SEQ ID NO: 1102908 - RNA, 19 nt, Homo sapiens
  misc_RNA (1)...(19): siRNA sense strand
gccaaggauauuauaaaug

SEQ ID NO: 1102909 - RNA, 19 nt, Homo sapiens
  misc_RNA (1)...(19): siRNA sense strand
gcaaaccagaccucaaagg

SEQ ID NO: 1102910 - RNA, 19 nt, Homo sapiens
  misc_RNA (1)...(19): siRNA sense strand
ucccaauaccuguaacuuu

SEQ ID NO: 1102911 - RNA, 19 nt, Homo sapiens
  misc_RNA (1)...(19): siRNA sense strand
gggcguggacuuccuuaca

SEQ ID NO: 1102912 - RNA, 19 nt, Homo sapiens
  misc_RNA (1)...(19): siRNA sense strand
guauucagcaggaagaaag

SEQ ID NO: 1102913 - RNA, 19 nt, Homo sapiens
  misc_RNA (1)...(19): siRNA sense strand
gaggcuggaagcugaauuc

SEQ ID NO: 1102914 - RNA, 19 nt, Homo sapiens
  misc_RNA (1)...(19): siRNA sense strand
ggacagagaacaccccaau

SEQ ID NO: 1102915 - RNA, 19 nt, Homo sapiens
  misc_RNA (1)...(19): siRNA sense strand
gccaagccccauuucauua

SEQ ID NO: 1102916 - RNA, 19 nt, Homo sapiens
  misc_RNA (1)...(19): siRNA sense strand
cgggaaagccucgcgaaga

SEQ ID NO: 1102917 - RNA, 19 nt, Homo sapiens
  misc_RNA (1)...(19): siRNA sense strand
gaaaccucaagauauaauc

SEQ ID NO: 1102918 - RNA, 19 nt, Homo sapiens
  misc_RNA (1)...(19): siRNA sense strand
caggauuggcgcacuuuau

SEQ ID NO: 1102919 - RNA, 19 nt, Homo sapiens
  misc_RNA (1)...(19): siRNA sense strand
gaauucggucagaagagaa

SEQ ID NO: 1102920 - RNA, 19 nt, Homo sapiens
  misc_RNA (1)...(19): siRNA sense strand
auuuggagguggacaagaa

SEQ ID NO: 1102921 - RNA, 19 nt, Homo sapiens
  misc_RNA (1)...(19): siRNA sense strand
cccagcggcuucccaauac

SEQ ID NO: 1102922 - RNA, 19 nt, Homo sapiens
  misc_RNA (1)...(19): siRNA sense strand
ccggagaggaaaguuuaua

SEQ ID NO: 1102923 - RNA, 19 nt, Homo sapiens
  misc_RNA (1)...(19): siRNA sense strand
acccagcggcuucccaaua

SEQ ID NO: 1102924 - RNA, 19 nt, Homo sapiens
  misc_RNA (1)...(19): siRNA sense strand
cggagaggaaaguuuauau

SEQ ID NO: 1102925 - RNA, 19 nt, Homo sapiens
  misc_RNA (1)...(19): siRNA sense strand
cgaggacuuggugaauuua

SEQ ID NO: 1102926 - RNA, 19 nt, Homo sapiens
  misc_RNA (1)...(19): siRNA sense strand
gcaccacagcccagugaag

SEQ ID NO: 1102927 - RNA, 19 nt, Homo sapiens
  misc_RNA (1)...(19): siRNA sense strand
agagaauccaucugaauag

SEQ ID NO: 1102928 - RNA, 19 nt, Homo sapiens
  misc_RNA (1)...(19): siRNA sense strand
ccaggauuggcgcacuuua

SEQ ID NO: 1102929 - RNA, 19 nt, Homo sapiens
  misc_RNA (1)...(19): siRNA sense strand
uccauucuguggugaaaca

SEQ ID NO: 1102930 - RNA, 19 nt, Homo sapiens
  misc_RNA (1)...(19): siRNA sense strand
aauccauucuguggugaaa

SEQ ID NO: 1102931 - RNA, 19 nt, Homo sapiens
  misc_RNA (1)...(19): siRNA sense strand
gagugcugauggccagugu

SEQ ID NO: 1102932 - RNA, 19 nt, Homo sapiens
  misc_RNA (1)...(19): siRNA sense strand
gcuuaugaggcccacauga

SEQ ID NO: 1102933 - RNA, 19 nt, Homo sapiens
  misc_RNA (1)...(19): siRNA sense strand
aggccaaggauauuauaaa

SEQ ID NO: 1102934 - RNA, 19 nt, Homo sapiens
  misc_RNA (1)...(19): siRNA sense strand
acagagaacaccccaauga

SEQ ID NO: 1102935 - RNA, 19 nt, Homo sapiens
  misc_RNA (1)...(19): siRNA sense strand
gauuggagcaugcauaaua

SEQ ID NO: 1102936 - RNA, 19 nt, Homo sapiens
  misc_RNA (1)...(19): siRNA sense strand
gagcaugcauaauaucuug

SEQ ID NO: 1102937 - RNA, 19 nt, Homo sapiens
  misc_RNA (1)...(19): siRNA sense strand
gcagagugccuaaaccaua

SEQ ID NO: 1102938 - RNA, 19 nt, Homo sapiens
  misc_RNA (1)...(19): siRNA sense strand
gaaaagaucccuacccuaa

SEQ ID NO: 1102939 - RNA, 19 nt, Homo sapiens
  misc_RNA (1)...(19): siRNA sense strand
ugacgggauuccugucuua

SEQ ID NO: 1102940 - RNA, 19 nt, Homo sapiens
  misc_RNA (1)...(19): siRNA sense strand
cagagugccuaaaccauaa

SEQ ID NO: 1102941 - RNA, 19 nt, Homo sapiens
  misc_RNA (1)...(19): siRNA sense strand
guuguugguuggacuguua

SEQ ID NO: 1102942 - RNA, 19 nt, Homo sapiens
  misc_RNA (1)...(19): siRNA sense strand
ggaguuggacauugaguuu

SEQ ID NO: 1102943 - RNA, 19 nt, Homo sapiens
  misc_RNA (1)...(19): siRNA sense strand
caucuugguuccagcuaua

SEQ ID NO: 1102944 - RNA, 19 nt, Homo sapiens
  misc_RNA (1)...(19): siRNA sense strand
gggaaaccacgcuaugaua

SEQ ID NO: 1102945 - RNA, 19 nt, Homo sapiens
  misc_RNA (1)...(19): siRNA sense strand
acaaacagaucgggaugua

SEQ ID NO: 1102946 - RNA, 19 nt, Homo sapiens
  misc_RNA (1)...(19): siRNA sense strand
ggacugggcgauuguguga

SEQ ID NO: 1102947 - RNA, 19 nt, Homo sapiens
  misc_RNA (1)...(19): siRNA sense strand
gaaaagaguuacuacgaau

SEQ ID NO: 1102948 - RNA, 19 nt, Homo sapiens
  misc_RNA (1)...(19): siRNA sense strand
cuacugaggcucuaaagaa

SEQ ID NO: 1102949 - RNA, 19 nt, Homo sapiens
  misc_RNA (1)...(19): siRNA sense strand
gaaguggucagcuaaagga

SEQ ID NO: 1102950 - RNA, 19 nt, Homo sapiens
  misc_RNA (1)...(19): siRNA sense strand
gaagaaguggucagcuaaa

SEQ ID NO: 1102951 - RNA, 19 nt, Homo sapiens
  misc_RNA (1)...(19): siRNA sense strand
acauugaguuuacuucuga

SEQ ID NO: 1102952 - RNA, 19 nt, Homo sapiens
  misc_RNA (1)...(19): siRNA sense strand
guagauaggacgacugaug

SEQ ID NO: 1102953 - RNA, 19 nt, Homo sapiens
  misc_RNA (1)...(19): siRNA sense strand
guaccuguguggaauuuca

SEQ ID NO: 1102954 - RNA, 19 nt, Homo sapiens
  misc_RNA (1)...(19): siRNA sense strand
ugcauaauaucuuguggua

SEQ ID NO: 1102955 - RNA, 19 nt, Homo sapiens
  misc_RNA (1)...(19): siRNA sense strand
gcuaugauacuuucuggaa

SEQ ID NO: 1102956 - RNA, 19 nt, Homo sapiens
  misc_RNA (1)...(19): siRNA sense strand
caaaggccaugcacacaag

SEQ ID NO: 1102957 - RNA, 19 nt, Homo sapiens
  misc_RNA (1)...(19): siRNA sense strand
gcaggcagcuaagaaugga

SEQ ID NO: 1102958 - RNA, 19 nt, Homo sapiens
  misc_RNA (1)...(19): siRNA sense strand
gcguggaguuggacauuga

SEQ ID NO: 1102959 - RNA, 19 nt, Homo sapiens
  misc_RNA (1)...(19): siRNA sense strand
gcgauugugugauuugaca

SEQ ID NO: 1102960 - RNA, 19 nt, Homo sapiens
  misc_RNA (1)...(19): siRNA sense strand
aaacagaucgggauguaau

SEQ ID NO: 1102961 - RNA, 19 nt, Homo sapiens
  misc_RNA (1)...(19): siRNA sense strand
cuaaaggaauccagguugu

SEQ ID NO: 1102962 - RNA, 19 nt, Homo sapiens
  misc_RNA (1)...(19): siRNA sense strand
ugccagaaguuaucuacaa

SEQ ID NO: 1102963 - RNA, 19 nt, Homo sapiens
  misc_RNA (1)...(19): siRNA sense strand
uugaagaaguggucagcua

SEQ ID NO: 1102964 - RNA, 19 nt, Homo sapiens
  misc_RNA (1)...(19): siRNA sense strand
caaauuaggaagcugaauc

SEQ ID NO: 1102965 - RNA, 19 nt, Homo sapiens
  misc_RNA (1)...(19): siRNA sense strand
ggacuguuaauaccuuuga

SEQ ID NO: 1102966 - RNA, 19 nt, Homo sapiens
  misc_RNA (1)...(19): siRNA sense strand
uacugaggcucuaaagaaa

SEQ ID NO: 1102967 - RNA, 19 nt, Homo sapiens
  misc_RNA (1)...(19): siRNA sense strand
gacauugaguuuacuucug

SEQ ID NO: 1102968 - RNA, 19 nt, Homo sapiens
  misc_RNA (1)...(19): siRNA sense strand
ugaagaaguggucagcuaa

SEQ ID NO: 1102969 - RNA, 19 nt, Homo sapiens
  misc_RNA (1)...(19): siRNA sense strand
ggaaaccacgcuaugauac

SEQ ID NO: 1102970 - RNA, 19 nt, Homo sapiens
  misc_RNA (1)...(19): siRNA sense strand
cgggauuccugucuuaaug

SEQ ID NO: 1102971 - RNA, 19 nt, Homo sapiens
  misc_RNA (1)...(19): siRNA sense strand
aaagaucccuacccuaagg

SEQ ID NO: 1102972 - RNA, 19 nt, Homo sapiens
  misc_RNA (1)...(19): siRNA sense strand
cugcgaaccucacuucuag

SEQ ID NO: 1102973 - RNA, 19 nt, Homo sapiens
  misc_RNA (1)...(19): siRNA sense strand
aaaccacgcuaugauacuu

SEQ ID NO: 1102974 - RNA, 19 nt, Homo sapiens
  misc_RNA (1)...(19): siRNA sense strand
gaauuuccucaacuguaua

SEQ ID NO: 1102975 - RNA, 19 nt, Homo sapiens
  misc_RNA (1)...(19): siRNA sense strand
ucacaaucuucuuugaugu

SEQ ID NO: 1102976 - RNA, 19 nt, Homo sapiens
  misc_RNA (1)...(19): siRNA sense strand
uaaccucacaaucuucuuu

SEQ ID NO: 1102977 - RNA, 19 nt, Homo sapiens
  misc_RNA (1)...(19): siRNA sense strand
gcagcaaaccacagacuca

SEQ ID NO: 1102978 - RNA, 19 nt, Homo sapiens
  misc_RNA (1)...(19): siRNA sense strand
aauuucagcuuuccucaug

SEQ ID NO: 1102979 - RNA, 19 nt, Homo sapiens
  misc_RNA (1)...(19): siRNA sense strand
ugugugauuugacauuuga

SEQ ID NO: 1102980 - RNA, 19 nt, Homo sapiens
  misc_RNA (1)...(19): siRNA sense strand
ccuuggagccuaagccaua

SEQ ID NO: 1102981 - RNA, 19 nt, Homo sapiens
  misc_RNA (1)...(19): siRNA sense strand
cacgauaacacaguagaua

SEQ ID NO: 1102982 - RNA, 19 nt, Homo sapiens
  misc_RNA (1)...(19): siRNA sense strand
auaauaguguggucuguuc

SEQ ID NO: 1102983 - RNA, 19 nt, Homo sapiens
  misc_RNA (1)...(19): siRNA sense strand
gggauguaauaacagcauu

SEQ ID NO: 1102984 - RNA, 19 nt, Homo sapiens
  misc_RNA (1)...(19): siRNA sense strand
ugaaaagaguuacuacgaa

SEQ ID NO: 1102985 - RNA, 19 nt, Homo sapiens
  misc_RNA (1)...(19): siRNA sense strand
guggucagcuaaaggaauc

SEQ ID NO: 1102986 - RNA, 19 nt, Homo sapiens
  misc_RNA (1)...(19): siRNA sense strand
gccagaaguuaucuacaag

SEQ ID NO: 1102987 - RNA, 19 nt, Homo sapiens
  misc_RNA (1)...(19): siRNA sense strand
gagcaacaggcguggaguu

SEQ ID NO: 1102988 - RNA, 19 nt, Homo sapiens
  misc_RNA (1)...(19): siRNA sense strand
uguguggaauuucagcuuu

SEQ ID NO: 1102989 - RNA, 19 nt, Homo sapiens
  misc_RNA (1)...(19): siRNA sense strand
ggacauugaguuuacuucu

SEQ ID NO: 1102990 - RNA, 19 nt, Homo sapiens
  misc_RNA (1)...(19): siRNA sense strand
gauaacacaguagauagga

SEQ ID NO: 1102991 - RNA, 19 nt, Homo sapiens
  misc_RNA (1)...(19): siRNA sense strand
gaguuggacauugaguuua

SEQ ID NO: 1102992 - RNA, 19 nt, Homo sapiens
  misc_RNA (1)...(19): siRNA sense strand
gggcgauugugugauuuga

SEQ ID NO: 1102993 - RNA, 19 nt, Homo sapiens
  misc_RNA (1)...(19): siRNA sense strand
gaugggaaaccacgcuaug

SEQ ID NO: 1102994 - RNA, 19 nt, Homo sapiens
  misc_RNA (1)...(19): siRNA sense strand
ucaaaggccaugcacacaa

SEQ ID NO: 1102995 - RNA, 19 nt, Homo sapiens
  misc_RNA (1)...(19): siRNA sense strand
cucacaaucuucuuugaug

SEQ ID NO: 1102996 - RNA, 19 nt, Homo sapiens
  misc_RNA (1)...(19): siRNA sense strand
accauaaccucacaaucuu

SEQ ID NO: 1102997 - RNA, 19 nt, Homo sapiens
  misc_RNA (1)...(19): siRNA sense strand
aaccauaaccucacaaucu

SEQ ID NO: 1102998 - RNA, 19 nt, Homo sapiens
  misc_RNA (1)...(19): siRNA sense strand
guuggacuguuaauaccuu

SEQ ID NO: 1102999 - RNA, 19 nt, Homo sapiens
  misc_RNA (1)...(19): siRNA sense strand
gaaaccacgcuaugauacu

SEQ ID NO: 1103000 - RNA, 19 nt, Homo sapiens
  misc_RNA (1)...(19): siRNA sense strand
uguggucuguucuuucuug

SEQ ID NO: 1103001 - RNA, 19 nt, Homo sapiens
  misc_RNA (1)...(19): siRNA sense strand
acugggcgauugugugauu

SEQ ID NO: 1103002 - RNA, 19 nt, Homo sapiens
  misc_RNA (1)...(19): siRNA sense strand
cacagaccuuggagccuaa

SEQ ID NO: 1103003 - RNA, 19 nt, Homo sapiens
  misc_RNA (1)...(19): siRNA sense strand
caagaugagacaaacagau

SEQ ID NO: 1103004 - RNA, 19 nt, Homo sapiens
  misc_RNA (1)...(19): siRNA sense strand
aaugcacgauaacacagua

SEQ ID NO: 1103005 - RNA, 19 nt, Homo sapiens
  misc_RNA (1)...(19): siRNA sense strand
aaaggaauccagguuguug

SEQ ID NO: 1103006 - RNA, 19 nt, Homo sapiens
  misc_RNA (1)...(19): siRNA sense strand
ggagcaugcauaauaucuu

SEQ ID NO: 1103007 - RNA, 19 nt, Homo sapiens
  misc_RNA (1)...(19): siRNA sense strand
ggauuccugucuuaaugca

SEQ ID NO: 1103008 - RNA, 19 nt, Homo sapiens
  misc_RNA (1)...(19): siRNA sense strand
ccuaaaccauaaccucaca

SEQ ID NO: 1103009 - RNA, 19 nt, Homo sapiens
  misc_RNA (1)...(19): siRNA sense strand
gauugugugauuugacauu

SEQ ID NO: 1103010 - RNA, 19 nt, Homo sapiens
  misc_RNA (1)...(19): siRNA sense strand
cuacgaaucccaucuuggu

SEQ ID NO: 1103011 - RNA, 19 nt, Homo sapiens
  misc_RNA (1)...(19): siRNA sense strand
uaaaggaauccagguuguu

SEQ ID NO: 1103012 - RNA, 19 nt, Homo sapiens
  misc_RNA (1)...(19): siRNA sense strand
ucgauuggagcaugcauaa

SEQ ID NO: 1103013 - RNA, 19 nt, Homo sapiens
  misc_RNA (1)...(19): siRNA sense strand
ugaugggacugggcgauug

SEQ ID NO: 1103014 - RNA, 19 nt, Homo sapiens
  misc_RNA (1)...(19): siRNA sense strand
gcacgauaacacaguagau

SEQ ID NO: 1103015 - RNA, 19 nt, Homo sapiens
  misc_RNA (1)...(19): siRNA sense strand
caaacagaucgggauguaa

SEQ ID NO: 1103016 - RNA, 19 nt, Homo sapiens
  misc_RNA (1)...(19): siRNA sense strand
cacagacucaggaaugauu

SEQ ID NO: 1103017 - RNA, 19 nt, Homo sapiens
  misc_RNA (1)...(19): siRNA sense strand
agaucgggauguaauaaca

SEQ ID NO: 1103018 - RNA, 19 nt, Homo sapiens
  misc_RNA (1)...(19): siRNA sense strand
gaaugauuucccugaugaa

SEQ ID NO: 1103019 - RNA, 19 nt, Homo sapiens
  misc_RNA (1)...(19): siRNA sense strand
acagaucgggauguaauaa

SEQ ID NO: 1103020 - RNA, 19 nt, Homo sapiens
  misc_RNA (1)...(19): siRNA sense strand
uaauaauaguguggucugu

SEQ ID NO: 1103021 - RNA, 19 nt, Homo sapiens
  misc_RNA (1)...(19): siRNA sense strand
acaaucuucuuugauguca

SEQ ID NO: 1103022 - RNA, 19 nt, Homo sapiens
  misc_RNA (1)...(19): siRNA sense strand
ucacugacagcaugguaga

SEQ ID NO: 1103023 - RNA, 19 nt, Homo sapiens
  misc_RNA (1)...(19): siRNA sense strand
ccuaagccauacaggagau

SEQ ID NO: 1103024 - RNA, 19 nt, Homo sapiens
  misc_RNA (1)...(19): siRNA sense strand
ccagaaguuaucuacaaga

SEQ ID NO: 1103025 - RNA, 19 nt, Homo sapiens
  misc_RNA (1)...(19): siRNA sense strand
auaguguggucuguucuuu

SEQ ID NO: 1103026 - RNA, 19 nt, Homo sapiens
  misc_RNA (1)...(19): siRNA sense strand
caaggcuacugaggcucua

SEQ ID NO: 1103027 - RNA, 19 nt, Homo sapiens
  misc_RNA (1)...(19): siRNA sense strand
cagcuuuccucaugcaaaa

SEQ ID NO: 1103028 - RNA, 19 nt, Homo sapiens
  misc_RNA (1)...(19): siRNA sense strand
uaaaccauaaccucacaau

SEQ ID NO: 1103029 - RNA, 19 nt, Homo sapiens
  misc_RNA (1)...(19): siRNA sense strand
gguagaagacugcgaaccu

SEQ ID NO: 1103030 - RNA, 19 nt, Homo sapiens
  misc_RNA (1)...(19): siRNA sense strand
gaauuucagcuuuccucau

SEQ ID NO: 1103031 - RNA, 19 nt, Homo sapiens
  misc_RNA (1)...(19): siRNA sense strand
gcaugcauaauaucuugug

SEQ ID NO: 1103032 - RNA, 19 nt, Homo sapiens
  misc_RNA (1)...(19): siRNA sense strand
auuggagcaugcauaauau

SEQ ID NO: 1103033 - RNA, 19 nt, Homo sapiens
  misc_RNA (1)...(19): siRNA sense strand
guuuacuucugacgggauu

SEQ ID NO: 1103034 - RNA, 19 nt, Homo sapiens
  misc_RNA (1)...(19): siRNA sense strand
aagaaguggucagcuaaag

SEQ ID NO: 1103035 - RNA, 19 nt, Homo sapiens
  misc_RNA (1)...(19): siRNA sense strand
gaaagaagguaugaaguuu

SEQ ID NO: 1103036 - RNA, 19 nt, Homo sapiens
  misc_RNA (1)...(19): siRNA sense strand
caacagaaguagaagcauu

SEQ ID NO: 1103037 - RNA, 19 nt, Homo sapiens
  misc_RNA (1)...(19): siRNA sense strand
gaacugaaauaugaugaga

SEQ ID NO: 1103038 - RNA, 19 nt, Homo sapiens
  misc_RNA (1)...(19): siRNA sense strand
ggaaagaagguaugaaguu

SEQ ID NO: 1103039 - RNA, 19 nt, Homo sapiens
  misc_RNA (1)...(19): siRNA sense strand
gcaauaaccagcucaauuc

SEQ ID NO: 1103040 - RNA, 19 nt, Homo sapiens
  misc_RNA (1)...(19): siRNA sense strand
uagaagaugugauugaaga

SEQ ID NO: 1103041 - RNA, 19 nt, Homo sapiens
  misc_RNA (1)...(19): siRNA sense strand
acagugagaugaagguuaa

SEQ ID NO: 1103042 - RNA, 19 nt, Homo sapiens
  misc_RNA (1)...(19): siRNA sense strand
gaagaaaucaucaaaucug

SEQ ID NO: 1103043 - RNA, 19 nt, Homo sapiens
  misc_RNA (1)...(19): siRNA sense strand
gcacggagaaggagaagaa

SEQ ID NO: 1103044 - RNA, 19 nt, Homo sapiens
  misc_RNA (1)...(19): siRNA sense strand
gcaacaagccaguagacua

SEQ ID NO: 1103045 - RNA, 19 nt, Homo sapiens
  misc_RNA (1)...(19): siRNA sense strand
gagaagagcaaguccuauu

SEQ ID NO: 1103046 - RNA, 19 nt, Homo sapiens
  misc_RNA (1)...(19): siRNA sense strand
cggagaaggagaagaauua

SEQ ID NO: 1103047 - RNA, 19 nt, Homo sapiens
  misc_RNA (1)...(19): siRNA sense strand
uccaggaacugaaauauga

SEQ ID NO: 1103048 - RNA, 19 nt, Homo sapiens
  misc_RNA (1)...(19): siRNA sense strand
gaaaucaucaaaucugaga

SEQ ID NO: 1103049 - RNA, 19 nt, Homo sapiens
  misc_RNA (1)...(19): siRNA sense strand
gaucugcaguuuguuaaga

SEQ ID NO: 1103050 - RNA, 19 nt, Homo sapiens
  misc_RNA (1)...(19): siRNA sense strand
aagaagguaugaaguuuga

SEQ ID NO: 1103051 - RNA, 19 nt, Homo sapiens
  misc_RNA (1)...(19): siRNA sense strand
caacgaaggcgccaucuag

SEQ ID NO: 1103052 - RNA, 19 nt, Homo sapiens
  misc_RNA (1)...(19): siRNA sense strand
gaaauaugaugagaagaac

SEQ ID NO: 1103053 - RNA, 19 nt, Homo sapiens
  misc_RNA (1)...(19): siRNA sense strand
gaagaugugauugaagaaa

SEQ ID NO: 1103054 - RNA, 19 nt, Homo sapiens
  misc_RNA (1)...(19): siRNA sense strand
gcuggaagaauuuaagaaa

SEQ ID NO: 1103055 - RNA, 19 nt, Homo sapiens
  misc_RNA (1)...(19): siRNA sense strand
ccucagacaucaucaucuu

SEQ ID NO: 1103056 - RNA, 19 nt, Homo sapiens
  misc_RNA (1)...(19): siRNA sense strand
gguaaacaaugagggagaa

SEQ ID NO: 1103057 - RNA, 19 nt, Homo sapiens
  misc_RNA (1)...(19): siRNA sense strand
guaaaucucaccuggcuau

SEQ ID NO: 1103058 - RNA, 19 nt, Homo sapiens
  misc_RNA (1)...(19): siRNA sense strand
agaagagcaaguccuauua

SEQ ID NO: 1103059 - RNA, 19 nt, Homo sapiens
  misc_RNA (1)...(19): siRNA sense strand
ggcagaacaucaauaacga

SEQ ID NO: 1103060 - RNA, 19 nt, Homo sapiens
  misc_RNA (1)...(19): siRNA sense strand
gcacugcccacuuggaaga

SEQ ID NO: 1103061 - RNA, 19 nt, Homo sapiens
  misc_RNA (1)...(19): siRNA sense strand
gaucguaggcgaagagaag

SEQ ID NO: 1103062 - RNA, 19 nt, Homo sapiens
  misc_RNA (1)...(19): siRNA sense strand
auaaccagcucaauucuuc

SEQ ID NO: 1103063 - RNA, 19 nt, Homo sapiens
  misc_RNA (1)...(19): siRNA sense strand
gcagacagacagugagaug

SEQ ID NO: 1103064 - RNA, 19 nt, Homo sapiens
  misc_RNA (1)...(19): siRNA sense strand
ugaaaaccaucaccaaauu

SEQ ID NO: 1103065 - RNA, 19 nt, Homo sapiens
  misc_RNA (1)...(19): siRNA sense strand
gcgaagccauccuggacuu

SEQ ID NO: 1103066 - RNA, 19 nt, Homo sapiens
  misc_RNA (1)...(19): siRNA sense strand
ggaagaauuuaagaaaggu

SEQ ID NO: 1103067 - RNA, 19 nt, Homo sapiens
  misc_RNA (1)...(19): siRNA sense strand
gagaaggggauccauuuua

SEQ ID NO: 1103068 - RNA, 19 nt, Homo sapiens
  misc_RNA (1)...(19): siRNA sense strand
cagccaaccugcucaacga

SEQ ID NO: 1103069 - RNA, 19 nt, Homo sapiens
  misc_RNA (1)...(19): siRNA sense strand
gaagagcaaguccuauuac

SEQ ID NO: 1103070 - RNA, 19 nt, Homo sapiens
  misc_RNA (1)...(19): siRNA sense strand
gaaaguggaaguugaagcu

SEQ ID NO: 1103071 - RNA, 19 nt, Homo sapiens
  misc_RNA (1)...(19): siRNA sense strand
gacagugagaugaagguua

SEQ ID NO: 1103072 - RNA, 19 nt, Homo sapiens
  misc_RNA (1)...(19): siRNA sense strand
gccgagaccaccuggauuu

SEQ ID NO: 1103073 - RNA, 19 nt, Homo sapiens
  misc_RNA (1)...(19): siRNA sense strand
acgcuaugcuggaagaauu

SEQ ID NO: 1103074 - RNA, 19 nt, Homo sapiens
  misc_RNA (1)...(19): siRNA sense strand
cuuagaagaugugauugaa

SEQ ID NO: 1103075 - RNA, 19 nt, Homo sapiens
  misc_RNA (1)...(19): siRNA sense strand
ggaaguugaagcugggaaa

SEQ ID NO: 1103076 - RNA, 19 nt, Homo sapiens
  misc_RNA (1)...(19): siRNA sense strand
uuuauacacugacaacaga

SEQ ID NO: 1103077 - RNA, 19 nt, Homo sapiens
  misc_RNA (1)...(19): siRNA sense strand
ucucguaccuuuguuguca

SEQ ID NO: 1103078 - RNA, 19 nt, Homo sapiens
  misc_RNA (1)...(19): siRNA sense strand
uuucggaucugcaguuugu

SEQ ID NO: 1103079 - RNA, 19 nt, Homo sapiens
  misc_RNA (1)...(19): siRNA sense strand
ucaaaccgcuacgcaagau

SEQ ID NO: 1103080 - RNA, 19 nt, Homo sapiens
  misc_RNA (1)...(19): siRNA sense strand
ccauguggcuugaaucacu

SEQ ID NO: 1103081 - RNA, 19 nt, Homo sapiens
  misc_RNA (1)...(19): siRNA sense strand
gaagguaugaaguuugaag

SEQ ID NO: 1103082 - RNA, 19 nt, Homo sapiens
  misc_RNA (1)...(19): siRNA sense strand
gggaacgaaagcaagauuu

SEQ ID NO: 1103083 - RNA, 19 nt, Homo sapiens
  misc_RNA (1)...(19): siRNA sense strand
caccuuagaagaugugauu

SEQ ID NO: 1103084 - RNA, 19 nt, Homo sapiens
  misc_RNA (1)...(19): siRNA sense strand
gggaaucgucaccuuagaa

SEQ ID NO: 1103085 - RNA, 19 nt, Homo sapiens
  misc_RNA (1)...(19): siRNA sense strand
uggaagaauuuaagaaagg

SEQ ID NO: 1103086 - RNA, 19 nt, Homo sapiens
  misc_RNA (1)...(19): siRNA sense strand
gcaacgugcuggucaacac

SEQ ID NO: 1103087 - RNA, 19 nt, Homo sapiens
  misc_RNA (1)...(19): siRNA sense strand
ggucaccgaucccuacaac

SEQ ID NO: 1103088 - RNA, 19 nt, Homo sapiens
  misc_RNA (1)...(19): siRNA sense strand
gucccugucucguaccuuu

SEQ ID NO: 1103089 - RNA, 19 nt, Homo sapiens
  misc_RNA (1)...(19): siRNA sense strand
agacagacagugagaugaa

SEQ ID NO: 1103090 - RNA, 19 nt, Homo sapiens
  misc_RNA (1)...(19): siRNA sense strand
gaaaaccaucaccaaauuu

SEQ ID NO: 1103091 - RNA, 19 nt, Homo sapiens
  misc_RNA (1)...(19): siRNA sense strand
aggaggagcugaacaucau

SEQ ID NO: 1103092 - RNA, 19 nt, Homo sapiens
  misc_RNA (1)...(19): siRNA sense strand
gggucaagcugcgggugua

SEQ ID NO: 1103093 - RNA, 19 nt, Homo sapiens
  misc_RNA (1)...(19): siRNA sense strand
cgagcgccuucucauacua

SEQ ID NO: 1103094 - RNA, 19 nt, Homo sapiens
  misc_RNA (1)...(19): siRNA sense strand
ugagauucuugaugaaaca

SEQ ID NO: 1103095 - RNA, 19 nt, Homo sapiens
  misc_RNA (1)...(19): siRNA sense strand
gggcagaacaucaauaacg

SEQ ID NO: 1103096 - RNA, 19 nt, Homo sapiens
  misc_RNA (1)...(19): siRNA sense strand
gcaagauggagaagagcaa

SEQ ID NO: 1103097 - RNA, 19 nt, Homo sapiens
  misc_RNA (1)...(19): siRNA sense strand
cuacuucguucucauucug

SEQ ID NO: 1103098 - RNA, 19 nt, Homo sapiens
  misc_RNA (1)...(19): siRNA sense strand
acugaaauaugaugagaag

SEQ ID NO: 1103099 - RNA, 19 nt, Homo sapiens
  misc_RNA (1)...(19): siRNA sense strand
ggaaucgucaccuuagaag

SEQ ID NO: 1103100 - RNA, 19 nt, Homo sapiens
  misc_RNA (1)...(19): siRNA sense strand
ucaaagacuuggccuucgu

SEQ ID NO: 1103101 - RNA, 19 nt, Homo sapiens
  misc_RNA (1)...(19): siRNA sense strand
gcuugugaacccaaaguaa

SEQ ID NO: 1103102 - RNA, 19 nt, Homo sapiens
  misc_RNA (1)...(19): siRNA sense strand
ccaaccugcucaacgaaca

SEQ ID NO: 1103103 - RNA, 19 nt, Homo sapiens
  misc_RNA (1)...(19): siRNA sense strand
ccugacagccucuccaguu

SEQ ID NO: 1103104 - RNA, 19 nt, Homo sapiens
  misc_RNA (1)...(19): siRNA sense strand
aguugaagcugggaaagaa

SEQ ID NO: 1103105 - RNA, 19 nt, Homo sapiens
  misc_RNA (1)...(19): siRNA sense strand
ccaucuuccucaccaaguu

SEQ ID NO: 1103106 - RNA, 19 nt, Homo sapiens
  misc_RNA (1)...(19): siRNA sense strand
caccaucgguaucgucauc

SEQ ID NO: 1103107 - RNA, 19 nt, Homo sapiens
  misc_RNA (1)...(19): siRNA sense strand
ucaccgaucccuacaacga

SEQ ID NO: 1103108 - RNA, 19 nt, Homo sapiens
  misc_RNA (1)...(19): siRNA sense strand
gcaguuuguuaagaucuca

SEQ ID NO: 1103109 - RNA, 19 nt, Homo sapiens
  misc_RNA (1)...(19): siRNA sense strand
aaagaagguaugaaguuug

SEQ ID NO: 1103110 - RNA, 19 nt, Homo sapiens
  misc_RNA (1)...(19): siRNA sense strand
ggaacgaaagcaagauuuu

SEQ ID NO: 1103111 - RNA, 19 nt, Homo sapiens
  misc_RNA (1)...(19): siRNA sense strand
ucaacaccaugucugagau

SEQ ID NO: 1103112 - RNA, 19 nt, Homo sapiens
  misc_RNA (1)...(19): siRNA sense strand
cgggacugcuucaugauca

SEQ ID NO: 1103113 - RNA, 19 nt, Homo sapiens
  misc_RNA (1)...(19): siRNA sense strand
agacuuggccuucguggau

SEQ ID NO: 1103114 - RNA, 19 nt, Homo sapiens
  misc_RNA (1)...(19): siRNA sense strand
ccuagcaacagaaguagaa

SEQ ID NO: 1103115 - RNA, 19 nt, Homo sapiens
  misc_RNA (1)...(19): siRNA sense strand
gcuaugcuggaagaauuua

SEQ ID NO: 1103116 - RNA, 19 nt, Homo sapiens
  misc_RNA (1)...(19): siRNA sense strand
gcgaggacaccaagaugau

SEQ ID NO: 1103117 - RNA, 19 nt, Homo sapiens
  misc_RNA (1)...(19): siRNA sense strand
uaagaucucaagacagcaa

SEQ ID NO: 1103118 - RNA, 19 nt, Homo sapiens
  misc_RNA (1)...(19): siRNA sense strand
ggccaugcaccguuuccua

SEQ ID NO: 1103119 - RNA, 19 nt, Homo sapiens
  misc_RNA (1)...(19): siRNA sense strand
agaaggggauccauuuuau

SEQ ID NO: 1103120 - RNA, 19 nt, Homo sapiens
  misc_RNA (1)...(19): siRNA sense strand
ggacuucaacaccaugucu

SEQ ID NO: 1103121 - RNA, 19 nt, Homo sapiens
  misc_RNA (1)...(19): siRNA sense strand
cuccgggacugcuucauga

SEQ ID NO: 1103122 - RNA, 19 nt, Homo sapiens
  misc_RNA (1)...(19): siRNA sense strand
ggacaccaagaugaucgua

SEQ ID NO: 1103123 - RNA, 19 nt, Homo sapiens
  misc_RNA (1)...(19): siRNA sense strand
caagacagcaauaccaaaa

SEQ ID NO: 1103124 - RNA, 19 nt, Homo sapiens
  misc_RNA (1)...(19): siRNA sense strand
ucggaucugcaguuuguua

SEQ ID NO: 1103125 - RNA, 19 nt, Homo sapiens
  misc_RNA (1)...(19): siRNA sense strand
ucacucagacucucucagu

SEQ ID NO: 1103126 - RNA, 19 nt, Homo sapiens
  misc_RNA (1)...(19): siRNA sense strand
gaagcugggaaagaaggua

SEQ ID NO: 1103127 - RNA, 19 nt, Homo sapiens
  misc_RNA (1)...(19): siRNA sense strand
gaugagaagaacaagaaag

SEQ ID NO: 1103128 - RNA, 19 nt, Homo sapiens
  misc_RNA (1)...(19): siRNA sense strand
uuaagcagacagacaguga

SEQ ID NO: 1103129 - RNA, 19 nt, Homo sapiens
  misc_RNA (1)...(19): siRNA sense strand
gauucuugaugaaacagau

SEQ ID NO: 1103130 - RNA, 19 nt, Homo sapiens
  misc_RNA (1)...(19): siRNA sense strand
uuuaugaaguucugggaau

SEQ ID NO: 1103131 - RNA, 19 nt, Homo sapiens
  misc_RNA (1)...(19): siRNA sense strand
gugcagcggguaaacaaug

SEQ ID NO: 1103132 - RNA, 19 nt, Homo sapiens
  misc_RNA (1)...(19): siRNA sense strand
ggcgaggacaccaagauga

SEQ ID NO: 1103133 - RNA, 19 nt, Homo sapiens
  misc_RNA (1)...(19): siRNA sense strand
gcgagcgccuucucauacu

SEQ ID NO: 1103134 - RNA, 19 nt, Homo sapiens
  misc_RNA (1)...(19): siRNA sense strand
aagcgagcgccuucucaua

SEQ ID NO: 1103135 - RNA, 19 nt, Homo sapiens
  misc_RNA (1)...(19): siRNA sense strand
ggaggcagcuguacccuaa

SEQ ID NO: 1103136 - RNA, 19 nt, Homo sapiens
  misc_RNA (1)...(19): siRNA sense strand
ucgaucaucuggcuucuua

SEQ ID NO: 1103137 - RNA, 19 nt, Homo sapiens
  misc_RNA (1)...(19): siRNA sense strand
gugccaagcucuacuccua

SEQ ID NO: 1103138 - RNA, 19 nt, Homo sapiens
  misc_RNA (1)...(19): siRNA sense strand
ccaagaagguacagaaguc

SEQ ID NO: 1103139 - RNA, 19 nt, Homo sapiens
  misc_RNA (1)...(19): siRNA sense strand
ggaccuggcuuugccuaca

SEQ ID NO: 1103140 - RNA, 19 nt, Homo sapiens
  misc_RNA (1)...(19): siRNA sense strand
ggccugggcucacaccaau

SEQ ID NO: 1103141 - RNA, 19 nt, Homo sapiens
  misc_RNA (1)...(19): siRNA sense strand
ccucucaccuugcgugguu

SEQ ID NO: 1103142 - RNA, 19 nt, Homo sapiens
  misc_RNA (1)...(19): siRNA sense strand
cagcuacuccgcuaucuga

SEQ ID NO: 1103143 - RNA, 19 nt, Homo sapiens
  misc_RNA (1)...(19): siRNA sense strand
auaccuacuucccuucuuu

SEQ ID NO: 1103144 - RNA, 19 nt, Homo sapiens
  misc_RNA (1)...(19): siRNA sense strand
gcaguaacaaccaggaugu

SEQ ID NO: 1103145 - RNA, 19 nt, Homo sapiens
  misc_RNA (1)...(19): siRNA sense strand
acagucagcuuccuuucug

SEQ ID NO: 1103146 - RNA, 19 nt, Homo sapiens
  misc_RNA (1)...(19): siRNA sense strand
accaggagcugcugaggaa

SEQ ID NO: 1103147 - RNA, 19 nt, Homo sapiens
  misc_RNA (1)...(19): siRNA sense strand
ugaagacacagcucaguga

SEQ ID NO: 1103148 - RNA, 19 nt, Homo sapiens
  misc_RNA (1)...(19): siRNA sense strand
gcagauucccaagaaggua

SEQ ID NO: 1103149 - RNA, 19 nt, Homo sapiens
  misc_RNA (1)...(19): siRNA sense strand
cuucuggacuuugccuaua

SEQ ID NO: 1103150 - RNA, 19 nt, Homo sapiens
  misc_RNA (1)...(19): siRNA sense strand
gccaagcucuacuccuaca

SEQ ID NO: 1103151 - RNA, 19 nt, Homo sapiens
  misc_RNA (1)...(19): siRNA sense strand
agaagguacagaagucuuu

SEQ ID NO: 1103152 - RNA, 19 nt, Homo sapiens
  misc_RNA (1)...(19): siRNA sense strand
gaggaaggguagcaguaac

SEQ ID NO: 1103153 - RNA, 19 nt, Homo sapiens
  misc_RNA (1)...(19): siRNA sense strand
ugaggaaggguagcaguaa

SEQ ID NO: 1103154 - RNA, 19 nt, Homo sapiens
  misc_RNA (1)...(19): siRNA sense strand
gaagguacagaagucuuug

SEQ ID NO: 1103155 - RNA, 19 nt, Homo sapiens
  misc_RNA (1)...(19): siRNA sense strand
ccacugugccucucaccuu

SEQ ID NO: 1103156 - RNA, 19 nt, Homo sapiens
  misc_RNA (1)...(19): siRNA sense strand
gggacugcaugaagacaca

SEQ ID NO: 1103157 - RNA, 19 nt, Homo sapiens
  misc_RNA (1)...(19): siRNA sense strand
uguggcaccucuugcuuga

SEQ ID NO: 1103158 - RNA, 19 nt, Homo sapiens
  misc_RNA (1)...(19): siRNA sense strand
accaagggcuucggcauga

SEQ ID NO: 1103159 - RNA, 19 nt, Homo sapiens
  misc_RNA (1)...(19): siRNA sense strand
ggagcagauucccaagaag

SEQ ID NO: 1103160 - RNA, 19 nt, Homo sapiens
  misc_RNA (1)...(19): siRNA sense strand
caagggcuucggcaugauu

SEQ ID NO: 1103161 - RNA, 19 nt, Homo sapiens
  misc_RNA (1)...(19): siRNA sense strand
ggaaggguagcaguaacaa

SEQ ID NO: 1103162 - RNA, 19 nt, Homo sapiens
  misc_RNA (1)...(19): siRNA sense strand
ggacauuacaguggcuuuc

SEQ ID NO: 1103163 - RNA, 19 nt, Homo sapiens
  misc_RNA (1)...(19): siRNA sense strand
ccugaugcaucccaaccuu

SEQ ID NO: 1103164 - RNA, 19 nt, Homo sapiens
  misc_RNA (1)...(19): siRNA sense strand
ccugugacauggccugcaa

SEQ ID NO: 1103165 - RNA, 19 nt, Homo sapiens
  misc_RNA (1)...(19): siRNA sense strand
ggacuucuucccacuucug

SEQ ID NO: 1103166 - RNA, 19 nt, Homo sapiens
  misc_RNA (1)...(19): siRNA sense strand
gaccugggacugcaugaag

SEQ ID NO: 1103167 - RNA, 19 nt, Homo sapiens
  misc_RNA (1)...(19): siRNA sense strand
ccccugagaugaagaaaga

SEQ ID NO: 1103168 - RNA, 19 nt, Homo sapiens
  misc_RNA (1)...(19): siRNA sense strand
uugccuauaugccgaacaa

SEQ ID NO: 1103169 - RNA, 19 nt, Homo sapiens
  misc_RNA (1)...(19): siRNA sense strand
acauuacaguggcuuucuu

SEQ ID NO: 1103170 - RNA, 19 nt, Homo sapiens
  misc_RNA (1)...(19): siRNA sense strand
auucagucccucaagcuua

SEQ ID NO: 1103171 - RNA, 19 nt, Homo sapiens
  misc_RNA (1)...(19): siRNA sense strand
aaggacuucuucccacuuc

SEQ ID NO: 1103172 - RNA, 19 nt, Homo sapiens
  misc_RNA (1)...(19): siRNA sense strand
gcuacuccgcuaucugaga

SEQ ID NO: 1103173 - RNA, 19 nt, Homo sapiens
  misc_RNA (1)...(19): siRNA sense strand
caaggacuucuucccacuu

SEQ ID NO: 1103174 - RNA, 19 nt, Homo sapiens
  misc_RNA (1)...(19): siRNA sense strand
uuacaguggcuuucuugga

SEQ ID NO: 1103175 - RNA, 19 nt, Homo sapiens
  misc_RNA (1)...(19): siRNA sense strand
cauaccuacuucccuucuu

SEQ ID NO: 1103176 - RNA, 19 nt, Homo sapiens
  misc_RNA (1)...(19): siRNA sense strand
ccugauaucccagcaguag

SEQ ID NO: 1103177 - RNA, 19 nt, Homo sapiens
  misc_RNA (1)...(19): siRNA sense strand
gccacagucagcuuccuuu

SEQ ID NO: 1103178 - RNA, 19 nt, Homo sapiens
  misc_RNA (1)...(19): siRNA sense strand
ggaaauaacugguaacaca

SEQ ID NO: 1103179 - RNA, 19 nt, Homo sapiens
  misc_RNA (1)...(19): siRNA sense strand
gaacaaugguggauccaaa

SEQ ID NO: 1103180 - RNA, 19 nt, Homo sapiens
  misc_RNA (1)...(19): siRNA sense strand
ggagaaagaaucauuguga

SEQ ID NO: 1103181 - RNA, 19 nt, Homo sapiens
  misc_RNA (1)...(19): siRNA sense strand
gaacagaaggucuugaaug

SEQ ID NO: 1103182 - RNA, 19 nt, Homo sapiens
  misc_RNA (1)...(19): siRNA sense strand
gagaaagaaucauugugaa

SEQ ID NO: 1103183 - RNA, 19 nt, Homo sapiens
  misc_RNA (1)...(19): siRNA sense strand
agaccuagcugaagauuug

SEQ ID NO: 1103184 - RNA, 19 nt, Homo sapiens
  misc_RNA (1)...(19): siRNA sense strand
ugaaagaccuagcugaaga

SEQ ID NO: 1103185 - RNA, 19 nt, Homo sapiens
  misc_RNA (1)...(19): siRNA sense strand
ugaacaagcaccugaauaa

SEQ ID NO: 1103186 - RNA, 19 nt, Homo sapiens
  misc_RNA (1)...(19): siRNA sense strand
gcaaauccaagaggaaaua

SEQ ID NO: 1103187 - RNA, 19 nt, Homo sapiens
  misc_RNA (1)...(19): siRNA sense strand
gaacaagcaccugaauaaa

SEQ ID NO: 1103188 - RNA, 19 nt, Homo sapiens
  misc_RNA (1)...(19): siRNA sense strand
gguauuaauugacuggauu

SEQ ID NO: 1103189 - RNA, 19 nt, Homo sapiens
  misc_RNA (1)...(19): siRNA sense strand
gaaugucuccuuugccuuu

SEQ ID NO: 1103190 - RNA, 19 nt, Homo sapiens
  misc_RNA (1)...(19): siRNA sense strand
ggucuugaaugucuccuuu

SEQ ID NO: 1103191 - RNA, 19 nt, Homo sapiens
  misc_RNA (1)...(19): siRNA sense strand
ucgagaaacuggagaguga

SEQ ID NO: 1103192 - RNA, 19 nt, Homo sapiens
  misc_RNA (1)...(19): siRNA sense strand
ggacagcuuugaacagaag

SEQ ID NO: 1103193 - RNA, 19 nt, Homo sapiens
  misc_RNA (1)...(19): siRNA sense strand
gaacugaugaagguauuaa

SEQ ID NO: 1103194 - RNA, 19 nt, Homo sapiens
  misc_RNA (1)...(19): siRNA sense strand
gaaagaaucauugugaaag

SEQ ID NO: 1103195 - RNA, 19 nt, Homo sapiens
  misc_RNA (1)...(19): siRNA sense strand
agucagagauugcucagaa

SEQ ID NO: 1103196 - RNA, 19 nt, Homo sapiens
  misc_RNA (1)...(19): siRNA sense strand
cagaaggucuugaaugucu

SEQ ID NO: 1103197 - RNA, 19 nt, Homo sapiens
  misc_RNA (1)...(19): siRNA sense strand
gaccugaaaucuacacuac

SEQ ID NO: 1103198 - RNA, 19 nt, Homo sapiens
  misc_RNA (1)...(19): siRNA sense strand
caagaggaaauaacuggua

SEQ ID NO: 1103199 - RNA, 19 nt, Homo sapiens
  misc_RNA (1)...(19): siRNA sense strand
gcaagaaagaugauuccuu

SEQ ID NO: 1103200 - RNA, 19 nt, Homo sapiens
  misc_RNA (1)...(19): siRNA sense strand
aacagaaggucuugaaugu

SEQ ID NO: 1103201 - RNA, 19 nt, Homo sapiens
  misc_RNA (1)...(19): siRNA sense strand
ccuuugagcucaugcaaga

SEQ ID NO: 1103202 - RNA, 19 nt, Homo sapiens
  misc_RNA (1)...(19): siRNA sense strand
gcugaagauuuguaugaug

SEQ ID NO: 1103203 - RNA, 19 nt, Homo sapiens
  misc_RNA (1)...(19): siRNA sense strand
cagaagacauagucaacug

SEQ ID NO: 1103204 - RNA, 19 nt, Homo sapiens
  misc_RNA (1)...(19): siRNA sense strand
aagaggaaauaacugguaa

SEQ ID NO: 1103205 - RNA, 19 nt, Homo sapiens
  misc_RNA (1)...(19): siRNA sense strand
acacgaugcuggaggagaa

SEQ ID NO: 1103206 - RNA, 19 nt, Homo sapiens
  misc_RNA (1)...(19): siRNA sense strand
agaaugaggugcgaacaau

SEQ ID NO: 1103207 - RNA, 19 nt, Homo sapiens
  misc_RNA (1)...(19): siRNA sense strand
caagauggaggguuggaaa

SEQ ID NO: 1103208 - RNA, 19 nt, Homo sapiens
  misc_RNA (1)...(19): siRNA sense strand
acaagcaccugaauaaacu

SEQ ID NO: 1103209 - RNA, 19 nt, Homo sapiens
  misc_RNA (1)...(19): siRNA sense strand
ccaggagcaucaaguggaa

SEQ ID NO: 1103210 - RNA, 19 nt, Homo sapiens
  misc_RNA (1)...(19): siRNA sense strand
ccugaaaucuacacuacga

SEQ ID NO: 1103211 - RNA, 19 nt, Homo sapiens
  misc_RNA (1)...(19): siRNA sense strand
uagcugaagauuuguauga

SEQ ID NO: 1103212 - RNA, 19 nt, Homo sapiens
  misc_RNA (1)...(19): siRNA sense strand
ggaggucacagaacuggaa

SEQ ID NO: 1103213 - RNA, 19 nt, Homo sapiens
  misc_RNA (1)...(19): siRNA sense strand
gauuaaugauguguugguu

SEQ ID NO: 1103214 - RNA, 19 nt, Homo sapiens
  misc_RNA (1)...(19): siRNA sense strand
gagaaugaggugcgaacaa

SEQ ID NO: 1103215 - RNA, 19 nt, Homo sapiens
  misc_RNA (1)...(19): siRNA sense strand
ccggacagcuuugaacaga

SEQ ID NO: 1103216 - RNA, 19 nt, Homo sapiens
  misc_RNA (1)...(19): siRNA sense strand
caagcugaauguggugaaa

SEQ ID NO: 1103217 - RNA, 19 nt, Homo sapiens
  misc_RNA (1)...(19): siRNA sense strand
gagccugguggccaucuua

SEQ ID NO: 1103218 - RNA, 19 nt, Homo sapiens
  misc_RNA (1)...(19): siRNA sense strand
ggaggaagaaagccaagga

SEQ ID NO: 1103219 - RNA, 19 nt, Homo sapiens
  misc_RNA (1)...(19): siRNA sense strand
gaaagaccuagcugaagau

SEQ ID NO: 1103220 - RNA, 19 nt, Homo sapiens
  misc_RNA (1)...(19): siRNA sense strand
gugaacaagcaccugaaua

SEQ ID NO: 1103221 - RNA, 19 nt, Homo sapiens
  misc_RNA (1)...(19): siRNA sense strand
aaugaaacccugaaacuuc

SEQ ID NO: 1103222 - RNA, 19 nt, Homo sapiens
  misc_RNA (1)...(19): siRNA sense strand
gaucaaugaaacccugaaa

SEQ ID NO: 1103223 - RNA, 19 nt, Homo sapiens
  misc_RNA (1)...(19): siRNA sense strand
caagaacugaugaagguau

SEQ ID NO: 1103224 - RNA, 19 nt, Homo sapiens
  misc_RNA (1)...(19): siRNA sense strand
uguacaaccucuucaccaa

SEQ ID NO: 1103225 - RNA, 19 nt, Homo sapiens
  misc_RNA (1)...(19): siRNA sense strand
caaugaaacccugaaacuu

SEQ ID NO: 1103226 - RNA, 19 nt, Homo sapiens
  misc_RNA (1)...(19): siRNA sense strand
uggagaagaucaaugaaac

SEQ ID NO: 1103227 - RNA, 19 nt, Homo sapiens
  misc_RNA (1)...(19): siRNA sense strand
agacuguccuggagaagau

SEQ ID NO: 1103228 - RNA, 19 nt, Homo sapiens
  misc_RNA (1)...(19): siRNA sense strand
gcaccugaauaaacugaac

SEQ ID NO: 1103229 - RNA, 19 nt, Homo sapiens
  misc_RNA (1)...(19): siRNA sense strand
aaugguggauccaaacuca

SEQ ID NO: 1103230 - RNA, 19 nt, Homo sapiens
  misc_RNA (1)...(19): siRNA sense strand
gacaaguccugcagaagcu

SEQ ID NO: 1103231 - RNA, 19 nt, Homo sapiens
  misc_RNA (1)...(19): siRNA sense strand
aagaacugaugaagguauu

SEQ ID NO: 1103232 - RNA, 19 nt, Homo sapiens
  misc_RNA (1)...(19): siRNA sense strand
agagugagaagcuaaaugu

SEQ ID NO: 1103233 - RNA, 19 nt, Homo sapiens
  misc_RNA (1)...(19): siRNA sense strand
gaacgugaugccuuugaca

SEQ ID NO: 1103234 - RNA, 19 nt, Homo sapiens
  misc_RNA (1)...(19): siRNA sense strand
ucguugcucugucucagua

SEQ ID NO: 1103235 - RNA, 19 nt, Homo sapiens
  misc_RNA (1)...(19): siRNA sense strand
gaaugaggugcgaacaaug

SEQ ID NO: 1103236 - RNA, 19 nt, Homo sapiens
  misc_RNA (1)...(19): siRNA sense strand
uguguugguuggagaaaga

SEQ ID NO: 1103237 - RNA, 19 nt, Homo sapiens
  misc_RNA (1)...(19): siRNA sense strand
gaggaaauaacugguaaca

SEQ ID NO: 1103238 - RNA, 19 nt, Homo sapiens
  misc_RNA (1)...(19): siRNA sense strand
ucaaugaaacccugaaacu

SEQ ID NO: 1103239 - RNA, 19 nt, Homo sapiens
  misc_RNA (1)...(19): siRNA sense strand
gagaaacuggagagugaga

SEQ ID NO: 1103240 - RNA, 19 nt, Homo sapiens
  misc_RNA (1)...(19): siRNA sense strand
cugaugaagguauuaauug

SEQ ID NO: 1103241 - RNA, 19 nt, Homo sapiens
  misc_RNA (1)...(19): siRNA sense strand
caaauccaagaggaaauaa

SEQ ID NO: 1103242 - RNA, 19 nt, Homo sapiens
  misc_RNA (1)...(19): siRNA sense strand
gagagugagaagcuaaaug

SEQ ID NO: 1103243 - RNA, 19 nt, Homo sapiens
  misc_RNA (1)...(19): siRNA sense strand
gaaacuggagagugagaag

SEQ ID NO: 1103244 - RNA, 19 nt, Homo sapiens
  misc_RNA (1)...(19): siRNA sense strand
uacaaccucuucaccaagu

SEQ ID NO: 1103245 - RNA, 19 nt, Homo sapiens
  misc_RNA (1)...(19): siRNA sense strand
acugugaccugaaaucuac

SEQ ID NO: 1103246 - RNA, 19 nt, Homo sapiens
  misc_RNA (1)...(19): siRNA sense strand
ccagaaacgagaaggaauc

SEQ ID NO: 1103247 - RNA, 19 nt, Homo sapiens
  misc_RNA (1)...(19): siRNA sense strand
gaggucacccagucagaga

SEQ ID NO: 1103248 - RNA, 19 nt, Homo sapiens
  misc_RNA (1)...(19): siRNA sense strand
ugacuggauuaaugaugug

SEQ ID NO: 1103249 - RNA, 19 nt, Homo sapiens
  misc_RNA (1)...(19): siRNA sense strand
guauuuccgcgcaccaauu

SEQ ID NO: 1103250 - RNA, 19 nt, Homo sapiens
  misc_RNA (1)...(19): siRNA sense strand
cuggauuaaugauguguug

SEQ ID NO: 1103251 - RNA, 19 nt, Homo sapiens
  misc_RNA (1)...(19): siRNA sense strand
ucagcccaauucccuuuga

SEQ ID NO: 1103252 - RNA, 19 nt, Homo sapiens
  misc_RNA (1)...(19): siRNA sense strand
ugugaaagaccuagcugaa

SEQ ID NO: 1103253 - RNA, 19 nt, Homo sapiens
  misc_RNA (1)...(19): siRNA sense strand
gguuggagaaagaaucauu

SEQ ID NO: 1103254 - RNA, 19 nt, Homo sapiens
  misc_RNA (1)...(19): siRNA sense strand
ggucacccagucagagauu

SEQ ID NO: 1103255 - RNA, 19 nt, Homo sapiens
  misc_RNA (1)...(19): siRNA sense strand
guugcucugucucaguauu

SEQ ID NO: 1103256 - RNA, 19 nt, Homo sapiens
  misc_RNA (1)...(19): siRNA sense strand
gaaugaacgccaucaaccu

SEQ ID NO: 1103257 - RNA, 19 nt, Homo sapiens
  misc_RNA (1)...(19): siRNA sense strand
gugaugccuuugacaccuu

SEQ ID NO: 1103258 - RNA, 19 nt, Homo sapiens
  misc_RNA (1)...(19): siRNA sense strand
ugcagaagcuuuucgagaa

SEQ ID NO: 1103259 - RNA, 19 nt, Homo sapiens
  misc_RNA (1)...(19): siRNA sense strand
caacugugaccugaaaucu

SEQ ID NO: 1103260 - RNA, 19 nt, Homo sapiens
  misc_RNA (1)...(19): siRNA sense strand
aagacauagucaacuguga

SEQ ID NO: 1103261 - RNA, 19 nt, Homo sapiens
  misc_RNA (1)...(19): siRNA sense strand
uugacuggauuaaugaugu

SEQ ID NO: 1103262 - RNA, 19 nt, Homo sapiens
  misc_RNA (1)...(19): siRNA sense strand
cggcaaauccaagaggaaa

SEQ ID NO: 1103263 - RNA, 19 nt, Homo sapiens
  misc_RNA (1)...(19): siRNA sense strand
caaguccugcagaagcuuu

SEQ ID NO: 1103264 - RNA, 19 nt, Homo sapiens
  misc_RNA (1)...(19): siRNA sense strand
gcaagauggaggguuggaa

SEQ ID NO: 1103265 - RNA, 19 nt, Homo sapiens
  misc_RNA (1)...(19): siRNA sense strand
aaauaacugguaacacaga

SEQ ID NO: 1103266 - RNA, 19 nt, Homo sapiens
  misc_RNA (1)...(19): siRNA sense strand
ggauuaaugauguguuggu

SEQ ID NO: 1103267 - RNA, 19 nt, Homo sapiens
  misc_RNA (1)...(19): siRNA sense strand
caucuuacaccugcucguu

SEQ ID NO: 1103268 - RNA, 19 nt, Homo sapiens
  misc_RNA (1)...(19): siRNA sense strand
ccucagcccaauucccuuu

SEQ ID NO: 1103269 - RNA, 19 nt, Homo sapiens
  misc_RNA (1)...(19): siRNA sense strand
ggagagugagaagcuaaau

SEQ ID NO: 1103270 - RNA, 19 nt, Homo sapiens
  misc_RNA (1)...(19): siRNA sense strand
acaaccucuucaccaagua

SEQ ID NO: 1103271 - RNA, 19 nt, Homo sapiens
  misc_RNA (1)...(19): siRNA sense strand
gggaaugaacgccaucaac

SEQ ID NO: 1103272 - RNA, 19 nt, Homo sapiens
  misc_RNA (1)...(19): siRNA sense strand
gcaggaggagggaaugaac

SEQ ID NO: 1103273 - RNA, 19 nt, Homo sapiens
  misc_RNA (1)...(19): siRNA sense strand
cuggagaagaucaaugaaa

SEQ ID NO: 1103274 - RNA, 19 nt, Homo sapiens
  misc_RNA (1)...(19): siRNA sense strand
gcagugaccccaagcuuca

SEQ ID NO: 1103275 - RNA, 19 nt, Homo sapiens
  misc_RNA (1)...(19): siRNA sense strand
ugaccugaaaucuacacua

SEQ ID NO: 1103276 - RNA, 19 nt, Homo sapiens
  misc_RNA (1)...(19): siRNA sense strand
gagcaucaaguggaaugug

SEQ ID NO: 1103277 - RNA, 19 nt, Homo sapiens
  misc_RNA (1)...(19): siRNA sense strand
ggccagaagacauagucaa

SEQ ID NO: 1103278 - RNA, 19 nt, Homo sapiens
  misc_RNA (1)...(19): siRNA sense strand
gaggaucuaucgucaauau

SEQ ID NO: 1103279 - RNA, 19 nt, Homo sapiens
  misc_RNA (1)...(19): siRNA sense strand
gaauacggaucaauugugu

SEQ ID NO: 1103280 - RNA, 19 nt, Homo sapiens
  misc_RNA (1)...(19): siRNA sense strand
ggaccuuucuguugucaaa

SEQ ID NO: 1103281 - RNA, 19 nt, Homo sapiens
  misc_RNA (1)...(19): siRNA sense strand
aggaggaggugaauaauuu

SEQ ID NO: 1103282 - RNA, 19 nt, Homo sapiens
  misc_RNA (1)...(19): siRNA sense strand
gaaagagcauggaggaucu

SEQ ID NO: 1103283 - RNA, 19 nt, Homo sapiens
  misc_RNA (1)...(19): siRNA sense strand
gaaugggccugcaguggaa

SEQ ID NO: 1103284 - RNA, 19 nt, Homo sapiens
  misc_RNA (1)...(19): siRNA sense strand
ggaggaggccaguuucuuu

SEQ ID NO: 1103285 - RNA, 19 nt, Homo sapiens
  misc_RNA (1)...(19): siRNA sense strand
caaccuaccucccacaaag

SEQ ID NO: 1103286 - RNA, 19 nt, Homo sapiens
  misc_RNA (1)...(19): siRNA sense strand
guuuacagcuccuggauga

SEQ ID NO: 1103287 - RNA, 19 nt, Homo sapiens
  misc_RNA (1)...(19): siRNA sense strand
caaccucaccaaaucuuua

SEQ ID NO: 1103288 - RNA, 19 nt, Homo sapiens
  misc_RNA (1)...(19): siRNA sense strand
gaaaagccaucgugaagga

SEQ ID NO: 1103289 - RNA, 19 nt, Homo sapiens
  misc_RNA (1)...(19): siRNA sense strand
ggaaugaggaggaggugaa

SEQ ID NO: 1103290 - RNA, 19 nt, Homo sapiens
  misc_RNA (1)...(19): siRNA sense strand
agacugcuguggagaacua

SEQ ID NO: 1103291 - RNA, 19 nt, Homo sapiens
  misc_RNA (1)...(19): siRNA sense strand
gaggaggaggugaauaauu

SEQ ID NO: 1103292 - RNA, 19 nt, Homo sapiens
  misc_RNA (1)...(19): siRNA sense strand
ggaucuaucgucaauauca

SEQ ID NO: 1103293 - RNA, 19 nt, Homo sapiens
  misc_RNA (1)...(19): siRNA sense strand
ggaauacggaucaauugug

SEQ ID NO: 1103294 - RNA, 19 nt, Homo sapiens
  misc_RNA (1)...(19): siRNA sense strand
caauggaggaggccaguuu

SEQ ID NO: 1103295 - RNA, 19 nt, Homo sapiens
  misc_RNA (1)...(19): siRNA sense strand
cguaugagguaccagauca

SEQ ID NO: 1103296 - RNA, 19 nt, Homo sapiens
  misc_RNA (1)...(19): siRNA sense strand
gaaaauccccgcuaaacga

SEQ ID NO: 1103297 - RNA, 19 nt, Homo sapiens
  misc_RNA (1)...(19): siRNA sense strand
gcacgagucauucccauac

SEQ ID NO: 1103298 - RNA, 19 nt, Homo sapiens
  misc_RNA (1)...(19): siRNA sense strand
uggaggaucuaucgucaau

SEQ ID NO: 1103299 - RNA, 19 nt, Homo sapiens
  misc_RNA (1)...(19): siRNA sense strand
gaucuaucgucaauaucau

SEQ ID NO: 1103300 - RNA, 19 nt, Homo sapiens
  misc_RNA (1)...(19): siRNA sense strand
caagagcagguguuuacaa

SEQ ID NO: 1103301 - RNA, 19 nt, Homo sapiens
  misc_RNA (1)...(19): siRNA sense strand
ucaauuucuuggugaacaa

SEQ ID NO: 1103302 - RNA, 19 nt, Homo sapiens
  misc_RNA (1)...(19): siRNA sense strand
ucaccaaaucuuuagcuuu

SEQ ID NO: 1103303 - RNA, 19 nt, Homo sapiens
  misc_RNA (1)...(19): siRNA sense strand
cccguaaguuggagagauu

SEQ ID NO: 1103304 - RNA, 19 nt, Homo sapiens
  misc_RNA (1)...(19): siRNA sense strand
uuuacaaccucaccaaauc

SEQ ID NO: 1103305 - RNA, 19 nt, Homo sapiens
  misc_RNA (1)...(19): siRNA sense strand
gagcauggaggaucuaucg

SEQ ID NO: 1103306 - RNA, 19 nt, Homo sapiens
  misc_RNA (1)...(19): siRNA sense strand
ggaggaggugaauaauuug

SEQ ID NO: 1103307 - RNA, 19 nt, Homo sapiens
  misc_RNA (1)...(19): siRNA sense strand
gguaccagaucaugacaac

SEQ ID NO: 1103308 - RNA, 19 nt, Homo sapiens
  misc_RNA (1)...(19): siRNA sense strand
acggguaccuucuacaugu

SEQ ID NO: 1103309 - RNA, 19 nt, Homo sapiens
  misc_RNA (1)...(19): siRNA sense strand
gaggaggccaguuucuuuc

SEQ ID NO: 1103310 - RNA, 19 nt, Homo sapiens
  misc_RNA (1)...(19): siRNA sense strand
uuacagcuccuggaugaaa

SEQ ID NO: 1103311 - RNA, 19 nt, Homo sapiens
  misc_RNA (1)...(19): siRNA sense strand
gcaguggaauacggaucaa

SEQ ID NO: 1103312 - RNA, 19 nt, Homo sapiens
  misc_RNA (1)...(19): siRNA sense strand
aaagcaggcacgagucauu

SEQ ID NO: 1103313 - RNA, 19 nt, Homo sapiens
  misc_RNA (1)...(19): siRNA sense strand
gcuaaacgaauugguguuc

SEQ ID NO: 1103314 - RNA, 19 nt, Homo sapiens
  misc_RNA (1)...(19): siRNA sense strand
guggaauacggaucaauug

SEQ ID NO: 1103315 - RNA, 19 nt, Homo sapiens
  misc_RNA (1)...(19): siRNA sense strand
caaugcaacauccggaaug

SEQ ID NO: 1103316 - RNA, 19 nt, Homo sapiens
  misc_RNA (1)...(19): siRNA sense strand
aaugcaacauccggaauga

SEQ ID NO: 1103317 - RNA, 19 nt, Homo sapiens
  misc_RNA (1)...(19): siRNA sense strand
auacggaucaauuguguug

SEQ ID NO: 1103318 - RNA, 19 nt, Homo sapiens
  misc_RNA (1)...(19): siRNA sense strand
aagagcagguguuuacaac

SEQ ID NO: 1103319 - RNA, 19 nt, Homo sapiens
  misc_RNA (1)...(19): siRNA sense strand
gucauugcaucccguaagu

SEQ ID NO: 1103320 - RNA, 19 nt, Homo sapiens
  misc_RNA (1)...(19): siRNA sense strand
augaggaggaggugaauaa

SEQ ID NO: 1103321 - RNA, 19 nt, Homo sapiens
  misc_RNA (1)...(19): siRNA sense strand
cuacaugugcaaagcaguu

SEQ ID NO: 1103322 - RNA, 19 nt, Homo sapiens
  misc_RNA (1)...(19): siRNA sense strand
uccauuagcugugcauucu

SEQ ID NO: 1103323 - RNA, 19 nt, Homo sapiens
  misc_RNA (1)...(19): siRNA sense strand
cauugcaucccguaaguug

SEQ ID NO: 1103324 - RNA, 19 nt, Homo sapiens
  misc_RNA (1)...(19): siRNA sense strand
gggcuaagggcaggagcua

SEQ ID NO: 1103325 - RNA, 19 nt, Homo sapiens
  misc_RNA (1)...(19): siRNA sense strand
gcaggggaccuuucuguug

SEQ ID NO: 1103326 - RNA, 19 nt, Homo sapiens
  misc_RNA (1)...(19): siRNA sense strand
uaccagaucaugacaacug

SEQ ID NO: 1103327 - RNA, 19 nt, Homo sapiens
  misc_RNA (1)...(19): siRNA sense strand
guggucugcuuccuacugu

SEQ ID NO: 1103328 - RNA, 19 nt, Homo sapiens
  misc_RNA (1)...(19): siRNA sense strand
guuuacaaccucaccaaau

SEQ ID NO: 1103329 - RNA, 19 nt, Homo sapiens
  misc_RNA (1)...(19): siRNA sense strand
gaaugaggaggaggugaau

SEQ ID NO: 1103330 - RNA, 19 nt, Homo sapiens
  misc_RNA (1)...(19): siRNA sense strand
uaucauugucccuacuaaa

SEQ ID NO: 1103331 - RNA, 19 nt, Homo sapiens
  misc_RNA (1)...(19): siRNA sense strand
acgcugugcuugagaccaa

SEQ ID NO: 1103332 - RNA, 19 nt, Homo sapiens
  misc_RNA (1)...(19): siRNA sense strand
ggcacgagucauucccaua

SEQ ID NO: 1103333 - RNA, 19 nt, Homo sapiens
  misc_RNA (1)...(19): siRNA sense strand
gcaagagcagguguuuaca

SEQ ID NO: 1103334 - RNA, 19 nt, Homo sapiens
  misc_RNA (1)...(19): siRNA sense strand
uaaacgaauugguguuccu

SEQ ID NO: 1103335 - RNA, 19 nt, Homo sapiens
  misc_RNA (1)...(19): siRNA sense strand
guaaguuggagagauugaa

SEQ ID NO: 1103336 - RNA, 19 nt, Homo sapiens
  misc_RNA (1)...(19): siRNA sense strand
ggucauugcaucccguaag

SEQ ID NO: 1103337 - RNA, 19 nt, Homo sapiens
  misc_RNA (1)...(19): siRNA sense strand
gacggguaccuucuacaug

SEQ ID NO: 1103338 - RNA, 19 nt, Homo sapiens
  misc_RNA (1)...(19): siRNA sense strand
acaaagcaggcacgaguca

SEQ ID NO: 1103339 - RNA, 19 nt, Homo sapiens
  misc_RNA (1)...(19): siRNA sense strand
aguggaauacggaucaauu

SEQ ID NO: 1103340 - RNA, 19 nt, Homo sapiens
  misc_RNA (1)...(19): siRNA sense strand
ugcaagagcagguguuuac

SEQ ID NO: 1103341 - RNA, 19 nt, Homo sapiens
  misc_RNA (1)...(19): siRNA sense strand
ccaaccuaccucccacaaa

SEQ ID NO: 1103342 - RNA, 19 nt, Homo sapiens
  misc_RNA (1)...(19): siRNA sense strand
ggaggaucuaucgucaaua

SEQ ID NO: 1103343 - RNA, 19 nt, Homo sapiens
  misc_RNA (1)...(19): siRNA sense strand
gagaagacuuuaaagguua

SEQ ID NO: 1103344 - RNA, 19 nt, Homo sapiens
  misc_RNA (1)...(19): siRNA sense strand
gaggaaagauggaugagaa

SEQ ID NO: 1103345 - RNA, 19 nt, Homo sapiens
  misc_RNA (1)...(19): siRNA sense strand
gcaagguggugaacgauga

SEQ ID NO: 1103346 - RNA, 19 nt, Homo sapiens
  misc_RNA (1)...(19): siRNA sense strand
ccacaaagcagaaagcuau

SEQ ID NO: 1103347 - RNA, 19 nt, Homo sapiens
  misc_RNA (1)...(19): siRNA sense strand
gaggagacuucaaccugua

SEQ ID NO: 1103348 - RNA, 19 nt, Homo sapiens
  misc_RNA (1)...(19): siRNA sense strand
caccagaccuucaugaaug

SEQ ID NO: 1103349 - RNA, 19 nt, Homo sapiens
  misc_RNA (1)...(19): siRNA sense strand
agagaagacuuuaaagguu

SEQ ID NO: 1103350 - RNA, 19 nt, Homo sapiens
  misc_RNA (1)...(19): siRNA sense strand
ucagaucgaugaccauguu

SEQ ID NO: 1103351 - RNA, 19 nt, Homo sapiens
  misc_RNA (1)...(19): siRNA sense strand
uaucgcagcugcuaagaug

SEQ ID NO: 1103352 - RNA, 19 nt, Homo sapiens
  misc_RNA (1)...(19): siRNA sense strand
ccacgaggcugacgucuac

SEQ ID NO: 1103353 - RNA, 19 nt, Homo sapiens
  misc_RNA (1)...(19): siRNA sense strand
gagagaagacuuuaaaggu

SEQ ID NO: 1103354 - RNA, 19 nt, Homo sapiens
  misc_RNA (1)...(19): siRNA sense strand
gaucacaggcccagaagga

SEQ ID NO: 1103355 - RNA, 19 nt, Homo sapiens
  misc_RNA (1)...(19): siRNA sense strand
ugagggaccuucacgaauc

SEQ ID NO: 1103356 - RNA, 19 nt, Homo sapiens
  misc_RNA (1)...(19): siRNA sense strand
ugacaggcuuacacuacua

SEQ ID NO: 1103357 - RNA, 19 nt, Homo sapiens
  misc_RNA (1)...(19): siRNA sense strand
cccaaggucugcugugauu

SEQ ID NO: 1103358 - RNA, 19 nt, Homo sapiens
  misc_RNA (1)...(19): siRNA sense strand
gaggcaagguggugaacga

SEQ ID NO: 1103359 - RNA, 19 nt, Homo sapiens
  misc_RNA (1)...(19): siRNA sense strand
gaacaucguggcaucagau

SEQ ID NO: 1103360 - RNA, 19 nt, Homo sapiens
  misc_RNA (1)...(19): siRNA sense strand
guacaugcuucgagacagu

SEQ ID NO: 1103361 - RNA, 19 nt, Homo sapiens
  misc_RNA (1)...(19): siRNA sense strand
agagagagaagacuuuaaa

SEQ ID NO: 1103362 - RNA, 19 nt, Homo sapiens
  misc_RNA (1)...(19): siRNA sense strand
cuaaggaggcacuggauuu

SEQ ID NO: 1103363 - RNA, 19 nt, Homo sapiens
  misc_RNA (1)...(19): siRNA sense strand
gaagccacucaucguguua

SEQ ID NO: 1103364 - RNA, 19 nt, Homo sapiens
  misc_RNA (1)...(19): siRNA sense strand
uaucucggcuggugacguu

SEQ ID NO: 1103365 - RNA, 19 nt, Homo sapiens
  misc_RNA (1)...(19): siRNA sense strand
gagaacggcgucuucaugu

SEQ ID NO: 1103366 - RNA, 19 nt, Homo sapiens
  misc_RNA (1)...(19): siRNA sense strand
ccagagagagaagacuuua

SEQ ID NO: 1103367 - RNA, 19 nt, Homo sapiens
  misc_RNA (1)...(19): siRNA sense strand
agaagggugucaacucguu

SEQ ID NO: 1103368 - RNA, 19 nt, Homo sapiens
  misc_RNA (1)...(19): siRNA sense strand
caaccuguaugagaacaug

SEQ ID NO: 1103369 - RNA, 19 nt, Homo sapiens
  misc_RNA (1)...(19): siRNA sense strand
ugaagccacucaucguguu

SEQ ID NO: 1103370 - RNA, 19 nt, Homo sapiens
  misc_RNA (1)...(19): siRNA sense strand
gaggagugguuggaggaaa

SEQ ID NO: 1103371 - RNA, 19 nt, Homo sapiens
  misc_RNA (1)...(19): siRNA sense strand
ucaacucguuccagauguu

SEQ ID NO: 1103372 - RNA, 19 nt, Homo sapiens
  misc_RNA (1)...(19): siRNA sense strand
cuaagcuucugaaccugua

SEQ ID NO: 1103373 - RNA, 19 nt, Homo sapiens
  misc_RNA (1)...(19): siRNA sense strand
caaucuaccuggucaacgu

SEQ ID NO: 1103374 - RNA, 19 nt, Homo sapiens
  misc_RNA (1)...(19): siRNA sense strand
ggaggcaccaccaugauca

SEQ ID NO: 1103375 - RNA, 19 nt, Homo sapiens
  misc_RNA (1)...(19): siRNA sense strand
caucgagaauggcaucauc

SEQ ID NO: 1103376 - RNA, 19 nt, Homo sapiens
  misc_RNA (1)...(19): siRNA sense strand
caaugacacucugaacauc

SEQ ID NO: 1103377 - RNA, 19 nt, Homo sapiens
  misc_RNA (1)...(19): siRNA sense strand
ccaaugacacucugaacau

SEQ ID NO: 1103378 - RNA, 19 nt, Homo sapiens
  misc_RNA (1)...(19): siRNA sense strand
acaaggaccuguacaugcu

SEQ ID NO: 1103379 - RNA, 19 nt, Homo sapiens
  misc_RNA (1)...(19): siRNA sense strand
gaucccacauggagugagu

SEQ ID NO: 1103380 - RNA, 19 nt, Homo sapiens
  misc_RNA (1)...(19): siRNA sense strand
agaaagcuaugggcaagga

SEQ ID NO: 1103381 - RNA, 19 nt, Homo sapiens
  misc_RNA (1)...(19): siRNA sense strand
caaggugaaagcagaaaug

SEQ ID NO: 1103382 - RNA, 19 nt, Homo sapiens
  misc_RNA (1)...(19): siRNA sense strand
caucagaucaccggccuuu

SEQ ID NO: 1103383 - RNA, 19 nt, Homo sapiens
  misc_RNA (1)...(19): siRNA sense strand
ugagccugcuggccaauga

SEQ ID NO: 1103384 - RNA, 19 nt, Homo sapiens
  misc_RNA (1)...(19): siRNA sense strand
ucagaucaccggccuuuca

SEQ ID NO: 1103385 - RNA, 19 nt, Homo sapiens
  misc_RNA (1)...(19): siRNA sense strand
ugagaacggcgucuucaug

SEQ ID NO: 1103386 - RNA, 19 nt, Homo sapiens
  misc_RNA (1)...(19): siRNA sense strand
ggagagaggagugguugga

SEQ ID NO: 1103387 - RNA, 19 nt, Homo sapiens
  misc_RNA (1)...(19): siRNA sense strand
aagcagaaauggagacacu

SEQ ID NO: 1103388 - RNA, 19 nt, Homo sapiens
  misc_RNA (1)...(19): siRNA sense strand
ccaccagaccuucaugaau

SEQ ID NO: 1103389 - RNA, 19 nt, Homo sapiens
  misc_RNA (1)...(19): siRNA sense strand
ggucgaguggcauuuggua

SEQ ID NO: 1103390 - RNA, 19 nt, Homo sapiens
  misc_RNA (1)...(19): siRNA sense strand
caugagggaccuucacgaa

SEQ ID NO: 1103391 - RNA, 19 nt, Homo sapiens
  misc_RNA (1)...(19): siRNA sense strand
uguggacgcuuaugagaag

SEQ ID NO: 1103392 - RNA, 19 nt, Homo sapiens
  misc_RNA (1)...(19): siRNA sense strand
uaaggaggcacuggauuug

SEQ ID NO: 1103393 - RNA, 19 nt, Homo sapiens
  misc_RNA (1)...(19): siRNA sense strand
ggaggaaagauggaugaga

SEQ ID NO: 1103394 - RNA, 19 nt, Homo sapiens
  misc_RNA (1)...(19): siRNA sense strand
gaaagcagaaauggagaca

SEQ ID NO: 1103395 - RNA, 19 nt, Homo sapiens
  misc_RNA (1)...(19): siRNA sense strand
gcaggucgaguggcauuug

SEQ ID NO: 1103396 - RNA, 19 nt, Homo sapiens
  misc_RNA (1)...(19): siRNA sense strand
gcuaaggaggcacuggauu

SEQ ID NO: 1103397 - RNA, 19 nt, Homo sapiens
  misc_RNA (1)...(19): siRNA sense strand
cagaaggaaucgagaucag

SEQ ID NO: 1103398 - RNA, 19 nt, Homo sapiens
  misc_RNA (1)...(19): siRNA sense strand
gcugacaggcuuacacuac

SEQ ID NO: 1103399 - RNA, 19 nt, Homo sapiens
  misc_RNA (1)...(19): siRNA sense strand
gacuucaaccuguaugaga

SEQ ID NO: 1103400 - RNA, 19 nt, Homo sapiens
  misc_RNA (1)...(19): siRNA sense strand
acaccaacaccucaaccua

SEQ ID NO: 1103401 - RNA, 19 nt, Homo sapiens
  misc_RNA (1)...(19): siRNA sense strand
cgaugaccauguuccaaag

SEQ ID NO: 1103402 - RNA, 19 nt, Homo sapiens
  misc_RNA (1)...(19): siRNA sense strand
ucgaugaccauguuccaaa

SEQ ID NO: 1103403 - RNA, 19 nt, Homo sapiens
  misc_RNA (1)...(19): siRNA sense strand
gagacuucaaccuguauga

SEQ ID NO: 1103404 - RNA, 19 nt, Homo sapiens
  misc_RNA (1)...(19): siRNA sense strand
ugaacaucguggcaucaga

SEQ ID NO: 1103405 - RNA, 19 nt, Homo sapiens
  misc_RNA (1)...(19): siRNA sense strand
cagagagagaagacuuuaa

SEQ ID NO: 1103406 - RNA, 19 nt, Homo sapiens
  misc_RNA (1)...(19): siRNA sense strand
caaggucugcugugauuac

SEQ ID NO: 1103407 - RNA, 19 nt, Homo sapiens
  misc_RNA (1)...(19): siRNA sense strand
gagagagaagacuuuaaag

SEQ ID NO: 1103408 - RNA, 19 nt, Homo sapiens
  misc_RNA (1)...(19): siRNA sense strand
ggacccagaagccacaaag

SEQ ID NO: 1103409 - RNA, 19 nt, Homo sapiens
  misc_RNA (1)...(19): siRNA sense strand
gccaaugacacucugaaca

SEQ ID NO: 1103410 - RNA, 19 nt, Homo sapiens
  misc_RNA (1)...(19): siRNA sense strand
ugauugaugccacaggaaa

SEQ ID NO: 1103411 - RNA, 19 nt, Homo sapiens
  misc_RNA (1)...(19): siRNA sense strand
ucacaggcccagaaggaau

SEQ ID NO: 1103412 - RNA, 19 nt, Homo sapiens
  misc_RNA (1)...(19): siRNA sense strand
gggagaagggugucaacuc

SEQ ID NO: 1103413 - RNA, 19 nt, Homo sapiens
  misc_RNA (1)...(19): siRNA sense strand
acuucaaccuguaugagaa

SEQ ID NO: 1103414 - RNA, 19 nt, Homo sapiens
  misc_RNA (1)...(19): siRNA sense strand
ccaguuccaacgcagcuaa

SEQ ID NO: 1103415 - RNA, 19 nt, Homo sapiens
  misc_RNA (1)...(19): siRNA sense strand
caccucaaccuaccucaug

SEQ ID NO: 1103416 - RNA, 19 nt, Homo sapiens
  misc_RNA (1)...(19): siRNA sense strand
gaagcugaagccacucauc

SEQ ID NO: 1103417 - RNA, 19 nt, Homo sapiens
  misc_RNA (1)...(19): siRNA sense strand
gacguuaucgcagcugcua

SEQ ID NO: 1103418 - RNA, 19 nt, Homo sapiens
  misc_RNA (1)...(19): siRNA sense strand
gucaacguguccaguaucu

SEQ ID NO: 1103419 - RNA, 19 nt, Homo sapiens
  misc_RNA (1)...(19): siRNA sense strand
ugucaacucguuccagaug

SEQ ID NO: 1103420 - RNA, 19 nt, Homo sapiens
  misc_RNA (1)...(19): siRNA sense strand
agaagacuuuaaagguuag

SEQ ID NO: 1103421 - RNA, 19 nt, Homo sapiens
  misc_RNA (1)...(19): siRNA sense strand
agaacggcgucuucaugug

SEQ ID NO: 1103422 - RNA, 19 nt, Homo sapiens
  misc_RNA (1)...(19): siRNA sense strand
agacacuggugagggagaa

SEQ ID NO: 1103423 - RNA, 19 nt, Homo sapiens
  misc_RNA (1)...(19): siRNA sense strand
gaaagcuaugggcaaggaa

SEQ ID NO: 1103424 - RNA, 19 nt, Homo sapiens
  misc_RNA (1)...(19): siRNA sense strand
ccagaaggaaucgagauca

SEQ ID NO: 1103425 - RNA, 19 nt, Homo sapiens
  misc_RNA (1)...(19): siRNA sense strand
cggagccgaugcugaugug

SEQ ID NO: 1103426 - RNA, 19 nt, Homo sapiens
  misc_RNA (1)...(19): siRNA sense strand
agagagaagacuuuaaagg

SEQ ID NO: 1103427 - RNA, 19 nt, Homo sapiens
  misc_RNA (1)...(19): siRNA sense strand
cguguuaucaccauugcaa

SEQ ID NO: 1103428 - RNA, 19 nt, Homo sapiens
  misc_RNA (1)...(19): siRNA sense strand
guaugagaacggcgucuuc

SEQ ID NO: 1103429 - RNA, 19 nt, Homo sapiens
  misc_RNA (1)...(19): siRNA sense strand
ggagaccaccacugcacau

SEQ ID NO: 1103430 - RNA, 19 nt, Homo sapiens
  misc_RNA (1)...(19): siRNA sense strand
caaagaagguucagauuga

SEQ ID NO: 1103431 - RNA, 19 nt, Homo sapiens
  misc_RNA (1)...(19): siRNA sense strand
gaucaggucugcuucaaau

SEQ ID NO: 1103432 - RNA, 19 nt, Homo sapiens
  misc_RNA (1)...(19): siRNA sense strand
gccaauaucuuucgaagga

SEQ ID NO: 1103433 - RNA, 19 nt, Homo sapiens
  misc_RNA (1)...(19): siRNA sense strand
uacagaagcuggauuaguu

SEQ ID NO: 1103434 - RNA, 19 nt, Homo sapiens
  misc_RNA (1)...(19): siRNA sense strand
gaagaagcaggaaggauaa

SEQ ID NO: 1103435 - RNA, 19 nt, Homo sapiens
  misc_RNA (1)...(19): siRNA sense strand
gcaaggaggugcaggugau

SEQ ID NO: 1103436 - RNA, 19 nt, Homo sapiens
  misc_RNA (1)...(19): siRNA sense strand
ccaccaaguucacaaagaa

SEQ ID NO: 1103437 - RNA, 19 nt, Homo sapiens
  misc_RNA (1)...(19): siRNA sense strand
aaggauaaaugccauauug

SEQ ID NO: 1103438 - RNA, 19 nt, Homo sapiens
  misc_RNA (1)...(19): siRNA sense strand
gcacaaguaucccauuggu

SEQ ID NO: 1103439 - RNA, 19 nt, Homo sapiens
  misc_RNA (1)...(19): siRNA sense strand
gaagauucucugugucaua

SEQ ID NO: 1103440 - RNA, 19 nt, Homo sapiens
  misc_RNA (1)...(19): siRNA sense strand
gaagaaacaguuacaagca

SEQ ID NO: 1103441 - RNA, 19 nt, Homo sapiens
  misc_RNA (1)...(19): siRNA sense strand
cagauggccugagugaaua

SEQ ID NO: 1103442 - RNA, 19 nt, Homo sapiens
  misc_RNA (1)...(19): siRNA sense strand
gaagcuggauuaguuaaca

SEQ ID NO: 1103443 - RNA, 19 nt, Homo sapiens
  misc_RNA (1)...(19): siRNA sense strand
cagagacccuuuaaagaug

SEQ ID NO: 1103444 - RNA, 19 nt, Homo sapiens
  misc_RNA (1)...(19): siRNA sense strand
agaagaagcaggaaggaua

SEQ ID NO: 1103445 - RNA, 19 nt, Homo sapiens
  misc_RNA (1)...(19): siRNA sense strand
ggaguggccugguaaggau

SEQ ID NO: 1103446 - RNA, 19 nt, Homo sapiens
  misc_RNA (1)...(19): siRNA sense strand
ccaggacucugaagaaaca

SEQ ID NO: 1103447 - RNA, 19 nt, Homo sapiens
  misc_RNA (1)...(19): siRNA sense strand
ccagagacccuuuaaagau

SEQ ID NO: 1103448 - RNA, 19 nt, Homo sapiens
  misc_RNA (1)...(19): siRNA sense strand
acacagauaagcacaagua

SEQ ID NO: 1103449 - RNA, 19 nt, Homo sapiens
  misc_RNA (1)...(19): siRNA sense strand
gguguuccuugggauauua

SEQ ID NO: 1103450 - RNA, 19 nt, Homo sapiens
  misc_RNA (1)...(19): siRNA sense strand
gaggaauucaugaucauuu

SEQ ID NO: 1103451 - RNA, 19 nt, Homo sapiens
  misc_RNA (1)...(19): siRNA sense strand
caacggaguuaccugaaag

SEQ ID NO: 1103452 - RNA, 19 nt, Homo sapiens
  misc_RNA (1)...(19): siRNA sense strand
uaauaugccuaaaggguau

SEQ ID NO: 1103453 - RNA, 19 nt, Homo sapiens
  misc_RNA (1)...(19): siRNA sense strand
ccaacggaguuaccugaaa

SEQ ID NO: 1103454 - RNA, 19 nt, Homo sapiens
  misc_RNA (1)...(19): siRNA sense strand
ggauaaaugccauauugga

SEQ ID NO: 1103455 - RNA, 19 nt, Homo sapiens
  misc_RNA (1)...(19): siRNA sense strand
caucuugaacgaccuauuu

SEQ ID NO: 1103456 - RNA, 19 nt, Homo sapiens
  misc_RNA (1)...(19): siRNA sense strand
ggauaauucucuggauuuc

SEQ ID NO: 1103457 - RNA, 19 nt, Homo sapiens
  misc_RNA (1)...(19): siRNA sense strand
ccaaagguaauaugccuaa

SEQ ID NO: 1103458 - RNA, 19 nt, Homo sapiens
  misc_RNA (1)...(19): siRNA sense strand
ccagauggccugagugaau

SEQ ID NO: 1103459 - RNA, 19 nt, Homo sapiens
  misc_RNA (1)...(19): siRNA sense strand
gagaucaggucugcuucaa

SEQ ID NO: 1103460 - RNA, 19 nt, Homo sapiens
  misc_RNA (1)...(19): siRNA sense strand
gauaaaugccauauuggau

SEQ ID NO: 1103461 - RNA, 19 nt, Homo sapiens
  misc_RNA (1)...(19): siRNA sense strand
acaaagaagguucagauug

SEQ ID NO: 1103462 - RNA, 19 nt, Homo sapiens
  misc_RNA (1)...(19): siRNA sense strand
gaaggauaaaugccauauu

SEQ ID NO: 1103463 - RNA, 19 nt, Homo sapiens
  misc_RNA (1)...(19): siRNA sense strand
ggucgugugacuuucaaua

SEQ ID NO: 1103464 - RNA, 19 nt, Homo sapiens
  misc_RNA (1)...(19): siRNA sense strand
ccucgaagcucccaaagac

SEQ ID NO: 1103465 - RNA, 19 nt, Homo sapiens
  misc_RNA (1)...(19): siRNA sense strand
ggucugacuugguggacaa

SEQ ID NO: 1103466 - RNA, 19 nt, Homo sapiens
  misc_RNA (1)...(19): siRNA sense strand
ugggaaauguccuaggaaa

SEQ ID NO: 1103467 - RNA, 19 nt, Homo sapiens
  misc_RNA (1)...(19): siRNA sense strand
guaguaaugccaauaucuu

SEQ ID NO: 1103468 - RNA, 19 nt, Homo sapiens
  misc_RNA (1)...(19): siRNA sense strand
ucacaaagaagguucagau

SEQ ID NO: 1103469 - RNA, 19 nt, Homo sapiens
  misc_RNA (1)...(19): siRNA sense strand
cauugucacuggaagaaga

SEQ ID NO: 1103470 - RNA, 19 nt, Homo sapiens
  misc_RNA (1)...(19): siRNA sense strand
uauuacagaagcuggauua

SEQ ID NO: 1103471 - RNA, 19 nt, Homo sapiens
  misc_RNA (1)...(19): siRNA sense strand
ggagguguuccuugggaua

SEQ ID NO: 1103472 - RNA, 19 nt, Homo sapiens
  misc_RNA (1)...(19): siRNA sense strand
aaccagugcuucaaagaga

SEQ ID NO: 1103473 - RNA, 19 nt, Homo sapiens
  misc_RNA (1)...(19): siRNA sense strand
aagauucucugugucauau

SEQ ID NO: 1103474 - RNA, 19 nt, Homo sapiens
  misc_RNA (1)...(19): siRNA sense strand
ugucauaucugcaguucuc

SEQ ID NO: 1103475 - RNA, 19 nt, Homo sapiens
  misc_RNA (1)...(19): siRNA sense strand
gagcccagauggccugagu

SEQ ID NO: 1103476 - RNA, 19 nt, Homo sapiens
  misc_RNA (1)...(19): siRNA sense strand
aagcacaaguaucccauug

SEQ ID NO: 1103477 - RNA, 19 nt, Homo sapiens
  misc_RNA (1)...(19): siRNA sense strand
gguauuagccgacaguaac

SEQ ID NO: 1103478 - RNA, 19 nt, Homo sapiens
  misc_RNA (1)...(19): siRNA sense strand
agucugcacuacaccuaua

SEQ ID NO: 1103479 - RNA, 19 nt, Homo sapiens
  misc_RNA (1)...(19): siRNA sense strand
guucuggucgugugacuuu

SEQ ID NO: 1103480 - RNA, 19 nt, Homo sapiens
  misc_RNA (1)...(19): siRNA sense strand
gaagaagaagcaggaagga

SEQ ID NO: 1103481 - RNA, 19 nt, Homo sapiens
  misc_RNA (1)...(19): siRNA sense strand
caaagaccccuucagcaua

SEQ ID NO: 1103482 - RNA, 19 nt, Homo sapiens
  misc_RNA (1)...(19): siRNA sense strand
caaagguaauaugccuaaa

SEQ ID NO: 1103483 - RNA, 19 nt, Homo sapiens
  misc_RNA (1)...(19): siRNA sense strand
acagaagcuggauuaguua

SEQ ID NO: 1103484 - RNA, 19 nt, Homo sapiens
  misc_RNA (1)...(19): siRNA sense strand
aggaauucaugaucauuug

SEQ ID NO: 1103485 - RNA, 19 nt, Homo sapiens
  misc_RNA (1)...(19): siRNA sense strand
uaucuggucuucgaacuag

SEQ ID NO: 1103486 - RNA, 19 nt, Homo sapiens
  misc_RNA (1)...(19): siRNA sense strand
gcaggaaggauaaaagauu

SEQ ID NO: 1103487 - RNA, 19 nt, Homo sapiens
  misc_RNA (1)...(19): siRNA sense strand
gcacccaggacucagauuc

SEQ ID NO: 1103488 - RNA, 19 nt, Homo sapiens
  misc_RNA (1)...(19): siRNA sense strand
ccuauaaaccgaggaauuc

SEQ ID NO: 1103489 - RNA, 19 nt, Homo sapiens
  misc_RNA (1)...(19): siRNA sense strand
ugacacagauaagcacaag

SEQ ID NO: 1103490 - RNA, 19 nt, Homo sapiens
  misc_RNA (1)...(19): siRNA sense strand
uggauaauucucuggauuu

SEQ ID NO: 1103491 - RNA, 19 nt, Homo sapiens
  misc_RNA (1)...(19): siRNA sense strand
guccggagcccaucucaga

SEQ ID NO: 1103492 - RNA, 19 nt, Homo sapiens
  misc_RNA (1)...(19): siRNA sense strand
uaaaggguauguguaucug

SEQ ID NO: 1103493 - RNA, 19 nt, Homo sapiens
  misc_RNA (1)...(19): siRNA sense strand
gaucaaaaccaccaaguuc

SEQ ID NO: 1103494 - RNA, 19 nt, Homo sapiens
  misc_RNA (1)...(19): siRNA sense strand
ggacucugaagaaacaguu

SEQ ID NO: 1103495 - RNA, 19 nt, Homo sapiens
  misc_RNA (1)...(19): siRNA sense strand
guucucagccugguccuuu

SEQ ID NO: 1103496 - RNA, 19 nt, Homo sapiens
  misc_RNA (1)...(19): siRNA sense strand
gauucucugugucauaucu

SEQ ID NO: 1103497 - RNA, 19 nt, Homo sapiens
  misc_RNA (1)...(19): siRNA sense strand
gaaggaugcgcugcaagga

SEQ ID NO: 1103498 - RNA, 19 nt, Homo sapiens
  misc_RNA (1)...(19): siRNA sense strand
gcccagauggccugaguga

SEQ ID NO: 1103499 - RNA, 19 nt, Homo sapiens
  misc_RNA (1)...(19): siRNA sense strand
ucucucagauuugauuuca

SEQ ID NO: 1103500 - RNA, 19 nt, Homo sapiens
  misc_RNA (1)...(19): siRNA sense strand
gguguccucccaaagguaa

SEQ ID NO: 1103501 - RNA, 19 nt, Homo sapiens
  misc_RNA (1)...(19): siRNA sense strand
aagguaauaugccuaaagg

SEQ ID NO: 1103502 - RNA, 19 nt, Homo sapiens
  misc_RNA (1)...(19): siRNA sense strand
guauguguaucuggucuuc

SEQ ID NO: 1103503 - RNA, 19 nt, Homo sapiens
  misc_RNA (1)...(19): siRNA sense strand
gccuaaaggguauguguau

SEQ ID NO: 1103504 - RNA, 19 nt, Homo sapiens
  misc_RNA (1)...(19): siRNA sense strand
uuggauaauucucuggauu

SEQ ID NO: 1103505 - RNA, 19 nt, Homo sapiens
  misc_RNA (1)...(19): siRNA sense strand
cagaagcuggauuaguuaa

SEQ ID NO: 1103506 - RNA, 19 nt, Homo sapiens
  misc_RNA (1)...(19): siRNA sense strand
ugaaugaagccaccuguac

SEQ ID NO: 1103507 - RNA, 19 nt, Homo sapiens
  misc_RNA (1)...(19): siRNA sense strand
uggccugagugaauauuau

SEQ ID NO: 1103508 - RNA, 19 nt, Homo sapiens
  misc_RNA (1)...(19): siRNA sense strand
cacaaagaagguucagauu

SEQ ID NO: 1103509 - RNA, 19 nt, Homo sapiens
  misc_RNA (1)...(19): siRNA sense strand
ccugcucucuccacgugua

SEQ ID NO: 1103510 - RNA, 19 nt, Homo sapiens
  misc_RNA (1)...(19): siRNA sense strand
ggauugacacagauaagca

SEQ ID NO: 1103511 - RNA, 19 nt, Homo sapiens
  misc_RNA (1)...(19): siRNA sense strand
caggaaggauaaaagauug

SEQ ID NO: 1103512 - RNA, 19 nt, Homo sapiens
  misc_RNA (1)...(19): siRNA sense strand
gucgugugacuuucaauaa

SEQ ID NO: 1103513 - RNA, 19 nt, Homo sapiens
  misc_RNA (1)...(19): siRNA sense strand
gcucucuccacguguagua

SEQ ID NO: 1103514 - RNA, 19 nt, Homo sapiens
  misc_RNA (1)...(19): siRNA sense strand
ggugauccccuggguauua

SEQ ID NO: 1103515 - RNA, 19 nt, Homo sapiens
  misc_RNA (1)...(19): siRNA sense strand
auaauucucuggauuucag

SEQ ID NO: 1103516 - RNA, 19 nt, Homo sapiens
  misc_RNA (1)...(19): siRNA sense strand
acugggaaauguccuagga

SEQ ID NO: 1103517 - RNA, 19 nt, Homo sapiens
  misc_RNA (1)...(19): siRNA sense strand
ggagcacccaggacucaga

SEQ ID NO: 1103518 - RNA, 19 nt, Homo sapiens
  misc_RNA (1)...(19): siRNA sense strand
gauuucaagccuucgcauu

SEQ ID NO: 1103519 - RNA, 19 nt, Homo sapiens
  misc_RNA (1)...(19): siRNA sense strand
gugaaugaagccaccugua

SEQ ID NO: 1103520 - RNA, 19 nt, Homo sapiens
  misc_RNA (1)...(19): siRNA sense strand
cccagagacccuuuaaaga

SEQ ID NO: 1103521 - RNA, 19 nt, Homo sapiens
  misc_RNA (1)...(19): siRNA sense strand
uuucaagccuucgcauuuc

SEQ ID NO: 1103522 - RNA, 19 nt, Homo sapiens
  misc_RNA (1)...(19): siRNA sense strand
ccaaccagugcuucaaaga

SEQ ID NO: 1103523 - RNA, 19 nt, Homo sapiens
  misc_RNA (1)...(19): siRNA sense strand
aaaccaccaaguucacaaa

SEQ ID NO: 1103524 - RNA, 19 nt, Homo sapiens
  misc_RNA (1)...(19): siRNA sense strand
ggguauuagccgacaguaa

SEQ ID NO: 1103525 - RNA, 19 nt, Homo sapiens
  misc_RNA (1)...(19): siRNA sense strand
guaucuggucuucgaacua

SEQ ID NO: 1103526 - RNA, 19 nt, Homo sapiens
  misc_RNA (1)...(19): siRNA sense strand
ucccagagacccuuuaaag

SEQ ID NO: 1103527 - RNA, 19 nt, Homo sapiens
  misc_RNA (1)...(19): siRNA sense strand
cuaaaggguauguguaucu

SEQ ID NO: 1103528 - RNA, 19 nt, Homo sapiens
  misc_RNA (1)...(19): siRNA sense strand
caaccagugcuucaaagag

SEQ ID NO: 1103529 - RNA, 19 nt, Homo sapiens
  misc_RNA (1)...(19): siRNA sense strand
uuccaggacucugaagaaa

SEQ ID NO: 1103530 - RNA, 19 nt, Homo sapiens
  misc_RNA (1)...(19): siRNA sense strand
ccaaauauaugcacaaaga

SEQ ID NO: 1103531 - RNA, 19 nt, Homo sapiens
  misc_RNA (1)...(19): siRNA sense strand
aaacagagcuggccaagca

SEQ ID NO: 1103532 - RNA, 19 nt, Homo sapiens
  misc_RNA (1)...(19): siRNA sense strand
gcaggaagcuuuggagaug

SEQ ID NO: 1103533 - RNA, 19 nt, Homo sapiens
  misc_RNA (1)...(19): siRNA sense strand
ucaaugagaucgucuacuu

SEQ ID NO: 1103534 - RNA, 19 nt, Homo sapiens
  misc_RNA (1)...(19): siRNA sense strand
caaagaacuucaaggagaa

SEQ ID NO: 1103535 - RNA, 19 nt, Homo sapiens
  misc_RNA (1)...(19): siRNA sense strand
ggaagaccauugauugcaa

SEQ ID NO: 1103536 - RNA, 19 nt, Homo sapiens
  misc_RNA (1)...(19): siRNA sense strand
gaggaugacuucaacaaca

SEQ ID NO: 1103537 - RNA, 19 nt, Homo sapiens
  misc_RNA (1)...(19): siRNA sense strand
gggaucaucuggaauagga

SEQ ID NO: 1103538 - RNA, 19 nt, Homo sapiens
  misc_RNA (1)...(19): siRNA sense strand
gcagacagccaaauauaug

SEQ ID NO: 1103539 - RNA, 19 nt, Homo sapiens
  misc_RNA (1)...(19): siRNA sense strand
caucaaacaugagguagaa

SEQ ID NO: 1103540 - RNA, 19 nt, Homo sapiens
  misc_RNA (1)...(19): siRNA sense strand
ccagauaagugacaagauc

SEQ ID NO: 1103541 - RNA, 19 nt, Homo sapiens
  misc_RNA (1)...(19): siRNA sense strand
uuacaagacugccaaggaa

SEQ ID NO: 1103542 - RNA, 19 nt, Homo sapiens
  misc_RNA (1)...(19): siRNA sense strand
gcaagaguccguccaacaa

SEQ ID NO: 1103543 - RNA, 19 nt, Homo sapiens
  misc_RNA (1)...(19): siRNA sense strand
gacacgagguggccaaguu

SEQ ID NO: 1103544 - RNA, 19 nt, Homo sapiens
  misc_RNA (1)...(19): siRNA sense strand
ccaagcagacagccaaaua

SEQ ID NO: 1103545 - RNA, 19 nt, Homo sapiens
  misc_RNA (1)...(19): siRNA sense strand
caacaaggaacuaaacuuc

SEQ ID NO: 1103546 - RNA, 19 nt, Homo sapiens
  misc_RNA (1)...(19): siRNA sense strand
ggacacacacccuuggauu

SEQ ID NO: 1103547 - RNA, 19 nt, Homo sapiens
  misc_RNA (1)...(19): siRNA sense strand
gacacacacccuuggauua

SEQ ID NO: 1103548 - RNA, 19 nt, Homo sapiens
  misc_RNA (1)...(19): siRNA sense strand
ggaaggagaauggcuggua

SEQ ID NO: 1103549 - RNA, 19 nt, Homo sapiens
  misc_RNA (1)...(19): siRNA sense strand
ggacaagugcccuggaguu

SEQ ID NO: 1103550 - RNA, 19 nt, Homo sapiens
  misc_RNA (1)...(19): siRNA sense strand
gcacuaugcuguucuugcu

SEQ ID NO: 1103551 - RNA, 19 nt, Homo sapiens
  misc_RNA (1)...(19): siRNA sense strand
ccaacaauaugcaagaagu

SEQ ID NO: 1103552 - RNA, 19 nt, Homo sapiens
  misc_RNA (1)...(19): siRNA sense strand
uaaaggagcacaucauugg

SEQ ID NO: 1103553 - RNA, 19 nt, Homo sapiens
  misc_RNA (1)...(19): siRNA sense strand
gaagccaaguaccaagaga

SEQ ID NO: 1103554 - RNA, 19 nt, Homo sapiens
  misc_RNA (1)...(19): siRNA sense strand
gaugauuucagcaguguuu

SEQ ID NO: 1103555 - RNA, 19 nt, Homo sapiens
  misc_RNA (1)...(19): siRNA sense strand
gaugagccguaaccguauu

SEQ ID NO: 1103556 - RNA, 19 nt, Homo sapiens
  misc_RNA (1)...(19): siRNA sense strand
gcuacaaugugcacuaugg

SEQ ID NO: 1103557 - RNA, 19 nt, Homo sapiens
  misc_RNA (1)...(19): siRNA sense strand
ggaggacgcuucgauacca

SEQ ID NO: 1103558 - RNA, 19 nt, Homo sapiens
  misc_RNA (1)...(19): siRNA sense strand
gaaaagggaagaccauuga

SEQ ID NO: 1103559 - RNA, 19 nt, Homo sapiens
  misc_RNA (1)...(19): siRNA sense strand
gagaugauuucagcagugu

SEQ ID NO: 1103560 - RNA, 19 nt, Homo sapiens
  misc_RNA (1)...(19): siRNA sense strand
gagaggaugacuucaacaa

SEQ ID NO: 1103561 - RNA, 19 nt, Homo sapiens
  misc_RNA (1)...(19): siRNA sense strand
acaaggaacuaaacuucug

SEQ ID NO: 1103562 - RNA, 19 nt, Homo sapiens
  misc_RNA (1)...(19): siRNA sense strand
ggugcucuuugaugaagua

SEQ ID NO: 1103563 - RNA, 19 nt, Homo sapiens
  misc_RNA (1)...(19): siRNA sense strand
aagcagacagccaaauaua

SEQ ID NO: 1103564 - RNA, 19 nt, Homo sapiens
  misc_RNA (1)...(19): siRNA sense strand
guggccagcugaccaagaa

SEQ ID NO: 1103565 - RNA, 19 nt, Homo sapiens
  misc_RNA (1)...(19): siRNA sense strand
gcacggccuugcacuaugc

SEQ ID NO: 1103566 - RNA, 19 nt, Homo sapiens
  misc_RNA (1)...(19): siRNA sense strand
acaaaccaguggacaagug

SEQ ID NO: 1103567 - RNA, 19 nt, Homo sapiens
  misc_RNA (1)...(19): siRNA sense strand
gccaagagagccaagcaaa

SEQ ID NO: 1103568 - RNA, 19 nt, Homo sapiens
  misc_RNA (1)...(19): siRNA sense strand
gauucgcccuauccugaaa

SEQ ID NO: 1103569 - RNA, 19 nt, Homo sapiens
  misc_RNA (1)...(19): siRNA sense strand
gcaaggacgccaucuucau

SEQ ID NO: 1103570 - RNA, 19 nt, Homo sapiens
  misc_RNA (1)...(19): siRNA sense strand
caagcagacagccaaauau

SEQ ID NO: 1103571 - RNA, 19 nt, Homo sapiens
  misc_RNA (1)...(19): siRNA sense strand
gaaacaacagugugguaca

SEQ ID NO: 1103572 - RNA, 19 nt, Homo sapiens
  misc_RNA (1)...(19): siRNA sense strand
gaucaucuggaauaggaaa

SEQ ID NO: 1103573 - RNA, 19 nt, Homo sapiens
  misc_RNA (1)...(19): siRNA sense strand
caucaugaccuccaaugug

SEQ ID NO: 1103574 - RNA, 19 nt, Homo sapiens
  misc_RNA (1)...(19): siRNA sense strand
agacaaggcccauccagau

SEQ ID NO: 1103575 - RNA, 19 nt, Homo sapiens
  misc_RNA (1)...(19): siRNA sense strand
ccaaugcuguggugcucuu

SEQ ID NO: 1103576 - RNA, 19 nt, Homo sapiens
  misc_RNA (1)...(19): siRNA sense strand
gagguggccaaguuuauug

SEQ ID NO: 1103577 - RNA, 19 nt, Homo sapiens
  misc_RNA (1)...(19): siRNA sense strand
caagagagccaagcaaagg

SEQ ID NO: 1103578 - RNA, 19 nt, Homo sapiens
  misc_RNA (1)...(19): siRNA sense strand
ggacucagacaagcagcua

SEQ ID NO: 1103579 - RNA, 19 nt, Homo sapiens
  misc_RNA (1)...(19): siRNA sense strand
caaggaugcagcccuguug

SEQ ID NO: 1103580 - RNA, 19 nt, Homo sapiens
  misc_RNA (1)...(19): siRNA sense strand
ucucaaagaacuucaagga

SEQ ID NO: 1103581 - RNA, 19 nt, Homo sapiens
  misc_RNA (1)...(19): siRNA sense strand
caaggacgccaucuucauc

SEQ ID NO: 1103582 - RNA, 19 nt, Homo sapiens
  misc_RNA (1)...(19): siRNA sense strand
aaagggaagaccauugauu

SEQ ID NO: 1103583 - RNA, 19 nt, Homo sapiens
  misc_RNA (1)...(19): siRNA sense strand
caagugcccuggaguucag

SEQ ID NO: 1103584 - RNA, 19 nt, Homo sapiens
  misc_RNA (1)...(19): siRNA sense strand
gcucuuugaugaaguagac

SEQ ID NO: 1103585 - RNA, 19 nt, Homo sapiens
  misc_RNA (1)...(19): siRNA sense strand
ggaugcagcccuguuggaa

SEQ ID NO: 1103586 - RNA, 19 nt, Homo sapiens
  misc_RNA (1)...(19): siRNA sense strand
ucauccaacucgucaacaa

SEQ ID NO: 1103587 - RNA, 19 nt, Homo sapiens
  misc_RNA (1)...(19): siRNA sense strand
aagggaagaccauugauug

SEQ ID NO: 1103588 - RNA, 19 nt, Homo sapiens
  misc_RNA (1)...(19): siRNA sense strand
gucagaaggugcagauguc

SEQ ID NO: 1103589 - RNA, 19 nt, Homo sapiens
  misc_RNA (1)...(19): siRNA sense strand
agacaagcagcuacucaaa

SEQ ID NO: 1103590 - RNA, 19 nt, Homo sapiens
  misc_RNA (1)...(19): siRNA sense strand
gaacuucaaggagaaugug

SEQ ID NO: 1103591 - RNA, 19 nt, Homo sapiens
  misc_RNA (1)...(19): siRNA sense strand
cagcgcuggugguucauug

SEQ ID NO: 1103592 - RNA, 19 nt, Homo sapiens
  misc_RNA (1)...(19): siRNA sense strand
gaauggcugguacgaugaa

SEQ ID NO: 1103593 - RNA, 19 nt, Homo sapiens
  misc_RNA (1)...(19): siRNA sense strand
cuaaaggagcacaucauug

SEQ ID NO: 1103594 - RNA, 19 nt, Homo sapiens
  misc_RNA (1)...(19): siRNA sense strand
acacacacccuuggauuau

SEQ ID NO: 1103595 - RNA, 19 nt, Homo sapiens
  misc_RNA (1)...(19): siRNA sense strand
cagggaggacgcuucgaua

SEQ ID NO: 1103596 - RNA, 19 nt, Homo sapiens
  misc_RNA (1)...(19): siRNA sense strand
aagcaaaggcacaacauca

SEQ ID NO: 1103597 - RNA, 19 nt, Homo sapiens
  misc_RNA (1)...(19): siRNA sense strand
gaggacgcuucgauaccaa

SEQ ID NO: 1103598 - RNA, 19 nt, Homo sapiens
  misc_RNA (1)...(19): siRNA sense strand
acucggagcucauccaacu

SEQ ID NO: 1103599 - RNA, 19 nt, Homo sapiens
  misc_RNA (1)...(19): siRNA sense strand
caagccggcacaucacaaa

SEQ ID NO: 1103600 - RNA, 19 nt, Homo sapiens
  misc_RNA (1)...(19): siRNA sense strand
gggauguccagauaaguga

SEQ ID NO: 1103601 - RNA, 19 nt, Homo sapiens
  misc_RNA (1)...(19): siRNA sense strand
cuugggaucaucuggaaua

SEQ ID NO: 1103602 - RNA, 19 nt, Homo sapiens
  misc_RNA (1)...(19): siRNA sense strand
aaacaacagugugguacag

SEQ ID NO: 1103603 - RNA, 19 nt, Homo sapiens
  misc_RNA (1)...(19): siRNA sense strand
caggaagcuuuggagauga

SEQ ID NO: 1103604 - RNA, 19 nt, Homo sapiens
  misc_RNA (1)...(19): siRNA sense strand
ugcugcagcuguuugauga

SEQ ID NO: 1103605 - RNA, 19 nt, Homo sapiens
  misc_RNA (1)...(19): siRNA sense strand
ccaaguaccaagagaagca

SEQ ID NO: 1103606 - RNA, 19 nt, Homo sapiens
  misc_RNA (1)...(19): siRNA sense strand
gaaugaaaugggacacaca

SEQ ID NO: 1103607 - RNA, 19 nt, Homo sapiens
  misc_RNA (1)...(19): siRNA sense strand
ggucgacggcuacaaugug

SEQ ID NO: 1103608 - RNA, 19 nt, Homo sapiens
  misc_RNA (1)...(19): siRNA sense strand
ggacgccaucuucaucaug

SEQ ID NO: 1103609 - RNA, 19 nt, Homo sapiens
  misc_RNA (1)...(19): siRNA sense strand
cagcugaccaagaaguuga

SEQ ID NO: 1103610 - RNA, 19 nt, Homo sapiens
  misc_RNA (1)...(19): siRNA sense strand
cgagguggccaaguuuauu

SEQ ID NO: 1103611 - RNA, 19 nt, Homo sapiens
  misc_RNA (1)...(19): siRNA sense strand
gcaagccggcacaucacaa

SEQ ID NO: 1103612 - RNA, 19 nt, Homo sapiens
  misc_RNA (1)...(19): siRNA sense strand
cuaaacuucugggccaaga

SEQ ID NO: 1103613 - RNA, 19 nt, Homo sapiens
  misc_RNA (1)...(19): siRNA sense strand
gugcugcgauccggaggaa

SEQ ID NO: 1103614 - RNA, 19 nt, Homo sapiens
  misc_RNA (1)...(19): siRNA sense strand
gacaagugcccuggaguuc

SEQ ID NO: 1103615 - RNA, 19 nt, Homo sapiens
  misc_RNA (1)...(19): siRNA sense strand
ucaacaaggaacuaaacuu

SEQ ID NO: 1103616 - RNA, 19 nt, Homo sapiens
  misc_RNA (1)...(19): siRNA sense strand
cgacuaaaggagcacauca

SEQ ID NO: 1103617 - RNA, 19 nt, Homo sapiens
  misc_RNA (1)...(19): siRNA sense strand
ccgaaacaacaguguggua

SEQ ID NO: 1103618 - RNA, 19 nt, Homo sapiens
  misc_RNA (1)...(19): siRNA sense strand
ccgagaggaugacuucaac

SEQ ID NO: 1103619 - RNA, 19 nt, Homo sapiens
  misc_RNA (1)...(19): siRNA sense strand
gucuggagaucaucgacaa

SEQ ID NO: 1103620 - RNA, 19 nt, Homo sapiens
  misc_RNA (1)...(19): siRNA sense strand
cggcuacaaugugcacuau

SEQ ID NO: 1103621 - RNA, 19 nt, Homo sapiens
  misc_RNA (1)...(19): siRNA sense strand
gccaucaaccgaaacaaca

SEQ ID NO: 1103622 - RNA, 19 nt, Homo sapiens
  misc_RNA (1)...(19): siRNA sense strand
ggaaaagggaagaccauug

SEQ ID NO: 1103623 - RNA, 19 nt, Homo sapiens
  misc_RNA (1)...(19): siRNA sense strand
ccucuggucuuccucuucu

SEQ ID NO: 1103624 - RNA, 19 nt, Homo sapiens
  misc_RNA (1)...(19): siRNA sense strand
agaacacccucuggucuuc

SEQ ID NO: 1103625 - RNA, 19 nt, Homo sapiens
  misc_RNA (1)...(19): siRNA sense strand
acuaaaggagcacaucauu

SEQ ID NO: 1103626 - RNA, 19 nt, Homo sapiens
  misc_RNA (1)...(19): siRNA sense strand
ucacaaaccaguggacaag

SEQ ID NO: 1103627 - RNA, 19 nt, Homo sapiens
  misc_RNA (1)...(19): siRNA sense strand
ccaucaugcugcagcuguu

SEQ ID NO: 1103628 - RNA, 19 nt, Homo sapiens
  misc_RNA (1)...(19): siRNA sense strand
caggcuacguuggccauga

SEQ ID NO: 1103629 - RNA, 19 nt, Homo sapiens
  misc_RNA (1)...(19): siRNA sense strand
acacgagguggccaaguuu

SEQ ID NO: 1103630 - RNA, 19 nt, Homo sapiens
  misc_RNA (1)...(19): siRNA sense strand
gugggcagcuguuguacua

SEQ ID NO: 1103631 - RNA, 19 nt, Homo sapiens
  misc_RNA (1)...(19): siRNA sense strand
ucucugagcuugcgucaug

SEQ ID NO: 1103632 - RNA, 19 nt, Homo sapiens
  misc_RNA (1)...(19): siRNA sense strand
gccagaagauaaagaaauc

SEQ ID NO: 1103633 - RNA, 19 nt, Homo sapiens
  misc_RNA (1)...(19): siRNA sense strand
agaagcagcuggcacagau

SEQ ID NO: 1103634 - RNA, 19 nt, Homo sapiens
  misc_RNA (1)...(19): siRNA sense strand
gggcagcuguuguacuauc

SEQ ID NO: 1103635 - RNA, 19 nt, Homo sapiens
  misc_RNA (1)...(19): siRNA sense strand
gagccaaggaggcacagaa

SEQ ID NO: 1103636 - RNA, 19 nt, Homo sapiens
  misc_RNA (1)...(19): siRNA sense strand
ggccagaagauaaagaaau

SEQ ID NO: 1103637 - RNA, 19 nt, Homo sapiens
  misc_RNA (1)...(19): siRNA sense strand
gcaccgacaccuacgucaa

SEQ ID NO: 1103638 - RNA, 19 nt, Homo sapiens
  misc_RNA (1)...(19): siRNA sense strand
ccaaggaggcacagaagca

SEQ ID NO: 1103639 - RNA, 19 nt, Homo sapiens
  misc_RNA (1)...(19): siRNA sense strand
ggacaccaucucugagcuu

SEQ ID NO: 1103640 - RNA, 19 nt, Homo sapiens
  misc_RNA (1)...(19): siRNA sense strand
uggagaaggccuugaguca

SEQ ID NO: 1103641 - RNA, 19 nt, Homo sapiens
  misc_RNA (1)...(19): siRNA sense strand
cagcuguuguacuaucaug

SEQ ID NO: 1103642 - RNA, 19 nt, Homo sapiens
  misc_RNA (1)...(19): siRNA sense strand
ggcagcuguuguacuauca

SEQ ID NO: 1103643 - RNA, 19 nt, Homo sapiens
  misc_RNA (1)...(19): siRNA sense strand
gacucgugcugcccuacaa

SEQ ID NO: 1103644 - RNA, 19 nt, Homo sapiens
  misc_RNA (1)...(19): siRNA sense strand
gcaauguuggccagaucaa

SEQ ID NO: 1103645 - RNA, 19 nt, Homo sapiens
  misc_RNA (1)...(19): siRNA sense strand
ggaccaggacaccaucucu

SEQ ID NO: 1103646 - RNA, 19 nt, Homo sapiens
  misc_RNA (1)...(19): siRNA sense strand
cagauuaccagcucaccau

SEQ ID NO: 1103647 - RNA, 19 nt, Homo sapiens
  misc_RNA (1)...(19): siRNA sense strand
ccgcgucaccgacuucuuc

SEQ ID NO: 1103648 - RNA, 19 nt, Homo sapiens
  misc_RNA (1)...(19): siRNA sense strand
cugcggagcgucuuugugu

SEQ ID NO: 1103649 - RNA, 19 nt, Homo sapiens
  misc_RNA (1)...(19): siRNA sense strand
ggauggagaaggccuugag

SEQ ID NO: 1103650 - RNA, 19 nt, Homo sapiens
  misc_RNA (1)...(19): siRNA sense strand
caauguuggccagaucaaa

SEQ ID NO: 1103651 - RNA, 19 nt, Homo sapiens
  misc_RNA (1)...(19): siRNA sense strand
guaaucaaaucucagcuua

SEQ ID NO: 1103652 - RNA, 19 nt, Homo sapiens
  misc_RNA (1)...(19): siRNA sense strand
gcaggaacuucaagaauau

SEQ ID NO: 1103653 - RNA, 19 nt, Homo sapiens
  misc_RNA (1)...(19): siRNA sense strand
ugaaacagcacaaacaaua

SEQ ID NO: 1103654 - RNA, 19 nt, Homo sapiens
  misc_RNA (1)...(19): siRNA sense strand
ggaaagaaauggagcaacu

SEQ ID NO: 1103655 - RNA, 19 nt, Homo sapiens
  misc_RNA (1)...(19): siRNA sense strand
ggaagaggauucugcagau

SEQ ID NO: 1103656 - RNA, 19 nt, Homo sapiens
  misc_RNA (1)...(19): siRNA sense strand
gaaacagcacaaacaauaa

SEQ ID NO: 1103657 - RNA, 19 nt, Homo sapiens
  misc_RNA (1)...(19): siRNA sense strand
aaagaaauccguagaagaa

SEQ ID NO: 1103658 - RNA, 19 nt, Homo sapiens
  misc_RNA (1)...(19): siRNA sense strand
aaacugggauaaggaaaua

SEQ ID NO: 1103659 - RNA, 19 nt, Homo sapiens
  misc_RNA (1)...(19): siRNA sense strand
ucaggaagaucuaaggaaa

SEQ ID NO: 1103660 - RNA, 19 nt, Homo sapiens
  misc_RNA (1)...(19): siRNA sense strand
ggagacagccguacuggaa

SEQ ID NO: 1103661 - RNA, 19 nt, Homo sapiens
  misc_RNA (1)...(19): siRNA sense strand
gaagaucuaaggaaagaaa

SEQ ID NO: 1103662 - RNA, 19 nt, Homo sapiens
  misc_RNA (1)...(19): siRNA sense strand
gaagaggauucugcagauu

SEQ ID NO: 1103663 - RNA, 19 nt, Homo sapiens
  misc_RNA (1)...(19): siRNA sense strand
gaagagcaacauacaaaga

SEQ ID NO: 1103664 - RNA, 19 nt, Homo sapiens
  misc_RNA (1)...(19): siRNA sense strand
gaugagauuugcccucguu

SEQ ID NO: 1103665 - RNA, 19 nt, Homo sapiens
  misc_RNA (1)...(19): siRNA sense strand
gauuugcccucguuccuaa

SEQ ID NO: 1103666 - RNA, 19 nt, Homo sapiens
  misc_RNA (1)...(19): siRNA sense strand
ccaaagacuucggcaacua

SEQ ID NO: 1103667 - RNA, 19 nt, Homo sapiens
  misc_RNA (1)...(19): siRNA sense strand
agcaggaacuucaagaaua

SEQ ID NO: 1103668 - RNA, 19 nt, Homo sapiens
  misc_RNA (1)...(19): siRNA sense strand
gaaagaaauggagcaacua

SEQ ID NO: 1103669 - RNA, 19 nt, Homo sapiens
  misc_RNA (1)...(19): siRNA sense strand
gaaaaugcuucaagaggaa

SEQ ID NO: 1103670 - RNA, 19 nt, Homo sapiens
  misc_RNA (1)...(19): siRNA sense strand
ucaagaggaugaggaagaa

SEQ ID NO: 1103671 - RNA, 19 nt, Homo sapiens
  misc_RNA (1)...(19): siRNA sense strand
gcaacuagugcuugacaaa

SEQ ID NO: 1103672 - RNA, 19 nt, Homo sapiens
  misc_RNA (1)...(19): siRNA sense strand
gaagaaacaauucaacaac

SEQ ID NO: 1103673 - RNA, 19 nt, Homo sapiens
  misc_RNA (1)...(19): siRNA sense strand
ggaaggaggagaagagcaa

SEQ ID NO: 1103674 - RNA, 19 nt, Homo sapiens
  misc_RNA (1)...(19): siRNA sense strand
agacuucggcaacuauuua

SEQ ID NO: 1103675 - RNA, 19 nt, Homo sapiens
  misc_RNA (1)...(19): siRNA sense strand
uaccgcgucucccugauua

SEQ ID NO: 1103676 - RNA, 19 nt, Homo sapiens
  misc_RNA (1)...(19): siRNA sense strand
aauaugaaguggugacaga

SEQ ID NO: 1103677 - RNA, 19 nt, Homo sapiens
  misc_RNA (1)...(19): siRNA sense strand
uaaagaaauccguagaaga

SEQ ID NO: 1103678 - RNA, 19 nt, Homo sapiens
  misc_RNA (1)...(19): siRNA sense strand
cggcuggcgugcaauuuaa

SEQ ID NO: 1103679 - RNA, 19 nt, Homo sapiens
  misc_RNA (1)...(19): siRNA sense strand
ggauaaggaaauagagaaa

SEQ ID NO: 1103680 - RNA, 19 nt, Homo sapiens
  misc_RNA (1)...(19): siRNA sense strand
uaaccuaaaucaggaagau

SEQ ID NO: 1103681 - RNA, 19 nt, Homo sapiens
  misc_RNA (1)...(19): siRNA sense strand
gcccagguguuucugaguu

SEQ ID NO: 1103682 - RNA, 19 nt, Homo sapiens
  misc_RNA (1)...(19): siRNA sense strand
gaaauccguagaagaagga

SEQ ID NO: 1103683 - RNA, 19 nt, Homo sapiens
  misc_RNA (1)...(19): siRNA sense strand
caagacaauuauaggagau

SEQ ID NO: 1103684 - RNA, 19 nt, Homo sapiens
  misc_RNA (1)...(19): siRNA sense strand
aggaagaucuaaggaaaga

SEQ ID NO: 1103685 - RNA, 19 nt, Homo sapiens
  misc_RNA (1)...(19): siRNA sense strand
caaagacuucggcaacuau

SEQ ID NO: 1103686 - RNA, 19 nt, Homo sapiens
  misc_RNA (1)...(19): siRNA sense strand
cagcacaaacaauaaagaa

SEQ ID NO: 1103687 - RNA, 19 nt, Homo sapiens
  misc_RNA (1)...(19): siRNA sense strand
gggauaaggaaauagagaa

SEQ ID NO: 1103688 - RNA, 19 nt, Homo sapiens
  misc_RNA (1)...(19): siRNA sense strand
gcagcaggaacuucaagaa

SEQ ID NO: 1103689 - RNA, 19 nt, Homo sapiens
  misc_RNA (1)...(19): siRNA sense strand
ccaggaggaugagcugcua

SEQ ID NO: 1103690 - RNA, 19 nt, Homo sapiens
  misc_RNA (1)...(19): siRNA sense strand
ugacaagacaauuauagga

SEQ ID NO: 1103691 - RNA, 19 nt, Homo sapiens
  misc_RNA (1)...(19): siRNA sense strand
gguugacacuaacgaugaa

SEQ ID NO: 1103692 - RNA, 19 nt, Homo sapiens
  misc_RNA (1)...(19): siRNA sense strand
agacagccguacuggaaga

SEQ ID NO: 1103693 - RNA, 19 nt, Homo sapiens
  misc_RNA (1)...(19): siRNA sense strand
cacuaacgaugaagaaaca

SEQ ID NO: 1103694 - RNA, 19 nt, Homo sapiens
  misc_RNA (1)...(19): siRNA sense strand
caauaaagaaauccguaga

SEQ ID NO: 1103695 - RNA, 19 nt, Homo sapiens
  misc_RNA (1)...(19): siRNA sense strand
cuaaacuugugaaggaaga

SEQ ID NO: 1103696 - RNA, 19 nt, Homo sapiens
  misc_RNA (1)...(19): siRNA sense strand
cggcaacuauuuauuuaac

SEQ ID NO: 1103697 - RNA, 19 nt, Homo sapiens
  misc_RNA (1)...(19): siRNA sense strand
uggcagagagcaagauuug

SEQ ID NO: 1103698 - RNA, 19 nt, Homo sapiens
  misc_RNA (1)...(19): siRNA sense strand
uugaagagcaacauacaaa

SEQ ID NO: 1103699 - RNA, 19 nt, Homo sapiens
  misc_RNA (1)...(19): siRNA sense strand
agaaauggagcaacuagug

SEQ ID NO: 1103700 - RNA, 19 nt, Homo sapiens
  misc_RNA (1)...(19): siRNA sense strand
cuucggcaacuauuuauuu

SEQ ID NO: 1103701 - RNA, 19 nt, Homo sapiens
  misc_RNA (1)...(19): siRNA sense strand
cagcugacaagaggaauuu

SEQ ID NO: 1103702 - RNA, 19 nt, Homo sapiens
  misc_RNA (1)...(19): siRNA sense strand
gaggaugaggaagaaauuu

SEQ ID NO: 1103703 - RNA, 19 nt, Homo sapiens
  misc_RNA (1)...(19): siRNA sense strand
auaaagaaauccguagaag

SEQ ID NO: 1103704 - RNA, 19 nt, Homo sapiens
  misc_RNA (1)...(19): siRNA sense strand
ggguugacacuaacgauga

SEQ ID NO: 1103705 - RNA, 19 nt, Homo sapiens
  misc_RNA (1)...(19): siRNA sense strand
cagcaggaacuucaagaau

SEQ ID NO: 1103706 - RNA, 19 nt, Homo sapiens
  misc_RNA (1)...(19): siRNA sense strand
ggaaauagagaaaaugcuu

SEQ ID NO: 1103707 - RNA, 19 nt, Homo sapiens
  misc_RNA (1)...(19): siRNA sense strand
cgacuuugaucagauguac

SEQ ID NO: 1103708 - RNA, 19 nt, Homo sapiens
  misc_RNA (1)...(19): siRNA sense strand
uucgaugccuguaaccuaa

SEQ ID NO: 1103709 - RNA, 19 nt, Homo sapiens
  misc_RNA (1)...(19): siRNA sense strand
gcaauggcagagagcaaga

SEQ ID NO: 1103710 - RNA, 19 nt, Homo sapiens
  misc_RNA (1)...(19): siRNA sense strand
aagagcaacauacaaagaa

SEQ ID NO: 1103711 - RNA, 19 nt, Homo sapiens
  misc_RNA (1)...(19): siRNA sense strand
aaucucagcuuaaaacuca

SEQ ID NO: 1103712 - RNA, 19 nt, Homo sapiens
  misc_RNA (1)...(19): siRNA sense strand
gaugaaaacugggauaagg

SEQ ID NO: 1103713 - RNA, 19 nt, Homo sapiens
  misc_RNA (1)...(19): siRNA sense strand
gaucuaaggaaagaaaugg

SEQ ID NO: 1103714 - RNA, 19 nt, Homo sapiens
  misc_RNA (1)...(19): siRNA sense strand
ccaccaggccaaagacuuc

SEQ ID NO: 1103715 - RNA, 19 nt, Homo sapiens
  misc_RNA (1)...(19): siRNA sense strand
ucuacuagcccagguguuu

SEQ ID NO: 1103716 - RNA, 19 nt, Homo sapiens
  misc_RNA (1)...(19): siRNA sense strand
ccggcuggcgugcaauuua

SEQ ID NO: 1103717 - RNA, 19 nt, Homo sapiens
  misc_RNA (1)...(19): siRNA sense strand
gcuuaaaacucaagaggau

SEQ ID NO: 1103718 - RNA, 19 nt, Homo sapiens
  misc_RNA (1)...(19): siRNA sense strand
gccacccguuguaaucaaa

SEQ ID NO: 1103719 - RNA, 19 nt, Homo sapiens
  misc_RNA (1)...(19): siRNA sense strand
ugacacuaacgaugaagaa

SEQ ID NO: 1103720 - RNA, 19 nt, Homo sapiens
  misc_RNA (1)...(19): siRNA sense strand
uagagaaaaugcuucaaga

SEQ ID NO: 1103721 - RNA, 19 nt, Homo sapiens
  misc_RNA (1)...(19): siRNA sense strand
cccagguguuucugaguuu

SEQ ID NO: 1103722 - RNA, 19 nt, Homo sapiens
  misc_RNA (1)...(19): siRNA sense strand
cuaagcaagaugagauuug

SEQ ID NO: 1103723 - RNA, 19 nt, Homo sapiens
  misc_RNA (1)...(19): siRNA sense strand
gcuaagcaagaugagauuu

SEQ ID NO: 1103724 - RNA, 19 nt, Homo sapiens
  misc_RNA (1)...(19): siRNA sense strand
gagcaacauacaaagaagu

SEQ ID NO: 1103725 - RNA, 19 nt, Homo sapiens
  misc_RNA (1)...(19): siRNA sense strand
gcaguugguugggcuugca

SEQ ID NO: 1103726 - RNA, 19 nt, Homo sapiens
  misc_RNA (1)...(19): siRNA sense strand
gagcaauggcagagagcaa

SEQ ID NO: 1103727 - RNA, 19 nt, Homo sapiens
  misc_RNA (1)...(19): siRNA sense strand
aaagaaauggagcaacuag

SEQ ID NO: 1103728 - RNA, 19 nt, Homo sapiens
  misc_RNA (1)...(19): siRNA sense strand
uauaggagauuuucagaag

SEQ ID NO: 1103729 - RNA, 19 nt, Homo sapiens
  misc_RNA (1)...(19): siRNA sense strand
gccaaagacuucggcaacu

SEQ ID NO: 1103730 - RNA, 19 nt, Homo sapiens
  misc_RNA (1)...(19): siRNA sense strand
ugucagugaugccuucgau

SEQ ID NO: 1103731 - RNA, 19 nt, Homo sapiens
  misc_RNA (1)...(19): siRNA sense strand
ccccauggguugacacuaa

SEQ ID NO: 1103732 - RNA, 19 nt, Homo sapiens
  misc_RNA (1)...(19): siRNA sense strand
uggcaucauugacaagaca

SEQ ID NO: 1103733 - RNA, 19 nt, Homo sapiens
  misc_RNA (1)...(19): siRNA sense strand
aagaggauucugcagauug

SEQ ID NO: 1103734 - RNA, 19 nt, Homo sapiens
  misc_RNA (1)...(19): siRNA sense strand
cuaaaucaggaagaucuaa

SEQ ID NO: 1103735 - RNA, 19 nt, Homo sapiens
  misc_RNA (1)...(19): siRNA sense strand
ccagguguuucugaguuug

SEQ ID NO: 1103736 - RNA, 19 nt, Homo sapiens
  misc_RNA (1)...(19): siRNA sense strand
gcgucucccugauuaagca

SEQ ID NO: 1103737 - RNA, 19 nt, Homo sapiens
  misc_RNA (1)...(19): siRNA sense strand
gacacuaacgaugaagaaa

SEQ ID NO: 1103738 - RNA, 19 nt, Homo sapiens
  misc_RNA (1)...(19): siRNA sense strand
agaggauucugcagauugg

SEQ ID NO: 1103739 - RNA, 19 nt, Homo sapiens
  misc_RNA (1)...(19): siRNA sense strand
ggccuuaucagcugacaag

SEQ ID NO: 1103740 - RNA, 19 nt, Homo sapiens
  misc_RNA (1)...(19): siRNA sense strand
cgaugccuguaaccuaaau

SEQ ID NO: 1103741 - RNA, 19 nt, Homo sapiens
  misc_RNA (1)...(19): siRNA sense strand
uaucagcugacaagaggaa

SEQ ID NO: 1103742 - RNA, 19 nt, Homo sapiens
  misc_RNA (1)...(19): siRNA sense strand
agaggaugaggaagaaauu

SEQ ID NO: 1103743 - RNA, 19 nt, Homo sapiens
  misc_RNA (1)...(19): siRNA sense strand
agagcaacauacaaagaag

SEQ ID NO: 1103744 - RNA, 19 nt, Homo sapiens
  misc_RNA (1)...(19): siRNA sense strand
ccucguuccuaaacuugug

SEQ ID NO: 1103745 - RNA, 19 nt, Homo sapiens
  misc_RNA (1)...(19): siRNA sense strand
uaaaucaggaagaucuaag

SEQ ID NO: 1103746 - RNA, 19 nt, Homo sapiens
  misc_RNA (1)...(19): siRNA sense strand
cuucgaugccuguaaccua

SEQ ID NO: 1103747 - RNA, 19 nt, Homo sapiens
  misc_RNA (1)...(19): siRNA sense strand
ugaagaagcugcugaagua

SEQ ID NO: 1103748 - RNA, 19 nt, Homo sapiens
  misc_RNA (1)...(19): siRNA sense strand
gaagaggaaugauacugua

SEQ ID NO: 1103749 - RNA, 19 nt, Homo sapiens
  misc_RNA (1)...(19): siRNA sense strand
ggauuggucuccauauuaa

SEQ ID NO: 1103750 - RNA, 19 nt, Homo sapiens
  misc_RNA (1)...(19): siRNA sense strand
gcgauacuccuacauauua

SEQ ID NO: 1103751 - RNA, 19 nt, Homo sapiens
  misc_RNA (1)...(19): siRNA sense strand
gaagaagcauccuauaguc

SEQ ID NO: 1103752 - RNA, 19 nt, Homo sapiens
  misc_RNA (1)...(19): siRNA sense strand
gcaaauagaaccacaagau

SEQ ID NO: 1103753 - RNA, 19 nt, Homo sapiens
  misc_RNA (1)...(19): siRNA sense strand
gaaauucauucagcuagaa

SEQ ID NO: 1103754 - RNA, 19 nt, Homo sapiens
  misc_RNA (1)...(19): siRNA sense strand
gaaaugcuccacgcaguua

SEQ ID NO: 1103755 - RNA, 19 nt, Homo sapiens
  misc_RNA (1)...(19): siRNA sense strand
gagcaggacagucucaaua

SEQ ID NO: 1103756 - RNA, 19 nt, Homo sapiens
  misc_RNA (1)...(19): siRNA sense strand
caaagaaacagaagacuau

SEQ ID NO: 1103757 - RNA, 19 nt, Homo sapiens
  misc_RNA (1)...(19): siRNA sense strand
agagugagauuccaagaaa

SEQ ID NO: 1103758 - RNA, 19 nt, Homo sapiens
  misc_RNA (1)...(19): siRNA sense strand
caggagauauugcaccuuu

SEQ ID NO: 1103759 - RNA, 19 nt, Homo sapiens
  misc_RNA (1)...(19): siRNA sense strand
gaacuccguuugccacuuc

SEQ ID NO: 1103760 - RNA, 19 nt, Homo sapiens
  misc_RNA (1)...(19): siRNA sense strand
gaagauaccaccaggacuu

SEQ ID NO: 1103761 - RNA, 19 nt, Homo sapiens
  misc_RNA (1)...(19): siRNA sense strand
caagaucucucuccugaag

SEQ ID NO: 1103762 - RNA, 19 nt, Homo sapiens
  misc_RNA (1)...(19): siRNA sense strand
ggagauauugcaccuuuaa

SEQ ID NO: 1103763 - RNA, 19 nt, Homo sapiens
  misc_RNA (1)...(19): siRNA sense strand
gacauggagucaccuguuu

SEQ ID NO: 1103764 - RNA, 19 nt, Homo sapiens
  misc_RNA (1)...(19): siRNA sense strand
aagauucccuuuccuauga

SEQ ID NO: 1103765 - RNA, 19 nt, Homo sapiens
  misc_RNA (1)...(19): siRNA sense strand
gaggugaaguugagcaguu

SEQ ID NO: 1103766 - RNA, 19 nt, Homo sapiens
  misc_RNA (1)...(19): siRNA sense strand
ucacauaugcuguugauga

SEQ ID NO: 1103767 - RNA, 19 nt, Homo sapiens
  misc_RNA (1)...(19): siRNA sense strand
ccaaagagucagagaguaa

SEQ ID NO: 1103768 - RNA, 19 nt, Homo sapiens
  misc_RNA (1)...(19): siRNA sense strand
gcaggacagucucaauaau

SEQ ID NO: 1103769 - RNA, 19 nt, Homo sapiens
  misc_RNA (1)...(19): siRNA sense strand
agacagagccguugauuuc

SEQ ID NO: 1103770 - RNA, 19 nt, Homo sapiens
  misc_RNA (1)...(19): siRNA sense strand
cauaugcuguugaugauga

SEQ ID NO: 1103771 - RNA, 19 nt, Homo sapiens
  misc_RNA (1)...(19): siRNA sense strand
ggacuucuauuacacuaag

SEQ ID NO: 1103772 - RNA, 19 nt, Homo sapiens
  misc_RNA (1)...(19): siRNA sense strand
cuagaacgauuguaucaug

SEQ ID NO: 1103773 - RNA, 19 nt, Homo sapiens
  misc_RNA (1)...(19): siRNA sense strand
gcaaaucuuucugccauuc

SEQ ID NO: 1103774 - RNA, 19 nt, Homo sapiens
  misc_RNA (1)...(19): siRNA sense strand
ggaucaagaugaaguugga

SEQ ID NO: 1103775 - RNA, 19 nt, Homo sapiens
  misc_RNA (1)...(19): siRNA sense strand
guacugacuuugcagacaa

SEQ ID NO: 1103776 - RNA, 19 nt, Homo sapiens
  misc_RNA (1)...(19): siRNA sense strand
ggaggaggacuacgagaaa

SEQ ID NO: 1103777 - RNA, 19 nt, Homo sapiens
  misc_RNA (1)...(19): siRNA sense strand
caacauggacuucuauuac

SEQ ID NO: 1103778 - RNA, 19 nt, Homo sapiens
  misc_RNA (1)...(19): siRNA sense strand
caggacagucucaauaaua

SEQ ID NO: 1103779 - RNA, 19 nt, Homo sapiens
  misc_RNA (1)...(19): siRNA sense strand
gaaugauacuguaggagau

SEQ ID NO: 1103780 - RNA, 19 nt, Homo sapiens
  misc_RNA (1)...(19): siRNA sense strand
gcacagagucaaguaaaga

SEQ ID NO: 1103781 - RNA, 19 nt, Homo sapiens
  misc_RNA (1)...(19): siRNA sense strand
aggacagucucaauaauaa

SEQ ID NO: 1103782 - RNA, 19 nt, Homo sapiens
  misc_RNA (1)...(19): siRNA sense strand
gauagagauugcagagguu

SEQ ID NO: 1103783 - RNA, 19 nt, Homo sapiens
  misc_RNA (1)...(19): siRNA sense strand
gaagauucccuuuccuaug

SEQ ID NO: 1103784 - RNA, 19 nt, Homo sapiens
  misc_RNA (1)...(19): siRNA sense strand
gauagcagcuguggagaag

SEQ ID NO: 1103785 - RNA, 19 nt, Homo sapiens
  misc_RNA (1)...(19): siRNA sense strand
caagaacagugggaaacaa

SEQ ID NO: 1103786 - RNA, 19 nt, Homo sapiens
  misc_RNA (1)...(19): siRNA sense strand
ccguauaccuccugcauug

SEQ ID NO: 1103787 - RNA, 19 nt, Homo sapiens
  misc_RNA (1)...(19): siRNA sense strand
ugaagacccuaagguguuu

SEQ ID NO: 1103788 - RNA, 19 nt, Homo sapiens
  misc_RNA (1)...(19): siRNA sense strand
cagacaacauggacuucua

SEQ ID NO: 1103789 - RNA, 19 nt, Homo sapiens
  misc_RNA (1)...(19): siRNA sense strand
gaggaaugauacuguagga

SEQ ID NO: 1103790 - RNA, 19 nt, Homo sapiens
  misc_RNA (1)...(19): siRNA sense strand
gcagcagccugaucuuaca

SEQ ID NO: 1103791 - RNA, 19 nt, Homo sapiens
  misc_RNA (1)...(19): siRNA sense strand
gaggaaagaacuccguuug

SEQ ID NO: 1103792 - RNA, 19 nt, Homo sapiens
  misc_RNA (1)...(19): siRNA sense strand
ugaaguaaaugcuaaugag

SEQ ID NO: 1103793 - RNA, 19 nt, Homo sapiens
  misc_RNA (1)...(19): siRNA sense strand
uggaggaacugcauuauac

SEQ ID NO: 1103794 - RNA, 19 nt, Homo sapiens
  misc_RNA (1)...(19): siRNA sense strand
cagcgauacuccuacauau

SEQ ID NO: 1103795 - RNA, 19 nt, Homo sapiens
  misc_RNA (1)...(19): siRNA sense strand
caaauagaaccacaagaug

SEQ ID NO: 1103796 - RNA, 19 nt, Homo sapiens
  misc_RNA (1)...(19): siRNA sense strand
aaugugcucuguggaaaua

SEQ ID NO: 1103797 - RNA, 19 nt, Homo sapiens
  misc_RNA (1)...(19): siRNA sense strand
gagaaugugcucuguggaa

SEQ ID NO: 1103798 - RNA, 19 nt, Homo sapiens
  misc_RNA (1)...(19): siRNA sense strand
gaaacaaaauggaaaacug

SEQ ID NO: 1103799 - RNA, 19 nt, Homo sapiens
  misc_RNA (1)...(19): siRNA sense strand
guggagaagucccaggaaa

SEQ ID NO: 1103800 - RNA, 19 nt, Homo sapiens
  misc_RNA (1)...(19): siRNA sense strand
cagaccaacuugagaacaa

SEQ ID NO: 1103801 - RNA, 19 nt, Homo sapiens
  misc_RNA (1)...(19): siRNA sense strand
agaagcugcugaaguaaau

SEQ ID NO: 1103802 - RNA, 19 nt, Homo sapiens
  misc_RNA (1)...(19): siRNA sense strand
gagaucauccugcccaaau

SEQ ID NO: 1103803 - RNA, 19 nt, Homo sapiens
  misc_RNA (1)...(19): siRNA sense strand
aaacuugucucggcacaga

SEQ ID NO: 1103804 - RNA, 19 nt, Homo sapiens
  misc_RNA (1)...(19): siRNA sense strand
gaugacagcgauacuccua

SEQ ID NO: 1103805 - RNA, 19 nt, Homo sapiens
  misc_RNA (1)...(19): siRNA sense strand
gaacugaagcacuggaucu

SEQ ID NO: 1103806 - RNA, 19 nt, Homo sapiens
  misc_RNA (1)...(19): siRNA sense strand
ggagucaccuguuuguacu

SEQ ID NO: 1103807 - RNA, 19 nt, Homo sapiens
  misc_RNA (1)...(19): siRNA sense strand
uaaagaagaggaaugauac

SEQ ID NO: 1103808 - RNA, 19 nt, Homo sapiens
  misc_RNA (1)...(19): siRNA sense strand
gaaacagaagacuauuuga

SEQ ID NO: 1103809 - RNA, 19 nt, Homo sapiens
  misc_RNA (1)...(19): siRNA sense strand
ccacagaccaacuugagaa

SEQ ID NO: 1103810 - RNA, 19 nt, Homo sapiens
  misc_RNA (1)...(19): siRNA sense strand
uaaagaaagccaacauaca

SEQ ID NO: 1103811 - RNA, 19 nt, Homo sapiens
  misc_RNA (1)...(19): siRNA sense strand
ggaaaugcuccacgcaguu

SEQ ID NO: 1103812 - RNA, 19 nt, Homo sapiens
  misc_RNA (1)...(19): siRNA sense strand
gugcaaccacauacaguua

SEQ ID NO: 1103813 - RNA, 19 nt, Homo sapiens
  misc_RNA (1)...(19): siRNA sense strand
ucauucagcuagaacgauu

SEQ ID NO: 1103814 - RNA, 19 nt, Homo sapiens
  misc_RNA (1)...(19): siRNA sense strand
agaaacagaagacuauuug

SEQ ID NO: 1103815 - RNA, 19 nt, Homo sapiens
  misc_RNA (1)...(19): siRNA sense strand
guaaagaaagccaacauac

SEQ ID NO: 1103816 - RNA, 19 nt, Homo sapiens
  misc_RNA (1)...(19): siRNA sense strand
gcucuaaggaauucagaaa

SEQ ID NO: 1103817 - RNA, 19 nt, Homo sapiens
  misc_RNA (1)...(19): siRNA sense strand
gagaugaacaggccuucuu

SEQ ID NO: 1103818 - RNA, 19 nt, Homo sapiens
  misc_RNA (1)...(19): siRNA sense strand
ugaagaagcauccuauagu

SEQ ID NO: 1103819 - RNA, 19 nt, Homo sapiens
  misc_RNA (1)...(19): siRNA sense strand
gaggagcuaccaccaaaga

SEQ ID NO: 1103820 - RNA, 19 nt, Homo sapiens
  misc_RNA (1)...(19): siRNA sense strand
cgagaaagcaaugaaauuc

SEQ ID NO: 1103821 - RNA, 19 nt, Homo sapiens
  misc_RNA (1)...(19): siRNA sense strand
gaagaagcugcugaaguaa

SEQ ID NO: 1103822 - RNA, 19 nt, Homo sapiens
  misc_RNA (1)...(19): siRNA sense strand
gcagucacauaugcuguug

SEQ ID NO: 1103823 - RNA, 19 nt, Homo sapiens
  misc_RNA (1)...(19): siRNA sense strand
gaaguugagcaguuggauu

SEQ ID NO: 1103824 - RNA, 19 nt, Homo sapiens
  misc_RNA (1)...(19): siRNA sense strand
caaaccaucuaagcgaaga

SEQ ID NO: 1103825 - RNA, 19 nt, Homo sapiens
  misc_RNA (1)...(19): siRNA sense strand
gaaucugccuucugaugag

SEQ ID NO: 1103826 - RNA, 19 nt, Homo sapiens
  misc_RNA (1)...(19): siRNA sense strand
cgacuccgaucuccuucaa

SEQ ID NO: 1103827 - RNA, 19 nt, Homo sapiens
  misc_RNA (1)...(19): siRNA sense strand
acagaagacuauuugaaca

SEQ ID NO: 1103828 - RNA, 19 nt, Homo sapiens
  misc_RNA (1)...(19): siRNA sense strand
acaaagaaacagaagacua

SEQ ID NO: 1103829 - RNA, 19 nt, Homo sapiens
  misc_RNA (1)...(19): siRNA sense strand
gaccaacucaacaaagaaa

SEQ ID NO: 1103830 - RNA, 19 nt, Homo sapiens
  misc_RNA (1)...(19): siRNA sense strand
gauaaagacgaccaacuca

SEQ ID NO: 1103831 - RNA, 19 nt, Homo sapiens
  misc_RNA (1)...(19): siRNA sense strand
uagaacgauuguaucauga

SEQ ID NO: 1103832 - RNA, 19 nt, Homo sapiens
  misc_RNA (1)...(19): siRNA sense strand
ggacuacgagaaagcaaug

SEQ ID NO: 1103833 - RNA, 19 nt, Homo sapiens
  misc_RNA (1)...(19): siRNA sense strand
gaagagugagauuccaaga

SEQ ID NO: 1103834 - RNA, 19 nt, Homo sapiens
  misc_RNA (1)...(19): siRNA sense strand
aggaggagcuaccaccaaa

SEQ ID NO: 1103835 - RNA, 19 nt, Homo sapiens
  misc_RNA (1)...(19): siRNA sense strand
gggauuuaauggugaagau

SEQ ID NO: 1103836 - RNA, 19 nt, Homo sapiens
  misc_RNA (1)...(19): siRNA sense strand
caagagcacuuccccuuug

SEQ ID NO: 1103837 - RNA, 19 nt, Homo sapiens
  misc_RNA (1)...(19): siRNA sense strand
aggauuggucuccauauua

SEQ ID NO: 1103838 - RNA, 19 nt, Homo sapiens
  misc_RNA (1)...(19): siRNA sense strand
cagagguuguuccuacuga

SEQ ID NO: 1103839 - RNA, 19 nt, Homo sapiens
  misc_RNA (1)...(19): siRNA sense strand
ggugagaacucgcaaaaca

SEQ ID NO: 1103840 - RNA, 19 nt, Homo sapiens
  misc_RNA (1)...(19): siRNA sense strand
caacaaagaaacagaagac

SEQ ID NO: 1103841 - RNA, 19 nt, Homo sapiens
  misc_RNA (1)...(19): siRNA sense strand
cugcugaaguaaaugcuaa

SEQ ID NO: 1103842 - RNA, 19 nt, Homo sapiens
  misc_RNA (1)...(19): siRNA sense strand
acaacauggacuucuauua

SEQ ID NO: 1103843 - RNA, 19 nt, Homo sapiens
  misc_RNA (1)...(19): siRNA sense strand
ugacagcgauacuccuaca

SEQ ID NO: 1103844 - RNA, 19 nt, Homo sapiens
  misc_RNA (1)...(19): siRNA sense strand
aaggauuggucuccauauu

SEQ ID NO: 1103845 - RNA, 19 nt, Homo sapiens
  misc_RNA (1)...(19): siRNA sense strand
agaaugugcucuguggaaa

SEQ ID NO: 1103846 - RNA, 19 nt, Homo sapiens
  misc_RNA (1)...(19): siRNA sense strand
aaagaaagccaacauacag

SEQ ID NO: 1103847 - RNA, 19 nt, Homo sapiens
  misc_RNA (1)...(19): siRNA sense strand
gaucagaagguccagauga

SEQ ID NO: 1103848 - RNA, 19 nt, Homo sapiens
  misc_RNA (1)...(19): siRNA sense strand
caagaaggcccagaggaua

SEQ ID NO: 1103849 - RNA, 19 nt, Homo sapiens
  misc_RNA (1)...(19): siRNA sense strand
ucaaggaggccauuaagaa

SEQ ID NO: 1103850 - RNA, 19 nt, Homo sapiens
  misc_RNA (1)...(19): siRNA sense strand
caaggaggccauuaagaaa

SEQ ID NO: 1103851 - RNA, 19 nt, Homo sapiens
  misc_RNA (1)...(19): siRNA sense strand
cgaccagguugagucauua

SEQ ID NO: 1103852 - RNA, 19 nt, Homo sapiens
  misc_RNA (1)...(19): siRNA sense strand
gcgaccagguugagucauu

SEQ ID NO: 1103853 - RNA, 19 nt, Homo sapiens
  misc_RNA (1)...(19): siRNA sense strand
gaggaaaagugucacauug

SEQ ID NO: 1103854 - RNA, 19 nt, Homo sapiens
  misc_RNA (1)...(19): siRNA sense strand
guggaagccugucgcaaga

SEQ ID NO: 1103855 - RNA, 19 nt, Homo sapiens
  misc_RNA (1)...(19): siRNA sense strand
gcaucaaggaggccauuaa

SEQ ID NO: 1103856 - RNA, 19 nt, Homo sapiens
  misc_RNA (1)...(19): siRNA sense strand
gggagaaggcccagaagga

SEQ ID NO: 1103857 - RNA, 19 nt, Homo sapiens
  misc_RNA (1)...(19): siRNA sense strand
caccacauccugaaacuga

SEQ ID NO: 1103858 - RNA, 19 nt, Homo sapiens
  misc_RNA (1)...(19): siRNA sense strand
cccaacagcucccuugauc

SEQ ID NO: 1103859 - RNA, 19 nt, Homo sapiens
  misc_RNA (1)...(19): siRNA sense strand
gaaggaggaagagcaguug

SEQ ID NO: 1103860 - RNA, 19 nt, Homo sapiens
  misc_RNA (1)...(19): siRNA sense strand
ugguggagcuggcggauga

SEQ ID NO: 1103861 - RNA, 19 nt, Homo sapiens
  misc_RNA (1)...(19): siRNA sense strand
gaagaugccuggggagaga

SEQ ID NO: 1103862 - RNA, 19 nt, Homo sapiens
  misc_RNA (1)...(19): siRNA sense strand
ggagucacgugcacaagac

SEQ ID NO: 1103863 - RNA, 19 nt, Homo sapiens
  misc_RNA (1)...(19): siRNA sense strand
gugcugacccgucucaaga

SEQ ID NO: 1103864 - RNA, 19 nt, Homo sapiens
  misc_RNA (1)...(19): siRNA sense strand
caacagcucccuugaucag

SEQ ID NO: 1103865 - RNA, 19 nt, Homo sapiens
  misc_RNA (1)...(19): siRNA sense strand
gcccuuggccuccagcaaa

SEQ ID NO: 1103866 - RNA, 19 nt, Homo sapiens
  misc_RNA (1)...(19): siRNA sense strand
ucaagaaggcccagaggau

SEQ ID NO: 1103867 - RNA, 19 nt, Homo sapiens
  misc_RNA (1)...(19): siRNA sense strand
gagaaggagcagcgcaaga

SEQ ID NO: 1103868 - RNA, 19 nt, Homo sapiens
  misc_RNA (1)...(19): siRNA sense strand
ggaaaagugucacauugag

SEQ ID NO: 1103869 - RNA, 19 nt, Homo sapiens
  misc_RNA (1)...(19): siRNA sense strand
ucaaccaccugagggagaa

SEQ ID NO: 1103870 - RNA, 19 nt, Homo sapiens
  misc_RNA (1)...(19): siRNA sense strand
gaagaugcgcaaaagaauu

SEQ ID NO: 1103871 - RNA, 19 nt, Homo sapiens
  misc_RNA (1)...(19): siRNA sense strand
gaaacugaaagccgagaag

SEQ ID NO: 1103872 - RNA, 19 nt, Homo sapiens
  misc_RNA (1)...(19): siRNA sense strand
gaagcgcucggaucagaag

SEQ ID NO: 1103873 - RNA, 19 nt, Homo sapiens
  misc_RNA (1)...(19): siRNA sense strand
uugaucagaugguacuaga

SEQ ID NO: 1103874 - RNA, 19 nt, Homo sapiens
  misc_RNA (1)...(19): siRNA sense strand
ccacucggcagacaucuag

SEQ ID NO: 1103875 - RNA, 19 nt, Homo sapiens
  misc_RNA (1)...(19): siRNA sense strand
gccgaagccugagcgaugu

SEQ ID NO: 1103876 - RNA, 19 nt, Homo sapiens
  misc_RNA (1)...(19): siRNA sense strand
ccacauccugaaacugaaa

SEQ ID NO: 1103877 - RNA, 19 nt, Homo sapiens
  misc_RNA (1)...(19): siRNA sense strand
caagaccacuagggacaag

SEQ ID NO: 1103878 - RNA, 19 nt, Homo sapiens
  misc_RNA (1)...(19): siRNA sense strand
gcugacccgucucaagaag

SEQ ID NO: 1103879 - RNA, 19 nt, Homo sapiens
  misc_RNA (1)...(19): siRNA sense strand
ggagcuggcggaugagaag

SEQ ID NO: 1103880 - RNA, 19 nt, Homo sapiens
  misc_RNA (1)...(19): siRNA sense strand
ugagggagaaggcccagaa

SEQ ID NO: 1103881 - RNA, 19 nt, Homo sapiens
  misc_RNA (1)...(19): siRNA sense strand
agacagcagcgaccagguu

SEQ ID NO: 1103882 - RNA, 19 nt, Homo sapiens
  misc_RNA (1)...(19): siRNA sense strand
acagcucccuugaucagau

SEQ ID NO: 1103883 - RNA, 19 nt, Homo sapiens
  misc_RNA (1)...(19): siRNA sense strand
gaagagcaagcuggaagag

SEQ ID NO: 1103884 - RNA, 19 nt, Homo sapiens
  misc_RNA (1)...(19): siRNA sense strand
gagagagcgccucccaaca

SEQ ID NO: 1103885 - RNA, 19 nt, Homo sapiens
  misc_RNA (1)...(19): siRNA sense strand
agggaaagacccaaacuuc

SEQ ID NO: 1103886 - RNA, 19 nt, Homo sapiens
  misc_RNA (1)...(19): siRNA sense strand
caucaaggaggccauuaag

SEQ ID NO: 1103887 - RNA, 19 nt, Homo sapiens
  misc_RNA (1)...(19): siRNA sense strand
ggaggaaaagugucacauu

SEQ ID NO: 1103888 - RNA, 19 nt, Homo sapiens
  misc_RNA (1)...(19): siRNA sense strand
gaaagccgagaaggaggaa

SEQ ID NO: 1103889 - RNA, 19 nt, Homo sapiens
  misc_RNA (1)...(19): siRNA sense strand
gcagcugucccuggaacaa

SEQ ID NO: 1103890 - RNA, 19 nt, Homo sapiens
  misc_RNA (1)...(19): siRNA sense strand
cccggaagguccucaugga

SEQ ID NO: 1103891 - RNA, 19 nt, Homo sapiens
  misc_RNA (1)...(19): siRNA sense strand
cagcucccuugaucagaug

SEQ ID NO: 1103892 - RNA, 19 nt, Homo sapiens
  misc_RNA (1)...(19): siRNA sense strand
agaaggaggaagagcaguu

SEQ ID NO: 1103893 - RNA, 19 nt, Homo sapiens
  misc_RNA (1)...(19): siRNA sense strand
ccagcggucccaggagaua

SEQ ID NO: 1103894 - RNA, 19 nt, Homo sapiens
  misc_RNA (1)...(19): siRNA sense strand
gggaaagccgguggaagga

SEQ ID NO: 1103895 - RNA, 19 nt, Homo sapiens
  misc_RNA (1)...(19): siRNA sense strand
cacccgcacuguucguuca

SEQ ID NO: 1103896 - RNA, 19 nt, Homo sapiens
  misc_RNA (1)...(19): siRNA sense strand
ugaagagcaagcuggaaga

SEQ ID NO: 1103897 - RNA, 19 nt, Homo sapiens
  misc_RNA (1)...(19): siRNA sense strand
aaaccaccacauccugaaa

SEQ ID NO: 1103898 - RNA, 19 nt, Homo sapiens
  misc_RNA (1)...(19): siRNA sense strand
gcagaggaggcugguggaa

SEQ ID NO: 1103899 - RNA, 19 nt, Homo sapiens
  misc_RNA (1)...(19): siRNA sense strand
cgggacagccagaggaaga

SEQ ID NO: 1103900 - RNA, 19 nt, Homo sapiens
  misc_RNA (1)...(19): siRNA sense strand
ggaagaugcgcaaaagaau

SEQ ID NO: 1103901 - RNA, 19 nt, Homo sapiens
  misc_RNA (1)...(19): siRNA sense strand
cagaggaacagaggaagau

SEQ ID NO: 1103902 - RNA, 19 nt, Homo sapiens
  misc_RNA (1)...(19): siRNA sense strand
ucagaggaacagaggaaga

SEQ ID NO: 1103903 - RNA, 19 nt, Homo sapiens
  misc_RNA (1)...(19): siRNA sense strand
gcagagcaccgaaaacagu

SEQ ID NO: 1103904 - RNA, 19 nt, Homo sapiens
  misc_RNA (1)...(19): siRNA sense strand
cgcaagaggcaccuacaug

SEQ ID NO: 1103905 - RNA, 19 nt, Homo sapiens
  misc_RNA (1)...(19): siRNA sense strand
gcacauucaggguagaaaa

SEQ ID NO: 1103906 - RNA, 19 nt, Homo sapiens
  misc_RNA (1)...(19): siRNA sense strand
gcaaagagaacuguccuaa

SEQ ID NO: 1103907 - RNA, 19 nt, Homo sapiens
  misc_RNA (1)...(19): siRNA sense strand
aaagagaacuguccuaagc

SEQ ID NO: 1103908 - RNA, 19 nt, Homo sapiens
  misc_RNA (1)...(19): siRNA sense strand
cacagcaacuccagcguuu

SEQ ID NO: 1103909 - RNA, 19 nt, Homo sapiens
  misc_RNA (1)...(19): siRNA sense strand
ucagagaccugccgaagcu

SEQ ID NO: 1103910 - RNA, 19 nt, Homo sapiens
  misc_RNA (1)...(19): siRNA sense strand
gggcgagauuccagucuug

SEQ ID NO: 1103911 - RNA, 19 nt, Homo sapiens
  misc_RNA (1)...(19): siRNA sense strand
uuccagaacugcaacuuga

SEQ ID NO: 1103912 - RNA, 19 nt, Homo sapiens
  misc_RNA (1)...(19): siRNA sense strand
ccucacggaugcaaagaga

SEQ ID NO: 1103913 - RNA, 19 nt, Homo sapiens
  misc_RNA (1)...(19): siRNA sense strand
gcaguugugacuugucuug

SEQ ID NO: 1103914 - RNA, 19 nt, Homo sapiens
  misc_RNA (1)...(19): siRNA sense strand
ggcguucgcuggagaggau

SEQ ID NO: 1103915 - RNA, 19 nt, Homo sapiens
  misc_RNA (1)...(19): siRNA sense strand
gaagcucacaucccucuac

SEQ ID NO: 1103916 - RNA, 19 nt, Homo sapiens
  misc_RNA (1)...(19): siRNA sense strand
gcagggcagcagacacuau

SEQ ID NO: 1103917 - RNA, 19 nt, Homo sapiens
  misc_RNA (1)...(19): siRNA sense strand
caaagagaacuguccuaag

SEQ ID NO: 1103918 - RNA, 19 nt, Homo sapiens
  misc_RNA (1)...(19): siRNA sense strand
gugauuaccaucccugcaa

SEQ ID NO: 1103919 - RNA, 19 nt, Homo sapiens
  misc_RNA (1)...(19): siRNA sense strand
ggggacauuuucaagauga

SEQ ID NO: 1103920 - RNA, 19 nt, Homo sapiens
  misc_RNA (1)...(19): siRNA sense strand
cacuugcaguugugacuug

SEQ ID NO: 1103921 - RNA, 19 nt, Homo sapiens
  misc_RNA (1)...(19): siRNA sense strand
cagcggcacguuccuugaa

SEQ ID NO: 1103922 - RNA, 19 nt, Homo sapiens
  misc_RNA (1)...(19): siRNA sense strand
acacccaccuugcuucaac

SEQ ID NO: 1103923 - RNA, 19 nt, Homo sapiens
  misc_RNA (1)...(19): siRNA sense strand
aggagaaggucccgcucuu

SEQ ID NO: 1103924 - RNA, 19 nt, Homo sapiens
  misc_RNA (1)...(19): siRNA sense strand
ggcuccagaccgucaguua

SEQ ID NO: 1103925 - RNA, 19 nt, Homo sapiens
  misc_RNA (1)...(19): siRNA sense strand
ccucccagguccuaucgau

SEQ ID NO: 1103926 - RNA, 19 nt, Homo sapiens
  misc_RNA (1)...(19): siRNA sense strand
cuucucagccucccuguca

SEQ ID NO: 1103927 - RNA, 19 nt, Homo sapiens
  misc_RNA (1)...(19): siRNA sense strand
gggcagcagacacuaugug

SEQ ID NO: 1103928 - RNA, 19 nt, Homo sapiens
  misc_RNA (1)...(19): siRNA sense strand
ucaaaugucuuuaguggua

SEQ ID NO: 1103929 - RNA, 19 nt, Homo sapiens
  misc_RNA (1)...(19): siRNA sense strand
gcccgaggauuuccacuua

SEQ ID NO: 1103930 - RNA, 19 nt, Homo sapiens
  misc_RNA (1)...(19): siRNA sense strand
ugacgaaccucacuguuga

SEQ ID NO: 1103931 - RNA, 19 nt, Homo sapiens
  misc_RNA (1)...(19): siRNA sense strand
cagaugccuuguucaguua

SEQ ID NO: 1103932 - RNA, 19 nt, Homo sapiens
  misc_RNA (1)...(19): siRNA sense strand
gcggagcccucaucccuaa

SEQ ID NO: 1103933 - RNA, 19 nt, Homo sapiens
  misc_RNA (1)...(19): siRNA sense strand
cuucucagguccauucuua

SEQ ID NO: 1103934 - RNA, 19 nt, Homo sapiens
  misc_RNA (1)...(19): siRNA sense strand
ucagaaggcucaaaugucu

SEQ ID NO: 1103935 - RNA, 19 nt, Homo sapiens
  misc_RNA (1)...(19): siRNA sense strand
ccacuuagaaccuuaaaug

SEQ ID NO: 1103936 - RNA, 19 nt, Homo sapiens
  misc_RNA (1)...(19): siRNA sense strand
gaucagaaggcucaaaugu

SEQ ID NO: 1103937 - RNA, 19 nt, Homo sapiens
  misc_RNA (1)...(19): siRNA sense strand
acagaugccuuguucaguu

SEQ ID NO: 1103938 - RNA, 19 nt, Homo sapiens
  misc_RNA (1)...(19): siRNA sense strand
cauuugaucugaugacgaa

SEQ ID NO: 1103939 - RNA, 19 nt, Homo sapiens
  misc_RNA (1)...(19): siRNA sense strand
cauuguuucucacuucaua

SEQ ID NO: 1103940 - RNA, 19 nt, Homo sapiens
  misc_RNA (1)...(19): siRNA sense strand
gaucccauguugucuuuua

SEQ ID NO: 1103941 - RNA, 19 nt, Homo sapiens
  misc_RNA (1)...(19): siRNA sense strand
gcugcaaacuucauuaagg

SEQ ID NO: 1103942 - RNA, 19 nt, Homo sapiens
  misc_RNA (1)...(19): siRNA sense strand
guagaaagacaggaacauu

SEQ ID NO: 1103943 - RNA, 19 nt, Homo sapiens
  misc_RNA (1)...(19): siRNA sense strand
gagccucaccugugcgaua

SEQ ID NO: 1103944 - RNA, 19 nt, Homo sapiens
  misc_RNA (1)...(19): siRNA sense strand
gugaucccauguugucuuu

SEQ ID NO: 1103945 - RNA, 19 nt, Homo sapiens
  misc_RNA (1)...(19): siRNA sense strand
gggaaggacaagcuacuuu

SEQ ID NO: 1103946 - RNA, 19 nt, Homo sapiens
  misc_RNA (1)...(19): siRNA sense strand
guucagcucuaugggaauu

SEQ ID NO: 1103947 - RNA, 19 nt, Homo sapiens
  misc_RNA (1)...(19): siRNA sense strand
ucagcucuaugggaauuua

SEQ ID NO: 1103948 - RNA, 19 nt, Homo sapiens
  misc_RNA (1)...(19): siRNA sense strand
gaagcggucuccgaaugug

SEQ ID NO: 1103949 - RNA, 19 nt, Homo sapiens
  misc_RNA (1)...(19): siRNA sense strand
uagaaagacaggaacauug

SEQ ID NO: 1103950 - RNA, 19 nt, Homo sapiens
  misc_RNA (1)...(19): siRNA sense strand
gaaggacaagcuacuuuua

SEQ ID NO: 1103951 - RNA, 19 nt, Homo sapiens
  misc_RNA (1)...(19): siRNA sense strand
ccauugaauuugcccaguu

SEQ ID NO: 1103952 - RNA, 19 nt, Homo sapiens
  misc_RNA (1)...(19): siRNA sense strand
ucaggcagcuccauauggu

SEQ ID NO: 1103953 - RNA, 19 nt, Homo sapiens
  misc_RNA (1)...(19): siRNA sense strand
guucaguuauugucuaugg

SEQ ID NO: 1103954 - RNA, 19 nt, Homo sapiens
  misc_RNA (1)...(19): siRNA sense strand
cauugaauuugcccaguug

SEQ ID NO: 1103955 - RNA, 19 nt, Homo sapiens
  misc_RNA (1)...(19): siRNA sense strand
ccgaggauuuccacuuaga

SEQ ID NO: 1103956 - RNA, 19 nt, Homo sapiens
  misc_RNA (1)...(19): siRNA sense strand
ccucaucccuaacggugaa

SEQ ID NO: 1103957 - RNA, 19 nt, Homo sapiens
  misc_RNA (1)...(19): siRNA sense strand
gagcccaacccguaggaaa

SEQ ID NO: 1103958 - RNA, 19 nt, Homo sapiens
  misc_RNA (1)...(19): siRNA sense strand
cuuagaaccuuaaaugacu

SEQ ID NO: 1103959 - RNA, 19 nt, Homo sapiens
  misc_RNA (1)...(19): siRNA sense strand
gaugccauuugaucugaug

SEQ ID NO: 1103960 - RNA, 19 nt, Homo sapiens
  misc_RNA (1)...(19): siRNA sense strand
agaaagacaggaacauugu

SEQ ID NO: 1103961 - RNA, 19 nt, Homo sapiens
  misc_RNA (1)...(19): siRNA sense strand
agaaggcucaaaugucuuu

SEQ ID NO: 1103962 - RNA, 19 nt, Homo sapiens
  misc_RNA (1)...(19): siRNA sense strand
uugaagcggucuccgaaug

SEQ ID NO: 1103963 - RNA, 19 nt, Homo sapiens
  misc_RNA (1)...(19): siRNA sense strand
ggaaggacaagcuacuuuu

SEQ ID NO: 1103964 - RNA, 19 nt, Homo sapiens
  misc_RNA (1)...(19): siRNA sense strand
gaugccuuguucaguuauu

SEQ ID NO: 1103965 - RNA, 19 nt, Homo sapiens
  misc_RNA (1)...(19): siRNA sense strand
cuccacagaugccuuguuc

SEQ ID NO: 1103966 - RNA, 19 nt, Homo sapiens
  misc_RNA (1)...(19): siRNA sense strand
gcgaucagaaggcucaaau

SEQ ID NO: 1103967 - RNA, 19 nt, Homo sapiens
  misc_RNA (1)...(19): siRNA sense strand
ucagugaucccauguuguc

SEQ ID NO: 1103968 - RNA, 19 nt, Homo sapiens
  misc_RNA (1)...(19): siRNA sense strand
gauuuccacuuagaaccuu

SEQ ID NO: 1103969 - RNA, 19 nt, Homo sapiens
  misc_RNA (1)...(19): siRNA sense strand
cauguugucuuuuaugaug

SEQ ID NO: 1103970 - RNA, 19 nt, Homo sapiens
  misc_RNA (1)...(19): siRNA sense strand
ccacagaugccuuguucag

SEQ ID NO: 1103971 - RNA, 19 nt, Homo sapiens
  misc_RNA (1)...(19): siRNA sense strand
ugaauuugcccaguugaug

SEQ ID NO: 1103972 - RNA, 19 nt, Homo sapiens
  misc_RNA (1)...(19): siRNA sense strand
uaacggugaaagucucuug

SEQ ID NO: 1103973 - RNA, 19 nt, Homo sapiens
  misc_RNA (1)...(19): siRNA sense strand
gaaccccaccucucggaua

SEQ ID NO: 1103974 - RNA, 19 nt, Homo sapiens
  misc_RNA (1)...(19): siRNA sense strand
gaugacgaaccucacuguu

SEQ ID NO: 1103975 - RNA, 19 nt, Homo sapiens
  misc_RNA (1)...(19): siRNA sense strand
cuuguucaguuauugucua

SEQ ID NO: 1103976 - RNA, 19 nt, Homo sapiens
  misc_RNA (1)...(19): siRNA sense strand
ggacaagcuacuuuuaaau

SEQ ID NO: 1103977 - RNA, 19 nt, Homo sapiens
  misc_RNA (1)...(19): siRNA sense strand
cacuuagaaccuuaaauga

SEQ ID NO: 1103978 - RNA, 19 nt, Homo sapiens
  misc_RNA (1)...(19): siRNA sense strand
gcucuaugggaauuuaugu

SEQ ID NO: 1103979 - RNA, 19 nt, Homo sapiens
  misc_RNA (1)...(19): siRNA sense strand
gcccaacccguaggaaaug

SEQ ID NO: 1103980 - RNA, 19 nt, Homo sapiens
  misc_RNA (1)...(19): siRNA sense strand
ucauuaagggaacuauuca

SEQ ID NO: 1103981 - RNA, 19 nt, Homo sapiens
  misc_RNA (1)...(19): siRNA sense strand
gaaaacgaggcuucucuuc

SEQ ID NO: 1103982 - RNA, 19 nt, Homo sapiens
  misc_RNA (1)...(19): siRNA sense strand
cggugaaagucucuugaag

SEQ ID NO: 1103983 - RNA, 19 nt, Homo sapiens
  misc_RNA (1)...(19): siRNA sense strand
gaaggcucaaaugucuuua

SEQ ID NO: 1103984 - RNA, 19 nt, Homo sapiens
  misc_RNA (1)...(19): siRNA sense strand
aggcucaaaugucuuuagu

SEQ ID NO: 1103985 - RNA, 19 nt, Homo sapiens
  misc_RNA (1)...(19): siRNA sense strand
ugaagcggucuccgaaugu

SEQ ID NO: 1103986 - RNA, 19 nt, Homo sapiens
  misc_RNA (1)...(19): siRNA sense strand
aaugacugguucagcucua

SEQ ID NO: 1103987 - RNA, 19 nt, Homo sapiens
  misc_RNA (1)...(19): siRNA sense strand
aggacaagcuacuuuuaaa

SEQ ID NO: 1103988 - RNA, 19 nt, Homo sapiens
  misc_RNA (1)...(19): siRNA sense strand
gaucaggccuccuucaaga

SEQ ID NO: 1103989 - RNA, 19 nt, Homo sapiens
  misc_RNA (1)...(19): siRNA sense strand
gcagaugucuuggcaguga

SEQ ID NO: 1103990 - RNA, 19 nt, Homo sapiens
  misc_RNA (1)...(19): siRNA sense strand
caagucaccuccuggguaa

SEQ ID NO: 1103991 - RNA, 19 nt, Homo sapiens
  misc_RNA (1)...(19): siRNA sense strand
uaggagaccugcagacuug

SEQ ID NO: 1103992 - RNA, 19 nt, Homo sapiens
  misc_RNA (1)...(19): siRNA sense strand
ggagaaagcugagcaucca

SEQ ID NO: 1103993 - RNA, 19 nt, Homo sapiens
  misc_RNA (1)...(19): siRNA sense strand
caaaugugguggacagcuu

SEQ ID NO: 1103994 - RNA, 19 nt, Homo sapiens
  misc_RNA (1)...(19): siRNA sense strand
caagucugcugaggagaaa

SEQ ID NO: 1103995 - RNA, 19 nt, Homo sapiens
  misc_RNA (1)...(19): siRNA sense strand
caacaucuggagacaaaga

SEQ ID NO: 1103996 - RNA, 19 nt, Homo sapiens
  misc_RNA (1)...(19): siRNA sense strand
gagugcaguuguuccagaa

SEQ ID NO: 1103997 - RNA, 19 nt, Homo sapiens
  misc_RNA (1)...(19): siRNA sense strand
ucacaaauggcgaguguuc

SEQ ID NO: 1103998 - RNA, 19 nt, Homo sapiens
  misc_RNA (1)...(19): siRNA sense strand
ccagugaggagaacagcua

SEQ ID NO: 1103999 - RNA, 19 nt, Homo sapiens
  misc_RNA (1)...(19): siRNA sense strand
gaugacagcaggucuaagg

SEQ ID NO: 1104000 - RNA, 19 nt, Homo sapiens
  misc_RNA (1)...(19): siRNA sense strand
ucuaugagccuucagaauc

SEQ ID NO: 1104001 - RNA, 19 nt, Homo sapiens
  misc_RNA (1)...(19): siRNA sense strand
gccagaagacacccagaaa

SEQ ID NO: 1104002 - RNA, 19 nt, Homo sapiens
  misc_RNA (1)...(19): siRNA sense strand
aucaacaucuggagacaaa

SEQ ID NO: 1104003 - RNA, 19 nt, Homo sapiens
  misc_RNA (1)...(19): siRNA sense strand
ugucacaaauggcgagugu

SEQ ID NO: 1104004 - RNA, 19 nt, Homo sapiens
  misc_RNA (1)...(19): siRNA sense strand
ccagaacacggccagaaga

SEQ ID NO: 1104005 - RNA, 19 nt, Homo sapiens
  misc_RNA (1)...(19): siRNA sense strand
ccaagucugcugaggagaa

SEQ ID NO: 1104006 - RNA, 19 nt, Homo sapiens
  misc_RNA (1)...(19): siRNA sense strand
gagugaugcugaccauguc

SEQ ID NO: 1104007 - RNA, 19 nt, Homo sapiens
  misc_RNA (1)...(19): siRNA sense strand
cgagagugaugcugaccau

SEQ ID NO: 1104008 - RNA, 19 nt, Homo sapiens
  misc_RNA (1)...(19): siRNA sense strand
acucacagcagaugucuug

SEQ ID NO: 1104009 - RNA, 19 nt, Homo sapiens
  misc_RNA (1)...(19): siRNA sense strand
ggacaagucagagucuagu

SEQ ID NO: 1104010 - RNA, 19 nt, Homo sapiens
  misc_RNA (1)...(19): siRNA sense strand
caaagacaagagugcaguu

SEQ ID NO: 1104011 - RNA, 19 nt, Homo sapiens
  misc_RNA (1)...(19): siRNA sense strand
gcugaagcuuuaccaucug

SEQ ID NO: 1104012 - RNA, 19 nt, Homo sapiens
  misc_RNA (1)...(19): siRNA sense strand
uccacugacuggcaggaua

SEQ ID NO: 1104013 - RNA, 19 nt, Homo sapiens
  misc_RNA (1)...(19): siRNA sense strand
ccacugacuggcaggauau

SEQ ID NO: 1104014 - RNA, 19 nt, Homo sapiens
  misc_RNA (1)...(19): siRNA sense strand
gggacaggcagguucaaga

SEQ ID NO: 1104015 - RNA, 19 nt, Homo sapiens
  misc_RNA (1)...(19): siRNA sense strand
ggacaggcagguucaagac

SEQ ID NO: 1104016 - RNA, 19 nt, Homo sapiens
  misc_RNA (1)...(19): siRNA sense strand
gaaagcugagcauccaaag

SEQ ID NO: 1104017 - RNA, 19 nt, Homo sapiens
  misc_RNA (1)...(19): siRNA sense strand
ccagggccauaucaacauc

SEQ ID NO: 1104018 - RNA, 19 nt, Homo sapiens
  misc_RNA (1)...(19): siRNA sense strand
guucaagacgcaaggacaa

SEQ ID NO: 1104019 - RNA, 19 nt, Homo sapiens
  misc_RNA (1)...(19): siRNA sense strand
ggccagaagacacccagaa

SEQ ID NO: 1104020 - RNA, 19 nt, Homo sapiens
  misc_RNA (1)...(19): siRNA sense strand
agaaagcugagcauccaaa

SEQ ID NO: 1104021 - RNA, 19 nt, Homo sapiens
  misc_RNA (1)...(19): siRNA sense strand
aaaugugguggacagcuua

SEQ ID NO: 1104022 - RNA, 19 nt, Homo sapiens
  misc_RNA (1)...(19): siRNA sense strand
cugaagcuuuaccaucuga

SEQ ID NO: 1104023 - RNA, 19 nt, Homo sapiens
  misc_RNA (1)...(19): siRNA sense strand
ggcgaguguuccugagaga

SEQ ID NO: 1104024 - RNA, 19 nt, Homo sapiens
  misc_RNA (1)...(19): siRNA sense strand
cgaguguuccugagagaga

SEQ ID NO: 1104025 - RNA, 19 nt, Homo sapiens
  misc_RNA (1)...(19): siRNA sense strand
agagugaugcugaccaugu

SEQ ID NO: 1104026 - RNA, 19 nt, Homo sapiens
  misc_RNA (1)...(19): siRNA sense strand
caagagugcaguuguucca

SEQ ID NO: 1104027 - RNA, 19 nt, Homo sapiens
  misc_RNA (1)...(19): siRNA sense strand
caaggucaggucccacuca

SEQ ID NO: 1104028 - RNA, 19 nt, Homo sapiens
  misc_RNA (1)...(19): siRNA sense strand
uagaucaggccuccuucaa

SEQ ID NO: 1104029 - RNA, 19 nt, Homo sapiens
  misc_RNA (1)...(19): siRNA sense strand
gacgcaaggacaagucaga

SEQ ID NO: 1104030 - RNA, 19 nt, Homo sapiens
  misc_RNA (1)...(19): siRNA sense strand
ucacagcaggugccaaugg

SEQ ID NO: 1104031 - RNA, 19 nt, Homo sapiens
  misc_RNA (1)...(19): siRNA sense strand
ugacuggcaggauauagau

SEQ ID NO: 1104032 - RNA, 19 nt, Homo sapiens
  misc_RNA (1)...(19): siRNA sense strand
agucagagucuagugguuu

SEQ ID NO: 1104033 - RNA, 19 nt, Homo sapiens
  misc_RNA (1)...(19): siRNA sense strand
ugagagagagccggaguca

SEQ ID NO: 1104034 - RNA, 19 nt, Homo sapiens
  misc_RNA (1)...(19): siRNA sense strand
gcaaauggauaucaagaau

SEQ ID NO: 1104035 - RNA, 19 nt, Homo sapiens
  misc_RNA (1)...(19): siRNA sense strand
cauaaucgaugcuauugua

SEQ ID NO: 1104036 - RNA, 19 nt, Homo sapiens
  misc_RNA (1)...(19): siRNA sense strand
gaaaucaggugugucaaga

SEQ ID NO: 1104037 - RNA, 19 nt, Homo sapiens
  misc_RNA (1)...(19): siRNA sense strand
aaagggacgugcaggauua

SEQ ID NO: 1104038 - RNA, 19 nt, Homo sapiens
  misc_RNA (1)...(19): siRNA sense strand
cagcacggcuuuaauagaa

SEQ ID NO: 1104039 - RNA, 19 nt, Homo sapiens
  misc_RNA (1)...(19): siRNA sense strand
acagguagauguuauugua

SEQ ID NO: 1104040 - RNA, 19 nt, Homo sapiens
  misc_RNA (1)...(19): siRNA sense strand
gaaagcacauguacguugu

SEQ ID NO: 1104041 - RNA, 19 nt, Homo sapiens
  misc_RNA (1)...(19): siRNA sense strand
aaccugagcugcuaaauau

SEQ ID NO: 1104042 - RNA, 19 nt, Homo sapiens
  misc_RNA (1)...(19): siRNA sense strand
gacaagcuguggaaaguga

SEQ ID NO: 1104043 - RNA, 19 nt, Homo sapiens
  misc_RNA (1)...(19): siRNA sense strand
cacaguugcugauaacaua

SEQ ID NO: 1104044 - RNA, 19 nt, Homo sapiens
  misc_RNA (1)...(19): siRNA sense strand
caacagcaaggacauuuaa

SEQ ID NO: 1104045 - RNA, 19 nt, Homo sapiens
  misc_RNA (1)...(19): siRNA sense strand
caaccugagcugcuaaaua

SEQ ID NO: 1104046 - RNA, 19 nt, Homo sapiens
  misc_RNA (1)...(19): siRNA sense strand
gaacaggaaaugccggaaa

SEQ ID NO: 1104047 - RNA, 19 nt, Homo sapiens
  misc_RNA (1)...(19): siRNA sense strand
gaaagugaaugugcuguac

SEQ ID NO: 1104048 - RNA, 19 nt, Homo sapiens
  misc_RNA (1)...(19): siRNA sense strand
ggucaccaguguucuagaa

SEQ ID NO: 1104049 - RNA, 19 nt, Homo sapiens
  misc_RNA (1)...(19): siRNA sense strand
cauguaaucuuccugaaca

SEQ ID NO: 1104050 - RNA, 19 nt, Homo sapiens
  misc_RNA (1)...(19): siRNA sense strand
ccaggacaaucagaauaua

SEQ ID NO: 1104051 - RNA, 19 nt, Homo sapiens
  misc_RNA (1)...(19): siRNA sense strand
ggagaaagcacauguacgu

SEQ ID NO: 1104052 - RNA, 19 nt, Homo sapiens
  misc_RNA (1)...(19): siRNA sense strand
ggaaagugaaugugcugua

SEQ ID NO: 1104053 - RNA, 19 nt, Homo sapiens
  misc_RNA (1)...(19): siRNA sense strand
uauagccacugaacaggua

SEQ ID NO: 1104054 - RNA, 19 nt, Homo sapiens
  misc_RNA (1)...(19): siRNA sense strand
ucauaacuuucacggcuua

SEQ ID NO: 1104055 - RNA, 19 nt, Homo sapiens
  misc_RNA (1)...(19): siRNA sense strand
aaucagcacggcuuuaaua

SEQ ID NO: 1104056 - RNA, 19 nt, Homo sapiens
  misc_RNA (1)...(19): siRNA sense strand
uagagaagauugagaggau

SEQ ID NO: 1104057 - RNA, 19 nt, Homo sapiens
  misc_RNA (1)...(19): siRNA sense strand
gaacagaggaaguacacau

SEQ ID NO: 1104058 - RNA, 19 nt, Homo sapiens
  misc_RNA (1)...(19): siRNA sense strand
gggaaaagaugucaggaaa

SEQ ID NO: 1104059 - RNA, 19 nt, Homo sapiens
  misc_RNA (1)...(19): siRNA sense strand
ccagguggaugcuuaaagu

SEQ ID NO: 1104060 - RNA, 19 nt, Homo sapiens
  misc_RNA (1)...(19): siRNA sense strand
uaaucaggcuuacccagaa

SEQ ID NO: 1104061 - RNA, 19 nt, Homo sapiens
  misc_RNA (1)...(19): siRNA sense strand
gaggauacagaaugcauuu

SEQ ID NO: 1104062 - RNA, 19 nt, Homo sapiens
  misc_RNA (1)...(19): siRNA sense strand
acacuggacugacaugaau

SEQ ID NO: 1104063 - RNA, 19 nt, Homo sapiens
  misc_RNA (1)...(19): siRNA sense strand
cacagcauaugaaaugaaa

SEQ ID NO: 1104064 - RNA, 19 nt, Homo sapiens
  misc_RNA (1)...(19): siRNA sense strand
ggaaaacggucaccagugu

SEQ ID NO: 1104065 - RNA, 19 nt, Homo sapiens
  misc_RNA (1)...(19): siRNA sense strand
gaaaaucggugcaauuacu

SEQ ID NO: 1104066 - RNA, 19 nt, Homo sapiens
  misc_RNA (1)...(19): siRNA sense strand
uuacuggagucuucacaaa

SEQ ID NO: 1104067 - RNA, 19 nt, Homo sapiens
  misc_RNA (1)...(19): siRNA sense strand
aagaauaaaucccaacaag

SEQ ID NO: 1104068 - RNA, 19 nt, Homo sapiens
  misc_RNA (1)...(19): siRNA sense strand
acuaacuggucaagaauaa

SEQ ID NO: 1104069 - RNA, 19 nt, Homo sapiens
  misc_RNA (1)...(19): siRNA sense strand
gaaaagaugucaggaaaac

SEQ ID NO: 1104070 - RNA, 19 nt, Homo sapiens
  misc_RNA (1)...(19): siRNA sense strand
ucaagaaugaccauaagaa

SEQ ID NO: 1104071 - RNA, 19 nt, Homo sapiens
  misc_RNA (1)...(19): siRNA sense strand
uacacgaucuccaaagcua

SEQ ID NO: 1104072 - RNA, 19 nt, Homo sapiens
  misc_RNA (1)...(19): siRNA sense strand
ggacagaugcagacucagu

SEQ ID NO: 1104073 - RNA, 19 nt, Homo sapiens
  misc_RNA (1)...(19): siRNA sense strand
caagaaugaccauaagaau

SEQ ID NO: 1104074 - RNA, 19 nt, Homo sapiens
  misc_RNA (1)...(19): siRNA sense strand
ccacugaacagguagaugu

SEQ ID NO: 1104075 - RNA, 19 nt, Homo sapiens
  misc_RNA (1)...(19): siRNA sense strand
ccauaagaauaaugagaga

SEQ ID NO: 1104076 - RNA, 19 nt, Homo sapiens
  misc_RNA (1)...(19): siRNA sense strand
gucaagagcuauuuuagaa

SEQ ID NO: 1104077 - RNA, 19 nt, Homo sapiens
  misc_RNA (1)...(19): siRNA sense strand
ucaggugugucaagagcua

SEQ ID NO: 1104078 - RNA, 19 nt, Homo sapiens
  misc_RNA (1)...(19): siRNA sense strand
caaagggacgugcaggauu

SEQ ID NO: 1104079 - RNA, 19 nt, Homo sapiens
  misc_RNA (1)...(19): siRNA sense strand
gcacggcuuuaauagaagu

SEQ ID NO: 1104080 - RNA, 19 nt, Homo sapiens
  misc_RNA (1)...(19): siRNA sense strand
uaucaagaaugaccauaag

SEQ ID NO: 1104081 - RNA, 19 nt, Homo sapiens
  misc_RNA (1)...(19): siRNA sense strand
aaaggcaaauggauaucaa

SEQ ID NO: 1104082 - RNA, 19 nt, Homo sapiens
  misc_RNA (1)...(19): siRNA sense strand
ggaaguacacaucgguuuc

SEQ ID NO: 1104083 - RNA, 19 nt, Homo sapiens
  misc_RNA (1)...(19): siRNA sense strand
gcacagccucacagagauu

SEQ ID NO: 1104084 - RNA, 19 nt, Homo sapiens
  misc_RNA (1)...(19): siRNA sense strand
gguugcuacuggagauaua

SEQ ID NO: 1104085 - RNA, 19 nt, Homo sapiens
  misc_RNA (1)...(19): siRNA sense strand
gacaaacaauacacgaucu

SEQ ID NO: 1104086 - RNA, 19 nt, Homo sapiens
  misc_RNA (1)...(19): siRNA sense strand
ucaaucagcacggcuuuaa

SEQ ID NO: 1104087 - RNA, 19 nt, Homo sapiens
  misc_RNA (1)...(19): siRNA sense strand
gaacuuucaguccacauuc

SEQ ID NO: 1104088 - RNA, 19 nt, Homo sapiens
  misc_RNA (1)...(19): siRNA sense strand
ucaccaguguucuagaaga

SEQ ID NO: 1104089 - RNA, 19 nt, Homo sapiens
  misc_RNA (1)...(19): siRNA sense strand
ggaaaucaggugugucaag

SEQ ID NO: 1104090 - RNA, 19 nt, Homo sapiens
  misc_RNA (1)...(19): siRNA sense strand
uagaugaauucacuaacug

SEQ ID NO: 1104091 - RNA, 19 nt, Homo sapiens
  misc_RNA (1)...(19): siRNA sense strand
aagugaaugugcuguacua

SEQ ID NO: 1104092 - RNA, 19 nt, Homo sapiens
  misc_RNA (1)...(19): siRNA sense strand
gaccauaagaauaaugaga

SEQ ID NO: 1104093 - RNA, 19 nt, Homo sapiens
  misc_RNA (1)...(19): siRNA sense strand
caauauuguuguagucagu

SEQ ID NO: 1104094 - RNA, 19 nt, Homo sapiens
  misc_RNA (1)...(19): siRNA sense strand
ggucgggacugucucuaag

SEQ ID NO: 1104095 - RNA, 19 nt, Homo sapiens
  misc_RNA (1)...(19): siRNA sense strand
ugaaugugcuguacuagcu

SEQ ID NO: 1104096 - RNA, 19 nt, Homo sapiens
  misc_RNA (1)...(19): siRNA sense strand
ucaacagcaaggacauuua

SEQ ID NO: 1104097 - RNA, 19 nt, Homo sapiens
  misc_RNA (1)...(19): siRNA sense strand
ggacgugcaggauuaguca

SEQ ID NO: 1104098 - RNA, 19 nt, Homo sapiens
  misc_RNA (1)...(19): siRNA sense strand
gaacacuggacugacauga

SEQ ID NO: 1104099 - RNA, 19 nt, Homo sapiens
  misc_RNA (1)...(19): siRNA sense strand
gauaacauaaucgaugcua

SEQ ID NO: 1104100 - RNA, 19 nt, Homo sapiens
  misc_RNA (1)...(19): siRNA sense strand
cagacucagugccauaugu

SEQ ID NO: 1104101 - RNA, 19 nt, Homo sapiens
  misc_RNA (1)...(19): siRNA sense strand
ccaagaauccucacaaucc

SEQ ID NO: 1104102 - RNA, 19 nt, Homo sapiens
  misc_RNA (1)...(19): siRNA sense strand
uagaaguugugcugggaaa

SEQ ID NO: 1104103 - RNA, 19 nt, Homo sapiens
  misc_RNA (1)...(19): siRNA sense strand
ccugaacacuggacugaca

SEQ ID NO: 1104104 - RNA, 19 nt, Homo sapiens
  misc_RNA (1)...(19): siRNA sense strand
ccaaggacaccuacuccaa

SEQ ID NO: 1104105 - RNA, 19 nt, Homo sapiens
  misc_RNA (1)...(19): siRNA sense strand
gcuagagccaggacaauca

SEQ ID NO: 1104106 - RNA, 19 nt, Homo sapiens
  misc_RNA (1)...(19): siRNA sense strand
ggagauauagccacugaac

SEQ ID NO: 1104107 - RNA, 19 nt, Homo sapiens
  misc_RNA (1)...(19): siRNA sense strand
agagaagauugagaggaua

SEQ ID NO: 1104108 - RNA, 19 nt, Homo sapiens
  misc_RNA (1)...(19): siRNA sense strand
caggacaaucagaauauaa

SEQ ID NO: 1104109 - RNA, 19 nt, Homo sapiens
  misc_RNA (1)...(19): siRNA sense strand
gccaggacaaucagaauau

SEQ ID NO: 1104110 - RNA, 19 nt, Homo sapiens
  misc_RNA (1)...(19): siRNA sense strand
uuuagaaggugcuggacaa

SEQ ID NO: 1104111 - RNA, 19 nt, Homo sapiens
  misc_RNA (1)...(19): siRNA sense strand
gcuauuugugguauucuuu

SEQ ID NO: 1104112 - RNA, 19 nt, Homo sapiens
  misc_RNA (1)...(19): siRNA sense strand
ugggacagaugcagacuca

SEQ ID NO: 1104113 - RNA, 19 nt, Homo sapiens
  misc_RNA (1)...(19): siRNA sense strand
caaauggauaucaagaaug

SEQ ID NO: 1104114 - RNA, 19 nt, Homo sapiens
  misc_RNA (1)...(19): siRNA sense strand
ggcaggagauacccaaggu

SEQ ID NO: 1104115 - RNA, 19 nt, Homo sapiens
  misc_RNA (1)...(19): siRNA sense strand
cuagaagagugugaacaga

SEQ ID NO: 1104116 - RNA, 19 nt, Homo sapiens
  misc_RNA (1)...(19): siRNA sense strand
uuacccagaauaucucaua

SEQ ID NO: 1104117 - RNA, 19 nt, Homo sapiens
  misc_RNA (1)...(19): siRNA sense strand
aaagcuauuugugguauuc

SEQ ID NO: 1104118 - RNA, 19 nt, Homo sapiens
  misc_RNA (1)...(19): siRNA sense strand
cauguacguugugcgagua

SEQ ID NO: 1104119 - RNA, 19 nt, Homo sapiens
  misc_RNA (1)...(19): siRNA sense strand
cuggagauauagccacuga

SEQ ID NO: 1104120 - RNA, 19 nt, Homo sapiens
  misc_RNA (1)...(19): siRNA sense strand
guagacuucucaucacaac

SEQ ID NO: 1104121 - RNA, 19 nt, Homo sapiens
  misc_RNA (1)...(19): siRNA sense strand
uucacuaacuggucaagaa

SEQ ID NO: 1104122 - RNA, 19 nt, Homo sapiens
  misc_RNA (1)...(19): siRNA sense strand
gcugcuaaauauauucuac

SEQ ID NO: 1104123 - RNA, 19 nt, Homo sapiens
  misc_RNA (1)...(19): siRNA sense strand
ccugagcugcuaaauauau

SEQ ID NO: 1104124 - RNA, 19 nt, Homo sapiens
  misc_RNA (1)...(19): siRNA sense strand
uggacaagcuguggaaagu

SEQ ID NO: 1104125 - RNA, 19 nt, Homo sapiens
  misc_RNA (1)...(19): siRNA sense strand
caagaauaaaucccaacaa

SEQ ID NO: 1104126 - RNA, 19 nt, Homo sapiens
  misc_RNA (1)...(19): siRNA sense strand
ggcaaauggauaucaagaa

SEQ ID NO: 1104127 - RNA, 19 nt, Homo sapiens
  misc_RNA (1)...(19): siRNA sense strand
uacccagaauaucucauaa

SEQ ID NO: 1104128 - RNA, 19 nt, Homo sapiens
  misc_RNA (1)...(19): siRNA sense strand
cugcacagccucacagaga

SEQ ID NO: 1104129 - RNA, 19 nt, Homo sapiens
  misc_RNA (1)...(19): siRNA sense strand
cccagaauaucucauaacu

SEQ ID NO: 1104130 - RNA, 19 nt, Homo sapiens
  misc_RNA (1)...(19): siRNA sense strand
ccaguuauucugccaagga

SEQ ID NO: 1104131 - RNA, 19 nt, Homo sapiens
  misc_RNA (1)...(19): siRNA sense strand
ucgaugcuauuguagacuu

SEQ ID NO: 1104132 - RNA, 19 nt, Homo sapiens
  misc_RNA (1)...(19): siRNA sense strand
auuguaaacucaacagcaa

SEQ ID NO: 1104133 - RNA, 19 nt, Homo sapiens
  misc_RNA (1)...(19): siRNA sense strand
gagaaagcacauguacguu

SEQ ID NO: 1104134 - RNA, 19 nt, Homo sapiens
  misc_RNA (1)...(19): siRNA sense strand
gaagaggugucucccuauu

SEQ ID NO: 1104135 - RNA, 19 nt, Homo sapiens
  misc_RNA (1)...(19): siRNA sense strand
ggaggaaggugcccacguu

SEQ ID NO: 1104136 - RNA, 19 nt, Homo sapiens
  misc_RNA (1)...(19): siRNA sense strand
gaaaggaagcggauguuca

SEQ ID NO: 1104137 - RNA, 19 nt, Homo sapiens
  misc_RNA (1)...(19): siRNA sense strand
gagaagaggaggaggaaga

SEQ ID NO: 1104138 - RNA, 19 nt, Homo sapiens
  misc_RNA (1)...(19): siRNA sense strand
gucuauaucuccuucauga

SEQ ID NO: 1104139 - RNA, 19 nt, Homo sapiens
  misc_RNA (1)...(19): siRNA sense strand
cacguuugcuuacgagaaa

SEQ ID NO: 1104140 - RNA, 19 nt, Homo sapiens
  misc_RNA (1)...(19): siRNA sense strand
ggaagaggagcgcggaaga

SEQ ID NO: 1104141 - RNA, 19 nt, Homo sapiens
  misc_RNA (1)...(19): siRNA sense strand
ggagagcugugagaagaag

SEQ ID NO: 1104142 - RNA, 19 nt, Homo sapiens
  misc_RNA (1)...(19): siRNA sense strand
acacuacggugcuggacuu

SEQ ID NO: 1104143 - RNA, 19 nt, Homo sapiens
  misc_RNA (1)...(19): siRNA sense strand
aaaggaagcggauguucaa

SEQ ID NO: 1104144 - RNA, 19 nt, Homo sapiens
  misc_RNA (1)...(19): siRNA sense strand
agaggugucucccuauuag

SEQ ID NO: 1104145 - RNA, 19 nt, Homo sapiens
  misc_RNA (1)...(19): siRNA sense strand
ggaagcggauguucaaccu

SEQ ID NO: 1104146 - RNA, 19 nt, Homo sapiens
  misc_RNA (1)...(19): siRNA sense strand
ggaagaggugucucccuau

SEQ ID NO: 1104147 - RNA, 19 nt, Homo sapiens
  misc_RNA (1)...(19): siRNA sense strand
uuggagagcugugagaaga

SEQ ID NO: 1104148 - RNA, 19 nt, Homo sapiens
  misc_RNA (1)...(19): siRNA sense strand
aagaggugucucccuauua

SEQ ID NO: 1104149 - RNA, 19 nt, Homo sapiens
  misc_RNA (1)...(19): siRNA sense strand
gaggaaggugcccacguuu

SEQ ID NO: 1104150 - RNA, 19 nt, Homo sapiens
  misc_RNA (1)...(19): siRNA sense strand
ggaaggugcccacguuugc

SEQ ID NO: 1104151 - RNA, 19 nt, Homo sapiens
  misc_RNA (1)...(19): siRNA sense strand
gccuggccaucgucuauau

SEQ ID NO: 1104152 - RNA, 19 nt, Homo sapiens
  misc_RNA (1)...(19): siRNA sense strand
gaagaggagcgcggaagag

SEQ ID NO: 1104153 - RNA, 19 nt, Homo sapiens
  misc_RNA (1)...(19): siRNA sense strand
ccacguuugcuuacgagaa

SEQ ID NO: 1104154 - RNA, 19 nt, Homo sapiens
  misc_RNA (1)...(19): siRNA sense strand
gcugugagaagaaggaaag

SEQ ID NO: 1104155 - RNA, 19 nt, Homo sapiens
  misc_RNA (1)...(19): siRNA sense strand
gccaacauccgcgaaagga

SEQ ID NO: 1104156 - RNA, 19 nt, Homo sapiens
  misc_RNA (1)...(19): siRNA sense strand
gcgaaaggaagcggauguu

SEQ ID NO: 1104157 - RNA, 19 nt, Homo sapiens
  misc_RNA (1)...(19): siRNA sense strand
cuacggugcuggacuucgu

SEQ ID NO: 1104158 - RNA, 19 nt, Homo sapiens
  misc_RNA (1)...(19): siRNA sense strand
agaagaggagugcgaagug

SEQ ID NO: 1104159 - RNA, 19 nt, Homo sapiens
  misc_RNA (1)...(19): siRNA sense strand
cgaaaggaagcggauguuc

SEQ ID NO: 1104160 - RNA, 19 nt, Homo sapiens
  misc_RNA (1)...(19): siRNA sense strand
gaagagagaagacauauuc

SEQ ID NO: 1104161 - RNA, 19 nt, Homo sapiens
  misc_RNA (1)...(19): siRNA sense strand
gaagacauauucuacacuu

SEQ ID NO: 1104162 - RNA, 19 nt, Homo sapiens
  misc_RNA (1)...(19): siRNA sense strand
aaacagaaaugugcgauau

SEQ ID NO: 1104163 - RNA, 19 nt, Homo sapiens
  misc_RNA (1)...(19): siRNA sense strand
gcaaccagguggaauguca

SEQ ID NO: 1104164 - RNA, 19 nt, Homo sapiens
  misc_RNA (1)...(19): siRNA sense strand
ggaaugucauccuuacuuc

SEQ ID NO: 1104165 - RNA, 19 nt, Homo sapiens
  misc_RNA (1)...(19): siRNA sense strand
guguaaagaugcaggauug

SEQ ID NO: 1104166 - RNA, 19 nt, Homo sapiens
  misc_RNA (1)...(19): siRNA sense strand
gagcagcgcaucagacaga

SEQ ID NO: 1104167 - RNA, 19 nt, Homo sapiens
  misc_RNA (1)...(19): siRNA sense strand
gugaggaagugaucccaaa

SEQ ID NO: 1104168 - RNA, 19 nt, Homo sapiens
  misc_RNA (1)...(19): siRNA sense strand
uagauggccuaaacagaaa

SEQ ID NO: 1104169 - RNA, 19 nt, Homo sapiens
  misc_RNA (1)...(19): siRNA sense strand
agagaaaacugcuggauuu

SEQ ID NO: 1104170 - RNA, 19 nt, Homo sapiens
  misc_RNA (1)...(19): siRNA sense strand
gacagaacgugcagguguu

SEQ ID NO: 1104171 - RNA, 19 nt, Homo sapiens
  misc_RNA (1)...(19): siRNA sense strand
gcugaaugauggucacuuc

SEQ ID NO: 1104172 - RNA, 19 nt, Homo sapiens
  misc_RNA (1)...(19): siRNA sense strand
ggagaaguguaaagaugca

SEQ ID NO: 1104173 - RNA, 19 nt, Homo sapiens
  misc_RNA (1)...(19): siRNA sense strand
gagaugaaagccauagaug

SEQ ID NO: 1104174 - RNA, 19 nt, Homo sapiens
  misc_RNA (1)...(19): siRNA sense strand
gaagugaucccaaaagaug

SEQ ID NO: 1104175 - RNA, 19 nt, Homo sapiens
  misc_RNA (1)...(19): siRNA sense strand
gacauauucuacacuucaa

SEQ ID NO: 1104176 - RNA, 19 nt, Homo sapiens
  misc_RNA (1)...(19): siRNA sense strand
ggagaugaaagccauagau

SEQ ID NO: 1104177 - RNA, 19 nt, Homo sapiens
  misc_RNA (1)...(19): siRNA sense strand
auagauggccuaaacagaa

SEQ ID NO: 1104178 - RNA, 19 nt, Homo sapiens
  misc_RNA (1)...(19): siRNA sense strand
uaaacagaaaugugcgaua

SEQ ID NO: 1104179 - RNA, 19 nt, Homo sapiens
  misc_RNA (1)...(19): siRNA sense strand
gguggaaugucauccuuac

SEQ ID NO: 1104180 - RNA, 19 nt, Homo sapiens
  misc_RNA (1)...(19): siRNA sense strand
gaacgugcagguguuugaa

SEQ ID NO: 1104181 - RNA, 19 nt, Homo sapiens
  misc_RNA (1)...(19): siRNA sense strand
ggacuggccauccgaagca

SEQ ID NO: 1104182 - RNA, 19 nt, Homo sapiens
  misc_RNA (1)...(19): siRNA sense strand
agacauauucuacacuuca

SEQ ID NO: 1104183 - RNA, 19 nt, Homo sapiens
  misc_RNA (1)...(19): siRNA sense strand
gcagagguuccuaaaagua

SEQ ID NO: 1104184 - RNA, 19 nt, Homo sapiens
  misc_RNA (1)...(19): siRNA sense strand
ggagaugauccucaacaag

SEQ ID NO: 1104185 - RNA, 19 nt, Homo sapiens
  misc_RNA (1)...(19): siRNA sense strand
uggagaugauccucaacaa

SEQ ID NO: 1104186 - RNA, 19 nt, Homo sapiens
  misc_RNA (1)...(19): siRNA sense strand
guguuugaauuccaguuga

SEQ ID NO: 1104187 - RNA, 19 nt, Homo sapiens
  misc_RNA (1)...(19): siRNA sense strand
gaaugucauccuuacuuca

SEQ ID NO: 1104188 - RNA, 19 nt, Homo sapiens
  misc_RNA (1)...(19): siRNA sense strand
cagguggaaugucauccuu

SEQ ID NO: 1104189 - RNA, 19 nt, Homo sapiens
  misc_RNA (1)...(19): siRNA sense strand
gaauuccaguugacuucag

SEQ ID NO: 1104190 - RNA, 19 nt, Homo sapiens
  misc_RNA (1)...(19): siRNA sense strand
cgauauuugacccuugaua

SEQ ID NO: 1104191 - RNA, 19 nt, Homo sapiens
  misc_RNA (1)...(19): siRNA sense strand
cauagauggccuaaacaga

SEQ ID NO: 1104192 - RNA, 19 nt, Homo sapiens
  misc_RNA (1)...(19): siRNA sense strand
gugaagagagaagacauau

SEQ ID NO: 1104193 - RNA, 19 nt, Homo sapiens
  misc_RNA (1)...(19): siRNA sense strand
uggccaagagcuacaauga

SEQ ID NO: 1104194 - RNA, 19 nt, Homo sapiens
  misc_RNA (1)...(19): siRNA sense strand
uggaaugucauccuuacuu

SEQ ID NO: 1104195 - RNA, 19 nt, Homo sapiens
  misc_RNA (1)...(19): siRNA sense strand
auucuacacuucaaagcuu

SEQ ID NO: 1104196 - RNA, 19 nt, Homo sapiens
  misc_RNA (1)...(19): siRNA sense strand
ugcgauauuugacccuuga

SEQ ID NO: 1104197 - RNA, 19 nt, Homo sapiens
  misc_RNA (1)...(19): siRNA sense strand
aaagccaggugaggaagug

SEQ ID NO: 1104198 - RNA, 19 nt, Homo sapiens
  misc_RNA (1)...(19): siRNA sense strand
ccugggauuuggcaccuau

SEQ ID NO: 1104199 - RNA, 19 nt, Homo sapiens
  misc_RNA (1)...(19): siRNA sense strand
acgugcagguguuugaauu

SEQ ID NO: 1104200 - RNA, 19 nt, Homo sapiens
  misc_RNA (1)...(19): siRNA sense strand
gaugcaggauuggccaagu

SEQ ID NO: 1104201 - RNA, 19 nt, Homo sapiens
  misc_RNA (1)...(19): siRNA sense strand
ugaagagagaagacauauu

SEQ ID NO: 1104202 - RNA, 19 nt, Homo sapiens
  misc_RNA (1)...(19): siRNA sense strand
cccaaaagaugaaaaugga

SEQ ID NO: 1104203 - RNA, 19 nt, Homo sapiens
  misc_RNA (1)...(19): siRNA sense strand
gguguuugaauuccaguug

SEQ ID NO: 1104204 - RNA, 19 nt, Homo sapiens
  misc_RNA (1)...(19): siRNA sense strand
uguaaagccaggugaggaa

SEQ ID NO: 1104205 - RNA, 19 nt, Homo sapiens
  misc_RNA (1)...(19): siRNA sense strand
uuggaaaggucacugaaaa

SEQ ID NO: 1104206 - RNA, 19 nt, Homo sapiens
  misc_RNA (1)...(19): siRNA sense strand
cuaugcgccugcagagguu

SEQ ID NO: 1104207 - RNA, 19 nt, Homo sapiens
  misc_RNA (1)...(19): siRNA sense strand
aaaagacauuguucugguu

SEQ ID NO: 1104208 - RNA, 19 nt, Homo sapiens
  misc_RNA (1)...(19): siRNA sense strand
aguacaagccugucugcaa

SEQ ID NO: 1104209 - RNA, 19 nt, Homo sapiens
  misc_RNA (1)...(19): siRNA sense strand
cugcagagguuccuaaaag

SEQ ID NO: 1104210 - RNA, 19 nt, Homo sapiens
  misc_RNA (1)...(19): siRNA sense strand
agaacgugcagguguuuga

SEQ ID NO: 1104211 - RNA, 19 nt, Homo sapiens
  misc_RNA (1)...(19): siRNA sense strand
gaacggcgcucgcugcuau

SEQ ID NO: 1104212 - RNA, 19 nt, Homo sapiens
  misc_RNA (1)...(19): siRNA sense strand
gcaaggaagcuguguguaa

SEQ ID NO: 1104213 - RNA, 19 nt, Homo sapiens
  misc_RNA (1)...(19): siRNA sense strand
caaggaagcuguguguaaa

SEQ ID NO: 1104214 - RNA, 19 nt, Homo sapiens
  misc_RNA (1)...(19): siRNA sense strand
acaaagaccugaacuacug

SEQ ID NO: 1104215 - RNA, 19 nt, Homo sapiens
  misc_RNA (1)...(19): siRNA sense strand
aaacaaggguguaauuugc

SEQ ID NO: 1104216 - RNA, 19 nt, Homo sapiens
  misc_RNA (1)...(19): siRNA sense strand
guaaacaaggguguaauuu

SEQ ID NO: 1104217 - RNA, 19 nt, Homo sapiens
  misc_RNA (1)...(19): siRNA sense strand
gcgugugccuuaaggagua

SEQ ID NO: 1104218 - RNA, 19 nt, Homo sapiens
  misc_RNA (1)...(19): siRNA sense strand
uaaacaaggguguaauuug

SEQ ID NO: 1104219 - RNA, 19 nt, Homo sapiens
  misc_RNA (1)...(19): siRNA sense strand
gaagcuguguguaaacaag

SEQ ID NO: 1104220 - RNA, 19 nt, Homo sapiens
  misc_RNA (1)...(19): siRNA sense strand
gaaguuccucucacacaaa

SEQ ID NO: 1104221 - RNA, 19 nt, Homo sapiens
  misc_RNA (1)...(19): siRNA sense strand
ucacacaaauucaccaaag

SEQ ID NO: 1104222 - RNA, 19 nt, Homo sapiens
  misc_RNA (1)...(19): siRNA sense strand
cuacaaugguggcaucugu

SEQ ID NO: 1104223 - RNA, 19 nt, Homo sapiens
  misc_RNA (1)...(19): siRNA sense strand
cgccugcccugaugacuuu

SEQ ID NO: 1104224 - RNA, 19 nt, Homo sapiens
  misc_RNA (1)...(19): siRNA sense strand
ccggccaccuggacaauaa

SEQ ID NO: 1104225 - RNA, 19 nt, Homo sapiens
  misc_RNA (1)...(19): siRNA sense strand
ggucguacuugcacucaca

SEQ ID NO: 1104226 - RNA, 19 nt, Homo sapiens
  misc_RNA (1)...(19): siRNA sense strand
cuacugccaugagaacauu

SEQ ID NO: 1104227 - RNA, 19 nt, Homo sapiens
  misc_RNA (1)...(19): siRNA sense strand
cacacaaauucaccaaaga

SEQ ID NO: 1104228 - RNA, 19 nt, Homo sapiens
  misc_RNA (1)...(19): siRNA sense strand
guacuugcacucacaauac

SEQ ID NO: 1104229 - RNA, 19 nt, Homo sapiens
  misc_RNA (1)...(19): siRNA sense strand
agaaguuccucucacacaa

SEQ ID NO: 1104230 - RNA, 19 nt, Homo sapiens
  misc_RNA (1)...(19): siRNA sense strand
gggcaaggagugcaaggaa

SEQ ID NO: 1104231 - RNA, 19 nt, Homo sapiens
  misc_RNA (1)...(19): siRNA sense strand
gcacucacaauaccaacga

SEQ ID NO: 1104232 - RNA, 19 nt, Homo sapiens
  misc_RNA (1)...(19): siRNA sense strand
ugacaaagaccugaacuac

SEQ ID NO: 1104233 - RNA, 19 nt, Homo sapiens
  misc_RNA (1)...(19): siRNA sense strand
gggaggagagcgccaacaa

SEQ ID NO: 1104234 - RNA, 19 nt, Homo sapiens
  misc_RNA (1)...(19): siRNA sense strand
gcaacaaggccugcaugga

SEQ ID NO: 1104235 - RNA, 19 nt, Homo sapiens
  misc_RNA (1)...(19): siRNA sense strand
acaaggacgugcucuacca

SEQ ID NO: 1104236 - RNA, 19 nt, Homo sapiens
  misc_RNA (1)...(19): siRNA sense strand
cgccucaccuugcauuuca

SEQ ID NO: 1104237 - RNA, 19 nt, Homo sapiens
  misc_RNA (1)...(19): siRNA sense strand
uguaaacaaggguguaauu

SEQ ID NO: 1104238 - RNA, 19 nt, Homo sapiens
  misc_RNA (1)...(19): siRNA sense strand
gcaccuacugccaugagaa

SEQ ID NO: 1104239 - RNA, 19 nt, Homo sapiens
  misc_RNA (1)...(19): siRNA sense strand
ggaccagguggacggcuuu

SEQ ID NO: 1104240 - RNA, 19 nt, Homo sapiens
  misc_RNA (1)...(19): siRNA sense strand
uaaccuggagggugacuau

SEQ ID NO: 1104241 - RNA, 19 nt, Homo sapiens
  misc_RNA (1)...(19): siRNA sense strand
gcaaaggugccuggagaag

SEQ ID NO: 1104242 - RNA, 19 nt, Homo sapiens
  misc_RNA (1)...(19): siRNA sense strand
gcuggugccugugcugugu

SEQ ID NO: 1104243 - RNA, 19 nt, Homo sapiens
  misc_RNA (1)...(19): siRNA sense strand
ugacuuugguggcaagaac

SEQ ID NO: 1104244 - RNA, 19 nt, Homo sapiens
  misc_RNA (1)...(19): siRNA sense strand
gagguucugcgaugagugu

SEQ ID NO: 1104245 - RNA, 19 nt, Homo sapiens
  misc_RNA (1)...(19): siRNA sense strand
acacaaauucaccaaagau

SEQ ID NO: 1104246 - RNA, 19 nt, Homo sapiens
  misc_RNA (1)...(19): siRNA sense strand
augaggagcugcugaucga

SEQ ID NO: 1104247 - RNA, 19 nt, Homo sapiens
  misc_RNA (1)...(19): siRNA sense strand
cguacuugcacucacaaua

SEQ ID NO: 1104248 - RNA, 19 nt, Homo sapiens
  misc_RNA (1)...(19): siRNA sense strand
acgccgagccugaccagua

SEQ ID NO: 1104249 - RNA, 19 nt, Homo sapiens
  misc_RNA (1)...(19): siRNA sense strand
gacaaagaccugaacuacu

SEQ ID NO: 1104250 - RNA, 19 nt, Homo sapiens
  misc_RNA (1)...(19): siRNA sense strand
gugacaaagaccugaacua

SEQ ID NO: 1104251 - RNA, 19 nt, Homo sapiens
  misc_RNA (1)...(19): siRNA sense strand
cgaaugaggagcugcugau

SEQ ID NO: 1104252 - RNA, 19 nt, Homo sapiens
  misc_RNA (1)...(19): siRNA sense strand
uacgugcgcgugugccuua

SEQ ID NO: 1104253 - RNA, 19 nt, Homo sapiens
  misc_RNA (1)...(19): siRNA sense strand
ccucugccuugcuacaaug

SEQ ID NO: 1104254 - RNA, 19 nt, Homo sapiens
  misc_RNA (1)...(19): siRNA sense strand
ggugaacggguaccagugu

SEQ ID NO: 1104255 - RNA, 19 nt, Homo sapiens
  misc_RNA (1)...(19): siRNA sense strand
gggcaggaacugugagaag

SEQ ID NO: 1104256 - RNA, 19 nt, Homo sapiens
  misc_RNA (1)...(19): siRNA sense strand
gugcaaggaagcugugugu

SEQ ID NO: 1104257 - RNA, 19 nt, Homo sapiens
  misc_RNA (1)...(19): siRNA sense strand
ccuggagggugacuauuac

SEQ ID NO: 1104258 - RNA, 19 nt, Homo sapiens
  misc_RNA (1)...(19): siRNA sense strand
ggaagcuguguguaaacaa

SEQ ID NO: 1104259 - RNA, 19 nt, Homo sapiens
  misc_RNA (1)...(19): siRNA sense strand
ggccugcucugugacaaag

SEQ ID NO: 1104260 - RNA, 19 nt, Homo sapiens
  misc_RNA (1)...(19): siRNA sense strand
gcuggaagagccugcacuu

SEQ ID NO: 1104261 - RNA, 19 nt, Homo sapiens
  misc_RNA (1)...(19): siRNA sense strand
guuccucucacacaaauuc

SEQ ID NO: 1104262 - RNA, 19 nt, Homo sapiens
  misc_RNA (1)...(19): siRNA sense strand
ccacaaggacgugcucuac

SEQ ID NO: 1104263 - RNA, 19 nt, Homo sapiens
  misc_RNA (1)...(19): siRNA sense strand
aaugguggcaucuguguug

SEQ ID NO: 1104264 - RNA, 19 nt, Homo sapiens
  misc_RNA (1)...(19): siRNA sense strand
gcugcgacgagaacuacua

SEQ ID NO: 1104265 - RNA, 19 nt, Homo sapiens
  misc_RNA (1)...(19): siRNA sense strand
gcaacugugagaccaacug

SEQ ID NO: 1104266 - RNA, 19 nt, Homo sapiens
  misc_RNA (1)...(19): siRNA sense strand
ccaccuggacaauaacugu

SEQ ID NO: 1104267 - RNA, 19 nt, Homo sapiens
  misc_RNA (1)...(19): siRNA sense strand
gggagguucugcgaugagu

SEQ ID NO: 1104268 - RNA, 19 nt, Homo sapiens
  misc_RNA (1)...(19): siRNA sense strand
ccugugcccuugacaucga

SEQ ID NO: 1104269 - RNA, 19 nt, Homo sapiens
  misc_RNA (1)...(19): siRNA sense strand
gcugggagggucguacuug

SEQ ID NO: 1104270 - RNA, 19 nt, Homo sapiens
  misc_RNA (1)...(19): siRNA sense strand
aggaagcuguguguaaaca

SEQ ID NO: 1104271 - RNA, 19 nt, Homo sapiens
  misc_RNA (1)...(19): siRNA sense strand
gcggucaggagcaucaaug

SEQ ID NO: 1104272 - RNA, 19 nt, Homo sapiens
  misc_RNA (1)...(19): siRNA sense strand
ucacugcuccuggcuguca

SEQ ID NO: 1104273 - RNA, 19 nt, Homo sapiens
  misc_RNA (1)...(19): siRNA sense strand
gagguggccguguccuuca

SEQ ID NO: 1104274 - RNA, 19 nt, Homo sapiens
  misc_RNA (1)...(19): siRNA sense strand
gaagcuccuggguggaaga

SEQ ID NO: 1104275 - RNA, 19 nt, Homo sapiens
  misc_RNA (1)...(19): siRNA sense strand
gaacggcgcucgcugcuau

SEQ ID NO: 1104276 - RNA, 19 nt, Homo sapiens
  misc_RNA (1)...(19): siRNA sense strand
gcaaggaagcuguguguaa

SEQ ID NO: 1104277 - RNA, 19 nt, Homo sapiens
  misc_RNA (1)...(19): siRNA sense strand
caaggaagcuguguguaaa

SEQ ID NO: 1104278 - RNA, 19 nt, Homo sapiens
  misc_RNA (1)...(19): siRNA sense strand
acaaagaccugaacuacug

SEQ ID NO: 1104279 - RNA, 19 nt, Homo sapiens
  misc_RNA (1)...(19): siRNA sense strand
aaacaaggguguaauuugc

SEQ ID NO: 1104280 - RNA, 19 nt, Homo sapiens
  misc_RNA (1)...(19): siRNA sense strand
guaaacaaggguguaauuu

SEQ ID NO: 1104281 - RNA, 19 nt, Homo sapiens
  misc_RNA (1)...(19): siRNA sense strand
gcgugugccuuaaggagua

SEQ ID NO: 1104282 - RNA, 19 nt, Homo sapiens
  misc_RNA (1)...(19): siRNA sense strand
uaaacaaggguguaauuug

SEQ ID NO: 1104283 - RNA, 19 nt, Homo sapiens
  misc_RNA (1)...(19): siRNA sense strand
gaagcuguguguaaacaag

SEQ ID NO: 1104284 - RNA, 19 nt, Homo sapiens
  misc_RNA (1)...(19): siRNA sense strand
gaaguuccucucacacaaa

SEQ ID NO: 1104285 - RNA, 19 nt, Homo sapiens
  misc_RNA (1)...(19): siRNA sense strand
ucacacaaauucaccaaag

SEQ ID NO: 1104286 - RNA, 19 nt, Homo sapiens
  misc_RNA (1)...(19): siRNA sense strand
cuacaaugguggcaucugu

SEQ ID NO: 1104287 - RNA, 19 nt, Homo sapiens
  misc_RNA (1)...(19): siRNA sense strand
cgccugcccugaugacuuu

SEQ ID NO: 1104288 - RNA, 19 nt, Homo sapiens
  misc_RNA (1)...(19): siRNA sense strand
ccggccaccuggacaauaa

SEQ ID NO: 1104289 - RNA, 19 nt, Homo sapiens
  misc_RNA (1)...(19): siRNA sense strand
ggucguacuugcacucaca

SEQ ID NO: 1104290 - RNA, 19 nt, Homo sapiens
  misc_RNA (1)...(19): siRNA sense strand
cuacugccaugagaacauu

SEQ ID NO: 1104291 - RNA, 19 nt, Homo sapiens
  misc_RNA (1)...(19): siRNA sense strand
cacacaaauucaccaaaga

SEQ ID NO: 1104292 - RNA, 19 nt, Homo sapiens
  misc_RNA (1)...(19): siRNA sense strand
guacuugcacucacaauac

SEQ ID NO: 1104293 - RNA, 19 nt, Homo sapiens
  misc_RNA (1)...(19): siRNA sense strand
agaaguuccucucacacaa

SEQ ID NO: 1104294 - RNA, 19 nt, Homo sapiens
  misc_RNA (1)...(19): siRNA sense strand
gggcaaggagugcaaggaa

SEQ ID NO: 1104295 - RNA, 19 nt, Homo sapiens
  misc_RNA (1)...(19): siRNA sense strand
gcacucacaauaccaacga

SEQ ID NO: 1104296 - RNA, 19 nt, Homo sapiens
  misc_RNA (1)...(19): siRNA sense strand
ugacaaagaccugaacuac

SEQ ID NO: 1104297 - RNA, 19 nt, Homo sapiens
  misc_RNA (1)...(19): siRNA sense strand
gggaggagagcgccaacaa

SEQ ID NO: 1104298 - RNA, 19 nt, Homo sapiens
  misc_RNA (1)...(19): siRNA sense strand
gcaacaaggccugcaugga

SEQ ID NO: 1104299 - RNA, 19 nt, Homo sapiens
  misc_RNA (1)...(19): siRNA sense strand
acaaggacgugcucuacca

SEQ ID NO: 1104300 - RNA, 19 nt, Homo sapiens
  misc_RNA (1)...(19): siRNA sense strand
cgccucaccuugcauuuca

SEQ ID NO: 1104301 - RNA, 19 nt, Homo sapiens
  misc_RNA (1)...(19): siRNA sense strand
uguaaacaaggguguaauu

SEQ ID NO: 1104302 - RNA, 19 nt, Homo sapiens
  misc_RNA (1)...(19): siRNA sense strand
gcaccuacugccaugagaa

SEQ ID NO: 1104303 - RNA, 19 nt, Homo sapiens
  misc_RNA (1)...(19): siRNA sense strand
ggaccagguggacggcuuu

SEQ ID NO: 1104304 - RNA, 19 nt, Homo sapiens
  misc_RNA (1)...(19): siRNA sense strand
uaaccuggagggugacuau

SEQ ID NO: 1104305 - RNA, 19 nt, Homo sapiens
  misc_RNA (1)...(19): siRNA sense strand
gcaaaggugccuggagaag

SEQ ID NO: 1104306 - RNA, 19 nt, Homo sapiens
  misc_RNA (1)...(19): siRNA sense strand
gcuggugccugugcugugu

SEQ ID NO: 1104307 - RNA, 19 nt, Homo sapiens
  misc_RNA (1)...(19): siRNA sense strand
ugacuuugguggcaagaac

SEQ ID NO: 1104308 - RNA, 19 nt, Homo sapiens
  misc_RNA (1)...(19): siRNA sense strand
gagguucugcgaugagugu

SEQ ID NO: 1104309 - RNA, 19 nt, Homo sapiens
  misc_RNA (1)...(19): siRNA sense strand
acacaaauucaccaaagau

SEQ ID NO: 1104310 - RNA, 19 nt, Homo sapiens
  misc_RNA (1)...(19): siRNA sense strand
augaggagcugcugaucga

SEQ ID NO: 1104311 - RNA, 19 nt, Homo sapiens
  misc_RNA (1)...(19): siRNA sense strand
cguacuugcacucacaaua

SEQ ID NO: 1104312 - RNA, 19 nt, Homo sapiens
  misc_RNA (1)...(19): siRNA sense strand
acgccgagccugaccagua

SEQ ID NO: 1104313 - RNA, 19 nt, Homo sapiens
  misc_RNA (1)...(19): siRNA sense strand
gacaaagaccugaacuacu

SEQ ID NO: 1104314 - RNA, 19 nt, Homo sapiens
  misc_RNA (1)...(19): siRNA sense strand
gugacaaagaccugaacua

SEQ ID NO: 1104315 - RNA, 19 nt, Homo sapiens
  misc_RNA (1)...(19): siRNA sense strand
cgaaugaggagcugcugau

SEQ ID NO: 1104316 - RNA, 19 nt, Homo sapiens
  misc_RNA (1)...(19): siRNA sense strand
uacgugcgcgugugccuua

SEQ ID NO: 1104317 - RNA, 19 nt, Homo sapiens
  misc_RNA (1)...(19): siRNA sense strand
ccucugccuugcuacaaug

SEQ ID NO: 1104318 - RNA, 19 nt, Homo sapiens
  misc_RNA (1)...(19): siRNA sense strand
ggugaacggguaccagugu

SEQ ID NO: 1104319 - RNA, 19 nt, Homo sapiens
  misc_RNA (1)...(19): siRNA sense strand
gggcaggaacugugagaag

SEQ ID NO: 1104320 - RNA, 19 nt, Homo sapiens
  misc_RNA (1)...(19): siRNA sense strand
gugcaaggaagcugugugu

SEQ ID NO: 1104321 - RNA, 19 nt, Homo sapiens
  misc_RNA (1)...(19): siRNA sense strand
ccuggagggugacuauuac

SEQ ID NO: 1104322 - RNA, 19 nt, Homo sapiens
  misc_RNA (1)...(19): siRNA sense strand
ggaagcuguguguaaacaa

SEQ ID NO: 1104323 - RNA, 19 nt, Homo sapiens
  misc_RNA (1)...(19): siRNA sense strand
ggccugcucugugacaaag

SEQ ID NO: 1104324 - RNA, 19 nt, Homo sapiens
  misc_RNA (1)...(19): siRNA sense strand
gcuggaagagccugcacuu

SEQ ID NO: 1104325 - RNA, 19 nt, Homo sapiens
  misc_RNA (1)...(19): siRNA sense strand
guuccucucacacaaauuc

SEQ ID NO: 1104326 - RNA, 19 nt, Homo sapiens
  misc_RNA (1)...(19): siRNA sense strand
ccacaaggacgugcucuac

SEQ ID NO: 1104327 - RNA, 19 nt, Homo sapiens
  misc_RNA (1)...(19): siRNA sense strand
aaugguggcaucuguguug

SEQ ID NO: 1104328 - RNA, 19 nt, Homo sapiens
  misc_RNA (1)...(19): siRNA sense strand
gcugcgacgagaacuacua

SEQ ID NO: 1104329 - RNA, 19 nt, Homo sapiens
  misc_RNA (1)...(19): siRNA sense strand
gcaacugugagaccaacug

SEQ ID NO: 1104330 - RNA, 19 nt, Homo sapiens
  misc_RNA (1)...(19): siRNA sense strand
ccaccuggacaauaacugu

SEQ ID NO: 1104331 - RNA, 19 nt, Homo sapiens
  misc_RNA (1)...(19): siRNA sense strand
gggagguucugcgaugagu

SEQ ID NO: 1104332 - RNA, 19 nt, Homo sapiens
  misc_RNA (1)...(19): siRNA sense strand
ccugugcccuugacaucga

SEQ ID NO: 1104333 - RNA, 19 nt, Homo sapiens
  misc_RNA (1)...(19): siRNA sense strand
gcugggagggucguacuug

SEQ ID NO: 1104334 - RNA, 19 nt, Homo sapiens
  misc_RNA (1)...(19): siRNA sense strand
aggaagcuguguguaaaca

SEQ ID NO: 1104335 - RNA, 19 nt, Homo sapiens
  misc_RNA (1)...(19): siRNA sense strand
gcggucaggagcaucaaug

SEQ ID NO: 1104336 - RNA, 19 nt, Homo sapiens
  misc_RNA (1)...(19): siRNA sense strand
ucacugcuccuggcuguca

SEQ ID NO: 1104337 - RNA, 19 nt, Homo sapiens
  misc_RNA (1)...(19): siRNA sense strand
gagguggccguguccuuca

SEQ ID NO: 1104338 - RNA, 19 nt, Homo sapiens
  misc_RNA (1)...(19): siRNA sense strand
gaagcuccuggguggaaga

SEQ ID NO: 1104339 - RNA, 19 nt, Homo sapiens
  misc_RNA (1)...(19): siRNA sense strand
gaagauucguguggacauu

SEQ ID NO: 1104340 - RNA, 19 nt, Homo sapiens
  misc_RNA (1)...(19): siRNA sense strand
ccaaucagcuggccagagu

SEQ ID NO: 1104341 - RNA, 19 nt, Homo sapiens
  misc_RNA (1)...(19): siRNA sense strand
ucccaaaucugaaggacuu

SEQ ID NO: 1104342 - RNA, 19 nt, Homo sapiens
  misc_RNA (1)...(19): siRNA sense strand
ugaccuccaccguauauuu

SEQ ID NO: 1104343 - RNA, 19 nt, Homo sapiens
  misc_RNA (1)...(19): siRNA sense strand
gaaacugaagccagaauac

SEQ ID NO: 1104344 - RNA, 19 nt, Homo sapiens
  misc_RNA (1)...(19): siRNA sense strand
cagaauacuuggaggaacu

SEQ ID NO: 1104345 - RNA, 19 nt, Homo sapiens
  misc_RNA (1)...(19): siRNA sense strand
gaccuccaccguauauuug

SEQ ID NO: 1104346 - RNA, 19 nt, Homo sapiens
  misc_RNA (1)...(19): siRNA sense strand
gacagaagaggagaagauu

SEQ ID NO: 1104347 - RNA, 19 nt, Homo sapiens
  misc_RNA (1)...(19): siRNA sense strand
agaaacugaagccagaaua

SEQ ID NO: 1104348 - RNA, 19 nt, Homo sapiens
  misc_RNA (1)...(19): siRNA sense strand
agacagaagaggagaagau

SEQ ID NO: 1104349 - RNA, 19 nt, Homo sapiens
  misc_RNA (1)...(19): siRNA sense strand
gagaaacugaagccagaau

SEQ ID NO: 1104350 - RNA, 19 nt, Homo sapiens
  misc_RNA (1)...(19): siRNA sense strand
caagcugggccuggacuuu

SEQ ID NO: 1104351 - RNA, 19 nt, Homo sapiens
  misc_RNA (1)...(19): siRNA sense strand
uauuugagcccaacugcuu

SEQ ID NO: 1104352 - RNA, 19 nt, Homo sapiens
  misc_RNA (1)...(19): siRNA sense strand
cagaagaggagaagauucg

SEQ ID NO: 1104353 - RNA, 19 nt, Homo sapiens
  misc_RNA (1)...(19): siRNA sense strand
ggagacagaagaggagaag

SEQ ID NO: 1104354 - RNA, 19 nt, Homo sapiens
  misc_RNA (1)...(19): siRNA sense strand
gccagaauacuuggaggaa

SEQ ID NO: 1104355 - RNA, 19 nt, Homo sapiens
  misc_RNA (1)...(19): siRNA sense strand
gaagauucguguggacauu

SEQ ID NO: 1104356 - RNA, 19 nt, Homo sapiens
  misc_RNA (1)...(19): siRNA sense strand
ccaaucagcuggccagagu

SEQ ID NO: 1104357 - RNA, 19 nt, Homo sapiens
  misc_RNA (1)...(19): siRNA sense strand
ggacuucaucucccgcuuu

SEQ ID NO: 1104358 - RNA, 19 nt, Homo sapiens
  misc_RNA (1)...(19): siRNA sense strand
ucccaaaucugaaggacuu

SEQ ID NO: 1104359 - RNA, 19 nt, Homo sapiens
  misc_RNA (1)...(19): siRNA sense strand
ugaccuccaccguauauuu

SEQ ID NO: 1104360 - RNA, 19 nt, Homo sapiens
  misc_RNA (1)...(19): siRNA sense strand
gaaacugaagccagaauac

SEQ ID NO: 1104361 - RNA, 19 nt, Homo sapiens
  misc_RNA (1)...(19): siRNA sense strand
gacuucaucucccgcuuug

SEQ ID NO: 1104362 - RNA, 19 nt, Homo sapiens
  misc_RNA (1)...(19): siRNA sense strand
cagaauacuuggaggaacu

SEQ ID NO: 1104363 - RNA, 19 nt, Homo sapiens
  misc_RNA (1)...(19): siRNA sense strand
gaccuccaccguauauuug

SEQ ID NO: 1104364 - RNA, 19 nt, Homo sapiens
  misc_RNA (1)...(19): siRNA sense strand
gacagaagaggagaagauu

SEQ ID NO: 1104365 - RNA, 19 nt, Homo sapiens
  misc_RNA (1)...(19): siRNA sense strand
agaaacugaagccagaaua

SEQ ID NO: 1104366 - RNA, 19 nt, Homo sapiens
  misc_RNA (1)...(19): siRNA sense strand
agacagaagaggagaagau

SEQ ID NO: 1104367 - RNA, 19 nt, Homo sapiens
  misc_RNA (1)...(19): siRNA sense strand
gagaaacugaagccagaau

SEQ ID NO: 1104368 - RNA, 19 nt, Homo sapiens
  misc_RNA (1)...(19): siRNA sense strand
caagcugggccuggacuuu

SEQ ID NO: 1104369 - RNA, 19 nt, Homo sapiens
  misc_RNA (1)...(19): siRNA sense strand
uauuugagcccaacugcuu

SEQ ID NO: 1104370 - RNA, 19 nt, Homo sapiens
  misc_RNA (1)...(19): siRNA sense strand
cagaagaggagaagauucg

SEQ ID NO: 1104371 - RNA, 19 nt, Homo sapiens
  misc_RNA (1)...(19): siRNA sense strand
ggagacagaagaggagaag

SEQ ID NO: 1104372 - RNA, 19 nt, Homo sapiens
  misc_RNA (1)...(19): siRNA sense strand
gccagaauacuuggaggaa

SEQ ID NO: 1104373 - RNA, 19 nt, Homo sapiens
  misc_RNA (1)...(19): siRNA sense strand
gaagauucguguggacauu

SEQ ID NO: 1104374 - RNA, 19 nt, Homo sapiens
  misc_RNA (1)...(19): siRNA sense strand
ccaaucagcuggccagagu

SEQ ID NO: 1104375 - RNA, 19 nt, Homo sapiens
  misc_RNA (1)...(19): siRNA sense strand
gacagaagaggagaagauu

SEQ ID NO: 1104376 - RNA, 19 nt, Homo sapiens
  misc_RNA (1)...(19): siRNA sense strand
agacagaagaggagaagau

SEQ ID NO: 1104377 - RNA, 19 nt, Homo sapiens
  misc_RNA (1)...(19): siRNA sense strand
caagcugggccuggacuuu

SEQ ID NO: 1104378 - RNA, 19 nt, Homo sapiens
  misc_RNA (1)...(19): siRNA sense strand
cagaagaggagaagauucg

SEQ ID NO: 1104379 - RNA, 19 nt, Homo sapiens
  misc_RNA (1)...(19): siRNA sense strand
ggagacagaagaggagaag

SEQ ID NO: 1104380 - RNA, 19 nt, Homo sapiens
  misc_RNA (1)...(19): siRNA sense strand
ggaagcaggagaucauuaa

SEQ ID NO: 1104381 - RNA, 19 nt, Homo sapiens
  misc_RNA (1)...(19): siRNA sense strand
caacaacggugacuuugag

SEQ ID NO: 1104382 - RNA, 19 nt, Homo sapiens
  misc_RNA (1)...(19): siRNA sense strand
cagcaggcaugguuugguu

SEQ ID NO: 1104383 - RNA, 19 nt, Homo sapiens
  misc_RNA (1)...(19): siRNA sense strand
gcacgucauuggagaggau

SEQ ID NO: 1104384 - RNA, 19 nt, Homo sapiens
  misc_RNA (1)...(19): siRNA sense strand
cagugaagcuggcagacuu

SEQ ID NO: 1104385 - RNA, 19 nt, Homo sapiens
  misc_RNA (1)...(19): siRNA sense strand
ccaagaucaucaacaccaa

SEQ ID NO: 1104386 - RNA, 19 nt, Homo sapiens
  misc_RNA (1)...(19): siRNA sense strand
gcaagccuguggacaucug

SEQ ID NO: 1104387 - RNA, 19 nt, Homo sapiens
  misc_RNA (1)...(19): siRNA sense strand
caaaggggcugcagugaag

SEQ ID NO: 1104388 - RNA, 19 nt, Homo sapiens
  misc_RNA (1)...(19): siRNA sense strand
uaccagcucuacgaggaua

SEQ ID NO: 1104389 - RNA, 19 nt, Homo sapiens
  misc_RNA (1)...(19): siRNA sense strand
agaaccugcuggccaagaa

SEQ ID NO: 1104390 - RNA, 19 nt, Homo sapiens
  misc_RNA (1)...(19): siRNA sense strand
gaucaucaacaccaagaag

SEQ ID NO: 1104391 - RNA, 19 nt, Homo sapiens
  misc_RNA (1)...(19): siRNA sense strand
cggaagcaggagaucauua

SEQ ID NO: 1104392 - RNA, 19 nt, Homo sapiens
  misc_RNA (1)...(19): siRNA sense strand
cgucacuccugaagccaaa

SEQ ID NO: 1104393 - RNA, 19 nt, Homo sapiens
  misc_RNA (1)...(19): siRNA sense strand
cagccaagaucaucaacac

SEQ ID NO: 1104394 - RNA, 19 nt, Homo sapiens
  misc_RNA (1)...(19): siRNA sense strand
ucaaccagaugcugaccau

SEQ ID NO: 1104395 - RNA, 19 nt, Homo sapiens
  misc_RNA (1)...(19): siRNA sense strand
gcagacuucggccuagcua

SEQ ID NO: 1104396 - RNA, 19 nt, Homo sapiens
  misc_RNA (1)...(19): siRNA sense strand
acauccggcucacgcagua

SEQ ID NO: 1104397 - RNA, 19 nt, Homo sapiens
  misc_RNA (1)...(19): siRNA sense strand
agccagagaucaccagaag

SEQ ID NO: 1104398 - RNA, 19 nt, Homo sapiens
  misc_RNA (1)...(19): siRNA sense strand
ggacgaggaccagcacaag

SEQ ID NO: 1104399 - RNA, 19 nt, Homo sapiens
  misc_RNA (1)...(19): siRNA sense strand
ggacaccgucacuccugaa

SEQ ID NO: 1104400 - RNA, 19 nt, Homo sapiens
  misc_RNA (1)...(19): siRNA sense strand
ccagagaucaccagaagcu

SEQ ID NO: 1104401 - RNA, 19 nt, Homo sapiens
  misc_RNA (1)...(19): siRNA sense strand
gagccauccucaccaccau

SEQ ID NO: 1104402 - RNA, 19 nt, Homo sapiens
  misc_RNA (1)...(19): siRNA sense strand
gcaaaggggcugcagugaa

SEQ ID NO: 1104403 - RNA, 19 nt, Homo sapiens
  misc_RNA (1)...(19): siRNA sense strand
guucuccauugucaccaaa

SEQ ID NO: 1104404 - RNA, 19 nt, Homo sapiens
  misc_RNA (1)...(19): siRNA sense strand
ggucuucgaucuggucacu

SEQ ID NO: 1104405 - RNA, 19 nt, Homo sapiens
  misc_RNA (1)...(19): siRNA sense strand
aagcaggagaucauuaaga

SEQ ID NO: 1104406 - RNA, 19 nt, Homo sapiens
  misc_RNA (1)...(19): siRNA sense strand
gcaggcaugguuugguuuc

SEQ ID NO: 1104407 - RNA, 19 nt, Homo sapiens
  misc_RNA (1)...(19): siRNA sense strand
ccgaggagggcuuccacua

SEQ ID NO: 1104408 - RNA, 19 nt, Homo sapiens
  misc_RNA (1)...(19): siRNA sense strand
ggcagaacgugcacuucca

SEQ ID NO: 1104409 - RNA, 19 nt, Homo sapiens
  misc_RNA (1)...(19): siRNA sense strand
gcaccggccaugaguaugc

SEQ ID NO: 1104410 - RNA, 19 nt, Homo sapiens
  misc_RNA (1)...(19): siRNA sense strand
gaagcaggagaucauuaag

SEQ ID NO: 1104411 - RNA, 19 nt, Homo sapiens
  misc_RNA (1)...(19): siRNA sense strand
caucgaggccgucaacaac

SEQ ID NO: 1104412 - RNA, 19 nt, Homo sapiens
  misc_RNA (1)...(19): siRNA sense strand
uggcaagccuguggacauc

SEQ ID NO: 1104413 - RNA, 19 nt, Homo sapiens
  misc_RNA (1)...(19): siRNA sense strand
gaguaugcagccaagauca

SEQ ID NO: 1104414 - RNA, 19 nt, Homo sapiens
  misc_RNA (1)...(19): siRNA sense strand
gacuguggagugucugaaa

SEQ ID NO: 1104415 - RNA, 19 nt, Homo sapiens
  misc_RNA (1)...(19): siRNA sense strand
gagaaccugcuggccaaga

SEQ ID NO: 1104416 - RNA, 19 nt, Homo sapiens
  misc_RNA (1)...(19): siRNA sense strand
agcaggagaucauuaagac

SEQ ID NO: 1104417 - RNA, 19 nt, Homo sapiens
  misc_RNA (1)...(19): siRNA sense strand
ggaagcaggagaucauuaa

SEQ ID NO: 1104418 - RNA, 19 nt, Homo sapiens
  misc_RNA (1)...(19): siRNA sense strand
caacaacggugacuuugag

SEQ ID NO: 1104419 - RNA, 19 nt, Homo sapiens
  misc_RNA (1)...(19): siRNA sense strand
cagcaggcaugguuugguu

SEQ ID NO: 1104420 - RNA, 19 nt, Homo sapiens
  misc_RNA (1)...(19): siRNA sense strand
gcacgucauuggagaggau

SEQ ID NO: 1104421 - RNA, 19 nt, Homo sapiens
  misc_RNA (1)...(19): siRNA sense strand
cagugaagcuggcagacuu

SEQ ID NO: 1104422 - RNA, 19 nt, Homo sapiens
  misc_RNA (1)...(19): siRNA sense strand
ccaagaucaucaacaccaa

SEQ ID NO: 1104423 - RNA, 19 nt, Homo sapiens
  misc_RNA (1)...(19): siRNA sense strand
gcaagccuguggacaucug

SEQ ID NO: 1104424 - RNA, 19 nt, Homo sapiens
  misc_RNA (1)...(19): siRNA sense strand
caaaggggcugcagugaag

SEQ ID NO: 1104425 - RNA, 19 nt, Homo sapiens
  misc_RNA (1)...(19): siRNA sense strand
uaccagcucuacgaggaua

SEQ ID NO: 1104426 - RNA, 19 nt, Homo sapiens
  misc_RNA (1)...(19): siRNA sense strand
agaaccugcuggccaagaa

SEQ ID NO: 1104427 - RNA, 19 nt, Homo sapiens
  misc_RNA (1)...(19): siRNA sense strand
gaucaucaacaccaagaag

SEQ ID NO: 1104428 - RNA, 19 nt, Homo sapiens
  misc_RNA (1)...(19): siRNA sense strand
cggaagcaggagaucauua

SEQ ID NO: 1104429 - RNA, 19 nt, Homo sapiens
  misc_RNA (1)...(19): siRNA sense strand
cgucacuccugaagccaaa

SEQ ID NO: 1104430 - RNA, 19 nt, Homo sapiens
  misc_RNA (1)...(19): siRNA sense strand
cagccaagaucaucaacac

SEQ ID NO: 1104431 - RNA, 19 nt, Homo sapiens
  misc_RNA (1)...(19): siRNA sense strand
ucaaccagaugcugaccau

SEQ ID NO: 1104432 - RNA, 19 nt, Homo sapiens
  misc_RNA (1)...(19): siRNA sense strand
gcagacuucggccuagcua

SEQ ID NO: 1104433 - RNA, 19 nt, Homo sapiens
  misc_RNA (1)...(19): siRNA sense strand
acauccggcucacgcagua

SEQ ID NO: 1104434 - RNA, 19 nt, Homo sapiens
  misc_RNA (1)...(19): siRNA sense strand
agccagagaucaccagaag

SEQ ID NO: 1104435 - RNA, 19 nt, Homo sapiens
  misc_RNA (1)...(19): siRNA sense strand
ggacgaggaccagcacaag

SEQ ID NO: 1104436 - RNA, 19 nt, Homo sapiens
  misc_RNA (1)...(19): siRNA sense strand
ggacaccgucacuccugaa

SEQ ID NO: 1104437 - RNA, 19 nt, Homo sapiens
  misc_RNA (1)...(19): siRNA sense strand
ccagagaucaccagaagcu

SEQ ID NO: 1104438 - RNA, 19 nt, Homo sapiens
  misc_RNA (1)...(19): siRNA sense strand
gagccauccucaccaccau

SEQ ID NO: 1104439 - RNA, 19 nt, Homo sapiens
  misc_RNA (1)...(19): siRNA sense strand
gcaaaggggcugcagugaa

SEQ ID NO: 1104440 - RNA, 19 nt, Homo sapiens
  misc_RNA (1)...(19): siRNA sense strand
guucuccauugucaccaaa

SEQ ID NO: 1104441 - RNA, 19 nt, Homo sapiens
  misc_RNA (1)...(19): siRNA sense strand
ggucuucgaucuggucacu

SEQ ID NO: 1104442 - RNA, 19 nt, Homo sapiens
  misc_RNA (1)...(19): siRNA sense strand
aagcaggagaucauuaaga

SEQ ID NO: 1104443 - RNA, 19 nt, Homo sapiens
  misc_RNA (1)...(19): siRNA sense strand
gcaggcaugguuugguuuc

SEQ ID NO: 1104444 - RNA, 19 nt, Homo sapiens
  misc_RNA (1)...(19): siRNA sense strand
ccgaggagggcuuccacua

SEQ ID NO: 1104445 - RNA, 19 nt, Homo sapiens
  misc_RNA (1)...(19): siRNA sense strand
ggcagaacgugcacuucca

SEQ ID NO: 1104446 - RNA, 19 nt, Homo sapiens
  misc_RNA (1)...(19): siRNA sense strand
gcaccggccaugaguaugc

SEQ ID NO: 1104447 - RNA, 19 nt, Homo sapiens
  misc_RNA (1)...(19): siRNA sense strand
gaagcaggagaucauuaag

SEQ ID NO: 1104448 - RNA, 19 nt, Homo sapiens
  misc_RNA (1)...(19): siRNA sense strand
caucgaggccgucaacaac

SEQ ID NO: 1104449 - RNA, 19 nt, Homo sapiens
  misc_RNA (1)...(19): siRNA sense strand
uggcaagccuguggacauc

SEQ ID NO: 1104450 - RNA, 19 nt, Homo sapiens
  misc_RNA (1)...(19): siRNA sense strand
gaguaugcagccaagauca

SEQ ID NO: 1104451 - RNA, 19 nt, Homo sapiens
  misc_RNA (1)...(19): siRNA sense strand
gacuguggagugucugaaa

SEQ ID NO: 1104452 - RNA, 19 nt, Homo sapiens
  misc_RNA (1)...(19): siRNA sense strand
gagaaccugcuggccaaga

SEQ ID NO: 1104453 - RNA, 19 nt, Homo sapiens
  misc_RNA (1)...(19): siRNA sense strand
agcaggagaucauuaagac

SEQ ID NO: 1104454 - RNA, 19 nt, Homo sapiens
  misc_RNA (1)...(19): siRNA sense strand
ggaagcaggagaucauuaa

SEQ ID NO: 1104455 - RNA, 19 nt, Homo sapiens
  misc_RNA (1)...(19): siRNA sense strand
caacaacggugacuuugag

SEQ ID NO: 1104456 - RNA, 19 nt, Homo sapiens
  misc_RNA (1)...(19): siRNA sense strand
cagcaggcaugguuugguu

SEQ ID NO: 1104457 - RNA, 19 nt, Homo sapiens
  misc_RNA (1)...(19): siRNA sense strand
gcacgucauuggagaggau

SEQ ID NO: 1104458 - RNA, 19 nt, Homo sapiens
  misc_RNA (1)...(19): siRNA sense strand
cagugaagcuggcagacuu

SEQ ID NO: 1104459 - RNA, 19 nt, Homo sapiens
  misc_RNA (1)...(19): siRNA sense strand
ccaagaucaucaacaccaa

SEQ ID NO: 1104460 - RNA, 19 nt, Homo sapiens
  misc_RNA (1)...(19): siRNA sense strand
gcaagccuguggacaucug

SEQ ID NO: 1104461 - RNA, 19 nt, Homo sapiens
  misc_RNA (1)...(19): siRNA sense strand
caaaggggcugcagugaag

SEQ ID NO: 1104462 - RNA, 19 nt, Homo sapiens
  misc_RNA (1)...(19): siRNA sense strand
uaccagcucuacgaggaua

SEQ ID NO: 1104463 - RNA, 19 nt, Homo sapiens
  misc_RNA (1)...(19): siRNA sense strand
agaaccugcuggccaagaa

SEQ ID NO: 1104464 - RNA, 19 nt, Homo sapiens
  misc_RNA (1)...(19): siRNA sense strand
gaucaucaacaccaagaag

SEQ ID NO: 1104465 - RNA, 19 nt, Homo sapiens
  misc_RNA (1)...(19): siRNA sense strand
cggaagcaggagaucauua

SEQ ID NO: 1104466 - RNA, 19 nt, Homo sapiens
  misc_RNA (1)...(19): siRNA sense strand
cgucacuccugaagccaaa

SEQ ID NO: 1104467 - RNA, 19 nt, Homo sapiens
  misc_RNA (1)...(19): siRNA sense strand
cagccaagaucaucaacac

SEQ ID NO: 1104468 - RNA, 19 nt, Homo sapiens
  misc_RNA (1)...(19): siRNA sense strand
ucaaccagaugcugaccau

SEQ ID NO: 1104469 - RNA, 19 nt, Homo sapiens
  misc_RNA (1)...(19): siRNA sense strand
gcagacuucggccuagcua

SEQ ID NO: 1104470 - RNA, 19 nt, Homo sapiens
  misc_RNA (1)...(19): siRNA sense strand
acauccggcucacgcagua

SEQ ID NO: 1104471 - RNA, 19 nt, Homo sapiens
  misc_RNA (1)...(19): siRNA sense strand
agccagagaucaccagaag

SEQ ID NO: 1104472 - RNA, 19 nt, Homo sapiens
  misc_RNA (1)...(19): siRNA sense strand
ggacgaggaccagcacaag

SEQ ID NO: 1104473 - RNA, 19 nt, Homo sapiens
  misc_RNA (1)...(19): siRNA sense strand
ggacaccgucacuccugaa

SEQ ID NO: 1104474 - RNA, 19 nt, Homo sapiens
  misc_RNA (1)...(19): siRNA sense strand
ccagagaucaccagaagcu

SEQ ID NO: 1104475 - RNA, 19 nt, Homo sapiens
  misc_RNA (1)...(19): siRNA sense strand
gagccauccucaccaccau

SEQ ID NO: 1104476 - RNA, 19 nt, Homo sapiens
  misc_RNA (1)...(19): siRNA sense strand
gcaaaggggcugcagugaa

SEQ ID NO: 1104477 - RNA, 19 nt, Homo sapiens
  misc_RNA (1)...(19): siRNA sense strand
guucuccauugucaccaaa

SEQ ID NO: 1104478 - RNA, 19 nt, Homo sapiens
  misc_RNA (1)...(19): siRNA sense strand
ggucuucgaucuggucacu

SEQ ID NO: 1104479 - RNA, 19 nt, Homo sapiens
  misc_RNA (1)...(19): siRNA sense strand
aagcaggagaucauuaaga

SEQ ID NO: 1104480 - RNA, 19 nt, Homo sapiens
  misc_RNA (1)...(19): siRNA sense strand
gcaggcaugguuugguuuc

SEQ ID NO: 1104481 - RNA, 19 nt, Homo sapiens
  misc_RNA (1)...(19): siRNA sense strand
ccgaggagggcuuccacua

SEQ ID NO: 1104482 - RNA, 19 nt, Homo sapiens
  misc_RNA (1)...(19): siRNA sense strand
ggcagaacgugcacuucca

SEQ ID NO: 1104483 - RNA, 19 nt, Homo sapiens
  misc_RNA (1)...(19): siRNA sense strand
gcaccggccaugaguaugc

SEQ ID NO: 1104484 - RNA, 19 nt, Homo sapiens
  misc_RNA (1)...(19): siRNA sense strand
gaagcaggagaucauuaag

SEQ ID NO: 1104485 - RNA, 19 nt, Homo sapiens
  misc_RNA (1)...(19): siRNA sense strand
caucgaggccgucaacaac

SEQ ID NO: 1104486 - RNA, 19 nt, Homo sapiens
  misc_RNA (1)...(19): siRNA sense strand
uggcaagccuguggacauc

SEQ ID NO: 1104487 - RNA, 19 nt, Homo sapiens
  misc_RNA (1)...(19): siRNA sense strand
gaguaugcagccaagauca

SEQ ID NO: 1104488 - RNA, 19 nt, Homo sapiens
  misc_RNA (1)...(19): siRNA sense strand
gacuguggagugucugaaa

SEQ ID NO: 1104489 - RNA, 19 nt, Homo sapiens
  misc_RNA (1)...(19): siRNA sense strand
gagaaccugcuggccaaga

SEQ ID NO: 1104490 - RNA, 19 nt, Homo sapiens
  misc_RNA (1)...(19): siRNA sense strand
agcaggagaucauuaagac

SEQ ID NO: 1104491 - RNA, 19 nt, Homo sapiens
  misc_RNA (1)...(19): siRNA sense strand
ggaagcaggagaucauuaa

SEQ ID NO: 1104492 - RNA, 19 nt, Homo sapiens
  misc_RNA (1)...(19): siRNA sense strand
caacaacggugacuuugag

SEQ ID NO: 1104493 - RNA, 19 nt, Homo sapiens
  misc_RNA (1)...(19): siRNA sense strand
cagcaggcaugguuugguu

SEQ ID NO: 1104494 - RNA, 19 nt, Homo sapiens
  misc_RNA (1)...(19): siRNA sense strand
gcacgucauuggagaggau

SEQ ID NO: 1104495 - RNA, 19 nt, Homo sapiens
  misc_RNA (1)...(19): siRNA sense strand
cagugaagcuggcagacuu

SEQ ID NO: 1104496 - RNA, 19 nt, Homo sapiens
  misc_RNA (1)...(19): siRNA sense strand
ccaagaucaucaacaccaa

SEQ ID NO: 1104497 - RNA, 19 nt, Homo sapiens
  misc_RNA (1)...(19): siRNA sense strand
gcaagccuguggacaucug

SEQ ID NO: 1104498 - RNA, 19 nt, Homo sapiens
  misc_RNA (1)...(19): siRNA sense strand
caaaggggcugcagugaag

SEQ ID NO: 1104499 - RNA, 19 nt, Homo sapiens
  misc_RNA (1)...(19): siRNA sense strand
uaccagcucuacgaggaua

SEQ ID NO: 1104500 - RNA, 19 nt, Homo sapiens
  misc_RNA (1)...(19): siRNA sense strand
agaaccugcuggccaagaa

SEQ ID NO: 1104501 - RNA, 19 nt, Homo sapiens
  misc_RNA (1)...(19): siRNA sense strand
gaucaucaacaccaagaag

SEQ ID NO: 1104502 - RNA, 19 nt, Homo sapiens
  misc_RNA (1)...(19): siRNA sense strand
cggaagcaggagaucauua

SEQ ID NO: 1104503 - RNA, 19 nt, Homo sapiens
  misc_RNA (1)...(19): siRNA sense strand
cgucacuccugaagccaaa

SEQ ID NO: 1104504 - RNA, 19 nt, Homo sapiens
  misc_RNA (1)...(19): siRNA sense strand
cagccaagaucaucaacac

SEQ ID NO: 1104505 - RNA, 19 nt, Homo sapiens
  misc_RNA (1)...(19): siRNA sense strand
ucaaccagaugcugaccau

SEQ ID NO: 1104506 - RNA, 19 nt, Homo sapiens
  misc_RNA (1)...(19): siRNA sense strand
gcagacuucggccuagcua

SEQ ID NO: 1104507 - RNA, 19 nt, Homo sapiens
  misc_RNA (1)...(19): siRNA sense strand
acauccggcucacgcagua

SEQ ID NO: 1104508 - RNA, 19 nt, Homo sapiens
  misc_RNA (1)...(19): siRNA sense strand
agccagagaucaccagaag

SEQ ID NO: 1104509 - RNA, 19 nt, Homo sapiens
  misc_RNA (1)...(19): siRNA sense strand
ggacgaggaccagcacaag

SEQ ID NO: 1104510 - RNA, 19 nt, Homo sapiens
  misc_RNA (1)...(19): siRNA sense strand
ggacaccgucacuccugaa

SEQ ID NO: 1104511 - RNA, 19 nt, Homo sapiens
  misc_RNA (1)...(19): siRNA sense strand
ccagagaucaccagaagcu

SEQ ID NO: 1104512 - RNA, 19 nt, Homo sapiens
  misc_RNA (1)...(19): siRNA sense strand
gagccauccucaccaccau

SEQ ID NO: 1104513 - RNA, 19 nt, Homo sapiens
  misc_RNA (1)...(19): siRNA sense strand
gcaaaggggcugcagugaa

SEQ ID NO: 1104514 - RNA, 19 nt, Homo sapiens
  misc_RNA (1)...(19): siRNA sense strand
guucuccauugucaccaaa

SEQ ID NO: 1104515 - RNA, 19 nt, Homo sapiens
  misc_RNA (1)...(19): siRNA sense strand
ggucuucgaucuggucacu

SEQ ID NO: 1104516 - RNA, 19 nt, Homo sapiens
  misc_RNA (1)...(19): siRNA sense strand
aagcaggagaucauuaaga

SEQ ID NO: 1104517 - RNA, 19 nt, Homo sapiens
  misc_RNA (1)...(19): siRNA sense strand
gcaggcaugguuugguuuc

SEQ ID NO: 1104518 - RNA, 19 nt, Homo sapiens
  misc_RNA (1)...(19): siRNA sense strand
ccgaggagggcuuccacua

SEQ ID NO: 1104519 - RNA, 19 nt, Homo sapiens
  misc_RNA (1)...(19): siRNA sense strand
ggcagaacgugcacuucca

SEQ ID NO: 1104520 - RNA, 19 nt, Homo sapiens
  misc_RNA (1)...(19): siRNA sense strand
gcaccggccaugaguaugc

SEQ ID NO: 1104521 - RNA, 19 nt, Homo sapiens
  misc_RNA (1)...(19): siRNA sense strand
gaagcaggagaucauuaag

SEQ ID NO: 1104522 - RNA, 19 nt, Homo sapiens
  misc_RNA (1)...(19): siRNA sense strand
caucgaggccgucaacaac

SEQ ID NO: 1104523 - RNA, 19 nt, Homo sapiens
  misc_RNA (1)...(19): siRNA sense strand
uggcaagccuguggacauc

SEQ ID NO: 1104524 - RNA, 19 nt, Homo sapiens
  misc_RNA (1)...(19): siRNA sense strand
gaguaugcagccaagauca

SEQ ID NO: 1104525 - RNA, 19 nt, Homo sapiens
  misc_RNA (1)...(19): siRNA sense strand
gacuguggagugucugaaa

SEQ ID NO: 1104526 - RNA, 19 nt, Homo sapiens
  misc_RNA (1)...(19): siRNA sense strand
gagaaccugcuggccaaga

SEQ ID NO: 1104527 - RNA, 19 nt, Homo sapiens
  misc_RNA (1)...(19): siRNA sense strand
agcaggagaucauuaagac

SEQ ID NO: 1104528 - RNA, 19 nt, Homo sapiens
  misc_RNA (1)...(19): siRNA sense strand
ggaagcaggagaucauuaa

SEQ ID NO: 1104529 - RNA, 19 nt, Homo sapiens
  misc_RNA (1)...(19): siRNA sense strand
caacaacggugacuuugag

SEQ ID NO: 1104530 - RNA, 19 nt, Homo sapiens
  misc_RNA (1)...(19): siRNA sense strand
cagcaggcaugguuugguu

SEQ ID NO: 1104531 - RNA, 19 nt, Homo sapiens
  misc_RNA (1)...(19): siRNA sense strand
gcacgucauuggagaggau

SEQ ID NO: 1104532 - RNA, 19 nt, Homo sapiens
  misc_RNA (1)...(19): siRNA sense strand
cagugaagcuggcagacuu

SEQ ID NO: 1104533 - RNA, 19 nt, Homo sapiens
  misc_RNA (1)...(19): siRNA sense strand
ccaagaucaucaacaccaa

SEQ ID NO: 1104534 - RNA, 19 nt, Homo sapiens
  misc_RNA (1)...(19): siRNA sense strand
gcaagccuguggacaucug

SEQ ID NO: 1104535 - RNA, 19 nt, Homo sapiens
  misc_RNA (1)...(19): siRNA sense strand
caaaggggcugcagugaag

SEQ ID NO: 1104536 - RNA, 19 nt, Homo sapiens
  misc_RNA (1)...(19): siRNA sense strand
uaccagcucuacgaggaua

SEQ ID NO: 1104537 - RNA, 19 nt, Homo sapiens
  misc_RNA (1)...(19): siRNA sense strand
agaaccugcuggccaagaa

SEQ ID NO: 1104538 - RNA, 19 nt, Homo sapiens
  misc_RNA (1)...(19): siRNA sense strand
gaucaucaacaccaagaag

SEQ ID NO: 1104539 - RNA, 19 nt, Homo sapiens
  misc_RNA (1)...(19): siRNA sense strand
cggaagcaggagaucauua

SEQ ID NO: 1104540 - RNA, 19 nt, Homo sapiens
  misc_RNA (1)...(19): siRNA sense strand
cgucacuccugaagccaaa

SEQ ID NO: 1104541 - RNA, 19 nt, Homo sapiens
  misc_RNA (1)...(19): siRNA sense strand
cagccaagaucaucaacac

SEQ ID NO: 1104542 - RNA, 19 nt, Homo sapiens
  misc_RNA (1)...(19): siRNA sense strand
ucaaccagaugcugaccau

SEQ ID NO: 1104543 - RNA, 19 nt, Homo sapiens
  misc_RNA (1)...(19): siRNA sense strand
gcagacuucggccuagcua

SEQ ID NO: 1104544 - RNA, 19 nt, Homo sapiens
  misc_RNA (1)...(19): siRNA sense strand
acauccggcucacgcagua

SEQ ID NO: 1104545 - RNA, 19 nt, Homo sapiens
  misc_RNA (1)...(19): siRNA sense strand
agccagagaucaccagaag

SEQ ID NO: 1104546 - RNA, 19 nt, Homo sapiens
  misc_RNA (1)...(19): siRNA sense strand
ggacgaggaccagcacaag

SEQ ID NO: 1104547 - RNA, 19 nt, Homo sapiens
  misc_RNA (1)...(19): siRNA sense strand
ggacaccgucacuccugaa

SEQ ID NO: 1104548 - RNA, 19 nt, Homo sapiens
  misc_RNA (1)...(19): siRNA sense strand
ccagagaucaccagaagcu

SEQ ID NO: 1104549 - RNA, 19 nt, Homo sapiens
  misc_RNA (1)...(19): siRNA sense strand
gagccauccucaccaccau

SEQ ID NO: 1104550 - RNA, 19 nt, Homo sapiens
  misc_RNA (1)...(19): siRNA sense strand
gcaaaggggcugcagugaa

SEQ ID NO: 1104551 - RNA, 19 nt, Homo sapiens
  misc_RNA (1)...(19): siRNA sense strand
guucuccauugucaccaaa

SEQ ID NO: 1104552 - RNA, 19 nt, Homo sapiens
  misc_RNA (1)...(19): siRNA sense strand
ggucuucgaucuggucacu

SEQ ID NO: 1104553 - RNA, 19 nt, Homo sapiens
  misc_RNA (1)...(19): siRNA sense strand
aagcaggagaucauuaaga

SEQ ID NO: 1104554 - RNA, 19 nt, Homo sapiens
  misc_RNA (1)...(19): siRNA sense strand
gcaggcaugguuugguuuc

SEQ ID NO: 1104555 - RNA, 19 nt, Homo sapiens
  misc_RNA (1)...(19): siRNA sense strand
ccgaggagggcuuccacua

SEQ ID NO: 1104556 - RNA, 19 nt, Homo sapiens
  misc_RNA (1)...(19): siRNA sense strand
ggcagaacgugcacuucca

SEQ ID NO: 1104557 - RNA, 19 nt, Homo sapiens
  misc_RNA (1)...(19): siRNA sense strand
gcaccggccaugaguaugc

SEQ ID NO: 1104558 - RNA, 19 nt, Homo sapiens
  misc_RNA (1)...(19): siRNA sense strand
gaagcaggagaucauuaag

SEQ ID NO: 1104559 - RNA, 19 nt, Homo sapiens
  misc_RNA (1)...(19): siRNA sense strand
caucgaggccgucaacaac

SEQ ID NO: 1104560 - RNA, 19 nt, Homo sapiens
  misc_RNA (1)...(19): siRNA sense strand
uggcaagccuguggacauc

SEQ ID NO: 1104561 - RNA, 19 nt, Homo sapiens
  misc_RNA (1)...(19): siRNA sense strand
gaguaugcagccaagauca

SEQ ID NO: 1104562 - RNA, 19 nt, Homo sapiens
  misc_RNA (1)...(19): siRNA sense strand
gacuguggagugucugaaa

SEQ ID NO: 1104563 - RNA, 19 nt, Homo sapiens
  misc_RNA (1)...(19): siRNA sense strand
gagaaccugcuggccaaga

SEQ ID NO: 1104564 - RNA, 19 nt, Homo sapiens
  misc_RNA (1)...(19): siRNA sense strand
agcaggagaucauuaagac

SEQ ID NO: 1104565 - RNA, 19 nt, Homo sapiens
  misc_RNA (1)...(19): siRNA sense strand
ggaagcaggagaucauuaa

SEQ ID NO: 1104566 - RNA, 19 nt, Homo sapiens
  misc_RNA (1)...(19): siRNA sense strand
caacaacggugacuuugag

SEQ ID NO: 1104567 - RNA, 19 nt, Homo sapiens
  misc_RNA (1)...(19): siRNA sense strand
cagcaggcaugguuugguu

SEQ ID NO: 1104568 - RNA, 19 nt, Homo sapiens
  misc_RNA (1)...(19): siRNA sense strand
gcacgucauuggagaggau

SEQ ID NO: 1104569 - RNA, 19 nt, Homo sapiens
  misc_RNA (1)...(19): siRNA sense strand
cagugaagcuggcagacuu

SEQ ID NO: 1104570 - RNA, 19 nt, Homo sapiens
  misc_RNA (1)...(19): siRNA sense strand
ccaagaucaucaacaccaa

SEQ ID NO: 1104571 - RNA, 19 nt, Homo sapiens
  misc_RNA (1)...(19): siRNA sense strand
gcaagccuguggacaucug

SEQ ID NO: 1104572 - RNA, 19 nt, Homo sapiens
  misc_RNA (1)...(19): siRNA sense strand
caaaggggcugcagugaag

SEQ ID NO: 1104573 - RNA, 19 nt, Homo sapiens
  misc_RNA (1)...(19): siRNA sense strand
uaccagcucuacgaggaua

SEQ ID NO: 1104574 - RNA, 19 nt, Homo sapiens
  misc_RNA (1)...(19): siRNA sense strand
agaaccugcuggccaagaa

SEQ ID NO: 1104575 - RNA, 19 nt, Homo sapiens
  misc_RNA (1)...(19): siRNA sense strand
gaucaucaacaccaagaag

SEQ ID NO: 1104576 - RNA, 19 nt, Homo sapiens
  misc_RNA (1)...(19): siRNA sense strand
cggaagcaggagaucauua

SEQ ID NO: 1104577 - RNA, 19 nt, Homo sapiens
  misc_RNA (1)...(19): siRNA sense strand
cgucacuccugaagccaaa

SEQ ID NO: 1104578 - RNA, 19 nt, Homo sapiens
  misc_RNA (1)...(19): siRNA sense strand
cagccaagaucaucaacac

SEQ ID NO: 1104579 - RNA, 19 nt, Homo sapiens
  misc_RNA (1)...(19): siRNA sense strand
ucaaccagaugcugaccau

SEQ ID NO: 1104580 - RNA, 19 nt, Homo sapiens
  misc_RNA (1)...(19): siRNA sense strand
gcagacuucggccuagcua

SEQ ID NO: 1104581 - RNA, 19 nt, Homo sapiens
  misc_RNA (1)...(19): siRNA sense strand
acauccggcucacgcagua

SEQ ID NO: 1104582 - RNA, 19 nt, Homo sapiens
  misc_RNA (1)...(19): siRNA sense strand
agccagagaucaccagaag

SEQ ID NO: 1104583 - RNA, 19 nt, Homo sapiens
  misc_RNA (1)...(19): siRNA sense strand
ggacgaggaccagcacaag

SEQ ID NO: 1104584 - RNA, 19 nt, Homo sapiens
  misc_RNA (1)...(19): siRNA sense strand
ggacaccgucacuccugaa

SEQ ID NO: 1104585 - RNA, 19 nt, Homo sapiens
  misc_RNA (1)...(19): siRNA sense strand
ccagagaucaccagaagcu

SEQ ID NO: 1104586 - RNA, 19 nt, Homo sapiens
  misc_RNA (1)...(19): siRNA sense strand
gagccauccucaccaccau

SEQ ID NO: 1104587 - RNA, 19 nt, Homo sapiens
  misc_RNA (1)...(19): siRNA sense strand
gcaaaggggcugcagugaa

SEQ ID NO: 1104588 - RNA, 19 nt, Homo sapiens
  misc_RNA (1)...(19): siRNA sense strand
guucuccauugucaccaaa

SEQ ID NO: 1104589 - RNA, 19 nt, Homo sapiens
  misc_RNA (1)...(19): siRNA sense strand
ggucuucgaucuggucacu

SEQ ID NO: 1104590 - RNA, 19 nt, Homo sapiens
  misc_RNA (1)...(19): siRNA sense strand
aagcaggagaucauuaaga

SEQ ID NO: 1104591 - RNA, 19 nt, Homo sapiens
  misc_RNA (1)...(19): siRNA sense strand
gcaggcaugguuugguuuc

SEQ ID NO: 1104592 - RNA, 19 nt, Homo sapiens
  misc_RNA (1)...(19): siRNA sense strand
ccgaggagggcuuccacua

SEQ ID NO: 1104593 - RNA, 19 nt, Homo sapiens
  misc_RNA (1)...(19): siRNA sense strand
ggcagaacgugcacuucca

SEQ ID NO: 1104594 - RNA, 19 nt, Homo sapiens
  misc_RNA (1)...(19): siRNA sense strand
gcaccggccaugaguaugc

SEQ ID NO: 1104595 - RNA, 19 nt, Homo sapiens
  misc_RNA (1)...(19): siRNA sense strand
gaagcaggagaucauuaag

SEQ ID NO: 1104596 - RNA, 19 nt, Homo sapiens
  misc_RNA (1)...(19): siRNA sense strand
caucgaggccgucaacaac

SEQ ID NO: 1104597 - RNA, 19 nt, Homo sapiens
  misc_RNA (1)...(19): siRNA sense strand
uggcaagccuguggacauc

SEQ ID NO: 1104598 - RNA, 19 nt, Homo sapiens
  misc_RNA (1)...(19): siRNA sense strand
gaguaugcagccaagauca

SEQ ID NO: 1104599 - RNA, 19 nt, Homo sapiens
  misc_RNA (1)...(19): siRNA sense strand
gacuguggagugucugaaa

SEQ ID NO: 1104600 - RNA, 19 nt, Homo sapiens
  misc_RNA (1)...(19): siRNA sense strand
gagaaccugcuggccaaga

SEQ ID NO: 1104601 - RNA, 19 nt, Homo sapiens
  misc_RNA (1)...(19): siRNA sense strand
agcaggagaucauuaagac

SEQ ID NO: 1104602 - RNA, 19 nt, Homo sapiens
  misc_RNA (1)...(19): siRNA sense strand
ggaagcaggagaucauuaa

SEQ ID NO: 1104603 - RNA, 19 nt, Homo sapiens
  misc_RNA (1)...(19): siRNA sense strand
caacaacggugacuuugag

SEQ ID NO: 1104604 - RNA, 19 nt, Homo sapiens
  misc_RNA (1)...(19): siRNA sense strand
cagcaggcaugguuugguu

SEQ ID NO: 1104605 - RNA, 19 nt, Homo sapiens
  misc_RNA (1)...(19): siRNA sense strand
gcacgucauuggagaggau

SEQ ID NO: 1104606 - RNA, 19 nt, Homo sapiens
  misc_RNA (1)...(19): siRNA sense strand
cagugaagcuggcagacuu

SEQ ID NO: 1104607 - RNA, 19 nt, Homo sapiens
  misc_RNA (1)...(19): siRNA sense strand
ccaagaucaucaacaccaa

SEQ ID NO: 1104608 - RNA, 19 nt, Homo sapiens
  misc_RNA (1)...(19): siRNA sense strand
gcaagccuguggacaucug

SEQ ID NO: 1104609 - RNA, 19 nt, Homo sapiens
  misc_RNA (1)...(19): siRNA sense strand
caaaggggcugcagugaag

SEQ ID NO: 1104610 - RNA, 19 nt, Homo sapiens
  misc_RNA (1)...(19): siRNA sense strand
uaccagcucuacgaggaua

SEQ ID NO: 1104611 - RNA, 19 nt, Homo sapiens
  misc_RNA (1)...(19): siRNA sense strand
agaaccugcuggccaagaa

SEQ ID NO: 1104612 - RNA, 19 nt, Homo sapiens
  misc_RNA (1)...(19): siRNA sense strand
gaucaucaacaccaagaag

SEQ ID NO: 1104613 - RNA, 19 nt, Homo sapiens
  misc_RNA (1)...(19): siRNA sense strand
cggaagcaggagaucauua

SEQ ID NO: 1104614 - RNA, 19 nt, Homo sapiens
  misc_RNA (1)...(19): siRNA sense strand
cgucacuccugaagccaaa

SEQ ID NO: 1104615 - RNA, 19 nt, Homo sapiens
  misc_RNA (1)...(19): siRNA sense strand
cagccaagaucaucaacac

SEQ ID NO: 1104616 - RNA, 19 nt, Homo sapiens
  misc_RNA (1)...(19): siRNA sense strand
ucaaccagaugcugaccau

SEQ ID NO: 1104617 - RNA, 19 nt, Homo sapiens
  misc_RNA (1)...(19): siRNA sense strand
gcagacuucggccuagcua

SEQ ID NO: 1104618 - RNA, 19 nt, Homo sapiens
  misc_RNA (1)...(19): siRNA sense strand
acauccggcucacgcagua

SEQ ID NO: 1104619 - RNA, 19 nt, Homo sapiens
  misc_RNA (1)...(19): siRNA sense strand
agccagagaucaccagaag

SEQ ID NO: 1104620 - RNA, 19 nt, Homo sapiens
  misc_RNA (1)...(19): siRNA sense strand
ggacgaggaccagcacaag

SEQ ID NO: 1104621 - RNA, 19 nt, Homo sapiens
  misc_RNA (1)...(19): siRNA sense strand
ggacaccgucacuccugaa

SEQ ID NO: 1104622 - RNA, 19 nt, Homo sapiens
  misc_RNA (1)...(19): siRNA sense strand
ccagagaucaccagaagcu

SEQ ID NO: 1104623 - RNA, 19 nt, Homo sapiens
  misc_RNA (1)...(19): siRNA sense strand
gagccauccucaccaccau

SEQ ID NO: 1104624 - RNA, 19 nt, Homo sapiens
  misc_RNA (1)...(19): siRNA sense strand
gcaaaggggcugcagugaa

SEQ ID NO: 1104625 - RNA, 19 nt, Homo sapiens
  misc_RNA (1)...(19): siRNA sense strand
guucuccauugucaccaaa

SEQ ID NO: 1104626 - RNA, 19 nt, Homo sapiens
  misc_RNA (1)...(19): siRNA sense strand
ggucuucgaucuggucacu

SEQ ID NO: 1104627 - RNA, 19 nt, Homo sapiens
  misc_RNA (1)...(19): siRNA sense strand
aagcaggagaucauuaaga

SEQ ID NO: 1104628 - RNA, 19 nt, Homo sapiens
  misc_RNA (1)...(19): siRNA sense strand
gcaggcaugguuugguuuc

SEQ ID NO: 1104629 - RNA, 19 nt, Homo sapiens
  misc_RNA (1)...(19): siRNA sense strand
ccgaggagggcuuccacua

SEQ ID NO: 1104630 - RNA, 19 nt, Homo sapiens
  misc_RNA (1)...(19): siRNA sense strand
ggcagaacgugcacuucca

SEQ ID NO: 1104631 - RNA, 19 nt, Homo sapiens
  misc_RNA (1)...(19): siRNA sense strand
gcaccggccaugaguaugc

SEQ ID NO: 1104632 - RNA, 19 nt, Homo sapiens
  misc_RNA (1)...(19): siRNA sense strand
gaagcaggagaucauuaag

SEQ ID NO: 1104633 - RNA, 19 nt, Homo sapiens
  misc_RNA (1)...(19): siRNA sense strand
caucgaggccgucaacaac

SEQ ID NO: 1104634 - RNA, 19 nt, Homo sapiens
  misc_RNA (1)...(19): siRNA sense strand
uggcaagccuguggacauc

SEQ ID NO: 1104635 - RNA, 19 nt, Homo sapiens
  misc_RNA (1)...(19): siRNA sense strand
gaguaugcagccaagauca

SEQ ID NO: 1104636 - RNA, 19 nt, Homo sapiens
  misc_RNA (1)...(19): siRNA sense strand
gacuguggagugucugaaa

SEQ ID NO: 1104637 - RNA, 19 nt, Homo sapiens
  misc_RNA (1)...(19): siRNA sense strand
gagaaccugcuggccaaga

SEQ ID NO: 1104638 - RNA, 19 nt, Homo sapiens
  misc_RNA (1)...(19): siRNA sense strand
agcaggagaucauuaagac

SEQ ID NO: 1104639 - RNA, 19 nt, Homo sapiens
  misc_RNA (1)...(19): siRNA sense strand
ggaagcaggagaucauuaa

SEQ ID NO: 1104640 - RNA, 19 nt, Homo sapiens
  misc_RNA (1)...(19): siRNA sense strand
caacaacggugacuuugag

SEQ ID NO: 1104641 - RNA, 19 nt, Homo sapiens
  misc_RNA (1)...(19): siRNA sense strand
cagcaggcaugguuugguu

SEQ ID NO: 1104642 - RNA, 19 nt, Homo sapiens
  misc_RNA (1)...(19): siRNA sense strand
gcacgucauuggagaggau

SEQ ID NO: 1104643 - RNA, 19 nt, Homo sapiens
  misc_RNA (1)...(19): siRNA sense strand
cagugaagcuggcagacuu

SEQ ID NO: 1104644 - RNA, 19 nt, Homo sapiens
  misc_RNA (1)...(19): siRNA sense strand
ccaagaucaucaacaccaa

SEQ ID NO: 1104645 - RNA, 19 nt, Homo sapiens
  misc_RNA (1)...(19): siRNA sense strand
gcaagccuguggacaucug

SEQ ID NO: 1104646 - RNA, 19 nt, Homo sapiens
  misc_RNA (1)...(19): siRNA sense strand
caaaggggcugcagugaag

SEQ ID NO: 1104647 - RNA, 19 nt, Homo sapiens
  misc_RNA (1)...(19): siRNA sense strand
uaccagcucuacgaggaua

SEQ ID NO: 1104648 - RNA, 19 nt, Homo sapiens
  misc_RNA (1)...(19): siRNA sense strand
agaaccugcuggccaagaa

SEQ ID NO: 1104649 - RNA, 19 nt, Homo sapiens
  misc_RNA (1)...(19): siRNA sense strand
gaucaucaacaccaagaag

SEQ ID NO: 1104650 - RNA, 19 nt, Homo sapiens
  misc_RNA (1)...(19): siRNA sense strand
cggaagcaggagaucauua

SEQ ID NO: 1104651 - RNA, 19 nt, Homo sapiens
  misc_RNA (1)...(19): siRNA sense strand
cgucacuccugaagccaaa

SEQ ID NO: 1104652 - RNA, 19 nt, Homo sapiens
  misc_RNA (1)...(19): siRNA sense strand
cagccaagaucaucaacac

SEQ ID NO: 1104653 - RNA, 19 nt, Homo sapiens
  misc_RNA (1)...(19): siRNA sense strand
ucaaccagaugcugaccau

SEQ ID NO: 1104654 - RNA, 19 nt, Homo sapiens
  misc_RNA (1)...(19): siRNA sense strand
gcagacuucggccuagcua

SEQ ID NO: 1104655 - RNA, 19 nt, Homo sapiens
  misc_RNA (1)...(19): siRNA sense strand
acauccggcucacgcagua

SEQ ID NO: 1104656 - RNA, 19 nt, Homo sapiens
  misc_RNA (1)...(19): siRNA sense strand
agccagagaucaccagaag

SEQ ID NO: 1104657 - RNA, 19 nt, Homo sapiens
  misc_RNA (1)...(19): siRNA sense strand
ggacgaggaccagcacaag

SEQ ID NO: 1104658 - RNA, 19 nt, Homo sapiens
  misc_RNA (1)...(19): siRNA sense strand
ggacaccgucacuccugaa

SEQ ID NO: 1104659 - RNA, 19 nt, Homo sapiens
  misc_RNA (1)...(19): siRNA sense strand
ccagagaucaccagaagcu

SEQ ID NO: 1104660 - RNA, 19 nt, Homo sapiens
  misc_RNA (1)...(19): siRNA sense strand
gagccauccucaccaccau

SEQ ID NO: 1104661 - RNA, 19 nt, Homo sapiens
  misc_RNA (1)...(19): siRNA sense strand
gcaaaggggcugcagugaa

SEQ ID NO: 1104662 - RNA, 19 nt, Homo sapiens
  misc_RNA (1)...(19): siRNA sense strand
guucuccauugucaccaaa

SEQ ID NO: 1104663 - RNA, 19 nt, Homo sapiens
  misc_RNA (1)...(19): siRNA sense strand
ggucuucgaucuggucacu

SEQ ID NO: 1104664 - RNA, 19 nt, Homo sapiens
  misc_RNA (1)...(19): siRNA sense strand
aagcaggagaucauuaaga

SEQ ID NO: 1104665 - RNA, 19 nt, Homo sapiens
  misc_RNA (1)...(19): siRNA sense strand
gcaggcaugguuugguuuc

SEQ ID NO: 1104666 - RNA, 19 nt, Homo sapiens
  misc_RNA (1)...(19): siRNA sense strand
ccgaggagggcuuccacua

SEQ ID NO: 1104667 - RNA, 19 nt, Homo sapiens
  misc_RNA (1)...(19): siRNA sense strand
ggcagaacgugcacuucca

SEQ ID NO: 1104668 - RNA, 19 nt, Homo sapiens
  misc_RNA (1)...(19): siRNA sense strand
gcaccggccaugaguaugc

SEQ ID NO: 1104669 - RNA, 19 nt, Homo sapiens
  misc_RNA (1)...(19): siRNA sense strand
gaagcaggagaucauuaag

SEQ ID NO: 1104670 - RNA, 19 nt, Homo sapiens
  misc_RNA (1)...(19): siRNA sense strand
caucgaggccgucaacaac

SEQ ID NO: 1104671 - RNA, 19 nt, Homo sapiens
  misc_RNA (1)...(19): siRNA sense strand
uggcaagccuguggacauc

SEQ ID NO: 1104672 - RNA, 19 nt, Homo sapiens
  misc_RNA (1)...(19): siRNA sense strand
gaguaugcagccaagauca

SEQ ID NO: 1104673 - RNA, 19 nt, Homo sapiens
  misc_RNA (1)...(19): siRNA sense strand
gacuguggagugucugaaa

SEQ ID NO: 1104674 - RNA, 19 nt, Homo sapiens
  misc_RNA (1)...(19): siRNA sense strand
gagaaccugcuggccaaga

SEQ ID NO: 1104675 - RNA, 19 nt, Homo sapiens
  misc_RNA (1)...(19): siRNA sense strand
agcaggagaucauuaagac

SEQ ID NO: 1104676 - RNA, 19 nt, Homo sapiens
  misc_RNA (1)...(19): siRNA sense strand
gaagaguguugaaggauua

SEQ ID NO: 1104677 - RNA, 19 nt, Homo sapiens
  misc_RNA (1)...(19): siRNA sense strand
ggacaacgguuacggcuau

SEQ ID NO: 1104678 - RNA, 19 nt, Homo sapiens
  misc_RNA (1)...(19): siRNA sense strand
gcaaagagcucagcaaagg

SEQ ID NO: 1104679 - RNA, 19 nt, Homo sapiens
  misc_RNA (1)...(19): siRNA sense strand
aagcagaacugaauaagaa

SEQ ID NO: 1104680 - RNA, 19 nt, Homo sapiens
  misc_RNA (1)...(19): siRNA sense strand
gaagacagcaauucacaaa

SEQ ID NO: 1104681 - RNA, 19 nt, Homo sapiens
  misc_RNA (1)...(19): siRNA sense strand
cgacaaauacuccaaguuu

SEQ ID NO: 1104682 - RNA, 19 nt, Homo sapiens
  misc_RNA (1)...(19): siRNA sense strand
caaugggucugucuacuuu

SEQ ID NO: 1104683 - RNA, 19 nt, Homo sapiens
  misc_RNA (1)...(19): siRNA sense strand
gcaugaacauuacggauau

SEQ ID NO: 1104684 - RNA, 19 nt, Homo sapiens
  misc_RNA (1)...(19): siRNA sense strand
cauuaaagaugccuugaaa

SEQ ID NO: 1104685 - RNA, 19 nt, Homo sapiens
  misc_RNA (1)...(19): siRNA sense strand
agacagaaacaccuuauua

SEQ ID NO: 1104686 - RNA, 19 nt, Homo sapiens
  misc_RNA (1)...(19): siRNA sense strand
ucagaaagcccuucaagaa

SEQ ID NO: 1104687 - RNA, 19 nt, Homo sapiens
  misc_RNA (1)...(19): siRNA sense strand
agucagcgcuucaauauga

SEQ ID NO: 1104688 - RNA, 19 nt, Homo sapiens
  misc_RNA (1)...(19): siRNA sense strand
gacagaaacaccuuauuaa

SEQ ID NO: 1104689 - RNA, 19 nt, Homo sapiens
  misc_RNA (1)...(19): siRNA sense strand
ccaaggauuugcucucuga

SEQ ID NO: 1104690 - RNA, 19 nt, Homo sapiens
  misc_RNA (1)...(19): siRNA sense strand
gcaaagggcaagccaagaa

SEQ ID NO: 1104691 - RNA, 19 nt, Homo sapiens
  misc_RNA (1)...(19): siRNA sense strand
gaagaagcagaacugaaua

SEQ ID NO: 1104692 - RNA, 19 nt, Homo sapiens
  misc_RNA (1)...(19): siRNA sense strand
ggagucagcgcuucaauau

SEQ ID NO: 1104693 - RNA, 19 nt, Homo sapiens
  misc_RNA (1)...(19): siRNA sense strand
ggaagaagccaaggauuug

SEQ ID NO: 1104694 - RNA, 19 nt, Homo sapiens
  misc_RNA (1)...(19): siRNA sense strand
ccacagagccacuugagaa

SEQ ID NO: 1104695 - RNA, 19 nt, Homo sapiens
  misc_RNA (1)...(19): siRNA sense strand
gagaagcucuacaaggaau

SEQ ID NO: 1104696 - RNA, 19 nt, Homo sapiens
  misc_RNA (1)...(19): siRNA sense strand
ggaaggacacccuggacua

SEQ ID NO: 1104697 - RNA, 19 nt, Homo sapiens
  misc_RNA (1)...(19): siRNA sense strand
gaacauuacggauauugau

SEQ ID NO: 1104698 - RNA, 19 nt, Homo sapiens
  misc_RNA (1)...(19): siRNA sense strand
gcaaagcuggccaagauga

SEQ ID NO: 1104699 - RNA, 19 nt, Homo sapiens
  misc_RNA (1)...(19): siRNA sense strand
ggaggaaacaggaacaaga

SEQ ID NO: 1104700 - RNA, 19 nt, Homo sapiens
  misc_RNA (1)...(19): siRNA sense strand
gggcuucgauggacauuca

SEQ ID NO: 1104701 - RNA, 19 nt, Homo sapiens
  misc_RNA (1)...(19): siRNA sense strand
ggauauugaugacaagauc

SEQ ID NO: 1104702 - RNA, 19 nt, Homo sapiens
  misc_RNA (1)...(19): siRNA sense strand
cauggaagcucugaauguu

SEQ ID NO: 1104703 - RNA, 19 nt, Homo sapiens
  misc_RNA (1)...(19): siRNA sense strand
aggagaagcucuacaagga

SEQ ID NO: 1104704 - RNA, 19 nt, Homo sapiens
  misc_RNA (1)...(19): siRNA sense strand
gaaggagugcggaagauug

SEQ ID NO: 1104705 - RNA, 19 nt, Homo sapiens
  misc_RNA (1)...(19): siRNA sense strand
caugcagacuccaccuuua

SEQ ID NO: 1104706 - RNA, 19 nt, Homo sapiens
  misc_RNA (1)...(19): siRNA sense strand
gaagcagaacugaauaaga

SEQ ID NO: 1104707 - RNA, 19 nt, Homo sapiens
  misc_RNA (1)...(19): siRNA sense strand
ucuccaagcugcccaaguu

SEQ ID NO: 1104708 - RNA, 19 nt, Homo sapiens
  misc_RNA (1)...(19): siRNA sense strand
gaggaaacaggaacaagaa

SEQ ID NO: 1104709 - RNA, 19 nt, Homo sapiens
  misc_RNA (1)...(19): siRNA sense strand
gcagaccgccugagugaga

SEQ ID NO: 1104710 - RNA, 19 nt, Homo sapiens
  misc_RNA (1)...(19): siRNA sense strand
ugagaagaguguugaagga

SEQ ID NO: 1104711 - RNA, 19 nt, Homo sapiens
  misc_RNA (1)...(19): siRNA sense strand
ccagugagauguucuuguc

SEQ ID NO: 1104712 - RNA, 19 nt, Homo sapiens
  misc_RNA (1)...(19): siRNA sense strand
caacgacuuugccuuaugg

SEQ ID NO: 1104713 - RNA, 19 nt, Homo sapiens
  misc_RNA (1)...(19): siRNA sense strand
uuacggauauugaugacaa

SEQ ID NO: 1104714 - RNA, 19 nt, Homo sapiens
  misc_RNA (1)...(19): siRNA sense strand
gggcaaagagcucagcaaa

SEQ ID NO: 1104715 - RNA, 19 nt, Homo sapiens
  misc_RNA (1)...(19): siRNA sense strand
gugaguaugugccagaaau

SEQ ID NO: 1104716 - RNA, 19 nt, Homo sapiens
  misc_RNA (1)...(19): siRNA sense strand
agaagaguguugaaggauu

SEQ ID NO: 1104717 - RNA, 19 nt, Homo sapiens
  misc_RNA (1)...(19): siRNA sense strand
ggaaagccgugaggaagag

SEQ ID NO: 1104718 - RNA, 19 nt, Homo sapiens
  misc_RNA (1)...(19): siRNA sense strand
gaagaagaagcagaacuga

SEQ ID NO: 1104719 - RNA, 19 nt, Homo sapiens
  misc_RNA (1)...(19): siRNA sense strand
gccagaaauugugaacuuu

SEQ ID NO: 1104720 - RNA, 19 nt, Homo sapiens
  misc_RNA (1)...(19): siRNA sense strand
acacuuggcugugauguca

SEQ ID NO: 1104721 - RNA, 19 nt, Homo sapiens
  misc_RNA (1)...(19): siRNA sense strand
gagaaggagugcggaagau

SEQ ID NO: 1104722 - RNA, 19 nt, Homo sapiens
  misc_RNA (1)...(19): siRNA sense strand
cagaaauugugaacuuugu

SEQ ID NO: 1104723 - RNA, 19 nt, Homo sapiens
  misc_RNA (1)...(19): siRNA sense strand
ugaaacugguagacagaaa

SEQ ID NO: 1104724 - RNA, 19 nt, Homo sapiens
  misc_RNA (1)...(19): siRNA sense strand
agaagaagcagaacugaau

SEQ ID NO: 1104725 - RNA, 19 nt, Homo sapiens
  misc_RNA (1)...(19): siRNA sense strand
gaaguucuugaaugaguuu

SEQ ID NO: 1104726 - RNA, 19 nt, Homo sapiens
  misc_RNA (1)...(19): siRNA sense strand
gcacucagcacggcaguug

SEQ ID NO: 1104727 - RNA, 19 nt, Homo sapiens
  misc_RNA (1)...(19): siRNA sense strand
uggaagaagccaaggauuu

SEQ ID NO: 1104728 - RNA, 19 nt, Homo sapiens
  misc_RNA (1)...(19): siRNA sense strand
gcagauggcccagaaugga

SEQ ID NO: 1104729 - RNA, 19 nt, Homo sapiens
  misc_RNA (1)...(19): siRNA sense strand
ccaacgacuuugccuuaug

SEQ ID NO: 1104730 - RNA, 19 nt, Homo sapiens
  misc_RNA (1)...(19): siRNA sense strand
gcgagaagcacuccuaugg

SEQ ID NO: 1104731 - RNA, 19 nt, Homo sapiens
  misc_RNA (1)...(19): siRNA sense strand
gggucugucuacuuugaua

SEQ ID NO: 1104732 - RNA, 19 nt, Homo sapiens
  misc_RNA (1)...(19): siRNA sense strand
gaacuuuguccagaagauu

SEQ ID NO: 1104733 - RNA, 19 nt, Homo sapiens
  misc_RNA (1)...(19): siRNA sense strand
gggagaagaagaagcagaa

SEQ ID NO: 1104734 - RNA, 19 nt, Homo sapiens
  misc_RNA (1)...(19): siRNA sense strand
gaaacaggaacaagaagca

SEQ ID NO: 1104735 - RNA, 19 nt, Homo sapiens
  misc_RNA (1)...(19): siRNA sense strand
ugccagaaauugugaacuu

SEQ ID NO: 1104736 - RNA, 19 nt, Homo sapiens
  misc_RNA (1)...(19): siRNA sense strand
ggagaagcucuacaaggaa

SEQ ID NO: 1104737 - RNA, 19 nt, Homo sapiens
  misc_RNA (1)...(19): siRNA sense strand
gaggagaagaggaagaaga

SEQ ID NO: 1104738 - RNA, 19 nt, Homo sapiens
  misc_RNA (1)...(19): siRNA sense strand
cagugcagcuugccacaga

SEQ ID NO: 1104739 - RNA, 19 nt, Homo sapiens
  misc_RNA (1)...(19): siRNA sense strand
gagaagaggaagaagaaag

SEQ ID NO: 1104740 - RNA, 19 nt, Homo sapiens
  misc_RNA (1)...(19): siRNA sense strand
acaauuccaucuucuccaa

SEQ ID NO: 1104741 - RNA, 19 nt, Homo sapiens
  misc_RNA (1)...(19): siRNA sense strand
gaucagaaagcccuucaag

SEQ ID NO: 1104742 - RNA, 19 nt, Homo sapiens
  misc_RNA (1)...(19): siRNA sense strand
ggaacaagaagcagcaaag

SEQ ID NO: 1104743 - RNA, 19 nt, Homo sapiens
  misc_RNA (1)...(19): siRNA sense strand
gaagaggagaagaggaaga

SEQ ID NO: 1104744 - RNA, 19 nt, Homo sapiens
  misc_RNA (1)...(19): siRNA sense strand
uggagaacaucgcccugua

SEQ ID NO: 1104745 - RNA, 19 nt, Homo sapiens
  misc_RNA (1)...(19): siRNA sense strand
acaaagcccucugugacaa

SEQ ID NO: 1104746 - RNA, 19 nt, Homo sapiens
  misc_RNA (1)...(19): siRNA sense strand
acaacagccucaccaggaa

SEQ ID NO: 1104747 - RNA, 19 nt, Homo sapiens
  misc_RNA (1)...(19): siRNA sense strand
gcagaugcucgaacggauu

SEQ ID NO: 1104748 - RNA, 19 nt, Homo sapiens
  misc_RNA (1)...(19): siRNA sense strand
ggacuuccacagagacaug

SEQ ID NO: 1104749 - RNA, 19 nt, Homo sapiens
  misc_RNA (1)...(19): siRNA sense strand
ucggaggccuacuuugaaa

SEQ ID NO: 1104750 - RNA, 19 nt, Homo sapiens
  misc_RNA (1)...(19): siRNA sense strand
ucacccauaugcugaagau

SEQ ID NO: 1104751 - RNA, 19 nt, Homo sapiens
  misc_RNA (1)...(19): siRNA sense strand
ucccaacgacuuugccuua

SEQ ID NO: 1104752 - RNA, 19 nt, Homo sapiens
  misc_RNA (1)...(19): siRNA sense strand
agaagaggaagaagaaaga

SEQ ID NO: 1104753 - RNA, 19 nt, Homo sapiens
  misc_RNA (1)...(19): siRNA sense strand
cuucagguguuaucagaau

SEQ ID NO: 1104754 - RNA, 19 nt, Homo sapiens
  misc_RNA (1)...(19): siRNA sense strand
agacagcaauucacaaagc

SEQ ID NO: 1104755 - RNA, 19 nt, Homo sapiens
  misc_RNA (1)...(19): siRNA sense strand
acaagaagacagcaauuca

SEQ ID NO: 1104756 - RNA, 19 nt, Homo sapiens
  misc_RNA (1)...(19): siRNA sense strand
ccagaaauugugaacuuug

SEQ ID NO: 1104757 - RNA, 19 nt, Homo sapiens
  misc_RNA (1)...(19): siRNA sense strand
gguagacagaaacaccuua

SEQ ID NO: 1104758 - RNA, 19 nt, Homo sapiens
  misc_RNA (1)...(19): siRNA sense strand
gcaccgucauggaagagau

SEQ ID NO: 1104759 - RNA, 19 nt, Homo sapiens
  misc_RNA (1)...(19): siRNA sense strand
gacaagaagacagcaauuc

SEQ ID NO: 1104760 - RNA, 19 nt, Homo sapiens
  misc_RNA (1)...(19): siRNA sense strand
gaacuuuuaugacaagaag

SEQ ID NO: 1104761 - RNA, 19 nt, Homo sapiens
  misc_RNA (1)...(19): siRNA sense strand
ccaaugggucugucuacuu

SEQ ID NO: 1104762 - RNA, 19 nt, Homo sapiens
  misc_RNA (1)...(19): siRNA sense strand
cuacaucucuuuugauauc

SEQ ID NO: 1104763 - RNA, 19 nt, Homo sapiens
  misc_RNA (1)...(19): siRNA sense strand
gaaguguucauaccucaag

SEQ ID NO: 1104764 - RNA, 19 nt, Homo sapiens
  misc_RNA (1)...(19): siRNA sense strand
uggaagcucugaauguucu

SEQ ID NO: 1104765 - RNA, 19 nt, Homo sapiens
  misc_RNA (1)...(19): siRNA sense strand
gugagauguucuugucaga

SEQ ID NO: 1104766 - RNA, 19 nt, Homo sapiens
  misc_RNA (1)...(19): siRNA sense strand
gaguaugugccagaaauug

SEQ ID NO: 1104767 - RNA, 19 nt, Homo sapiens
  misc_RNA (1)...(19): siRNA sense strand
gaaggacacccuggacuac

SEQ ID NO: 1104768 - RNA, 19 nt, Homo sapiens
  misc_RNA (1)...(19): siRNA sense strand
gaagcucuacaaggaauau

SEQ ID NO: 1104769 - RNA, 19 nt, Homo sapiens
  misc_RNA (1)...(19): siRNA sense strand
gucagaaaccgacaaauac

SEQ ID NO: 1104770 - RNA, 19 nt, Homo sapiens
  misc_RNA (1)...(19): siRNA sense strand
gaaaagagacggguugaag

SEQ ID NO: 1104771 - RNA, 19 nt, Homo sapiens
  misc_RNA (1)...(19): siRNA sense strand
guagacagaaacaccuuau

SEQ ID NO: 1104772 - RNA, 19 nt, Homo sapiens
  misc_RNA (1)...(19): siRNA sense strand
cgagaaggagugcggaaga

SEQ ID NO: 1104773 - RNA, 19 nt, Homo sapiens
  misc_RNA (1)...(19): siRNA sense strand
gguccuacaucucuuuuga

SEQ ID NO: 1104774 - RNA, 19 nt, Homo sapiens
  misc_RNA (1)...(19): siRNA sense strand
ugacaagaagacagcaauu

SEQ ID NO: 1104775 - RNA, 19 nt, Homo sapiens
  misc_RNA (1)...(19): siRNA sense strand
caaagcuggccaagaugaa

SEQ ID NO: 1104776 - RNA, 19 nt, Homo sapiens
  misc_RNA (1)...(19): siRNA sense strand
gaagaguguugaaggauua

SEQ ID NO: 1104777 - RNA, 19 nt, Homo sapiens
  misc_RNA (1)...(19): siRNA sense strand
ggacaacgguuacggcuau

SEQ ID NO: 1104778 - RNA, 19 nt, Homo sapiens
  misc_RNA (1)...(19): siRNA sense strand
gcaaagagcucagcaaagg

SEQ ID NO: 1104779 - RNA, 19 nt, Homo sapiens
  misc_RNA (1)...(19): siRNA sense strand
aagcagaacugaauaagaa

SEQ ID NO: 1104780 - RNA, 19 nt, Homo sapiens
  misc_RNA (1)...(19): siRNA sense strand
gaagacagcaauucacaaa

SEQ ID NO: 1104781 - RNA, 19 nt, Homo sapiens
  misc_RNA (1)...(19): siRNA sense strand
cgacaaauacuccaaguuu

SEQ ID NO: 1104782 - RNA, 19 nt, Homo sapiens
  misc_RNA (1)...(19): siRNA sense strand
caaugggucugucuacuuu

SEQ ID NO: 1104783 - RNA, 19 nt, Homo sapiens
  misc_RNA (1)...(19): siRNA sense strand
gcaugaacauuacggauau

SEQ ID NO: 1104784 - RNA, 19 nt, Homo sapiens
  misc_RNA (1)...(19): siRNA sense strand
cauuaaagaugccuugaaa

SEQ ID NO: 1104785 - RNA, 19 nt, Homo sapiens
  misc_RNA (1)...(19): siRNA sense strand
agacagaaacaccuuauua

SEQ ID NO: 1104786 - RNA, 19 nt, Homo sapiens
  misc_RNA (1)...(19): siRNA sense strand
ucagaaagcccuucaagaa

SEQ ID NO: 1104787 - RNA, 19 nt, Homo sapiens
  misc_RNA (1)...(19): siRNA sense strand
agucagcgcuucaauauga

SEQ ID NO: 1104788 - RNA, 19 nt, Homo sapiens
  misc_RNA (1)...(19): siRNA sense strand
gacagaaacaccuuauuaa

SEQ ID NO: 1104789 - RNA, 19 nt, Homo sapiens
  misc_RNA (1)...(19): siRNA sense strand
ccaaggauuugcucucuga

SEQ ID NO: 1104790 - RNA, 19 nt, Homo sapiens
  misc_RNA (1)...(19): siRNA sense strand
gcaaagggcaagccaagaa

SEQ ID NO: 1104791 - RNA, 19 nt, Homo sapiens
  misc_RNA (1)...(19): siRNA sense strand
gaagaagcagaacugaaua

SEQ ID NO: 1104792 - RNA, 19 nt, Homo sapiens
  misc_RNA (1)...(19): siRNA sense strand
ggagucagcgcuucaauau

SEQ ID NO: 1104793 - RNA, 19 nt, Homo sapiens
  misc_RNA (1)...(19): siRNA sense strand
ggaagaagccaaggauuug

SEQ ID NO: 1104794 - RNA, 19 nt, Homo sapiens
  misc_RNA (1)...(19): siRNA sense strand
ccacagagccacuugagaa

SEQ ID NO: 1104795 - RNA, 19 nt, Homo sapiens
  misc_RNA (1)...(19): siRNA sense strand
ggaaggacacccuggacua

SEQ ID NO: 1104796 - RNA, 19 nt, Homo sapiens
  misc_RNA (1)...(19): siRNA sense strand
gaacauuacggauauugau

SEQ ID NO: 1104797 - RNA, 19 nt, Homo sapiens
  misc_RNA (1)...(19): siRNA sense strand
gcaaagcuggccaagauga

SEQ ID NO: 1104798 - RNA, 19 nt, Homo sapiens
  misc_RNA (1)...(19): siRNA sense strand
ggaggaaacaggaacaaga

SEQ ID NO: 1104799 - RNA, 19 nt, Homo sapiens
  misc_RNA (1)...(19): siRNA sense strand
gggcuucgauggacauuca

SEQ ID NO: 1104800 - RNA, 19 nt, Homo sapiens
  misc_RNA (1)...(19): siRNA sense strand
ggauauugaugacaagauc

SEQ ID NO: 1104801 - RNA, 19 nt, Homo sapiens
  misc_RNA (1)...(19): siRNA sense strand
cauggaagcucugaauguu

SEQ ID NO: 1104802 - RNA, 19 nt, Homo sapiens
  misc_RNA (1)...(19): siRNA sense strand
gaaggagugcggaagauug

SEQ ID NO: 1104803 - RNA, 19 nt, Homo sapiens
  misc_RNA (1)...(19): siRNA sense strand
caugcagacuccaccuuua

SEQ ID NO: 1104804 - RNA, 19 nt, Homo sapiens
  misc_RNA (1)...(19): siRNA sense strand
gaagcagaacugaauaaga

SEQ ID NO: 1104805 - RNA, 19 nt, Homo sapiens
  misc_RNA (1)...(19): siRNA sense strand
ucuccaagcugcccaaguu

SEQ ID NO: 1104806 - RNA, 19 nt, Homo sapiens
  misc_RNA (1)...(19): siRNA sense strand
gaggaaacaggaacaagaa

SEQ ID NO: 1104807 - RNA, 19 nt, Homo sapiens
  misc_RNA (1)...(19): siRNA sense strand
gcagaccgccugagugaga

SEQ ID NO: 1104808 - RNA, 19 nt, Homo sapiens
  misc_RNA (1)...(19): siRNA sense strand
ugagaagaguguugaagga

SEQ ID NO: 1104809 - RNA, 19 nt, Homo sapiens
  misc_RNA (1)...(19): siRNA sense strand
ccagugagauguucuuguc

SEQ ID NO: 1104810 - RNA, 19 nt, Homo sapiens
  misc_RNA (1)...(19): siRNA sense strand
caacgacuuugccuuaugg

SEQ ID NO: 1104811 - RNA, 19 nt, Homo sapiens
  misc_RNA (1)...(19): siRNA sense strand
uuacggauauugaugacaa

SEQ ID NO: 1104812 - RNA, 19 nt, Homo sapiens
  misc_RNA (1)...(19): siRNA sense strand
gggcaaagagcucagcaaa

SEQ ID NO: 1104813 - RNA, 19 nt, Homo sapiens
  misc_RNA (1)...(19): siRNA sense strand
gugaguaugugccagaaau

SEQ ID NO: 1104814 - RNA, 19 nt, Homo sapiens
  misc_RNA (1)...(19): siRNA sense strand
agaagaguguugaaggauu

SEQ ID NO: 1104815 - RNA, 19 nt, Homo sapiens
  misc_RNA (1)...(19): siRNA sense strand
ggaaagccgugaggaagag

SEQ ID NO: 1104816 - RNA, 19 nt, Homo sapiens
  misc_RNA (1)...(19): siRNA sense strand
gaagaagaagcagaacuga

SEQ ID NO: 1104817 - RNA, 19 nt, Homo sapiens
  misc_RNA (1)...(19): siRNA sense strand
gccagaaauugugaacuuu

SEQ ID NO: 1104818 - RNA, 19 nt, Homo sapiens
  misc_RNA (1)...(19): siRNA sense strand
acacuuggcugugauguca

SEQ ID NO: 1104819 - RNA, 19 nt, Homo sapiens
  misc_RNA (1)...(19): siRNA sense strand
gagaaggagugcggaagau

SEQ ID NO: 1104820 - RNA, 19 nt, Homo sapiens
  misc_RNA (1)...(19): siRNA sense strand
cagaaauugugaacuuugu

SEQ ID NO: 1104821 - RNA, 19 nt, Homo sapiens
  misc_RNA (1)...(19): siRNA sense strand
ugaaacugguagacagaaa

SEQ ID NO: 1104822 - RNA, 19 nt, Homo sapiens
  misc_RNA (1)...(19): siRNA sense strand
agaagaagcagaacugaau

SEQ ID NO: 1104823 - RNA, 19 nt, Homo sapiens
  misc_RNA (1)...(19): siRNA sense strand
gaaguucuugaaugaguuu

SEQ ID NO: 1104824 - RNA, 19 nt, Homo sapiens
  misc_RNA (1)...(19): siRNA sense strand
gcacucagcacggcaguug

SEQ ID NO: 1104825 - RNA, 19 nt, Homo sapiens
  misc_RNA (1)...(19): siRNA sense strand
uggaagaagccaaggauuu

SEQ ID NO: 1104826 - RNA, 19 nt, Homo sapiens
  misc_RNA (1)...(19): siRNA sense strand
ccaacgacuuugccuuaug

SEQ ID NO: 1104827 - RNA, 19 nt, Homo sapiens
  misc_RNA (1)...(19): siRNA sense strand
gcgagaagcacuccuaugg

SEQ ID NO: 1104828 - RNA, 19 nt, Homo sapiens
  misc_RNA (1)...(19): siRNA sense strand
gggucugucuacuuugaua

SEQ ID NO: 1104829 - RNA, 19 nt, Homo sapiens
  misc_RNA (1)...(19): siRNA sense strand
gaacuuuguccagaagauu

SEQ ID NO: 1104830 - RNA, 19 nt, Homo sapiens
  misc_RNA (1)...(19): siRNA sense strand
gggagaagaagaagcagaa

SEQ ID NO: 1104831 - RNA, 19 nt, Homo sapiens
  misc_RNA (1)...(19): siRNA sense strand
gaaacaggaacaagaagca

SEQ ID NO: 1104832 - RNA, 19 nt, Homo sapiens
  misc_RNA (1)...(19): siRNA sense strand
ugccagaaauugugaacuu

SEQ ID NO: 1104833 - RNA, 19 nt, Homo sapiens
  misc_RNA (1)...(19): siRNA sense strand
gaggagaagaggaagaaga

SEQ ID NO: 1104834 - RNA, 19 nt, Homo sapiens
  misc_RNA (1)...(19): siRNA sense strand
cagugcagcuugccacaga

SEQ ID NO: 1104835 - RNA, 19 nt, Homo sapiens
  misc_RNA (1)...(19): siRNA sense strand
gagaagaggaagaagaaag

SEQ ID NO: 1104836 - RNA, 19 nt, Homo sapiens
  misc_RNA (1)...(19): siRNA sense strand
acaauuccaucuucuccaa

SEQ ID NO: 1104837 - RNA, 19 nt, Homo sapiens
  misc_RNA (1)...(19): siRNA sense strand
gaucagaaagcccuucaag

SEQ ID NO: 1104838 - RNA, 19 nt, Homo sapiens
  misc_RNA (1)...(19): siRNA sense strand
ggaacaagaagcagcaaag

SEQ ID NO: 1104839 - RNA, 19 nt, Homo sapiens
  misc_RNA (1)...(19): siRNA sense strand
gaagaggagaagaggaaga

SEQ ID NO: 1104840 - RNA, 19 nt, Homo sapiens
  misc_RNA (1)...(19): siRNA sense strand
uggagaacaucgcccugua

SEQ ID NO: 1104841 - RNA, 19 nt, Homo sapiens
  misc_RNA (1)...(19): siRNA sense strand
acaaagcccucugugacaa

SEQ ID NO: 1104842 - RNA, 19 nt, Homo sapiens
  misc_RNA (1)...(19): siRNA sense strand
acaacagccucaccaggaa

SEQ ID NO: 1104843 - RNA, 19 nt, Homo sapiens
  misc_RNA (1)...(19): siRNA sense strand
gcagaugcucgaacggauu

SEQ ID NO: 1104844 - RNA, 19 nt, Homo sapiens
  misc_RNA (1)...(19): siRNA sense strand
ggacuuccacagagacaug

SEQ ID NO: 1104845 - RNA, 19 nt, Homo sapiens
  misc_RNA (1)...(19): siRNA sense strand
ucggaggccuacuuugaaa

SEQ ID NO: 1104846 - RNA, 19 nt, Homo sapiens
  misc_RNA (1)...(19): siRNA sense strand
ucacccauaugcugaagau

SEQ ID NO: 1104847 - RNA, 19 nt, Homo sapiens
  misc_RNA (1)...(19): siRNA sense strand
ucccaacgacuuugccuua

SEQ ID NO: 1104848 - RNA, 19 nt, Homo sapiens
  misc_RNA (1)...(19): siRNA sense strand
agaagaggaagaagaaaga

SEQ ID NO: 1104849 - RNA, 19 nt, Homo sapiens
  misc_RNA (1)...(19): siRNA sense strand
cuucagguguuaucagaau

SEQ ID NO: 1104850 - RNA, 19 nt, Homo sapiens
  misc_RNA (1)...(19): siRNA sense strand
agacagcaauucacaaagc

SEQ ID NO: 1104851 - RNA, 19 nt, Homo sapiens
  misc_RNA (1)...(19): siRNA sense strand
acaagaagacagcaauuca

SEQ ID NO: 1104852 - RNA, 19 nt, Homo sapiens
  misc_RNA (1)...(19): siRNA sense strand
ccagaaauugugaacuuug

SEQ ID NO: 1104853 - RNA, 19 nt, Homo sapiens
  misc_RNA (1)...(19): siRNA sense strand
gguagacagaaacaccuua

SEQ ID NO: 1104854 - RNA, 19 nt, Homo sapiens
  misc_RNA (1)...(19): siRNA sense strand
gcaccgucauggaagagau

SEQ ID NO: 1104855 - RNA, 19 nt, Homo sapiens
  misc_RNA (1)...(19): siRNA sense strand
gacaagaagacagcaauuc

SEQ ID NO: 1104856 - RNA, 19 nt, Homo sapiens
  misc_RNA (1)...(19): siRNA sense strand
gaacuuuuaugacaagaag

SEQ ID NO: 1104857 - RNA, 19 nt, Homo sapiens
  misc_RNA (1)...(19): siRNA sense strand
ccaaugggucugucuacuu

SEQ ID NO: 1104858 - RNA, 19 nt, Homo sapiens
  misc_RNA (1)...(19): siRNA sense strand
cuacaucucuuuugauauc

SEQ ID NO: 1104859 - RNA, 19 nt, Homo sapiens
  misc_RNA (1)...(19): siRNA sense strand
gaaguguucauaccucaag

SEQ ID NO: 1104860 - RNA, 19 nt, Homo sapiens
  misc_RNA (1)...(19): siRNA sense strand
uggaagcucugaauguucu

SEQ ID NO: 1104861 - RNA, 19 nt, Homo sapiens
  misc_RNA (1)...(19): siRNA sense strand
gugagauguucuugucaga

SEQ ID NO: 1104862 - RNA, 19 nt, Homo sapiens
  misc_RNA (1)...(19): siRNA sense strand
gaguaugugccagaaauug

SEQ ID NO: 1104863 - RNA, 19 nt, Homo sapiens
  misc_RNA (1)...(19): siRNA sense strand
gguccuacaucucuuuuga

SEQ ID NO: 1104864 - RNA, 19 nt, Homo sapiens
  misc_RNA (1)...(19): siRNA sense strand
gucagaaaccgacaaauac

SEQ ID NO: 1104865 - RNA, 19 nt, Homo sapiens
  misc_RNA (1)...(19): siRNA sense strand
gaaaagagacggguugaag

SEQ ID NO: 1104866 - RNA, 19 nt, Homo sapiens
  misc_RNA (1)...(19): siRNA sense strand
guagacagaaacaccuuau

SEQ ID NO: 1104867 - RNA, 19 nt, Homo sapiens
  misc_RNA (1)...(19): siRNA sense strand
cgagaaggagugcggaaga

SEQ ID NO: 1104868 - RNA, 19 nt, Homo sapiens
  misc_RNA (1)...(19): siRNA sense strand
gaaggacacccuggacuac

SEQ ID NO: 1104869 - RNA, 19 nt, Homo sapiens
  misc_RNA (1)...(19): siRNA sense strand
ccaugcagacuccaccuuu

SEQ ID NO: 1104870 - RNA, 19 nt, Homo sapiens
  misc_RNA (1)...(19): siRNA sense strand
caaagcuggccaagaugaa

SEQ ID NO: 1104871 - RNA, 19 nt, Homo sapiens
  misc_RNA (1)...(19): siRNA sense strand
ugacaagaagacagcaauu

SEQ ID NO: 1104872 - RNA, 19 nt, Homo sapiens
  misc_RNA (1)...(19): siRNA sense strand
aagaagcagaacugaauaa

SEQ ID NO: 1104873 - RNA, 19 nt, Homo sapiens
  misc_RNA (1)...(19): siRNA sense strand
gcagacuccaccuuuacaa

SEQ ID NO: 1104874 - RNA, 19 nt, Homo sapiens
  misc_RNA (1)...(19): siRNA sense strand
cccuguaccucacccauau

SEQ ID NO: 1104875 - RNA, 19 nt, Homo sapiens
  misc_RNA (1)...(19): siRNA sense strand
cccauaugcugaagaucuu

SEQ ID NO: 1104876 - RNA, 19 nt, Homo sapiens
  misc_RNA (1)...(19): siRNA sense strand
ccacagcuaucaccuuuga

SEQ ID NO: 1104877 - RNA, 19 nt, Homo sapiens
  misc_RNA (1)...(19): siRNA sense strand
cugcauggcuccaaaauua

SEQ ID NO: 1104878 - RNA, 19 nt, Homo sapiens
  misc_RNA (1)...(19): siRNA sense strand
cccaacaccuucaauguga

SEQ ID NO: 1104879 - RNA, 19 nt, Homo sapiens
  misc_RNA (1)...(19): siRNA sense strand
ggccugacccugagucuuu

SEQ ID NO: 1104880 - RNA, 19 nt, Homo sapiens
  misc_RNA (1)...(19): siRNA sense strand
uacaaggucuccauaagug

SEQ ID NO: 1104881 - RNA, 19 nt, Homo sapiens
  misc_RNA (1)...(19): siRNA sense strand
caagaaccgcugccacauu

SEQ ID NO: 1104882 - RNA, 19 nt, Homo sapiens
  misc_RNA (1)...(19): siRNA sense strand
guacaaggucuccauaagu

SEQ ID NO: 1104883 - RNA, 19 nt, Homo sapiens
  misc_RNA (1)...(19): siRNA sense strand
aagaaccgcugccacauuc

SEQ ID NO: 1104884 - RNA, 19 nt, Homo sapiens
  misc_RNA (1)...(19): siRNA sense strand
ugccacagcuaucaccuuu

SEQ ID NO: 1104885 - RNA, 19 nt, Homo sapiens
  misc_RNA (1)...(19): siRNA sense strand
gaagccugauccuccagaa

SEQ ID NO: 1104886 - RNA, 19 nt, Homo sapiens
  misc_RNA (1)...(19): siRNA sense strand
caaguacaaggucuccaua

SEQ ID NO: 1104887 - RNA, 19 nt, Homo sapiens
  misc_RNA (1)...(19): siRNA sense strand
ccaaaauuauggucuguga

SEQ ID NO: 1104888 - RNA, 19 nt, Homo sapiens
  misc_RNA (1)...(19): siRNA sense strand
ggacccagcccucaagaac

SEQ ID NO: 1104889 - RNA, 19 nt, Homo sapiens
  misc_RNA (1)...(19): siRNA sense strand
gaaggacccagcccucaag

SEQ ID NO: 1104890 - RNA, 19 nt, Homo sapiens
  misc_RNA (1)...(19): siRNA sense strand
ggaaggaguacauuaucca

SEQ ID NO: 1104891 - RNA, 19 nt, Homo sapiens
  misc_RNA (1)...(19): siRNA sense strand
ugacguggcggguaaaugg

SEQ ID NO: 1104892 - RNA, 19 nt, Homo sapiens
  misc_RNA (1)...(19): siRNA sense strand
cagcacacaccaucacaga

SEQ ID NO: 1104893 - RNA, 19 nt, Homo sapiens
  misc_RNA (1)...(19): siRNA sense strand
gggaaggaguacauuaucc

SEQ ID NO: 1104894 - RNA, 19 nt, Homo sapiens
  misc_RNA (1)...(19): siRNA sense strand
ccagcagucucuugaucug

SEQ ID NO: 1104895 - RNA, 19 nt, Homo sapiens
  misc_RNA (1)...(19): siRNA sense strand
caccuguucuccaccauca

SEQ ID NO: 1104896 - RNA, 19 nt, Homo sapiens
  misc_RNA (1)...(19): siRNA sense strand
uaucaccuuugacgaguuc

SEQ ID NO: 1104897 - RNA, 19 nt, Homo sapiens
  misc_RNA (1)...(19): siRNA sense strand
ccaccuacauucccaacac

SEQ ID NO: 1104898 - RNA, 19 nt, Homo sapiens
  misc_RNA (1)...(19): siRNA sense strand
gccgggaaggaguacauua

SEQ ID NO: 1104899 - RNA, 19 nt, Homo sapiens
  misc_RNA (1)...(19): siRNA sense strand
cuccauaagugucagcaau

SEQ ID NO: 1104900 - RNA, 19 nt, Homo sapiens
  misc_RNA (1)...(19): siRNA sense strand
ggccugcugugcugugcuu

SEQ ID NO: 1104901 - RNA, 19 nt, Homo sapiens
  misc_RNA (1)...(19): siRNA sense strand
caaugugacugugcugcau

SEQ ID NO: 1104902 - RNA, 19 nt, Homo sapiens
  misc_RNA (1)...(19): siRNA sense strand
ccacaaugccacagcuauc

SEQ ID NO: 1104903 - RNA, 19 nt, Homo sapiens
  misc_RNA (1)...(19): siRNA sense strand
aguacaaggucuccauaag

SEQ ID NO: 1104904 - RNA, 19 nt, Homo sapiens
  misc_RNA (1)...(19): siRNA sense strand
aaauuauggucugugagaa

SEQ ID NO: 1104905 - RNA, 19 nt, Homo sapiens
  misc_RNA (1)...(19): siRNA sense strand
gcacagcacacaccaucac

SEQ ID NO: 1104906 - RNA, 19 nt, Homo sapiens
  misc_RNA (1)...(19): siRNA sense strand
ccugggcucugacgugaca

SEQ ID NO: 1104907 - RNA, 19 nt, Homo sapiens
  misc_RNA (1)...(19): siRNA sense strand
cuaccacgaagaucuguga

SEQ ID NO: 1104908 - RNA, 19 nt, Homo sapiens
  misc_RNA (1)...(19): siRNA sense strand
ccaccuaccacgaagaucu

SEQ ID NO: 1104909 - RNA, 19 nt, Homo sapiens
  misc_RNA (1)...(19): siRNA sense strand
ucuccaccaucaaguacaa

SEQ ID NO: 1104910 - RNA, 19 nt, Homo sapiens
  misc_RNA (1)...(19): siRNA sense strand
ccgggaaggaguacauuau

SEQ ID NO: 1104911 - RNA, 19 nt, Homo sapiens
  misc_RNA (1)...(19): siRNA sense strand
ccauaagugucagcaaugc

SEQ ID NO: 1104912 - RNA, 19 nt, Homo sapiens
  misc_RNA (1)...(19): siRNA sense strand
gacgugacacugccaugug

SEQ ID NO: 1104913 - RNA, 19 nt, Homo sapiens
  misc_RNA (1)...(19): siRNA sense strand
uuugacgaguucaccauug

SEQ ID NO: 1104914 - RNA, 19 nt, Homo sapiens
  misc_RNA (1)...(19): siRNA sense strand
ccacagcuaucaccuuuga

SEQ ID NO: 1104915 - RNA, 19 nt, Homo sapiens
  misc_RNA (1)...(19): siRNA sense strand
cugcauggcuccaaaauua

SEQ ID NO: 1104916 - RNA, 19 nt, Homo sapiens
  misc_RNA (1)...(19): siRNA sense strand
cccaacaccuucaauguga

SEQ ID NO: 1104917 - RNA, 19 nt, Homo sapiens
  misc_RNA (1)...(19): siRNA sense strand
ggccugacccugagucuuu

SEQ ID NO: 1104918 - RNA, 19 nt, Homo sapiens
  misc_RNA (1)...(19): siRNA sense strand
uacaaggucuccauaagug

SEQ ID NO: 1104919 - RNA, 19 nt, Homo sapiens
  misc_RNA (1)...(19): siRNA sense strand
caagaaccgcugccacauu

SEQ ID NO: 1104920 - RNA, 19 nt, Homo sapiens
  misc_RNA (1)...(19): siRNA sense strand
guacaaggucuccauaagu

SEQ ID NO: 1104921 - RNA, 19 nt, Homo sapiens
  misc_RNA (1)...(19): siRNA sense strand
aagaaccgcugccacauuc

SEQ ID NO: 1104922 - RNA, 19 nt, Homo sapiens
  misc_RNA (1)...(19): siRNA sense strand
ugccacagcuaucaccuuu

SEQ ID NO: 1104923 - RNA, 19 nt, Homo sapiens
  misc_RNA (1)...(19): siRNA sense strand
gaagccugauccuccagaa

SEQ ID NO: 1104924 - RNA, 19 nt, Homo sapiens
  misc_RNA (1)...(19): siRNA sense strand
caaguacaaggucuccaua

SEQ ID NO: 1104925 - RNA, 19 nt, Homo sapiens
  misc_RNA (1)...(19): siRNA sense strand
ccaaaauuauggucuguga

SEQ ID NO: 1104926 - RNA, 19 nt, Homo sapiens
  misc_RNA (1)...(19): siRNA sense strand
ggacccagcccucaagaac

SEQ ID NO: 1104927 - RNA, 19 nt, Homo sapiens
  misc_RNA (1)...(19): siRNA sense strand
gaaggacccagcccucaag

SEQ ID NO: 1104928 - RNA, 19 nt, Homo sapiens
  misc_RNA (1)...(19): siRNA sense strand
ggaaggaguacauuaucca

SEQ ID NO: 1104929 - RNA, 19 nt, Homo sapiens
  misc_RNA (1)...(19): siRNA sense strand
ugacguggcggguaaaugg

SEQ ID NO: 1104930 - RNA, 19 nt, Homo sapiens
  misc_RNA (1)...(19): siRNA sense strand
cagcacacaccaucacaga

SEQ ID NO: 1104931 - RNA, 19 nt, Homo sapiens
  misc_RNA (1)...(19): siRNA sense strand
gggaaggaguacauuaucc

SEQ ID NO: 1104932 - RNA, 19 nt, Homo sapiens
  misc_RNA (1)...(19): siRNA sense strand
ccagcagucucuugaucug

SEQ ID NO: 1104933 - RNA, 19 nt, Homo sapiens
  misc_RNA (1)...(19): siRNA sense strand
caccuguucuccaccauca

SEQ ID NO: 1104934 - RNA, 19 nt, Homo sapiens
  misc_RNA (1)...(19): siRNA sense strand
uaucaccuuugacgaguuc

SEQ ID NO: 1104935 - RNA, 19 nt, Homo sapiens
  misc_RNA (1)...(19): siRNA sense strand
ccaccuacauucccaacac

SEQ ID NO: 1104936 - RNA, 19 nt, Homo sapiens
  misc_RNA (1)...(19): siRNA sense strand
gccgggaaggaguacauua

SEQ ID NO: 1104937 - RNA, 19 nt, Homo sapiens
  misc_RNA (1)...(19): siRNA sense strand
cuccauaagugucagcaau

SEQ ID NO: 1104938 - RNA, 19 nt, Homo sapiens
  misc_RNA (1)...(19): siRNA sense strand
ggccugcugugcugugcuu

SEQ ID NO: 1104939 - RNA, 19 nt, Homo sapiens
  misc_RNA (1)...(19): siRNA sense strand
caaugugacugugcugcau

SEQ ID NO: 1104940 - RNA, 19 nt, Homo sapiens
  misc_RNA (1)...(19): siRNA sense strand
ccacaaugccacagcuauc

SEQ ID NO: 1104941 - RNA, 19 nt, Homo sapiens
  misc_RNA (1)...(19): siRNA sense strand
aguacaaggucuccauaag

SEQ ID NO: 1104942 - RNA, 19 nt, Homo sapiens
  misc_RNA (1)...(19): siRNA sense strand
aaauuauggucugugagaa

SEQ ID NO: 1104943 - RNA, 19 nt, Homo sapiens
  misc_RNA (1)...(19): siRNA sense strand
gcacagcacacaccaucac

SEQ ID NO: 1104944 - RNA, 19 nt, Homo sapiens
  misc_RNA (1)...(19): siRNA sense strand
ccugggcucugacgugaca

SEQ ID NO: 1104945 - RNA, 19 nt, Homo sapiens
  misc_RNA (1)...(19): siRNA sense strand
cuaccacgaagaucuguga

SEQ ID NO: 1104946 - RNA, 19 nt, Homo sapiens
  misc_RNA (1)...(19): siRNA sense strand
ccaccuaccacgaagaucu

SEQ ID NO: 1104947 - RNA, 19 nt, Homo sapiens
  misc_RNA (1)...(19): siRNA sense strand
ucuccaccaucaaguacaa

SEQ ID NO: 1104948 - RNA, 19 nt, Homo sapiens
  misc_RNA (1)...(19): siRNA sense strand
ccgggaaggaguacauuau

SEQ ID NO: 1104949 - RNA, 19 nt, Homo sapiens
  misc_RNA (1)...(19): siRNA sense strand
ccauaagugucagcaaugc

SEQ ID NO: 1104950 - RNA, 19 nt, Homo sapiens
  misc_RNA (1)...(19): siRNA sense strand
gacgugacacugccaugug

SEQ ID NO: 1104951 - RNA, 19 nt, Homo sapiens
  misc_RNA (1)...(19): siRNA sense strand
uuugacgaguucaccauug

SEQ ID NO: 1104952 - RNA, 19 nt, Homo sapiens
  misc_RNA (1)...(19): siRNA sense strand
uaccauagcuuuacgaaua

SEQ ID NO: 1104953 - RNA, 19 nt, Homo sapiens
  misc_RNA (1)...(19): siRNA sense strand
gcacuugccuucauaauuc

SEQ ID NO: 1104954 - RNA, 19 nt, Homo sapiens
  misc_RNA (1)...(19): siRNA sense strand
ggacacugcuuguuuauag

SEQ ID NO: 1104955 - RNA, 19 nt, Homo sapiens
  misc_RNA (1)...(19): siRNA sense strand
aauaagcgcuuuccuaauu

SEQ ID NO: 1104956 - RNA, 19 nt, Homo sapiens
  misc_RNA (1)...(19): siRNA sense strand
gaaagauaguguucaguug

SEQ ID NO: 1104957 - RNA, 19 nt, Homo sapiens
  misc_RNA (1)...(19): siRNA sense strand
guacuucagucaaggauuu

SEQ ID NO: 1104958 - RNA, 19 nt, Homo sapiens
  misc_RNA (1)...(19): siRNA sense strand
gaguuacacuuaucccuua

SEQ ID NO: 1104959 - RNA, 19 nt, Homo sapiens
  misc_RNA (1)...(19): siRNA sense strand
ggacucugguucaauuuaa

SEQ ID NO: 1104960 - RNA, 19 nt, Homo sapiens
  misc_RNA (1)...(19): siRNA sense strand
caauaaaucuucagcuuca

SEQ ID NO: 1104961 - RNA, 19 nt, Homo sapiens
  misc_RNA (1)...(19): siRNA sense strand
ggaaacuguucucacuaua

SEQ ID NO: 1104962 - RNA, 19 nt, Homo sapiens
  misc_RNA (1)...(19): siRNA sense strand
agucaaggauuuccaguua

SEQ ID NO: 1104963 - RNA, 19 nt, Homo sapiens
  misc_RNA (1)...(19): siRNA sense strand
gaagaaaccagcucuaagu

SEQ ID NO: 1104964 - RNA, 19 nt, Homo sapiens
  misc_RNA (1)...(19): siRNA sense strand
gaaacuguucucacuauaa

SEQ ID NO: 1104965 - RNA, 19 nt, Homo sapiens
  misc_RNA (1)...(19): siRNA sense strand
aaagggaaauucaacauga

SEQ ID NO: 1104966 - RNA, 19 nt, Homo sapiens
  misc_RNA (1)...(19): siRNA sense strand
cacaaagaauucagguuua

SEQ ID NO: 1104967 - RNA, 19 nt, Homo sapiens
  misc_RNA (1)...(19): siRNA sense strand
ggaaagauaguguucaguu

SEQ ID NO: 1104968 - RNA, 19 nt, Homo sapiens
  misc_RNA (1)...(19): siRNA sense strand
ccacaaagaauucagguuu

SEQ ID NO: 1104969 - RNA, 19 nt, Homo sapiens
  misc_RNA (1)...(19): siRNA sense strand
uaucuuggguacucacuua

SEQ ID NO: 1104970 - RNA, 19 nt, Homo sapiens
  misc_RNA (1)...(19): siRNA sense strand
cagagagacugaggaguua

SEQ ID NO: 1104971 - RNA, 19 nt, Homo sapiens
  misc_RNA (1)...(19): siRNA sense strand
caaagucuaugaacagugu

SEQ ID NO: 1104972 - RNA, 19 nt, Homo sapiens
  misc_RNA (1)...(19): siRNA sense strand
uagcagaugugagacuuua

SEQ ID NO: 1104973 - RNA, 19 nt, Homo sapiens
  misc_RNA (1)...(19): siRNA sense strand
ucacuuacccuucuuuauu

SEQ ID NO: 1104974 - RNA, 19 nt, Homo sapiens
  misc_RNA (1)...(19): siRNA sense strand
gagaaagucuaccuuguac

SEQ ID NO: 1104975 - RNA, 19 nt, Homo sapiens
  misc_RNA (1)...(19): siRNA sense strand
ccaaagagauaccggauac

SEQ ID NO: 1104976 - RNA, 19 nt, Homo sapiens
  misc_RNA (1)...(19): siRNA sense strand
ugaugaagcagauguauuu

SEQ ID NO: 1104977 - RNA, 19 nt, Homo sapiens
  misc_RNA (1)...(19): siRNA sense strand
gaauuggaagucacauaua

SEQ ID NO: 1104978 - RNA, 19 nt, Homo sapiens
  misc_RNA (1)...(19): siRNA sense strand
gcaagcauuuacaagauuc

SEQ ID NO: 1104979 - RNA, 19 nt, Homo sapiens
  misc_RNA (1)...(19): siRNA sense strand
gcagauguauuuuaccuaa

SEQ ID NO: 1104980 - RNA, 19 nt, Homo sapiens
  misc_RNA (1)...(19): siRNA sense strand
caaacaccauggaaacugu

SEQ ID NO: 1104981 - RNA, 19 nt, Homo sapiens
  misc_RNA (1)...(19): siRNA sense strand
cccuuaaacugguuacaua

SEQ ID NO: 1104982 - RNA, 19 nt, Homo sapiens
  misc_RNA (1)...(19): siRNA sense strand
uguggacacugcuuguuua

SEQ ID NO: 1104983 - RNA, 19 nt, Homo sapiens
  misc_RNA (1)...(19): siRNA sense strand
gaguuugucucugaugauu

SEQ ID NO: 1104984 - RNA, 19 nt, Homo sapiens
  misc_RNA (1)...(19): siRNA sense strand
cauagagaguuucaugaug

SEQ ID NO: 1104985 - RNA, 19 nt, Homo sapiens
  misc_RNA (1)...(19): siRNA sense strand
gcacuucugucugcuguag

SEQ ID NO: 1104986 - RNA, 19 nt, Homo sapiens
  misc_RNA (1)...(19): siRNA sense strand
gaacagugucaaauacuca

SEQ ID NO: 1104987 - RNA, 19 nt, Homo sapiens
  misc_RNA (1)...(19): siRNA sense strand
gcuccugguucacauggua

SEQ ID NO: 1104988 - RNA, 19 nt, Homo sapiens
  misc_RNA (1)...(19): siRNA sense strand
gaaagagaaagucuaccuu

SEQ ID NO: 1104989 - RNA, 19 nt, Homo sapiens
  misc_RNA (1)...(19): siRNA sense strand
agagaaagucuaccuugua

SEQ ID NO: 1104990 - RNA, 19 nt, Homo sapiens
  misc_RNA (1)...(19): siRNA sense strand
uggaaacuguucucacuau

SEQ ID NO: 1104991 - RNA, 19 nt, Homo sapiens
  misc_RNA (1)...(19): siRNA sense strand
ucaaggauuuccaguuauc

SEQ ID NO: 1104992 - RNA, 19 nt, Homo sapiens
  misc_RNA (1)...(19): siRNA sense strand
aauggacucugguucaauu

SEQ ID NO: 1104993 - RNA, 19 nt, Homo sapiens
  misc_RNA (1)...(19): siRNA sense strand
guuugucucugaugauuga

SEQ ID NO: 1104994 - RNA, 19 nt, Homo sapiens
  misc_RNA (1)...(19): siRNA sense strand
ggcagucucuugaaguuuc

SEQ ID NO: 1104995 - RNA, 19 nt, Homo sapiens
  misc_RNA (1)...(19): siRNA sense strand
uaaacugguuacauagaga

SEQ ID NO: 1104996 - RNA, 19 nt, Homo sapiens
  misc_RNA (1)...(19): siRNA sense strand
gccacucuacuccuuauua

SEQ ID NO: 1104997 - RNA, 19 nt, Homo sapiens
  misc_RNA (1)...(19): siRNA sense strand
acacuuaucccuuaaucuu

SEQ ID NO: 1104998 - RNA, 19 nt, Homo sapiens
  misc_RNA (1)...(19): siRNA sense strand
cgaauuggaagucacauau

SEQ ID NO: 1104999 - RNA, 19 nt, Homo sapiens
  misc_RNA (1)...(19): siRNA sense strand
cauguucacugcccacuuc

SEQ ID NO: 1105000 - RNA, 19 nt, Homo sapiens
  misc_RNA (1)...(19): siRNA sense strand
ggaagaaaccagcucuaag

SEQ ID NO: 1105001 - RNA, 19 nt, Homo sapiens
  misc_RNA (1)...(19): siRNA sense strand
ccaauggacucugguucaa

SEQ ID NO: 1105002 - RNA, 19 nt, Homo sapiens
  misc_RNA (1)...(19): siRNA sense strand
gcucuaaguuuccuguuuu

SEQ ID NO: 1105003 - RNA, 19 nt, Homo sapiens
  misc_RNA (1)...(19): siRNA sense strand
cccaauaaaucuucagcuu

SEQ ID NO: 1105004 - RNA, 19 nt, Homo sapiens
  misc_RNA (1)...(19): siRNA sense strand
caacaaucccaauaaaucu

SEQ ID NO: 1105005 - RNA, 19 nt, Homo sapiens
  misc_RNA (1)...(19): siRNA sense strand
uaugaacagugucaaauac

SEQ ID NO: 1105006 - RNA, 19 nt, Homo sapiens
  misc_RNA (1)...(19): siRNA sense strand
gagaugccagccucacuuu

SEQ ID NO: 1105007 - RNA, 19 nt, Homo sapiens
  misc_RNA (1)...(19): siRNA sense strand
gguguucuguggauacuca

SEQ ID NO: 1105008 - RNA, 19 nt, Homo sapiens
  misc_RNA (1)...(19): siRNA sense strand
acagagagacugaggaguu

SEQ ID NO: 1105009 - RNA, 19 nt, Homo sapiens
  misc_RNA (1)...(19): siRNA sense strand
acaacaaucccaauaaauc

SEQ ID NO: 1105010 - RNA, 19 nt, Homo sapiens
  misc_RNA (1)...(19): siRNA sense strand
guuacaacaaucccaauaa

SEQ ID NO: 1105011 - RNA, 19 nt, Homo sapiens
  misc_RNA (1)...(19): siRNA sense strand
gagguacucuugaugucau

SEQ ID NO: 1105012 - RNA, 19 nt, Homo sapiens
  misc_RNA (1)...(19): siRNA sense strand
caucaacgagguacucuug

SEQ ID NO: 1105013 - RNA, 19 nt, Homo sapiens
  misc_RNA (1)...(19): siRNA sense strand
cauggaaacuguucucacu

SEQ ID NO: 1105014 - RNA, 19 nt, Homo sapiens
  misc_RNA (1)...(19): siRNA sense strand
ccagaacccuuacaaacac

SEQ ID NO: 1105015 - RNA, 19 nt, Homo sapiens
  misc_RNA (1)...(19): siRNA sense strand
gaauggacagagagacuga

SEQ ID NO: 1105016 - RNA, 19 nt, Homo sapiens
  misc_RNA (1)...(19): siRNA sense strand
auucauggcugcuaucuag

SEQ ID NO: 1105017 - RNA, 19 nt, Homo sapiens
  misc_RNA (1)...(19): siRNA sense strand
cuaugaacagugucaaaua

SEQ ID NO: 1105018 - RNA, 19 nt, Homo sapiens
  misc_RNA (1)...(19): siRNA sense strand
agauaaagcugcgaaagag

SEQ ID NO: 1105019 - RNA, 19 nt, Homo sapiens
  misc_RNA (1)...(19): siRNA sense strand
gacugaggaguuacacuua

SEQ ID NO: 1105020 - RNA, 19 nt, Homo sapiens
  misc_RNA (1)...(19): siRNA sense strand
guaccagaacccuuacaaa

SEQ ID NO: 1105021 - RNA, 19 nt, Homo sapiens
  misc_RNA (1)...(19): siRNA sense strand
auaagcgcuuuccuaauuu

SEQ ID NO: 1105022 - RNA, 19 nt, Homo sapiens
  misc_RNA (1)...(19): siRNA sense strand
uaucugcucuuguuuacca

SEQ ID NO: 1105023 - RNA, 19 nt, Homo sapiens
  misc_RNA (1)...(19): siRNA sense strand
guucuguggauacucauua

SEQ ID NO: 1105024 - RNA, 19 nt, Homo sapiens
  misc_RNA (1)...(19): siRNA sense strand
cacuuacccuucuuuauuc

SEQ ID NO: 1105025 - RNA, 19 nt, Homo sapiens
  misc_RNA (1)...(19): siRNA sense strand
ccaguuaucuuggguacuc

SEQ ID NO: 1105026 - RNA, 19 nt, Homo sapiens
  misc_RNA (1)...(19): siRNA sense strand
ggagaugccagccucacuu

SEQ ID NO: 1105027 - RNA, 19 nt, Homo sapiens
  misc_RNA (1)...(19): siRNA sense strand
gaagguucaaagucuauga

SEQ ID NO: 1105028 - RNA, 19 nt, Homo sapiens
  misc_RNA (1)...(19): siRNA sense strand
ccuuugcucuucagacauu

SEQ ID NO: 1105029 - RNA, 19 nt, Homo sapiens
  misc_RNA (1)...(19): siRNA sense strand
ucuaugaacggaaguuaaa

SEQ ID NO: 1105030 - RNA, 19 nt, Homo sapiens
  misc_RNA (1)...(19): siRNA sense strand
gccagagggucgaauugga

SEQ ID NO: 1105031 - RNA, 19 nt, Homo sapiens
  misc_RNA (1)...(19): siRNA sense strand
aagagaaagucuaccuugu

SEQ ID NO: 1105032 - RNA, 19 nt, Homo sapiens
  misc_RNA (1)...(19): siRNA sense strand
caucauugccuacucacuu

SEQ ID NO: 1105033 - RNA, 19 nt, Homo sapiens
  misc_RNA (1)...(19): siRNA sense strand
ccuguaggcuuuguuacuu

SEQ ID NO: 1105034 - RNA, 19 nt, Homo sapiens
  misc_RNA (1)...(19): siRNA sense strand
cugguuacauagagaguuu

SEQ ID NO: 1105035 - RNA, 19 nt, Homo sapiens
  misc_RNA (1)...(19): siRNA sense strand
ccacuucccaugagauuuc

SEQ ID NO: 1105036 - RNA, 19 nt, Homo sapiens
  misc_RNA (1)...(19): siRNA sense strand
ccauggcacugguacuuca

SEQ ID NO: 1105037 - RNA, 19 nt, Homo sapiens
  misc_RNA (1)...(19): siRNA sense strand
ccacucuacuccuuauuac

SEQ ID NO: 1105038 - RNA, 19 nt, Homo sapiens
  misc_RNA (1)...(19): siRNA sense strand
uuacauagagaguuucaug

SEQ ID NO: 1105039 - RNA, 19 nt, Homo sapiens
  misc_RNA (1)...(19): siRNA sense strand
gauaaagcugcgaaagaga

SEQ ID NO: 1105040 - RNA, 19 nt, Homo sapiens
  misc_RNA (1)...(19): siRNA sense strand
uaaaucccuuaaacugguu

SEQ ID NO: 1105041 - RNA, 19 nt, Homo sapiens
  misc_RNA (1)...(19): siRNA sense strand
aagauaaagcugcgaaaga

SEQ ID NO: 1105042 - RNA, 19 nt, Homo sapiens
  misc_RNA (1)...(19): siRNA sense strand
guggacaccuuugcucuuc

SEQ ID NO: 1105043 - RNA, 19 nt, Homo sapiens
  misc_RNA (1)...(19): siRNA sense strand
uuaccuaaaucccuuaaac

SEQ ID NO: 1105044 - RNA, 19 nt, Homo sapiens
  misc_RNA (1)...(19): siRNA sense strand
caacgagguacucuugaug

SEQ ID NO: 1105045 - RNA, 19 nt, Homo sapiens
  misc_RNA (1)...(19): siRNA sense strand
guacucacuuacccuucuu

SEQ ID NO: 1105046 - RNA, 19 nt, Homo sapiens
  misc_RNA (1)...(19): siRNA sense strand
caccuuugcucuucagaca

SEQ ID NO: 1105047 - RNA, 19 nt, Homo sapiens
  misc_RNA (1)...(19): siRNA sense strand
gagacuuuacucauuaaug

SEQ ID NO: 1105048 - RNA, 19 nt, Homo sapiens
  misc_RNA (1)...(19): siRNA sense strand
ccagagggucgaauuggaa

SEQ ID NO: 1105049 - RNA, 19 nt, Homo sapiens
  misc_RNA (1)...(19): siRNA sense strand
gcgcuuuccuaauuucaag

SEQ ID NO: 1105050 - RNA, 19 nt, Homo sapiens
  misc_RNA (1)...(19): siRNA sense strand
uaagcgcuuuccuaauuuc

SEQ ID NO: 1105051 - RNA, 19 nt, Homo sapiens
  misc_RNA (1)...(19): siRNA sense strand
gcaagauaaagcugcgaaa

SEQ ID NO: 1105052 - RNA, 19 nt, Homo sapiens
  misc_RNA (1)...(19): siRNA sense strand
caagacagcucaacagauu

SEQ ID NO: 1105053 - RNA, 19 nt, Homo sapiens
  misc_RNA (1)...(19): siRNA sense strand
gcauggaucucccgaaauu

SEQ ID NO: 1105054 - RNA, 19 nt, Homo sapiens
  misc_RNA (1)...(19): siRNA sense strand
ggacauggccuccaaugaa

SEQ ID NO: 1105055 - RNA, 19 nt, Homo sapiens
  misc_RNA (1)...(19): siRNA sense strand
gcaaagagaagaaggagaa

SEQ ID NO: 1105056 - RNA, 19 nt, Homo sapiens
  misc_RNA (1)...(19): siRNA sense strand
gcucagagaacgccaauga

SEQ ID NO: 1105057 - RNA, 19 nt, Homo sapiens
  misc_RNA (1)...(19): siRNA sense strand
cagcauggaucucccgaaa

SEQ ID NO: 1105058 - RNA, 19 nt, Homo sapiens
  misc_RNA (1)...(19): siRNA sense strand
uagaagcacuagagaagaa

SEQ ID NO: 1105059 - RNA, 19 nt, Homo sapiens
  misc_RNA (1)...(19): siRNA sense strand
ugacaggacuggccgcuau

SEQ ID NO: 1105060 - RNA, 19 nt, Homo sapiens
  misc_RNA (1)...(19): siRNA sense strand
ggacauggacuaccguuca

SEQ ID NO: 1105061 - RNA, 19 nt, Homo sapiens
  misc_RNA (1)...(19): siRNA sense strand
agaccggccucuacuauga

SEQ ID NO: 1105062 - RNA, 19 nt, Homo sapiens
  misc_RNA (1)...(19): siRNA sense strand
agaaugacauggagcaaau

SEQ ID NO: 1105063 - RNA, 19 nt, Homo sapiens
  misc_RNA (1)...(19): siRNA sense strand
ccacacagcaccauggauu

SEQ ID NO: 1105064 - RNA, 19 nt, Homo sapiens
  misc_RNA (1)...(19): siRNA sense strand
gcaugacuaugacgacuca

SEQ ID NO: 1105065 - RNA, 19 nt, Homo sapiens
  misc_RNA (1)...(19): siRNA sense strand
gcaagaagcagggcauugu

SEQ ID NO: 1105066 - RNA, 19 nt, Homo sapiens
  misc_RNA (1)...(19): siRNA sense strand
ggcagaagcuggccugucu

SEQ ID NO: 1105067 - RNA, 19 nt, Homo sapiens
  misc_RNA (1)...(19): siRNA sense strand
ggcaagaccaucaauguug

SEQ ID NO: 1105068 - RNA, 19 nt, Homo sapiens
  misc_RNA (1)...(19): siRNA sense strand
gcuaugccauccucgagaa

SEQ ID NO: 1105069 - RNA, 19 nt, Homo sapiens
  misc_RNA (1)...(19): siRNA sense strand
ccgcugugcucaaaucuga

SEQ ID NO: 1105070 - RNA, 19 nt, Homo sapiens
  misc_RNA (1)...(19): siRNA sense strand
uggcaucacuggaaccaaa

SEQ ID NO: 1105071 - RNA, 19 nt, Homo sapiens
  misc_RNA (1)...(19): siRNA sense strand
guucauauccucgcgagua

SEQ ID NO: 1105072 - RNA, 19 nt, Homo sapiens
  misc_RNA (1)...(19): siRNA sense strand
gccaacagccagucguaua

SEQ ID NO: 1105073 - RNA, 19 nt, Homo sapiens
  misc_RNA (1)...(19): siRNA sense strand
gacauggccuccaaugaag

SEQ ID NO: 1105074 - RNA, 19 nt, Homo sapiens
  misc_RNA (1)...(19): siRNA sense strand
gcugggcagugacaacauu

SEQ ID NO: 1105075 - RNA, 19 nt, Homo sapiens
  misc_RNA (1)...(19): siRNA sense strand
caagaagcagggcauugua

SEQ ID NO: 1105076 - RNA, 19 nt, Homo sapiens
  misc_RNA (1)...(19): siRNA sense strand
gaugagggcuauggcaaca

SEQ ID NO: 1105077 - RNA, 19 nt, Homo sapiens
  misc_RNA (1)...(19): siRNA sense strand
cgaaggagggcaaagagaa

SEQ ID NO: 1105078 - RNA, 19 nt, Homo sapiens
  misc_RNA (1)...(19): siRNA sense strand
ucucagggcuccacaagca

SEQ ID NO: 1105079 - RNA, 19 nt, Homo sapiens
  misc_RNA (1)...(19): siRNA sense strand
aaucagcacucccucaaca

SEQ ID NO: 1105080 - RNA, 19 nt, Homo sapiens
  misc_RNA (1)...(19): siRNA sense strand
gaggacuggcugugcaaua

SEQ ID NO: 1105081 - RNA, 19 nt, Homo sapiens
  misc_RNA (1)...(19): siRNA sense strand
cgagcccacuugucagaaa

SEQ ID NO: 1105082 - RNA, 19 nt, Homo sapiens
  misc_RNA (1)...(19): siRNA sense strand
gagaagcacaagaccaaga

SEQ ID NO: 1105083 - RNA, 19 nt, Homo sapiens
  misc_RNA (1)...(19): siRNA sense strand
gccagaaggugucgaugca

SEQ ID NO: 1105084 - RNA, 19 nt, Homo sapiens
  misc_RNA (1)...(19): siRNA sense strand
aggacuggcugugcaauaa

SEQ ID NO: 1105085 - RNA, 19 nt, Homo sapiens
  misc_RNA (1)...(19): siRNA sense strand
gggagaggcggaccuaugu

SEQ ID NO: 1105086 - RNA, 19 nt, Homo sapiens
  misc_RNA (1)...(19): siRNA sense strand
acauggagcaaaugaagua

SEQ ID NO: 1105087 - RNA, 19 nt, Homo sapiens
  misc_RNA (1)...(19): siRNA sense strand
caagggcccuggcaucacu

SEQ ID NO: 1105088 - RNA, 19 nt, Homo sapiens
  misc_RNA (1)...(19): siRNA sense strand
caacgugcgcgucauaaag

SEQ ID NO: 1105089 - RNA, 19 nt, Homo sapiens
  misc_RNA (1)...(19): siRNA sense strand
gcagcugaacgcagagaaa

SEQ ID NO: 1105090 - RNA, 19 nt, Homo sapiens
  misc_RNA (1)...(19): siRNA sense strand
ggacuaccguucauauccu

SEQ ID NO: 1105091 - RNA, 19 nt, Homo sapiens
  misc_RNA (1)...(19): siRNA sense strand
ggagucagccacugcagau

SEQ ID NO: 1105092 - RNA, 19 nt, Homo sapiens
  misc_RNA (1)...(19): siRNA sense strand
gaaggagggcaaagagaag

SEQ ID NO: 1105093 - RNA, 19 nt, Homo sapiens
  misc_RNA (1)...(19): siRNA sense strand
gacaagcagacccaacuga

SEQ ID NO: 1105094 - RNA, 19 nt, Homo sapiens
  misc_RNA (1)...(19): siRNA sense strand
gagaggcggaccuauguuc

SEQ ID NO: 1105095 - RNA, 19 nt, Homo sapiens
  misc_RNA (1)...(19): siRNA sense strand
ggagggcaagcaugacuau

SEQ ID NO: 1105096 - RNA, 19 nt, Homo sapiens
  misc_RNA (1)...(19): siRNA sense strand
gaugagaccuccggcuacu

SEQ ID NO: 1105097 - RNA, 19 nt, Homo sapiens
  misc_RNA (1)...(19): siRNA sense strand
cuaccuaccaguacgauga

SEQ ID NO: 1105098 - RNA, 19 nt, Homo sapiens
  misc_RNA (1)...(19): siRNA sense strand
ugaaggcagucgcaucagu

SEQ ID NO: 1105099 - RNA, 19 nt, Homo sapiens
  misc_RNA (1)...(19): siRNA sense strand
ucagagaacgccaaugaca

SEQ ID NO: 1105100 - RNA, 19 nt, Homo sapiens
  misc_RNA (1)...(19): siRNA sense strand
cucaacagauugccaagga

SEQ ID NO: 1105101 - RNA, 19 nt, Homo sapiens
  misc_RNA (1)...(19): siRNA sense strand
ccaacaggaugagggcuau

SEQ ID NO: 1105102 - RNA, 19 nt, Homo sapiens
  misc_RNA (1)...(19): siRNA sense strand
gacauggacuaccguucau

SEQ ID NO: 1105103 - RNA, 19 nt, Homo sapiens
  misc_RNA (1)...(19): siRNA sense strand
gggcaagcaugacuaugac

SEQ ID NO: 1105104 - RNA, 19 nt, Homo sapiens
  misc_RNA (1)...(19): siRNA sense strand
gcuacuaccaacaggauga

SEQ ID NO: 1105105 - RNA, 19 nt, Homo sapiens
  misc_RNA (1)...(19): siRNA sense strand
gccaggagggcaagcauga

SEQ ID NO: 1105106 - RNA, 19 nt, Homo sapiens
  misc_RNA (1)...(19): siRNA sense strand
ccagaccggccucuacuau

SEQ ID NO: 1105107 - RNA, 19 nt, Homo sapiens
  misc_RNA (1)...(19): siRNA sense strand
ccaaucagcacucccucaa

SEQ ID NO: 1105108 - RNA, 19 nt, Homo sapiens
  misc_RNA (1)...(19): siRNA sense strand
ugacauggagcaaaugaag

SEQ ID NO: 1105109 - RNA, 19 nt, Homo sapiens
  misc_RNA (1)...(19): siRNA sense strand
gagaagaagggagcacuag

SEQ ID NO: 1105110 - RNA, 19 nt, Homo sapiens
  misc_RNA (1)...(19): siRNA sense strand
ccaagcccaagaucaauga

SEQ ID NO: 1105111 - RNA, 19 nt, Homo sapiens
  misc_RNA (1)...(19): siRNA sense strand
cgacuacagcuacuaccaa

SEQ ID NO: 1105112 - RNA, 19 nt, Homo sapiens
  misc_RNA (1)...(19): siRNA sense strand
aagaagcagggcauuguaa

SEQ ID NO: 1105113 - RNA, 19 nt, Homo sapiens
  misc_RNA (1)...(19): siRNA sense strand
agaagaaggagaagcacaa

SEQ ID NO: 1105114 - RNA, 19 nt, Homo sapiens
  misc_RNA (1)...(19): siRNA sense strand
cgacggacauaaggagaca

SEQ ID NO: 1105115 - RNA, 19 nt, Homo sapiens
  misc_RNA (1)...(19): siRNA sense strand
gaccuccggcuacuacuau

SEQ ID NO: 1105116 - RNA, 19 nt, Homo sapiens
  misc_RNA (1)...(19): siRNA sense strand
ccaacgugcgcgucauaaa

SEQ ID NO: 1105117 - RNA, 19 nt, Homo sapiens
  misc_RNA (1)...(19): siRNA sense strand
gaagaaugacauggagcaa

SEQ ID NO: 1105118 - RNA, 19 nt, Homo sapiens
  misc_RNA (1)...(19): siRNA sense strand
uagagaagaaugacaugga

SEQ ID NO: 1105119 - RNA, 19 nt, Homo sapiens
  misc_RNA (1)...(19): siRNA sense strand
cgagaagaagggagcacua

SEQ ID NO: 1105120 - RNA, 19 nt, Homo sapiens
  misc_RNA (1)...(19): siRNA sense strand
ucagcucccugcgagauga

SEQ ID NO: 1105121 - RNA, 19 nt, Homo sapiens
  misc_RNA (1)...(19): siRNA sense strand
gacuggcugugcaauaagu

SEQ ID NO: 1105122 - RNA, 19 nt, Homo sapiens
  misc_RNA (1)...(19): siRNA sense strand
gggacauggccuccaauga

SEQ ID NO: 1105123 - RNA, 19 nt, Homo sapiens
  misc_RNA (1)...(19): siRNA sense strand
ggacaagcagacccaacug

SEQ ID NO: 1105124 - RNA, 19 nt, Homo sapiens
  misc_RNA (1)...(19): siRNA sense strand
uggcaucuaccaacaauca

SEQ ID NO: 1105125 - RNA, 19 nt, Homo sapiens
  misc_RNA (1)...(19): siRNA sense strand
gcacuagagaagaaugaca

SEQ ID NO: 1105126 - RNA, 19 nt, Homo sapiens
  misc_RNA (1)...(19): siRNA sense strand
ccagucguauaccaucaug

SEQ ID NO: 1105127 - RNA, 19 nt, Homo sapiens
  misc_RNA (1)...(19): siRNA sense strand
acaagcagacccaacugaa

SEQ ID NO: 1105128 - RNA, 19 nt, Homo sapiens
  misc_RNA (1)...(19): siRNA sense strand
acaaggagacacugcacaa

SEQ ID NO: 1105129 - RNA, 19 nt, Homo sapiens
  misc_RNA (1)...(19): siRNA sense strand
gaagcacuagagaagaaug

SEQ ID NO: 1105130 - RNA, 19 nt, Homo sapiens
  misc_RNA (1)...(19): siRNA sense strand
ucccgaaauuggccaguga

SEQ ID NO: 1105131 - RNA, 19 nt, Homo sapiens
  misc_RNA (1)...(19): siRNA sense strand
ccaagacagcucaacagau

SEQ ID NO: 1105132 - RNA, 19 nt, Homo sapiens
  misc_RNA (1)...(19): siRNA sense strand
gaagaaggagaagcacaag

SEQ ID NO: 1105133 - RNA, 19 nt, Homo sapiens
  misc_RNA (1)...(19): siRNA sense strand
ggagaggcggaccuauguu

SEQ ID NO: 1105134 - RNA, 19 nt, Homo sapiens
  misc_RNA (1)...(19): siRNA sense strand
ccuggcaucuaccaacaau

SEQ ID NO: 1105135 - RNA, 19 nt, Homo sapiens
  misc_RNA (1)...(19): siRNA sense strand
cggcaagaccaucaauguu

SEQ ID NO: 1105136 - RNA, 19 nt, Homo sapiens
  misc_RNA (1)...(19): siRNA sense strand
cgucgaguuuagucacuug

SEQ ID NO: 1105137 - RNA, 19 nt, Homo sapiens
  misc_RNA (1)...(19): siRNA sense strand
cauggacuaccguucauau

SEQ ID NO: 1105138 - RNA, 19 nt, Homo sapiens
  misc_RNA (1)...(19): siRNA sense strand
aaggagacacugcacaaga

SEQ ID NO: 1105139 - RNA, 19 nt, Homo sapiens
  misc_RNA (1)...(19): siRNA sense strand
gcacccaccacucacuauc

SEQ ID NO: 1105140 - RNA, 19 nt, Homo sapiens
  misc_RNA (1)...(19): siRNA sense strand
ggagacacugcacaagaca

SEQ ID NO: 1105141 - RNA, 19 nt, Homo sapiens
  misc_RNA (1)...(19): siRNA sense strand
aaugaaggcagucgcauca

SEQ ID NO: 1105142 - RNA, 19 nt, Homo sapiens
  misc_RNA (1)...(19): siRNA sense strand
agggcaagcaugacuauga

SEQ ID NO: 1105143 - RNA, 19 nt, Homo sapiens
  misc_RNA (1)...(19): siRNA sense strand
gcaacagccagggcacaga

SEQ ID NO: 1105144 - RNA, 19 nt, Homo sapiens
  misc_RNA (1)...(19): siRNA sense strand
gaccaagacagcucaacag

SEQ ID NO: 1105145 - RNA, 19 nt, Homo sapiens
  misc_RNA (1)...(19): siRNA sense strand
cggcugaugcggaacaaau

SEQ ID NO: 1105146 - RNA, 19 nt, Homo sapiens
  misc_RNA (1)...(19): siRNA sense strand
ccaacagccagucguauac

SEQ ID NO: 1105147 - RNA, 19 nt, Homo sapiens
  misc_RNA (1)...(19): siRNA sense strand
cugugucgaugcaggcuuu

SEQ ID NO: 1105148 - RNA, 19 nt, Homo sapiens
  misc_RNA (1)...(19): siRNA sense strand
cacugcagaugcuggcuau

SEQ ID NO: 1105149 - RNA, 19 nt, Homo sapiens
  misc_RNA (1)...(19): siRNA sense strand
ucaccucaaccgaguccua

SEQ ID NO: 1105150 - RNA, 19 nt, Homo sapiens
  misc_RNA (1)...(19): siRNA sense strand
aaacgagcuagaagcacua

SEQ ID NO: 1105151 - RNA, 19 nt, Homo sapiens
  misc_RNA (1)...(19): siRNA sense strand
ucagggcuccacaagcaaa

SEQ ID NO: 1105152 - RNA, 19 nt, Homo sapiens
  misc_RNA (1)...(19): siRNA sense strand
caagacagcucaacagauu

SEQ ID NO: 1105153 - RNA, 19 nt, Homo sapiens
  misc_RNA (1)...(19): siRNA sense strand
gcauggaucucccgaaauu

SEQ ID NO: 1105154 - RNA, 19 nt, Homo sapiens
  misc_RNA (1)...(19): siRNA sense strand
ggacauggccuccaaugaa

SEQ ID NO: 1105155 - RNA, 19 nt, Homo sapiens
  misc_RNA (1)...(19): siRNA sense strand
gcaaagagaagaaggagaa

SEQ ID NO: 1105156 - RNA, 19 nt, Homo sapiens
  misc_RNA (1)...(19): siRNA sense strand
gcucagagaacgccaauga

SEQ ID NO: 1105157 - RNA, 19 nt, Homo sapiens
  misc_RNA (1)...(19): siRNA sense strand
cagcauggaucucccgaaa

SEQ ID NO: 1105158 - RNA, 19 nt, Homo sapiens
  misc_RNA (1)...(19): siRNA sense strand
uagaagcacuagagaagaa

SEQ ID NO: 1105159 - RNA, 19 nt, Homo sapiens
  misc_RNA (1)...(19): siRNA sense strand
ugacaggacuggccgcuau

SEQ ID NO: 1105160 - RNA, 19 nt, Homo sapiens
  misc_RNA (1)...(19): siRNA sense strand
ggacauggacuaccguuca

SEQ ID NO: 1105161 - RNA, 19 nt, Homo sapiens
  misc_RNA (1)...(19): siRNA sense strand
agaccggccucuacuauga

SEQ ID NO: 1105162 - RNA, 19 nt, Homo sapiens
  misc_RNA (1)...(19): siRNA sense strand
agaaugacauggagcaaau

SEQ ID NO: 1105163 - RNA, 19 nt, Homo sapiens
  misc_RNA (1)...(19): siRNA sense strand
ccacacagcaccauggauu

SEQ ID NO: 1105164 - RNA, 19 nt, Homo sapiens
  misc_RNA (1)...(19): siRNA sense strand
gcaugacuaugacgacuca

SEQ ID NO: 1105165 - RNA, 19 nt, Homo sapiens
  misc_RNA (1)...(19): siRNA sense strand
gcaagaagcagggcauugu

SEQ ID NO: 1105166 - RNA, 19 nt, Homo sapiens
  misc_RNA (1)...(19): siRNA sense strand
ggcagaagcuggccugucu

SEQ ID NO: 1105167 - RNA, 19 nt, Homo sapiens
  misc_RNA (1)...(19): siRNA sense strand
ggcaagaccaucaauguug

SEQ ID NO: 1105168 - RNA, 19 nt, Homo sapiens
  misc_RNA (1)...(19): siRNA sense strand
gcuaugccauccucgagaa

SEQ ID NO: 1105169 - RNA, 19 nt, Homo sapiens
  misc_RNA (1)...(19): siRNA sense strand
ccgcugugcucaaaucuga

SEQ ID NO: 1105170 - RNA, 19 nt, Homo sapiens
  misc_RNA (1)...(19): siRNA sense strand
uggcaucacuggaaccaaa

SEQ ID NO: 1105171 - RNA, 19 nt, Homo sapiens
  misc_RNA (1)...(19): siRNA sense strand
guucauauccucgcgagua

SEQ ID NO: 1105172 - RNA, 19 nt, Homo sapiens
  misc_RNA (1)...(19): siRNA sense strand
gccaacagccagucguaua

SEQ ID NO: 1105173 - RNA, 19 nt, Homo sapiens
  misc_RNA (1)...(19): siRNA sense strand
gacauggccuccaaugaag

SEQ ID NO: 1105174 - RNA, 19 nt, Homo sapiens
  misc_RNA (1)...(19): siRNA sense strand
gcugggcagugacaacauu

SEQ ID NO: 1105175 - RNA, 19 nt, Homo sapiens
  misc_RNA (1)...(19): siRNA sense strand
caagaagcagggcauugua

SEQ ID NO: 1105176 - RNA, 19 nt, Homo sapiens
  misc_RNA (1)...(19): siRNA sense strand
gaugagggcuauggcaaca

SEQ ID NO: 1105177 - RNA, 19 nt, Homo sapiens
  misc_RNA (1)...(19): siRNA sense strand
cgaaggagggcaaagagaa

SEQ ID NO: 1105178 - RNA, 19 nt, Homo sapiens
  misc_RNA (1)...(19): siRNA sense strand
ucucagggcuccacaagca

SEQ ID NO: 1105179 - RNA, 19 nt, Homo sapiens
  misc_RNA (1)...(19): siRNA sense strand
aaucagcacucccucaaca

SEQ ID NO: 1105180 - RNA, 19 nt, Homo sapiens
  misc_RNA (1)...(19): siRNA sense strand
gaggacuggcugugcaaua

SEQ ID NO: 1105181 - RNA, 19 nt, Homo sapiens
  misc_RNA (1)...(19): siRNA sense strand
cgagcccacuugucagaaa

SEQ ID NO: 1105182 - RNA, 19 nt, Homo sapiens
  misc_RNA (1)...(19): siRNA sense strand
gagaagcacaagaccaaga

SEQ ID NO: 1105183 - RNA, 19 nt, Homo sapiens
  misc_RNA (1)...(19): siRNA sense strand
gccagaaggugucgaugca

SEQ ID NO: 1105184 - RNA, 19 nt, Homo sapiens
  misc_RNA (1)...(19): siRNA sense strand
aggacuggcugugcaauaa

SEQ ID NO: 1105185 - RNA, 19 nt, Homo sapiens
  misc_RNA (1)...(19): siRNA sense strand
gggagaggcggaccuaugu

SEQ ID NO: 1105186 - RNA, 19 nt, Homo sapiens
  misc_RNA (1)...(19): siRNA sense strand
acauggagcaaaugaagua

SEQ ID NO: 1105187 - RNA, 19 nt, Homo sapiens
  misc_RNA (1)...(19): siRNA sense strand
caagggcccuggcaucacu

SEQ ID NO: 1105188 - RNA, 19 nt, Homo sapiens
  misc_RNA (1)...(19): siRNA sense strand
caacgugcgcgucauaaag

SEQ ID NO: 1105189 - RNA, 19 nt, Homo sapiens
  misc_RNA (1)...(19): siRNA sense strand
gcagcugaacgcagagaaa

SEQ ID NO: 1105190 - RNA, 19 nt, Homo sapiens
  misc_RNA (1)...(19): siRNA sense strand
ggacuaccguucauauccu

SEQ ID NO: 1105191 - RNA, 19 nt, Homo sapiens
  misc_RNA (1)...(19): siRNA sense strand
ggagucagccacugcagau

SEQ ID NO: 1105192 - RNA, 19 nt, Homo sapiens
  misc_RNA (1)...(19): siRNA sense strand
gaaggagggcaaagagaag

SEQ ID NO: 1105193 - RNA, 19 nt, Homo sapiens
  misc_RNA (1)...(19): siRNA sense strand
gacaagcagacccaacuga

SEQ ID NO: 1105194 - RNA, 19 nt, Homo sapiens
  misc_RNA (1)...(19): siRNA sense strand
gagaggcggaccuauguuc

SEQ ID NO: 1105195 - RNA, 19 nt, Homo sapiens
  misc_RNA (1)...(19): siRNA sense strand
ggagggcaagcaugacuau

SEQ ID NO: 1105196 - RNA, 19 nt, Homo sapiens
  misc_RNA (1)...(19): siRNA sense strand
gaugagaccuccggcuacu

SEQ ID NO: 1105197 - RNA, 19 nt, Homo sapiens
  misc_RNA (1)...(19): siRNA sense strand
cuaccuaccaguacgauga

SEQ ID NO: 1105198 - RNA, 19 nt, Homo sapiens
  misc_RNA (1)...(19): siRNA sense strand
ugaaggcagucgcaucagu

SEQ ID NO: 1105199 - RNA, 19 nt, Homo sapiens
  misc_RNA (1)...(19): siRNA sense strand
ucagagaacgccaaugaca

SEQ ID NO: 1105200 - RNA, 19 nt, Homo sapiens
  misc_RNA (1)...(19): siRNA sense strand
cucaacagauugccaagga

SEQ ID NO: 1105201 - RNA, 19 nt, Homo sapiens
  misc_RNA (1)...(19): siRNA sense strand
ccaacaggaugagggcuau

SEQ ID NO: 1105202 - RNA, 19 nt, Homo sapiens
  misc_RNA (1)...(19): siRNA sense strand
gacauggacuaccguucau

SEQ ID NO: 1105203 - RNA, 19 nt, Homo sapiens
  misc_RNA (1)...(19): siRNA sense strand
gggcaagcaugacuaugac

SEQ ID NO: 1105204 - RNA, 19 nt, Homo sapiens
  misc_RNA (1)...(19): siRNA sense strand
gcuacuaccaacaggauga

SEQ ID NO: 1105205 - RNA, 19 nt, Homo sapiens
  misc_RNA (1)...(19): siRNA sense strand
gccaggagggcaagcauga

SEQ ID NO: 1105206 - RNA, 19 nt, Homo sapiens
  misc_RNA (1)...(19): siRNA sense strand
ccagaccggccucuacuau

SEQ ID NO: 1105207 - RNA, 19 nt, Homo sapiens
  misc_RNA (1)...(19): siRNA sense strand
ccaaucagcacucccucaa

SEQ ID NO: 1105208 - RNA, 19 nt, Homo sapiens
  misc_RNA (1)...(19): siRNA sense strand
ugacauggagcaaaugaag

SEQ ID NO: 1105209 - RNA, 19 nt, Homo sapiens
  misc_RNA (1)...(19): siRNA sense strand
gagaagaagggagcacuag

SEQ ID NO: 1105210 - RNA, 19 nt, Homo sapiens
  misc_RNA (1)...(19): siRNA sense strand
ccaagcccaagaucaauga

SEQ ID NO: 1105211 - RNA, 19 nt, Homo sapiens
  misc_RNA (1)...(19): siRNA sense strand
cgacuacagcuacuaccaa

SEQ ID NO: 1105212 - RNA, 19 nt, Homo sapiens
  misc_RNA (1)...(19): siRNA sense strand
aagaagcagggcauuguaa

SEQ ID NO: 1105213 - RNA, 19 nt, Homo sapiens
  misc_RNA (1)...(19): siRNA sense strand
agaagaaggagaagcacaa

SEQ ID NO: 1105214 - RNA, 19 nt, Homo sapiens
  misc_RNA (1)...(19): siRNA sense strand
cgacggacauaaggagaca

SEQ ID NO: 1105215 - RNA, 19 nt, Homo sapiens
  misc_RNA (1)...(19): siRNA sense strand
gaccuccggcuacuacuau

SEQ ID NO: 1105216 - RNA, 19 nt, Homo sapiens
  misc_RNA (1)...(19): siRNA sense strand
ccaacgugcgcgucauaaa

SEQ ID NO: 1105217 - RNA, 19 nt, Homo sapiens
  misc_RNA (1)...(19): siRNA sense strand
gaagaaugacauggagcaa

SEQ ID NO: 1105218 - RNA, 19 nt, Homo sapiens
  misc_RNA (1)...(19): siRNA sense strand
uagagaagaaugacaugga

SEQ ID NO: 1105219 - RNA, 19 nt, Homo sapiens
  misc_RNA (1)...(19): siRNA sense strand
cgagaagaagggagcacua

SEQ ID NO: 1105220 - RNA, 19 nt, Homo sapiens
  misc_RNA (1)...(19): siRNA sense strand
ucagcucccugcgagauga

SEQ ID NO: 1105221 - RNA, 19 nt, Homo sapiens
  misc_RNA (1)...(19): siRNA sense strand
gacuggcugugcaauaagu

SEQ ID NO: 1105222 - RNA, 19 nt, Homo sapiens
  misc_RNA (1)...(19): siRNA sense strand
gggacauggccuccaauga

SEQ ID NO: 1105223 - RNA, 19 nt, Homo sapiens
  misc_RNA (1)...(19): siRNA sense strand
ggacaagcagacccaacug

SEQ ID NO: 1105224 - RNA, 19 nt, Homo sapiens
  misc_RNA (1)...(19): siRNA sense strand
uggcaucuaccaacaauca

SEQ ID NO: 1105225 - RNA, 19 nt, Homo sapiens
  misc_RNA (1)...(19): siRNA sense strand
gcacuagagaagaaugaca

SEQ ID NO: 1105226 - RNA, 19 nt, Homo sapiens
  misc_RNA (1)...(19): siRNA sense strand
ccagucguauaccaucaug

SEQ ID NO: 1105227 - RNA, 19 nt, Homo sapiens
  misc_RNA (1)...(19): siRNA sense strand
acaagcagacccaacugaa

SEQ ID NO: 1105228 - RNA, 19 nt, Homo sapiens
  misc_RNA (1)...(19): siRNA sense strand
acaaggagacacugcacaa

SEQ ID NO: 1105229 - RNA, 19 nt, Homo sapiens
  misc_RNA (1)...(19): siRNA sense strand
gaagcacuagagaagaaug

SEQ ID NO: 1105230 - RNA, 19 nt, Homo sapiens
  misc_RNA (1)...(19): siRNA sense strand
ucccgaaauuggccaguga

SEQ ID NO: 1105231 - RNA, 19 nt, Homo sapiens
  misc_RNA (1)...(19): siRNA sense strand
ccaagacagcucaacagau

SEQ ID NO: 1105232 - RNA, 19 nt, Homo sapiens
  misc_RNA (1)...(19): siRNA sense strand
gaagaaggagaagcacaag

SEQ ID NO: 1105233 - RNA, 19 nt, Homo sapiens
  misc_RNA (1)...(19): siRNA sense strand
ggagaggcggaccuauguu

SEQ ID NO: 1105234 - RNA, 19 nt, Homo sapiens
  misc_RNA (1)...(19): siRNA sense strand
ccuggcaucuaccaacaau

SEQ ID NO: 1105235 - RNA, 19 nt, Homo sapiens
  misc_RNA (1)...(19): siRNA sense strand
cggcaagaccaucaauguu

SEQ ID NO: 1105236 - RNA, 19 nt, Homo sapiens
  misc_RNA (1)...(19): siRNA sense strand
cgucgaguuuagucacuug

SEQ ID NO: 1105237 - RNA, 19 nt, Homo sapiens
  misc_RNA (1)...(19): siRNA sense strand
cauggacuaccguucauau

SEQ ID NO: 1105238 - RNA, 19 nt, Homo sapiens
  misc_RNA (1)...(19): siRNA sense strand
aaggagacacugcacaaga

SEQ ID NO: 1105239 - RNA, 19 nt, Homo sapiens
  misc_RNA (1)...(19): siRNA sense strand
gcacccaccacucacuauc

SEQ ID NO: 1105240 - RNA, 19 nt, Homo sapiens
  misc_RNA (1)...(19): siRNA sense strand
ggagacacugcacaagaca

SEQ ID NO: 1105241 - RNA, 19 nt, Homo sapiens
  misc_RNA (1)...(19): siRNA sense strand
aaugaaggcagucgcauca

SEQ ID NO: 1105242 - RNA, 19 nt, Homo sapiens
  misc_RNA (1)...(19): siRNA sense strand
agggcaagcaugacuauga

SEQ ID NO: 1105243 - RNA, 19 nt, Homo sapiens
  misc_RNA (1)...(19): siRNA sense strand
gcaacagccagggcacaga

SEQ ID NO: 1105244 - RNA, 19 nt, Homo sapiens
  misc_RNA (1)...(19): siRNA sense strand
gaccaagacagcucaacag

SEQ ID NO: 1105245 - RNA, 19 nt, Homo sapiens
  misc_RNA (1)...(19): siRNA sense strand
cggcugaugcggaacaaau

SEQ ID NO: 1105246 - RNA, 19 nt, Homo sapiens
  misc_RNA (1)...(19): siRNA sense strand
ccaacagccagucguauac

SEQ ID NO: 1105247 - RNA, 19 nt, Homo sapiens
  misc_RNA (1)...(19): siRNA sense strand
cugugucgaugcaggcuuu

SEQ ID NO: 1105248 - RNA, 19 nt, Homo sapiens
  misc_RNA (1)...(19): siRNA sense strand
cacugcagaugcuggcuau

SEQ ID NO: 1105249 - RNA, 19 nt, Homo sapiens
  misc_RNA (1)...(19): siRNA sense strand
ucaccucaaccgaguccua

SEQ ID NO: 1105250 - RNA, 19 nt, Homo sapiens
  misc_RNA (1)...(19): siRNA sense strand
aaacgagcuagaagcacua

SEQ ID NO: 1105251 - RNA, 19 nt, Homo sapiens
  misc_RNA (1)...(19): siRNA sense strand
ucagggcuccacaagcaaa

SEQ ID NO: 1105252 - RNA, 19 nt, Homo sapiens
  misc_RNA (1)...(19): siRNA sense strand
gaugagaaguugcuuuaug

SEQ ID NO: 1105253 - RNA, 19 nt, Homo sapiens
  misc_RNA (1)...(19): siRNA sense strand
ugaggaagaugcugacuau

SEQ ID NO: 1105254 - RNA, 19 nt, Homo sapiens
  misc_RNA (1)...(19): siRNA sense strand
gcaccaaggcuauggcuuu

SEQ ID NO: 1105255 - RNA, 19 nt, Homo sapiens
  misc_RNA (1)...(19): siRNA sense strand
gagaaguugcuuuaugaua

SEQ ID NO: 1105256 - RNA, 19 nt, Homo sapiens
  misc_RNA (1)...(19): siRNA sense strand
gaaccuggacccugagauu

SEQ ID NO: 1105257 - RNA, 19 nt, Homo sapiens
  misc_RNA (1)...(19): siRNA sense strand
gaacaugaucaaacucuau

SEQ ID NO: 1105258 - RNA, 19 nt, Homo sapiens
  misc_RNA (1)...(19): siRNA sense strand
gaugcugacuaugccauua

SEQ ID NO: 1105259 - RNA, 19 nt, Homo sapiens
  misc_RNA (1)...(19): siRNA sense strand
ccauuaagaucaugaacau

SEQ ID NO: 1105260 - RNA, 19 nt, Homo sapiens
  misc_RNA (1)...(19): siRNA sense strand
gcuauggcuuuguggaauu

SEQ ID NO: 1105261 - RNA, 19 nt, Homo sapiens
  misc_RNA (1)...(19): siRNA sense strand
gaaguugcuuuaugauacu

SEQ ID NO: 1105262 - RNA, 19 nt, Homo sapiens
  misc_RNA (1)...(19): siRNA sense strand
agaaguugcuuuaugauac

SEQ ID NO: 1105263 - RNA, 19 nt, Homo sapiens
  misc_RNA (1)...(19): siRNA sense strand
augagaaguugcuuuauga

SEQ ID NO: 1105264 - RNA, 19 nt, Homo sapiens
  misc_RNA (1)...(19): siRNA sense strand
gcaauugaagccaugaaug

SEQ ID NO: 1105265 - RNA, 19 nt, Homo sapiens
  misc_RNA (1)...(19): siRNA sense strand
ccaaggcuauggcuuugug

SEQ ID NO: 1105266 - RNA, 19 nt, Homo sapiens
  misc_RNA (1)...(19): siRNA sense strand
acaggcaacuccaaagguu

SEQ ID NO: 1105267 - RNA, 19 nt, Homo sapiens
  misc_RNA (1)...(19): siRNA sense strand
ggaaucaggaugccacugu

SEQ ID NO: 1105268 - RNA, 19 nt, Homo sapiens
  misc_RNA (1)...(19): siRNA sense strand
agcaucagcucacaacaaa

SEQ ID NO: 1105269 - RNA, 19 nt, Homo sapiens
  misc_RNA (1)...(19): siRNA sense strand
ugagauugaugagaaguug

SEQ ID NO: 1105270 - RNA, 19 nt, Homo sapiens
  misc_RNA (1)...(19): siRNA sense strand
ugaacaugaucaaacucua

SEQ ID NO: 1105271 - RNA, 19 nt, Homo sapiens
  misc_RNA (1)...(19): siRNA sense strand
ccucauggcuuaggacauc

SEQ ID NO: 1105272 - RNA, 19 nt, Homo sapiens
  misc_RNA (1)...(19): siRNA sense strand
ccaauccugugguaucauc

SEQ ID NO: 1105273 - RNA, 19 nt, Homo sapiens
  misc_RNA (1)...(19): siRNA sense strand
acccugagauugaugagaa

SEQ ID NO: 1105274 - RNA, 19 nt, Homo sapiens
  misc_RNA (1)...(19): siRNA sense strand
ugacacaggcaacuccaaa

SEQ ID NO: 1105275 - RNA, 19 nt, Homo sapiens
  misc_RNA (1)...(19): siRNA sense strand
caccaaggcuauggcuuug

SEQ ID NO: 1105276 - RNA, 19 nt, Homo sapiens
  misc_RNA (1)...(19): siRNA sense strand
uugaugagaaguugcuuua

SEQ ID NO: 1105277 - RNA, 19 nt, Homo sapiens
  misc_RNA (1)...(19): siRNA sense strand
caauacgggugaacaaagc

SEQ ID NO: 1105278 - RNA, 19 nt, Homo sapiens
  misc_RNA (1)...(19): siRNA sense strand
uggaugagaagguuaguga

SEQ ID NO: 1105279 - RNA, 19 nt, Homo sapiens
  misc_RNA (1)...(19): siRNA sense strand
gggccuggaugagaagguu

SEQ ID NO: 1105280 - RNA, 19 nt, Homo sapiens
  misc_RNA (1)...(19): siRNA sense strand
gccaaaggauagagucacu

SEQ ID NO: 1105281 - RNA, 19 nt, Homo sapiens
  misc_RNA (1)...(19): siRNA sense strand
ggucauggacacucacauc

SEQ ID NO: 1105282 - RNA, 19 nt, Homo sapiens
  misc_RNA (1)...(19): siRNA sense strand
acacccacaugccaaagga

SEQ ID NO: 1105283 - RNA, 19 nt, Homo sapiens
  misc_RNA (1)...(19): siRNA sense strand
caaagcaucagcucacaac

SEQ ID NO: 1105284 - RNA, 19 nt, Homo sapiens
  misc_RNA (1)...(19): siRNA sense strand
gaugagaagguuagugaac

SEQ ID NO: 1105285 - RNA, 19 nt, Homo sapiens
  misc_RNA (1)...(19): siRNA sense strand
ggcuauggcuuuguggaau

SEQ ID NO: 1105286 - RNA, 19 nt, Homo sapiens
  misc_RNA (1)...(19): siRNA sense strand
gacuaugccauuaagauca

SEQ ID NO: 1105287 - RNA, 19 nt, Homo sapiens
  misc_RNA (1)...(19): siRNA sense strand
ggaauucuugagugaggaa

SEQ ID NO: 1105288 - RNA, 19 nt, Homo sapiens
  misc_RNA (1)...(19): siRNA sense strand
gugaggaagaugcugacua

SEQ ID NO: 1105289 - RNA, 19 nt, Homo sapiens
  misc_RNA (1)...(19): siRNA sense strand
guccuaucaccguaucuua

SEQ ID NO: 1105290 - RNA, 19 nt, Homo sapiens
  misc_RNA (1)...(19): siRNA sense strand
gaaugggcaguaccucugu

SEQ ID NO: 1105291 - RNA, 19 nt, Homo sapiens
  misc_RNA (1)...(19): siRNA sense strand
caggcaacuccaaagguua

SEQ ID NO: 1105292 - RNA, 19 nt, Homo sapiens
  misc_RNA (1)...(19): siRNA sense strand
ccaauacgggugaacaaag

SEQ ID NO: 1105293 - RNA, 19 nt, Homo sapiens
  misc_RNA (1)...(19): siRNA sense strand
ggaagccaauacgggugaa

SEQ ID NO: 1105294 - RNA, 19 nt, Homo sapiens
  misc_RNA (1)...(19): siRNA sense strand
ugacuaugccauuaagauc

SEQ ID NO: 1105295 - RNA, 19 nt, Homo sapiens
  misc_RNA (1)...(19): siRNA sense strand
gccaauacgggugaacaaa

SEQ ID NO: 1105296 - RNA, 19 nt, Homo sapiens
  misc_RNA (1)...(19): siRNA sense strand
aagcaucagcucacaacaa

SEQ ID NO: 1105297 - RNA, 19 nt, Homo sapiens
  misc_RNA (1)...(19): siRNA sense strand
acucacauccucacccauu

SEQ ID NO: 1105298 - RNA, 19 nt, Homo sapiens
  misc_RNA (1)...(19): siRNA sense strand
ccuaucaccguaucuuaug

SEQ ID NO: 1105299 - RNA, 19 nt, Homo sapiens
  misc_RNA (1)...(19): siRNA sense strand
ucaacacccacaugccaaa

SEQ ID NO: 1105300 - RNA, 19 nt, Homo sapiens
  misc_RNA (1)...(19): siRNA sense strand
ccacaugccaaaggauaga

SEQ ID NO: 1105301 - RNA, 19 nt, Homo sapiens
  misc_RNA (1)...(19): siRNA sense strand
ggaugagaagguuagugaa

SEQ ID NO: 1105302 - RNA, 19 nt, Homo sapiens
  misc_RNA (1)...(19): siRNA sense strand
gccauuaagaucaugaaca

SEQ ID NO: 1105303 - RNA, 19 nt, Homo sapiens
  misc_RNA (1)...(19): siRNA sense strand
ccugugguaucaucauugg

SEQ ID NO: 1105304 - RNA, 19 nt, Homo sapiens
  misc_RNA (1)...(19): siRNA sense strand
caaagaagaugaccagaga

SEQ ID NO: 1105305 - RNA, 19 nt, Homo sapiens
  misc_RNA (1)...(19): siRNA sense strand
uaauauagcuccagaugaa

SEQ ID NO: 1105306 - RNA, 19 nt, Homo sapiens
  misc_RNA (1)...(19): siRNA sense strand
cgaaagagcaguucagaua

SEQ ID NO: 1105307 - RNA, 19 nt, Homo sapiens
  misc_RNA (1)...(19): siRNA sense strand
ggaaggagauuguuaacuc

SEQ ID NO: 1105308 - RNA, 19 nt, Homo sapiens
  misc_RNA (1)...(19): siRNA sense strand
gaagauaaauaugcagaug

SEQ ID NO: 1105309 - RNA, 19 nt, Homo sapiens
  misc_RNA (1)...(19): siRNA sense strand
gaagaaggagcuagaagaa

SEQ ID NO: 1105310 - RNA, 19 nt, Homo sapiens
  misc_RNA (1)...(19): siRNA sense strand
gaaagaagaaggagcuaga

SEQ ID NO: 1105311 - RNA, 19 nt, Homo sapiens
  misc_RNA (1)...(19): siRNA sense strand
gaaagaauccagaugaagu

SEQ ID NO: 1105312 - RNA, 19 nt, Homo sapiens
  misc_RNA (1)...(19): siRNA sense strand
ggagccaaauuuacaggua

SEQ ID NO: 1105313 - RNA, 19 nt, Homo sapiens
  misc_RNA (1)...(19): siRNA sense strand
ggaggcauauagaaugaaa

SEQ ID NO: 1105314 - RNA, 19 nt, Homo sapiens
  misc_RNA (1)...(19): siRNA sense strand
caaauucugccuacuauga

SEQ ID NO: 1105315 - RNA, 19 nt, Homo sapiens
  misc_RNA (1)...(19): siRNA sense strand
gaaauggaggcauauagaa

SEQ ID NO: 1105316 - RNA, 19 nt, Homo sapiens
  misc_RNA (1)...(19): siRNA sense strand
gaaaugaguuuggaagaac

SEQ ID NO: 1105317 - RNA, 19 nt, Homo sapiens
  misc_RNA (1)...(19): siRNA sense strand
ggaaauggaggcauauaga

SEQ ID NO: 1105318 - RNA, 19 nt, Homo sapiens
  misc_RNA (1)...(19): siRNA sense strand
gaaagaaagcauccuggaa

SEQ ID NO: 1105319 - RNA, 19 nt, Homo sapiens
  misc_RNA (1)...(19): siRNA sense strand
ugacaugccuggacagaau

SEQ ID NO: 1105320 - RNA, 19 nt, Homo sapiens
  misc_RNA (1)...(19): siRNA sense strand
ggaaccaaauucucagaug

SEQ ID NO: 1105321 - RNA, 19 nt, Homo sapiens
  misc_RNA (1)...(19): siRNA sense strand
gggcaaugcuccugcagaa

SEQ ID NO: 1105322 - RNA, 19 nt, Homo sapiens
  misc_RNA (1)...(19): siRNA sense strand
gaaacuccaagaggaauua

SEQ ID NO: 1105323 - RNA, 19 nt, Homo sapiens
  misc_RNA (1)...(19): siRNA sense strand
ucaaagaacagcagaaaga

SEQ ID NO: 1105324 - RNA, 19 nt, Homo sapiens
  misc_RNA (1)...(19): siRNA sense strand
ggaauuagccucaggaaaa

SEQ ID NO: 1105325 - RNA, 19 nt, Homo sapiens
  misc_RNA (1)...(19): siRNA sense strand
ggaagcggccuuacaauag

SEQ ID NO: 1105326 - RNA, 19 nt, Homo sapiens
  misc_RNA (1)...(19): siRNA sense strand
ucauggagcugcaucaaga

SEQ ID NO: 1105327 - RNA, 19 nt, Homo sapiens
  misc_RNA (1)...(19): siRNA sense strand
agagaggacuggagaaaga

SEQ ID NO: 1105328 - RNA, 19 nt, Homo sapiens
  misc_RNA (1)...(19): siRNA sense strand
ugaagaguaugccaaaguu

SEQ ID NO: 1105329 - RNA, 19 nt, Homo sapiens
  misc_RNA (1)...(19): siRNA sense strand
gaagagggaucgguggaau

SEQ ID NO: 1105330 - RNA, 19 nt, Homo sapiens
  misc_RNA (1)...(19): siRNA sense strand
caagggaucugaagugcau

SEQ ID NO: 1105331 - RNA, 19 nt, Homo sapiens
  misc_RNA (1)...(19): siRNA sense strand
ucugaggaguguauuauaa

SEQ ID NO: 1105332 - RNA, 19 nt, Homo sapiens
  misc_RNA (1)...(19): siRNA sense strand
aaagaaagcauccuggaaa

SEQ ID NO: 1105333 - RNA, 19 nt, Homo sapiens
  misc_RNA (1)...(19): siRNA sense strand
caacugauguuugacuaug

SEQ ID NO: 1105334 - RNA, 19 nt, Homo sapiens
  misc_RNA (1)...(19): siRNA sense strand
gaucugaagugcaucuaca

SEQ ID NO: 1105335 - RNA, 19 nt, Homo sapiens
  misc_RNA (1)...(19): siRNA sense strand
gagaagaggaaccaaauuc

SEQ ID NO: 1105336 - RNA, 19 nt, Homo sapiens
  misc_RNA (1)...(19): siRNA sense strand
agaaggagcuagaagaaca

SEQ ID NO: 1105337 - RNA, 19 nt, Homo sapiens
  misc_RNA (1)...(19): siRNA sense strand
ucagugccaugguauauug

SEQ ID NO: 1105338 - RNA, 19 nt, Homo sapiens
  misc_RNA (1)...(19): siRNA sense strand
aagaggaaauggaggcaua

SEQ ID NO: 1105339 - RNA, 19 nt, Homo sapiens
  misc_RNA (1)...(19): siRNA sense strand
ggaugaagauaaauaugca

SEQ ID NO: 1105340 - RNA, 19 nt, Homo sapiens
  misc_RNA (1)...(19): siRNA sense strand
gaaggagauuguuaacucu

SEQ ID NO: 1105341 - RNA, 19 nt, Homo sapiens
  misc_RNA (1)...(19): siRNA sense strand
gaagaaccaaagaagauga

SEQ ID NO: 1105342 - RNA, 19 nt, Homo sapiens
  misc_RNA (1)...(19): siRNA sense strand
gaagaacacaugaaaauug

SEQ ID NO: 1105343 - RNA, 19 nt, Homo sapiens
  misc_RNA (1)...(19): siRNA sense strand
uauaaguccuucaaaguca

SEQ ID NO: 1105344 - RNA, 19 nt, Homo sapiens
  misc_RNA (1)...(19): siRNA sense strand
agaaaugaguuuggaagaa

SEQ ID NO: 1105345 - RNA, 19 nt, Homo sapiens
  misc_RNA (1)...(19): siRNA sense strand
gaauccagaugaagugagu

SEQ ID NO: 1105346 - RNA, 19 nt, Homo sapiens
  misc_RNA (1)...(19): siRNA sense strand
guacacaggagauaccauu

SEQ ID NO: 1105347 - RNA, 19 nt, Homo sapiens
  misc_RNA (1)...(19): siRNA sense strand
gaaagagcaguucagauag

SEQ ID NO: 1105348 - RNA, 19 nt, Homo sapiens
  misc_RNA (1)...(19): siRNA sense strand
cagcucaucuggagaaugg

SEQ ID NO: 1105349 - RNA, 19 nt, Homo sapiens
  misc_RNA (1)...(19): siRNA sense strand
gaagaugaggaugaagaua

SEQ ID NO: 1105350 - RNA, 19 nt, Homo sapiens
  misc_RNA (1)...(19): siRNA sense strand
gcaaugcuccugcagaagu

SEQ ID NO: 1105351 - RNA, 19 nt, Homo sapiens
  misc_RNA (1)...(19): siRNA sense strand
aaaguaugguggccaagaa

SEQ ID NO: 1105352 - RNA, 19 nt, Homo sapiens
  misc_RNA (1)...(19): siRNA sense strand
gaacauugaaagcccagaa

SEQ ID NO: 1105353 - RNA, 19 nt, Homo sapiens
  misc_RNA (1)...(19): siRNA sense strand
cugcagaaguugaugaaga

SEQ ID NO: 1105354 - RNA, 19 nt, Homo sapiens
  misc_RNA (1)...(19): siRNA sense strand
gcuguugccugcucuaagu

SEQ ID NO: 1105355 - RNA, 19 nt, Homo sapiens
  misc_RNA (1)...(19): siRNA sense strand
gcaaugagagagaauccuu

SEQ ID NO: 1105356 - RNA, 19 nt, Homo sapiens
  misc_RNA (1)...(19): siRNA sense strand
agaugaggaugaagauaaa

SEQ ID NO: 1105357 - RNA, 19 nt, Homo sapiens
  misc_RNA (1)...(19): siRNA sense strand
ggagaagaggaaccaaauu

SEQ ID NO: 1105358 - RNA, 19 nt, Homo sapiens
  misc_RNA (1)...(19): siRNA sense strand
gaacauguccagccucaac

SEQ ID NO: 1105359 - RNA, 19 nt, Homo sapiens
  misc_RNA (1)...(19): siRNA sense strand
caggaaagaauccagauga

SEQ ID NO: 1105360 - RNA, 19 nt, Homo sapiens
  misc_RNA (1)...(19): siRNA sense strand
agaaguugaugaagaagga

SEQ ID NO: 1105361 - RNA, 19 nt, Homo sapiens
  misc_RNA (1)...(19): siRNA sense strand
guucagauagugaugauga

SEQ ID NO: 1105362 - RNA, 19 nt, Homo sapiens
  misc_RNA (1)...(19): siRNA sense strand
cuagagcuguuguauaagu

SEQ ID NO: 1105363 - RNA, 19 nt, Homo sapiens
  misc_RNA (1)...(19): siRNA sense strand
aagaugaggaugaagauaa

SEQ ID NO: 1105364 - RNA, 19 nt, Homo sapiens
  misc_RNA (1)...(19): siRNA sense strand
ccagagaccacaaccagaa

SEQ ID NO: 1105365 - RNA, 19 nt, Homo sapiens
  misc_RNA (1)...(19): siRNA sense strand
cacaggagauaccauuuca

SEQ ID NO: 1105366 - RNA, 19 nt, Homo sapiens
  misc_RNA (1)...(19): siRNA sense strand
agauagugaugaugaagaa

SEQ ID NO: 1105367 - RNA, 19 nt, Homo sapiens
  misc_RNA (1)...(19): siRNA sense strand
aaagagcaguucagauagu

SEQ ID NO: 1105368 - RNA, 19 nt, Homo sapiens
  misc_RNA (1)...(19): siRNA sense strand
caaaugcugucacucuuuu

SEQ ID NO: 1105369 - RNA, 19 nt, Homo sapiens
  misc_RNA (1)...(19): siRNA sense strand
caaagaacagcagaaagaa

SEQ ID NO: 1105370 - RNA, 19 nt, Homo sapiens
  misc_RNA (1)...(19): siRNA sense strand
gaagauccacaaucacaca

SEQ ID NO: 1105371 - RNA, 19 nt, Homo sapiens
  misc_RNA (1)...(19): siRNA sense strand
gaagcggccuuacaauagc

SEQ ID NO: 1105372 - RNA, 19 nt, Homo sapiens
  misc_RNA (1)...(19): siRNA sense strand
ggauacaaaugcugucacu

SEQ ID NO: 1105373 - RNA, 19 nt, Homo sapiens
  misc_RNA (1)...(19): siRNA sense strand
caaaggagcaugugaaaau

SEQ ID NO: 1105374 - RNA, 19 nt, Homo sapiens
  misc_RNA (1)...(19): siRNA sense strand
ugcagaaguugaugaagaa

SEQ ID NO: 1105375 - RNA, 19 nt, Homo sapiens
  misc_RNA (1)...(19): siRNA sense strand
gaauuacuguccggaaucu

SEQ ID NO: 1105376 - RNA, 19 nt, Homo sapiens
  misc_RNA (1)...(19): siRNA sense strand
ugagagaccuaggcgaguu

SEQ ID NO: 1105377 - RNA, 19 nt, Homo sapiens
  misc_RNA (1)...(19): siRNA sense strand
ggaagaaccaaagaagaug

SEQ ID NO: 1105378 - RNA, 19 nt, Homo sapiens
  misc_RNA (1)...(19): siRNA sense strand
gaagaggaaccaaauucuc

SEQ ID NO: 1105379 - RNA, 19 nt, Homo sapiens
  misc_RNA (1)...(19): siRNA sense strand
gcugggaaggagauuguua

SEQ ID NO: 1105380 - RNA, 19 nt, Homo sapiens
  misc_RNA (1)...(19): siRNA sense strand
gcucagacacaguuguuug

SEQ ID NO: 1105381 - RNA, 19 nt, Homo sapiens
  misc_RNA (1)...(19): siRNA sense strand
caaugagagagaauccuua

SEQ ID NO: 1105382 - RNA, 19 nt, Homo sapiens
  misc_RNA (1)...(19): siRNA sense strand
ugaggaauuuagauccaaa

SEQ ID NO: 1105383 - RNA, 19 nt, Homo sapiens
  misc_RNA (1)...(19): siRNA sense strand
uggcuacaauccagaagaa

SEQ ID NO: 1105384 - RNA, 19 nt, Homo sapiens
  misc_RNA (1)...(19): siRNA sense strand
guggaguacucaagacaug

SEQ ID NO: 1105385 - RNA, 19 nt, Homo sapiens
  misc_RNA (1)...(19): siRNA sense strand
guauaaguccuucaaaguc

SEQ ID NO: 1105386 - RNA, 19 nt, Homo sapiens
  misc_RNA (1)...(19): siRNA sense strand
caaugcuccugcagaaguu

SEQ ID NO: 1105387 - RNA, 19 nt, Homo sapiens
  misc_RNA (1)...(19): siRNA sense strand
gggagaagaggaaccaaau

SEQ ID NO: 1105388 - RNA, 19 nt, Homo sapiens
  misc_RNA (1)...(19): siRNA sense strand
gaagaguaugccaaaguug

SEQ ID NO: 1105389 - RNA, 19 nt, Homo sapiens
  misc_RNA (1)...(19): siRNA sense strand
ggaaagaauccagaugaag

SEQ ID NO: 1105390 - RNA, 19 nt, Homo sapiens
  misc_RNA (1)...(19): siRNA sense strand
guaugaaacucgagaaccu

SEQ ID NO: 1105391 - RNA, 19 nt, Homo sapiens
  misc_RNA (1)...(19): siRNA sense strand
aggaagcggccuuacaaua

SEQ ID NO: 1105392 - RNA, 19 nt, Homo sapiens
  misc_RNA (1)...(19): siRNA sense strand
ccagaaacuccaagaggaa

SEQ ID NO: 1105393 - RNA, 19 nt, Homo sapiens
  misc_RNA (1)...(19): siRNA sense strand
gaggaaauggaggcauaua

SEQ ID NO: 1105394 - RNA, 19 nt, Homo sapiens
  misc_RNA (1)...(19): siRNA sense strand
ucaaggagaccaugcagau

SEQ ID NO: 1105395 - RNA, 19 nt, Homo sapiens
  misc_RNA (1)...(19): siRNA sense strand
caggagauaccauuucaau

SEQ ID NO: 1105396 - RNA, 19 nt, Homo sapiens
  misc_RNA (1)...(19): siRNA sense strand
aggaaagaauccagaugaa

SEQ ID NO: 1105397 - RNA, 19 nt, Homo sapiens
  misc_RNA (1)...(19): siRNA sense strand
gagaauccuuaugccaaug

SEQ ID NO: 1105398 - RNA, 19 nt, Homo sapiens
  misc_RNA (1)...(19): siRNA sense strand
agaagaaggagcuagaaga

SEQ ID NO: 1105399 - RNA, 19 nt, Homo sapiens
  misc_RNA (1)...(19): siRNA sense strand
aaagaacagcagaaagaaa

SEQ ID NO: 1105400 - RNA, 19 nt, Homo sapiens
  misc_RNA (1)...(19): siRNA sense strand
ugacaagggaucugaagug

SEQ ID NO: 1105401 - RNA, 19 nt, Homo sapiens
  misc_RNA (1)...(19): siRNA sense strand
agagaauccuuaugccaau

SEQ ID NO: 1105402 - RNA, 19 nt, Homo sapiens
  misc_RNA (1)...(19): siRNA sense strand
gaagaaaagaagcaugaaa

SEQ ID NO: 1105403 - RNA, 19 nt, Homo sapiens
  misc_RNA (1)...(19): siRNA sense strand
gagaggaagcggccuuaca

SEQ ID NO: 1105404 - RNA, 19 nt, Homo sapiens
  misc_RNA (1)...(19): siRNA sense strand
gcaagacgcugggcaagcu

SEQ ID NO: 1105405 - RNA, 19 nt, Homo sapiens
  misc_RNA (1)...(19): siRNA sense strand
uggcugaguuggaccagua

SEQ ID NO: 1105406 - RNA, 19 nt, Homo sapiens
  misc_RNA (1)...(19): siRNA sense strand
ggaggcugcugaacgaaag

SEQ ID NO: 1105407 - RNA, 19 nt, Homo sapiens
  misc_RNA (1)...(19): siRNA sense strand
agaaagaccacccggacua

SEQ ID NO: 1105408 - RNA, 19 nt, Homo sapiens
  misc_RNA (1)...(19): siRNA sense strand
guaugcagcacaagaaaga

SEQ ID NO: 1105409 - RNA, 19 nt, Homo sapiens
  misc_RNA (1)...(19): siRNA sense strand
gagaucagccacgagguaa

SEQ ID NO: 1105410 - RNA, 19 nt, Homo sapiens
  misc_RNA (1)...(19): siRNA sense strand
gaucagccacgagguaaug

SEQ ID NO: 1105411 - RNA, 19 nt, Homo sapiens
  misc_RNA (1)...(19): siRNA sense strand
ggcggacgaugacaaguuc

SEQ ID NO: 1105412 - RNA, 19 nt, Homo sapiens
  misc_RNA (1)...(19): siRNA sense strand
ugagaucagccacgaggua

SEQ ID NO: 1105413 - RNA, 19 nt, Homo sapiens
  misc_RNA (1)...(19): siRNA sense strand
gggagcagccaguauauac

SEQ ID NO: 1105414 - RNA, 19 nt, Homo sapiens
  misc_RNA (1)...(19): siRNA sense strand
caacauggagaccuuugau

SEQ ID NO: 1105415 - RNA, 19 nt, Homo sapiens
  misc_RNA (1)...(19): siRNA sense strand
gagcagccaguauauacga

SEQ ID NO: 1105416 - RNA, 19 nt, Homo sapiens
  misc_RNA (1)...(19): siRNA sense strand
gaagcucgcggaccaguac

SEQ ID NO: 1105417 - RNA, 19 nt, Homo sapiens
  misc_RNA (1)...(19): siRNA sense strand
gcgggaagccucacaucga

SEQ ID NO: 1105418 - RNA, 19 nt, Homo sapiens
  misc_RNA (1)...(19): siRNA sense strand
ggaagccucacaucgacuu

SEQ ID NO: 1105419 - RNA, 19 nt, Homo sapiens
  misc_RNA (1)...(19): siRNA sense strand
gccacgagguaauguccaa

SEQ ID NO: 1105420 - RNA, 19 nt, Homo sapiens
  misc_RNA (1)...(19): siRNA sense strand
ggaagcucgcggaccagua

SEQ ID NO: 1105421 - RNA, 19 nt, Homo sapiens
  misc_RNA (1)...(19): siRNA sense strand
ccucaggacccuauuaugg

SEQ ID NO: 1105422 - RNA, 19 nt, Homo sapiens
  misc_RNA (1)...(19): siRNA sense strand
ucuggaggcugcugaacga

SEQ ID NO: 1105423 - RNA, 19 nt, Homo sapiens
  misc_RNA (1)...(19): siRNA sense strand
gaaagaccacccggacuac

SEQ ID NO: 1105424 - RNA, 19 nt, Homo sapiens
  misc_RNA (1)...(19): siRNA sense strand
cuacucggccuucuccuau

SEQ ID NO: 1105425 - RNA, 19 nt, Homo sapiens
  misc_RNA (1)...(19): siRNA sense strand
aagcccaggugaagacaga

SEQ ID NO: 1105426 - RNA, 19 nt, Homo sapiens
  misc_RNA (1)...(19): siRNA sense strand
ccuuugauguggcugaguu

SEQ ID NO: 1105427 - RNA, 19 nt, Homo sapiens
  misc_RNA (1)...(19): siRNA sense strand
ugggcaaggucaagaagga

SEQ ID NO: 1105428 - RNA, 19 nt, Homo sapiens
  misc_RNA (1)...(19): siRNA sense strand
cuacucagcagccggcuau

SEQ ID NO: 1105429 - RNA, 19 nt, Homo sapiens
  misc_RNA (1)...(19): siRNA sense strand
aaagcaagccgcacgucaa

SEQ ID NO: 1105430 - RNA, 19 nt, Homo sapiens
  misc_RNA (1)...(19): siRNA sense strand
ccucacagaucgccuacac

SEQ ID NO: 1105431 - RNA, 19 nt, Homo sapiens
  misc_RNA (1)...(19): siRNA sense strand
acucggccuucuccuauau

SEQ ID NO: 1105432 - RNA, 19 nt, Homo sapiens
  misc_RNA (1)...(19): siRNA sense strand
gagcugggcaaggucaaga

SEQ ID NO: 1105433 - RNA, 19 nt, Homo sapiens
  misc_RNA (1)...(19): siRNA sense strand
ccaaagcccaggugaagac

SEQ ID NO: 1105434 - RNA, 19 nt, Homo sapiens
  misc_RNA (1)...(19): siRNA sense strand
cauggagaccuuugaugug

SEQ ID NO: 1105435 - RNA, 19 nt, Homo sapiens
  misc_RNA (1)...(19): siRNA sense strand
gcccucaggacccuauuau

SEQ ID NO: 1105436 - RNA, 19 nt, Homo sapiens
  misc_RNA (1)...(19): siRNA sense strand
ccaacauggagaccuuuga

SEQ ID NO: 1105437 - RNA, 19 nt, Homo sapiens
  misc_RNA (1)...(19): siRNA sense strand
uacucggccuucuccuaua

SEQ ID NO: 1105438 - RNA, 19 nt, Homo sapiens
  misc_RNA (1)...(19): siRNA sense strand
cauccaggcccacuacaag

SEQ ID NO: 1105439 - RNA, 19 nt, Homo sapiens
  misc_RNA (1)...(19): siRNA sense strand
ggacacuccgccuggaucu

SEQ ID NO: 1105440 - RNA, 19 nt, Homo sapiens
  misc_RNA (1)...(19): siRNA sense strand
ggauauagcuagugcaaua

SEQ ID NO: 1105441 - RNA, 19 nt, Homo sapiens
  misc_RNA (1)...(19): siRNA sense strand
uggaagagaugaagaauga

SEQ ID NO: 1105442 - RNA, 19 nt, Homo sapiens
  misc_RNA (1)...(19): siRNA sense strand
caaaccaacuuaauacuuc

SEQ ID NO: 1105443 - RNA, 19 nt, Homo sapiens
  misc_RNA (1)...(19): siRNA sense strand
ucaguaagaucccagauga

SEQ ID NO: 1105444 - RNA, 19 nt, Homo sapiens
  misc_RNA (1)...(19): siRNA sense strand
ccacauccaugguuucuau

SEQ ID NO: 1105445 - RNA, 19 nt, Homo sapiens
  misc_RNA (1)...(19): siRNA sense strand
guagaagaguauaugauug

SEQ ID NO: 1105446 - RNA, 19 nt, Homo sapiens
  misc_RNA (1)...(19): siRNA sense strand
uauggcagcugaugaugua

SEQ ID NO: 1105447 - RNA, 19 nt, Homo sapiens
  misc_RNA (1)...(19): siRNA sense strand
ggcaauaaauguguucgua

SEQ ID NO: 1105448 - RNA, 19 nt, Homo sapiens
  misc_RNA (1)...(19): siRNA sense strand
gcacgagcacuuaaacaaa

SEQ ID NO: 1105449 - RNA, 19 nt, Homo sapiens
  misc_RNA (1)...(19): siRNA sense strand
gcaauaaauguguucguaa

SEQ ID NO: 1105450 - RNA, 19 nt, Homo sapiens
  misc_RNA (1)...(19): siRNA sense strand
gcacuuaaacaaauucuca

SEQ ID NO: 1105451 - RNA, 19 nt, Homo sapiens
  misc_RNA (1)...(19): siRNA sense strand
gcaaggcaauaaauguguu

SEQ ID NO: 1105452 - RNA, 19 nt, Homo sapiens
  misc_RNA (1)...(19): siRNA sense strand
gagagccgcuuucaucaag

SEQ ID NO: 1105453 - RNA, 19 nt, Homo sapiens
  misc_RNA (1)...(19): siRNA sense strand
caauaaauguguucguaag

SEQ ID NO: 1105454 - RNA, 19 nt, Homo sapiens
  misc_RNA (1)...(19): siRNA sense strand
ucauguauccuguguuuaa

SEQ ID NO: 1105455 - RNA, 19 nt, Homo sapiens
  misc_RNA (1)...(19): siRNA sense strand
agucauguauccuguguuu

SEQ ID NO: 1105456 - RNA, 19 nt, Homo sapiens
  misc_RNA (1)...(19): siRNA sense strand
guaaaguacuccaaaaguu

SEQ ID NO: 1105457 - RNA, 19 nt, Homo sapiens
  misc_RNA (1)...(19): siRNA sense strand
gcagucauguauccugugu

SEQ ID NO: 1105458 - RNA, 19 nt, Homo sapiens
  misc_RNA (1)...(19): siRNA sense strand
cacgagcacuuaaacaaau

SEQ ID NO: 1105459 - RNA, 19 nt, Homo sapiens
  misc_RNA (1)...(19): siRNA sense strand
gaaaaggcacgagcacuua

SEQ ID NO: 1105460 - RNA, 19 nt, Homo sapiens
  misc_RNA (1)...(19): siRNA sense strand
gaacuucuugauacaguga

SEQ ID NO: 1105461 - RNA, 19 nt, Homo sapiens
  misc_RNA (1)...(19): siRNA sense strand
guaagugccaaccgacuaa

SEQ ID NO: 1105462 - RNA, 19 nt, Homo sapiens
  misc_RNA (1)...(19): siRNA sense strand
gaagagaugaagaaugaag

SEQ ID NO: 1105463 - RNA, 19 nt, Homo sapiens
  misc_RNA (1)...(19): siRNA sense strand
ggaugacaauggaagagau

SEQ ID NO: 1105464 - RNA, 19 nt, Homo sapiens
  misc_RNA (1)...(19): siRNA sense strand
aaagauggcaaggcaauaa

SEQ ID NO: 1105465 - RNA, 19 nt, Homo sapiens
  misc_RNA (1)...(19): siRNA sense strand
uguauccuguguuuaauga

SEQ ID NO: 1105466 - RNA, 19 nt, Homo sapiens
  misc_RNA (1)...(19): siRNA sense strand
cugaugauguagaagagua

SEQ ID NO: 1105467 - RNA, 19 nt, Homo sapiens
  misc_RNA (1)...(19): siRNA sense strand
cggagucccuucuucguau

SEQ ID NO: 1105468 - RNA, 19 nt, Homo sapiens
  misc_RNA (1)...(19): siRNA sense strand
caucaaaccaacuuaauac

SEQ ID NO: 1105469 - RNA, 19 nt, Homo sapiens
  misc_RNA (1)...(19): siRNA sense strand
gcagacaaucaaggauaua

SEQ ID NO: 1105470 - RNA, 19 nt, Homo sapiens
  misc_RNA (1)...(19): siRNA sense strand
caauggaagagaugaagaa

SEQ ID NO: 1105471 - RNA, 19 nt, Homo sapiens
  misc_RNA (1)...(19): siRNA sense strand
ucacacaagacaucauuau

SEQ ID NO: 1105472 - RNA, 19 nt, Homo sapiens
  misc_RNA (1)...(19): siRNA sense strand
gugauacucugaaaacgua

SEQ ID NO: 1105473 - RNA, 19 nt, Homo sapiens
  misc_RNA (1)...(19): siRNA sense strand
gauguagaagaguauauga

SEQ ID NO: 1105474 - RNA, 19 nt, Homo sapiens
  misc_RNA (1)...(19): siRNA sense strand
ccaaccgacuaauucauca

SEQ ID NO: 1105475 - RNA, 19 nt, Homo sapiens
  misc_RNA (1)...(19): siRNA sense strand
gauauagcuagugcaauaa

SEQ ID NO: 1105476 - RNA, 19 nt, Homo sapiens
  misc_RNA (1)...(19): siRNA sense strand
ugagguuucugcagacaau

SEQ ID NO: 1105477 - RNA, 19 nt, Homo sapiens
  misc_RNA (1)...(19): siRNA sense strand
ggcagcugaugauguagaa

SEQ ID NO: 1105478 - RNA, 19 nt, Homo sapiens
  misc_RNA (1)...(19): siRNA sense strand
gaaccgcagggcacuugaa

SEQ ID NO: 1105479 - RNA, 19 nt, Homo sapiens
  misc_RNA (1)...(19): siRNA sense strand
gaacgaccagagccagaau

SEQ ID NO: 1105480 - RNA, 19 nt, Homo sapiens
  misc_RNA (1)...(19): siRNA sense strand
auaaauguguucguaagug

SEQ ID NO: 1105481 - RNA, 19 nt, Homo sapiens
  misc_RNA (1)...(19): siRNA sense strand
gauggcaaggcaauaaaug

SEQ ID NO: 1105482 - RNA, 19 nt, Homo sapiens
  misc_RNA (1)...(19): siRNA sense strand
uccaaaaguuucagugaua

SEQ ID NO: 1105483 - RNA, 19 nt, Homo sapiens
  misc_RNA (1)...(19): siRNA sense strand
ggcacgagcacuuaaacaa

SEQ ID NO: 1105484 - RNA, 19 nt, Homo sapiens
  misc_RNA (1)...(19): siRNA sense strand
gaccagagccagaauucca

SEQ ID NO: 1105485 - RNA, 19 nt, Homo sapiens
  misc_RNA (1)...(19): siRNA sense strand
ggagucccuucuucguaug

SEQ ID NO: 1105486 - RNA, 19 nt, Homo sapiens
  misc_RNA (1)...(19): siRNA sense strand
uaaagauggcaaggcaaua

SEQ ID NO: 1105487 - RNA, 19 nt, Homo sapiens
  misc_RNA (1)...(19): siRNA sense strand
cagcugaugauguagaaga

SEQ ID NO: 1105488 - RNA, 19 nt, Homo sapiens
  misc_RNA (1)...(19): siRNA sense strand
aaucaaggauauagcuagu

SEQ ID NO: 1105489 - RNA, 19 nt, Homo sapiens
  misc_RNA (1)...(19): siRNA sense strand
cugcagacaaucaaggaua

SEQ ID NO: 1105490 - RNA, 19 nt, Homo sapiens
  misc_RNA (1)...(19): siRNA sense strand
gaaauaucaauaccagaac

SEQ ID NO: 1105491 - RNA, 19 nt, Homo sapiens
  misc_RNA (1)...(19): siRNA sense strand
ugagcuagaacgaguaaau

SEQ ID NO: 1105492 - RNA, 19 nt, Homo sapiens
  misc_RNA (1)...(19): siRNA sense strand
ugcagacaaucaaggauau

SEQ ID NO: 1105493 - RNA, 19 nt, Homo sapiens
  misc_RNA (1)...(19): siRNA sense strand
cuagaacgaguaaaucugu

SEQ ID NO: 1105494 - RNA, 19 nt, Homo sapiens
  misc_RNA (1)...(19): siRNA sense strand
gagcuagaacgaguaaauc

SEQ ID NO: 1105495 - RNA, 19 nt, Homo sapiens
  misc_RNA (1)...(19): siRNA sense strand
aaauccaggucucacacaa

SEQ ID NO: 1105496 - RNA, 19 nt, Homo sapiens
  misc_RNA (1)...(19): siRNA sense strand
gaugauguagaagaguaua

SEQ ID NO: 1105497 - RNA, 19 nt, Homo sapiens
  misc_RNA (1)...(19): siRNA sense strand
gaugacaauggaagagaug

SEQ ID NO: 1105498 - RNA, 19 nt, Homo sapiens
  misc_RNA (1)...(19): siRNA sense strand
uacagugaauaaugucuuc

SEQ ID NO: 1105499 - RNA, 19 nt, Homo sapiens
  misc_RNA (1)...(19): siRNA sense strand
ucccagaugagaucaauga

SEQ ID NO: 1105500 - RNA, 19 nt, Homo sapiens
  misc_RNA (1)...(19): siRNA sense strand
cauguauccuguguuuaau

SEQ ID NO: 1105501 - RNA, 19 nt, Homo sapiens
  misc_RNA (1)...(19): siRNA sense strand
acgagcacuuaaacaaauu

SEQ ID NO: 1105502 - RNA, 19 nt, Homo sapiens
  misc_RNA (1)...(19): siRNA sense strand
acugagagccgcuuucauc

SEQ ID NO: 1105503 - RNA, 19 nt, Homo sapiens
  misc_RNA (1)...(19): siRNA sense strand
cguaagugccaaccgacua

SEQ ID NO: 1105504 - RNA, 19 nt, Homo sapiens
  misc_RNA (1)...(19): siRNA sense strand
gagaucaaugacagaguga

SEQ ID NO: 1105505 - RNA, 19 nt, Homo sapiens
  misc_RNA (1)...(19): siRNA sense strand
aguaagaucccagaugaga

SEQ ID NO: 1105506 - RNA, 19 nt, Homo sapiens
  misc_RNA (1)...(19): siRNA sense strand
uuaaagauggcaaggcaau

SEQ ID NO: 1105507 - RNA, 19 nt, Homo sapiens
  misc_RNA (1)...(19): siRNA sense strand
cuugauacagugaauaaug

SEQ ID NO: 1105508 - RNA, 19 nt, Homo sapiens
  misc_RNA (1)...(19): siRNA sense strand
ucaaugacagagugagguu

SEQ ID NO: 1105509 - RNA, 19 nt, Homo sapiens
  misc_RNA (1)...(19): siRNA sense strand
auccaggucucacacaaga

SEQ ID NO: 1105510 - RNA, 19 nt, Homo sapiens
  misc_RNA (1)...(19): siRNA sense strand
ccucuaugcagucauguau

SEQ ID NO: 1105511 - RNA, 19 nt, Homo sapiens
  misc_RNA (1)...(19): siRNA sense strand
gccaaccgacuaauucauc

SEQ ID NO: 1105512 - RNA, 19 nt, Homo sapiens
  misc_RNA (1)...(19): siRNA sense strand
gcuagaacgaguaaaucug

SEQ ID NO: 1105513 - RNA, 19 nt, Homo sapiens
  misc_RNA (1)...(19): siRNA sense strand
aaaggcacgagcacuuaaa

SEQ ID NO: 1105514 - RNA, 19 nt, Homo sapiens
  misc_RNA (1)...(19): siRNA sense strand
guaagaucccagaugagau

SEQ ID NO: 1105515 - RNA, 19 nt, Homo sapiens
  misc_RNA (1)...(19): siRNA sense strand
ggcaaggcaauaaaugugu

SEQ ID NO: 1105516 - RNA, 19 nt, Homo sapiens
  misc_RNA (1)...(19): siRNA sense strand
ugagagccgcuuucaucaa

SEQ ID NO: 1105517 - RNA, 19 nt, Homo sapiens
  misc_RNA (1)...(19): siRNA sense strand
ucucacacaagacaucauu

SEQ ID NO: 1105518 - RNA, 19 nt, Homo sapiens
  misc_RNA (1)...(19): siRNA sense strand
ccagaugagaucaaugaca

SEQ ID NO: 1105519 - RNA, 19 nt, Homo sapiens
  misc_RNA (1)...(19): siRNA sense strand
ugacaauggaagagaugaa

SEQ ID NO: 1105520 - RNA, 19 nt, Homo sapiens
  misc_RNA (1)...(19): siRNA sense strand
cuucagaccuucaaaacug

SEQ ID NO: 1105521 - RNA, 19 nt, Homo sapiens
  misc_RNA (1)...(19): siRNA sense strand
gcacuugaacaccaaaaga

SEQ ID NO: 1105522 - RNA, 19 nt, Homo sapiens
  misc_RNA (1)...(19): siRNA sense strand
gaagaguauaugauugaac

SEQ ID NO: 1105523 - RNA, 19 nt, Homo sapiens
  misc_RNA (1)...(19): siRNA sense strand
cacacaagacaucauuaug

SEQ ID NO: 1105524 - RNA, 19 nt, Homo sapiens
  misc_RNA (1)...(19): siRNA sense strand
guauggcagcugaugaugu

SEQ ID NO: 1105525 - RNA, 19 nt, Homo sapiens
  misc_RNA (1)...(19): siRNA sense strand
cagggcacuugaacaccaa

SEQ ID NO: 1105526 - RNA, 19 nt, Homo sapiens
  misc_RNA (1)...(19): siRNA sense strand
cagaaccgcagggcacuug

SEQ ID NO: 1105527 - RNA, 19 nt, Homo sapiens
  misc_RNA (1)...(19): siRNA sense strand
ggauauagcuagugcaaua

SEQ ID NO: 1105528 - RNA, 19 nt, Homo sapiens
  misc_RNA (1)...(19): siRNA sense strand
uggaagagaugaagaauga

SEQ ID NO: 1105529 - RNA, 19 nt, Homo sapiens
  misc_RNA (1)...(19): siRNA sense strand
caaaccaacuuaauacuuc

SEQ ID NO: 1105530 - RNA, 19 nt, Homo sapiens
  misc_RNA (1)...(19): siRNA sense strand
ucaguaagaucccagauga

SEQ ID NO: 1105531 - RNA, 19 nt, Homo sapiens
  misc_RNA (1)...(19): siRNA sense strand
ccacauccaugguuucuau

SEQ ID NO: 1105532 - RNA, 19 nt, Homo sapiens
  misc_RNA (1)...(19): siRNA sense strand
guagaagaguauaugauug

SEQ ID NO: 1105533 - RNA, 19 nt, Homo sapiens
  misc_RNA (1)...(19): siRNA sense strand
uauggcagcugaugaugua

SEQ ID NO: 1105534 - RNA, 19 nt, Homo sapiens
  misc_RNA (1)...(19): siRNA sense strand
ggcaauaaauguguucgua

SEQ ID NO: 1105535 - RNA, 19 nt, Homo sapiens
  misc_RNA (1)...(19): siRNA sense strand
gcacgagcacuuaaacaaa

SEQ ID NO: 1105536 - RNA, 19 nt, Homo sapiens
  misc_RNA (1)...(19): siRNA sense strand
gcaauaaauguguucguaa

SEQ ID NO: 1105537 - RNA, 19 nt, Homo sapiens
  misc_RNA (1)...(19): siRNA sense strand
gcacuuaaacaaauucuca

SEQ ID NO: 1105538 - RNA, 19 nt, Homo sapiens
  misc_RNA (1)...(19): siRNA sense strand
gcaaggcaauaaauguguu

SEQ ID NO: 1105539 - RNA, 19 nt, Homo sapiens
  misc_RNA (1)...(19): siRNA sense strand
gagagccgcuuucaucaag

SEQ ID NO: 1105540 - RNA, 19 nt, Homo sapiens
  misc_RNA (1)...(19): siRNA sense strand
caauaaauguguucguaag

SEQ ID NO: 1105541 - RNA, 19 nt, Homo sapiens
  misc_RNA (1)...(19): siRNA sense strand
ucauguauccuguguuuaa

SEQ ID NO: 1105542 - RNA, 19 nt, Homo sapiens
  misc_RNA (1)...(19): siRNA sense strand
agucauguauccuguguuu

SEQ ID NO: 1105543 - RNA, 19 nt, Homo sapiens
  misc_RNA (1)...(19): siRNA sense strand
guaaaguacuccaaaaguu

SEQ ID NO: 1105544 - RNA, 19 nt, Homo sapiens
  misc_RNA (1)...(19): siRNA sense strand
gcagucauguauccugugu

SEQ ID NO: 1105545 - RNA, 19 nt, Homo sapiens
  misc_RNA (1)...(19): siRNA sense strand
cacgagcacuuaaacaaau

SEQ ID NO: 1105546 - RNA, 19 nt, Homo sapiens
  misc_RNA (1)...(19): siRNA sense strand
gaaaaggcacgagcacuua

SEQ ID NO: 1105547 - RNA, 19 nt, Homo sapiens
  misc_RNA (1)...(19): siRNA sense strand
gaacuucuugauacaguga

SEQ ID NO: 1105548 - RNA, 19 nt, Homo sapiens
  misc_RNA (1)...(19): siRNA sense strand
guaagugccaaccgacuaa

SEQ ID NO: 1105549 - RNA, 19 nt, Homo sapiens
  misc_RNA (1)...(19): siRNA sense strand
gaagagaugaagaaugaag

SEQ ID NO: 1105550 - RNA, 19 nt, Homo sapiens
  misc_RNA (1)...(19): siRNA sense strand
ggaugacaauggaagagau

SEQ ID NO: 1105551 - RNA, 19 nt, Homo sapiens
  misc_RNA (1)...(19): siRNA sense strand
aaagauggcaaggcaauaa

SEQ ID NO: 1105552 - RNA, 19 nt, Homo sapiens
  misc_RNA (1)...(19): siRNA sense strand
uguauccuguguuuaauga

SEQ ID NO: 1105553 - RNA, 19 nt, Homo sapiens
  misc_RNA (1)...(19): siRNA sense strand
cugaugauguagaagagua

SEQ ID NO: 1105554 - RNA, 19 nt, Homo sapiens
  misc_RNA (1)...(19): siRNA sense strand
cggagucccuucuucguau

SEQ ID NO: 1105555 - RNA, 19 nt, Homo sapiens
  misc_RNA (1)...(19): siRNA sense strand
caucaaaccaacuuaauac

SEQ ID NO: 1105556 - RNA, 19 nt, Homo sapiens
  misc_RNA (1)...(19): siRNA sense strand
gcagacaaucaaggauaua

SEQ ID NO: 1105557 - RNA, 19 nt, Homo sapiens
  misc_RNA (1)...(19): siRNA sense strand
caauggaagagaugaagaa

SEQ ID NO: 1105558 - RNA, 19 nt, Homo sapiens
  misc_RNA (1)...(19): siRNA sense strand
ucacacaagacaucauuau

SEQ ID NO: 1105559 - RNA, 19 nt, Homo sapiens
  misc_RNA (1)...(19): siRNA sense strand
gugauacucugaaaacgua

SEQ ID NO: 1105560 - RNA, 19 nt, Homo sapiens
  misc_RNA (1)...(19): siRNA sense strand
gauguagaagaguauauga

SEQ ID NO: 1105561 - RNA, 19 nt, Homo sapiens
  misc_RNA (1)...(19): siRNA sense strand
ccaaccgacuaauucauca

SEQ ID NO: 1105562 - RNA, 19 nt, Homo sapiens
  misc_RNA (1)...(19): siRNA sense strand
gauauagcuagugcaauaa

SEQ ID NO: 1105563 - RNA, 19 nt, Homo sapiens
  misc_RNA (1)...(19): siRNA sense strand
ugagguuucugcagacaau

SEQ ID NO: 1105564 - RNA, 19 nt, Homo sapiens
  misc_RNA (1)...(19): siRNA sense strand
ggcagcugaugauguagaa

SEQ ID NO: 1105565 - RNA, 19 nt, Homo sapiens
  misc_RNA (1)...(19): siRNA sense strand
gaaccgcagggcacuugaa

SEQ ID NO: 1105566 - RNA, 19 nt, Homo sapiens
  misc_RNA (1)...(19): siRNA sense strand
gaacgaccagagccagaau

SEQ ID NO: 1105567 - RNA, 19 nt, Homo sapiens
  misc_RNA (1)...(19): siRNA sense strand
auaaauguguucguaagug

SEQ ID NO: 1105568 - RNA, 19 nt, Homo sapiens
  misc_RNA (1)...(19): siRNA sense strand
gauggcaaggcaauaaaug

SEQ ID NO: 1105569 - RNA, 19 nt, Homo sapiens
  misc_RNA (1)...(19): siRNA sense strand
uccaaaaguuucagugaua

SEQ ID NO: 1105570 - RNA, 19 nt, Homo sapiens
  misc_RNA (1)...(19): siRNA sense strand
ggcacgagcacuuaaacaa

SEQ ID NO: 1105571 - RNA, 19 nt, Homo sapiens
  misc_RNA (1)...(19): siRNA sense strand
gaccagagccagaauucca

SEQ ID NO: 1105572 - RNA, 19 nt, Homo sapiens
  misc_RNA (1)...(19): siRNA sense strand
ggagucccuucuucguaug

SEQ ID NO: 1105573 - RNA, 19 nt, Homo sapiens
  misc_RNA (1)...(19): siRNA sense strand
uaaagauggcaaggcaaua

SEQ ID NO: 1105574 - RNA, 19 nt, Homo sapiens
  misc_RNA (1)...(19): siRNA sense strand
cagcugaugauguagaaga

SEQ ID NO: 1105575 - RNA, 19 nt, Homo sapiens
  misc_RNA (1)...(19): siRNA sense strand
aaucaaggauauagcuagu

SEQ ID NO: 1105576 - RNA, 19 nt, Homo sapiens
  misc_RNA (1)...(19): siRNA sense strand
cugcagacaaucaaggaua

SEQ ID NO: 1105577 - RNA, 19 nt, Homo sapiens
  misc_RNA (1)...(19): siRNA sense strand
gaaauaucaauaccagaac

SEQ ID NO: 1105578 - RNA, 19 nt, Homo sapiens
  misc_RNA (1)...(19): siRNA sense strand
ugagcuagaacgaguaaau

SEQ ID NO: 1105579 - RNA, 19 nt, Homo sapiens
  misc_RNA (1)...(19): siRNA sense strand
ugcagacaaucaaggauau

SEQ ID NO: 1105580 - RNA, 19 nt, Homo sapiens
  misc_RNA (1)...(19): siRNA sense strand
cuagaacgaguaaaucugu

SEQ ID NO: 1105581 - RNA, 19 nt, Homo sapiens
  misc_RNA (1)...(19): siRNA sense strand
gagcuagaacgaguaaauc

SEQ ID NO: 1105582 - RNA, 19 nt, Homo sapiens
  misc_RNA (1)...(19): siRNA sense strand
aaauccaggucucacacaa

SEQ ID NO: 1105583 - RNA, 19 nt, Homo sapiens
  misc_RNA (1)...(19): siRNA sense strand
gaugauguagaagaguaua

SEQ ID NO: 1105584 - RNA, 19 nt, Homo sapiens
  misc_RNA (1)...(19): siRNA sense strand
gaugacaauggaagagaug

SEQ ID NO: 1105585 - RNA, 19 nt, Homo sapiens
  misc_RNA (1)...(19): siRNA sense strand
uacagugaauaaugucuuc

SEQ ID NO: 1105586 - RNA, 19 nt, Homo sapiens
  misc_RNA (1)...(19): siRNA sense strand
ucccagaugagaucaauga

SEQ ID NO: 1105587 - RNA, 19 nt, Homo sapiens
  misc_RNA (1)...(19): siRNA sense strand
cauguauccuguguuuaau

SEQ ID NO: 1105588 - RNA, 19 nt, Homo sapiens
  misc_RNA (1)...(19): siRNA sense strand
acgagcacuuaaacaaauu

SEQ ID NO: 1105589 - RNA, 19 nt, Homo sapiens
  misc_RNA (1)...(19): siRNA sense strand
acugagagccgcuuucauc

SEQ ID NO: 1105590 - RNA, 19 nt, Homo sapiens
  misc_RNA (1)...(19): siRNA sense strand
cguaagugccaaccgacua

SEQ ID NO: 1105591 - RNA, 19 nt, Homo sapiens
  misc_RNA (1)...(19): siRNA sense strand
gagaucaaugacagaguga

SEQ ID NO: 1105592 - RNA, 19 nt, Homo sapiens
  misc_RNA (1)...(19): siRNA sense strand
aguaagaucccagaugaga

SEQ ID NO: 1105593 - RNA, 19 nt, Homo sapiens
  misc_RNA (1)...(19): siRNA sense strand
uuaaagauggcaaggcaau

SEQ ID NO: 1105594 - RNA, 19 nt, Homo sapiens
  misc_RNA (1)...(19): siRNA sense strand
cuugauacagugaauaaug

SEQ ID NO: 1105595 - RNA, 19 nt, Homo sapiens
  misc_RNA (1)...(19): siRNA sense strand
ucaaugacagagugagguu

SEQ ID NO: 1105596 - RNA, 19 nt, Homo sapiens
  misc_RNA (1)...(19): siRNA sense strand
auccaggucucacacaaga

SEQ ID NO: 1105597 - RNA, 19 nt, Homo sapiens
  misc_RNA (1)...(19): siRNA sense strand
ccucuaugcagucauguau

SEQ ID NO: 1105598 - RNA, 19 nt, Homo sapiens
  misc_RNA (1)...(19): siRNA sense strand
gccaaccgacuaauucauc

SEQ ID NO: 1105599 - RNA, 19 nt, Homo sapiens
  misc_RNA (1)...(19): siRNA sense strand
gcuagaacgaguaaaucug

SEQ ID NO: 1105600 - RNA, 19 nt, Homo sapiens
  misc_RNA (1)...(19): siRNA sense strand
aaaggcacgagcacuuaaa

SEQ ID NO: 1105601 - RNA, 19 nt, Homo sapiens
  misc_RNA (1)...(19): siRNA sense strand
guaagaucccagaugagau

SEQ ID NO: 1105602 - RNA, 19 nt, Homo sapiens
  misc_RNA (1)...(19): siRNA sense strand
ggcaaggcaauaaaugugu

SEQ ID NO: 1105603 - RNA, 19 nt, Homo sapiens
  misc_RNA (1)...(19): siRNA sense strand
ugagagccgcuuucaucaa

SEQ ID NO: 1105604 - RNA, 19 nt, Homo sapiens
  misc_RNA (1)...(19): siRNA sense strand
ucucacacaagacaucauu

SEQ ID NO: 1105605 - RNA, 19 nt, Homo sapiens
  misc_RNA (1)...(19): siRNA sense strand
ccagaugagaucaaugaca

SEQ ID NO: 1105606 - RNA, 19 nt, Homo sapiens
  misc_RNA (1)...(19): siRNA sense strand
ugacaauggaagagaugaa

SEQ ID NO: 1105607 - RNA, 19 nt, Homo sapiens
  misc_RNA (1)...(19): siRNA sense strand
cuucagaccuucaaaacug

SEQ ID NO: 1105608 - RNA, 19 nt, Homo sapiens
  misc_RNA (1)...(19): siRNA sense strand
gcacuugaacaccaaaaga

SEQ ID NO: 1105609 - RNA, 19 nt, Homo sapiens
  misc_RNA (1)...(19): siRNA sense strand
gaagaguauaugauugaac

SEQ ID NO: 1105610 - RNA, 19 nt, Homo sapiens
  misc_RNA (1)...(19): siRNA sense strand
cacacaagacaucauuaug

SEQ ID NO: 1105611 - RNA, 19 nt, Homo sapiens
  misc_RNA (1)...(19): siRNA sense strand
guauggcagcugaugaugu

SEQ ID NO: 1105612 - RNA, 19 nt, Homo sapiens
  misc_RNA (1)...(19): siRNA sense strand
cagggcacuugaacaccaa

SEQ ID NO: 1105613 - RNA, 19 nt, Homo sapiens
  misc_RNA (1)...(19): siRNA sense strand
cagaaccgcagggcacuug

SEQ ID NO: 1105614 - RNA, 19 nt, Homo sapiens
  misc_RNA (1)...(19): siRNA sense strand
ggauauagcuagugcaaua

SEQ ID NO: 1105615 - RNA, 19 nt, Homo sapiens
  misc_RNA (1)...(19): siRNA sense strand
uggaagagaugaagaauga

SEQ ID NO: 1105616 - RNA, 19 nt, Homo sapiens
  misc_RNA (1)...(19): siRNA sense strand
caaaccaacuuaauacuuc

SEQ ID NO: 1105617 - RNA, 19 nt, Homo sapiens
  misc_RNA (1)...(19): siRNA sense strand
ucaguaagaucccagauga

SEQ ID NO: 1105618 - RNA, 19 nt, Homo sapiens
  misc_RNA (1)...(19): siRNA sense strand
ccacauccaugguuucuau

SEQ ID NO: 1105619 - RNA, 19 nt, Homo sapiens
  misc_RNA (1)...(19): siRNA sense strand
guagaagaguauaugauug

SEQ ID NO: 1105620 - RNA, 19 nt, Homo sapiens
  misc_RNA (1)...(19): siRNA sense strand
uauggcagcugaugaugua

SEQ ID NO: 1105621 - RNA, 19 nt, Homo sapiens
  misc_RNA (1)...(19): siRNA sense strand
ggcaauaaauguguucgua

SEQ ID NO: 1105622 - RNA, 19 nt, Homo sapiens
  misc_RNA (1)...(19): siRNA sense strand
gcacgagcacuuaaacaaa

SEQ ID NO: 1105623 - RNA, 19 nt, Homo sapiens
  misc_RNA (1)...(19): siRNA sense strand
gcaauaaauguguucguaa

SEQ ID NO: 1105624 - RNA, 19 nt, Homo sapiens
  misc_RNA (1)...(19): siRNA sense strand
gcacuuaaacaaauucuca

SEQ ID NO: 1105625 - RNA, 19 nt, Homo sapiens
  misc_RNA (1)...(19): siRNA sense strand
gcaaggcaauaaauguguu

SEQ ID NO: 1105626 - RNA, 19 nt, Homo sapiens
  misc_RNA (1)...(19): siRNA sense strand
gagagccgcuuucaucaag

SEQ ID NO: 1105627 - RNA, 19 nt, Homo sapiens
  misc_RNA (1)...(19): siRNA sense strand
caauaaauguguucguaag

SEQ ID NO: 1105628 - RNA, 19 nt, Homo sapiens
  misc_RNA (1)...(19): siRNA sense strand
ucauguauccuguguuuaa

SEQ ID NO: 1105629 - RNA, 19 nt, Homo sapiens
  misc_RNA (1)...(19): siRNA sense strand
agucauguauccuguguuu

SEQ ID NO: 1105630 - RNA, 19 nt, Homo sapiens
  misc_RNA (1)...(19): siRNA sense strand
guaaaguacuccaaaaguu

SEQ ID NO: 1105631 - RNA, 19 nt, Homo sapiens
  misc_RNA (1)...(19): siRNA sense strand
gcagucauguauccugugu

SEQ ID NO: 1105632 - RNA, 19 nt, Homo sapiens
  misc_RNA (1)...(19): siRNA sense strand
cacgagcacuuaaacaaau

SEQ ID NO: 1105633 - RNA, 19 nt, Homo sapiens
  misc_RNA (1)...(19): siRNA sense strand
gaaaaggcacgagcacuua

SEQ ID NO: 1105634 - RNA, 19 nt, Homo sapiens
  misc_RNA (1)...(19): siRNA sense strand
gaacuucuugauacaguga

SEQ ID NO: 1105635 - RNA, 19 nt, Homo sapiens
  misc_RNA (1)...(19): siRNA sense strand
guaagugccaaccgacuaa

SEQ ID NO: 1105636 - RNA, 19 nt, Homo sapiens
  misc_RNA (1)...(19): siRNA sense strand
gaagagaugaagaaugaag

SEQ ID NO: 1105637 - RNA, 19 nt, Homo sapiens
  misc_RNA (1)...(19): siRNA sense strand
ggaugacaauggaagagau

SEQ ID NO: 1105638 - RNA, 19 nt, Homo sapiens
  misc_RNA (1)...(19): siRNA sense strand
aaagauggcaaggcaauaa

SEQ ID NO: 1105639 - RNA, 19 nt, Homo sapiens
  misc_RNA (1)...(19): siRNA sense strand
uguauccuguguuuaauga

SEQ ID NO: 1105640 - RNA, 19 nt, Homo sapiens
  misc_RNA (1)...(19): siRNA sense strand
cugaugauguagaagagua

SEQ ID NO: 1105641 - RNA, 19 nt, Homo sapiens
  misc_RNA (1)...(19): siRNA sense strand
cggagucccuucuucguau

SEQ ID NO: 1105642 - RNA, 19 nt, Homo sapiens
  misc_RNA (1)...(19): siRNA sense strand
caucaaaccaacuuaauac

SEQ ID NO: 1105643 - RNA, 19 nt, Homo sapiens
  misc_RNA (1)...(19): siRNA sense strand
gcagacaaucaaggauaua

SEQ ID NO: 1105644 - RNA, 19 nt, Homo sapiens
  misc_RNA (1)...(19): siRNA sense strand
caauggaagagaugaagaa

SEQ ID NO: 1105645 - RNA, 19 nt, Homo sapiens
  misc_RNA (1)...(19): siRNA sense strand
ucacacaagacaucauuau

SEQ ID NO: 1105646 - RNA, 19 nt, Homo sapiens
  misc_RNA (1)...(19): siRNA sense strand
gugauacucugaaaacgua

SEQ ID NO: 1105647 - RNA, 19 nt, Homo sapiens
  misc_RNA (1)...(19): siRNA sense strand
gauguagaagaguauauga

SEQ ID NO: 1105648 - RNA, 19 nt, Homo sapiens
  misc_RNA (1)...(19): siRNA sense strand
ccaaccgacuaauucauca

SEQ ID NO: 1105649 - RNA, 19 nt, Homo sapiens
  misc_RNA (1)...(19): siRNA sense strand
gauauagcuagugcaauaa

SEQ ID NO: 1105650 - RNA, 19 nt, Homo sapiens
  misc_RNA (1)...(19): siRNA sense strand
ugagguuucugcagacaau

SEQ ID NO: 1105651 - RNA, 19 nt, Homo sapiens
  misc_RNA (1)...(19): siRNA sense strand
ggcagcugaugauguagaa

SEQ ID NO: 1105652 - RNA, 19 nt, Homo sapiens
  misc_RNA (1)...(19): siRNA sense strand
gaaccgcagggcacuugaa

SEQ ID NO: 1105653 - RNA, 19 nt, Homo sapiens
  misc_RNA (1)...(19): siRNA sense strand
gaacgaccagagccagaau

SEQ ID NO: 1105654 - RNA, 19 nt, Homo sapiens
  misc_RNA (1)...(19): siRNA sense strand
auaaauguguucguaagug

SEQ ID NO: 1105655 - RNA, 19 nt, Homo sapiens
  misc_RNA (1)...(19): siRNA sense strand
gauggcaaggcaauaaaug

SEQ ID NO: 1105656 - RNA, 19 nt, Homo sapiens
  misc_RNA (1)...(19): siRNA sense strand
uccaaaaguuucagugaua

SEQ ID NO: 1105657 - RNA, 19 nt, Homo sapiens
  misc_RNA (1)...(19): siRNA sense strand
ggcacgagcacuuaaacaa

SEQ ID NO: 1105658 - RNA, 19 nt, Homo sapiens
  misc_RNA (1)...(19): siRNA sense strand
gaccagagccagaauucca

SEQ ID NO: 1105659 - RNA, 19 nt, Homo sapiens
  misc_RNA (1)...(19): siRNA sense strand
ggagucccuucuucguaug

SEQ ID NO: 1105660 - RNA, 19 nt, Homo sapiens
  misc_RNA (1)...(19): siRNA sense strand
uaaagauggcaaggcaaua

SEQ ID NO: 1105661 - RNA, 19 nt, Homo sapiens
  misc_RNA (1)...(19): siRNA sense strand
cagcugaugauguagaaga

SEQ ID NO: 1105662 - RNA, 19 nt, Homo sapiens
  misc_RNA (1)...(19): siRNA sense strand
aaucaaggauauagcuagu

SEQ ID NO: 1105663 - RNA, 19 nt, Homo sapiens
  misc_RNA (1)...(19): siRNA sense strand
cugcagacaaucaaggaua

SEQ ID NO: 1105664 - RNA, 19 nt, Homo sapiens
  misc_RNA (1)...(19): siRNA sense strand
gaaauaucaauaccagaac

SEQ ID NO: 1105665 - RNA, 19 nt, Homo sapiens
  misc_RNA (1)...(19): siRNA sense strand
ugagcuagaacgaguaaau

SEQ ID NO: 1105666 - RNA, 19 nt, Homo sapiens
  misc_RNA (1)...(19): siRNA sense strand
ugcagacaaucaaggauau

SEQ ID NO: 1105667 - RNA, 19 nt, Homo sapiens
  misc_RNA (1)...(19): siRNA sense strand
cuagaacgaguaaaucugu

SEQ ID NO: 1105668 - RNA, 19 nt, Homo sapiens
  misc_RNA (1)...(19): siRNA sense strand
gagcuagaacgaguaaauc

SEQ ID NO: 1105669 - RNA, 19 nt, Homo sapiens
  misc_RNA (1)...(19): siRNA sense strand
aaauccaggucucacacaa

SEQ ID NO: 1105670 - RNA, 19 nt, Homo sapiens
  misc_RNA (1)...(19): siRNA sense strand
gaugauguagaagaguaua

SEQ ID NO: 1105671 - RNA, 19 nt, Homo sapiens
  misc_RNA (1)...(19): siRNA sense strand
gaugacaauggaagagaug

SEQ ID NO: 1105672 - RNA, 19 nt, Homo sapiens
  misc_RNA (1)...(19): siRNA sense strand
uacagugaauaaugucuuc

SEQ ID NO: 1105673 - RNA, 19 nt, Homo sapiens
  misc_RNA (1)...(19): siRNA sense strand
ucccagaugagaucaauga

SEQ ID NO: 1105674 - RNA, 19 nt, Homo sapiens
  misc_RNA (1)...(19): siRNA sense strand
cauguauccuguguuuaau

SEQ ID NO: 1105675 - RNA, 19 nt, Homo sapiens
  misc_RNA (1)...(19): siRNA sense strand
acgagcacuuaaacaaauu

SEQ ID NO: 1105676 - RNA, 19 nt, Homo sapiens
  misc_RNA (1)...(19): siRNA sense strand
acugagagccgcuuucauc

SEQ ID NO: 1105677 - RNA, 19 nt, Homo sapiens
  misc_RNA (1)...(19): siRNA sense strand
cguaagugccaaccgacua

SEQ ID NO: 1105678 - RNA, 19 nt, Homo sapiens
  misc_RNA (1)...(19): siRNA sense strand
gagaucaaugacagaguga

SEQ ID NO: 1105679 - RNA, 19 nt, Homo sapiens
  misc_RNA (1)...(19): siRNA sense strand
aguaagaucccagaugaga

SEQ ID NO: 1105680 - RNA, 19 nt, Homo sapiens
  misc_RNA (1)...(19): siRNA sense strand
uuaaagauggcaaggcaau

SEQ ID NO: 1105681 - RNA, 19 nt, Homo sapiens
  misc_RNA (1)...(19): siRNA sense strand
cuugauacagugaauaaug

SEQ ID NO: 1105682 - RNA, 19 nt, Homo sapiens
  misc_RNA (1)...(19): siRNA sense strand
ucaaugacagagugagguu

SEQ ID NO: 1105683 - RNA, 19 nt, Homo sapiens
  misc_RNA (1)...(19): siRNA sense strand
auccaggucucacacaaga

SEQ ID NO: 1105684 - RNA, 19 nt, Homo sapiens
  misc_RNA (1)...(19): siRNA sense strand
ccucuaugcagucauguau

SEQ ID NO: 1105685 - RNA, 19 nt, Homo sapiens
  misc_RNA (1)...(19): siRNA sense strand
gccaaccgacuaauucauc

SEQ ID NO: 1105686 - RNA, 19 nt, Homo sapiens
  misc_RNA (1)...(19): siRNA sense strand
gcuagaacgaguaaaucug

SEQ ID NO: 1105687 - RNA, 19 nt, Homo sapiens
  misc_RNA (1)...(19): siRNA sense strand
aaaggcacgagcacuuaaa

SEQ ID NO: 1105688 - RNA, 19 nt, Homo sapiens
  misc_RNA (1)...(19): siRNA sense strand
guaagaucccagaugagau

SEQ ID NO: 1105689 - RNA, 19 nt, Homo sapiens
  misc_RNA (1)...(19): siRNA sense strand
ggcaaggcaauaaaugugu

SEQ ID NO: 1105690 - RNA, 19 nt, Homo sapiens
  misc_RNA (1)...(19): siRNA sense strand
ugagagccgcuuucaucaa

SEQ ID NO: 1105691 - RNA, 19 nt, Homo sapiens
  misc_RNA (1)...(19): siRNA sense strand
ucucacacaagacaucauu

SEQ ID NO: 1105692 - RNA, 19 nt, Homo sapiens
  misc_RNA (1)...(19): siRNA sense strand
ccagaugagaucaaugaca

SEQ ID NO: 1105693 - RNA, 19 nt, Homo sapiens
  misc_RNA (1)...(19): siRNA sense strand
ugacaauggaagagaugaa

SEQ ID NO: 1105694 - RNA, 19 nt, Homo sapiens
  misc_RNA (1)...(19): siRNA sense strand
cuucagaccuucaaaacug

SEQ ID NO: 1105695 - RNA, 19 nt, Homo sapiens
  misc_RNA (1)...(19): siRNA sense strand
gcacuugaacaccaaaaga

SEQ ID NO: 1105696 - RNA, 19 nt, Homo sapiens
  misc_RNA (1)...(19): siRNA sense strand
gaagaguauaugauugaac

SEQ ID NO: 1105697 - RNA, 19 nt, Homo sapiens
  misc_RNA (1)...(19): siRNA sense strand
cacacaagacaucauuaug

SEQ ID NO: 1105698 - RNA, 19 nt, Homo sapiens
  misc_RNA (1)...(19): siRNA sense strand
guauggcagcugaugaugu

SEQ ID NO: 1105699 - RNA, 19 nt, Homo sapiens
  misc_RNA (1)...(19): siRNA sense strand
cagggcacuugaacaccaa

SEQ ID NO: 1105700 - RNA, 19 nt, Homo sapiens
  misc_RNA (1)...(19): siRNA sense strand
cagaaccgcagggcacuug

SEQ ID NO: 1105701 - RNA, 19 nt, Homo sapiens
  misc_RNA (1)...(19): siRNA sense strand
gaagaauucgucccacuaa

SEQ ID NO: 1105702 - RNA, 19 nt, Homo sapiens
  misc_RNA (1)...(19): siRNA sense strand
acaaugauguuuccuguga

SEQ ID NO: 1105703 - RNA, 19 nt, Homo sapiens
  misc_RNA (1)...(19): siRNA sense strand
aaacugaacagaagaauuc

SEQ ID NO: 1105704 - RNA, 19 nt, Homo sapiens
  misc_RNA (1)...(19): siRNA sense strand
acacgaaccucugcaaguu

SEQ ID NO: 1105705 - RNA, 19 nt, Homo sapiens
  misc_RNA (1)...(19): siRNA sense strand
gaauucgucccacuaaaga

SEQ ID NO: 1105706 - RNA, 19 nt, Homo sapiens
  misc_RNA (1)...(19): siRNA sense strand
caacgucuccucucauugu

SEQ ID NO: 1105707 - RNA, 19 nt, Homo sapiens
  misc_RNA (1)...(19): siRNA sense strand
ccaaguggauccaggaaac

SEQ ID NO: 1105708 - RNA, 19 nt, Homo sapiens
  misc_RNA (1)...(19): siRNA sense strand
cuccagugcuugaauauca

SEQ ID NO: 1105709 - RNA, 19 nt, Homo sapiens
  misc_RNA (1)...(19): siRNA sense strand
caaacugaacagaagaauu

SEQ ID NO: 1105710 - RNA, 19 nt, Homo sapiens
  misc_RNA (1)...(19): siRNA sense strand
gaucacagccuugcuucug

SEQ ID NO: 1105711 - RNA, 19 nt, Homo sapiens
  misc_RNA (1)...(19): siRNA sense strand
guccuccagugcuugaaua

SEQ ID NO: 1105712 - RNA, 19 nt, Homo sapiens
  misc_RNA (1)...(19): siRNA sense strand
ucaucaaacugaacagaag

SEQ ID NO: 1105713 - RNA, 19 nt, Homo sapiens
  misc_RNA (1)...(19): siRNA sense strand
aagaauucgucccacuaaa

SEQ ID NO: 1105714 - RNA, 19 nt, Homo sapiens
  misc_RNA (1)...(19): siRNA sense strand
gaauaucagcgugcuaagu

SEQ ID NO: 1105715 - RNA, 19 nt, Homo sapiens
  misc_RNA (1)...(19): siRNA sense strand
gcagccgcaucaucaaugg

SEQ ID NO: 1105716 - RNA, 19 nt, Homo sapiens
  misc_RNA (1)...(19): siRNA sense strand
cuaagguccuccagugcuu

SEQ ID NO: 1105717 - RNA, 19 nt, Homo sapiens
  misc_RNA (1)...(19): siRNA sense strand
gacagcagcagccgcauca

SEQ ID NO: 1105718 - RNA, 19 nt, Homo sapiens
  misc_RNA (1)...(19): siRNA sense strand
aaaggugcgaggaugcuua

SEQ ID NO: 1105719 - RNA, 19 nt, Homo sapiens
  misc_RNA (1)...(19): siRNA sense strand
agaagaauucgucccacua

SEQ ID NO: 1105720 - RNA, 19 nt, Homo sapiens
  misc_RNA (1)...(19): siRNA sense strand
gauagaugacaccauguuc

SEQ ID NO: 1105721 - RNA, 19 nt, Homo sapiens
  misc_RNA (1)...(19): siRNA sense strand
gcaaguucaccaaguggau

SEQ ID NO: 1105722 - RNA, 19 nt, Homo sapiens
  misc_RNA (1)...(19): siRNA sense strand
ugucaccaguuuaugaauc

SEQ ID NO: 1105723 - RNA, 19 nt, Homo sapiens
  misc_RNA (1)...(19): siRNA sense strand
caucaaacugaacagaaga

SEQ ID NO: 1105724 - RNA, 19 nt, Homo sapiens
  misc_RNA (1)...(19): siRNA sense strand
gcagcagccgcaucaucaa

SEQ ID NO: 1105725 - RNA, 19 nt, Homo sapiens
  misc_RNA (1)...(19): siRNA sense strand
gcucaucaaacugaacaga

SEQ ID NO: 1105726 - RNA, 19 nt, Homo sapiens
  misc_RNA (1)...(19): siRNA sense strand
ucugcaaguucaccaagug

SEQ ID NO: 1105727 - RNA, 19 nt, Homo sapiens
  misc_RNA (1)...(19): siRNA sense strand
agaauucgucccacuaaag

SEQ ID NO: 1105728 - RNA, 19 nt, Homo sapiens
  misc_RNA (1)...(19): siRNA sense strand
ugggugcucugugcucuga

SEQ ID NO: 1105729 - RNA, 19 nt, Homo sapiens
  misc_RNA (1)...(19): siRNA sense strand
ggugcucugugcucugauc

SEQ ID NO: 1105730 - RNA, 19 nt, Homo sapiens
  misc_RNA (1)...(19): siRNA sense strand
aauaucagcgugcuaaguc

SEQ ID NO: 1105731 - RNA, 19 nt, Homo sapiens
  misc_RNA (1)...(19): siRNA sense strand
gucaccaguuuaugaaucu

SEQ ID NO: 1105732 - RNA, 19 nt, Homo sapiens
  misc_RNA (1)...(19): siRNA sense strand
uugaauaucagcgugcuaa

SEQ ID NO: 1105733 - RNA, 19 nt, Homo sapiens
  misc_RNA (1)...(19): siRNA sense strand
gaugcuuacccgagacaga

SEQ ID NO: 1105734 - RNA, 19 nt, Homo sapiens
  misc_RNA (1)...(19): siRNA sense strand
agauagaugacaccauguu

SEQ ID NO: 1105735 - RNA, 19 nt, Homo sapiens
  misc_RNA (1)...(19): siRNA sense strand
gacaaacggucuuucauua

SEQ ID NO: 1105736 - RNA, 19 nt, Homo sapiens
  misc_RNA (1)...(19): siRNA sense strand
gaaguuaacaucccuaaua

SEQ ID NO: 1105737 - RNA, 19 nt, Homo sapiens
  misc_RNA (1)...(19): siRNA sense strand
gacaagagauggagacaaa

SEQ ID NO: 1105738 - RNA, 19 nt, Homo sapiens
  misc_RNA (1)...(19): siRNA sense strand
gcaaugaacagaugacuaa

SEQ ID NO: 1105739 - RNA, 19 nt, Homo sapiens
  misc_RNA (1)...(19): siRNA sense strand
gaaauggcaugugcaauug

SEQ ID NO: 1105740 - RNA, 19 nt, Homo sapiens
  misc_RNA (1)...(19): siRNA sense strand
gaugcugccucucaacuua

SEQ ID NO: 1105741 - RNA, 19 nt, Homo sapiens
  misc_RNA (1)...(19): siRNA sense strand
uggcagagcuguacacaaa

SEQ ID NO: 1105742 - RNA, 19 nt, Homo sapiens
  misc_RNA (1)...(19): siRNA sense strand
gagaagaccagauguugua

SEQ ID NO: 1105743 - RNA, 19 nt, Homo sapiens
  misc_RNA (1)...(19): siRNA sense strand
gaaagugcugugacuguua

SEQ ID NO: 1105744 - RNA, 19 nt, Homo sapiens
  misc_RNA (1)...(19): siRNA sense strand
gcauuucucaucuacauua

SEQ ID NO: 1105745 - RNA, 19 nt, Homo sapiens
  misc_RNA (1)...(19): siRNA sense strand
gcagagcuguacacaaaga

SEQ ID NO: 1105746 - RNA, 19 nt, Homo sapiens
  misc_RNA (1)...(19): siRNA sense strand
gaacagaugacuaaguaug

SEQ ID NO: 1105747 - RNA, 19 nt, Homo sapiens
  misc_RNA (1)...(19): siRNA sense strand
gaacaaauccaccuuacag

SEQ ID NO: 1105748 - RNA, 19 nt, Homo sapiens
  misc_RNA (1)...(19): siRNA sense strand
gcaguuggcugugguuuca

SEQ ID NO: 1105749 - RNA, 19 nt, Homo sapiens
  misc_RNA (1)...(19): siRNA sense strand
ucaaagauguggccacugu

SEQ ID NO: 1105750 - RNA, 19 nt, Homo sapiens
  misc_RNA (1)...(19): siRNA sense strand
gagcauuucucaucuacau

SEQ ID NO: 1105751 - RNA, 19 nt, Homo sapiens
  misc_RNA (1)...(19): siRNA sense strand
gaauuggaaucaaagaauc

SEQ ID NO: 1105752 - RNA, 19 nt, Homo sapiens
  misc_RNA (1)...(19): siRNA sense strand
gcacaacguccgagaaaug

SEQ ID NO: 1105753 - RNA, 19 nt, Homo sapiens
  misc_RNA (1)...(19): siRNA sense strand
acaaagaauuucagcagaa

SEQ ID NO: 1105754 - RNA, 19 nt, Homo sapiens
  misc_RNA (1)...(19): siRNA sense strand
uuacagagaggaagacaua

SEQ ID NO: 1105755 - RNA, 19 nt, Homo sapiens
  misc_RNA (1)...(19): siRNA sense strand
ugaaauggcaugugcaauu

SEQ ID NO: 1105756 - RNA, 19 nt, Homo sapiens
  misc_RNA (1)...(19): siRNA sense strand
ucacuggucuggcaaugaa

SEQ ID NO: 1105757 - RNA, 19 nt, Homo sapiens
  misc_RNA (1)...(19): siRNA sense strand
gcagagagaagaccagaug

SEQ ID NO: 1105758 - RNA, 19 nt, Homo sapiens
  misc_RNA (1)...(19): siRNA sense strand
caacaagucagcaaacaug

SEQ ID NO: 1105759 - RNA, 19 nt, Homo sapiens
  misc_RNA (1)...(19): siRNA sense strand
augaacagaugacuaagua

SEQ ID NO: 1105760 - RNA, 19 nt, Homo sapiens
  misc_RNA (1)...(19): siRNA sense strand
gagcacaacguccgagaaa

SEQ ID NO: 1105761 - RNA, 19 nt, Homo sapiens
  misc_RNA (1)...(19): siRNA sense strand
caaagaauuucagcagaau

SEQ ID NO: 1105762 - RNA, 19 nt, Homo sapiens
  misc_RNA (1)...(19): siRNA sense strand
gagagaagaccagauguug

SEQ ID NO: 1105763 - RNA, 19 nt, Homo sapiens
  misc_RNA (1)...(19): siRNA sense strand
ggaugcuucugggaauuua

SEQ ID NO: 1105764 - RNA, 19 nt, Homo sapiens
  misc_RNA (1)...(19): siRNA sense strand
uacauuagcucagauuaug

SEQ ID NO: 1105765 - RNA, 19 nt, Homo sapiens
  misc_RNA (1)...(19): siRNA sense strand
cagcuugacugcuccaaau

SEQ ID NO: 1105766 - RNA, 19 nt, Homo sapiens
  misc_RNA (1)...(19): siRNA sense strand
gaccagauguuguagaaaa

SEQ ID NO: 1105767 - RNA, 19 nt, Homo sapiens
  misc_RNA (1)...(19): siRNA sense strand
aagaaucacuuuggccuuu

SEQ ID NO: 1105768 - RNA, 19 nt, Homo sapiens
  misc_RNA (1)...(19): siRNA sense strand
gcucagauuauguauuuga

SEQ ID NO: 1105769 - RNA, 19 nt, Homo sapiens
  misc_RNA (1)...(19): siRNA sense strand
caaauccaccuuacagaga

SEQ ID NO: 1105770 - RNA, 19 nt, Homo sapiens
  misc_RNA (1)...(19): siRNA sense strand
cgagaaaugcucagcuuga

SEQ ID NO: 1105771 - RNA, 19 nt, Homo sapiens
  misc_RNA (1)...(19): siRNA sense strand
cgaagaaagugcugugacu

SEQ ID NO: 1105772 - RNA, 19 nt, Homo sapiens
  misc_RNA (1)...(19): siRNA sense strand
gaacaccauuucgaauugg

SEQ ID NO: 1105773 - RNA, 19 nt, Homo sapiens
  misc_RNA (1)...(19): siRNA sense strand
aauaggaggguucugguua

SEQ ID NO: 1105774 - RNA, 19 nt, Homo sapiens
  misc_RNA (1)...(19): siRNA sense strand
aagaccagauguuguagaa

SEQ ID NO: 1105775 - RNA, 19 nt, Homo sapiens
  misc_RNA (1)...(19): siRNA sense strand
aaagugcugugacuguuau

SEQ ID NO: 1105776 - RNA, 19 nt, Homo sapiens
  misc_RNA (1)...(19): siRNA sense strand
gagcuguacacaaagaauu

SEQ ID NO: 1105777 - RNA, 19 nt, Homo sapiens
  misc_RNA (1)...(19): siRNA sense strand
ggauuccuauucuguaugg

SEQ ID NO: 1105778 - RNA, 19 nt, Homo sapiens
  misc_RNA (1)...(19): siRNA sense strand
cgaauuggaaucaaagaau

SEQ ID NO: 1105779 - RNA, 19 nt, Homo sapiens
  misc_RNA (1)...(19): siRNA sense strand
agaaagugcugugacuguu

SEQ ID NO: 1105780 - RNA, 19 nt, Homo sapiens
  misc_RNA (1)...(19): siRNA sense strand
guucaucacaucauucaug

SEQ ID NO: 1105781 - RNA, 19 nt, Homo sapiens
  misc_RNA (1)...(19): siRNA sense strand
gagaaaugcucagcuugac

SEQ ID NO: 1105782 - RNA, 19 nt, Homo sapiens
  misc_RNA (1)...(19): siRNA sense strand
acagaugacuaaguaugaa

SEQ ID NO: 1105783 - RNA, 19 nt, Homo sapiens
  misc_RNA (1)...(19): siRNA sense strand
gcagcuagcagagaagaga

SEQ ID NO: 1105784 - RNA, 19 nt, Homo sapiens
  misc_RNA (1)...(19): siRNA sense strand
uaaugcaguucaucacauc

SEQ ID NO: 1105785 - RNA, 19 nt, Homo sapiens
  misc_RNA (1)...(19): siRNA sense strand
aaagugcaguucagcaaca

SEQ ID NO: 1105786 - RNA, 19 nt, Homo sapiens
  misc_RNA (1)...(19): siRNA sense strand
cauuagcucagauuaugua

SEQ ID NO: 1105787 - RNA, 19 nt, Homo sapiens
  misc_RNA (1)...(19): siRNA sense strand
gaagaccagauguuguaga

SEQ ID NO: 1105788 - RNA, 19 nt, Homo sapiens
  misc_RNA (1)...(19): siRNA sense strand
gaauuuagcaaaggaagca

SEQ ID NO: 1105789 - RNA, 19 nt, Homo sapiens
  misc_RNA (1)...(19): siRNA sense strand
aaguuaacaucccuaauag

SEQ ID NO: 1105790 - RNA, 19 nt, Homo sapiens
  misc_RNA (1)...(19): siRNA sense strand
gccggcagcuagcagagaa

SEQ ID NO: 1105791 - RNA, 19 nt, Homo sapiens
  misc_RNA (1)...(19): siRNA sense strand
ucuaggagcugcuguuuug

SEQ ID NO: 1105792 - RNA, 19 nt, Homo sapiens
  misc_RNA (1)...(19): siRNA sense strand
ggaacaaauccaccuuaca

SEQ ID NO: 1105793 - RNA, 19 nt, Homo sapiens
  misc_RNA (1)...(19): siRNA sense strand
aaugcuggauccaucaauu

SEQ ID NO: 1105794 - RNA, 19 nt, Homo sapiens
  misc_RNA (1)...(19): siRNA sense strand
ggccuuuccucauugacaa

SEQ ID NO: 1105795 - RNA, 19 nt, Homo sapiens
  misc_RNA (1)...(19): siRNA sense strand
gaauaauuggcaugcaguu

SEQ ID NO: 1105796 - RNA, 19 nt, Homo sapiens
  misc_RNA (1)...(19): siRNA sense strand
cuaaugcaguucaucacau

SEQ ID NO: 1105797 - RNA, 19 nt, Homo sapiens
  misc_RNA (1)...(19): siRNA sense strand
gcaacaagucagcaaacau

SEQ ID NO: 1105798 - RNA, 19 nt, Homo sapiens
  misc_RNA (1)...(19): siRNA sense strand
gcagaauaauuggcaugca

SEQ ID NO: 1105799 - RNA, 19 nt, Homo sapiens
  misc_RNA (1)...(19): siRNA sense strand
agcagucacuuaagaccua

SEQ ID NO: 1105800 - RNA, 19 nt, Homo sapiens
  misc_RNA (1)...(19): siRNA sense strand
gcaguucagcaacaaguca

SEQ ID NO: 1105801 - RNA, 19 nt, Homo sapiens
  misc_RNA (1)...(19): siRNA sense strand
ugcugugacuguuauguuu

SEQ ID NO: 1105802 - RNA, 19 nt, Homo sapiens
  misc_RNA (1)...(19): siRNA sense strand
cuacauuagcucagauuau

SEQ ID NO: 1105803 - RNA, 19 nt, Homo sapiens
  misc_RNA (1)...(19): siRNA sense strand
gccagaugcugccucucaa

SEQ ID NO: 1105804 - RNA, 19 nt, Homo sapiens
  misc_RNA (1)...(19): siRNA sense strand
gagaaugcuggauccauca

SEQ ID NO: 1105805 - RNA, 19 nt, Homo sapiens
  misc_RNA (1)...(19): siRNA sense strand
caagucagcaaacauggau

SEQ ID NO: 1105806 - RNA, 19 nt, Homo sapiens
  misc_RNA (1)...(19): siRNA sense strand
uuggagaccuugggcauug

SEQ ID NO: 1105807 - RNA, 19 nt, Homo sapiens
  misc_RNA (1)...(19): siRNA sense strand
gaagagcaagaccaaaauu

SEQ ID NO: 1105808 - RNA, 19 nt, Homo sapiens
  misc_RNA (1)...(19): siRNA sense strand
gcagucacuuaagaccuau

SEQ ID NO: 1105809 - RNA, 19 nt, Homo sapiens
  misc_RNA (1)...(19): siRNA sense strand
guuggauucuaaugcaguu

SEQ ID NO: 1105810 - RNA, 19 nt, Homo sapiens
  misc_RNA (1)...(19): siRNA sense strand
gcuugacugcuccaaauug

SEQ ID NO: 1105811 - RNA, 19 nt, Homo sapiens
  misc_RNA (1)...(19): siRNA sense strand
ggagcacaacguccgagaa

SEQ ID NO: 1105812 - RNA, 19 nt, Homo sapiens
  misc_RNA (1)...(19): siRNA sense strand
ggcaaugaacagaugacua

SEQ ID NO: 1105813 - RNA, 19 nt, Homo sapiens
  misc_RNA (1)...(19): siRNA sense strand
uggcugugguuucagaaga

SEQ ID NO: 1105814 - RNA, 19 nt, Homo sapiens
  misc_RNA (1)...(19): siRNA sense strand
gcaguucaucacaucauuc

SEQ ID NO: 1105815 - RNA, 19 nt, Homo sapiens
  misc_RNA (1)...(19): siRNA sense strand
ggccaacgaacaccauuuc

SEQ ID NO: 1105816 - RNA, 19 nt, Homo sapiens
  misc_RNA (1)...(19): siRNA sense strand
cauaccagcuccccuaaau

SEQ ID NO: 1105817 - RNA, 19 nt, Homo sapiens
  misc_RNA (1)...(19): siRNA sense strand
agagagaagaccagauguu

SEQ ID NO: 1105818 - RNA, 19 nt, Homo sapiens
  misc_RNA (1)...(19): siRNA sense strand
acuuuggccuuuccucauu

SEQ ID NO: 1105819 - RNA, 19 nt, Homo sapiens
  misc_RNA (1)...(19): siRNA sense strand
gaugacuaaguaugaaaug

SEQ ID NO: 1105820 - RNA, 19 nt, Homo sapiens
  misc_RNA (1)...(19): siRNA sense strand
gcuguuggagcauuucuca

SEQ ID NO: 1105821 - RNA, 19 nt, Homo sapiens
  misc_RNA (1)...(19): siRNA sense strand
cagaagagcaagaccaaaa

SEQ ID NO: 1105822 - RNA, 19 nt, Homo sapiens
  misc_RNA (1)...(19): siRNA sense strand
guggaugcuucugggaauu

SEQ ID NO: 1105823 - RNA, 19 nt, Homo sapiens
  misc_RNA (1)...(19): siRNA sense strand
ggaaguuaacaucccuaau

SEQ ID NO: 1105824 - RNA, 19 nt, Homo sapiens
  misc_RNA (1)...(19): siRNA sense strand
gggcauuggccaacgaaca

SEQ ID NO: 1105825 - RNA, 19 nt, Homo sapiens
  misc_RNA (1)...(19): siRNA sense strand
cagaugacuaaguaugaaa

SEQ ID NO: 1105826 - RNA, 19 nt, Homo sapiens
  misc_RNA (1)...(19): siRNA sense strand
guuggagcauuucucaucu

SEQ ID NO: 1105827 - RNA, 19 nt, Homo sapiens
  misc_RNA (1)...(19): siRNA sense strand
ucaucuacauuagcucaga

SEQ ID NO: 1105828 - RNA, 19 nt, Homo sapiens
  misc_RNA (1)...(19): siRNA sense strand
acaaacggucuuucauuag

SEQ ID NO: 1105829 - RNA, 19 nt, Homo sapiens
  misc_RNA (1)...(19): siRNA sense strand
uccgagaaaugcucagcuu

SEQ ID NO: 1105830 - RNA, 19 nt, Homo sapiens
  misc_RNA (1)...(19): siRNA sense strand
acuuaagaccuauuacuga

SEQ ID NO: 1105831 - RNA, 19 nt, Homo sapiens
  misc_RNA (1)...(19): siRNA sense strand
aacagaugacuaaguauga

SEQ ID NO: 1105832 - RNA, 19 nt, Homo sapiens
  misc_RNA (1)...(19): siRNA sense strand
uugaaaagcucgaagaaag

SEQ ID NO: 1105833 - RNA, 19 nt, Homo sapiens
  misc_RNA (1)...(19): siRNA sense strand
ucuguuggauucuaaugca

SEQ ID NO: 1105834 - RNA, 19 nt, Homo sapiens
  misc_RNA (1)...(19): siRNA sense strand
uaauaggaggguucugguu

SEQ ID NO: 1105835 - RNA, 19 nt, Homo sapiens
  misc_RNA (1)...(19): siRNA sense strand
gacaaacggucuuucauua

SEQ ID NO: 1105836 - RNA, 19 nt, Homo sapiens
  misc_RNA (1)...(19): siRNA sense strand
gaaguuaacaucccuaaua

SEQ ID NO: 1105837 - RNA, 19 nt, Homo sapiens
  misc_RNA (1)...(19): siRNA sense strand
gacaagagauggagacaaa

SEQ ID NO: 1105838 - RNA, 19 nt, Homo sapiens
  misc_RNA (1)...(19): siRNA sense strand
gcaaugaacagaugacuaa

SEQ ID NO: 1105839 - RNA, 19 nt, Homo sapiens
  misc_RNA (1)...(19): siRNA sense strand
gaaauggcaugugcaauug

SEQ ID NO: 1105840 - RNA, 19 nt, Homo sapiens
  misc_RNA (1)...(19): siRNA sense strand
gaugcugccucucaacuua

SEQ ID NO: 1105841 - RNA, 19 nt, Homo sapiens
  misc_RNA (1)...(19): siRNA sense strand
uggcagagcuguacacaaa

SEQ ID NO: 1105842 - RNA, 19 nt, Homo sapiens
  misc_RNA (1)...(19): siRNA sense strand
gagaagaccagauguugua

SEQ ID NO: 1105843 - RNA, 19 nt, Homo sapiens
  misc_RNA (1)...(19): siRNA sense strand
gaaagugcugugacuguua

SEQ ID NO: 1105844 - RNA, 19 nt, Homo sapiens
  misc_RNA (1)...(19): siRNA sense strand
gcauuucucaucuacauua

SEQ ID NO: 1105845 - RNA, 19 nt, Homo sapiens
  misc_RNA (1)...(19): siRNA sense strand
gcagagcuguacacaaaga

SEQ ID NO: 1105846 - RNA, 19 nt, Homo sapiens
  misc_RNA (1)...(19): siRNA sense strand
gaacagaugacuaaguaug

SEQ ID NO: 1105847 - RNA, 19 nt, Homo sapiens
  misc_RNA (1)...(19): siRNA sense strand
gaacaaauccaccuuacag

SEQ ID NO: 1105848 - RNA, 19 nt, Homo sapiens
  misc_RNA (1)...(19): siRNA sense strand
gcaguuggcugugguuuca

SEQ ID NO: 1105849 - RNA, 19 nt, Homo sapiens
  misc_RNA (1)...(19): siRNA sense strand
ucaaagauguggccacugu

SEQ ID NO: 1105850 - RNA, 19 nt, Homo sapiens
  misc_RNA (1)...(19): siRNA sense strand
gagcauuucucaucuacau

SEQ ID NO: 1105851 - RNA, 19 nt, Homo sapiens
  misc_RNA (1)...(19): siRNA sense strand
gaauuggaaucaaagaauc

SEQ ID NO: 1105852 - RNA, 19 nt, Homo sapiens
  misc_RNA (1)...(19): siRNA sense strand
gcacaacguccgagaaaug

SEQ ID NO: 1105853 - RNA, 19 nt, Homo sapiens
  misc_RNA (1)...(19): siRNA sense strand
acaaagaauuucagcagaa

SEQ ID NO: 1105854 - RNA, 19 nt, Homo sapiens
  misc_RNA (1)...(19): siRNA sense strand
uuacagagaggaagacaua

SEQ ID NO: 1105855 - RNA, 19 nt, Homo sapiens
  misc_RNA (1)...(19): siRNA sense strand
ugaaauggcaugugcaauu

SEQ ID NO: 1105856 - RNA, 19 nt, Homo sapiens
  misc_RNA (1)...(19): siRNA sense strand
ucacuggucuggcaaugaa

SEQ ID NO: 1105857 - RNA, 19 nt, Homo sapiens
  misc_RNA (1)...(19): siRNA sense strand
gcagagagaagaccagaug

SEQ ID NO: 1105858 - RNA, 19 nt, Homo sapiens
  misc_RNA (1)...(19): siRNA sense strand
caacaagucagcaaacaug

SEQ ID NO: 1105859 - RNA, 19 nt, Homo sapiens
  misc_RNA (1)...(19): siRNA sense strand
augaacagaugacuaagua

SEQ ID NO: 1105860 - RNA, 19 nt, Homo sapiens
  misc_RNA (1)...(19): siRNA sense strand
gagcacaacguccgagaaa

SEQ ID NO: 1105861 - RNA, 19 nt, Homo sapiens
  misc_RNA (1)...(19): siRNA sense strand
caaagaauuucagcagaau

SEQ ID NO: 1105862 - RNA, 19 nt, Homo sapiens
  misc_RNA (1)...(19): siRNA sense strand
gagagaagaccagauguug

SEQ ID NO: 1105863 - RNA, 19 nt, Homo sapiens
  misc_RNA (1)...(19): siRNA sense strand
ggaugcuucugggaauuua

SEQ ID NO: 1105864 - RNA, 19 nt, Homo sapiens
  misc_RNA (1)...(19): siRNA sense strand
uacauuagcucagauuaug

SEQ ID NO: 1105865 - RNA, 19 nt, Homo sapiens
  misc_RNA (1)...(19): siRNA sense strand
cagcuugacugcuccaaau

SEQ ID NO: 1105866 - RNA, 19 nt, Homo sapiens
  misc_RNA (1)...(19): siRNA sense strand
gaccagauguuguagaaaa

SEQ ID NO: 1105867 - RNA, 19 nt, Homo sapiens
  misc_RNA (1)...(19): siRNA sense strand
aagaaucacuuuggccuuu

SEQ ID NO: 1105868 - RNA, 19 nt, Homo sapiens
  misc_RNA (1)...(19): siRNA sense strand
gcucagauuauguauuuga

SEQ ID NO: 1105869 - RNA, 19 nt, Homo sapiens
  misc_RNA (1)...(19): siRNA sense strand
caaauccaccuuacagaga

SEQ ID NO: 1105870 - RNA, 19 nt, Homo sapiens
  misc_RNA (1)...(19): siRNA sense strand
cgagaaaugcucagcuuga

SEQ ID NO: 1105871 - RNA, 19 nt, Homo sapiens
  misc_RNA (1)...(19): siRNA sense strand
cgaagaaagugcugugacu

SEQ ID NO: 1105872 - RNA, 19 nt, Homo sapiens
  misc_RNA (1)...(19): siRNA sense strand
gaacaccauuucgaauugg

SEQ ID NO: 1105873 - RNA, 19 nt, Homo sapiens
  misc_RNA (1)...(19): siRNA sense strand
aauaggaggguucugguua

SEQ ID NO: 1105874 - RNA, 19 nt, Homo sapiens
  misc_RNA (1)...(19): siRNA sense strand
aagaccagauguuguagaa

SEQ ID NO: 1105875 - RNA, 19 nt, Homo sapiens
  misc_RNA (1)...(19): siRNA sense strand
aaagugcugugacuguuau

SEQ ID NO: 1105876 - RNA, 19 nt, Homo sapiens
  misc_RNA (1)...(19): siRNA sense strand
gagcuguacacaaagaauu

SEQ ID NO: 1105877 - RNA, 19 nt, Homo sapiens
  misc_RNA (1)...(19): siRNA sense strand
ggauuccuauucuguaugg

SEQ ID NO: 1105878 - RNA, 19 nt, Homo sapiens
  misc_RNA (1)...(19): siRNA sense strand
cgaauuggaaucaaagaau

SEQ ID NO: 1105879 - RNA, 19 nt, Homo sapiens
  misc_RNA (1)...(19): siRNA sense strand
agaaagugcugugacuguu

SEQ ID NO: 1105880 - RNA, 19 nt, Homo sapiens
  misc_RNA (1)...(19): siRNA sense strand
guucaucacaucauucaug

SEQ ID NO: 1105881 - RNA, 19 nt, Homo sapiens
  misc_RNA (1)...(19): siRNA sense strand
gagaaaugcucagcuugac

SEQ ID NO: 1105882 - RNA, 19 nt, Homo sapiens
  misc_RNA (1)...(19): siRNA sense strand
acagaugacuaaguaugaa

SEQ ID NO: 1105883 - RNA, 19 nt, Homo sapiens
  misc_RNA (1)...(19): siRNA sense strand
gcagcuagcagagaagaga

SEQ ID NO: 1105884 - RNA, 19 nt, Homo sapiens
  misc_RNA (1)...(19): siRNA sense strand
uaaugcaguucaucacauc

SEQ ID NO: 1105885 - RNA, 19 nt, Homo sapiens
  misc_RNA (1)...(19): siRNA sense strand
aaagugcaguucagcaaca

SEQ ID NO: 1105886 - RNA, 19 nt, Homo sapiens
  misc_RNA (1)...(19): siRNA sense strand
cauuagcucagauuaugua

SEQ ID NO: 1105887 - RNA, 19 nt, Homo sapiens
  misc_RNA (1)...(19): siRNA sense strand
gaagaccagauguuguaga

SEQ ID NO: 1105888 - RNA, 19 nt, Homo sapiens
  misc_RNA (1)...(19): siRNA sense strand
gaauuuagcaaaggaagca

SEQ ID NO: 1105889 - RNA, 19 nt, Homo sapiens
  misc_RNA (1)...(19): siRNA sense strand
aaguuaacaucccuaauag

SEQ ID NO: 1105890 - RNA, 19 nt, Homo sapiens
  misc_RNA (1)...(19): siRNA sense strand
gccggcagcuagcagagaa

SEQ ID NO: 1105891 - RNA, 19 nt, Homo sapiens
  misc_RNA (1)...(19): siRNA sense strand
ucuaggagcugcuguuuug

SEQ ID NO: 1105892 - RNA, 19 nt, Homo sapiens
  misc_RNA (1)...(19): siRNA sense strand
ggaacaaauccaccuuaca

SEQ ID NO: 1105893 - RNA, 19 nt, Homo sapiens
  misc_RNA (1)...(19): siRNA sense strand
aaugcuggauccaucaauu

SEQ ID NO: 1105894 - RNA, 19 nt, Homo sapiens
  misc_RNA (1)...(19): siRNA sense strand
ggccuuuccucauugacaa

SEQ ID NO: 1105895 - RNA, 19 nt, Homo sapiens
  misc_RNA (1)...(19): siRNA sense strand
gaauaauuggcaugcaguu

SEQ ID NO: 1105896 - RNA, 19 nt, Homo sapiens
  misc_RNA (1)...(19): siRNA sense strand
cuaaugcaguucaucacau

SEQ ID NO: 1105897 - RNA, 19 nt, Homo sapiens
  misc_RNA (1)...(19): siRNA sense strand
gcaacaagucagcaaacau

SEQ ID NO: 1105898 - RNA, 19 nt, Homo sapiens
  misc_RNA (1)...(19): siRNA sense strand
gcagaauaauuggcaugca

SEQ ID NO: 1105899 - RNA, 19 nt, Homo sapiens
  misc_RNA (1)...(19): siRNA sense strand
agcagucacuuaagaccua

SEQ ID NO: 1105900 - RNA, 19 nt, Homo sapiens
  misc_RNA (1)...(19): siRNA sense strand
gcaguucagcaacaaguca

SEQ ID NO: 1105901 - RNA, 19 nt, Homo sapiens
  misc_RNA (1)...(19): siRNA sense strand
ugcugugacuguuauguuu

SEQ ID NO: 1105902 - RNA, 19 nt, Homo sapiens
  misc_RNA (1)...(19): siRNA sense strand
cuacauuagcucagauuau

SEQ ID NO: 1105903 - RNA, 19 nt, Homo sapiens
  misc_RNA (1)...(19): siRNA sense strand
gccagaugcugccucucaa

SEQ ID NO: 1105904 - RNA, 19 nt, Homo sapiens
  misc_RNA (1)...(19): siRNA sense strand
gagaaugcuggauccauca

SEQ ID NO: 1105905 - RNA, 19 nt, Homo sapiens
  misc_RNA (1)...(19): siRNA sense strand
caagucagcaaacauggau

SEQ ID NO: 1105906 - RNA, 19 nt, Homo sapiens
  misc_RNA (1)...(19): siRNA sense strand
uuggagaccuugggcauug

SEQ ID NO: 1105907 - RNA, 19 nt, Homo sapiens
  misc_RNA (1)...(19): siRNA sense strand
gaagagcaagaccaaaauu

SEQ ID NO: 1105908 - RNA, 19 nt, Homo sapiens
  misc_RNA (1)...(19): siRNA sense strand
gcagucacuuaagaccuau

SEQ ID NO: 1105909 - RNA, 19 nt, Homo sapiens
  misc_RNA (1)...(19): siRNA sense strand
guuggauucuaaugcaguu

SEQ ID NO: 1105910 - RNA, 19 nt, Homo sapiens
  misc_RNA (1)...(19): siRNA sense strand
gcuugacugcuccaaauug

SEQ ID NO: 1105911 - RNA, 19 nt, Homo sapiens
  misc_RNA (1)...(19): siRNA sense strand
ggagcacaacguccgagaa

SEQ ID NO: 1105912 - RNA, 19 nt, Homo sapiens
  misc_RNA (1)...(19): siRNA sense strand
ggcaaugaacagaugacua

SEQ ID NO: 1105913 - RNA, 19 nt, Homo sapiens
  misc_RNA (1)...(19): siRNA sense strand
uggcugugguuucagaaga

SEQ ID NO: 1105914 - RNA, 19 nt, Homo sapiens
  misc_RNA (1)...(19): siRNA sense strand
gcaguucaucacaucauuc

SEQ ID NO: 1105915 - RNA, 19 nt, Homo sapiens
  misc_RNA (1)...(19): siRNA sense strand
ggccaacgaacaccauuuc

SEQ ID NO: 1105916 - RNA, 19 nt, Homo sapiens
  misc_RNA (1)...(19): siRNA sense strand
cauaccagcuccccuaaau

SEQ ID NO: 1105917 - RNA, 19 nt, Homo sapiens
  misc_RNA (1)...(19): siRNA sense strand
agagagaagaccagauguu

SEQ ID NO: 1105918 - RNA, 19 nt, Homo sapiens
  misc_RNA (1)...(19): siRNA sense strand
acuuuggccuuuccucauu

SEQ ID NO: 1105919 - RNA, 19 nt, Homo sapiens
  misc_RNA (1)...(19): siRNA sense strand
gaugacuaaguaugaaaug

SEQ ID NO: 1105920 - RNA, 19 nt, Homo sapiens
  misc_RNA (1)...(19): siRNA sense strand
gcuguuggagcauuucuca

SEQ ID NO: 1105921 - RNA, 19 nt, Homo sapiens
  misc_RNA (1)...(19): siRNA sense strand
cagaagagcaagaccaaaa

SEQ ID NO: 1105922 - RNA, 19 nt, Homo sapiens
  misc_RNA (1)...(19): siRNA sense strand
guggaugcuucugggaauu

SEQ ID NO: 1105923 - RNA, 19 nt, Homo sapiens
  misc_RNA (1)...(19): siRNA sense strand
ggaaguuaacaucccuaau

SEQ ID NO: 1105924 - RNA, 19 nt, Homo sapiens
  misc_RNA (1)...(19): siRNA sense strand
gggcauuggccaacgaaca

SEQ ID NO: 1105925 - RNA, 19 nt, Homo sapiens
  misc_RNA (1)...(19): siRNA sense strand
cagaugacuaaguaugaaa

SEQ ID NO: 1105926 - RNA, 19 nt, Homo sapiens
  misc_RNA (1)...(19): siRNA sense strand
guuggagcauuucucaucu

SEQ ID NO: 1105927 - RNA, 19 nt, Homo sapiens
  misc_RNA (1)...(19): siRNA sense strand
ucaucuacauuagcucaga

SEQ ID NO: 1105928 - RNA, 19 nt, Homo sapiens
  misc_RNA (1)...(19): siRNA sense strand
acaaacggucuuucauuag

SEQ ID NO: 1105929 - RNA, 19 nt, Homo sapiens
  misc_RNA (1)...(19): siRNA sense strand
uccgagaaaugcucagcuu

SEQ ID NO: 1105930 - RNA, 19 nt, Homo sapiens
  misc_RNA (1)...(19): siRNA sense strand
acuuaagaccuauuacuga

SEQ ID NO: 1105931 - RNA, 19 nt, Homo sapiens
  misc_RNA (1)...(19): siRNA sense strand
aacagaugacuaaguauga

SEQ ID NO: 1105932 - RNA, 19 nt, Homo sapiens
  misc_RNA (1)...(19): siRNA sense strand
uugaaaagcucgaagaaag

SEQ ID NO: 1105933 - RNA, 19 nt, Homo sapiens
  misc_RNA (1)...(19): siRNA sense strand
ucuguuggauucuaaugca

SEQ ID NO: 1105934 - RNA, 19 nt, Homo sapiens
  misc_RNA (1)...(19): siRNA sense strand
uaauaggaggguucugguu

SEQ ID NO: 1105935 - RNA, 19 nt, Homo sapiens
  misc_RNA (1)...(19): siRNA sense strand
gaauggcaaugcuguuuca

SEQ ID NO: 1105936 - RNA, 19 nt, Homo sapiens
  misc_RNA (1)...(19): siRNA sense strand
gaacaaacaacgggacuuc

SEQ ID NO: 1105937 - RNA, 19 nt, Homo sapiens
  misc_RNA (1)...(19): siRNA sense strand
guggaucagugaaguuuga

SEQ ID NO: 1105938 - RNA, 19 nt, Homo sapiens
  misc_RNA (1)...(19): siRNA sense strand
uguggaagaucgcaaguga

SEQ ID NO: 1105939 - RNA, 19 nt, Homo sapiens
  misc_RNA (1)...(19): siRNA sense strand
cugaggaguuugucaaugu

SEQ ID NO: 1105940 - RNA, 19 nt, Homo sapiens
  misc_RNA (1)...(19): siRNA sense strand
cagagcugcugaggaguuu

SEQ ID NO: 1105941 - RNA, 19 nt, Homo sapiens
  misc_RNA (1)...(19): siRNA sense strand
gcugaggaguuugucaaug

SEQ ID NO: 1105942 - RNA, 19 nt, Homo sapiens
  misc_RNA (1)...(19): siRNA sense strand
cagccacccuggucuggaa

SEQ ID NO: 1105943 - RNA, 19 nt, Homo sapiens
  misc_RNA (1)...(19): siRNA sense strand
ggaauggcaaugcuguuuc

SEQ ID NO: 1105944 - RNA, 19 nt, Homo sapiens
  misc_RNA (1)...(19): siRNA sense strand
acaaacaacgggacuucaa

SEQ ID NO: 1105945 - RNA, 19 nt, Homo sapiens
  misc_RNA (1)...(19): siRNA sense strand
ccacgguccuuguugucau

SEQ ID NO: 1105946 - RNA, 19 nt, Homo sapiens
  misc_RNA (1)...(19): siRNA sense strand
gguccuuguugucaucugu

SEQ ID NO: 1105947 - RNA, 19 nt, Homo sapiens
  misc_RNA (1)...(19): siRNA sense strand
gagcugcugaggaguuugu

SEQ ID NO: 1105948 - RNA, 19 nt, Homo sapiens
  misc_RNA (1)...(19): siRNA sense strand
ggucuggaauggcaaugcu

SEQ ID NO: 1105949 - RNA, 19 nt, Homo sapiens
  misc_RNA (1)...(19): siRNA sense strand
caaaucagcgugguagacu

SEQ ID NO: 1105950 - RNA, 19 nt, Homo sapiens
  misc_RNA (1)...(19): siRNA sense strand
aagaauccuugagugaguu

SEQ ID NO: 1105951 - RNA, 19 nt, Homo sapiens
  misc_RNA (1)...(19): siRNA sense strand
uggaauggcaaugcuguuu

SEQ ID NO: 1105952 - RNA, 19 nt, Homo sapiens
  misc_RNA (1)...(19): siRNA sense strand
ggaacaaacaacgggacuu

SEQ ID NO: 1105953 - RNA, 19 nt, Homo sapiens
  misc_RNA (1)...(19): siRNA sense strand
guagacugccagccuguuc

SEQ ID NO: 1105954 - RNA, 19 nt, Homo sapiens
  misc_RNA (1)...(19): siRNA sense strand
ugaggaguuugucaauguc

SEQ ID NO: 1105955 - RNA, 19 nt, Homo sapiens
  misc_RNA (1)...(19): siRNA sense strand
ccagcgaguuccaaaucag

SEQ ID NO: 1105956 - RNA, 19 nt, Homo sapiens
  misc_RNA (1)...(19): siRNA sense strand
caaugcuguuucaggacaa

SEQ ID NO: 1105957 - RNA, 19 nt, Homo sapiens
  misc_RNA (1)...(19): siRNA sense strand
guuugucaaugucuacuac

SEQ ID NO: 1105958 - RNA, 19 nt, Homo sapiens
  misc_RNA (1)...(19): siRNA sense strand
caaacaacgggacuucaac

SEQ ID NO: 1105959 - RNA, 19 nt, Homo sapiens
  misc_RNA (1)...(19): siRNA sense strand
ggaagcaccucaacaaccu

SEQ ID NO: 1105960 - RNA, 19 nt, Homo sapiens
  misc_RNA (1)...(19): siRNA sense strand
ucaacaaccuccugaacug

SEQ ID NO: 1105961 - RNA, 19 nt, Homo sapiens
  misc_RNA (1)...(19): siRNA sense strand
cuggugaacucgacauuga

SEQ ID NO: 1105962 - RNA, 19 nt, Homo sapiens
  misc_RNA (1)...(19): siRNA sense strand
ggaguuucauuccaagcuu

SEQ ID NO: 1105963 - RNA, 19 nt, Homo sapiens
  misc_RNA (1)...(19): siRNA sense strand
cugaagaggccgugaauga

SEQ ID NO: 1105964 - RNA, 19 nt, Homo sapiens
  misc_RNA (1)...(19): siRNA sense strand
agacgugccucgcgaguuc

SEQ ID NO: 1105965 - RNA, 19 nt, Homo sapiens
  misc_RNA (1)...(19): siRNA sense strand
gcccaccacuuccgagaug

SEQ ID NO: 1105966 - RNA, 19 nt, Homo sapiens
  misc_RNA (1)...(19): siRNA sense strand
gcaaagcgcacgagcucau

SEQ ID NO: 1105967 - RNA, 19 nt, Homo sapiens
  misc_RNA (1)...(19): siRNA sense strand
gaacggcagcagccacuca

SEQ ID NO: 1105968 - RNA, 19 nt, Homo sapiens
  misc_RNA (1)...(19): siRNA sense strand
cccaacggcuucagcaaug

SEQ ID NO: 1105969 - RNA, 19 nt, Homo sapiens
  misc_RNA (1)...(19): siRNA sense strand
ccaaagagaacgggucaga

SEQ ID NO: 1105970 - RNA, 19 nt, Homo sapiens
  misc_RNA (1)...(19): siRNA sense strand
ucgaggaguuucauuccaa

SEQ ID NO: 1105971 - RNA, 19 nt, Homo sapiens
  misc_RNA (1)...(19): siRNA sense strand
ugucggagcugcagaaagc

SEQ ID NO: 1105972 - RNA, 19 nt, Homo sapiens
  misc_RNA (1)...(19): siRNA sense strand
cauugacgaucgaggaguu

SEQ ID NO: 1105973 - RNA, 19 nt, Homo sapiens
  misc_RNA (1)...(19): siRNA sense strand
aagaagugaucgaccacaa

SEQ ID NO: 1105974 - RNA, 19 nt, Homo sapiens
  misc_RNA (1)...(19): siRNA sense strand
ccaguggacaggaaagcua

SEQ ID NO: 1105975 - RNA, 19 nt, Homo sapiens
  misc_RNA (1)...(19): siRNA sense strand
ccgaagggccucagcuaga

SEQ ID NO: 1105976 - RNA, 19 nt, Homo sapiens
  misc_RNA (1)...(19): siRNA sense strand
cuacgugccugaggacauc

SEQ ID NO: 1105977 - RNA, 19 nt, Homo sapiens
  misc_RNA (1)...(19): siRNA sense strand
gagcgugagugggcagaag

SEQ ID NO: 1105978 - RNA, 19 nt, Homo sapiens
  misc_RNA (1)...(19): siRNA sense strand
gggcggaaagccagugaga

SEQ ID NO: 1105979 - RNA, 19 nt, Homo sapiens
  misc_RNA (1)...(19): siRNA sense strand
cgaagggccucagcuagac

SEQ ID NO: 1105980 - RNA, 19 nt, Homo sapiens
  misc_RNA (1)...(19): siRNA sense strand
ucaggaggccaccaacuuc

SEQ ID NO: 1105981 - RNA, 19 nt, Homo sapiens
  misc_RNA (1)...(19): siRNA sense strand
cgacaggaccaaagagaac

SEQ ID NO: 1105982 - RNA, 19 nt, Homo sapiens
  misc_RNA (1)...(19): siRNA sense strand
uacuggaagucaacgagaa

SEQ ID NO: 1105983 - RNA, 19 nt, Homo sapiens
  misc_RNA (1)...(19): siRNA sense strand
ugaacugcaucauggacau

SEQ ID NO: 1105984 - RNA, 19 nt, Homo sapiens
  misc_RNA (1)...(19): siRNA sense strand
guacuuggcccagcaugag

SEQ ID NO: 1105985 - RNA, 19 nt, Homo sapiens
  misc_RNA (1)...(19): siRNA sense strand
gaagcaucaccacgugugu

SEQ ID NO: 1105986 - RNA, 19 nt, Homo sapiens
  misc_RNA (1)...(19): siRNA sense strand
gagcugcuacuggaaguca

SEQ ID NO: 1105987 - RNA, 19 nt, Homo sapiens
  misc_RNA (1)...(19): siRNA sense strand
ucaccaacagccaucaaug

SEQ ID NO: 1105988 - RNA, 19 nt, Homo sapiens
  misc_RNA (1)...(19): siRNA sense strand
cagagcugcuacuggaagu

SEQ ID NO: 1105989 - RNA, 19 nt, Homo sapiens
  misc_RNA (1)...(19): siRNA sense strand
cagcagccacucaccaaca

SEQ ID NO: 1105990 - RNA, 19 nt, Homo sapiens
  misc_RNA (1)...(19): siRNA sense strand
cugaggacaucuggaggaa

SEQ ID NO: 1105991 - RNA, 19 nt, Homo sapiens
  misc_RNA (1)...(19): siRNA sense strand
agcgagagcugcuggaacu

SEQ ID NO: 1105992 - RNA, 19 nt, Homo sapiens
  misc_RNA (1)...(19): siRNA sense strand
ggaagcaccucaacaaccu

SEQ ID NO: 1105993 - RNA, 19 nt, Homo sapiens
  misc_RNA (1)...(19): siRNA sense strand
ucaacaaccuccugaacug

SEQ ID NO: 1105994 - RNA, 19 nt, Homo sapiens
  misc_RNA (1)...(19): siRNA sense strand
cuggugaacucgacauuga

SEQ ID NO: 1105995 - RNA, 19 nt, Homo sapiens
  misc_RNA (1)...(19): siRNA sense strand
ggaguuucauuccaagcuu

SEQ ID NO: 1105996 - RNA, 19 nt, Homo sapiens
  misc_RNA (1)...(19): siRNA sense strand
cugaagaggccgugaauga

SEQ ID NO: 1105997 - RNA, 19 nt, Homo sapiens
  misc_RNA (1)...(19): siRNA sense strand
agacgugccucgcgaguuc

SEQ ID NO: 1105998 - RNA, 19 nt, Homo sapiens
  misc_RNA (1)...(19): siRNA sense strand
gcccaccacuuccgagaug

SEQ ID NO: 1105999 - RNA, 19 nt, Homo sapiens
  misc_RNA (1)...(19): siRNA sense strand
gcaaagcgcacgagcucau

SEQ ID NO: 1106000 - RNA, 19 nt, Homo sapiens
  misc_RNA (1)...(19): siRNA sense strand
cccaacggcuucagcaaug

SEQ ID NO: 1106001 - RNA, 19 nt, Homo sapiens
  misc_RNA (1)...(19): siRNA sense strand
gaacggcagcagccacuca

SEQ ID NO: 1106002 - RNA, 19 nt, Homo sapiens
  misc_RNA (1)...(19): siRNA sense strand
ccaaagagaacgggucaga

SEQ ID NO: 1106003 - RNA, 19 nt, Homo sapiens
  misc_RNA (1)...(19): siRNA sense strand
ucgaggaguuucauuccaa

SEQ ID NO: 1106004 - RNA, 19 nt, Homo sapiens
  misc_RNA (1)...(19): siRNA sense strand
ugucggagcugcagaaagc

SEQ ID NO: 1106005 - RNA, 19 nt, Homo sapiens
  misc_RNA (1)...(19): siRNA sense strand
cauugacgaucgaggaguu

SEQ ID NO: 1106006 - RNA, 19 nt, Homo sapiens
  misc_RNA (1)...(19): siRNA sense strand
aagaagugaucgaccacaa

SEQ ID NO: 1106007 - RNA, 19 nt, Homo sapiens
  misc_RNA (1)...(19): siRNA sense strand
ccgaagggccucagcuaga

SEQ ID NO: 1106008 - RNA, 19 nt, Homo sapiens
  misc_RNA (1)...(19): siRNA sense strand
cuacgugccugaggacauc

SEQ ID NO: 1106009 - RNA, 19 nt, Homo sapiens
  misc_RNA (1)...(19): siRNA sense strand
gagcgugagugggcagaag

SEQ ID NO: 1106010 - RNA, 19 nt, Homo sapiens
  misc_RNA (1)...(19): siRNA sense strand
gggcggaaagccagugaga

SEQ ID NO: 1106011 - RNA, 19 nt, Homo sapiens
  misc_RNA (1)...(19): siRNA sense strand
cgaagggccucagcuagac

SEQ ID NO: 1106012 - RNA, 19 nt, Homo sapiens
  misc_RNA (1)...(19): siRNA sense strand
ucaggaggccaccaacuuc

SEQ ID NO: 1106013 - RNA, 19 nt, Homo sapiens
  misc_RNA (1)...(19): siRNA sense strand
cgacaggaccaaagagaac

SEQ ID NO: 1106014 - RNA, 19 nt, Homo sapiens
  misc_RNA (1)...(19): siRNA sense strand
uacuggaagucaacgagaa

SEQ ID NO: 1106015 - RNA, 19 nt, Homo sapiens
  misc_RNA (1)...(19): siRNA sense strand
ugaacugcaucauggacau

SEQ ID NO: 1106016 - RNA, 19 nt, Homo sapiens
  misc_RNA (1)...(19): siRNA sense strand
guacuuggcccagcaugag

SEQ ID NO: 1106017 - RNA, 19 nt, Homo sapiens
  misc_RNA (1)...(19): siRNA sense strand
gaagcaucaccacgugugu

SEQ ID NO: 1106018 - RNA, 19 nt, Homo sapiens
  misc_RNA (1)...(19): siRNA sense strand
gagcugcuacuggaaguca

SEQ ID NO: 1106019 - RNA, 19 nt, Homo sapiens
  misc_RNA (1)...(19): siRNA sense strand
ucaccaacagccaucaaug

SEQ ID NO: 1106020 - RNA, 19 nt, Homo sapiens
  misc_RNA (1)...(19): siRNA sense strand
cagagcugcuacuggaagu

SEQ ID NO: 1106021 - RNA, 19 nt, Homo sapiens
  misc_RNA (1)...(19): siRNA sense strand
cugaggacaucuggaggaa

SEQ ID NO: 1106022 - RNA, 19 nt, Homo sapiens
  misc_RNA (1)...(19): siRNA sense strand
cagcagccacucaccaaca

SEQ ID NO: 1106023 - RNA, 19 nt, Homo sapiens
  misc_RNA (1)...(19): siRNA sense strand
agcgagagcugcuggaacu

SEQ ID NO: 1106024 - RNA, 19 nt, Homo sapiens
  misc_RNA (1)...(19): siRNA sense strand
gaaagagccuuaugaucga

SEQ ID NO: 1106025 - RNA, 19 nt, Homo sapiens
  misc_RNA (1)...(19): siRNA sense strand
ggacuucgacuuccucaaa

SEQ ID NO: 1106026 - RNA, 19 nt, Homo sapiens
  misc_RNA (1)...(19): siRNA sense strand
gggaugaccuguaccacaa

SEQ ID NO: 1106027 - RNA, 19 nt, Homo sapiens
  misc_RNA (1)...(19): siRNA sense strand
caagauguaucccagaugu

SEQ ID NO: 1106028 - RNA, 19 nt, Homo sapiens
  misc_RNA (1)...(19): siRNA sense strand
gcaaagccuucuccacaag

SEQ ID NO: 1106029 - RNA, 19 nt, Homo sapiens
  misc_RNA (1)...(19): siRNA sense strand
cagacuuucuugagauuaa

SEQ ID NO: 1106030 - RNA, 19 nt, Homo sapiens
  misc_RNA (1)...(19): siRNA sense strand
aaacugggaugaccuguac

SEQ ID NO: 1106031 - RNA, 19 nt, Homo sapiens
  misc_RNA (1)...(19): siRNA sense strand
gcagugaagguacuacaga

SEQ ID NO: 1106032 - RNA, 19 nt, Homo sapiens
  misc_RNA (1)...(19): siRNA sense strand
caagugcauuccugggauu

SEQ ID NO: 1106033 - RNA, 19 nt, Homo sapiens
  misc_RNA (1)...(19): siRNA sense strand
gauuaagaaccauguauuc

SEQ ID NO: 1106034 - RNA, 19 nt, Homo sapiens
  misc_RNA (1)...(19): siRNA sense strand
gaagacaccacauccacau

SEQ ID NO: 1106035 - RNA, 19 nt, Homo sapiens
  misc_RNA (1)...(19): siRNA sense strand
gagauuaagaaccauguau

SEQ ID NO: 1106036 - RNA, 19 nt, Homo sapiens
  misc_RNA (1)...(19): siRNA sense strand
uaucccagauguaugagaa

SEQ ID NO: 1106037 - RNA, 19 nt, Homo sapiens
  misc_RNA (1)...(19): siRNA sense strand
gggcaguccucuacgagau

SEQ ID NO: 1106038 - RNA, 19 nt, Homo sapiens
  misc_RNA (1)...(19): siRNA sense strand
gcuacagaaugaacucuag

SEQ ID NO: 1106039 - RNA, 19 nt, Homo sapiens
  misc_RNA (1)...(19): siRNA sense strand
gaugaccuguaccacaaga

SEQ ID NO: 1106040 - RNA, 19 nt, Homo sapiens
  misc_RNA (1)...(19): siRNA sense strand
cagugaagguacuacagaa

SEQ ID NO: 1106041 - RNA, 19 nt, Homo sapiens
  misc_RNA (1)...(19): siRNA sense strand
gccaagauguaucccagau

SEQ ID NO: 1106042 - RNA, 19 nt, Homo sapiens
  misc_RNA (1)...(19): siRNA sense strand
gaacuacgggaagguccua

SEQ ID NO: 1106043 - RNA, 19 nt, Homo sapiens
  misc_RNA (1)...(19): siRNA sense strand
aagcagacuuucuugagau

SEQ ID NO: 1106044 - RNA, 19 nt, Homo sapiens
  misc_RNA (1)...(19): siRNA sense strand
gcagacuuucuugagauua

SEQ ID NO: 1106045 - RNA, 19 nt, Homo sapiens
  misc_RNA (1)...(19): siRNA sense strand
gagcgcagugugcuucuga

SEQ ID NO: 1106046 - RNA, 19 nt, Homo sapiens
  misc_RNA (1)...(19): siRNA sense strand
ccugugaccuccugcaaag

SEQ ID NO: 1106047 - RNA, 19 nt, Homo sapiens
  misc_RNA (1)...(19): siRNA sense strand
uaaacugggaugaccugua

SEQ ID NO: 1106048 - RNA, 19 nt, Homo sapiens
  misc_RNA (1)...(19): siRNA sense strand
ugcaaagccuucuccacaa

SEQ ID NO: 1106049 - RNA, 19 nt, Homo sapiens
  misc_RNA (1)...(19): siRNA sense strand
ccugaucauugcuacagaa

SEQ ID NO: 1106050 - RNA, 19 nt, Homo sapiens
  misc_RNA (1)...(19): siRNA sense strand
gaaagagcagagccacauc

SEQ ID NO: 1106051 - RNA, 19 nt, Homo sapiens
  misc_RNA (1)...(19): siRNA sense strand
gcgcuacuccuuccagaca

SEQ ID NO: 1106052 - RNA, 19 nt, Homo sapiens
  misc_RNA (1)...(19): siRNA sense strand
uaccugcacucccucaaca

SEQ ID NO: 1106053 - RNA, 19 nt, Homo sapiens
  misc_RNA (1)...(19): siRNA sense strand
gcaccagccgcuacagauc

SEQ ID NO: 1106054 - RNA, 19 nt, Homo sapiens
  misc_RNA (1)...(19): siRNA sense strand
cagagcugccugaucauug

SEQ ID NO: 1106055 - RNA, 19 nt, Homo sapiens
  misc_RNA (1)...(19): siRNA sense strand
uuacagggaucugaaacca

SEQ ID NO: 1106056 - RNA, 19 nt, Homo sapiens
  misc_RNA (1)...(19): siRNA sense strand
gcacucccucaacaucauu

SEQ ID NO: 1106057 - RNA, 19 nt, Homo sapiens
  misc_RNA (1)...(19): siRNA sense strand
ccucaaagucaucggcaaa

SEQ ID NO: 1106058 - RNA, 19 nt, Homo sapiens
  misc_RNA (1)...(19): siRNA sense strand
gacaccacauccacauucu

SEQ ID NO: 1106059 - RNA, 19 nt, Homo sapiens
  misc_RNA (1)...(19): siRNA sense strand
gccaagcgcaagucugaug

SEQ ID NO: 1106060 - RNA, 19 nt, Homo sapiens
  misc_RNA (1)...(19): siRNA sense strand
uggccaagcgcaagucuga

SEQ ID NO: 1106061 - RNA, 19 nt, Homo sapiens
  misc_RNA (1)...(19): siRNA sense strand
caccugagaagcucuacuu

SEQ ID NO: 1106062 - RNA, 19 nt, Homo sapiens
  misc_RNA (1)...(19): siRNA sense strand
ggggagagcucuucuucca

SEQ ID NO: 1106063 - RNA, 19 nt, Homo sapiens
  misc_RNA (1)...(19): siRNA sense strand
acguggugcugacggauuu

SEQ ID NO: 1106064 - RNA, 19 nt, Homo sapiens
  misc_RNA (1)...(19): siRNA sense strand
gacuucgacuuccucaaag

SEQ ID NO: 1106065 - RNA, 19 nt, Homo sapiens
  misc_RNA (1)...(19): siRNA sense strand
agacaccacauccacauuc

SEQ ID NO: 1106066 - RNA, 19 nt, Homo sapiens
  misc_RNA (1)...(19): siRNA sense strand
caccacauccacauucugu

SEQ ID NO: 1106067 - RNA, 19 nt, Homo sapiens
  misc_RNA (1)...(19): siRNA sense strand
cuuaugcgccagaggauga

SEQ ID NO: 1106068 - RNA, 19 nt, Homo sapiens
  misc_RNA (1)...(19): siRNA sense strand
aggaagcuguguccaaguc

SEQ ID NO: 1106069 - RNA, 19 nt, Homo sapiens
  misc_RNA (1)...(19): siRNA sense strand
ggcguucuaugcagugaag

SEQ ID NO: 1106070 - RNA, 19 nt, Homo sapiens
  misc_RNA (1)...(19): siRNA sense strand
gcccacggacuucgacuuc

SEQ ID NO: 1106071 - RNA, 19 nt, Homo sapiens
  misc_RNA (1)...(19): siRNA sense strand
agauguaucccagauguau

SEQ ID NO: 1106072 - RNA, 19 nt, Homo sapiens
  misc_RNA (1)...(19): siRNA sense strand
aaagagcagagccacauca

SEQ ID NO: 1106073 - RNA, 19 nt, Homo sapiens
  misc_RNA (1)...(19): siRNA sense strand
agaaagagcagagccacau

SEQ ID NO: 1106074 - RNA, 19 nt, Homo sapiens
  misc_RNA (1)...(19): siRNA sense strand
guucuaugcagugaaggua

SEQ ID NO: 1106075 - RNA, 19 nt, Homo sapiens
  misc_RNA (1)...(19): siRNA sense strand
ucaaagucaucggcaaagg

SEQ ID NO: 1106076 - RNA, 19 nt, Homo sapiens
  misc_RNA (1)...(19): siRNA sense strand
gaagguguagagccugaag

SEQ ID NO: 1106077 - RNA, 19 nt, Homo sapiens
  misc_RNA (1)...(19): siRNA sense strand
cuacuucgugcucgacuau

SEQ ID NO: 1106078 - RNA, 19 nt, Homo sapiens
  misc_RNA (1)...(19): siRNA sense strand
cggaaagagccuuaugauc

SEQ ID NO: 1106079 - RNA, 19 nt, Homo sapiens
  misc_RNA (1)...(19): siRNA sense strand
gaaagagccuuaugaucga

SEQ ID NO: 1106080 - RNA, 19 nt, Homo sapiens
  misc_RNA (1)...(19): siRNA sense strand
ggacuucgacuuccucaaa

SEQ ID NO: 1106081 - RNA, 19 nt, Homo sapiens
  misc_RNA (1)...(19): siRNA sense strand
gggaugaccuguaccacaa

SEQ ID NO: 1106082 - RNA, 19 nt, Homo sapiens
  misc_RNA (1)...(19): siRNA sense strand
caagauguaucccagaugu

SEQ ID NO: 1106083 - RNA, 19 nt, Homo sapiens
  misc_RNA (1)...(19): siRNA sense strand
gcaaagccuucuccacaag

SEQ ID NO: 1106084 - RNA, 19 nt, Homo sapiens
  misc_RNA (1)...(19): siRNA sense strand
cagacuuucuugagauuaa

SEQ ID NO: 1106085 - RNA, 19 nt, Homo sapiens
  misc_RNA (1)...(19): siRNA sense strand
aaacugggaugaccuguac

SEQ ID NO: 1106086 - RNA, 19 nt, Homo sapiens
  misc_RNA (1)...(19): siRNA sense strand
gcagugaagguacuacaga

SEQ ID NO: 1106087 - RNA, 19 nt, Homo sapiens
  misc_RNA (1)...(19): siRNA sense strand
caagugcauuccugggauu

SEQ ID NO: 1106088 - RNA, 19 nt, Homo sapiens
  misc_RNA (1)...(19): siRNA sense strand
gauuaagaaccauguauuc

SEQ ID NO: 1106089 - RNA, 19 nt, Homo sapiens
  misc_RNA (1)...(19): siRNA sense strand
gaagacaccacauccacau

SEQ ID NO: 1106090 - RNA, 19 nt, Homo sapiens
  misc_RNA (1)...(19): siRNA sense strand
gagauuaagaaccauguau

SEQ ID NO: 1106091 - RNA, 19 nt, Homo sapiens
  misc_RNA (1)...(19): siRNA sense strand
uaucccagauguaugagaa

SEQ ID NO: 1106092 - RNA, 19 nt, Homo sapiens
  misc_RNA (1)...(19): siRNA sense strand
gggcaguccucuacgagau

SEQ ID NO: 1106093 - RNA, 19 nt, Homo sapiens
  misc_RNA (1)...(19): siRNA sense strand
gaugaccuguaccacaaga

SEQ ID NO: 1106094 - RNA, 19 nt, Homo sapiens
  misc_RNA (1)...(19): siRNA sense strand
cagugaagguacuacagaa

SEQ ID NO: 1106095 - RNA, 19 nt, Homo sapiens
  misc_RNA (1)...(19): siRNA sense strand
gccaagauguaucccagau

SEQ ID NO: 1106096 - RNA, 19 nt, Homo sapiens
  misc_RNA (1)...(19): siRNA sense strand
gaacuacgggaagguccua

SEQ ID NO: 1106097 - RNA, 19 nt, Homo sapiens
  misc_RNA (1)...(19): siRNA sense strand
aagcagacuuucuugagau

SEQ ID NO: 1106098 - RNA, 19 nt, Homo sapiens
  misc_RNA (1)...(19): siRNA sense strand
gcagacuuucuugagauua

SEQ ID NO: 1106099 - RNA, 19 nt, Homo sapiens
  misc_RNA (1)...(19): siRNA sense strand
gagcgcagugugcuucuga

SEQ ID NO: 1106100 - RNA, 19 nt, Homo sapiens
  misc_RNA (1)...(19): siRNA sense strand
ccugugaccuccugcaaag

SEQ ID NO: 1106101 - RNA, 19 nt, Homo sapiens
  misc_RNA (1)...(19): siRNA sense strand
uaaacugggaugaccugua

SEQ ID NO: 1106102 - RNA, 19 nt, Homo sapiens
  misc_RNA (1)...(19): siRNA sense strand
ugcaaagccuucuccacaa

SEQ ID NO: 1106103 - RNA, 19 nt, Homo sapiens
  misc_RNA (1)...(19): siRNA sense strand
gaaagagcagagccacauc

SEQ ID NO: 1106104 - RNA, 19 nt, Homo sapiens
  misc_RNA (1)...(19): siRNA sense strand
gcgcuacuccuuccagaca

SEQ ID NO: 1106105 - RNA, 19 nt, Homo sapiens
  misc_RNA (1)...(19): siRNA sense strand
uaccugcacucccucaaca

SEQ ID NO: 1106106 - RNA, 19 nt, Homo sapiens
  misc_RNA (1)...(19): siRNA sense strand
gcaccagccgcuacagauc

SEQ ID NO: 1106107 - RNA, 19 nt, Homo sapiens
  misc_RNA (1)...(19): siRNA sense strand
uuacagggaucugaaacca

SEQ ID NO: 1106108 - RNA, 19 nt, Homo sapiens
  misc_RNA (1)...(19): siRNA sense strand
gcacucccucaacaucauu

SEQ ID NO: 1106109 - RNA, 19 nt, Homo sapiens
  misc_RNA (1)...(19): siRNA sense strand
ccucaaagucaucggcaaa

SEQ ID NO: 1106110 - RNA, 19 nt, Homo sapiens
  misc_RNA (1)...(19): siRNA sense strand
gacaccacauccacauucu

SEQ ID NO: 1106111 - RNA, 19 nt, Homo sapiens
  misc_RNA (1)...(19): siRNA sense strand
gccaagcgcaagucugaug

SEQ ID NO: 1106112 - RNA, 19 nt, Homo sapiens
  misc_RNA (1)...(19): siRNA sense strand
uggccaagcgcaagucuga

SEQ ID NO: 1106113 - RNA, 19 nt, Homo sapiens
  misc_RNA (1)...(19): siRNA sense strand
caccugagaagcucuacuu

SEQ ID NO: 1106114 - RNA, 19 nt, Homo sapiens
  misc_RNA (1)...(19): siRNA sense strand
ggggagagcucuucuucca

SEQ ID NO: 1106115 - RNA, 19 nt, Homo sapiens
  misc_RNA (1)...(19): siRNA sense strand
acguggugcugacggauuu

SEQ ID NO: 1106116 - RNA, 19 nt, Homo sapiens
  misc_RNA (1)...(19): siRNA sense strand
agacaccacauccacauuc

SEQ ID NO: 1106117 - RNA, 19 nt, Homo sapiens
  misc_RNA (1)...(19): siRNA sense strand
gacuucgacuuccucaaag

SEQ ID NO: 1106118 - RNA, 19 nt, Homo sapiens
  misc_RNA (1)...(19): siRNA sense strand
caccacauccacauucugu

SEQ ID NO: 1106119 - RNA, 19 nt, Homo sapiens
  misc_RNA (1)...(19): siRNA sense strand
cuuaugcgccagaggauga

SEQ ID NO: 1106120 - RNA, 19 nt, Homo sapiens
  misc_RNA (1)...(19): siRNA sense strand
aggaagcuguguccaaguc

SEQ ID NO: 1106121 - RNA, 19 nt, Homo sapiens
  misc_RNA (1)...(19): siRNA sense strand
guucuaugcagugaaggua

SEQ ID NO: 1106122 - RNA, 19 nt, Homo sapiens
  misc_RNA (1)...(19): siRNA sense strand
agauguaucccagauguau

SEQ ID NO: 1106123 - RNA, 19 nt, Homo sapiens
  misc_RNA (1)...(19): siRNA sense strand
gcccacggacuucgacuuc

SEQ ID NO: 1106124 - RNA, 19 nt, Homo sapiens
  misc_RNA (1)...(19): siRNA sense strand
aaagagcagagccacauca

SEQ ID NO: 1106125 - RNA, 19 nt, Homo sapiens
  misc_RNA (1)...(19): siRNA sense strand
ggcguucuaugcagugaag

SEQ ID NO: 1106126 - RNA, 19 nt, Homo sapiens
  misc_RNA (1)...(19): siRNA sense strand
agaaagagcagagccacau

SEQ ID NO: 1106127 - RNA, 19 nt, Homo sapiens
  misc_RNA (1)...(19): siRNA sense strand
cuacuucgugcucgacuau

SEQ ID NO: 1106128 - RNA, 19 nt, Homo sapiens
  misc_RNA (1)...(19): siRNA sense strand
ucaaagucaucggcaaagg

SEQ ID NO: 1106129 - RNA, 19 nt, Homo sapiens
  misc_RNA (1)...(19): siRNA sense strand
gaagguguagagccugaag

SEQ ID NO: 1106130 - RNA, 19 nt, Homo sapiens
  misc_RNA (1)...(19): siRNA sense strand
cggaaagagccuuaugauc

SEQ ID NO: 1106131 - RNA, 19 nt, Homo sapiens
  misc_RNA (1)...(19): siRNA sense strand
caagacagcugacgacuga

SEQ ID NO: 1106132 - RNA, 19 nt, Homo sapiens
  misc_RNA (1)...(19): siRNA sense strand
gccgauggcugacguauuu

SEQ ID NO: 1106133 - RNA, 19 nt, Homo sapiens
  misc_RNA (1)...(19): siRNA sense strand
gaagggaccauagauguua

SEQ ID NO: 1106134 - RNA, 19 nt, Homo sapiens
  misc_RNA (1)...(19): siRNA sense strand
cuaagaaccucaugcaguu

SEQ ID NO: 1106135 - RNA, 19 nt, Homo sapiens
  misc_RNA (1)...(19): siRNA sense strand
gaaagucacacugcacaua

SEQ ID NO: 1106136 - RNA, 19 nt, Homo sapiens
  misc_RNA (1)...(19): siRNA sense strand
aagcagaggcugagaauaa

SEQ ID NO: 1106137 - RNA, 19 nt, Homo sapiens
  misc_RNA (1)...(19): siRNA sense strand
ggaggaagagcuagaagaa

SEQ ID NO: 1106138 - RNA, 19 nt, Homo sapiens
  misc_RNA (1)...(19): siRNA sense strand
gaagaagggaccauagaug

SEQ ID NO: 1106139 - RNA, 19 nt, Homo sapiens
  misc_RNA (1)...(19): siRNA sense strand
gaugacagaugacgacagu

SEQ ID NO: 1106140 - RNA, 19 nt, Homo sapiens
  misc_RNA (1)...(19): siRNA sense strand
gggccuaucccgcucuuua

SEQ ID NO: 1106141 - RNA, 19 nt, Homo sapiens
  misc_RNA (1)...(19): siRNA sense strand
ccauagauguuaccgacuu

SEQ ID NO: 1106142 - RNA, 19 nt, Homo sapiens
  misc_RNA (1)...(19): siRNA sense strand
ggacgaggaggaagagcua

SEQ ID NO: 1106143 - RNA, 19 nt, Homo sapiens
  misc_RNA (1)...(19): siRNA sense strand
ccuuugagaugacagauga

SEQ ID NO: 1106144 - RNA, 19 nt, Homo sapiens
  misc_RNA (1)...(19): siRNA sense strand
gcaaagcagaggcugagaa

SEQ ID NO: 1106145 - RNA, 19 nt, Homo sapiens
  misc_RNA (1)...(19): siRNA sense strand
gaagagcccucggcaucuc

SEQ ID NO: 1106146 - RNA, 19 nt, Homo sapiens
  misc_RNA (1)...(19): siRNA sense strand
gggaguuccuuugagauga

SEQ ID NO: 1106147 - RNA, 19 nt, Homo sapiens
  misc_RNA (1)...(19): siRNA sense strand
gaacaacgaaccgcuuaca

SEQ ID NO: 1106148 - RNA, 19 nt, Homo sapiens
  misc_RNA (1)...(19): siRNA sense strand
aaagucacacugcacauaa

SEQ ID NO: 1106149 - RNA, 19 nt, Homo sapiens
  misc_RNA (1)...(19): siRNA sense strand
gaugacgacagugccauua

SEQ ID NO: 1106150 - RNA, 19 nt, Homo sapiens
  misc_RNA (1)...(19): siRNA sense strand
agugcuagcugaucgcuuu

SEQ ID NO: 1106151 - RNA, 19 nt, Homo sapiens
  misc_RNA (1)...(19): siRNA sense strand
ccaagagcguggagguaga

SEQ ID NO: 1106152 - RNA, 19 nt, Homo sapiens
  misc_RNA (1)...(19): siRNA sense strand
caaagcagaggcugagaau

SEQ ID NO: 1106153 - RNA, 19 nt, Homo sapiens
  misc_RNA (1)...(19): siRNA sense strand
gcuagaagaagggaccaua

SEQ ID NO: 1106154 - RNA, 19 nt, Homo sapiens
  misc_RNA (1)...(19): siRNA sense strand
gcagcugaauccagagagu

SEQ ID NO: 1106155 - RNA, 19 nt, Homo sapiens
  misc_RNA (1)...(19): siRNA sense strand
uuagggcucugacccaguu

SEQ ID NO: 1106156 - RNA, 19 nt, Homo sapiens
  misc_RNA (1)...(19): siRNA sense strand
ccaaggugauucagauugc

SEQ ID NO: 1106157 - RNA, 19 nt, Homo sapiens
  misc_RNA (1)...(19): siRNA sense strand
acacaaauggaccgaagaa

SEQ ID NO: 1106158 - RNA, 19 nt, Homo sapiens
  misc_RNA (1)...(19): siRNA sense strand
uagaagaagggaccauaga

SEQ ID NO: 1106159 - RNA, 19 nt, Homo sapiens
  misc_RNA (1)...(19): siRNA sense strand
uagucuacgugcacacaaa

SEQ ID NO: 1106160 - RNA, 19 nt, Homo sapiens
  misc_RNA (1)...(19): siRNA sense strand
aagaagggaccauagaugu

SEQ ID NO: 1106161 - RNA, 19 nt, Homo sapiens
  misc_RNA (1)...(19): siRNA sense strand
gauguuaccgacuucuugu

SEQ ID NO: 1106162 - RNA, 19 nt, Homo sapiens
  misc_RNA (1)...(19): siRNA sense strand
gccaaggugauucagauug

SEQ ID NO: 1106163 - RNA, 19 nt, Homo sapiens
  misc_RNA (1)...(19): siRNA sense strand
uggccaaggugauucagau

SEQ ID NO: 1106164 - RNA, 19 nt, Homo sapiens
  misc_RNA (1)...(19): siRNA sense strand
ggaguuccuuugagaugac

SEQ ID NO: 1106165 - RNA, 19 nt, Homo sapiens
  misc_RNA (1)...(19): siRNA sense strand
ugacgacagugccauuagg

SEQ ID NO: 1106166 - RNA, 19 nt, Homo sapiens
  misc_RNA (1)...(19): siRNA sense strand
aagucacacugcacauaaa

SEQ ID NO: 1106167 - RNA, 19 nt, Homo sapiens
  misc_RNA (1)...(19): siRNA sense strand
ggaagagcccucggcaucu

SEQ ID NO: 1106168 - RNA, 19 nt, Homo sapiens
  misc_RNA (1)...(19): siRNA sense strand
caagagcguggagguagaa

SEQ ID NO: 1106169 - RNA, 19 nt, Homo sapiens
  misc_RNA (1)...(19): siRNA sense strand
acaacgaaccgcuuacaca

SEQ ID NO: 1106170 - RNA, 19 nt, Homo sapiens
  misc_RNA (1)...(19): siRNA sense strand
caacagugugauuggaaga

SEQ ID NO: 1106171 - RNA, 19 nt, Homo sapiens
  misc_RNA (1)...(19): siRNA sense strand
cauagauguuaccgacuuc

SEQ ID NO: 1106172 - RNA, 19 nt, Homo sapiens
  misc_RNA (1)...(19): siRNA sense strand
agaagggaccauagauguu

SEQ ID NO: 1106173 - RNA, 19 nt, Homo sapiens
  misc_RNA (1)...(19): siRNA sense strand
cagcugaauccagagagua

SEQ ID NO: 1106174 - RNA, 19 nt, Homo sapiens
  misc_RNA (1)...(19): siRNA sense strand
ucauggcagucaaguccaa

SEQ ID NO: 1106175 - RNA, 19 nt, Homo sapiens
  misc_RNA (1)...(19): siRNA sense strand
aggaacaacgaaccgcuua

SEQ ID NO: 1106176 - RNA, 19 nt, Homo sapiens
  misc_RNA (1)...(19): siRNA sense strand
acaaauggaccgaagaaaa

SEQ ID NO: 1106177 - RNA, 19 nt, Homo sapiens
  misc_RNA (1)...(19): siRNA sense strand
agaagaagggaccauagau

SEQ ID NO: 1106178 - RNA, 19 nt, Homo sapiens
  misc_RNA (1)...(19): siRNA sense strand
ggcuauggcagcaagaaga

SEQ ID NO: 1106179 - RNA, 19 nt, Homo sapiens
  misc_RNA (1)...(19): siRNA sense strand
cgucauccuccacagcuaa

SEQ ID NO: 1106180 - RNA, 19 nt, Homo sapiens
  misc_RNA (1)...(19): siRNA sense strand
gcuauggcagcaagaagau

SEQ ID NO: 1106181 - RNA, 19 nt, Homo sapiens
  misc_RNA (1)...(19): siRNA sense strand
accaagcugucuacacuca

SEQ ID NO: 1106182 - RNA, 19 nt, Homo sapiens
  misc_RNA (1)...(19): siRNA sense strand
cagcuaagaaccucaugca

SEQ ID NO: 1106183 - RNA, 19 nt, Homo sapiens
  misc_RNA (1)...(19): siRNA sense strand
ucucaacagugugauugga

SEQ ID NO: 1106184 - RNA, 19 nt, Homo sapiens
  misc_RNA (1)...(19): siRNA sense strand
caaggugauucagauugca

SEQ ID NO: 1106185 - RNA, 19 nt, Homo sapiens
  misc_RNA (1)...(19): siRNA sense strand
gcccaagagcguggaggua

SEQ ID NO: 1106186 - RNA, 19 nt, Homo sapiens
  misc_RNA (1)...(19): siRNA sense strand
cacauaaaauggcccaaga

SEQ ID NO: 1106187 - RNA, 19 nt, Homo sapiens
  misc_RNA (1)...(19): siRNA sense strand
ggccaaggugauucagauu

SEQ ID NO: 1106188 - RNA, 19 nt, Homo sapiens
  misc_RNA (1)...(19): siRNA sense strand
aaucuucucaacaguguga

SEQ ID NO: 1106189 - RNA, 19 nt, Homo sapiens
  misc_RNA (1)...(19): siRNA sense strand
gaagggaccauagauguua

SEQ ID NO: 1106190 - RNA, 19 nt, Homo sapiens
  misc_RNA (1)...(19): siRNA sense strand
cuaagaaccucaugcaguu

SEQ ID NO: 1106191 - RNA, 19 nt, Homo sapiens
  misc_RNA (1)...(19): siRNA sense strand
gaaagucacacugcacaua

SEQ ID NO: 1106192 - RNA, 19 nt, Homo sapiens
  misc_RNA (1)...(19): siRNA sense strand
aagcagaggcugagaauaa

SEQ ID NO: 1106193 - RNA, 19 nt, Homo sapiens
  misc_RNA (1)...(19): siRNA sense strand
ggaggaagagcuagaagaa

SEQ ID NO: 1106194 - RNA, 19 nt, Homo sapiens
  misc_RNA (1)...(19): siRNA sense strand
gaagaagggaccauagaug

SEQ ID NO: 1106195 - RNA, 19 nt, Homo sapiens
  misc_RNA (1)...(19): siRNA sense strand
gaugacagaugacgacagu

SEQ ID NO: 1106196 - RNA, 19 nt, Homo sapiens
  misc_RNA (1)...(19): siRNA sense strand
gggccuaucccgcucuuua

SEQ ID NO: 1106197 - RNA, 19 nt, Homo sapiens
  misc_RNA (1)...(19): siRNA sense strand
ccauagauguuaccgacuu

SEQ ID NO: 1106198 - RNA, 19 nt, Homo sapiens
  misc_RNA (1)...(19): siRNA sense strand
ggacgaggaggaagagcua

SEQ ID NO: 1106199 - RNA, 19 nt, Homo sapiens
  misc_RNA (1)...(19): siRNA sense strand
ccuuugagaugacagauga

SEQ ID NO: 1106200 - RNA, 19 nt, Homo sapiens
  misc_RNA (1)...(19): siRNA sense strand
gcaaagcagaggcugagaa

SEQ ID NO: 1106201 - RNA, 19 nt, Homo sapiens
  misc_RNA (1)...(19): siRNA sense strand
gaagagcccucggcaucuc

SEQ ID NO: 1106202 - RNA, 19 nt, Homo sapiens
  misc_RNA (1)...(19): siRNA sense strand
gggaguuccuuugagauga

SEQ ID NO: 1106203 - RNA, 19 nt, Homo sapiens
  misc_RNA (1)...(19): siRNA sense strand
gaacaacgaaccgcuuaca

SEQ ID NO: 1106204 - RNA, 19 nt, Homo sapiens
  misc_RNA (1)...(19): siRNA sense strand
aaagucacacugcacauaa

SEQ ID NO: 1106205 - RNA, 19 nt, Homo sapiens
  misc_RNA (1)...(19): siRNA sense strand
gaugacgacagugccauua

SEQ ID NO: 1106206 - RNA, 19 nt, Homo sapiens
  misc_RNA (1)...(19): siRNA sense strand
agugcuagcugaucgcuuu

SEQ ID NO: 1106207 - RNA, 19 nt, Homo sapiens
  misc_RNA (1)...(19): siRNA sense strand
ccaagagcguggagguaga

SEQ ID NO: 1106208 - RNA, 19 nt, Homo sapiens
  misc_RNA (1)...(19): siRNA sense strand
caaagcagaggcugagaau

SEQ ID NO: 1106209 - RNA, 19 nt, Homo sapiens
  misc_RNA (1)...(19): siRNA sense strand
gcuagaagaagggaccaua

SEQ ID NO: 1106210 - RNA, 19 nt, Homo sapiens
  misc_RNA (1)...(19): siRNA sense strand
gcagcugaauccagagagu

SEQ ID NO: 1106211 - RNA, 19 nt, Homo sapiens
  misc_RNA (1)...(19): siRNA sense strand
uuagggcucugacccaguu

SEQ ID NO: 1106212 - RNA, 19 nt, Homo sapiens
  misc_RNA (1)...(19): siRNA sense strand
ccaaggugauucagauugc

SEQ ID NO: 1106213 - RNA, 19 nt, Homo sapiens
  misc_RNA (1)...(19): siRNA sense strand
acacaaauggaccgaagaa

SEQ ID NO: 1106214 - RNA, 19 nt, Homo sapiens
  misc_RNA (1)...(19): siRNA sense strand
uagaagaagggaccauaga

SEQ ID NO: 1106215 - RNA, 19 nt, Homo sapiens
  misc_RNA (1)...(19): siRNA sense strand
uagucuacgugcacacaaa

SEQ ID NO: 1106216 - RNA, 19 nt, Homo sapiens
  misc_RNA (1)...(19): siRNA sense strand
aagaagggaccauagaugu

SEQ ID NO: 1106217 - RNA, 19 nt, Homo sapiens
  misc_RNA (1)...(19): siRNA sense strand
gauguuaccgacuucuugu

SEQ ID NO: 1106218 - RNA, 19 nt, Homo sapiens
  misc_RNA (1)...(19): siRNA sense strand
gccaaggugauucagauug

SEQ ID NO: 1106219 - RNA, 19 nt, Homo sapiens
  misc_RNA (1)...(19): siRNA sense strand
uggccaaggugauucagau

SEQ ID NO: 1106220 - RNA, 19 nt, Homo sapiens
  misc_RNA (1)...(19): siRNA sense strand
ggaguuccuuugagaugac

SEQ ID NO: 1106221 - RNA, 19 nt, Homo sapiens
  misc_RNA (1)...(19): siRNA sense strand
ugacgacagugccauuagg

SEQ ID NO: 1106222 - RNA, 19 nt, Homo sapiens
  misc_RNA (1)...(19): siRNA sense strand
aagucacacugcacauaaa

SEQ ID NO: 1106223 - RNA, 19 nt, Homo sapiens
  misc_RNA (1)...(19): siRNA sense strand
ggaagagcccucggcaucu

SEQ ID NO: 1106224 - RNA, 19 nt, Homo sapiens
  misc_RNA (1)...(19): siRNA sense strand
caagagcguggagguagaa

SEQ ID NO: 1106225 - RNA, 19 nt, Homo sapiens
  misc_RNA (1)...(19): siRNA sense strand
acaacgaaccgcuuacaca

SEQ ID NO: 1106226 - RNA, 19 nt, Homo sapiens
  misc_RNA (1)...(19): siRNA sense strand
cauagauguuaccgacuuc

SEQ ID NO: 1106227 - RNA, 19 nt, Homo sapiens
  misc_RNA (1)...(19): siRNA sense strand
agaagggaccauagauguu

SEQ ID NO: 1106228 - RNA, 19 nt, Homo sapiens
  misc_RNA (1)...(19): siRNA sense strand
caacagugugauuggaaga

SEQ ID NO: 1106229 - RNA, 19 nt, Homo sapiens
  misc_RNA (1)...(19): siRNA sense strand
cagcugaauccagagagua

SEQ ID NO: 1106230 - RNA, 19 nt, Homo sapiens
  misc_RNA (1)...(19): siRNA sense strand
aggaacaacgaaccgcuua

SEQ ID NO: 1106231 - RNA, 19 nt, Homo sapiens
  misc_RNA (1)...(19): siRNA sense strand
acaaauggaccgaagaaaa

SEQ ID NO: 1106232 - RNA, 19 nt, Homo sapiens
  misc_RNA (1)...(19): siRNA sense strand
agaagaagggaccauagau

SEQ ID NO: 1106233 - RNA, 19 nt, Homo sapiens
  misc_RNA (1)...(19): siRNA sense strand
ggcuauggcagcaagaaga

SEQ ID NO: 1106234 - RNA, 19 nt, Homo sapiens
  misc_RNA (1)...(19): siRNA sense strand
cgucauccuccacagcuaa

SEQ ID NO: 1106235 - RNA, 19 nt, Homo sapiens
  misc_RNA (1)...(19): siRNA sense strand
gcuauggcagcaagaagau

SEQ ID NO: 1106236 - RNA, 19 nt, Homo sapiens
  misc_RNA (1)...(19): siRNA sense strand
ucucaacagugugauugga

SEQ ID NO: 1106237 - RNA, 19 nt, Homo sapiens
  misc_RNA (1)...(19): siRNA sense strand
accaagcugucuacacuca

SEQ ID NO: 1106238 - RNA, 19 nt, Homo sapiens
  misc_RNA (1)...(19): siRNA sense strand
cagcuaagaaccucaugca

SEQ ID NO: 1106239 - RNA, 19 nt, Homo sapiens
  misc_RNA (1)...(19): siRNA sense strand
caaggugauucagauugca

SEQ ID NO: 1106240 - RNA, 19 nt, Homo sapiens
  misc_RNA (1)...(19): siRNA sense strand
aaucuucucaacaguguga

SEQ ID NO: 1106241 - RNA, 19 nt, Homo sapiens
  misc_RNA (1)...(19): siRNA sense strand
cacauaaaauggcccaaga

SEQ ID NO: 1106242 - RNA, 19 nt, Homo sapiens
  misc_RNA (1)...(19): siRNA sense strand
ggccaaggugauucagauu

SEQ ID NO: 1106243 - RNA, 19 nt, Homo sapiens
  misc_RNA (1)...(19): siRNA sense strand
gcccaagagcguggaggua

SEQ ID NO: 1106244 - RNA, 19 nt, Homo sapiens
  misc_RNA (1)...(19): siRNA sense strand
caagacagcugacgacuga

SEQ ID NO: 1106245 - RNA, 19 nt, Homo sapiens
  misc_RNA (1)...(19): siRNA sense strand
gccgauggcugacguauuu

SEQ ID NO: 1106246 - RNA, 19 nt, Homo sapiens
  misc_RNA (1)...(19): siRNA sense strand
gaagggaccauagauguua

SEQ ID NO: 1106247 - RNA, 19 nt, Homo sapiens
  misc_RNA (1)...(19): siRNA sense strand
cuaagaaccucaugcaguu

SEQ ID NO: 1106248 - RNA, 19 nt, Homo sapiens
  misc_RNA (1)...(19): siRNA sense strand
gaaagucacacugcacaua

SEQ ID NO: 1106249 - RNA, 19 nt, Homo sapiens
  misc_RNA (1)...(19): siRNA sense strand
aagcagaggcugagaauaa

SEQ ID NO: 1106250 - RNA, 19 nt, Homo sapiens
  misc_RNA (1)...(19): siRNA sense strand
ggaggaagagcuagaagaa

SEQ ID NO: 1106251 - RNA, 19 nt, Homo sapiens
  misc_RNA (1)...(19): siRNA sense strand
gaagaagggaccauagaug

SEQ ID NO: 1106252 - RNA, 19 nt, Homo sapiens
  misc_RNA (1)...(19): siRNA sense strand
gaugacagaugacgacagu

SEQ ID NO: 1106253 - RNA, 19 nt, Homo sapiens
  misc_RNA (1)...(19): siRNA sense strand
gggccuaucccgcucuuua

SEQ ID NO: 1106254 - RNA, 19 nt, Homo sapiens
  misc_RNA (1)...(19): siRNA sense strand
ccauagauguuaccgacuu

SEQ ID NO: 1106255 - RNA, 19 nt, Homo sapiens
  misc_RNA (1)...(19): siRNA sense strand
ggacgaggaggaagagcua

SEQ ID NO: 1106256 - RNA, 19 nt, Homo sapiens
  misc_RNA (1)...(19): siRNA sense strand
ccuuugagaugacagauga

SEQ ID NO: 1106257 - RNA, 19 nt, Homo sapiens
  misc_RNA (1)...(19): siRNA sense strand
gcaaagcagaggcugagaa

SEQ ID NO: 1106258 - RNA, 19 nt, Homo sapiens
  misc_RNA (1)...(19): siRNA sense strand
gaagagcccucggcaucuc

SEQ ID NO: 1106259 - RNA, 19 nt, Homo sapiens
  misc_RNA (1)...(19): siRNA sense strand
gggaguuccuuugagauga

SEQ ID NO: 1106260 - RNA, 19 nt, Homo sapiens
  misc_RNA (1)...(19): siRNA sense strand
gaacaacgaaccgcuuaca

SEQ ID NO: 1106261 - RNA, 19 nt, Homo sapiens
  misc_RNA (1)...(19): siRNA sense strand
aaagucacacugcacauaa

SEQ ID NO: 1106262 - RNA, 19 nt, Homo sapiens
  misc_RNA (1)...(19): siRNA sense strand
gaugacgacagugccauua

SEQ ID NO: 1106263 - RNA, 19 nt, Homo sapiens
  misc_RNA (1)...(19): siRNA sense strand
agugcuagcugaucgcuuu

SEQ ID NO: 1106264 - RNA, 19 nt, Homo sapiens
  misc_RNA (1)...(19): siRNA sense strand
ccaagagcguggagguaga

SEQ ID NO: 1106265 - RNA, 19 nt, Homo sapiens
  misc_RNA (1)...(19): siRNA sense strand
caaagcagaggcugagaau

SEQ ID NO: 1106266 - RNA, 19 nt, Homo sapiens
  misc_RNA (1)...(19): siRNA sense strand
gcuagaagaagggaccaua

SEQ ID NO: 1106267 - RNA, 19 nt, Homo sapiens
  misc_RNA (1)...(19): siRNA sense strand
gcagcugaauccagagagu

SEQ ID NO: 1106268 - RNA, 19 nt, Homo sapiens
  misc_RNA (1)...(19): siRNA sense strand
uuagggcucugacccaguu

SEQ ID NO: 1106269 - RNA, 19 nt, Homo sapiens
  misc_RNA (1)...(19): siRNA sense strand
ccaaggugauucagauugc

SEQ ID NO: 1106270 - RNA, 19 nt, Homo sapiens
  misc_RNA (1)...(19): siRNA sense strand
acacaaauggaccgaagaa

SEQ ID NO: 1106271 - RNA, 19 nt, Homo sapiens
  misc_RNA (1)...(19): siRNA sense strand
uagaagaagggaccauaga

SEQ ID NO: 1106272 - RNA, 19 nt, Homo sapiens
  misc_RNA (1)...(19): siRNA sense strand
uagucuacgugcacacaaa

SEQ ID NO: 1106273 - RNA, 19 nt, Homo sapiens
  misc_RNA (1)...(19): siRNA sense strand
aagaagggaccauagaugu

SEQ ID NO: 1106274 - RNA, 19 nt, Homo sapiens
  misc_RNA (1)...(19): siRNA sense strand
gauguuaccgacuucuugu

SEQ ID NO: 1106275 - RNA, 19 nt, Homo sapiens
  misc_RNA (1)...(19): siRNA sense strand
gccaaggugauucagauug

SEQ ID NO: 1106276 - RNA, 19 nt, Homo sapiens
  misc_RNA (1)...(19): siRNA sense strand
uggccaaggugauucagau

SEQ ID NO: 1106277 - RNA, 19 nt, Homo sapiens
  misc_RNA (1)...(19): siRNA sense strand
ggaguuccuuugagaugac

SEQ ID NO: 1106278 - RNA, 19 nt, Homo sapiens
  misc_RNA (1)...(19): siRNA sense strand
ugacgacagugccauuagg

SEQ ID NO: 1106279 - RNA, 19 nt, Homo sapiens
  misc_RNA (1)...(19): siRNA sense strand
aagucacacugcacauaaa

SEQ ID NO: 1106280 - RNA, 19 nt, Homo sapiens
  misc_RNA (1)...(19): siRNA sense strand
ggaagagcccucggcaucu

SEQ ID NO: 1106281 - RNA, 19 nt, Homo sapiens
  misc_RNA (1)...(19): siRNA sense strand
caagagcguggagguagaa

SEQ ID NO: 1106282 - RNA, 19 nt, Homo sapiens
  misc_RNA (1)...(19): siRNA sense strand
acaacgaaccgcuuacaca

SEQ ID NO: 1106283 - RNA, 19 nt, Homo sapiens
  misc_RNA (1)...(19): siRNA sense strand
caacagugugauuggaaga

SEQ ID NO: 1106284 - RNA, 19 nt, Homo sapiens
  misc_RNA (1)...(19): siRNA sense strand
cauagauguuaccgacuuc

SEQ ID NO: 1106285 - RNA, 19 nt, Homo sapiens
  misc_RNA (1)...(19): siRNA sense strand
agaagggaccauagauguu

SEQ ID NO: 1106286 - RNA, 19 nt, Homo sapiens
  misc_RNA (1)...(19): siRNA sense strand
cagcugaauccagagagua

SEQ ID NO: 1106287 - RNA, 19 nt, Homo sapiens
  misc_RNA (1)...(19): siRNA sense strand
ucauggcagucaaguccaa

SEQ ID NO: 1106288 - RNA, 19 nt, Homo sapiens
  misc_RNA (1)...(19): siRNA sense strand
aggaacaacgaaccgcuua

SEQ ID NO: 1106289 - RNA, 19 nt, Homo sapiens
  misc_RNA (1)...(19): siRNA sense strand
acaaauggaccgaagaaaa

SEQ ID NO: 1106290 - RNA, 19 nt, Homo sapiens
  misc_RNA (1)...(19): siRNA sense strand
agaagaagggaccauagau

SEQ ID NO: 1106291 - RNA, 19 nt, Homo sapiens
  misc_RNA (1)...(19): siRNA sense strand
ggcuauggcagcaagaaga

SEQ ID NO: 1106292 - RNA, 19 nt, Homo sapiens
  misc_RNA (1)...(19): siRNA sense strand
cgucauccuccacagcuaa

SEQ ID NO: 1106293 - RNA, 19 nt, Homo sapiens
  misc_RNA (1)...(19): siRNA sense strand
gcuauggcagcaagaagau

SEQ ID NO: 1106294 - RNA, 19 nt, Homo sapiens
  misc_RNA (1)...(19): siRNA sense strand
accaagcugucuacacuca

SEQ ID NO: 1106295 - RNA, 19 nt, Homo sapiens
  misc_RNA (1)...(19): siRNA sense strand
cagcuaagaaccucaugca

SEQ ID NO: 1106296 - RNA, 19 nt, Homo sapiens
  misc_RNA (1)...(19): siRNA sense strand
ucucaacagugugauugga

SEQ ID NO: 1106297 - RNA, 19 nt, Homo sapiens
  misc_RNA (1)...(19): siRNA sense strand
caaggugauucagauugca

SEQ ID NO: 1106298 - RNA, 19 nt, Homo sapiens
  misc_RNA (1)...(19): siRNA sense strand
gcccaagagcguggaggua

SEQ ID NO: 1106299 - RNA, 19 nt, Homo sapiens
  misc_RNA (1)...(19): siRNA sense strand
cacauaaaauggcccaaga

SEQ ID NO: 1106300 - RNA, 19 nt, Homo sapiens
  misc_RNA (1)...(19): siRNA sense strand
ggccaaggugauucagauu

SEQ ID NO: 1106301 - RNA, 19 nt, Homo sapiens
  misc_RNA (1)...(19): siRNA sense strand
aaucuucucaacaguguga

SEQ ID NO: 1106302 - RNA, 19 nt, Homo sapiens
  misc_RNA (1)...(19): siRNA sense strand
gaagagagauuccauugaa

SEQ ID NO: 1106303 - RNA, 19 nt, Homo sapiens
  misc_RNA (1)...(19): siRNA sense strand
ugaaagagcucaacaacaa

SEQ ID NO: 1106304 - RNA, 19 nt, Homo sapiens
  misc_RNA (1)...(19): siRNA sense strand
ggaaagaagucuccagaau

SEQ ID NO: 1106305 - RNA, 19 nt, Homo sapiens
  misc_RNA (1)...(19): siRNA sense strand
gagagaaacugaagaaauc

SEQ ID NO: 1106306 - RNA, 19 nt, Homo sapiens
  misc_RNA (1)...(19): siRNA sense strand
ugaaguacaugcagaauga

SEQ ID NO: 1106307 - RNA, 19 nt, Homo sapiens
  misc_RNA (1)...(19): siRNA sense strand
caacaacaauguggagaaa

SEQ ID NO: 1106308 - RNA, 19 nt, Homo sapiens
  misc_RNA (1)...(19): siRNA sense strand
ggaaauuucuguucaagac

SEQ ID NO: 1106309 - RNA, 19 nt, Homo sapiens
  misc_RNA (1)...(19): siRNA sense strand
gaaagaagucuccagaauc

SEQ ID NO: 1106310 - RNA, 19 nt, Homo sapiens
  misc_RNA (1)...(19): siRNA sense strand
ggagagaaacugaagaaau

SEQ ID NO: 1106311 - RNA, 19 nt, Homo sapiens
  misc_RNA (1)...(19): siRNA sense strand
uaucuuuggugcuguauuu

SEQ ID NO: 1106312 - RNA, 19 nt, Homo sapiens
  misc_RNA (1)...(19): siRNA sense strand
gcucaaaucucggcagaau

SEQ ID NO: 1106313 - RNA, 19 nt, Homo sapiens
  misc_RNA (1)...(19): siRNA sense strand
gcaaacagcacauucagau

SEQ ID NO: 1106314 - RNA, 19 nt, Homo sapiens
  misc_RNA (1)...(19): siRNA sense strand
aaagaagucuccagaaucu

SEQ ID NO: 1106315 - RNA, 19 nt, Homo sapiens
  misc_RNA (1)...(19): siRNA sense strand
caaaggagauagaaacaac

SEQ ID NO: 1106316 - RNA, 19 nt, Homo sapiens
  misc_RNA (1)...(19): siRNA sense strand
gagaagagagauuccauug

SEQ ID NO: 1106317 - RNA, 19 nt, Homo sapiens
  misc_RNA (1)...(19): siRNA sense strand
caagacacacuucaccaua

SEQ ID NO: 1106318 - RNA, 19 nt, Homo sapiens
  misc_RNA (1)...(19): siRNA sense strand
ggucgaggacuauuucuuu

SEQ ID NO: 1106319 - RNA, 19 nt, Homo sapiens
  misc_RNA (1)...(19): siRNA sense strand
ccauggaacaucccaaaua

SEQ ID NO: 1106320 - RNA, 19 nt, Homo sapiens
  misc_RNA (1)...(19): siRNA sense strand
ccaaagggauuuuaacuug

SEQ ID NO: 1106321 - RNA, 19 nt, Homo sapiens
  misc_RNA (1)...(19): siRNA sense strand
caccugaccuugugcuuga

SEQ ID NO: 1106322 - RNA, 19 nt, Homo sapiens
  misc_RNA (1)...(19): siRNA sense strand
gagauuccauugaaagucu

SEQ ID NO: 1106323 - RNA, 19 nt, Homo sapiens
  misc_RNA (1)...(19): siRNA sense strand
aggaugaccuucaguauca

SEQ ID NO: 1106324 - RNA, 19 nt, Homo sapiens
  misc_RNA (1)...(19): siRNA sense strand
cagaagagccugagagaca

SEQ ID NO: 1106325 - RNA, 19 nt, Homo sapiens
  misc_RNA (1)...(19): siRNA sense strand
gaaagagcucaacaacaaa

SEQ ID NO: 1106326 - RNA, 19 nt, Homo sapiens
  misc_RNA (1)...(19): siRNA sense strand
gaagugggcaggagaaugg

SEQ ID NO: 1106327 - RNA, 19 nt, Homo sapiens
  misc_RNA (1)...(19): siRNA sense strand
acaggaaccuaccaacuga

SEQ ID NO: 1106328 - RNA, 19 nt, Homo sapiens
  misc_RNA (1)...(19): siRNA sense strand
aagacacacuucaccauaa

SEQ ID NO: 1106329 - RNA, 19 nt, Homo sapiens
  misc_RNA (1)...(19): siRNA sense strand
ucgaauuugucaaccaaua

SEQ ID NO: 1106330 - RNA, 19 nt, Homo sapiens
  misc_RNA (1)...(19): siRNA sense strand
gcaaagcccucagcagcau

SEQ ID NO: 1106331 - RNA, 19 nt, Homo sapiens
  misc_RNA (1)...(19): siRNA sense strand
aagguugucugcauggaua

SEQ ID NO: 1106332 - RNA, 19 nt, Homo sapiens
  misc_RNA (1)...(19): siRNA sense strand
cugccaagcugaaauugaa

SEQ ID NO: 1106333 - RNA, 19 nt, Homo sapiens
  misc_RNA (1)...(19): siRNA sense strand
gaaagaccaggcugucguu

SEQ ID NO: 1106334 - RNA, 19 nt, Homo sapiens
  misc_RNA (1)...(19): siRNA sense strand
caacauugcugugcuccau

SEQ ID NO: 1106335 - RNA, 19 nt, Homo sapiens
  misc_RNA (1)...(19): siRNA sense strand
uaacaaaggagauagaaac

SEQ ID NO: 1106336 - RNA, 19 nt, Homo sapiens
  misc_RNA (1)...(19): siRNA sense strand
agaaaucgcucuucaugcu

SEQ ID NO: 1106337 - RNA, 19 nt, Homo sapiens
  misc_RNA (1)...(19): siRNA sense strand
agaccaaauuccaccagua

SEQ ID NO: 1106338 - RNA, 19 nt, Homo sapiens
  misc_RNA (1)...(19): siRNA sense strand
ucagcaagcagcagaauga

SEQ ID NO: 1106339 - RNA, 19 nt, Homo sapiens
  misc_RNA (1)...(19): siRNA sense strand
ggccuguccuuggaaauuu

SEQ ID NO: 1106340 - RNA, 19 nt, Homo sapiens
  misc_RNA (1)...(19): siRNA sense strand
cauggaacaucccaaauac

SEQ ID NO: 1106341 - RNA, 19 nt, Homo sapiens
  misc_RNA (1)...(19): siRNA sense strand
gaccaaauuccaccaguau

SEQ ID NO: 1106342 - RNA, 19 nt, Homo sapiens
  misc_RNA (1)...(19): siRNA sense strand
gggaugacuuuccaagaca

SEQ ID NO: 1106343 - RNA, 19 nt, Homo sapiens
  misc_RNA (1)...(19): siRNA sense strand
gcaaguggaaguucaccaa

SEQ ID NO: 1106344 - RNA, 19 nt, Homo sapiens
  misc_RNA (1)...(19): siRNA sense strand
gagaagcggagacccaaga

SEQ ID NO: 1106345 - RNA, 19 nt, Homo sapiens
  misc_RNA (1)...(19): siRNA sense strand
ccaccaguaugcaaugaau

SEQ ID NO: 1106346 - RNA, 19 nt, Homo sapiens
  misc_RNA (1)...(19): siRNA sense strand
gaucacacgcccacagaga

SEQ ID NO: 1106347 - RNA, 19 nt, Homo sapiens
  misc_RNA (1)...(19): siRNA sense strand
uugcugugcuccauaguuu

SEQ ID NO: 1106348 - RNA, 19 nt, Homo sapiens
  misc_RNA (1)...(19): siRNA sense strand
gccaggcccucaccuacuu

SEQ ID NO: 1106349 - RNA, 19 nt, Homo sapiens
  misc_RNA (1)...(19): siRNA sense strand
accaggagaugcugaacua

SEQ ID NO: 1106350 - RNA, 19 nt, Homo sapiens
  misc_RNA (1)...(19): siRNA sense strand
uaucgaauuugucaaccaa

SEQ ID NO: 1106351 - RNA, 19 nt, Homo sapiens
  misc_RNA (1)...(19): siRNA sense strand
gcugugcucuuugccugua

SEQ ID NO: 1106352 - RNA, 19 nt, Homo sapiens
  misc_RNA (1)...(19): siRNA sense strand
gcugcagaauccuucauga

SEQ ID NO: 1106353 - RNA, 19 nt, Homo sapiens
  misc_RNA (1)...(19): siRNA sense strand
aagcaggccuggcgcaaug

SEQ ID NO: 1106354 - RNA, 19 nt, Homo sapiens
  misc_RNA (1)...(19): siRNA sense strand
gcaucgaccugggcuggaa

SEQ ID NO: 1106355 - RNA, 19 nt, Homo sapiens
  misc_RNA (1)...(19): siRNA sense strand
cgccuuugcucaugacauu

SEQ ID NO: 1106356 - RNA, 19 nt, Homo sapiens
  misc_RNA (1)...(19): siRNA sense strand
acccugagcucuucgaaau

SEQ ID NO: 1106357 - RNA, 19 nt, Homo sapiens
  misc_RNA (1)...(19): siRNA sense strand
gcaggucgaggacuauuuc

SEQ ID NO: 1106358 - RNA, 19 nt, Homo sapiens
  misc_RNA (1)...(19): siRNA sense strand
gagauagaaacaacaggaa

SEQ ID NO: 1106359 - RNA, 19 nt, Homo sapiens
  misc_RNA (1)...(19): siRNA sense strand
ccaggccaccucuauguuu

SEQ ID NO: 1106360 - RNA, 19 nt, Homo sapiens
  misc_RNA (1)...(19): siRNA sense strand
gcaauggagagaaacugaa

SEQ ID NO: 1106361 - RNA, 19 nt, Homo sapiens
  misc_RNA (1)...(19): siRNA sense strand
aagagagauuccauugaaa

SEQ ID NO: 1106362 - RNA, 19 nt, Homo sapiens
  misc_RNA (1)...(19): siRNA sense strand
uggaagcgguaacaaagga

SEQ ID NO: 1106363 - RNA, 19 nt, Homo sapiens
  misc_RNA (1)...(19): siRNA sense strand
ugguggaacucuccuguga

SEQ ID NO: 1106364 - RNA, 19 nt, Homo sapiens
  misc_RNA (1)...(19): siRNA sense strand
aacuggagcuaaaguggua

SEQ ID NO: 1106365 - RNA, 19 nt, Homo sapiens
  misc_RNA (1)...(19): siRNA sense strand
guaacaaaggagauagaaa

SEQ ID NO: 1106366 - RNA, 19 nt, Homo sapiens
  misc_RNA (1)...(19): siRNA sense strand
guacaugggcacagagauc

SEQ ID NO: 1106367 - RNA, 19 nt, Homo sapiens
  misc_RNA (1)...(19): siRNA sense strand
ucaaaucucggcagaaucu

SEQ ID NO: 1106368 - RNA, 19 nt, Homo sapiens
  misc_RNA (1)...(19): siRNA sense strand
gagcucaacaacaaauuca

SEQ ID NO: 1106369 - RNA, 19 nt, Homo sapiens
  misc_RNA (1)...(19): siRNA sense strand
ccacucggcugcagaaucc

SEQ ID NO: 1106370 - RNA, 19 nt, Homo sapiens
  misc_RNA (1)...(19): siRNA sense strand
ccauaaggccaaagggauu

SEQ ID NO: 1106371 - RNA, 19 nt, Homo sapiens
  misc_RNA (1)...(19): siRNA sense strand
ggagccaggccaccucuau

SEQ ID NO: 1106372 - RNA, 19 nt, Homo sapiens
  misc_RNA (1)...(19): siRNA sense strand
ucugcuggcuuccugcuuu

SEQ ID NO: 1106373 - RNA, 19 nt, Homo sapiens
  misc_RNA (1)...(19): siRNA sense strand
cgaaaucccaccugaccuu

SEQ ID NO: 1106374 - RNA, 19 nt, Homo sapiens
  misc_RNA (1)...(19): siRNA sense strand
ggucggccaucaccguguu

SEQ ID NO: 1106375 - RNA, 19 nt, Homo sapiens
  misc_RNA (1)...(19): siRNA sense strand
caccaacaauggcaacauc

SEQ ID NO: 1106376 - RNA, 19 nt, Homo sapiens
  misc_RNA (1)...(19): siRNA sense strand
gcagacacgugcguuacuc

SEQ ID NO: 1106377 - RNA, 19 nt, Homo sapiens
  misc_RNA (1)...(19): siRNA sense strand
gcugguacaugggcacaga

SEQ ID NO: 1106378 - RNA, 19 nt, Homo sapiens
  misc_RNA (1)...(19): siRNA sense strand
caggccaccucuauguuug

SEQ ID NO: 1106379 - RNA, 19 nt, Homo sapiens
  misc_RNA (1)...(19): siRNA sense strand
acaauggcgucccgaguca

SEQ ID NO: 1106380 - RNA, 19 nt, Homo sapiens
  misc_RNA (1)...(19): siRNA sense strand
caagcuaucgaauuuguca

SEQ ID NO: 1106381 - RNA, 19 nt, Homo sapiens
  misc_RNA (1)...(19): siRNA sense strand
gcucuacaccuccaaugug

SEQ ID NO: 1106382 - RNA, 19 nt, Homo sapiens
  misc_RNA (1)...(19): siRNA sense strand
gcuggucccucccaugucu

SEQ ID NO: 1106383 - RNA, 19 nt, Homo sapiens
  misc_RNA (1)...(19): siRNA sense strand
gggaaagaagucuccagaa

SEQ ID NO: 1106384 - RNA, 19 nt, Homo sapiens
  misc_RNA (1)...(19): siRNA sense strand
gguggaagcgguaacaaag

SEQ ID NO: 1106385 - RNA, 19 nt, Homo sapiens
  misc_RNA (1)...(19): siRNA sense strand
gcagcgggaugacuuucca

SEQ ID NO: 1106386 - RNA, 19 nt, Homo sapiens
  misc_RNA (1)...(19): siRNA sense strand
agauaucuuuggugcugua

SEQ ID NO: 1106387 - RNA, 19 nt, Homo sapiens
  misc_RNA (1)...(19): siRNA sense strand
ccgcaugaccuugguguuu

SEQ ID NO: 1106388 - RNA, 19 nt, Homo sapiens
  misc_RNA (1)...(19): siRNA sense strand
gaggcaaacagcacauuca

SEQ ID NO: 1106389 - RNA, 19 nt, Homo sapiens
  misc_RNA (1)...(19): siRNA sense strand
cucaugacauugaucagaa

SEQ ID NO: 1106390 - RNA, 19 nt, Homo sapiens
  misc_RNA (1)...(19): siRNA sense strand
gcucaugacauugaucaga

SEQ ID NO: 1106391 - RNA, 19 nt, Homo sapiens
  misc_RNA (1)...(19): siRNA sense strand
caacaggaaccuaccaacu

SEQ ID NO: 1106392 - RNA, 19 nt, Homo sapiens
  misc_RNA (1)...(19): siRNA sense strand
agacacacuucaccauaag

SEQ ID NO: 1106393 - RNA, 19 nt, Homo sapiens
  misc_RNA (1)...(19): siRNA sense strand
cgaauuugucaaccaauau

SEQ ID NO: 1106394 - RNA, 19 nt, Homo sapiens
  misc_RNA (1)...(19): siRNA sense strand
gcaagcccaaggucuaugu

SEQ ID NO: 1106395 - RNA, 19 nt, Homo sapiens
  misc_RNA (1)...(19): siRNA sense strand
aaagacaucaacaacaaug

SEQ ID NO: 1106396 - RNA, 19 nt, Homo sapiens
  misc_RNA (1)...(19): siRNA sense strand
gagagauuccauugaaagu

SEQ ID NO: 1106397 - RNA, 19 nt, Homo sapiens
  misc_RNA (1)...(19): siRNA sense strand
guacaugcagaaugaauac

SEQ ID NO: 1106398 - RNA, 19 nt, Homo sapiens
  misc_RNA (1)...(19): siRNA sense strand
gguaacaaaggagauagaa

SEQ ID NO: 1106399 - RNA, 19 nt, Homo sapiens
  misc_RNA (1)...(19): siRNA sense strand
uauuacggcuccuucaaag

SEQ ID NO: 1106400 - RNA, 19 nt, Homo sapiens
  misc_RNA (1)...(19): siRNA sense strand
aggagcaggucgaggacua

SEQ ID NO: 1106401 - RNA, 19 nt, Homo sapiens
  misc_RNA (1)...(19): siRNA sense strand
cgcaugaccuugguguuug

SEQ ID NO: 1106402 - RNA, 19 nt, Homo sapiens
  misc_RNA (1)...(19): siRNA sense strand
gaagagagauuccauugaa

SEQ ID NO: 1106403 - RNA, 19 nt, Homo sapiens
  misc_RNA (1)...(19): siRNA sense strand
ugaaagagcucaacaacaa

SEQ ID NO: 1106404 - RNA, 19 nt, Homo sapiens
  misc_RNA (1)...(19): siRNA sense strand
ggaaagaagucuccagaau

SEQ ID NO: 1106405 - RNA, 19 nt, Homo sapiens
  misc_RNA (1)...(19): siRNA sense strand
gagagaaacugaagaaauc

SEQ ID NO: 1106406 - RNA, 19 nt, Homo sapiens
  misc_RNA (1)...(19): siRNA sense strand
ugaaguacaugcagaauga

SEQ ID NO: 1106407 - RNA, 19 nt, Homo sapiens
  misc_RNA (1)...(19): siRNA sense strand
caacaacaauguggagaaa

SEQ ID NO: 1106408 - RNA, 19 nt, Homo sapiens
  misc_RNA (1)...(19): siRNA sense strand
ggaaauuucuguucaagac

SEQ ID NO: 1106409 - RNA, 19 nt, Homo sapiens
  misc_RNA (1)...(19): siRNA sense strand
gaaagaagucuccagaauc

SEQ ID NO: 1106410 - RNA, 19 nt, Homo sapiens
  misc_RNA (1)...(19): siRNA sense strand
ggagagaaacugaagaaau

SEQ ID NO: 1106411 - RNA, 19 nt, Homo sapiens
  misc_RNA (1)...(19): siRNA sense strand
uaucuuuggugcuguauuu

SEQ ID NO: 1106412 - RNA, 19 nt, Homo sapiens
  misc_RNA (1)...(19): siRNA sense strand
gcucaaaucucggcagaau

SEQ ID NO: 1106413 - RNA, 19 nt, Homo sapiens
  misc_RNA (1)...(19): siRNA sense strand
gcaaacagcacauucagau

SEQ ID NO: 1106414 - RNA, 19 nt, Homo sapiens
  misc_RNA (1)...(19): siRNA sense strand
aaagaagucuccagaaucu

SEQ ID NO: 1106415 - RNA, 19 nt, Homo sapiens
  misc_RNA (1)...(19): siRNA sense strand
caaaggagauagaaacaac

SEQ ID NO: 1106416 - RNA, 19 nt, Homo sapiens
  misc_RNA (1)...(19): siRNA sense strand
gagaagagagauuccauug

SEQ ID NO: 1106417 - RNA, 19 nt, Homo sapiens
  misc_RNA (1)...(19): siRNA sense strand
caagacacacuucaccaua

SEQ ID NO: 1106418 - RNA, 19 nt, Homo sapiens
  misc_RNA (1)...(19): siRNA sense strand
ggucgaggacuauuucuuu

SEQ ID NO: 1106419 - RNA, 19 nt, Homo sapiens
  misc_RNA (1)...(19): siRNA sense strand
ccauggaacaucccaaaua

SEQ ID NO: 1106420 - RNA, 19 nt, Homo sapiens
  misc_RNA (1)...(19): siRNA sense strand
ccaaagggauuuuaacuug

SEQ ID NO: 1106421 - RNA, 19 nt, Homo sapiens
  misc_RNA (1)...(19): siRNA sense strand
caccugaccuugugcuuga

SEQ ID NO: 1106422 - RNA, 19 nt, Homo sapiens
  misc_RNA (1)...(19): siRNA sense strand
gagauuccauugaaagucu

SEQ ID NO: 1106423 - RNA, 19 nt, Homo sapiens
  misc_RNA (1)...(19): siRNA sense strand
aggaugaccuucaguauca

SEQ ID NO: 1106424 - RNA, 19 nt, Homo sapiens
  misc_RNA (1)...(19): siRNA sense strand
cagaagagccugagagaca

SEQ ID NO: 1106425 - RNA, 19 nt, Homo sapiens
  misc_RNA (1)...(19): siRNA sense strand
gaaagagcucaacaacaaa

SEQ ID NO: 1106426 - RNA, 19 nt, Homo sapiens
  misc_RNA (1)...(19): siRNA sense strand
gaagugggcaggagaaugg

SEQ ID NO: 1106427 - RNA, 19 nt, Homo sapiens
  misc_RNA (1)...(19): siRNA sense strand
acaggaaccuaccaacuga

SEQ ID NO: 1106428 - RNA, 19 nt, Homo sapiens
  misc_RNA (1)...(19): siRNA sense strand
aagacacacuucaccauaa

SEQ ID NO: 1106429 - RNA, 19 nt, Homo sapiens
  misc_RNA (1)...(19): siRNA sense strand
ucgaauuugucaaccaaua

SEQ ID NO: 1106430 - RNA, 19 nt, Homo sapiens
  misc_RNA (1)...(19): siRNA sense strand
gcaaagcccucagcagcau

SEQ ID NO: 1106431 - RNA, 19 nt, Homo sapiens
  misc_RNA (1)...(19): siRNA sense strand
aagguugucugcauggaua

SEQ ID NO: 1106432 - RNA, 19 nt, Homo sapiens
  misc_RNA (1)...(19): siRNA sense strand
cugccaagcugaaauugaa

SEQ ID NO: 1106433 - RNA, 19 nt, Homo sapiens
  misc_RNA (1)...(19): siRNA sense strand
gaaagaccaggcugucguu

SEQ ID NO: 1106434 - RNA, 19 nt, Homo sapiens
  misc_RNA (1)...(19): siRNA sense strand
caacauugcugugcuccau

SEQ ID NO: 1106435 - RNA, 19 nt, Homo sapiens
  misc_RNA (1)...(19): siRNA sense strand
uaacaaaggagauagaaac

SEQ ID NO: 1106436 - RNA, 19 nt, Homo sapiens
  misc_RNA (1)...(19): siRNA sense strand
agaaaucgcucuucaugcu

SEQ ID NO: 1106437 - RNA, 19 nt, Homo sapiens
  misc_RNA (1)...(19): siRNA sense strand
agaccaaauuccaccagua

SEQ ID NO: 1106438 - RNA, 19 nt, Homo sapiens
  misc_RNA (1)...(19): siRNA sense strand
ucagcaagcagcagaauga

SEQ ID NO: 1106439 - RNA, 19 nt, Homo sapiens
  misc_RNA (1)...(19): siRNA sense strand
ggccuguccuuggaaauuu

SEQ ID NO: 1106440 - RNA, 19 nt, Homo sapiens
  misc_RNA (1)...(19): siRNA sense strand
cauggaacaucccaaauac

SEQ ID NO: 1106441 - RNA, 19 nt, Homo sapiens
  misc_RNA (1)...(19): siRNA sense strand
gaccaaauuccaccaguau

SEQ ID NO: 1106442 - RNA, 19 nt, Homo sapiens
  misc_RNA (1)...(19): siRNA sense strand
gggaugacuuuccaagaca

SEQ ID NO: 1106443 - RNA, 19 nt, Homo sapiens
  misc_RNA (1)...(19): siRNA sense strand
gcaaguggaaguucaccaa

SEQ ID NO: 1106444 - RNA, 19 nt, Homo sapiens
  misc_RNA (1)...(19): siRNA sense strand
gagaagcggagacccaaga

SEQ ID NO: 1106445 - RNA, 19 nt, Homo sapiens
  misc_RNA (1)...(19): siRNA sense strand
ccaccaguaugcaaugaau

SEQ ID NO: 1106446 - RNA, 19 nt, Homo sapiens
  misc_RNA (1)...(19): siRNA sense strand
gaucacacgcccacagaga

SEQ ID NO: 1106447 - RNA, 19 nt, Homo sapiens
  misc_RNA (1)...(19): siRNA sense strand
uugcugugcuccauaguuu

SEQ ID NO: 1106448 - RNA, 19 nt, Homo sapiens
  misc_RNA (1)...(19): siRNA sense strand
gccaggcccucaccuacuu

SEQ ID NO: 1106449 - RNA, 19 nt, Homo sapiens
  misc_RNA (1)...(19): siRNA sense strand
accaggagaugcugaacua

SEQ ID NO: 1106450 - RNA, 19 nt, Homo sapiens
  misc_RNA (1)...(19): siRNA sense strand
uaucgaauuugucaaccaa

SEQ ID NO: 1106451 - RNA, 19 nt, Homo sapiens
  misc_RNA (1)...(19): siRNA sense strand
gcugugcucuuugccugua

SEQ ID NO: 1106452 - RNA, 19 nt, Homo sapiens
  misc_RNA (1)...(19): siRNA sense strand
gcugcagaauccuucauga

SEQ ID NO: 1106453 - RNA, 19 nt, Homo sapiens
  misc_RNA (1)...(19): siRNA sense strand
aagcaggccuggcgcaaug

SEQ ID NO: 1106454 - RNA, 19 nt, Homo sapiens
  misc_RNA (1)...(19): siRNA sense strand
gcaucgaccugggcuggaa

SEQ ID NO: 1106455 - RNA, 19 nt, Homo sapiens
  misc_RNA (1)...(19): siRNA sense strand
cgccuuugcucaugacauu

SEQ ID NO: 1106456 - RNA, 19 nt, Homo sapiens
  misc_RNA (1)...(19): siRNA sense strand
acccugagcucuucgaaau

SEQ ID NO: 1106457 - RNA, 19 nt, Homo sapiens
  misc_RNA (1)...(19): siRNA sense strand
gcaggucgaggacuauuuc

SEQ ID NO: 1106458 - RNA, 19 nt, Homo sapiens
  misc_RNA (1)...(19): siRNA sense strand
gagauagaaacaacaggaa

SEQ ID NO: 1106459 - RNA, 19 nt, Homo sapiens
  misc_RNA (1)...(19): siRNA sense strand
ccaggccaccucuauguuu

SEQ ID NO: 1106460 - RNA, 19 nt, Homo sapiens
  misc_RNA (1)...(19): siRNA sense strand
gcaauggagagaaacugaa

SEQ ID NO: 1106461 - RNA, 19 nt, Homo sapiens
  misc_RNA (1)...(19): siRNA sense strand
aagagagauuccauugaaa

SEQ ID NO: 1106462 - RNA, 19 nt, Homo sapiens
  misc_RNA (1)...(19): siRNA sense strand
uggaagcgguaacaaagga

SEQ ID NO: 1106463 - RNA, 19 nt, Homo sapiens
  misc_RNA (1)...(19): siRNA sense strand
ugguggaacucuccuguga

SEQ ID NO: 1106464 - RNA, 19 nt, Homo sapiens
  misc_RNA (1)...(19): siRNA sense strand
aacuggagcuaaaguggua

SEQ ID NO: 1106465 - RNA, 19 nt, Homo sapiens
  misc_RNA (1)...(19): siRNA sense strand
guaacaaaggagauagaaa

SEQ ID NO: 1106466 - RNA, 19 nt, Homo sapiens
  misc_RNA (1)...(19): siRNA sense strand
guacaugggcacagagauc

SEQ ID NO: 1106467 - RNA, 19 nt, Homo sapiens
  misc_RNA (1)...(19): siRNA sense strand
ucaaaucucggcagaaucu

SEQ ID NO: 1106468 - RNA, 19 nt, Homo sapiens
  misc_RNA (1)...(19): siRNA sense strand
gagcucaacaacaaauuca

SEQ ID NO: 1106469 - RNA, 19 nt, Homo sapiens
  misc_RNA (1)...(19): siRNA sense strand
ccacucggcugcagaaucc

SEQ ID NO: 1106470 - RNA, 19 nt, Homo sapiens
  misc_RNA (1)...(19): siRNA sense strand
ccauaaggccaaagggauu

SEQ ID NO: 1106471 - RNA, 19 nt, Homo sapiens
  misc_RNA (1)...(19): siRNA sense strand
ggagccaggccaccucuau

SEQ ID NO: 1106472 - RNA, 19 nt, Homo sapiens
  misc_RNA (1)...(19): siRNA sense strand
ucugcuggcuuccugcuuu

SEQ ID NO: 1106473 - RNA, 19 nt, Homo sapiens
  misc_RNA (1)...(19): siRNA sense strand
cgaaaucccaccugaccuu

SEQ ID NO: 1106474 - RNA, 19 nt, Homo sapiens
  misc_RNA (1)...(19): siRNA sense strand
ggucggccaucaccguguu

SEQ ID NO: 1106475 - RNA, 19 nt, Homo sapiens
  misc_RNA (1)...(19): siRNA sense strand
caccaacaauggcaacauc

SEQ ID NO: 1106476 - RNA, 19 nt, Homo sapiens
  misc_RNA (1)...(19): siRNA sense strand
gcagacacgugcguuacuc

SEQ ID NO: 1106477 - RNA, 19 nt, Homo sapiens
  misc_RNA (1)...(19): siRNA sense strand
gcugguacaugggcacaga

SEQ ID NO: 1106478 - RNA, 19 nt, Homo sapiens
  misc_RNA (1)...(19): siRNA sense strand
caggccaccucuauguuug

SEQ ID NO: 1106479 - RNA, 19 nt, Homo sapiens
  misc_RNA (1)...(19): siRNA sense strand
acaauggcgucccgaguca

SEQ ID NO: 1106480 - RNA, 19 nt, Homo sapiens
  misc_RNA (1)...(19): siRNA sense strand
caagcuaucgaauuuguca

SEQ ID NO: 1106481 - RNA, 19 nt, Homo sapiens
  misc_RNA (1)...(19): siRNA sense strand
gcucuacaccuccaaugug

SEQ ID NO: 1106482 - RNA, 19 nt, Homo sapiens
  misc_RNA (1)...(19): siRNA sense strand
gcuggucccucccaugucu

SEQ ID NO: 1106483 - RNA, 19 nt, Homo sapiens
  misc_RNA (1)...(19): siRNA sense strand
gggaaagaagucuccagaa

SEQ ID NO: 1106484 - RNA, 19 nt, Homo sapiens
  misc_RNA (1)...(19): siRNA sense strand
gguggaagcgguaacaaag

SEQ ID NO: 1106485 - RNA, 19 nt, Homo sapiens
  misc_RNA (1)...(19): siRNA sense strand
gcagcgggaugacuuucca

SEQ ID NO: 1106486 - RNA, 19 nt, Homo sapiens
  misc_RNA (1)...(19): siRNA sense strand
agauaucuuuggugcugua

SEQ ID NO: 1106487 - RNA, 19 nt, Homo sapiens
  misc_RNA (1)...(19): siRNA sense strand
ccgcaugaccuugguguuu

SEQ ID NO: 1106488 - RNA, 19 nt, Homo sapiens
  misc_RNA (1)...(19): siRNA sense strand
gaggcaaacagcacauuca

SEQ ID NO: 1106489 - RNA, 19 nt, Homo sapiens
  misc_RNA (1)...(19): siRNA sense strand
cucaugacauugaucagaa

SEQ ID NO: 1106490 - RNA, 19 nt, Homo sapiens
  misc_RNA (1)...(19): siRNA sense strand
gcucaugacauugaucaga

SEQ ID NO: 1106491 - RNA, 19 nt, Homo sapiens
  misc_RNA (1)...(19): siRNA sense strand
caacaggaaccuaccaacu

SEQ ID NO: 1106492 - RNA, 19 nt, Homo sapiens
  misc_RNA (1)...(19): siRNA sense strand
agacacacuucaccauaag

SEQ ID NO: 1106493 - RNA, 19 nt, Homo sapiens
  misc_RNA (1)...(19): siRNA sense strand
cgaauuugucaaccaauau

SEQ ID NO: 1106494 - RNA, 19 nt, Homo sapiens
  misc_RNA (1)...(19): siRNA sense strand
gcaagcccaaggucuaugu

SEQ ID NO: 1106495 - RNA, 19 nt, Homo sapiens
  misc_RNA (1)...(19): siRNA sense strand
aaagacaucaacaacaaug

SEQ ID NO: 1106496 - RNA, 19 nt, Homo sapiens
  misc_RNA (1)...(19): siRNA sense strand
gagagauuccauugaaagu

SEQ ID NO: 1106497 - RNA, 19 nt, Homo sapiens
  misc_RNA (1)...(19): siRNA sense strand
guacaugcagaaugaauac

SEQ ID NO: 1106498 - RNA, 19 nt, Homo sapiens
  misc_RNA (1)...(19): siRNA sense strand
gguaacaaaggagauagaa

SEQ ID NO: 1106499 - RNA, 19 nt, Homo sapiens
  misc_RNA (1)...(19): siRNA sense strand
uauuacggcuccuucaaag

SEQ ID NO: 1106500 - RNA, 19 nt, Homo sapiens
  misc_RNA (1)...(19): siRNA sense strand
aggagcaggucgaggacua

SEQ ID NO: 1106501 - RNA, 19 nt, Homo sapiens
  misc_RNA (1)...(19): siRNA sense strand
cgcaugaccuugguguuug

SEQ ID NO: 1106502 - RNA, 19 nt, Homo sapiens
  misc_RNA (1)...(19): siRNA sense strand
ggaagcaacccaagacguu

SEQ ID NO: 1106503 - RNA, 19 nt, Homo sapiens
  misc_RNA (1)...(19): siRNA sense strand
agaagcagauuuuagauga

SEQ ID NO: 1106504 - RNA, 19 nt, Homo sapiens
  misc_RNA (1)...(19): siRNA sense strand
gaagcagauuuuagaugaa

SEQ ID NO: 1106505 - RNA, 19 nt, Homo sapiens
  misc_RNA (1)...(19): siRNA sense strand
caccauggacgccgagaug

SEQ ID NO: 1106506 - RNA, 19 nt, Homo sapiens
  misc_RNA (1)...(19): siRNA sense strand
acgccgagauggaguucaa

SEQ ID NO: 1106507 - RNA, 19 nt, Homo sapiens
  misc_RNA (1)...(19): siRNA sense strand
gccaucgcuucccgcauga

SEQ ID NO: 1106508 - RNA, 19 nt, Homo sapiens
  misc_RNA (1)...(19): siRNA sense strand
gccgagauggaguucaauu

SEQ ID NO: 1106509 - RNA, 19 nt, Homo sapiens
  misc_RNA (1)...(19): siRNA sense strand
cgagauggaguucaauugc

SEQ ID NO: 1106510 - RNA, 19 nt, Homo sapiens
  misc_RNA (1)...(19): siRNA sense strand
ugaggaucgucaccaugga

SEQ ID NO: 1106511 - RNA, 19 nt, Homo sapiens
  misc_RNA (1)...(19): siRNA sense strand
ccgagauggaguucaauug

SEQ ID NO: 1106512 - RNA, 19 nt, Homo sapiens
  misc_RNA (1)...(19): siRNA sense strand
ggaagcaacccaagacguu

SEQ ID NO: 1106513 - RNA, 19 nt, Homo sapiens
  misc_RNA (1)...(19): siRNA sense strand
agaagcagauuuuagauga

SEQ ID NO: 1106514 - RNA, 19 nt, Homo sapiens
  misc_RNA (1)...(19): siRNA sense strand
gaagcagauuuuagaugaa

SEQ ID NO: 1106515 - RNA, 19 nt, Homo sapiens
  misc_RNA (1)...(19): siRNA sense strand
caccauggacgccgagaug

SEQ ID NO: 1106516 - RNA, 19 nt, Homo sapiens
  misc_RNA (1)...(19): siRNA sense strand
acgccgagauggaguucaa

SEQ ID NO: 1106517 - RNA, 19 nt, Homo sapiens
  misc_RNA (1)...(19): siRNA sense strand
gccaucgcuucccgcauga

SEQ ID NO: 1106518 - RNA, 19 nt, Homo sapiens
  misc_RNA (1)...(19): siRNA sense strand
gccgagauggaguucaauu

SEQ ID NO: 1106519 - RNA, 19 nt, Homo sapiens
  misc_RNA (1)...(19): siRNA sense strand
cgagauggaguucaauugc

SEQ ID NO: 1106520 - RNA, 19 nt, Homo sapiens
  misc_RNA (1)...(19): siRNA sense strand
ugaggaucgucaccaugga

SEQ ID NO: 1106521 - RNA, 19 nt, Homo sapiens
  misc_RNA (1)...(19): siRNA sense strand
ccgagauggaguucaauug

SEQ ID NO: 1106522 - RNA, 19 nt, Homo sapiens
  misc_RNA (1)...(19): siRNA sense strand
ggaagcaacccaagacguu

SEQ ID NO: 1106523 - RNA, 19 nt, Homo sapiens
  misc_RNA (1)...(19): siRNA sense strand
agaagcagauuuuagauga

SEQ ID NO: 1106524 - RNA, 19 nt, Homo sapiens
  misc_RNA (1)...(19): siRNA sense strand
gaagcagauuuuagaugaa

SEQ ID NO: 1106525 - RNA, 19 nt, Homo sapiens
  misc_RNA (1)...(19): siRNA sense strand
caccauggacgccgagaug

SEQ ID NO: 1106526 - RNA, 19 nt, Homo sapiens
  misc_RNA (1)...(19): siRNA sense strand
acgccgagauggaguucaa

SEQ ID NO: 1106527 - RNA, 19 nt, Homo sapiens
  misc_RNA (1)...(19): siRNA sense strand
gccaucgcuucccgcauga

SEQ ID NO: 1106528 - RNA, 19 nt, Homo sapiens
  misc_RNA (1)...(19): siRNA sense strand
gccgagauggaguucaauu

SEQ ID NO: 1106529 - RNA, 19 nt, Homo sapiens
  misc_RNA (1)...(19): siRNA sense strand
cgagauggaguucaauugc

SEQ ID NO: 1106530 - RNA, 19 nt, Homo sapiens
  misc_RNA (1)...(19): siRNA sense strand
ugaggaucgucaccaugga

SEQ ID NO: 1106531 - RNA, 19 nt, Homo sapiens
  misc_RNA (1)...(19): siRNA sense strand
ccgagauggaguucaauug

SEQ ID NO: 1106532 - RNA, 19 nt, Homo sapiens
  misc_RNA (1)...(19): siRNA sense strand
ggaagcaacccaagacguu

SEQ ID NO: 1106533 - RNA, 19 nt, Homo sapiens
  misc_RNA (1)...(19): siRNA sense strand
caccauggacgccgagaug

SEQ ID NO: 1106534 - RNA, 19 nt, Homo sapiens
  misc_RNA (1)...(19): siRNA sense strand
acgccgagauggaguucaa

SEQ ID NO: 1106535 - RNA, 19 nt, Homo sapiens
  misc_RNA (1)...(19): siRNA sense strand
gccaucgcuucccgcauga

SEQ ID NO: 1106536 - RNA, 19 nt, Homo sapiens
  misc_RNA (1)...(19): siRNA sense strand
gccgagauggaguucaauu

SEQ ID NO: 1106537 - RNA, 19 nt, Homo sapiens
  misc_RNA (1)...(19): siRNA sense strand
cgagauggaguucaauugc

SEQ ID NO: 1106538 - RNA, 19 nt, Homo sapiens
  misc_RNA (1)...(19): siRNA sense strand
ugaggaucgucaccaugga

SEQ ID NO: 1106539 - RNA, 19 nt, Homo sapiens
  misc_RNA (1)...(19): siRNA sense strand
ccgagauggaguucaauug

SEQ ID NO: 1106540 - RNA, 19 nt, Homo sapiens
  misc_RNA (1)...(19): siRNA sense strand
ggaagcaacccaagacguu

SEQ ID NO: 1106541 - RNA, 19 nt, Homo sapiens
  misc_RNA (1)...(19): siRNA sense strand
caccauggacgccgagaug

SEQ ID NO: 1106542 - RNA, 19 nt, Homo sapiens
  misc_RNA (1)...(19): siRNA sense strand
acgccgagauggaguucaa

SEQ ID NO: 1106543 - RNA, 19 nt, Homo sapiens
  misc_RNA (1)...(19): siRNA sense strand
gccaucgcuucccgcauga

SEQ ID NO: 1106544 - RNA, 19 nt, Homo sapiens
  misc_RNA (1)...(19): siRNA sense strand
gccgagauggaguucaauu

SEQ ID NO: 1106545 - RNA, 19 nt, Homo sapiens
  misc_RNA (1)...(19): siRNA sense strand
cgagauggaguucaauugc

SEQ ID NO: 1106546 - RNA, 19 nt, Homo sapiens
  misc_RNA (1)...(19): siRNA sense strand
ugaggaucgucaccaugga

SEQ ID NO: 1106547 - RNA, 19 nt, Homo sapiens
  misc_RNA (1)...(19): siRNA sense strand
ccgagauggaguucaauug

SEQ ID NO: 1106548 - RNA, 19 nt, Homo sapiens
  misc_RNA (1)...(19): siRNA sense strand
ggaagcaacccaagacguu

SEQ ID NO: 1106549 - RNA, 19 nt, Homo sapiens
  misc_RNA (1)...(19): siRNA sense strand
agaagcagauuuuagauga

SEQ ID NO: 1106550 - RNA, 19 nt, Homo sapiens
  misc_RNA (1)...(19): siRNA sense strand
gaagcagauuuuagaugaa

SEQ ID NO: 1106551 - RNA, 19 nt, Homo sapiens
  misc_RNA (1)...(19): siRNA sense strand
caccauggacgccgagaug

SEQ ID NO: 1106552 - RNA, 19 nt, Homo sapiens
  misc_RNA (1)...(19): siRNA sense strand
acgccgagauggaguucaa

SEQ ID NO: 1106553 - RNA, 19 nt, Homo sapiens
  misc_RNA (1)...(19): siRNA sense strand
gccaucgcuucccgcauga

SEQ ID NO: 1106554 - RNA, 19 nt, Homo sapiens
  misc_RNA (1)...(19): siRNA sense strand
gccgagauggaguucaauu

SEQ ID NO: 1106555 - RNA, 19 nt, Homo sapiens
  misc_RNA (1)...(19): siRNA sense strand
cgagauggaguucaauugc

SEQ ID NO: 1106556 - RNA, 19 nt, Homo sapiens
  misc_RNA (1)...(19): siRNA sense strand
ugaggaucgucaccaugga

SEQ ID NO: 1106557 - RNA, 19 nt, Homo sapiens
  misc_RNA (1)...(19): siRNA sense strand
ccgagauggaguucaauug

SEQ ID NO: 1106558 - RNA, 19 nt, Homo sapiens
  misc_RNA (1)...(19): siRNA sense strand
ggaagcaacccaagacguu

SEQ ID NO: 1106559 - RNA, 19 nt, Homo sapiens
  misc_RNA (1)...(19): siRNA sense strand
agaagcagauuuuagauga

SEQ ID NO: 1106560 - RNA, 19 nt, Homo sapiens
  misc_RNA (1)...(19): siRNA sense strand
gaagcagauuuuagaugaa

SEQ ID NO: 1106561 - RNA, 19 nt, Homo sapiens
  misc_RNA (1)...(19): siRNA sense strand
caccauggacgccgagaug

SEQ ID NO: 1106562 - RNA, 19 nt, Homo sapiens
  misc_RNA (1)...(19): siRNA sense strand
acgccgagauggaguucaa

SEQ ID NO: 1106563 - RNA, 19 nt, Homo sapiens
  misc_RNA (1)...(19): siRNA sense strand
gccaucgcuucccgcauga

SEQ ID NO: 1106564 - RNA, 19 nt, Homo sapiens
  misc_RNA (1)...(19): siRNA sense strand
gccgagauggaguucaauu

SEQ ID NO: 1106565 - RNA, 19 nt, Homo sapiens
  misc_RNA (1)...(19): siRNA sense strand
cgagauggaguucaauugc

SEQ ID NO: 1106566 - RNA, 19 nt, Homo sapiens
  misc_RNA (1)...(19): siRNA sense strand
ugaggaucgucaccaugga

SEQ ID NO: 1106567 - RNA, 19 nt, Homo sapiens
  misc_RNA (1)...(19): siRNA sense strand
ccgagauggaguucaauug

SEQ ID NO: 1106568 - RNA, 19 nt, Homo sapiens
  misc_RNA (1)...(19): siRNA sense strand
ggaagcaacccaagacguu

SEQ ID NO: 1106569 - RNA, 19 nt, Homo sapiens
  misc_RNA (1)...(19): siRNA sense strand
agaagcagauuuuagauga

SEQ ID NO: 1106570 - RNA, 19 nt, Homo sapiens
  misc_RNA (1)...(19): siRNA sense strand
gaagcagauuuuagaugaa

SEQ ID NO: 1106571 - RNA, 19 nt, Homo sapiens
  misc_RNA (1)...(19): siRNA sense strand
caccauggacgccgagaug

SEQ ID NO: 1106572 - RNA, 19 nt, Homo sapiens
  misc_RNA (1)...(19): siRNA sense strand
acgccgagauggaguucaa

SEQ ID NO: 1106573 - RNA, 19 nt, Homo sapiens
  misc_RNA (1)...(19): siRNA sense strand
gccaucgcuucccgcauga

SEQ ID NO: 1106574 - RNA, 19 nt, Homo sapiens
  misc_RNA (1)...(19): siRNA sense strand
gccgagauggaguucaauu

SEQ ID NO: 1106575 - RNA, 19 nt, Homo sapiens
  misc_RNA (1)...(19): siRNA sense strand
cgagauggaguucaauugc

SEQ ID NO: 1106576 - RNA, 19 nt, Homo sapiens
  misc_RNA (1)...(19): siRNA sense strand
ugaggaucgucaccaugga

SEQ ID NO: 1106577 - RNA, 19 nt, Homo sapiens
  misc_RNA (1)...(19): siRNA sense strand
ccgagauggaguucaauug

SEQ ID NO: 1106578 - RNA, 19 nt, Homo sapiens
  misc_RNA (1)...(19): siRNA sense strand
ggaagcaacccaagacguu

SEQ ID NO: 1106579 - RNA, 19 nt, Homo sapiens
  misc_RNA (1)...(19): siRNA sense strand
agaagcagauuuuagauga

SEQ ID NO: 1106580 - RNA, 19 nt, Homo sapiens
  misc_RNA (1)...(19): siRNA sense strand
gaagcagauuuuagaugaa

SEQ ID NO: 1106581 - RNA, 19 nt, Homo sapiens
  misc_RNA (1)...(19): siRNA sense strand
caccauggacgccgagaug

SEQ ID NO: 1106582 - RNA, 19 nt, Homo sapiens
  misc_RNA (1)...(19): siRNA sense strand
acgccgagauggaguucaa

SEQ ID NO: 1106583 - RNA, 19 nt, Homo sapiens
  misc_RNA (1)...(19): siRNA sense strand
gccaucgcuucccgcauga

SEQ ID NO: 1106584 - RNA, 19 nt, Homo sapiens
  misc_RNA (1)...(19): siRNA sense strand
gccgagauggaguucaauu

SEQ ID NO: 1106585 - RNA, 19 nt, Homo sapiens
  misc_RNA (1)...(19): siRNA sense strand
cgagauggaguucaauugc

SEQ ID NO: 1106586 - RNA, 19 nt, Homo sapiens
  misc_RNA (1)...(19): siRNA sense strand
ugaggaucgucaccaugga

SEQ ID NO: 1106587 - RNA, 19 nt, Homo sapiens
  misc_RNA (1)...(19): siRNA sense strand
ccgagauggaguucaauug

SEQ ID NO: 1106588 - RNA, 19 nt, Homo sapiens
  misc_RNA (1)...(19): siRNA sense strand
ggaagcaacccaagacguu

SEQ ID NO: 1106589 - RNA, 19 nt, Homo sapiens
  misc_RNA (1)...(19): siRNA sense strand
agaagcagauuuuagauga

SEQ ID NO: 1106590 - RNA, 19 nt, Homo sapiens
  misc_RNA (1)...(19): siRNA sense strand
gaagcagauuuuagaugaa

SEQ ID NO: 1106591 - RNA, 19 nt, Homo sapiens
  misc_RNA (1)...(19): siRNA sense strand
caccauggacgccgagaug

SEQ ID NO: 1106592 - RNA, 19 nt, Homo sapiens
  misc_RNA (1)...(19): siRNA sense strand
acgccgagauggaguucaa

SEQ ID NO: 1106593 - RNA, 19 nt, Homo sapiens
  misc_RNA (1)...(19): siRNA sense strand
gccaucgcuucccgcauga

SEQ ID NO: 1106594 - RNA, 19 nt, Homo sapiens
  misc_RNA (1)...(19): siRNA sense strand
gccgagauggaguucaauu

SEQ ID NO: 1106595 - RNA, 19 nt, Homo sapiens
  misc_RNA (1)...(19): siRNA sense strand
cgagauggaguucaauugc

SEQ ID NO: 1106596 - RNA, 19 nt, Homo sapiens
  misc_RNA (1)...(19): siRNA sense strand
ugaggaucgucaccaugga

SEQ ID NO: 1106597 - RNA, 19 nt, Homo sapiens
  misc_RNA (1)...(19): siRNA sense strand
ccgagauggaguucaauug

SEQ ID NO: 1106598 - RNA, 19 nt, Homo sapiens
  misc_RNA (1)...(19): siRNA sense strand
ggaagcaacccaagacguu

SEQ ID NO: 1106599 - RNA, 19 nt, Homo sapiens
  misc_RNA (1)...(19): siRNA sense strand
agaagcagauuuuagauga

SEQ ID NO: 1106600 - RNA, 19 nt, Homo sapiens
  misc_RNA (1)...(19): siRNA sense strand
gaagcagauuuuagaugaa

SEQ ID NO: 1106601 - RNA, 19 nt, Homo sapiens
  misc_RNA (1)...(19): siRNA sense strand
caccauggacgccgagaug

SEQ ID NO: 1106602 - RNA, 19 nt, Homo sapiens
  misc_RNA (1)...(19): siRNA sense strand
acgccgagauggaguucaa

SEQ ID NO: 1106603 - RNA, 19 nt, Homo sapiens
  misc_RNA (1)...(19): siRNA sense strand
gccaucgcuucccgcauga

SEQ ID NO: 1106604 - RNA, 19 nt, Homo sapiens
  misc_RNA (1)...(19): siRNA sense strand
gccgagauggaguucaauu

SEQ ID NO: 1106605 - RNA, 19 nt, Homo sapiens
  misc_RNA (1)...(19): siRNA sense strand
cgagauggaguucaauugc

SEQ ID NO: 1106606 - RNA, 19 nt, Homo sapiens
  misc_RNA (1)...(19): siRNA sense strand
ugaggaucgucaccaugga

SEQ ID NO: 1106607 - RNA, 19 nt, Homo sapiens
  misc_RNA (1)...(19): siRNA sense strand
ccgagauggaguucaauug

SEQ ID NO: 1106608 - RNA, 19 nt, Homo sapiens
  misc_RNA (1)...(19): siRNA sense strand
ggaagcaacccaagacguu

SEQ ID NO: 1106609 - RNA, 19 nt, Homo sapiens
  misc_RNA (1)...(19): siRNA sense strand
agaagcagauuuuagauga

SEQ ID NO: 1106610 - RNA, 19 nt, Homo sapiens
  misc_RNA (1)...(19): siRNA sense strand
gaagcagauuuuagaugaa

SEQ ID NO: 1106611 - RNA, 19 nt, Homo sapiens
  misc_RNA (1)...(19): siRNA sense strand
caccauggacgccgagaug

SEQ ID NO: 1106612 - RNA, 19 nt, Homo sapiens
  misc_RNA (1)...(19): siRNA sense strand
acgccgagauggaguucaa

SEQ ID NO: 1106613 - RNA, 19 nt, Homo sapiens
  misc_RNA (1)...(19): siRNA sense strand
gccaucgcuucccgcauga

SEQ ID NO: 1106614 - RNA, 19 nt, Homo sapiens
  misc_RNA (1)...(19): siRNA sense strand
gccgagauggaguucaauu

SEQ ID NO: 1106615 - RNA, 19 nt, Homo sapiens
  misc_RNA (1)...(19): siRNA sense strand
cgagauggaguucaauugc

SEQ ID NO: 1106616 - RNA, 19 nt, Homo sapiens
  misc_RNA (1)...(19): siRNA sense strand
ugaggaucgucaccaugga

SEQ ID NO: 1106617 - RNA, 19 nt, Homo sapiens
  misc_RNA (1)...(19): siRNA sense strand
ccgagauggaguucaauug

SEQ ID NO: 1106618 - RNA, 19 nt, Homo sapiens
  misc_RNA (1)...(19): siRNA sense strand
ggaagcaacccaagacguu

SEQ ID NO: 1106619 - RNA, 19 nt, Homo sapiens
  misc_RNA (1)...(19): siRNA sense strand
agaagcagauuuuagauga

SEQ ID NO: 1106620 - RNA, 19 nt, Homo sapiens
  misc_RNA (1)...(19): siRNA sense strand
gaagcagauuuuagaugaa

SEQ ID NO: 1106621 - RNA, 19 nt, Homo sapiens
  misc_RNA (1)...(19): siRNA sense strand
caccauggacgccgagaug

SEQ ID NO: 1106622 - RNA, 19 nt, Homo sapiens
  misc_RNA (1)...(19): siRNA sense strand
acgccgagauggaguucaa

SEQ ID NO: 1106623 - RNA, 19 nt, Homo sapiens
  misc_RNA (1)...(19): siRNA sense strand
gccaucgcuucccgcauga

SEQ ID NO: 1106624 - RNA, 19 nt, Homo sapiens
  misc_RNA (1)...(19): siRNA sense strand
gccgagauggaguucaauu

SEQ ID NO: 1106625 - RNA, 19 nt, Homo sapiens
  misc_RNA (1)...(19): siRNA sense strand
cgagauggaguucaauugc

SEQ ID NO: 1106626 - RNA, 19 nt, Homo sapiens
  misc_RNA (1)...(19): siRNA sense strand
ugaggaucgucaccaugga

SEQ ID NO: 1106627 - RNA, 19 nt, Homo sapiens
  misc_RNA (1)...(19): siRNA sense strand
ccgagauggaguucaauug

SEQ ID NO: 1106628 - RNA, 19 nt, Homo sapiens
  misc_RNA (1)...(19): siRNA sense strand
gguaagacgugccugauga

SEQ ID NO: 1106629 - RNA, 19 nt, Homo sapiens
  misc_RNA (1)...(19): siRNA sense strand
acagagggcuccacaggua

SEQ ID NO: 1106630 - RNA, 19 nt, Homo sapiens
  misc_RNA (1)...(19): siRNA sense strand
gaaauucgccccucagaua

SEQ ID NO: 1106631 - RNA, 19 nt, Homo sapiens
  misc_RNA (1)...(19): siRNA sense strand
gaugagcgcuggugcuuca

SEQ ID NO: 1106632 - RNA, 19 nt, Homo sapiens
  misc_RNA (1)...(19): siRNA sense strand
gaaaugggaucugcucauc

SEQ ID NO: 1106633 - RNA, 19 nt, Homo sapiens
  misc_RNA (1)...(19): siRNA sense strand
ccuuggagcucuucaaauu

SEQ ID NO: 1106634 - RNA, 19 nt, Homo sapiens
  misc_RNA (1)...(19): siRNA sense strand
gaagaggagucugcagugu

SEQ ID NO: 1106635 - RNA, 19 nt, Homo sapiens
  misc_RNA (1)...(19): siRNA sense strand
guucauagacagcuacuuu

SEQ ID NO: 1106636 - RNA, 19 nt, Homo sapiens
  misc_RNA (1)...(19): siRNA sense strand
gagaucggcucuucaaugc

SEQ ID NO: 1106637 - RNA, 19 nt, Homo sapiens
  misc_RNA (1)...(19): siRNA sense strand
auagacagcuacuuugaaa

SEQ ID NO: 1106638 - RNA, 19 nt, Homo sapiens
  misc_RNA (1)...(19): siRNA sense strand
gcacaucgccauugagaag

SEQ ID NO: 1106639 - RNA, 19 nt, Homo sapiens
  misc_RNA (1)...(19): siRNA sense strand
gaaccugcuuuacuauaca

SEQ ID NO: 1106640 - RNA, 19 nt, Homo sapiens
  misc_RNA (1)...(19): siRNA sense strand
ggcugaaccugcuuuacua

SEQ ID NO: 1106641 - RNA, 19 nt, Homo sapiens
  misc_RNA (1)...(19): siRNA sense strand
guaaucugaucuacauguu

SEQ ID NO: 1106642 - RNA, 19 nt, Homo sapiens
  misc_RNA (1)...(19): siRNA sense strand
ccacagcgcucugcacauc

SEQ ID NO: 1106643 - RNA, 19 nt, Homo sapiens
  misc_RNA (1)...(19): siRNA sense strand
gaggaaagcuggauuuugg

SEQ ID NO: 1106644 - RNA, 19 nt, Homo sapiens
  misc_RNA (1)...(19): siRNA sense strand
gugcacagaugacuauuac

SEQ ID NO: 1106645 - RNA, 19 nt, Homo sapiens
  misc_RNA (1)...(19): siRNA sense strand
uguaugaccuggcuucugu

SEQ ID NO: 1106646 - RNA, 19 nt, Homo sapiens
  misc_RNA (1)...(19): siRNA sense strand
cugcugcgcuuccuucuga

SEQ ID NO: 1106647 - RNA, 19 nt, Homo sapiens
  misc_RNA (1)...(19): siRNA sense strand
ccacauccuuauccugcua

SEQ ID NO: 1106648 - RNA, 19 nt, Homo sapiens
  misc_RNA (1)...(19): siRNA sense strand
gaugaaggcugugcugaac

SEQ ID NO: 1106649 - RNA, 19 nt, Homo sapiens
  misc_RNA (1)...(19): siRNA sense strand
ggagaucauugccuuucau

SEQ ID NO: 1106650 - RNA, 19 nt, Homo sapiens
  misc_RNA (1)...(19): siRNA sense strand
gcacacaggcaucuacagu

SEQ ID NO: 1106651 - RNA, 19 nt, Homo sapiens
  misc_RNA (1)...(19): siRNA sense strand
ucuuaaacuuccuguguaa

SEQ ID NO: 1106652 - RNA, 19 nt, Homo sapiens
  misc_RNA (1)...(19): siRNA sense strand
aaucugaucuacauguuca

SEQ ID NO: 1106653 - RNA, 19 nt, Homo sapiens
  misc_RNA (1)...(19): siRNA sense strand
ccagucagccggauccaaa

SEQ ID NO: 1106654 - RNA, 19 nt, Homo sapiens
  misc_RNA (1)...(19): siRNA sense strand
gcgagaccgucaacagugu

SEQ ID NO: 1106655 - RNA, 19 nt, Homo sapiens
  misc_RNA (1)...(19): siRNA sense strand
gaucauugccuuucauugc

SEQ ID NO: 1106656 - RNA, 19 nt, Homo sapiens
  misc_RNA (1)...(19): siRNA sense strand
gaugaucucggacaacuca

SEQ ID NO: 1106657 - RNA, 19 nt, Homo sapiens
  misc_RNA (1)...(19): siRNA sense strand
cgagaucggcucuucaaug

SEQ ID NO: 1106658 - RNA, 19 nt, Homo sapiens
  misc_RNA (1)...(19): siRNA sense strand
gauggagaauggcuauugg

SEQ ID NO: 1106659 - RNA, 19 nt, Homo sapiens
  misc_RNA (1)...(19): siRNA sense strand
ggacagcugugaggagaac

SEQ ID NO: 1106660 - RNA, 19 nt, Homo sapiens
  misc_RNA (1)...(19): siRNA sense strand
caucuacagugucaugauc

SEQ ID NO: 1106661 - RNA, 19 nt, Homo sapiens
  misc_RNA (1)...(19): siRNA sense strand
aggcugugcugaaccuuaa

SEQ ID NO: 1106662 - RNA, 19 nt, Homo sapiens
  misc_RNA (1)...(19): siRNA sense strand
ggagauggagaauggcuau

SEQ ID NO: 1106663 - RNA, 19 nt, Homo sapiens
  misc_RNA (1)...(19): siRNA sense strand
ugucccaggugcuguguuu

SEQ ID NO: 1106664 - RNA, 19 nt, Homo sapiens
  misc_RNA (1)...(19): siRNA sense strand
gcaccaagcagugggaugu

SEQ ID NO: 1106665 - RNA, 19 nt, Homo sapiens
  misc_RNA (1)...(19): siRNA sense strand
agaggagucugcagugugu

SEQ ID NO: 1106666 - RNA, 19 nt, Homo sapiens
  misc_RNA (1)...(19): siRNA sense strand
ugaaagcggagguuggaaa

SEQ ID NO: 1106667 - RNA, 19 nt, Homo sapiens
  misc_RNA (1)...(19): siRNA sense strand
ugaaccugcuuuacuauac

SEQ ID NO: 1106668 - RNA, 19 nt, Homo sapiens
  misc_RNA (1)...(19): siRNA sense strand
gagcaagaccagcaaguac

SEQ ID NO: 1106669 - RNA, 19 nt, Homo sapiens
  misc_RNA (1)...(19): siRNA sense strand
cgacagggacucuggcaau

SEQ ID NO: 1106670 - RNA, 19 nt, Homo sapiens
  misc_RNA (1)...(19): siRNA sense strand
gagaucauugccuuucauu

SEQ ID NO: 1106671 - RNA, 19 nt, Homo sapiens
  misc_RNA (1)...(19): siRNA sense strand
gagcgagaccgucaacagu

SEQ ID NO: 1106672 - RNA, 19 nt, Homo sapiens
  misc_RNA (1)...(19): siRNA sense strand
agacagcuacuuugaaauc

SEQ ID NO: 1106673 - RNA, 19 nt, Homo sapiens
  misc_RNA (1)...(19): siRNA sense strand
gauaagagucaaccucaac

SEQ ID NO: 1106674 - RNA, 19 nt, Homo sapiens
  misc_RNA (1)...(19): siRNA sense strand
aaaccgauuugaccgagau

SEQ ID NO: 1106675 - RNA, 19 nt, Homo sapiens
  misc_RNA (1)...(19): siRNA sense strand
uuggagcucuucaaauuca

SEQ ID NO: 1106676 - RNA, 19 nt, Homo sapiens
  misc_RNA (1)...(19): siRNA sense strand
acaggcaucuacaguguca

SEQ ID NO: 1106677 - RNA, 19 nt, Homo sapiens
  misc_RNA (1)...(19): siRNA sense strand
ucauagacagcuacuuuga

SEQ ID NO: 1106678 - RNA, 19 nt, Homo sapiens
  misc_RNA (1)...(19): siRNA sense strand
uaaacuuccuguguaaucu

SEQ ID NO: 1106679 - RNA, 19 nt, Homo sapiens
  misc_RNA (1)...(19): siRNA sense strand
gcccuaccgugcagcuuga

SEQ ID NO: 1106680 - RNA, 19 nt, Homo sapiens
  misc_RNA (1)...(19): siRNA sense strand
gcagugggaugugguaagc

SEQ ID NO: 1106681 - RNA, 19 nt, Homo sapiens
  misc_RNA (1)...(19): siRNA sense strand
gacagggacucuggcaauc

SEQ ID NO: 1106682 - RNA, 19 nt, Homo sapiens
  misc_RNA (1)...(19): siRNA sense strand
ccagaguaccugagcaaga

SEQ ID NO: 1106683 - RNA, 19 nt, Homo sapiens
  misc_RNA (1)...(19): siRNA sense strand
ccuacgugcugcucaccua

SEQ ID NO: 1106684 - RNA, 19 nt, Homo sapiens
  misc_RNA (1)...(19): siRNA sense strand
ccagugcacagaugacuau

SEQ ID NO: 1106685 - RNA, 19 nt, Homo sapiens
  misc_RNA (1)...(19): siRNA sense strand
ugagcaagaccagcaagua

SEQ ID NO: 1106686 - RNA, 19 nt, Homo sapiens
  misc_RNA (1)...(19): siRNA sense strand
cagaguaccugagcaagac

SEQ ID NO: 1106687 - RNA, 19 nt, Homo sapiens
  misc_RNA (1)...(19): siRNA sense strand
cauagacagcuacuuugaa

SEQ ID NO: 1106688 - RNA, 19 nt, Homo sapiens
  misc_RNA (1)...(19): siRNA sense strand
ggacagaggaaagcuggau

SEQ ID NO: 1106689 - RNA, 19 nt, Homo sapiens
  misc_RNA (1)...(19): siRNA sense strand
uaagagucaaccucaacua

SEQ ID NO: 1106690 - RNA, 19 nt, Homo sapiens
  misc_RNA (1)...(19): siRNA sense strand
guaagacgugccugaugaa

SEQ ID NO: 1106691 - RNA, 19 nt, Homo sapiens
  misc_RNA (1)...(19): siRNA sense strand
ugaucuacauguucaucuu

SEQ ID NO: 1106692 - RNA, 19 nt, Homo sapiens
  misc_RNA (1)...(19): siRNA sense strand
gcaggugucccucgaacuc

SEQ ID NO: 1106693 - RNA, 19 nt, Homo sapiens
  misc_RNA (1)...(19): siRNA sense strand
cuucugaucuacuuagucu

SEQ ID NO: 1106694 - RNA, 19 nt, Homo sapiens
  misc_RNA (1)...(19): siRNA sense strand
ugaaauccucuuccuguuc

SEQ ID NO: 1106695 - RNA, 19 nt, Homo sapiens
  misc_RNA (1)...(19): siRNA sense strand
acagaggaaagcuggauuu

SEQ ID NO: 1106696 - RNA, 19 nt, Homo sapiens
  misc_RNA (1)...(19): siRNA sense strand
caaggaggaugaggauggu

SEQ ID NO: 1106697 - RNA, 19 nt, Homo sapiens
  misc_RNA (1)...(19): siRNA sense strand
gaaagcggagguuggaaac

SEQ ID NO: 1106698 - RNA, 19 nt, Homo sapiens
  misc_RNA (1)...(19): siRNA sense strand
gaucuacauguucaucuuc

SEQ ID NO: 1106699 - RNA, 19 nt, Homo sapiens
  misc_RNA (1)...(19): siRNA sense strand
caggaucucacgccucuga

SEQ ID NO: 1106700 - RNA, 19 nt, Homo sapiens
  misc_RNA (1)...(19): siRNA sense strand
agugggaugugguaagcua

SEQ ID NO: 1106701 - RNA, 19 nt, Homo sapiens
  misc_RNA (1)...(19): siRNA sense strand
gugaugaucucggacaacu

SEQ ID NO: 1106702 - RNA, 19 nt, Homo sapiens
  misc_RNA (1)...(19): siRNA sense strand
acugacagcuggagcaucu

SEQ ID NO: 1106703 - RNA, 19 nt, Homo sapiens
  misc_RNA (1)...(19): siRNA sense strand
ccaaggagggcaagaucga

SEQ ID NO: 1106704 - RNA, 19 nt, Homo sapiens
  misc_RNA (1)...(19): siRNA sense strand
ggagggcaagaucgagauu

SEQ ID NO: 1106705 - RNA, 19 nt, Homo sapiens
  misc_RNA (1)...(19): siRNA sense strand
gaacucagugcuggagauc

SEQ ID NO: 1106706 - RNA, 19 nt, Homo sapiens
  misc_RNA (1)...(19): siRNA sense strand
cccuccagcucuccaguuu

SEQ ID NO: 1106707 - RNA, 19 nt, Homo sapiens
  misc_RNA (1)...(19): siRNA sense strand
acagugucaugauccagaa

SEQ ID NO: 1106708 - RNA, 19 nt, Homo sapiens
  misc_RNA (1)...(19): siRNA sense strand
caagcagugggauguggua

SEQ ID NO: 1106709 - RNA, 19 nt, Homo sapiens
  misc_RNA (1)...(19): siRNA sense strand
uaaaugcccagugcacaga

SEQ ID NO: 1106710 - RNA, 19 nt, Homo sapiens
  misc_RNA (1)...(19): siRNA sense strand
gauggaggccaagaagaug

SEQ ID NO: 1106711 - RNA, 19 nt, Homo sapiens
  misc_RNA (1)...(19): siRNA sense strand
gggcgaggaccggaaauuc

SEQ ID NO: 1106712 - RNA, 19 nt, Homo sapiens
  misc_RNA (1)...(19): siRNA sense strand
uugaaauccucuuccuguu

SEQ ID NO: 1106713 - RNA, 19 nt, Homo sapiens
  misc_RNA (1)...(19): siRNA sense strand
ggccagcugugguacuucu

SEQ ID NO: 1106714 - RNA, 19 nt, Homo sapiens
  misc_RNA (1)...(19): siRNA sense strand
agauaagagucaaccucaa

SEQ ID NO: 1106715 - RNA, 19 nt, Homo sapiens
  misc_RNA (1)...(19): siRNA sense strand
uucuuaaacuuccugugua

SEQ ID NO: 1106716 - RNA, 19 nt, Homo sapiens
  misc_RNA (1)...(19): siRNA sense strand
ugaugaaggcugugcugaa

SEQ ID NO: 1106717 - RNA, 19 nt, Homo sapiens
  misc_RNA (1)...(19): siRNA sense strand
ugacgggccacauccuuau

SEQ ID NO: 1106718 - RNA, 19 nt, Homo sapiens
  misc_RNA (1)...(19): siRNA sense strand
caaccucaacuaccgaaag

SEQ ID NO: 1106719 - RNA, 19 nt, Homo sapiens
  misc_RNA (1)...(19): siRNA sense strand
gugaccagcauguaugaug

SEQ ID NO: 1106720 - RNA, 19 nt, Homo sapiens
  misc_RNA (1)...(19): siRNA sense strand
caucuggaucucguucaua

SEQ ID NO: 1106721 - RNA, 19 nt, Homo sapiens
  misc_RNA (1)...(19): siRNA sense strand
uuaaacuuccuguguaauc

SEQ ID NO: 1106722 - RNA, 19 nt, Homo sapiens
  misc_RNA (1)...(19): siRNA sense strand
gagggcaagaucgagauuu

SEQ ID NO: 1106723 - RNA, 19 nt, Homo sapiens
  misc_RNA (1)...(19): siRNA sense strand
gcucugcacaucgccauug

SEQ ID NO: 1106724 - RNA, 19 nt, Homo sapiens
  misc_RNA (1)...(19): siRNA sense strand
gaucuacuuagucuuccuu

SEQ ID NO: 1106725 - RNA, 19 nt, Homo sapiens
  misc_RNA (1)...(19): siRNA sense strand
gcugaaccugcuuuacuau

SEQ ID NO: 1106726 - RNA, 19 nt, Homo sapiens
  misc_RNA (1)...(19): siRNA sense strand
acucagugcuggagaucau

SEQ ID NO: 1106727 - RNA, 19 nt, Homo sapiens
  misc_RNA (1)...(19): siRNA sense strand
agaacucagugcuggagau

SEQ ID NO: 1106728 - RNA, 19 nt, Homo sapiens
  misc_RNA (1)...(19): siRNA sense strand
ugaaggcccucaucaggua

SEQ ID NO: 1106729 - RNA, 19 nt, Homo sapiens
  misc_RNA (1)...(19): siRNA sense strand
gagccaaccugaaucuagu

SEQ ID NO: 1106730 - RNA, 19 nt, Homo sapiens
  misc_RNA (1)...(19): siRNA sense strand
gcaaacaccggcuucaucu

SEQ ID NO: 1106731 - RNA, 19 nt, Homo sapiens
  misc_RNA (1)...(19): siRNA sense strand
caaccugaaucuagugaag

SEQ ID NO: 1106732 - RNA, 19 nt, Homo sapiens
  misc_RNA (1)...(19): siRNA sense strand
aaacaccggcuucaucuga

SEQ ID NO: 1106733 - RNA, 19 nt, Homo sapiens
  misc_RNA (1)...(19): siRNA sense strand
gaacgggcaccuagagagu

SEQ ID NO: 1106734 - RNA, 19 nt, Homo sapiens
  misc_RNA (1)...(19): siRNA sense strand
uaaagaggccagaaguguu

SEQ ID NO: 1106735 - RNA, 19 nt, Homo sapiens
  misc_RNA (1)...(19): siRNA sense strand
ucaggagccuauugcaaga

SEQ ID NO: 1106736 - RNA, 19 nt, Homo sapiens
  misc_RNA (1)...(19): siRNA sense strand
gcgcgaacccugacuucaa

SEQ ID NO: 1106737 - RNA, 19 nt, Homo sapiens
  misc_RNA (1)...(19): siRNA sense strand
ggagccaaccugaaucuag

SEQ ID NO: 1106738 - RNA, 19 nt, Homo sapiens
  misc_RNA (1)...(19): siRNA sense strand
ggagccgcaucaacgagaa

SEQ ID NO: 1106739 - RNA, 19 nt, Homo sapiens
  misc_RNA (1)...(19): siRNA sense strand
cgucauggaugcuguucug

SEQ ID NO: 1106740 - RNA, 19 nt, Homo sapiens
  misc_RNA (1)...(19): siRNA sense strand
ccaccugacuccugauguc

SEQ ID NO: 1106741 - RNA, 19 nt, Homo sapiens
  misc_RNA (1)...(19): siRNA sense strand
caaugguccugucaacaca

SEQ ID NO: 1106742 - RNA, 19 nt, Homo sapiens
  misc_RNA (1)...(19): siRNA sense strand
gcaaugguccugucaacac

SEQ ID NO: 1106743 - RNA, 19 nt, Homo sapiens
  misc_RNA (1)...(19): siRNA sense strand
gacacgaggcuccaugaug

SEQ ID NO: 1106744 - RNA, 19 nt, Homo sapiens
  misc_RNA (1)...(19): siRNA sense strand
ugagccugcugguagaauu

SEQ ID NO: 1106745 - RNA, 19 nt, Homo sapiens
  misc_RNA (1)...(19): siRNA sense strand
caacacacagggauucuac

SEQ ID NO: 1106746 - RNA, 19 nt, Homo sapiens
  misc_RNA (1)...(19): siRNA sense strand
gagccugcugguagaauuu

SEQ ID NO: 1106747 - RNA, 19 nt, Homo sapiens
  misc_RNA (1)...(19): siRNA sense strand
aaagaggccagaaguguuc

SEQ ID NO: 1106748 - RNA, 19 nt, Homo sapiens
  misc_RNA (1)...(19): siRNA sense strand
gagucgagaggaagaagaa

SEQ ID NO: 1106749 - RNA, 19 nt, Homo sapiens
  misc_RNA (1)...(19): siRNA sense strand
ccagaaccuugcugugucu

SEQ ID NO: 1106750 - RNA, 19 nt, Homo sapiens
  misc_RNA (1)...(19): siRNA sense strand
uuaaagaggccagaagugu

SEQ ID NO: 1106751 - RNA, 19 nt, Homo sapiens
  misc_RNA (1)...(19): siRNA sense strand
ggcaaacaccggcuucauc

SEQ ID NO: 1106752 - RNA, 19 nt, Homo sapiens
  misc_RNA (1)...(19): siRNA sense strand
acaccggcuucaucugauu

SEQ ID NO: 1106753 - RNA, 19 nt, Homo sapiens
  misc_RNA (1)...(19): siRNA sense strand
guauguggcuguggugaac

SEQ ID NO: 1106754 - RNA, 19 nt, Homo sapiens
  misc_RNA (1)...(19): siRNA sense strand
ggcccagagucgagaggaa

SEQ ID NO: 1106755 - RNA, 19 nt, Homo sapiens
  misc_RNA (1)...(19): siRNA sense strand
ggacacgaggcuccaugau

SEQ ID NO: 1106756 - RNA, 19 nt, Homo sapiens
  misc_RNA (1)...(19): siRNA sense strand
gccagaaguguucccagaa

SEQ ID NO: 1106757 - RNA, 19 nt, Homo sapiens
  misc_RNA (1)...(19): siRNA sense strand
gcaucaacgagaagucugu

SEQ ID NO: 1106758 - RNA, 19 nt, Homo sapiens
  misc_RNA (1)...(19): siRNA sense strand
ggccuugcaggucuuuaaa

SEQ ID NO: 1106759 - RNA, 19 nt, Homo sapiens
  misc_RNA (1)...(19): siRNA sense strand
cagcgcagccuaccacaac

SEQ ID NO: 1106760 - RNA, 19 nt, Homo sapiens
  misc_RNA (1)...(19): siRNA sense strand
ccguguggcugugagaaga

SEQ ID NO: 1106761 - RNA, 19 nt, Homo sapiens
  misc_RNA (1)...(19): siRNA sense strand
ccgcaggucguaaucugaa

SEQ ID NO: 1106762 - RNA, 19 nt, Homo sapiens
  misc_RNA (1)...(19): siRNA sense strand
guacggggcugauguugac

SEQ ID NO: 1106763 - RNA, 19 nt, Homo sapiens
  misc_RNA (1)...(19): siRNA sense strand
gcuccaugaugcagcuuac

SEQ ID NO: 1106764 - RNA, 19 nt, Homo sapiens
  misc_RNA (1)...(19): siRNA sense strand
gaacaaaccuggacugaaa

SEQ ID NO: 1106765 - RNA, 19 nt, Homo sapiens
  misc_RNA (1)...(19): siRNA sense strand
gcaauccucucauuuggaa

SEQ ID NO: 1106766 - RNA, 19 nt, Homo sapiens
  misc_RNA (1)...(19): siRNA sense strand
gagaagcucuugaacaaac

SEQ ID NO: 1106767 - RNA, 19 nt, Homo sapiens
  misc_RNA (1)...(19): siRNA sense strand
ucgagaagcucuugaacaa

SEQ ID NO: 1106768 - RNA, 19 nt, Homo sapiens
  misc_RNA (1)...(19): siRNA sense strand
ccaaagaugauaaagguaa

SEQ ID NO: 1106769 - RNA, 19 nt, Homo sapiens
  misc_RNA (1)...(19): siRNA sense strand
aaccuggacugaaauauaa

SEQ ID NO: 1106770 - RNA, 19 nt, Homo sapiens
  misc_RNA (1)...(19): siRNA sense strand
uggaggagcugguggauga

SEQ ID NO: 1106771 - RNA, 19 nt, Homo sapiens
  misc_RNA (1)...(19): siRNA sense strand
gaaacuggagggccuguaa

SEQ ID NO: 1106772 - RNA, 19 nt, Homo sapiens
  misc_RNA (1)...(19): siRNA sense strand
gaagucuccucuuggcaaa

SEQ ID NO: 1106773 - RNA, 19 nt, Homo sapiens
  misc_RNA (1)...(19): siRNA sense strand
gggaagccauccaagagaa

SEQ ID NO: 1106774 - RNA, 19 nt, Homo sapiens
  misc_RNA (1)...(19): siRNA sense strand
auacucagcuucaacagaa

SEQ ID NO: 1106775 - RNA, 19 nt, Homo sapiens
  misc_RNA (1)...(19): siRNA sense strand
aagagaagauccaagagaa

SEQ ID NO: 1106776 - RNA, 19 nt, Homo sapiens
  misc_RNA (1)...(19): siRNA sense strand
guucugauccguuuccaua

SEQ ID NO: 1106777 - RNA, 19 nt, Homo sapiens
  misc_RNA (1)...(19): siRNA sense strand
gcuggaggaucccaagauu

SEQ ID NO: 1106778 - RNA, 19 nt, Homo sapiens
  misc_RNA (1)...(19): siRNA sense strand
aaaccuggacugaaauaua

SEQ ID NO: 1106779 - RNA, 19 nt, Homo sapiens
  misc_RNA (1)...(19): siRNA sense strand
uaucuggacgucuaucuua

SEQ ID NO: 1106780 - RNA, 19 nt, Homo sapiens
  misc_RNA (1)...(19): siRNA sense strand
ggucuuugacuuuaaauug

SEQ ID NO: 1106781 - RNA, 19 nt, Homo sapiens
  misc_RNA (1)...(19): siRNA sense strand
gacuuuaaauugagugaug

SEQ ID NO: 1106782 - RNA, 19 nt, Homo sapiens
  misc_RNA (1)...(19): siRNA sense strand
cagugaagguggccauuga

SEQ ID NO: 1106783 - RNA, 19 nt, Homo sapiens
  misc_RNA (1)...(19): siRNA sense strand
ggccauugaugcaggauau

SEQ ID NO: 1106784 - RNA, 19 nt, Homo sapiens
  misc_RNA (1)...(19): siRNA sense strand
caagagaagauccaagaga

SEQ ID NO: 1106785 - RNA, 19 nt, Homo sapiens
  misc_RNA (1)...(19): siRNA sense strand
ugagcuaucuggacgucua

SEQ ID NO: 1106786 - RNA, 19 nt, Homo sapiens
  misc_RNA (1)...(19): siRNA sense strand
uggaggaucccaagauuaa

SEQ ID NO: 1106787 - RNA, 19 nt, Homo sapiens
  misc_RNA (1)...(19): siRNA sense strand
caggauaucggcacauuga

SEQ ID NO: 1106788 - RNA, 19 nt, Homo sapiens
  misc_RNA (1)...(19): siRNA sense strand
ucaggucuuugacuuuaaa

SEQ ID NO: 1106789 - RNA, 19 nt, Homo sapiens
  misc_RNA (1)...(19): siRNA sense strand
guaaugccaucgguggaaa

SEQ ID NO: 1106790 - RNA, 19 nt, Homo sapiens
  misc_RNA (1)...(19): siRNA sense strand
gugccuaugucuaucagaa

SEQ ID NO: 1106791 - RNA, 19 nt, Homo sapiens
  misc_RNA (1)...(19): siRNA sense strand
cagcacgcauuguugagaa

SEQ ID NO: 1106792 - RNA, 19 nt, Homo sapiens
  misc_RNA (1)...(19): siRNA sense strand
auucaggucuuugacuuua

SEQ ID NO: 1106793 - RNA, 19 nt, Homo sapiens
  misc_RNA (1)...(19): siRNA sense strand
ugagaacauucaggucuuu

SEQ ID NO: 1106794 - RNA, 19 nt, Homo sapiens
  misc_RNA (1)...(19): siRNA sense strand
gaagguggccauugaugca

SEQ ID NO: 1106795 - RNA, 19 nt, Homo sapiens
  misc_RNA (1)...(19): siRNA sense strand
gggaggaccuguucaucgu

SEQ ID NO: 1106796 - RNA, 19 nt, Homo sapiens
  misc_RNA (1)...(19): siRNA sense strand
ugacugugccuaugucuau

SEQ ID NO: 1106797 - RNA, 19 nt, Homo sapiens
  misc_RNA (1)...(19): siRNA sense strand
ggacgucuaucuuauucac

SEQ ID NO: 1106798 - RNA, 19 nt, Homo sapiens
  misc_RNA (1)...(19): siRNA sense strand
ucccuucgaugcagaauau

SEQ ID NO: 1106799 - RNA, 19 nt, Homo sapiens
  misc_RNA (1)...(19): siRNA sense strand
aagccaagaugcccauugu

SEQ ID NO: 1106800 - RNA, 19 nt, Homo sapiens
  misc_RNA (1)...(19): siRNA sense strand
gccuaugucuaucagaaug

SEQ ID NO: 1106801 - RNA, 19 nt, Homo sapiens
  misc_RNA (1)...(19): siRNA sense strand
uccaagggcaucaccguua

SEQ ID NO: 1106802 - RNA, 19 nt, Homo sapiens
  misc_RNA (1)...(19): siRNA sense strand
ccucucauuuggaagacua

SEQ ID NO: 1106803 - RNA, 19 nt, Homo sapiens
  misc_RNA (1)...(19): siRNA sense strand
gaaaagcaacguucuugga

SEQ ID NO: 1106804 - RNA, 19 nt, Homo sapiens
  misc_RNA (1)...(19): siRNA sense strand
guugcaauccucucauuug

SEQ ID NO: 1106805 - RNA, 19 nt, Homo sapiens
  misc_RNA (1)...(19): siRNA sense strand
caaccauacucagcuucaa

SEQ ID NO: 1106806 - RNA, 19 nt, Homo sapiens
  misc_RNA (1)...(19): siRNA sense strand
gaagcgggaggaccuguuc

SEQ ID NO: 1106807 - RNA, 19 nt, Homo sapiens
  misc_RNA (1)...(19): siRNA sense strand
gagggccuguaacguguug

SEQ ID NO: 1106808 - RNA, 19 nt, Homo sapiens
  misc_RNA (1)...(19): siRNA sense strand
gcaaccauacucagcuuca

SEQ ID NO: 1106809 - RNA, 19 nt, Homo sapiens
  misc_RNA (1)...(19): siRNA sense strand
gcagugaagguggccauug

SEQ ID NO: 1106810 - RNA, 19 nt, Homo sapiens
  misc_RNA (1)...(19): siRNA sense strand
guguugcaauccucucauu

SEQ ID NO: 1106811 - RNA, 19 nt, Homo sapiens
  misc_RNA (1)...(19): siRNA sense strand
ccuguaacguguugcaauc

SEQ ID NO: 1106812 - RNA, 19 nt, Homo sapiens
  misc_RNA (1)...(19): siRNA sense strand
acauucaggucuuugacuu

SEQ ID NO: 1106813 - RNA, 19 nt, Homo sapiens
  misc_RNA (1)...(19): siRNA sense strand
ccaagggcaucaccguuac

SEQ ID NO: 1106814 - RNA, 19 nt, Homo sapiens
  misc_RNA (1)...(19): siRNA sense strand
acaaaccuggacugaaaua

SEQ ID NO: 1106815 - RNA, 19 nt, Homo sapiens
  misc_RNA (1)...(19): siRNA sense strand
ugaaagaagcagugaaggu

SEQ ID NO: 1106816 - RNA, 19 nt, Homo sapiens
  misc_RNA (1)...(19): siRNA sense strand
cccagguucugauccguuu

SEQ ID NO: 1106817 - RNA, 19 nt, Homo sapiens
  misc_RNA (1)...(19): siRNA sense strand
gaagccauccaagagaaga

SEQ ID NO: 1106818 - RNA, 19 nt, Homo sapiens
  misc_RNA (1)...(19): siRNA sense strand
ucuaucagaaugaacauga

SEQ ID NO: 1106819 - RNA, 19 nt, Homo sapiens
  misc_RNA (1)...(19): siRNA sense strand
gacaccagcacgcauuguu

SEQ ID NO: 1106820 - RNA, 19 nt, Homo sapiens
  misc_RNA (1)...(19): siRNA sense strand
gaaauauaaaccagugacu

SEQ ID NO: 1106821 - RNA, 19 nt, Homo sapiens
  misc_RNA (1)...(19): siRNA sense strand
guucaucgucagcaaguug

SEQ ID NO: 1106822 - RNA, 19 nt, Homo sapiens
  misc_RNA (1)...(19): siRNA sense strand
ccagaggaaugugauuguc

SEQ ID NO: 1106823 - RNA, 19 nt, Homo sapiens
  misc_RNA (1)...(19): siRNA sense strand
gguaaugccaucgguggaa

SEQ ID NO: 1106824 - RNA, 19 nt, Homo sapiens
  misc_RNA (1)...(19): siRNA sense strand
cuggacgucuaucuuauuc

SEQ ID NO: 1106825 - RNA, 19 nt, Homo sapiens
  misc_RNA (1)...(19): siRNA sense strand
gcaggauaucggcacauug

SEQ ID NO: 1106826 - RNA, 19 nt, Homo sapiens
  misc_RNA (1)...(19): siRNA sense strand
gaacauucaggucuuugac

SEQ ID NO: 1106827 - RNA, 19 nt, Homo sapiens
  misc_RNA (1)...(19): siRNA sense strand
agaggaaugugauugucau

SEQ ID NO: 1106828 - RNA, 19 nt, Homo sapiens
  misc_RNA (1)...(19): siRNA sense strand
cuaucagaaugaacaugaa

SEQ ID NO: 1106829 - RNA, 19 nt, Homo sapiens
  misc_RNA (1)...(19): siRNA sense strand
caccagcacgcauuguuga

SEQ ID NO: 1106830 - RNA, 19 nt, Homo sapiens
  misc_RNA (1)...(19): siRNA sense strand
ucugauccguuuccauauc

SEQ ID NO: 1106831 - RNA, 19 nt, Homo sapiens
  misc_RNA (1)...(19): siRNA sense strand
ucagaaugaacaugaagug

SEQ ID NO: 1106832 - RNA, 19 nt, Homo sapiens
  misc_RNA (1)...(19): siRNA sense strand
gaggaucccaagauuaagg

SEQ ID NO: 1106833 - RNA, 19 nt, Homo sapiens
  misc_RNA (1)...(19): siRNA sense strand
ucacacaggagaaacugau

SEQ ID NO: 1106834 - RNA, 19 nt, Homo sapiens
  misc_RNA (1)...(19): siRNA sense strand
ugaacaaaccuggacugaa

SEQ ID NO: 1106835 - RNA, 19 nt, Homo sapiens
  misc_RNA (1)...(19): siRNA sense strand
cgagaagcucuugaacaaa

SEQ ID NO: 1106836 - RNA, 19 nt, Homo sapiens
  misc_RNA (1)...(19): siRNA sense strand
uccaagagaagauccaaga

SEQ ID NO: 1106837 - RNA, 19 nt, Homo sapiens
  misc_RNA (1)...(19): siRNA sense strand
ugcaggauaucggcacauu

SEQ ID NO: 1106838 - RNA, 19 nt, Homo sapiens
  misc_RNA (1)...(19): siRNA sense strand
cuggaggaucccaagauua

SEQ ID NO: 1106839 - RNA, 19 nt, Homo sapiens
  misc_RNA (1)...(19): siRNA sense strand
gguugagugucacccauac

SEQ ID NO: 1106840 - RNA, 19 nt, Homo sapiens
  misc_RNA (1)...(19): siRNA sense strand
uggcaaccauacucagcuu

SEQ ID NO: 1106841 - RNA, 19 nt, Homo sapiens
  misc_RNA (1)...(19): siRNA sense strand
uugagaacauucaggucuu

SEQ ID NO: 1106842 - RNA, 19 nt, Homo sapiens
  misc_RNA (1)...(19): siRNA sense strand
cuaugucuaucagaaugaa

SEQ ID NO: 1106843 - RNA, 19 nt, Homo sapiens
  misc_RNA (1)...(19): siRNA sense strand
cagaggaaugugauuguca

SEQ ID NO: 1106844 - RNA, 19 nt, Homo sapiens
  misc_RNA (1)...(19): siRNA sense strand
ggauaucggcacauugacu

SEQ ID NO: 1106845 - RNA, 19 nt, Homo sapiens
  misc_RNA (1)...(19): siRNA sense strand
auaaaccagugacuaacca

SEQ ID NO: 1106846 - RNA, 19 nt, Homo sapiens
  misc_RNA (1)...(19): siRNA sense strand
cauacucagcuucaacaga

SEQ ID NO: 1106847 - RNA, 19 nt, Homo sapiens
  misc_RNA (1)...(19): siRNA sense strand
ggaagccauccaagagaag

SEQ ID NO: 1106848 - RNA, 19 nt, Homo sapiens
  misc_RNA (1)...(19): siRNA sense strand
cuucgaugcagaauauuga

SEQ ID NO: 1106849 - RNA, 19 nt, Homo sapiens
  misc_RNA (1)...(19): siRNA sense strand
uugcaauccucucauuugg

SEQ ID NO: 1106850 - RNA, 19 nt, Homo sapiens
  misc_RNA (1)...(19): siRNA sense strand
gugaagguggccauugaug

SEQ ID NO: 1106851 - RNA, 19 nt, Homo sapiens
  misc_RNA (1)...(19): siRNA sense strand
gagaacauucaggucuuug

SEQ ID NO: 1106852 - RNA, 19 nt, Homo sapiens
  misc_RNA (1)...(19): siRNA sense strand
gaagagagaagacauauuc

SEQ ID NO: 1106853 - RNA, 19 nt, Homo sapiens
  misc_RNA (1)...(19): siRNA sense strand
gaagacauauucuacacuu

SEQ ID NO: 1106854 - RNA, 19 nt, Homo sapiens
  misc_RNA (1)...(19): siRNA sense strand
gaagcuggguuccgccaua

SEQ ID NO: 1106855 - RNA, 19 nt, Homo sapiens
  misc_RNA (1)...(19): siRNA sense strand
agacagaaaucuccacuau

SEQ ID NO: 1106856 - RNA, 19 nt, Homo sapiens
  misc_RNA (1)...(19): siRNA sense strand
gaaagauauuguucugguu

SEQ ID NO: 1106857 - RNA, 19 nt, Homo sapiens
  misc_RNA (1)...(19): siRNA sense strand
ggacuauguugaccucuau

SEQ ID NO: 1106858 - RNA, 19 nt, Homo sapiens
  misc_RNA (1)...(19): siRNA sense strand
gguagaaugucauccguau

SEQ ID NO: 1106859 - RNA, 19 nt, Homo sapiens
  misc_RNA (1)...(19): siRNA sense strand
cggaguaaauugcuagauu

SEQ ID NO: 1106860 - RNA, 19 nt, Homo sapiens
  misc_RNA (1)...(19): siRNA sense strand
gcaaccagguagaauguca

SEQ ID NO: 1106861 - RNA, 19 nt, Homo sapiens
  misc_RNA (1)...(19): siRNA sense strand
gcuaaaugauggccacuuc

SEQ ID NO: 1106862 - RNA, 19 nt, Homo sapiens
  misc_RNA (1)...(19): siRNA sense strand
uagaaugucauccguauuu

SEQ ID NO: 1106863 - RNA, 19 nt, Homo sapiens
  misc_RNA (1)...(19): siRNA sense strand
uauguugaccucuaucuua

SEQ ID NO: 1106864 - RNA, 19 nt, Homo sapiens
  misc_RNA (1)...(19): siRNA sense strand
gagcagcgcaucagacaga

SEQ ID NO: 1106865 - RNA, 19 nt, Homo sapiens
  misc_RNA (1)...(19): siRNA sense strand
agacagaacgugcagguuu

SEQ ID NO: 1106866 - RNA, 19 nt, Homo sapiens
  misc_RNA (1)...(19): siRNA sense strand
gaacuuucaccaacagaug

SEQ ID NO: 1106867 - RNA, 19 nt, Homo sapiens
  misc_RNA (1)...(19): siRNA sense strand
caaccggaguaaauugcua

SEQ ID NO: 1106868 - RNA, 19 nt, Homo sapiens
  misc_RNA (1)...(19): siRNA sense strand
uagauggccuagacagaaa

SEQ ID NO: 1106869 - RNA, 19 nt, Homo sapiens
  misc_RNA (1)...(19): siRNA sense strand
guguaaggaugcaggauug

SEQ ID NO: 1106870 - RNA, 19 nt, Homo sapiens
  misc_RNA (1)...(19): siRNA sense strand
ccauauagauucugcucau

SEQ ID NO: 1106871 - RNA, 19 nt, Homo sapiens
  misc_RNA (1)...(19): siRNA sense strand
guugaccucuaucuuauuc

SEQ ID NO: 1106872 - RNA, 19 nt, Homo sapiens
  misc_RNA (1)...(19): siRNA sense strand
gggaggccauggagaagug

SEQ ID NO: 1106873 - RNA, 19 nt, Homo sapiens
  misc_RNA (1)...(19): siRNA sense strand
gcaagucgaaagauauugu

SEQ ID NO: 1106874 - RNA, 19 nt, Homo sapiens
  misc_RNA (1)...(19): siRNA sense strand
gacauauucuacacuucaa

SEQ ID NO: 1106875 - RNA, 19 nt, Homo sapiens
  misc_RNA (1)...(19): siRNA sense strand
caacaagccaggacucaag

SEQ ID NO: 1106876 - RNA, 19 nt, Homo sapiens
  misc_RNA (1)...(19): siRNA sense strand
ugacauaguggaucucugu

SEQ ID NO: 1106877 - RNA, 19 nt, Homo sapiens
  misc_RNA (1)...(19): siRNA sense strand
cauauagauucugcucauu

SEQ ID NO: 1106878 - RNA, 19 nt, Homo sapiens
  misc_RNA (1)...(19): siRNA sense strand
gacagaaaucuccacuauu

SEQ ID NO: 1106879 - RNA, 19 nt, Homo sapiens
  misc_RNA (1)...(19): siRNA sense strand
ggacuggccauccgaagca

SEQ ID NO: 1106880 - RNA, 19 nt, Homo sapiens
  misc_RNA (1)...(19): siRNA sense strand
gacagaacgugcagguuuu

SEQ ID NO: 1106881 - RNA, 19 nt, Homo sapiens
  misc_RNA (1)...(19): siRNA sense strand
gaaugucauccguauuuca

SEQ ID NO: 1106882 - RNA, 19 nt, Homo sapiens
  misc_RNA (1)...(19): siRNA sense strand
ugaggaacuuucaccaaca

SEQ ID NO: 1106883 - RNA, 19 nt, Homo sapiens
  misc_RNA (1)...(19): siRNA sense strand
uugcuagccacccuaauua

SEQ ID NO: 1106884 - RNA, 19 nt, Homo sapiens
  misc_RNA (1)...(19): siRNA sense strand
gaggaacuuucaccaacag

SEQ ID NO: 1106885 - RNA, 19 nt, Homo sapiens
  misc_RNA (1)...(19): siRNA sense strand
agacauauucuacacuuca

SEQ ID NO: 1106886 - RNA, 19 nt, Homo sapiens
  misc_RNA (1)...(19): siRNA sense strand
agccaggacucaaguacaa

SEQ ID NO: 1106887 - RNA, 19 nt, Homo sapiens
  misc_RNA (1)...(19): siRNA sense strand
aagcucaauuggacuaugu

SEQ ID NO: 1106888 - RNA, 19 nt, Homo sapiens
  misc_RNA (1)...(19): siRNA sense strand
ccacccuaauuauccauau

SEQ ID NO: 1106889 - RNA, 19 nt, Homo sapiens
  misc_RNA (1)...(19): siRNA sense strand
gucgaaagauauuguucug

SEQ ID NO: 1106890 - RNA, 19 nt, Homo sapiens
  misc_RNA (1)...(19): siRNA sense strand
ccacuucaugccuguauug

SEQ ID NO: 1106891 - RNA, 19 nt, Homo sapiens
  misc_RNA (1)...(19): siRNA sense strand
ggagaaguguaaggaugca

SEQ ID NO: 1106892 - RNA, 19 nt, Homo sapiens
  misc_RNA (1)...(19): siRNA sense strand
uggacuauguugaccucua

SEQ ID NO: 1106893 - RNA, 19 nt, Homo sapiens
  misc_RNA (1)...(19): siRNA sense strand
cacccuaauuauccauauu

SEQ ID NO: 1106894 - RNA, 19 nt, Homo sapiens
  misc_RNA (1)...(19): siRNA sense strand
ugaccucuaucuuauucau

SEQ ID NO: 1106895 - RNA, 19 nt, Homo sapiens
  misc_RNA (1)...(19): siRNA sense strand
ggauuggccaaguccauug

SEQ ID NO: 1106896 - RNA, 19 nt, Homo sapiens
  misc_RNA (1)...(19): siRNA sense strand
agauucugcucauuuauac

SEQ ID NO: 1106897 - RNA, 19 nt, Homo sapiens
  misc_RNA (1)...(19): siRNA sense strand
auucuacacuucaaagcuu

SEQ ID NO: 1106898 - RNA, 19 nt, Homo sapiens
  misc_RNA (1)...(19): siRNA sense strand
gcuagccacccuaauuauc

SEQ ID NO: 1106899 - RNA, 19 nt, Homo sapiens
  misc_RNA (1)...(19): siRNA sense strand
uggccaagagcuacaauga

SEQ ID NO: 1106900 - RNA, 19 nt, Homo sapiens
  misc_RNA (1)...(19): siRNA sense strand
aaagccaggugaggaacuu

SEQ ID NO: 1106901 - RNA, 19 nt, Homo sapiens
  misc_RNA (1)...(19): siRNA sense strand
gugaagagagaagacauau

SEQ ID NO: 1106902 - RNA, 19 nt, Homo sapiens
  misc_RNA (1)...(19): siRNA sense strand
caagucgaaagauauuguu

SEQ ID NO: 1106903 - RNA, 19 nt, Homo sapiens
  misc_RNA (1)...(19): siRNA sense strand
ggaacuuucaccaacagau

SEQ ID NO: 1106904 - RNA, 19 nt, Homo sapiens
  misc_RNA (1)...(19): siRNA sense strand
cauagauggccuagacaga

SEQ ID NO: 1106905 - RNA, 19 nt, Homo sapiens
  misc_RNA (1)...(19): siRNA sense strand
ugaagagagaagacauauu

SEQ ID NO: 1106906 - RNA, 19 nt, Homo sapiens
  misc_RNA (1)...(19): siRNA sense strand
gaugcaggauuggccaagu

SEQ ID NO: 1106907 - RNA, 19 nt, Homo sapiens
  misc_RNA (1)...(19): siRNA sense strand
caacagaugaaaauggaaa

SEQ ID NO: 1106908 - RNA, 19 nt, Homo sapiens
  misc_RNA (1)...(19): siRNA sense strand
guagaaugucauccguauu

SEQ ID NO: 1106909 - RNA, 19 nt, Homo sapiens
  misc_RNA (1)...(19): siRNA sense strand
ucuaaagccaggugaggaa

SEQ ID NO: 1106910 - RNA, 19 nt, Homo sapiens
  misc_RNA (1)...(19): siRNA sense strand
uguguaaagcuaaaugaug

SEQ ID NO: 1106911 - RNA, 19 nt, Homo sapiens
  misc_RNA (1)...(19): siRNA sense strand
auagauggccuagacagaa

SEQ ID NO: 1106912 - RNA, 19 nt, Homo sapiens
  misc_RNA (1)...(19): siRNA sense strand
gcucaauuggacuauguug

SEQ ID NO: 1106913 - RNA, 19 nt, Homo sapiens
  misc_RNA (1)...(19): siRNA sense strand
ggguuccgccauauagauu

SEQ ID NO: 1106914 - RNA, 19 nt, Homo sapiens
  misc_RNA (1)...(19): siRNA sense strand
agaaugucauccguauuuc

SEQ ID NO: 1106915 - RNA, 19 nt, Homo sapiens
  misc_RNA (1)...(19): siRNA sense strand
ccugggaggccauggagaa

SEQ ID NO: 1106916 - RNA, 19 nt, Homo sapiens
  misc_RNA (1)...(19): siRNA sense strand
gcuggguuccgccauauag

SEQ ID NO: 1106917 - RNA, 19 nt, Homo sapiens
  misc_RNA (1)...(19): siRNA sense strand
auguugaccucuaucuuau

SEQ ID NO: 1106918 - RNA, 19 nt, Homo sapiens
  misc_RNA (1)...(19): siRNA sense strand
gacauaguggaucucugua

SEQ ID NO: 1106919 - RNA, 19 nt, Homo sapiens
  misc_RNA (1)...(19): siRNA sense strand
aguacaagccugucugcaa

SEQ ID NO: 1106920 - RNA, 19 nt, Homo sapiens
  misc_RNA (1)...(19): siRNA sense strand
auagugcucugggaucuca

SEQ ID NO: 1106921 - RNA, 19 nt, Homo sapiens
  misc_RNA (1)...(19): siRNA sense strand
cugcaagucgaaagauauu

SEQ ID NO: 1106922 - RNA, 19 nt, Homo sapiens
  misc_RNA (1)...(19): siRNA sense strand
gccacuucaugccuguauu

SEQ ID NO: 1106923 - RNA, 19 nt, Homo sapiens
  misc_RNA (1)...(19): siRNA sense strand
gaacagaaguuaauagaga

SEQ ID NO: 1106924 - RNA, 19 nt, Homo sapiens
  misc_RNA (1)...(19): siRNA sense strand
gaugacagguguaacauga

SEQ ID NO: 1106925 - RNA, 19 nt, Homo sapiens
  misc_RNA (1)...(19): siRNA sense strand
ggauagggcuuuggaggaa

SEQ ID NO: 1106926 - RNA, 19 nt, Homo sapiens
  misc_RNA (1)...(19): siRNA sense strand
gaauggagaugggcaaaca

SEQ ID NO: 1106927 - RNA, 19 nt, Homo sapiens
  misc_RNA (1)...(19): siRNA sense strand
gaaaguggcauggaaguau

SEQ ID NO: 1106928 - RNA, 19 nt, Homo sapiens
  misc_RNA (1)...(19): siRNA sense strand
gaaugugguuguuacugaa

SEQ ID NO: 1106929 - RNA, 19 nt, Homo sapiens
  misc_RNA (1)...(19): siRNA sense strand
aaaguggcauggaaguaua

SEQ ID NO: 1106930 - RNA, 19 nt, Homo sapiens
  misc_RNA (1)...(19): siRNA sense strand
guaacaugaagcacaauua

SEQ ID NO: 1106931 - RNA, 19 nt, Homo sapiens
  misc_RNA (1)...(19): siRNA sense strand
gguauaauucccaaucuaa

SEQ ID NO: 1106932 - RNA, 19 nt, Homo sapiens
  misc_RNA (1)...(19): siRNA sense strand
gaaugaagcagaacagaag

SEQ ID NO: 1106933 - RNA, 19 nt, Homo sapiens
  misc_RNA (1)...(19): siRNA sense strand
ggaaugaugacagguguaa

SEQ ID NO: 1106934 - RNA, 19 nt, Homo sapiens
  misc_RNA (1)...(19): siRNA sense strand
gcaauucccaguaccgaaa

SEQ ID NO: 1106935 - RNA, 19 nt, Homo sapiens
  misc_RNA (1)...(19): siRNA sense strand
guagaaaagccuuaucuua

SEQ ID NO: 1106936 - RNA, 19 nt, Homo sapiens
  misc_RNA (1)...(19): siRNA sense strand
agaaugugguuguuacuga

SEQ ID NO: 1106937 - RNA, 19 nt, Homo sapiens
  misc_RNA (1)...(19): siRNA sense strand
gaagcacaauuauauuugc

SEQ ID NO: 1106938 - RNA, 19 nt, Homo sapiens
  misc_RNA (1)...(19): siRNA sense strand
gaacuguccagccgaguga

SEQ ID NO: 1106939 - RNA, 19 nt, Homo sapiens
  misc_RNA (1)...(19): siRNA sense strand
gguguaacaugaagcacaa

SEQ ID NO: 1106940 - RNA, 19 nt, Homo sapiens
  misc_RNA (1)...(19): siRNA sense strand
gaaacugguacacagauga

SEQ ID NO: 1106941 - RNA, 19 nt, Homo sapiens
  misc_RNA (1)...(19): siRNA sense strand
agccuuaucuuacaaauca

SEQ ID NO: 1106942 - RNA, 19 nt, Homo sapiens
  misc_RNA (1)...(19): siRNA sense strand
ggagacacccaucagaaug

SEQ ID NO: 1106943 - RNA, 19 nt, Homo sapiens
  misc_RNA (1)...(19): siRNA sense strand
gaaaagccuuaucuuacaa

SEQ ID NO: 1106944 - RNA, 19 nt, Homo sapiens
  misc_RNA (1)...(19): siRNA sense strand
ugaagcagaacagaaguua

SEQ ID NO: 1106945 - RNA, 19 nt, Homo sapiens
  misc_RNA (1)...(19): siRNA sense strand
gaagcagaacagaaguuaa

SEQ ID NO: 1106946 - RNA, 19 nt, Homo sapiens
  misc_RNA (1)...(19): siRNA sense strand
ugauggugauuucuggaua

SEQ ID NO: 1106947 - RNA, 19 nt, Homo sapiens
  misc_RNA (1)...(19): siRNA sense strand
guuaauagagagcauguug

SEQ ID NO: 1106948 - RNA, 19 nt, Homo sapiens
  misc_RNA (1)...(19): siRNA sense strand
cagaacagaaguuaauaga

SEQ ID NO: 1106949 - RNA, 19 nt, Homo sapiens
  misc_RNA (1)...(19): siRNA sense strand
caucagaaugugguuguua

SEQ ID NO: 1106950 - RNA, 19 nt, Homo sapiens
  misc_RNA (1)...(19): siRNA sense strand
gauggugauuucuggauag

SEQ ID NO: 1106951 - RNA, 19 nt, Homo sapiens
  misc_RNA (1)...(19): siRNA sense strand
gcagaacagaaguuaauag

SEQ ID NO: 1106952 - RNA, 19 nt, Homo sapiens
  misc_RNA (1)...(19): siRNA sense strand
auagagagcauguugcaaa

SEQ ID NO: 1106953 - RNA, 19 nt, Homo sapiens
  misc_RNA (1)...(19): siRNA sense strand
gcauaaaaguaaaggaaga

SEQ ID NO: 1106954 - RNA, 19 nt, Homo sapiens
  misc_RNA (1)...(19): siRNA sense strand
gcagguauaauucccaauc

SEQ ID NO: 1106955 - RNA, 19 nt, Homo sapiens
  misc_RNA (1)...(19): siRNA sense strand
gaaccagagauuaauccaa

SEQ ID NO: 1106956 - RNA, 19 nt, Homo sapiens
  misc_RNA (1)...(19): siRNA sense strand
cgaaacugguacacagaug

SEQ ID NO: 1106957 - RNA, 19 nt, Homo sapiens
  misc_RNA (1)...(19): siRNA sense strand
aaaaguguguugugaugua

SEQ ID NO: 1106958 - RNA, 19 nt, Homo sapiens
  misc_RNA (1)...(19): siRNA sense strand
ugacagguguaacaugaag

SEQ ID NO: 1106959 - RNA, 19 nt, Homo sapiens
  misc_RNA (1)...(19): siRNA sense strand
aguaugaaccagagauuaa

SEQ ID NO: 1106960 - RNA, 19 nt, Homo sapiens
  misc_RNA (1)...(19): siRNA sense strand
aagcagaacagaaguuaau

SEQ ID NO: 1106961 - RNA, 19 nt, Homo sapiens
  misc_RNA (1)...(19): siRNA sense strand
aaaagaaaguggcauggaa

SEQ ID NO: 1106962 - RNA, 19 nt, Homo sapiens
  misc_RNA (1)...(19): siRNA sense strand
caaguaugaaccagagauu

SEQ ID NO: 1106963 - RNA, 19 nt, Homo sapiens
  misc_RNA (1)...(19): siRNA sense strand
gagacacccaucagaaugu

SEQ ID NO: 1106964 - RNA, 19 nt, Homo sapiens
  misc_RNA (1)...(19): siRNA sense strand
gcaaguaugaaccagagau

SEQ ID NO: 1106965 - RNA, 19 nt, Homo sapiens
  misc_RNA (1)...(19): siRNA sense strand
gauuucugauggugauuuc

SEQ ID NO: 1106966 - RNA, 19 nt, Homo sapiens
  misc_RNA (1)...(19): siRNA sense strand
caggagacacccaucagaa

SEQ ID NO: 1106967 - RNA, 19 nt, Homo sapiens
  misc_RNA (1)...(19): siRNA sense strand
uacugaagcagguauaauu

SEQ ID NO: 1106968 - RNA, 19 nt, Homo sapiens
  misc_RNA (1)...(19): siRNA sense strand
ugaaaaguguguugugaug

SEQ ID NO: 1106969 - RNA, 19 nt, Homo sapiens
  misc_RNA (1)...(19): siRNA sense strand
agaaaagccuuaucuuaca

SEQ ID NO: 1106970 - RNA, 19 nt, Homo sapiens
  misc_RNA (1)...(19): siRNA sense strand
gagaaugaagcagaacaga

SEQ ID NO: 1106971 - RNA, 19 nt, Homo sapiens
  misc_RNA (1)...(19): siRNA sense strand
agaaugaagcagaacagaa

SEQ ID NO: 1106972 - RNA, 19 nt, Homo sapiens
  misc_RNA (1)...(19): siRNA sense strand
uaauagagagcauguugca

SEQ ID NO: 1106973 - RNA, 19 nt, Homo sapiens
  misc_RNA (1)...(19): siRNA sense strand
ggauuucugauggugauuu

SEQ ID NO: 1106974 - RNA, 19 nt, Homo sapiens
  misc_RNA (1)...(19): siRNA sense strand
aaaguguguugugauguau

SEQ ID NO: 1106975 - RNA, 19 nt, Homo sapiens
  misc_RNA (1)...(19): siRNA sense strand
gauagggcuuuggaggaau

SEQ ID NO: 1106976 - RNA, 19 nt, Homo sapiens
  misc_RNA (1)...(19): siRNA sense strand
agguauaauucccaaucua

SEQ ID NO: 1106977 - RNA, 19 nt, Homo sapiens
  misc_RNA (1)...(19): siRNA sense strand
aaacugguacacagaugaa

SEQ ID NO: 1106978 - RNA, 19 nt, Homo sapiens
  misc_RNA (1)...(19): siRNA sense strand
cuguggauuucaaagagua

SEQ ID NO: 1106979 - RNA, 19 nt, Homo sapiens
  misc_RNA (1)...(19): siRNA sense strand
ccaggagacacccaucaga

SEQ ID NO: 1106980 - RNA, 19 nt, Homo sapiens
  misc_RNA (1)...(19): siRNA sense strand
gcacgccuggcuugugaga

SEQ ID NO: 1106981 - RNA, 19 nt, Homo sapiens
  misc_RNA (1)...(19): siRNA sense strand
gaaccuguuguuuccagau

SEQ ID NO: 1106982 - RNA, 19 nt, Homo sapiens
  misc_RNA (1)...(19): siRNA sense strand
cagguauaauucccaaucu

SEQ ID NO: 1106983 - RNA, 19 nt, Homo sapiens
  misc_RNA (1)...(19): siRNA sense strand
gacagggauuucugauggu

SEQ ID NO: 1106984 - RNA, 19 nt, Homo sapiens
  misc_RNA (1)...(19): siRNA sense strand
agaaaguggcauggaagua

SEQ ID NO: 1106985 - RNA, 19 nt, Homo sapiens
  misc_RNA (1)...(19): siRNA sense strand
acacuguggauuucaaaga

SEQ ID NO: 1106986 - RNA, 19 nt, Homo sapiens
  misc_RNA (1)...(19): siRNA sense strand
guaugaaccagagauuaau

SEQ ID NO: 1106987 - RNA, 19 nt, Homo sapiens
  misc_RNA (1)...(19): siRNA sense strand
gcuacaaaauggccuacuu

SEQ ID NO: 1106988 - RNA, 19 nt, Homo sapiens
  misc_RNA (1)...(19): siRNA sense strand
cccaaucuaauuuauguug

SEQ ID NO: 1106989 - RNA, 19 nt, Homo sapiens
  misc_RNA (1)...(19): siRNA sense strand
ccuugagaaugaagcagaa

SEQ ID NO: 1106990 - RNA, 19 nt, Homo sapiens
  misc_RNA (1)...(19): siRNA sense strand
agucuacacuguggauuuc

SEQ ID NO: 1106991 - RNA, 19 nt, Homo sapiens
  misc_RNA (1)...(19): siRNA sense strand
aaguaugaaccagagauua

SEQ ID NO: 1106992 - RNA, 19 nt, Homo sapiens
  misc_RNA (1)...(19): siRNA sense strand
gaaaagaaaguggcaugga

SEQ ID NO: 1106993 - RNA, 19 nt, Homo sapiens
  misc_RNA (1)...(19): siRNA sense strand
uacugauacugguugcuuu

SEQ ID NO: 1106994 - RNA, 19 nt, Homo sapiens
  misc_RNA (1)...(19): siRNA sense strand
uagagagcauguugcaaaa

SEQ ID NO: 1106995 - RNA, 19 nt, Homo sapiens
  misc_RNA (1)...(19): siRNA sense strand
gggacagggauuucugaug

SEQ ID NO: 1106996 - RNA, 19 nt, Homo sapiens
  misc_RNA (1)...(19): siRNA sense strand
ccaaccaacugccaauccu

SEQ ID NO: 1106997 - RNA, 19 nt, Homo sapiens
  misc_RNA (1)...(19): siRNA sense strand
aaugaugacagguguaaca

SEQ ID NO: 1106998 - RNA, 19 nt, Homo sapiens
  misc_RNA (1)...(19): siRNA sense strand
cacuguggauuucaaagag

SEQ ID NO: 1106999 - RNA, 19 nt, Homo sapiens
  misc_RNA (1)...(19): siRNA sense strand
ucuacacuguggauuucaa

SEQ ID NO: 1107000 - RNA, 19 nt, Homo sapiens
  misc_RNA (1)...(19): siRNA sense strand
gcucuuacugauacugguu

SEQ ID NO: 1107001 - RNA, 19 nt, Homo sapiens
  misc_RNA (1)...(19): siRNA sense strand
agacacccaucagaaugug

SEQ ID NO: 1107002 - RNA, 19 nt, Homo sapiens
  misc_RNA (1)...(19): siRNA sense strand
uagaaaagccuuaucuuac

SEQ ID NO: 1107003 - RNA, 19 nt, Homo sapiens
  misc_RNA (1)...(19): siRNA sense strand
caagacagcugacgacuga

SEQ ID NO: 1107004 - RNA, 19 nt, Homo sapiens
  misc_RNA (1)...(19): siRNA sense strand
gccgauggcugacguauuu

SEQ ID NO: 1107005 - RNA, 19 nt, Homo sapiens
  misc_RNA (1)...(19): siRNA sense strand
gaagggaccauagauguua

SEQ ID NO: 1107006 - RNA, 19 nt, Homo sapiens
  misc_RNA (1)...(19): siRNA sense strand
cuaagaaccucaugcaguu

SEQ ID NO: 1107007 - RNA, 19 nt, Homo sapiens
  misc_RNA (1)...(19): siRNA sense strand
gaaagucacacugcacaua

SEQ ID NO: 1107008 - RNA, 19 nt, Homo sapiens
  misc_RNA (1)...(19): siRNA sense strand
aagcagaggcugagaauaa

SEQ ID NO: 1107009 - RNA, 19 nt, Homo sapiens
  misc_RNA (1)...(19): siRNA sense strand
ggaggaagagcuagaagaa

SEQ ID NO: 1107010 - RNA, 19 nt, Homo sapiens
  misc_RNA (1)...(19): siRNA sense strand
gaagaagggaccauagaug

SEQ ID NO: 1107011 - RNA, 19 nt, Homo sapiens
  misc_RNA (1)...(19): siRNA sense strand
gaugacagaugacgacagu

SEQ ID NO: 1107012 - RNA, 19 nt, Homo sapiens
  misc_RNA (1)...(19): siRNA sense strand
gggccuaucccgcucuuua

SEQ ID NO: 1107013 - RNA, 19 nt, Homo sapiens
  misc_RNA (1)...(19): siRNA sense strand
ccauagauguuaccgacuu

SEQ ID NO: 1107014 - RNA, 19 nt, Homo sapiens
  misc_RNA (1)...(19): siRNA sense strand
ggacgaggaggaagagcua

SEQ ID NO: 1107015 - RNA, 19 nt, Homo sapiens
  misc_RNA (1)...(19): siRNA sense strand
ccuuugagaugacagauga

SEQ ID NO: 1107016 - RNA, 19 nt, Homo sapiens
  misc_RNA (1)...(19): siRNA sense strand
gcaaagcagaggcugagaa

SEQ ID NO: 1107017 - RNA, 19 nt, Homo sapiens
  misc_RNA (1)...(19): siRNA sense strand
gaagagcccucggcaucuc

SEQ ID NO: 1107018 - RNA, 19 nt, Homo sapiens
  misc_RNA (1)...(19): siRNA sense strand
gggaguuccuuugagauga

SEQ ID NO: 1107019 - RNA, 19 nt, Homo sapiens
  misc_RNA (1)...(19): siRNA sense strand
gaacaacgaaccgcuuaca

SEQ ID NO: 1107020 - RNA, 19 nt, Homo sapiens
  misc_RNA (1)...(19): siRNA sense strand
aaagucacacugcacauaa

SEQ ID NO: 1107021 - RNA, 19 nt, Homo sapiens
  misc_RNA (1)...(19): siRNA sense strand
gaugacgacagugccauua

SEQ ID NO: 1107022 - RNA, 19 nt, Homo sapiens
  misc_RNA (1)...(19): siRNA sense strand
agugcuagcugaucgcuuu

SEQ ID NO: 1107023 - RNA, 19 nt, Homo sapiens
  misc_RNA (1)...(19): siRNA sense strand
ccaagagcguggagguaga

SEQ ID NO: 1107024 - RNA, 19 nt, Homo sapiens
  misc_RNA (1)...(19): siRNA sense strand
caaagcagaggcugagaau

SEQ ID NO: 1107025 - RNA, 19 nt, Homo sapiens
  misc_RNA (1)...(19): siRNA sense strand
gcuagaagaagggaccaua

SEQ ID NO: 1107026 - RNA, 19 nt, Homo sapiens
  misc_RNA (1)...(19): siRNA sense strand
gcagcugaauccagagagu

SEQ ID NO: 1107027 - RNA, 19 nt, Homo sapiens
  misc_RNA (1)...(19): siRNA sense strand
uuagggcucugacccaguu

SEQ ID NO: 1107028 - RNA, 19 nt, Homo sapiens
  misc_RNA (1)...(19): siRNA sense strand
ccaaggugauucagauugc

SEQ ID NO: 1107029 - RNA, 19 nt, Homo sapiens
  misc_RNA (1)...(19): siRNA sense strand
acacaaauggaccgaagaa

SEQ ID NO: 1107030 - RNA, 19 nt, Homo sapiens
  misc_RNA (1)...(19): siRNA sense strand
uagaagaagggaccauaga

SEQ ID NO: 1107031 - RNA, 19 nt, Homo sapiens
  misc_RNA (1)...(19): siRNA sense strand
uagucuacgugcacacaaa

SEQ ID NO: 1107032 - RNA, 19 nt, Homo sapiens
  misc_RNA (1)...(19): siRNA sense strand
aagaagggaccauagaugu

SEQ ID NO: 1107033 - RNA, 19 nt, Homo sapiens
  misc_RNA (1)...(19): siRNA sense strand
gauguuaccgacuucuugu

SEQ ID NO: 1107034 - RNA, 19 nt, Homo sapiens
  misc_RNA (1)...(19): siRNA sense strand
gccaaggugauucagauug

SEQ ID NO: 1107035 - RNA, 19 nt, Homo sapiens
  misc_RNA (1)...(19): siRNA sense strand
uggccaaggugauucagau

SEQ ID NO: 1107036 - RNA, 19 nt, Homo sapiens
  misc_RNA (1)...(19): siRNA sense strand
ggaguuccuuugagaugac

SEQ ID NO: 1107037 - RNA, 19 nt, Homo sapiens
  misc_RNA (1)...(19): siRNA sense strand
ugacgacagugccauuagg

SEQ ID NO: 1107038 - RNA, 19 nt, Homo sapiens
  misc_RNA (1)...(19): siRNA sense strand
aagucacacugcacauaaa

SEQ ID NO: 1107039 - RNA, 19 nt, Homo sapiens
  misc_RNA (1)...(19): siRNA sense strand
ggaagagcccucggcaucu

SEQ ID NO: 1107040 - RNA, 19 nt, Homo sapiens
  misc_RNA (1)...(19): siRNA sense strand
caagagcguggagguagaa

SEQ ID NO: 1107041 - RNA, 19 nt, Homo sapiens
  misc_RNA (1)...(19): siRNA sense strand
acaacgaaccgcuuacaca

SEQ ID NO: 1107042 - RNA, 19 nt, Homo sapiens
  misc_RNA (1)...(19): siRNA sense strand
caacagugugauuggaaga

SEQ ID NO: 1107043 - RNA, 19 nt, Homo sapiens
  misc_RNA (1)...(19): siRNA sense strand
cauagauguuaccgacuuc

SEQ ID NO: 1107044 - RNA, 19 nt, Homo sapiens
  misc_RNA (1)...(19): siRNA sense strand
agaagggaccauagauguu

SEQ ID NO: 1107045 - RNA, 19 nt, Homo sapiens
  misc_RNA (1)...(19): siRNA sense strand
cagcugaauccagagagua

SEQ ID NO: 1107046 - RNA, 19 nt, Homo sapiens
  misc_RNA (1)...(19): siRNA sense strand
ucauggcagucaaguccaa

SEQ ID NO: 1107047 - RNA, 19 nt, Homo sapiens
  misc_RNA (1)...(19): siRNA sense strand
aggaacaacgaaccgcuua

SEQ ID NO: 1107048 - RNA, 19 nt, Homo sapiens
  misc_RNA (1)...(19): siRNA sense strand
acaaauggaccgaagaaaa

SEQ ID NO: 1107049 - RNA, 19 nt, Homo sapiens
  misc_RNA (1)...(19): siRNA sense strand
agaagaagggaccauagau

SEQ ID NO: 1107050 - RNA, 19 nt, Homo sapiens
  misc_RNA (1)...(19): siRNA sense strand
ggcuauggcagcaagaaga

SEQ ID NO: 1107051 - RNA, 19 nt, Homo sapiens
  misc_RNA (1)...(19): siRNA sense strand
cgucauccuccacagcuaa

SEQ ID NO: 1107052 - RNA, 19 nt, Homo sapiens
  misc_RNA (1)...(19): siRNA sense strand
gcuauggcagcaagaagau

SEQ ID NO: 1107053 - RNA, 19 nt, Homo sapiens
  misc_RNA (1)...(19): siRNA sense strand
accaagcugucuacacuca

SEQ ID NO: 1107054 - RNA, 19 nt, Homo sapiens
  misc_RNA (1)...(19): siRNA sense strand
cagcuaagaaccucaugca

SEQ ID NO: 1107055 - RNA, 19 nt, Homo sapiens
  misc_RNA (1)...(19): siRNA sense strand
ucucaacagugugauugga

SEQ ID NO: 1107056 - RNA, 19 nt, Homo sapiens
  misc_RNA (1)...(19): siRNA sense strand
caaggugauucagauugca

SEQ ID NO: 1107057 - RNA, 19 nt, Homo sapiens
  misc_RNA (1)...(19): siRNA sense strand
gcccaagagcguggaggua

SEQ ID NO: 1107058 - RNA, 19 nt, Homo sapiens
  misc_RNA (1)...(19): siRNA sense strand
cacauaaaauggcccaaga

SEQ ID NO: 1107059 - RNA, 19 nt, Homo sapiens
  misc_RNA (1)...(19): siRNA sense strand
ggccaaggugauucagauu

SEQ ID NO: 1107060 - RNA, 19 nt, Homo sapiens
  misc_RNA (1)...(19): siRNA sense strand
aaucuucucaacaguguga

SEQ ID NO: 1107061 - RNA, 19 nt, Homo sapiens
  misc_RNA (1)...(19): siRNA sense strand
gaagggaccauagauguua

SEQ ID NO: 1107062 - RNA, 19 nt, Homo sapiens
  misc_RNA (1)...(19): siRNA sense strand
cuaagaaccucaugcaguu

SEQ ID NO: 1107063 - RNA, 19 nt, Homo sapiens
  misc_RNA (1)...(19): siRNA sense strand
gaaagucacacugcacaua

SEQ ID NO: 1107064 - RNA, 19 nt, Homo sapiens
  misc_RNA (1)...(19): siRNA sense strand
aagcagaggcugagaauaa

SEQ ID NO: 1107065 - RNA, 19 nt, Homo sapiens
  misc_RNA (1)...(19): siRNA sense strand
ggaggaagagcuagaagaa

SEQ ID NO: 1107066 - RNA, 19 nt, Homo sapiens
  misc_RNA (1)...(19): siRNA sense strand
gaagaagggaccauagaug

SEQ ID NO: 1107067 - RNA, 19 nt, Homo sapiens
  misc_RNA (1)...(19): siRNA sense strand
gaugacagaugacgacagu

SEQ ID NO: 1107068 - RNA, 19 nt, Homo sapiens
  misc_RNA (1)...(19): siRNA sense strand
gggccuaucccgcucuuua

SEQ ID NO: 1107069 - RNA, 19 nt, Homo sapiens
  misc_RNA (1)...(19): siRNA sense strand
ccauagauguuaccgacuu

SEQ ID NO: 1107070 - RNA, 19 nt, Homo sapiens
  misc_RNA (1)...(19): siRNA sense strand
ggacgaggaggaagagcua

SEQ ID NO: 1107071 - RNA, 19 nt, Homo sapiens
  misc_RNA (1)...(19): siRNA sense strand
ccuuugagaugacagauga

SEQ ID NO: 1107072 - RNA, 19 nt, Homo sapiens
  misc_RNA (1)...(19): siRNA sense strand
gcaaagcagaggcugagaa

SEQ ID NO: 1107073 - RNA, 19 nt, Homo sapiens
  misc_RNA (1)...(19): siRNA sense strand
gaagagcccucggcaucuc

SEQ ID NO: 1107074 - RNA, 19 nt, Homo sapiens
  misc_RNA (1)...(19): siRNA sense strand
gggaguuccuuugagauga

SEQ ID NO: 1107075 - RNA, 19 nt, Homo sapiens
  misc_RNA (1)...(19): siRNA sense strand
gaacaacgaaccgcuuaca

SEQ ID NO: 1107076 - RNA, 19 nt, Homo sapiens
  misc_RNA (1)...(19): siRNA sense strand
aaagucacacugcacauaa

SEQ ID NO: 1107077 - RNA, 19 nt, Homo sapiens
  misc_RNA (1)...(19): siRNA sense strand
gaugacgacagugccauua

SEQ ID NO: 1107078 - RNA, 19 nt, Homo sapiens
  misc_RNA (1)...(19): siRNA sense strand
agugcuagcugaucgcuuu

SEQ ID NO: 1107079 - RNA, 19 nt, Homo sapiens
  misc_RNA (1)...(19): siRNA sense strand
ccaagagcguggagguaga

SEQ ID NO: 1107080 - RNA, 19 nt, Homo sapiens
  misc_RNA (1)...(19): siRNA sense strand
caaagcagaggcugagaau

SEQ ID NO: 1107081 - RNA, 19 nt, Homo sapiens
  misc_RNA (1)...(19): siRNA sense strand
gcuagaagaagggaccaua

SEQ ID NO: 1107082 - RNA, 19 nt, Homo sapiens
  misc_RNA (1)...(19): siRNA sense strand
gcagcugaauccagagagu

SEQ ID NO: 1107083 - RNA, 19 nt, Homo sapiens
  misc_RNA (1)...(19): siRNA sense strand
uuagggcucugacccaguu

SEQ ID NO: 1107084 - RNA, 19 nt, Homo sapiens
  misc_RNA (1)...(19): siRNA sense strand
ccaaggugauucagauugc

SEQ ID NO: 1107085 - RNA, 19 nt, Homo sapiens
  misc_RNA (1)...(19): siRNA sense strand
acacaaauggaccgaagaa

SEQ ID NO: 1107086 - RNA, 19 nt, Homo sapiens
  misc_RNA (1)...(19): siRNA sense strand
uagaagaagggaccauaga

SEQ ID NO: 1107087 - RNA, 19 nt, Homo sapiens
  misc_RNA (1)...(19): siRNA sense strand
uagucuacgugcacacaaa

SEQ ID NO: 1107088 - RNA, 19 nt, Homo sapiens
  misc_RNA (1)...(19): siRNA sense strand
aagaagggaccauagaugu

SEQ ID NO: 1107089 - RNA, 19 nt, Homo sapiens
  misc_RNA (1)...(19): siRNA sense strand
gauguuaccgacuucuugu

SEQ ID NO: 1107090 - RNA, 19 nt, Homo sapiens
  misc_RNA (1)...(19): siRNA sense strand
gccaaggugauucagauug

SEQ ID NO: 1107091 - RNA, 19 nt, Homo sapiens
  misc_RNA (1)...(19): siRNA sense strand
uggccaaggugauucagau

SEQ ID NO: 1107092 - RNA, 19 nt, Homo sapiens
  misc_RNA (1)...(19): siRNA sense strand
ggaguuccuuugagaugac

SEQ ID NO: 1107093 - RNA, 19 nt, Homo sapiens
  misc_RNA (1)...(19): siRNA sense strand
ugacgacagugccauuagg

SEQ ID NO: 1107094 - RNA, 19 nt, Homo sapiens
  misc_RNA (1)...(19): siRNA sense strand
aagucacacugcacauaaa

SEQ ID NO: 1107095 - RNA, 19 nt, Homo sapiens
  misc_RNA (1)...(19): siRNA sense strand
ggaagagcccucggcaucu

SEQ ID NO: 1107096 - RNA, 19 nt, Homo sapiens
  misc_RNA (1)...(19): siRNA sense strand
caagagcguggagguagaa

SEQ ID NO: 1107097 - RNA, 19 nt, Homo sapiens
  misc_RNA (1)...(19): siRNA sense strand
acaacgaaccgcuuacaca

SEQ ID NO: 1107098 - RNA, 19 nt, Homo sapiens
  misc_RNA (1)...(19): siRNA sense strand
cauagauguuaccgacuuc

SEQ ID NO: 1107099 - RNA, 19 nt, Homo sapiens
  misc_RNA (1)...(19): siRNA sense strand
agaagggaccauagauguu

SEQ ID NO: 1107100 - RNA, 19 nt, Homo sapiens
  misc_RNA (1)...(19): siRNA sense strand
caacagugugauuggaaga

SEQ ID NO: 1107101 - RNA, 19 nt, Homo sapiens
  misc_RNA (1)...(19): siRNA sense strand
cagcugaauccagagagua

SEQ ID NO: 1107102 - RNA, 19 nt, Homo sapiens
  misc_RNA (1)...(19): siRNA sense strand
aggaacaacgaaccgcuua

SEQ ID NO: 1107103 - RNA, 19 nt, Homo sapiens
  misc_RNA (1)...(19): siRNA sense strand
acaaauggaccgaagaaaa

SEQ ID NO: 1107104 - RNA, 19 nt, Homo sapiens
  misc_RNA (1)...(19): siRNA sense strand
agaagaagggaccauagau

SEQ ID NO: 1107105 - RNA, 19 nt, Homo sapiens
  misc_RNA (1)...(19): siRNA sense strand
ggcuauggcagcaagaaga

SEQ ID NO: 1107106 - RNA, 19 nt, Homo sapiens
  misc_RNA (1)...(19): siRNA sense strand
cgucauccuccacagcuaa

SEQ ID NO: 1107107 - RNA, 19 nt, Homo sapiens
  misc_RNA (1)...(19): siRNA sense strand
gcuauggcagcaagaagau

SEQ ID NO: 1107108 - RNA, 19 nt, Homo sapiens
  misc_RNA (1)...(19): siRNA sense strand
ucucaacagugugauugga

SEQ ID NO: 1107109 - RNA, 19 nt, Homo sapiens
  misc_RNA (1)...(19): siRNA sense strand
accaagcugucuacacuca

SEQ ID NO: 1107110 - RNA, 19 nt, Homo sapiens
  misc_RNA (1)...(19): siRNA sense strand
cagcuaagaaccucaugca

SEQ ID NO: 1107111 - RNA, 19 nt, Homo sapiens
  misc_RNA (1)...(19): siRNA sense strand
caaggugauucagauugca

SEQ ID NO: 1107112 - RNA, 19 nt, Homo sapiens
  misc_RNA (1)...(19): siRNA sense strand
aaucuucucaacaguguga

SEQ ID NO: 1107113 - RNA, 19 nt, Homo sapiens
  misc_RNA (1)...(19): siRNA sense strand
cacauaaaauggcccaaga

SEQ ID NO: 1107114 - RNA, 19 nt, Homo sapiens
  misc_RNA (1)...(19): siRNA sense strand
ggccaaggugauucagauu

SEQ ID NO: 1107115 - RNA, 19 nt, Homo sapiens
  misc_RNA (1)...(19): siRNA sense strand
gcccaagagcguggaggua

SEQ ID NO: 1107116 - RNA, 19 nt, Homo sapiens
  misc_RNA (1)...(19): siRNA sense strand
caagacagcugacgacuga

SEQ ID NO: 1107117 - RNA, 19 nt, Homo sapiens
  misc_RNA (1)...(19): siRNA sense strand
gccgauggcugacguauuu

SEQ ID NO: 1107118 - RNA, 19 nt, Homo sapiens
  misc_RNA (1)...(19): siRNA sense strand
gaagggaccauagauguua

SEQ ID NO: 1107119 - RNA, 19 nt, Homo sapiens
  misc_RNA (1)...(19): siRNA sense strand
cuaagaaccucaugcaguu

SEQ ID NO: 1107120 - RNA, 19 nt, Homo sapiens
  misc_RNA (1)...(19): siRNA sense strand
gaaagucacacugcacaua

SEQ ID NO: 1107121 - RNA, 19 nt, Homo sapiens
  misc_RNA (1)...(19): siRNA sense strand
aagcagaggcugagaauaa

SEQ ID NO: 1107122 - RNA, 19 nt, Homo sapiens
  misc_RNA (1)...(19): siRNA sense strand
ggaggaagagcuagaagaa

SEQ ID NO: 1107123 - RNA, 19 nt, Homo sapiens
  misc_RNA (1)...(19): siRNA sense strand
gaagaagggaccauagaug

SEQ ID NO: 1107124 - RNA, 19 nt, Homo sapiens
  misc_RNA (1)...(19): siRNA sense strand
gaugacagaugacgacagu

SEQ ID NO: 1107125 - RNA, 19 nt, Homo sapiens
  misc_RNA (1)...(19): siRNA sense strand
gggccuaucccgcucuuua

SEQ ID NO: 1107126 - RNA, 19 nt, Homo sapiens
  misc_RNA (1)...(19): siRNA sense strand
ccauagauguuaccgacuu

SEQ ID NO: 1107127 - RNA, 19 nt, Homo sapiens
  misc_RNA (1)...(19): siRNA sense strand
ggacgaggaggaagagcua

SEQ ID NO: 1107128 - RNA, 19 nt, Homo sapiens
  misc_RNA (1)...(19): siRNA sense strand
ccuuugagaugacagauga

SEQ ID NO: 1107129 - RNA, 19 nt, Homo sapiens
  misc_RNA (1)...(19): siRNA sense strand
gcaaagcagaggcugagaa

SEQ ID NO: 1107130 - RNA, 19 nt, Homo sapiens
  misc_RNA (1)...(19): siRNA sense strand
gaagagcccucggcaucuc

SEQ ID NO: 1107131 - RNA, 19 nt, Homo sapiens
  misc_RNA (1)...(19): siRNA sense strand
gggaguuccuuugagauga

SEQ ID NO: 1107132 - RNA, 19 nt, Homo sapiens
  misc_RNA (1)...(19): siRNA sense strand
gaacaacgaaccgcuuaca

SEQ ID NO: 1107133 - RNA, 19 nt, Homo sapiens
  misc_RNA (1)...(19): siRNA sense strand
aaagucacacugcacauaa

SEQ ID NO: 1107134 - RNA, 19 nt, Homo sapiens
  misc_RNA (1)...(19): siRNA sense strand
gaugacgacagugccauua

SEQ ID NO: 1107135 - RNA, 19 nt, Homo sapiens
  misc_RNA (1)...(19): siRNA sense strand
agugcuagcugaucgcuuu

SEQ ID NO: 1107136 - RNA, 19 nt, Homo sapiens
  misc_RNA (1)...(19): siRNA sense strand
ccaagagcguggagguaga

SEQ ID NO: 1107137 - RNA, 19 nt, Homo sapiens
  misc_RNA (1)...(19): siRNA sense strand
caaagcagaggcugagaau

SEQ ID NO: 1107138 - RNA, 19 nt, Homo sapiens
  misc_RNA (1)...(19): siRNA sense strand
gcuagaagaagggaccaua

SEQ ID NO: 1107139 - RNA, 19 nt, Homo sapiens
  misc_RNA (1)...(19): siRNA sense strand
gcagcugaauccagagagu

SEQ ID NO: 1107140 - RNA, 19 nt, Homo sapiens
  misc_RNA (1)...(19): siRNA sense strand
uuagggcucugacccaguu

SEQ ID NO: 1107141 - RNA, 19 nt, Homo sapiens
  misc_RNA (1)...(19): siRNA sense strand
ccaaggugauucagauugc

SEQ ID NO: 1107142 - RNA, 19 nt, Homo sapiens
  misc_RNA (1)...(19): siRNA sense strand
acacaaauggaccgaagaa

SEQ ID NO: 1107143 - RNA, 19 nt, Homo sapiens
  misc_RNA (1)...(19): siRNA sense strand
uagaagaagggaccauaga

SEQ ID NO: 1107144 - RNA, 19 nt, Homo sapiens
  misc_RNA (1)...(19): siRNA sense strand
uagucuacgugcacacaaa

SEQ ID NO: 1107145 - RNA, 19 nt, Homo sapiens
  misc_RNA (1)...(19): siRNA sense strand
aagaagggaccauagaugu

SEQ ID NO: 1107146 - RNA, 19 nt, Homo sapiens
  misc_RNA (1)...(19): siRNA sense strand
gauguuaccgacuucuugu

SEQ ID NO: 1107147 - RNA, 19 nt, Homo sapiens
  misc_RNA (1)...(19): siRNA sense strand
gccaaggugauucagauug

SEQ ID NO: 1107148 - RNA, 19 nt, Homo sapiens
  misc_RNA (1)...(19): siRNA sense strand
uggccaaggugauucagau

SEQ ID NO: 1107149 - RNA, 19 nt, Homo sapiens
  misc_RNA (1)...(19): siRNA sense strand
ggaguuccuuugagaugac

SEQ ID NO: 1107150 - RNA, 19 nt, Homo sapiens
  misc_RNA (1)...(19): siRNA sense strand
ugacgacagugccauuagg

SEQ ID NO: 1107151 - RNA, 19 nt, Homo sapiens
  misc_RNA (1)...(19): siRNA sense strand
aagucacacugcacauaaa

SEQ ID NO: 1107152 - RNA, 19 nt, Homo sapiens
  misc_RNA (1)...(19): siRNA sense strand
ggaagagcccucggcaucu

SEQ ID NO: 1107153 - RNA, 19 nt, Homo sapiens
  misc_RNA (1)...(19): siRNA sense strand
caagagcguggagguagaa

SEQ ID NO: 1107154 - RNA, 19 nt, Homo sapiens
  misc_RNA (1)...(19): siRNA sense strand
acaacgaaccgcuuacaca

SEQ ID NO: 1107155 - RNA, 19 nt, Homo sapiens
  misc_RNA (1)...(19): siRNA sense strand
caacagugugauuggaaga

SEQ ID NO: 1107156 - RNA, 19 nt, Homo sapiens
  misc_RNA (1)...(19): siRNA sense strand
cauagauguuaccgacuuc

SEQ ID NO: 1107157 - RNA, 19 nt, Homo sapiens
  misc_RNA (1)...(19): siRNA sense strand
agaagggaccauagauguu

SEQ ID NO: 1107158 - RNA, 19 nt, Homo sapiens
  misc_RNA (1)...(19): siRNA sense strand
cagcugaauccagagagua

SEQ ID NO: 1107159 - RNA, 19 nt, Homo sapiens
  misc_RNA (1)...(19): siRNA sense strand
ucauggcagucaaguccaa

SEQ ID NO: 1107160 - RNA, 19 nt, Homo sapiens
  misc_RNA (1)...(19): siRNA sense strand
aggaacaacgaaccgcuua

SEQ ID NO: 1107161 - RNA, 19 nt, Homo sapiens
  misc_RNA (1)...(19): siRNA sense strand
acaaauggaccgaagaaaa

SEQ ID NO: 1107162 - RNA, 19 nt, Homo sapiens
  misc_RNA (1)...(19): siRNA sense strand
agaagaagggaccauagau

SEQ ID NO: 1107163 - RNA, 19 nt, Homo sapiens
  misc_RNA (1)...(19): siRNA sense strand
ggcuauggcagcaagaaga

SEQ ID NO: 1107164 - RNA, 19 nt, Homo sapiens
  misc_RNA (1)...(19): siRNA sense strand
cgucauccuccacagcuaa

SEQ ID NO: 1107165 - RNA, 19 nt, Homo sapiens
  misc_RNA (1)...(19): siRNA sense strand
gcuauggcagcaagaagau

SEQ ID NO: 1107166 - RNA, 19 nt, Homo sapiens
  misc_RNA (1)...(19): siRNA sense strand
accaagcugucuacacuca

SEQ ID NO: 1107167 - RNA, 19 nt, Homo sapiens
  misc_RNA (1)...(19): siRNA sense strand
cagcuaagaaccucaugca

SEQ ID NO: 1107168 - RNA, 19 nt, Homo sapiens
  misc_RNA (1)...(19): siRNA sense strand
ucucaacagugugauugga

SEQ ID NO: 1107169 - RNA, 19 nt, Homo sapiens
  misc_RNA (1)...(19): siRNA sense strand
caaggugauucagauugca

SEQ ID NO: 1107170 - RNA, 19 nt, Homo sapiens
  misc_RNA (1)...(19): siRNA sense strand
gcccaagagcguggaggua

SEQ ID NO: 1107171 - RNA, 19 nt, Homo sapiens
  misc_RNA (1)...(19): siRNA sense strand
cacauaaaauggcccaaga

SEQ ID NO: 1107172 - RNA, 19 nt, Homo sapiens
  misc_RNA (1)...(19): siRNA sense strand
ggccaaggugauucagauu

SEQ ID NO: 1107173 - RNA, 19 nt, Homo sapiens
  misc_RNA (1)...(19): siRNA sense strand
aaucuucucaacaguguga

SEQ ID NO: 1107174 - RNA, 19 nt, Homo sapiens
  misc_RNA (1)...(19): siRNA sense strand
caagacagcugacgacuga

SEQ ID NO: 1107175 - RNA, 19 nt, Homo sapiens
  misc_RNA (1)...(19): siRNA sense strand
gccgauggcugacguauuu

SEQ ID NO: 1107176 - RNA, 19 nt, Homo sapiens
  misc_RNA (1)...(19): siRNA sense strand
gaagggaccauagauguua

SEQ ID NO: 1107177 - RNA, 19 nt, Homo sapiens
  misc_RNA (1)...(19): siRNA sense strand
cuaagaaccucaugcaguu

SEQ ID NO: 1107178 - RNA, 19 nt, Homo sapiens
  misc_RNA (1)...(19): siRNA sense strand
gaaagucacacugcacaua

SEQ ID NO: 1107179 - RNA, 19 nt, Homo sapiens
  misc_RNA (1)...(19): siRNA sense strand
aagcagaggcugagaauaa

SEQ ID NO: 1107180 - RNA, 19 nt, Homo sapiens
  misc_RNA (1)...(19): siRNA sense strand
ggaggaagagcuagaagaa

SEQ ID NO: 1107181 - RNA, 19 nt, Homo sapiens
  misc_RNA (1)...(19): siRNA sense strand
gaagaagggaccauagaug

SEQ ID NO: 1107182 - RNA, 19 nt, Homo sapiens
  misc_RNA (1)...(19): siRNA sense strand
gaugacagaugacgacagu

SEQ ID NO: 1107183 - RNA, 19 nt, Homo sapiens
  misc_RNA (1)...(19): siRNA sense strand
gggccuaucccgcucuuua

SEQ ID NO: 1107184 - RNA, 19 nt, Homo sapiens
  misc_RNA (1)...(19): siRNA sense strand
ccauagauguuaccgacuu

SEQ ID NO: 1107185 - RNA, 19 nt, Homo sapiens
  misc_RNA (1)...(19): siRNA sense strand
ggacgaggaggaagagcua

SEQ ID NO: 1107186 - RNA, 19 nt, Homo sapiens
  misc_RNA (1)...(19): siRNA sense strand
ccuuugagaugacagauga

SEQ ID NO: 1107187 - RNA, 19 nt, Homo sapiens
  misc_RNA (1)...(19): siRNA sense strand
gcaaagcagaggcugagaa

SEQ ID NO: 1107188 - RNA, 19 nt, Homo sapiens
  misc_RNA (1)...(19): siRNA sense strand
gaagagcccucggcaucuc

SEQ ID NO: 1107189 - RNA, 19 nt, Homo sapiens
  misc_RNA (1)...(19): siRNA sense strand
gggaguuccuuugagauga

SEQ ID NO: 1107190 - RNA, 19 nt, Homo sapiens
  misc_RNA (1)...(19): siRNA sense strand
gaacaacgaaccgcuuaca

SEQ ID NO: 1107191 - RNA, 19 nt, Homo sapiens
  misc_RNA (1)...(19): siRNA sense strand
aaagucacacugcacauaa

SEQ ID NO: 1107192 - RNA, 19 nt, Homo sapiens
  misc_RNA (1)...(19): siRNA sense strand
gaugacgacagugccauua

SEQ ID NO: 1107193 - RNA, 19 nt, Homo sapiens
  misc_RNA (1)...(19): siRNA sense strand
agugcuagcugaucgcuuu

SEQ ID NO: 1107194 - RNA, 19 nt, Homo sapiens
  misc_RNA (1)...(19): siRNA sense strand
ccaagagcguggagguaga

SEQ ID NO: 1107195 - RNA, 19 nt, Homo sapiens
  misc_RNA (1)...(19): siRNA sense strand
caaagcagaggcugagaau

SEQ ID NO: 1107196 - RNA, 19 nt, Homo sapiens
  misc_RNA (1)...(19): siRNA sense strand
gcuagaagaagggaccaua

SEQ ID NO: 1107197 - RNA, 19 nt, Homo sapiens
  misc_RNA (1)...(19): siRNA sense strand
gcagcugaauccagagagu

SEQ ID NO: 1107198 - RNA, 19 nt, Homo sapiens
  misc_RNA (1)...(19): siRNA sense strand
uuagggcucugacccaguu

SEQ ID NO: 1107199 - RNA, 19 nt, Homo sapiens
  misc_RNA (1)...(19): siRNA sense strand
ccaaggugauucagauugc

SEQ ID NO: 1107200 - RNA, 19 nt, Homo sapiens
  misc_RNA (1)...(19): siRNA sense strand
acacaaauggaccgaagaa

SEQ ID NO: 1107201 - RNA, 19 nt, Homo sapiens
  misc_RNA (1)...(19): siRNA sense strand
uagaagaagggaccauaga

SEQ ID NO: 1107202 - RNA, 19 nt, Homo sapiens
  misc_RNA (1)...(19): siRNA sense strand
uagucuacgugcacacaaa

SEQ ID NO: 1107203 - RNA, 19 nt, Homo sapiens
  misc_RNA (1)...(19): siRNA sense strand
aagaagggaccauagaugu

SEQ ID NO: 1107204 - RNA, 19 nt, Homo sapiens
  misc_RNA (1)...(19): siRNA sense strand
gauguuaccgacuucuugu

SEQ ID NO: 1107205 - RNA, 19 nt, Homo sapiens
  misc_RNA (1)...(19): siRNA sense strand
gccaaggugauucagauug

SEQ ID NO: 1107206 - RNA, 19 nt, Homo sapiens
  misc_RNA (1)...(19): siRNA sense strand
uggccaaggugauucagau

SEQ ID NO: 1107207 - RNA, 19 nt, Homo sapiens
  misc_RNA (1)...(19): siRNA sense strand
ggaguuccuuugagaugac

SEQ ID NO: 1107208 - RNA, 19 nt, Homo sapiens
  misc_RNA (1)...(19): siRNA sense strand
ugacgacagugccauuagg

SEQ ID NO: 1107209 - RNA, 19 nt, Homo sapiens
  misc_RNA (1)...(19): siRNA sense strand
aagucacacugcacauaaa

SEQ ID NO: 1107210 - RNA, 19 nt, Homo sapiens
  misc_RNA (1)...(19): siRNA sense strand
ggaagagcccucggcaucu

SEQ ID NO: 1107211 - RNA, 19 nt, Homo sapiens
  misc_RNA (1)...(19): siRNA sense strand
caagagcguggagguagaa

SEQ ID NO: 1107212 - RNA, 19 nt, Homo sapiens
  misc_RNA (1)...(19): siRNA sense strand
acaacgaaccgcuuacaca

SEQ ID NO: 1107213 - RNA, 19 nt, Homo sapiens
  misc_RNA (1)...(19): siRNA sense strand
caacagugugauuggaaga

SEQ ID NO: 1107214 - RNA, 19 nt, Homo sapiens
  misc_RNA (1)...(19): siRNA sense strand
cauagauguuaccgacuuc

SEQ ID NO: 1107215 - RNA, 19 nt, Homo sapiens
  misc_RNA (1)...(19): siRNA sense strand
agaagggaccauagauguu

SEQ ID NO: 1107216 - RNA, 19 nt, Homo sapiens
  misc_RNA (1)...(19): siRNA sense strand
cagcugaauccagagagua

SEQ ID NO: 1107217 - RNA, 19 nt, Homo sapiens
  misc_RNA (1)...(19): siRNA sense strand
ucauggcagucaaguccaa

SEQ ID NO: 1107218 - RNA, 19 nt, Homo sapiens
  misc_RNA (1)...(19): siRNA sense strand
aggaacaacgaaccgcuua

SEQ ID NO: 1107219 - RNA, 19 nt, Homo sapiens
  misc_RNA (1)...(19): siRNA sense strand
acaaauggaccgaagaaaa

SEQ ID NO: 1107220 - RNA, 19 nt, Homo sapiens
  misc_RNA (1)...(19): siRNA sense strand
agaagaagggaccauagau

SEQ ID NO: 1107221 - RNA, 19 nt, Homo sapiens
  misc_RNA (1)...(19): siRNA sense strand
ggcuauggcagcaagaaga

SEQ ID NO: 1107222 - RNA, 19 nt, Homo sapiens
  misc_RNA (1)...(19): siRNA sense strand
cgucauccuccacagcuaa

SEQ ID NO: 1107223 - RNA, 19 nt, Homo sapiens
  misc_RNA (1)...(19): siRNA sense strand
gcuauggcagcaagaagau

SEQ ID NO: 1107224 - RNA, 19 nt, Homo sapiens
  misc_RNA (1)...(19): siRNA sense strand
accaagcugucuacacuca

SEQ ID NO: 1107225 - RNA, 19 nt, Homo sapiens
  misc_RNA (1)...(19): siRNA sense strand
cagcuaagaaccucaugca

SEQ ID NO: 1107226 - RNA, 19 nt, Homo sapiens
  misc_RNA (1)...(19): siRNA sense strand
ucucaacagugugauugga

SEQ ID NO: 1107227 - RNA, 19 nt, Homo sapiens
  misc_RNA (1)...(19): siRNA sense strand
caaggugauucagauugca

SEQ ID NO: 1107228 - RNA, 19 nt, Homo sapiens
  misc_RNA (1)...(19): siRNA sense strand
gcccaagagcguggaggua

SEQ ID NO: 1107229 - RNA, 19 nt, Homo sapiens
  misc_RNA (1)...(19): siRNA sense strand
cacauaaaauggcccaaga

SEQ ID NO: 1107230 - RNA, 19 nt, Homo sapiens
  misc_RNA (1)...(19): siRNA sense strand
ggccaaggugauucagauu

SEQ ID NO: 1107231 - RNA, 19 nt, Homo sapiens
  misc_RNA (1)...(19): siRNA sense strand
aaucuucucaacaguguga

SEQ ID NO: 1107232 - RNA, 19 nt, Homo sapiens
  misc_RNA (1)...(19): siRNA sense strand
gaagggaccauagauguua

SEQ ID NO: 1107233 - RNA, 19 nt, Homo sapiens
  misc_RNA (1)...(19): siRNA sense strand
cuaagaaccucaugcaguu

SEQ ID NO: 1107234 - RNA, 19 nt, Homo sapiens
  misc_RNA (1)...(19): siRNA sense strand
gaaagucacacugcacaua

SEQ ID NO: 1107235 - RNA, 19 nt, Homo sapiens
  misc_RNA (1)...(19): siRNA sense strand
aagcagaggcugagaauaa

SEQ ID NO: 1107236 - RNA, 19 nt, Homo sapiens
  misc_RNA (1)...(19): siRNA sense strand
ggaggaagagcuagaagaa

SEQ ID NO: 1107237 - RNA, 19 nt, Homo sapiens
  misc_RNA (1)...(19): siRNA sense strand
gaagaagggaccauagaug

SEQ ID NO: 1107238 - RNA, 19 nt, Homo sapiens
  misc_RNA (1)...(19): siRNA sense strand
gaugacagaugacgacagu

SEQ ID NO: 1107239 - RNA, 19 nt, Homo sapiens
  misc_RNA (1)...(19): siRNA sense strand
gggccuaucccgcucuuua

SEQ ID NO: 1107240 - RNA, 19 nt, Homo sapiens
  misc_RNA (1)...(19): siRNA sense strand
ccauagauguuaccgacuu

SEQ ID NO: 1107241 - RNA, 19 nt, Homo sapiens
  misc_RNA (1)...(19): siRNA sense strand
ggacgaggaggaagagcua

SEQ ID NO: 1107242 - RNA, 19 nt, Homo sapiens
  misc_RNA (1)...(19): siRNA sense strand
ccuuugagaugacagauga

SEQ ID NO: 1107243 - RNA, 19 nt, Homo sapiens
  misc_RNA (1)...(19): siRNA sense strand
gcaaagcagaggcugagaa

SEQ ID NO: 1107244 - RNA, 19 nt, Homo sapiens
  misc_RNA (1)...(19): siRNA sense strand
gaagagcccucggcaucuc

SEQ ID NO: 1107245 - RNA, 19 nt, Homo sapiens
  misc_RNA (1)...(19): siRNA sense strand
gggaguuccuuugagauga

SEQ ID NO: 1107246 - RNA, 19 nt, Homo sapiens
  misc_RNA (1)...(19): siRNA sense strand
gaacaacgaaccgcuuaca

SEQ ID NO: 1107247 - RNA, 19 nt, Homo sapiens
  misc_RNA (1)...(19): siRNA sense strand
aaagucacacugcacauaa

SEQ ID NO: 1107248 - RNA, 19 nt, Homo sapiens
  misc_RNA (1)...(19): siRNA sense strand
gaugacgacagugccauua

SEQ ID NO: 1107249 - RNA, 19 nt, Homo sapiens
  misc_RNA (1)...(19): siRNA sense strand
agugcuagcugaucgcuuu

SEQ ID NO: 1107250 - RNA, 19 nt, Homo sapiens
  misc_RNA (1)...(19): siRNA sense strand
ccaagagcguggagguaga

SEQ ID NO: 1107251 - RNA, 19 nt, Homo sapiens
  misc_RNA (1)...(19): siRNA sense strand
caaagcagaggcugagaau

SEQ ID NO: 1107252 - RNA, 19 nt, Homo sapiens
  misc_RNA (1)...(19): siRNA sense strand
gcuagaagaagggaccaua

SEQ ID NO: 1107253 - RNA, 19 nt, Homo sapiens
  misc_RNA (1)...(19): siRNA sense strand
gcagcugaauccagagagu

SEQ ID NO: 1107254 - RNA, 19 nt, Homo sapiens
  misc_RNA (1)...(19): siRNA sense strand
uuagggcucugacccaguu

SEQ ID NO: 1107255 - RNA, 19 nt, Homo sapiens
  misc_RNA (1)...(19): siRNA sense strand
ccaaggugauucagauugc

SEQ ID NO: 1107256 - RNA, 19 nt, Homo sapiens
  misc_RNA (1)...(19): siRNA sense strand
acacaaauggaccgaagaa

SEQ ID NO: 1107257 - RNA, 19 nt, Homo sapiens
  misc_RNA (1)...(19): siRNA sense strand
uagaagaagggaccauaga

SEQ ID NO: 1107258 - RNA, 19 nt, Homo sapiens
  misc_RNA (1)...(19): siRNA sense strand
uagucuacgugcacacaaa

SEQ ID NO: 1107259 - RNA, 19 nt, Homo sapiens
  misc_RNA (1)...(19): siRNA sense strand
aagaagggaccauagaugu

SEQ ID NO: 1107260 - RNA, 19 nt, Homo sapiens
  misc_RNA (1)...(19): siRNA sense strand
gauguuaccgacuucuugu

SEQ ID NO: 1107261 - RNA, 19 nt, Homo sapiens
  misc_RNA (1)...(19): siRNA sense strand
gccaaggugauucagauug

SEQ ID NO: 1107262 - RNA, 19 nt, Homo sapiens
  misc_RNA (1)...(19): siRNA sense strand
uggccaaggugauucagau

SEQ ID NO: 1107263 - RNA, 19 nt, Homo sapiens
  misc_RNA (1)...(19): siRNA sense strand
ggaguuccuuugagaugac

SEQ ID NO: 1107264 - RNA, 19 nt, Homo sapiens
  misc_RNA (1)...(19): siRNA sense strand
ugacgacagugccauuagg

SEQ ID NO: 1107265 - RNA, 19 nt, Homo sapiens
  misc_RNA (1)...(19): siRNA sense strand
aagucacacugcacauaaa

SEQ ID NO: 1107266 - RNA, 19 nt, Homo sapiens
  misc_RNA (1)...(19): siRNA sense strand
ggaagagcccucggcaucu

SEQ ID NO: 1107267 - RNA, 19 nt, Homo sapiens
  misc_RNA (1)...(19): siRNA sense strand
caagagcguggagguagaa

SEQ ID NO: 1107268 - RNA, 19 nt, Homo sapiens
  misc_RNA (1)...(19): siRNA sense strand
acaacgaaccgcuuacaca

SEQ ID NO: 1107269 - RNA, 19 nt, Homo sapiens
  misc_RNA (1)...(19): siRNA sense strand
cauagauguuaccgacuuc

SEQ ID NO: 1107270 - RNA, 19 nt, Homo sapiens
  misc_RNA (1)...(19): siRNA sense strand
agaagggaccauagauguu

SEQ ID NO: 1107271 - RNA, 19 nt, Homo sapiens
  misc_RNA (1)...(19): siRNA sense strand
caacagugugauuggaaga

SEQ ID NO: 1107272 - RNA, 19 nt, Homo sapiens
  misc_RNA (1)...(19): siRNA sense strand
cagcugaauccagagagua

SEQ ID NO: 1107273 - RNA, 19 nt, Homo sapiens
  misc_RNA (1)...(19): siRNA sense strand
aggaacaacgaaccgcuua

SEQ ID NO: 1107274 - RNA, 19 nt, Homo sapiens
  misc_RNA (1)...(19): siRNA sense strand
acaaauggaccgaagaaaa

SEQ ID NO: 1107275 - RNA, 19 nt, Homo sapiens
  misc_RNA (1)...(19): siRNA sense strand
agaagaagggaccauagau

SEQ ID NO: 1107276 - RNA, 19 nt, Homo sapiens
  misc_RNA (1)...(19): siRNA sense strand
ggcuauggcagcaagaaga

SEQ ID NO: 1107277 - RNA, 19 nt, Homo sapiens
  misc_RNA (1)...(19): siRNA sense strand
cgucauccuccacagcuaa

SEQ ID NO: 1107278 - RNA, 19 nt, Homo sapiens
  misc_RNA (1)...(19): siRNA sense strand
gcuauggcagcaagaagau

SEQ ID NO: 1107279 - RNA, 19 nt, Homo sapiens
  misc_RNA (1)...(19): siRNA sense strand
ucucaacagugugauugga

SEQ ID NO: 1107280 - RNA, 19 nt, Homo sapiens
  misc_RNA (1)...(19): siRNA sense strand
accaagcugucuacacuca

SEQ ID NO: 1107281 - RNA, 19 nt, Homo sapiens
  misc_RNA (1)...(19): siRNA sense strand
cagcuaagaaccucaugca

SEQ ID NO: 1107282 - RNA, 19 nt, Homo sapiens
  misc_RNA (1)...(19): siRNA sense strand
caaggugauucagauugca

SEQ ID NO: 1107283 - RNA, 19 nt, Homo sapiens
  misc_RNA (1)...(19): siRNA sense strand
aaucuucucaacaguguga

SEQ ID NO: 1107284 - RNA, 19 nt, Homo sapiens
  misc_RNA (1)...(19): siRNA sense strand
cacauaaaauggcccaaga

SEQ ID NO: 1107285 - RNA, 19 nt, Homo sapiens
  misc_RNA (1)...(19): siRNA sense strand
ggccaaggugauucagauu

SEQ ID NO: 1107286 - RNA, 19 nt, Homo sapiens
  misc_RNA (1)...(19): siRNA sense strand
gcccaagagcguggaggua

SEQ ID NO: 1107287 - RNA, 19 nt, Homo sapiens
  misc_RNA (1)...(19): siRNA sense strand
caagacagcugacgacuga

SEQ ID NO: 1107288 - RNA, 19 nt, Homo sapiens
  misc_RNA (1)...(19): siRNA sense strand
gccgauggcugacguauuu

SEQ ID NO: 1107289 - RNA, 19 nt, Homo sapiens
  misc_RNA (1)...(19): siRNA sense strand
gaagggaccauagauguua

SEQ ID NO: 1107290 - RNA, 19 nt, Homo sapiens
  misc_RNA (1)...(19): siRNA sense strand
cuaagaaccucaugcaguu

SEQ ID NO: 1107291 - RNA, 19 nt, Homo sapiens
  misc_RNA (1)...(19): siRNA sense strand
gaaagucacacugcacaua

SEQ ID NO: 1107292 - RNA, 19 nt, Homo sapiens
  misc_RNA (1)...(19): siRNA sense strand
aagcagaggcugagaauaa

SEQ ID NO: 1107293 - RNA, 19 nt, Homo sapiens
  misc_RNA (1)...(19): siRNA sense strand
ggaggaagagcuagaagaa

SEQ ID NO: 1107294 - RNA, 19 nt, Homo sapiens
  misc_RNA (1)...(19): siRNA sense strand
gaagaagggaccauagaug

SEQ ID NO: 1107295 - RNA, 19 nt, Homo sapiens
  misc_RNA (1)...(19): siRNA sense strand
gaugacagaugacgacagu

SEQ ID NO: 1107296 - RNA, 19 nt, Homo sapiens
  misc_RNA (1)...(19): siRNA sense strand
gggccuaucccgcucuuua

SEQ ID NO: 1107297 - RNA, 19 nt, Homo sapiens
  misc_RNA (1)...(19): siRNA sense strand
ccauagauguuaccgacuu

SEQ ID NO: 1107298 - RNA, 19 nt, Homo sapiens
  misc_RNA (1)...(19): siRNA sense strand
ggacgaggaggaagagcua

SEQ ID NO: 1107299 - RNA, 19 nt, Homo sapiens
  misc_RNA (1)...(19): siRNA sense strand
ccuuugagaugacagauga

SEQ ID NO: 1107300 - RNA, 19 nt, Homo sapiens
  misc_RNA (1)...(19): siRNA sense strand
gcaaagcagaggcugagaa

SEQ ID NO: 1107301 - RNA, 19 nt, Homo sapiens
  misc_RNA (1)...(19): siRNA sense strand
gaagagcccucggcaucuc

SEQ ID NO: 1107302 - RNA, 19 nt, Homo sapiens
  misc_RNA (1)...(19): siRNA sense strand
gggaguuccuuugagauga

SEQ ID NO: 1107303 - RNA, 19 nt, Homo sapiens
  misc_RNA (1)...(19): siRNA sense strand
gaacaacgaaccgcuuaca

SEQ ID NO: 1107304 - RNA, 19 nt, Homo sapiens
  misc_RNA (1)...(19): siRNA sense strand
aaagucacacugcacauaa

SEQ ID NO: 1107305 - RNA, 19 nt, Homo sapiens
  misc_RNA (1)...(19): siRNA sense strand
gaugacgacagugccauua

SEQ ID NO: 1107306 - RNA, 19 nt, Homo sapiens
  misc_RNA (1)...(19): siRNA sense strand
agugcuagcugaucgcuuu

SEQ ID NO: 1107307 - RNA, 19 nt, Homo sapiens
  misc_RNA (1)...(19): siRNA sense strand
ccaagagcguggagguaga

SEQ ID NO: 1107308 - RNA, 19 nt, Homo sapiens
  misc_RNA (1)...(19): siRNA sense strand
caaagcagaggcugagaau

SEQ ID NO: 1107309 - RNA, 19 nt, Homo sapiens
  misc_RNA (1)...(19): siRNA sense strand
gcuagaagaagggaccaua

SEQ ID NO: 1107310 - RNA, 19 nt, Homo sapiens
  misc_RNA (1)...(19): siRNA sense strand
gcagcugaauccagagagu

SEQ ID NO: 1107311 - RNA, 19 nt, Homo sapiens
  misc_RNA (1)...(19): siRNA sense strand
uuagggcucugacccaguu

SEQ ID NO: 1107312 - RNA, 19 nt, Homo sapiens
  misc_RNA (1)...(19): siRNA sense strand
ccaaggugauucagauugc

SEQ ID NO: 1107313 - RNA, 19 nt, Homo sapiens
  misc_RNA (1)...(19): siRNA sense strand
acacaaauggaccgaagaa

SEQ ID NO: 1107314 - RNA, 19 nt, Homo sapiens
  misc_RNA (1)...(19): siRNA sense strand
uagaagaagggaccauaga

SEQ ID NO: 1107315 - RNA, 19 nt, Homo sapiens
  misc_RNA (1)...(19): siRNA sense strand
uagucuacgugcacacaaa

SEQ ID NO: 1107316 - RNA, 19 nt, Homo sapiens
  misc_RNA (1)...(19): siRNA sense strand
aagaagggaccauagaugu

SEQ ID NO: 1107317 - RNA, 19 nt, Homo sapiens
  misc_RNA (1)...(19): siRNA sense strand
gauguuaccgacuucuugu

SEQ ID NO: 1107318 - RNA, 19 nt, Homo sapiens
  misc_RNA (1)...(19): siRNA sense strand
gccaaggugauucagauug

SEQ ID NO: 1107319 - RNA, 19 nt, Homo sapiens
  misc_RNA (1)...(19): siRNA sense strand
uggccaaggugauucagau

SEQ ID NO: 1107320 - RNA, 19 nt, Homo sapiens
  misc_RNA (1)...(19): siRNA sense strand
ggaguuccuuugagaugac

SEQ ID NO: 1107321 - RNA, 19 nt, Homo sapiens
  misc_RNA (1)...(19): siRNA sense strand
ugacgacagugccauuagg

SEQ ID NO: 1107322 - RNA, 19 nt, Homo sapiens
  misc_RNA (1)...(19): siRNA sense strand
aagucacacugcacauaaa

SEQ ID NO: 1107323 - RNA, 19 nt, Homo sapiens
  misc_RNA (1)...(19): siRNA sense strand
ggaagagcccucggcaucu

SEQ ID NO: 1107324 - RNA, 19 nt, Homo sapiens
  misc_RNA (1)...(19): siRNA sense strand
caagagcguggagguagaa

SEQ ID NO: 1107325 - RNA, 19 nt, Homo sapiens
  misc_RNA (1)...(19): siRNA sense strand
acaacgaaccgcuuacaca

SEQ ID NO: 1107326 - RNA, 19 nt, Homo sapiens
  misc_RNA (1)...(19): siRNA sense strand
caacagugugauuggaaga

SEQ ID NO: 1107327 - RNA, 19 nt, Homo sapiens
  misc_RNA (1)...(19): siRNA sense strand
cauagauguuaccgacuuc

SEQ ID NO: 1107328 - RNA, 19 nt, Homo sapiens
  misc_RNA (1)...(19): siRNA sense strand
agaagggaccauagauguu

SEQ ID NO: 1107329 - RNA, 19 nt, Homo sapiens
  misc_RNA (1)...(19): siRNA sense strand
cagcugaauccagagagua

SEQ ID NO: 1107330 - RNA, 19 nt, Homo sapiens
  misc_RNA (1)...(19): siRNA sense strand
ucauggcagucaaguccaa

SEQ ID NO: 1107331 - RNA, 19 nt, Homo sapiens
  misc_RNA (1)...(19): siRNA sense strand
aggaacaacgaaccgcuua

SEQ ID NO: 1107332 - RNA, 19 nt, Homo sapiens
  misc_RNA (1)...(19): siRNA sense strand
acaaauggaccgaagaaaa

SEQ ID NO: 1107333 - RNA, 19 nt, Homo sapiens
  misc_RNA (1)...(19): siRNA sense strand
agaagaagggaccauagau

SEQ ID NO: 1107334 - RNA, 19 nt, Homo sapiens
  misc_RNA (1)...(19): siRNA sense strand
ggcuauggcagcaagaaga

SEQ ID NO: 1107335 - RNA, 19 nt, Homo sapiens
  misc_RNA (1)...(19): siRNA sense strand
cgucauccuccacagcuaa

SEQ ID NO: 1107336 - RNA, 19 nt, Homo sapiens
  misc_RNA (1)...(19): siRNA sense strand
gcuauggcagcaagaagau

SEQ ID NO: 1107337 - RNA, 19 nt, Homo sapiens
  misc_RNA (1)...(19): siRNA sense strand
accaagcugucuacacuca

SEQ ID NO: 1107338 - RNA, 19 nt, Homo sapiens
  misc_RNA (1)...(19): siRNA sense strand
cagcuaagaaccucaugca

SEQ ID NO: 1107339 - RNA, 19 nt, Homo sapiens
  misc_RNA (1)...(19): siRNA sense strand
ucucaacagugugauugga

SEQ ID NO: 1107340 - RNA, 19 nt, Homo sapiens
  misc_RNA (1)...(19): siRNA sense strand
caaggugauucagauugca

SEQ ID NO: 1107341 - RNA, 19 nt, Homo sapiens
  misc_RNA (1)...(19): siRNA sense strand
gcccaagagcguggaggua

SEQ ID NO: 1107342 - RNA, 19 nt, Homo sapiens
  misc_RNA (1)...(19): siRNA sense strand
cacauaaaauggcccaaga

SEQ ID NO: 1107343 - RNA, 19 nt, Homo sapiens
  misc_RNA (1)...(19): siRNA sense strand
ggccaaggugauucagauu

SEQ ID NO: 1107344 - RNA, 19 nt, Homo sapiens
  misc_RNA (1)...(19): siRNA sense strand
aaucuucucaacaguguga

SEQ ID NO: 1107345 - RNA, 19 nt, Homo sapiens
  misc_RNA (1)...(19): siRNA sense strand
guacaaagguggugaagag

SEQ ID NO: 1107346 - RNA, 19 nt, Homo sapiens
  misc_RNA (1)...(19): siRNA sense strand
ccagaaggcucuauacaca

SEQ ID NO: 1107347 - RNA, 19 nt, Homo sapiens
  misc_RNA (1)...(19): siRNA sense strand
ggcaagauacuacauaauu

SEQ ID NO: 1107348 - RNA, 19 nt, Homo sapiens
  misc_RNA (1)...(19): siRNA sense strand
gcaccaagguccccauuuu

SEQ ID NO: 1107349 - RNA, 19 nt, Homo sapiens
  misc_RNA (1)...(19): siRNA sense strand
caguacagcucaccaagga

SEQ ID NO: 1107350 - RNA, 19 nt, Homo sapiens
  misc_RNA (1)...(19): siRNA sense strand
gaacauugaggaacuguac

SEQ ID NO: 1107351 - RNA, 19 nt, Homo sapiens
  misc_RNA (1)...(19): siRNA sense strand
gagauccuguugcagacaa

SEQ ID NO: 1107352 - RNA, 19 nt, Homo sapiens
  misc_RNA (1)...(19): siRNA sense strand
ggugggagauccuguugca

SEQ ID NO: 1107353 - RNA, 19 nt, Homo sapiens
  misc_RNA (1)...(19): siRNA sense strand
cugcauacuuccuaacaga

SEQ ID NO: 1107354 - RNA, 19 nt, Homo sapiens
  misc_RNA (1)...(19): siRNA sense strand
uuaaauaugcagaccagaa

SEQ ID NO: 1107355 - RNA, 19 nt, Homo sapiens
  misc_RNA (1)...(19): siRNA sense strand
uggcauguguggagacaga

SEQ ID NO: 1107356 - RNA, 19 nt, Homo sapiens
  misc_RNA (1)...(19): siRNA sense strand
agaaggcucuauacacaag

SEQ ID NO: 1107357 - RNA, 19 nt, Homo sapiens
  misc_RNA (1)...(19): siRNA sense strand
uugaggaacuguacaaagg

SEQ ID NO: 1107358 - RNA, 19 nt, Homo sapiens
  misc_RNA (1)...(19): siRNA sense strand
ccacacgcuucaccuucuu

SEQ ID NO: 1107359 - RNA, 19 nt, Homo sapiens
  misc_RNA (1)...(19): siRNA sense strand
gaccagaaggcucuauaca

SEQ ID NO: 1107360 - RNA, 19 nt, Homo sapiens
  misc_RNA (1)...(19): siRNA sense strand
cauggcaagauacuacaua

SEQ ID NO: 1107361 - RNA, 19 nt, Homo sapiens
  misc_RNA (1)...(19): siRNA sense strand
uaaauaugcagaccagaag

SEQ ID NO: 1107362 - RNA, 19 nt, Homo sapiens
  misc_RNA (1)...(19): siRNA sense strand
ccucagcccguaccaaguu

SEQ ID NO: 1107363 - RNA, 19 nt, Homo sapiens
  misc_RNA (1)...(19): siRNA sense strand
cccuacagcuggaggaugu

SEQ ID NO: 1107364 - RNA, 19 nt, Homo sapiens
  misc_RNA (1)...(19): siRNA sense strand
auggcaagauacuacauaa

SEQ ID NO: 1107365 - RNA, 19 nt, Homo sapiens
  misc_RNA (1)...(19): siRNA sense strand
gccacacgcuucaccuucu

SEQ ID NO: 1107366 - RNA, 19 nt, Homo sapiens
  misc_RNA (1)...(19): siRNA sense strand
cagaccagaaggcucuaua

SEQ ID NO: 1107367 - RNA, 19 nt, Homo sapiens
  misc_RNA (1)...(19): siRNA sense strand
cagaaggcucuauacacaa

SEQ ID NO: 1107368 - RNA, 19 nt, Homo sapiens
  misc_RNA (1)...(19): siRNA sense strand
agagaagaucugcauacuu

SEQ ID NO: 1107369 - RNA, 19 nt, Homo sapiens
  misc_RNA (1)...(19): siRNA sense strand
guacaaagguggugaagag

SEQ ID NO: 1107370 - RNA, 19 nt, Homo sapiens
  misc_RNA (1)...(19): siRNA sense strand
ccagaaggcucuauacaca

SEQ ID NO: 1107371 - RNA, 19 nt, Homo sapiens
  misc_RNA (1)...(19): siRNA sense strand
ggcaagauacuacauaauu

SEQ ID NO: 1107372 - RNA, 19 nt, Homo sapiens
  misc_RNA (1)...(19): siRNA sense strand
gcaccaagguccccauuuu

SEQ ID NO: 1107373 - RNA, 19 nt, Homo sapiens
  misc_RNA (1)...(19): siRNA sense strand
caguacagcucaccaagga

SEQ ID NO: 1107374 - RNA, 19 nt, Homo sapiens
  misc_RNA (1)...(19): siRNA sense strand
gaacauugaggaacuguac

SEQ ID NO: 1107375 - RNA, 19 nt, Homo sapiens
  misc_RNA (1)...(19): siRNA sense strand
gagauccuguugcagacaa

SEQ ID NO: 1107376 - RNA, 19 nt, Homo sapiens
  misc_RNA (1)...(19): siRNA sense strand
ggugggagauccuguugca

SEQ ID NO: 1107377 - RNA, 19 nt, Homo sapiens
  misc_RNA (1)...(19): siRNA sense strand
cugcauacuuccuaacaga

SEQ ID NO: 1107378 - RNA, 19 nt, Homo sapiens
  misc_RNA (1)...(19): siRNA sense strand
uuaaauaugcagaccagaa

SEQ ID NO: 1107379 - RNA, 19 nt, Homo sapiens
  misc_RNA (1)...(19): siRNA sense strand
uggcauguguggagacaga

SEQ ID NO: 1107380 - RNA, 19 nt, Homo sapiens
  misc_RNA (1)...(19): siRNA sense strand
agaaggcucuauacacaag

SEQ ID NO: 1107381 - RNA, 19 nt, Homo sapiens
  misc_RNA (1)...(19): siRNA sense strand
uugaggaacuguacaaagg

SEQ ID NO: 1107382 - RNA, 19 nt, Homo sapiens
  misc_RNA (1)...(19): siRNA sense strand
ccacacgcuucaccuucuu

SEQ ID NO: 1107383 - RNA, 19 nt, Homo sapiens
  misc_RNA (1)...(19): siRNA sense strand
gaccagaaggcucuauaca

SEQ ID NO: 1107384 - RNA, 19 nt, Homo sapiens
  misc_RNA (1)...(19): siRNA sense strand
cauggcaagauacuacaua

SEQ ID NO: 1107385 - RNA, 19 nt, Homo sapiens
  misc_RNA (1)...(19): siRNA sense strand
uaaauaugcagaccagaag

SEQ ID NO: 1107386 - RNA, 19 nt, Homo sapiens
  misc_RNA (1)...(19): siRNA sense strand
ccucagcccguaccaaguu

SEQ ID NO: 1107387 - RNA, 19 nt, Homo sapiens
  misc_RNA (1)...(19): siRNA sense strand
cccuacagcuggaggaugu

SEQ ID NO: 1107388 - RNA, 19 nt, Homo sapiens
  misc_RNA (1)...(19): siRNA sense strand
auggcaagauacuacauaa

SEQ ID NO: 1107389 - RNA, 19 nt, Homo sapiens
  misc_RNA (1)...(19): siRNA sense strand
gccacacgcuucaccuucu

SEQ ID NO: 1107390 - RNA, 19 nt, Homo sapiens
  misc_RNA (1)...(19): siRNA sense strand
cagaccagaaggcucuaua

SEQ ID NO: 1107391 - RNA, 19 nt, Homo sapiens
  misc_RNA (1)...(19): siRNA sense strand
cagaaggcucuauacacaa

SEQ ID NO: 1107392 - RNA, 19 nt, Homo sapiens
  misc_RNA (1)...(19): siRNA sense strand
agagaagaucugcauacuu

SEQ ID NO: 1107393 - RNA, 19 nt, Homo sapiens
  misc_RNA (1)...(19): siRNA sense strand
gaagagauaugaggaaauu

SEQ ID NO: 1107394 - RNA, 19 nt, Homo sapiens
  misc_RNA (1)...(19): siRNA sense strand
gaaggaggcugcugagaug

SEQ ID NO: 1107395 - RNA, 19 nt, Homo sapiens
  misc_RNA (1)...(19): siRNA sense strand
gauggaaagucacccguaa

SEQ ID NO: 1107396 - RNA, 19 nt, Homo sapiens
  misc_RNA (1)...(19): siRNA sense strand
gaagauggcccuaaauucu

SEQ ID NO: 1107397 - RNA, 19 nt, Homo sapiens
  misc_RNA (1)...(19): siRNA sense strand
acacagagacuuuaucaaa

SEQ ID NO: 1107398 - RNA, 19 nt, Homo sapiens
  misc_RNA (1)...(19): siRNA sense strand
ucaaagcaguggacaagaa

SEQ ID NO: 1107399 - RNA, 19 nt, Homo sapiens
  misc_RNA (1)...(19): siRNA sense strand
gcugguaucuccaagaaug

SEQ ID NO: 1107400 - RNA, 19 nt, Homo sapiens
  misc_RNA (1)...(19): siRNA sense strand
ggucuuggauaaacugaaa

SEQ ID NO: 1107401 - RNA, 19 nt, Homo sapiens
  misc_RNA (1)...(19): siRNA sense strand
gaaugugucugucaaggau

SEQ ID NO: 1107402 - RNA, 19 nt, Homo sapiens
  misc_RNA (1)...(19): siRNA sense strand
ugacugugcuguccugauu

SEQ ID NO: 1107403 - RNA, 19 nt, Homo sapiens
  misc_RNA (1)...(19): siRNA sense strand
gaaagucacccguaaggau

SEQ ID NO: 1107404 - RNA, 19 nt, Homo sapiens
  misc_RNA (1)...(19): siRNA sense strand
gcuggaagauggcccuaaa

SEQ ID NO: 1107405 - RNA, 19 nt, Homo sapiens
  misc_RNA (1)...(19): siRNA sense strand
ggacacagagacuuuauca

SEQ ID NO: 1107406 - RNA, 19 nt, Homo sapiens
  misc_RNA (1)...(19): siRNA sense strand
cagaagagauaugaggaaa

SEQ ID NO: 1107407 - RNA, 19 nt, Homo sapiens
  misc_RNA (1)...(19): siRNA sense strand
ggaagauggcccuaaauuc

SEQ ID NO: 1107408 - RNA, 19 nt, Homo sapiens
  misc_RNA (1)...(19): siRNA sense strand
caacuaauugucgguguua

SEQ ID NO: 1107409 - RNA, 19 nt, Homo sapiens
  misc_RNA (1)...(19): siRNA sense strand
gcaaguacuaugugacuau

SEQ ID NO: 1107410 - RNA, 19 nt, Homo sapiens
  misc_RNA (1)...(19): siRNA sense strand
uaucaacauugucgucauu

SEQ ID NO: 1107411 - RNA, 19 nt, Homo sapiens
  misc_RNA (1)...(19): siRNA sense strand
gauaucuccuuguggaaau

SEQ ID NO: 1107412 - RNA, 19 nt, Homo sapiens
  misc_RNA (1)...(19): siRNA sense strand
ucaagaaugugucugucaa

SEQ ID NO: 1107413 - RNA, 19 nt, Homo sapiens
  misc_RNA (1)...(19): siRNA sense strand
gugcuaacaugccuugguu

SEQ ID NO: 1107414 - RNA, 19 nt, Homo sapiens
  misc_RNA (1)...(19): siRNA sense strand
ugaggaaauuguuaaggaa

SEQ ID NO: 1107415 - RNA, 19 nt, Homo sapiens
  misc_RNA (1)...(19): siRNA sense strand
ccaugaagcuuugagugaa

SEQ ID NO: 1107416 - RNA, 19 nt, Homo sapiens
  misc_RNA (1)...(19): siRNA sense strand
ggagccaagugcuaacaug

SEQ ID NO: 1107417 - RNA, 19 nt, Homo sapiens
  misc_RNA (1)...(19): siRNA sense strand
ggaaaagacucauaucaac

SEQ ID NO: 1107418 - RNA, 19 nt, Homo sapiens
  misc_RNA (1)...(19): siRNA sense strand
agacucauaucaacauugu

SEQ ID NO: 1107419 - RNA, 19 nt, Homo sapiens
  misc_RNA (1)...(19): siRNA sense strand
ggugugaaacaacuaauug

SEQ ID NO: 1107420 - RNA, 19 nt, Homo sapiens
  misc_RNA (1)...(19): siRNA sense strand
agaaagcucagaaggcuaa

SEQ ID NO: 1107421 - RNA, 19 nt, Homo sapiens
  misc_RNA (1)...(19): siRNA sense strand
gcaagcccauguguguuga

SEQ ID NO: 1107422 - RNA, 19 nt, Homo sapiens
  misc_RNA (1)...(19): siRNA sense strand
ccauugauaucuccuugug

SEQ ID NO: 1107423 - RNA, 19 nt, Homo sapiens
  misc_RNA (1)...(19): siRNA sense strand
gauuguugcugcugguguu

SEQ ID NO: 1107424 - RNA, 19 nt, Homo sapiens
  misc_RNA (1)...(19): siRNA sense strand
cuggccaucugaucuauaa

SEQ ID NO: 1107425 - RNA, 19 nt, Homo sapiens
  misc_RNA (1)...(19): siRNA sense strand
gaaaggaaaagacucauau

SEQ ID NO: 1107426 - RNA, 19 nt, Homo sapiens
  misc_RNA (1)...(19): siRNA sense strand
aagcugguaucuccaagaa

SEQ ID NO: 1107427 - RNA, 19 nt, Homo sapiens
  misc_RNA (1)...(19): siRNA sense strand
gccaucugaucuauaaaug

SEQ ID NO: 1107428 - RNA, 19 nt, Homo sapiens
  misc_RNA (1)...(19): siRNA sense strand
ggaaauuguuaaggaaguc

SEQ ID NO: 1107429 - RNA, 19 nt, Homo sapiens
  misc_RNA (1)...(19): siRNA sense strand
agcaugcccuucuggcuua

SEQ ID NO: 1107430 - RNA, 19 nt, Homo sapiens
  misc_RNA (1)...(19): siRNA sense strand
uagcauuugugccaauuuc

SEQ ID NO: 1107431 - RNA, 19 nt, Homo sapiens
  misc_RNA (1)...(19): siRNA sense strand
gcccuaaauucuugaaguc

SEQ ID NO: 1107432 - RNA, 19 nt, Homo sapiens
  misc_RNA (1)...(19): siRNA sense strand
caaguuugcugagcugaag

SEQ ID NO: 1107433 - RNA, 19 nt, Homo sapiens
  misc_RNA (1)...(19): siRNA sense strand
ucuccaggaugucuacaaa

SEQ ID NO: 1107434 - RNA, 19 nt, Homo sapiens
  misc_RNA (1)...(19): siRNA sense strand
gagauaugaggaaauuguu

SEQ ID NO: 1107435 - RNA, 19 nt, Homo sapiens
  misc_RNA (1)...(19): siRNA sense strand
caacauugucgucauugga

SEQ ID NO: 1107436 - RNA, 19 nt, Homo sapiens
  misc_RNA (1)...(19): siRNA sense strand
caacggaaguaaaaucugu

SEQ ID NO: 1107437 - RNA, 19 nt, Homo sapiens
  misc_RNA (1)...(19): siRNA sense strand
uggaagauggcccuaaauu

SEQ ID NO: 1107438 - RNA, 19 nt, Homo sapiens
  misc_RNA (1)...(19): siRNA sense strand
gacaaaagaaccauugaaa

SEQ ID NO: 1107439 - RNA, 19 nt, Homo sapiens
  misc_RNA (1)...(19): siRNA sense strand
ggcccuaaauucuugaagu

SEQ ID NO: 1107440 - RNA, 19 nt, Homo sapiens
  misc_RNA (1)...(19): siRNA sense strand
agauggcccuaaauucuug

SEQ ID NO: 1107441 - RNA, 19 nt, Homo sapiens
  misc_RNA (1)...(19): siRNA sense strand
caggaugucuacaaaauug

SEQ ID NO: 1107442 - RNA, 19 nt, Homo sapiens
  misc_RNA (1)...(19): siRNA sense strand
ggaaauuugagaccagcaa

SEQ ID NO: 1107443 - RNA, 19 nt, Homo sapiens
  misc_RNA (1)...(19): siRNA sense strand
acugaaagcugagcgugaa

SEQ ID NO: 1107444 - RNA, 19 nt, Homo sapiens
  misc_RNA (1)...(19): siRNA sense strand
ggcaagcccauguguguug

SEQ ID NO: 1107445 - RNA, 19 nt, Homo sapiens
  misc_RNA (1)...(19): siRNA sense strand
caaguacuaugugacuauc

SEQ ID NO: 1107446 - RNA, 19 nt, Homo sapiens
  misc_RNA (1)...(19): siRNA sense strand
gcuaacaugccuugguuca

SEQ ID NO: 1107447 - RNA, 19 nt, Homo sapiens
  misc_RNA (1)...(19): siRNA sense strand
augaggaaauuguuaagga

SEQ ID NO: 1107448 - RNA, 19 nt, Homo sapiens
  misc_RNA (1)...(19): siRNA sense strand
gaagcugguaucuccaaga

SEQ ID NO: 1107449 - RNA, 19 nt, Homo sapiens
  misc_RNA (1)...(19): siRNA sense strand
ccaggacacagagacuuua

SEQ ID NO: 1107450 - RNA, 19 nt, Homo sapiens
  misc_RNA (1)...(19): siRNA sense strand
ggaaaggaaaagacucaua

SEQ ID NO: 1107451 - RNA, 19 nt, Homo sapiens
  misc_RNA (1)...(19): siRNA sense strand
cacagagacuuuaucaaaa

SEQ ID NO: 1107452 - RNA, 19 nt, Homo sapiens
  misc_RNA (1)...(19): siRNA sense strand
caccaacucguccaacuga

SEQ ID NO: 1107453 - RNA, 19 nt, Homo sapiens
  misc_RNA (1)...(19): siRNA sense strand
ccagaagagauaugaggaa

SEQ ID NO: 1107454 - RNA, 19 nt, Homo sapiens
  misc_RNA (1)...(19): siRNA sense strand
caucaaagcaguggacaag

SEQ ID NO: 1107455 - RNA, 19 nt, Homo sapiens
  misc_RNA (1)...(19): siRNA sense strand
aaagauugaucgccguucu

SEQ ID NO: 1107456 - RNA, 19 nt, Homo sapiens
  misc_RNA (1)...(19): siRNA sense strand
cuacaaaauuggugguauu

SEQ ID NO: 1107457 - RNA, 19 nt, Homo sapiens
  misc_RNA (1)...(19): siRNA sense strand
ggaaagucacccguaagga

SEQ ID NO: 1107458 - RNA, 19 nt, Homo sapiens
  misc_RNA (1)...(19): siRNA sense strand
cuacuggccaucugaucua

SEQ ID NO: 1107459 - RNA, 19 nt, Homo sapiens
  misc_RNA (1)...(19): siRNA sense strand
ccauguguguugagagcuu

SEQ ID NO: 1107460 - RNA, 19 nt, Homo sapiens
  misc_RNA (1)...(19): siRNA sense strand
ggccaucugaucuauaaau

SEQ ID NO: 1107461 - RNA, 19 nt, Homo sapiens
  misc_RNA (1)...(19): siRNA sense strand
ccacugagccacccuacag

SEQ ID NO: 1107462 - RNA, 19 nt, Homo sapiens
  misc_RNA (1)...(19): siRNA sense strand
gagcgugaacgugguauca

SEQ ID NO: 1107463 - RNA, 19 nt, Homo sapiens
  misc_RNA (1)...(19): siRNA sense strand
uugcugagcugaaggaaaa

SEQ ID NO: 1107464 - RNA, 19 nt, Homo sapiens
  misc_RNA (1)...(19): siRNA sense strand
gaaaagacucauaucaaca

SEQ ID NO: 1107465 - RNA, 19 nt, Homo sapiens
  misc_RNA (1)...(19): siRNA sense strand
caugaagcuuugagugaag

SEQ ID NO: 1107466 - RNA, 19 nt, Homo sapiens
  misc_RNA (1)...(19): siRNA sense strand
caacucguccaacugacaa

SEQ ID NO: 1107467 - RNA, 19 nt, Homo sapiens
  misc_RNA (1)...(19): siRNA sense strand
agagauaugaggaaauugu

SEQ ID NO: 1107468 - RNA, 19 nt, Homo sapiens
  misc_RNA (1)...(19): siRNA sense strand
agaaggaggcugcugagau

SEQ ID NO: 1107469 - RNA, 19 nt, Homo sapiens
  misc_RNA (1)...(19): siRNA sense strand
uucaagggauggaaaguca

SEQ ID NO: 1107470 - RNA, 19 nt, Homo sapiens
  misc_RNA (1)...(19): siRNA sense strand
gggacaaugugggcuucaa

SEQ ID NO: 1107471 - RNA, 19 nt, Homo sapiens
  misc_RNA (1)...(19): siRNA sense strand
ccuacagccagaagagaua

SEQ ID NO: 1107472 - RNA, 19 nt, Homo sapiens
  misc_RNA (1)...(19): siRNA sense strand
caaaauuggugguauuggu

SEQ ID NO: 1107473 - RNA, 19 nt, Homo sapiens
  misc_RNA (1)...(19): siRNA sense strand
augccugggucuuggauaa

SEQ ID NO: 1107474 - RNA, 19 nt, Homo sapiens
  misc_RNA (1)...(19): siRNA sense strand
caaagcaguggacaagaag

SEQ ID NO: 1107475 - RNA, 19 nt, Homo sapiens
  misc_RNA (1)...(19): siRNA sense strand
gagaccagcaaguacuaug

SEQ ID NO: 1107476 - RNA, 19 nt, Homo sapiens
  misc_RNA (1)...(19): siRNA sense strand
ugcggugggugucaucaaa

SEQ ID NO: 1107477 - RNA, 19 nt, Homo sapiens
  misc_RNA (1)...(19): siRNA sense strand
auugaucgccguucuggua

SEQ ID NO: 1107478 - RNA, 19 nt, Homo sapiens
  misc_RNA (1)...(19): siRNA sense strand
gaaauuguuaaggaaguca

SEQ ID NO: 1107479 - RNA, 19 nt, Homo sapiens
  misc_RNA (1)...(19): siRNA sense strand
guacuaugugacuaucauu

SEQ ID NO: 1107480 - RNA, 19 nt, Homo sapiens
  misc_RNA (1)...(19): siRNA sense strand
gaccagcaaguacuaugug

SEQ ID NO: 1107481 - RNA, 19 nt, Homo sapiens
  misc_RNA (1)...(19): siRNA sense strand
gggugugaaacaacuaauu

SEQ ID NO: 1107482 - RNA, 19 nt, Homo sapiens
  misc_RNA (1)...(19): siRNA sense strand
aauuugagaccagcaagua

SEQ ID NO: 1107483 - RNA, 19 nt, Homo sapiens
  misc_RNA (1)...(19): siRNA sense strand
caccuuugcuccagucaac

SEQ ID NO: 1107484 - RNA, 19 nt, Homo sapiens
  misc_RNA (1)...(19): siRNA sense strand
ugauaucuccuuguggaaa

SEQ ID NO: 1107485 - RNA, 19 nt, Homo sapiens
  misc_RNA (1)...(19): siRNA sense strand
gagaaggaggcugcugaga

SEQ ID NO: 1107486 - RNA, 19 nt, Homo sapiens
  misc_RNA (1)...(19): siRNA sense strand
aagcucagaaggcuaaaug

SEQ ID NO: 1107487 - RNA, 19 nt, Homo sapiens
  misc_RNA (1)...(19): siRNA sense strand
gcauuugugccaauuucug

SEQ ID NO: 1107488 - RNA, 19 nt, Homo sapiens
  misc_RNA (1)...(19): siRNA sense strand
cuacaaccccgacacagua

SEQ ID NO: 1107489 - RNA, 19 nt, Homo sapiens
  misc_RNA (1)...(19): siRNA sense strand
gagcuucucagacuaucca

SEQ ID NO: 1107490 - RNA, 19 nt, Homo sapiens
  misc_RNA (1)...(19): siRNA sense strand
ucucagacuauccaccuuu

SEQ ID NO: 1107491 - RNA, 19 nt, Homo sapiens
  misc_RNA (1)...(19): siRNA sense strand
ugaucgccguucugguaaa

SEQ ID NO: 1107492 - RNA, 19 nt, Homo sapiens
  misc_RNA (1)...(19): siRNA sense strand
gagcuggcaaggucaccaa

SEQ ID NO: 1107493 - RNA, 19 nt, Homo sapiens
  misc_RNA (1)...(19): siRNA sense strand
gaaagcuacuucacaaucu

SEQ ID NO: 1107494 - RNA, 19 nt, Homo sapiens
  misc_RNA (1)...(19): siRNA sense strand
ggacaucggcuuugaagau

SEQ ID NO: 1107495 - RNA, 19 nt, Homo sapiens
  misc_RNA (1)...(19): siRNA sense strand
gacaauaucaggcugguuu

SEQ ID NO: 1107496 - RNA, 19 nt, Homo sapiens
  misc_RNA (1)...(19): siRNA sense strand
ccaagaagaccgaaagcua

SEQ ID NO: 1107497 - RNA, 19 nt, Homo sapiens
  misc_RNA (1)...(19): siRNA sense strand
gcuggucccuggugauuug

SEQ ID NO: 1107498 - RNA, 19 nt, Homo sapiens
  misc_RNA (1)...(19): siRNA sense strand
gaacugcugcugccuguca

SEQ ID NO: 1107499 - RNA, 19 nt, Homo sapiens
  misc_RNA (1)...(19): siRNA sense strand
cagcguggguuccuauuuc

SEQ ID NO: 1107500 - RNA, 19 nt, Homo sapiens
  misc_RNA (1)...(19): siRNA sense strand
gcugcugccugucaucauu

SEQ ID NO: 1107501 - RNA, 19 nt, Homo sapiens
  misc_RNA (1)...(19): siRNA sense strand
cagcugcacugccucuaug

SEQ ID NO: 1107502 - RNA, 19 nt, Homo sapiens
  misc_RNA (1)...(19): siRNA sense strand
cagacuccuucuacuauga

SEQ ID NO: 1107503 - RNA, 19 nt, Homo sapiens
  misc_RNA (1)...(19): siRNA sense strand
gugcagacacccacaauca

SEQ ID NO: 1107504 - RNA, 19 nt, Homo sapiens
  misc_RNA (1)...(19): siRNA sense strand
ccaccacccuggccuaucu

SEQ ID NO: 1107505 - RNA, 19 nt, Homo sapiens
  misc_RNA (1)...(19): siRNA sense strand
cgaaagcuacuucacaauc

SEQ ID NO: 1107506 - RNA, 19 nt, Homo sapiens
  misc_RNA (1)...(19): siRNA sense strand
ggagauguaccagcuguau

SEQ ID NO: 1107507 - RNA, 19 nt, Homo sapiens
  misc_RNA (1)...(19): siRNA sense strand
gcagcguggguuccuauuu

SEQ ID NO: 1107508 - RNA, 19 nt, Homo sapiens
  misc_RNA (1)...(19): siRNA sense strand
gcagcgagcacaucgagau

SEQ ID NO: 1107509 - RNA, 19 nt, Homo sapiens
  misc_RNA (1)...(19): siRNA sense strand
caggcugguuuacaacaaa

SEQ ID NO: 1107510 - RNA, 19 nt, Homo sapiens
  misc_RNA (1)...(19): siRNA sense strand
ccagacuccuucuacuaug

SEQ ID NO: 1107511 - RNA, 19 nt, Homo sapiens
  misc_RNA (1)...(19): siRNA sense strand
cauguacacgcucuacuuu

SEQ ID NO: 1107512 - RNA, 19 nt, Homo sapiens
  misc_RNA (1)...(19): siRNA sense strand
gcgagaugaucgaggagau

SEQ ID NO: 1107513 - RNA, 19 nt, Homo sapiens
  misc_RNA (1)...(19): siRNA sense strand
caccagacuccuucuacua

SEQ ID NO: 1107514 - RNA, 19 nt, Homo sapiens
  misc_RNA (1)...(19): siRNA sense strand
caucauugacugcuggauu

SEQ ID NO: 1107515 - RNA, 19 nt, Homo sapiens
  misc_RNA (1)...(19): siRNA sense strand
gaccgaaagcuacuucaca

SEQ ID NO: 1107516 - RNA, 19 nt, Homo sapiens
  misc_RNA (1)...(19): siRNA sense strand
gcuggcugcugcccuacaa

SEQ ID NO: 1107517 - RNA, 19 nt, Homo sapiens
  misc_RNA (1)...(19): siRNA sense strand
ccuggaaggacaaguauau

SEQ ID NO: 1107518 - RNA, 19 nt, Homo sapiens
  misc_RNA (1)...(19): siRNA sense strand
gcgaugguacugugaacuu

SEQ ID NO: 1107519 - RNA, 19 nt, Homo sapiens
  misc_RNA (1)...(19): siRNA sense strand
gcaaguucuuccaggacau

SEQ ID NO: 1107520 - RNA, 19 nt, Homo sapiens
  misc_RNA (1)...(19): siRNA sense strand
gcagacacccacaaucaac

SEQ ID NO: 1107521 - RNA, 19 nt, Homo sapiens
  misc_RNA (1)...(19): siRNA sense strand
accgaaagcuacuucacaa

SEQ ID NO: 1107522 - RNA, 19 nt, Homo sapiens
  misc_RNA (1)...(19): siRNA sense strand
gccaggagcaccaaguguu

SEQ ID NO: 1107523 - RNA, 19 nt, Homo sapiens
  misc_RNA (1)...(19): siRNA sense strand
guacgugucccuggcuuug

SEQ ID NO: 1107524 - RNA, 19 nt, Homo sapiens
  misc_RNA (1)...(19): siRNA sense strand
ucaggcugguuuacaacaa

SEQ ID NO: 1107525 - RNA, 19 nt, Homo sapiens
  misc_RNA (1)...(19): siRNA sense strand
cacccuggccuaucugaaa

SEQ ID NO: 1107526 - RNA, 19 nt, Homo sapiens
  misc_RNA (1)...(19): siRNA sense strand
gaugguacugugaacuuga

SEQ ID NO: 1107527 - RNA, 19 nt, Homo sapiens
  misc_RNA (1)...(19): siRNA sense strand
uguacacgcucuacuuucu

SEQ ID NO: 1107528 - RNA, 19 nt, Homo sapiens
  misc_RNA (1)...(19): siRNA sense strand
auaucaggcugguuuacaa

SEQ ID NO: 1107529 - RNA, 19 nt, Homo sapiens
  misc_RNA (1)...(19): siRNA sense strand
ccaggagcaccaaguguug

SEQ ID NO: 1107530 - RNA, 19 nt, Homo sapiens
  misc_RNA (1)...(19): siRNA sense strand
cgaugguacugugaacuug

SEQ ID NO: 1107531 - RNA, 19 nt, Homo sapiens
  misc_RNA (1)...(19): siRNA sense strand
gagaugaucgaggagaugu

SEQ ID NO: 1107532 - RNA, 19 nt, Homo sapiens
  misc_RNA (1)...(19): siRNA sense strand
uaccucugcuccaagaaga

SEQ ID NO: 1107533 - RNA, 19 nt, Homo sapiens
  misc_RNA (1)...(19): siRNA sense strand
acaauaucaggcugguuua

SEQ ID NO: 1107534 - RNA, 19 nt, Homo sapiens
  misc_RNA (1)...(19): siRNA sense strand
aaagcuacuucacaaucug

SEQ ID NO: 1107535 - RNA, 19 nt, Homo sapiens
  misc_RNA (1)...(19): siRNA sense strand
ccacaccagacuccuucua

SEQ ID NO: 1107536 - RNA, 19 nt, Homo sapiens
  misc_RNA (1)...(19): siRNA sense strand
gggacuaccgcaaguucuu

SEQ ID NO: 1107537 - RNA, 19 nt, Homo sapiens
  misc_RNA (1)...(19): siRNA sense strand
aucauugacugcuggauug

SEQ ID NO: 1107538 - RNA, 19 nt, Homo sapiens
  misc_RNA (1)...(19): siRNA sense strand
cacuaccucugcuccaaga

SEQ ID NO: 1107539 - RNA, 19 nt, Homo sapiens
  misc_RNA (1)...(19): siRNA sense strand
ggacuaccgcaaguucuuc

SEQ ID NO: 1107540 - RNA, 19 nt, Homo sapiens
  misc_RNA (1)...(19): siRNA sense strand
agacacccacaaucaacua

SEQ ID NO: 1107541 - RNA, 19 nt, Homo sapiens
  misc_RNA (1)...(19): siRNA sense strand
gagauguaccagcuguaug

SEQ ID NO: 1107542 - RNA, 19 nt, Homo sapiens
  misc_RNA (1)...(19): siRNA sense strand
acacauggucaccugagaa

SEQ ID NO: 1107543 - RNA, 19 nt, Homo sapiens
  misc_RNA (1)...(19): siRNA sense strand
guacugugaacuugaagag

SEQ ID NO: 1107544 - RNA, 19 nt, Homo sapiens
  misc_RNA (1)...(19): siRNA sense strand
gcuccaagaagaccgaaag

SEQ ID NO: 1107545 - RNA, 19 nt, Homo sapiens
  misc_RNA (1)...(19): siRNA sense strand
uccaggacaucggcuuuga

SEQ ID NO: 1107546 - RNA, 19 nt, Homo sapiens
  misc_RNA (1)...(19): siRNA sense strand
gcugguugcccacaguaug

SEQ ID NO: 1107547 - RNA, 19 nt, Homo sapiens
  misc_RNA (1)...(19): siRNA sense strand
aaagcagcguggguuccua

SEQ ID NO: 1107548 - RNA, 19 nt, Homo sapiens
  misc_RNA (1)...(19): siRNA sense strand
ucugaaacgugugcuccuu

SEQ ID NO: 1107549 - RNA, 19 nt, Homo sapiens
  misc_RNA (1)...(19): siRNA sense strand
gugcuggucccuggugauu

SEQ ID NO: 1107550 - RNA, 19 nt, Homo sapiens
  misc_RNA (1)...(19): siRNA sense strand
ggaaggagcucacuuacca

SEQ ID NO: 1107551 - RNA, 19 nt, Homo sapiens
  misc_RNA (1)...(19): siRNA sense strand
ggagcucacuuaccaggaa

SEQ ID NO: 1107552 - RNA, 19 nt, Homo sapiens
  misc_RNA (1)...(19): siRNA sense strand
gcccugagguucuggcaaa

SEQ ID NO: 1107553 - RNA, 19 nt, Homo sapiens
  misc_RNA (1)...(19): siRNA sense strand
ucaacuggaugcauuacaa

SEQ ID NO: 1107554 - RNA, 19 nt, Homo sapiens
  misc_RNA (1)...(19): siRNA sense strand
ugaacaacaucgucaagug

SEQ ID NO: 1107555 - RNA, 19 nt, Homo sapiens
  misc_RNA (1)...(19): siRNA sense strand
ggcaggagcugaacaagac

SEQ ID NO: 1107556 - RNA, 19 nt, Homo sapiens
  misc_RNA (1)...(19): siRNA sense strand
ggagaugaccggcuaugug

SEQ ID NO: 1107557 - RNA, 19 nt, Homo sapiens
  misc_RNA (1)...(19): siRNA sense strand
gcgacgagcacguucaauu

SEQ ID NO: 1107558 - RNA, 19 nt, Homo sapiens
  misc_RNA (1)...(19): siRNA sense strand
gcgccgaccugaacaacau

SEQ ID NO: 1107559 - RNA, 19 nt, Homo sapiens
  misc_RNA (1)...(19): siRNA sense strand
cgacgagcacguucaauuc

SEQ ID NO: 1107560 - RNA, 19 nt, Homo sapiens
  misc_RNA (1)...(19): siRNA sense strand
ggccauagaccuccuugga

SEQ ID NO: 1107561 - RNA, 19 nt, Homo sapiens
  misc_RNA (1)...(19): siRNA sense strand
gaagguggcggugaagaag

SEQ ID NO: 1107562 - RNA, 19 nt, Homo sapiens
  misc_RNA (1)...(19): siRNA sense strand
gccauagaccuccuuggaa

SEQ ID NO: 1107563 - RNA, 19 nt, Homo sapiens
  misc_RNA (1)...(19): siRNA sense strand
gagcgacgagcacguucaa

SEQ ID NO: 1107564 - RNA, 19 nt, Homo sapiens
  misc_RNA (1)...(19): siRNA sense strand
agaaggaccugagcagcau

SEQ ID NO: 1107565 - RNA, 19 nt, Homo sapiens
  misc_RNA (1)...(19): siRNA sense strand
ugaagcgcaucauggaagu

SEQ ID NO: 1107566 - RNA, 19 nt, Homo sapiens
  misc_RNA (1)...(19): siRNA sense strand
caaccaaacaguggauauc

SEQ ID NO: 1107567 - RNA, 19 nt, Homo sapiens
  misc_RNA (1)...(19): siRNA sense strand
gcaacguggcugugaacga

SEQ ID NO: 1107568 - RNA, 19 nt, Homo sapiens
  misc_RNA (1)...(19): siRNA sense strand
guaccgggcaccugagauc

SEQ ID NO: 1107569 - RNA, 19 nt, Homo sapiens
  misc_RNA (1)...(19): siRNA sense strand
cagaggccgagccauauga

SEQ ID NO: 1107570 - RNA, 19 nt, Homo sapiens
  misc_RNA (1)...(19): siRNA sense strand
ggaccugagcagcaucuuc

SEQ ID NO: 1107571 - RNA, 19 nt, Homo sapiens
  misc_RNA (1)...(19): siRNA sense strand
agaagguggcggugaagaa

SEQ ID NO: 1107572 - RNA, 19 nt, Homo sapiens
  misc_RNA (1)...(19): siRNA sense strand
agccagaggccgagccaua

SEQ ID NO: 1107573 - RNA, 19 nt, Homo sapiens
  misc_RNA (1)...(19): siRNA sense strand
cuggaugcauuacaaccaa

SEQ ID NO: 1107574 - RNA, 19 nt, Homo sapiens
  misc_RNA (1)...(19): siRNA sense strand
gccagaggccgagccauau

SEQ ID NO: 1107575 - RNA, 19 nt, Homo sapiens
  misc_RNA (1)...(19): siRNA sense strand
gggaagcgacuacauugac

SEQ ID NO: 1107576 - RNA, 19 nt, Homo sapiens
  misc_RNA (1)...(19): siRNA sense strand
ccgggaagcgacuacauug

SEQ ID NO: 1107577 - RNA, 19 nt, Homo sapiens
  misc_RNA (1)...(19): siRNA sense strand
gaagcacgagaacgucauc

SEQ ID NO: 1107578 - RNA, 19 nt, Homo sapiens
  misc_RNA (1)...(19): siRNA sense strand
cggcaggagcugaacaaga

SEQ ID NO: 1107579 - RNA, 19 nt, Homo sapiens
  misc_RNA (1)...(19): siRNA sense strand
gcacgcuggaggaguggaa

SEQ ID NO: 1107580 - RNA, 19 nt, Homo sapiens
  misc_RNA (1)...(19): siRNA sense strand
gcugaagcgcaucauggaa

SEQ ID NO: 1107581 - RNA, 19 nt, Homo sapiens
  misc_RNA (1)...(19): siRNA sense strand
aggccgagccauaugauga

SEQ ID NO: 1107582 - RNA, 19 nt, Homo sapiens
  misc_RNA (1)...(19): siRNA sense strand
cuggcagccuggagauuga

SEQ ID NO: 1107583 - RNA, 19 nt, Homo sapiens
  misc_RNA (1)...(19): siRNA sense strand
gcugagcgacgagcacguu

SEQ ID NO: 1107584 - RNA, 19 nt, Homo sapiens
  misc_RNA (1)...(19): siRNA sense strand
ccagaggccgagccauaug

SEQ ID NO: 1107585 - RNA, 19 nt, Homo sapiens
  misc_RNA (1)...(19): siRNA sense strand
ggaaggagcucacuuacca

SEQ ID NO: 1107586 - RNA, 19 nt, Homo sapiens
  misc_RNA (1)...(19): siRNA sense strand
ggagcucacuuaccaggaa

SEQ ID NO: 1107587 - RNA, 19 nt, Homo sapiens
  misc_RNA (1)...(19): siRNA sense strand
gcccugagguucuggcaaa

SEQ ID NO: 1107588 - RNA, 19 nt, Homo sapiens
  misc_RNA (1)...(19): siRNA sense strand
ucaacuggaugcauuacaa

SEQ ID NO: 1107589 - RNA, 19 nt, Homo sapiens
  misc_RNA (1)...(19): siRNA sense strand
ugaacaacaucgucaagug

SEQ ID NO: 1107590 - RNA, 19 nt, Homo sapiens
  misc_RNA (1)...(19): siRNA sense strand
ggcaggagcugaacaagac

SEQ ID NO: 1107591 - RNA, 19 nt, Homo sapiens
  misc_RNA (1)...(19): siRNA sense strand
ggagaugaccggcuaugug

SEQ ID NO: 1107592 - RNA, 19 nt, Homo sapiens
  misc_RNA (1)...(19): siRNA sense strand
gcgacgagcacguucaauu

SEQ ID NO: 1107593 - RNA, 19 nt, Homo sapiens
  misc_RNA (1)...(19): siRNA sense strand
gcgccgaccugaacaacau

SEQ ID NO: 1107594 - RNA, 19 nt, Homo sapiens
  misc_RNA (1)...(19): siRNA sense strand
cgacgagcacguucaauuc

SEQ ID NO: 1107595 - RNA, 19 nt, Homo sapiens
  misc_RNA (1)...(19): siRNA sense strand
ggccauagaccuccuugga

SEQ ID NO: 1107596 - RNA, 19 nt, Homo sapiens
  misc_RNA (1)...(19): siRNA sense strand
gaagguggcggugaagaag

SEQ ID NO: 1107597 - RNA, 19 nt, Homo sapiens
  misc_RNA (1)...(19): siRNA sense strand
gccauagaccuccuuggaa

SEQ ID NO: 1107598 - RNA, 19 nt, Homo sapiens
  misc_RNA (1)...(19): siRNA sense strand
gagcgacgagcacguucaa

SEQ ID NO: 1107599 - RNA, 19 nt, Homo sapiens
  misc_RNA (1)...(19): siRNA sense strand
agaaggaccugagcagcau

SEQ ID NO: 1107600 - RNA, 19 nt, Homo sapiens
  misc_RNA (1)...(19): siRNA sense strand
ugaagcgcaucauggaagu

SEQ ID NO: 1107601 - RNA, 19 nt, Homo sapiens
  misc_RNA (1)...(19): siRNA sense strand
caaccaaacaguggauauc

SEQ ID NO: 1107602 - RNA, 19 nt, Homo sapiens
  misc_RNA (1)...(19): siRNA sense strand
gcaacguggcugugaacga

SEQ ID NO: 1107603 - RNA, 19 nt, Homo sapiens
  misc_RNA (1)...(19): siRNA sense strand
guaccgggcaccugagauc

SEQ ID NO: 1107604 - RNA, 19 nt, Homo sapiens
  misc_RNA (1)...(19): siRNA sense strand
cagaggccgagccauauga

SEQ ID NO: 1107605 - RNA, 19 nt, Homo sapiens
  misc_RNA (1)...(19): siRNA sense strand
ggaccugagcagcaucuuc

SEQ ID NO: 1107606 - RNA, 19 nt, Homo sapiens
  misc_RNA (1)...(19): siRNA sense strand
agaagguggcggugaagaa

SEQ ID NO: 1107607 - RNA, 19 nt, Homo sapiens
  misc_RNA (1)...(19): siRNA sense strand
agccagaggccgagccaua

SEQ ID NO: 1107608 - RNA, 19 nt, Homo sapiens
  misc_RNA (1)...(19): siRNA sense strand
cuggaugcauuacaaccaa

SEQ ID NO: 1107609 - RNA, 19 nt, Homo sapiens
  misc_RNA (1)...(19): siRNA sense strand
gccagaggccgagccauau

SEQ ID NO: 1107610 - RNA, 19 nt, Homo sapiens
  misc_RNA (1)...(19): siRNA sense strand
gggaagcgacuacauugac

SEQ ID NO: 1107611 - RNA, 19 nt, Homo sapiens
  misc_RNA (1)...(19): siRNA sense strand
ccgggaagcgacuacauug

SEQ ID NO: 1107612 - RNA, 19 nt, Homo sapiens
  misc_RNA (1)...(19): siRNA sense strand
gaagcacgagaacgucauc

SEQ ID NO: 1107613 - RNA, 19 nt, Homo sapiens
  misc_RNA (1)...(19): siRNA sense strand
cggcaggagcugaacaaga

SEQ ID NO: 1107614 - RNA, 19 nt, Homo sapiens
  misc_RNA (1)...(19): siRNA sense strand
gcacgcuggaggaguggaa

SEQ ID NO: 1107615 - RNA, 19 nt, Homo sapiens
  misc_RNA (1)...(19): siRNA sense strand
gcugaagcgcaucauggaa

SEQ ID NO: 1107616 - RNA, 19 nt, Homo sapiens
  misc_RNA (1)...(19): siRNA sense strand
aggccgagccauaugauga

SEQ ID NO: 1107617 - RNA, 19 nt, Homo sapiens
  misc_RNA (1)...(19): siRNA sense strand
cuggcagccuggagauuga

SEQ ID NO: 1107618 - RNA, 19 nt, Homo sapiens
  misc_RNA (1)...(19): siRNA sense strand
gcugagcgacgagcacguu

SEQ ID NO: 1107619 - RNA, 19 nt, Homo sapiens
  misc_RNA (1)...(19): siRNA sense strand
ccagaggccgagccauaug

SEQ ID NO: 1107620 - RNA, 19 nt, Homo sapiens
  misc_RNA (1)...(19): siRNA sense strand
ucauuuggcuguuggauuu

SEQ ID NO: 1107621 - RNA, 19 nt, Homo sapiens
  misc_RNA (1)...(19): siRNA sense strand
ggaagcagcucucauucuc

SEQ ID NO: 1107622 - RNA, 19 nt, Homo sapiens
  misc_RNA (1)...(19): siRNA sense strand
ggucaucaguaauaucuuc

SEQ ID NO: 1107623 - RNA, 19 nt, Homo sapiens
  misc_RNA (1)...(19): siRNA sense strand
ccacuaugacgcuuccuua

SEQ ID NO: 1107624 - RNA, 19 nt, Homo sapiens
  misc_RNA (1)...(19): siRNA sense strand
gccaagaucugaccgugau

SEQ ID NO: 1107625 - RNA, 19 nt, Homo sapiens
  misc_RNA (1)...(19): siRNA sense strand
ucauucuccucuucuauuu

SEQ ID NO: 1107626 - RNA, 19 nt, Homo sapiens
  misc_RNA (1)...(19): siRNA sense strand
ggaagguggucaucacacu

SEQ ID NO: 1107627 - RNA, 19 nt, Homo sapiens
  misc_RNA (1)...(19): siRNA sense strand
ggagcaguguggccuucaa

SEQ ID NO: 1107628 - RNA, 19 nt, Homo sapiens
  misc_RNA (1)...(19): siRNA sense strand
cuaugacgcuuccuuagag

SEQ ID NO: 1107629 - RNA, 19 nt, Homo sapiens
  misc_RNA (1)...(19): siRNA sense strand
ugguggaggugacagcuuu

SEQ ID NO: 1107630 - RNA, 19 nt, Homo sapiens
  misc_RNA (1)...(19): siRNA sense strand
gcucguggcauccuaucaa

SEQ ID NO: 1107631 - RNA, 19 nt, Homo sapiens
  misc_RNA (1)...(19): siRNA sense strand
guauucggcuggccaccau

SEQ ID NO: 1107632 - RNA, 19 nt, Homo sapiens
  misc_RNA (1)...(19): siRNA sense strand
acuggaagcagcucucauu

SEQ ID NO: 1107633 - RNA, 19 nt, Homo sapiens
  misc_RNA (1)...(19): siRNA sense strand
caucaguaauaucuucaac

SEQ ID NO: 1107634 - RNA, 19 nt, Homo sapiens
  misc_RNA (1)...(19): siRNA sense strand
caaguuuucuggaaguuuc

SEQ ID NO: 1107635 - RNA, 19 nt, Homo sapiens
  misc_RNA (1)...(19): siRNA sense strand
gguggaggugacagcuuua

SEQ ID NO: 1107636 - RNA, 19 nt, Homo sapiens
  misc_RNA (1)...(19): siRNA sense strand
ggccuucaaccucuucaug

SEQ ID NO: 1107637 - RNA, 19 nt, Homo sapiens
  misc_RNA (1)...(19): siRNA sense strand
ucauuuggcuguuggauuu

SEQ ID NO: 1107638 - RNA, 19 nt, Homo sapiens
  misc_RNA (1)...(19): siRNA sense strand
ggaagcagcucucauucuc

SEQ ID NO: 1107639 - RNA, 19 nt, Homo sapiens
  misc_RNA (1)...(19): siRNA sense strand
ggucaucaguaauaucuuc

SEQ ID NO: 1107640 - RNA, 19 nt, Homo sapiens
  misc_RNA (1)...(19): siRNA sense strand
ccacuaugacgcuuccuua

SEQ ID NO: 1107641 - RNA, 19 nt, Homo sapiens
  misc_RNA (1)...(19): siRNA sense strand
gccaagaucugaccgugau

SEQ ID NO: 1107642 - RNA, 19 nt, Homo sapiens
  misc_RNA (1)...(19): siRNA sense strand
ucauucuccucuucuauuu

SEQ ID NO: 1107643 - RNA, 19 nt, Homo sapiens
  misc_RNA (1)...(19): siRNA sense strand
ggaagguggucaucacacu

SEQ ID NO: 1107644 - RNA, 19 nt, Homo sapiens
  misc_RNA (1)...(19): siRNA sense strand
ggagcaguguggccuucaa

SEQ ID NO: 1107645 - RNA, 19 nt, Homo sapiens
  misc_RNA (1)...(19): siRNA sense strand
cuaugacgcuuccuuagag

SEQ ID NO: 1107646 - RNA, 19 nt, Homo sapiens
  misc_RNA (1)...(19): siRNA sense strand
ugguggaggugacagcuuu

SEQ ID NO: 1107647 - RNA, 19 nt, Homo sapiens
  misc_RNA (1)...(19): siRNA sense strand
gcucguggcauccuaucaa

SEQ ID NO: 1107648 - RNA, 19 nt, Homo sapiens
  misc_RNA (1)...(19): siRNA sense strand
guauucggcuggccaccau

SEQ ID NO: 1107649 - RNA, 19 nt, Homo sapiens
  misc_RNA (1)...(19): siRNA sense strand
acuggaagcagcucucauu

SEQ ID NO: 1107650 - RNA, 19 nt, Homo sapiens
  misc_RNA (1)...(19): siRNA sense strand
caucaguaauaucuucaac

SEQ ID NO: 1107651 - RNA, 19 nt, Homo sapiens
  misc_RNA (1)...(19): siRNA sense strand
caaguuuucuggaaguuuc

SEQ ID NO: 1107652 - RNA, 19 nt, Homo sapiens
  misc_RNA (1)...(19): siRNA sense strand
gguggaggugacagcuuua

SEQ ID NO: 1107653 - RNA, 19 nt, Homo sapiens
  misc_RNA (1)...(19): siRNA sense strand
ggccuucaaccucuucaug

SEQ ID NO: 1107654 - RNA, 19 nt, Homo sapiens
  misc_RNA (1)...(19): siRNA sense strand
ggaagcagcucucauucuc

SEQ ID NO: 1107655 - RNA, 19 nt, Homo sapiens
  misc_RNA (1)...(19): siRNA sense strand
ggucaucaguaauaucuuc

SEQ ID NO: 1107656 - RNA, 19 nt, Homo sapiens
  misc_RNA (1)...(19): siRNA sense strand
gcuccuaaaucucaaaaua

SEQ ID NO: 1107657 - RNA, 19 nt, Homo sapiens
  misc_RNA (1)...(19): siRNA sense strand
ccacuaugacgcuuccuua

SEQ ID NO: 1107658 - RNA, 19 nt, Homo sapiens
  misc_RNA (1)...(19): siRNA sense strand
gccaagaucugaccgugau

SEQ ID NO: 1107659 - RNA, 19 nt, Homo sapiens
  misc_RNA (1)...(19): siRNA sense strand
ucauucuccucuucuauuu

SEQ ID NO: 1107660 - RNA, 19 nt, Homo sapiens
  misc_RNA (1)...(19): siRNA sense strand
ggaagguggucaucacacu

SEQ ID NO: 1107661 - RNA, 19 nt, Homo sapiens
  misc_RNA (1)...(19): siRNA sense strand
ggagcaguguggccuucaa

SEQ ID NO: 1107662 - RNA, 19 nt, Homo sapiens
  misc_RNA (1)...(19): siRNA sense strand
cuaugacgcuuccuuagag

SEQ ID NO: 1107663 - RNA, 19 nt, Homo sapiens
  misc_RNA (1)...(19): siRNA sense strand
ugguggaggugacagcuuu

SEQ ID NO: 1107664 - RNA, 19 nt, Homo sapiens
  misc_RNA (1)...(19): siRNA sense strand
gcucguggcauccuaucaa

SEQ ID NO: 1107665 - RNA, 19 nt, Homo sapiens
  misc_RNA (1)...(19): siRNA sense strand
guauucggcuggccaccau

SEQ ID NO: 1107666 - RNA, 19 nt, Homo sapiens
  misc_RNA (1)...(19): siRNA sense strand
acuggaagcagcucucauu

SEQ ID NO: 1107667 - RNA, 19 nt, Homo sapiens
  misc_RNA (1)...(19): siRNA sense strand
caucaguaauaucuucaac

SEQ ID NO: 1107668 - RNA, 19 nt, Homo sapiens
  misc_RNA (1)...(19): siRNA sense strand
gguggaggugacagcuuua

SEQ ID NO: 1107669 - RNA, 19 nt, Homo sapiens
  misc_RNA (1)...(19): siRNA sense strand
ggccuucaaccucuucaug

SEQ ID NO: 1107670 - RNA, 19 nt, Homo sapiens
  misc_RNA (1)...(19): siRNA sense strand
ggaagcagcucucauucuc

SEQ ID NO: 1107671 - RNA, 19 nt, Homo sapiens
  misc_RNA (1)...(19): siRNA sense strand
ggucaucaguaauaucuuc

SEQ ID NO: 1107672 - RNA, 19 nt, Homo sapiens
  misc_RNA (1)...(19): siRNA sense strand
ccacuaugacgcuuccuua

SEQ ID NO: 1107673 - RNA, 19 nt, Homo sapiens
  misc_RNA (1)...(19): siRNA sense strand
gccaagaucugaccgugau

SEQ ID NO: 1107674 - RNA, 19 nt, Homo sapiens
  misc_RNA (1)...(19): siRNA sense strand
ucauucuccucuucuauuu

SEQ ID NO: 1107675 - RNA, 19 nt, Homo sapiens
  misc_RNA (1)...(19): siRNA sense strand
ggaagguggucaucacacu

SEQ ID NO: 1107676 - RNA, 19 nt, Homo sapiens
  misc_RNA (1)...(19): siRNA sense strand
ggagcaguguggccuucaa

SEQ ID NO: 1107677 - RNA, 19 nt, Homo sapiens
  misc_RNA (1)...(19): siRNA sense strand
cuaugacgcuuccuuagag

SEQ ID NO: 1107678 - RNA, 19 nt, Homo sapiens
  misc_RNA (1)...(19): siRNA sense strand
ugguggaggugacagcuuu

SEQ ID NO: 1107679 - RNA, 19 nt, Homo sapiens
  misc_RNA (1)...(19): siRNA sense strand
gcucguggcauccuaucaa

SEQ ID NO: 1107680 - RNA, 19 nt, Homo sapiens
  misc_RNA (1)...(19): siRNA sense strand
guauucggcuggccaccau

SEQ ID NO: 1107681 - RNA, 19 nt, Homo sapiens
  misc_RNA (1)...(19): siRNA sense strand
acuggaagcagcucucauu

SEQ ID NO: 1107682 - RNA, 19 nt, Homo sapiens
  misc_RNA (1)...(19): siRNA sense strand
caucaguaauaucuucaac

SEQ ID NO: 1107683 - RNA, 19 nt, Homo sapiens
  misc_RNA (1)...(19): siRNA sense strand
gguggaggugacagcuuua

SEQ ID NO: 1107684 - RNA, 19 nt, Homo sapiens
  misc_RNA (1)...(19): siRNA sense strand
ggccuucaaccucuucaug

SEQ ID NO: 1107685 - RNA, 19 nt, Homo sapiens
  misc_RNA (1)...(19): siRNA sense strand
ucauuuggcuguuggauuu

SEQ ID NO: 1107686 - RNA, 19 nt, Homo sapiens
  misc_RNA (1)...(19): siRNA sense strand
ggaagcagcucucauucuc

SEQ ID NO: 1107687 - RNA, 19 nt, Homo sapiens
  misc_RNA (1)...(19): siRNA sense strand
ggucaucaguaauaucuuc

SEQ ID NO: 1107688 - RNA, 19 nt, Homo sapiens
  misc_RNA (1)...(19): siRNA sense strand
ccacuaugacgcuuccuua

SEQ ID NO: 1107689 - RNA, 19 nt, Homo sapiens
  misc_RNA (1)...(19): siRNA sense strand
gccaagaucugaccgugau

SEQ ID NO: 1107690 - RNA, 19 nt, Homo sapiens
  misc_RNA (1)...(19): siRNA sense strand
ucauucuccucuucuauuu

SEQ ID NO: 1107691 - RNA, 19 nt, Homo sapiens
  misc_RNA (1)...(19): siRNA sense strand
ggaagguggucaucacacu

SEQ ID NO: 1107692 - RNA, 19 nt, Homo sapiens
  misc_RNA (1)...(19): siRNA sense strand
ggagcaguguggccuucaa

SEQ ID NO: 1107693 - RNA, 19 nt, Homo sapiens
  misc_RNA (1)...(19): siRNA sense strand
cuaugacgcuuccuuagag

SEQ ID NO: 1107694 - RNA, 19 nt, Homo sapiens
  misc_RNA (1)...(19): siRNA sense strand
ugguggaggugacagcuuu

SEQ ID NO: 1107695 - RNA, 19 nt, Homo sapiens
  misc_RNA (1)...(19): siRNA sense strand
gcucguggcauccuaucaa

SEQ ID NO: 1107696 - RNA, 19 nt, Homo sapiens
  misc_RNA (1)...(19): siRNA sense strand
guauucggcuggccaccau

SEQ ID NO: 1107697 - RNA, 19 nt, Homo sapiens
  misc_RNA (1)...(19): siRNA sense strand
acuggaagcagcucucauu

SEQ ID NO: 1107698 - RNA, 19 nt, Homo sapiens
  misc_RNA (1)...(19): siRNA sense strand
caucaguaauaucuucaac

SEQ ID NO: 1107699 - RNA, 19 nt, Homo sapiens
  misc_RNA (1)...(19): siRNA sense strand
caaguuuucuggaaguuuc

SEQ ID NO: 1107700 - RNA, 19 nt, Homo sapiens
  misc_RNA (1)...(19): siRNA sense strand
gguggaggugacagcuuua

SEQ ID NO: 1107701 - RNA, 19 nt, Homo sapiens
  misc_RNA (1)...(19): siRNA sense strand
ggccuucaaccucuucaug

SEQ ID NO: 1107702 - RNA, 19 nt, Homo sapiens
  misc_RNA (1)...(19): siRNA sense strand
ucauuuggcuguuggauuu

SEQ ID NO: 1107703 - RNA, 19 nt, Homo sapiens
  misc_RNA (1)...(19): siRNA sense strand
ggaagcagcucucauucuc

SEQ ID NO: 1107704 - RNA, 19 nt, Homo sapiens
  misc_RNA (1)...(19): siRNA sense strand
ggucaucaguaauaucuuc

SEQ ID NO: 1107705 - RNA, 19 nt, Homo sapiens
  misc_RNA (1)...(19): siRNA sense strand
ccacuaugacgcuuccuua

SEQ ID NO: 1107706 - RNA, 19 nt, Homo sapiens
  misc_RNA (1)...(19): siRNA sense strand
gccaagaucugaccgugau

SEQ ID NO: 1107707 - RNA, 19 nt, Homo sapiens
  misc_RNA (1)...(19): siRNA sense strand
ucauucuccucuucuauuu

SEQ ID NO: 1107708 - RNA, 19 nt, Homo sapiens
  misc_RNA (1)...(19): siRNA sense strand
ggaagguggucaucacacu

SEQ ID NO: 1107709 - RNA, 19 nt, Homo sapiens
  misc_RNA (1)...(19): siRNA sense strand
ggagcaguguggccuucaa

SEQ ID NO: 1107710 - RNA, 19 nt, Homo sapiens
  misc_RNA (1)...(19): siRNA sense strand
cuaugacgcuuccuuagag

SEQ ID NO: 1107711 - RNA, 19 nt, Homo sapiens
  misc_RNA (1)...(19): siRNA sense strand
ugguggaggugacagcuuu

SEQ ID NO: 1107712 - RNA, 19 nt, Homo sapiens
  misc_RNA (1)...(19): siRNA sense strand
gcucguggcauccuaucaa

SEQ ID NO: 1107713 - RNA, 19 nt, Homo sapiens
  misc_RNA (1)...(19): siRNA sense strand
guauucggcuggccaccau

SEQ ID NO: 1107714 - RNA, 19 nt, Homo sapiens
  misc_RNA (1)...(19): siRNA sense strand
acuggaagcagcucucauu

SEQ ID NO: 1107715 - RNA, 19 nt, Homo sapiens
  misc_RNA (1)...(19): siRNA sense strand
caucaguaauaucuucaac

SEQ ID NO: 1107716 - RNA, 19 nt, Homo sapiens
  misc_RNA (1)...(19): siRNA sense strand
caaguuuucuggaaguuuc

SEQ ID NO: 1107717 - RNA, 19 nt, Homo sapiens
  misc_RNA (1)...(19): siRNA sense strand
gguggaggugacagcuuua

SEQ ID NO: 1107718 - RNA, 19 nt, Homo sapiens
  misc_RNA (1)...(19): siRNA sense strand
ggccuucaaccucuucaug

SEQ ID NO: 1107719 - RNA, 19 nt, Homo sapiens
  misc_RNA (1)...(19): siRNA sense strand
ggaagcagcucucauucuc

SEQ ID NO: 1107720 - RNA, 19 nt, Homo sapiens
  misc_RNA (1)...(19): siRNA sense strand
ggucaucaguaauaucuuc

SEQ ID NO: 1107721 - RNA, 19 nt, Homo sapiens
  misc_RNA (1)...(19): siRNA sense strand
gcuccuaaaucucaaaaua

SEQ ID NO: 1107722 - RNA, 19 nt, Homo sapiens
  misc_RNA (1)...(19): siRNA sense strand
ccacuaugacgcuuccuua

SEQ ID NO: 1107723 - RNA, 19 nt, Homo sapiens
  misc_RNA (1)...(19): siRNA sense strand
gccaagaucugaccgugau

SEQ ID NO: 1107724 - RNA, 19 nt, Homo sapiens
  misc_RNA (1)...(19): siRNA sense strand
ucauucuccucuucuauuu

SEQ ID NO: 1107725 - RNA, 19 nt, Homo sapiens
  misc_RNA (1)...(19): siRNA sense strand
ggaagguggucaucacacu

SEQ ID NO: 1107726 - RNA, 19 nt, Homo sapiens
  misc_RNA (1)...(19): siRNA sense strand
ggagcaguguggccuucaa

SEQ ID NO: 1107727 - RNA, 19 nt, Homo sapiens
  misc_RNA (1)...(19): siRNA sense strand
cuaugacgcuuccuuagag

SEQ ID NO: 1107728 - RNA, 19 nt, Homo sapiens
  misc_RNA (1)...(19): siRNA sense strand
ugguggaggugacagcuuu

SEQ ID NO: 1107729 - RNA, 19 nt, Homo sapiens
  misc_RNA (1)...(19): siRNA sense strand
gcucguggcauccuaucaa

SEQ ID NO: 1107730 - RNA, 19 nt, Homo sapiens
  misc_RNA (1)...(19): siRNA sense strand
guauucggcuggccaccau

SEQ ID NO: 1107731 - RNA, 19 nt, Homo sapiens
  misc_RNA (1)...(19): siRNA sense strand
acuggaagcagcucucauu

SEQ ID NO: 1107732 - RNA, 19 nt, Homo sapiens
  misc_RNA (1)...(19): siRNA sense strand
caucaguaauaucuucaac

SEQ ID NO: 1107733 - RNA, 19 nt, Homo sapiens
  misc_RNA (1)...(19): siRNA sense strand
gguggaggugacagcuuua

SEQ ID NO: 1107734 - RNA, 19 nt, Homo sapiens
  misc_RNA (1)...(19): siRNA sense strand
ggccuucaaccucuucaug

SEQ ID NO: 1107735 - RNA, 19 nt, Homo sapiens
  misc_RNA (1)...(19): siRNA sense strand
ggaagcagcucucauucuc

SEQ ID NO: 1107736 - RNA, 19 nt, Homo sapiens
  misc_RNA (1)...(19): siRNA sense strand
ggucaucaguaauaucuuc

SEQ ID NO: 1107737 - RNA, 19 nt, Homo sapiens
  misc_RNA (1)...(19): siRNA sense strand
ccacuaugacgcuuccuua

SEQ ID NO: 1107738 - RNA, 19 nt, Homo sapiens
  misc_RNA (1)...(19): siRNA sense strand
gccaagaucugaccgugau

SEQ ID NO: 1107739 - RNA, 19 nt, Homo sapiens
  misc_RNA (1)...(19): siRNA sense strand
ucauucuccucuucuauuu

SEQ ID NO: 1107740 - RNA, 19 nt, Homo sapiens
  misc_RNA (1)...(19): siRNA sense strand
ggaagguggucaucacacu

SEQ ID NO: 1107741 - RNA, 19 nt, Homo sapiens
  misc_RNA (1)...(19): siRNA sense strand
ggagcaguguggccuucaa

SEQ ID NO: 1107742 - RNA, 19 nt, Homo sapiens
  misc_RNA (1)...(19): siRNA sense strand
cuaugacgcuuccuuagag

SEQ ID NO: 1107743 - RNA, 19 nt, Homo sapiens
  misc_RNA (1)...(19): siRNA sense strand
ugguggaggugacagcuuu

SEQ ID NO: 1107744 - RNA, 19 nt, Homo sapiens
  misc_RNA (1)...(19): siRNA sense strand
gcucguggcauccuaucaa

SEQ ID NO: 1107745 - RNA, 19 nt, Homo sapiens
  misc_RNA (1)...(19): siRNA sense strand
guauucggcuggccaccau

SEQ ID NO: 1107746 - RNA, 19 nt, Homo sapiens
  misc_RNA (1)...(19): siRNA sense strand
acuggaagcagcucucauu

SEQ ID NO: 1107747 - RNA, 19 nt, Homo sapiens
  misc_RNA (1)...(19): siRNA sense strand
caucaguaauaucuucaac

SEQ ID NO: 1107748 - RNA, 19 nt, Homo sapiens
  misc_RNA (1)...(19): siRNA sense strand
gguggaggugacagcuuua

SEQ ID NO: 1107749 - RNA, 19 nt, Homo sapiens
  misc_RNA (1)...(19): siRNA sense strand
ggccuucaaccucuucaug

SEQ ID NO: 1107750 - RNA, 19 nt, Homo sapiens
  misc_RNA (1)...(19): siRNA sense strand
ucauuuggcuguuggauuu

SEQ ID NO: 1107751 - RNA, 19 nt, Homo sapiens
  misc_RNA (1)...(19): siRNA sense strand
ggaagcagcucucauucuc

SEQ ID NO: 1107752 - RNA, 19 nt, Homo sapiens
  misc_RNA (1)...(19): siRNA sense strand
ggucaucaguaauaucuuc

SEQ ID NO: 1107753 - RNA, 19 nt, Homo sapiens
  misc_RNA (1)...(19): siRNA sense strand
ccacuaugacgcuuccuua

SEQ ID NO: 1107754 - RNA, 19 nt, Homo sapiens
  misc_RNA (1)...(19): siRNA sense strand
gccaagaucugaccgugau

SEQ ID NO: 1107755 - RNA, 19 nt, Homo sapiens
  misc_RNA (1)...(19): siRNA sense strand
ucauucuccucuucuauuu

SEQ ID NO: 1107756 - RNA, 19 nt, Homo sapiens
  misc_RNA (1)...(19): siRNA sense strand
ggaagguggucaucacacu

SEQ ID NO: 1107757 - RNA, 19 nt, Homo sapiens
  misc_RNA (1)...(19): siRNA sense strand
ggagcaguguggccuucaa

SEQ ID NO: 1107758 - RNA, 19 nt, Homo sapiens
  misc_RNA (1)...(19): siRNA sense strand
cuaugacgcuuccuuagag

SEQ ID NO: 1107759 - RNA, 19 nt, Homo sapiens
  misc_RNA (1)...(19): siRNA sense strand
ugguggaggugacagcuuu

SEQ ID NO: 1107760 - RNA, 19 nt, Homo sapiens
  misc_RNA (1)...(19): siRNA sense strand
gcucguggcauccuaucaa

SEQ ID NO: 1107761 - RNA, 19 nt, Homo sapiens
  misc_RNA (1)...(19): siRNA sense strand
guauucggcuggccaccau

SEQ ID NO: 1107762 - RNA, 19 nt, Homo sapiens
  misc_RNA (1)...(19): siRNA sense strand
acuggaagcagcucucauu

SEQ ID NO: 1107763 - RNA, 19 nt, Homo sapiens
  misc_RNA (1)...(19): siRNA sense strand
caucaguaauaucuucaac

SEQ ID NO: 1107764 - RNA, 19 nt, Homo sapiens
  misc_RNA (1)...(19): siRNA sense strand
caaguuuucuggaaguuuc

SEQ ID NO: 1107765 - RNA, 19 nt, Homo sapiens
  misc_RNA (1)...(19): siRNA sense strand
gguggaggugacagcuuua

SEQ ID NO: 1107766 - RNA, 19 nt, Homo sapiens
  misc_RNA (1)...(19): siRNA sense strand
ggccuucaaccucuucaug

SEQ ID NO: 1107767 - RNA, 19 nt, Homo sapiens
  misc_RNA (1)...(19): siRNA sense strand
ucauuuggcuguuggauuu

SEQ ID NO: 1107768 - RNA, 19 nt, Homo sapiens
  misc_RNA (1)...(19): siRNA sense strand
ggaagcagcucucauucuc

SEQ ID NO: 1107769 - RNA, 19 nt, Homo sapiens
  misc_RNA (1)...(19): siRNA sense strand
ggucaucaguaauaucuuc

SEQ ID NO: 1107770 - RNA, 19 nt, Homo sapiens
  misc_RNA (1)...(19): siRNA sense strand
ccacuaugacgcuuccuua

SEQ ID NO: 1107771 - RNA, 19 nt, Homo sapiens
  misc_RNA (1)...(19): siRNA sense strand
gccaagaucugaccgugau

SEQ ID NO: 1107772 - RNA, 19 nt, Homo sapiens
  misc_RNA (1)...(19): siRNA sense strand
ucauucuccucuucuauuu

SEQ ID NO: 1107773 - RNA, 19 nt, Homo sapiens
  misc_RNA (1)...(19): siRNA sense strand
ggaagguggucaucacacu

SEQ ID NO: 1107774 - RNA, 19 nt, Homo sapiens
  misc_RNA (1)...(19): siRNA sense strand
ggagcaguguggccuucaa

SEQ ID NO: 1107775 - RNA, 19 nt, Homo sapiens
  misc_RNA (1)...(19): siRNA sense strand
cuaugacgcuuccuuagag

SEQ ID NO: 1107776 - RNA, 19 nt, Homo sapiens
  misc_RNA (1)...(19): siRNA sense strand
ugguggaggugacagcuuu

SEQ ID NO: 1107777 - RNA, 19 nt, Homo sapiens
  misc_RNA (1)...(19): siRNA sense strand
gcucguggcauccuaucaa

SEQ ID NO: 1107778 - RNA, 19 nt, Homo sapiens
  misc_RNA (1)...(19): siRNA sense strand
guauucggcuggccaccau

SEQ ID NO: 1107779 - RNA, 19 nt, Homo sapiens
  misc_RNA (1)...(19): siRNA sense strand
acuggaagcagcucucauu

SEQ ID NO: 1107780 - RNA, 19 nt, Homo sapiens
  misc_RNA (1)...(19): siRNA sense strand
caucaguaauaucuucaac

SEQ ID NO: 1107781 - RNA, 19 nt, Homo sapiens
  misc_RNA (1)...(19): siRNA sense strand
caaguuuucuggaaguuuc

SEQ ID NO: 1107782 - RNA, 19 nt, Homo sapiens
  misc_RNA (1)...(19): siRNA sense strand
gguggaggugacagcuuua

SEQ ID NO: 1107783 - RNA, 19 nt, Homo sapiens
  misc_RNA (1)...(19): siRNA sense strand
ggccuucaaccucuucaug

SEQ ID NO: 1107784 - RNA, 19 nt, Homo sapiens
  misc_RNA (1)...(19): siRNA sense strand
ggaagcagcucucauucuc

SEQ ID NO: 1107785 - RNA, 19 nt, Homo sapiens
  misc_RNA (1)...(19): siRNA sense strand
ggucaucaguaauaucuuc

SEQ ID NO: 1107786 - RNA, 19 nt, Homo sapiens
  misc_RNA (1)...(19): siRNA sense strand
gcuccuaaaucucaaaaua

SEQ ID NO: 1107787 - RNA, 19 nt, Homo sapiens
  misc_RNA (1)...(19): siRNA sense strand
ccacuaugacgcuuccuua

SEQ ID NO: 1107788 - RNA, 19 nt, Homo sapiens
  misc_RNA (1)...(19): siRNA sense strand
gccaagaucugaccgugau

SEQ ID NO: 1107789 - RNA, 19 nt, Homo sapiens
  misc_RNA (1)...(19): siRNA sense strand
ucauucuccucuucuauuu

SEQ ID NO: 1107790 - RNA, 19 nt, Homo sapiens
  misc_RNA (1)...(19): siRNA sense strand
ggaagguggucaucacacu

SEQ ID NO: 1107791 - RNA, 19 nt, Homo sapiens
  misc_RNA (1)...(19): siRNA sense strand
ggagcaguguggccuucaa

SEQ ID NO: 1107792 - RNA, 19 nt, Homo sapiens
  misc_RNA (1)...(19): siRNA sense strand
cuaugacgcuuccuuagag

SEQ ID NO: 1107793 - RNA, 19 nt, Homo sapiens
  misc_RNA (1)...(19): siRNA sense strand
ugguggaggugacagcuuu

SEQ ID NO: 1107794 - RNA, 19 nt, Homo sapiens
  misc_RNA (1)...(19): siRNA sense strand
gcucguggcauccuaucaa

SEQ ID NO: 1107795 - RNA, 19 nt, Homo sapiens
  misc_RNA (1)...(19): siRNA sense strand
guauucggcuggccaccau

SEQ ID NO: 1107796 - RNA, 19 nt, Homo sapiens
  misc_RNA (1)...(19): siRNA sense strand
acuggaagcagcucucauu

SEQ ID NO: 1107797 - RNA, 19 nt, Homo sapiens
  misc_RNA (1)...(19): siRNA sense strand
caucaguaauaucuucaac

SEQ ID NO: 1107798 - RNA, 19 nt, Homo sapiens
  misc_RNA (1)...(19): siRNA sense strand
gguggaggugacagcuuua

SEQ ID NO: 1107799 - RNA, 19 nt, Homo sapiens
  misc_RNA (1)...(19): siRNA sense strand
ggccuucaaccucuucaug

SEQ ID NO: 1107800 - RNA, 19 nt, Homo sapiens
  misc_RNA (1)...(19): siRNA sense strand
ggaagcagcucucauucuc

SEQ ID NO: 1107801 - RNA, 19 nt, Homo sapiens
  misc_RNA (1)...(19): siRNA sense strand
ggucaucaguaauaucuuc

SEQ ID NO: 1107802 - RNA, 19 nt, Homo sapiens
  misc_RNA (1)...(19): siRNA sense strand
ccacuaugacgcuuccuua

SEQ ID NO: 1107803 - RNA, 19 nt, Homo sapiens
  misc_RNA (1)...(19): siRNA sense strand
gccaagaucugaccgugau

SEQ ID NO: 1107804 - RNA, 19 nt, Homo sapiens
  misc_RNA (1)...(19): siRNA sense strand
ucauucuccucuucuauuu

SEQ ID NO: 1107805 - RNA, 19 nt, Homo sapiens
  misc_RNA (1)...(19): siRNA sense strand
ggaagguggucaucacacu

SEQ ID NO: 1107806 - RNA, 19 nt, Homo sapiens
  misc_RNA (1)...(19): siRNA sense strand
ggagcaguguggccuucaa

SEQ ID NO: 1107807 - RNA, 19 nt, Homo sapiens
  misc_RNA (1)...(19): siRNA sense strand
cuaugacgcuuccuuagag

SEQ ID NO: 1107808 - RNA, 19 nt, Homo sapiens
  misc_RNA (1)...(19): siRNA sense strand
ugguggaggugacagcuuu

SEQ ID NO: 1107809 - RNA, 19 nt, Homo sapiens
  misc_RNA (1)...(19): siRNA sense strand
gcucguggcauccuaucaa

SEQ ID NO: 1107810 - RNA, 19 nt, Homo sapiens
  misc_RNA (1)...(19): siRNA sense strand
guauucggcuggccaccau

SEQ ID NO: 1107811 - RNA, 19 nt, Homo sapiens
  misc_RNA (1)...(19): siRNA sense strand
acuggaagcagcucucauu

SEQ ID NO: 1107812 - RNA, 19 nt, Homo sapiens
  misc_RNA (1)...(19): siRNA sense strand
caucaguaauaucuucaac

SEQ ID NO: 1107813 - RNA, 19 nt, Homo sapiens
  misc_RNA (1)...(19): siRNA sense strand
gguggaggugacagcuuua

SEQ ID NO: 1107814 - RNA, 19 nt, Homo sapiens
  misc_RNA (1)...(19): siRNA sense strand
ggccuucaaccucuucaug

SEQ ID NO: 1107815 - RNA, 19 nt, Homo sapiens
  misc_RNA (1)...(19): siRNA sense strand
ggacagaacucucuccauu

SEQ ID NO: 1107816 - RNA, 19 nt, Homo sapiens
  misc_RNA (1)...(19): siRNA sense strand
acagaacucucuccauuua

SEQ ID NO: 1107817 - RNA, 19 nt, Homo sapiens
  misc_RNA (1)...(19): siRNA sense strand
ugaaggagcuguuugauca

SEQ ID NO: 1107818 - RNA, 19 nt, Homo sapiens
  misc_RNA (1)...(19): siRNA sense strand
gaggagaaguccaagcuuu

SEQ ID NO: 1107819 - RNA, 19 nt, Homo sapiens
  misc_RNA (1)...(19): siRNA sense strand
gugagaugcugcuucauua

SEQ ID NO: 1107820 - RNA, 19 nt, Homo sapiens
  misc_RNA (1)...(19): siRNA sense strand
acagagagcugaugaagga

SEQ ID NO: 1107821 - RNA, 19 nt, Homo sapiens
  misc_RNA (1)...(19): siRNA sense strand
ggacaaugauaacaguuug

SEQ ID NO: 1107822 - RNA, 19 nt, Homo sapiens
  misc_RNA (1)...(19): siRNA sense strand
ggacugggaauacauaauu

SEQ ID NO: 1107823 - RNA, 19 nt, Homo sapiens
  misc_RNA (1)...(19): siRNA sense strand
ccaacaagcucaucaaguc

SEQ ID NO: 1107824 - RNA, 19 nt, Homo sapiens
  misc_RNA (1)...(19): siRNA sense strand
gaacacggcucccuuaccu

SEQ ID NO: 1107825 - RNA, 19 nt, Homo sapiens
  misc_RNA (1)...(19): siRNA sense strand
gaacaagaggcggacuuua

SEQ ID NO: 1107826 - RNA, 19 nt, Homo sapiens
  misc_RNA (1)...(19): siRNA sense strand
caaagacgccuaccacaug

SEQ ID NO: 1107827 - RNA, 19 nt, Homo sapiens
  misc_RNA (1)...(19): siRNA sense strand
ggaaacagucagugcagua

SEQ ID NO: 1107828 - RNA, 19 nt, Homo sapiens
  misc_RNA (1)...(19): siRNA sense strand
gaagagacagggcauagug

SEQ ID NO: 1107829 - RNA, 19 nt, Homo sapiens
  misc_RNA (1)...(19): siRNA sense strand
uagaggaaguuaacaacaa

SEQ ID NO: 1107830 - RNA, 19 nt, Homo sapiens
  misc_RNA (1)...(19): siRNA sense strand
ccaauccacugaaggagaa

SEQ ID NO: 1107831 - RNA, 19 nt, Homo sapiens
  misc_RNA (1)...(19): siRNA sense strand
uauuuaaacucgccaguga

SEQ ID NO: 1107832 - RNA, 19 nt, Homo sapiens
  misc_RNA (1)...(19): siRNA sense strand
ccaagucaaugaaagugaa

SEQ ID NO: 1107833 - RNA, 19 nt, Homo sapiens
  misc_RNA (1)...(19): siRNA sense strand
ggucaucaacucuuacaaa

SEQ ID NO: 1107834 - RNA, 19 nt, Homo sapiens
  misc_RNA (1)...(19): siRNA sense strand
gaaacagucagugcaguaa

SEQ ID NO: 1107835 - RNA, 19 nt, Homo sapiens
  misc_RNA (1)...(19): siRNA sense strand
agacugaggacaaugauaa

SEQ ID NO: 1107836 - RNA, 19 nt, Homo sapiens
  misc_RNA (1)...(19): siRNA sense strand
ggaggacugggaauacaua

SEQ ID NO: 1107837 - RNA, 19 nt, Homo sapiens
  misc_RNA (1)...(19): siRNA sense strand
ucagugagaugcugcuuca

SEQ ID NO: 1107838 - RNA, 19 nt, Homo sapiens
  misc_RNA (1)...(19): siRNA sense strand
auaauuggcuucugugauc

SEQ ID NO: 1107839 - RNA, 19 nt, Homo sapiens
  misc_RNA (1)...(19): siRNA sense strand
gggagcagcugagcacaga

SEQ ID NO: 1107840 - RNA, 19 nt, Homo sapiens
  misc_RNA (1)...(19): siRNA sense strand
ccaagcgucugcacacguu

SEQ ID NO: 1107841 - RNA, 19 nt, Homo sapiens
  misc_RNA (1)...(19): siRNA sense strand
ucaaguccauggugaagga

SEQ ID NO: 1107842 - RNA, 19 nt, Homo sapiens
  misc_RNA (1)...(19): siRNA sense strand
aaagugaagaccaagguua

SEQ ID NO: 1107843 - RNA, 19 nt, Homo sapiens
  misc_RNA (1)...(19): siRNA sense strand
gacagaacucucuccauuu

SEQ ID NO: 1107844 - RNA, 19 nt, Homo sapiens
  misc_RNA (1)...(19): siRNA sense strand
gcugaacacggcucccuua

SEQ ID NO: 1107845 - RNA, 19 nt, Homo sapiens
  misc_RNA (1)...(19): siRNA sense strand
caagaggcggacuuuauuu

SEQ ID NO: 1107846 - RNA, 19 nt, Homo sapiens
  misc_RNA (1)...(19): siRNA sense strand
ggacacgaccaacaguuug

SEQ ID NO: 1107847 - RNA, 19 nt, Homo sapiens
  misc_RNA (1)...(19): siRNA sense strand
auacauaauuggcuucugu

SEQ ID NO: 1107848 - RNA, 19 nt, Homo sapiens
  misc_RNA (1)...(19): siRNA sense strand
gcagugcccaagucaauga

SEQ ID NO: 1107849 - RNA, 19 nt, Homo sapiens
  misc_RNA (1)...(19): siRNA sense strand
gaaagugaagaccaagguu

SEQ ID NO: 1107850 - RNA, 19 nt, Homo sapiens
  misc_RNA (1)...(19): siRNA sense strand
ggacagagagcugaugaag

SEQ ID NO: 1107851 - RNA, 19 nt, Homo sapiens
  misc_RNA (1)...(19): siRNA sense strand
acaagaggcggacuuuauu

SEQ ID NO: 1107852 - RNA, 19 nt, Homo sapiens
  misc_RNA (1)...(19): siRNA sense strand
aagaggcggacuuuauuua

SEQ ID NO: 1107853 - RNA, 19 nt, Homo sapiens
  misc_RNA (1)...(19): siRNA sense strand
gacugggaauacauaauug

SEQ ID NO: 1107854 - RNA, 19 nt, Homo sapiens
  misc_RNA (1)...(19): siRNA sense strand
caucaacucuuacaaaaca

SEQ ID NO: 1107855 - RNA, 19 nt, Homo sapiens
  misc_RNA (1)...(19): siRNA sense strand
ggagcuguuugaucagugu

SEQ ID NO: 1107856 - RNA, 19 nt, Homo sapiens
  misc_RNA (1)...(19): siRNA sense strand
ugugacagccuacgauaaa

SEQ ID NO: 1107857 - RNA, 19 nt, Homo sapiens
  misc_RNA (1)...(19): siRNA sense strand
gaagggcaggucaucaaug

SEQ ID NO: 1107858 - RNA, 19 nt, Homo sapiens
  misc_RNA (1)...(19): siRNA sense strand
cuggaguccuggcucaaua

SEQ ID NO: 1107859 - RNA, 19 nt, Homo sapiens
  misc_RNA (1)...(19): siRNA sense strand
agaagaagcaaagaucaaa

SEQ ID NO: 1107860 - RNA, 19 nt, Homo sapiens
  misc_RNA (1)...(19): siRNA sense strand
ugaggacaaugauaacagu

SEQ ID NO: 1107861 - RNA, 19 nt, Homo sapiens
  misc_RNA (1)...(19): siRNA sense strand
gaagaagcaaagaucaaag

SEQ ID NO: 1107862 - RNA, 19 nt, Homo sapiens
  misc_RNA (1)...(19): siRNA sense strand
uuauugagcugcuguacag

SEQ ID NO: 1107863 - RNA, 19 nt, Homo sapiens
  misc_RNA (1)...(19): siRNA sense strand
ccaccuggaugcccucgau

SEQ ID NO: 1107864 - RNA, 19 nt, Homo sapiens
  misc_RNA (1)...(19): siRNA sense strand
aacaagaggcggacuuuau

SEQ ID NO: 1107865 - RNA, 19 nt, Homo sapiens
  misc_RNA (1)...(19): siRNA sense strand
gagaugcugcuucauuaca

SEQ ID NO: 1107866 - RNA, 19 nt, Homo sapiens
  misc_RNA (1)...(19): siRNA sense strand
gugaagaccaagguuauug

SEQ ID NO: 1107867 - RNA, 19 nt, Homo sapiens
  misc_RNA (1)...(19): siRNA sense strand
cuaauguuccucccaaaga

SEQ ID NO: 1107868 - RNA, 19 nt, Homo sapiens
  misc_RNA (1)...(19): siRNA sense strand
acgaggagcuacucugcuu

SEQ ID NO: 1107869 - RNA, 19 nt, Homo sapiens
  misc_RNA (1)...(19): siRNA sense strand
ggagaaguccaagcuuuua

SEQ ID NO: 1107870 - RNA, 19 nt, Homo sapiens
  misc_RNA (1)...(19): siRNA sense strand
cagaagaagcaaagaucaa

SEQ ID NO: 1107871 - RNA, 19 nt, Homo sapiens
  misc_RNA (1)...(19): siRNA sense strand
gagacugaggacaaugaua

SEQ ID NO: 1107872 - RNA, 19 nt, Homo sapiens
  misc_RNA (1)...(19): siRNA sense strand
agaggcggacuuuauuuaa

SEQ ID NO: 1107873 - RNA, 19 nt, Homo sapiens
  misc_RNA (1)...(19): siRNA sense strand
ugaagaccaagguuauuga

SEQ ID NO: 1107874 - RNA, 19 nt, Homo sapiens
  misc_RNA (1)...(19): siRNA sense strand
cugagaaagugaagaccaa

SEQ ID NO: 1107875 - RNA, 19 nt, Homo sapiens
  misc_RNA (1)...(19): siRNA sense strand
gcagucugacccaccaauu

SEQ ID NO: 1107876 - RNA, 19 nt, Homo sapiens
  misc_RNA (1)...(19): siRNA sense strand
ggaguccuggcucaauaaa

SEQ ID NO: 1107877 - RNA, 19 nt, Homo sapiens
  misc_RNA (1)...(19): siRNA sense strand
cagggugucugagaaagug

SEQ ID NO: 1107878 - RNA, 19 nt, Homo sapiens
  misc_RNA (1)...(19): siRNA sense strand
ugaugaaggagcuguuuga

SEQ ID NO: 1107879 - RNA, 19 nt, Homo sapiens
  misc_RNA (1)...(19): siRNA sense strand
ccagaagaagcaaagauca

SEQ ID NO: 1107880 - RNA, 19 nt, Homo sapiens
  misc_RNA (1)...(19): siRNA sense strand
caggaggacugggaauaca

SEQ ID NO: 1107881 - RNA, 19 nt, Homo sapiens
  misc_RNA (1)...(19): siRNA sense strand
uaauguuccucccaaagag

SEQ ID NO: 1107882 - RNA, 19 nt, Homo sapiens
  misc_RNA (1)...(19): siRNA sense strand
gagaacaagaggcggacuu

SEQ ID NO: 1107883 - RNA, 19 nt, Homo sapiens
  misc_RNA (1)...(19): siRNA sense strand
ucaaagacgccuaccacau

SEQ ID NO: 1107884 - RNA, 19 nt, Homo sapiens
  misc_RNA (1)...(19): siRNA sense strand
gagcuggacacgaccaaca

SEQ ID NO: 1107885 - RNA, 19 nt, Homo sapiens
  misc_RNA (1)...(19): siRNA sense strand
aagaagcaaagaucaaaga

SEQ ID NO: 1107886 - RNA, 19 nt, Homo sapiens
  misc_RNA (1)...(19): siRNA sense strand
gaucaacaaggagcuggaa

SEQ ID NO: 1107887 - RNA, 19 nt, Homo sapiens
  misc_RNA (1)...(19): siRNA sense strand
gucaucaacucuuacaaaa

SEQ ID NO: 1107888 - RNA, 19 nt, Homo sapiens
  misc_RNA (1)...(19): siRNA sense strand
cccgggucaucaacucuua

SEQ ID NO: 1107889 - RNA, 19 nt, Homo sapiens
  misc_RNA (1)...(19): siRNA sense strand
gaagaccaagguuauugag

SEQ ID NO: 1107890 - RNA, 19 nt, Homo sapiens
  misc_RNA (1)...(19): siRNA sense strand
ccgcauccucuuccacuuu

SEQ ID NO: 1107891 - RNA, 19 nt, Homo sapiens
  misc_RNA (1)...(19): siRNA sense strand
aagggcaggucaucaaugg

SEQ ID NO: 1107892 - RNA, 19 nt, Homo sapiens
  misc_RNA (1)...(19): siRNA sense strand
gugagacugaggacaauga

SEQ ID NO: 1107893 - RNA, 19 nt, Homo sapiens
  misc_RNA (1)...(19): siRNA sense strand
gaggacugggaauacauaa

SEQ ID NO: 1107894 - RNA, 19 nt, Homo sapiens
  misc_RNA (1)...(19): siRNA sense strand
gccagaagaagcaaagauc

SEQ ID NO: 1107895 - RNA, 19 nt, Homo sapiens
  misc_RNA (1)...(19): siRNA sense strand
gagcuggaagggccacaga

SEQ ID NO: 1107896 - RNA, 19 nt, Homo sapiens
  misc_RNA (1)...(19): siRNA sense strand
cgcauccucuuccacuuug

SEQ ID NO: 1107897 - RNA, 19 nt, Homo sapiens
  misc_RNA (1)...(19): siRNA sense strand
gaaucgaucaagccuagca

SEQ ID NO: 1107898 - RNA, 19 nt, Homo sapiens
  misc_RNA (1)...(19): siRNA sense strand
cuagaagaggccaaaguga

SEQ ID NO: 1107899 - RNA, 19 nt, Homo sapiens
  misc_RNA (1)...(19): siRNA sense strand
uagccaagcugcugaaaag

SEQ ID NO: 1107900 - RNA, 19 nt, Homo sapiens
  misc_RNA (1)...(19): siRNA sense strand
caauaaagccaccaauccu

SEQ ID NO: 1107901 - RNA, 19 nt, Homo sapiens
  misc_RNA (1)...(19): siRNA sense strand
gcugaugaaggagcuguuu

SEQ ID NO: 1107902 - RNA, 19 nt, Homo sapiens
  misc_RNA (1)...(19): siRNA sense strand
agugagaugcugcuucauu

SEQ ID NO: 1107903 - RNA, 19 nt, Homo sapiens
  misc_RNA (1)...(19): siRNA sense strand
gcacacguuagaggaaguu

SEQ ID NO: 1107904 - RNA, 19 nt, Homo sapiens
  misc_RNA (1)...(19): siRNA sense strand
ucaauaaagccaccaaucc

SEQ ID NO: 1107905 - RNA, 19 nt, Homo sapiens
  misc_RNA (1)...(19): siRNA sense strand
caguuuguccuccguguug

SEQ ID NO: 1107906 - RNA, 19 nt, Homo sapiens
  misc_RNA (1)...(19): siRNA sense strand
uggacacgaccaacaguuu

SEQ ID NO: 1107907 - RNA, 19 nt, Homo sapiens
  misc_RNA (1)...(19): siRNA sense strand
agaacaagaggcggacuuu

SEQ ID NO: 1107908 - RNA, 19 nt, Homo sapiens
  misc_RNA (1)...(19): siRNA sense strand
gaucagugugagaacaaga

SEQ ID NO: 1107909 - RNA, 19 nt, Homo sapiens
  misc_RNA (1)...(19): siRNA sense strand
agaggaaguuaacaacaac

SEQ ID NO: 1107910 - RNA, 19 nt, Homo sapiens
  misc_RNA (1)...(19): siRNA sense strand
aauaaagccaccaauccuu

SEQ ID NO: 1107911 - RNA, 19 nt, Homo sapiens
  misc_RNA (1)...(19): siRNA sense strand
ugggcgagguggaccaguu

SEQ ID NO: 1107912 - RNA, 19 nt, Homo sapiens
  misc_RNA (1)...(19): siRNA sense strand
agaacucucuccauuuagc

SEQ ID NO: 1107913 - RNA, 19 nt, Homo sapiens
  misc_RNA (1)...(19): siRNA sense strand
ucuagaagaggccaaagug

SEQ ID NO: 1107914 - RNA, 19 nt, Homo sapiens
  misc_RNA (1)...(19): siRNA sense strand
aaggugcggcuucgguaua

SEQ ID NO: 1107915 - RNA, 19 nt, Homo sapiens
  misc_RNA (1)...(19): siRNA sense strand
ggacagaacucucuccauu

SEQ ID NO: 1107916 - RNA, 19 nt, Homo sapiens
  misc_RNA (1)...(19): siRNA sense strand
acagaacucucuccauuua

SEQ ID NO: 1107917 - RNA, 19 nt, Homo sapiens
  misc_RNA (1)...(19): siRNA sense strand
ugaaggagcuguuugauca

SEQ ID NO: 1107918 - RNA, 19 nt, Homo sapiens
  misc_RNA (1)...(19): siRNA sense strand
gaggagaaguccaagcuuu

SEQ ID NO: 1107919 - RNA, 19 nt, Homo sapiens
  misc_RNA (1)...(19): siRNA sense strand
gugagaugcugcuucauua

SEQ ID NO: 1107920 - RNA, 19 nt, Homo sapiens
  misc_RNA (1)...(19): siRNA sense strand
acagagagcugaugaagga

SEQ ID NO: 1107921 - RNA, 19 nt, Homo sapiens
  misc_RNA (1)...(19): siRNA sense strand
ggacaaugauaacaguuug

SEQ ID NO: 1107922 - RNA, 19 nt, Homo sapiens
  misc_RNA (1)...(19): siRNA sense strand
ggacugggaauacauaauu

SEQ ID NO: 1107923 - RNA, 19 nt, Homo sapiens
  misc_RNA (1)...(19): siRNA sense strand
ccaacaagcucaucaaguc

SEQ ID NO: 1107924 - RNA, 19 nt, Homo sapiens
  misc_RNA (1)...(19): siRNA sense strand
gaacacggcucccuuaccu

SEQ ID NO: 1107925 - RNA, 19 nt, Homo sapiens
  misc_RNA (1)...(19): siRNA sense strand
gaacaagaggcggacuuua

SEQ ID NO: 1107926 - RNA, 19 nt, Homo sapiens
  misc_RNA (1)...(19): siRNA sense strand
caaagacgccuaccacaug

SEQ ID NO: 1107927 - RNA, 19 nt, Homo sapiens
  misc_RNA (1)...(19): siRNA sense strand
ggaaacagucagugcagua

SEQ ID NO: 1107928 - RNA, 19 nt, Homo sapiens
  misc_RNA (1)...(19): siRNA sense strand
gaagagacagggcauagug

SEQ ID NO: 1107929 - RNA, 19 nt, Homo sapiens
  misc_RNA (1)...(19): siRNA sense strand
uagaggaaguuaacaacaa

SEQ ID NO: 1107930 - RNA, 19 nt, Homo sapiens
  misc_RNA (1)...(19): siRNA sense strand
ccaauccacugaaggagaa

SEQ ID NO: 1107931 - RNA, 19 nt, Homo sapiens
  misc_RNA (1)...(19): siRNA sense strand
uauuuaaacucgccaguga

SEQ ID NO: 1107932 - RNA, 19 nt, Homo sapiens
  misc_RNA (1)...(19): siRNA sense strand
ccaagucaaugaaagugaa

SEQ ID NO: 1107933 - RNA, 19 nt, Homo sapiens
  misc_RNA (1)...(19): siRNA sense strand
ggucaucaacucuuacaaa

SEQ ID NO: 1107934 - RNA, 19 nt, Homo sapiens
  misc_RNA (1)...(19): siRNA sense strand
gaaacagucagugcaguaa

SEQ ID NO: 1107935 - RNA, 19 nt, Homo sapiens
  misc_RNA (1)...(19): siRNA sense strand
agacugaggacaaugauaa

SEQ ID NO: 1107936 - RNA, 19 nt, Homo sapiens
  misc_RNA (1)...(19): siRNA sense strand
ggaggacugggaauacaua

SEQ ID NO: 1107937 - RNA, 19 nt, Homo sapiens
  misc_RNA (1)...(19): siRNA sense strand
ucagugagaugcugcuuca

SEQ ID NO: 1107938 - RNA, 19 nt, Homo sapiens
  misc_RNA (1)...(19): siRNA sense strand
auaauuggcuucugugauc

SEQ ID NO: 1107939 - RNA, 19 nt, Homo sapiens
  misc_RNA (1)...(19): siRNA sense strand
gggagcagcugagcacaga

SEQ ID NO: 1107940 - RNA, 19 nt, Homo sapiens
  misc_RNA (1)...(19): siRNA sense strand
ccaagcgucugcacacguu

SEQ ID NO: 1107941 - RNA, 19 nt, Homo sapiens
  misc_RNA (1)...(19): siRNA sense strand
ucaaguccauggugaagga

SEQ ID NO: 1107942 - RNA, 19 nt, Homo sapiens
  misc_RNA (1)...(19): siRNA sense strand
aaagugaagaccaagguua

SEQ ID NO: 1107943 - RNA, 19 nt, Homo sapiens
  misc_RNA (1)...(19): siRNA sense strand
gacagaacucucuccauuu

SEQ ID NO: 1107944 - RNA, 19 nt, Homo sapiens
  misc_RNA (1)...(19): siRNA sense strand
gcugaacacggcucccuua

SEQ ID NO: 1107945 - RNA, 19 nt, Homo sapiens
  misc_RNA (1)...(19): siRNA sense strand
caagaggcggacuuuauuu

SEQ ID NO: 1107946 - RNA, 19 nt, Homo sapiens
  misc_RNA (1)...(19): siRNA sense strand
ggacacgaccaacaguuug

SEQ ID NO: 1107947 - RNA, 19 nt, Homo sapiens
  misc_RNA (1)...(19): siRNA sense strand
auacauaauuggcuucugu

SEQ ID NO: 1107948 - RNA, 19 nt, Homo sapiens
  misc_RNA (1)...(19): siRNA sense strand
gcagugcccaagucaauga

SEQ ID NO: 1107949 - RNA, 19 nt, Homo sapiens
  misc_RNA (1)...(19): siRNA sense strand
gaaagugaagaccaagguu

SEQ ID NO: 1107950 - RNA, 19 nt, Homo sapiens
  misc_RNA (1)...(19): siRNA sense strand
ggacagagagcugaugaag

SEQ ID NO: 1107951 - RNA, 19 nt, Homo sapiens
  misc_RNA (1)...(19): siRNA sense strand
acaagaggcggacuuuauu

SEQ ID NO: 1107952 - RNA, 19 nt, Homo sapiens
  misc_RNA (1)...(19): siRNA sense strand
aagaggcggacuuuauuua

SEQ ID NO: 1107953 - RNA, 19 nt, Homo sapiens
  misc_RNA (1)...(19): siRNA sense strand
gacugggaauacauaauug

SEQ ID NO: 1107954 - RNA, 19 nt, Homo sapiens
  misc_RNA (1)...(19): siRNA sense strand
caucaacucuuacaaaaca

SEQ ID NO: 1107955 - RNA, 19 nt, Homo sapiens
  misc_RNA (1)...(19): siRNA sense strand
ggagcuguuugaucagugu

SEQ ID NO: 1107956 - RNA, 19 nt, Homo sapiens
  misc_RNA (1)...(19): siRNA sense strand
ugugacagccuacgauaaa

SEQ ID NO: 1107957 - RNA, 19 nt, Homo sapiens
  misc_RNA (1)...(19): siRNA sense strand
gaagggcaggucaucaaug

SEQ ID NO: 1107958 - RNA, 19 nt, Homo sapiens
  misc_RNA (1)...(19): siRNA sense strand
cuggaguccuggcucaaua

SEQ ID NO: 1107959 - RNA, 19 nt, Homo sapiens
  misc_RNA (1)...(19): siRNA sense strand
agaagaagcaaagaucaaa

SEQ ID NO: 1107960 - RNA, 19 nt, Homo sapiens
  misc_RNA (1)...(19): siRNA sense strand
ugaggacaaugauaacagu

SEQ ID NO: 1107961 - RNA, 19 nt, Homo sapiens
  misc_RNA (1)...(19): siRNA sense strand
gaagaagcaaagaucaaag

SEQ ID NO: 1107962 - RNA, 19 nt, Homo sapiens
  misc_RNA (1)...(19): siRNA sense strand
uuauugagcugcuguacag

SEQ ID NO: 1107963 - RNA, 19 nt, Homo sapiens
  misc_RNA (1)...(19): siRNA sense strand
ccaccuggaugcccucgau

SEQ ID NO: 1107964 - RNA, 19 nt, Homo sapiens
  misc_RNA (1)...(19): siRNA sense strand
aacaagaggcggacuuuau

SEQ ID NO: 1107965 - RNA, 19 nt, Homo sapiens
  misc_RNA (1)...(19): siRNA sense strand
gagaugcugcuucauuaca

SEQ ID NO: 1107966 - RNA, 19 nt, Homo sapiens
  misc_RNA (1)...(19): siRNA sense strand
gugaagaccaagguuauug

SEQ ID NO: 1107967 - RNA, 19 nt, Homo sapiens
  misc_RNA (1)...(19): siRNA sense strand
cuaauguuccucccaaaga

SEQ ID NO: 1107968 - RNA, 19 nt, Homo sapiens
  misc_RNA (1)...(19): siRNA sense strand
acgaggagcuacucugcuu

SEQ ID NO: 1107969 - RNA, 19 nt, Homo sapiens
  misc_RNA (1)...(19): siRNA sense strand
ggagaaguccaagcuuuua

SEQ ID NO: 1107970 - RNA, 19 nt, Homo sapiens
  misc_RNA (1)...(19): siRNA sense strand
cagaagaagcaaagaucaa

SEQ ID NO: 1107971 - RNA, 19 nt, Homo sapiens
  misc_RNA (1)...(19): siRNA sense strand
gagacugaggacaaugaua

SEQ ID NO: 1107972 - RNA, 19 nt, Homo sapiens
  misc_RNA (1)...(19): siRNA sense strand
agaggcggacuuuauuuaa

SEQ ID NO: 1107973 - RNA, 19 nt, Homo sapiens
  misc_RNA (1)...(19): siRNA sense strand
ugaagaccaagguuauuga

SEQ ID NO: 1107974 - RNA, 19 nt, Homo sapiens
  misc_RNA (1)...(19): siRNA sense strand
cugagaaagugaagaccaa

SEQ ID NO: 1107975 - RNA, 19 nt, Homo sapiens
  misc_RNA (1)...(19): siRNA sense strand
gcagucugacccaccaauu

SEQ ID NO: 1107976 - RNA, 19 nt, Homo sapiens
  misc_RNA (1)...(19): siRNA sense strand
ggaguccuggcucaauaaa

SEQ ID NO: 1107977 - RNA, 19 nt, Homo sapiens
  misc_RNA (1)...(19): siRNA sense strand
cagggugucugagaaagug

SEQ ID NO: 1107978 - RNA, 19 nt, Homo sapiens
  misc_RNA (1)...(19): siRNA sense strand
ugaugaaggagcuguuuga

SEQ ID NO: 1107979 - RNA, 19 nt, Homo sapiens
  misc_RNA (1)...(19): siRNA sense strand
ccagaagaagcaaagauca

SEQ ID NO: 1107980 - RNA, 19 nt, Homo sapiens
  misc_RNA (1)...(19): siRNA sense strand
caggaggacugggaauaca

SEQ ID NO: 1107981 - RNA, 19 nt, Homo sapiens
  misc_RNA (1)...(19): siRNA sense strand
uaauguuccucccaaagag

SEQ ID NO: 1107982 - RNA, 19 nt, Homo sapiens
  misc_RNA (1)...(19): siRNA sense strand
gagaacaagaggcggacuu

SEQ ID NO: 1107983 - RNA, 19 nt, Homo sapiens
  misc_RNA (1)...(19): siRNA sense strand
ucaaagacgccuaccacau

SEQ ID NO: 1107984 - RNA, 19 nt, Homo sapiens
  misc_RNA (1)...(19): siRNA sense strand
gagcuggacacgaccaaca

SEQ ID NO: 1107985 - RNA, 19 nt, Homo sapiens
  misc_RNA (1)...(19): siRNA sense strand
aagaagcaaagaucaaaga

SEQ ID NO: 1107986 - RNA, 19 nt, Homo sapiens
  misc_RNA (1)...(19): siRNA sense strand
gaucaacaaggagcuggaa

SEQ ID NO: 1107987 - RNA, 19 nt, Homo sapiens
  misc_RNA (1)...(19): siRNA sense strand
gucaucaacucuuacaaaa

SEQ ID NO: 1107988 - RNA, 19 nt, Homo sapiens
  misc_RNA (1)...(19): siRNA sense strand
cccgggucaucaacucuua

SEQ ID NO: 1107989 - RNA, 19 nt, Homo sapiens
  misc_RNA (1)...(19): siRNA sense strand
gaagaccaagguuauugag

SEQ ID NO: 1107990 - RNA, 19 nt, Homo sapiens
  misc_RNA (1)...(19): siRNA sense strand
ccgcauccucuuccacuuu

SEQ ID NO: 1107991 - RNA, 19 nt, Homo sapiens
  misc_RNA (1)...(19): siRNA sense strand
aagggcaggucaucaaugg

SEQ ID NO: 1107992 - RNA, 19 nt, Homo sapiens
  misc_RNA (1)...(19): siRNA sense strand
gugagacugaggacaauga

SEQ ID NO: 1107993 - RNA, 19 nt, Homo sapiens
  misc_RNA (1)...(19): siRNA sense strand
gaggacugggaauacauaa

SEQ ID NO: 1107994 - RNA, 19 nt, Homo sapiens
  misc_RNA (1)...(19): siRNA sense strand
gccagaagaagcaaagauc

SEQ ID NO: 1107995 - RNA, 19 nt, Homo sapiens
  misc_RNA (1)...(19): siRNA sense strand
gagcuggaagggccacaga

SEQ ID NO: 1107996 - RNA, 19 nt, Homo sapiens
  misc_RNA (1)...(19): siRNA sense strand
cgcauccucuuccacuuug

SEQ ID NO: 1107997 - RNA, 19 nt, Homo sapiens
  misc_RNA (1)...(19): siRNA sense strand
gaaucgaucaagccuagca

SEQ ID NO: 1107998 - RNA, 19 nt, Homo sapiens
  misc_RNA (1)...(19): siRNA sense strand
cuagaagaggccaaaguga

SEQ ID NO: 1107999 - RNA, 19 nt, Homo sapiens
  misc_RNA (1)...(19): siRNA sense strand
uagccaagcugcugaaaag

SEQ ID NO: 1108000 - RNA, 19 nt, Homo sapiens
  misc_RNA (1)...(19): siRNA sense strand
caauaaagccaccaauccu

SEQ ID NO: 1108001 - RNA, 19 nt, Homo sapiens
  misc_RNA (1)...(19): siRNA sense strand
gcugaugaaggagcuguuu

SEQ ID NO: 1108002 - RNA, 19 nt, Homo sapiens
  misc_RNA (1)...(19): siRNA sense strand
agugagaugcugcuucauu

SEQ ID NO: 1108003 - RNA, 19 nt, Homo sapiens
  misc_RNA (1)...(19): siRNA sense strand
gcacacguuagaggaaguu

SEQ ID NO: 1108004 - RNA, 19 nt, Homo sapiens
  misc_RNA (1)...(19): siRNA sense strand
ucaauaaagccaccaaucc

SEQ ID NO: 1108005 - RNA, 19 nt, Homo sapiens
  misc_RNA (1)...(19): siRNA sense strand
caguuuguccuccguguug

SEQ ID NO: 1108006 - RNA, 19 nt, Homo sapiens
  misc_RNA (1)...(19): siRNA sense strand
uggacacgaccaacaguuu

SEQ ID NO: 1108007 - RNA, 19 nt, Homo sapiens
  misc_RNA (1)...(19): siRNA sense strand
agaacaagaggcggacuuu

SEQ ID NO: 1108008 - RNA, 19 nt, Homo sapiens
  misc_RNA (1)...(19): siRNA sense strand
gaucagugugagaacaaga

SEQ ID NO: 1108009 - RNA, 19 nt, Homo sapiens
  misc_RNA (1)...(19): siRNA sense strand
agaggaaguuaacaacaac

SEQ ID NO: 1108010 - RNA, 19 nt, Homo sapiens
  misc_RNA (1)...(19): siRNA sense strand
aauaaagccaccaauccuu

SEQ ID NO: 1108011 - RNA, 19 nt, Homo sapiens
  misc_RNA (1)...(19): siRNA sense strand
ugggcgagguggaccaguu

SEQ ID NO: 1108012 - RNA, 19 nt, Homo sapiens
  misc_RNA (1)...(19): siRNA sense strand
agaacucucuccauuuagc

SEQ ID NO: 1108013 - RNA, 19 nt, Homo sapiens
  misc_RNA (1)...(19): siRNA sense strand
ucuagaagaggccaaagug

SEQ ID NO: 1108014 - RNA, 19 nt, Homo sapiens
  misc_RNA (1)...(19): siRNA sense strand
aaggugcggcuucgguaua

SEQ ID NO: 1108015 - RNA, 19 nt, Homo sapiens
  misc_RNA (1)...(19): siRNA sense strand
gauugugccuggaguguua

SEQ ID NO: 1108016 - RNA, 19 nt, Homo sapiens
  misc_RNA (1)...(19): siRNA sense strand
ccacaaagaacauucauuu

SEQ ID NO: 1108017 - RNA, 19 nt, Homo sapiens
  misc_RNA (1)...(19): siRNA sense strand
gaggagagacagugcauua

SEQ ID NO: 1108018 - RNA, 19 nt, Homo sapiens
  misc_RNA (1)...(19): siRNA sense strand
gagagacagugcauuaaga

SEQ ID NO: 1108019 - RNA, 19 nt, Homo sapiens
  misc_RNA (1)...(19): siRNA sense strand
gcaaaguauuccuguguug

SEQ ID NO: 1108020 - RNA, 19 nt, Homo sapiens
  misc_RNA (1)...(19): siRNA sense strand
caagagccaugaccaguug

SEQ ID NO: 1108021 - RNA, 19 nt, Homo sapiens
  misc_RNA (1)...(19): siRNA sense strand
guaaaacucuugccuauug

SEQ ID NO: 1108022 - RNA, 19 nt, Homo sapiens
  misc_RNA (1)...(19): siRNA sense strand
ccaaagaagcauucgguua

SEQ ID NO: 1108023 - RNA, 19 nt, Homo sapiens
  misc_RNA (1)...(19): siRNA sense strand
cacaauaaauacggucuua

SEQ ID NO: 1108024 - RNA, 19 nt, Homo sapiens
  misc_RNA (1)...(19): siRNA sense strand
agaaacugcuuaagccuuu

SEQ ID NO: 1108025 - RNA, 19 nt, Homo sapiens
  misc_RNA (1)...(19): siRNA sense strand
uaacgcggcuagcugauau

SEQ ID NO: 1108026 - RNA, 19 nt, Homo sapiens
  misc_RNA (1)...(19): siRNA sense strand
caaagaagcauucgguuag

SEQ ID NO: 1108027 - RNA, 19 nt, Homo sapiens
  misc_RNA (1)...(19): siRNA sense strand
gaaaugcaaguuugaggaa

SEQ ID NO: 1108028 - RNA, 19 nt, Homo sapiens
  misc_RNA (1)...(19): siRNA sense strand
ggacagcuuugcaauacca

SEQ ID NO: 1108029 - RNA, 19 nt, Homo sapiens
  misc_RNA (1)...(19): siRNA sense strand
gacagugcauuaagacuuc

SEQ ID NO: 1108030 - RNA, 19 nt, Homo sapiens
  misc_RNA (1)...(19): siRNA sense strand
gaggaacgaaacuucauuu

SEQ ID NO: 1108031 - RNA, 19 nt, Homo sapiens
  misc_RNA (1)...(19): siRNA sense strand
cagcaguguuucaggaauu

SEQ ID NO: 1108032 - RNA, 19 nt, Homo sapiens
  misc_RNA (1)...(19): siRNA sense strand
cuucagaaaugcaaguuug

SEQ ID NO: 1108033 - RNA, 19 nt, Homo sapiens
  misc_RNA (1)...(19): siRNA sense strand
guaaagcaggugcaagaaa

SEQ ID NO: 1108034 - RNA, 19 nt, Homo sapiens
  misc_RNA (1)...(19): siRNA sense strand
aaacaacccugacauucca

SEQ ID NO: 1108035 - RNA, 19 nt, Homo sapiens
  misc_RNA (1)...(19): siRNA sense strand
ggugguugguguuugauga

SEQ ID NO: 1108036 - RNA, 19 nt, Homo sapiens
  misc_RNA (1)...(19): siRNA sense strand
uaaagcaggugcaagaaaa

SEQ ID NO: 1108037 - RNA, 19 nt, Homo sapiens
  misc_RNA (1)...(19): siRNA sense strand
guugcgagcugguggaguu

SEQ ID NO: 1108038 - RNA, 19 nt, Homo sapiens
  misc_RNA (1)...(19): siRNA sense strand
gcaagcaaaggcuacgaaa

SEQ ID NO: 1108039 - RNA, 19 nt, Homo sapiens
  misc_RNA (1)...(19): siRNA sense strand
ucgguuagcacaagugaua

SEQ ID NO: 1108040 - RNA, 19 nt, Homo sapiens
  misc_RNA (1)...(19): siRNA sense strand
ggaggaacgaaacuucauu

SEQ ID NO: 1108041 - RNA, 19 nt, Homo sapiens
  misc_RNA (1)...(19): siRNA sense strand
caugauccagucaguauuu

SEQ ID NO: 1108042 - RNA, 19 nt, Homo sapiens
  misc_RNA (1)...(19): siRNA sense strand
cagaaugucuugcuaucag

SEQ ID NO: 1108043 - RNA, 19 nt, Homo sapiens
  misc_RNA (1)...(19): siRNA sense strand
ggagagacagugcauuaag

SEQ ID NO: 1108044 - RNA, 19 nt, Homo sapiens
  misc_RNA (1)...(19): siRNA sense strand
guucagaagcaaaguauuc

SEQ ID NO: 1108045 - RNA, 19 nt, Homo sapiens
  misc_RNA (1)...(19): siRNA sense strand
gggccuccacccacauuua

SEQ ID NO: 1108046 - RNA, 19 nt, Homo sapiens
  misc_RNA (1)...(19): siRNA sense strand
gcgaaacggaggaacgaaa

SEQ ID NO: 1108047 - RNA, 19 nt, Homo sapiens
  misc_RNA (1)...(19): siRNA sense strand
guaacgcggcuagcugaua

SEQ ID NO: 1108048 - RNA, 19 nt, Homo sapiens
  misc_RNA (1)...(19): siRNA sense strand
uaagacuucaucacuguuu

SEQ ID NO: 1108049 - RNA, 19 nt, Homo sapiens
  misc_RNA (1)...(19): siRNA sense strand
gcauuaagacuucaucacu

SEQ ID NO: 1108050 - RNA, 19 nt, Homo sapiens
  misc_RNA (1)...(19): siRNA sense strand
gaaacucagaggacuuuua

SEQ ID NO: 1108051 - RNA, 19 nt, Homo sapiens
  misc_RNA (1)...(19): siRNA sense strand
gaaaccaggaggagagaca

SEQ ID NO: 1108052 - RNA, 19 nt, Homo sapiens
  misc_RNA (1)...(19): siRNA sense strand
gcauggagcaggaggaaag

SEQ ID NO: 1108053 - RNA, 19 nt, Homo sapiens
  misc_RNA (1)...(19): siRNA sense strand
ugaagcagacagaaucuug

SEQ ID NO: 1108054 - RNA, 19 nt, Homo sapiens
  misc_RNA (1)...(19): siRNA sense strand
cgccggaucucgcuucuca

SEQ ID NO: 1108055 - RNA, 19 nt, Homo sapiens
  misc_RNA (1)...(19): siRNA sense strand
ucaagcagcaugugacugu

SEQ ID NO: 1108056 - RNA, 19 nt, Homo sapiens
  misc_RNA (1)...(19): siRNA sense strand
ccacuacagccucuuccua

SEQ ID NO: 1108057 - RNA, 19 nt, Homo sapiens
  misc_RNA (1)...(19): siRNA sense strand
aagacuucaucacuguuua

SEQ ID NO: 1108058 - RNA, 19 nt, Homo sapiens
  misc_RNA (1)...(19): siRNA sense strand
ugacugugguucccagcaa

SEQ ID NO: 1108059 - RNA, 19 nt, Homo sapiens
  misc_RNA (1)...(19): siRNA sense strand
uagcacaagugauagaaac

SEQ ID NO: 1108060 - RNA, 19 nt, Homo sapiens
  misc_RNA (1)...(19): siRNA sense strand
gaagagaaaaucagaaaag

SEQ ID NO: 1108061 - RNA, 19 nt, Homo sapiens
  misc_RNA (1)...(19): siRNA sense strand
gagaagagaaaaucagaaa

SEQ ID NO: 1108062 - RNA, 19 nt, Homo sapiens
  misc_RNA (1)...(19): siRNA sense strand
ggccuccacccacauuuaa

SEQ ID NO: 1108063 - RNA, 19 nt, Homo sapiens
  misc_RNA (1)...(19): siRNA sense strand
gaggaaagaacagcagugu

SEQ ID NO: 1108064 - RNA, 19 nt, Homo sapiens
  misc_RNA (1)...(19): siRNA sense strand
gccaagaaaacuaguguua

SEQ ID NO: 1108065 - RNA, 19 nt, Homo sapiens
  misc_RNA (1)...(19): siRNA sense strand
ccagcaaacugaggcuugu

SEQ ID NO: 1108066 - RNA, 19 nt, Homo sapiens
  misc_RNA (1)...(19): siRNA sense strand
aaugcaaguuugaggaaga

SEQ ID NO: 1108067 - RNA, 19 nt, Homo sapiens
  misc_RNA (1)...(19): siRNA sense strand
ugucuaguaugaccagugu

SEQ ID NO: 1108068 - RNA, 19 nt, Homo sapiens
  misc_RNA (1)...(19): siRNA sense strand
uacagccucuuccuacaga

SEQ ID NO: 1108069 - RNA, 19 nt, Homo sapiens
  misc_RNA (1)...(19): siRNA sense strand
gacugugguucccagcaaa

SEQ ID NO: 1108070 - RNA, 19 nt, Homo sapiens
  misc_RNA (1)...(19): siRNA sense strand
ggacgccugguggaucaua

SEQ ID NO: 1108071 - RNA, 19 nt, Homo sapiens
  misc_RNA (1)...(19): siRNA sense strand
uucaagcaauggagucaaa

SEQ ID NO: 1108072 - RNA, 19 nt, Homo sapiens
  misc_RNA (1)...(19): siRNA sense strand
ugaccaguguucagaagca

SEQ ID NO: 1108073 - RNA, 19 nt, Homo sapiens
  misc_RNA (1)...(19): siRNA sense strand
agacagugcauuaagacuu

SEQ ID NO: 1108074 - RNA, 19 nt, Homo sapiens
  misc_RNA (1)...(19): siRNA sense strand
gccagacuccgcaaaggaa

SEQ ID NO: 1108075 - RNA, 19 nt, Homo sapiens
  misc_RNA (1)...(19): siRNA sense strand
ccagacgggcucagguaaa

SEQ ID NO: 1108076 - RNA, 19 nt, Homo sapiens
  misc_RNA (1)...(19): siRNA sense strand
aagaaacucagaggacuuu

SEQ ID NO: 1108077 - RNA, 19 nt, Homo sapiens
  misc_RNA (1)...(19): siRNA sense strand
cuggacagcuuugcaauac

SEQ ID NO: 1108078 - RNA, 19 nt, Homo sapiens
  misc_RNA (1)...(19): siRNA sense strand
guaaaugcugaaugccaaa

SEQ ID NO: 1108079 - RNA, 19 nt, Homo sapiens
  misc_RNA (1)...(19): siRNA sense strand
agugauacuuaaugcugua

SEQ ID NO: 1108080 - RNA, 19 nt, Homo sapiens
  misc_RNA (1)...(19): siRNA sense strand
ugaugaagcagacagaauc

SEQ ID NO: 1108081 - RNA, 19 nt, Homo sapiens
  misc_RNA (1)...(19): siRNA sense strand
auuaagacuucaucacugu

SEQ ID NO: 1108082 - RNA, 19 nt, Homo sapiens
  misc_RNA (1)...(19): siRNA sense strand
ccugguggaucauauaaaa

SEQ ID NO: 1108083 - RNA, 19 nt, Homo sapiens
  misc_RNA (1)...(19): siRNA sense strand
caaaggcuacgaaaagaaa

SEQ ID NO: 1108084 - RNA, 19 nt, Homo sapiens
  misc_RNA (1)...(19): siRNA sense strand
uaucagcgacacucacaga

SEQ ID NO: 1108085 - RNA, 19 nt, Homo sapiens
  misc_RNA (1)...(19): siRNA sense strand
acgguucgcucuucgacaa

SEQ ID NO: 1108086 - RNA, 19 nt, Homo sapiens
  misc_RNA (1)...(19): siRNA sense strand
agacuucaucacuguuuaa

SEQ ID NO: 1108087 - RNA, 19 nt, Homo sapiens
  misc_RNA (1)...(19): siRNA sense strand
ugaggaagaccagaagaug

SEQ ID NO: 1108088 - RNA, 19 nt, Homo sapiens
  misc_RNA (1)...(19): siRNA sense strand
gaccaguguucagaagcaa

SEQ ID NO: 1108089 - RNA, 19 nt, Homo sapiens
  misc_RNA (1)...(19): siRNA sense strand
ccacauuuaauuuccacaa

SEQ ID NO: 1108090 - RNA, 19 nt, Homo sapiens
  misc_RNA (1)...(19): siRNA sense strand
gguaaagcaggugcaagaa

SEQ ID NO: 1108091 - RNA, 19 nt, Homo sapiens
  misc_RNA (1)...(19): siRNA sense strand
ccuccacccacauuuaauu

SEQ ID NO: 1108092 - RNA, 19 nt, Homo sapiens
  misc_RNA (1)...(19): siRNA sense strand
acaagagccaugaccaguu

SEQ ID NO: 1108093 - RNA, 19 nt, Homo sapiens
  misc_RNA (1)...(19): siRNA sense strand
gcaugauccagucaguauu

SEQ ID NO: 1108094 - RNA, 19 nt, Homo sapiens
  misc_RNA (1)...(19): siRNA sense strand
ccagucccuucaagcaaug

SEQ ID NO: 1108095 - RNA, 19 nt, Homo sapiens
  misc_RNA (1)...(19): siRNA sense strand
aagcaaaguauuccugugu

SEQ ID NO: 1108096 - RNA, 19 nt, Homo sapiens
  misc_RNA (1)...(19): siRNA sense strand
gcacaagugauagaaacca

SEQ ID NO: 1108097 - RNA, 19 nt, Homo sapiens
  misc_RNA (1)...(19): siRNA sense strand
gcuaucagcgacacucaca

SEQ ID NO: 1108098 - RNA, 19 nt, Homo sapiens
  misc_RNA (1)...(19): siRNA sense strand
ccgcaaaggaauaaauauc

SEQ ID NO: 1108099 - RNA, 19 nt, Homo sapiens
  misc_RNA (1)...(19): siRNA sense strand
ggccagacuccgcaaagga

SEQ ID NO: 1108100 - RNA, 19 nt, Homo sapiens
  misc_RNA (1)...(19): siRNA sense strand
aaacucagaggacuuuuaa

SEQ ID NO: 1108101 - RNA, 19 nt, Homo sapiens
  misc_RNA (1)...(19): siRNA sense strand
ugguaaagcaggugcaaga

SEQ ID NO: 1108102 - RNA, 19 nt, Homo sapiens
  misc_RNA (1)...(19): siRNA sense strand
ggagcaggaggaaagaaca

SEQ ID NO: 1108103 - RNA, 19 nt, Homo sapiens
  misc_RNA (1)...(19): siRNA sense strand
agacuccgcaaaggaauaa

SEQ ID NO: 1108104 - RNA, 19 nt, Homo sapiens
  misc_RNA (1)...(19): siRNA sense strand
cagacuccgcaaaggaaua

SEQ ID NO: 1108105 - RNA, 19 nt, Homo sapiens
  misc_RNA (1)...(19): siRNA sense strand
ccacccacauuuaauuucc

SEQ ID NO: 1108106 - RNA, 19 nt, Homo sapiens
  misc_RNA (1)...(19): siRNA sense strand
ugaacucucggccgaaugu

SEQ ID NO: 1108107 - RNA, 19 nt, Homo sapiens
  misc_RNA (1)...(19): siRNA sense strand
gaacucucggccgaaugua

SEQ ID NO: 1108108 - RNA, 19 nt, Homo sapiens
  misc_RNA (1)...(19): siRNA sense strand
gcauucgguuagcacaagu

SEQ ID NO: 1108109 - RNA, 19 nt, Homo sapiens
  misc_RNA (1)...(19): siRNA sense strand
gauccagucaguauuucug

SEQ ID NO: 1108110 - RNA, 19 nt, Homo sapiens
  misc_RNA (1)...(19): siRNA sense strand
cagacgggcucagguaaaa

SEQ ID NO: 1108111 - RNA, 19 nt, Homo sapiens
  misc_RNA (1)...(19): siRNA sense strand
ggccuucauccuucagaaa

SEQ ID NO: 1108112 - RNA, 19 nt, Homo sapiens
  misc_RNA (1)...(19): siRNA sense strand
gugguucccagcaaacuga

SEQ ID NO: 1108113 - RNA, 19 nt, Homo sapiens
  misc_RNA (1)...(19): siRNA sense strand
gcaaaggcuacgaaaagaa

SEQ ID NO: 1108114 - RNA, 19 nt, Homo sapiens
  misc_RNA (1)...(19): siRNA sense strand
uccagucccuucaagcaau

SEQ ID NO: 1108115 - RNA, 19 nt, Homo sapiens
  misc_RNA (1)...(19): siRNA sense strand
gauugugccuggaguguua

SEQ ID NO: 1108116 - RNA, 19 nt, Homo sapiens
  misc_RNA (1)...(19): siRNA sense strand
ccacaaagaacauucauuu

SEQ ID NO: 1108117 - RNA, 19 nt, Homo sapiens
  misc_RNA (1)...(19): siRNA sense strand
gaggagagacagugcauua

SEQ ID NO: 1108118 - RNA, 19 nt, Homo sapiens
  misc_RNA (1)...(19): siRNA sense strand
gagagacagugcauuaaga

SEQ ID NO: 1108119 - RNA, 19 nt, Homo sapiens
  misc_RNA (1)...(19): siRNA sense strand
gcaaaguauuccuguguug

SEQ ID NO: 1108120 - RNA, 19 nt, Homo sapiens
  misc_RNA (1)...(19): siRNA sense strand
caagagccaugaccaguug

SEQ ID NO: 1108121 - RNA, 19 nt, Homo sapiens
  misc_RNA (1)...(19): siRNA sense strand
guaaaacucuugccuauug

SEQ ID NO: 1108122 - RNA, 19 nt, Homo sapiens
  misc_RNA (1)...(19): siRNA sense strand
ccaaagaagcauucgguua

SEQ ID NO: 1108123 - RNA, 19 nt, Homo sapiens
  misc_RNA (1)...(19): siRNA sense strand
cacaauaaauacggucuua

SEQ ID NO: 1108124 - RNA, 19 nt, Homo sapiens
  misc_RNA (1)...(19): siRNA sense strand
agaaacugcuuaagccuuu

SEQ ID NO: 1108125 - RNA, 19 nt, Homo sapiens
  misc_RNA (1)...(19): siRNA sense strand
uaacgcggcuagcugauau

SEQ ID NO: 1108126 - RNA, 19 nt, Homo sapiens
  misc_RNA (1)...(19): siRNA sense strand
caaagaagcauucgguuag

SEQ ID NO: 1108127 - RNA, 19 nt, Homo sapiens
  misc_RNA (1)...(19): siRNA sense strand
gaaaugcaaguuugaggaa

SEQ ID NO: 1108128 - RNA, 19 nt, Homo sapiens
  misc_RNA (1)...(19): siRNA sense strand
ggacagcuuugcaauacca

SEQ ID NO: 1108129 - RNA, 19 nt, Homo sapiens
  misc_RNA (1)...(19): siRNA sense strand
gacagugcauuaagacuuc

SEQ ID NO: 1108130 - RNA, 19 nt, Homo sapiens
  misc_RNA (1)...(19): siRNA sense strand
gaggaacgaaacuucauuu

SEQ ID NO: 1108131 - RNA, 19 nt, Homo sapiens
  misc_RNA (1)...(19): siRNA sense strand
cagcaguguuucaggaauu

SEQ ID NO: 1108132 - RNA, 19 nt, Homo sapiens
  misc_RNA (1)...(19): siRNA sense strand
cuucagaaaugcaaguuug

SEQ ID NO: 1108133 - RNA, 19 nt, Homo sapiens
  misc_RNA (1)...(19): siRNA sense strand
guaaagcaggugcaagaaa

SEQ ID NO: 1108134 - RNA, 19 nt, Homo sapiens
  misc_RNA (1)...(19): siRNA sense strand
aaacaacccugacauucca

SEQ ID NO: 1108135 - RNA, 19 nt, Homo sapiens
  misc_RNA (1)...(19): siRNA sense strand
ggugguugguguuugauga

SEQ ID NO: 1108136 - RNA, 19 nt, Homo sapiens
  misc_RNA (1)...(19): siRNA sense strand
uaaagcaggugcaagaaaa

SEQ ID NO: 1108137 - RNA, 19 nt, Homo sapiens
  misc_RNA (1)...(19): siRNA sense strand
guugcgagcugguggaguu

SEQ ID NO: 1108138 - RNA, 19 nt, Homo sapiens
  misc_RNA (1)...(19): siRNA sense strand
gcaagcaaaggcuacgaaa

SEQ ID NO: 1108139 - RNA, 19 nt, Homo sapiens
  misc_RNA (1)...(19): siRNA sense strand
ucgguuagcacaagugaua

SEQ ID NO: 1108140 - RNA, 19 nt, Homo sapiens
  misc_RNA (1)...(19): siRNA sense strand
ggaggaacgaaacuucauu

SEQ ID NO: 1108141 - RNA, 19 nt, Homo sapiens
  misc_RNA (1)...(19): siRNA sense strand
caugauccagucaguauuu

SEQ ID NO: 1108142 - RNA, 19 nt, Homo sapiens
  misc_RNA (1)...(19): siRNA sense strand
cagaaugucuugcuaucag

SEQ ID NO: 1108143 - RNA, 19 nt, Homo sapiens
  misc_RNA (1)...(19): siRNA sense strand
ggagagacagugcauuaag

SEQ ID NO: 1108144 - RNA, 19 nt, Homo sapiens
  misc_RNA (1)...(19): siRNA sense strand
guucagaagcaaaguauuc

SEQ ID NO: 1108145 - RNA, 19 nt, Homo sapiens
  misc_RNA (1)...(19): siRNA sense strand
gggccuccacccacauuua

SEQ ID NO: 1108146 - RNA, 19 nt, Homo sapiens
  misc_RNA (1)...(19): siRNA sense strand
gcgaaacggaggaacgaaa

SEQ ID NO: 1108147 - RNA, 19 nt, Homo sapiens
  misc_RNA (1)...(19): siRNA sense strand
guaacgcggcuagcugaua

SEQ ID NO: 1108148 - RNA, 19 nt, Homo sapiens
  misc_RNA (1)...(19): siRNA sense strand
uaagacuucaucacuguuu

SEQ ID NO: 1108149 - RNA, 19 nt, Homo sapiens
  misc_RNA (1)...(19): siRNA sense strand
gcauuaagacuucaucacu

SEQ ID NO: 1108150 - RNA, 19 nt, Homo sapiens
  misc_RNA (1)...(19): siRNA sense strand
gaaacucagaggacuuuua

SEQ ID NO: 1108151 - RNA, 19 nt, Homo sapiens
  misc_RNA (1)...(19): siRNA sense strand
gaaaccaggaggagagaca

SEQ ID NO: 1108152 - RNA, 19 nt, Homo sapiens
  misc_RNA (1)...(19): siRNA sense strand
gcauggagcaggaggaaag

SEQ ID NO: 1108153 - RNA, 19 nt, Homo sapiens
  misc_RNA (1)...(19): siRNA sense strand
ugaagcagacagaaucuug

SEQ ID NO: 1108154 - RNA, 19 nt, Homo sapiens
  misc_RNA (1)...(19): siRNA sense strand
cgccggaucucgcuucuca

SEQ ID NO: 1108155 - RNA, 19 nt, Homo sapiens
  misc_RNA (1)...(19): siRNA sense strand
ucaagcagcaugugacugu

SEQ ID NO: 1108156 - RNA, 19 nt, Homo sapiens
  misc_RNA (1)...(19): siRNA sense strand
ccacuacagccucuuccua

SEQ ID NO: 1108157 - RNA, 19 nt, Homo sapiens
  misc_RNA (1)...(19): siRNA sense strand
aagacuucaucacuguuua

SEQ ID NO: 1108158 - RNA, 19 nt, Homo sapiens
  misc_RNA (1)...(19): siRNA sense strand
ugacugugguucccagcaa

SEQ ID NO: 1108159 - RNA, 19 nt, Homo sapiens
  misc_RNA (1)...(19): siRNA sense strand
uagcacaagugauagaaac

SEQ ID NO: 1108160 - RNA, 19 nt, Homo sapiens
  misc_RNA (1)...(19): siRNA sense strand
gaagagaaaaucagaaaag

SEQ ID NO: 1108161 - RNA, 19 nt, Homo sapiens
  misc_RNA (1)...(19): siRNA sense strand
gagaagagaaaaucagaaa

SEQ ID NO: 1108162 - RNA, 19 nt, Homo sapiens
  misc_RNA (1)...(19): siRNA sense strand
ggccuccacccacauuuaa

SEQ ID NO: 1108163 - RNA, 19 nt, Homo sapiens
  misc_RNA (1)...(19): siRNA sense strand
gaggaaagaacagcagugu

SEQ ID NO: 1108164 - RNA, 19 nt, Homo sapiens
  misc_RNA (1)...(19): siRNA sense strand
gccaagaaaacuaguguua

SEQ ID NO: 1108165 - RNA, 19 nt, Homo sapiens
  misc_RNA (1)...(19): siRNA sense strand
ccagcaaacugaggcuugu

SEQ ID NO: 1108166 - RNA, 19 nt, Homo sapiens
  misc_RNA (1)...(19): siRNA sense strand
aaugcaaguuugaggaaga

SEQ ID NO: 1108167 - RNA, 19 nt, Homo sapiens
  misc_RNA (1)...(19): siRNA sense strand
ugucuaguaugaccagugu

SEQ ID NO: 1108168 - RNA, 19 nt, Homo sapiens
  misc_RNA (1)...(19): siRNA sense strand
uacagccucuuccuacaga

SEQ ID NO: 1108169 - RNA, 19 nt, Homo sapiens
  misc_RNA (1)...(19): siRNA sense strand
gacugugguucccagcaaa

SEQ ID NO: 1108170 - RNA, 19 nt, Homo sapiens
  misc_RNA (1)...(19): siRNA sense strand
ggacgccugguggaucaua

SEQ ID NO: 1108171 - RNA, 19 nt, Homo sapiens
  misc_RNA (1)...(19): siRNA sense strand
uucaagcaauggagucaaa

SEQ ID NO: 1108172 - RNA, 19 nt, Homo sapiens
  misc_RNA (1)...(19): siRNA sense strand
ugaccaguguucagaagca

SEQ ID NO: 1108173 - RNA, 19 nt, Homo sapiens
  misc_RNA (1)...(19): siRNA sense strand
agacagugcauuaagacuu

SEQ ID NO: 1108174 - RNA, 19 nt, Homo sapiens
  misc_RNA (1)...(19): siRNA sense strand
gccagacuccgcaaaggaa

SEQ ID NO: 1108175 - RNA, 19 nt, Homo sapiens
  misc_RNA (1)...(19): siRNA sense strand
ccagacgggcucagguaaa

SEQ ID NO: 1108176 - RNA, 19 nt, Homo sapiens
  misc_RNA (1)...(19): siRNA sense strand
aagaaacucagaggacuuu

SEQ ID NO: 1108177 - RNA, 19 nt, Homo sapiens
  misc_RNA (1)...(19): siRNA sense strand
cuggacagcuuugcaauac

SEQ ID NO: 1108178 - RNA, 19 nt, Homo sapiens
  misc_RNA (1)...(19): siRNA sense strand
guaaaugcugaaugccaaa

SEQ ID NO: 1108179 - RNA, 19 nt, Homo sapiens
  misc_RNA (1)...(19): siRNA sense strand
agugauacuuaaugcugua

SEQ ID NO: 1108180 - RNA, 19 nt, Homo sapiens
  misc_RNA (1)...(19): siRNA sense strand
ugaugaagcagacagaauc

SEQ ID NO: 1108181 - RNA, 19 nt, Homo sapiens
  misc_RNA (1)...(19): siRNA sense strand
auuaagacuucaucacugu

SEQ ID NO: 1108182 - RNA, 19 nt, Homo sapiens
  misc_RNA (1)...(19): siRNA sense strand
ccugguggaucauauaaaa

SEQ ID NO: 1108183 - RNA, 19 nt, Homo sapiens
  misc_RNA (1)...(19): siRNA sense strand
caaaggcuacgaaaagaaa

SEQ ID NO: 1108184 - RNA, 19 nt, Homo sapiens
  misc_RNA (1)...(19): siRNA sense strand
uaucagcgacacucacaga

SEQ ID NO: 1108185 - RNA, 19 nt, Homo sapiens
  misc_RNA (1)...(19): siRNA sense strand
acgguucgcucuucgacaa

SEQ ID NO: 1108186 - RNA, 19 nt, Homo sapiens
  misc_RNA (1)...(19): siRNA sense strand
agacuucaucacuguuuaa

SEQ ID NO: 1108187 - RNA, 19 nt, Homo sapiens
  misc_RNA (1)...(19): siRNA sense strand
ugaggaagaccagaagaug

SEQ ID NO: 1108188 - RNA, 19 nt, Homo sapiens
  misc_RNA (1)...(19): siRNA sense strand
gaccaguguucagaagcaa

SEQ ID NO: 1108189 - RNA, 19 nt, Homo sapiens
  misc_RNA (1)...(19): siRNA sense strand
ccacauuuaauuuccacaa

SEQ ID NO: 1108190 - RNA, 19 nt, Homo sapiens
  misc_RNA (1)...(19): siRNA sense strand
gguaaagcaggugcaagaa

SEQ ID NO: 1108191 - RNA, 19 nt, Homo sapiens
  misc_RNA (1)...(19): siRNA sense strand
ccuccacccacauuuaauu

SEQ ID NO: 1108192 - RNA, 19 nt, Homo sapiens
  misc_RNA (1)...(19): siRNA sense strand
acaagagccaugaccaguu

SEQ ID NO: 1108193 - RNA, 19 nt, Homo sapiens
  misc_RNA (1)...(19): siRNA sense strand
gcaugauccagucaguauu

SEQ ID NO: 1108194 - RNA, 19 nt, Homo sapiens
  misc_RNA (1)...(19): siRNA sense strand
ccagucccuucaagcaaug

SEQ ID NO: 1108195 - RNA, 19 nt, Homo sapiens
  misc_RNA (1)...(19): siRNA sense strand
aagcaaaguauuccugugu

SEQ ID NO: 1108196 - RNA, 19 nt, Homo sapiens
  misc_RNA (1)...(19): siRNA sense strand
gcacaagugauagaaacca

SEQ ID NO: 1108197 - RNA, 19 nt, Homo sapiens
  misc_RNA (1)...(19): siRNA sense strand
gcuaucagcgacacucaca

SEQ ID NO: 1108198 - RNA, 19 nt, Homo sapiens
  misc_RNA (1)...(19): siRNA sense strand
ccgcaaaggaauaaauauc

SEQ ID NO: 1108199 - RNA, 19 nt, Homo sapiens
  misc_RNA (1)...(19): siRNA sense strand
ggccagacuccgcaaagga

SEQ ID NO: 1108200 - RNA, 19 nt, Homo sapiens
  misc_RNA (1)...(19): siRNA sense strand
aaacucagaggacuuuuaa

SEQ ID NO: 1108201 - RNA, 19 nt, Homo sapiens
  misc_RNA (1)...(19): siRNA sense strand
ugguaaagcaggugcaaga

SEQ ID NO: 1108202 - RNA, 19 nt, Homo sapiens
  misc_RNA (1)...(19): siRNA sense strand
ggagcaggaggaaagaaca

SEQ ID NO: 1108203 - RNA, 19 nt, Homo sapiens
  misc_RNA (1)...(19): siRNA sense strand
agacuccgcaaaggaauaa

SEQ ID NO: 1108204 - RNA, 19 nt, Homo sapiens
  misc_RNA (1)...(19): siRNA sense strand
cagacuccgcaaaggaaua

SEQ ID NO: 1108205 - RNA, 19 nt, Homo sapiens
  misc_RNA (1)...(19): siRNA sense strand
ccacccacauuuaauuucc

SEQ ID NO: 1108206 - RNA, 19 nt, Homo sapiens
  misc_RNA (1)...(19): siRNA sense strand
ugaacucucggccgaaugu

SEQ ID NO: 1108207 - RNA, 19 nt, Homo sapiens
  misc_RNA (1)...(19): siRNA sense strand
gaacucucggccgaaugua

SEQ ID NO: 1108208 - RNA, 19 nt, Homo sapiens
  misc_RNA (1)...(19): siRNA sense strand
gcauucgguuagcacaagu

SEQ ID NO: 1108209 - RNA, 19 nt, Homo sapiens
  misc_RNA (1)...(19): siRNA sense strand
gauccagucaguauuucug

SEQ ID NO: 1108210 - RNA, 19 nt, Homo sapiens
  misc_RNA (1)...(19): siRNA sense strand
cagacgggcucagguaaaa

SEQ ID NO: 1108211 - RNA, 19 nt, Homo sapiens
  misc_RNA (1)...(19): siRNA sense strand
ggccuucauccuucagaaa

SEQ ID NO: 1108212 - RNA, 19 nt, Homo sapiens
  misc_RNA (1)...(19): siRNA sense strand
gugguucccagcaaacuga

SEQ ID NO: 1108213 - RNA, 19 nt, Homo sapiens
  misc_RNA (1)...(19): siRNA sense strand
gcaaaggcuacgaaaagaa

SEQ ID NO: 1108214 - RNA, 19 nt, Homo sapiens
  misc_RNA (1)...(19): siRNA sense strand
uccagucccuucaagcaau

SEQ ID NO: 1108215 - RNA, 19 nt, Homo sapiens
  misc_RNA (1)...(19): siRNA sense strand
aaagcaaccuucugaugua

SEQ ID NO: 1108216 - RNA, 19 nt, Homo sapiens
  misc_RNA (1)...(19): siRNA sense strand
gcaaagcaaccuucugaug

SEQ ID NO: 1108217 - RNA, 19 nt, Homo sapiens
  misc_RNA (1)...(19): siRNA sense strand
ccgagaagguagacaauug

SEQ ID NO: 1108218 - RNA, 19 nt, Homo sapiens
  misc_RNA (1)...(19): siRNA sense strand
caaagcaaccuucugaugu

SEQ ID NO: 1108219 - RNA, 19 nt, Homo sapiens
  misc_RNA (1)...(19): siRNA sense strand
gaagaccacccacgaaugg

SEQ ID NO: 1108220 - RNA, 19 nt, Homo sapiens
  misc_RNA (1)...(19): siRNA sense strand
gcaaccuucugauguaagu

SEQ ID NO: 1108221 - RNA, 19 nt, Homo sapiens
  misc_RNA (1)...(19): siRNA sense strand
ucuuacgacuguuacguua

SEQ ID NO: 1108222 - RNA, 19 nt, Homo sapiens
  misc_RNA (1)...(19): siRNA sense strand
ugauguaaguucugagugu

SEQ ID NO: 1108223 - RNA, 19 nt, Homo sapiens
  misc_RNA (1)...(19): siRNA sense strand
aagcaaccuucugauguaa

SEQ ID NO: 1108224 - RNA, 19 nt, Homo sapiens
  misc_RNA (1)...(19): siRNA sense strand
gguuaucuuacgacuguua

SEQ ID NO: 1108225 - RNA, 19 nt, Homo sapiens
  misc_RNA (1)...(19): siRNA sense strand
uuacgacuguuacguuaca

SEQ ID NO: 1108226 - RNA, 19 nt, Homo sapiens
  misc_RNA (1)...(19): siRNA sense strand
cgacuguuacguuacauug

SEQ ID NO: 1108227 - RNA, 19 nt, Homo sapiens
  misc_RNA (1)...(19): siRNA sense strand
cuaccucccuacagacaga

SEQ ID NO: 1108228 - RNA, 19 nt, Homo sapiens
  misc_RNA (1)...(19): siRNA sense strand
cgaagaccacccacgaaug

SEQ ID NO: 1108229 - RNA, 19 nt, Homo sapiens
  misc_RNA (1)...(19): siRNA sense strand
augguuaucuuacgacugu

SEQ ID NO: 1108230 - RNA, 19 nt, Homo sapiens
  misc_RNA (1)...(19): siRNA sense strand
gagugugaccgagaaggua

SEQ ID NO: 1108231 - RNA, 19 nt, Homo sapiens
  misc_RNA (1)...(19): siRNA sense strand
cuucugauguaaguucuga

SEQ ID NO: 1108232 - RNA, 19 nt, Homo sapiens
  misc_RNA (1)...(19): siRNA sense strand
ccacgaaugguuaucuuac

SEQ ID NO: 1108233 - RNA, 19 nt, Homo sapiens
  misc_RNA (1)...(19): siRNA sense strand
ugaccgagaagguagacaa

SEQ ID NO: 1108234 - RNA, 19 nt, Homo sapiens
  misc_RNA (1)...(19): siRNA sense strand
ccgaagaccacccacgaau

SEQ ID NO: 1108235 - RNA, 19 nt, Homo sapiens
  misc_RNA (1)...(19): siRNA sense strand
acgaaugguuaucuuacga

SEQ ID NO: 1108236 - RNA, 19 nt, Homo sapiens
  misc_RNA (1)...(19): siRNA sense strand
gaccgagaagguagacaau

SEQ ID NO: 1108237 - RNA, 19 nt, Homo sapiens
  misc_RNA (1)...(19): siRNA sense strand
gagaagguagacaauugca

SEQ ID NO: 1108238 - RNA, 19 nt, Homo sapiens
  misc_RNA (1)...(19): siRNA sense strand
aaagcaaccuucugaugua

SEQ ID NO: 1108239 - RNA, 19 nt, Homo sapiens
  misc_RNA (1)...(19): siRNA sense strand
gcaaagcaaccuucugaug

SEQ ID NO: 1108240 - RNA, 19 nt, Homo sapiens
  misc_RNA (1)...(19): siRNA sense strand
ccgagaagguagacaauug

SEQ ID NO: 1108241 - RNA, 19 nt, Homo sapiens
  misc_RNA (1)...(19): siRNA sense strand
caaagcaaccuucugaugu

SEQ ID NO: 1108242 - RNA, 19 nt, Homo sapiens
  misc_RNA (1)...(19): siRNA sense strand
gaagaccacccacgaaugg

SEQ ID NO: 1108243 - RNA, 19 nt, Homo sapiens
  misc_RNA (1)...(19): siRNA sense strand
gcaaccuucugauguaagu

SEQ ID NO: 1108244 - RNA, 19 nt, Homo sapiens
  misc_RNA (1)...(19): siRNA sense strand
ucuuacgacuguuacguua

SEQ ID NO: 1108245 - RNA, 19 nt, Homo sapiens
  misc_RNA (1)...(19): siRNA sense strand
ugauguaaguucugagugu

SEQ ID NO: 1108246 - RNA, 19 nt, Homo sapiens
  misc_RNA (1)...(19): siRNA sense strand
aagcaaccuucugauguaa

SEQ ID NO: 1108247 - RNA, 19 nt, Homo sapiens
  misc_RNA (1)...(19): siRNA sense strand
gguuaucuuacgacuguua

SEQ ID NO: 1108248 - RNA, 19 nt, Homo sapiens
  misc_RNA (1)...(19): siRNA sense strand
uuacgacuguuacguuaca

SEQ ID NO: 1108249 - RNA, 19 nt, Homo sapiens
  misc_RNA (1)...(19): siRNA sense strand
cgacuguuacguuacauug

SEQ ID NO: 1108250 - RNA, 19 nt, Homo sapiens
  misc_RNA (1)...(19): siRNA sense strand
cuaccucccuacagacaga

SEQ ID NO: 1108251 - RNA, 19 nt, Homo sapiens
  misc_RNA (1)...(19): siRNA sense strand
cgaagaccacccacgaaug

SEQ ID NO: 1108252 - RNA, 19 nt, Homo sapiens
  misc_RNA (1)...(19): siRNA sense strand
augguuaucuuacgacugu

SEQ ID NO: 1108253 - RNA, 19 nt, Homo sapiens
  misc_RNA (1)...(19): siRNA sense strand
gagugugaccgagaaggua

SEQ ID NO: 1108254 - RNA, 19 nt, Homo sapiens
  misc_RNA (1)...(19): siRNA sense strand
cuucugauguaaguucuga

SEQ ID NO: 1108255 - RNA, 19 nt, Homo sapiens
  misc_RNA (1)...(19): siRNA sense strand
ccacgaaugguuaucuuac

SEQ ID NO: 1108256 - RNA, 19 nt, Homo sapiens
  misc_RNA (1)...(19): siRNA sense strand
ugaccgagaagguagacaa

SEQ ID NO: 1108257 - RNA, 19 nt, Homo sapiens
  misc_RNA (1)...(19): siRNA sense strand
ccgaagaccacccacgaau

SEQ ID NO: 1108258 - RNA, 19 nt, Homo sapiens
  misc_RNA (1)...(19): siRNA sense strand
acgaaugguuaucuuacga

SEQ ID NO: 1108259 - RNA, 19 nt, Homo sapiens
  misc_RNA (1)...(19): siRNA sense strand
gaccgagaagguagacaau

SEQ ID NO: 1108260 - RNA, 19 nt, Homo sapiens
  misc_RNA (1)...(19): siRNA sense strand
gagaagguagacaauugca

SEQ ID NO: 1108261 - RNA, 19 nt, Homo sapiens
  misc_RNA (1)...(19): siRNA sense strand
aaagcaaccuucugaugua

SEQ ID NO: 1108262 - RNA, 19 nt, Homo sapiens
  misc_RNA (1)...(19): siRNA sense strand
gcaaagcaaccuucugaug

SEQ ID NO: 1108263 - RNA, 19 nt, Homo sapiens
  misc_RNA (1)...(19): siRNA sense strand
ccgagaagguagacaauug

SEQ ID NO: 1108264 - RNA, 19 nt, Homo sapiens
  misc_RNA (1)...(19): siRNA sense strand
caaagcaaccuucugaugu

SEQ ID NO: 1108265 - RNA, 19 nt, Homo sapiens
  misc_RNA (1)...(19): siRNA sense strand
gcaaccuucugauguaagu

SEQ ID NO: 1108266 - RNA, 19 nt, Homo sapiens
  misc_RNA (1)...(19): siRNA sense strand
ugauguaaguucugagugu

SEQ ID NO: 1108267 - RNA, 19 nt, Homo sapiens
  misc_RNA (1)...(19): siRNA sense strand
aagcaaccuucugauguaa

SEQ ID NO: 1108268 - RNA, 19 nt, Homo sapiens
  misc_RNA (1)...(19): siRNA sense strand
cuaccucccuacagacaga

SEQ ID NO: 1108269 - RNA, 19 nt, Homo sapiens
  misc_RNA (1)...(19): siRNA sense strand
gagugugaccgagaaggua

SEQ ID NO: 1108270 - RNA, 19 nt, Homo sapiens
  misc_RNA (1)...(19): siRNA sense strand
cuucugauguaaguucuga

SEQ ID NO: 1108271 - RNA, 19 nt, Homo sapiens
  misc_RNA (1)...(19): siRNA sense strand
ugaccgagaagguagacaa

SEQ ID NO: 1108272 - RNA, 19 nt, Homo sapiens
  misc_RNA (1)...(19): siRNA sense strand
gaccgagaagguagacaau

SEQ ID NO: 1108273 - RNA, 19 nt, Homo sapiens
  misc_RNA (1)...(19): siRNA sense strand
gagaagguagacaauugca

SEQ ID NO: 1108274 - RNA, 19 nt, Homo sapiens
  misc_RNA (1)...(19): siRNA sense strand
aaagcaaccuucugaugua

SEQ ID NO: 1108275 - RNA, 19 nt, Homo sapiens
  misc_RNA (1)...(19): siRNA sense strand
gcaaagcaaccuucugaug

SEQ ID NO: 1108276 - RNA, 19 nt, Homo sapiens
  misc_RNA (1)...(19): siRNA sense strand
ccgagaagguagacaauug

SEQ ID NO: 1108277 - RNA, 19 nt, Homo sapiens
  misc_RNA (1)...(19): siRNA sense strand
caaagcaaccuucugaugu

SEQ ID NO: 1108278 - RNA, 19 nt, Homo sapiens
  misc_RNA (1)...(19): siRNA sense strand
gcaaccuucugauguaagu

SEQ ID NO: 1108279 - RNA, 19 nt, Homo sapiens
  misc_RNA (1)...(19): siRNA sense strand
ugauguaaguucugagugu

SEQ ID NO: 1108280 - RNA, 19 nt, Homo sapiens
  misc_RNA (1)...(19): siRNA sense strand
aagcaaccuucugauguaa

SEQ ID NO: 1108281 - RNA, 19 nt, Homo sapiens
  misc_RNA (1)...(19): siRNA sense strand
cuaccucccuacagacaga

SEQ ID NO: 1108282 - RNA, 19 nt, Homo sapiens
  misc_RNA (1)...(19): siRNA sense strand
gagugugaccgagaaggua

SEQ ID NO: 1108283 - RNA, 19 nt, Homo sapiens
  misc_RNA (1)...(19): siRNA sense strand
cuucugauguaaguucuga

SEQ ID NO: 1108284 - RNA, 19 nt, Homo sapiens
  misc_RNA (1)...(19): siRNA sense strand
ugaccgagaagguagacaa

SEQ ID NO: 1108285 - RNA, 19 nt, Homo sapiens
  misc_RNA (1)...(19): siRNA sense strand
gaccgagaagguagacaau

SEQ ID NO: 1108286 - RNA, 19 nt, Homo sapiens
  misc_RNA (1)...(19): siRNA sense strand
gagaagguagacaauugca

SEQ ID NO: 1108287 - RNA, 19 nt, Homo sapiens
  misc_RNA (1)...(19): siRNA sense strand
aaagcaaccuucugaugua

SEQ ID NO: 1108288 - RNA, 19 nt, Homo sapiens
  misc_RNA (1)...(19): siRNA sense strand
gcaaagcaaccuucugaug

SEQ ID NO: 1108289 - RNA, 19 nt, Homo sapiens
  misc_RNA (1)...(19): siRNA sense strand
ccgagaagguagacaauug

SEQ ID NO: 1108290 - RNA, 19 nt, Homo sapiens
  misc_RNA (1)...(19): siRNA sense strand
caaagcaaccuucugaugu

SEQ ID NO: 1108291 - RNA, 19 nt, Homo sapiens
  misc_RNA (1)...(19): siRNA sense strand
gcaaccuucugauguaagu

SEQ ID NO: 1108292 - RNA, 19 nt, Homo sapiens
  misc_RNA (1)...(19): siRNA sense strand
ugauguaaguucugagugu

SEQ ID NO: 1108293 - RNA, 19 nt, Homo sapiens
  misc_RNA (1)...(19): siRNA sense strand
aagcaaccuucugauguaa

SEQ ID NO: 1108294 - RNA, 19 nt, Homo sapiens
  misc_RNA (1)...(19): siRNA sense strand
cuaccucccuacagacaga

SEQ ID NO: 1108295 - RNA, 19 nt, Homo sapiens
  misc_RNA (1)...(19): siRNA sense strand
gagugugaccgagaaggua

SEQ ID NO: 1108296 - RNA, 19 nt, Homo sapiens
  misc_RNA (1)...(19): siRNA sense strand
cuucugauguaaguucuga

SEQ ID NO: 1108297 - RNA, 19 nt, Homo sapiens
  misc_RNA (1)...(19): siRNA sense strand
ugaccgagaagguagacaa

SEQ ID NO: 1108298 - RNA, 19 nt, Homo sapiens
  misc_RNA (1)...(19): siRNA sense strand
gaccgagaagguagacaau

SEQ ID NO: 1108299 - RNA, 19 nt, Homo sapiens
  misc_RNA (1)...(19): siRNA sense strand
gagaagguagacaauugca

SEQ ID NO: 1108300 - RNA, 19 nt, Homo sapiens
  misc_RNA (1)...(19): siRNA sense strand
aaagcaaccuucugaugua

SEQ ID NO: 1108301 - RNA, 19 nt, Homo sapiens
  misc_RNA (1)...(19): siRNA sense strand
gcaaagcaaccuucugaug

SEQ ID NO: 1108302 - RNA, 19 nt, Homo sapiens
  misc_RNA (1)...(19): siRNA sense strand
ccgagaagguagacaauug

SEQ ID NO: 1108303 - RNA, 19 nt, Homo sapiens
  misc_RNA (1)...(19): siRNA sense strand
caaagcaaccuucugaugu

SEQ ID NO: 1108304 - RNA, 19 nt, Homo sapiens
  misc_RNA (1)...(19): siRNA sense strand
gcaaccuucugauguaagu

SEQ ID NO: 1108305 - RNA, 19 nt, Homo sapiens
  misc_RNA (1)...(19): siRNA sense strand
ugauguaaguucugagugu

SEQ ID NO: 1108306 - RNA, 19 nt, Homo sapiens
  misc_RNA (1)...(19): siRNA sense strand
aagcaaccuucugauguaa

SEQ ID NO: 1108307 - RNA, 19 nt, Homo sapiens
  misc_RNA (1)...(19): siRNA sense strand
cuaccucccuacagacaga

SEQ ID NO: 1108308 - RNA, 19 nt, Homo sapiens
  misc_RNA (1)...(19): siRNA sense strand
gagugugaccgagaaggua

SEQ ID NO: 1108309 - RNA, 19 nt, Homo sapiens
  misc_RNA (1)...(19): siRNA sense strand
cuucugauguaaguucuga

SEQ ID NO: 1108310 - RNA, 19 nt, Homo sapiens
  misc_RNA (1)...(19): siRNA sense strand
ugaccgagaagguagacaa

SEQ ID NO: 1108311 - RNA, 19 nt, Homo sapiens
  misc_RNA (1)...(19): siRNA sense strand
gaccgagaagguagacaau

SEQ ID NO: 1108312 - RNA, 19 nt, Homo sapiens
  misc_RNA (1)...(19): siRNA sense strand
gagaagguagacaauugca

SEQ ID NO: 1108313 - RNA, 19 nt, Homo sapiens
  misc_RNA (1)...(19): siRNA sense strand
aaagcaaccuucugaugua

SEQ ID NO: 1108314 - RNA, 19 nt, Homo sapiens
  misc_RNA (1)...(19): siRNA sense strand
gcaaagcaaccuucugaug

SEQ ID NO: 1108315 - RNA, 19 nt, Homo sapiens
  misc_RNA (1)...(19): siRNA sense strand
ccgagaagguagacaauug

SEQ ID NO: 1108316 - RNA, 19 nt, Homo sapiens
  misc_RNA (1)...(19): siRNA sense strand
caaagcaaccuucugaugu

SEQ ID NO: 1108317 - RNA, 19 nt, Homo sapiens
  misc_RNA (1)...(19): siRNA sense strand
gcaaccuucugauguaagu

SEQ ID NO: 1108318 - RNA, 19 nt, Homo sapiens
  misc_RNA (1)...(19): siRNA sense strand
ugauguaaguucugagugu

SEQ ID NO: 1108319 - RNA, 19 nt, Homo sapiens
  misc_RNA (1)...(19): siRNA sense strand
aagcaaccuucugauguaa

SEQ ID NO: 1108320 - RNA, 19 nt, Homo sapiens
  misc_RNA (1)...(19): siRNA sense strand
cuaccucccuacagacaga

SEQ ID NO: 1108321 - RNA, 19 nt, Homo sapiens
  misc_RNA (1)...(19): siRNA sense strand
gagugugaccgagaaggua

SEQ ID NO: 1108322 - RNA, 19 nt, Homo sapiens
  misc_RNA (1)...(19): siRNA sense strand
cuucugauguaaguucuga

SEQ ID NO: 1108323 - RNA, 19 nt, Homo sapiens
  misc_RNA (1)...(19): siRNA sense strand
ugaccgagaagguagacaa

SEQ ID NO: 1108324 - RNA, 19 nt, Homo sapiens
  misc_RNA (1)...(19): siRNA sense strand
gaccgagaagguagacaau

SEQ ID NO: 1108325 - RNA, 19 nt, Homo sapiens
  misc_RNA (1)...(19): siRNA sense strand
gagaagguagacaauugca

SEQ ID NO: 1108326 - RNA, 19 nt, Homo sapiens
  misc_RNA (1)...(19): siRNA sense strand
aaagcaaccuucugaugua

SEQ ID NO: 1108327 - RNA, 19 nt, Homo sapiens
  misc_RNA (1)...(19): siRNA sense strand
gcaaagcaaccuucugaug

SEQ ID NO: 1108328 - RNA, 19 nt, Homo sapiens
  misc_RNA (1)...(19): siRNA sense strand
ccgagaagguagacaauug

SEQ ID NO: 1108329 - RNA, 19 nt, Homo sapiens
  misc_RNA (1)...(19): siRNA sense strand
caaagcaaccuucugaugu

SEQ ID NO: 1108330 - RNA, 19 nt, Homo sapiens
  misc_RNA (1)...(19): siRNA sense strand
gcaaccuucugauguaagu

SEQ ID NO: 1108331 - RNA, 19 nt, Homo sapiens
  misc_RNA (1)...(19): siRNA sense strand
ugauguaaguucugagugu

SEQ ID NO: 1108332 - RNA, 19 nt, Homo sapiens
  misc_RNA (1)...(19): siRNA sense strand
aagcaaccuucugauguaa

SEQ ID NO: 1108333 - RNA, 19 nt, Homo sapiens
  misc_RNA (1)...(19): siRNA sense strand
cuaccucccuacagacaga

SEQ ID NO: 1108334 - RNA, 19 nt, Homo sapiens
  misc_RNA (1)...(19): siRNA sense strand
gagugugaccgagaaggua

SEQ ID NO: 1108335 - RNA, 19 nt, Homo sapiens
  misc_RNA (1)...(19): siRNA sense strand
cuucugauguaaguucuga

SEQ ID NO: 1108336 - RNA, 19 nt, Homo sapiens
  misc_RNA (1)...(19): siRNA sense strand
ugaccgagaagguagacaa

SEQ ID NO: 1108337 - RNA, 19 nt, Homo sapiens
  misc_RNA (1)...(19): siRNA sense strand
gaccgagaagguagacaau

SEQ ID NO: 1108338 - RNA, 19 nt, Homo sapiens
  misc_RNA (1)...(19): siRNA sense strand
gagaagguagacaauugca

SEQ ID NO: 1108339 - RNA, 19 nt, Homo sapiens
  misc_RNA (1)...(19): siRNA sense strand
aaagcaaccuucugaugua

SEQ ID NO: 1108340 - RNA, 19 nt, Homo sapiens
  misc_RNA (1)...(19): siRNA sense strand
gcaaagcaaccuucugaug

SEQ ID NO: 1108341 - RNA, 19 nt, Homo sapiens
  misc_RNA (1)...(19): siRNA sense strand
ccgagaagguagacaauug

SEQ ID NO: 1108342 - RNA, 19 nt, Homo sapiens
  misc_RNA (1)...(19): siRNA sense strand
caaagcaaccuucugaugu

SEQ ID NO: 1108343 - RNA, 19 nt, Homo sapiens
  misc_RNA (1)...(19): siRNA sense strand
gaagaccacccacgaaugg

SEQ ID NO: 1108344 - RNA, 19 nt, Homo sapiens
  misc_RNA (1)...(19): siRNA sense strand
gcaaccuucugauguaagu

SEQ ID NO: 1108345 - RNA, 19 nt, Homo sapiens
  misc_RNA (1)...(19): siRNA sense strand
ucuuacgacuguuacguua

SEQ ID NO: 1108346 - RNA, 19 nt, Homo sapiens
  misc_RNA (1)...(19): siRNA sense strand
ugauguaaguucugagugu

SEQ ID NO: 1108347 - RNA, 19 nt, Homo sapiens
  misc_RNA (1)...(19): siRNA sense strand
aagcaaccuucugauguaa

SEQ ID NO: 1108348 - RNA, 19 nt, Homo sapiens
  misc_RNA (1)...(19): siRNA sense strand
gguuaucuuacgacuguua

SEQ ID NO: 1108349 - RNA, 19 nt, Homo sapiens
  misc_RNA (1)...(19): siRNA sense strand
uuacgacuguuacguuaca

SEQ ID NO: 1108350 - RNA, 19 nt, Homo sapiens
  misc_RNA (1)...(19): siRNA sense strand
cgacuguuacguuacauug

SEQ ID NO: 1108351 - RNA, 19 nt, Homo sapiens
  misc_RNA (1)...(19): siRNA sense strand
cuaccucccuacagacaga

SEQ ID NO: 1108352 - RNA, 19 nt, Homo sapiens
  misc_RNA (1)...(19): siRNA sense strand
cgaagaccacccacgaaug

SEQ ID NO: 1108353 - RNA, 19 nt, Homo sapiens
  misc_RNA (1)...(19): siRNA sense strand
augguuaucuuacgacugu

SEQ ID NO: 1108354 - RNA, 19 nt, Homo sapiens
  misc_RNA (1)...(19): siRNA sense strand
gagugugaccgagaaggua

SEQ ID NO: 1108355 - RNA, 19 nt, Homo sapiens
  misc_RNA (1)...(19): siRNA sense strand
cuucugauguaaguucuga

SEQ ID NO: 1108356 - RNA, 19 nt, Homo sapiens
  misc_RNA (1)...(19): siRNA sense strand
ccacgaaugguuaucuuac

SEQ ID NO: 1108357 - RNA, 19 nt, Homo sapiens
  misc_RNA (1)...(19): siRNA sense strand
ugaccgagaagguagacaa

SEQ ID NO: 1108358 - RNA, 19 nt, Homo sapiens
  misc_RNA (1)...(19): siRNA sense strand
ccgaagaccacccacgaau

SEQ ID NO: 1108359 - RNA, 19 nt, Homo sapiens
  misc_RNA (1)...(19): siRNA sense strand
acgaaugguuaucuuacga

SEQ ID NO: 1108360 - RNA, 19 nt, Homo sapiens
  misc_RNA (1)...(19): siRNA sense strand
gaccgagaagguagacaau

SEQ ID NO: 1108361 - RNA, 19 nt, Homo sapiens
  misc_RNA (1)...(19): siRNA sense strand
gagaagguagacaauugca

SEQ ID NO: 1108362 - RNA, 19 nt, Homo sapiens
  misc_RNA (1)...(19): siRNA sense strand
aaagcaaccuucugaugua

SEQ ID NO: 1108363 - RNA, 19 nt, Homo sapiens
  misc_RNA (1)...(19): siRNA sense strand
gcaaagcaaccuucugaug

SEQ ID NO: 1108364 - RNA, 19 nt, Homo sapiens
  misc_RNA (1)...(19): siRNA sense strand
ccgagaagguagacaauug

SEQ ID NO: 1108365 - RNA, 19 nt, Homo sapiens
  misc_RNA (1)...(19): siRNA sense strand
caaagcaaccuucugaugu

SEQ ID NO: 1108366 - RNA, 19 nt, Homo sapiens
  misc_RNA (1)...(19): siRNA sense strand
gaagaccacccacgaaugg

SEQ ID NO: 1108367 - RNA, 19 nt, Homo sapiens
  misc_RNA (1)...(19): siRNA sense strand
gcaaccuucugauguaagu

SEQ ID NO: 1108368 - RNA, 19 nt, Homo sapiens
  misc_RNA (1)...(19): siRNA sense strand
ucuuacgacuguuacguua

SEQ ID NO: 1108369 - RNA, 19 nt, Homo sapiens
  misc_RNA (1)...(19): siRNA sense strand
ugauguaaguucugagugu

SEQ ID NO: 1108370 - RNA, 19 nt, Homo sapiens
  misc_RNA (1)...(19): siRNA sense strand
aagcaaccuucugauguaa

SEQ ID NO: 1108371 - RNA, 19 nt, Homo sapiens
  misc_RNA (1)...(19): siRNA sense strand
gguuaucuuacgacuguua

SEQ ID NO: 1108372 - RNA, 19 nt, Homo sapiens
  misc_RNA (1)...(19): siRNA sense strand
uuacgacuguuacguuaca

SEQ ID NO: 1108373 - RNA, 19 nt, Homo sapiens
  misc_RNA (1)...(19): siRNA sense strand
cgacuguuacguuacauug

SEQ ID NO: 1108374 - RNA, 19 nt, Homo sapiens
  misc_RNA (1)...(19): siRNA sense strand
cuaccucccuacagacaga

SEQ ID NO: 1108375 - RNA, 19 nt, Homo sapiens
  misc_RNA (1)...(19): siRNA sense strand
cgaagaccacccacgaaug

SEQ ID NO: 1108376 - RNA, 19 nt, Homo sapiens
  misc_RNA (1)...(19): siRNA sense strand
augguuaucuuacgacugu

SEQ ID NO: 1108377 - RNA, 19 nt, Homo sapiens
  misc_RNA (1)...(19): siRNA sense strand
gagugugaccgagaaggua

SEQ ID NO: 1108378 - RNA, 19 nt, Homo sapiens
  misc_RNA (1)...(19): siRNA sense strand
cuucugauguaaguucuga

SEQ ID NO: 1108379 - RNA, 19 nt, Homo sapiens
  misc_RNA (1)...(19): siRNA sense strand
ccacgaaugguuaucuuac

SEQ ID NO: 1108380 - RNA, 19 nt, Homo sapiens
  misc_RNA (1)...(19): siRNA sense strand
ugaccgagaagguagacaa

SEQ ID NO: 1108381 - RNA, 19 nt, Homo sapiens
  misc_RNA (1)...(19): siRNA sense strand
ccgaagaccacccacgaau

SEQ ID NO: 1108382 - RNA, 19 nt, Homo sapiens
  misc_RNA (1)...(19): siRNA sense strand
acgaaugguuaucuuacga

SEQ ID NO: 1108383 - RNA, 19 nt, Homo sapiens
  misc_RNA (1)...(19): siRNA sense strand
gaccgagaagguagacaau

SEQ ID NO: 1108384 - RNA, 19 nt, Homo sapiens
  misc_RNA (1)...(19): siRNA sense strand
gagaagguagacaauugca

SEQ ID NO: 1108385 - RNA, 19 nt, Homo sapiens
  misc_RNA (1)...(19): siRNA sense strand
aaagcaaccuucugaugua

SEQ ID NO: 1108386 - RNA, 19 nt, Homo sapiens
  misc_RNA (1)...(19): siRNA sense strand
gcaaagcaaccuucugaug

SEQ ID NO: 1108387 - RNA, 19 nt, Homo sapiens
  misc_RNA (1)...(19): siRNA sense strand
ccgagaagguagacaauug

SEQ ID NO: 1108388 - RNA, 19 nt, Homo sapiens
  misc_RNA (1)...(19): siRNA sense strand
caaagcaaccuucugaugu

SEQ ID NO: 1108389 - RNA, 19 nt, Homo sapiens
  misc_RNA (1)...(19): siRNA sense strand
gcaaccuucugauguaagu

SEQ ID NO: 1108390 - RNA, 19 nt, Homo sapiens
  misc_RNA (1)...(19): siRNA sense strand
ugauguaaguucugagugu

SEQ ID NO: 1108391 - RNA, 19 nt, Homo sapiens
  misc_RNA (1)...(19): siRNA sense strand
aagcaaccuucugauguaa

SEQ ID NO: 1108392 - RNA, 19 nt, Homo sapiens
  misc_RNA (1)...(19): siRNA sense strand
cuaccucccuacagacaga

SEQ ID NO: 1108393 - RNA, 19 nt, Homo sapiens
  misc_RNA (1)...(19): siRNA sense strand
gagugugaccgagaaggua

SEQ ID NO: 1108394 - RNA, 19 nt, Homo sapiens
  misc_RNA (1)...(19): siRNA sense strand
cuucugauguaaguucuga

SEQ ID NO: 1108395 - RNA, 19 nt, Homo sapiens
  misc_RNA (1)...(19): siRNA sense strand
ugaccgagaagguagacaa

SEQ ID NO: 1108396 - RNA, 19 nt, Homo sapiens
  misc_RNA (1)...(19): siRNA sense strand
gaccgagaagguagacaau

SEQ ID NO: 1108397 - RNA, 19 nt, Homo sapiens
  misc_RNA (1)...(19): siRNA sense strand
gagaagguagacaauugca

SEQ ID NO: 1108398 - RNA, 19 nt, Homo sapiens
  misc_RNA (1)...(19): siRNA sense strand
aaagcaaccuucugaugua

SEQ ID NO: 1108399 - RNA, 19 nt, Homo sapiens
  misc_RNA (1)...(19): siRNA sense strand
gcaaagcaaccuucugaug

SEQ ID NO: 1108400 - RNA, 19 nt, Homo sapiens
  misc_RNA (1)...(19): siRNA sense strand
ccgagaagguagacaauug

SEQ ID NO: 1108401 - RNA, 19 nt, Homo sapiens
  misc_RNA (1)...(19): siRNA sense strand
caaagcaaccuucugaugu

SEQ ID NO: 1108402 - RNA, 19 nt, Homo sapiens
  misc_RNA (1)...(19): siRNA sense strand
gcaaccuucugauguaagu

SEQ ID NO: 1108403 - RNA, 19 nt, Homo sapiens
  misc_RNA (1)...(19): siRNA sense strand
ugauguaaguucugagugu

SEQ ID NO: 1108404 - RNA, 19 nt, Homo sapiens
  misc_RNA (1)...(19): siRNA sense strand
aagcaaccuucugauguaa

SEQ ID NO: 1108405 - RNA, 19 nt, Homo sapiens
  misc_RNA (1)...(19): siRNA sense strand
cuaccucccuacagacaga

SEQ ID NO: 1108406 - RNA, 19 nt, Homo sapiens
  misc_RNA (1)...(19): siRNA sense strand
gagugugaccgagaaggua

SEQ ID NO: 1108407 - RNA, 19 nt, Homo sapiens
  misc_RNA (1)...(19): siRNA sense strand
cuucugauguaaguucuga

SEQ ID NO: 1108408 - RNA, 19 nt, Homo sapiens
  misc_RNA (1)...(19): siRNA sense strand
ugaccgagaagguagacaa

SEQ ID NO: 1108409 - RNA, 19 nt, Homo sapiens
  misc_RNA (1)...(19): siRNA sense strand
gaccgagaagguagacaau

SEQ ID NO: 1108410 - RNA, 19 nt, Homo sapiens
  misc_RNA (1)...(19): siRNA sense strand
gagaagguagacaauugca

SEQ ID NO: 1108411 - RNA, 19 nt, Homo sapiens
  misc_RNA (1)...(19): siRNA sense strand
aaagcaaccuucugaugua

SEQ ID NO: 1108412 - RNA, 19 nt, Homo sapiens
  misc_RNA (1)...(19): siRNA sense strand
gcaaagcaaccuucugaug

SEQ ID NO: 1108413 - RNA, 19 nt, Homo sapiens
  misc_RNA (1)...(19): siRNA sense strand
ccgagaagguagacaauug

SEQ ID NO: 1108414 - RNA, 19 nt, Homo sapiens
  misc_RNA (1)...(19): siRNA sense strand
caaagcaaccuucugaugu

SEQ ID NO: 1108415 - RNA, 19 nt, Homo sapiens
  misc_RNA (1)...(19): siRNA sense strand
gcaaccuucugauguaagu

SEQ ID NO: 1108416 - RNA, 19 nt, Homo sapiens
  misc_RNA (1)...(19): siRNA sense strand
ugauguaaguucugagugu

SEQ ID NO: 1108417 - RNA, 19 nt, Homo sapiens
  misc_RNA (1)...(19): siRNA sense strand
aagcaaccuucugauguaa

SEQ ID NO: 1108418 - RNA, 19 nt, Homo sapiens
  misc_RNA (1)...(19): siRNA sense strand
cuaccucccuacagacaga

SEQ ID NO: 1108419 - RNA, 19 nt, Homo sapiens
  misc_RNA (1)...(19): siRNA sense strand
gagugugaccgagaaggua

SEQ ID NO: 1108420 - RNA, 19 nt, Homo sapiens
  misc_RNA (1)...(19): siRNA sense strand
cuucugauguaaguucuga

SEQ ID NO: 1108421 - RNA, 19 nt, Homo sapiens
  misc_RNA (1)...(19): siRNA sense strand
ugaccgagaagguagacaa

SEQ ID NO: 1108422 - RNA, 19 nt, Homo sapiens
  misc_RNA (1)...(19): siRNA sense strand
gaccgagaagguagacaau

SEQ ID NO: 1108423 - RNA, 19 nt, Homo sapiens
  misc_RNA (1)...(19): siRNA sense strand
gagaagguagacaauugca

SEQ ID NO: 1108424 - RNA, 19 nt, Homo sapiens
  misc_RNA (1)...(19): siRNA sense strand
aaagcaaccuucugaugua

SEQ ID NO: 1108425 - RNA, 19 nt, Homo sapiens
  misc_RNA (1)...(19): siRNA sense strand
gcaaagcaaccuucugaug

SEQ ID NO: 1108426 - RNA, 19 nt, Homo sapiens
  misc_RNA (1)...(19): siRNA sense strand
ccgagaagguagacaauug

SEQ ID NO: 1108427 - RNA, 19 nt, Homo sapiens
  misc_RNA (1)...(19): siRNA sense strand
caaagcaaccuucugaugu

SEQ ID NO: 1108428 - RNA, 19 nt, Homo sapiens
  misc_RNA (1)...(19): siRNA sense strand
gcaaccuucugauguaagu

SEQ ID NO: 1108429 - RNA, 19 nt, Homo sapiens
  misc_RNA (1)...(19): siRNA sense strand
ugauguaaguucugagugu

SEQ ID NO: 1108430 - RNA, 19 nt, Homo sapiens
  misc_RNA (1)...(19): siRNA sense strand
aagcaaccuucugauguaa

SEQ ID NO: 1108431 - RNA, 19 nt, Homo sapiens
  misc_RNA (1)...(19): siRNA sense strand
cuaccucccuacagacaga

SEQ ID NO: 1108432 - RNA, 19 nt, Homo sapiens
  misc_RNA (1)...(19): siRNA sense strand
gagugugaccgagaaggua

SEQ ID NO: 1108433 - RNA, 19 nt, Homo sapiens
  misc_RNA (1)...(19): siRNA sense strand
cuucugauguaaguucuga

SEQ ID NO: 1108434 - RNA, 19 nt, Homo sapiens
  misc_RNA (1)...(19): siRNA sense strand
ugaccgagaagguagacaa

SEQ ID NO: 1108435 - RNA, 19 nt, Homo sapiens
  misc_RNA (1)...(19): siRNA sense strand
gaccgagaagguagacaau

SEQ ID NO: 1108436 - RNA, 19 nt, Homo sapiens
  misc_RNA (1)...(19): siRNA sense strand
gagaagguagacaauugca

SEQ ID NO: 1108437 - RNA, 19 nt, Homo sapiens
  misc_RNA (1)...(19): siRNA sense strand
aaagcaaccuucugaugua

SEQ ID NO: 1108438 - RNA, 19 nt, Homo sapiens
  misc_RNA (1)...(19): siRNA sense strand
gcaaagcaaccuucugaug

SEQ ID NO: 1108439 - RNA, 19 nt, Homo sapiens
  misc_RNA (1)...(19): siRNA sense strand
ccgagaagguagacaauug

SEQ ID NO: 1108440 - RNA, 19 nt, Homo sapiens
  misc_RNA (1)...(19): siRNA sense strand
caaagcaaccuucugaugu

SEQ ID NO: 1108441 - RNA, 19 nt, Homo sapiens
  misc_RNA (1)...(19): siRNA sense strand
gcaaccuucugauguaagu

SEQ ID NO: 1108442 - RNA, 19 nt, Homo sapiens
  misc_RNA (1)...(19): siRNA sense strand
ugauguaaguucugagugu

SEQ ID NO: 1108443 - RNA, 19 nt, Homo sapiens
  misc_RNA (1)...(19): siRNA sense strand
aagcaaccuucugauguaa

SEQ ID NO: 1108444 - RNA, 19 nt, Homo sapiens
  misc_RNA (1)...(19): siRNA sense strand
cuaccucccuacagacaga

SEQ ID NO: 1108445 - RNA, 19 nt, Homo sapiens
  misc_RNA (1)...(19): siRNA sense strand
gagugugaccgagaaggua

SEQ ID NO: 1108446 - RNA, 19 nt, Homo sapiens
  misc_RNA (1)...(19): siRNA sense strand
cuucugauguaaguucuga

SEQ ID NO: 1108447 - RNA, 19 nt, Homo sapiens
  misc_RNA (1)...(19): siRNA sense strand
ugaccgagaagguagacaa

SEQ ID NO: 1108448 - RNA, 19 nt, Homo sapiens
  misc_RNA (1)...(19): siRNA sense strand
gaccgagaagguagacaau

SEQ ID NO: 1108449 - RNA, 19 nt, Homo sapiens
  misc_RNA (1)...(19): siRNA sense strand
gagaagguagacaauugca

SEQ ID NO: 1108450 - RNA, 19 nt, Homo sapiens
  misc_RNA (1)...(19): siRNA sense strand
aaagcaaccuucugaugua

SEQ ID NO: 1108451 - RNA, 19 nt, Homo sapiens
  misc_RNA (1)...(19): siRNA sense strand
gcaaagcaaccuucugaug

SEQ ID NO: 1108452 - RNA, 19 nt, Homo sapiens
  misc_RNA (1)...(19): siRNA sense strand
ccgagaagguagacaauug

SEQ ID NO: 1108453 - RNA, 19 nt, Homo sapiens
  misc_RNA (1)...(19): siRNA sense strand
caaagcaaccuucugaugu

SEQ ID NO: 1108454 - RNA, 19 nt, Homo sapiens
  misc_RNA (1)...(19): siRNA sense strand
gcaaccuucugauguaagu

SEQ ID NO: 1108455 - RNA, 19 nt, Homo sapiens
  misc_RNA (1)...(19): siRNA sense strand
ugauguaaguucugagugu

SEQ ID NO: 1108456 - RNA, 19 nt, Homo sapiens
  misc_RNA (1)...(19): siRNA sense strand
aagcaaccuucugauguaa

SEQ ID NO: 1108457 - RNA, 19 nt, Homo sapiens
  misc_RNA (1)...(19): siRNA sense strand
cuaccucccuacagacaga

SEQ ID NO: 1108458 - RNA, 19 nt, Homo sapiens
  misc_RNA (1)...(19): siRNA sense strand
gagugugaccgagaaggua

SEQ ID NO: 1108459 - RNA, 19 nt, Homo sapiens
  misc_RNA (1)...(19): siRNA sense strand
cuucugauguaaguucuga

SEQ ID NO: 1108460 - RNA, 19 nt, Homo sapiens
  misc_RNA (1)...(19): siRNA sense strand
ugaccgagaagguagacaa

SEQ ID NO: 1108461 - RNA, 19 nt, Homo sapiens
  misc_RNA (1)...(19): siRNA sense strand
gaccgagaagguagacaau

SEQ ID NO: 1108462 - RNA, 19 nt, Homo sapiens
  misc_RNA (1)...(19): siRNA sense strand
gagaagguagacaauugca

SEQ ID NO: 1108463 - RNA, 19 nt, Homo sapiens
  misc_RNA (1)...(19): siRNA sense strand
aaagcaaccuucugaugua

SEQ ID NO: 1108464 - RNA, 19 nt, Homo sapiens
  misc_RNA (1)...(19): siRNA sense strand
gcaaagcaaccuucugaug

SEQ ID NO: 1108465 - RNA, 19 nt, Homo sapiens
  misc_RNA (1)...(19): siRNA sense strand
ccgagaagguagacaauug

SEQ ID NO: 1108466 - RNA, 19 nt, Homo sapiens
  misc_RNA (1)...(19): siRNA sense strand
caaagcaaccuucugaugu

SEQ ID NO: 1108467 - RNA, 19 nt, Homo sapiens
  misc_RNA (1)...(19): siRNA sense strand
gaagaccacccacgaaugg

SEQ ID NO: 1108468 - RNA, 19 nt, Homo sapiens
  misc_RNA (1)...(19): siRNA sense strand
gcaaccuucugauguaagu

SEQ ID NO: 1108469 - RNA, 19 nt, Homo sapiens
  misc_RNA (1)...(19): siRNA sense strand
ucuuacgacuguuacguua

SEQ ID NO: 1108470 - RNA, 19 nt, Homo sapiens
  misc_RNA (1)...(19): siRNA sense strand
ugauguaaguucugagugu

SEQ ID NO: 1108471 - RNA, 19 nt, Homo sapiens
  misc_RNA (1)...(19): siRNA sense strand
aagcaaccuucugauguaa

SEQ ID NO: 1108472 - RNA, 19 nt, Homo sapiens
  misc_RNA (1)...(19): siRNA sense strand
gguuaucuuacgacuguua

SEQ ID NO: 1108473 - RNA, 19 nt, Homo sapiens
  misc_RNA (1)...(19): siRNA sense strand
uuacgacuguuacguuaca

SEQ ID NO: 1108474 - RNA, 19 nt, Homo sapiens
  misc_RNA (1)...(19): siRNA sense strand
cgacuguuacguuacauug

SEQ ID NO: 1108475 - RNA, 19 nt, Homo sapiens
  misc_RNA (1)...(19): siRNA sense strand
cuaccucccuacagacaga

SEQ ID NO: 1108476 - RNA, 19 nt, Homo sapiens
  misc_RNA (1)...(19): siRNA sense strand
cgaagaccacccacgaaug

SEQ ID NO: 1108477 - RNA, 19 nt, Homo sapiens
  misc_RNA (1)...(19): siRNA sense strand
augguuaucuuacgacugu

SEQ ID NO: 1108478 - RNA, 19 nt, Homo sapiens
  misc_RNA (1)...(19): siRNA sense strand
gagugugaccgagaaggua

SEQ ID NO: 1108479 - RNA, 19 nt, Homo sapiens
  misc_RNA (1)...(19): siRNA sense strand
cuucugauguaaguucuga

SEQ ID NO: 1108480 - RNA, 19 nt, Homo sapiens
  misc_RNA (1)...(19): siRNA sense strand
ccacgaaugguuaucuuac

SEQ ID NO: 1108481 - RNA, 19 nt, Homo sapiens
  misc_RNA (1)...(19): siRNA sense strand
ugaccgagaagguagacaa

SEQ ID NO: 1108482 - RNA, 19 nt, Homo sapiens
  misc_RNA (1)...(19): siRNA sense strand
ccgaagaccacccacgaau

SEQ ID NO: 1108483 - RNA, 19 nt, Homo sapiens
  misc_RNA (1)...(19): siRNA sense strand
acgaaugguuaucuuacga

SEQ ID NO: 1108484 - RNA, 19 nt, Homo sapiens
  misc_RNA (1)...(19): siRNA sense strand
gaccgagaagguagacaau

SEQ ID NO: 1108485 - RNA, 19 nt, Homo sapiens
  misc_RNA (1)...(19): siRNA sense strand
gagaagguagacaauugca

SEQ ID NO: 1108486 - RNA, 19 nt, Homo sapiens
  misc_RNA (1)...(19): siRNA sense strand
aaagcaaccuucugaugua

SEQ ID NO: 1108487 - RNA, 19 nt, Homo sapiens
  misc_RNA (1)...(19): siRNA sense strand
gcaaagcaaccuucugaug

SEQ ID NO: 1108488 - RNA, 19 nt, Homo sapiens
  misc_RNA (1)...(19): siRNA sense strand
ccgagaagguagacaauug

SEQ ID NO: 1108489 - RNA, 19 nt, Homo sapiens
  misc_RNA (1)...(19): siRNA sense strand
caaagcaaccuucugaugu

SEQ ID NO: 1108490 - RNA, 19 nt, Homo sapiens
  misc_RNA (1)...(19): siRNA sense strand
gaagaccacccacgaaugg

SEQ ID NO: 1108491 - RNA, 19 nt, Homo sapiens
  misc_RNA (1)...(19): siRNA sense strand
gcaaccuucugauguaagu

SEQ ID NO: 1108492 - RNA, 19 nt, Homo sapiens
  misc_RNA (1)...(19): siRNA sense strand
ucuuacgacuguuacguua

SEQ ID NO: 1108493 - RNA, 19 nt, Homo sapiens
  misc_RNA (1)...(19): siRNA sense strand
ugauguaaguucugagugu

SEQ ID NO: 1108494 - RNA, 19 nt, Homo sapiens
  misc_RNA (1)...(19): siRNA sense strand
aagcaaccuucugauguaa

SEQ ID NO: 1108495 - RNA, 19 nt, Homo sapiens
  misc_RNA (1)...(19): siRNA sense strand
gguuaucuuacgacuguua

SEQ ID NO: 1108496 - RNA, 19 nt, Homo sapiens
  misc_RNA (1)...(19): siRNA sense strand
uuacgacuguuacguuaca

SEQ ID NO: 1108497 - RNA, 19 nt, Homo sapiens
  misc_RNA (1)...(19): siRNA sense strand
cgacuguuacguuacauug

SEQ ID NO: 1108498 - RNA, 19 nt, Homo sapiens
  misc_RNA (1)...(19): siRNA sense strand
cuaccucccuacagacaga

SEQ ID NO: 1108499 - RNA, 19 nt, Homo sapiens
  misc_RNA (1)...(19): siRNA sense strand
cgaagaccacccacgaaug

SEQ ID NO: 1108500 - RNA, 19 nt, Homo sapiens
  misc_RNA (1)...(19): siRNA sense strand
augguuaucuuacgacugu

SEQ ID NO: 1108501 - RNA, 19 nt, Homo sapiens
  misc_RNA (1)...(19): siRNA sense strand
gagugugaccgagaaggua

SEQ ID NO: 1108502 - RNA, 19 nt, Homo sapiens
  misc_RNA (1)...(19): siRNA sense strand
cuucugauguaaguucuga

SEQ ID NO: 1108503 - RNA, 19 nt, Homo sapiens
  misc_RNA (1)...(19): siRNA sense strand
ccacgaaugguuaucuuac

SEQ ID NO: 1108504 - RNA, 19 nt, Homo sapiens
  misc_RNA (1)...(19): siRNA sense strand
ugaccgagaagguagacaa

SEQ ID NO: 1108505 - RNA, 19 nt, Homo sapiens
  misc_RNA (1)...(19): siRNA sense strand
ccgaagaccacccacgaau

SEQ ID NO: 1108506 - RNA, 19 nt, Homo sapiens
  misc_RNA (1)...(19): siRNA sense strand
acgaaugguuaucuuacga

SEQ ID NO: 1108507 - RNA, 19 nt, Homo sapiens
  misc_RNA (1)...(19): siRNA sense strand
gaccgagaagguagacaau

SEQ ID NO: 1108508 - RNA, 19 nt, Homo sapiens
  misc_RNA (1)...(19): siRNA sense strand
gagaagguagacaauugca

SEQ ID NO: 1108509 - RNA, 19 nt, Homo sapiens
  misc_RNA (1)...(19): siRNA sense strand
aaagcaaccuucugaugua

SEQ ID NO: 1108510 - RNA, 19 nt, Homo sapiens
  misc_RNA (1)...(19): siRNA sense strand
gcaaagcaaccuucugaug

SEQ ID NO: 1108511 - RNA, 19 nt, Homo sapiens
  misc_RNA (1)...(19): siRNA sense strand
ccgagaagguagacaauug

SEQ ID NO: 1108512 - RNA, 19 nt, Homo sapiens
  misc_RNA (1)...(19): siRNA sense strand
caaagcaaccuucugaugu

SEQ ID NO: 1108513 - RNA, 19 nt, Homo sapiens
  misc_RNA (1)...(19): siRNA sense strand
gcaaccuucugauguaagu

SEQ ID NO: 1108514 - RNA, 19 nt, Homo sapiens
  misc_RNA (1)...(19): siRNA sense strand
ugauguaaguucugagugu

SEQ ID NO: 1108515 - RNA, 19 nt, Homo sapiens
  misc_RNA (1)...(19): siRNA sense strand
aagcaaccuucugauguaa

SEQ ID NO: 1108516 - RNA, 19 nt, Homo sapiens
  misc_RNA (1)...(19): siRNA sense strand
cuaccucccuacagacaga

SEQ ID NO: 1108517 - RNA, 19 nt, Homo sapiens
  misc_RNA (1)...(19): siRNA sense strand
gagugugaccgagaaggua

SEQ ID NO: 1108518 - RNA, 19 nt, Homo sapiens
  misc_RNA (1)...(19): siRNA sense strand
cuucugauguaaguucuga

SEQ ID NO: 1108519 - RNA, 19 nt, Homo sapiens
  misc_RNA (1)...(19): siRNA sense strand
ugaccgagaagguagacaa

SEQ ID NO: 1108520 - RNA, 19 nt, Homo sapiens
  misc_RNA (1)...(19): siRNA sense strand
gaccgagaagguagacaau

SEQ ID NO: 1108521 - RNA, 19 nt, Homo sapiens
  misc_RNA (1)...(19): siRNA sense strand
gagaagguagacaauugca

SEQ ID NO: 1108522 - RNA, 19 nt, Homo sapiens
  misc_RNA (1)...(19): siRNA sense strand
aaagcaaccuucugaugua

SEQ ID NO: 1108523 - RNA, 19 nt, Homo sapiens
  misc_RNA (1)...(19): siRNA sense strand
gcaaagcaaccuucugaug

SEQ ID NO: 1108524 - RNA, 19 nt, Homo sapiens
  misc_RNA (1)...(19): siRNA sense strand
ccgagaagguagacaauug

SEQ ID NO: 1108525 - RNA, 19 nt, Homo sapiens
  misc_RNA (1)...(19): siRNA sense strand
caaagcaaccuucugaugu

SEQ ID NO: 1108526 - RNA, 19 nt, Homo sapiens
  misc_RNA (1)...(19): siRNA sense strand
gcaaccuucugauguaagu

SEQ ID NO: 1108527 - RNA, 19 nt, Homo sapiens
  misc_RNA (1)...(19): siRNA sense strand
ugauguaaguucugagugu

SEQ ID NO: 1108528 - RNA, 19 nt, Homo sapiens
  misc_RNA (1)...(19): siRNA sense strand
aagcaaccuucugauguaa

SEQ ID NO: 1108529 - RNA, 19 nt, Homo sapiens
  misc_RNA (1)...(19): siRNA sense strand
cuaccucccuacagacaga

SEQ ID NO: 1108530 - RNA, 19 nt, Homo sapiens
  misc_RNA (1)...(19): siRNA sense strand
gagugugaccgagaaggua

SEQ ID NO: 1108531 - RNA, 19 nt, Homo sapiens
  misc_RNA (1)...(19): siRNA sense strand
cuucugauguaaguucuga

SEQ ID NO: 1108532 - RNA, 19 nt, Homo sapiens
  misc_RNA (1)...(19): siRNA sense strand
ugaccgagaagguagacaa

SEQ ID NO: 1108533 - RNA, 19 nt, Homo sapiens
  misc_RNA (1)...(19): siRNA sense strand
gaccgagaagguagacaau

SEQ ID NO: 1108534 - RNA, 19 nt, Homo sapiens
  misc_RNA (1)...(19): siRNA sense strand
gagaagguagacaauugca

SEQ ID NO: 1108535 - RNA, 19 nt, Homo sapiens
  misc_RNA (1)...(19): siRNA sense strand
aaagcaaccuucugaugua

SEQ ID NO: 1108536 - RNA, 19 nt, Homo sapiens
  misc_RNA (1)...(19): siRNA sense strand
gcaaagcaaccuucugaug

SEQ ID NO: 1108537 - RNA, 19 nt, Homo sapiens
  misc_RNA (1)...(19): siRNA sense strand
ccgagaagguagacaauug

SEQ ID NO: 1108538 - RNA, 19 nt, Homo sapiens
  misc_RNA (1)...(19): siRNA sense strand
caaagcaaccuucugaugu

SEQ ID NO: 1108539 - RNA, 19 nt, Homo sapiens
  misc_RNA (1)...(19): siRNA sense strand
gcaaccuucugauguaagu

SEQ ID NO: 1108540 - RNA, 19 nt, Homo sapiens
  misc_RNA (1)...(19): siRNA sense strand
ugauguaaguucugagugu

SEQ ID NO: 1108541 - RNA, 19 nt, Homo sapiens
  misc_RNA (1)...(19): siRNA sense strand
aagcaaccuucugauguaa

SEQ ID NO: 1108542 - RNA, 19 nt, Homo sapiens
  misc_RNA (1)...(19): siRNA sense strand
cuaccucccuacagacaga

SEQ ID NO: 1108543 - RNA, 19 nt, Homo sapiens
  misc_RNA (1)...(19): siRNA sense strand
gagugugaccgagaaggua

SEQ ID NO: 1108544 - RNA, 19 nt, Homo sapiens
  misc_RNA (1)...(19): siRNA sense strand
cuucugauguaaguucuga

SEQ ID NO: 1108545 - RNA, 19 nt, Homo sapiens
  misc_RNA (1)...(19): siRNA sense strand
ugaccgagaagguagacaa

SEQ ID NO: 1108546 - RNA, 19 nt, Homo sapiens
  misc_RNA (1)...(19): siRNA sense strand
gaccgagaagguagacaau

SEQ ID NO: 1108547 - RNA, 19 nt, Homo sapiens
  misc_RNA (1)...(19): siRNA sense strand
gagaagguagacaauugca

SEQ ID NO: 1108548 - RNA, 19 nt, Homo sapiens
  misc_RNA (1)...(19): siRNA sense strand
aaagcaaccuucugaugua

SEQ ID NO: 1108549 - RNA, 19 nt, Homo sapiens
  misc_RNA (1)...(19): siRNA sense strand
gcaaagcaaccuucugaug

SEQ ID NO: 1108550 - RNA, 19 nt, Homo sapiens
  misc_RNA (1)...(19): siRNA sense strand
ccgagaagguagacaauug

SEQ ID NO: 1108551 - RNA, 19 nt, Homo sapiens
  misc_RNA (1)...(19): siRNA sense strand
caaagcaaccuucugaugu

SEQ ID NO: 1108552 - RNA, 19 nt, Homo sapiens
  misc_RNA (1)...(19): siRNA sense strand
gcaaccuucugauguaagu

SEQ ID NO: 1108553 - RNA, 19 nt, Homo sapiens
  misc_RNA (1)...(19): siRNA sense strand
ugauguaaguucugagugu

SEQ ID NO: 1108554 - RNA, 19 nt, Homo sapiens
  misc_RNA (1)...(19): siRNA sense strand
aagcaaccuucugauguaa

SEQ ID NO: 1108555 - RNA, 19 nt, Homo sapiens
  misc_RNA (1)...(19): siRNA sense strand
cuaccucccuacagacaga

SEQ ID NO: 1108556 - RNA, 19 nt, Homo sapiens
  misc_RNA (1)...(19): siRNA sense strand
gagugugaccgagaaggua

SEQ ID NO: 1108557 - RNA, 19 nt, Homo sapiens
  misc_RNA (1)...(19): siRNA sense strand
cuucugauguaaguucuga

SEQ ID NO: 1108558 - RNA, 19 nt, Homo sapiens
  misc_RNA (1)...(19): siRNA sense strand
ugaccgagaagguagacaa

SEQ ID NO: 1108559 - RNA, 19 nt, Homo sapiens
  misc_RNA (1)...(19): siRNA sense strand
gaccgagaagguagacaau

SEQ ID NO: 1108560 - RNA, 19 nt, Homo sapiens
  misc_RNA (1)...(19): siRNA sense strand
gagaagguagacaauugca

SEQ ID NO: 1108561 - RNA, 19 nt, Homo sapiens
  misc_RNA (1)...(19): siRNA sense strand
aaagcaaccuucugaugua

SEQ ID NO: 1108562 - RNA, 19 nt, Homo sapiens
  misc_RNA (1)...(19): siRNA sense strand
gcaaagcaaccuucugaug

SEQ ID NO: 1108563 - RNA, 19 nt, Homo sapiens
  misc_RNA (1)...(19): siRNA sense strand
ccgagaagguagacaauug

SEQ ID NO: 1108564 - RNA, 19 nt, Homo sapiens
  misc_RNA (1)...(19): siRNA sense strand
caaagcaaccuucugaugu

SEQ ID NO: 1108565 - RNA, 19 nt, Homo sapiens
  misc_RNA (1)...(19): siRNA sense strand
gcaaccuucugauguaagu

SEQ ID NO: 1108566 - RNA, 19 nt, Homo sapiens
  misc_RNA (1)...(19): siRNA sense strand
ugauguaaguucugagugu

SEQ ID NO: 1108567 - RNA, 19 nt, Homo sapiens
  misc_RNA (1)...(19): siRNA sense strand
aagcaaccuucugauguaa

SEQ ID NO: 1108568 - RNA, 19 nt, Homo sapiens
  misc_RNA (1)...(19): siRNA sense strand
cuaccucccuacagacaga

SEQ ID NO: 1108569 - RNA, 19 nt, Homo sapiens
  misc_RNA (1)...(19): siRNA sense strand
gagugugaccgagaaggua

SEQ ID NO: 1108570 - RNA, 19 nt, Homo sapiens
  misc_RNA (1)...(19): siRNA sense strand
cuucugauguaaguucuga

SEQ ID NO: 1108571 - RNA, 19 nt, Homo sapiens
  misc_RNA (1)...(19): siRNA sense strand
ugaccgagaagguagacaa

SEQ ID NO: 1108572 - RNA, 19 nt, Homo sapiens
  misc_RNA (1)...(19): siRNA sense strand
gaccgagaagguagacaau

SEQ ID NO: 1108573 - RNA, 19 nt, Homo sapiens
  misc_RNA (1)...(19): siRNA sense strand
gagaagguagacaauugca

SEQ ID NO: 1108574 - RNA, 19 nt, Homo sapiens
  misc_RNA (1)...(19): siRNA sense strand
aaagcaaccuucugaugua

SEQ ID NO: 1108575 - RNA, 19 nt, Homo sapiens
  misc_RNA (1)...(19): siRNA sense strand
gcaaagcaaccuucugaug

SEQ ID NO: 1108576 - RNA, 19 nt, Homo sapiens
  misc_RNA (1)...(19): siRNA sense strand
ccgagaagguagacaauug

SEQ ID NO: 1108577 - RNA, 19 nt, Homo sapiens
  misc_RNA (1)...(19): siRNA sense strand
caaagcaaccuucugaugu

SEQ ID NO: 1108578 - RNA, 19 nt, Homo sapiens
  misc_RNA (1)...(19): siRNA sense strand
gcaaccuucugauguaagu

SEQ ID NO: 1108579 - RNA, 19 nt, Homo sapiens
  misc_RNA (1)...(19): siRNA sense strand
ugauguaaguucugagugu

SEQ ID NO: 1108580 - RNA, 19 nt, Homo sapiens
  misc_RNA (1)...(19): siRNA sense strand
aagcaaccuucugauguaa

SEQ ID NO: 1108581 - RNA, 19 nt, Homo sapiens
  misc_RNA (1)...(19): siRNA sense strand
cuaccucccuacagacaga

SEQ ID NO: 1108582 - RNA, 19 nt, Homo sapiens
  misc_RNA (1)...(19): siRNA sense strand
gagugugaccgagaaggua

SEQ ID NO: 1108583 - RNA, 19 nt, Homo sapiens
  misc_RNA (1)...(19): siRNA sense strand
cuucugauguaaguucuga

SEQ ID NO: 1108584 - RNA, 19 nt, Homo sapiens
  misc_RNA (1)...(19): siRNA sense strand
ugaccgagaagguagacaa

SEQ ID NO: 1108585 - RNA, 19 nt, Homo sapiens
  misc_RNA (1)...(19): siRNA sense strand
gaccgagaagguagacaau

SEQ ID NO: 1108586 - RNA, 19 nt, Homo sapiens
  misc_RNA (1)...(19): siRNA sense strand
gagaagguagacaauugca

SEQ ID NO: 1108587 - RNA, 19 nt, Homo sapiens
  misc_RNA (1)...(19): siRNA sense strand
ggaggacccugacuacuug

SEQ ID NO: 1108588 - RNA, 19 nt, Homo sapiens
  misc_RNA (1)...(19): siRNA sense strand
ggaggaggauccccaagua

SEQ ID NO: 1108589 - RNA, 19 nt, Homo sapiens
  misc_RNA (1)...(19): siRNA sense strand
gcgauucgguggacuacau

SEQ ID NO: 1108590 - RNA, 19 nt, Homo sapiens
  misc_RNA (1)...(19): siRNA sense strand
gcaagcgcgaggucaugua

SEQ ID NO: 1108591 - RNA, 19 nt, Homo sapiens
  misc_RNA (1)...(19): siRNA sense strand
ucaaggcccucggcgauuc

SEQ ID NO: 1108592 - RNA, 19 nt, Homo sapiens
  misc_RNA (1)...(19): siRNA sense strand
ccaggaggacgccuacaug

SEQ ID NO: 1108593 - RNA, 19 nt, Homo sapiens
  misc_RNA (1)...(19): siRNA sense strand
gugacgggcuaccaguuca

SEQ ID NO: 1108594 - RNA, 19 nt, Homo sapiens
  misc_RNA (1)...(19): siRNA sense strand
ccuacaugcuggacaucuu

SEQ ID NO: 1108595 - RNA, 19 nt, Homo sapiens
  misc_RNA (1)...(19): siRNA sense strand
gccugcaccugcucauuca

SEQ ID NO: 1108596 - RNA, 19 nt, Homo sapiens
  misc_RNA (1)...(19): siRNA sense strand
ggccugcaccugcucauuc

SEQ ID NO: 1108597 - RNA, 19 nt, Homo sapiens
  misc_RNA (1)...(19): siRNA sense strand
aggaggacccugacuacuu

SEQ ID NO: 1108598 - RNA, 19 nt, Homo sapiens
  misc_RNA (1)...(19): siRNA sense strand
ggaggacccugacuacuug

SEQ ID NO: 1108599 - RNA, 19 nt, Homo sapiens
  misc_RNA (1)...(19): siRNA sense strand
ggaggaggauccccaagua

SEQ ID NO: 1108600 - RNA, 19 nt, Homo sapiens
  misc_RNA (1)...(19): siRNA sense strand
gcgauucgguggacuacau

SEQ ID NO: 1108601 - RNA, 19 nt, Homo sapiens
  misc_RNA (1)...(19): siRNA sense strand
gcaagcgcgaggucaugua

SEQ ID NO: 1108602 - RNA, 19 nt, Homo sapiens
  misc_RNA (1)...(19): siRNA sense strand
ucaaggcccucggcgauuc

SEQ ID NO: 1108603 - RNA, 19 nt, Homo sapiens
  misc_RNA (1)...(19): siRNA sense strand
ccaggaggacgccuacaug

SEQ ID NO: 1108604 - RNA, 19 nt, Homo sapiens
  misc_RNA (1)...(19): siRNA sense strand
gugacgggcuaccaguuca

SEQ ID NO: 1108605 - RNA, 19 nt, Homo sapiens
  misc_RNA (1)...(19): siRNA sense strand
ccuacaugcuggacaucuu

SEQ ID NO: 1108606 - RNA, 19 nt, Homo sapiens
  misc_RNA (1)...(19): siRNA sense strand
gccugcaccugcucauuca

SEQ ID NO: 1108607 - RNA, 19 nt, Homo sapiens
  misc_RNA (1)...(19): siRNA sense strand
ggccugcaccugcucauuc

SEQ ID NO: 1108608 - RNA, 19 nt, Homo sapiens
  misc_RNA (1)...(19): siRNA sense strand
aggaggacccugacuacuu

SEQ ID NO: 1108609 - RNA, 19 nt, Homo sapiens
  misc_RNA (1)...(19): siRNA sense strand
ggaggacccugacuacuug

SEQ ID NO: 1108610 - RNA, 19 nt, Homo sapiens
  misc_RNA (1)...(19): siRNA sense strand
ggaggaggauccccaagua

SEQ ID NO: 1108611 - RNA, 19 nt, Homo sapiens
  misc_RNA (1)...(19): siRNA sense strand
gcgauucgguggacuacau

SEQ ID NO: 1108612 - RNA, 19 nt, Homo sapiens
  misc_RNA (1)...(19): siRNA sense strand
gcaagcgcgaggucaugua

SEQ ID NO: 1108613 - RNA, 19 nt, Homo sapiens
  misc_RNA (1)...(19): siRNA sense strand
ucaaggcccucggcgauuc

SEQ ID NO: 1108614 - RNA, 19 nt, Homo sapiens
  misc_RNA (1)...(19): siRNA sense strand
ccaggaggacgccuacaug

SEQ ID NO: 1108615 - RNA, 19 nt, Homo sapiens
  misc_RNA (1)...(19): siRNA sense strand
gugacgggcuaccaguuca

SEQ ID NO: 1108616 - RNA, 19 nt, Homo sapiens
  misc_RNA (1)...(19): siRNA sense strand
ccuacaugcuggacaucuu

SEQ ID NO: 1108617 - RNA, 19 nt, Homo sapiens
  misc_RNA (1)...(19): siRNA sense strand
gccugcaccugcucauuca

SEQ ID NO: 1108618 - RNA, 19 nt, Homo sapiens
  misc_RNA (1)...(19): siRNA sense strand
ggccugcaccugcucauuc

SEQ ID NO: 1108619 - RNA, 19 nt, Homo sapiens
  misc_RNA (1)...(19): siRNA sense strand
aggaggacccugacuacuu

SEQ ID NO: 1108620 - RNA, 19 nt, Homo sapiens
  misc_RNA (1)...(19): siRNA sense strand
ggaggacccugacuacuug

SEQ ID NO: 1108621 - RNA, 19 nt, Homo sapiens
  misc_RNA (1)...(19): siRNA sense strand
ggaggaggauccccaagua

SEQ ID NO: 1108622 - RNA, 19 nt, Homo sapiens
  misc_RNA (1)...(19): siRNA sense strand
gcgauucgguggacuacau

SEQ ID NO: 1108623 - RNA, 19 nt, Homo sapiens
  misc_RNA (1)...(19): siRNA sense strand
gcaagcgcgaggucaugua

SEQ ID NO: 1108624 - RNA, 19 nt, Homo sapiens
  misc_RNA (1)...(19): siRNA sense strand
ucaaggcccucggcgauuc

SEQ ID NO: 1108625 - RNA, 19 nt, Homo sapiens
  misc_RNA (1)...(19): siRNA sense strand
ccaggaggacgccuacaug

SEQ ID NO: 1108626 - RNA, 19 nt, Homo sapiens
  misc_RNA (1)...(19): siRNA sense strand
gugacgggcuaccaguuca

SEQ ID NO: 1108627 - RNA, 19 nt, Homo sapiens
  misc_RNA (1)...(19): siRNA sense strand
ccuacaugcuggacaucuu

SEQ ID NO: 1108628 - RNA, 19 nt, Homo sapiens
  misc_RNA (1)...(19): siRNA sense strand
gccugcaccugcucauuca

SEQ ID NO: 1108629 - RNA, 19 nt, Homo sapiens
  misc_RNA (1)...(19): siRNA sense strand
ggccugcaccugcucauuc

SEQ ID NO: 1108630 - RNA, 19 nt, Homo sapiens
  misc_RNA (1)...(19): siRNA sense strand
aggaggacccugacuacuu

SEQ ID NO: 1108631 - RNA, 19 nt, Homo sapiens
  misc_RNA (1)...(19): siRNA sense strand
aaagcaaccuucugaugua

SEQ ID NO: 1108632 - RNA, 19 nt, Homo sapiens
  misc_RNA (1)...(19): siRNA sense strand
gcaaagcaaccuucugaug

SEQ ID NO: 1108633 - RNA, 19 nt, Homo sapiens
  misc_RNA (1)...(19): siRNA sense strand
ccgagaagguagacaauug

SEQ ID NO: 1108634 - RNA, 19 nt, Homo sapiens
  misc_RNA (1)...(19): siRNA sense strand
caaagcaaccuucugaugu

SEQ ID NO: 1108635 - RNA, 19 nt, Homo sapiens
  misc_RNA (1)...(19): siRNA sense strand
gaagaccacccacgaaugg

SEQ ID NO: 1108636 - RNA, 19 nt, Homo sapiens
  misc_RNA (1)...(19): siRNA sense strand
gcaaccuucugauguaagu

SEQ ID NO: 1108637 - RNA, 19 nt, Homo sapiens
  misc_RNA (1)...(19): siRNA sense strand
ucuuacgacuguuacguua

SEQ ID NO: 1108638 - RNA, 19 nt, Homo sapiens
  misc_RNA (1)...(19): siRNA sense strand
ugauguaaguucugagugu

SEQ ID NO: 1108639 - RNA, 19 nt, Homo sapiens
  misc_RNA (1)...(19): siRNA sense strand
aagcaaccuucugauguaa

SEQ ID NO: 1108640 - RNA, 19 nt, Homo sapiens
  misc_RNA (1)...(19): siRNA sense strand
gguuaucuuacgacuguua

SEQ ID NO: 1108641 - RNA, 19 nt, Homo sapiens
  misc_RNA (1)...(19): siRNA sense strand
uuacgacuguuacguuaca

SEQ ID NO: 1108642 - RNA, 19 nt, Homo sapiens
  misc_RNA (1)...(19): siRNA sense strand
cgacuguuacguuacauug

SEQ ID NO: 1108643 - RNA, 19 nt, Homo sapiens
  misc_RNA (1)...(19): siRNA sense strand
cuaccucccuacagacaga

SEQ ID NO: 1108644 - RNA, 19 nt, Homo sapiens
  misc_RNA (1)...(19): siRNA sense strand
cgaagaccacccacgaaug

SEQ ID NO: 1108645 - RNA, 19 nt, Homo sapiens
  misc_RNA (1)...(19): siRNA sense strand
augguuaucuuacgacugu

SEQ ID NO: 1108646 - RNA, 19 nt, Homo sapiens
  misc_RNA (1)...(19): siRNA sense strand
gagugugaccgagaaggua

SEQ ID NO: 1108647 - RNA, 19 nt, Homo sapiens
  misc_RNA (1)...(19): siRNA sense strand
cuucugauguaaguucuga

SEQ ID NO: 1108648 - RNA, 19 nt, Homo sapiens
  misc_RNA (1)...(19): siRNA sense strand
ccacgaaugguuaucuuac

SEQ ID NO: 1108649 - RNA, 19 nt, Homo sapiens
  misc_RNA (1)...(19): siRNA sense strand
ugaccgagaagguagacaa

SEQ ID NO: 1108650 - RNA, 19 nt, Homo sapiens
  misc_RNA (1)...(19): siRNA sense strand
ccgaagaccacccacgaau

SEQ ID NO: 1108651 - RNA, 19 nt, Homo sapiens
  misc_RNA (1)...(19): siRNA sense strand
acgaaugguuaucuuacga

SEQ ID NO: 1108652 - RNA, 19 nt, Homo sapiens
  misc_RNA (1)...(19): siRNA sense strand
gaccgagaagguagacaau

SEQ ID NO: 1108653 - RNA, 19 nt, Homo sapiens
  misc_RNA (1)...(19): siRNA sense strand
gagaagguagacaauugca

SEQ ID NO: 1108654 - RNA, 19 nt, Homo sapiens
  misc_RNA (1)...(19): siRNA sense strand
aaagcaaccuucugaugua

SEQ ID NO: 1108655 - RNA, 19 nt, Homo sapiens
  misc_RNA (1)...(19): siRNA sense strand
gcaaagcaaccuucugaug

SEQ ID NO: 1108656 - RNA, 19 nt, Homo sapiens
  misc_RNA (1)...(19): siRNA sense strand
ccgagaagguagacaauug

SEQ ID NO: 1108657 - RNA, 19 nt, Homo sapiens
  misc_RNA (1)...(19): siRNA sense strand
caaagcaaccuucugaugu

SEQ ID NO: 1108658 - RNA, 19 nt, Homo sapiens
  misc_RNA (1)...(19): siRNA sense strand
gaagaccacccacgaaugg

SEQ ID NO: 1108659 - RNA, 19 nt, Homo sapiens
  misc_RNA (1)...(19): siRNA sense strand
gcaaccuucugauguaagu

SEQ ID NO: 1108660 - RNA, 19 nt, Homo sapiens
  misc_RNA (1)...(19): siRNA sense strand
ucuuacgacuguuacguua

SEQ ID NO: 1108661 - RNA, 19 nt, Homo sapiens
  misc_RNA (1)...(19): siRNA sense strand
ugauguaaguucugagugu

SEQ ID NO: 1108662 - RNA, 19 nt, Homo sapiens
  misc_RNA (1)...(19): siRNA sense strand
aagcaaccuucugauguaa

SEQ ID NO: 1108663 - RNA, 19 nt, Homo sapiens
  misc_RNA (1)...(19): siRNA sense strand
gguuaucuuacgacuguua

SEQ ID NO: 1108664 - RNA, 19 nt, Homo sapiens
  misc_RNA (1)...(19): siRNA sense strand
uuacgacuguuacguuaca

SEQ ID NO: 1108665 - RNA, 19 nt, Homo sapiens
  misc_RNA (1)...(19): siRNA sense strand
cgacuguuacguuacauug

SEQ ID NO: 1108666 - RNA, 19 nt, Homo sapiens
  misc_RNA (1)...(19): siRNA sense strand
cuaccucccuacagacaga

SEQ ID NO: 1108667 - RNA, 19 nt, Homo sapiens
  misc_RNA (1)...(19): siRNA sense strand
cgaagaccacccacgaaug

SEQ ID NO: 1108668 - RNA, 19 nt, Homo sapiens
  misc_RNA (1)...(19): siRNA sense strand
augguuaucuuacgacugu

SEQ ID NO: 1108669 - RNA, 19 nt, Homo sapiens
  misc_RNA (1)...(19): siRNA sense strand
gagugugaccgagaaggua

SEQ ID NO: 1108670 - RNA, 19 nt, Homo sapiens
  misc_RNA (1)...(19): siRNA sense strand
cuucugauguaaguucuga

SEQ ID NO: 1108671 - RNA, 19 nt, Homo sapiens
  misc_RNA (1)...(19): siRNA sense strand
ccacgaaugguuaucuuac

SEQ ID NO: 1108672 - RNA, 19 nt, Homo sapiens
  misc_RNA (1)...(19): siRNA sense strand
ugaccgagaagguagacaa

SEQ ID NO: 1108673 - RNA, 19 nt, Homo sapiens
  misc_RNA (1)...(19): siRNA sense strand
ccgaagaccacccacgaau

SEQ ID NO: 1108674 - RNA, 19 nt, Homo sapiens
  misc_RNA (1)...(19): siRNA sense strand
acgaaugguuaucuuacga

SEQ ID NO: 1108675 - RNA, 19 nt, Homo sapiens
  misc_RNA (1)...(19): siRNA sense strand
gaccgagaagguagacaau

SEQ ID NO: 1108676 - RNA, 19 nt, Homo sapiens
  misc_RNA (1)...(19): siRNA sense strand
gagaagguagacaauugca

SEQ ID NO: 1108677 - RNA, 19 nt, Homo sapiens
  misc_RNA (1)...(19): siRNA sense strand
aaagcaaccuucugaugua

SEQ ID NO: 1108678 - RNA, 19 nt, Homo sapiens
  misc_RNA (1)...(19): siRNA sense strand
gcaaagcaaccuucugaug

SEQ ID NO: 1108679 - RNA, 19 nt, Homo sapiens
  misc_RNA (1)...(19): siRNA sense strand
ccgagaagguagacaauug

SEQ ID NO: 1108680 - RNA, 19 nt, Homo sapiens
  misc_RNA (1)...(19): siRNA sense strand
caaagcaaccuucugaugu

SEQ ID NO: 1108681 - RNA, 19 nt, Homo sapiens
  misc_RNA (1)...(19): siRNA sense strand
gcaaccuucugauguaagu

SEQ ID NO: 1108682 - RNA, 19 nt, Homo sapiens
  misc_RNA (1)...(19): siRNA sense strand
ugauguaaguucugagugu

SEQ ID NO: 1108683 - RNA, 19 nt, Homo sapiens
  misc_RNA (1)...(19): siRNA sense strand
aagcaaccuucugauguaa

SEQ ID NO: 1108684 - RNA, 19 nt, Homo sapiens
  misc_RNA (1)...(19): siRNA sense strand
cuaccucccuacagacaga

SEQ ID NO: 1108685 - RNA, 19 nt, Homo sapiens
  misc_RNA (1)...(19): siRNA sense strand
gagugugaccgagaaggua

SEQ ID NO: 1108686 - RNA, 19 nt, Homo sapiens
  misc_RNA (1)...(19): siRNA sense strand
cuucugauguaaguucuga

SEQ ID NO: 1108687 - RNA, 19 nt, Homo sapiens
  misc_RNA (1)...(19): siRNA sense strand
ugaccgagaagguagacaa

SEQ ID NO: 1108688 - RNA, 19 nt, Homo sapiens
  misc_RNA (1)...(19): siRNA sense strand
gaccgagaagguagacaau

SEQ ID NO: 1108689 - RNA, 19 nt, Homo sapiens
  misc_RNA (1)...(19): siRNA sense strand
gagaagguagacaauugca

SEQ ID NO: 1108690 - RNA, 19 nt, Homo sapiens
  misc_RNA (1)...(19): siRNA sense strand
aaagcaaccuucugaugua

SEQ ID NO: 1108691 - RNA, 19 nt, Homo sapiens
  misc_RNA (1)...(19): siRNA sense strand
gcaaagcaaccuucugaug

SEQ ID NO: 1108692 - RNA, 19 nt, Homo sapiens
  misc_RNA (1)...(19): siRNA sense strand
ccgagaagguagacaauug

SEQ ID NO: 1108693 - RNA, 19 nt, Homo sapiens
  misc_RNA (1)...(19): siRNA sense strand
caaagcaaccuucugaugu

SEQ ID NO: 1108694 - RNA, 19 nt, Homo sapiens
  misc_RNA (1)...(19): siRNA sense strand
gcaaccuucugauguaagu

SEQ ID NO: 1108695 - RNA, 19 nt, Homo sapiens
  misc_RNA (1)...(19): siRNA sense strand
ugauguaaguucugagugu

SEQ ID NO: 1108696 - RNA, 19 nt, Homo sapiens
  misc_RNA (1)...(19): siRNA sense strand
aagcaaccuucugauguaa

SEQ ID NO: 1108697 - RNA, 19 nt, Homo sapiens
  misc_RNA (1)...(19): siRNA sense strand
cuaccucccuacagacaga

SEQ ID NO: 1108698 - RNA, 19 nt, Homo sapiens
  misc_RNA (1)...(19): siRNA sense strand
gagugugaccgagaaggua

SEQ ID NO: 1108699 - RNA, 19 nt, Homo sapiens
  misc_RNA (1)...(19): siRNA sense strand
cuucugauguaaguucuga

SEQ ID NO: 1108700 - RNA, 19 nt, Homo sapiens
  misc_RNA (1)...(19): siRNA sense strand
ugaccgagaagguagacaa

SEQ ID NO: 1108701 - RNA, 19 nt, Homo sapiens
  misc_RNA (1)...(19): siRNA sense strand
gaccgagaagguagacaau

SEQ ID NO: 1108702 - RNA, 19 nt, Homo sapiens
  misc_RNA (1)...(19): siRNA sense strand
gagaagguagacaauugca

SEQ ID NO: 1108703 - RNA, 19 nt, Homo sapiens
  misc_RNA (1)...(19): siRNA sense strand
aaagcaaccuucugaugua

SEQ ID NO: 1108704 - RNA, 19 nt, Homo sapiens
  misc_RNA (1)...(19): siRNA sense strand
gcaaagcaaccuucugaug

SEQ ID NO: 1108705 - RNA, 19 nt, Homo sapiens
  misc_RNA (1)...(19): siRNA sense strand
ccgagaagguagacaauug

SEQ ID NO: 1108706 - RNA, 19 nt, Homo sapiens
  misc_RNA (1)...(19): siRNA sense strand
caaagcaaccuucugaugu

SEQ ID NO: 1108707 - RNA, 19 nt, Homo sapiens
  misc_RNA (1)...(19): siRNA sense strand
gcaaccuucugauguaagu

SEQ ID NO: 1108708 - RNA, 19 nt, Homo sapiens
  misc_RNA (1)...(19): siRNA sense strand
ugauguaaguucugagugu

SEQ ID NO: 1108709 - RNA, 19 nt, Homo sapiens
  misc_RNA (1)...(19): siRNA sense strand
aagcaaccuucugauguaa

SEQ ID NO: 1108710 - RNA, 19 nt, Homo sapiens
  misc_RNA (1)...(19): siRNA sense strand
cuaccucccuacagacaga

SEQ ID NO: 1108711 - RNA, 19 nt, Homo sapiens
  misc_RNA (1)...(19): siRNA sense strand
gagugugaccgagaaggua

SEQ ID NO: 1108712 - RNA, 19 nt, Homo sapiens
  misc_RNA (1)...(19): siRNA sense strand
cuucugauguaaguucuga

SEQ ID NO: 1108713 - RNA, 19 nt, Homo sapiens
  misc_RNA (1)...(19): siRNA sense strand
ugaccgagaagguagacaa

SEQ ID NO: 1108714 - RNA, 19 nt, Homo sapiens
  misc_RNA (1)...(19): siRNA sense strand
gaccgagaagguagacaau

SEQ ID NO: 1108715 - RNA, 19 nt, Homo sapiens
  misc_RNA (1)...(19): siRNA sense strand
gagaagguagacaauugca

SEQ ID NO: 1108716 - RNA, 19 nt, Homo sapiens
  misc_RNA (1)...(19): siRNA sense strand
aaagcaaccuucugaugua

SEQ ID NO: 1108717 - RNA, 19 nt, Homo sapiens
  misc_RNA (1)...(19): siRNA sense strand
gcaaagcaaccuucugaug

SEQ ID NO: 1108718 - RNA, 19 nt, Homo sapiens
  misc_RNA (1)...(19): siRNA sense strand
ccgagaagguagacaauug

SEQ ID NO: 1108719 - RNA, 19 nt, Homo sapiens
  misc_RNA (1)...(19): siRNA sense strand
caaagcaaccuucugaugu

SEQ ID NO: 1108720 - RNA, 19 nt, Homo sapiens
  misc_RNA (1)...(19): siRNA sense strand
gcaaccuucugauguaagu

SEQ ID NO: 1108721 - RNA, 19 nt, Homo sapiens
  misc_RNA (1)...(19): siRNA sense strand
ugauguaaguucugagugu

SEQ ID NO: 1108722 - RNA, 19 nt, Homo sapiens
  misc_RNA (1)...(19): siRNA sense strand
aagcaaccuucugauguaa

SEQ ID NO: 1108723 - RNA, 19 nt, Homo sapiens
  misc_RNA (1)...(19): siRNA sense strand
cuaccucccuacagacaga

SEQ ID NO: 1108724 - RNA, 19 nt, Homo sapiens
  misc_RNA (1)...(19): siRNA sense strand
gagugugaccgagaaggua

SEQ ID NO: 1108725 - RNA, 19 nt, Homo sapiens
  misc_RNA (1)...(19): siRNA sense strand
cuucugauguaaguucuga

SEQ ID NO: 1108726 - RNA, 19 nt, Homo sapiens
  misc_RNA (1)...(19): siRNA sense strand
ugaccgagaagguagacaa

SEQ ID NO: 1108727 - RNA, 19 nt, Homo sapiens
  misc_RNA (1)...(19): siRNA sense strand
gaccgagaagguagacaau

SEQ ID NO: 1108728 - RNA, 19 nt, Homo sapiens
  misc_RNA (1)...(19): siRNA sense strand
gagaagguagacaauugca

SEQ ID NO: 1108729 - RNA, 19 nt, Homo sapiens
  misc_RNA (1)...(19): siRNA sense strand
aaagcaaccuucugaugua

SEQ ID NO: 1108730 - RNA, 19 nt, Homo sapiens
  misc_RNA (1)...(19): siRNA sense strand
gcaaagcaaccuucugaug

SEQ ID NO: 1108731 - RNA, 19 nt, Homo sapiens
  misc_RNA (1)...(19): siRNA sense strand
ccgagaagguagacaauug

SEQ ID NO: 1108732 - RNA, 19 nt, Homo sapiens
  misc_RNA (1)...(19): siRNA sense strand
caaagcaaccuucugaugu

SEQ ID NO: 1108733 - RNA, 19 nt, Homo sapiens
  misc_RNA (1)...(19): siRNA sense strand
gcaaccuucugauguaagu

SEQ ID NO: 1108734 - RNA, 19 nt, Homo sapiens
  misc_RNA (1)...(19): siRNA sense strand
ugauguaaguucugagugu

SEQ ID NO: 1108735 - RNA, 19 nt, Homo sapiens
  misc_RNA (1)...(19): siRNA sense strand
aagcaaccuucugauguaa

SEQ ID NO: 1108736 - RNA, 19 nt, Homo sapiens
  misc_RNA (1)...(19): siRNA sense strand
cuaccucccuacagacaga

SEQ ID NO: 1108737 - RNA, 19 nt, Homo sapiens
  misc_RNA (1)...(19): siRNA sense strand
gagugugaccgagaaggua

SEQ ID NO: 1108738 - RNA, 19 nt, Homo sapiens
  misc_RNA (1)...(19): siRNA sense strand
cuucugauguaaguucuga

SEQ ID NO: 1108739 - RNA, 19 nt, Homo sapiens
  misc_RNA (1)...(19): siRNA sense strand
ugaccgagaagguagacaa

SEQ ID NO: 1108740 - RNA, 19 nt, Homo sapiens
  misc_RNA (1)...(19): siRNA sense strand
gaccgagaagguagacaau

SEQ ID NO: 1108741 - RNA, 19 nt, Homo sapiens
  misc_RNA (1)...(19): siRNA sense strand
gagaagguagacaauugca

SEQ ID NO: 1108742 - RNA, 19 nt, Homo sapiens
  misc_RNA (1)...(19): siRNA sense strand
aaagcaaccuucugaugua

SEQ ID NO: 1108743 - RNA, 19 nt, Homo sapiens
  misc_RNA (1)...(19): siRNA sense strand
gcaaagcaaccuucugaug

SEQ ID NO: 1108744 - RNA, 19 nt, Homo sapiens
  misc_RNA (1)...(19): siRNA sense strand
ccgagaagguagacaauug

SEQ ID NO: 1108745 - RNA, 19 nt, Homo sapiens
  misc_RNA (1)...(19): siRNA sense strand
caaagcaaccuucugaugu

SEQ ID NO: 1108746 - RNA, 19 nt, Homo sapiens
  misc_RNA (1)...(19): siRNA sense strand
gcaaccuucugauguaagu

SEQ ID NO: 1108747 - RNA, 19 nt, Homo sapiens
  misc_RNA (1)...(19): siRNA sense strand
ugauguaaguucugagugu

SEQ ID NO: 1108748 - RNA, 19 nt, Homo sapiens
  misc_RNA (1)...(19): siRNA sense strand
aagcaaccuucugauguaa

SEQ ID NO: 1108749 - RNA, 19 nt, Homo sapiens
  misc_RNA (1)...(19): siRNA sense strand
cuaccucccuacagacaga

SEQ ID NO: 1108750 - RNA, 19 nt, Homo sapiens
  misc_RNA (1)...(19): siRNA sense strand
gagugugaccgagaaggua

SEQ ID NO: 1108751 - RNA, 19 nt, Homo sapiens
  misc_RNA (1)...(19): siRNA sense strand
cuucugauguaaguucuga

SEQ ID NO: 1108752 - RNA, 19 nt, Homo sapiens
  misc_RNA (1)...(19): siRNA sense strand
ugaccgagaagguagacaa

SEQ ID NO: 1108753 - RNA, 19 nt, Homo sapiens
  misc_RNA (1)...(19): siRNA sense strand
gaccgagaagguagacaau

SEQ ID NO: 1108754 - RNA, 19 nt, Homo sapiens
  misc_RNA (1)...(19): siRNA sense strand
gagaagguagacaauugca

SEQ ID NO: 1108755 - RNA, 19 nt, Homo sapiens
  misc_RNA (1)...(19): siRNA sense strand
aaagcaaccuucugaugua

SEQ ID NO: 1108756 - RNA, 19 nt, Homo sapiens
  misc_RNA (1)...(19): siRNA sense strand
gcaaagcaaccuucugaug

SEQ ID NO: 1108757 - RNA, 19 nt, Homo sapiens
  misc_RNA (1)...(19): siRNA sense strand
ccgagaagguagacaauug

SEQ ID NO: 1108758 - RNA, 19 nt, Homo sapiens
  misc_RNA (1)...(19): siRNA sense strand
caaagcaaccuucugaugu

SEQ ID NO: 1108759 - RNA, 19 nt, Homo sapiens
  misc_RNA (1)...(19): siRNA sense strand
gaagaccacccacgaaugg

SEQ ID NO: 1108760 - RNA, 19 nt, Homo sapiens
  misc_RNA (1)...(19): siRNA sense strand
gcaaccuucugauguaagu

SEQ ID NO: 1108761 - RNA, 19 nt, Homo sapiens
  misc_RNA (1)...(19): siRNA sense strand
ucuuacgacuguuacguua

SEQ ID NO: 1108762 - RNA, 19 nt, Homo sapiens
  misc_RNA (1)...(19): siRNA sense strand
ugauguaaguucugagugu

SEQ ID NO: 1108763 - RNA, 19 nt, Homo sapiens
  misc_RNA (1)...(19): siRNA sense strand
aagcaaccuucugauguaa

SEQ ID NO: 1108764 - RNA, 19 nt, Homo sapiens
  misc_RNA (1)...(19): siRNA sense strand
gguuaucuuacgacuguua

SEQ ID NO: 1108765 - RNA, 19 nt, Homo sapiens
  misc_RNA (1)...(19): siRNA sense strand
uuacgacuguuacguuaca

SEQ ID NO: 1108766 - RNA, 19 nt, Homo sapiens
  misc_RNA (1)...(19): siRNA sense strand
cgacuguuacguuacauug

SEQ ID NO: 1108767 - RNA, 19 nt, Homo sapiens
  misc_RNA (1)...(19): siRNA sense strand
cuaccucccuacagacaga

SEQ ID NO: 1108768 - RNA, 19 nt, Homo sapiens
  misc_RNA (1)...(19): siRNA sense strand
cgaagaccacccacgaaug

SEQ ID NO: 1108769 - RNA, 19 nt, Homo sapiens
  misc_RNA (1)...(19): siRNA sense strand
augguuaucuuacgacugu

SEQ ID NO: 1108770 - RNA, 19 nt, Homo sapiens
  misc_RNA (1)...(19): siRNA sense strand
gagugugaccgagaaggua

SEQ ID NO: 1108771 - RNA, 19 nt, Homo sapiens
  misc_RNA (1)...(19): siRNA sense strand
cuucugauguaaguucuga

SEQ ID NO: 1108772 - RNA, 19 nt, Homo sapiens
  misc_RNA (1)...(19): siRNA sense strand
ccacgaaugguuaucuuac

SEQ ID NO: 1108773 - RNA, 19 nt, Homo sapiens
  misc_RNA (1)...(19): siRNA sense strand
ugaccgagaagguagacaa

SEQ ID NO: 1108774 - RNA, 19 nt, Homo sapiens
  misc_RNA (1)...(19): siRNA sense strand
ccgaagaccacccacgaau

SEQ ID NO: 1108775 - RNA, 19 nt, Homo sapiens
  misc_RNA (1)...(19): siRNA sense strand
acgaaugguuaucuuacga

SEQ ID NO: 1108776 - RNA, 19 nt, Homo sapiens
  misc_RNA (1)...(19): siRNA sense strand
gaccgagaagguagacaau

SEQ ID NO: 1108777 - RNA, 19 nt, Homo sapiens
  misc_RNA (1)...(19): siRNA sense strand
gagaagguagacaauugca

SEQ ID NO: 1108778 - RNA, 19 nt, Homo sapiens
  misc_RNA (1)...(19): siRNA sense strand
aaagcaaccuucugaugua

SEQ ID NO: 1108779 - RNA, 19 nt, Homo sapiens
  misc_RNA (1)...(19): siRNA sense strand
gcaaagcaaccuucugaug

SEQ ID NO: 1108780 - RNA, 19 nt, Homo sapiens
  misc_RNA (1)...(19): siRNA sense strand
ccgagaagguagacaauug

SEQ ID NO: 1108781 - RNA, 19 nt, Homo sapiens
  misc_RNA (1)...(19): siRNA sense strand
caaagcaaccuucugaugu

SEQ ID NO: 1108782 - RNA, 19 nt, Homo sapiens
  misc_RNA (1)...(19): siRNA sense strand
gaagaccacccacgaaugg

SEQ ID NO: 1108783 - RNA, 19 nt, Homo sapiens
  misc_RNA (1)...(19): siRNA sense strand
gcaaccuucugauguaagu

SEQ ID NO: 1108784 - RNA, 19 nt, Homo sapiens
  misc_RNA (1)...(19): siRNA sense strand
ucuuacgacuguuacguua

SEQ ID NO: 1108785 - RNA, 19 nt, Homo sapiens
  misc_RNA (1)...(19): siRNA sense strand
ugauguaaguucugagugu

SEQ ID NO: 1108786 - RNA, 19 nt, Homo sapiens
  misc_RNA (1)...(19): siRNA sense strand
aagcaaccuucugauguaa

SEQ ID NO: 1108787 - RNA, 19 nt, Homo sapiens
  misc_RNA (1)...(19): siRNA sense strand
gguuaucuuacgacuguua

SEQ ID NO: 1108788 - RNA, 19 nt, Homo sapiens
  misc_RNA (1)...(19): siRNA sense strand
uuacgacuguuacguuaca

SEQ ID NO: 1108789 - RNA, 19 nt, Homo sapiens
  misc_RNA (1)...(19): siRNA sense strand
cgacuguuacguuacauug

SEQ ID NO: 1108790 - RNA, 19 nt, Homo sapiens
  misc_RNA (1)...(19): siRNA sense strand
cuaccucccuacagacaga

SEQ ID NO: 1108791 - RNA, 19 nt, Homo sapiens
  misc_RNA (1)...(19): siRNA sense strand
cgaagaccacccacgaaug

SEQ ID NO: 1108792 - RNA, 19 nt, Homo sapiens
  misc_RNA (1)...(19): siRNA sense strand
augguuaucuuacgacugu

SEQ ID NO: 1108793 - RNA, 19 nt, Homo sapiens
  misc_RNA (1)...(19): siRNA sense strand
gagugugaccgagaaggua

SEQ ID NO: 1108794 - RNA, 19 nt, Homo sapiens
  misc_RNA (1)...(19): siRNA sense strand
cuucugauguaaguucuga

SEQ ID NO: 1108795 - RNA, 19 nt, Homo sapiens
  misc_RNA (1)...(19): siRNA sense strand
ccacgaaugguuaucuuac

SEQ ID NO: 1108796 - RNA, 19 nt, Homo sapiens
  misc_RNA (1)...(19): siRNA sense strand
ugaccgagaagguagacaa

SEQ ID NO: 1108797 - RNA, 19 nt, Homo sapiens
  misc_RNA (1)...(19): siRNA sense strand
ccgaagaccacccacgaau

SEQ ID NO: 1108798 - RNA, 19 nt, Homo sapiens
  misc_RNA (1)...(19): siRNA sense strand
acgaaugguuaucuuacga

SEQ ID NO: 1108799 - RNA, 19 nt, Homo sapiens
  misc_RNA (1)...(19): siRNA sense strand
gaccgagaagguagacaau

SEQ ID NO: 1108800 - RNA, 19 nt, Homo sapiens
  misc_RNA (1)...(19): siRNA sense strand
gagaagguagacaauugca

SEQ ID NO: 1108801 - RNA, 19 nt, Homo sapiens
  misc_RNA (1)...(19): siRNA sense strand
aaagcaaccuucugaugua

SEQ ID NO: 1108802 - RNA, 19 nt, Homo sapiens
  misc_RNA (1)...(19): siRNA sense strand
gcaaagcaaccuucugaug

SEQ ID NO: 1108803 - RNA, 19 nt, Homo sapiens
  misc_RNA (1)...(19): siRNA sense strand
ccgagaagguagacaauug

SEQ ID NO: 1108804 - RNA, 19 nt, Homo sapiens
  misc_RNA (1)...(19): siRNA sense strand
caaagcaaccuucugaugu

SEQ ID NO: 1108805 - RNA, 19 nt, Homo sapiens
  misc_RNA (1)...(19): siRNA sense strand
gcaaccuucugauguaagu

SEQ ID NO: 1108806 - RNA, 19 nt, Homo sapiens
  misc_RNA (1)...(19): siRNA sense strand
ugauguaaguucugagugu

SEQ ID NO: 1108807 - RNA, 19 nt, Homo sapiens
  misc_RNA (1)...(19): siRNA sense strand
aagcaaccuucugauguaa

SEQ ID NO: 1108808 - RNA, 19 nt, Homo sapiens
  misc_RNA (1)...(19): siRNA sense strand
cuaccucccuacagacaga

SEQ ID NO: 1108809 - RNA, 19 nt, Homo sapiens
  misc_RNA (1)...(19): siRNA sense strand
gagugugaccgagaaggua

SEQ ID NO: 1108810 - RNA, 19 nt, Homo sapiens
  misc_RNA (1)...(19): siRNA sense strand
cuucugauguaaguucuga

SEQ ID NO: 1108811 - RNA, 19 nt, Homo sapiens
  misc_RNA (1)...(19): siRNA sense strand
ugaccgagaagguagacaa

SEQ ID NO: 1108812 - RNA, 19 nt, Homo sapiens
  misc_RNA (1)...(19): siRNA sense strand
gaccgagaagguagacaau

SEQ ID NO: 1108813 - RNA, 19 nt, Homo sapiens
  misc_RNA (1)...(19): siRNA sense strand
gagaagguagacaauugca

SEQ ID NO: 1108814 - RNA, 19 nt, Homo sapiens
  misc_RNA (1)...(19): siRNA sense strand
aaagcaaccuucugaugua

SEQ ID NO: 1108815 - RNA, 19 nt, Homo sapiens
  misc_RNA (1)...(19): siRNA sense strand
gcaaagcaaccuucugaug

SEQ ID NO: 1108816 - RNA, 19 nt, Homo sapiens
  misc_RNA (1)...(19): siRNA sense strand
ccgagaagguagacaauug

SEQ ID NO: 1108817 - RNA, 19 nt, Homo sapiens
  misc_RNA (1)...(19): siRNA sense strand
caaagcaaccuucugaugu

SEQ ID NO: 1108818 - RNA, 19 nt, Homo sapiens
  misc_RNA (1)...(19): siRNA sense strand
gcaaccuucugauguaagu

SEQ ID NO: 1108819 - RNA, 19 nt, Homo sapiens
  misc_RNA (1)...(19): siRNA sense strand
ugauguaaguucugagugu

SEQ ID NO: 1108820 - RNA, 19 nt, Homo sapiens
  misc_RNA (1)...(19): siRNA sense strand
aagcaaccuucugauguaa

SEQ ID NO: 1108821 - RNA, 19 nt, Homo sapiens
  misc_RNA (1)...(19): siRNA sense strand
cuaccucccuacagacaga

SEQ ID NO: 1108822 - RNA, 19 nt, Homo sapiens
  misc_RNA (1)...(19): siRNA sense strand
gagugugaccgagaaggua

SEQ ID NO: 1108823 - RNA, 19 nt, Homo sapiens
  misc_RNA (1)...(19): siRNA sense strand
cuucugauguaaguucuga

SEQ ID NO: 1108824 - RNA, 19 nt, Homo sapiens
  misc_RNA (1)...(19): siRNA sense strand
ugaccgagaagguagacaa

SEQ ID NO: 1108825 - RNA, 19 nt, Homo sapiens
  misc_RNA (1)...(19): siRNA sense strand
gaccgagaagguagacaau

SEQ ID NO: 1108826 - RNA, 19 nt, Homo sapiens
  misc_RNA (1)...(19): siRNA sense strand
gagaagguagacaauugca

SEQ ID NO: 1108827 - RNA, 19 nt, Homo sapiens
  misc_RNA (1)...(19): siRNA sense strand
aaagcaaccuucugaugua

SEQ ID NO: 1108828 - RNA, 19 nt, Homo sapiens
  misc_RNA (1)...(19): siRNA sense strand
gcaaagcaaccuucugaug

SEQ ID NO: 1108829 - RNA, 19 nt, Homo sapiens
  misc_RNA (1)...(19): siRNA sense strand
ccgagaagguagacaauug

SEQ ID NO: 1108830 - RNA, 19 nt, Homo sapiens
  misc_RNA (1)...(19): siRNA sense strand
caaagcaaccuucugaugu

SEQ ID NO: 1108831 - RNA, 19 nt, Homo sapiens
  misc_RNA (1)...(19): siRNA sense strand
gcaaccuucugauguaagu

SEQ ID NO: 1108832 - RNA, 19 nt, Homo sapiens
  misc_RNA (1)...(19): siRNA sense strand
ugauguaaguucugagugu

SEQ ID NO: 1108833 - RNA, 19 nt, Homo sapiens
  misc_RNA (1)...(19): siRNA sense strand
aagcaaccuucugauguaa

SEQ ID NO: 1108834 - RNA, 19 nt, Homo sapiens
  misc_RNA (1)...(19): siRNA sense strand
cuaccucccuacagacaga

SEQ ID NO: 1108835 - RNA, 19 nt, Homo sapiens
  misc_RNA (1)...(19): siRNA sense strand
gagugugaccgagaaggua

SEQ ID NO: 1108836 - RNA, 19 nt, Homo sapiens
  misc_RNA (1)...(19): siRNA sense strand
cuucugauguaaguucuga

SEQ ID NO: 1108837 - RNA, 19 nt, Homo sapiens
  misc_RNA (1)...(19): siRNA sense strand
ugaccgagaagguagacaa

SEQ ID NO: 1108838 - RNA, 19 nt, Homo sapiens
  misc_RNA (1)...(19): siRNA sense strand
gaccgagaagguagacaau

SEQ ID NO: 1108839 - RNA, 19 nt, Homo sapiens
  misc_RNA (1)...(19): siRNA sense strand
gagaagguagacaauugca

SEQ ID NO: 1108840 - RNA, 19 nt, Homo sapiens
  misc_RNA (1)...(19): siRNA sense strand
aaagcaaccuucugaugua

SEQ ID NO: 1108841 - RNA, 19 nt, Homo sapiens
  misc_RNA (1)...(19): siRNA sense strand
gcaaagcaaccuucugaug

SEQ ID NO: 1108842 - RNA, 19 nt, Homo sapiens
  misc_RNA (1)...(19): siRNA sense strand
ccgagaagguagacaauug

SEQ ID NO: 1108843 - RNA, 19 nt, Homo sapiens
  misc_RNA (1)...(19): siRNA sense strand
caaagcaaccuucugaugu

SEQ ID NO: 1108844 - RNA, 19 nt, Homo sapiens
  misc_RNA (1)...(19): siRNA sense strand
gcaaccuucugauguaagu

SEQ ID NO: 1108845 - RNA, 19 nt, Homo sapiens
  misc_RNA (1)...(19): siRNA sense strand
ugauguaaguucugagugu

SEQ ID NO: 1108846 - RNA, 19 nt, Homo sapiens
  misc_RNA (1)...(19): siRNA sense strand
aagcaaccuucugauguaa

SEQ ID NO: 1108847 - RNA, 19 nt, Homo sapiens
  misc_RNA (1)...(19): siRNA sense strand
cuaccucccuacagacaga

SEQ ID NO: 1108848 - RNA, 19 nt, Homo sapiens
  misc_RNA (1)...(19): siRNA sense strand
gagugugaccgagaaggua

SEQ ID NO: 1108849 - RNA, 19 nt, Homo sapiens
  misc_RNA (1)...(19): siRNA sense strand
cuucugauguaaguucuga

SEQ ID NO: 1108850 - RNA, 19 nt, Homo sapiens
  misc_RNA (1)...(19): siRNA sense strand
ugaccgagaagguagacaa

SEQ ID NO: 1108851 - RNA, 19 nt, Homo sapiens
  misc_RNA (1)...(19): siRNA sense strand
gaccgagaagguagacaau

SEQ ID NO: 1108852 - RNA, 19 nt, Homo sapiens
  misc_RNA (1)...(19): siRNA sense strand
gagaagguagacaauugca

SEQ ID NO: 1108853 - RNA, 19 nt, Homo sapiens
  misc_RNA (1)...(19): siRNA sense strand
aaagcaaccuucugaugua

SEQ ID NO: 1108854 - RNA, 19 nt, Homo sapiens
  misc_RNA (1)...(19): siRNA sense strand
gcaaagcaaccuucugaug

SEQ ID NO: 1108855 - RNA, 19 nt, Homo sapiens
  misc_RNA (1)...(19): siRNA sense strand
ccgagaagguagacaauug

SEQ ID NO: 1108856 - RNA, 19 nt, Homo sapiens
  misc_RNA (1)...(19): siRNA sense strand
caaagcaaccuucugaugu

SEQ ID NO: 1108857 - RNA, 19 nt, Homo sapiens
  misc_RNA (1)...(19): siRNA sense strand
gcaaccuucugauguaagu

SEQ ID NO: 1108858 - RNA, 19 nt, Homo sapiens
  misc_RNA (1)...(19): siRNA sense strand
ugauguaaguucugagugu

SEQ ID NO: 1108859 - RNA, 19 nt, Homo sapiens
  misc_RNA (1)...(19): siRNA sense strand
aagcaaccuucugauguaa

SEQ ID NO: 1108860 - RNA, 19 nt, Homo sapiens
  misc_RNA (1)...(19): siRNA sense strand
cuaccucccuacagacaga

SEQ ID NO: 1108861 - RNA, 19 nt, Homo sapiens
  misc_RNA (1)...(19): siRNA sense strand
gagugugaccgagaaggua

SEQ ID NO: 1108862 - RNA, 19 nt, Homo sapiens
  misc_RNA (1)...(19): siRNA sense strand
cuucugauguaaguucuga

SEQ ID NO: 1108863 - RNA, 19 nt, Homo sapiens
  misc_RNA (1)...(19): siRNA sense strand
ugaccgagaagguagacaa

SEQ ID NO: 1108864 - RNA, 19 nt, Homo sapiens
  misc_RNA (1)...(19): siRNA sense strand
gaccgagaagguagacaau

SEQ ID NO: 1108865 - RNA, 19 nt, Homo sapiens
  misc_RNA (1)...(19): siRNA sense strand
gagaagguagacaauugca

SEQ ID NO: 1108866 - RNA, 19 nt, Homo sapiens
  misc_RNA (1)...(19): siRNA sense strand
aaagcaaccuucugaugua

SEQ ID NO: 1108867 - RNA, 19 nt, Homo sapiens
  misc_RNA (1)...(19): siRNA sense strand
gcaaagcaaccuucugaug

SEQ ID NO: 1108868 - RNA, 19 nt, Homo sapiens
  misc_RNA (1)...(19): siRNA sense strand
ccgagaagguagacaauug

SEQ ID NO: 1108869 - RNA, 19 nt, Homo sapiens
  misc_RNA (1)...(19): siRNA sense strand
caaagcaaccuucugaugu

SEQ ID NO: 1108870 - RNA, 19 nt, Homo sapiens
  misc_RNA (1)...(19): siRNA sense strand
gcaaccuucugauguaagu

SEQ ID NO: 1108871 - RNA, 19 nt, Homo sapiens
  misc_RNA (1)...(19): siRNA sense strand
ugauguaaguucugagugu

SEQ ID NO: 1108872 - RNA, 19 nt, Homo sapiens
  misc_RNA (1)...(19): siRNA sense strand
aagcaaccuucugauguaa

SEQ ID NO: 1108873 - RNA, 19 nt, Homo sapiens
  misc_RNA (1)...(19): siRNA sense strand
cuaccucccuacagacaga

SEQ ID NO: 1108874 - RNA, 19 nt, Homo sapiens
  misc_RNA (1)...(19): siRNA sense strand
gagugugaccgagaaggua

SEQ ID NO: 1108875 - RNA, 19 nt, Homo sapiens
  misc_RNA (1)...(19): siRNA sense strand
cuucugauguaaguucuga

SEQ ID NO: 1108876 - RNA, 19 nt, Homo sapiens
  misc_RNA (1)...(19): siRNA sense strand
ugaccgagaagguagacaa

SEQ ID NO: 1108877 - RNA, 19 nt, Homo sapiens
  misc_RNA (1)...(19): siRNA sense strand
gaccgagaagguagacaau

SEQ ID NO: 1108878 - RNA, 19 nt, Homo sapiens
  misc_RNA (1)...(19): siRNA sense strand
gagaagguagacaauugca

SEQ ID NO: 1108879 - RNA, 19 nt, Homo sapiens
  misc_RNA (1)...(19): siRNA sense strand
gaacuuggccgcagacaug

SEQ ID NO: 1108880 - RNA, 19 nt, Homo sapiens
  misc_RNA (1)...(19): siRNA sense strand
gaacaccauucuugauaau

SEQ ID NO: 1108881 - RNA, 19 nt, Homo sapiens
  misc_RNA (1)...(19): siRNA sense strand
caaggcagcuggcaacguu

SEQ ID NO: 1108882 - RNA, 19 nt, Homo sapiens
  misc_RNA (1)...(19): siRNA sense strand
gugcagugguugaugaaua

SEQ ID NO: 1108883 - RNA, 19 nt, Homo sapiens
  misc_RNA (1)...(19): siRNA sense strand
gaagaggucgccauuguug

SEQ ID NO: 1108884 - RNA, 19 nt, Homo sapiens
  misc_RNA (1)...(19): siRNA sense strand
ggagaaauccagaucauuc

SEQ ID NO: 1108885 - RNA, 19 nt, Homo sapiens
  misc_RNA (1)...(19): siRNA sense strand
cagaagaggucgccauugu

SEQ ID NO: 1108886 - RNA, 19 nt, Homo sapiens
  misc_RNA (1)...(19): siRNA sense strand
ggaauaacauugccaaacg

SEQ ID NO: 1108887 - RNA, 19 nt, Homo sapiens
  misc_RNA (1)...(19): siRNA sense strand
gagaugaacaccauucuug

SEQ ID NO: 1108888 - RNA, 19 nt, Homo sapiens
  misc_RNA (1)...(19): siRNA sense strand
ugaacaccauucuugauaa

SEQ ID NO: 1108889 - RNA, 19 nt, Homo sapiens
  misc_RNA (1)...(19): siRNA sense strand
caaaaucacugacaggaaa

SEQ ID NO: 1108890 - RNA, 19 nt, Homo sapiens
  misc_RNA (1)...(19): siRNA sense strand
gaggagaaauccagaucau

SEQ ID NO: 1108891 - RNA, 19 nt, Homo sapiens
  misc_RNA (1)...(19): siRNA sense strand
gaauaacauugccaaacgu

SEQ ID NO: 1108892 - RNA, 19 nt, Homo sapiens
  misc_RNA (1)...(19): siRNA sense strand
caaacgucacgaugaauuu

SEQ ID NO: 1108893 - RNA, 19 nt, Homo sapiens
  misc_RNA (1)...(19): siRNA sense strand
gccaaggaauucauugcuu

SEQ ID NO: 1108894 - RNA, 19 nt, Homo sapiens
  misc_RNA (1)...(19): siRNA sense strand
gaaauccagaucauucuca

SEQ ID NO: 1108895 - RNA, 19 nt, Homo sapiens
  misc_RNA (1)...(19): siRNA sense strand
ccaaacgucacgaugaauu

SEQ ID NO: 1108896 - RNA, 19 nt, Homo sapiens
  misc_RNA (1)...(19): siRNA sense strand
ccaagaggaacaggaauaa

SEQ ID NO: 1108897 - RNA, 19 nt, Homo sapiens
  misc_RNA (1)...(19): siRNA sense strand
ccagggacuuuauaaacug

SEQ ID NO: 1108898 - RNA, 19 nt, Homo sapiens
  misc_RNA (1)...(19): siRNA sense strand
gccagggacuuuauaaacu

SEQ ID NO: 1108899 - RNA, 19 nt, Homo sapiens
  misc_RNA (1)...(19): siRNA sense strand
ggcgagauuucccagaaga

SEQ ID NO: 1108900 - RNA, 19 nt, Homo sapiens
  misc_RNA (1)...(19): siRNA sense strand
ggucgccauuguugaagaa

SEQ ID NO: 1108901 - RNA, 19 nt, Homo sapiens
  misc_RNA (1)...(19): siRNA sense strand
ugccaaacgucacgaugaa

SEQ ID NO: 1108902 - RNA, 19 nt, Homo sapiens
  misc_RNA (1)...(19): siRNA sense strand
gaugaacaccauucuugau

SEQ ID NO: 1108903 - RNA, 19 nt, Homo sapiens
  misc_RNA (1)...(19): siRNA sense strand
auaaacugguugauucaga

SEQ ID NO: 1108904 - RNA, 19 nt, Homo sapiens
  misc_RNA (1)...(19): siRNA sense strand
gaggaacaggaauaacauu

SEQ ID NO: 1108905 - RNA, 19 nt, Homo sapiens
  misc_RNA (1)...(19): siRNA sense strand
gaugagaugaacaccauuc

SEQ ID NO: 1108906 - RNA, 19 nt, Homo sapiens
  misc_RNA (1)...(19): siRNA sense strand
caacguucccuucaagaca

SEQ ID NO: 1108907 - RNA, 19 nt, Homo sapiens
  misc_RNA (1)...(19): siRNA sense strand
aaggcgagauuucccagaa

SEQ ID NO: 1108908 - RNA, 19 nt, Homo sapiens
  misc_RNA (1)...(19): siRNA sense strand
acaccauucuugauaaucu

SEQ ID NO: 1108909 - RNA, 19 nt, Homo sapiens
  misc_RNA (1)...(19): siRNA sense strand
gaugguucuuucucugaug

SEQ ID NO: 1108910 - RNA, 19 nt, Homo sapiens
  misc_RNA (1)...(19): siRNA sense strand
gaccuuuaccagugaugua

SEQ ID NO: 1108911 - RNA, 19 nt, Homo sapiens
  misc_RNA (1)...(19): siRNA sense strand
ccgcagacaugcugauggu

SEQ ID NO: 1108912 - RNA, 19 nt, Homo sapiens
  misc_RNA (1)...(19): siRNA sense strand
cugaugagaugaacaccau

SEQ ID NO: 1108913 - RNA, 19 nt, Homo sapiens
  misc_RNA (1)...(19): siRNA sense strand
augaacaccauucuugaua

SEQ ID NO: 1108914 - RNA, 19 nt, Homo sapiens
  misc_RNA (1)...(19): siRNA sense strand
aagaggaacaggaauaaca

SEQ ID NO: 1108915 - RNA, 19 nt, Homo sapiens
  misc_RNA (1)...(19): siRNA sense strand
ugaugaauaccaagaggaa

SEQ ID NO: 1108916 - RNA, 19 nt, Homo sapiens
  misc_RNA (1)...(19): siRNA sense strand
ggaacaggaauaacauugc

SEQ ID NO: 1108917 - RNA, 19 nt, Homo sapiens
  misc_RNA (1)...(19): siRNA sense strand
ucaagacacagaggagaaa

SEQ ID NO: 1108918 - RNA, 19 nt, Homo sapiens
  misc_RNA (1)...(19): siRNA sense strand
uugcuuggcuggugaaagg

SEQ ID NO: 1108919 - RNA, 19 nt, Homo sapiens
  misc_RNA (1)...(19): siRNA sense strand
gggacuuuauaaacugguu

SEQ ID NO: 1108920 - RNA, 19 nt, Homo sapiens
  misc_RNA (1)...(19): siRNA sense strand
ccaggcgugcccaagauuu

SEQ ID NO: 1108921 - RNA, 19 nt, Homo sapiens
  misc_RNA (1)...(19): siRNA sense strand
cgccauuguugaagaacuu

SEQ ID NO: 1108922 - RNA, 19 nt, Homo sapiens
  misc_RNA (1)...(19): siRNA sense strand
agaggucgccauuguugaa

SEQ ID NO: 1108923 - RNA, 19 nt, Homo sapiens
  misc_RNA (1)...(19): siRNA sense strand
uggcaacguucccuucaag

SEQ ID NO: 1108924 - RNA, 19 nt, Homo sapiens
  misc_RNA (1)...(19): siRNA sense strand
ucacgaugaauuugagaga

SEQ ID NO: 1108925 - RNA, 19 nt, Homo sapiens
  misc_RNA (1)...(19): siRNA sense strand
gacaugcugaugguucuuu

SEQ ID NO: 1108926 - RNA, 19 nt, Homo sapiens
  misc_RNA (1)...(19): siRNA sense strand
cagacaugcugaugguucu

SEQ ID NO: 1108927 - RNA, 19 nt, Homo sapiens
  misc_RNA (1)...(19): siRNA sense strand
accaagaggaacaggaaua

SEQ ID NO: 1108928 - RNA, 19 nt, Homo sapiens
  misc_RNA (1)...(19): siRNA sense strand
caccauucuugauaaucuu

SEQ ID NO: 1108929 - RNA, 19 nt, Homo sapiens
  misc_RNA (1)...(19): siRNA sense strand
ccagugacuacagcaagua

SEQ ID NO: 1108930 - RNA, 19 nt, Homo sapiens
  misc_RNA (1)...(19): siRNA sense strand
acgaugaauuugagagaca

SEQ ID NO: 1108931 - RNA, 19 nt, Homo sapiens
  misc_RNA (1)...(19): siRNA sense strand
uuugugcagugguugauga

SEQ ID NO: 1108932 - RNA, 19 nt, Homo sapiens
  misc_RNA (1)...(19): siRNA sense strand
agaugaacaccauucuuga

SEQ ID NO: 1108933 - RNA, 19 nt, Homo sapiens
  misc_RNA (1)...(19): siRNA sense strand
agaagaggucgccauuguu

SEQ ID NO: 1108934 - RNA, 19 nt, Homo sapiens
  misc_RNA (1)...(19): siRNA sense strand
aaacgucacgaugaauuug

SEQ ID NO: 1108935 - RNA, 19 nt, Homo sapiens
  misc_RNA (1)...(19): siRNA sense strand
uaccagugauguaaguucu

SEQ ID NO: 1108936 - RNA, 19 nt, Homo sapiens
  misc_RNA (1)...(19): siRNA sense strand
gcaacguucccuucaagac

SEQ ID NO: 1108937 - RNA, 19 nt, Homo sapiens
  misc_RNA (1)...(19): siRNA sense strand
ggccgaggaaggcgagauu

SEQ ID NO: 1108938 - RNA, 19 nt, Homo sapiens
  misc_RNA (1)...(19): siRNA sense strand
ugcagugguugaugaauac

SEQ ID NO: 1108939 - RNA, 19 nt, Homo sapiens
  misc_RNA (1)...(19): siRNA sense strand
cagaggagaaauccagauc

SEQ ID NO: 1108940 - RNA, 19 nt, Homo sapiens
  misc_RNA (1)...(19): siRNA sense strand
gaagagcucccgagacaua

SEQ ID NO: 1108941 - RNA, 19 nt, Homo sapiens
  misc_RNA (1)...(19): siRNA sense strand
gcuccaagcuccacuguau

SEQ ID NO: 1108942 - RNA, 19 nt, Homo sapiens
  misc_RNA (1)...(19): siRNA sense strand
guucugguguucuguaaua

SEQ ID NO: 1108943 - RNA, 19 nt, Homo sapiens
  misc_RNA (1)...(19): siRNA sense strand
cagaagagcucccgagaca

SEQ ID NO: 1108944 - RNA, 19 nt, Homo sapiens
  misc_RNA (1)...(19): siRNA sense strand
ugcgaaagcucucgucuaa

SEQ ID NO: 1108945 - RNA, 19 nt, Homo sapiens
  misc_RNA (1)...(19): siRNA sense strand
cgaaagcucucgucuaagg

SEQ ID NO: 1108946 - RNA, 19 nt, Homo sapiens
  misc_RNA (1)...(19): siRNA sense strand
guaggccaguugcugaaua

SEQ ID NO: 1108947 - RNA, 19 nt, Homo sapiens
  misc_RNA (1)...(19): siRNA sense strand
gcaaaugccagccuugaug

SEQ ID NO: 1108948 - RNA, 19 nt, Homo sapiens
  misc_RNA (1)...(19): siRNA sense strand
ggagcugguugucaauuau

SEQ ID NO: 1108949 - RNA, 19 nt, Homo sapiens
  misc_RNA (1)...(19): siRNA sense strand
ugaacuggcugggauauau

SEQ ID NO: 1108950 - RNA, 19 nt, Homo sapiens
  misc_RNA (1)...(19): siRNA sense strand
ccacaaccgugcagucuag

SEQ ID NO: 1108951 - RNA, 19 nt, Homo sapiens
  misc_RNA (1)...(19): siRNA sense strand
ugggauauauucuggauga

SEQ ID NO: 1108952 - RNA, 19 nt, Homo sapiens
  misc_RNA (1)...(19): siRNA sense strand
cagacacacugcuggauga

SEQ ID NO: 1108953 - RNA, 19 nt, Homo sapiens
  misc_RNA (1)...(19): siRNA sense strand
gaagagccacauagcagaa

SEQ ID NO: 1108954 - RNA, 19 nt, Homo sapiens
  misc_RNA (1)...(19): siRNA sense strand
uggagcugguugucaauua

SEQ ID NO: 1108955 - RNA, 19 nt, Homo sapiens
  misc_RNA (1)...(19): siRNA sense strand
gaacuggcugggauauauu

SEQ ID NO: 1108956 - RNA, 19 nt, Homo sapiens
  misc_RNA (1)...(19): siRNA sense strand
gccaguugcugaauaaagu

SEQ ID NO: 1108957 - RNA, 19 nt, Homo sapiens
  misc_RNA (1)...(19): siRNA sense strand
gaugugagccugguucaga

SEQ ID NO: 1108958 - RNA, 19 nt, Homo sapiens
  misc_RNA (1)...(19): siRNA sense strand
ccccaacgcugcaagauua

SEQ ID NO: 1108959 - RNA, 19 nt, Homo sapiens
  misc_RNA (1)...(19): siRNA sense strand
gcugguaggagccacauuu

SEQ ID NO: 1108960 - RNA, 19 nt, Homo sapiens
  misc_RNA (1)...(19): siRNA sense strand
ucccaaagcucaguuagug

SEQ ID NO: 1108961 - RNA, 19 nt, Homo sapiens
  misc_RNA (1)...(19): siRNA sense strand
caaaugccagccuugauga

SEQ ID NO: 1108962 - RNA, 19 nt, Homo sapiens
  misc_RNA (1)...(19): siRNA sense strand
uaggccaguugcugaauaa

SEQ ID NO: 1108963 - RNA, 19 nt, Homo sapiens
  misc_RNA (1)...(19): siRNA sense strand
ccucaagcaucgugacaga

SEQ ID NO: 1108964 - RNA, 19 nt, Homo sapiens
  misc_RNA (1)...(19): siRNA sense strand
gguugucaauuaugauuuc

SEQ ID NO: 1108965 - RNA, 19 nt, Homo sapiens
  misc_RNA (1)...(19): siRNA sense strand
gagccugguucagaagauu

SEQ ID NO: 1108966 - RNA, 19 nt, Homo sapiens
  misc_RNA (1)...(19): siRNA sense strand
gcaagacucucagcuaccu

SEQ ID NO: 1108967 - RNA, 19 nt, Homo sapiens
  misc_RNA (1)...(19): siRNA sense strand
acacacugcuggaugaaag

SEQ ID NO: 1108968 - RNA, 19 nt, Homo sapiens
  misc_RNA (1)...(19): siRNA sense strand
uggacuacaucuuagagaa

SEQ ID NO: 1108969 - RNA, 19 nt, Homo sapiens
  misc_RNA (1)...(19): siRNA sense strand
caggcaccgucaucaguuu

SEQ ID NO: 1108970 - RNA, 19 nt, Homo sapiens
  misc_RNA (1)...(19): siRNA sense strand
guguggagcugguugucaa

SEQ ID NO: 1108971 - RNA, 19 nt, Homo sapiens
  misc_RNA (1)...(19): siRNA sense strand
gcugggauauauucuggau

SEQ ID NO: 1108972 - RNA, 19 nt, Homo sapiens
  misc_RNA (1)...(19): siRNA sense strand
ggacuacaucuuagagaag

SEQ ID NO: 1108973 - RNA, 19 nt, Homo sapiens
  misc_RNA (1)...(19): siRNA sense strand
agacauuucugagacugaa

SEQ ID NO: 1108974 - RNA, 19 nt, Homo sapiens
  misc_RNA (1)...(19): siRNA sense strand
uaaagucgccagcccagau

SEQ ID NO: 1108975 - RNA, 19 nt, Homo sapiens
  misc_RNA (1)...(19): siRNA sense strand
cagacagccuucagcagau

SEQ ID NO: 1108976 - RNA, 19 nt, Homo sapiens
  misc_RNA (1)...(19): siRNA sense strand
gcaagauuacauccacaga

SEQ ID NO: 1108977 - RNA, 19 nt, Homo sapiens
  misc_RNA (1)...(19): siRNA sense strand
acugguggacuacaucuua

SEQ ID NO: 1108978 - RNA, 19 nt, Homo sapiens
  misc_RNA (1)...(19): siRNA sense strand
uauucuggaugaccacaaa

SEQ ID NO: 1108979 - RNA, 19 nt, Homo sapiens
  misc_RNA (1)...(19): siRNA sense strand
gaugaggguaggaaucuuc

SEQ ID NO: 1108980 - RNA, 19 nt, Homo sapiens
  misc_RNA (1)...(19): siRNA sense strand
gaaaccggcaguggcaaga

SEQ ID NO: 1108981 - RNA, 19 nt, Homo sapiens
  misc_RNA (1)...(19): siRNA sense strand
gaacugguggacuacaucu

SEQ ID NO: 1108982 - RNA, 19 nt, Homo sapiens
  misc_RNA (1)...(19): siRNA sense strand
aggcccagcugacuuggaa

SEQ ID NO: 1108983 - RNA, 19 nt, Homo sapiens
  misc_RNA (1)...(19): siRNA sense strand
gcagaaggcccagcugacu

SEQ ID NO: 1108984 - RNA, 19 nt, Homo sapiens
  misc_RNA (1)...(19): siRNA sense strand
agacugaagggagcagaua

SEQ ID NO: 1108985 - RNA, 19 nt, Homo sapiens
  misc_RNA (1)...(19): siRNA sense strand
gacugaagggagcagauaa

SEQ ID NO: 1108986 - RNA, 19 nt, Homo sapiens
  misc_RNA (1)...(19): siRNA sense strand
agaaggcccagcugacuug

SEQ ID NO: 1108987 - RNA, 19 nt, Homo sapiens
  misc_RNA (1)...(19): siRNA sense strand
gagcugguugucaauuaug

SEQ ID NO: 1108988 - RNA, 19 nt, Homo sapiens
  misc_RNA (1)...(19): siRNA sense strand
gugcgaaagcucucgucua

SEQ ID NO: 1108989 - RNA, 19 nt, Homo sapiens
  misc_RNA (1)...(19): siRNA sense strand
caagcuccacuguaucaug

SEQ ID NO: 1108990 - RNA, 19 nt, Homo sapiens
  misc_RNA (1)...(19): siRNA sense strand
cagaugcugucaccaccau

SEQ ID NO: 1108991 - RNA, 19 nt, Homo sapiens
  misc_RNA (1)...(19): siRNA sense strand
uagcauccucggugaaaga

SEQ ID NO: 1108992 - RNA, 19 nt, Homo sapiens
  misc_RNA (1)...(19): siRNA sense strand
ccaggcaccgucaucaguu

SEQ ID NO: 1108993 - RNA, 19 nt, Homo sapiens
  misc_RNA (1)...(19): siRNA sense strand
agacagccuucagcagaug

SEQ ID NO: 1108994 - RNA, 19 nt, Homo sapiens
  misc_RNA (1)...(19): siRNA sense strand
uggccgagcuggugcacau

SEQ ID NO: 1108995 - RNA, 19 nt, Homo sapiens
  misc_RNA (1)...(19): siRNA sense strand
caaucccaaagcucaguua

SEQ ID NO: 1108996 - RNA, 19 nt, Homo sapiens
  misc_RNA (1)...(19): siRNA sense strand
guggcaagacucucagcua

SEQ ID NO: 1108997 - RNA, 19 nt, Homo sapiens
  misc_RNA (1)...(19): siRNA sense strand
uccuggaacugguggacua

SEQ ID NO: 1108998 - RNA, 19 nt, Homo sapiens
  misc_RNA (1)...(19): siRNA sense strand
ggaacugguggacuacauc

SEQ ID NO: 1108999 - RNA, 19 nt, Homo sapiens
  misc_RNA (1)...(19): siRNA sense strand
agccuggacucccuuccua

SEQ ID NO: 1109000 - RNA, 19 nt, Homo sapiens
  misc_RNA (1)...(19): siRNA sense strand
cagaaggcccagcugacuu

SEQ ID NO: 1109001 - RNA, 19 nt, Homo sapiens
  misc_RNA (1)...(19): siRNA sense strand
ccacaaaauccaacaccua

SEQ ID NO: 1109002 - RNA, 19 nt, Homo sapiens
  misc_RNA (1)...(19): siRNA sense strand
caucgugacagagcagaaa

SEQ ID NO: 1109003 - RNA, 19 nt, Homo sapiens
  misc_RNA (1)...(19): siRNA sense strand
uuagagaagagccacauag

SEQ ID NO: 1109004 - RNA, 19 nt, Homo sapiens
  misc_RNA (1)...(19): siRNA sense strand
cacaaaauccaacaccuaa

SEQ ID NO: 1109005 - RNA, 19 nt, Homo sapiens
  misc_RNA (1)...(19): siRNA sense strand
gugaacuggcugggauaua

SEQ ID NO: 1109006 - RNA, 19 nt, Homo sapiens
  misc_RNA (1)...(19): siRNA sense strand
cacauuucccgaaggugua

SEQ ID NO: 1109007 - RNA, 19 nt, Homo sapiens
  misc_RNA (1)...(19): siRNA sense strand
aaagcaaccuucugaugua

SEQ ID NO: 1109008 - RNA, 19 nt, Homo sapiens
  misc_RNA (1)...(19): siRNA sense strand
gcaaagcaaccuucugaug

SEQ ID NO: 1109009 - RNA, 19 nt, Homo sapiens
  misc_RNA (1)...(19): siRNA sense strand
ccgagaagguagacaauug

SEQ ID NO: 1109010 - RNA, 19 nt, Homo sapiens
  misc_RNA (1)...(19): siRNA sense strand
caaagcaaccuucugaugu

SEQ ID NO: 1109011 - RNA, 19 nt, Homo sapiens
  misc_RNA (1)...(19): siRNA sense strand
gaagaccacccacgaaugg

SEQ ID NO: 1109012 - RNA, 19 nt, Homo sapiens
  misc_RNA (1)...(19): siRNA sense strand
gcaaccuucugauguaagu

SEQ ID NO: 1109013 - RNA, 19 nt, Homo sapiens
  misc_RNA (1)...(19): siRNA sense strand
ucuuacgacuguuacguua

SEQ ID NO: 1109014 - RNA, 19 nt, Homo sapiens
  misc_RNA (1)...(19): siRNA sense strand
ugauguaaguucugagugu

SEQ ID NO: 1109015 - RNA, 19 nt, Homo sapiens
  misc_RNA (1)...(19): siRNA sense strand
aagcaaccuucugauguaa

SEQ ID NO: 1109016 - RNA, 19 nt, Homo sapiens
  misc_RNA (1)...(19): siRNA sense strand
gguuaucuuacgacuguua

SEQ ID NO: 1109017 - RNA, 19 nt, Homo sapiens
  misc_RNA (1)...(19): siRNA sense strand
uuacgacuguuacguuaca

SEQ ID NO: 1109018 - RNA, 19 nt, Homo sapiens
  misc_RNA (1)...(19): siRNA sense strand
cgacuguuacguuacauug

SEQ ID NO: 1109019 - RNA, 19 nt, Homo sapiens
  misc_RNA (1)...(19): siRNA sense strand
cuaccucccuacagacaga

SEQ ID NO: 1109020 - RNA, 19 nt, Homo sapiens
  misc_RNA (1)...(19): siRNA sense strand
cgaagaccacccacgaaug

SEQ ID NO: 1109021 - RNA, 19 nt, Homo sapiens
  misc_RNA (1)...(19): siRNA sense strand
augguuaucuuacgacugu

SEQ ID NO: 1109022 - RNA, 19 nt, Homo sapiens
  misc_RNA (1)...(19): siRNA sense strand
gagugugaccgagaaggua

SEQ ID NO: 1109023 - RNA, 19 nt, Homo sapiens
  misc_RNA (1)...(19): siRNA sense strand
cuucugauguaaguucuga

SEQ ID NO: 1109024 - RNA, 19 nt, Homo sapiens
  misc_RNA (1)...(19): siRNA sense strand
ccacgaaugguuaucuuac

SEQ ID NO: 1109025 - RNA, 19 nt, Homo sapiens
  misc_RNA (1)...(19): siRNA sense strand
ugaccgagaagguagacaa

SEQ ID NO: 1109026 - RNA, 19 nt, Homo sapiens
  misc_RNA (1)...(19): siRNA sense strand
ccgaagaccacccacgaau

SEQ ID NO: 1109027 - RNA, 19 nt, Homo sapiens
  misc_RNA (1)...(19): siRNA sense strand
acgaaugguuaucuuacga

SEQ ID NO: 1109028 - RNA, 19 nt, Homo sapiens
  misc_RNA (1)...(19): siRNA sense strand
gaccgagaagguagacaau

SEQ ID NO: 1109029 - RNA, 19 nt, Homo sapiens
  misc_RNA (1)...(19): siRNA sense strand
gagaagguagacaauugca

SEQ ID NO: 1109030 - RNA, 19 nt, Homo sapiens
  misc_RNA (1)...(19): siRNA sense strand
aaagcaaccuucugaugua

SEQ ID NO: 1109031 - RNA, 19 nt, Homo sapiens
  misc_RNA (1)...(19): siRNA sense strand
gcaaagcaaccuucugaug

SEQ ID NO: 1109032 - RNA, 19 nt, Homo sapiens
  misc_RNA (1)...(19): siRNA sense strand
ccgagaagguagacaauug

SEQ ID NO: 1109033 - RNA, 19 nt, Homo sapiens
  misc_RNA (1)...(19): siRNA sense strand
caaagcaaccuucugaugu

SEQ ID NO: 1109034 - RNA, 19 nt, Homo sapiens
  misc_RNA (1)...(19): siRNA sense strand
gaagaccacccacgaaugg

SEQ ID NO: 1109035 - RNA, 19 nt, Homo sapiens
  misc_RNA (1)...(19): siRNA sense strand
gcaaccuucugauguaagu

SEQ ID NO: 1109036 - RNA, 19 nt, Homo sapiens
  misc_RNA (1)...(19): siRNA sense strand
ucuuacgacuguuacguua

SEQ ID NO: 1109037 - RNA, 19 nt, Homo sapiens
  misc_RNA (1)...(19): siRNA sense strand
ugauguaaguucugagugu

SEQ ID NO: 1109038 - RNA, 19 nt, Homo sapiens
  misc_RNA (1)...(19): siRNA sense strand
aagcaaccuucugauguaa

SEQ ID NO: 1109039 - RNA, 19 nt, Homo sapiens
  misc_RNA (1)...(19): siRNA sense strand
gguuaucuuacgacuguua

SEQ ID NO: 1109040 - RNA, 19 nt, Homo sapiens
  misc_RNA (1)...(19): siRNA sense strand
uuacgacuguuacguuaca

SEQ ID NO: 1109041 - RNA, 19 nt, Homo sapiens
  misc_RNA (1)...(19): siRNA sense strand
cgacuguuacguuacauug

SEQ ID NO: 1109042 - RNA, 19 nt, Homo sapiens
  misc_RNA (1)...(19): siRNA sense strand
cuaccucccuacagacaga

SEQ ID NO: 1109043 - RNA, 19 nt, Homo sapiens
  misc_RNA (1)...(19): siRNA sense strand
cgaagaccacccacgaaug

SEQ ID NO: 1109044 - RNA, 19 nt, Homo sapiens
  misc_RNA (1)...(19): siRNA sense strand
augguuaucuuacgacugu

SEQ ID NO: 1109045 - RNA, 19 nt, Homo sapiens
  misc_RNA (1)...(19): siRNA sense strand
gagugugaccgagaaggua

SEQ ID NO: 1109046 - RNA, 19 nt, Homo sapiens
  misc_RNA (1)...(19): siRNA sense strand
cuucugauguaaguucuga

SEQ ID NO: 1109047 - RNA, 19 nt, Homo sapiens
  misc_RNA (1)...(19): siRNA sense strand
ccacgaaugguuaucuuac

SEQ ID NO: 1109048 - RNA, 19 nt, Homo sapiens
  misc_RNA (1)...(19): siRNA sense strand
ugaccgagaagguagacaa

SEQ ID NO: 1109049 - RNA, 19 nt, Homo sapiens
  misc_RNA (1)...(19): siRNA sense strand
ccgaagaccacccacgaau

SEQ ID NO: 1109050 - RNA, 19 nt, Homo sapiens
  misc_RNA (1)...(19): siRNA sense strand
acgaaugguuaucuuacga

SEQ ID NO: 1109051 - RNA, 19 nt, Homo sapiens
  misc_RNA (1)...(19): siRNA sense strand
gaccgagaagguagacaau

SEQ ID NO: 1109052 - RNA, 19 nt, Homo sapiens
  misc_RNA (1)...(19): siRNA sense strand
gagaagguagacaauugca

SEQ ID NO: 1109053 - RNA, 19 nt, Homo sapiens
  misc_RNA (1)...(19): siRNA sense strand
aaagcaaccuucugaugua

SEQ ID NO: 1109054 - RNA, 19 nt, Homo sapiens
  misc_RNA (1)...(19): siRNA sense strand
gcaaagcaaccuucugaug

SEQ ID NO: 1109055 - RNA, 19 nt, Homo sapiens
  misc_RNA (1)...(19): siRNA sense strand
ccgagaagguagacaauug

SEQ ID NO: 1109056 - RNA, 19 nt, Homo sapiens
  misc_RNA (1)...(19): siRNA sense strand
caaagcaaccuucugaugu

SEQ ID NO: 1109057 - RNA, 19 nt, Homo sapiens
  misc_RNA (1)...(19): siRNA sense strand
gcaaccuucugauguaagu

SEQ ID NO: 1109058 - RNA, 19 nt, Homo sapiens
  misc_RNA (1)...(19): siRNA sense strand
ugauguaaguucugagugu

SEQ ID NO: 1109059 - RNA, 19 nt, Homo sapiens
  misc_RNA (1)...(19): siRNA sense strand
aagcaaccuucugauguaa

SEQ ID NO: 1109060 - RNA, 19 nt, Homo sapiens
  misc_RNA (1)...(19): siRNA sense strand
cuaccucccuacagacaga

SEQ ID NO: 1109061 - RNA, 19 nt, Homo sapiens
  misc_RNA (1)...(19): siRNA sense strand
gagugugaccgagaaggua

SEQ ID NO: 1109062 - RNA, 19 nt, Homo sapiens
  misc_RNA (1)...(19): siRNA sense strand
cuucugauguaaguucuga

SEQ ID NO: 1109063 - RNA, 19 nt, Homo sapiens
  misc_RNA (1)...(19): siRNA sense strand
ugaccgagaagguagacaa

SEQ ID NO: 1109064 - RNA, 19 nt, Homo sapiens
  misc_RNA (1)...(19): siRNA sense strand
gaccgagaagguagacaau

SEQ ID NO: 1109065 - RNA, 19 nt, Homo sapiens
  misc_RNA (1)...(19): siRNA sense strand
gagaagguagacaauugca

SEQ ID NO: 1109066 - RNA, 19 nt, Homo sapiens
  misc_RNA (1)...(19): siRNA sense strand
aaagcaaccuucugaugua

SEQ ID NO: 1109067 - RNA, 19 nt, Homo sapiens
  misc_RNA (1)...(19): siRNA sense strand
gcaaagcaaccuucugaug

SEQ ID NO: 1109068 - RNA, 19 nt, Homo sapiens
  misc_RNA (1)...(19): siRNA sense strand
ccgagaagguagacaauug

SEQ ID NO: 1109069 - RNA, 19 nt, Homo sapiens
  misc_RNA (1)...(19): siRNA sense strand
caaagcaaccuucugaugu

SEQ ID NO: 1109070 - RNA, 19 nt, Homo sapiens
  misc_RNA (1)...(19): siRNA sense strand
gcaaccuucugauguaagu

SEQ ID NO: 1109071 - RNA, 19 nt, Homo sapiens
  misc_RNA (1)...(19): siRNA sense strand
ugauguaaguucugagugu

SEQ ID NO: 1109072 - RNA, 19 nt, Homo sapiens
  misc_RNA (1)...(19): siRNA sense strand
aagcaaccuucugauguaa

SEQ ID NO: 1109073 - RNA, 19 nt, Homo sapiens
  misc_RNA (1)...(19): siRNA sense strand
cuaccucccuacagacaga

SEQ ID NO: 1109074 - RNA, 19 nt, Homo sapiens
  misc_RNA (1)...(19): siRNA sense strand
gagugugaccgagaaggua

SEQ ID NO: 1109075 - RNA, 19 nt, Homo sapiens
  misc_RNA (1)...(19): siRNA sense strand
cuucugauguaaguucuga

SEQ ID NO: 1109076 - RNA, 19 nt, Homo sapiens
  misc_RNA (1)...(19): siRNA sense strand
ugaccgagaagguagacaa

SEQ ID NO: 1109077 - RNA, 19 nt, Homo sapiens
  misc_RNA (1)...(19): siRNA sense strand
gaccgagaagguagacaau

SEQ ID NO: 1109078 - RNA, 19 nt, Homo sapiens
  misc_RNA (1)...(19): siRNA sense strand
gagaagguagacaauugca

SEQ ID NO: 1109079 - RNA, 19 nt, Homo sapiens
  misc_RNA (1)...(19): siRNA sense strand
aaagcaaccuucugaugua

SEQ ID NO: 1109080 - RNA, 19 nt, Homo sapiens
  misc_RNA (1)...(19): siRNA sense strand
gcaaagcaaccuucugaug

SEQ ID NO: 1109081 - RNA, 19 nt, Homo sapiens
  misc_RNA (1)...(19): siRNA sense strand
ccgagaagguagacaauug

SEQ ID NO: 1109082 - RNA, 19 nt, Homo sapiens
  misc_RNA (1)...(19): siRNA sense strand
caaagcaaccuucugaugu

SEQ ID NO: 1109083 - RNA, 19 nt, Homo sapiens
  misc_RNA (1)...(19): siRNA sense strand
gcaaccuucugauguaagu

SEQ ID NO: 1109084 - RNA, 19 nt, Homo sapiens
  misc_RNA (1)...(19): siRNA sense strand
ugauguaaguucugagugu

SEQ ID NO: 1109085 - RNA, 19 nt, Homo sapiens
  misc_RNA (1)...(19): siRNA sense strand
aagcaaccuucugauguaa

SEQ ID NO: 1109086 - RNA, 19 nt, Homo sapiens
  misc_RNA (1)...(19): siRNA sense strand
cuaccucccuacagacaga

SEQ ID NO: 1109087 - RNA, 19 nt, Homo sapiens
  misc_RNA (1)...(19): siRNA sense strand
gagugugaccgagaaggua

SEQ ID NO: 1109088 - RNA, 19 nt, Homo sapiens
  misc_RNA (1)...(19): siRNA sense strand
cuucugauguaaguucuga

SEQ ID NO: 1109089 - RNA, 19 nt, Homo sapiens
  misc_RNA (1)...(19): siRNA sense strand
ugaccgagaagguagacaa

SEQ ID NO: 1109090 - RNA, 19 nt, Homo sapiens
  misc_RNA (1)...(19): siRNA sense strand
gaccgagaagguagacaau

SEQ ID NO: 1109091 - RNA, 19 nt, Homo sapiens
  misc_RNA (1)...(19): siRNA sense strand
gagaagguagacaauugca

SEQ ID NO: 1109092 - RNA, 19 nt, Homo sapiens
  misc_RNA (1)...(19): siRNA sense strand
aaagcaaccuucugaugua

SEQ ID NO: 1109093 - RNA, 19 nt, Homo sapiens
  misc_RNA (1)...(19): siRNA sense strand
gcaaagcaaccuucugaug

SEQ ID NO: 1109094 - RNA, 19 nt, Homo sapiens
  misc_RNA (1)...(19): siRNA sense strand
ccgagaagguagacaauug

SEQ ID NO: 1109095 - RNA, 19 nt, Homo sapiens
  misc_RNA (1)...(19): siRNA sense strand
caaagcaaccuucugaugu

SEQ ID NO: 1109096 - RNA, 19 nt, Homo sapiens
  misc_RNA (1)...(19): siRNA sense strand
gcaaccuucugauguaagu

SEQ ID NO: 1109097 - RNA, 19 nt, Homo sapiens
  misc_RNA (1)...(19): siRNA sense strand
ugauguaaguucugagugu

SEQ ID NO: 1109098 - RNA, 19 nt, Homo sapiens
  misc_RNA (1)...(19): siRNA sense strand
aagcaaccuucugauguaa

SEQ ID NO: 1109099 - RNA, 19 nt, Homo sapiens
  misc_RNA (1)...(19): siRNA sense strand
cuaccucccuacagacaga

SEQ ID NO: 1109100 - RNA, 19 nt, Homo sapiens
  misc_RNA (1)...(19): siRNA sense strand
gagugugaccgagaaggua

SEQ ID NO: 1109101 - RNA, 19 nt, Homo sapiens
  misc_RNA (1)...(19): siRNA sense strand
cuucugauguaaguucuga

SEQ ID NO: 1109102 - RNA, 19 nt, Homo sapiens
  misc_RNA (1)...(19): siRNA sense strand
ugaccgagaagguagacaa

SEQ ID NO: 1109103 - RNA, 19 nt, Homo sapiens
  misc_RNA (1)...(19): siRNA sense strand
gaccgagaagguagacaau

SEQ ID NO: 1109104 - RNA, 19 nt, Homo sapiens
  misc_RNA (1)...(19): siRNA sense strand
gagaagguagacaauugca

SEQ ID NO: 1109105 - RNA, 19 nt, Homo sapiens
  misc_RNA (1)...(19): siRNA sense strand
aaagcaaccuucugaugua

SEQ ID NO: 1109106 - RNA, 19 nt, Homo sapiens
  misc_RNA (1)...(19): siRNA sense strand
gcaaagcaaccuucugaug

SEQ ID NO: 1109107 - RNA, 19 nt, Homo sapiens
  misc_RNA (1)...(19): siRNA sense strand
ccgagaagguagacaauug

SEQ ID NO: 1109108 - RNA, 19 nt, Homo sapiens
  misc_RNA (1)...(19): siRNA sense strand
caaagcaaccuucugaugu

SEQ ID NO: 1109109 - RNA, 19 nt, Homo sapiens
  misc_RNA (1)...(19): siRNA sense strand
gcaaccuucugauguaagu

SEQ ID NO: 1109110 - RNA, 19 nt, Homo sapiens
  misc_RNA (1)...(19): siRNA sense strand
ugauguaaguucugagugu

SEQ ID NO: 1109111 - RNA, 19 nt, Homo sapiens
  misc_RNA (1)...(19): siRNA sense strand
aagcaaccuucugauguaa

SEQ ID NO: 1109112 - RNA, 19 nt, Homo sapiens
  misc_RNA (1)...(19): siRNA sense strand
cuaccucccuacagacaga

SEQ ID NO: 1109113 - RNA, 19 nt, Homo sapiens
  misc_RNA (1)...(19): siRNA sense strand
gagugugaccgagaaggua

SEQ ID NO: 1109114 - RNA, 19 nt, Homo sapiens
  misc_RNA (1)...(19): siRNA sense strand
cuucugauguaaguucuga

SEQ ID NO: 1109115 - RNA, 19 nt, Homo sapiens
  misc_RNA (1)...(19): siRNA sense strand
ugaccgagaagguagacaa

SEQ ID NO: 1109116 - RNA, 19 nt, Homo sapiens
  misc_RNA (1)...(19): siRNA sense strand
gaccgagaagguagacaau

SEQ ID NO: 1109117 - RNA, 19 nt, Homo sapiens
  misc_RNA (1)...(19): siRNA sense strand
gagaagguagacaauugca

SEQ ID NO: 1109118 - RNA, 19 nt, Homo sapiens
  misc_RNA (1)...(19): siRNA sense strand
aaagcaaccuucugaugua

SEQ ID NO: 1109119 - RNA, 19 nt, Homo sapiens
  misc_RNA (1)...(19): siRNA sense strand
gcaaagcaaccuucugaug

SEQ ID NO: 1109120 - RNA, 19 nt, Homo sapiens
  misc_RNA (1)...(19): siRNA sense strand
ccgagaagguagacaauug

SEQ ID NO: 1109121 - RNA, 19 nt, Homo sapiens
  misc_RNA (1)...(19): siRNA sense strand
caaagcaaccuucugaugu

SEQ ID NO: 1109122 - RNA, 19 nt, Homo sapiens
  misc_RNA (1)...(19): siRNA sense strand
gcaaccuucugauguaagu

SEQ ID NO: 1109123 - RNA, 19 nt, Homo sapiens
  misc_RNA (1)...(19): siRNA sense strand
ugauguaaguucugagugu

SEQ ID NO: 1109124 - RNA, 19 nt, Homo sapiens
  misc_RNA (1)...(19): siRNA sense strand
aagcaaccuucugauguaa

SEQ ID NO: 1109125 - RNA, 19 nt, Homo sapiens
  misc_RNA (1)...(19): siRNA sense strand
cuaccucccuacagacaga

SEQ ID NO: 1109126 - RNA, 19 nt, Homo sapiens
  misc_RNA (1)...(19): siRNA sense strand
gagugugaccgagaaggua

SEQ ID NO: 1109127 - RNA, 19 nt, Homo sapiens
  misc_RNA (1)...(19): siRNA sense strand
cuucugauguaaguucuga

SEQ ID NO: 1109128 - RNA, 19 nt, Homo sapiens
  misc_RNA (1)...(19): siRNA sense strand
ugaccgagaagguagacaa

SEQ ID NO: 1109129 - RNA, 19 nt, Homo sapiens
  misc_RNA (1)...(19): siRNA sense strand
gaccgagaagguagacaau

SEQ ID NO: 1109130 - RNA, 19 nt, Homo sapiens
  misc_RNA (1)...(19): siRNA sense strand
gagaagguagacaauugca

SEQ ID NO: 1109131 - RNA, 19 nt, Homo sapiens
  misc_RNA (1)...(19): siRNA sense strand
aaagcaaccuucugaugua

SEQ ID NO: 1109132 - RNA, 19 nt, Homo sapiens
  misc_RNA (1)...(19): siRNA sense strand
gcaaagcaaccuucugaug

SEQ ID NO: 1109133 - RNA, 19 nt, Homo sapiens
  misc_RNA (1)...(19): siRNA sense strand
ccgagaagguagacaauug

SEQ ID NO: 1109134 - RNA, 19 nt, Homo sapiens
  misc_RNA (1)...(19): siRNA sense strand
caaagcaaccuucugaugu

SEQ ID NO: 1109135 - RNA, 19 nt, Homo sapiens
  misc_RNA (1)...(19): siRNA sense strand
gaagaccacccacgaaugg

SEQ ID NO: 1109136 - RNA, 19 nt, Homo sapiens
  misc_RNA (1)...(19): siRNA sense strand
gcaaccuucugauguaagu

SEQ ID NO: 1109137 - RNA, 19 nt, Homo sapiens
  misc_RNA (1)...(19): siRNA sense strand
ucuuacgacuguuacguua

SEQ ID NO: 1109138 - RNA, 19 nt, Homo sapiens
  misc_RNA (1)...(19): siRNA sense strand
ugauguaaguucugagugu

SEQ ID NO: 1109139 - RNA, 19 nt, Homo sapiens
  misc_RNA (1)...(19): siRNA sense strand
aagcaaccuucugauguaa

SEQ ID NO: 1109140 - RNA, 19 nt, Homo sapiens
  misc_RNA (1)...(19): siRNA sense strand
gguuaucuuacgacuguua

SEQ ID NO: 1109141 - RNA, 19 nt, Homo sapiens
  misc_RNA (1)...(19): siRNA sense strand
uuacgacuguuacguuaca

SEQ ID NO: 1109142 - RNA, 19 nt, Homo sapiens
  misc_RNA (1)...(19): siRNA sense strand
cgacuguuacguuacauug

SEQ ID NO: 1109143 - RNA, 19 nt, Homo sapiens
  misc_RNA (1)...(19): siRNA sense strand
cuaccucccuacagacaga

SEQ ID NO: 1109144 - RNA, 19 nt, Homo sapiens
  misc_RNA (1)...(19): siRNA sense strand
cgaagaccacccacgaaug

SEQ ID NO: 1109145 - RNA, 19 nt, Homo sapiens
  misc_RNA (1)...(19): siRNA sense strand
augguuaucuuacgacugu

SEQ ID NO: 1109146 - RNA, 19 nt, Homo sapiens
  misc_RNA (1)...(19): siRNA sense strand
gagugugaccgagaaggua

SEQ ID NO: 1109147 - RNA, 19 nt, Homo sapiens
  misc_RNA (1)...(19): siRNA sense strand
cuucugauguaaguucuga

SEQ ID NO: 1109148 - RNA, 19 nt, Homo sapiens
  misc_RNA (1)...(19): siRNA sense strand
ccacgaaugguuaucuuac

SEQ ID NO: 1109149 - RNA, 19 nt, Homo sapiens
  misc_RNA (1)...(19): siRNA sense strand
ugaccgagaagguagacaa

SEQ ID NO: 1109150 - RNA, 19 nt, Homo sapiens
  misc_RNA (1)...(19): siRNA sense strand
ccgaagaccacccacgaau

SEQ ID NO: 1109151 - RNA, 19 nt, Homo sapiens
  misc_RNA (1)...(19): siRNA sense strand
acgaaugguuaucuuacga

SEQ ID NO: 1109152 - RNA, 19 nt, Homo sapiens
  misc_RNA (1)...(19): siRNA sense strand
gaccgagaagguagacaau

SEQ ID NO: 1109153 - RNA, 19 nt, Homo sapiens
  misc_RNA (1)...(19): siRNA sense strand
gagaagguagacaauugca

SEQ ID NO: 1109154 - RNA, 19 nt, Homo sapiens
  misc_RNA (1)...(19): siRNA sense strand
aaagcaaccuucugaugua

SEQ ID NO: 1109155 - RNA, 19 nt, Homo sapiens
  misc_RNA (1)...(19): siRNA sense strand
gcaaagcaaccuucugaug

SEQ ID NO: 1109156 - RNA, 19 nt, Homo sapiens
  misc_RNA (1)...(19): siRNA sense strand
ccgagaagguagacaauug

SEQ ID NO: 1109157 - RNA, 19 nt, Homo sapiens
  misc_RNA (1)...(19): siRNA sense strand
caaagcaaccuucugaugu

SEQ ID NO: 1109158 - RNA, 19 nt, Homo sapiens
  misc_RNA (1)...(19): siRNA sense strand
gaagaccacccacgaaugg

SEQ ID NO: 1109159 - RNA, 19 nt, Homo sapiens
  misc_RNA (1)...(19): siRNA sense strand
gcaaccuucugauguaagu

SEQ ID NO: 1109160 - RNA, 19 nt, Homo sapiens
  misc_RNA (1)...(19): siRNA sense strand
ucuuacgacuguuacguua

SEQ ID NO: 1109161 - RNA, 19 nt, Homo sapiens
  misc_RNA (1)...(19): siRNA sense strand
ugauguaaguucugagugu

SEQ ID NO: 1109162 - RNA, 19 nt, Homo sapiens
  misc_RNA (1)...(19): siRNA sense strand
aagcaaccuucugauguaa

SEQ ID NO: 1109163 - RNA, 19 nt, Homo sapiens
  misc_RNA (1)...(19): siRNA sense strand
gguuaucuuacgacuguua

SEQ ID NO: 1109164 - RNA, 19 nt, Homo sapiens
  misc_RNA (1)...(19): siRNA sense strand
uuacgacuguuacguuaca

SEQ ID NO: 1109165 - RNA, 19 nt, Homo sapiens
  misc_RNA (1)...(19): siRNA sense strand
cgacuguuacguuacauug

SEQ ID NO: 1109166 - RNA, 19 nt, Homo sapiens
  misc_RNA (1)...(19): siRNA sense strand
cuaccucccuacagacaga

SEQ ID NO: 1109167 - RNA, 19 nt, Homo sapiens
  misc_RNA (1)...(19): siRNA sense strand
cgaagaccacccacgaaug

SEQ ID NO: 1109168 - RNA, 19 nt, Homo sapiens
  misc_RNA (1)...(19): siRNA sense strand
augguuaucuuacgacugu

SEQ ID NO: 1109169 - RNA, 19 nt, Homo sapiens
  misc_RNA (1)...(19): siRNA sense strand
gagugugaccgagaaggua

SEQ ID NO: 1109170 - RNA, 19 nt, Homo sapiens
  misc_RNA (1)...(19): siRNA sense strand
cuucugauguaaguucuga

SEQ ID NO: 1109171 - RNA, 19 nt, Homo sapiens
  misc_RNA (1)...(19): siRNA sense strand
ccacgaaugguuaucuuac

SEQ ID NO: 1109172 - RNA, 19 nt, Homo sapiens
  misc_RNA (1)...(19): siRNA sense strand
ugaccgagaagguagacaa

SEQ ID NO: 1109173 - RNA, 19 nt, Homo sapiens
  misc_RNA (1)...(19): siRNA sense strand
ccgaagaccacccacgaau

SEQ ID NO: 1109174 - RNA, 19 nt, Homo sapiens
  misc_RNA (1)...(19): siRNA sense strand
acgaaugguuaucuuacga

SEQ ID NO: 1109175 - RNA, 19 nt, Homo sapiens
  misc_RNA (1)...(19): siRNA sense strand
gaccgagaagguagacaau

SEQ ID NO: 1109176 - RNA, 19 nt, Homo sapiens
  misc_RNA (1)...(19): siRNA sense strand
gagaagguagacaauugca

SEQ ID NO: 1109177 - RNA, 19 nt, Homo sapiens
  misc_RNA (1)...(19): siRNA sense strand
aaagcaaccuucugaugua

SEQ ID NO: 1109178 - RNA, 19 nt, Homo sapiens
  misc_RNA (1)...(19): siRNA sense strand
gcaaagcaaccuucugaug

SEQ ID NO: 1109179 - RNA, 19 nt, Homo sapiens
  misc_RNA (1)...(19): siRNA sense strand
ccgagaagguagacaauug

SEQ ID NO: 1109180 - RNA, 19 nt, Homo sapiens
  misc_RNA (1)...(19): siRNA sense strand
caaagcaaccuucugaugu

SEQ ID NO: 1109181 - RNA, 19 nt, Homo sapiens
  misc_RNA (1)...(19): siRNA sense strand
gcaaccuucugauguaagu

SEQ ID NO: 1109182 - RNA, 19 nt, Homo sapiens
  misc_RNA (1)...(19): siRNA sense strand
ugauguaaguucugagugu

SEQ ID NO: 1109183 - RNA, 19 nt, Homo sapiens
  misc_RNA (1)...(19): siRNA sense strand
aagcaaccuucugauguaa

SEQ ID NO: 1109184 - RNA, 19 nt, Homo sapiens
  misc_RNA (1)...(19): siRNA sense strand
cuaccucccuacagacaga

SEQ ID NO: 1109185 - RNA, 19 nt, Homo sapiens
  misc_RNA (1)...(19): siRNA sense strand
gagugugaccgagaaggua

SEQ ID NO: 1109186 - RNA, 19 nt, Homo sapiens
  misc_RNA (1)...(19): siRNA sense strand
cuucugauguaaguucuga

SEQ ID NO: 1109187 - RNA, 19 nt, Homo sapiens
  misc_RNA (1)...(19): siRNA sense strand
ugaccgagaagguagacaa

SEQ ID NO: 1109188 - RNA, 19 nt, Homo sapiens
  misc_RNA (1)...(19): siRNA sense strand
gaccgagaagguagacaau

SEQ ID NO: 1109189 - RNA, 19 nt, Homo sapiens
  misc_RNA (1)...(19): siRNA sense strand
gagaagguagacaauugca

SEQ ID NO: 1109190 - RNA, 19 nt, Homo sapiens
  misc_RNA (1)...(19): siRNA sense strand
aaagcaaccuucugaugua

SEQ ID NO: 1109191 - RNA, 19 nt, Homo sapiens
  misc_RNA (1)...(19): siRNA sense strand
gcaaagcaaccuucugaug

SEQ ID NO: 1109192 - RNA, 19 nt, Homo sapiens
  misc_RNA (1)...(19): siRNA sense strand
ccgagaagguagacaauug

SEQ ID NO: 1109193 - RNA, 19 nt, Homo sapiens
  misc_RNA (1)...(19): siRNA sense strand
caaagcaaccuucugaugu

SEQ ID NO: 1109194 - RNA, 19 nt, Homo sapiens
  misc_RNA (1)...(19): siRNA sense strand
gcaaccuucugauguaagu

SEQ ID NO: 1109195 - RNA, 19 nt, Homo sapiens
  misc_RNA (1)...(19): siRNA sense strand
ugauguaaguucugagugu

SEQ ID NO: 1109196 - RNA, 19 nt, Homo sapiens
  misc_RNA (1)...(19): siRNA sense strand
aagcaaccuucugauguaa

SEQ ID NO: 1109197 - RNA, 19 nt, Homo sapiens
  misc_RNA (1)...(19): siRNA sense strand
cuaccucccuacagacaga

SEQ ID NO: 1109198 - RNA, 19 nt, Homo sapiens
  misc_RNA (1)...(19): siRNA sense strand
gagugugaccgagaaggua

SEQ ID NO: 1109199 - RNA, 19 nt, Homo sapiens
  misc_RNA (1)...(19): siRNA sense strand
cuucugauguaaguucuga

SEQ ID NO: 1109200 - RNA, 19 nt, Homo sapiens
  misc_RNA (1)...(19): siRNA sense strand
ugaccgagaagguagacaa

SEQ ID NO: 1109201 - RNA, 19 nt, Homo sapiens
  misc_RNA (1)...(19): siRNA sense strand
gaccgagaagguagacaau

SEQ ID NO: 1109202 - RNA, 19 nt, Homo sapiens
  misc_RNA (1)...(19): siRNA sense strand
gagaagguagacaauugca

SEQ ID NO: 1109203 - RNA, 19 nt, Homo sapiens
  misc_RNA (1)...(19): siRNA sense strand
aaagcaaccuucugaugua

SEQ ID NO: 1109204 - RNA, 19 nt, Homo sapiens
  misc_RNA (1)...(19): siRNA sense strand
gcaaagcaaccuucugaug

SEQ ID NO: 1109205 - RNA, 19 nt, Homo sapiens
  misc_RNA (1)...(19): siRNA sense strand
ccgagaagguagacaauug

SEQ ID NO: 1109206 - RNA, 19 nt, Homo sapiens
  misc_RNA (1)...(19): siRNA sense strand
caaagcaaccuucugaugu

SEQ ID NO: 1109207 - RNA, 19 nt, Homo sapiens
  misc_RNA (1)...(19): siRNA sense strand
gcaaccuucugauguaagu

SEQ ID NO: 1109208 - RNA, 19 nt, Homo sapiens
  misc_RNA (1)...(19): siRNA sense strand
ugauguaaguucugagugu

SEQ ID NO: 1109209 - RNA, 19 nt, Homo sapiens
  misc_RNA (1)...(19): siRNA sense strand
aagcaaccuucugauguaa

SEQ ID NO: 1109210 - RNA, 19 nt, Homo sapiens
  misc_RNA (1)...(19): siRNA sense strand
cuaccucccuacagacaga

SEQ ID NO: 1109211 - RNA, 19 nt, Homo sapiens
  misc_RNA (1)...(19): siRNA sense strand
gagugugaccgagaaggua

SEQ ID NO: 1109212 - RNA, 19 nt, Homo sapiens
  misc_RNA (1)...(19): siRNA sense strand
cuucugauguaaguucuga

SEQ ID NO: 1109213 - RNA, 19 nt, Homo sapiens
  misc_RNA (1)...(19): siRNA sense strand
ugaccgagaagguagacaa

SEQ ID NO: 1109214 - RNA, 19 nt, Homo sapiens
  misc_RNA (1)...(19): siRNA sense strand
gaccgagaagguagacaau

SEQ ID NO: 1109215 - RNA, 19 nt, Homo sapiens
  misc_RNA (1)...(19): siRNA sense strand
gagaagguagacaauugca

SEQ ID NO: 1109216 - RNA, 19 nt, Homo sapiens
  misc_RNA (1)...(19): siRNA sense strand
aaagcaaccuucugaugua

SEQ ID NO: 1109217 - RNA, 19 nt, Homo sapiens
  misc_RNA (1)...(19): siRNA sense strand
gcaaagcaaccuucugaug

SEQ ID NO: 1109218 - RNA, 19 nt, Homo sapiens
  misc_RNA (1)...(19): siRNA sense strand
ccgagaagguagacaauug

SEQ ID NO: 1109219 - RNA, 19 nt, Homo sapiens
  misc_RNA (1)...(19): siRNA sense strand
caaagcaaccuucugaugu

SEQ ID NO: 1109220 - RNA, 19 nt, Homo sapiens
  misc_RNA (1)...(19): siRNA sense strand
gcaaccuucugauguaagu

SEQ ID NO: 1109221 - RNA, 19 nt, Homo sapiens
  misc_RNA (1)...(19): siRNA sense strand
ugauguaaguucugagugu

SEQ ID NO: 1109222 - RNA, 19 nt, Homo sapiens
  misc_RNA (1)...(19): siRNA sense strand
aagcaaccuucugauguaa

SEQ ID NO: 1109223 - RNA, 19 nt, Homo sapiens
  misc_RNA (1)...(19): siRNA sense strand
cuaccucccuacagacaga

SEQ ID NO: 1109224 - RNA, 19 nt, Homo sapiens
  misc_RNA (1)...(19): siRNA sense strand
gagugugaccgagaaggua

SEQ ID NO: 1109225 - RNA, 19 nt, Homo sapiens
  misc_RNA (1)...(19): siRNA sense strand
cuucugauguaaguucuga

SEQ ID NO: 1109226 - RNA, 19 nt, Homo sapiens
  misc_RNA (1)...(19): siRNA sense strand
ugaccgagaagguagacaa

SEQ ID NO: 1109227 - RNA, 19 nt, Homo sapiens
  misc_RNA (1)...(19): siRNA sense strand
gaccgagaagguagacaau

SEQ ID NO: 1109228 - RNA, 19 nt, Homo sapiens
  misc_RNA (1)...(19): siRNA sense strand
gagaagguagacaauugca

SEQ ID NO: 1109229 - RNA, 19 nt, Homo sapiens
  misc_RNA (1)...(19): siRNA sense strand
aaagcaaccuucugaugua

SEQ ID NO: 1109230 - RNA, 19 nt, Homo sapiens
  misc_RNA (1)...(19): siRNA sense strand
gcaaagcaaccuucugaug

SEQ ID NO: 1109231 - RNA, 19 nt, Homo sapiens
  misc_RNA (1)...(19): siRNA sense strand
ccgagaagguagacaauug

SEQ ID NO: 1109232 - RNA, 19 nt, Homo sapiens
  misc_RNA (1)...(19): siRNA sense strand
caaagcaaccuucugaugu

SEQ ID NO: 1109233 - RNA, 19 nt, Homo sapiens
  misc_RNA (1)...(19): siRNA sense strand
gcaaccuucugauguaagu

SEQ ID NO: 1109234 - RNA, 19 nt, Homo sapiens
  misc_RNA (1)...(19): siRNA sense strand
ugauguaaguucugagugu

SEQ ID NO: 1109235 - RNA, 19 nt, Homo sapiens
  misc_RNA (1)...(19): siRNA sense strand
aagcaaccuucugauguaa

SEQ ID NO: 1109236 - RNA, 19 nt, Homo sapiens
  misc_RNA (1)...(19): siRNA sense strand
cuaccucccuacagacaga

SEQ ID NO: 1109237 - RNA, 19 nt, Homo sapiens
  misc_RNA (1)...(19): siRNA sense strand
gagugugaccgagaaggua

SEQ ID NO: 1109238 - RNA, 19 nt, Homo sapiens
  misc_RNA (1)...(19): siRNA sense strand
cuucugauguaaguucuga

SEQ ID NO: 1109239 - RNA, 19 nt, Homo sapiens
  misc_RNA (1)...(19): siRNA sense strand
ugaccgagaagguagacaa

SEQ ID NO: 1109240 - RNA, 19 nt, Homo sapiens
  misc_RNA (1)...(19): siRNA sense strand
gaccgagaagguagacaau

SEQ ID NO: 1109241 - RNA, 19 nt, Homo sapiens
  misc_RNA (1)...(19): siRNA sense strand
gagaagguagacaauugca

SEQ ID NO: 1109242 - RNA, 19 nt, Homo sapiens
  misc_RNA (1)...(19): siRNA sense strand
aaagcaaccuucugaugua

SEQ ID NO: 1109243 - RNA, 19 nt, Homo sapiens
  misc_RNA (1)...(19): siRNA sense strand
gcaaagcaaccuucugaug

SEQ ID NO: 1109244 - RNA, 19 nt, Homo sapiens
  misc_RNA (1)...(19): siRNA sense strand
ccgagaagguagacaauug

SEQ ID NO: 1109245 - RNA, 19 nt, Homo sapiens
  misc_RNA (1)...(19): siRNA sense strand
caaagcaaccuucugaugu

SEQ ID NO: 1109246 - RNA, 19 nt, Homo sapiens
  misc_RNA (1)...(19): siRNA sense strand
gcaaccuucugauguaagu

SEQ ID NO: 1109247 - RNA, 19 nt, Homo sapiens
  misc_RNA (1)...(19): siRNA sense strand
ugauguaaguucugagugu

SEQ ID NO: 1109248 - RNA, 19 nt, Homo sapiens
  misc_RNA (1)...(19): siRNA sense strand
aagcaaccuucugauguaa

SEQ ID NO: 1109249 - RNA, 19 nt, Homo sapiens
  misc_RNA (1)...(19): siRNA sense strand
cuaccucccuacagacaga

SEQ ID NO: 1109250 - RNA, 19 nt, Homo sapiens
  misc_RNA (1)...(19): siRNA sense strand
gagugugaccgagaaggua

SEQ ID NO: 1109251 - RNA, 19 nt, Homo sapiens
  misc_RNA (1)...(19): siRNA sense strand
cuucugauguaaguucuga

SEQ ID NO: 1109252 - RNA, 19 nt, Homo sapiens
  misc_RNA (1)...(19): siRNA sense strand
ugaccgagaagguagacaa

SEQ ID NO: 1109253 - RNA, 19 nt, Homo sapiens
  misc_RNA (1)...(19): siRNA sense strand
gaccgagaagguagacaau

SEQ ID NO: 1109254 - RNA, 19 nt, Homo sapiens
  misc_RNA (1)...(19): siRNA sense strand
gagaagguagacaauugca

SEQ ID NO: 1109255 - RNA, 19 nt, Homo sapiens
  misc_RNA (1)...(19): siRNA sense strand
gaagaagccuguaucuaaa

SEQ ID NO: 1109256 - RNA, 19 nt, Homo sapiens
  misc_RNA (1)...(19): siRNA sense strand
gaaacacgcuggagaagaa

SEQ ID NO: 1109257 - RNA, 19 nt, Homo sapiens
  misc_RNA (1)...(19): siRNA sense strand
agaagaagccuguaucuaa

SEQ ID NO: 1109258 - RNA, 19 nt, Homo sapiens
  misc_RNA (1)...(19): siRNA sense strand
ugaaggccaucuccaguua

SEQ ID NO: 1109259 - RNA, 19 nt, Homo sapiens
  misc_RNA (1)...(19): siRNA sense strand
gaagcagggugaagucagu

SEQ ID NO: 1109260 - RNA, 19 nt, Homo sapiens
  misc_RNA (1)...(19): siRNA sense strand
ggaagaagaaguccaccaa

SEQ ID NO: 1109261 - RNA, 19 nt, Homo sapiens
  misc_RNA (1)...(19): siRNA sense strand
aagaagaaguccaccaaga

SEQ ID NO: 1109262 - RNA, 19 nt, Homo sapiens
  misc_RNA (1)...(19): siRNA sense strand
auaagaagcugaaauccau

SEQ ID NO: 1109263 - RNA, 19 nt, Homo sapiens
  misc_RNA (1)...(19): siRNA sense strand
gcaucuaugugcaggaaau

SEQ ID NO: 1109264 - RNA, 19 nt, Homo sapiens
  misc_RNA (1)...(19): siRNA sense strand
ggagcuggcuggcaaugca

SEQ ID NO: 1109265 - RNA, 19 nt, Homo sapiens
  misc_RNA (1)...(19): siRNA sense strand
ucacaguccucuccaccaa

SEQ ID NO: 1109266 - RNA, 19 nt, Homo sapiens
  misc_RNA (1)...(19): siRNA sense strand
gaaagguggcaaggaguuu

SEQ ID NO: 1109267 - RNA, 19 nt, Homo sapiens
  misc_RNA (1)...(19): siRNA sense strand
gcuuggcccuggcugauga

SEQ ID NO: 1109268 - RNA, 19 nt, Homo sapiens
  misc_RNA (1)...(19): siRNA sense strand
ggaaacacgcuggagaaga

SEQ ID NO: 1109269 - RNA, 19 nt, Homo sapiens
  misc_RNA (1)...(19): siRNA sense strand
acaauguccucuuccauca

SEQ ID NO: 1109270 - RNA, 19 nt, Homo sapiens
  misc_RNA (1)...(19): siRNA sense strand
gauaagaagcugaaaucca

SEQ ID NO: 1109271 - RNA, 19 nt, Homo sapiens
  misc_RNA (1)...(19): siRNA sense strand
ccgaguugcuagcgaagaa

SEQ ID NO: 1109272 - RNA, 19 nt, Homo sapiens
  misc_RNA (1)...(19): siRNA sense strand
gcagacaagugugaagaac

SEQ ID NO: 1109273 - RNA, 19 nt, Homo sapiens
  misc_RNA (1)...(19): siRNA sense strand
gugauccacuguaauaguc

SEQ ID NO: 1109274 - RNA, 19 nt, Homo sapiens
  misc_RNA (1)...(19): siRNA sense strand
aauguccucuuccaucaaa

SEQ ID NO: 1109275 - RNA, 19 nt, Homo sapiens
  misc_RNA (1)...(19): siRNA sense strand
gaugauaagaagcugaaau

SEQ ID NO: 1109276 - RNA, 19 nt, Homo sapiens
  misc_RNA (1)...(19): siRNA sense strand
cagaagaagccuguaucua

SEQ ID NO: 1109277 - RNA, 19 nt, Homo sapiens
  misc_RNA (1)...(19): siRNA sense strand
gcuaaaaggagucaccaua

SEQ ID NO: 1109278 - RNA, 19 nt, Homo sapiens
  misc_RNA (1)...(19): siRNA sense strand
ggcccuggcugaugauaag

SEQ ID NO: 1109279 - RNA, 19 nt, Homo sapiens
  misc_RNA (1)...(19): siRNA sense strand
uuugugauccacuguaaua

SEQ ID NO: 1109280 - RNA, 19 nt, Homo sapiens
  misc_RNA (1)...(19): siRNA sense strand
ccaagucuccaucccagaa

SEQ ID NO: 1109281 - RNA, 19 nt, Homo sapiens
  misc_RNA (1)...(19): siRNA sense strand
acaguccucuccaccaaga

SEQ ID NO: 1109282 - RNA, 19 nt, Homo sapiens
  misc_RNA (1)...(19): siRNA sense strand
gcagcgagagacaacaaga

SEQ ID NO: 1109283 - RNA, 19 nt, Homo sapiens
  misc_RNA (1)...(19): siRNA sense strand
ugaaucagcugcuaaaagg

SEQ ID NO: 1109284 - RNA, 19 nt, Homo sapiens
  misc_RNA (1)...(19): siRNA sense strand
gcgagaguauaggcaucua

SEQ ID NO: 1109285 - RNA, 19 nt, Homo sapiens
  misc_RNA (1)...(19): siRNA sense strand
aagcugaaauccauugcau

SEQ ID NO: 1109286 - RNA, 19 nt, Homo sapiens
  misc_RNA (1)...(19): siRNA sense strand
uaggaaacacgcuggagaa

SEQ ID NO: 1109287 - RNA, 19 nt, Homo sapiens
  misc_RNA (1)...(19): siRNA sense strand
ggccaucuccaguuacuuc

SEQ ID NO: 1109288 - RNA, 19 nt, Homo sapiens
  misc_RNA (1)...(19): siRNA sense strand
gcaaugcagcgagagacaa

SEQ ID NO: 1109289 - RNA, 19 nt, Homo sapiens
  misc_RNA (1)...(19): siRNA sense strand
guuggaagccaucaucaca

SEQ ID NO: 1109290 - RNA, 19 nt, Homo sapiens
  misc_RNA (1)...(19): siRNA sense strand
caagcuggacgccaacuag

SEQ ID NO: 1109291 - RNA, 19 nt, Homo sapiens
  misc_RNA (1)...(19): siRNA sense strand
cagcgagagacaacaagaa

SEQ ID NO: 1109292 - RNA, 19 nt, Homo sapiens
  misc_RNA (1)...(19): siRNA sense strand
ccaaugaugaagagcugaa

SEQ ID NO: 1109293 - RNA, 19 nt, Homo sapiens
  misc_RNA (1)...(19): siRNA sense strand
agaaagguggcaaggaguu

SEQ ID NO: 1109294 - RNA, 19 nt, Homo sapiens
  misc_RNA (1)...(19): siRNA sense strand
gcagcggcaggaacgguuu

SEQ ID NO: 1109295 - RNA, 19 nt, Homo sapiens
  misc_RNA (1)...(19): siRNA sense strand
aguuugugauccacuguaa

SEQ ID NO: 1109296 - RNA, 19 nt, Homo sapiens
  misc_RNA (1)...(19): siRNA sense strand
gaaaguuggaagccaucau

SEQ ID NO: 1109297 - RNA, 19 nt, Homo sapiens
  misc_RNA (1)...(19): siRNA sense strand
ccagaagaagccuguaucu

SEQ ID NO: 1109298 - RNA, 19 nt, Homo sapiens
  misc_RNA (1)...(19): siRNA sense strand
gggauccaaaggaaaguug

SEQ ID NO: 1109299 - RNA, 19 nt, Homo sapiens
  misc_RNA (1)...(19): siRNA sense strand
uggcaaggaguuuguggaa

SEQ ID NO: 1109300 - RNA, 19 nt, Homo sapiens
  misc_RNA (1)...(19): siRNA sense strand
ugccaaagcaggagucauc

SEQ ID NO: 1109301 - RNA, 19 nt, Homo sapiens
  misc_RNA (1)...(19): siRNA sense strand
gaagcugaaauccauugca

SEQ ID NO: 1109302 - RNA, 19 nt, Homo sapiens
  misc_RNA (1)...(19): siRNA sense strand
gaagaagcggggauccaaa

SEQ ID NO: 1109303 - RNA, 19 nt, Homo sapiens
  misc_RNA (1)...(19): siRNA sense strand
aggcaucuaugugcaggaa

SEQ ID NO: 1109304 - RNA, 19 nt, Homo sapiens
  misc_RNA (1)...(19): siRNA sense strand
uaagaagcugaaauccauu

SEQ ID NO: 1109305 - RNA, 19 nt, Homo sapiens
  misc_RNA (1)...(19): siRNA sense strand
aaaguuggaagccaucauc

SEQ ID NO: 1109306 - RNA, 19 nt, Homo sapiens
  misc_RNA (1)...(19): siRNA sense strand
gaagaagccuguaucuaaa

SEQ ID NO: 1109307 - RNA, 19 nt, Homo sapiens
  misc_RNA (1)...(19): siRNA sense strand
gaaacacgcuggagaagaa

SEQ ID NO: 1109308 - RNA, 19 nt, Homo sapiens
  misc_RNA (1)...(19): siRNA sense strand
agaagaagccuguaucuaa

SEQ ID NO: 1109309 - RNA, 19 nt, Homo sapiens
  misc_RNA (1)...(19): siRNA sense strand
ugaaggccaucuccaguua

SEQ ID NO: 1109310 - RNA, 19 nt, Homo sapiens
  misc_RNA (1)...(19): siRNA sense strand
gaagcagggugaagucagu

SEQ ID NO: 1109311 - RNA, 19 nt, Homo sapiens
  misc_RNA (1)...(19): siRNA sense strand
ggaagaagaaguccaccaa

SEQ ID NO: 1109312 - RNA, 19 nt, Homo sapiens
  misc_RNA (1)...(19): siRNA sense strand
aagaagaaguccaccaaga

SEQ ID NO: 1109313 - RNA, 19 nt, Homo sapiens
  misc_RNA (1)...(19): siRNA sense strand
auaagaagcugaaauccau

SEQ ID NO: 1109314 - RNA, 19 nt, Homo sapiens
  misc_RNA (1)...(19): siRNA sense strand
gcaucuaugugcaggaaau

SEQ ID NO: 1109315 - RNA, 19 nt, Homo sapiens
  misc_RNA (1)...(19): siRNA sense strand
ggagcuggcuggcaaugca

SEQ ID NO: 1109316 - RNA, 19 nt, Homo sapiens
  misc_RNA (1)...(19): siRNA sense strand
ucacaguccucuccaccaa

SEQ ID NO: 1109317 - RNA, 19 nt, Homo sapiens
  misc_RNA (1)...(19): siRNA sense strand
gaaagguggcaaggaguuu

SEQ ID NO: 1109318 - RNA, 19 nt, Homo sapiens
  misc_RNA (1)...(19): siRNA sense strand
gcuuggcccuggcugauga

SEQ ID NO: 1109319 - RNA, 19 nt, Homo sapiens
  misc_RNA (1)...(19): siRNA sense strand
ggaaacacgcuggagaaga

SEQ ID NO: 1109320 - RNA, 19 nt, Homo sapiens
  misc_RNA (1)...(19): siRNA sense strand
acaauguccucuuccauca

SEQ ID NO: 1109321 - RNA, 19 nt, Homo sapiens
  misc_RNA (1)...(19): siRNA sense strand
gauaagaagcugaaaucca

SEQ ID NO: 1109322 - RNA, 19 nt, Homo sapiens
  misc_RNA (1)...(19): siRNA sense strand
ccgaguugcuagcgaagaa

SEQ ID NO: 1109323 - RNA, 19 nt, Homo sapiens
  misc_RNA (1)...(19): siRNA sense strand
gcagacaagugugaagaac

SEQ ID NO: 1109324 - RNA, 19 nt, Homo sapiens
  misc_RNA (1)...(19): siRNA sense strand
gugauccacuguaauaguc

SEQ ID NO: 1109325 - RNA, 19 nt, Homo sapiens
  misc_RNA (1)...(19): siRNA sense strand
aauguccucuuccaucaaa

SEQ ID NO: 1109326 - RNA, 19 nt, Homo sapiens
  misc_RNA (1)...(19): siRNA sense strand
gaugauaagaagcugaaau

SEQ ID NO: 1109327 - RNA, 19 nt, Homo sapiens
  misc_RNA (1)...(19): siRNA sense strand
cagaagaagccuguaucua

SEQ ID NO: 1109328 - RNA, 19 nt, Homo sapiens
  misc_RNA (1)...(19): siRNA sense strand
gcuaaaaggagucaccaua

SEQ ID NO: 1109329 - RNA, 19 nt, Homo sapiens
  misc_RNA (1)...(19): siRNA sense strand
ggcccuggcugaugauaag

SEQ ID NO: 1109330 - RNA, 19 nt, Homo sapiens
  misc_RNA (1)...(19): siRNA sense strand
uuugugauccacuguaaua

SEQ ID NO: 1109331 - RNA, 19 nt, Homo sapiens
  misc_RNA (1)...(19): siRNA sense strand
ccaagucuccaucccagaa

SEQ ID NO: 1109332 - RNA, 19 nt, Homo sapiens
  misc_RNA (1)...(19): siRNA sense strand
acaguccucuccaccaaga

SEQ ID NO: 1109333 - RNA, 19 nt, Homo sapiens
  misc_RNA (1)...(19): siRNA sense strand
gcagcgagagacaacaaga

SEQ ID NO: 1109334 - RNA, 19 nt, Homo sapiens
  misc_RNA (1)...(19): siRNA sense strand
ugaaucagcugcuaaaagg

SEQ ID NO: 1109335 - RNA, 19 nt, Homo sapiens
  misc_RNA (1)...(19): siRNA sense strand
gcgagaguauaggcaucua

SEQ ID NO: 1109336 - RNA, 19 nt, Homo sapiens
  misc_RNA (1)...(19): siRNA sense strand
aagcugaaauccauugcau

SEQ ID NO: 1109337 - RNA, 19 nt, Homo sapiens
  misc_RNA (1)...(19): siRNA sense strand
uaggaaacacgcuggagaa

SEQ ID NO: 1109338 - RNA, 19 nt, Homo sapiens
  misc_RNA (1)...(19): siRNA sense strand
ggccaucuccaguuacuuc

SEQ ID NO: 1109339 - RNA, 19 nt, Homo sapiens
  misc_RNA (1)...(19): siRNA sense strand
gcaaugcagcgagagacaa

SEQ ID NO: 1109340 - RNA, 19 nt, Homo sapiens
  misc_RNA (1)...(19): siRNA sense strand
guuggaagccaucaucaca

SEQ ID NO: 1109341 - RNA, 19 nt, Homo sapiens
  misc_RNA (1)...(19): siRNA sense strand
caagcuggacgccaacuag

SEQ ID NO: 1109342 - RNA, 19 nt, Homo sapiens
  misc_RNA (1)...(19): siRNA sense strand
cagcgagagacaacaagaa

SEQ ID NO: 1109343 - RNA, 19 nt, Homo sapiens
  misc_RNA (1)...(19): siRNA sense strand
ccaaugaugaagagcugaa

SEQ ID NO: 1109344 - RNA, 19 nt, Homo sapiens
  misc_RNA (1)...(19): siRNA sense strand
agaaagguggcaaggaguu

SEQ ID NO: 1109345 - RNA, 19 nt, Homo sapiens
  misc_RNA (1)...(19): siRNA sense strand
gcagcggcaggaacgguuu

SEQ ID NO: 1109346 - RNA, 19 nt, Homo sapiens
  misc_RNA (1)...(19): siRNA sense strand
aguuugugauccacuguaa

SEQ ID NO: 1109347 - RNA, 19 nt, Homo sapiens
  misc_RNA (1)...(19): siRNA sense strand
gaaaguuggaagccaucau

SEQ ID NO: 1109348 - RNA, 19 nt, Homo sapiens
  misc_RNA (1)...(19): siRNA sense strand
ccagaagaagccuguaucu

SEQ ID NO: 1109349 - RNA, 19 nt, Homo sapiens
  misc_RNA (1)...(19): siRNA sense strand
gggauccaaaggaaaguug

SEQ ID NO: 1109350 - RNA, 19 nt, Homo sapiens
  misc_RNA (1)...(19): siRNA sense strand
uggcaaggaguuuguggaa

SEQ ID NO: 1109351 - RNA, 19 nt, Homo sapiens
  misc_RNA (1)...(19): siRNA sense strand
ugccaaagcaggagucauc

SEQ ID NO: 1109352 - RNA, 19 nt, Homo sapiens
  misc_RNA (1)...(19): siRNA sense strand
gaagcugaaauccauugca

SEQ ID NO: 1109353 - RNA, 19 nt, Homo sapiens
  misc_RNA (1)...(19): siRNA sense strand
gaagaagcggggauccaaa

SEQ ID NO: 1109354 - RNA, 19 nt, Homo sapiens
  misc_RNA (1)...(19): siRNA sense strand
aggcaucuaugugcaggaa

SEQ ID NO: 1109355 - RNA, 19 nt, Homo sapiens
  misc_RNA (1)...(19): siRNA sense strand
uaagaagcugaaauccauu

SEQ ID NO: 1109356 - RNA, 19 nt, Homo sapiens
  misc_RNA (1)...(19): siRNA sense strand
aaaguuggaagccaucauc

SEQ ID NO: 1109357 - RNA, 19 nt, Homo sapiens
  misc_RNA (1)...(19): siRNA sense strand
gaagaagccuguaucuaaa

SEQ ID NO: 1109358 - RNA, 19 nt, Homo sapiens
  misc_RNA (1)...(19): siRNA sense strand
gaaacacgcuggagaagaa

SEQ ID NO: 1109359 - RNA, 19 nt, Homo sapiens
  misc_RNA (1)...(19): siRNA sense strand
agaagaagccuguaucuaa

SEQ ID NO: 1109360 - RNA, 19 nt, Homo sapiens
  misc_RNA (1)...(19): siRNA sense strand
ugaaggccaucuccaguua

SEQ ID NO: 1109361 - RNA, 19 nt, Homo sapiens
  misc_RNA (1)...(19): siRNA sense strand
gaagcagggugaagucagu

SEQ ID NO: 1109362 - RNA, 19 nt, Homo sapiens
  misc_RNA (1)...(19): siRNA sense strand
ggaagaagaaguccaccaa

SEQ ID NO: 1109363 - RNA, 19 nt, Homo sapiens
  misc_RNA (1)...(19): siRNA sense strand
aagaagaaguccaccaaga

SEQ ID NO: 1109364 - RNA, 19 nt, Homo sapiens
  misc_RNA (1)...(19): siRNA sense strand
auaagaagcugaaauccau

SEQ ID NO: 1109365 - RNA, 19 nt, Homo sapiens
  misc_RNA (1)...(19): siRNA sense strand
gcaucuaugugcaggaaau

SEQ ID NO: 1109366 - RNA, 19 nt, Homo sapiens
  misc_RNA (1)...(19): siRNA sense strand
ggagcuggcuggcaaugca

SEQ ID NO: 1109367 - RNA, 19 nt, Homo sapiens
  misc_RNA (1)...(19): siRNA sense strand
ucacaguccucuccaccaa

SEQ ID NO: 1109368 - RNA, 19 nt, Homo sapiens
  misc_RNA (1)...(19): siRNA sense strand
gaaagguggcaaggaguuu

SEQ ID NO: 1109369 - RNA, 19 nt, Homo sapiens
  misc_RNA (1)...(19): siRNA sense strand
gcuuggcccuggcugauga

SEQ ID NO: 1109370 - RNA, 19 nt, Homo sapiens
  misc_RNA (1)...(19): siRNA sense strand
ggaaacacgcuggagaaga

SEQ ID NO: 1109371 - RNA, 19 nt, Homo sapiens
  misc_RNA (1)...(19): siRNA sense strand
acaauguccucuuccauca

SEQ ID NO: 1109372 - RNA, 19 nt, Homo sapiens
  misc_RNA (1)...(19): siRNA sense strand
gauaagaagcugaaaucca

SEQ ID NO: 1109373 - RNA, 19 nt, Homo sapiens
  misc_RNA (1)...(19): siRNA sense strand
ccgaguugcuagcgaagaa

SEQ ID NO: 1109374 - RNA, 19 nt, Homo sapiens
  misc_RNA (1)...(19): siRNA sense strand
gcagacaagugugaagaac

SEQ ID NO: 1109375 - RNA, 19 nt, Homo sapiens
  misc_RNA (1)...(19): siRNA sense strand
gugauccacuguaauaguc

SEQ ID NO: 1109376 - RNA, 19 nt, Homo sapiens
  misc_RNA (1)...(19): siRNA sense strand
aauguccucuuccaucaaa

SEQ ID NO: 1109377 - RNA, 19 nt, Homo sapiens
  misc_RNA (1)...(19): siRNA sense strand
gaugauaagaagcugaaau

SEQ ID NO: 1109378 - RNA, 19 nt, Homo sapiens
  misc_RNA (1)...(19): siRNA sense strand
cagaagaagccuguaucua

SEQ ID NO: 1109379 - RNA, 19 nt, Homo sapiens
  misc_RNA (1)...(19): siRNA sense strand
gcuaaaaggagucaccaua

SEQ ID NO: 1109380 - RNA, 19 nt, Homo sapiens
  misc_RNA (1)...(19): siRNA sense strand
ggcccuggcugaugauaag

SEQ ID NO: 1109381 - RNA, 19 nt, Homo sapiens
  misc_RNA (1)...(19): siRNA sense strand
uuugugauccacuguaaua

SEQ ID NO: 1109382 - RNA, 19 nt, Homo sapiens
  misc_RNA (1)...(19): siRNA sense strand
ccaagucuccaucccagaa

SEQ ID NO: 1109383 - RNA, 19 nt, Homo sapiens
  misc_RNA (1)...(19): siRNA sense strand
acaguccucuccaccaaga

SEQ ID NO: 1109384 - RNA, 19 nt, Homo sapiens
  misc_RNA (1)...(19): siRNA sense strand
gcagcgagagacaacaaga

SEQ ID NO: 1109385 - RNA, 19 nt, Homo sapiens
  misc_RNA (1)...(19): siRNA sense strand
ugaaucagcugcuaaaagg

SEQ ID NO: 1109386 - RNA, 19 nt, Homo sapiens
  misc_RNA (1)...(19): siRNA sense strand
gcgagaguauaggcaucua

SEQ ID NO: 1109387 - RNA, 19 nt, Homo sapiens
  misc_RNA (1)...(19): siRNA sense strand
aagcugaaauccauugcau

SEQ ID NO: 1109388 - RNA, 19 nt, Homo sapiens
  misc_RNA (1)...(19): siRNA sense strand
uaggaaacacgcuggagaa

SEQ ID NO: 1109389 - RNA, 19 nt, Homo sapiens
  misc_RNA (1)...(19): siRNA sense strand
ggccaucuccaguuacuuc

SEQ ID NO: 1109390 - RNA, 19 nt, Homo sapiens
  misc_RNA (1)...(19): siRNA sense strand
gcaaugcagcgagagacaa

SEQ ID NO: 1109391 - RNA, 19 nt, Homo sapiens
  misc_RNA (1)...(19): siRNA sense strand
guuggaagccaucaucaca

SEQ ID NO: 1109392 - RNA, 19 nt, Homo sapiens
  misc_RNA (1)...(19): siRNA sense strand
caagcuggacgccaacuag

SEQ ID NO: 1109393 - RNA, 19 nt, Homo sapiens
  misc_RNA (1)...(19): siRNA sense strand
cagcgagagacaacaagaa

SEQ ID NO: 1109394 - RNA, 19 nt, Homo sapiens
  misc_RNA (1)...(19): siRNA sense strand
ccaaugaugaagagcugaa

SEQ ID NO: 1109395 - RNA, 19 nt, Homo sapiens
  misc_RNA (1)...(19): siRNA sense strand
agaaagguggcaaggaguu

SEQ ID NO: 1109396 - RNA, 19 nt, Homo sapiens
  misc_RNA (1)...(19): siRNA sense strand
gcagcggcaggaacgguuu

SEQ ID NO: 1109397 - RNA, 19 nt, Homo sapiens
  misc_RNA (1)...(19): siRNA sense strand
aguuugugauccacuguaa

SEQ ID NO: 1109398 - RNA, 19 nt, Homo sapiens
  misc_RNA (1)...(19): siRNA sense strand
gaaaguuggaagccaucau

SEQ ID NO: 1109399 - RNA, 19 nt, Homo sapiens
  misc_RNA (1)...(19): siRNA sense strand
ccagaagaagccuguaucu

SEQ ID NO: 1109400 - RNA, 19 nt, Homo sapiens
  misc_RNA (1)...(19): siRNA sense strand
gggauccaaaggaaaguug

SEQ ID NO: 1109401 - RNA, 19 nt, Homo sapiens
  misc_RNA (1)...(19): siRNA sense strand
uggcaaggaguuuguggaa

SEQ ID NO: 1109402 - RNA, 19 nt, Homo sapiens
  misc_RNA (1)...(19): siRNA sense strand
ugccaaagcaggagucauc

SEQ ID NO: 1109403 - RNA, 19 nt, Homo sapiens
  misc_RNA (1)...(19): siRNA sense strand
gaagcugaaauccauugca

SEQ ID NO: 1109404 - RNA, 19 nt, Homo sapiens
  misc_RNA (1)...(19): siRNA sense strand
gaagaagcggggauccaaa

SEQ ID NO: 1109405 - RNA, 19 nt, Homo sapiens
  misc_RNA (1)...(19): siRNA sense strand
aggcaucuaugugcaggaa

SEQ ID NO: 1109406 - RNA, 19 nt, Homo sapiens
  misc_RNA (1)...(19): siRNA sense strand
uaagaagcugaaauccauu

SEQ ID NO: 1109407 - RNA, 19 nt, Homo sapiens
  misc_RNA (1)...(19): siRNA sense strand
aaaguuggaagccaucauc

SEQ ID NO: 1109408 - RNA, 19 nt, Homo sapiens
  misc_RNA (1)...(19): siRNA sense strand
gaagaagccuguaucuaaa

SEQ ID NO: 1109409 - RNA, 19 nt, Homo sapiens
  misc_RNA (1)...(19): siRNA sense strand
gaaacacgcuggagaagaa

SEQ ID NO: 1109410 - RNA, 19 nt, Homo sapiens
  misc_RNA (1)...(19): siRNA sense strand
agaagaagccuguaucuaa

SEQ ID NO: 1109411 - RNA, 19 nt, Homo sapiens
  misc_RNA (1)...(19): siRNA sense strand
ugaaggccaucuccaguua

SEQ ID NO: 1109412 - RNA, 19 nt, Homo sapiens
  misc_RNA (1)...(19): siRNA sense strand
gaagcagggugaagucagu

SEQ ID NO: 1109413 - RNA, 19 nt, Homo sapiens
  misc_RNA (1)...(19): siRNA sense strand
ggaagaagaaguccaccaa

SEQ ID NO: 1109414 - RNA, 19 nt, Homo sapiens
  misc_RNA (1)...(19): siRNA sense strand
aagaagaaguccaccaaga

SEQ ID NO: 1109415 - RNA, 19 nt, Homo sapiens
  misc_RNA (1)...(19): siRNA sense strand
auaagaagcugaaauccau

SEQ ID NO: 1109416 - RNA, 19 nt, Homo sapiens
  misc_RNA (1)...(19): siRNA sense strand
gcaucuaugugcaggaaau

SEQ ID NO: 1109417 - RNA, 19 nt, Homo sapiens
  misc_RNA (1)...(19): siRNA sense strand
ggagcuggcuggcaaugca

SEQ ID NO: 1109418 - RNA, 19 nt, Homo sapiens
  misc_RNA (1)...(19): siRNA sense strand
ucacaguccucuccaccaa

SEQ ID NO: 1109419 - RNA, 19 nt, Homo sapiens
  misc_RNA (1)...(19): siRNA sense strand
gaaagguggcaaggaguuu

SEQ ID NO: 1109420 - RNA, 19 nt, Homo sapiens
  misc_RNA (1)...(19): siRNA sense strand
gcuuggcccuggcugauga

SEQ ID NO: 1109421 - RNA, 19 nt, Homo sapiens
  misc_RNA (1)...(19): siRNA sense strand
ggaaacacgcuggagaaga

SEQ ID NO: 1109422 - RNA, 19 nt, Homo sapiens
  misc_RNA (1)...(19): siRNA sense strand
acaauguccucuuccauca

SEQ ID NO: 1109423 - RNA, 19 nt, Homo sapiens
  misc_RNA (1)...(19): siRNA sense strand
gauaagaagcugaaaucca

SEQ ID NO: 1109424 - RNA, 19 nt, Homo sapiens
  misc_RNA (1)...(19): siRNA sense strand
ccgaguugcuagcgaagaa

SEQ ID NO: 1109425 - RNA, 19 nt, Homo sapiens
  misc_RNA (1)...(19): siRNA sense strand
gcagacaagugugaagaac

SEQ ID NO: 1109426 - RNA, 19 nt, Homo sapiens
  misc_RNA (1)...(19): siRNA sense strand
gugauccacuguaauaguc

SEQ ID NO: 1109427 - RNA, 19 nt, Homo sapiens
  misc_RNA (1)...(19): siRNA sense strand
aauguccucuuccaucaaa

SEQ ID NO: 1109428 - RNA, 19 nt, Homo sapiens
  misc_RNA (1)...(19): siRNA sense strand
gaugauaagaagcugaaau

SEQ ID NO: 1109429 - RNA, 19 nt, Homo sapiens
  misc_RNA (1)...(19): siRNA sense strand
cagaagaagccuguaucua

SEQ ID NO: 1109430 - RNA, 19 nt, Homo sapiens
  misc_RNA (1)...(19): siRNA sense strand
gcuaaaaggagucaccaua

SEQ ID NO: 1109431 - RNA, 19 nt, Homo sapiens
  misc_RNA (1)...(19): siRNA sense strand
ggcccuggcugaugauaag

SEQ ID NO: 1109432 - RNA, 19 nt, Homo sapiens
  misc_RNA (1)...(19): siRNA sense strand
uuugugauccacuguaaua

SEQ ID NO: 1109433 - RNA, 19 nt, Homo sapiens
  misc_RNA (1)...(19): siRNA sense strand
ccaagucuccaucccagaa

SEQ ID NO: 1109434 - RNA, 19 nt, Homo sapiens
  misc_RNA (1)...(19): siRNA sense strand
acaguccucuccaccaaga

SEQ ID NO: 1109435 - RNA, 19 nt, Homo sapiens
  misc_RNA (1)...(19): siRNA sense strand
gcagcgagagacaacaaga

SEQ ID NO: 1109436 - RNA, 19 nt, Homo sapiens
  misc_RNA (1)...(19): siRNA sense strand
ugaaucagcugcuaaaagg

SEQ ID NO: 1109437 - RNA, 19 nt, Homo sapiens
  misc_RNA (1)...(19): siRNA sense strand
gcgagaguauaggcaucua

SEQ ID NO: 1109438 - RNA, 19 nt, Homo sapiens
  misc_RNA (1)...(19): siRNA sense strand
aagcugaaauccauugcau

SEQ ID NO: 1109439 - RNA, 19 nt, Homo sapiens
  misc_RNA (1)...(19): siRNA sense strand
uaggaaacacgcuggagaa

SEQ ID NO: 1109440 - RNA, 19 nt, Homo sapiens
  misc_RNA (1)...(19): siRNA sense strand
ggccaucuccaguuacuuc

SEQ ID NO: 1109441 - RNA, 19 nt, Homo sapiens
  misc_RNA (1)...(19): siRNA sense strand
gcaaugcagcgagagacaa

SEQ ID NO: 1109442 - RNA, 19 nt, Homo sapiens
  misc_RNA (1)...(19): siRNA sense strand
guuggaagccaucaucaca

SEQ ID NO: 1109443 - RNA, 19 nt, Homo sapiens
  misc_RNA (1)...(19): siRNA sense strand
caagcuggacgccaacuag

SEQ ID NO: 1109444 - RNA, 19 nt, Homo sapiens
  misc_RNA (1)...(19): siRNA sense strand
cagcgagagacaacaagaa

SEQ ID NO: 1109445 - RNA, 19 nt, Homo sapiens
  misc_RNA (1)...(19): siRNA sense strand
ccaaugaugaagagcugaa

SEQ ID NO: 1109446 - RNA, 19 nt, Homo sapiens
  misc_RNA (1)...(19): siRNA sense strand
agaaagguggcaaggaguu

SEQ ID NO: 1109447 - RNA, 19 nt, Homo sapiens
  misc_RNA (1)...(19): siRNA sense strand
gcagcggcaggaacgguuu

SEQ ID NO: 1109448 - RNA, 19 nt, Homo sapiens
  misc_RNA (1)...(19): siRNA sense strand
aguuugugauccacuguaa

SEQ ID NO: 1109449 - RNA, 19 nt, Homo sapiens
  misc_RNA (1)...(19): siRNA sense strand
gaaaguuggaagccaucau

SEQ ID NO: 1109450 - RNA, 19 nt, Homo sapiens
  misc_RNA (1)...(19): siRNA sense strand
ccagaagaagccuguaucu

SEQ ID NO: 1109451 - RNA, 19 nt, Homo sapiens
  misc_RNA (1)...(19): siRNA sense strand
gggauccaaaggaaaguug

SEQ ID NO: 1109452 - RNA, 19 nt, Homo sapiens
  misc_RNA (1)...(19): siRNA sense strand
uggcaaggaguuuguggaa

SEQ ID NO: 1109453 - RNA, 19 nt, Homo sapiens
  misc_RNA (1)...(19): siRNA sense strand
ugccaaagcaggagucauc

SEQ ID NO: 1109454 - RNA, 19 nt, Homo sapiens
  misc_RNA (1)...(19): siRNA sense strand
gaagcugaaauccauugca

SEQ ID NO: 1109455 - RNA, 19 nt, Homo sapiens
  misc_RNA (1)...(19): siRNA sense strand
gaagaagcggggauccaaa

SEQ ID NO: 1109456 - RNA, 19 nt, Homo sapiens
  misc_RNA (1)...(19): siRNA sense strand
aggcaucuaugugcaggaa

SEQ ID NO: 1109457 - RNA, 19 nt, Homo sapiens
  misc_RNA (1)...(19): siRNA sense strand
uaagaagcugaaauccauu

SEQ ID NO: 1109458 - RNA, 19 nt, Homo sapiens
  misc_RNA (1)...(19): siRNA sense strand
aaaguuggaagccaucauc

SEQ ID NO: 1109459 - RNA, 19 nt, Homo sapiens
  misc_RNA (1)...(19): siRNA sense strand
gaagaagccuguaucuaaa

SEQ ID NO: 1109460 - RNA, 19 nt, Homo sapiens
  misc_RNA (1)...(19): siRNA sense strand
gaaacacgcuggagaagaa

SEQ ID NO: 1109461 - RNA, 19 nt, Homo sapiens
  misc_RNA (1)...(19): siRNA sense strand
agaagaagccuguaucuaa

SEQ ID NO: 1109462 - RNA, 19 nt, Homo sapiens
  misc_RNA (1)...(19): siRNA sense strand
ugaaggccaucuccaguua

SEQ ID NO: 1109463 - RNA, 19 nt, Homo sapiens
  misc_RNA (1)...(19): siRNA sense strand
gaagcagggugaagucagu

SEQ ID NO: 1109464 - RNA, 19 nt, Homo sapiens
  misc_RNA (1)...(19): siRNA sense strand
ggaagaagaaguccaccaa

SEQ ID NO: 1109465 - RNA, 19 nt, Homo sapiens
  misc_RNA (1)...(19): siRNA sense strand
aagaagaaguccaccaaga

SEQ ID NO: 1109466 - RNA, 19 nt, Homo sapiens
  misc_RNA (1)...(19): siRNA sense strand
auaagaagcugaaauccau

SEQ ID NO: 1109467 - RNA, 19 nt, Homo sapiens
  misc_RNA (1)...(19): siRNA sense strand
gcaucuaugugcaggaaau

SEQ ID NO: 1109468 - RNA, 19 nt, Homo sapiens
  misc_RNA (1)...(19): siRNA sense strand
ggagcuggcuggcaaugca

SEQ ID NO: 1109469 - RNA, 19 nt, Homo sapiens
  misc_RNA (1)...(19): siRNA sense strand
ucacaguccucuccaccaa

SEQ ID NO: 1109470 - RNA, 19 nt, Homo sapiens
  misc_RNA (1)...(19): siRNA sense strand
gaaagguggcaaggaguuu

SEQ ID NO: 1109471 - RNA, 19 nt, Homo sapiens
  misc_RNA (1)...(19): siRNA sense strand
gcuuggcccuggcugauga

SEQ ID NO: 1109472 - RNA, 19 nt, Homo sapiens
  misc_RNA (1)...(19): siRNA sense strand
ggaaacacgcuggagaaga

SEQ ID NO: 1109473 - RNA, 19 nt, Homo sapiens
  misc_RNA (1)...(19): siRNA sense strand
acaauguccucuuccauca

SEQ ID NO: 1109474 - RNA, 19 nt, Homo sapiens
  misc_RNA (1)...(19): siRNA sense strand
gauaagaagcugaaaucca

SEQ ID NO: 1109475 - RNA, 19 nt, Homo sapiens
  misc_RNA (1)...(19): siRNA sense strand
ccgaguugcuagcgaagaa

SEQ ID NO: 1109476 - RNA, 19 nt, Homo sapiens
  misc_RNA (1)...(19): siRNA sense strand
gcagacaagugugaagaac

SEQ ID NO: 1109477 - RNA, 19 nt, Homo sapiens
  misc_RNA (1)...(19): siRNA sense strand
gugauccacuguaauaguc

SEQ ID NO: 1109478 - RNA, 19 nt, Homo sapiens
  misc_RNA (1)...(19): siRNA sense strand
aauguccucuuccaucaaa

SEQ ID NO: 1109479 - RNA, 19 nt, Homo sapiens
  misc_RNA (1)...(19): siRNA sense strand
gaugauaagaagcugaaau

SEQ ID NO: 1109480 - RNA, 19 nt, Homo sapiens
  misc_RNA (1)...(19): siRNA sense strand
cagaagaagccuguaucua

SEQ ID NO: 1109481 - RNA, 19 nt, Homo sapiens
  misc_RNA (1)...(19): siRNA sense strand
gcuaaaaggagucaccaua

SEQ ID NO: 1109482 - RNA, 19 nt, Homo sapiens
  misc_RNA (1)...(19): siRNA sense strand
ggcccuggcugaugauaag

SEQ ID NO: 1109483 - RNA, 19 nt, Homo sapiens
  misc_RNA (1)...(19): siRNA sense strand
uuugugauccacuguaaua

SEQ ID NO: 1109484 - RNA, 19 nt, Homo sapiens
  misc_RNA (1)...(19): siRNA sense strand
ccaagucuccaucccagaa

SEQ ID NO: 1109485 - RNA, 19 nt, Homo sapiens
  misc_RNA (1)...(19): siRNA sense strand
acaguccucuccaccaaga

SEQ ID NO: 1109486 - RNA, 19 nt, Homo sapiens
  misc_RNA (1)...(19): siRNA sense strand
gcagcgagagacaacaaga

SEQ ID NO: 1109487 - RNA, 19 nt, Homo sapiens
  misc_RNA (1)...(19): siRNA sense strand
ugaaucagcugcuaaaagg

SEQ ID NO: 1109488 - RNA, 19 nt, Homo sapiens
  misc_RNA (1)...(19): siRNA sense strand
gcgagaguauaggcaucua

SEQ ID NO: 1109489 - RNA, 19 nt, Homo sapiens
  misc_RNA (1)...(19): siRNA sense strand
aagcugaaauccauugcau

SEQ ID NO: 1109490 - RNA, 19 nt, Homo sapiens
  misc_RNA (1)...(19): siRNA sense strand
uaggaaacacgcuggagaa

SEQ ID NO: 1109491 - RNA, 19 nt, Homo sapiens
  misc_RNA (1)...(19): siRNA sense strand
ggccaucuccaguuacuuc

SEQ ID NO: 1109492 - RNA, 19 nt, Homo sapiens
  misc_RNA (1)...(19): siRNA sense strand
gcaaugcagcgagagacaa

SEQ ID NO: 1109493 - RNA, 19 nt, Homo sapiens
  misc_RNA (1)...(19): siRNA sense strand
guuggaagccaucaucaca

SEQ ID NO: 1109494 - RNA, 19 nt, Homo sapiens
  misc_RNA (1)...(19): siRNA sense strand
caagcuggacgccaacuag

SEQ ID NO: 1109495 - RNA, 19 nt, Homo sapiens
  misc_RNA (1)...(19): siRNA sense strand
cagcgagagacaacaagaa

SEQ ID NO: 1109496 - RNA, 19 nt, Homo sapiens
  misc_RNA (1)...(19): siRNA sense strand
ccaaugaugaagagcugaa

SEQ ID NO: 1109497 - RNA, 19 nt, Homo sapiens
  misc_RNA (1)...(19): siRNA sense strand
agaaagguggcaaggaguu

SEQ ID NO: 1109498 - RNA, 19 nt, Homo sapiens
  misc_RNA (1)...(19): siRNA sense strand
gcagcggcaggaacgguuu

SEQ ID NO: 1109499 - RNA, 19 nt, Homo sapiens
  misc_RNA (1)...(19): siRNA sense strand
aguuugugauccacuguaa

SEQ ID NO: 1109500 - RNA, 19 nt, Homo sapiens
  misc_RNA (1)...(19): siRNA sense strand
gaaaguuggaagccaucau

SEQ ID NO: 1109501 - RNA, 19 nt, Homo sapiens
  misc_RNA (1)...(19): siRNA sense strand
ccagaagaagccuguaucu

SEQ ID NO: 1109502 - RNA, 19 nt, Homo sapiens
  misc_RNA (1)...(19): siRNA sense strand
gggauccaaaggaaaguug

SEQ ID NO: 1109503 - RNA, 19 nt, Homo sapiens
  misc_RNA (1)...(19): siRNA sense strand
uggcaaggaguuuguggaa

SEQ ID NO: 1109504 - RNA, 19 nt, Homo sapiens
  misc_RNA (1)...(19): siRNA sense strand
ugccaaagcaggagucauc

SEQ ID NO: 1109505 - RNA, 19 nt, Homo sapiens
  misc_RNA (1)...(19): siRNA sense strand
gaagcugaaauccauugca

SEQ ID NO: 1109506 - RNA, 19 nt, Homo sapiens
  misc_RNA (1)...(19): siRNA sense strand
gaagaagcggggauccaaa

SEQ ID NO: 1109507 - RNA, 19 nt, Homo sapiens
  misc_RNA (1)...(19): siRNA sense strand
aggcaucuaugugcaggaa

SEQ ID NO: 1109508 - RNA, 19 nt, Homo sapiens
  misc_RNA (1)...(19): siRNA sense strand
uaagaagcugaaauccauu

SEQ ID NO: 1109509 - RNA, 19 nt, Homo sapiens
  misc_RNA (1)...(19): siRNA sense strand
aaaguuggaagccaucauc

SEQ ID NO: 1109510 - RNA, 19 nt, Homo sapiens
  misc_RNA (1)...(19): siRNA sense strand
gaagaagccuguaucuaaa

SEQ ID NO: 1109511 - RNA, 19 nt, Homo sapiens
  misc_RNA (1)...(19): siRNA sense strand
gaaacacgcuggagaagaa

SEQ ID NO: 1109512 - RNA, 19 nt, Homo sapiens
  misc_RNA (1)...(19): siRNA sense strand
agaagaagccuguaucuaa

SEQ ID NO: 1109513 - RNA, 19 nt, Homo sapiens
  misc_RNA (1)...(19): siRNA sense strand
ugaaggccaucuccaguua

SEQ ID NO: 1109514 - RNA, 19 nt, Homo sapiens
  misc_RNA (1)...(19): siRNA sense strand
gaagcagggugaagucagu

SEQ ID NO: 1109515 - RNA, 19 nt, Homo sapiens
  misc_RNA (1)...(19): siRNA sense strand
ggaagaagaaguccaccaa

SEQ ID NO: 1109516 - RNA, 19 nt, Homo sapiens
  misc_RNA (1)...(19): siRNA sense strand
aagaagaaguccaccaaga

SEQ ID NO: 1109517 - RNA, 19 nt, Homo sapiens
  misc_RNA (1)...(19): siRNA sense strand
auaagaagcugaaauccau

SEQ ID NO: 1109518 - RNA, 19 nt, Homo sapiens
  misc_RNA (1)...(19): siRNA sense strand
gcaucuaugugcaggaaau

SEQ ID NO: 1109519 - RNA, 19 nt, Homo sapiens
  misc_RNA (1)...(19): siRNA sense strand
ggagcuggcuggcaaugca

SEQ ID NO: 1109520 - RNA, 19 nt, Homo sapiens
  misc_RNA (1)...(19): siRNA sense strand
ucacaguccucuccaccaa

SEQ ID NO: 1109521 - RNA, 19 nt, Homo sapiens
  misc_RNA (1)...(19): siRNA sense strand
gaaagguggcaaggaguuu

SEQ ID NO: 1109522 - RNA, 19 nt, Homo sapiens
  misc_RNA (1)...(19): siRNA sense strand
gcuuggcccuggcugauga

SEQ ID NO: 1109523 - RNA, 19 nt, Homo sapiens
  misc_RNA (1)...(19): siRNA sense strand
ggaaacacgcuggagaaga

SEQ ID NO: 1109524 - RNA, 19 nt, Homo sapiens
  misc_RNA (1)...(19): siRNA sense strand
acaauguccucuuccauca

SEQ ID NO: 1109525 - RNA, 19 nt, Homo sapiens
  misc_RNA (1)...(19): siRNA sense strand
gauaagaagcugaaaucca

SEQ ID NO: 1109526 - RNA, 19 nt, Homo sapiens
  misc_RNA (1)...(19): siRNA sense strand
ccgaguugcuagcgaagaa

SEQ ID NO: 1109527 - RNA, 19 nt, Homo sapiens
  misc_RNA (1)...(19): siRNA sense strand
gcagacaagugugaagaac

SEQ ID NO: 1109528 - RNA, 19 nt, Homo sapiens
  misc_RNA (1)...(19): siRNA sense strand
gugauccacuguaauaguc

SEQ ID NO: 1109529 - RNA, 19 nt, Homo sapiens
  misc_RNA (1)...(19): siRNA sense strand
aauguccucuuccaucaaa

SEQ ID NO: 1109530 - RNA, 19 nt, Homo sapiens
  misc_RNA (1)...(19): siRNA sense strand
gaugauaagaagcugaaau

SEQ ID NO: 1109531 - RNA, 19 nt, Homo sapiens
  misc_RNA (1)...(19): siRNA sense strand
cagaagaagccuguaucua

SEQ ID NO: 1109532 - RNA, 19 nt, Homo sapiens
  misc_RNA (1)...(19): siRNA sense strand
gcuaaaaggagucaccaua

SEQ ID NO: 1109533 - RNA, 19 nt, Homo sapiens
  misc_RNA (1)...(19): siRNA sense strand
ggcccuggcugaugauaag

SEQ ID NO: 1109534 - RNA, 19 nt, Homo sapiens
  misc_RNA (1)...(19): siRNA sense strand
uuugugauccacuguaaua

SEQ ID NO: 1109535 - RNA, 19 nt, Homo sapiens
  misc_RNA (1)...(19): siRNA sense strand
ccaagucuccaucccagaa

SEQ ID NO: 1109536 - RNA, 19 nt, Homo sapiens
  misc_RNA (1)...(19): siRNA sense strand
acaguccucuccaccaaga

SEQ ID NO: 1109537 - RNA, 19 nt, Homo sapiens
  misc_RNA (1)...(19): siRNA sense strand
gcagcgagagacaacaaga

SEQ ID NO: 1109538 - RNA, 19 nt, Homo sapiens
  misc_RNA (1)...(19): siRNA sense strand
ugaaucagcugcuaaaagg

SEQ ID NO: 1109539 - RNA, 19 nt, Homo sapiens
  misc_RNA (1)...(19): siRNA sense strand
gcgagaguauaggcaucua

SEQ ID NO: 1109540 - RNA, 19 nt, Homo sapiens
  misc_RNA (1)...(19): siRNA sense strand
aagcugaaauccauugcau

SEQ ID NO: 1109541 - RNA, 19 nt, Homo sapiens
  misc_RNA (1)...(19): siRNA sense strand
uaggaaacacgcuggagaa

SEQ ID NO: 1109542 - RNA, 19 nt, Homo sapiens
  misc_RNA (1)...(19): siRNA sense strand
ggccaucuccaguuacuuc

SEQ ID NO: 1109543 - RNA, 19 nt, Homo sapiens
  misc_RNA (1)...(19): siRNA sense strand
gcaaugcagcgagagacaa

SEQ ID NO: 1109544 - RNA, 19 nt, Homo sapiens
  misc_RNA (1)...(19): siRNA sense strand
guuggaagccaucaucaca

SEQ ID NO: 1109545 - RNA, 19 nt, Homo sapiens
  misc_RNA (1)...(19): siRNA sense strand
caagcuggacgccaacuag

SEQ ID NO: 1109546 - RNA, 19 nt, Homo sapiens
  misc_RNA (1)...(19): siRNA sense strand
cagcgagagacaacaagaa

SEQ ID NO: 1109547 - RNA, 19 nt, Homo sapiens
  misc_RNA (1)...(19): siRNA sense strand
ccaaugaugaagagcugaa

SEQ ID NO: 1109548 - RNA, 19 nt, Homo sapiens
  misc_RNA (1)...(19): siRNA sense strand
agaaagguggcaaggaguu

SEQ ID NO: 1109549 - RNA, 19 nt, Homo sapiens
  misc_RNA (1)...(19): siRNA sense strand
gcagcggcaggaacgguuu

SEQ ID NO: 1109550 - RNA, 19 nt, Homo sapiens
  misc_RNA (1)...(19): siRNA sense strand
aguuugugauccacuguaa

SEQ ID NO: 1109551 - RNA, 19 nt, Homo sapiens
  misc_RNA (1)...(19): siRNA sense strand
gaaaguuggaagccaucau

SEQ ID NO: 1109552 - RNA, 19 nt, Homo sapiens
  misc_RNA (1)...(19): siRNA sense strand
ccagaagaagccuguaucu

SEQ ID NO: 1109553 - RNA, 19 nt, Homo sapiens
  misc_RNA (1)...(19): siRNA sense strand
gggauccaaaggaaaguug

SEQ ID NO: 1109554 - RNA, 19 nt, Homo sapiens
  misc_RNA (1)...(19): siRNA sense strand
uggcaaggaguuuguggaa

SEQ ID NO: 1109555 - RNA, 19 nt, Homo sapiens
  misc_RNA (1)...(19): siRNA sense strand
ugccaaagcaggagucauc

SEQ ID NO: 1109556 - RNA, 19 nt, Homo sapiens
  misc_RNA (1)...(19): siRNA sense strand
gaagcugaaauccauugca

SEQ ID NO: 1109557 - RNA, 19 nt, Homo sapiens
  misc_RNA (1)...(19): siRNA sense strand
gaagaagcggggauccaaa

SEQ ID NO: 1109558 - RNA, 19 nt, Homo sapiens
  misc_RNA (1)...(19): siRNA sense strand
aggcaucuaugugcaggaa

SEQ ID NO: 1109559 - RNA, 19 nt, Homo sapiens
  misc_RNA (1)...(19): siRNA sense strand
uaagaagcugaaauccauu

SEQ ID NO: 1109560 - RNA, 19 nt, Homo sapiens
  misc_RNA (1)...(19): siRNA sense strand
aaaguuggaagccaucauc

SEQ ID NO: 1109561 - RNA, 19 nt, Homo sapiens
  misc_RNA (1)...(19): siRNA sense strand
ggacaccaauccacucuuu

SEQ ID NO: 1109562 - RNA, 19 nt, Homo sapiens
  misc_RNA (1)...(19): siRNA sense strand
ggaugaggauucagauauu

SEQ ID NO: 1109563 - RNA, 19 nt, Homo sapiens
  misc_RNA (1)...(19): siRNA sense strand
gugcaagugucgagagaua

SEQ ID NO: 1109564 - RNA, 19 nt, Homo sapiens
  misc_RNA (1)...(19): siRNA sense strand
gaugaggauucagauauug

SEQ ID NO: 1109565 - RNA, 19 nt, Homo sapiens
  misc_RNA (1)...(19): siRNA sense strand
gauaaaggucaauggcaua

SEQ ID NO: 1109566 - RNA, 19 nt, Homo sapiens
  misc_RNA (1)...(19): siRNA sense strand
gcagguggauuucuacacu

SEQ ID NO: 1109567 - RNA, 19 nt, Homo sapiens
  misc_RNA (1)...(19): siRNA sense strand
ugacauggaugaggauuca

SEQ ID NO: 1109568 - RNA, 19 nt, Homo sapiens
  misc_RNA (1)...(19): siRNA sense strand
cagacuacgugcccuuuga

SEQ ID NO: 1109569 - RNA, 19 nt, Homo sapiens
  misc_RNA (1)...(19): siRNA sense strand
gcaucuacguacauuacaa

SEQ ID NO: 1109570 - RNA, 19 nt, Homo sapiens
  misc_RNA (1)...(19): siRNA sense strand
acaaacugccugugucuuu

SEQ ID NO: 1109571 - RNA, 19 nt, Homo sapiens
  misc_RNA (1)...(19): siRNA sense strand
gauauugccuuccguuucc

SEQ ID NO: 1109572 - RNA, 19 nt, Homo sapiens
  misc_RNA (1)...(19): siRNA sense strand
aauuugagcugugcaucua

SEQ ID NO: 1109573 - RNA, 19 nt, Homo sapiens
  misc_RNA (1)...(19): siRNA sense strand
ccaauccacucuuuuauca

SEQ ID NO: 1109574 - RNA, 19 nt, Homo sapiens
  misc_RNA (1)...(19): siRNA sense strand
caaugaguaugagauaaag

SEQ ID NO: 1109575 - RNA, 19 nt, Homo sapiens
  misc_RNA (1)...(19): siRNA sense strand
gcaagugucgagagauauc

SEQ ID NO: 1109576 - RNA, 19 nt, Homo sapiens
  misc_RNA (1)...(19): siRNA sense strand
cauacgcauuuacggcuuu

SEQ ID NO: 1109577 - RNA, 19 nt, Homo sapiens
  misc_RNA (1)...(19): siRNA sense strand
ucgaaucccgccaucauuu

SEQ ID NO: 1109578 - RNA, 19 nt, Homo sapiens
  misc_RNA (1)...(19): siRNA sense strand
cgagugcacuuuggcaauc

SEQ ID NO: 1109579 - RNA, 19 nt, Homo sapiens
  misc_RNA (1)...(19): siRNA sense strand
ugaggauggcaaacaauuu

SEQ ID NO: 1109580 - RNA, 19 nt, Homo sapiens
  misc_RNA (1)...(19): siRNA sense strand
guugguuccugcgugauaa

SEQ ID NO: 1109581 - RNA, 19 nt, Homo sapiens
  misc_RNA (1)...(19): siRNA sense strand
gcacuuuggcaaucaugug

SEQ ID NO: 1109582 - RNA, 19 nt, Homo sapiens
  misc_RNA (1)...(19): siRNA sense strand
caugaacaggcgugaguuu

SEQ ID NO: 1109583 - RNA, 19 nt, Homo sapiens
  misc_RNA (1)...(19): siRNA sense strand
uggaugaggauucagauau

SEQ ID NO: 1109584 - RNA, 19 nt, Homo sapiens
  misc_RNA (1)...(19): siRNA sense strand
aguaugagauaaaggucaa

SEQ ID NO: 1109585 - RNA, 19 nt, Homo sapiens
  misc_RNA (1)...(19): siRNA sense strand
gugaagauggugcaagugu

SEQ ID NO: 1109586 - RNA, 19 nt, Homo sapiens
  misc_RNA (1)...(19): siRNA sense strand
cgaaucccgccaucauuug

SEQ ID NO: 1109587 - RNA, 19 nt, Homo sapiens
  misc_RNA (1)...(19): siRNA sense strand
gaaucccgccaucauuugu

SEQ ID NO: 1109588 - RNA, 19 nt, Homo sapiens
  misc_RNA (1)...(19): siRNA sense strand
ggauuucuacacugacaug

SEQ ID NO: 1109589 - RNA, 19 nt, Homo sapiens
  misc_RNA (1)...(19): siRNA sense strand
cagugugugucugcaauug

SEQ ID NO: 1109590 - RNA, 19 nt, Homo sapiens
  misc_RNA (1)...(19): siRNA sense strand
caucgaaucccgccaucau

SEQ ID NO: 1109591 - RNA, 19 nt, Homo sapiens
  misc_RNA (1)...(19): siRNA sense strand
ggcgugaguuugggauaug

SEQ ID NO: 1109592 - RNA, 19 nt, Homo sapiens
  misc_RNA (1)...(19): siRNA sense strand
uuucuacacugacauggau

SEQ ID NO: 1109593 - RNA, 19 nt, Homo sapiens
  misc_RNA (1)...(19): siRNA sense strand
guggauuucuacacugaca

SEQ ID NO: 1109594 - RNA, 19 nt, Homo sapiens
  misc_RNA (1)...(19): siRNA sense strand
cgccaucauuugugaagau

SEQ ID NO: 1109595 - RNA, 19 nt, Homo sapiens
  misc_RNA (1)...(19): siRNA sense strand
cagauauugccuuccguuu

SEQ ID NO: 1109596 - RNA, 19 nt, Homo sapiens
  misc_RNA (1)...(19): siRNA sense strand
uggaggagacaacagacua

SEQ ID NO: 1109597 - RNA, 19 nt, Homo sapiens
  misc_RNA (1)...(19): siRNA sense strand
gagugcacuuuggcaauca

SEQ ID NO: 1109598 - RNA, 19 nt, Homo sapiens
  misc_RNA (1)...(19): siRNA sense strand
acaccaauccacucuuuua

SEQ ID NO: 1109599 - RNA, 19 nt, Homo sapiens
  misc_RNA (1)...(19): siRNA sense strand
ccauacaaacugccugugu

SEQ ID NO: 1109600 - RNA, 19 nt, Homo sapiens
  misc_RNA (1)...(19): siRNA sense strand
cuacgugcccuuugaggau

SEQ ID NO: 1109601 - RNA, 19 nt, Homo sapiens
  misc_RNA (1)...(19): siRNA sense strand
gaguuugggauauggaugu

SEQ ID NO: 1109602 - RNA, 19 nt, Homo sapiens
  misc_RNA (1)...(19): siRNA sense strand
ggaggagacaacagacuac

SEQ ID NO: 1109603 - RNA, 19 nt, Homo sapiens
  misc_RNA (1)...(19): siRNA sense strand
caucuacguacauuacaau

SEQ ID NO: 1109604 - RNA, 19 nt, Homo sapiens
  misc_RNA (1)...(19): siRNA sense strand
gugcaucuacguacauuac

SEQ ID NO: 1109605 - RNA, 19 nt, Homo sapiens
  misc_RNA (1)...(19): siRNA sense strand
gaacugaagcucauaauua

SEQ ID NO: 1109606 - RNA, 19 nt, Homo sapiens
  misc_RNA (1)...(19): siRNA sense strand
gcugaacucuuagaaauua

SEQ ID NO: 1109607 - RNA, 19 nt, Homo sapiens
  misc_RNA (1)...(19): siRNA sense strand
gaaaugauguccaauccuu

SEQ ID NO: 1109608 - RNA, 19 nt, Homo sapiens
  misc_RNA (1)...(19): siRNA sense strand
ggaaaacacucuaaacaua

SEQ ID NO: 1109609 - RNA, 19 nt, Homo sapiens
  misc_RNA (1)...(19): siRNA sense strand
ucagcaaacucaauucuua

SEQ ID NO: 1109610 - RNA, 19 nt, Homo sapiens
  misc_RNA (1)...(19): siRNA sense strand
ugagaaaggugacauugua

SEQ ID NO: 1109611 - RNA, 19 nt, Homo sapiens
  misc_RNA (1)...(19): siRNA sense strand
gagcugaacucuuagaaau

SEQ ID NO: 1109612 - RNA, 19 nt, Homo sapiens
  misc_RNA (1)...(19): siRNA sense strand
gaacagaccagcaccagaa

SEQ ID NO: 1109613 - RNA, 19 nt, Homo sapiens
  misc_RNA (1)...(19): siRNA sense strand
agaaaucucuccugaacua

SEQ ID NO: 1109614 - RNA, 19 nt, Homo sapiens
  misc_RNA (1)...(19): siRNA sense strand
gaaacaauccugagguauu

SEQ ID NO: 1109615 - RNA, 19 nt, Homo sapiens
  misc_RNA (1)...(19): siRNA sense strand
gcacacagguccacaagca

SEQ ID NO: 1109616 - RNA, 19 nt, Homo sapiens
  misc_RNA (1)...(19): siRNA sense strand
uaucaaggaucuaaccuaa

SEQ ID NO: 1109617 - RNA, 19 nt, Homo sapiens
  misc_RNA (1)...(19): siRNA sense strand
aaacgugccugucauagaa

SEQ ID NO: 1109618 - RNA, 19 nt, Homo sapiens
  misc_RNA (1)...(19): siRNA sense strand
ccacaacucucgaagucua

SEQ ID NO: 1109619 - RNA, 19 nt, Homo sapiens
  misc_RNA (1)...(19): siRNA sense strand
uauucgagcugaacucuua

SEQ ID NO: 1109620 - RNA, 19 nt, Homo sapiens
  misc_RNA (1)...(19): siRNA sense strand
gaacugcuguaccaacgaa

SEQ ID NO: 1109621 - RNA, 19 nt, Homo sapiens
  misc_RNA (1)...(19): siRNA sense strand
cauugcaacugauguguua

SEQ ID NO: 1109622 - RNA, 19 nt, Homo sapiens
  misc_RNA (1)...(19): siRNA sense strand
gaagagugguguuaacuac

SEQ ID NO: 1109623 - RNA, 19 nt, Homo sapiens
  misc_RNA (1)...(19): siRNA sense strand
uaacauuggucaugagguu

SEQ ID NO: 1109624 - RNA, 19 nt, Homo sapiens
  misc_RNA (1)...(19): siRNA sense strand
gaaucgagcuucccuaugc

SEQ ID NO: 1109625 - RNA, 19 nt, Homo sapiens
  misc_RNA (1)...(19): siRNA sense strand
gagcaacucagucagauuu

SEQ ID NO: 1109626 - RNA, 19 nt, Homo sapiens
  misc_RNA (1)...(19): siRNA sense strand
gaaacugucuaucaaggau

SEQ ID NO: 1109627 - RNA, 19 nt, Homo sapiens
  misc_RNA (1)...(19): siRNA sense strand
ccuguacacugaagaauuu

SEQ ID NO: 1109628 - RNA, 19 nt, Homo sapiens
  misc_RNA (1)...(19): siRNA sense strand
aaagaagcauugcaacuga

SEQ ID NO: 1109629 - RNA, 19 nt, Homo sapiens
  misc_RNA (1)...(19): siRNA sense strand
acacaacucugaauucuag

SEQ ID NO: 1109630 - RNA, 19 nt, Homo sapiens
  misc_RNA (1)...(19): siRNA sense strand
aaagagaaaugauguccaa

SEQ ID NO: 1109631 - RNA, 19 nt, Homo sapiens
  misc_RNA (1)...(19): siRNA sense strand
gaacaacuacaucaggauu

SEQ ID NO: 1109632 - RNA, 19 nt, Homo sapiens
  misc_RNA (1)...(19): siRNA sense strand
gguaacagcuccaaauugc

SEQ ID NO: 1109633 - RNA, 19 nt, Homo sapiens
  misc_RNA (1)...(19): siRNA sense strand
gaauuugacuguguagaug

SEQ ID NO: 1109634 - RNA, 19 nt, Homo sapiens
  misc_RNA (1)...(19): siRNA sense strand
uggcagcacuggauaauga

SEQ ID NO: 1109635 - RNA, 19 nt, Homo sapiens
  misc_RNA (1)...(19): siRNA sense strand
gaaagaagcauugcaacug

SEQ ID NO: 1109636 - RNA, 19 nt, Homo sapiens
  misc_RNA (1)...(19): siRNA sense strand
gaacagcaaaugugugaga

SEQ ID NO: 1109637 - RNA, 19 nt, Homo sapiens
  misc_RNA (1)...(19): siRNA sense strand
gaaaaguggugucgugauu

SEQ ID NO: 1109638 - RNA, 19 nt, Homo sapiens
  misc_RNA (1)...(19): siRNA sense strand
gagaaagucugugaaacug

SEQ ID NO: 1109639 - RNA, 19 nt, Homo sapiens
  misc_RNA (1)...(19): siRNA sense strand
cggaugaaauggauguuaa

SEQ ID NO: 1109640 - RNA, 19 nt, Homo sapiens
  misc_RNA (1)...(19): siRNA sense strand
gcagauugcucgggauguu

SEQ ID NO: 1109641 - RNA, 19 nt, Homo sapiens
  misc_RNA (1)...(19): siRNA sense strand
uggaucagguaacuacuua

SEQ ID NO: 1109642 - RNA, 19 nt, Homo sapiens
  misc_RNA (1)...(19): siRNA sense strand
gcaggaagccaaccuaaca

SEQ ID NO: 1109643 - RNA, 19 nt, Homo sapiens
  misc_RNA (1)...(19): siRNA sense strand
ggauaaugauggaaaucuu

SEQ ID NO: 1109644 - RNA, 19 nt, Homo sapiens
  misc_RNA (1)...(19): siRNA sense strand
gaaacgugccugucauaga

SEQ ID NO: 1109645 - RNA, 19 nt, Homo sapiens
  misc_RNA (1)...(19): siRNA sense strand
gcaaguaguggaucaccua

SEQ ID NO: 1109646 - RNA, 19 nt, Homo sapiens
  misc_RNA (1)...(19): siRNA sense strand
cagaauggcagauguuauu

SEQ ID NO: 1109647 - RNA, 19 nt, Homo sapiens
  misc_RNA (1)...(19): siRNA sense strand
gugaggauuuggaacuuaa

SEQ ID NO: 1109648 - RNA, 19 nt, Homo sapiens
  misc_RNA (1)...(19): siRNA sense strand
gaaauuaucaagcgaaucg

SEQ ID NO: 1109649 - RNA, 19 nt, Homo sapiens
  misc_RNA (1)...(19): siRNA sense strand
caaacucgcucgucaugca

SEQ ID NO: 1109650 - RNA, 19 nt, Homo sapiens
  misc_RNA (1)...(19): siRNA sense strand
gaccagaacugaagcucau

SEQ ID NO: 1109651 - RNA, 19 nt, Homo sapiens
  misc_RNA (1)...(19): siRNA sense strand
ucaaggaucuaaccuaaac

SEQ ID NO: 1109652 - RNA, 19 nt, Homo sapiens
  misc_RNA (1)...(19): siRNA sense strand
caaagaagagugguguuaa

SEQ ID NO: 1109653 - RNA, 19 nt, Homo sapiens
  misc_RNA (1)...(19): siRNA sense strand
ucaaagaagagugguguua

SEQ ID NO: 1109654 - RNA, 19 nt, Homo sapiens
  misc_RNA (1)...(19): siRNA sense strand
aaacccagaucuuggagaa

SEQ ID NO: 1109655 - RNA, 19 nt, Homo sapiens
  misc_RNA (1)...(19): siRNA sense strand
gaacuuaaccccuuugaug

SEQ ID NO: 1109656 - RNA, 19 nt, Homo sapiens
  misc_RNA (1)...(19): siRNA sense strand
uagaugaagugcuaacaau

SEQ ID NO: 1109657 - RNA, 19 nt, Homo sapiens
  misc_RNA (1)...(19): siRNA sense strand
gaccagcaccagaaaguuu

SEQ ID NO: 1109658 - RNA, 19 nt, Homo sapiens
  misc_RNA (1)...(19): siRNA sense strand
ccaaguuuaucaaagaaga

SEQ ID NO: 1109659 - RNA, 19 nt, Homo sapiens
  misc_RNA (1)...(19): siRNA sense strand
gaugcuaaaugugguaaga

SEQ ID NO: 1109660 - RNA, 19 nt, Homo sapiens
  misc_RNA (1)...(19): siRNA sense strand
uuacaaggcuuaccaagac

SEQ ID NO: 1109661 - RNA, 19 nt, Homo sapiens
  misc_RNA (1)...(19): siRNA sense strand
guacaacccgagaauaaga

SEQ ID NO: 1109662 - RNA, 19 nt, Homo sapiens
  misc_RNA (1)...(19): siRNA sense strand
agagugguguuaacuacua

SEQ ID NO: 1109663 - RNA, 19 nt, Homo sapiens
  misc_RNA (1)...(19): siRNA sense strand
gcaggcauuggaagacuua

SEQ ID NO: 1109664 - RNA, 19 nt, Homo sapiens
  misc_RNA (1)...(19): siRNA sense strand
gagaaaugauguccaaucc

SEQ ID NO: 1109665 - RNA, 19 nt, Homo sapiens
  misc_RNA (1)...(19): siRNA sense strand
aaucucuccugaacuauuu

SEQ ID NO: 1109666 - RNA, 19 nt, Homo sapiens
  misc_RNA (1)...(19): siRNA sense strand
guauuguacugaugauaug

SEQ ID NO: 1109667 - RNA, 19 nt, Homo sapiens
  misc_RNA (1)...(19): siRNA sense strand
ugucaacaaugaauaagga

SEQ ID NO: 1109668 - RNA, 19 nt, Homo sapiens
  misc_RNA (1)...(19): siRNA sense strand
ccauauucaucacguuauu

SEQ ID NO: 1109669 - RNA, 19 nt, Homo sapiens
  misc_RNA (1)...(19): siRNA sense strand
gaauaaggaacagcaaaug

SEQ ID NO: 1109670 - RNA, 19 nt, Homo sapiens
  misc_RNA (1)...(19): siRNA sense strand
gaaaguaaggacauucuac

SEQ ID NO: 1109671 - RNA, 19 nt, Homo sapiens
  misc_RNA (1)...(19): siRNA sense strand
ucagguaacuacuuaaugc

SEQ ID NO: 1109672 - RNA, 19 nt, Homo sapiens
  misc_RNA (1)...(19): siRNA sense strand
caagacacaacucugaauu

SEQ ID NO: 1109673 - RNA, 19 nt, Homo sapiens
  misc_RNA (1)...(19): siRNA sense strand
ccaaauugcuuuucacaug

SEQ ID NO: 1109674 - RNA, 19 nt, Homo sapiens
  misc_RNA (1)...(19): siRNA sense strand
gaauuuggaaucaucaugu

SEQ ID NO: 1109675 - RNA, 19 nt, Homo sapiens
  misc_RNA (1)...(19): siRNA sense strand
acgaaacaauccugaggua

SEQ ID NO: 1109676 - RNA, 19 nt, Homo sapiens
  misc_RNA (1)...(19): siRNA sense strand
guaaucugccuccuaguga

SEQ ID NO: 1109677 - RNA, 19 nt, Homo sapiens
  misc_RNA (1)...(19): siRNA sense strand
ggaaucaucaugucagagu

SEQ ID NO: 1109678 - RNA, 19 nt, Homo sapiens
  misc_RNA (1)...(19): siRNA sense strand
guguacaacccgagaauaa

SEQ ID NO: 1109679 - RNA, 19 nt, Homo sapiens
  misc_RNA (1)...(19): siRNA sense strand
cgccuuaucuuugaaauuc

SEQ ID NO: 1109680 - RNA, 19 nt, Homo sapiens
  misc_RNA (1)...(19): siRNA sense strand
gguauuguacugaugauau

SEQ ID NO: 1109681 - RNA, 19 nt, Homo sapiens
  misc_RNA (1)...(19): siRNA sense strand
acuuaaugcugacacauaa

SEQ ID NO: 1109682 - RNA, 19 nt, Homo sapiens
  misc_RNA (1)...(19): siRNA sense strand
uaacagcuccaaauugcuu

SEQ ID NO: 1109683 - RNA, 19 nt, Homo sapiens
  misc_RNA (1)...(19): siRNA sense strand
gcaacucagucagauuugu

SEQ ID NO: 1109684 - RNA, 19 nt, Homo sapiens
  misc_RNA (1)...(19): siRNA sense strand
gaugauaugcugcaaagag

SEQ ID NO: 1109685 - RNA, 19 nt, Homo sapiens
  misc_RNA (1)...(19): siRNA sense strand
gacgugcccugaaacugaa

SEQ ID NO: 1109686 - RNA, 19 nt, Homo sapiens
  misc_RNA (1)...(19): siRNA sense strand
ugugagacgugcccugaaa

SEQ ID NO: 1109687 - RNA, 19 nt, Homo sapiens
  misc_RNA (1)...(19): siRNA sense strand
guuacucaaucaccaagaa

SEQ ID NO: 1109688 - RNA, 19 nt, Homo sapiens
  misc_RNA (1)...(19): siRNA sense strand
gaucagguaacuacuuaau

SEQ ID NO: 1109689 - RNA, 19 nt, Homo sapiens
  misc_RNA (1)...(19): siRNA sense strand
gaaucaucaugucagaguu

SEQ ID NO: 1109690 - RNA, 19 nt, Homo sapiens
  misc_RNA (1)...(19): siRNA sense strand
gaagccaaccuaacaagca

SEQ ID NO: 1109691 - RNA, 19 nt, Homo sapiens
  misc_RNA (1)...(19): siRNA sense strand
gauaugcugcaaagagaaa

SEQ ID NO: 1109692 - RNA, 19 nt, Homo sapiens
  misc_RNA (1)...(19): siRNA sense strand
uaaacacccuguggagguu

SEQ ID NO: 1109693 - RNA, 19 nt, Homo sapiens
  misc_RNA (1)...(19): siRNA sense strand
gcugguaccacaauacuau

SEQ ID NO: 1109694 - RNA, 19 nt, Homo sapiens
  misc_RNA (1)...(19): siRNA sense strand
gaaaggugacauuguaguc

SEQ ID NO: 1109695 - RNA, 19 nt, Homo sapiens
  misc_RNA (1)...(19): siRNA sense strand
gaguggguccucuuccaua

SEQ ID NO: 1109696 - RNA, 19 nt, Homo sapiens
  misc_RNA (1)...(19): siRNA sense strand
ccaaacucuuccucugaaa

SEQ ID NO: 1109697 - RNA, 19 nt, Homo sapiens
  misc_RNA (1)...(19): siRNA sense strand
cauuggaagacuuagauua

SEQ ID NO: 1109698 - RNA, 19 nt, Homo sapiens
  misc_RNA (1)...(19): siRNA sense strand
gagauacgcaagcagauuc

SEQ ID NO: 1109699 - RNA, 19 nt, Homo sapiens
  misc_RNA (1)...(19): siRNA sense strand
ucagauuuguuaucgaugu

SEQ ID NO: 1109700 - RNA, 19 nt, Homo sapiens
  misc_RNA (1)...(19): siRNA sense strand
gccacucgaugaaacagaa

SEQ ID NO: 1109701 - RNA, 19 nt, Homo sapiens
  misc_RNA (1)...(19): siRNA sense strand
cgaaggagaucacuuuacc

SEQ ID NO: 1109702 - RNA, 19 nt, Homo sapiens
  misc_RNA (1)...(19): siRNA sense strand
caacaaugaauaaggaaca

SEQ ID NO: 1109703 - RNA, 19 nt, Homo sapiens
  misc_RNA (1)...(19): siRNA sense strand
guggugugcugaauauugu

SEQ ID NO: 1109704 - RNA, 19 nt, Homo sapiens
  misc_RNA (1)...(19): siRNA sense strand
agacacaacucugaauucu

SEQ ID NO: 1109705 - RNA, 19 nt, Homo sapiens
  misc_RNA (1)...(19): siRNA sense strand
gcacggaugucacugagua

SEQ ID NO: 1109706 - RNA, 19 nt, Homo sapiens
  misc_RNA (1)...(19): siRNA sense strand
gugaggagaucgagaagaa

SEQ ID NO: 1109707 - RNA, 19 nt, Homo sapiens
  misc_RNA (1)...(19): siRNA sense strand
caccaaggaugcugucuau

SEQ ID NO: 1109708 - RNA, 19 nt, Homo sapiens
  misc_RNA (1)...(19): siRNA sense strand
gaucgaggcucugagaaag

SEQ ID NO: 1109709 - RNA, 19 nt, Homo sapiens
  misc_RNA (1)...(19): siRNA sense strand
cagauucaagucucaaaua

SEQ ID NO: 1109710 - RNA, 19 nt, Homo sapiens
  misc_RNA (1)...(19): siRNA sense strand
gaccguacguccaacuuca

SEQ ID NO: 1109711 - RNA, 19 nt, Homo sapiens
  misc_RNA (1)...(19): siRNA sense strand
ggaucgaggcucugagaaa

SEQ ID NO: 1109712 - RNA, 19 nt, Homo sapiens
  misc_RNA (1)...(19): siRNA sense strand
gguuugugcugacagauuc

SEQ ID NO: 1109713 - RNA, 19 nt, Homo sapiens
  misc_RNA (1)...(19): siRNA sense strand
ccaaggaugcugucuauac

SEQ ID NO: 1109714 - RNA, 19 nt, Homo sapiens
  misc_RNA (1)...(19): siRNA sense strand
ggaggcagaugagcuggau

SEQ ID NO: 1109715 - RNA, 19 nt, Homo sapiens
  misc_RNA (1)...(19): siRNA sense strand
gaaggagguucaggcucuu

SEQ ID NO: 1109716 - RNA, 19 nt, Homo sapiens
  misc_RNA (1)...(19): siRNA sense strand
agaaagaccguacguccaa

SEQ ID NO: 1109717 - RNA, 19 nt, Homo sapiens
  misc_RNA (1)...(19): siRNA sense strand
ucacugcccugcucaacca

SEQ ID NO: 1109718 - RNA, 19 nt, Homo sapiens
  misc_RNA (1)...(19): siRNA sense strand
gaucugcucaacuucaaga

SEQ ID NO: 1109719 - RNA, 19 nt, Homo sapiens
  misc_RNA (1)...(19): siRNA sense strand
gaugcugucuauaccuugu

SEQ ID NO: 1109720 - RNA, 19 nt, Homo sapiens
  misc_RNA (1)...(19): siRNA sense strand
caacuauggcuuccagauc

SEQ ID NO: 1109721 - RNA, 19 nt, Homo sapiens
  misc_RNA (1)...(19): siRNA sense strand
gaggagaucgagaagaagu

SEQ ID NO: 1109722 - RNA, 19 nt, Homo sapiens
  misc_RNA (1)...(19): siRNA sense strand
gcaacuauggcuuccagau

SEQ ID NO: 1109723 - RNA, 19 nt, Homo sapiens
  misc_RNA (1)...(19): siRNA sense strand
cgcccgaucugcucaacuu

SEQ ID NO: 1109724 - RNA, 19 nt, Homo sapiens
  misc_RNA (1)...(19): siRNA sense strand
caaggaugcugucuauacc

SEQ ID NO: 1109725 - RNA, 19 nt, Homo sapiens
  misc_RNA (1)...(19): siRNA sense strand
acgaggcacuggagaagga

SEQ ID NO: 1109726 - RNA, 19 nt, Homo sapiens
  misc_RNA (1)...(19): siRNA sense strand
ugagcuggauggugagauc

SEQ ID NO: 1109727 - RNA, 19 nt, Homo sapiens
  misc_RNA (1)...(19): siRNA sense strand
ccgaucugcucaacuucaa

SEQ ID NO: 1109728 - RNA, 19 nt, Homo sapiens
  misc_RNA (1)...(19): siRNA sense strand
agggauggaugucgaucuu

SEQ ID NO: 1109729 - RNA, 19 nt, Homo sapiens
  misc_RNA (1)...(19): siRNA sense strand
gacagauucaagucucaaa

SEQ ID NO: 1109730 - RNA, 19 nt, Homo sapiens
  misc_RNA (1)...(19): siRNA sense strand
uuagugaggagaucgagaa

SEQ ID NO: 1109731 - RNA, 19 nt, Homo sapiens
  misc_RNA (1)...(19): siRNA sense strand
gcuuccagauccacaccaa

SEQ ID NO: 1109732 - RNA, 19 nt, Homo sapiens
  misc_RNA (1)...(19): siRNA sense strand
cagcaaaaccggcuuagug

SEQ ID NO: 1109733 - RNA, 19 nt, Homo sapiens
  misc_RNA (1)...(19): siRNA sense strand
acaccaaggaugcugucua

SEQ ID NO: 1109734 - RNA, 19 nt, Homo sapiens
  misc_RNA (1)...(19): siRNA sense strand
aggaugcugucuauaccuu

SEQ ID NO: 1109735 - RNA, 19 nt, Homo sapiens
  misc_RNA (1)...(19): siRNA sense strand
gcucucggacucuaacaag

SEQ ID NO: 1109736 - RNA, 19 nt, Homo sapiens
  misc_RNA (1)...(19): siRNA sense strand
gcacggaugucacugagua

SEQ ID NO: 1109737 - RNA, 19 nt, Homo sapiens
  misc_RNA (1)...(19): siRNA sense strand
gugaggagaucgagaagaa

SEQ ID NO: 1109738 - RNA, 19 nt, Homo sapiens
  misc_RNA (1)...(19): siRNA sense strand
caccaaggaugcugucuau

SEQ ID NO: 1109739 - RNA, 19 nt, Homo sapiens
  misc_RNA (1)...(19): siRNA sense strand
gaucgaggcucugagaaag

SEQ ID NO: 1109740 - RNA, 19 nt, Homo sapiens
  misc_RNA (1)...(19): siRNA sense strand
cagauucaagucucaaaua

SEQ ID NO: 1109741 - RNA, 19 nt, Homo sapiens
  misc_RNA (1)...(19): siRNA sense strand
gaccguacguccaacuuca

SEQ ID NO: 1109742 - RNA, 19 nt, Homo sapiens
  misc_RNA (1)...(19): siRNA sense strand
ggaucgaggcucugagaaa

SEQ ID NO: 1109743 - RNA, 19 nt, Homo sapiens
  misc_RNA (1)...(19): siRNA sense strand
gguuugugcugacagauuc

SEQ ID NO: 1109744 - RNA, 19 nt, Homo sapiens
  misc_RNA (1)...(19): siRNA sense strand
ccaaggaugcugucuauac

SEQ ID NO: 1109745 - RNA, 19 nt, Homo sapiens
  misc_RNA (1)...(19): siRNA sense strand
ggaggcagaugagcuggau

SEQ ID NO: 1109746 - RNA, 19 nt, Homo sapiens
  misc_RNA (1)...(19): siRNA sense strand
gaaggagguucaggcucuu

SEQ ID NO: 1109747 - RNA, 19 nt, Homo sapiens
  misc_RNA (1)...(19): siRNA sense strand
agaaagaccguacguccaa

SEQ ID NO: 1109748 - RNA, 19 nt, Homo sapiens
  misc_RNA (1)...(19): siRNA sense strand
ucacugcccugcucaacca

SEQ ID NO: 1109749 - RNA, 19 nt, Homo sapiens
  misc_RNA (1)...(19): siRNA sense strand
gaucugcucaacuucaaga

SEQ ID NO: 1109750 - RNA, 19 nt, Homo sapiens
  misc_RNA (1)...(19): siRNA sense strand
gaugcugucuauaccuugu

SEQ ID NO: 1109751 - RNA, 19 nt, Homo sapiens
  misc_RNA (1)...(19): siRNA sense strand
caacuauggcuuccagauc

SEQ ID NO: 1109752 - RNA, 19 nt, Homo sapiens
  misc_RNA (1)...(19): siRNA sense strand
gaggagaucgagaagaagu

SEQ ID NO: 1109753 - RNA, 19 nt, Homo sapiens
  misc_RNA (1)...(19): siRNA sense strand
gcaacuauggcuuccagau

SEQ ID NO: 1109754 - RNA, 19 nt, Homo sapiens
  misc_RNA (1)...(19): siRNA sense strand
cgcccgaucugcucaacuu

SEQ ID NO: 1109755 - RNA, 19 nt, Homo sapiens
  misc_RNA (1)...(19): siRNA sense strand
caaggaugcugucuauacc

SEQ ID NO: 1109756 - RNA, 19 nt, Homo sapiens
  misc_RNA (1)...(19): siRNA sense strand
acgaggcacuggagaagga

SEQ ID NO: 1109757 - RNA, 19 nt, Homo sapiens
  misc_RNA (1)...(19): siRNA sense strand
ugagcuggauggugagauc

SEQ ID NO: 1109758 - RNA, 19 nt, Homo sapiens
  misc_RNA (1)...(19): siRNA sense strand
ccgaucugcucaacuucaa

SEQ ID NO: 1109759 - RNA, 19 nt, Homo sapiens
  misc_RNA (1)...(19): siRNA sense strand
agggauggaugucgaucuu

SEQ ID NO: 1109760 - RNA, 19 nt, Homo sapiens
  misc_RNA (1)...(19): siRNA sense strand
gacagauucaagucucaaa

SEQ ID NO: 1109761 - RNA, 19 nt, Homo sapiens
  misc_RNA (1)...(19): siRNA sense strand
uuagugaggagaucgagaa

SEQ ID NO: 1109762 - RNA, 19 nt, Homo sapiens
  misc_RNA (1)...(19): siRNA sense strand
gcuuccagauccacaccaa

SEQ ID NO: 1109763 - RNA, 19 nt, Homo sapiens
  misc_RNA (1)...(19): siRNA sense strand
cagcaaaaccggcuuagug

SEQ ID NO: 1109764 - RNA, 19 nt, Homo sapiens
  misc_RNA (1)...(19): siRNA sense strand
acaccaaggaugcugucua

SEQ ID NO: 1109765 - RNA, 19 nt, Homo sapiens
  misc_RNA (1)...(19): siRNA sense strand
aggaugcugucuauaccuu

SEQ ID NO: 1109766 - RNA, 19 nt, Homo sapiens
  misc_RNA (1)...(19): siRNA sense strand
gcucucggacucuaacaag

SEQ ID NO: 1109767 - RNA, 19 nt, Homo sapiens
  misc_RNA (1)...(19): siRNA sense strand
ggaaaucacuuagauguuu

SEQ ID NO: 1109768 - RNA, 19 nt, Homo sapiens
  misc_RNA (1)...(19): siRNA sense strand
uagcagagcugagauauuu

SEQ ID NO: 1109769 - RNA, 19 nt, Homo sapiens
  misc_RNA (1)...(19): siRNA sense strand
ucaagaggcugcagauuaa

SEQ ID NO: 1109770 - RNA, 19 nt, Homo sapiens
  misc_RNA (1)...(19): siRNA sense strand
gaaauugcccucguuguua

SEQ ID NO: 1109771 - RNA, 19 nt, Homo sapiens
  misc_RNA (1)...(19): siRNA sense strand
gagagaaggugauaacaga

SEQ ID NO: 1109772 - RNA, 19 nt, Homo sapiens
  misc_RNA (1)...(19): siRNA sense strand
ggaagaaacuccagugucu

SEQ ID NO: 1109773 - RNA, 19 nt, Homo sapiens
  misc_RNA (1)...(19): siRNA sense strand
gaucagaggauaugucuuu

SEQ ID NO: 1109774 - RNA, 19 nt, Homo sapiens
  misc_RNA (1)...(19): siRNA sense strand
gggcagaccuuggaucuaa

SEQ ID NO: 1109775 - RNA, 19 nt, Homo sapiens
  misc_RNA (1)...(19): siRNA sense strand
uaacagaacuggccaacau

SEQ ID NO: 1109776 - RNA, 19 nt, Homo sapiens
  misc_RNA (1)...(19): siRNA sense strand
cgaaauccuuguuauguuu

SEQ ID NO: 1109777 - RNA, 19 nt, Homo sapiens
  misc_RNA (1)...(19): siRNA sense strand
gaucuuggcacuaacuuua

SEQ ID NO: 1109778 - RNA, 19 nt, Homo sapiens
  misc_RNA (1)...(19): siRNA sense strand
gcagugaauuccaaccuuu

SEQ ID NO: 1109779 - RNA, 19 nt, Homo sapiens
  misc_RNA (1)...(19): siRNA sense strand
gaucucagcucaaauaaaa

SEQ ID NO: 1109780 - RNA, 19 nt, Homo sapiens
  misc_RNA (1)...(19): siRNA sense strand
gaaaccagcuacuagagau

SEQ ID NO: 1109781 - RNA, 19 nt, Homo sapiens
  misc_RNA (1)...(19): siRNA sense strand
cagaggauaugucuuuaaa

SEQ ID NO: 1109782 - RNA, 19 nt, Homo sapiens
  misc_RNA (1)...(19): siRNA sense strand
caacaaccggcuugauuua

SEQ ID NO: 1109783 - RNA, 19 nt, Homo sapiens
  misc_RNA (1)...(19): siRNA sense strand
gaacgacaaugacaucucu

SEQ ID NO: 1109784 - RNA, 19 nt, Homo sapiens
  misc_RNA (1)...(19): siRNA sense strand
gagaagcccuuucagaagu

SEQ ID NO: 1109785 - RNA, 19 nt, Homo sapiens
  misc_RNA (1)...(19): siRNA sense strand
agagaaagaugccuuccua

SEQ ID NO: 1109786 - RNA, 19 nt, Homo sapiens
  misc_RNA (1)...(19): siRNA sense strand
ugacuaaccugauucuguu

SEQ ID NO: 1109787 - RNA, 19 nt, Homo sapiens
  misc_RNA (1)...(19): siRNA sense strand
ggaaaucucauuagccaaa

SEQ ID NO: 1109788 - RNA, 19 nt, Homo sapiens
  misc_RNA (1)...(19): siRNA sense strand
ggaaauugcccucguuguu

SEQ ID NO: 1109789 - RNA, 19 nt, Homo sapiens
  misc_RNA (1)...(19): siRNA sense strand
gaaucuaucacaagcauuu

SEQ ID NO: 1109790 - RNA, 19 nt, Homo sapiens
  misc_RNA (1)...(19): siRNA sense strand
cagaaggaauuacucauau

SEQ ID NO: 1109791 - RNA, 19 nt, Homo sapiens
  misc_RNA (1)...(19): siRNA sense strand
gaccuuggaucuaaguaaa

SEQ ID NO: 1109792 - RNA, 19 nt, Homo sapiens
  misc_RNA (1)...(19): siRNA sense strand
gcaggaccauggagaguga

SEQ ID NO: 1109793 - RNA, 19 nt, Homo sapiens
  misc_RNA (1)...(19): siRNA sense strand
gagaaggugauaacagaua

SEQ ID NO: 1109794 - RNA, 19 nt, Homo sapiens
  misc_RNA (1)...(19): siRNA sense strand
gacaagcauuugacagaaa

SEQ ID NO: 1109795 - RNA, 19 nt, Homo sapiens
  misc_RNA (1)...(19): siRNA sense strand
aaaaugggcucaaaucuuu

SEQ ID NO: 1109796 - RNA, 19 nt, Homo sapiens
  misc_RNA (1)...(19): siRNA sense strand
gaaagcugcuacaaguaug

SEQ ID NO: 1109797 - RNA, 19 nt, Homo sapiens
  misc_RNA (1)...(19): siRNA sense strand
gaacuggccaacauagaaa

SEQ ID NO: 1109798 - RNA, 19 nt, Homo sapiens
  misc_RNA (1)...(19): siRNA sense strand
caagaugguuuaagaacau

SEQ ID NO: 1109799 - RNA, 19 nt, Homo sapiens
  misc_RNA (1)...(19): siRNA sense strand
guaacucucuucagcaugu

SEQ ID NO: 1109800 - RNA, 19 nt, Homo sapiens
  misc_RNA (1)...(19): siRNA sense strand
ccagaagccucaagaaucu

SEQ ID NO: 1109801 - RNA, 19 nt, Homo sapiens
  misc_RNA (1)...(19): siRNA sense strand
gaaagaugccuuccuaaac

SEQ ID NO: 1109802 - RNA, 19 nt, Homo sapiens
  misc_RNA (1)...(19): siRNA sense strand
ggaauuacucauaugcuaa

SEQ ID NO: 1109803 - RNA, 19 nt, Homo sapiens
  misc_RNA (1)...(19): siRNA sense strand
aaugaaagcugcuacaagu

SEQ ID NO: 1109804 - RNA, 19 nt, Homo sapiens
  misc_RNA (1)...(19): siRNA sense strand
uaauuuaugucucgaggaa

SEQ ID NO: 1109805 - RNA, 19 nt, Homo sapiens
  misc_RNA (1)...(19): siRNA sense strand
cagcaagucaccucuauuu

SEQ ID NO: 1109806 - RNA, 19 nt, Homo sapiens
  misc_RNA (1)...(19): siRNA sense strand
gaaccucacccucaccauu

SEQ ID NO: 1109807 - RNA, 19 nt, Homo sapiens
  misc_RNA (1)...(19): siRNA sense strand
cagaggaaaucacuuagau

SEQ ID NO: 1109808 - RNA, 19 nt, Homo sapiens
  misc_RNA (1)...(19): siRNA sense strand
gaaaagagaaucuaacaga

SEQ ID NO: 1109809 - RNA, 19 nt, Homo sapiens
  misc_RNA (1)...(19): siRNA sense strand
gaggaaaucacuuagaugu

SEQ ID NO: 1109810 - RNA, 19 nt, Homo sapiens
  misc_RNA (1)...(19): siRNA sense strand
gauuaaacccagaagcuuu

SEQ ID NO: 1109811 - RNA, 19 nt, Homo sapiens
  misc_RNA (1)...(19): siRNA sense strand
gagcauacagcuuagcaaa

SEQ ID NO: 1109812 - RNA, 19 nt, Homo sapiens
  misc_RNA (1)...(19): siRNA sense strand
ugggaugugugguauauuu

SEQ ID NO: 1109813 - RNA, 19 nt, Homo sapiens
  misc_RNA (1)...(19): siRNA sense strand
caagucaccucuauuucug

SEQ ID NO: 1109814 - RNA, 19 nt, Homo sapiens
  misc_RNA (1)...(19): siRNA sense strand
gggcucaaaucuuucaguu

SEQ ID NO: 1109815 - RNA, 19 nt, Homo sapiens
  misc_RNA (1)...(19): siRNA sense strand
ucagaaggaauuacucaua

SEQ ID NO: 1109816 - RNA, 19 nt, Homo sapiens
  misc_RNA (1)...(19): siRNA sense strand
gcuuuaaccucucgccauu

SEQ ID NO: 1109817 - RNA, 19 nt, Homo sapiens
  misc_RNA (1)...(19): siRNA sense strand
aaagaugccuuccuaaacu

SEQ ID NO: 1109818 - RNA, 19 nt, Homo sapiens
  misc_RNA (1)...(19): siRNA sense strand
agaaauuccuggagguauu

SEQ ID NO: 1109819 - RNA, 19 nt, Homo sapiens
  misc_RNA (1)...(19): siRNA sense strand
gcaucuuucuuuccucaaa

SEQ ID NO: 1109820 - RNA, 19 nt, Homo sapiens
  misc_RNA (1)...(19): siRNA sense strand
gcuaaccucagcauguuua

SEQ ID NO: 1109821 - RNA, 19 nt, Homo sapiens
  misc_RNA (1)...(19): siRNA sense strand
gacagcaagucaccucuau

SEQ ID NO: 1109822 - RNA, 19 nt, Homo sapiens
  misc_RNA (1)...(19): siRNA sense strand
aaacuccagugucuaaaga

SEQ ID NO: 1109823 - RNA, 19 nt, Homo sapiens
  misc_RNA (1)...(19): siRNA sense strand
acaacaacaugauugcaaa

SEQ ID NO: 1109824 - RNA, 19 nt, Homo sapiens
  misc_RNA (1)...(19): siRNA sense strand
gcaagucaccucuauuucu

SEQ ID NO: 1109825 - RNA, 19 nt, Homo sapiens
  misc_RNA (1)...(19): siRNA sense strand
ggagucugacgaaguauuu

SEQ ID NO: 1109826 - RNA, 19 nt, Homo sapiens
  misc_RNA (1)...(19): siRNA sense strand
ccaacaaccggcuugauuu

SEQ ID NO: 1109827 - RNA, 19 nt, Homo sapiens
  misc_RNA (1)...(19): siRNA sense strand
gaacuggaucugucccaaa

SEQ ID NO: 1109828 - RNA, 19 nt, Homo sapiens
  misc_RNA (1)...(19): siRNA sense strand
gcugagauauuuggacuuc

SEQ ID NO: 1109829 - RNA, 19 nt, Homo sapiens
  misc_RNA (1)...(19): siRNA sense strand
ggaaaccagcuacuagaga

SEQ ID NO: 1109830 - RNA, 19 nt, Homo sapiens
  misc_RNA (1)...(19): siRNA sense strand
ggaagacccaagagagaaa

SEQ ID NO: 1109831 - RNA, 19 nt, Homo sapiens
  misc_RNA (1)...(19): siRNA sense strand
ccaagaugguuuaagaaca

SEQ ID NO: 1109832 - RNA, 19 nt, Homo sapiens
  misc_RNA (1)...(19): siRNA sense strand
aagaccagcuucccagaaa

SEQ ID NO: 1109833 - RNA, 19 nt, Homo sapiens
  misc_RNA (1)...(19): siRNA sense strand
uugaugcgcugacagaauu

SEQ ID NO: 1109834 - RNA, 19 nt, Homo sapiens
  misc_RNA (1)...(19): siRNA sense strand
acaaucauguggccuauag

SEQ ID NO: 1109835 - RNA, 19 nt, Homo sapiens
  misc_RNA (1)...(19): siRNA sense strand
ucccagagcauacagcuua

SEQ ID NO: 1109836 - RNA, 19 nt, Homo sapiens
  misc_RNA (1)...(19): siRNA sense strand
agaaagaugccuuccuaaa

SEQ ID NO: 1109837 - RNA, 19 nt, Homo sapiens
  misc_RNA (1)...(19): siRNA sense strand
gaaaauguccucaacaauc

SEQ ID NO: 1109838 - RNA, 19 nt, Homo sapiens
  misc_RNA (1)...(19): siRNA sense strand
gagagauuauccaacuguu

SEQ ID NO: 1109839 - RNA, 19 nt, Homo sapiens
  misc_RNA (1)...(19): siRNA sense strand
ugcagaaacugaugaugaa

SEQ ID NO: 1109840 - RNA, 19 nt, Homo sapiens
  misc_RNA (1)...(19): siRNA sense strand
cucauuagccaaacucuua

SEQ ID NO: 1109841 - RNA, 19 nt, Homo sapiens
  misc_RNA (1)...(19): siRNA sense strand
ugaaagcugcuacaaguau

SEQ ID NO: 1109842 - RNA, 19 nt, Homo sapiens
  misc_RNA (1)...(19): siRNA sense strand
ggaggugacuauuccuuac

SEQ ID NO: 1109843 - RNA, 19 nt, Homo sapiens
  misc_RNA (1)...(19): siRNA sense strand
gaagaaacuccagugucua

SEQ ID NO: 1109844 - RNA, 19 nt, Homo sapiens
  misc_RNA (1)...(19): siRNA sense strand
ucgaaauccuuguuauguu

SEQ ID NO: 1109845 - RNA, 19 nt, Homo sapiens
  misc_RNA (1)...(19): siRNA sense strand
ugacagacaaguaugcaaa

SEQ ID NO: 1109846 - RNA, 19 nt, Homo sapiens
  misc_RNA (1)...(19): siRNA sense strand
cgaggaaagggacugguua

SEQ ID NO: 1109847 - RNA, 19 nt, Homo sapiens
  misc_RNA (1)...(19): siRNA sense strand
cugauucuguucucacuuu

SEQ ID NO: 1109848 - RNA, 19 nt, Homo sapiens
  misc_RNA (1)...(19): siRNA sense strand
gcacacaagggccaaagug

SEQ ID NO: 1109849 - RNA, 19 nt, Homo sapiens
  misc_RNA (1)...(19): siRNA sense strand
cuaaagaaccuggaaacuu

SEQ ID NO: 1109850 - RNA, 19 nt, Homo sapiens
  misc_RNA (1)...(19): siRNA sense strand
aaauugcccucguuguuau

SEQ ID NO: 1109851 - RNA, 19 nt, Homo sapiens
  misc_RNA (1)...(19): siRNA sense strand
aggaauuacucauaugcua

SEQ ID NO: 1109852 - RNA, 19 nt, Homo sapiens
  misc_RNA (1)...(19): siRNA sense strand
gagaaagaugccuuccuaa

SEQ ID NO: 1109853 - RNA, 19 nt, Homo sapiens
  misc_RNA (1)...(19): siRNA sense strand
ucaaaucuuucaguuggaa

SEQ ID NO: 1109854 - RNA, 19 nt, Homo sapiens
  misc_RNA (1)...(19): siRNA sense strand
ucacuuagauguuuuaugg

SEQ ID NO: 1109855 - RNA, 19 nt, Homo sapiens
  misc_RNA (1)...(19): siRNA sense strand
agacaagcauuugacagaa

SEQ ID NO: 1109856 - RNA, 19 nt, Homo sapiens
  misc_RNA (1)...(19): siRNA sense strand
ucaacaaacuccaggaacu

SEQ ID NO: 1109857 - RNA, 19 nt, Homo sapiens
  misc_RNA (1)...(19): siRNA sense strand
aaagugcucucccugaaag

SEQ ID NO: 1109858 - RNA, 19 nt, Homo sapiens
  misc_RNA (1)...(19): siRNA sense strand
gaugguaugccuccaaauc

SEQ ID NO: 1109859 - RNA, 19 nt, Homo sapiens
  misc_RNA (1)...(19): siRNA sense strand
ucaccagacuguugcuaug

SEQ ID NO: 1109860 - RNA, 19 nt, Homo sapiens
  misc_RNA (1)...(19): siRNA sense strand
guaucagcgucuaauauca

SEQ ID NO: 1109861 - RNA, 19 nt, Homo sapiens
  misc_RNA (1)...(19): siRNA sense strand
gggaugugugguauauuua

SEQ ID NO: 1109862 - RNA, 19 nt, Homo sapiens
  misc_RNA (1)...(19): siRNA sense strand
guacaccugugaguuagau

SEQ ID NO: 1109863 - RNA, 19 nt, Homo sapiens
  misc_RNA (1)...(19): siRNA sense strand
aagaaacuccagugucuaa

SEQ ID NO: 1109864 - RNA, 19 nt, Homo sapiens
  misc_RNA (1)...(19): siRNA sense strand
ucuguacaccugugaguua

SEQ ID NO: 1109865 - RNA, 19 nt, Homo sapiens
  misc_RNA (1)...(19): siRNA sense strand
uaauaucaccagacuguug

SEQ ID NO: 1109866 - RNA, 19 nt, Homo sapiens
  misc_RNA (1)...(19): siRNA sense strand
cuaaaacucugcccuguga

SEQ ID NO: 1109867 - RNA, 19 nt, Homo sapiens
  misc_RNA (1)...(19): siRNA sense strand
caucaagaaccacgccuuu

SEQ ID NO: 1109868 - RNA, 19 nt, Homo sapiens
  misc_RNA (1)...(19): siRNA sense strand
gggagcugaugaaguccaa

SEQ ID NO: 1109869 - RNA, 19 nt, Homo sapiens
  misc_RNA (1)...(19): siRNA sense strand
gaugaaguccaaguacuca

SEQ ID NO: 1109870 - RNA, 19 nt, Homo sapiens
  misc_RNA (1)...(19): siRNA sense strand
acucagacaucaccaucau

SEQ ID NO: 1109871 - RNA, 19 nt, Homo sapiens
  misc_RNA (1)...(19): siRNA sense strand
gcacacacaccaguucaac

SEQ ID NO: 1109872 - RNA, 19 nt, Homo sapiens
  misc_RNA (1)...(19): siRNA sense strand
ugaaguccaaguacucaga

SEQ ID NO: 1109873 - RNA, 19 nt, Homo sapiens
  misc_RNA (1)...(19): siRNA sense strand
ggaggagaccuggcacaca

SEQ ID NO: 1109874 - RNA, 19 nt, Homo sapiens
  misc_RNA (1)...(19): siRNA sense strand
uugaugggauccuguacga

SEQ ID NO: 1109875 - RNA, 19 nt, Homo sapiens
  misc_RNA (1)...(19): siRNA sense strand
gagcugaugaaguccaagu

SEQ ID NO: 1109876 - RNA, 19 nt, Homo sapiens
  misc_RNA (1)...(19): siRNA sense strand
gcccauugaugagcauugg

SEQ ID NO: 1109877 - RNA, 19 nt, Homo sapiens
  misc_RNA (1)...(19): siRNA sense strand
ucaagaaccacgccuuucg

SEQ ID NO: 1109878 - RNA, 19 nt, Homo sapiens
  misc_RNA (1)...(19): siRNA sense strand
caucaagaaccacgccuuu

SEQ ID NO: 1109879 - RNA, 19 nt, Homo sapiens
  misc_RNA (1)...(19): siRNA sense strand
gggagcugaugaaguccaa

SEQ ID NO: 1109880 - RNA, 19 nt, Homo sapiens
  misc_RNA (1)...(19): siRNA sense strand
gaugaaguccaaguacuca

SEQ ID NO: 1109881 - RNA, 19 nt, Homo sapiens
  misc_RNA (1)...(19): siRNA sense strand
acucagacaucaccaucau

SEQ ID NO: 1109882 - RNA, 19 nt, Homo sapiens
  misc_RNA (1)...(19): siRNA sense strand
gcacacacaccaguucaac

SEQ ID NO: 1109883 - RNA, 19 nt, Homo sapiens
  misc_RNA (1)...(19): siRNA sense strand
ugaaguccaaguacucaga

SEQ ID NO: 1109884 - RNA, 19 nt, Homo sapiens
  misc_RNA (1)...(19): siRNA sense strand
ggaggagaccuggcacaca

SEQ ID NO: 1109885 - RNA, 19 nt, Homo sapiens
  misc_RNA (1)...(19): siRNA sense strand
uugaugggauccuguacga

SEQ ID NO: 1109886 - RNA, 19 nt, Homo sapiens
  misc_RNA (1)...(19): siRNA sense strand
gagcugaugaaguccaagu

SEQ ID NO: 1109887 - RNA, 19 nt, Homo sapiens
  misc_RNA (1)...(19): siRNA sense strand
gcccauugaugagcauugg

SEQ ID NO: 1109888 - RNA, 19 nt, Homo sapiens
  misc_RNA (1)...(19): siRNA sense strand
ucaagaaccacgccuuucg

SEQ ID NO: 1109889 - RNA, 19 nt, Homo sapiens
  misc_RNA (1)...(19): siRNA sense strand
uaacaacagccuucauuua

SEQ ID NO: 1109890 - RNA, 19 nt, Homo sapiens
  misc_RNA (1)...(19): siRNA sense strand
caacagccuucauuuaucu

SEQ ID NO: 1109891 - RNA, 19 nt, Homo sapiens
  misc_RNA (1)...(19): siRNA sense strand
ucucuggacacgauuauua

SEQ ID NO: 1109892 - RNA, 19 nt, Homo sapiens
  misc_RNA (1)...(19): siRNA sense strand
guuaacaacagccuucauu

SEQ ID NO: 1109893 - RNA, 19 nt, Homo sapiens
  misc_RNA (1)...(19): siRNA sense strand
aacaacagccuucauuuau

SEQ ID NO: 1109894 - RNA, 19 nt, Homo sapiens
  misc_RNA (1)...(19): siRNA sense strand
acaacagccuucauuuauc

SEQ ID NO: 1109895 - RNA, 19 nt, Homo sapiens
  misc_RNA (1)...(19): siRNA sense strand
uuaacaacagccuucauuu

SEQ ID NO: 1109896 - RNA, 19 nt, Homo sapiens
  misc_RNA (1)...(19): siRNA sense strand
gcagauucaccgguccuuu

SEQ ID NO: 1109897 - RNA, 19 nt, Homo sapiens
  misc_RNA (1)...(19): siRNA sense strand
gguccaggcuuuucuguca

SEQ ID NO: 1109898 - RNA, 19 nt, Homo sapiens
  misc_RNA (1)...(19): siRNA sense strand
uuucugucaugcuuguuaa

SEQ ID NO: 1109899 - RNA, 19 nt, Homo sapiens
  misc_RNA (1)...(19): siRNA sense strand
gaagaaagauggcagcauu

SEQ ID NO: 1109900 - RNA, 19 nt, Homo sapiens
  misc_RNA (1)...(19): siRNA sense strand
caacucagaucccucagua

SEQ ID NO: 1109901 - RNA, 19 nt, Homo sapiens
  misc_RNA (1)...(19): siRNA sense strand
ccaaacagccucagaauga

SEQ ID NO: 1109902 - RNA, 19 nt, Homo sapiens
  misc_RNA (1)...(19): siRNA sense strand
gaaacuggcucugggaaga

SEQ ID NO: 1109903 - RNA, 19 nt, Homo sapiens
  misc_RNA (1)...(19): siRNA sense strand
gaaaggaacucgggaaacu

SEQ ID NO: 1109904 - RNA, 19 nt, Homo sapiens
  misc_RNA (1)...(19): siRNA sense strand
gaaauacagcugugucauu

SEQ ID NO: 1109905 - RNA, 19 nt, Homo sapiens
  misc_RNA (1)...(19): siRNA sense strand
ggugaaagcugcacagaag

SEQ ID NO: 1109906 - RNA, 19 nt, Homo sapiens
  misc_RNA (1)...(19): siRNA sense strand
gaacugaacuugggaagcu

SEQ ID NO: 1109907 - RNA, 19 nt, Homo sapiens
  misc_RNA (1)...(19): siRNA sense strand
gcucacagccucuucauga

SEQ ID NO: 1109908 - RNA, 19 nt, Homo sapiens
  misc_RNA (1)...(19): siRNA sense strand
gcaaagugaucauuucaac

SEQ ID NO: 1109909 - RNA, 19 nt, Homo sapiens
  misc_RNA (1)...(19): siRNA sense strand
gauggcagcauuuccuuua

SEQ ID NO: 1109910 - RNA, 19 nt, Homo sapiens
  misc_RNA (1)...(19): siRNA sense strand
caaugaaagucccaaaugu

SEQ ID NO: 1109911 - RNA, 19 nt, Homo sapiens
  misc_RNA (1)...(19): siRNA sense strand
ggacgaguuugagaaguuu

SEQ ID NO: 1109912 - RNA, 19 nt, Homo sapiens
  misc_RNA (1)...(19): siRNA sense strand
gcaaugaaagucccaaaug

SEQ ID NO: 1109913 - RNA, 19 nt, Homo sapiens
  misc_RNA (1)...(19): siRNA sense strand
uaggugcucuugaacauaa

SEQ ID NO: 1109914 - RNA, 19 nt, Homo sapiens
  misc_RNA (1)...(19): siRNA sense strand
gaggagacguggagagugu

SEQ ID NO: 1109915 - RNA, 19 nt, Homo sapiens
  misc_RNA (1)...(19): siRNA sense strand
gaaagugauugugauguca

SEQ ID NO: 1109916 - RNA, 19 nt, Homo sapiens
  misc_RNA (1)...(19): siRNA sense strand
ccaaagggcuaucgcaaag

SEQ ID NO: 1109917 - RNA, 19 nt, Homo sapiens
  misc_RNA (1)...(19): siRNA sense strand
gaaaccuccauaaccauua

SEQ ID NO: 1109918 - RNA, 19 nt, Homo sapiens
  misc_RNA (1)...(19): siRNA sense strand
gcugaaaccuccauaacca

SEQ ID NO: 1109919 - RNA, 19 nt, Homo sapiens
  misc_RNA (1)...(19): siRNA sense strand
gguguaaccuggccagugu

SEQ ID NO: 1109920 - RNA, 19 nt, Homo sapiens
  misc_RNA (1)...(19): siRNA sense strand
cuacuagagucucagauga

SEQ ID NO: 1109921 - RNA, 19 nt, Homo sapiens
  misc_RNA (1)...(19): siRNA sense strand
gaaauaaggauuggugcaa

SEQ ID NO: 1109922 - RNA, 19 nt, Homo sapiens
  misc_RNA (1)...(19): siRNA sense strand
gagaagagaacugaacuug

SEQ ID NO: 1109923 - RNA, 19 nt, Homo sapiens
  misc_RNA (1)...(19): siRNA sense strand
cacaugacccugcucaaua

SEQ ID NO: 1109924 - RNA, 19 nt, Homo sapiens
  misc_RNA (1)...(19): siRNA sense strand
gagaaccgccagaaacuga

SEQ ID NO: 1109925 - RNA, 19 nt, Homo sapiens
  misc_RNA (1)...(19): siRNA sense strand
gaagcugguuggcuauaca

SEQ ID NO: 1109926 - RNA, 19 nt, Homo sapiens
  misc_RNA (1)...(19): siRNA sense strand
gagcacagcugagggacau

SEQ ID NO: 1109927 - RNA, 19 nt, Homo sapiens
  misc_RNA (1)...(19): siRNA sense strand
gaccuguucucucaguauu

SEQ ID NO: 1109928 - RNA, 19 nt, Homo sapiens
  misc_RNA (1)...(19): siRNA sense strand
gaagacaccaggaucaagu

SEQ ID NO: 1109929 - RNA, 19 nt, Homo sapiens
  misc_RNA (1)...(19): siRNA sense strand
gagaaaggaacucgggaaa

SEQ ID NO: 1109930 - RNA, 19 nt, Homo sapiens
  misc_RNA (1)...(19): siRNA sense strand
cauaaccauuacaggaaua

SEQ ID NO: 1109931 - RNA, 19 nt, Homo sapiens
  misc_RNA (1)...(19): siRNA sense strand
ugagaaguuugauaagaug

SEQ ID NO: 1109932 - RNA, 19 nt, Homo sapiens
  misc_RNA (1)...(19): siRNA sense strand
ccuguuaggugcucuugaa

SEQ ID NO: 1109933 - RNA, 19 nt, Homo sapiens
  misc_RNA (1)...(19): siRNA sense strand
ccagagauccagaggugua

SEQ ID NO: 1109934 - RNA, 19 nt, Homo sapiens
  misc_RNA (1)...(19): siRNA sense strand
acucuuugcuucggaaaua

SEQ ID NO: 1109935 - RNA, 19 nt, Homo sapiens
  misc_RNA (1)...(19): siRNA sense strand
gcugagggacaucugcuua

SEQ ID NO: 1109936 - RNA, 19 nt, Homo sapiens
  misc_RNA (1)...(19): siRNA sense strand
acaugacccugcucaauau

SEQ ID NO: 1109937 - RNA, 19 nt, Homo sapiens
  misc_RNA (1)...(19): siRNA sense strand
gcacagaagaggagaaagg

SEQ ID NO: 1109938 - RNA, 19 nt, Homo sapiens
  misc_RNA (1)...(19): siRNA sense strand
gcugccaucucucuugcua

SEQ ID NO: 1109939 - RNA, 19 nt, Homo sapiens
  misc_RNA (1)...(19): siRNA sense strand
caaccaacaucgcugaaac

SEQ ID NO: 1109940 - RNA, 19 nt, Homo sapiens
  misc_RNA (1)...(19): siRNA sense strand
ucgaguagcugccaucucu

SEQ ID NO: 1109941 - RNA, 19 nt, Homo sapiens
  misc_RNA (1)...(19): siRNA sense strand
agggacaucugcuuaaaga

SEQ ID NO: 1109942 - RNA, 19 nt, Homo sapiens
  misc_RNA (1)...(19): siRNA sense strand
ugagggacaucugcuuaaa

SEQ ID NO: 1109943 - RNA, 19 nt, Homo sapiens
  misc_RNA (1)...(19): siRNA sense strand
aaauaaggauuggugcaaa

SEQ ID NO: 1109944 - RNA, 19 nt, Homo sapiens
  misc_RNA (1)...(19): siRNA sense strand
ugaaagugauugugauguc

SEQ ID NO: 1109945 - RNA, 19 nt, Homo sapiens
  misc_RNA (1)...(19): siRNA sense strand
gcuauacagugcgcuuuga

SEQ ID NO: 1109946 - RNA, 19 nt, Homo sapiens
  misc_RNA (1)...(19): siRNA sense strand
gcugguagcagaagucaga

SEQ ID NO: 1109947 - RNA, 19 nt, Homo sapiens
  misc_RNA (1)...(19): siRNA sense strand
ggcagcauuuccuuuagaa

SEQ ID NO: 1109948 - RNA, 19 nt, Homo sapiens
  misc_RNA (1)...(19): siRNA sense strand
caaacagccucagaaugau

SEQ ID NO: 1109949 - RNA, 19 nt, Homo sapiens
  misc_RNA (1)...(19): siRNA sense strand
ugacccugcucaauaucua

SEQ ID NO: 1109950 - RNA, 19 nt, Homo sapiens
  misc_RNA (1)...(19): siRNA sense strand
aaagggcuaucgcaaagug

SEQ ID NO: 1109951 - RNA, 19 nt, Homo sapiens
  misc_RNA (1)...(19): siRNA sense strand
gccgagacauugcaaagca

SEQ ID NO: 1109952 - RNA, 19 nt, Homo sapiens
  misc_RNA (1)...(19): siRNA sense strand
gucaacagcaagaauauga

SEQ ID NO: 1109953 - RNA, 19 nt, Homo sapiens
  misc_RNA (1)...(19): siRNA sense strand
guuaggugcucuugaacau

SEQ ID NO: 1109954 - RNA, 19 nt, Homo sapiens
  misc_RNA (1)...(19): siRNA sense strand
gcucaccuuugacuucaug

SEQ ID NO: 1109955 - RNA, 19 nt, Homo sapiens
  misc_RNA (1)...(19): siRNA sense strand
ccauaaccauuacaggaau

SEQ ID NO: 1109956 - RNA, 19 nt, Homo sapiens
  misc_RNA (1)...(19): siRNA sense strand
acagugcgcuuugaugaug

SEQ ID NO: 1109957 - RNA, 19 nt, Homo sapiens
  misc_RNA (1)...(19): siRNA sense strand
gggcaugguuaaagcaaag

SEQ ID NO: 1109958 - RNA, 19 nt, Homo sapiens
  misc_RNA (1)...(19): siRNA sense strand
gaagcaauuucagacucuu

SEQ ID NO: 1109959 - RNA, 19 nt, Homo sapiens
  misc_RNA (1)...(19): siRNA sense strand
ggacuauccacacagaugu

SEQ ID NO: 1109960 - RNA, 19 nt, Homo sapiens
  misc_RNA (1)...(19): siRNA sense strand
cagcuuacccugacuccaa

SEQ ID NO: 1109961 - RNA, 19 nt, Homo sapiens
  misc_RNA (1)...(19): siRNA sense strand
acaguggucuugagguguu

SEQ ID NO: 1109962 - RNA, 19 nt, Homo sapiens
  misc_RNA (1)...(19): siRNA sense strand
gcacagcagcuccgagucu

SEQ ID NO: 1109963 - RNA, 19 nt, Homo sapiens
  misc_RNA (1)...(19): siRNA sense strand
gaugucagcuacgauggau

SEQ ID NO: 1109964 - RNA, 19 nt, Homo sapiens
  misc_RNA (1)...(19): siRNA sense strand
cgauggauguggaccuguu

SEQ ID NO: 1109965 - RNA, 19 nt, Homo sapiens
  misc_RNA (1)...(19): siRNA sense strand
acauaaggaugaccagcuu

SEQ ID NO: 1109966 - RNA, 19 nt, Homo sapiens
  misc_RNA (1)...(19): siRNA sense strand
acacggaggacgaguuuga

SEQ ID NO: 1109967 - RNA, 19 nt, Homo sapiens
  misc_RNA (1)...(19): siRNA sense strand
caagacgugccgagacauu

SEQ ID NO: 1109968 - RNA, 19 nt, Homo sapiens
  misc_RNA (1)...(19): siRNA sense strand
ggaagcugguuggcuauac

SEQ ID NO: 1109969 - RNA, 19 nt, Homo sapiens
  misc_RNA (1)...(19): siRNA sense strand
gaagcucacgaacggacua

SEQ ID NO: 1109970 - RNA, 19 nt, Homo sapiens
  misc_RNA (1)...(19): siRNA sense strand
ccaucucucuugcuacuag

SEQ ID NO: 1109971 - RNA, 19 nt, Homo sapiens
  misc_RNA (1)...(19): siRNA sense strand
gaggagaucgaagccauga

SEQ ID NO: 1109972 - RNA, 19 nt, Homo sapiens
  misc_RNA (1)...(19): siRNA sense strand
ggaccuguucucucaguau

SEQ ID NO: 1109973 - RNA, 19 nt, Homo sapiens
  misc_RNA (1)...(19): siRNA sense strand
cgaacggacuauccacaca

SEQ ID NO: 1109974 - RNA, 19 nt, Homo sapiens
  misc_RNA (1)...(19): siRNA sense strand
ugaaaccuccauaaccauu

SEQ ID NO: 1109975 - RNA, 19 nt, Homo sapiens
  misc_RNA (1)...(19): siRNA sense strand
ggaccucugcgucauagau

SEQ ID NO: 1109976 - RNA, 19 nt, Homo sapiens
  misc_RNA (1)...(19): siRNA sense strand
ugacuccaaugggaagaaa

SEQ ID NO: 1109977 - RNA, 19 nt, Homo sapiens
  misc_RNA (1)...(19): siRNA sense strand
gcuacuagagucucagaug

SEQ ID NO: 1109978 - RNA, 19 nt, Homo sapiens
  misc_RNA (1)...(19): siRNA sense strand
uaaccuggccagugugaug

SEQ ID NO: 1109979 - RNA, 19 nt, Homo sapiens
  misc_RNA (1)...(19): siRNA sense strand
cuacacggaggacgaguuu

SEQ ID NO: 1109980 - RNA, 19 nt, Homo sapiens
  misc_RNA (1)...(19): siRNA sense strand
uugaugaugucaccucaga

SEQ ID NO: 1109981 - RNA, 19 nt, Homo sapiens
  misc_RNA (1)...(19): siRNA sense strand
aaggauuggugcaaagaga

SEQ ID NO: 1109982 - RNA, 19 nt, Homo sapiens
  misc_RNA (1)...(19): siRNA sense strand
aggacgaguuugagaaguu

SEQ ID NO: 1109983 - RNA, 19 nt, Homo sapiens
  misc_RNA (1)...(19): siRNA sense strand
uaucgcaaagugaucauuu

SEQ ID NO: 1109984 - RNA, 19 nt, Homo sapiens
  misc_RNA (1)...(19): siRNA sense strand
cagaugagaagagaacuga

SEQ ID NO: 1109985 - RNA, 19 nt, Homo sapiens
  misc_RNA (1)...(19): siRNA sense strand
gaugaugucaccucagaag

SEQ ID NO: 1109986 - RNA, 19 nt, Homo sapiens
  misc_RNA (1)...(19): siRNA sense strand
aaacagccucagaaugauu

SEQ ID NO: 1109987 - RNA, 19 nt, Homo sapiens
  misc_RNA (1)...(19): siRNA sense strand
aaaccuaggcggaaauaag

SEQ ID NO: 1109988 - RNA, 19 nt, Homo sapiens
  misc_RNA (1)...(19): siRNA sense strand
uggcagcauuuccuuuaga

SEQ ID NO: 1109989 - RNA, 19 nt, Homo sapiens
  misc_RNA (1)...(19): siRNA sense strand
gaaguauaacccugacagu

SEQ ID NO: 1109990 - RNA, 19 nt, Homo sapiens
  misc_RNA (1)...(19): siRNA sense strand
gguuaaagcaaagaaguau

SEQ ID NO: 1109991 - RNA, 19 nt, Homo sapiens
  misc_RNA (1)...(19): siRNA sense strand
acaccaggaucaaguuucu

SEQ ID NO: 1109992 - RNA, 19 nt, Homo sapiens
  misc_RNA (1)...(19): siRNA sense strand
gcugagaaccgccagaaac

SEQ ID NO: 1109993 - RNA, 19 nt, Homo sapiens
  misc_RNA (1)...(19): siRNA sense strand
auacagugcgcuuugauga

SEQ ID NO: 1109994 - RNA, 19 nt, Homo sapiens
  misc_RNA (1)...(19): siRNA sense strand
ucccaaaugugcucaccuu

SEQ ID NO: 1109995 - RNA, 19 nt, Homo sapiens
  misc_RNA (1)...(19): siRNA sense strand
ggaggacgaguuugagaag

SEQ ID NO: 1109996 - RNA, 19 nt, Homo sapiens
  misc_RNA (1)...(19): siRNA sense strand
ccucugaaagugauuguga

SEQ ID NO: 1109997 - RNA, 19 nt, Homo sapiens
  misc_RNA (1)...(19): siRNA sense strand
ucacaugacccugcucaau

SEQ ID NO: 1109998 - RNA, 19 nt, Homo sapiens
  misc_RNA (1)...(19): siRNA sense strand
gaauaugacgcugguagca

SEQ ID NO: 1109999 - RNA, 19 nt, Homo sapiens
  misc_RNA (1)...(19): siRNA sense strand
guaagaggcugguggagaa

SEQ ID NO: 1110000 - RNA, 19 nt, Homo sapiens
  misc_RNA (1)...(19): siRNA sense strand
cgaugacgcugaacuagua

SEQ ID NO: 1110001 - RNA, 19 nt, Homo sapiens
  misc_RNA (1)...(19): siRNA sense strand
cgaagcagcugaucagaau

SEQ ID NO: 1110002 - RNA, 19 nt, Homo sapiens
  misc_RNA (1)...(19): siRNA sense strand
gaacuaguaaggcucagua

SEQ ID NO: 1110003 - RNA, 19 nt, Homo sapiens
  misc_RNA (1)...(19): siRNA sense strand
gcaaugacaaugagaacaa

SEQ ID NO: 1110004 - RNA, 19 nt, Homo sapiens
  misc_RNA (1)...(19): siRNA sense strand
ggaggaaacacagaauaaa

SEQ ID NO: 1110005 - RNA, 19 nt, Homo sapiens
  misc_RNA (1)...(19): siRNA sense strand
cuaguaaggcucaguaaga

SEQ ID NO: 1110006 - RNA, 19 nt, Homo sapiens
  misc_RNA (1)...(19): siRNA sense strand
gaauggcaaugacaaugag

SEQ ID NO: 1110007 - RNA, 19 nt, Homo sapiens
  misc_RNA (1)...(19): siRNA sense strand
gaggggagcucugugaaaa

SEQ ID NO: 1110008 - RNA, 19 nt, Homo sapiens
  misc_RNA (1)...(19): siRNA sense strand
acaaugagaacaacaggaa

SEQ ID NO: 1110009 - RNA, 19 nt, Homo sapiens
  misc_RNA (1)...(19): siRNA sense strand
uggaggaaacacagaauaa

SEQ ID NO: 1110010 - RNA, 19 nt, Homo sapiens
  misc_RNA (1)...(19): siRNA sense strand
gaucagaauggcaaugaca

SEQ ID NO: 1110011 - RNA, 19 nt, Homo sapiens
  misc_RNA (1)...(19): siRNA sense strand
ggagcccgaugacgcugaa

SEQ ID NO: 1110012 - RNA, 19 nt, Homo sapiens
  misc_RNA (1)...(19): siRNA sense strand
agaauggcaaugacaauga

SEQ ID NO: 1110013 - RNA, 19 nt, Homo sapiens
  misc_RNA (1)...(19): siRNA sense strand
gaggaaacacagaauaaaa

SEQ ID NO: 1110014 - RNA, 19 nt, Homo sapiens
  misc_RNA (1)...(19): siRNA sense strand
ggagaacgcggugcucaag

SEQ ID NO: 1110015 - RNA, 19 nt, Homo sapiens
  misc_RNA (1)...(19): siRNA sense strand
uaguaaggcucaguaagag

SEQ ID NO: 1110016 - RNA, 19 nt, Homo sapiens
  misc_RNA (1)...(19): siRNA sense strand
ugagaacaacaggaaauga

SEQ ID NO: 1110017 - RNA, 19 nt, Homo sapiens
  misc_RNA (1)...(19): siRNA sense strand
gcccgaugacgcugaacua

SEQ ID NO: 1110018 - RNA, 19 nt, Homo sapiens
  misc_RNA (1)...(19): siRNA sense strand
cagaauggcaaugacaaug

SEQ ID NO: 1110019 - RNA, 19 nt, Homo sapiens
  misc_RNA (1)...(19): siRNA sense strand
ccgaagcagcugaucagaa

SEQ ID NO: 1110020 - RNA, 19 nt, Homo sapiens
  misc_RNA (1)...(19): siRNA sense strand
caaugagaacaacaggaaa

SEQ ID NO: 1110021 - RNA, 19 nt, Homo sapiens
  misc_RNA (1)...(19): siRNA sense strand
gaugacgcugaacuaguaa

SEQ ID NO: 1110022 - RNA, 19 nt, Homo sapiens
  misc_RNA (1)...(19): siRNA sense strand
aaaccgaagcagcugauca

SEQ ID NO: 1110023 - RNA, 19 nt, Homo sapiens
  misc_RNA (1)...(19): siRNA sense strand
aaugagaacaacaggaaau

SEQ ID NO: 1110024 - RNA, 19 nt, Homo sapiens
  misc_RNA (1)...(19): siRNA sense strand
caaugacaaugagaacaac

SEQ ID NO: 1110025 - RNA, 19 nt, Homo sapiens
  misc_RNA (1)...(19): siRNA sense strand
guaagaggcugguggagaa

SEQ ID NO: 1110026 - RNA, 19 nt, Homo sapiens
  misc_RNA (1)...(19): siRNA sense strand
cgaugacgcugaacuagua

SEQ ID NO: 1110027 - RNA, 19 nt, Homo sapiens
  misc_RNA (1)...(19): siRNA sense strand
cgaagcagcugaucagaau

SEQ ID NO: 1110028 - RNA, 19 nt, Homo sapiens
  misc_RNA (1)...(19): siRNA sense strand
gaacuaguaaggcucagua

SEQ ID NO: 1110029 - RNA, 19 nt, Homo sapiens
  misc_RNA (1)...(19): siRNA sense strand
gcaaugacaaugagaacaa

SEQ ID NO: 1110030 - RNA, 19 nt, Homo sapiens
  misc_RNA (1)...(19): siRNA sense strand
ggaggaaacacagaauaaa

SEQ ID NO: 1110031 - RNA, 19 nt, Homo sapiens
  misc_RNA (1)...(19): siRNA sense strand
cuaguaaggcucaguaaga

SEQ ID NO: 1110032 - RNA, 19 nt, Homo sapiens
  misc_RNA (1)...(19): siRNA sense strand
gaauggcaaugacaaugag

SEQ ID NO: 1110033 - RNA, 19 nt, Homo sapiens
  misc_RNA (1)...(19): siRNA sense strand
gaggggagcucugugaaaa

SEQ ID NO: 1110034 - RNA, 19 nt, Homo sapiens
  misc_RNA (1)...(19): siRNA sense strand
acaaugagaacaacaggaa

SEQ ID NO: 1110035 - RNA, 19 nt, Homo sapiens
  misc_RNA (1)...(19): siRNA sense strand
uggaggaaacacagaauaa

SEQ ID NO: 1110036 - RNA, 19 nt, Homo sapiens
  misc_RNA (1)...(19): siRNA sense strand
gaucagaauggcaaugaca

SEQ ID NO: 1110037 - RNA, 19 nt, Homo sapiens
  misc_RNA (1)...(19): siRNA sense strand
ggagcccgaugacgcugaa

SEQ ID NO: 1110038 - RNA, 19 nt, Homo sapiens
  misc_RNA (1)...(19): siRNA sense strand
agaauggcaaugacaauga

SEQ ID NO: 1110039 - RNA, 19 nt, Homo sapiens
  misc_RNA (1)...(19): siRNA sense strand
gaggaaacacagaauaaaa

SEQ ID NO: 1110040 - RNA, 19 nt, Homo sapiens
  misc_RNA (1)...(19): siRNA sense strand
ggagaacgcggugcucaag

SEQ ID NO: 1110041 - RNA, 19 nt, Homo sapiens
  misc_RNA (1)...(19): siRNA sense strand
uaguaaggcucaguaagag

SEQ ID NO: 1110042 - RNA, 19 nt, Homo sapiens
  misc_RNA (1)...(19): siRNA sense strand
ugagaacaacaggaaauga

SEQ ID NO: 1110043 - RNA, 19 nt, Homo sapiens
  misc_RNA (1)...(19): siRNA sense strand
gcccgaugacgcugaacua

SEQ ID NO: 1110044 - RNA, 19 nt, Homo sapiens
  misc_RNA (1)...(19): siRNA sense strand
cagaauggcaaugacaaug

SEQ ID NO: 1110045 - RNA, 19 nt, Homo sapiens
  misc_RNA (1)...(19): siRNA sense strand
ccgaagcagcugaucagaa

SEQ ID NO: 1110046 - RNA, 19 nt, Homo sapiens
  misc_RNA (1)...(19): siRNA sense strand
caaugagaacaacaggaaa

SEQ ID NO: 1110047 - RNA, 19 nt, Homo sapiens
  misc_RNA (1)...(19): siRNA sense strand
gaugacgcugaacuaguaa

SEQ ID NO: 1110048 - RNA, 19 nt, Homo sapiens
  misc_RNA (1)...(19): siRNA sense strand
aaaccgaagcagcugauca

SEQ ID NO: 1110049 - RNA, 19 nt, Homo sapiens
  misc_RNA (1)...(19): siRNA sense strand
aaugagaacaacaggaaau

SEQ ID NO: 1110050 - RNA, 19 nt, Homo sapiens
  misc_RNA (1)...(19): siRNA sense strand
caaugacaaugagaacaac

SEQ ID NO: 1110051 - RNA, 19 nt, Homo sapiens
  misc_RNA (1)...(19): siRNA sense strand
guaagaggcugguggagaa

SEQ ID NO: 1110052 - RNA, 19 nt, Homo sapiens
  misc_RNA (1)...(19): siRNA sense strand
cgaugacgcugaacuagua

SEQ ID NO: 1110053 - RNA, 19 nt, Homo sapiens
  misc_RNA (1)...(19): siRNA sense strand
cgaagcagcugaucagaau

SEQ ID NO: 1110054 - RNA, 19 nt, Homo sapiens
  misc_RNA (1)...(19): siRNA sense strand
gaacuaguaaggcucagua

SEQ ID NO: 1110055 - RNA, 19 nt, Homo sapiens
  misc_RNA (1)...(19): siRNA sense strand
gcaaugacaaugagaacaa

SEQ ID NO: 1110056 - RNA, 19 nt, Homo sapiens
  misc_RNA (1)...(19): siRNA sense strand
ggaggaaacacagaauaaa

SEQ ID NO: 1110057 - RNA, 19 nt, Homo sapiens
  misc_RNA (1)...(19): siRNA sense strand
cuaguaaggcucaguaaga

SEQ ID NO: 1110058 - RNA, 19 nt, Homo sapiens
  misc_RNA (1)...(19): siRNA sense strand
gaauggcaaugacaaugag

SEQ ID NO: 1110059 - RNA, 19 nt, Homo sapiens
  misc_RNA (1)...(19): siRNA sense strand
gaggggagcucugugaaaa

SEQ ID NO: 1110060 - RNA, 19 nt, Homo sapiens
  misc_RNA (1)...(19): siRNA sense strand
acaaugagaacaacaggaa

SEQ ID NO: 1110061 - RNA, 19 nt, Homo sapiens
  misc_RNA (1)...(19): siRNA sense strand
uggaggaaacacagaauaa

SEQ ID NO: 1110062 - RNA, 19 nt, Homo sapiens
  misc_RNA (1)...(19): siRNA sense strand
gaucagaauggcaaugaca

SEQ ID NO: 1110063 - RNA, 19 nt, Homo sapiens
  misc_RNA (1)...(19): siRNA sense strand
ggagcccgaugacgcugaa

SEQ ID NO: 1110064 - RNA, 19 nt, Homo sapiens
  misc_RNA (1)...(19): siRNA sense strand
agaauggcaaugacaauga

SEQ ID NO: 1110065 - RNA, 19 nt, Homo sapiens
  misc_RNA (1)...(19): siRNA sense strand
gaggaaacacagaauaaaa

SEQ ID NO: 1110066 - RNA, 19 nt, Homo sapiens
  misc_RNA (1)...(19): siRNA sense strand
ggagaacgcggugcucaag

SEQ ID NO: 1110067 - RNA, 19 nt, Homo sapiens
  misc_RNA (1)...(19): siRNA sense strand
uaguaaggcucaguaagag

SEQ ID NO: 1110068 - RNA, 19 nt, Homo sapiens
  misc_RNA (1)...(19): siRNA sense strand
ugagaacaacaggaaauga

SEQ ID NO: 1110069 - RNA, 19 nt, Homo sapiens
  misc_RNA (1)...(19): siRNA sense strand
gcccgaugacgcugaacua

SEQ ID NO: 1110070 - RNA, 19 nt, Homo sapiens
  misc_RNA (1)...(19): siRNA sense strand
cagaauggcaaugacaaug

SEQ ID NO: 1110071 - RNA, 19 nt, Homo sapiens
  misc_RNA (1)...(19): siRNA sense strand
ccgaagcagcugaucagaa

SEQ ID NO: 1110072 - RNA, 19 nt, Homo sapiens
  misc_RNA (1)...(19): siRNA sense strand
caaugagaacaacaggaaa

SEQ ID NO: 1110073 - RNA, 19 nt, Homo sapiens
  misc_RNA (1)...(19): siRNA sense strand
gaugacgcugaacuaguaa

SEQ ID NO: 1110074 - RNA, 19 nt, Homo sapiens
  misc_RNA (1)...(19): siRNA sense strand
aaaccgaagcagcugauca

SEQ ID NO: 1110075 - RNA, 19 nt, Homo sapiens
  misc_RNA (1)...(19): siRNA sense strand
aaugagaacaacaggaaau

SEQ ID NO: 1110076 - RNA, 19 nt, Homo sapiens
  misc_RNA (1)...(19): siRNA sense strand
caaugacaaugagaacaac

SEQ ID NO: 1110077 - RNA, 19 nt, Homo sapiens
  misc_RNA (1)...(19): siRNA sense strand
gcaucaagguggagaagga

SEQ ID NO: 1110078 - RNA, 19 nt, Homo sapiens
  misc_RNA (1)...(19): siRNA sense strand
gcgagaagcccuacaagug

SEQ ID NO: 1110079 - RNA, 19 nt, Homo sapiens
  misc_RNA (1)...(19): siRNA sense strand
gcggcaagguguucaagaa

SEQ ID NO: 1110080 - RNA, 19 nt, Homo sapiens
  misc_RNA (1)...(19): siRNA sense strand
acaaggcccuggacaagga

SEQ ID NO: 1110081 - RNA, 19 nt, Homo sapiens
  misc_RNA (1)...(19): siRNA sense strand
gcaagcagcccuucaacag

SEQ ID NO: 1110082 - RNA, 19 nt, Homo sapiens
  misc_RNA (1)...(19): siRNA sense strand
aagaugagccuuccagcua

SEQ ID NO: 1110083 - RNA, 19 nt, Homo sapiens
  misc_RNA (1)...(19): siRNA sense strand
gagcaagucgugcgaguuc

SEQ ID NO: 1110084 - RNA, 19 nt, Homo sapiens
  misc_RNA (1)...(19): siRNA sense strand
cagcuugggugccugcuau

SEQ ID NO: 1110085 - RNA, 19 nt, Homo sapiens
  misc_RNA (1)...(19): siRNA sense strand
gcaagaccuucaaguucca

SEQ ID NO: 1110086 - RNA, 19 nt, Homo sapiens
  misc_RNA (1)...(19): siRNA sense strand
gcucaccuguggccagugu

SEQ ID NO: 1110087 - RNA, 19 nt, Homo sapiens
  misc_RNA (1)...(19): siRNA sense strand
gcaaggucauggagaacgu

SEQ ID NO: 1110088 - RNA, 19 nt, Homo sapiens
  misc_RNA (1)...(19): siRNA sense strand
gcggcaagaccuucaaguu

SEQ ID NO: 1110089 - RNA, 19 nt, Homo sapiens
  misc_RNA (1)...(19): siRNA sense strand
ggagauagaggagccaagu

SEQ ID NO: 1110090 - RNA, 19 nt, Homo sapiens
  misc_RNA (1)...(19): siRNA sense strand
gagccuuccagcuacauuu

SEQ ID NO: 1110091 - RNA, 19 nt, Homo sapiens
  misc_RNA (1)...(19): siRNA sense strand
cuacagcacccuggagaaa

SEQ ID NO: 1110092 - RNA, 19 nt, Homo sapiens
  misc_RNA (1)...(19): siRNA sense strand
gcgagcggccuuacaagug

SEQ ID NO: 1110093 - RNA, 19 nt, Homo sapiens
  misc_RNA (1)...(19): siRNA sense strand
ugaagacgcacaugcacaa

SEQ ID NO: 1110094 - RNA, 19 nt, Homo sapiens
  misc_RNA (1)...(19): siRNA sense strand
cggcaagaccuucaaguuc

SEQ ID NO: 1110095 - RNA, 19 nt, Homo sapiens
  misc_RNA (1)...(19): siRNA sense strand
gaugagccuuccagcuaca

SEQ ID NO: 1110096 - RNA, 19 nt, Homo sapiens
  misc_RNA (1)...(19): siRNA sense strand
acgagggucuggagauaga

SEQ ID NO: 1110097 - RNA, 19 nt, Homo sapiens
  misc_RNA (1)...(19): siRNA sense strand
cagcuacauuugcacaaca

SEQ ID NO: 1110098 - RNA, 19 nt, Homo sapiens
  misc_RNA (1)...(19): siRNA sense strand
gcagcgacacgugcgagua

SEQ ID NO: 1110099 - RNA, 19 nt, Homo sapiens
  misc_RNA (1)...(19): siRNA sense strand
cccagaggcugaccaugug

SEQ ID NO: 1110100 - RNA, 19 nt, Homo sapiens
  misc_RNA (1)...(19): siRNA sense strand
acagcacccuggagaaaca

SEQ ID NO: 1110101 - RNA, 19 nt, Homo sapiens
  misc_RNA (1)...(19): siRNA sense strand
ugggcaaggucauggagaa

SEQ ID NO: 1110102 - RNA, 19 nt, Homo sapiens
  misc_RNA (1)...(19): siRNA sense strand
agugcgagcugugcaacua

SEQ ID NO: 1110103 - RNA, 19 nt, Homo sapiens
  misc_RNA (1)...(19): siRNA sense strand
ugacaaggcccuggacaag

SEQ ID NO: 1110104 - RNA, 19 nt, Homo sapiens
  misc_RNA (1)...(19): siRNA sense strand
uguggccagugucaaauga

SEQ ID NO: 1110105 - RNA, 19 nt, Homo sapiens
  misc_RNA (1)...(19): siRNA sense strand
gcucaagcgccacaugaag

SEQ ID NO: 1110106 - RNA, 19 nt, Homo sapiens
  misc_RNA (1)...(19): siRNA sense strand
ggaggaggaggagcugcua

SEQ ID NO: 1110107 - RNA, 19 nt, Homo sapiens
  misc_RNA (1)...(19): siRNA sense strand
gcacggcuuccgcaucuac

SEQ ID NO: 1110108 - RNA, 19 nt, Homo sapiens
  misc_RNA (1)...(19): siRNA sense strand
gcaagucgugcgaguucug

SEQ ID NO: 1110109 - RNA, 19 nt, Homo sapiens
  misc_RNA (1)...(19): siRNA sense strand
uucaagaacugcagcaacu

SEQ ID NO: 1110110 - RNA, 19 nt, Homo sapiens
  misc_RNA (1)...(19): siRNA sense strand
acgcacggcuuccgcaucu

SEQ ID NO: 1110111 - RNA, 19 nt, Homo sapiens
  misc_RNA (1)...(19): siRNA sense strand
gcagucacacgggcgagaa

SEQ ID NO: 1110112 - RNA, 19 nt, Homo sapiens
  misc_RNA (1)...(19): siRNA sense strand
ccgccauccucgaagaaga

SEQ ID NO: 1110113 - RNA, 19 nt, Homo sapiens
  misc_RNA (1)...(19): siRNA sense strand
gagauagaggagccaagug

SEQ ID NO: 1110114 - RNA, 19 nt, Homo sapiens
  misc_RNA (1)...(19): siRNA sense strand
caagcucacgcgccacaug

SEQ ID NO: 1110115 - RNA, 19 nt, Homo sapiens
  misc_RNA (1)...(19): siRNA sense strand
caugcaagcagcccuucaa

SEQ ID NO: 1110116 - RNA, 19 nt, Homo sapiens
  misc_RNA (1)...(19): siRNA sense strand
gaagacgcacgggcagauc

SEQ ID NO: 1110117 - RNA, 19 nt, Homo sapiens
  misc_RNA (1)...(19): siRNA sense strand
guacugcggcaagguguuc

SEQ ID NO: 1110118 - RNA, 19 nt, Homo sapiens
  misc_RNA (1)...(19): siRNA sense strand
gcaacccgcagcacuuguc

SEQ ID NO: 1110119 - RNA, 19 nt, Homo sapiens
  misc_RNA (1)...(19): siRNA sense strand
gcaucaagguggagaagga

SEQ ID NO: 1110120 - RNA, 19 nt, Homo sapiens
  misc_RNA (1)...(19): siRNA sense strand
gcgagaagcccuacaagug

SEQ ID NO: 1110121 - RNA, 19 nt, Homo sapiens
  misc_RNA (1)...(19): siRNA sense strand
gcggcaagguguucaagaa

SEQ ID NO: 1110122 - RNA, 19 nt, Homo sapiens
  misc_RNA (1)...(19): siRNA sense strand
acaaggcccuggacaagga

SEQ ID NO: 1110123 - RNA, 19 nt, Homo sapiens
  misc_RNA (1)...(19): siRNA sense strand
gcaagcagcccuucaacag

SEQ ID NO: 1110124 - RNA, 19 nt, Homo sapiens
  misc_RNA (1)...(19): siRNA sense strand
aagaugagccuuccagcua

SEQ ID NO: 1110125 - RNA, 19 nt, Homo sapiens
  misc_RNA (1)...(19): siRNA sense strand
gagcaagucgugcgaguuc

SEQ ID NO: 1110126 - RNA, 19 nt, Homo sapiens
  misc_RNA (1)...(19): siRNA sense strand
cagcuugggugccugcuau

SEQ ID NO: 1110127 - RNA, 19 nt, Homo sapiens
  misc_RNA (1)...(19): siRNA sense strand
gcaagaccuucaaguucca

SEQ ID NO: 1110128 - RNA, 19 nt, Homo sapiens
  misc_RNA (1)...(19): siRNA sense strand
gcucaccuguggccagugu

SEQ ID NO: 1110129 - RNA, 19 nt, Homo sapiens
  misc_RNA (1)...(19): siRNA sense strand
gcaaggucauggagaacgu

SEQ ID NO: 1110130 - RNA, 19 nt, Homo sapiens
  misc_RNA (1)...(19): siRNA sense strand
gcggcaagaccuucaaguu

SEQ ID NO: 1110131 - RNA, 19 nt, Homo sapiens
  misc_RNA (1)...(19): siRNA sense strand
ggagauagaggagccaagu

SEQ ID NO: 1110132 - RNA, 19 nt, Homo sapiens
  misc_RNA (1)...(19): siRNA sense strand
gagccuuccagcuacauuu

SEQ ID NO: 1110133 - RNA, 19 nt, Homo sapiens
  misc_RNA (1)...(19): siRNA sense strand
cuacagcacccuggagaaa

SEQ ID NO: 1110134 - RNA, 19 nt, Homo sapiens
  misc_RNA (1)...(19): siRNA sense strand
gcgagcggccuuacaagug

SEQ ID NO: 1110135 - RNA, 19 nt, Homo sapiens
  misc_RNA (1)...(19): siRNA sense strand
ugaagacgcacaugcacaa

SEQ ID NO: 1110136 - RNA, 19 nt, Homo sapiens
  misc_RNA (1)...(19): siRNA sense strand
cggcaagaccuucaaguuc

SEQ ID NO: 1110137 - RNA, 19 nt, Homo sapiens
  misc_RNA (1)...(19): siRNA sense strand
gaugagccuuccagcuaca

SEQ ID NO: 1110138 - RNA, 19 nt, Homo sapiens
  misc_RNA (1)...(19): siRNA sense strand
acgagggucuggagauaga

SEQ ID NO: 1110139 - RNA, 19 nt, Homo sapiens
  misc_RNA (1)...(19): siRNA sense strand
cagcuacauuugcacaaca

SEQ ID NO: 1110140 - RNA, 19 nt, Homo sapiens
  misc_RNA (1)...(19): siRNA sense strand
gcagcgacacgugcgagua

SEQ ID NO: 1110141 - RNA, 19 nt, Homo sapiens
  misc_RNA (1)...(19): siRNA sense strand
cccagaggcugaccaugug

SEQ ID NO: 1110142 - RNA, 19 nt, Homo sapiens
  misc_RNA (1)...(19): siRNA sense strand
acagcacccuggagaaaca

SEQ ID NO: 1110143 - RNA, 19 nt, Homo sapiens
  misc_RNA (1)...(19): siRNA sense strand
ugggcaaggucauggagaa

SEQ ID NO: 1110144 - RNA, 19 nt, Homo sapiens
  misc_RNA (1)...(19): siRNA sense strand
agugcgagcugugcaacua

SEQ ID NO: 1110145 - RNA, 19 nt, Homo sapiens
  misc_RNA (1)...(19): siRNA sense strand
ugacaaggcccuggacaag

SEQ ID NO: 1110146 - RNA, 19 nt, Homo sapiens
  misc_RNA (1)...(19): siRNA sense strand
uguggccagugucaaauga

SEQ ID NO: 1110147 - RNA, 19 nt, Homo sapiens
  misc_RNA (1)...(19): siRNA sense strand
gcucaagcgccacaugaag

SEQ ID NO: 1110148 - RNA, 19 nt, Homo sapiens
  misc_RNA (1)...(19): siRNA sense strand
ggaggaggaggagcugcua

SEQ ID NO: 1110149 - RNA, 19 nt, Homo sapiens
  misc_RNA (1)...(19): siRNA sense strand
gcacggcuuccgcaucuac

SEQ ID NO: 1110150 - RNA, 19 nt, Homo sapiens
  misc_RNA (1)...(19): siRNA sense strand
gcaagucgugcgaguucug

SEQ ID NO: 1110151 - RNA, 19 nt, Homo sapiens
  misc_RNA (1)...(19): siRNA sense strand
uucaagaacugcagcaacu

SEQ ID NO: 1110152 - RNA, 19 nt, Homo sapiens
  misc_RNA (1)...(19): siRNA sense strand
acgcacggcuuccgcaucu

SEQ ID NO: 1110153 - RNA, 19 nt, Homo sapiens
  misc_RNA (1)...(19): siRNA sense strand
gcagucacacgggcgagaa

SEQ ID NO: 1110154 - RNA, 19 nt, Homo sapiens
  misc_RNA (1)...(19): siRNA sense strand
ccgccauccucgaagaaga

SEQ ID NO: 1110155 - RNA, 19 nt, Homo sapiens
  misc_RNA (1)...(19): siRNA sense strand
gagauagaggagccaagug

SEQ ID NO: 1110156 - RNA, 19 nt, Homo sapiens
  misc_RNA (1)...(19): siRNA sense strand
caagcucacgcgccacaug

SEQ ID NO: 1110157 - RNA, 19 nt, Homo sapiens
  misc_RNA (1)...(19): siRNA sense strand
caugcaagcagcccuucaa

SEQ ID NO: 1110158 - RNA, 19 nt, Homo sapiens
  misc_RNA (1)...(19): siRNA sense strand
gaagacgcacgggcagauc

SEQ ID NO: 1110159 - RNA, 19 nt, Homo sapiens
  misc_RNA (1)...(19): siRNA sense strand
guacugcggcaagguguuc

SEQ ID NO: 1110160 - RNA, 19 nt, Homo sapiens
  misc_RNA (1)...(19): siRNA sense strand
gcaacccgcagcacuuguc

SEQ ID NO: 1110161 - RNA, 19 nt, Homo sapiens
  misc_RNA (1)...(19): siRNA sense strand
ggauacagcuggagucagu

SEQ ID NO: 1110162 - RNA, 19 nt, Homo sapiens
  misc_RNA (1)...(19): siRNA sense strand
ccuacaagcuuucccagaa

SEQ ID NO: 1110163 - RNA, 19 nt, Homo sapiens
  misc_RNA (1)...(19): siRNA sense strand
ggaggcaggcgacgaguuu

SEQ ID NO: 1110164 - RNA, 19 nt, Homo sapiens
  misc_RNA (1)...(19): siRNA sense strand
ggagucaguuuagugaugu

SEQ ID NO: 1110165 - RNA, 19 nt, Homo sapiens
  misc_RNA (1)...(19): siRNA sense strand
uuagugauguggaagagaa

SEQ ID NO: 1110166 - RNA, 19 nt, Homo sapiens
  misc_RNA (1)...(19): siRNA sense strand
gacagcauaucagagcuuu

SEQ ID NO: 1110167 - RNA, 19 nt, Homo sapiens
  misc_RNA (1)...(19): siRNA sense strand
ggaacucuaugggaacaau

SEQ ID NO: 1110168 - RNA, 19 nt, Homo sapiens
  misc_RNA (1)...(19): siRNA sense strand
ggacugaaucggagaugga

SEQ ID NO: 1110169 - RNA, 19 nt, Homo sapiens
  misc_RNA (1)...(19): siRNA sense strand
cagcauaucagagcuuuga

SEQ ID NO: 1110170 - RNA, 19 nt, Homo sapiens
  misc_RNA (1)...(19): siRNA sense strand
gcuggagucaguuuaguga

SEQ ID NO: 1110171 - RNA, 19 nt, Homo sapiens
  misc_RNA (1)...(19): siRNA sense strand
ucaguuuagugauguggaa

SEQ ID NO: 1110172 - RNA, 19 nt, Homo sapiens
  misc_RNA (1)...(19): siRNA sense strand
ggagcuggugguugacuuu

SEQ ID NO: 1110173 - RNA, 19 nt, Homo sapiens
  misc_RNA (1)...(19): siRNA sense strand
ggacagcauaucagagcuu

SEQ ID NO: 1110174 - RNA, 19 nt, Homo sapiens
  misc_RNA (1)...(19): siRNA sense strand
uggagucaguuuagugaug

SEQ ID NO: 1110175 - RNA, 19 nt, Homo sapiens
  misc_RNA (1)...(19): siRNA sense strand
cugcugggcucacucuuca

SEQ ID NO: 1110176 - RNA, 19 nt, Homo sapiens
  misc_RNA (1)...(19): siRNA sense strand
accgggagcuggugguuga

SEQ ID NO: 1110177 - RNA, 19 nt, Homo sapiens
  misc_RNA (1)...(19): siRNA sense strand
ccagggacagcauaucaga

SEQ ID NO: 1110178 - RNA, 19 nt, Homo sapiens
  misc_RNA (1)...(19): siRNA sense strand
acucuucagucggaaauga

SEQ ID NO: 1110179 - RNA, 19 nt, Homo sapiens
  misc_RNA (1)...(19): siRNA sense strand
gggagcuggugguugacuu

SEQ ID NO: 1110180 - RNA, 19 nt, Homo sapiens
  misc_RNA (1)...(19): siRNA sense strand
cauaucagagcuuugaaca

SEQ ID NO: 1110181 - RNA, 19 nt, Homo sapiens
  misc_RNA (1)...(19): siRNA sense strand
gagccgaaagggccaggaa

SEQ ID NO: 1110182 - RNA, 19 nt, Homo sapiens
  misc_RNA (1)...(19): siRNA sense strand
uggaagagaacaggacuga

SEQ ID NO: 1110183 - RNA, 19 nt, Homo sapiens
  misc_RNA (1)...(19): siRNA sense strand
gaacucuaugggaacaaug

SEQ ID NO: 1110184 - RNA, 19 nt, Homo sapiens
  misc_RNA (1)...(19): siRNA sense strand
cauggcagcaguaaagcaa

SEQ ID NO: 1110185 - RNA, 19 nt, Homo sapiens
  misc_RNA (1)...(19): siRNA sense strand
ggccacagcagcaguuugg

SEQ ID NO: 1110186 - RNA, 19 nt, Homo sapiens
  misc_RNA (1)...(19): siRNA sense strand
ccacagcagcaguuuggau

SEQ ID NO: 1110187 - RNA, 19 nt, Homo sapiens
  misc_RNA (1)...(19): siRNA sense strand
cagcuggagucaguuuagu

SEQ ID NO: 1110188 - RNA, 19 nt, Homo sapiens
  misc_RNA (1)...(19): siRNA sense strand
gcuggugguugacuuucuc

SEQ ID NO: 1110189 - RNA, 19 nt, Homo sapiens
  misc_RNA (1)...(19): siRNA sense strand
guggaacucuaugggaaca

SEQ ID NO: 1110190 - RNA, 19 nt, Homo sapiens
  misc_RNA (1)...(19): siRNA sense strand
ugguugacuuucucuccua

SEQ ID NO: 1110191 - RNA, 19 nt, Homo sapiens
  misc_RNA (1)...(19): siRNA sense strand
ugacaucccagcuccacau

SEQ ID NO: 1110192 - RNA, 19 nt, Homo sapiens
  misc_RNA (1)...(19): siRNA sense strand
ggauacagcuggagucagu

SEQ ID NO: 1110193 - RNA, 19 nt, Homo sapiens
  misc_RNA (1)...(19): siRNA sense strand
ccuacaagcuuucccagaa

SEQ ID NO: 1110194 - RNA, 19 nt, Homo sapiens
  misc_RNA (1)...(19): siRNA sense strand
ggaggcaggcgacgaguuu

SEQ ID NO: 1110195 - RNA, 19 nt, Homo sapiens
  misc_RNA (1)...(19): siRNA sense strand
ggagucaguuuagugaugu

SEQ ID NO: 1110196 - RNA, 19 nt, Homo sapiens
  misc_RNA (1)...(19): siRNA sense strand
uuagugauguggaagagaa

SEQ ID NO: 1110197 - RNA, 19 nt, Homo sapiens
  misc_RNA (1)...(19): siRNA sense strand
gacagcauaucagagcuuu

SEQ ID NO: 1110198 - RNA, 19 nt, Homo sapiens
  misc_RNA (1)...(19): siRNA sense strand
ggaacucuaugggaacaau

SEQ ID NO: 1110199 - RNA, 19 nt, Homo sapiens
  misc_RNA (1)...(19): siRNA sense strand
ggacugaaucggagaugga

SEQ ID NO: 1110200 - RNA, 19 nt, Homo sapiens
  misc_RNA (1)...(19): siRNA sense strand
cagcauaucagagcuuuga

SEQ ID NO: 1110201 - RNA, 19 nt, Homo sapiens
  misc_RNA (1)...(19): siRNA sense strand
gcuggagucaguuuaguga

SEQ ID NO: 1110202 - RNA, 19 nt, Homo sapiens
  misc_RNA (1)...(19): siRNA sense strand
ucaguuuagugauguggaa

SEQ ID NO: 1110203 - RNA, 19 nt, Homo sapiens
  misc_RNA (1)...(19): siRNA sense strand
ggagcuggugguugacuuu

SEQ ID NO: 1110204 - RNA, 19 nt, Homo sapiens
  misc_RNA (1)...(19): siRNA sense strand
ggacagcauaucagagcuu

SEQ ID NO: 1110205 - RNA, 19 nt, Homo sapiens
  misc_RNA (1)...(19): siRNA sense strand
uggagucaguuuagugaug

SEQ ID NO: 1110206 - RNA, 19 nt, Homo sapiens
  misc_RNA (1)...(19): siRNA sense strand
cugcugggcucacucuuca

SEQ ID NO: 1110207 - RNA, 19 nt, Homo sapiens
  misc_RNA (1)...(19): siRNA sense strand
accgggagcuggugguuga

SEQ ID NO: 1110208 - RNA, 19 nt, Homo sapiens
  misc_RNA (1)...(19): siRNA sense strand
ccagggacagcauaucaga

SEQ ID NO: 1110209 - RNA, 19 nt, Homo sapiens
  misc_RNA (1)...(19): siRNA sense strand
acucuucagucggaaauga

SEQ ID NO: 1110210 - RNA, 19 nt, Homo sapiens
  misc_RNA (1)...(19): siRNA sense strand
gggagcuggugguugacuu

SEQ ID NO: 1110211 - RNA, 19 nt, Homo sapiens
  misc_RNA (1)...(19): siRNA sense strand
cauaucagagcuuugaaca

SEQ ID NO: 1110212 - RNA, 19 nt, Homo sapiens
  misc_RNA (1)...(19): siRNA sense strand
gagccgaaagggccaggaa

SEQ ID NO: 1110213 - RNA, 19 nt, Homo sapiens
  misc_RNA (1)...(19): siRNA sense strand
uggaagagaacaggacuga

SEQ ID NO: 1110214 - RNA, 19 nt, Homo sapiens
  misc_RNA (1)...(19): siRNA sense strand
gaacucuaugggaacaaug

SEQ ID NO: 1110215 - RNA, 19 nt, Homo sapiens
  misc_RNA (1)...(19): siRNA sense strand
cauggcagcaguaaagcaa

SEQ ID NO: 1110216 - RNA, 19 nt, Homo sapiens
  misc_RNA (1)...(19): siRNA sense strand
ggccacagcagcaguuugg

SEQ ID NO: 1110217 - RNA, 19 nt, Homo sapiens
  misc_RNA (1)...(19): siRNA sense strand
ccacagcagcaguuuggau

SEQ ID NO: 1110218 - RNA, 19 nt, Homo sapiens
  misc_RNA (1)...(19): siRNA sense strand
cagcuggagucaguuuagu

SEQ ID NO: 1110219 - RNA, 19 nt, Homo sapiens
  misc_RNA (1)...(19): siRNA sense strand
gcuggugguugacuuucuc

SEQ ID NO: 1110220 - RNA, 19 nt, Homo sapiens
  misc_RNA (1)...(19): siRNA sense strand
guggaacucuaugggaaca

SEQ ID NO: 1110221 - RNA, 19 nt, Homo sapiens
  misc_RNA (1)...(19): siRNA sense strand
ugguugacuuucucuccua

SEQ ID NO: 1110222 - RNA, 19 nt, Homo sapiens
  misc_RNA (1)...(19): siRNA sense strand
ugacaucccagcuccacau

SEQ ID NO: 1110223 - RNA, 19 nt, Homo sapiens
  misc_RNA (1)...(19): siRNA sense strand
guaagaggcugguggagaa

SEQ ID NO: 1110224 - RNA, 19 nt, Homo sapiens
  misc_RNA (1)...(19): siRNA sense strand
cgaugacgcugaacuagua

SEQ ID NO: 1110225 - RNA, 19 nt, Homo sapiens
  misc_RNA (1)...(19): siRNA sense strand
cgaagcagcugaucagaau

SEQ ID NO: 1110226 - RNA, 19 nt, Homo sapiens
  misc_RNA (1)...(19): siRNA sense strand
gaacuaguaaggcucagua

SEQ ID NO: 1110227 - RNA, 19 nt, Homo sapiens
  misc_RNA (1)...(19): siRNA sense strand
gcaaugacaaugagaacaa

SEQ ID NO: 1110228 - RNA, 19 nt, Homo sapiens
  misc_RNA (1)...(19): siRNA sense strand
ggaggaaacacagaauaaa

SEQ ID NO: 1110229 - RNA, 19 nt, Homo sapiens
  misc_RNA (1)...(19): siRNA sense strand
cuaguaaggcucaguaaga

SEQ ID NO: 1110230 - RNA, 19 nt, Homo sapiens
  misc_RNA (1)...(19): siRNA sense strand
gaauggcaaugacaaugag

SEQ ID NO: 1110231 - RNA, 19 nt, Homo sapiens
  misc_RNA (1)...(19): siRNA sense strand
gaggggagcucugugaaaa

SEQ ID NO: 1110232 - RNA, 19 nt, Homo sapiens
  misc_RNA (1)...(19): siRNA sense strand
acaaugagaacaacaggaa

SEQ ID NO: 1110233 - RNA, 19 nt, Homo sapiens
  misc_RNA (1)...(19): siRNA sense strand
uggaggaaacacagaauaa

SEQ ID NO: 1110234 - RNA, 19 nt, Homo sapiens
  misc_RNA (1)...(19): siRNA sense strand
gaucagaauggcaaugaca

SEQ ID NO: 1110235 - RNA, 19 nt, Homo sapiens
  misc_RNA (1)...(19): siRNA sense strand
ggagcccgaugacgcugaa

SEQ ID NO: 1110236 - RNA, 19 nt, Homo sapiens
  misc_RNA (1)...(19): siRNA sense strand
agaauggcaaugacaauga

SEQ ID NO: 1110237 - RNA, 19 nt, Homo sapiens
  misc_RNA (1)...(19): siRNA sense strand
gaggaaacacagaauaaaa

SEQ ID NO: 1110238 - RNA, 19 nt, Homo sapiens
  misc_RNA (1)...(19): siRNA sense strand
ggagaacgcggugcucaag

SEQ ID NO: 1110239 - RNA, 19 nt, Homo sapiens
  misc_RNA (1)...(19): siRNA sense strand
uaguaaggcucaguaagag

SEQ ID NO: 1110240 - RNA, 19 nt, Homo sapiens
  misc_RNA (1)...(19): siRNA sense strand
ugagaacaacaggaaauga

SEQ ID NO: 1110241 - RNA, 19 nt, Homo sapiens
  misc_RNA (1)...(19): siRNA sense strand
gcccgaugacgcugaacua

SEQ ID NO: 1110242 - RNA, 19 nt, Homo sapiens
  misc_RNA (1)...(19): siRNA sense strand
cagaauggcaaugacaaug

SEQ ID NO: 1110243 - RNA, 19 nt, Homo sapiens
  misc_RNA (1)...(19): siRNA sense strand
ccgaagcagcugaucagaa

SEQ ID NO: 1110244 - RNA, 19 nt, Homo sapiens
  misc_RNA (1)...(19): siRNA sense strand
caaugagaacaacaggaaa

SEQ ID NO: 1110245 - RNA, 19 nt, Homo sapiens
  misc_RNA (1)...(19): siRNA sense strand
gaugacgcugaacuaguaa

SEQ ID NO: 1110246 - RNA, 19 nt, Homo sapiens
  misc_RNA (1)...(19): siRNA sense strand
aaaccgaagcagcugauca

SEQ ID NO: 1110247 - RNA, 19 nt, Homo sapiens
  misc_RNA (1)...(19): siRNA sense strand
aaugagaacaacaggaaau

SEQ ID NO: 1110248 - RNA, 19 nt, Homo sapiens
  misc_RNA (1)...(19): siRNA sense strand
caaugacaaugagaacaac

SEQ ID NO: 1110249 - RNA, 19 nt, Homo sapiens
  misc_RNA (1)...(19): siRNA sense strand
guaagaggcugguggagaa

SEQ ID NO: 1110250 - RNA, 19 nt, Homo sapiens
  misc_RNA (1)...(19): siRNA sense strand
cgaugacgcugaacuagua

SEQ ID NO: 1110251 - RNA, 19 nt, Homo sapiens
  misc_RNA (1)...(19): siRNA sense strand
cgaagcagcugaucagaau

SEQ ID NO: 1110252 - RNA, 19 nt, Homo sapiens
  misc_RNA (1)...(19): siRNA sense strand
gaacuaguaaggcucagua

SEQ ID NO: 1110253 - RNA, 19 nt, Homo sapiens
  misc_RNA (1)...(19): siRNA sense strand
gcaaugacaaugagaacaa

SEQ ID NO: 1110254 - RNA, 19 nt, Homo sapiens
  misc_RNA (1)...(19): siRNA sense strand
ggaggaaacacagaauaaa

SEQ ID NO: 1110255 - RNA, 19 nt, Homo sapiens
  misc_RNA (1)...(19): siRNA sense strand
cuaguaaggcucaguaaga

SEQ ID NO: 1110256 - RNA, 19 nt, Homo sapiens
  misc_RNA (1)...(19): siRNA sense strand
gaauggcaaugacaaugag

SEQ ID NO: 1110257 - RNA, 19 nt, Homo sapiens
  misc_RNA (1)...(19): siRNA sense strand
gaggggagcucugugaaaa

SEQ ID NO: 1110258 - RNA, 19 nt, Homo sapiens
  misc_RNA (1)...(19): siRNA sense strand
acaaugagaacaacaggaa

SEQ ID NO: 1110259 - RNA, 19 nt, Homo sapiens
  misc_RNA (1)...(19): siRNA sense strand
uggaggaaacacagaauaa

SEQ ID NO: 1110260 - RNA, 19 nt, Homo sapiens
  misc_RNA (1)...(19): siRNA sense strand
gaucagaauggcaaugaca

SEQ ID NO: 1110261 - RNA, 19 nt, Homo sapiens
  misc_RNA (1)...(19): siRNA sense strand
ggagcccgaugacgcugaa

SEQ ID NO: 1110262 - RNA, 19 nt, Homo sapiens
  misc_RNA (1)...(19): siRNA sense strand
agaauggcaaugacaauga

SEQ ID NO: 1110263 - RNA, 19 nt, Homo sapiens
  misc_RNA (1)...(19): siRNA sense strand
gaggaaacacagaauaaaa

SEQ ID NO: 1110264 - RNA, 19 nt, Homo sapiens
  misc_RNA (1)...(19): siRNA sense strand
ggagaacgcggugcucaag

SEQ ID NO: 1110265 - RNA, 19 nt, Homo sapiens
  misc_RNA (1)...(19): siRNA sense strand
uaguaaggcucaguaagag

SEQ ID NO: 1110266 - RNA, 19 nt, Homo sapiens
  misc_RNA (1)...(19): siRNA sense strand
ugagaacaacaggaaauga

SEQ ID NO: 1110267 - RNA, 19 nt, Homo sapiens
  misc_RNA (1)...(19): siRNA sense strand
gcccgaugacgcugaacua

SEQ ID NO: 1110268 - RNA, 19 nt, Homo sapiens
  misc_RNA (1)...(19): siRNA sense strand
cagaauggcaaugacaaug

SEQ ID NO: 1110269 - RNA, 19 nt, Homo sapiens
  misc_RNA (1)...(19): siRNA sense strand
ccgaagcagcugaucagaa

SEQ ID NO: 1110270 - RNA, 19 nt, Homo sapiens
  misc_RNA (1)...(19): siRNA sense strand
caaugagaacaacaggaaa

SEQ ID NO: 1110271 - RNA, 19 nt, Homo sapiens
  misc_RNA (1)...(19): siRNA sense strand
gaugacgcugaacuaguaa

SEQ ID NO: 1110272 - RNA, 19 nt, Homo sapiens
  misc_RNA (1)...(19): siRNA sense strand
aaaccgaagcagcugauca

SEQ ID NO: 1110273 - RNA, 19 nt, Homo sapiens
  misc_RNA (1)...(19): siRNA sense strand
aaugagaacaacaggaaau

SEQ ID NO: 1110274 - RNA, 19 nt, Homo sapiens
  misc_RNA (1)...(19): siRNA sense strand
caaugacaaugagaacaac

SEQ ID NO: 1110275 - RNA, 19 nt, Homo sapiens
  misc_RNA (1)...(19): siRNA sense strand
guaagaggcugguggagaa

SEQ ID NO: 1110276 - RNA, 19 nt, Homo sapiens
  misc_RNA (1)...(19): siRNA sense strand
cgaugacgcugaacuagua

SEQ ID NO: 1110277 - RNA, 19 nt, Homo sapiens
  misc_RNA (1)...(19): siRNA sense strand
cgaagcagcugaucagaau

SEQ ID NO: 1110278 - RNA, 19 nt, Homo sapiens
  misc_RNA (1)...(19): siRNA sense strand
gaacuaguaaggcucagua

SEQ ID NO: 1110279 - RNA, 19 nt, Homo sapiens
  misc_RNA (1)...(19): siRNA sense strand
gcaaugacaaugagaacaa

SEQ ID NO: 1110280 - RNA, 19 nt, Homo sapiens
  misc_RNA (1)...(19): siRNA sense strand
ggaggaaacacagaauaaa

SEQ ID NO: 1110281 - RNA, 19 nt, Homo sapiens
  misc_RNA (1)...(19): siRNA sense strand
cuaguaaggcucaguaaga

SEQ ID NO: 1110282 - RNA, 19 nt, Homo sapiens
  misc_RNA (1)...(19): siRNA sense strand
gaauggcaaugacaaugag

SEQ ID NO: 1110283 - RNA, 19 nt, Homo sapiens
  misc_RNA (1)...(19): siRNA sense strand
gaggggagcucugugaaaa

SEQ ID NO: 1110284 - RNA, 19 nt, Homo sapiens
  misc_RNA (1)...(19): siRNA sense strand
acaaugagaacaacaggaa

SEQ ID NO: 1110285 - RNA, 19 nt, Homo sapiens
  misc_RNA (1)...(19): siRNA sense strand
uggaggaaacacagaauaa

SEQ ID NO: 1110286 - RNA, 19 nt, Homo sapiens
  misc_RNA (1)...(19): siRNA sense strand
gaucagaauggcaaugaca

SEQ ID NO: 1110287 - RNA, 19 nt, Homo sapiens
  misc_RNA (1)...(19): siRNA sense strand
ggagcccgaugacgcugaa

SEQ ID NO: 1110288 - RNA, 19 nt, Homo sapiens
  misc_RNA (1)...(19): siRNA sense strand
agaauggcaaugacaauga

SEQ ID NO: 1110289 - RNA, 19 nt, Homo sapiens
  misc_RNA (1)...(19): siRNA sense strand
gaggaaacacagaauaaaa

SEQ ID NO: 1110290 - RNA, 19 nt, Homo sapiens
  misc_RNA (1)...(19): siRNA sense strand
ggagaacgcggugcucaag

SEQ ID NO: 1110291 - RNA, 19 nt, Homo sapiens
  misc_RNA (1)...(19): siRNA sense strand
uaguaaggcucaguaagag

SEQ ID NO: 1110292 - RNA, 19 nt, Homo sapiens
  misc_RNA (1)...(19): siRNA sense strand
ugagaacaacaggaaauga

SEQ ID NO: 1110293 - RNA, 19 nt, Homo sapiens
  misc_RNA (1)...(19): siRNA sense strand
gcccgaugacgcugaacua

SEQ ID NO: 1110294 - RNA, 19 nt, Homo sapiens
  misc_RNA (1)...(19): siRNA sense strand
cagaauggcaaugacaaug

SEQ ID NO: 1110295 - RNA, 19 nt, Homo sapiens
  misc_RNA (1)...(19): siRNA sense strand
ccgaagcagcugaucagaa

SEQ ID NO: 1110296 - RNA, 19 nt, Homo sapiens
  misc_RNA (1)...(19): siRNA sense strand
caaugagaacaacaggaaa

SEQ ID NO: 1110297 - RNA, 19 nt, Homo sapiens
  misc_RNA (1)...(19): siRNA sense strand
gaugacgcugaacuaguaa

SEQ ID NO: 1110298 - RNA, 19 nt, Homo sapiens
  misc_RNA (1)...(19): siRNA sense strand
aaaccgaagcagcugauca

SEQ ID NO: 1110299 - RNA, 19 nt, Homo sapiens
  misc_RNA (1)...(19): siRNA sense strand
aaugagaacaacaggaaau

SEQ ID NO: 1110300 - RNA, 19 nt, Homo sapiens
  misc_RNA (1)...(19): siRNA sense strand
caaugacaaugagaacaac

SEQ ID NO: 1110301 - RNA, 19 nt, Homo sapiens
  misc_RNA (1)...(19): siRNA sense strand
gggcagcguugugaucuuu

SEQ ID NO: 1110302 - RNA, 19 nt, Homo sapiens
  misc_RNA (1)...(19): siRNA sense strand
gaccuguucugucagugaa

SEQ ID NO: 1110303 - RNA, 19 nt, Homo sapiens
  misc_RNA (1)...(19): siRNA sense strand
aaagaccuguucugucagu

SEQ ID NO: 1110304 - RNA, 19 nt, Homo sapiens
  misc_RNA (1)...(19): siRNA sense strand
uggagaagaaggacccaaa

SEQ ID NO: 1110305 - RNA, 19 nt, Homo sapiens
  misc_RNA (1)...(19): siRNA sense strand
gcagcguugugaucuuugc

SEQ ID NO: 1110306 - RNA, 19 nt, Homo sapiens
  misc_RNA (1)...(19): siRNA sense strand
ggagaagaaggacccaaaa

SEQ ID NO: 1110307 - RNA, 19 nt, Homo sapiens
  misc_RNA (1)...(19): siRNA sense strand
gggcagcguugugaucuuu

SEQ ID NO: 1110308 - RNA, 19 nt, Homo sapiens
  misc_RNA (1)...(19): siRNA sense strand
gaccuguucugucagugaa

SEQ ID NO: 1110309 - RNA, 19 nt, Homo sapiens
  misc_RNA (1)...(19): siRNA sense strand
aaagaccuguucugucagu

SEQ ID NO: 1110310 - RNA, 19 nt, Homo sapiens
  misc_RNA (1)...(19): siRNA sense strand
uuucuacaccuguggguua

SEQ ID NO: 1110311 - RNA, 19 nt, Homo sapiens
  misc_RNA (1)...(19): siRNA sense strand
uggagaagaaggacccaaa

SEQ ID NO: 1110312 - RNA, 19 nt, Homo sapiens
  misc_RNA (1)...(19): siRNA sense strand
gcagcguugugaucuuugc

SEQ ID NO: 1110313 - RNA, 19 nt, Homo sapiens
  misc_RNA (1)...(19): siRNA sense strand
ggagaagaaggacccaaaa

SEQ ID NO: 1110314 - RNA, 19 nt, Homo sapiens
  misc_RNA (1)...(19): siRNA sense strand
cuaaggaucucaaaguaaa

SEQ ID NO: 1110315 - RNA, 19 nt, Homo sapiens
  misc_RNA (1)...(19): siRNA sense strand
gugcugcgauucuggagua

SEQ ID NO: 1110316 - RNA, 19 nt, Homo sapiens
  misc_RNA (1)...(19): siRNA sense strand
ggccaaggcuaaggcagua

SEQ ID NO: 1110317 - RNA, 19 nt, Homo sapiens
  misc_RNA (1)...(19): siRNA sense strand
guacagugcugcgauucug

SEQ ID NO: 1110318 - RNA, 19 nt, Homo sapiens
  misc_RNA (1)...(19): siRNA sense strand
gaguuggauucucuuauca

SEQ ID NO: 1110319 - RNA, 19 nt, Homo sapiens
  misc_RNA (1)...(19): siRNA sense strand
gagcugggcuacaguuucc

SEQ ID NO: 1110320 - RNA, 19 nt, Homo sapiens
  misc_RNA (1)...(19): siRNA sense strand
gugggaaggccaaggcuaa

SEQ ID NO: 1110321 - RNA, 19 nt, Homo sapiens
  misc_RNA (1)...(19): siRNA sense strand
acagagagcugggcuacag

SEQ ID NO: 1110322 - RNA, 19 nt, Homo sapiens
  misc_RNA (1)...(19): siRNA sense strand
ugcuggagcuggcagguaa

SEQ ID NO: 1110323 - RNA, 19 nt, Homo sapiens
  misc_RNA (1)...(19): siRNA sense strand
uucuaaggaucucaaagua

SEQ ID NO: 1110324 - RNA, 19 nt, Homo sapiens
  misc_RNA (1)...(19): siRNA sense strand
ucuaaggaucucaaaguaa

SEQ ID NO: 1110325 - RNA, 19 nt, Homo sapiens
  misc_RNA (1)...(19): siRNA sense strand
caaaguaaagcguaucacu

SEQ ID NO: 1110326 - RNA, 19 nt, Homo sapiens
  misc_RNA (1)...(19): siRNA sense strand
cagguaaugcuucuaagga

SEQ ID NO: 1110327 - RNA, 19 nt, Homo sapiens
  misc_RNA (1)...(19): siRNA sense strand
gagagcugggcuacaguuu

SEQ ID NO: 1110328 - RNA, 19 nt, Homo sapiens
  misc_RNA (1)...(19): siRNA sense strand
ugcaauccguggugaugaa

SEQ ID NO: 1110329 - RNA, 19 nt, Homo sapiens
  misc_RNA (1)...(19): siRNA sense strand
guuggauucucuuaucaag

SEQ ID NO: 1110330 - RNA, 19 nt, Homo sapiens
  misc_RNA (1)...(19): siRNA sense strand
gaugaagaguuggauucuc

SEQ ID NO: 1110331 - RNA, 19 nt, Homo sapiens
  misc_RNA (1)...(19): siRNA sense strand
uggcagguaaugcuucuaa

SEQ ID NO: 1110332 - RNA, 19 nt, Homo sapiens
  misc_RNA (1)...(19): siRNA sense strand
cguguacagugcugcgauu

SEQ ID NO: 1110333 - RNA, 19 nt, Homo sapiens
  misc_RNA (1)...(19): siRNA sense strand
gugaugaagaguuggauuc

SEQ ID NO: 1110334 - RNA, 19 nt, Homo sapiens
  misc_RNA (1)...(19): siRNA sense strand
gcagguaaugcuucuaagg

SEQ ID NO: 1110335 - RNA, 19 nt, Homo sapiens
  misc_RNA (1)...(19): siRNA sense strand
guaaugcuucuaaggaucu

SEQ ID NO: 1110336 - RNA, 19 nt, Homo sapiens
  misc_RNA (1)...(19): siRNA sense strand
gagcuggcagguaaugcuu

SEQ ID NO: 1110337 - RNA, 19 nt, Homo sapiens
  misc_RNA (1)...(19): siRNA sense strand
ccacagacacuugaagacu

SEQ ID NO: 1110338 - RNA, 19 nt, Homo sapiens
  misc_RNA (1)...(19): siRNA sense strand
gcuggcagguaaugcuucu

SEQ ID NO: 1110339 - RNA, 19 nt, Homo sapiens
  misc_RNA (1)...(19): siRNA sense strand
ccguggugaugaagaguug

SEQ ID NO: 1110340 - RNA, 19 nt, Homo sapiens
  misc_RNA (1)...(19): siRNA sense strand
gcaguaucucgcucacaga

SEQ ID NO: 1110341 - RNA, 19 nt, Homo sapiens
  misc_RNA (1)...(19): siRNA sense strand
ugaagacucgcaccacaag

SEQ ID NO: 1110342 - RNA, 19 nt, Homo sapiens
  misc_RNA (1)...(19): siRNA sense strand
cuucuaaggaucucaaagu

SEQ ID NO: 1110343 - RNA, 19 nt, Homo sapiens
  misc_RNA (1)...(19): siRNA sense strand
cuaaggaucucaaaguaaa

SEQ ID NO: 1110344 - RNA, 19 nt, Homo sapiens
  misc_RNA (1)...(19): siRNA sense strand
gugcugcgauucuggagua

SEQ ID NO: 1110345 - RNA, 19 nt, Homo sapiens
  misc_RNA (1)...(19): siRNA sense strand
ggccaaggcuaaggcagua

SEQ ID NO: 1110346 - RNA, 19 nt, Homo sapiens
  misc_RNA (1)...(19): siRNA sense strand
guacagugcugcgauucug

SEQ ID NO: 1110347 - RNA, 19 nt, Homo sapiens
  misc_RNA (1)...(19): siRNA sense strand
gaguuggauucucuuauca

SEQ ID NO: 1110348 - RNA, 19 nt, Homo sapiens
  misc_RNA (1)...(19): siRNA sense strand
gagcugggcuacaguuucc

SEQ ID NO: 1110349 - RNA, 19 nt, Homo sapiens
  misc_RNA (1)...(19): siRNA sense strand
gugggaaggccaaggcuaa

SEQ ID NO: 1110350 - RNA, 19 nt, Homo sapiens
  misc_RNA (1)...(19): siRNA sense strand
acagagagcugggcuacag

SEQ ID NO: 1110351 - RNA, 19 nt, Homo sapiens
  misc_RNA (1)...(19): siRNA sense strand
ugcuggagcuggcagguaa

SEQ ID NO: 1110352 - RNA, 19 nt, Homo sapiens
  misc_RNA (1)...(19): siRNA sense strand
uucuaaggaucucaaagua

SEQ ID NO: 1110353 - RNA, 19 nt, Homo sapiens
  misc_RNA (1)...(19): siRNA sense strand
ucuaaggaucucaaaguaa

SEQ ID NO: 1110354 - RNA, 19 nt, Homo sapiens
  misc_RNA (1)...(19): siRNA sense strand
caaaguaaagcguaucacu

SEQ ID NO: 1110355 - RNA, 19 nt, Homo sapiens
  misc_RNA (1)...(19): siRNA sense strand
cagguaaugcuucuaagga

SEQ ID NO: 1110356 - RNA, 19 nt, Homo sapiens
  misc_RNA (1)...(19): siRNA sense strand
gagagcugggcuacaguuu

SEQ ID NO: 1110357 - RNA, 19 nt, Homo sapiens
  misc_RNA (1)...(19): siRNA sense strand
ugcaauccguggugaugaa

SEQ ID NO: 1110358 - RNA, 19 nt, Homo sapiens
  misc_RNA (1)...(19): siRNA sense strand
guuggauucucuuaucaag

SEQ ID NO: 1110359 - RNA, 19 nt, Homo sapiens
  misc_RNA (1)...(19): siRNA sense strand
gaugaagaguuggauucuc

SEQ ID NO: 1110360 - RNA, 19 nt, Homo sapiens
  misc_RNA (1)...(19): siRNA sense strand
uggcagguaaugcuucuaa

SEQ ID NO: 1110361 - RNA, 19 nt, Homo sapiens
  misc_RNA (1)...(19): siRNA sense strand
cguguacagugcugcgauu

SEQ ID NO: 1110362 - RNA, 19 nt, Homo sapiens
  misc_RNA (1)...(19): siRNA sense strand
gugaugaagaguuggauuc

SEQ ID NO: 1110363 - RNA, 19 nt, Homo sapiens
  misc_RNA (1)...(19): siRNA sense strand
gcagguaaugcuucuaagg

SEQ ID NO: 1110364 - RNA, 19 nt, Homo sapiens
  misc_RNA (1)...(19): siRNA sense strand
guaaugcuucuaaggaucu

SEQ ID NO: 1110365 - RNA, 19 nt, Homo sapiens
  misc_RNA (1)...(19): siRNA sense strand
gagcuggcagguaaugcuu

SEQ ID NO: 1110366 - RNA, 19 nt, Homo sapiens
  misc_RNA (1)...(19): siRNA sense strand
ccacagacacuugaagacu

SEQ ID NO: 1110367 - RNA, 19 nt, Homo sapiens
  misc_RNA (1)...(19): siRNA sense strand
gcuggcagguaaugcuucu

SEQ ID NO: 1110368 - RNA, 19 nt, Homo sapiens
  misc_RNA (1)...(19): siRNA sense strand
ccguggugaugaagaguug

SEQ ID NO: 1110369 - RNA, 19 nt, Homo sapiens
  misc_RNA (1)...(19): siRNA sense strand
gcaguaucucgcucacaga

SEQ ID NO: 1110370 - RNA, 19 nt, Homo sapiens
  misc_RNA (1)...(19): siRNA sense strand
ugaagacucgcaccacaag

SEQ ID NO: 1110371 - RNA, 19 nt, Homo sapiens
  misc_RNA (1)...(19): siRNA sense strand
cuucuaaggaucucaaagu

SEQ ID NO: 1110372 - RNA, 19 nt, Homo sapiens
  misc_RNA (1)...(19): siRNA sense strand
gaacggaaaucccgguaua

SEQ ID NO: 1110373 - RNA, 19 nt, Homo sapiens
  misc_RNA (1)...(19): siRNA sense strand
cauagaagauggaguauuu

SEQ ID NO: 1110374 - RNA, 19 nt, Homo sapiens
  misc_RNA (1)...(19): siRNA sense strand
gcaagucccugguagaauu

SEQ ID NO: 1110375 - RNA, 19 nt, Homo sapiens
  misc_RNA (1)...(19): siRNA sense strand
gaaauguggucuugacuga

SEQ ID NO: 1110376 - RNA, 19 nt, Homo sapiens
  misc_RNA (1)...(19): siRNA sense strand
gaagauggauggaugaaca

SEQ ID NO: 1110377 - RNA, 19 nt, Homo sapiens
  misc_RNA (1)...(19): siRNA sense strand
aaacgacgcucaacagauu

SEQ ID NO: 1110378 - RNA, 19 nt, Homo sapiens
  misc_RNA (1)...(19): siRNA sense strand
ggacauuacuccagcaguu

SEQ ID NO: 1110379 - RNA, 19 nt, Homo sapiens
  misc_RNA (1)...(19): siRNA sense strand
gaagauggaguauuugaaa

SEQ ID NO: 1110380 - RNA, 19 nt, Homo sapiens
  misc_RNA (1)...(19): siRNA sense strand
gcaaauaugugacagaacu

SEQ ID NO: 1110381 - RNA, 19 nt, Homo sapiens
  misc_RNA (1)...(19): siRNA sense strand
uugaaacgcugacaaauuu

SEQ ID NO: 1110382 - RNA, 19 nt, Homo sapiens
  misc_RNA (1)...(19): siRNA sense strand
uaacauagaagauggagua

SEQ ID NO: 1110383 - RNA, 19 nt, Homo sapiens
  misc_RNA (1)...(19): siRNA sense strand
gaucaaagagggaagagua

SEQ ID NO: 1110384 - RNA, 19 nt, Homo sapiens
  misc_RNA (1)...(19): siRNA sense strand
ugacuuacguggaaacaaa

SEQ ID NO: 1110385 - RNA, 19 nt, Homo sapiens
  misc_RNA (1)...(19): siRNA sense strand
gagggcauuucaagacuua

SEQ ID NO: 1110386 - RNA, 19 nt, Homo sapiens
  misc_RNA (1)...(19): siRNA sense strand
gauuuaagccucaacagua

SEQ ID NO: 1110387 - RNA, 19 nt, Homo sapiens
  misc_RNA (1)...(19): siRNA sense strand
gcaacacccagaucaaaua

SEQ ID NO: 1110388 - RNA, 19 nt, Homo sapiens
  misc_RNA (1)...(19): siRNA sense strand
gauuaaugcugccugguuu

SEQ ID NO: 1110389 - RNA, 19 nt, Homo sapiens
  misc_RNA (1)...(19): siRNA sense strand
ggaaaagccuuagauuuaa

SEQ ID NO: 1110390 - RNA, 19 nt, Homo sapiens
  misc_RNA (1)...(19): siRNA sense strand
ucaaaggucucaagaaucu

SEQ ID NO: 1110391 - RNA, 19 nt, Homo sapiens
  misc_RNA (1)...(19): siRNA sense strand
caacagguauaucuccauu

SEQ ID NO: 1110392 - RNA, 19 nt, Homo sapiens
  misc_RNA (1)...(19): siRNA sense strand
ucacacacauaacgaauga

SEQ ID NO: 1110393 - RNA, 19 nt, Homo sapiens
  misc_RNA (1)...(19): siRNA sense strand
gaaaaugauucacgguaua

SEQ ID NO: 1110394 - RNA, 19 nt, Homo sapiens
  misc_RNA (1)...(19): siRNA sense strand
caacuuguguuucagaugu

SEQ ID NO: 1110395 - RNA, 19 nt, Homo sapiens
  misc_RNA (1)...(19): siRNA sense strand
gacauugccuguuuaaauc

SEQ ID NO: 1110396 - RNA, 19 nt, Homo sapiens
  misc_RNA (1)...(19): siRNA sense strand
gaauaucaccguugguaaa

SEQ ID NO: 1110397 - RNA, 19 nt, Homo sapiens
  misc_RNA (1)...(19): siRNA sense strand
gguggugcuucaauuaaua

SEQ ID NO: 1110398 - RNA, 19 nt, Homo sapiens
  misc_RNA (1)...(19): siRNA sense strand
gaaggcagaaggcuuguuu

SEQ ID NO: 1110399 - RNA, 19 nt, Homo sapiens
  misc_RNA (1)...(19): siRNA sense strand
uaagaccaccaccaaauua

SEQ ID NO: 1110400 - RNA, 19 nt, Homo sapiens
  misc_RNA (1)...(19): siRNA sense strand
gcucaaguguuaaguggaa

SEQ ID NO: 1110401 - RNA, 19 nt, Homo sapiens
  misc_RNA (1)...(19): siRNA sense strand
gcaaauaguuccucuuuuc

SEQ ID NO: 1110402 - RNA, 19 nt, Homo sapiens
  misc_RNA (1)...(19): siRNA sense strand
guuuaaaucugucugcaaa

SEQ ID NO: 1110403 - RNA, 19 nt, Homo sapiens
  misc_RNA (1)...(19): siRNA sense strand
uaacaggauuucccaccua

SEQ ID NO: 1110404 - RNA, 19 nt, Homo sapiens
  misc_RNA (1)...(19): siRNA sense strand
ggaaaucccgguauacaau

SEQ ID NO: 1110405 - RNA, 19 nt, Homo sapiens
  misc_RNA (1)...(19): siRNA sense strand
ggaagaguauugugagucu

SEQ ID NO: 1110406 - RNA, 19 nt, Homo sapiens
  misc_RNA (1)...(19): siRNA sense strand
caaaaugacucaguuauug

SEQ ID NO: 1110407 - RNA, 19 nt, Homo sapiens
  misc_RNA (1)...(19): siRNA sense strand
acuaucaacuuggguauua

SEQ ID NO: 1110408 - RNA, 19 nt, Homo sapiens
  misc_RNA (1)...(19): siRNA sense strand
gaugcagcuuccaaacuua

SEQ ID NO: 1110409 - RNA, 19 nt, Homo sapiens
  misc_RNA (1)...(19): siRNA sense strand
cuacgggcauugcauuuaa

SEQ ID NO: 1110410 - RNA, 19 nt, Homo sapiens
  misc_RNA (1)...(19): siRNA sense strand
ggaguuauccacagcauau

SEQ ID NO: 1110411 - RNA, 19 nt, Homo sapiens
  misc_RNA (1)...(19): siRNA sense strand
gggcaaauaugugacagaa

SEQ ID NO: 1110412 - RNA, 19 nt, Homo sapiens
  misc_RNA (1)...(19): siRNA sense strand
gggcauuccucaaccuaaa

SEQ ID NO: 1110413 - RNA, 19 nt, Homo sapiens
  misc_RNA (1)...(19): siRNA sense strand
uuacugggauguuugguuu

SEQ ID NO: 1110414 - RNA, 19 nt, Homo sapiens
  misc_RNA (1)...(19): siRNA sense strand
gaagcuauccuugugauga

SEQ ID NO: 1110415 - RNA, 19 nt, Homo sapiens
  misc_RNA (1)...(19): siRNA sense strand
ggaaagcaagucccuggua

SEQ ID NO: 1110416 - RNA, 19 nt, Homo sapiens
  misc_RNA (1)...(19): siRNA sense strand
cuagugcucuuacugaauu

SEQ ID NO: 1110417 - RNA, 19 nt, Homo sapiens
  misc_RNA (1)...(19): siRNA sense strand
acaauagacuagacuuuga

SEQ ID NO: 1110418 - RNA, 19 nt, Homo sapiens
  misc_RNA (1)...(19): siRNA sense strand
gaugguggugcuucaauua

SEQ ID NO: 1110419 - RNA, 19 nt, Homo sapiens
  misc_RNA (1)...(19): siRNA sense strand
gcuaauggaugagaacaug

SEQ ID NO: 1110420 - RNA, 19 nt, Homo sapiens
  misc_RNA (1)...(19): siRNA sense strand
cguaacacaucaucuagaa

SEQ ID NO: 1110421 - RNA, 19 nt, Homo sapiens
  misc_RNA (1)...(19): siRNA sense strand
caacagauuuugaguuuga

SEQ ID NO: 1110422 - RNA, 19 nt, Homo sapiens
  misc_RNA (1)...(19): siRNA sense strand
ugaaggugcuggaucuuga

SEQ ID NO: 1110423 - RNA, 19 nt, Homo sapiens
  misc_RNA (1)...(19): siRNA sense strand
gauucacgguauaacaaua

SEQ ID NO: 1110424 - RNA, 19 nt, Homo sapiens
  misc_RNA (1)...(19): siRNA sense strand
uaaaugagcugcgcuacca

SEQ ID NO: 1110425 - RNA, 19 nt, Homo sapiens
  misc_RNA (1)...(19): siRNA sense strand
ugacauugccuguuuaaau

SEQ ID NO: 1110426 - RNA, 19 nt, Homo sapiens
  misc_RNA (1)...(19): siRNA sense strand
ucgauuccauuaagcaaua

SEQ ID NO: 1110427 - RNA, 19 nt, Homo sapiens
  misc_RNA (1)...(19): siRNA sense strand
gcaaucgccuugacauuuu

SEQ ID NO: 1110428 - RNA, 19 nt, Homo sapiens
  misc_RNA (1)...(19): siRNA sense strand
uuuaagagguuauguguuc

SEQ ID NO: 1110429 - RNA, 19 nt, Homo sapiens
  misc_RNA (1)...(19): siRNA sense strand
caccaaagaugccucuguu

SEQ ID NO: 1110430 - RNA, 19 nt, Homo sapiens
  misc_RNA (1)...(19): siRNA sense strand
agacuagacuuugauaaug

SEQ ID NO: 1110431 - RNA, 19 nt, Homo sapiens
  misc_RNA (1)...(19): siRNA sense strand
gagcaacacccagaucaaa

SEQ ID NO: 1110432 - RNA, 19 nt, Homo sapiens
  misc_RNA (1)...(19): siRNA sense strand
ggcaaacucugagaaaugu

SEQ ID NO: 1110433 - RNA, 19 nt, Homo sapiens
  misc_RNA (1)...(19): siRNA sense strand
aauccgcacuugaaacuaa

SEQ ID NO: 1110434 - RNA, 19 nt, Homo sapiens
  misc_RNA (1)...(19): siRNA sense strand
cagaauagcaggcguaaca

SEQ ID NO: 1110435 - RNA, 19 nt, Homo sapiens
  misc_RNA (1)...(19): siRNA sense strand
gcagaguuaugcaaauagu

SEQ ID NO: 1110436 - RNA, 19 nt, Homo sapiens
  misc_RNA (1)...(19): siRNA sense strand
gaaaacauguuccuucagu

SEQ ID NO: 1110437 - RNA, 19 nt, Homo sapiens
  misc_RNA (1)...(19): siRNA sense strand
gaagagagccgagacaaaa

SEQ ID NO: 1110438 - RNA, 19 nt, Homo sapiens
  misc_RNA (1)...(19): siRNA sense strand
ugacacgucuggauuuauc

SEQ ID NO: 1110439 - RNA, 19 nt, Homo sapiens
  misc_RNA (1)...(19): siRNA sense strand
ccaaacuuaucgacuauca

SEQ ID NO: 1110440 - RNA, 19 nt, Homo sapiens
  misc_RNA (1)...(19): siRNA sense strand
ugaugcagcuuccaaacuu

SEQ ID NO: 1110441 - RNA, 19 nt, Homo sapiens
  misc_RNA (1)...(19): siRNA sense strand
gggaguuacugcuugaaga

SEQ ID NO: 1110442 - RNA, 19 nt, Homo sapiens
  misc_RNA (1)...(19): siRNA sense strand
uaagggaguuacugcuuga

SEQ ID NO: 1110443 - RNA, 19 nt, Homo sapiens
  misc_RNA (1)...(19): siRNA sense strand
gcuugaagacaaccaguua

SEQ ID NO: 1110444 - RNA, 19 nt, Homo sapiens
  misc_RNA (1)...(19): siRNA sense strand
ugaagcaccucgauuuaag

SEQ ID NO: 1110445 - RNA, 19 nt, Homo sapiens
  misc_RNA (1)...(19): siRNA sense strand
uuucaaaggucucaagaau

SEQ ID NO: 1110446 - RNA, 19 nt, Homo sapiens
  misc_RNA (1)...(19): siRNA sense strand
uggaaaagccuuagauuua

SEQ ID NO: 1110447 - RNA, 19 nt, Homo sapiens
  misc_RNA (1)...(19): siRNA sense strand
aagaagauuucaagggauu

SEQ ID NO: 1110448 - RNA, 19 nt, Homo sapiens
  misc_RNA (1)...(19): siRNA sense strand
gagccaguguuacagcauu

SEQ ID NO: 1110449 - RNA, 19 nt, Homo sapiens
  misc_RNA (1)...(19): siRNA sense strand
caaagagggaagaguauug

SEQ ID NO: 1110450 - RNA, 19 nt, Homo sapiens
  misc_RNA (1)...(19): siRNA sense strand
cauuggagauuuccgaaga

SEQ ID NO: 1110451 - RNA, 19 nt, Homo sapiens
  misc_RNA (1)...(19): siRNA sense strand
ggcaaucgccuugacauuu

SEQ ID NO: 1110452 - RNA, 19 nt, Homo sapiens
  misc_RNA (1)...(19): siRNA sense strand
gugcagcaaucgucgacua

SEQ ID NO: 1110453 - RNA, 19 nt, Homo sapiens
  misc_RNA (1)...(19): siRNA sense strand
ggaaacgacgcucaacaga

SEQ ID NO: 1110454 - RNA, 19 nt, Homo sapiens
  misc_RNA (1)...(19): siRNA sense strand
cuaaaccucucuagcacuu

SEQ ID NO: 1110455 - RNA, 19 nt, Homo sapiens
  misc_RNA (1)...(19): siRNA sense strand
gaugaugacaacagguaua

SEQ ID NO: 1110456 - RNA, 19 nt, Homo sapiens
  misc_RNA (1)...(19): siRNA sense strand
gaaacgacgcucaacagau

SEQ ID NO: 1110457 - RNA, 19 nt, Homo sapiens
  misc_RNA (1)...(19): siRNA sense strand
gcauugcauuuaagagguu

SEQ ID NO: 1110458 - RNA, 19 nt, Homo sapiens
  misc_RNA (1)...(19): siRNA sense strand
ggugcuggaucuugaauuc

SEQ ID NO: 1110459 - RNA, 19 nt, Homo sapiens
  misc_RNA (1)...(19): siRNA sense strand
gcugacaaauuuggaguug

SEQ ID NO: 1110460 - RNA, 19 nt, Homo sapiens
  misc_RNA (1)...(19): siRNA sense strand
aauguggucuugacugaaa

SEQ ID NO: 1110461 - RNA, 19 nt, Homo sapiens
  misc_RNA (1)...(19): siRNA sense strand
ccaccuacccucuggcuuu

SEQ ID NO: 1110462 - RNA, 19 nt, Homo sapiens
  misc_RNA (1)...(19): siRNA sense strand
uaucugacuuuacaucuuc

SEQ ID NO: 1110463 - RNA, 19 nt, Homo sapiens
  misc_RNA (1)...(19): siRNA sense strand
cuagaucucagcuauaauu

SEQ ID NO: 1110464 - RNA, 19 nt, Homo sapiens
  misc_RNA (1)...(19): siRNA sense strand
acacauaacgaaugaauca

SEQ ID NO: 1110465 - RNA, 19 nt, Homo sapiens
  misc_RNA (1)...(19): siRNA sense strand
gaacucagagaagaugauu

SEQ ID NO: 1110466 - RNA, 19 nt, Homo sapiens
  misc_RNA (1)...(19): siRNA sense strand
agaaauacuugacuugucu

SEQ ID NO: 1110467 - RNA, 19 nt, Homo sapiens
  misc_RNA (1)...(19): siRNA sense strand
aaauaugccucaucugaag

SEQ ID NO: 1110468 - RNA, 19 nt, Homo sapiens
  misc_RNA (1)...(19): siRNA sense strand
aaacuaagaccaccaccaa

SEQ ID NO: 1110469 - RNA, 19 nt, Homo sapiens
  misc_RNA (1)...(19): siRNA sense strand
gauaaugcuagugcucuua

SEQ ID NO: 1110470 - RNA, 19 nt, Homo sapiens
  misc_RNA (1)...(19): siRNA sense strand
acaaugugcugcuuaugga

SEQ ID NO: 1110471 - RNA, 19 nt, Homo sapiens
  misc_RNA (1)...(19): siRNA sense strand
cuuccaaacuuaucgacua

SEQ ID NO: 1110472 - RNA, 19 nt, Homo sapiens
  misc_RNA (1)...(19): siRNA sense strand
gaacggaaaucccgguaua

SEQ ID NO: 1110473 - RNA, 19 nt, Homo sapiens
  misc_RNA (1)...(19): siRNA sense strand
cauagaagauggaguauuu

SEQ ID NO: 1110474 - RNA, 19 nt, Homo sapiens
  misc_RNA (1)...(19): siRNA sense strand
gcaagucccugguagaauu

SEQ ID NO: 1110475 - RNA, 19 nt, Homo sapiens
  misc_RNA (1)...(19): siRNA sense strand
gaaauguggucuugacuga

SEQ ID NO: 1110476 - RNA, 19 nt, Homo sapiens
  misc_RNA (1)...(19): siRNA sense strand
gaagauggauggaugaaca

SEQ ID NO: 1110477 - RNA, 19 nt, Homo sapiens
  misc_RNA (1)...(19): siRNA sense strand
aaacgacgcucaacagauu

SEQ ID NO: 1110478 - RNA, 19 nt, Homo sapiens
  misc_RNA (1)...(19): siRNA sense strand
ggacauuacuccagcaguu

SEQ ID NO: 1110479 - RNA, 19 nt, Homo sapiens
  misc_RNA (1)...(19): siRNA sense strand
gaagauggaguauuugaaa

SEQ ID NO: 1110480 - RNA, 19 nt, Homo sapiens
  misc_RNA (1)...(19): siRNA sense strand
gcaaauaugugacagaacu

SEQ ID NO: 1110481 - RNA, 19 nt, Homo sapiens
  misc_RNA (1)...(19): siRNA sense strand
uugaaacgcugacaaauuu

SEQ ID NO: 1110482 - RNA, 19 nt, Homo sapiens
  misc_RNA (1)...(19): siRNA sense strand
uaacauagaagauggagua

SEQ ID NO: 1110483 - RNA, 19 nt, Homo sapiens
  misc_RNA (1)...(19): siRNA sense strand
gaucaaagagggaagagua

SEQ ID NO: 1110484 - RNA, 19 nt, Homo sapiens
  misc_RNA (1)...(19): siRNA sense strand
ugacuuacguggaaacaaa

SEQ ID NO: 1110485 - RNA, 19 nt, Homo sapiens
  misc_RNA (1)...(19): siRNA sense strand
gagggcauuucaagacuua

SEQ ID NO: 1110486 - RNA, 19 nt, Homo sapiens
  misc_RNA (1)...(19): siRNA sense strand
gauuuaagccucaacagua

SEQ ID NO: 1110487 - RNA, 19 nt, Homo sapiens
  misc_RNA (1)...(19): siRNA sense strand
gcaacacccagaucaaaua

SEQ ID NO: 1110488 - RNA, 19 nt, Homo sapiens
  misc_RNA (1)...(19): siRNA sense strand
gauuaaugcugccugguuu

SEQ ID NO: 1110489 - RNA, 19 nt, Homo sapiens
  misc_RNA (1)...(19): siRNA sense strand
ggaaaagccuuagauuuaa

SEQ ID NO: 1110490 - RNA, 19 nt, Homo sapiens
  misc_RNA (1)...(19): siRNA sense strand
ucaaaggucucaagaaucu

SEQ ID NO: 1110491 - RNA, 19 nt, Homo sapiens
  misc_RNA (1)...(19): siRNA sense strand
caacagguauaucuccauu

SEQ ID NO: 1110492 - RNA, 19 nt, Homo sapiens
  misc_RNA (1)...(19): siRNA sense strand
ucacacacauaacgaauga

SEQ ID NO: 1110493 - RNA, 19 nt, Homo sapiens
  misc_RNA (1)...(19): siRNA sense strand
gaaaaugauucacgguaua

SEQ ID NO: 1110494 - RNA, 19 nt, Homo sapiens
  misc_RNA (1)...(19): siRNA sense strand
caacuuguguuucagaugu

SEQ ID NO: 1110495 - RNA, 19 nt, Homo sapiens
  misc_RNA (1)...(19): siRNA sense strand
gacauugccuguuuaaauc

SEQ ID NO: 1110496 - RNA, 19 nt, Homo sapiens
  misc_RNA (1)...(19): siRNA sense strand
gaauaucaccguugguaaa

SEQ ID NO: 1110497 - RNA, 19 nt, Homo sapiens
  misc_RNA (1)...(19): siRNA sense strand
gguggugcuucaauuaaua

SEQ ID NO: 1110498 - RNA, 19 nt, Homo sapiens
  misc_RNA (1)...(19): siRNA sense strand
gaaggcagaaggcuuguuu

SEQ ID NO: 1110499 - RNA, 19 nt, Homo sapiens
  misc_RNA (1)...(19): siRNA sense strand
uaagaccaccaccaaauua

SEQ ID NO: 1110500 - RNA, 19 nt, Homo sapiens
  misc_RNA (1)...(19): siRNA sense strand
gcucaaguguuaaguggaa

SEQ ID NO: 1110501 - RNA, 19 nt, Homo sapiens
  misc_RNA (1)...(19): siRNA sense strand
gcaaauaguuccucuuuuc

SEQ ID NO: 1110502 - RNA, 19 nt, Homo sapiens
  misc_RNA (1)...(19): siRNA sense strand
guuuaaaucugucugcaaa

SEQ ID NO: 1110503 - RNA, 19 nt, Homo sapiens
  misc_RNA (1)...(19): siRNA sense strand
uaacaggauuucccaccua

SEQ ID NO: 1110504 - RNA, 19 nt, Homo sapiens
  misc_RNA (1)...(19): siRNA sense strand
ggaaaucccgguauacaau

SEQ ID NO: 1110505 - RNA, 19 nt, Homo sapiens
  misc_RNA (1)...(19): siRNA sense strand
ggaagaguauugugagucu

SEQ ID NO: 1110506 - RNA, 19 nt, Homo sapiens
  misc_RNA (1)...(19): siRNA sense strand
caaaaugacucaguuauug

SEQ ID NO: 1110507 - RNA, 19 nt, Homo sapiens
  misc_RNA (1)...(19): siRNA sense strand
acuaucaacuuggguauua

SEQ ID NO: 1110508 - RNA, 19 nt, Homo sapiens
  misc_RNA (1)...(19): siRNA sense strand
gaugcagcuuccaaacuua

SEQ ID NO: 1110509 - RNA, 19 nt, Homo sapiens
  misc_RNA (1)...(19): siRNA sense strand
cuacgggcauugcauuuaa

SEQ ID NO: 1110510 - RNA, 19 nt, Homo sapiens
  misc_RNA (1)...(19): siRNA sense strand
ggaguuauccacagcauau

SEQ ID NO: 1110511 - RNA, 19 nt, Homo sapiens
  misc_RNA (1)...(19): siRNA sense strand
gggcaaauaugugacagaa

SEQ ID NO: 1110512 - RNA, 19 nt, Homo sapiens
  misc_RNA (1)...(19): siRNA sense strand
gggcauuccucaaccuaaa

SEQ ID NO: 1110513 - RNA, 19 nt, Homo sapiens
  misc_RNA (1)...(19): siRNA sense strand
uuacugggauguuugguuu

SEQ ID NO: 1110514 - RNA, 19 nt, Homo sapiens
  misc_RNA (1)...(19): siRNA sense strand
gaagcuauccuugugauga

SEQ ID NO: 1110515 - RNA, 19 nt, Homo sapiens
  misc_RNA (1)...(19): siRNA sense strand
ggaaagcaagucccuggua

SEQ ID NO: 1110516 - RNA, 19 nt, Homo sapiens
  misc_RNA (1)...(19): siRNA sense strand
cuagugcucuuacugaauu

SEQ ID NO: 1110517 - RNA, 19 nt, Homo sapiens
  misc_RNA (1)...(19): siRNA sense strand
acaauagacuagacuuuga

SEQ ID NO: 1110518 - RNA, 19 nt, Homo sapiens
  misc_RNA (1)...(19): siRNA sense strand
gaugguggugcuucaauua

SEQ ID NO: 1110519 - RNA, 19 nt, Homo sapiens
  misc_RNA (1)...(19): siRNA sense strand
gcuaauggaugagaacaug

SEQ ID NO: 1110520 - RNA, 19 nt, Homo sapiens
  misc_RNA (1)...(19): siRNA sense strand
cguaacacaucaucuagaa

SEQ ID NO: 1110521 - RNA, 19 nt, Homo sapiens
  misc_RNA (1)...(19): siRNA sense strand
caacagauuuugaguuuga

SEQ ID NO: 1110522 - RNA, 19 nt, Homo sapiens
  misc_RNA (1)...(19): siRNA sense strand
ugaaggugcuggaucuuga

SEQ ID NO: 1110523 - RNA, 19 nt, Homo sapiens
  misc_RNA (1)...(19): siRNA sense strand
gauucacgguauaacaaua

SEQ ID NO: 1110524 - RNA, 19 nt, Homo sapiens
  misc_RNA (1)...(19): siRNA sense strand
uaaaugagcugcgcuacca

SEQ ID NO: 1110525 - RNA, 19 nt, Homo sapiens
  misc_RNA (1)...(19): siRNA sense strand
ugacauugccuguuuaaau

SEQ ID NO: 1110526 - RNA, 19 nt, Homo sapiens
  misc_RNA (1)...(19): siRNA sense strand
ucgauuccauuaagcaaua

SEQ ID NO: 1110527 - RNA, 19 nt, Homo sapiens
  misc_RNA (1)...(19): siRNA sense strand
gcaaucgccuugacauuuu

SEQ ID NO: 1110528 - RNA, 19 nt, Homo sapiens
  misc_RNA (1)...(19): siRNA sense strand
uuuaagagguuauguguuc

SEQ ID NO: 1110529 - RNA, 19 nt, Homo sapiens
  misc_RNA (1)...(19): siRNA sense strand
caccaaagaugccucuguu

SEQ ID NO: 1110530 - RNA, 19 nt, Homo sapiens
  misc_RNA (1)...(19): siRNA sense strand
agacuagacuuugauaaug

SEQ ID NO: 1110531 - RNA, 19 nt, Homo sapiens
  misc_RNA (1)...(19): siRNA sense strand
gagcaacacccagaucaaa

SEQ ID NO: 1110532 - RNA, 19 nt, Homo sapiens
  misc_RNA (1)...(19): siRNA sense strand
ggcaaacucugagaaaugu

SEQ ID NO: 1110533 - RNA, 19 nt, Homo sapiens
  misc_RNA (1)...(19): siRNA sense strand
aauccgcacuugaaacuaa

SEQ ID NO: 1110534 - RNA, 19 nt, Homo sapiens
  misc_RNA (1)...(19): siRNA sense strand
cagaauagcaggcguaaca

SEQ ID NO: 1110535 - RNA, 19 nt, Homo sapiens
  misc_RNA (1)...(19): siRNA sense strand
gcagaguuaugcaaauagu

SEQ ID NO: 1110536 - RNA, 19 nt, Homo sapiens
  misc_RNA (1)...(19): siRNA sense strand
gaaaacauguuccuucagu

SEQ ID NO: 1110537 - RNA, 19 nt, Homo sapiens
  misc_RNA (1)...(19): siRNA sense strand
gaagagagccgagacaaaa

SEQ ID NO: 1110538 - RNA, 19 nt, Homo sapiens
  misc_RNA (1)...(19): siRNA sense strand
ugacacgucuggauuuauc

SEQ ID NO: 1110539 - RNA, 19 nt, Homo sapiens
  misc_RNA (1)...(19): siRNA sense strand
ccaaacuuaucgacuauca

SEQ ID NO: 1110540 - RNA, 19 nt, Homo sapiens
  misc_RNA (1)...(19): siRNA sense strand
ugaugcagcuuccaaacuu

SEQ ID NO: 1110541 - RNA, 19 nt, Homo sapiens
  misc_RNA (1)...(19): siRNA sense strand
gggaguuacugcuugaaga

SEQ ID NO: 1110542 - RNA, 19 nt, Homo sapiens
  misc_RNA (1)...(19): siRNA sense strand
uaagggaguuacugcuuga

SEQ ID NO: 1110543 - RNA, 19 nt, Homo sapiens
  misc_RNA (1)...(19): siRNA sense strand
gcuugaagacaaccaguua

SEQ ID NO: 1110544 - RNA, 19 nt, Homo sapiens
  misc_RNA (1)...(19): siRNA sense strand
ugaagcaccucgauuuaag

SEQ ID NO: 1110545 - RNA, 19 nt, Homo sapiens
  misc_RNA (1)...(19): siRNA sense strand
uuucaaaggucucaagaau

SEQ ID NO: 1110546 - RNA, 19 nt, Homo sapiens
  misc_RNA (1)...(19): siRNA sense strand
uggaaaagccuuagauuua

SEQ ID NO: 1110547 - RNA, 19 nt, Homo sapiens
  misc_RNA (1)...(19): siRNA sense strand
aagaagauuucaagggauu

SEQ ID NO: 1110548 - RNA, 19 nt, Homo sapiens
  misc_RNA (1)...(19): siRNA sense strand
gagccaguguuacagcauu

SEQ ID NO: 1110549 - RNA, 19 nt, Homo sapiens
  misc_RNA (1)...(19): siRNA sense strand
caaagagggaagaguauug

SEQ ID NO: 1110550 - RNA, 19 nt, Homo sapiens
  misc_RNA (1)...(19): siRNA sense strand
cauuggagauuuccgaaga

SEQ ID NO: 1110551 - RNA, 19 nt, Homo sapiens
  misc_RNA (1)...(19): siRNA sense strand
ggcaaucgccuugacauuu

SEQ ID NO: 1110552 - RNA, 19 nt, Homo sapiens
  misc_RNA (1)...(19): siRNA sense strand
gugcagcaaucgucgacua

SEQ ID NO: 1110553 - RNA, 19 nt, Homo sapiens
  misc_RNA (1)...(19): siRNA sense strand
ggaaacgacgcucaacaga

SEQ ID NO: 1110554 - RNA, 19 nt, Homo sapiens
  misc_RNA (1)...(19): siRNA sense strand
cuaaaccucucuagcacuu

SEQ ID NO: 1110555 - RNA, 19 nt, Homo sapiens
  misc_RNA (1)...(19): siRNA sense strand
gaugaugacaacagguaua

SEQ ID NO: 1110556 - RNA, 19 nt, Homo sapiens
  misc_RNA (1)...(19): siRNA sense strand
gaaacgacgcucaacagau

SEQ ID NO: 1110557 - RNA, 19 nt, Homo sapiens
  misc_RNA (1)...(19): siRNA sense strand
gcauugcauuuaagagguu

SEQ ID NO: 1110558 - RNA, 19 nt, Homo sapiens
  misc_RNA (1)...(19): siRNA sense strand
ggugcuggaucuugaauuc

SEQ ID NO: 1110559 - RNA, 19 nt, Homo sapiens
  misc_RNA (1)...(19): siRNA sense strand
gcugacaaauuuggaguug

SEQ ID NO: 1110560 - RNA, 19 nt, Homo sapiens
  misc_RNA (1)...(19): siRNA sense strand
aauguggucuugacugaaa

SEQ ID NO: 1110561 - RNA, 19 nt, Homo sapiens
  misc_RNA (1)...(19): siRNA sense strand
ccaccuacccucuggcuuu

SEQ ID NO: 1110562 - RNA, 19 nt, Homo sapiens
  misc_RNA (1)...(19): siRNA sense strand
uaucugacuuuacaucuuc

SEQ ID NO: 1110563 - RNA, 19 nt, Homo sapiens
  misc_RNA (1)...(19): siRNA sense strand
cuagaucucagcuauaauu

SEQ ID NO: 1110564 - RNA, 19 nt, Homo sapiens
  misc_RNA (1)...(19): siRNA sense strand
acacauaacgaaugaauca

SEQ ID NO: 1110565 - RNA, 19 nt, Homo sapiens
  misc_RNA (1)...(19): siRNA sense strand
gaacucagagaagaugauu

SEQ ID NO: 1110566 - RNA, 19 nt, Homo sapiens
  misc_RNA (1)...(19): siRNA sense strand
agaaauacuugacuugucu

SEQ ID NO: 1110567 - RNA, 19 nt, Homo sapiens
  misc_RNA (1)...(19): siRNA sense strand
aaauaugccucaucugaag

SEQ ID NO: 1110568 - RNA, 19 nt, Homo sapiens
  misc_RNA (1)...(19): siRNA sense strand
aaacuaagaccaccaccaa

SEQ ID NO: 1110569 - RNA, 19 nt, Homo sapiens
  misc_RNA (1)...(19): siRNA sense strand
gauaaugcuagugcucuua

SEQ ID NO: 1110570 - RNA, 19 nt, Homo sapiens
  misc_RNA (1)...(19): siRNA sense strand
acaaugugcugcuuaugga

SEQ ID NO: 1110571 - RNA, 19 nt, Homo sapiens
  misc_RNA (1)...(19): siRNA sense strand
cuuccaaacuuaucgacua

SEQ ID NO: 1110572 - RNA, 19 nt, Homo sapiens
  misc_RNA (1)...(19): siRNA sense strand
ccagagauguuaucaauga

SEQ ID NO: 1110573 - RNA, 19 nt, Homo sapiens
  misc_RNA (1)...(19): siRNA sense strand
gaggaaagcucaagugaag

SEQ ID NO: 1110574 - RNA, 19 nt, Homo sapiens
  misc_RNA (1)...(19): siRNA sense strand
gaccagagauguuaucaau

SEQ ID NO: 1110575 - RNA, 19 nt, Homo sapiens
  misc_RNA (1)...(19): siRNA sense strand
ugacaacacuuucaauuuc

SEQ ID NO: 1110576 - RNA, 19 nt, Homo sapiens
  misc_RNA (1)...(19): siRNA sense strand
uaaggaagcuaucacagaa

SEQ ID NO: 1110577 - RNA, 19 nt, Homo sapiens
  misc_RNA (1)...(19): siRNA sense strand
gaagauaagcuaccucgaa

SEQ ID NO: 1110578 - RNA, 19 nt, Homo sapiens
  misc_RNA (1)...(19): siRNA sense strand
gagaggagcagaagaagaa

SEQ ID NO: 1110579 - RNA, 19 nt, Homo sapiens
  misc_RNA (1)...(19): siRNA sense strand
aagaggagguggaagauaa

SEQ ID NO: 1110580 - RNA, 19 nt, Homo sapiens
  misc_RNA (1)...(19): siRNA sense strand
gaagcgaucccaggaauuu

SEQ ID NO: 1110581 - RNA, 19 nt, Homo sapiens
  misc_RNA (1)...(19): siRNA sense strand
agagagagcuugagaccaa

SEQ ID NO: 1110582 - RNA, 19 nt, Homo sapiens
  misc_RNA (1)...(19): siRNA sense strand
cuucaaagcuuccagauca

SEQ ID NO: 1110583 - RNA, 19 nt, Homo sapiens
  misc_RNA (1)...(19): siRNA sense strand
cauggaagauggagaagaa

SEQ ID NO: 1110584 - RNA, 19 nt, Homo sapiens
  misc_RNA (1)...(19): siRNA sense strand
gaagaggaauuggaaagau

SEQ ID NO: 1110585 - RNA, 19 nt, Homo sapiens
  misc_RNA (1)...(19): siRNA sense strand
ucaaugguuuggcacaaua

SEQ ID NO: 1110586 - RNA, 19 nt, Homo sapiens
  misc_RNA (1)...(19): siRNA sense strand
ugaaacagcagacaacaaa

SEQ ID NO: 1110587 - RNA, 19 nt, Homo sapiens
  misc_RNA (1)...(19): siRNA sense strand
gguugccgcucuccuauuu

SEQ ID NO: 1110588 - RNA, 19 nt, Homo sapiens
  misc_RNA (1)...(19): siRNA sense strand
gagauuaacaacaagauug

SEQ ID NO: 1110589 - RNA, 19 nt, Homo sapiens
  misc_RNA (1)...(19): siRNA sense strand
gaugacaacacuuucaauu

SEQ ID NO: 1110590 - RNA, 19 nt, Homo sapiens
  misc_RNA (1)...(19): siRNA sense strand
ggacuuggaguauggauau

SEQ ID NO: 1110591 - RNA, 19 nt, Homo sapiens
  misc_RNA (1)...(19): siRNA sense strand
cuaguaaaggccaauauua

SEQ ID NO: 1110592 - RNA, 19 nt, Homo sapiens
  misc_RNA (1)...(19): siRNA sense strand
uggaugagauuaacaacaa

SEQ ID NO: 1110593 - RNA, 19 nt, Homo sapiens
  misc_RNA (1)...(19): siRNA sense strand
gaucggcaauccugaaaca

SEQ ID NO: 1110594 - RNA, 19 nt, Homo sapiens
  misc_RNA (1)...(19): siRNA sense strand
agaaauugaugaagaggaa

SEQ ID NO: 1110595 - RNA, 19 nt, Homo sapiens
  misc_RNA (1)...(19): siRNA sense strand
gaagaggagaagcuaguaa

SEQ ID NO: 1110596 - RNA, 19 nt, Homo sapiens
  misc_RNA (1)...(19): siRNA sense strand
cagcagacaacaaauuuaa

SEQ ID NO: 1110597 - RNA, 19 nt, Homo sapiens
  misc_RNA (1)...(19): siRNA sense strand
aaacggaccagagauguua

SEQ ID NO: 1110598 - RNA, 19 nt, Homo sapiens
  misc_RNA (1)...(19): siRNA sense strand
gacaacacuuucaauuuca

SEQ ID NO: 1110599 - RNA, 19 nt, Homo sapiens
  misc_RNA (1)...(19): siRNA sense strand
caaugaggaugacccagaa

SEQ ID NO: 1110600 - RNA, 19 nt, Homo sapiens
  misc_RNA (1)...(19): siRNA sense strand
aaacauuggugaugaugga

SEQ ID NO: 1110601 - RNA, 19 nt, Homo sapiens
  misc_RNA (1)...(19): siRNA sense strand
gggauuaugugcauuggau

SEQ ID NO: 1110602 - RNA, 19 nt, Homo sapiens
  misc_RNA (1)...(19): siRNA sense strand
caauaugguucucuuuauc

SEQ ID NO: 1110603 - RNA, 19 nt, Homo sapiens
  misc_RNA (1)...(19): siRNA sense strand
gaagaggagguggaagaua

SEQ ID NO: 1110604 - RNA, 19 nt, Homo sapiens
  misc_RNA (1)...(19): siRNA sense strand
gaucaaggccuacaaugca

SEQ ID NO: 1110605 - RNA, 19 nt, Homo sapiens
  misc_RNA (1)...(19): siRNA sense strand
gagaggaggaggaggcuaa

SEQ ID NO: 1110606 - RNA, 19 nt, Homo sapiens
  misc_RNA (1)...(19): siRNA sense strand
cagcgaaucuggaucucaa

SEQ ID NO: 1110607 - RNA, 19 nt, Homo sapiens
  misc_RNA (1)...(19): siRNA sense strand
gcuccucaguggccucaua

SEQ ID NO: 1110608 - RNA, 19 nt, Homo sapiens
  misc_RNA (1)...(19): siRNA sense strand
gacaaauaauugcuacugu

SEQ ID NO: 1110609 - RNA, 19 nt, Homo sapiens
  misc_RNA (1)...(19): siRNA sense strand
ggccaucuauuaucucaau

SEQ ID NO: 1110610 - RNA, 19 nt, Homo sapiens
  misc_RNA (1)...(19): siRNA sense strand
guuaugugcugcaauguuc

SEQ ID NO: 1110611 - RNA, 19 nt, Homo sapiens
  misc_RNA (1)...(19): siRNA sense strand
gaagcuaucacagaagaaa

SEQ ID NO: 1110612 - RNA, 19 nt, Homo sapiens
  misc_RNA (1)...(19): siRNA sense strand
gaagaggcaucggcagcaa

SEQ ID NO: 1110613 - RNA, 19 nt, Homo sapiens
  misc_RNA (1)...(19): siRNA sense strand
aaagagaggagcagaagaa

SEQ ID NO: 1110614 - RNA, 19 nt, Homo sapiens
  misc_RNA (1)...(19): siRNA sense strand
ggaccuugcugggaaacaa

SEQ ID NO: 1110615 - RNA, 19 nt, Homo sapiens
  misc_RNA (1)...(19): siRNA sense strand
aaacagcagacaacaaauu

SEQ ID NO: 1110616 - RNA, 19 nt, Homo sapiens
  misc_RNA (1)...(19): siRNA sense strand
gaagaagaagaaauugaug

SEQ ID NO: 1110617 - RNA, 19 nt, Homo sapiens
  misc_RNA (1)...(19): siRNA sense strand
gaaacggaccagagauguu

SEQ ID NO: 1110618 - RNA, 19 nt, Homo sapiens
  misc_RNA (1)...(19): siRNA sense strand
gaguggauaccucaucuuu

SEQ ID NO: 1110619 - RNA, 19 nt, Homo sapiens
  misc_RNA (1)...(19): siRNA sense strand
aagaggaauuggaaagauu

SEQ ID NO: 1110620 - RNA, 19 nt, Homo sapiens
  misc_RNA (1)...(19): siRNA sense strand
gucaauaugguucucuuua

SEQ ID NO: 1110621 - RNA, 19 nt, Homo sapiens
  misc_RNA (1)...(19): siRNA sense strand
ggagguggaagauaagcua

SEQ ID NO: 1110622 - RNA, 19 nt, Homo sapiens
  misc_RNA (1)...(19): siRNA sense strand
ggucauugcugucauuuug

SEQ ID NO: 1110623 - RNA, 19 nt, Homo sapiens
  misc_RNA (1)...(19): siRNA sense strand
caagcuggauggcgaagau

SEQ ID NO: 1110624 - RNA, 19 nt, Homo sapiens
  misc_RNA (1)...(19): siRNA sense strand
uggaugggcuccuucuuug

SEQ ID NO: 1110625 - RNA, 19 nt, Homo sapiens
  misc_RNA (1)...(19): siRNA sense strand
gacagucucugauguucug

SEQ ID NO: 1110626 - RNA, 19 nt, Homo sapiens
  misc_RNA (1)...(19): siRNA sense strand
gaagaaaacguccacuuga

SEQ ID NO: 1110627 - RNA, 19 nt, Homo sapiens
  misc_RNA (1)...(19): siRNA sense strand
gcuaguaaaggccaauauu

SEQ ID NO: 1110628 - RNA, 19 nt, Homo sapiens
  misc_RNA (1)...(19): siRNA sense strand
caaauaauugcuacuguca

SEQ ID NO: 1110629 - RNA, 19 nt, Homo sapiens
  misc_RNA (1)...(19): siRNA sense strand
gugaagcgaucccaggaau

SEQ ID NO: 1110630 - RNA, 19 nt, Homo sapiens
  misc_RNA (1)...(19): siRNA sense strand
ccauauggcaguuuaccua

SEQ ID NO: 1110631 - RNA, 19 nt, Homo sapiens
  misc_RNA (1)...(19): siRNA sense strand
ucucaucgcuuugaaaugg

SEQ ID NO: 1110632 - RNA, 19 nt, Homo sapiens
  misc_RNA (1)...(19): siRNA sense strand
ggagaugacaacacuuuca

SEQ ID NO: 1110633 - RNA, 19 nt, Homo sapiens
  misc_RNA (1)...(19): siRNA sense strand
acaauauuccguucucuuu

SEQ ID NO: 1110634 - RNA, 19 nt, Homo sapiens
  misc_RNA (1)...(19): siRNA sense strand
aaacaaggaaggcaagaga

SEQ ID NO: 1110635 - RNA, 19 nt, Homo sapiens
  misc_RNA (1)...(19): siRNA sense strand
gccagggucuucaaagcuu

SEQ ID NO: 1110636 - RNA, 19 nt, Homo sapiens
  misc_RNA (1)...(19): siRNA sense strand
cauuuagccucaucauguu

SEQ ID NO: 1110637 - RNA, 19 nt, Homo sapiens
  misc_RNA (1)...(19): siRNA sense strand
gagcagaagaagaagaaau

SEQ ID NO: 1110638 - RNA, 19 nt, Homo sapiens
  misc_RNA (1)...(19): siRNA sense strand
agaagaaauugaugaagag

SEQ ID NO: 1110639 - RNA, 19 nt, Homo sapiens
  misc_RNA (1)...(19): siRNA sense strand
cagaagaagaagaaauuga

SEQ ID NO: 1110640 - RNA, 19 nt, Homo sapiens
  misc_RNA (1)...(19): siRNA sense strand
gcuggucauugcugucauu

SEQ ID NO: 1110641 - RNA, 19 nt, Homo sapiens
  misc_RNA (1)...(19): siRNA sense strand
uggcgaagaucuugagaca

SEQ ID NO: 1110642 - RNA, 19 nt, Homo sapiens
  misc_RNA (1)...(19): siRNA sense strand
gccguuaugugcugcaaug

SEQ ID NO: 1110643 - RNA, 19 nt, Homo sapiens
  misc_RNA (1)...(19): siRNA sense strand
guggauaccucaucuuuug

SEQ ID NO: 1110644 - RNA, 19 nt, Homo sapiens
  misc_RNA (1)...(19): siRNA sense strand
ugagguuucuggcuaacuu

SEQ ID NO: 1110645 - RNA, 19 nt, Homo sapiens
  misc_RNA (1)...(19): siRNA sense strand
gagaugacaacacuuucaa

SEQ ID NO: 1110646 - RNA, 19 nt, Homo sapiens
  misc_RNA (1)...(19): siRNA sense strand
ccucauacuuccucuucuu

SEQ ID NO: 1110647 - RNA, 19 nt, Homo sapiens
  misc_RNA (1)...(19): siRNA sense strand
ggaaagcucaagugaagag

SEQ ID NO: 1110648 - RNA, 19 nt, Homo sapiens
  misc_RNA (1)...(19): siRNA sense strand
ggauguauggagucaauau

SEQ ID NO: 1110649 - RNA, 19 nt, Homo sapiens
  misc_RNA (1)...(19): siRNA sense strand
gaaggcagcgaaucuggau

SEQ ID NO: 1110650 - RNA, 19 nt, Homo sapiens
  misc_RNA (1)...(19): siRNA sense strand
cuagggauguucuguccaa

SEQ ID NO: 1110651 - RNA, 19 nt, Homo sapiens
  misc_RNA (1)...(19): siRNA sense strand
gauaagcuaccucgaagag

SEQ ID NO: 1110652 - RNA, 19 nt, Homo sapiens
  misc_RNA (1)...(19): siRNA sense strand
ccagaucaaauaacuucua

SEQ ID NO: 1110653 - RNA, 19 nt, Homo sapiens
  misc_RNA (1)...(19): siRNA sense strand
guggagaugacaacacuuu

SEQ ID NO: 1110654 - RNA, 19 nt, Homo sapiens
  misc_RNA (1)...(19): siRNA sense strand
gcagaagaagaagaaauug

SEQ ID NO: 1110655 - RNA, 19 nt, Homo sapiens
  misc_RNA (1)...(19): siRNA sense strand
ggaaacggaccagagaugu

SEQ ID NO: 1110656 - RNA, 19 nt, Homo sapiens
  misc_RNA (1)...(19): siRNA sense strand
gagagagcuugagaccaaa

SEQ ID NO: 1110657 - RNA, 19 nt, Homo sapiens
  misc_RNA (1)...(19): siRNA sense strand
ggaauuggaaagauugaag

SEQ ID NO: 1110658 - RNA, 19 nt, Homo sapiens
  misc_RNA (1)...(19): siRNA sense strand
gaguauggauauccuucau

SEQ ID NO: 1110659 - RNA, 19 nt, Homo sapiens
  misc_RNA (1)...(19): siRNA sense strand
gaagacuaccauccucuca

SEQ ID NO: 1110660 - RNA, 19 nt, Homo sapiens
  misc_RNA (1)...(19): siRNA sense strand
gcaaaauuccuccgugauu

SEQ ID NO: 1110661 - RNA, 19 nt, Homo sapiens
  misc_RNA (1)...(19): siRNA sense strand
aagcucaagugaagaggaa

SEQ ID NO: 1110662 - RNA, 19 nt, Homo sapiens
  misc_RNA (1)...(19): siRNA sense strand
gcaacguccucgcucugau

SEQ ID NO: 1110663 - RNA, 19 nt, Homo sapiens
  misc_RNA (1)...(19): siRNA sense strand
gcugggacuuggaguaugg

SEQ ID NO: 1110664 - RNA, 19 nt, Homo sapiens
  misc_RNA (1)...(19): siRNA sense strand
gggaguggauaccucaucu

SEQ ID NO: 1110665 - RNA, 19 nt, Homo sapiens
  misc_RNA (1)...(19): siRNA sense strand
aggaagcuaucacagaaga

SEQ ID NO: 1110666 - RNA, 19 nt, Homo sapiens
  misc_RNA (1)...(19): siRNA sense strand
ugaaggggcucuugggaaa

SEQ ID NO: 1110667 - RNA, 19 nt, Homo sapiens
  misc_RNA (1)...(19): siRNA sense strand
aggcagaguuagaugagaa

SEQ ID NO: 1110668 - RNA, 19 nt, Homo sapiens
  misc_RNA (1)...(19): siRNA sense strand
uuaaggaagcuaucacaga

SEQ ID NO: 1110669 - RNA, 19 nt, Homo sapiens
  misc_RNA (1)...(19): siRNA sense strand
aaagcuuccagaucaaaua

SEQ ID NO: 1110670 - RNA, 19 nt, Homo sapiens
  misc_RNA (1)...(19): siRNA sense strand
agacuaccauccucucauc

SEQ ID NO: 1110671 - RNA, 19 nt, Homo sapiens
  misc_RNA (1)...(19): siRNA sense strand
acaaggaaggcaagagaaa

SEQ ID NO: 1110672 - RNA, 19 nt, Homo sapiens
  misc_RNA (1)...(19): siRNA sense strand
gguccuagcugccuuccuu

SEQ ID NO: 1110673 - RNA, 19 nt, Homo sapiens
  misc_RNA (1)...(19): siRNA sense strand
ggaggaggcagaagucauu

SEQ ID NO: 1110674 - RNA, 19 nt, Homo sapiens
  misc_RNA (1)...(19): siRNA sense strand
gagcgucacaugcaaauug

SEQ ID NO: 1110675 - RNA, 19 nt, Homo sapiens
  misc_RNA (1)...(19): siRNA sense strand
ggaggagaccgcaaguuga

SEQ ID NO: 1110676 - RNA, 19 nt, Homo sapiens
  misc_RNA (1)...(19): siRNA sense strand
cuccagacuucuaugcuuu

SEQ ID NO: 1110677 - RNA, 19 nt, Homo sapiens
  misc_RNA (1)...(19): siRNA sense strand
gacagagaaggaagccaua

SEQ ID NO: 1110678 - RNA, 19 nt, Homo sapiens
  misc_RNA (1)...(19): siRNA sense strand
gaggaggcagaagucauua

SEQ ID NO: 1110679 - RNA, 19 nt, Homo sapiens
  misc_RNA (1)...(19): siRNA sense strand
uggaggagaccgcaaguug

SEQ ID NO: 1110680 - RNA, 19 nt, Homo sapiens
  misc_RNA (1)...(19): siRNA sense strand
gaggagaccgcaaguugag

SEQ ID NO: 1110681 - RNA, 19 nt, Homo sapiens
  misc_RNA (1)...(19): siRNA sense strand
cagcuacuccagacuucua

SEQ ID NO: 1110682 - RNA, 19 nt, Homo sapiens
  misc_RNA (1)...(19): siRNA sense strand
uccaagagcagcugaaauc

SEQ ID NO: 1110683 - RNA, 19 nt, Homo sapiens
  misc_RNA (1)...(19): siRNA sense strand
ggaggaggaggcagaaguc

SEQ ID NO: 1110684 - RNA, 19 nt, Homo sapiens
  misc_RNA (1)...(19): siRNA sense strand
gguccaagagcagcugaaa

SEQ ID NO: 1110685 - RNA, 19 nt, Homo sapiens
  misc_RNA (1)...(19): siRNA sense strand
gcugggagcgucacaugca

SEQ ID NO: 1110686 - RNA, 19 nt, Homo sapiens
  misc_RNA (1)...(19): siRNA sense strand
caagagcagcugaaaucuc

SEQ ID NO: 1110687 - RNA, 19 nt, Homo sapiens
  misc_RNA (1)...(19): siRNA sense strand
uaaaguuuguacgaguuca

SEQ ID NO: 1110688 - RNA, 19 nt, Homo sapiens
  misc_RNA (1)...(19): siRNA sense strand
acuccagacuucuaugcuu

SEQ ID NO: 1110689 - RNA, 19 nt, Homo sapiens
  misc_RNA (1)...(19): siRNA sense strand
gguccuagcugccuuccuu

SEQ ID NO: 1110690 - RNA, 19 nt, Homo sapiens
  misc_RNA (1)...(19): siRNA sense strand
ggaggaggcagaagucauu

SEQ ID NO: 1110691 - RNA, 19 nt, Homo sapiens
  misc_RNA (1)...(19): siRNA sense strand
gagcgucacaugcaaauug

SEQ ID NO: 1110692 - RNA, 19 nt, Homo sapiens
  misc_RNA (1)...(19): siRNA sense strand
gaacuugccauuggacuga

SEQ ID NO: 1110693 - RNA, 19 nt, Homo sapiens
  misc_RNA (1)...(19): siRNA sense strand
ggaggagaccgcaaguuga

SEQ ID NO: 1110694 - RNA, 19 nt, Homo sapiens
  misc_RNA (1)...(19): siRNA sense strand
cagaagucauuaaccagaa

SEQ ID NO: 1110695 - RNA, 19 nt, Homo sapiens
  misc_RNA (1)...(19): siRNA sense strand
ggacuugaacuugccauug

SEQ ID NO: 1110696 - RNA, 19 nt, Homo sapiens
  misc_RNA (1)...(19): siRNA sense strand
gacuugaacuugccauugg

SEQ ID NO: 1110697 - RNA, 19 nt, Homo sapiens
  misc_RNA (1)...(19): siRNA sense strand
gagggcauccuggcuguuu

SEQ ID NO: 1110698 - RNA, 19 nt, Homo sapiens
  misc_RNA (1)...(19): siRNA sense strand
ugguggagcuguucuguag

SEQ ID NO: 1110699 - RNA, 19 nt, Homo sapiens
  misc_RNA (1)...(19): siRNA sense strand
cuccagacuucuaugcuuu

SEQ ID NO: 1110700 - RNA, 19 nt, Homo sapiens
  misc_RNA (1)...(19): siRNA sense strand
gacagagaaggaagccaua

SEQ ID NO: 1110701 - RNA, 19 nt, Homo sapiens
  misc_RNA (1)...(19): siRNA sense strand
gaggaggcagaagucauua

SEQ ID NO: 1110702 - RNA, 19 nt, Homo sapiens
  misc_RNA (1)...(19): siRNA sense strand
uggaggagaccgcaaguug

SEQ ID NO: 1110703 - RNA, 19 nt, Homo sapiens
  misc_RNA (1)...(19): siRNA sense strand
gaggagaccgcaaguugag

SEQ ID NO: 1110704 - RNA, 19 nt, Homo sapiens
  misc_RNA (1)...(19): siRNA sense strand
cagcuacuccagacuucua

SEQ ID NO: 1110705 - RNA, 19 nt, Homo sapiens
  misc_RNA (1)...(19): siRNA sense strand
aggcagaagucauuaacca

SEQ ID NO: 1110706 - RNA, 19 nt, Homo sapiens
  misc_RNA (1)...(19): siRNA sense strand
uccaagagcagcugaaauc

SEQ ID NO: 1110707 - RNA, 19 nt, Homo sapiens
  misc_RNA (1)...(19): siRNA sense strand
ggaggaggaggcagaaguc

SEQ ID NO: 1110708 - RNA, 19 nt, Homo sapiens
  misc_RNA (1)...(19): siRNA sense strand
ggaggcagaagucauuaac

SEQ ID NO: 1110709 - RNA, 19 nt, Homo sapiens
  misc_RNA (1)...(19): siRNA sense strand
gguccaagagcagcugaaa

SEQ ID NO: 1110710 - RNA, 19 nt, Homo sapiens
  misc_RNA (1)...(19): siRNA sense strand
gcugggagcgucacaugca

SEQ ID NO: 1110711 - RNA, 19 nt, Homo sapiens
  misc_RNA (1)...(19): siRNA sense strand
caagagcagcugaaaucuc

SEQ ID NO: 1110712 - RNA, 19 nt, Homo sapiens
  misc_RNA (1)...(19): siRNA sense strand
acuccagacuucuaugcuu

SEQ ID NO: 1110713 - RNA, 19 nt, Homo sapiens
  misc_RNA (1)...(19): siRNA sense strand
uaaaguuuguacgaguuca

SEQ ID NO: 1110714 - RNA, 19 nt, Homo sapiens
  misc_RNA (1)...(19): siRNA sense strand
agaagucauuaaccagaag

SEQ ID NO: 1110715 - RNA, 19 nt, Homo sapiens
  misc_RNA (1)...(19): siRNA sense strand
gguccuagcugccuuccuu

SEQ ID NO: 1110716 - RNA, 19 nt, Homo sapiens
  misc_RNA (1)...(19): siRNA sense strand
ggaggaggcagaagucauu

SEQ ID NO: 1110717 - RNA, 19 nt, Homo sapiens
  misc_RNA (1)...(19): siRNA sense strand
gagcgucacaugcaaauug

SEQ ID NO: 1110718 - RNA, 19 nt, Homo sapiens
  misc_RNA (1)...(19): siRNA sense strand
ggaggagaccgcaaguuga

SEQ ID NO: 1110719 - RNA, 19 nt, Homo sapiens
  misc_RNA (1)...(19): siRNA sense strand
cuccagacuucuaugcuuu

SEQ ID NO: 1110720 - RNA, 19 nt, Homo sapiens
  misc_RNA (1)...(19): siRNA sense strand
gacagagaaggaagccaua

SEQ ID NO: 1110721 - RNA, 19 nt, Homo sapiens
  misc_RNA (1)...(19): siRNA sense strand
gaggaggcagaagucauua

SEQ ID NO: 1110722 - RNA, 19 nt, Homo sapiens
  misc_RNA (1)...(19): siRNA sense strand
uggaggagaccgcaaguug

SEQ ID NO: 1110723 - RNA, 19 nt, Homo sapiens
  misc_RNA (1)...(19): siRNA sense strand
gaggagaccgcaaguugag

SEQ ID NO: 1110724 - RNA, 19 nt, Homo sapiens
  misc_RNA (1)...(19): siRNA sense strand
cagcuacuccagacuucua

SEQ ID NO: 1110725 - RNA, 19 nt, Homo sapiens
  misc_RNA (1)...(19): siRNA sense strand
uccaagagcagcugaaauc

SEQ ID NO: 1110726 - RNA, 19 nt, Homo sapiens
  misc_RNA (1)...(19): siRNA sense strand
ggaggaggaggcagaaguc

SEQ ID NO: 1110727 - RNA, 19 nt, Homo sapiens
  misc_RNA (1)...(19): siRNA sense strand
gguccaagagcagcugaaa

SEQ ID NO: 1110728 - RNA, 19 nt, Homo sapiens
  misc_RNA (1)...(19): siRNA sense strand
gcugggagcgucacaugca

SEQ ID NO: 1110729 - RNA, 19 nt, Homo sapiens
  misc_RNA (1)...(19): siRNA sense strand
caagagcagcugaaaucuc

SEQ ID NO: 1110730 - RNA, 19 nt, Homo sapiens
  misc_RNA (1)...(19): siRNA sense strand
uaaaguuuguacgaguuca

SEQ ID NO: 1110731 - RNA, 19 nt, Homo sapiens
  misc_RNA (1)...(19): siRNA sense strand
acuccagacuucuaugcuu

SEQ ID NO: 1110732 - RNA, 19 nt, Homo sapiens
  misc_RNA (1)...(19): siRNA sense strand
gguccuagcugccuuccuu

SEQ ID NO: 1110733 - RNA, 19 nt, Homo sapiens
  misc_RNA (1)...(19): siRNA sense strand
ggaggaggcagaagucauu

SEQ ID NO: 1110734 - RNA, 19 nt, Homo sapiens
  misc_RNA (1)...(19): siRNA sense strand
gagcgucacaugcaaauug

SEQ ID NO: 1110735 - RNA, 19 nt, Homo sapiens
  misc_RNA (1)...(19): siRNA sense strand
gaacuugccauuggacuga

SEQ ID NO: 1110736 - RNA, 19 nt, Homo sapiens
  misc_RNA (1)...(19): siRNA sense strand
ggaggagaccgcaaguuga

SEQ ID NO: 1110737 - RNA, 19 nt, Homo sapiens
  misc_RNA (1)...(19): siRNA sense strand
cagaagucauuaaccagaa

SEQ ID NO: 1110738 - RNA, 19 nt, Homo sapiens
  misc_RNA (1)...(19): siRNA sense strand
ggacuugaacuugccauug

SEQ ID NO: 1110739 - RNA, 19 nt, Homo sapiens
  misc_RNA (1)...(19): siRNA sense strand
gacuugaacuugccauugg

SEQ ID NO: 1110740 - RNA, 19 nt, Homo sapiens
  misc_RNA (1)...(19): siRNA sense strand
gagggcauccuggcuguuu

SEQ ID NO: 1110741 - RNA, 19 nt, Homo sapiens
  misc_RNA (1)...(19): siRNA sense strand
ugguggagcuguucuguag

SEQ ID NO: 1110742 - RNA, 19 nt, Homo sapiens
  misc_RNA (1)...(19): siRNA sense strand
cuccagacuucuaugcuuu

SEQ ID NO: 1110743 - RNA, 19 nt, Homo sapiens
  misc_RNA (1)...(19): siRNA sense strand
gacagagaaggaagccaua

SEQ ID NO: 1110744 - RNA, 19 nt, Homo sapiens
  misc_RNA (1)...(19): siRNA sense strand
gaggaggcagaagucauua

SEQ ID NO: 1110745 - RNA, 19 nt, Homo sapiens
  misc_RNA (1)...(19): siRNA sense strand
uggaggagaccgcaaguug

SEQ ID NO: 1110746 - RNA, 19 nt, Homo sapiens
  misc_RNA (1)...(19): siRNA sense strand
gaggagaccgcaaguugag

SEQ ID NO: 1110747 - RNA, 19 nt, Homo sapiens
  misc_RNA (1)...(19): siRNA sense strand
cagcuacuccagacuucua

SEQ ID NO: 1110748 - RNA, 19 nt, Homo sapiens
  misc_RNA (1)...(19): siRNA sense strand
aggcagaagucauuaacca

SEQ ID NO: 1110749 - RNA, 19 nt, Homo sapiens
  misc_RNA (1)...(19): siRNA sense strand
uccaagagcagcugaaauc

SEQ ID NO: 1110750 - RNA, 19 nt, Homo sapiens
  misc_RNA (1)...(19): siRNA sense strand
ggaggaggaggcagaaguc

SEQ ID NO: 1110751 - RNA, 19 nt, Homo sapiens
  misc_RNA (1)...(19): siRNA sense strand
ggaggcagaagucauuaac

SEQ ID NO: 1110752 - RNA, 19 nt, Homo sapiens
  misc_RNA (1)...(19): siRNA sense strand
gguccaagagcagcugaaa

SEQ ID NO: 1110753 - RNA, 19 nt, Homo sapiens
  misc_RNA (1)...(19): siRNA sense strand
gcugggagcgucacaugca

SEQ ID NO: 1110754 - RNA, 19 nt, Homo sapiens
  misc_RNA (1)...(19): siRNA sense strand
caagagcagcugaaaucuc

SEQ ID NO: 1110755 - RNA, 19 nt, Homo sapiens
  misc_RNA (1)...(19): siRNA sense strand
acuccagacuucuaugcuu

SEQ ID NO: 1110756 - RNA, 19 nt, Homo sapiens
  misc_RNA (1)...(19): siRNA sense strand
uaaaguuuguacgaguuca

SEQ ID NO: 1110757 - RNA, 19 nt, Homo sapiens
  misc_RNA (1)...(19): siRNA sense strand
agaagucauuaaccagaag

SEQ ID NO: 1110758 - RNA, 19 nt, Homo sapiens
  misc_RNA (1)...(19): siRNA sense strand
caaagaaccuauccgcuua

SEQ ID NO: 1110759 - RNA, 19 nt, Homo sapiens
  misc_RNA (1)...(19): siRNA sense strand
gaaauacucuucaguugga

SEQ ID NO: 1110760 - RNA, 19 nt, Homo sapiens
  misc_RNA (1)...(19): siRNA sense strand
ggucagcuauccagaauuu

SEQ ID NO: 1110761 - RNA, 19 nt, Homo sapiens
  misc_RNA (1)...(19): siRNA sense strand
gaacaggauuggucagcua

SEQ ID NO: 1110762 - RNA, 19 nt, Homo sapiens
  misc_RNA (1)...(19): siRNA sense strand
gcaaaccgguuaaucaaga

SEQ ID NO: 1110763 - RNA, 19 nt, Homo sapiens
  misc_RNA (1)...(19): siRNA sense strand
ggacuguggugccaucuuu

SEQ ID NO: 1110764 - RNA, 19 nt, Homo sapiens
  misc_RNA (1)...(19): siRNA sense strand
ugacaaggcuucuaaagag

SEQ ID NO: 1110765 - RNA, 19 nt, Homo sapiens
  misc_RNA (1)...(19): siRNA sense strand
gcuccaagcuuccugcauu

SEQ ID NO: 1110766 - RNA, 19 nt, Homo sapiens
  misc_RNA (1)...(19): siRNA sense strand
ugaauuauguuucgcagaa

SEQ ID NO: 1110767 - RNA, 19 nt, Homo sapiens
  misc_RNA (1)...(19): siRNA sense strand
gguacaagcugacauucaa

SEQ ID NO: 1110768 - RNA, 19 nt, Homo sapiens
  misc_RNA (1)...(19): siRNA sense strand
ugaacgaacugaucaaagu

SEQ ID NO: 1110769 - RNA, 19 nt, Homo sapiens
  misc_RNA (1)...(19): siRNA sense strand
ggaagcucuuuaugccuua

SEQ ID NO: 1110770 - RNA, 19 nt, Homo sapiens
  misc_RNA (1)...(19): siRNA sense strand
ucaagaauuuggucaagga

SEQ ID NO: 1110771 - RNA, 19 nt, Homo sapiens
  misc_RNA (1)...(19): siRNA sense strand
cgaaguaggagaagugaaa

SEQ ID NO: 1110772 - RNA, 19 nt, Homo sapiens
  misc_RNA (1)...(19): siRNA sense strand
gaagugcgaagccauguga

SEQ ID NO: 1110773 - RNA, 19 nt, Homo sapiens
  misc_RNA (1)...(19): siRNA sense strand
gugagcaggugaacacuga

SEQ ID NO: 1110774 - RNA, 19 nt, Homo sapiens
  misc_RNA (1)...(19): siRNA sense strand
gaaauucuccaggcaaaug

SEQ ID NO: 1110775 - RNA, 19 nt, Homo sapiens
  misc_RNA (1)...(19): siRNA sense strand
gaagagucauugaaauacu

SEQ ID NO: 1110776 - RNA, 19 nt, Homo sapiens
  misc_RNA (1)...(19): siRNA sense strand
uaacggugcuggagaugug

SEQ ID NO: 1110777 - RNA, 19 nt, Homo sapiens
  misc_RNA (1)...(19): siRNA sense strand
acagcgagguggccaaauu

SEQ ID NO: 1110778 - RNA, 19 nt, Homo sapiens
  misc_RNA (1)...(19): siRNA sense strand
cagaauugcugugaggaaa

SEQ ID NO: 1110779 - RNA, 19 nt, Homo sapiens
  misc_RNA (1)...(19): siRNA sense strand
aaaggaagagucauugaaa

SEQ ID NO: 1110780 - RNA, 19 nt, Homo sapiens
  misc_RNA (1)...(19): siRNA sense strand
ucgagacgcuuaucagaug

SEQ ID NO: 1110781 - RNA, 19 nt, Homo sapiens
  misc_RNA (1)...(19): siRNA sense strand
ggucaaggaggaacaagaa

SEQ ID NO: 1110782 - RNA, 19 nt, Homo sapiens
  misc_RNA (1)...(19): siRNA sense strand
caaagucaaugagagugaa

SEQ ID NO: 1110783 - RNA, 19 nt, Homo sapiens
  misc_RNA (1)...(19): siRNA sense strand
uaaaggaagagucauugaa

SEQ ID NO: 1110784 - RNA, 19 nt, Homo sapiens
  misc_RNA (1)...(19): siRNA sense strand
ugacaccacugaugacgau

SEQ ID NO: 1110785 - RNA, 19 nt, Homo sapiens
  misc_RNA (1)...(19): siRNA sense strand
aaacaagacccuaaacuac

SEQ ID NO: 1110786 - RNA, 19 nt, Homo sapiens
  misc_RNA (1)...(19): siRNA sense strand
caauggaccugcgcagaug

SEQ ID NO: 1110787 - RNA, 19 nt, Homo sapiens
  misc_RNA (1)...(19): siRNA sense strand
caaaccgguuaaucaagaa

SEQ ID NO: 1110788 - RNA, 19 nt, Homo sapiens
  misc_RNA (1)...(19): siRNA sense strand
gaacgaacugaucaaagug

SEQ ID NO: 1110789 - RNA, 19 nt, Homo sapiens
  misc_RNA (1)...(19): siRNA sense strand
cggaaauucuccaggcaaa

SEQ ID NO: 1110790 - RNA, 19 nt, Homo sapiens
  misc_RNA (1)...(19): siRNA sense strand
aggaagagucauugaaaua

SEQ ID NO: 1110791 - RNA, 19 nt, Homo sapiens
  misc_RNA (1)...(19): siRNA sense strand
gaagugccaccagguacua

SEQ ID NO: 1110792 - RNA, 19 nt, Homo sapiens
  misc_RNA (1)...(19): siRNA sense strand
gcuugacaauccacacaaa

SEQ ID NO: 1110793 - RNA, 19 nt, Homo sapiens
  misc_RNA (1)...(19): siRNA sense strand
gagaaggaagcucuuuaug

SEQ ID NO: 1110794 - RNA, 19 nt, Homo sapiens
  misc_RNA (1)...(19): siRNA sense strand
ugaaggugcugcaggagau

SEQ ID NO: 1110795 - RNA, 19 nt, Homo sapiens
  misc_RNA (1)...(19): siRNA sense strand
gaacugaucaaaguguugu

SEQ ID NO: 1110796 - RNA, 19 nt, Homo sapiens
  misc_RNA (1)...(19): siRNA sense strand
ggucaccuuuggaaacaga

SEQ ID NO: 1110797 - RNA, 19 nt, Homo sapiens
  misc_RNA (1)...(19): siRNA sense strand
ggaagagucauugaaauac

SEQ ID NO: 1110798 - RNA, 19 nt, Homo sapiens
  misc_RNA (1)...(19): siRNA sense strand
gaguucugcuguacaaaca

SEQ ID NO: 1110799 - RNA, 19 nt, Homo sapiens
  misc_RNA (1)...(19): siRNA sense strand
gcugcaaaccgguuaauca

SEQ ID NO: 1110800 - RNA, 19 nt, Homo sapiens
  misc_RNA (1)...(19): siRNA sense strand
gaagcucuuuaugccuuaa

SEQ ID NO: 1110801 - RNA, 19 nt, Homo sapiens
  misc_RNA (1)...(19): siRNA sense strand
ugacaauccacacaaagaa

SEQ ID NO: 1110802 - RNA, 19 nt, Homo sapiens
  misc_RNA (1)...(19): siRNA sense strand
cggagaagguguccaagag

SEQ ID NO: 1110803 - RNA, 19 nt, Homo sapiens
  misc_RNA (1)...(19): siRNA sense strand
uaaacuaccaguggauaaa

SEQ ID NO: 1110804 - RNA, 19 nt, Homo sapiens
  misc_RNA (1)...(19): siRNA sense strand
cugaagaaacaaggaauua

SEQ ID NO: 1110805 - RNA, 19 nt, Homo sapiens
  misc_RNA (1)...(19): siRNA sense strand
caaauuucguuuccugaac

SEQ ID NO: 1110806 - RNA, 19 nt, Homo sapiens
  misc_RNA (1)...(19): siRNA sense strand
ccaaggaguucugcuguac

SEQ ID NO: 1110807 - RNA, 19 nt, Homo sapiens
  misc_RNA (1)...(19): siRNA sense strand
aaggaagagucauugaaau

SEQ ID NO: 1110808 - RNA, 19 nt, Homo sapiens
  misc_RNA (1)...(19): siRNA sense strand
cggaagacaucaagauucg

SEQ ID NO: 1110809 - RNA, 19 nt, Homo sapiens
  misc_RNA (1)...(19): siRNA sense strand
gggauaucauguuucaagu

SEQ ID NO: 1110810 - RNA, 19 nt, Homo sapiens
  misc_RNA (1)...(19): siRNA sense strand
cccaaggaguucugcugua

SEQ ID NO: 1110811 - RNA, 19 nt, Homo sapiens
  misc_RNA (1)...(19): siRNA sense strand
gcugaagaaacaaggaauu

SEQ ID NO: 1110812 - RNA, 19 nt, Homo sapiens
  misc_RNA (1)...(19): siRNA sense strand
ccaaauuucguuuccugaa

SEQ ID NO: 1110813 - RNA, 19 nt, Homo sapiens
  misc_RNA (1)...(19): siRNA sense strand
cuccgugcccucugaauua

SEQ ID NO: 1110814 - RNA, 19 nt, Homo sapiens
  misc_RNA (1)...(19): siRNA sense strand
cagcgagguggccaaauuu

SEQ ID NO: 1110815 - RNA, 19 nt, Homo sapiens
  misc_RNA (1)...(19): siRNA sense strand
caagcuuccugcauucagu

SEQ ID NO: 1110816 - RNA, 19 nt, Homo sapiens
  misc_RNA (1)...(19): siRNA sense strand
ccaaagucaaugagaguga

SEQ ID NO: 1110817 - RNA, 19 nt, Homo sapiens
  misc_RNA (1)...(19): siRNA sense strand
aaggaguucugcuguacaa

SEQ ID NO: 1110818 - RNA, 19 nt, Homo sapiens
  misc_RNA (1)...(19): siRNA sense strand
aaaguuaaaggaagaguca

SEQ ID NO: 1110819 - RNA, 19 nt, Homo sapiens
  misc_RNA (1)...(19): siRNA sense strand
ucagugcgguggaggaagu

SEQ ID NO: 1110820 - RNA, 19 nt, Homo sapiens
  misc_RNA (1)...(19): siRNA sense strand
cuaaacuaccaguggauaa

SEQ ID NO: 1110821 - RNA, 19 nt, Homo sapiens
  misc_RNA (1)...(19): siRNA sense strand
gauccagucuccgcaagag

SEQ ID NO: 1110822 - RNA, 19 nt, Homo sapiens
  misc_RNA (1)...(19): siRNA sense strand
acuaaguccucuccagguu

SEQ ID NO: 1110823 - RNA, 19 nt, Homo sapiens
  misc_RNA (1)...(19): siRNA sense strand
gcuccgugcccucugaauu

SEQ ID NO: 1110824 - RNA, 19 nt, Homo sapiens
  misc_RNA (1)...(19): siRNA sense strand
cagagugaccagcucauug

SEQ ID NO: 1110825 - RNA, 19 nt, Homo sapiens
  misc_RNA (1)...(19): siRNA sense strand
caaggcuucuaaagagcaa

SEQ ID NO: 1110826 - RNA, 19 nt, Homo sapiens
  misc_RNA (1)...(19): siRNA sense strand
acaagacccuaaacuacca

SEQ ID NO: 1110827 - RNA, 19 nt, Homo sapiens
  misc_RNA (1)...(19): siRNA sense strand
ucaagauucgagacgcuua

SEQ ID NO: 1110828 - RNA, 19 nt, Homo sapiens
  misc_RNA (1)...(19): siRNA sense strand
ccaucucccuggcccaaga

SEQ ID NO: 1110829 - RNA, 19 nt, Homo sapiens
  misc_RNA (1)...(19): siRNA sense strand
ggauaucauguuucaagug

SEQ ID NO: 1110830 - RNA, 19 nt, Homo sapiens
  misc_RNA (1)...(19): siRNA sense strand
gcuacuggcccacaagauc

SEQ ID NO: 1110831 - RNA, 19 nt, Homo sapiens
  misc_RNA (1)...(19): siRNA sense strand
guuaaaggaagagucauug

SEQ ID NO: 1110832 - RNA, 19 nt, Homo sapiens
  misc_RNA (1)...(19): siRNA sense strand
ccuauccgcuuacgguaca

SEQ ID NO: 1110833 - RNA, 19 nt, Homo sapiens
  misc_RNA (1)...(19): siRNA sense strand
cuuugaugcugaugaagaa

SEQ ID NO: 1110834 - RNA, 19 nt, Homo sapiens
  misc_RNA (1)...(19): siRNA sense strand
aaaacaagacccuaaacua

SEQ ID NO: 1110835 - RNA, 19 nt, Homo sapiens
  misc_RNA (1)...(19): siRNA sense strand
uccagagucuuucagaauc

SEQ ID NO: 1110836 - RNA, 19 nt, Homo sapiens
  misc_RNA (1)...(19): siRNA sense strand
gcaugucggaacaggauug

SEQ ID NO: 1110837 - RNA, 19 nt, Homo sapiens
  misc_RNA (1)...(19): siRNA sense strand
ccuaaacuaccaguggaua

SEQ ID NO: 1110838 - RNA, 19 nt, Homo sapiens
  misc_RNA (1)...(19): siRNA sense strand
gaaaaguguccccaaggaa

SEQ ID NO: 1110839 - RNA, 19 nt, Homo sapiens
  misc_RNA (1)...(19): siRNA sense strand
cagugaugcuccuguuaca

SEQ ID NO: 1110840 - RNA, 19 nt, Homo sapiens
  misc_RNA (1)...(19): siRNA sense strand
ggaguucugcuguacaaac

SEQ ID NO: 1110841 - RNA, 19 nt, Homo sapiens
  misc_RNA (1)...(19): siRNA sense strand
cccugcaggucguguauga

SEQ ID NO: 1110842 - RNA, 19 nt, Homo sapiens
  misc_RNA (1)...(19): siRNA sense strand
cugacaaggcuucuaaaga

SEQ ID NO: 1110843 - RNA, 19 nt, Homo sapiens
  misc_RNA (1)...(19): siRNA sense strand
agaaggaagcucuuuaugc

SEQ ID NO: 1110844 - RNA, 19 nt, Homo sapiens
  misc_RNA (1)...(19): siRNA sense strand
cuucugacaaggcuucuaa

SEQ ID NO: 1110845 - RNA, 19 nt, Homo sapiens
  misc_RNA (1)...(19): siRNA sense strand
caagcugacauucaaccaa

SEQ ID NO: 1110846 - RNA, 19 nt, Homo sapiens
  misc_RNA (1)...(19): siRNA sense strand
gaugaugcacucgcggaaa

SEQ ID NO: 1110847 - RNA, 19 nt, Homo sapiens
  misc_RNA (1)...(19): siRNA sense strand
aaucaagaauuuggucaag

SEQ ID NO: 1110848 - RNA, 19 nt, Homo sapiens
  misc_RNA (1)...(19): siRNA sense strand
gagguggccaaauuucguu

SEQ ID NO: 1110849 - RNA, 19 nt, Homo sapiens
  misc_RNA (1)...(19): siRNA sense strand
uuaaaggaagagucauuga

SEQ ID NO: 1110850 - RNA, 19 nt, Homo sapiens
  misc_RNA (1)...(19): siRNA sense strand
cagcgaaguaggagaagug

SEQ ID NO: 1110851 - RNA, 19 nt, Homo sapiens
  misc_RNA (1)...(19): siRNA sense strand
ucuccagagucuuucagaa

SEQ ID NO: 1110852 - RNA, 19 nt, Homo sapiens
  misc_RNA (1)...(19): siRNA sense strand
cugcaaaccgguuaaucaa

SEQ ID NO: 1110853 - RNA, 19 nt, Homo sapiens
  misc_RNA (1)...(19): siRNA sense strand
ccuuaacggugcuggagau

SEQ ID NO: 1110854 - RNA, 19 nt, Homo sapiens
  misc_RNA (1)...(19): siRNA sense strand
cuccagcugugauaucuca

SEQ ID NO: 1110855 - RNA, 19 nt, Homo sapiens
  misc_RNA (1)...(19): siRNA sense strand
ugcauucaguccuuugaug

SEQ ID NO: 1110856 - RNA, 19 nt, Homo sapiens
  misc_RNA (1)...(19): siRNA sense strand
cgugcccucugaauuaugu

SEQ ID NO: 1110857 - RNA, 19 nt, Homo sapiens
  misc_RNA (1)...(19): siRNA sense strand
ggaaauucuccaggcaaau

SEQ ID NO: 1110858 - RNA, 19 nt, Homo sapiens
  misc_RNA (1)...(19): siRNA sense strand
gaaauacucuucaguugga

SEQ ID NO: 1110859 - RNA, 19 nt, Homo sapiens
  misc_RNA (1)...(19): siRNA sense strand
ggucagcuauccagaauuu

SEQ ID NO: 1110860 - RNA, 19 nt, Homo sapiens
  misc_RNA (1)...(19): siRNA sense strand
gaacaggauuggucagcua

SEQ ID NO: 1110861 - RNA, 19 nt, Homo sapiens
  misc_RNA (1)...(19): siRNA sense strand
ugaacgaacugaucaaagu

SEQ ID NO: 1110862 - RNA, 19 nt, Homo sapiens
  misc_RNA (1)...(19): siRNA sense strand
ggaagcucuuuaugccuua

SEQ ID NO: 1110863 - RNA, 19 nt, Homo sapiens
  misc_RNA (1)...(19): siRNA sense strand
gugagcaggugaacacuga

SEQ ID NO: 1110864 - RNA, 19 nt, Homo sapiens
  misc_RNA (1)...(19): siRNA sense strand
gaagagucauugaaauacu

SEQ ID NO: 1110865 - RNA, 19 nt, Homo sapiens
  misc_RNA (1)...(19): siRNA sense strand
uaacggugcuggagaugug

SEQ ID NO: 1110866 - RNA, 19 nt, Homo sapiens
  misc_RNA (1)...(19): siRNA sense strand
acagcgagguggccaaauu

SEQ ID NO: 1110867 - RNA, 19 nt, Homo sapiens
  misc_RNA (1)...(19): siRNA sense strand
aaaggaagagucauugaaa

SEQ ID NO: 1110868 - RNA, 19 nt, Homo sapiens
  misc_RNA (1)...(19): siRNA sense strand
ucgagacgcuuaucagaug

SEQ ID NO: 1110869 - RNA, 19 nt, Homo sapiens
  misc_RNA (1)...(19): siRNA sense strand
uaaaggaagagucauugaa

SEQ ID NO: 1110870 - RNA, 19 nt, Homo sapiens
  misc_RNA (1)...(19): siRNA sense strand
aaacaagacccuaaacuac

SEQ ID NO: 1110871 - RNA, 19 nt, Homo sapiens
  misc_RNA (1)...(19): siRNA sense strand
gaacgaacugaucaaagug

SEQ ID NO: 1110872 - RNA, 19 nt, Homo sapiens
  misc_RNA (1)...(19): siRNA sense strand
aggaagagucauugaaaua

SEQ ID NO: 1110873 - RNA, 19 nt, Homo sapiens
  misc_RNA (1)...(19): siRNA sense strand
gagaaggaagcucuuuaug

SEQ ID NO: 1110874 - RNA, 19 nt, Homo sapiens
  misc_RNA (1)...(19): siRNA sense strand
gaacugaucaaaguguugu

SEQ ID NO: 1110875 - RNA, 19 nt, Homo sapiens
  misc_RNA (1)...(19): siRNA sense strand
ggaagagucauugaaauac

SEQ ID NO: 1110876 - RNA, 19 nt, Homo sapiens
  misc_RNA (1)...(19): siRNA sense strand
gaagcucuuuaugccuuaa

SEQ ID NO: 1110877 - RNA, 19 nt, Homo sapiens
  misc_RNA (1)...(19): siRNA sense strand
uaaacuaccaguggauaaa

SEQ ID NO: 1110878 - RNA, 19 nt, Homo sapiens
  misc_RNA (1)...(19): siRNA sense strand
cugaagaaacaaggaauua

SEQ ID NO: 1110879 - RNA, 19 nt, Homo sapiens
  misc_RNA (1)...(19): siRNA sense strand
caaauuucguuuccugaac

SEQ ID NO: 1110880 - RNA, 19 nt, Homo sapiens
  misc_RNA (1)...(19): siRNA sense strand
aaggaagagucauugaaau

SEQ ID NO: 1110881 - RNA, 19 nt, Homo sapiens
  misc_RNA (1)...(19): siRNA sense strand
cggaagacaucaagauucg

SEQ ID NO: 1110882 - RNA, 19 nt, Homo sapiens
  misc_RNA (1)...(19): siRNA sense strand
gcugaagaaacaaggaauu

SEQ ID NO: 1110883 - RNA, 19 nt, Homo sapiens
  misc_RNA (1)...(19): siRNA sense strand
ccaaauuucguuuccugaa

SEQ ID NO: 1110884 - RNA, 19 nt, Homo sapiens
  misc_RNA (1)...(19): siRNA sense strand
cagcgagguggccaaauuu

SEQ ID NO: 1110885 - RNA, 19 nt, Homo sapiens
  misc_RNA (1)...(19): siRNA sense strand
aaaguuaaaggaagaguca

SEQ ID NO: 1110886 - RNA, 19 nt, Homo sapiens
  misc_RNA (1)...(19): siRNA sense strand
cuaaacuaccaguggauaa

SEQ ID NO: 1110887 - RNA, 19 nt, Homo sapiens
  misc_RNA (1)...(19): siRNA sense strand
gauccagucuccgcaagag

SEQ ID NO: 1110888 - RNA, 19 nt, Homo sapiens
  misc_RNA (1)...(19): siRNA sense strand
acaagacccuaaacuacca

SEQ ID NO: 1110889 - RNA, 19 nt, Homo sapiens
  misc_RNA (1)...(19): siRNA sense strand
ucaagauucgagacgcuua

SEQ ID NO: 1110890 - RNA, 19 nt, Homo sapiens
  misc_RNA (1)...(19): siRNA sense strand
gcuacuggcccacaagauc

SEQ ID NO: 1110891 - RNA, 19 nt, Homo sapiens
  misc_RNA (1)...(19): siRNA sense strand
ccaucucccuggcccaaga

SEQ ID NO: 1110892 - RNA, 19 nt, Homo sapiens
  misc_RNA (1)...(19): siRNA sense strand
guuaaaggaagagucauug

SEQ ID NO: 1110893 - RNA, 19 nt, Homo sapiens
  misc_RNA (1)...(19): siRNA sense strand
cuuugaugcugaugaagaa

SEQ ID NO: 1110894 - RNA, 19 nt, Homo sapiens
  misc_RNA (1)...(19): siRNA sense strand
aaaacaagacccuaaacua

SEQ ID NO: 1110895 - RNA, 19 nt, Homo sapiens
  misc_RNA (1)...(19): siRNA sense strand
gcaugucggaacaggauug

SEQ ID NO: 1110896 - RNA, 19 nt, Homo sapiens
  misc_RNA (1)...(19): siRNA sense strand
agaaggaagcucuuuaugc

SEQ ID NO: 1110897 - RNA, 19 nt, Homo sapiens
  misc_RNA (1)...(19): siRNA sense strand
ccuaaacuaccaguggaua

SEQ ID NO: 1110898 - RNA, 19 nt, Homo sapiens
  misc_RNA (1)...(19): siRNA sense strand
gagguggccaaauuucguu

SEQ ID NO: 1110899 - RNA, 19 nt, Homo sapiens
  misc_RNA (1)...(19): siRNA sense strand
uuaaaggaagagucauuga

SEQ ID NO: 1110900 - RNA, 19 nt, Homo sapiens
  misc_RNA (1)...(19): siRNA sense strand
ccuuaacggugcuggagau

SEQ ID NO: 1110901 - RNA, 19 nt, Homo sapiens
  misc_RNA (1)...(19): siRNA sense strand
caagauucgagacgcuuau

SEQ ID NO: 1110902 - RNA, 19 nt, Homo sapiens
  misc_RNA (1)...(19): siRNA sense strand
ccacagacccaagcauguc

SEQ ID NO: 1110903 - RNA, 19 nt, Homo sapiens
  misc_RNA (1)...(19): siRNA sense strand
ggugaacacugaccccaau

SEQ ID NO: 1110904 - RNA, 19 nt, Homo sapiens
  misc_RNA (1)...(19): siRNA sense strand
ccggaagacaucaagauuc

SEQ ID NO: 1110905 - RNA, 19 nt, Homo sapiens
  misc_RNA (1)...(19): siRNA sense strand
ucaguuggacagucugguu

SEQ ID NO: 1110906 - RNA, 19 nt, Homo sapiens
  misc_RNA (1)...(19): siRNA sense strand
uuggucagcuauccagaau

SEQ ID NO: 1110907 - RNA, 19 nt, Homo sapiens
  misc_RNA (1)...(19): siRNA sense strand
gcuaugaccucaacucuaa

SEQ ID NO: 1110908 - RNA, 19 nt, Homo sapiens
  misc_RNA (1)...(19): siRNA sense strand
gaaaauaccugcacgauga

SEQ ID NO: 1110909 - RNA, 19 nt, Homo sapiens
  misc_RNA (1)...(19): siRNA sense strand
ggacagagcuagaaucagu

SEQ ID NO: 1110910 - RNA, 19 nt, Homo sapiens
  misc_RNA (1)...(19): siRNA sense strand
gaauguggcuuccaaucaa

SEQ ID NO: 1110911 - RNA, 19 nt, Homo sapiens
  misc_RNA (1)...(19): siRNA sense strand
cuacgucagucccguguua

SEQ ID NO: 1110912 - RNA, 19 nt, Homo sapiens
  misc_RNA (1)...(19): siRNA sense strand
gcacaucauugucuucaca

SEQ ID NO: 1110913 - RNA, 19 nt, Homo sapiens
  misc_RNA (1)...(19): siRNA sense strand
ggacauugcacccaacuau

SEQ ID NO: 1110914 - RNA, 19 nt, Homo sapiens
  misc_RNA (1)...(19): siRNA sense strand
cagcaaggauccagacgaa

SEQ ID NO: 1110915 - RNA, 19 nt, Homo sapiens
  misc_RNA (1)...(19): siRNA sense strand
ucuggcagcuggcaugaua

SEQ ID NO: 1110916 - RNA, 19 nt, Homo sapiens
  misc_RNA (1)...(19): siRNA sense strand
aauggcagcugacccuaua

SEQ ID NO: 1110917 - RNA, 19 nt, Homo sapiens
  misc_RNA (1)...(19): siRNA sense strand
agacaaaggcuguuagaga

SEQ ID NO: 1110918 - RNA, 19 nt, Homo sapiens
  misc_RNA (1)...(19): siRNA sense strand
ggauggaccuggagauguc

SEQ ID NO: 1110919 - RNA, 19 nt, Homo sapiens
  misc_RNA (1)...(19): siRNA sense strand
ugaagacccuggagcaugu

SEQ ID NO: 1110920 - RNA, 19 nt, Homo sapiens
  misc_RNA (1)...(19): siRNA sense strand
ccaaguacccgcagcaaug

SEQ ID NO: 1110921 - RNA, 19 nt, Homo sapiens
  misc_RNA (1)...(19): siRNA sense strand
gcaaggauccagacgaagu

SEQ ID NO: 1110922 - RNA, 19 nt, Homo sapiens
  misc_RNA (1)...(19): siRNA sense strand
caacaagcacuaucagauc

SEQ ID NO: 1110923 - RNA, 19 nt, Homo sapiens
  misc_RNA (1)...(19): siRNA sense strand
caucuacaccgucaccaua

SEQ ID NO: 1110924 - RNA, 19 nt, Homo sapiens
  misc_RNA (1)...(19): siRNA sense strand
cagacgaaguggaaacaga

SEQ ID NO: 1110925 - RNA, 19 nt, Homo sapiens
  misc_RNA (1)...(19): siRNA sense strand
ggagcauugugaccacuga

SEQ ID NO: 1110926 - RNA, 19 nt, Homo sapiens
  misc_RNA (1)...(19): siRNA sense strand
gacauugcacccaacuaua

SEQ ID NO: 1110927 - RNA, 19 nt, Homo sapiens
  misc_RNA (1)...(19): siRNA sense strand
ggaagggacagagcuagaa

SEQ ID NO: 1110928 - RNA, 19 nt, Homo sapiens
  misc_RNA (1)...(19): siRNA sense strand
gcagguggaggcuguguug

SEQ ID NO: 1110929 - RNA, 19 nt, Homo sapiens
  misc_RNA (1)...(19): siRNA sense strand
ggaggaagggacagagcua

SEQ ID NO: 1110930 - RNA, 19 nt, Homo sapiens
  misc_RNA (1)...(19): siRNA sense strand
cagagugggucaccaacga

SEQ ID NO: 1110931 - RNA, 19 nt, Homo sapiens
  misc_RNA (1)...(19): siRNA sense strand
cauaggagcuguggaugag

SEQ ID NO: 1110932 - RNA, 19 nt, Homo sapiens
  misc_RNA (1)...(19): siRNA sense strand
ggaaggaggagcagaucug

SEQ ID NO: 1110933 - RNA, 19 nt, Homo sapiens
  misc_RNA (1)...(19): siRNA sense strand
gagagugccaugaguggaa

SEQ ID NO: 1110934 - RNA, 19 nt, Homo sapiens
  misc_RNA (1)...(19): siRNA sense strand
gcagugacagucuccauca

SEQ ID NO: 1110935 - RNA, 19 nt, Homo sapiens
  misc_RNA (1)...(19): siRNA sense strand
ggacgcaugccuuucuaug

SEQ ID NO: 1110936 - RNA, 19 nt, Homo sapiens
  misc_RNA (1)...(19): siRNA sense strand
caacggaggccaacacaac

SEQ ID NO: 1110937 - RNA, 19 nt, Homo sapiens
  misc_RNA (1)...(19): siRNA sense strand
gaagggacagagcuagaau

SEQ ID NO: 1110938 - RNA, 19 nt, Homo sapiens
  misc_RNA (1)...(19): siRNA sense strand
cagcaauggcaccugaaua

SEQ ID NO: 1110939 - RNA, 19 nt, Homo sapiens
  misc_RNA (1)...(19): siRNA sense strand
acuacaugcuggaaguaua

SEQ ID NO: 1110940 - RNA, 19 nt, Homo sapiens
  misc_RNA (1)...(19): siRNA sense strand
gagguccuguggaauguca

SEQ ID NO: 1110941 - RNA, 19 nt, Homo sapiens
  misc_RNA (1)...(19): siRNA sense strand
agcaauggcaccugaauaa

SEQ ID NO: 1110942 - RNA, 19 nt, Homo sapiens
  misc_RNA (1)...(19): siRNA sense strand
ucaacaagcacuaucagau

SEQ ID NO: 1110943 - RNA, 19 nt, Homo sapiens
  misc_RNA (1)...(19): siRNA sense strand
aacaagcacuaucagauca

SEQ ID NO: 1110944 - RNA, 19 nt, Homo sapiens
  misc_RNA (1)...(19): siRNA sense strand
caacgacaacugcaacuac

SEQ ID NO: 1110945 - RNA, 19 nt, Homo sapiens
  misc_RNA (1)...(19): siRNA sense strand
caagcacuaucagaucaau

SEQ ID NO: 1110946 - RNA, 19 nt, Homo sapiens
  misc_RNA (1)...(19): siRNA sense strand
ccauaggagcuguggauga

SEQ ID NO: 1110947 - RNA, 19 nt, Homo sapiens
  misc_RNA (1)...(19): siRNA sense strand
caccaccucugaccuccuu

SEQ ID NO: 1110948 - RNA, 19 nt, Homo sapiens
  misc_RNA (1)...(19): siRNA sense strand
cuacaugcuggaaguauau

SEQ ID NO: 1110949 - RNA, 19 nt, Homo sapiens
  misc_RNA (1)...(19): siRNA sense strand
guuagagagugccaugagu

SEQ ID NO: 1110950 - RNA, 19 nt, Homo sapiens
  misc_RNA (1)...(19): siRNA sense strand
gaucccaacggcuucaaug

SEQ ID NO: 1110951 - RNA, 19 nt, Homo sapiens
  misc_RNA (1)...(19): siRNA sense strand
ucacagccacccgguauga

SEQ ID NO: 1110952 - RNA, 19 nt, Homo sapiens
  misc_RNA (1)...(19): siRNA sense strand
ggagccgcaucgcagguau

SEQ ID NO: 1110953 - RNA, 19 nt, Homo sapiens
  misc_RNA (1)...(19): siRNA sense strand
cuucuggacuguuuacuac

SEQ ID NO: 1110954 - RNA, 19 nt, Homo sapiens
  misc_RNA (1)...(19): siRNA sense strand
cagccaagaucuggacauc

SEQ ID NO: 1110955 - RNA, 19 nt, Homo sapiens
  misc_RNA (1)...(19): siRNA sense strand
ccuggaggcucgugaaugc

SEQ ID NO: 1110956 - RNA, 19 nt, Homo sapiens
  misc_RNA (1)...(19): siRNA sense strand
gacaucagggacagacaaa

SEQ ID NO: 1110957 - RNA, 19 nt, Homo sapiens
  misc_RNA (1)...(19): siRNA sense strand
gcagcaauggcaccugaau

SEQ ID NO: 1110958 - RNA, 19 nt, Homo sapiens
  misc_RNA (1)...(19): siRNA sense strand
gaggaucgccgugcagagu

SEQ ID NO: 1110959 - RNA, 19 nt, Homo sapiens
  misc_RNA (1)...(19): siRNA sense strand
ugacguccagcacaucauu

SEQ ID NO: 1110960 - RNA, 19 nt, Homo sapiens
  misc_RNA (1)...(19): siRNA sense strand
gcaccuggaaagccuggaa

SEQ ID NO: 1110961 - RNA, 19 nt, Homo sapiens
  misc_RNA (1)...(19): siRNA sense strand
uguguuggcugggcaugaa

SEQ ID NO: 1110962 - RNA, 19 nt, Homo sapiens
  misc_RNA (1)...(19): siRNA sense strand
ggagugcaguagacaucag

SEQ ID NO: 1110963 - RNA, 19 nt, Homo sapiens
  misc_RNA (1)...(19): siRNA sense strand
gagggacgcaugccuuucu

SEQ ID NO: 1110964 - RNA, 19 nt, Homo sapiens
  misc_RNA (1)...(19): siRNA sense strand
acuaucagaucaaugacau

SEQ ID NO: 1110965 - RNA, 19 nt, Homo sapiens
  misc_RNA (1)...(19): siRNA sense strand
cgacaacugcaacuacgau

SEQ ID NO: 1110966 - RNA, 19 nt, Homo sapiens
  misc_RNA (1)...(19): siRNA sense strand
cccaacggcuucaaugacu

SEQ ID NO: 1110967 - RNA, 19 nt, Homo sapiens
  misc_RNA (1)...(19): siRNA sense strand
caaggauccagacgaagug

SEQ ID NO: 1110968 - RNA, 19 nt, Homo sapiens
  misc_RNA (1)...(19): siRNA sense strand
acauugcacccaacuauag

SEQ ID NO: 1110969 - RNA, 19 nt, Homo sapiens
  misc_RNA (1)...(19): siRNA sense strand
gggcuuugggagcaucuuu

SEQ ID NO: 1110970 - RNA, 19 nt, Homo sapiens
  misc_RNA (1)...(19): siRNA sense strand
ggguagcuaugaccucaac

SEQ ID NO: 1110971 - RNA, 19 nt, Homo sapiens
  misc_RNA (1)...(19): siRNA sense strand
ucgcggcugugcccaacaa

SEQ ID NO: 1110972 - RNA, 19 nt, Homo sapiens
  misc_RNA (1)...(19): siRNA sense strand
agagugccaugaguggaaa

SEQ ID NO: 1110973 - RNA, 19 nt, Homo sapiens
  misc_RNA (1)...(19): siRNA sense strand
caccauaggagcuguggau

SEQ ID NO: 1110974 - RNA, 19 nt, Homo sapiens
  misc_RNA (1)...(19): siRNA sense strand
gcaacggaggccaacacaa

SEQ ID NO: 1110975 - RNA, 19 nt, Homo sapiens
  misc_RNA (1)...(19): siRNA sense strand
uggauggaccucucacaga

SEQ ID NO: 1110976 - RNA, 19 nt, Homo sapiens
  misc_RNA (1)...(19): siRNA sense strand
caucagggacagacaaagg

SEQ ID NO: 1110977 - RNA, 19 nt, Homo sapiens
  misc_RNA (1)...(19): siRNA sense strand
caauggcagcugacccuau

SEQ ID NO: 1110978 - RNA, 19 nt, Homo sapiens
  misc_RNA (1)...(19): siRNA sense strand
cccuggagguccuguggaa

SEQ ID NO: 1110979 - RNA, 19 nt, Homo sapiens
  misc_RNA (1)...(19): siRNA sense strand
gugcagagugggucaccaa

SEQ ID NO: 1110980 - RNA, 19 nt, Homo sapiens
  misc_RNA (1)...(19): siRNA sense strand
caccauggcacgcgaugug

SEQ ID NO: 1110981 - RNA, 19 nt, Homo sapiens
  misc_RNA (1)...(19): siRNA sense strand
ccggaaagccaaggaggaa

SEQ ID NO: 1110982 - RNA, 19 nt, Homo sapiens
  misc_RNA (1)...(19): siRNA sense strand
gcaauggcaccugaauaac

SEQ ID NO: 1110983 - RNA, 19 nt, Homo sapiens
  misc_RNA (1)...(19): siRNA sense strand
ggcaguggcguucaacaag

SEQ ID NO: 1110984 - RNA, 19 nt, Homo sapiens
  misc_RNA (1)...(19): siRNA sense strand
guacuggauggaccucuca

SEQ ID NO: 1110985 - RNA, 19 nt, Homo sapiens
  misc_RNA (1)...(19): siRNA sense strand
gcgaugugcaggagagauc

SEQ ID NO: 1110986 - RNA, 19 nt, Homo sapiens
  misc_RNA (1)...(19): siRNA sense strand
ggaguagacuguacagaga

SEQ ID NO: 1110987 - RNA, 19 nt, Homo sapiens
  misc_RNA (1)...(19): siRNA sense strand
ccaaagagguucccaagac

SEQ ID NO: 1110988 - RNA, 19 nt, Homo sapiens
  misc_RNA (1)...(19): siRNA sense strand
caaagagguucccaagaca

SEQ ID NO: 1110989 - RNA, 19 nt, Homo sapiens
  misc_RNA (1)...(19): siRNA sense strand
acacuggucuggugaagau

SEQ ID NO: 1110990 - RNA, 19 nt, Homo sapiens
  misc_RNA (1)...(19): siRNA sense strand
ggacuggaguagacuguac

SEQ ID NO: 1110991 - RNA, 19 nt, Homo sapiens
  misc_RNA (1)...(19): siRNA sense strand
caacaaccacccaucaaca

SEQ ID NO: 1110992 - RNA, 19 nt, Homo sapiens
  misc_RNA (1)...(19): siRNA sense strand
gugaagauguccaggaaac

SEQ ID NO: 1110993 - RNA, 19 nt, Homo sapiens
  misc_RNA (1)...(19): siRNA sense strand
aaagggacccgucaaggaa

SEQ ID NO: 1110994 - RNA, 19 nt, Homo sapiens
  misc_RNA (1)...(19): siRNA sense strand
caucaacaccaaagagguu

SEQ ID NO: 1110995 - RNA, 19 nt, Homo sapiens
  misc_RNA (1)...(19): siRNA sense strand
uggugaagauguccaggaa

SEQ ID NO: 1110996 - RNA, 19 nt, Homo sapiens
  misc_RNA (1)...(19): siRNA sense strand
gaagauguccaggaaacca

SEQ ID NO: 1110997 - RNA, 19 nt, Homo sapiens
  misc_RNA (1)...(19): siRNA sense strand
cagguggacuggaguagac

SEQ ID NO: 1110998 - RNA, 19 nt, Homo sapiens
  misc_RNA (1)...(19): siRNA sense strand
aaagagguucccaagacaa

SEQ ID NO: 1110999 - RNA, 19 nt, Homo sapiens
  misc_RNA (1)...(19): siRNA sense strand
ccaaagagguucccaagac

SEQ ID NO: 1111000 - RNA, 19 nt, Homo sapiens
  misc_RNA (1)...(19): siRNA sense strand
caaagagguucccaagaca

SEQ ID NO: 1111001 - RNA, 19 nt, Homo sapiens
  misc_RNA (1)...(19): siRNA sense strand
caacaaccacccaucaaca

SEQ ID NO: 1111002 - RNA, 19 nt, Homo sapiens
  misc_RNA (1)...(19): siRNA sense strand
aaagggacccgucaaggaa

SEQ ID NO: 1111003 - RNA, 19 nt, Homo sapiens
  misc_RNA (1)...(19): siRNA sense strand
caucaacaccaaagagguu

SEQ ID NO: 1111004 - RNA, 19 nt, Homo sapiens
  misc_RNA (1)...(19): siRNA sense strand
aaagagguucccaagacaa

SEQ ID NO: 1111005 - RNA, 19 nt, Homo sapiens
  misc_RNA (1)...(19): siRNA sense strand
ggaauuaagugccaugaaa

SEQ ID NO: 1111006 - RNA, 19 nt, Homo sapiens
  misc_RNA (1)...(19): siRNA sense strand
ucaaaucccuguuauguug

SEQ ID NO: 1111007 - RNA, 19 nt, Homo sapiens
  misc_RNA (1)...(19): siRNA sense strand
gaucaagauuuccagaauu

SEQ ID NO: 1111008 - RNA, 19 nt, Homo sapiens
  misc_RNA (1)...(19): siRNA sense strand
aaauaaagguggacaauca

SEQ ID NO: 1111009 - RNA, 19 nt, Homo sapiens
  misc_RNA (1)...(19): siRNA sense strand
ccaaagaacugccaacucu

SEQ ID NO: 1111010 - RNA, 19 nt, Homo sapiens
  misc_RNA (1)...(19): siRNA sense strand
guaaaccacucgaucaaug

SEQ ID NO: 1111011 - RNA, 19 nt, Homo sapiens
  misc_RNA (1)...(19): siRNA sense strand
uagagaagcuagugacaaa

SEQ ID NO: 1111012 - RNA, 19 nt, Homo sapiens
  misc_RNA (1)...(19): siRNA sense strand
gaacaucgacgucuaugga

SEQ ID NO: 1111013 - RNA, 19 nt, Homo sapiens
  misc_RNA (1)...(19): siRNA sense strand
gaaauaccaccaguacaua

SEQ ID NO: 1111014 - RNA, 19 nt, Homo sapiens
  misc_RNA (1)...(19): siRNA sense strand
acaacauccugaagaaaua

SEQ ID NO: 1111015 - RNA, 19 nt, Homo sapiens
  misc_RNA (1)...(19): siRNA sense strand
ucaagacuauuaccaguga

SEQ ID NO: 1111016 - RNA, 19 nt, Homo sapiens
  misc_RNA (1)...(19): siRNA sense strand
gaagaaauaccaccaguac

SEQ ID NO: 1111017 - RNA, 19 nt, Homo sapiens
  misc_RNA (1)...(19): siRNA sense strand
gaugccagaugacuucaaa

SEQ ID NO: 1111018 - RNA, 19 nt, Homo sapiens
  misc_RNA (1)...(19): siRNA sense strand
ugccaacucugaaagauaa

SEQ ID NO: 1111019 - RNA, 19 nt, Homo sapiens
  misc_RNA (1)...(19): siRNA sense strand
ucaaugaacugagccaugu

SEQ ID NO: 1111020 - RNA, 19 nt, Homo sapiens
  misc_RNA (1)...(19): siRNA sense strand
gccgagccauuucaaguuu

SEQ ID NO: 1111021 - RNA, 19 nt, Homo sapiens
  misc_RNA (1)...(19): siRNA sense strand
aaagaaagcugcccaugcu

SEQ ID NO: 1111022 - RNA, 19 nt, Homo sapiens
  misc_RNA (1)...(19): siRNA sense strand
ggagagguuuggaauugau

SEQ ID NO: 1111023 - RNA, 19 nt, Homo sapiens
  misc_RNA (1)...(19): siRNA sense strand
cgggagagguuuggaauug

SEQ ID NO: 1111024 - RNA, 19 nt, Homo sapiens
  misc_RNA (1)...(19): siRNA sense strand
gugaagacguggccgaaau

SEQ ID NO: 1111025 - RNA, 19 nt, Homo sapiens
  misc_RNA (1)...(19): siRNA sense strand
aaagauacaucaucaagac

SEQ ID NO: 1111026 - RNA, 19 nt, Homo sapiens
  misc_RNA (1)...(19): siRNA sense strand
ggaguugaaauauauguga

SEQ ID NO: 1111027 - RNA, 19 nt, Homo sapiens
  misc_RNA (1)...(19): siRNA sense strand
gagaagcuagugacaaaga

SEQ ID NO: 1111028 - RNA, 19 nt, Homo sapiens
  misc_RNA (1)...(19): siRNA sense strand
gauacaucaucaagacuau

SEQ ID NO: 1111029 - RNA, 19 nt, Homo sapiens
  misc_RNA (1)...(19): siRNA sense strand
gcauguaccggcuuaaugu

SEQ ID NO: 1111030 - RNA, 19 nt, Homo sapiens
  misc_RNA (1)...(19): siRNA sense strand
gcaagaccaagaccaagaa

SEQ ID NO: 1111031 - RNA, 19 nt, Homo sapiens
  misc_RNA (1)...(19): siRNA sense strand
ugacauccuuacucauuau

SEQ ID NO: 1111032 - RNA, 19 nt, Homo sapiens
  misc_RNA (1)...(19): siRNA sense strand
cgagccauuucaaguuuaa

SEQ ID NO: 1111033 - RNA, 19 nt, Homo sapiens
  misc_RNA (1)...(19): siRNA sense strand
cgacgucuauggaauuaag

SEQ ID NO: 1111034 - RNA, 19 nt, Homo sapiens
  misc_RNA (1)...(19): siRNA sense strand
guucaaaucccuguuaugu

SEQ ID NO: 1111035 - RNA, 19 nt, Homo sapiens
  misc_RNA (1)...(19): siRNA sense strand
gaagcuagugacaaagaaa

SEQ ID NO: 1111036 - RNA, 19 nt, Homo sapiens
  misc_RNA (1)...(19): siRNA sense strand
gcacaacauccugaagaaa

SEQ ID NO: 1111037 - RNA, 19 nt, Homo sapiens
  misc_RNA (1)...(19): siRNA sense strand
gggagagguuuggaauuga

SEQ ID NO: 1111038 - RNA, 19 nt, Homo sapiens
  misc_RNA (1)...(19): siRNA sense strand
gcagaaagugaagcuguuu

SEQ ID NO: 1111039 - RNA, 19 nt, Homo sapiens
  misc_RNA (1)...(19): siRNA sense strand
gacaaaagauacaucauca

SEQ ID NO: 1111040 - RNA, 19 nt, Homo sapiens
  misc_RNA (1)...(19): siRNA sense strand
ugaucaagauuuccagaau

SEQ ID NO: 1111041 - RNA, 19 nt, Homo sapiens
  misc_RNA (1)...(19): siRNA sense strand
uaauguugauggaguugaa

SEQ ID NO: 1111042 - RNA, 19 nt, Homo sapiens
  misc_RNA (1)...(19): siRNA sense strand
agaccaagaccaagaagaa

SEQ ID NO: 1111043 - RNA, 19 nt, Homo sapiens
  misc_RNA (1)...(19): siRNA sense strand
ggacuuuauuggccacauc

SEQ ID NO: 1111044 - RNA, 19 nt, Homo sapiens
  misc_RNA (1)...(19): siRNA sense strand
aaagaacugccaacucuga

SEQ ID NO: 1111045 - RNA, 19 nt, Homo sapiens
  misc_RNA (1)...(19): siRNA sense strand
gcccgauggucuuccguaa

SEQ ID NO: 1111046 - RNA, 19 nt, Homo sapiens
  misc_RNA (1)...(19): siRNA sense strand
uugacauccuuacucauua

SEQ ID NO: 1111047 - RNA, 19 nt, Homo sapiens
  misc_RNA (1)...(19): siRNA sense strand
gaacugccaacucugaaag

SEQ ID NO: 1111048 - RNA, 19 nt, Homo sapiens
  misc_RNA (1)...(19): siRNA sense strand
aggaggaaguggaguguga

SEQ ID NO: 1111049 - RNA, 19 nt, Homo sapiens
  misc_RNA (1)...(19): siRNA sense strand
cauguucaaaucccuguua

SEQ ID NO: 1111050 - RNA, 19 nt, Homo sapiens
  misc_RNA (1)...(19): siRNA sense strand
ccgagccauuucaaguuua

SEQ ID NO: 1111051 - RNA, 19 nt, Homo sapiens
  misc_RNA (1)...(19): siRNA sense strand
ggugggaauucaugaugug

SEQ ID NO: 1111052 - RNA, 19 nt, Homo sapiens
  misc_RNA (1)...(19): siRNA sense strand
agaaauaccaccaguacau

SEQ ID NO: 1111053 - RNA, 19 nt, Homo sapiens
  misc_RNA (1)...(19): siRNA sense strand
ugaagaaauaccaccagua

SEQ ID NO: 1111054 - RNA, 19 nt, Homo sapiens
  misc_RNA (1)...(19): siRNA sense strand
uaaaccacucgaucaauga

SEQ ID NO: 1111055 - RNA, 19 nt, Homo sapiens
  misc_RNA (1)...(19): siRNA sense strand
gaaaacaugccgagccauu

SEQ ID NO: 1111056 - RNA, 19 nt, Homo sapiens
  misc_RNA (1)...(19): siRNA sense strand
uuauugacauccuuacuca

SEQ ID NO: 1111057 - RNA, 19 nt, Homo sapiens
  misc_RNA (1)...(19): siRNA sense strand
guacuucauggcaauuauu

SEQ ID NO: 1111058 - RNA, 19 nt, Homo sapiens
  misc_RNA (1)...(19): siRNA sense strand
caugaaaacucgccuagga

SEQ ID NO: 1111059 - RNA, 19 nt, Homo sapiens
  misc_RNA (1)...(19): siRNA sense strand
cacaacauccugaagaaau

SEQ ID NO: 1111060 - RNA, 19 nt, Homo sapiens
  misc_RNA (1)...(19): siRNA sense strand
ucacacuuccuacgacaaa

SEQ ID NO: 1111061 - RNA, 19 nt, Homo sapiens
  misc_RNA (1)...(19): siRNA sense strand
gaacccagaacaguauuca

SEQ ID NO: 1111062 - RNA, 19 nt, Homo sapiens
  misc_RNA (1)...(19): siRNA sense strand
gcuuaauguugauggaguu

SEQ ID NO: 1111063 - RNA, 19 nt, Homo sapiens
  misc_RNA (1)...(19): siRNA sense strand
caacucugaaagauaauga

SEQ ID NO: 1111064 - RNA, 19 nt, Homo sapiens
  misc_RNA (1)...(19): siRNA sense strand
caucgacgucuauggaauu

SEQ ID NO: 1111065 - RNA, 19 nt, Homo sapiens
  misc_RNA (1)...(19): siRNA sense strand
uguaccggcuuaauguuga

SEQ ID NO: 1111066 - RNA, 19 nt, Homo sapiens
  misc_RNA (1)...(19): siRNA sense strand
uaggaaauacgacuuaaag

SEQ ID NO: 1111067 - RNA, 19 nt, Homo sapiens
  misc_RNA (1)...(19): siRNA sense strand
agaagcuagugacaaagaa

SEQ ID NO: 1111068 - RNA, 19 nt, Homo sapiens
  misc_RNA (1)...(19): siRNA sense strand
gcacuucguagcgcagaaa

SEQ ID NO: 1111069 - RNA, 19 nt, Homo sapiens
  misc_RNA (1)...(19): siRNA sense strand
cuucaaagccuauucaaaa

SEQ ID NO: 1111070 - RNA, 19 nt, Homo sapiens
  misc_RNA (1)...(19): siRNA sense strand
ccagaacaguauucaaagc

SEQ ID NO: 1111071 - RNA, 19 nt, Homo sapiens
  misc_RNA (1)...(19): siRNA sense strand
aaacaugccgagccauuuc

SEQ ID NO: 1111072 - RNA, 19 nt, Homo sapiens
  misc_RNA (1)...(19): siRNA sense strand
cgcagaaagugaagcuguu

SEQ ID NO: 1111073 - RNA, 19 nt, Homo sapiens
  misc_RNA (1)...(19): siRNA sense strand
uuauguugaugccagauga

SEQ ID NO: 1111074 - RNA, 19 nt, Homo sapiens
  misc_RNA (1)...(19): siRNA sense strand
guuugucuguguauaggaa

SEQ ID NO: 1111075 - RNA, 19 nt, Homo sapiens
  misc_RNA (1)...(19): siRNA sense strand
ugcacaacauccugaagaa

SEQ ID NO: 1111076 - RNA, 19 nt, Homo sapiens
  misc_RNA (1)...(19): siRNA sense strand
caaagaaaaggccaaagaa

SEQ ID NO: 1111077 - RNA, 19 nt, Homo sapiens
  misc_RNA (1)...(19): siRNA sense strand
gaauuaagugccaugaaaa

SEQ ID NO: 1111078 - RNA, 19 nt, Homo sapiens
  misc_RNA (1)...(19): siRNA sense strand
agauacaucaucaagacua

SEQ ID NO: 1111079 - RNA, 19 nt, Homo sapiens
  misc_RNA (1)...(19): siRNA sense strand
acccagaacaguauucaaa

SEQ ID NO: 1111080 - RNA, 19 nt, Homo sapiens
  misc_RNA (1)...(19): siRNA sense strand
guauucagccaccguuugu

SEQ ID NO: 1111081 - RNA, 19 nt, Homo sapiens
  misc_RNA (1)...(19): siRNA sense strand
ggguaaaccacucgaucaa

SEQ ID NO: 1111082 - RNA, 19 nt, Homo sapiens
  misc_RNA (1)...(19): siRNA sense strand
cgagcaagaccaagaccaa

SEQ ID NO: 1111083 - RNA, 19 nt, Homo sapiens
  misc_RNA (1)...(19): siRNA sense strand
aucaagauuuccagaauuc

SEQ ID NO: 1111084 - RNA, 19 nt, Homo sapiens
  misc_RNA (1)...(19): siRNA sense strand
gagccgaacaggaggaagu

SEQ ID NO: 1111085 - RNA, 19 nt, Homo sapiens
  misc_RNA (1)...(19): siRNA sense strand
guugauggaguugaaauau

SEQ ID NO: 1111086 - RNA, 19 nt, Homo sapiens
  misc_RNA (1)...(19): siRNA sense strand
caugggaucacccuucuuc

SEQ ID NO: 1111087 - RNA, 19 nt, Homo sapiens
  misc_RNA (1)...(19): siRNA sense strand
aaaaggauguugaguuucu

SEQ ID NO: 1111088 - RNA, 19 nt, Homo sapiens
  misc_RNA (1)...(19): siRNA sense strand
acugagccauguucaaauc

SEQ ID NO: 1111089 - RNA, 19 nt, Homo sapiens
  misc_RNA (1)...(19): siRNA sense strand
gguaaaccacucgaucaau

SEQ ID NO: 1111090 - RNA, 19 nt, Homo sapiens
  misc_RNA (1)...(19): siRNA sense strand
cuaggaaggagguguacuu

SEQ ID NO: 1111091 - RNA, 19 nt, Homo sapiens
  misc_RNA (1)...(19): siRNA sense strand
ggcauguaccggcuuaaug

SEQ ID NO: 1111092 - RNA, 19 nt, Homo sapiens
  misc_RNA (1)...(19): siRNA sense strand
ugaagacguggccgaaaug

SEQ ID NO: 1111093 - RNA, 19 nt, Homo sapiens
  misc_RNA (1)...(19): siRNA sense strand
ugacuucaaagccuauuca

SEQ ID NO: 1111094 - RNA, 19 nt, Homo sapiens
  misc_RNA (1)...(19): siRNA sense strand
guugaugccagaugacuuc

SEQ ID NO: 1111095 - RNA, 19 nt, Homo sapiens
  misc_RNA (1)...(19): siRNA sense strand
ggccaaaagauuuauauug

SEQ ID NO: 1111096 - RNA, 19 nt, Homo sapiens
  misc_RNA (1)...(19): siRNA sense strand
caaaucccuguuauguuga

SEQ ID NO: 1111097 - RNA, 19 nt, Homo sapiens
  misc_RNA (1)...(19): siRNA sense strand
cgacuuaaagggcucuaca

SEQ ID NO: 1111098 - RNA, 19 nt, Homo sapiens
  misc_RNA (1)...(19): siRNA sense strand
cgugaacccagaacaguau

SEQ ID NO: 1111099 - RNA, 19 nt, Homo sapiens
  misc_RNA (1)...(19): siRNA sense strand
caagacuauuaccagugaa

SEQ ID NO: 1111100 - RNA, 19 nt, Homo sapiens
  misc_RNA (1)...(19): siRNA sense strand
caccguuugucuguguaua

SEQ ID NO: 1111101 - RNA, 19 nt, Homo sapiens
  misc_RNA (1)...(19): siRNA sense strand
guaccggcuuaauguugau

SEQ ID NO: 1111102 - RNA, 19 nt, Homo sapiens
  misc_RNA (1)...(19): siRNA sense strand
caaaagauacaucaucaag

SEQ ID NO: 1111103 - RNA, 19 nt, Homo sapiens
  misc_RNA (1)...(19): siRNA sense strand
ccauuucaaguuuaaggaa

SEQ ID NO: 1111104 - RNA, 19 nt, Homo sapiens
  misc_RNA (1)...(19): siRNA sense strand
auugacauccuuacucauu

SEQ ID NO: 1111105 - RNA, 19 nt, Homo sapiens
  misc_RNA (1)...(19): siRNA sense strand
uaaaguaccuacccagaug

SEQ ID NO: 1111106 - RNA, 19 nt, Homo sapiens
  misc_RNA (1)...(19): siRNA sense strand
gaacgacaccacagaagaa

SEQ ID NO: 1111107 - RNA, 19 nt, Homo sapiens
  misc_RNA (1)...(19): siRNA sense strand
guagagaaauggucagaag

SEQ ID NO: 1111108 - RNA, 19 nt, Homo sapiens
  misc_RNA (1)...(19): siRNA sense strand
gagaaauggucagaaggaa

SEQ ID NO: 1111109 - RNA, 19 nt, Homo sapiens
  misc_RNA (1)...(19): siRNA sense strand
ggaagcaguugguggucuu

SEQ ID NO: 1111110 - RNA, 19 nt, Homo sapiens
  misc_RNA (1)...(19): siRNA sense strand
cgacaccacagaagaaauu

SEQ ID NO: 1111111 - RNA, 19 nt, Homo sapiens
  misc_RNA (1)...(19): siRNA sense strand
gaaggaacgacaccacaga

SEQ ID NO: 1111112 - RNA, 19 nt, Homo sapiens
  misc_RNA (1)...(19): siRNA sense strand
ggaacgacaccacagaaga

SEQ ID NO: 1111113 - RNA, 19 nt, Homo sapiens
  misc_RNA (1)...(19): siRNA sense strand
gaacagaauauagugacaa

SEQ ID NO: 1111114 - RNA, 19 nt, Homo sapiens
  misc_RNA (1)...(19): siRNA sense strand
caauguaaccagaacagaa

SEQ ID NO: 1111115 - RNA, 19 nt, Homo sapiens
  misc_RNA (1)...(19): siRNA sense strand
guaccuacccagauggaaa

SEQ ID NO: 1111116 - RNA, 19 nt, Homo sapiens
  misc_RNA (1)...(19): siRNA sense strand
gcuugcugcucagauguua

SEQ ID NO: 1111117 - RNA, 19 nt, Homo sapiens
  misc_RNA (1)...(19): siRNA sense strand
guaaccagaacagaauaua

SEQ ID NO: 1111118 - RNA, 19 nt, Homo sapiens
  misc_RNA (1)...(19): siRNA sense strand
ccacagaagaaauuagaau

SEQ ID NO: 1111119 - RNA, 19 nt, Homo sapiens
  misc_RNA (1)...(19): siRNA sense strand
acacagacgaggacaaugu

SEQ ID NO: 1111120 - RNA, 19 nt, Homo sapiens
  misc_RNA (1)...(19): siRNA sense strand
caccagaguuugccuacgu

SEQ ID NO: 1111121 - RNA, 19 nt, Homo sapiens
  misc_RNA (1)...(19): siRNA sense strand
ccacccaguuuccaucagu

SEQ ID NO: 1111122 - RNA, 19 nt, Homo sapiens
  misc_RNA (1)...(19): siRNA sense strand
ccagaacagaauauaguga

SEQ ID NO: 1111123 - RNA, 19 nt, Homo sapiens
  misc_RNA (1)...(19): siRNA sense strand
gagcaaacggaagcaguug

SEQ ID NO: 1111124 - RNA, 19 nt, Homo sapiens
  misc_RNA (1)...(19): siRNA sense strand
caccacagaagaaauuaga

SEQ ID NO: 1111125 - RNA, 19 nt, Homo sapiens
  misc_RNA (1)...(19): siRNA sense strand
agagaaauggucagaagga

SEQ ID NO: 1111126 - RNA, 19 nt, Homo sapiens
  misc_RNA (1)...(19): siRNA sense strand
gcaaacggaagcaguuggu

SEQ ID NO: 1111127 - RNA, 19 nt, Homo sapiens
  misc_RNA (1)...(19): siRNA sense strand
uaaccagaacagaauauag

SEQ ID NO: 1111128 - RNA, 19 nt, Homo sapiens
  misc_RNA (1)...(19): siRNA sense strand
gaggacaauguaaccagaa

SEQ ID NO: 1111129 - RNA, 19 nt, Homo sapiens
  misc_RNA (1)...(19): siRNA sense strand
cacagacgaggacaaugua

SEQ ID NO: 1111130 - RNA, 19 nt, Homo sapiens
  misc_RNA (1)...(19): siRNA sense strand
gcaguugguggucuuucuu

SEQ ID NO: 1111131 - RNA, 19 nt, Homo sapiens
  misc_RNA (1)...(19): siRNA sense strand
ccaguuuccaucaguuuau

SEQ ID NO: 1111132 - RNA, 19 nt, Homo sapiens
  misc_RNA (1)...(19): siRNA sense strand
cuaaaguaccuacccagau

SEQ ID NO: 1111133 - RNA, 19 nt, Homo sapiens
  misc_RNA (1)...(19): siRNA sense strand
gacaccacagaagaaauua

SEQ ID NO: 1111134 - RNA, 19 nt, Homo sapiens
  misc_RNA (1)...(19): siRNA sense strand
cacagaagaaauuagaaug

SEQ ID NO: 1111135 - RNA, 19 nt, Homo sapiens
  misc_RNA (1)...(19): siRNA sense strand
ugagcaaacggaagcaguu

SEQ ID NO: 1111136 - RNA, 19 nt, Homo sapiens
  misc_RNA (1)...(19): siRNA sense strand
ggacaauguaaccagaaca

SEQ ID NO: 1111137 - RNA, 19 nt, Homo sapiens
  misc_RNA (1)...(19): siRNA sense strand
gaagcaguugguggucuuu

SEQ ID NO: 1111138 - RNA, 19 nt, Homo sapiens
  misc_RNA (1)...(19): siRNA sense strand
agaacagaauauagugaca

SEQ ID NO: 1111139 - RNA, 19 nt, Homo sapiens
  misc_RNA (1)...(19): siRNA sense strand
aauguaaccagaacagaau

SEQ ID NO: 1111140 - RNA, 19 nt, Homo sapiens
  misc_RNA (1)...(19): siRNA sense strand
acagcugucucaccagagu

SEQ ID NO: 1111141 - RNA, 19 nt, Homo sapiens
  misc_RNA (1)...(19): siRNA sense strand
agacacagacgaggacaau

SEQ ID NO: 1111142 - RNA, 19 nt, Homo sapiens
  misc_RNA (1)...(19): siRNA sense strand
aaccagaacagaauauagu

SEQ ID NO: 1111143 - RNA, 19 nt, Homo sapiens
  misc_RNA (1)...(19): siRNA sense strand
ugacaaaugugcucccuuu

SEQ ID NO: 1111144 - RNA, 19 nt, Homo sapiens
  misc_RNA (1)...(19): siRNA sense strand
ucacaaacgucgcaaagca

SEQ ID NO: 1111145 - RNA, 19 nt, Homo sapiens
  misc_RNA (1)...(19): siRNA sense strand
ggaagcaguugguggucuu

SEQ ID NO: 1111146 - RNA, 19 nt, Homo sapiens
  misc_RNA (1)...(19): siRNA sense strand
gaacagaauauagugacaa

SEQ ID NO: 1111147 - RNA, 19 nt, Homo sapiens
  misc_RNA (1)...(19): siRNA sense strand
caauguaaccagaacagaa

SEQ ID NO: 1111148 - RNA, 19 nt, Homo sapiens
  misc_RNA (1)...(19): siRNA sense strand
gcuugcugcucagauguua

SEQ ID NO: 1111149 - RNA, 19 nt, Homo sapiens
  misc_RNA (1)...(19): siRNA sense strand
guaaccagaacagaauaua

SEQ ID NO: 1111150 - RNA, 19 nt, Homo sapiens
  misc_RNA (1)...(19): siRNA sense strand
uucaggaucuggugacaaa

SEQ ID NO: 1111151 - RNA, 19 nt, Homo sapiens
  misc_RNA (1)...(19): siRNA sense strand
ucgcaaagcagaaacugaa

SEQ ID NO: 1111152 - RNA, 19 nt, Homo sapiens
  misc_RNA (1)...(19): siRNA sense strand
gagguaaccgugacuacug

SEQ ID NO: 1111153 - RNA, 19 nt, Homo sapiens
  misc_RNA (1)...(19): siRNA sense strand
acacagacgaggacaaugu

SEQ ID NO: 1111154 - RNA, 19 nt, Homo sapiens
  misc_RNA (1)...(19): siRNA sense strand
caccagaguuugccuacgu

SEQ ID NO: 1111155 - RNA, 19 nt, Homo sapiens
  misc_RNA (1)...(19): siRNA sense strand
ccacccaguuuccaucagu

SEQ ID NO: 1111156 - RNA, 19 nt, Homo sapiens
  misc_RNA (1)...(19): siRNA sense strand
gugcucccuuuggaaguua

SEQ ID NO: 1111157 - RNA, 19 nt, Homo sapiens
  misc_RNA (1)...(19): siRNA sense strand
ccagaacagaauauaguga

SEQ ID NO: 1111158 - RNA, 19 nt, Homo sapiens
  misc_RNA (1)...(19): siRNA sense strand
gagcaaacggaagcaguug

SEQ ID NO: 1111159 - RNA, 19 nt, Homo sapiens
  misc_RNA (1)...(19): siRNA sense strand
uaaccagaacagaauauag

SEQ ID NO: 1111160 - RNA, 19 nt, Homo sapiens
  misc_RNA (1)...(19): siRNA sense strand
gcaaacggaagcaguuggu

SEQ ID NO: 1111161 - RNA, 19 nt, Homo sapiens
  misc_RNA (1)...(19): siRNA sense strand
gaggacaauguaaccagaa

SEQ ID NO: 1111162 - RNA, 19 nt, Homo sapiens
  misc_RNA (1)...(19): siRNA sense strand
aaacgucgcaaagcagaaa

SEQ ID NO: 1111163 - RNA, 19 nt, Homo sapiens
  misc_RNA (1)...(19): siRNA sense strand
gcucacaaacgucgcaaag

SEQ ID NO: 1111164 - RNA, 19 nt, Homo sapiens
  misc_RNA (1)...(19): siRNA sense strand
cacagacgaggacaaugua

SEQ ID NO: 1111165 - RNA, 19 nt, Homo sapiens
  misc_RNA (1)...(19): siRNA sense strand
gcaguugguggucuuucuu

SEQ ID NO: 1111166 - RNA, 19 nt, Homo sapiens
  misc_RNA (1)...(19): siRNA sense strand
ccaguuuccaucaguuuau

SEQ ID NO: 1111167 - RNA, 19 nt, Homo sapiens
  misc_RNA (1)...(19): siRNA sense strand
ugagcaaacggaagcaguu

SEQ ID NO: 1111168 - RNA, 19 nt, Homo sapiens
  misc_RNA (1)...(19): siRNA sense strand
caggaucuggugacaaaug

SEQ ID NO: 1111169 - RNA, 19 nt, Homo sapiens
  misc_RNA (1)...(19): siRNA sense strand
agaacagaauauagugaca

SEQ ID NO: 1111170 - RNA, 19 nt, Homo sapiens
  misc_RNA (1)...(19): siRNA sense strand
gcaaagcagaaacugaaaa

SEQ ID NO: 1111171 - RNA, 19 nt, Homo sapiens
  misc_RNA (1)...(19): siRNA sense strand
cuuuggaaguuacgguauu

SEQ ID NO: 1111172 - RNA, 19 nt, Homo sapiens
  misc_RNA (1)...(19): siRNA sense strand
ggacaauguaaccagaaca

SEQ ID NO: 1111173 - RNA, 19 nt, Homo sapiens
  misc_RNA (1)...(19): siRNA sense strand
gaagcaguugguggucuuu

SEQ ID NO: 1111174 - RNA, 19 nt, Homo sapiens
  misc_RNA (1)...(19): siRNA sense strand
aauguaaccagaacagaau

SEQ ID NO: 1111175 - RNA, 19 nt, Homo sapiens
  misc_RNA (1)...(19): siRNA sense strand
agacacagacgaggacaau

SEQ ID NO: 1111176 - RNA, 19 nt, Homo sapiens
  misc_RNA (1)...(19): siRNA sense strand
acagcugucucaccagagu

SEQ ID NO: 1111177 - RNA, 19 nt, Homo sapiens
  misc_RNA (1)...(19): siRNA sense strand
ggagguaaccgugacuacu

SEQ ID NO: 1111178 - RNA, 19 nt, Homo sapiens
  misc_RNA (1)...(19): siRNA sense strand
gacuacugcucacaaacgu

SEQ ID NO: 1111179 - RNA, 19 nt, Homo sapiens
  misc_RNA (1)...(19): siRNA sense strand
aaccagaacagaauauagu

SEQ ID NO: 1111180 - RNA, 19 nt, Homo sapiens
  misc_RNA (1)...(19): siRNA sense strand
agcagaaacugaaaacuga

SEQ ID NO: 1111181 - RNA, 19 nt, Homo sapiens
  misc_RNA (1)...(19): siRNA sense strand
ugacaaaugugcucccuuu

SEQ ID NO: 1111182 - RNA, 19 nt, Homo sapiens
  misc_RNA (1)...(19): siRNA sense strand
uaaaguaccuacccagaug

SEQ ID NO: 1111183 - RNA, 19 nt, Homo sapiens
  misc_RNA (1)...(19): siRNA sense strand
gaacgacaccacagaagaa

SEQ ID NO: 1111184 - RNA, 19 nt, Homo sapiens
  misc_RNA (1)...(19): siRNA sense strand
guagagaaauggucagaag

SEQ ID NO: 1111185 - RNA, 19 nt, Homo sapiens
  misc_RNA (1)...(19): siRNA sense strand
ucacaaacgucgcaaagca

SEQ ID NO: 1111186 - RNA, 19 nt, Homo sapiens
  misc_RNA (1)...(19): siRNA sense strand
gagaaauggucagaaggaa

SEQ ID NO: 1111187 - RNA, 19 nt, Homo sapiens
  misc_RNA (1)...(19): siRNA sense strand
ggaagcaguugguggucuu

SEQ ID NO: 1111188 - RNA, 19 nt, Homo sapiens
  misc_RNA (1)...(19): siRNA sense strand
cgacaccacagaagaaauu

SEQ ID NO: 1111189 - RNA, 19 nt, Homo sapiens
  misc_RNA (1)...(19): siRNA sense strand
gaaggaacgacaccacaga

SEQ ID NO: 1111190 - RNA, 19 nt, Homo sapiens
  misc_RNA (1)...(19): siRNA sense strand
ggaacgacaccacagaaga

SEQ ID NO: 1111191 - RNA, 19 nt, Homo sapiens
  misc_RNA (1)...(19): siRNA sense strand
gaacagaauauagugacaa

SEQ ID NO: 1111192 - RNA, 19 nt, Homo sapiens
  misc_RNA (1)...(19): siRNA sense strand
caauguaaccagaacagaa

SEQ ID NO: 1111193 - RNA, 19 nt, Homo sapiens
  misc_RNA (1)...(19): siRNA sense strand
guaccuacccagauggaaa

SEQ ID NO: 1111194 - RNA, 19 nt, Homo sapiens
  misc_RNA (1)...(19): siRNA sense strand
gcuugcugcucagauguua

SEQ ID NO: 1111195 - RNA, 19 nt, Homo sapiens
  misc_RNA (1)...(19): siRNA sense strand
guaaccagaacagaauaua

SEQ ID NO: 1111196 - RNA, 19 nt, Homo sapiens
  misc_RNA (1)...(19): siRNA sense strand
ccacagaagaaauuagaau

SEQ ID NO: 1111197 - RNA, 19 nt, Homo sapiens
  misc_RNA (1)...(19): siRNA sense strand
uucaggaucuggugacaaa

SEQ ID NO: 1111198 - RNA, 19 nt, Homo sapiens
  misc_RNA (1)...(19): siRNA sense strand
ucgcaaagcagaaacugaa

SEQ ID NO: 1111199 - RNA, 19 nt, Homo sapiens
  misc_RNA (1)...(19): siRNA sense strand
gagguaaccgugacuacug

SEQ ID NO: 1111200 - RNA, 19 nt, Homo sapiens
  misc_RNA (1)...(19): siRNA sense strand
acacagacgaggacaaugu

SEQ ID NO: 1111201 - RNA, 19 nt, Homo sapiens
  misc_RNA (1)...(19): siRNA sense strand
caccagaguuugccuacgu

SEQ ID NO: 1111202 - RNA, 19 nt, Homo sapiens
  misc_RNA (1)...(19): siRNA sense strand
ccacccaguuuccaucagu

SEQ ID NO: 1111203 - RNA, 19 nt, Homo sapiens
  misc_RNA (1)...(19): siRNA sense strand
gugcucccuuuggaaguua

SEQ ID NO: 1111204 - RNA, 19 nt, Homo sapiens
  misc_RNA (1)...(19): siRNA sense strand
ccagaacagaauauaguga

SEQ ID NO: 1111205 - RNA, 19 nt, Homo sapiens
  misc_RNA (1)...(19): siRNA sense strand
gagcaaacggaagcaguug

SEQ ID NO: 1111206 - RNA, 19 nt, Homo sapiens
  misc_RNA (1)...(19): siRNA sense strand
caccacagaagaaauuaga

SEQ ID NO: 1111207 - RNA, 19 nt, Homo sapiens
  misc_RNA (1)...(19): siRNA sense strand
uaaccagaacagaauauag

SEQ ID NO: 1111208 - RNA, 19 nt, Homo sapiens
  misc_RNA (1)...(19): siRNA sense strand
gcaaacggaagcaguuggu

SEQ ID NO: 1111209 - RNA, 19 nt, Homo sapiens
  misc_RNA (1)...(19): siRNA sense strand
agagaaauggucagaagga

SEQ ID NO: 1111210 - RNA, 19 nt, Homo sapiens
  misc_RNA (1)...(19): siRNA sense strand
gaggacaauguaaccagaa

SEQ ID NO: 1111211 - RNA, 19 nt, Homo sapiens
  misc_RNA (1)...(19): siRNA sense strand
aaacgucgcaaagcagaaa

SEQ ID NO: 1111212 - RNA, 19 nt, Homo sapiens
  misc_RNA (1)...(19): siRNA sense strand
gcucacaaacgucgcaaag

SEQ ID NO: 1111213 - RNA, 19 nt, Homo sapiens
  misc_RNA (1)...(19): siRNA sense strand
cacagacgaggacaaugua

SEQ ID NO: 1111214 - RNA, 19 nt, Homo sapiens
  misc_RNA (1)...(19): siRNA sense strand
gcaguugguggucuuucuu

SEQ ID NO: 1111215 - RNA, 19 nt, Homo sapiens
  misc_RNA (1)...(19): siRNA sense strand
ccaguuuccaucaguuuau

SEQ ID NO: 1111216 - RNA, 19 nt, Homo sapiens
  misc_RNA (1)...(19): siRNA sense strand
gacaccacagaagaaauua

SEQ ID NO: 1111217 - RNA, 19 nt, Homo sapiens
  misc_RNA (1)...(19): siRNA sense strand
cacagaagaaauuagaaug

SEQ ID NO: 1111218 - RNA, 19 nt, Homo sapiens
  misc_RNA (1)...(19): siRNA sense strand
cuaaaguaccuacccagau

SEQ ID NO: 1111219 - RNA, 19 nt, Homo sapiens
  misc_RNA (1)...(19): siRNA sense strand
ugagcaaacggaagcaguu

SEQ ID NO: 1111220 - RNA, 19 nt, Homo sapiens
  misc_RNA (1)...(19): siRNA sense strand
caggaucuggugacaaaug

SEQ ID NO: 1111221 - RNA, 19 nt, Homo sapiens
  misc_RNA (1)...(19): siRNA sense strand
agaacagaauauagugaca

SEQ ID NO: 1111222 - RNA, 19 nt, Homo sapiens
  misc_RNA (1)...(19): siRNA sense strand
gcaaagcagaaacugaaaa

SEQ ID NO: 1111223 - RNA, 19 nt, Homo sapiens
  misc_RNA (1)...(19): siRNA sense strand
cuuuggaaguuacgguauu

SEQ ID NO: 1111224 - RNA, 19 nt, Homo sapiens
  misc_RNA (1)...(19): siRNA sense strand
ggacaauguaaccagaaca

SEQ ID NO: 1111225 - RNA, 19 nt, Homo sapiens
  misc_RNA (1)...(19): siRNA sense strand
gaagcaguugguggucuuu

SEQ ID NO: 1111226 - RNA, 19 nt, Homo sapiens
  misc_RNA (1)...(19): siRNA sense strand
agacacagacgaggacaau

SEQ ID NO: 1111227 - RNA, 19 nt, Homo sapiens
  misc_RNA (1)...(19): siRNA sense strand
aauguaaccagaacagaau

SEQ ID NO: 1111228 - RNA, 19 nt, Homo sapiens
  misc_RNA (1)...(19): siRNA sense strand
acagcugucucaccagagu

SEQ ID NO: 1111229 - RNA, 19 nt, Homo sapiens
  misc_RNA (1)...(19): siRNA sense strand
aaccagaacagaauauagu

SEQ ID NO: 1111230 - RNA, 19 nt, Homo sapiens
  misc_RNA (1)...(19): siRNA sense strand
gacuacugcucacaaacgu

SEQ ID NO: 1111231 - RNA, 19 nt, Homo sapiens
  misc_RNA (1)...(19): siRNA sense strand
ggagguaaccgugacuacu

SEQ ID NO: 1111232 - RNA, 19 nt, Homo sapiens
  misc_RNA (1)...(19): siRNA sense strand
agcagaaacugaaaacuga

SEQ ID NO: 1111233 - RNA, 19 nt, Homo sapiens
  misc_RNA (1)...(19): siRNA sense strand
uaaaguaccuacccagaug

SEQ ID NO: 1111234 - RNA, 19 nt, Homo sapiens
  misc_RNA (1)...(19): siRNA sense strand
gaacgacaccacagaagaa

SEQ ID NO: 1111235 - RNA, 19 nt, Homo sapiens
  misc_RNA (1)...(19): siRNA sense strand
guagagaaauggucagaag

SEQ ID NO: 1111236 - RNA, 19 nt, Homo sapiens
  misc_RNA (1)...(19): siRNA sense strand
gagaaauggucagaaggaa

SEQ ID NO: 1111237 - RNA, 19 nt, Homo sapiens
  misc_RNA (1)...(19): siRNA sense strand
ggaagcaguugguggucuu

SEQ ID NO: 1111238 - RNA, 19 nt, Homo sapiens
  misc_RNA (1)...(19): siRNA sense strand
cgacaccacagaagaaauu

SEQ ID NO: 1111239 - RNA, 19 nt, Homo sapiens
  misc_RNA (1)...(19): siRNA sense strand
gaaggaacgacaccacaga

SEQ ID NO: 1111240 - RNA, 19 nt, Homo sapiens
  misc_RNA (1)...(19): siRNA sense strand
ggaacgacaccacagaaga

SEQ ID NO: 1111241 - RNA, 19 nt, Homo sapiens
  misc_RNA (1)...(19): siRNA sense strand
gaacagaauauagugacaa

SEQ ID NO: 1111242 - RNA, 19 nt, Homo sapiens
  misc_RNA (1)...(19): siRNA sense strand
caauguaaccagaacagaa

SEQ ID NO: 1111243 - RNA, 19 nt, Homo sapiens
  misc_RNA (1)...(19): siRNA sense strand
guaccuacccagauggaaa

SEQ ID NO: 1111244 - RNA, 19 nt, Homo sapiens
  misc_RNA (1)...(19): siRNA sense strand
gcuugcugcucagauguua

SEQ ID NO: 1111245 - RNA, 19 nt, Homo sapiens
  misc_RNA (1)...(19): siRNA sense strand
guaaccagaacagaauaua

SEQ ID NO: 1111246 - RNA, 19 nt, Homo sapiens
  misc_RNA (1)...(19): siRNA sense strand
ccacagaagaaauuagaau

SEQ ID NO: 1111247 - RNA, 19 nt, Homo sapiens
  misc_RNA (1)...(19): siRNA sense strand
acacagacgaggacaaugu

SEQ ID NO: 1111248 - RNA, 19 nt, Homo sapiens
  misc_RNA (1)...(19): siRNA sense strand
caccagaguuugccuacgu

SEQ ID NO: 1111249 - RNA, 19 nt, Homo sapiens
  misc_RNA (1)...(19): siRNA sense strand
ccacccaguuuccaucagu

SEQ ID NO: 1111250 - RNA, 19 nt, Homo sapiens
  misc_RNA (1)...(19): siRNA sense strand
ccagaacagaauauaguga

SEQ ID NO: 1111251 - RNA, 19 nt, Homo sapiens
  misc_RNA (1)...(19): siRNA sense strand
gagcaaacggaagcaguug

SEQ ID NO: 1111252 - RNA, 19 nt, Homo sapiens
  misc_RNA (1)...(19): siRNA sense strand
caccacagaagaaauuaga

SEQ ID NO: 1111253 - RNA, 19 nt, Homo sapiens
  misc_RNA (1)...(19): siRNA sense strand
agagaaauggucagaagga

SEQ ID NO: 1111254 - RNA, 19 nt, Homo sapiens
  misc_RNA (1)...(19): siRNA sense strand
gcaaacggaagcaguuggu

SEQ ID NO: 1111255 - RNA, 19 nt, Homo sapiens
  misc_RNA (1)...(19): siRNA sense strand
uaaccagaacagaauauag

SEQ ID NO: 1111256 - RNA, 19 nt, Homo sapiens
  misc_RNA (1)...(19): siRNA sense strand
gaggacaauguaaccagaa

SEQ ID NO: 1111257 - RNA, 19 nt, Homo sapiens
  misc_RNA (1)...(19): siRNA sense strand
cacagacgaggacaaugua

SEQ ID NO: 1111258 - RNA, 19 nt, Homo sapiens
  misc_RNA (1)...(19): siRNA sense strand
gcaguugguggucuuucuu

SEQ ID NO: 1111259 - RNA, 19 nt, Homo sapiens
  misc_RNA (1)...(19): siRNA sense strand
ccaguuuccaucaguuuau

SEQ ID NO: 1111260 - RNA, 19 nt, Homo sapiens
  misc_RNA (1)...(19): siRNA sense strand
cuaaaguaccuacccagau

SEQ ID NO: 1111261 - RNA, 19 nt, Homo sapiens
  misc_RNA (1)...(19): siRNA sense strand
gacaccacagaagaaauua

SEQ ID NO: 1111262 - RNA, 19 nt, Homo sapiens
  misc_RNA (1)...(19): siRNA sense strand
cacagaagaaauuagaaug

SEQ ID NO: 1111263 - RNA, 19 nt, Homo sapiens
  misc_RNA (1)...(19): siRNA sense strand
ugagcaaacggaagcaguu

SEQ ID NO: 1111264 - RNA, 19 nt, Homo sapiens
  misc_RNA (1)...(19): siRNA sense strand
ggacaauguaaccagaaca

SEQ ID NO: 1111265 - RNA, 19 nt, Homo sapiens
  misc_RNA (1)...(19): siRNA sense strand
gaagcaguugguggucuuu

SEQ ID NO: 1111266 - RNA, 19 nt, Homo sapiens
  misc_RNA (1)...(19): siRNA sense strand
agaacagaauauagugaca

SEQ ID NO: 1111267 - RNA, 19 nt, Homo sapiens
  misc_RNA (1)...(19): siRNA sense strand
aauguaaccagaacagaau

SEQ ID NO: 1111268 - RNA, 19 nt, Homo sapiens
  misc_RNA (1)...(19): siRNA sense strand
acagcugucucaccagagu

SEQ ID NO: 1111269 - RNA, 19 nt, Homo sapiens
  misc_RNA (1)...(19): siRNA sense strand
agacacagacgaggacaau

SEQ ID NO: 1111270 - RNA, 19 nt, Homo sapiens
  misc_RNA (1)...(19): siRNA sense strand
aaccagaacagaauauagu

SEQ ID NO: 1111271 - RNA, 19 nt, Homo sapiens
  misc_RNA (1)...(19): siRNA sense strand
ugacaaaugugcucccuuu

SEQ ID NO: 1111272 - RNA, 19 nt, Homo sapiens
  misc_RNA (1)...(19): siRNA sense strand
uaaaguaccuacccagaug

SEQ ID NO: 1111273 - RNA, 19 nt, Homo sapiens
  misc_RNA (1)...(19): siRNA sense strand
gaacgacaccacagaagaa

SEQ ID NO: 1111274 - RNA, 19 nt, Homo sapiens
  misc_RNA (1)...(19): siRNA sense strand
guagagaaauggucagaag

SEQ ID NO: 1111275 - RNA, 19 nt, Homo sapiens
  misc_RNA (1)...(19): siRNA sense strand
ucacaaacgucgcaaagca

SEQ ID NO: 1111276 - RNA, 19 nt, Homo sapiens
  misc_RNA (1)...(19): siRNA sense strand
gagaaauggucagaaggaa

SEQ ID NO: 1111277 - RNA, 19 nt, Homo sapiens
  misc_RNA (1)...(19): siRNA sense strand
ggaagcaguugguggucuu

SEQ ID NO: 1111278 - RNA, 19 nt, Homo sapiens
  misc_RNA (1)...(19): siRNA sense strand
cgacaccacagaagaaauu

SEQ ID NO: 1111279 - RNA, 19 nt, Homo sapiens
  misc_RNA (1)...(19): siRNA sense strand
gaaggaacgacaccacaga

SEQ ID NO: 1111280 - RNA, 19 nt, Homo sapiens
  misc_RNA (1)...(19): siRNA sense strand
ggaacgacaccacagaaga

SEQ ID NO: 1111281 - RNA, 19 nt, Homo sapiens
  misc_RNA (1)...(19): siRNA sense strand
gaacagaauauagugacaa

SEQ ID NO: 1111282 - RNA, 19 nt, Homo sapiens
  misc_RNA (1)...(19): siRNA sense strand
caauguaaccagaacagaa

SEQ ID NO: 1111283 - RNA, 19 nt, Homo sapiens
  misc_RNA (1)...(19): siRNA sense strand
guaccuacccagauggaaa

SEQ ID NO: 1111284 - RNA, 19 nt, Homo sapiens
  misc_RNA (1)...(19): siRNA sense strand
gcuugcugcucagauguua

SEQ ID NO: 1111285 - RNA, 19 nt, Homo sapiens
  misc_RNA (1)...(19): siRNA sense strand
guaaccagaacagaauaua

SEQ ID NO: 1111286 - RNA, 19 nt, Homo sapiens
  misc_RNA (1)...(19): siRNA sense strand
ccacagaagaaauuagaau

SEQ ID NO: 1111287 - RNA, 19 nt, Homo sapiens
  misc_RNA (1)...(19): siRNA sense strand
uucaggaucuggugacaaa

SEQ ID NO: 1111288 - RNA, 19 nt, Homo sapiens
  misc_RNA (1)...(19): siRNA sense strand
ucgcaaagcagaaacugaa

SEQ ID NO: 1111289 - RNA, 19 nt, Homo sapiens
  misc_RNA (1)...(19): siRNA sense strand
gagguaaccgugacuacug

SEQ ID NO: 1111290 - RNA, 19 nt, Homo sapiens
  misc_RNA (1)...(19): siRNA sense strand
acacagacgaggacaaugu

SEQ ID NO: 1111291 - RNA, 19 nt, Homo sapiens
  misc_RNA (1)...(19): siRNA sense strand
caccagaguuugccuacgu

SEQ ID NO: 1111292 - RNA, 19 nt, Homo sapiens
  misc_RNA (1)...(19): siRNA sense strand
ccacccaguuuccaucagu

SEQ ID NO: 1111293 - RNA, 19 nt, Homo sapiens
  misc_RNA (1)...(19): siRNA sense strand
gugcucccuuuggaaguua

SEQ ID NO: 1111294 - RNA, 19 nt, Homo sapiens
  misc_RNA (1)...(19): siRNA sense strand
ccagaacagaauauaguga

SEQ ID NO: 1111295 - RNA, 19 nt, Homo sapiens
  misc_RNA (1)...(19): siRNA sense strand
gagcaaacggaagcaguug

SEQ ID NO: 1111296 - RNA, 19 nt, Homo sapiens
  misc_RNA (1)...(19): siRNA sense strand
caccacagaagaaauuaga

SEQ ID NO: 1111297 - RNA, 19 nt, Homo sapiens
  misc_RNA (1)...(19): siRNA sense strand
uaaccagaacagaauauag

SEQ ID NO: 1111298 - RNA, 19 nt, Homo sapiens
  misc_RNA (1)...(19): siRNA sense strand
gcaaacggaagcaguuggu

SEQ ID NO: 1111299 - RNA, 19 nt, Homo sapiens
  misc_RNA (1)...(19): siRNA sense strand
agagaaauggucagaagga

SEQ ID NO: 1111300 - RNA, 19 nt, Homo sapiens
  misc_RNA (1)...(19): siRNA sense strand
gaggacaauguaaccagaa

SEQ ID NO: 1111301 - RNA, 19 nt, Homo sapiens
  misc_RNA (1)...(19): siRNA sense strand
aaacgucgcaaagcagaaa

SEQ ID NO: 1111302 - RNA, 19 nt, Homo sapiens
  misc_RNA (1)...(19): siRNA sense strand
gcucacaaacgucgcaaag

SEQ ID NO: 1111303 - RNA, 19 nt, Homo sapiens
  misc_RNA (1)...(19): siRNA sense strand
cacagacgaggacaaugua

SEQ ID NO: 1111304 - RNA, 19 nt, Homo sapiens
  misc_RNA (1)...(19): siRNA sense strand
gcaguugguggucuuucuu

SEQ ID NO: 1111305 - RNA, 19 nt, Homo sapiens
  misc_RNA (1)...(19): siRNA sense strand
ccaguuuccaucaguuuau

SEQ ID NO: 1111306 - RNA, 19 nt, Homo sapiens
  misc_RNA (1)...(19): siRNA sense strand
gacaccacagaagaaauua

SEQ ID NO: 1111307 - RNA, 19 nt, Homo sapiens
  misc_RNA (1)...(19): siRNA sense strand
cacagaagaaauuagaaug

SEQ ID NO: 1111308 - RNA, 19 nt, Homo sapiens
  misc_RNA (1)...(19): siRNA sense strand
cuaaaguaccuacccagau

SEQ ID NO: 1111309 - RNA, 19 nt, Homo sapiens
  misc_RNA (1)...(19): siRNA sense strand
ugagcaaacggaagcaguu

SEQ ID NO: 1111310 - RNA, 19 nt, Homo sapiens
  misc_RNA (1)...(19): siRNA sense strand
caggaucuggugacaaaug

SEQ ID NO: 1111311 - RNA, 19 nt, Homo sapiens
  misc_RNA (1)...(19): siRNA sense strand
agaacagaauauagugaca

SEQ ID NO: 1111312 - RNA, 19 nt, Homo sapiens
  misc_RNA (1)...(19): siRNA sense strand
gcaaagcagaaacugaaaa

SEQ ID NO: 1111313 - RNA, 19 nt, Homo sapiens
  misc_RNA (1)...(19): siRNA sense strand
cuuuggaaguuacgguauu

SEQ ID NO: 1111314 - RNA, 19 nt, Homo sapiens
  misc_RNA (1)...(19): siRNA sense strand
ggacaauguaaccagaaca

SEQ ID NO: 1111315 - RNA, 19 nt, Homo sapiens
  misc_RNA (1)...(19): siRNA sense strand
gaagcaguugguggucuuu

SEQ ID NO: 1111316 - RNA, 19 nt, Homo sapiens
  misc_RNA (1)...(19): siRNA sense strand
agacacagacgaggacaau

SEQ ID NO: 1111317 - RNA, 19 nt, Homo sapiens
  misc_RNA (1)...(19): siRNA sense strand
aauguaaccagaacagaau

SEQ ID NO: 1111318 - RNA, 19 nt, Homo sapiens
  misc_RNA (1)...(19): siRNA sense strand
acagcugucucaccagagu

SEQ ID NO: 1111319 - RNA, 19 nt, Homo sapiens
  misc_RNA (1)...(19): siRNA sense strand
aaccagaacagaauauagu

SEQ ID NO: 1111320 - RNA, 19 nt, Homo sapiens
  misc_RNA (1)...(19): siRNA sense strand
gacuacugcucacaaacgu

SEQ ID NO: 1111321 - RNA, 19 nt, Homo sapiens
  misc_RNA (1)...(19): siRNA sense strand
ggagguaaccgugacuacu

SEQ ID NO: 1111322 - RNA, 19 nt, Homo sapiens
  misc_RNA (1)...(19): siRNA sense strand
agcagaaacugaaaacuga

SEQ ID NO: 1111323 - RNA, 19 nt, Homo sapiens
  misc_RNA (1)...(19): siRNA sense strand
ugacaaaugugcucccuuu

SEQ ID NO: 1111324 - RNA, 19 nt, Homo sapiens
  misc_RNA (1)...(19): siRNA sense strand
uaaaguaccuacccagaug

SEQ ID NO: 1111325 - RNA, 19 nt, Homo sapiens
  misc_RNA (1)...(19): siRNA sense strand
gaacgacaccacagaagaa

SEQ ID NO: 1111326 - RNA, 19 nt, Homo sapiens
  misc_RNA (1)...(19): siRNA sense strand
guagagaaauggucagaag

SEQ ID NO: 1111327 - RNA, 19 nt, Homo sapiens
  misc_RNA (1)...(19): siRNA sense strand
ucacaaacgucgcaaagca

SEQ ID NO: 1111328 - RNA, 19 nt, Homo sapiens
  misc_RNA (1)...(19): siRNA sense strand
gagaaauggucagaaggaa

SEQ ID NO: 1111329 - RNA, 19 nt, Homo sapiens
  misc_RNA (1)...(19): siRNA sense strand
ggaagcaguugguggucuu

SEQ ID NO: 1111330 - RNA, 19 nt, Homo sapiens
  misc_RNA (1)...(19): siRNA sense strand
cgacaccacagaagaaauu

SEQ ID NO: 1111331 - RNA, 19 nt, Homo sapiens
  misc_RNA (1)...(19): siRNA sense strand
gaaggaacgacaccacaga

SEQ ID NO: 1111332 - RNA, 19 nt, Homo sapiens
  misc_RNA (1)...(19): siRNA sense strand
ggaacgacaccacagaaga

SEQ ID NO: 1111333 - RNA, 19 nt, Homo sapiens
  misc_RNA (1)...(19): siRNA sense strand
gaacagaauauagugacaa

SEQ ID NO: 1111334 - RNA, 19 nt, Homo sapiens
  misc_RNA (1)...(19): siRNA sense strand
caauguaaccagaacagaa

SEQ ID NO: 1111335 - RNA, 19 nt, Homo sapiens
  misc_RNA (1)...(19): siRNA sense strand
guaccuacccagauggaaa

SEQ ID NO: 1111336 - RNA, 19 nt, Homo sapiens
  misc_RNA (1)...(19): siRNA sense strand
gcuugcugcucagauguua

SEQ ID NO: 1111337 - RNA, 19 nt, Homo sapiens
  misc_RNA (1)...(19): siRNA sense strand
guaaccagaacagaauaua

SEQ ID NO: 1111338 - RNA, 19 nt, Homo sapiens
  misc_RNA (1)...(19): siRNA sense strand
ccacagaagaaauuagaau

SEQ ID NO: 1111339 - RNA, 19 nt, Homo sapiens
  misc_RNA (1)...(19): siRNA sense strand
uucaggaucuggugacaaa

SEQ ID NO: 1111340 - RNA, 19 nt, Homo sapiens
  misc_RNA (1)...(19): siRNA sense strand
ucgcaaagcagaaacugaa

SEQ ID NO: 1111341 - RNA, 19 nt, Homo sapiens
  misc_RNA (1)...(19): siRNA sense strand
gagguaaccgugacuacug

SEQ ID NO: 1111342 - RNA, 19 nt, Homo sapiens
  misc_RNA (1)...(19): siRNA sense strand
acacagacgaggacaaugu

SEQ ID NO: 1111343 - RNA, 19 nt, Homo sapiens
  misc_RNA (1)...(19): siRNA sense strand
caccagaguuugccuacgu

SEQ ID NO: 1111344 - RNA, 19 nt, Homo sapiens
  misc_RNA (1)...(19): siRNA sense strand
ccacccaguuuccaucagu

SEQ ID NO: 1111345 - RNA, 19 nt, Homo sapiens
  misc_RNA (1)...(19): siRNA sense strand
gugcucccuuuggaaguua

SEQ ID NO: 1111346 - RNA, 19 nt, Homo sapiens
  misc_RNA (1)...(19): siRNA sense strand
ccagaacagaauauaguga

SEQ ID NO: 1111347 - RNA, 19 nt, Homo sapiens
  misc_RNA (1)...(19): siRNA sense strand
gagcaaacggaagcaguug

SEQ ID NO: 1111348 - RNA, 19 nt, Homo sapiens
  misc_RNA (1)...(19): siRNA sense strand
caccacagaagaaauuaga

SEQ ID NO: 1111349 - RNA, 19 nt, Homo sapiens
  misc_RNA (1)...(19): siRNA sense strand
uaaccagaacagaauauag

SEQ ID NO: 1111350 - RNA, 19 nt, Homo sapiens
  misc_RNA (1)...(19): siRNA sense strand
gcaaacggaagcaguuggu

SEQ ID NO: 1111351 - RNA, 19 nt, Homo sapiens
  misc_RNA (1)...(19): siRNA sense strand
agagaaauggucagaagga

SEQ ID NO: 1111352 - RNA, 19 nt, Homo sapiens
  misc_RNA (1)...(19): siRNA sense strand
gaggacaauguaaccagaa

SEQ ID NO: 1111353 - RNA, 19 nt, Homo sapiens
  misc_RNA (1)...(19): siRNA sense strand
aaacgucgcaaagcagaaa

SEQ ID NO: 1111354 - RNA, 19 nt, Homo sapiens
  misc_RNA (1)...(19): siRNA sense strand
gcucacaaacgucgcaaag

SEQ ID NO: 1111355 - RNA, 19 nt, Homo sapiens
  misc_RNA (1)...(19): siRNA sense strand
cacagacgaggacaaugua

SEQ ID NO: 1111356 - RNA, 19 nt, Homo sapiens
  misc_RNA (1)...(19): siRNA sense strand
gcaguugguggucuuucuu

SEQ ID NO: 1111357 - RNA, 19 nt, Homo sapiens
  misc_RNA (1)...(19): siRNA sense strand
ccaguuuccaucaguuuau

SEQ ID NO: 1111358 - RNA, 19 nt, Homo sapiens
  misc_RNA (1)...(19): siRNA sense strand
gacaccacagaagaaauua

SEQ ID NO: 1111359 - RNA, 19 nt, Homo sapiens
  misc_RNA (1)...(19): siRNA sense strand
cacagaagaaauuagaaug

SEQ ID NO: 1111360 - RNA, 19 nt, Homo sapiens
  misc_RNA (1)...(19): siRNA sense strand
cuaaaguaccuacccagau

SEQ ID NO: 1111361 - RNA, 19 nt, Homo sapiens
  misc_RNA (1)...(19): siRNA sense strand
ugagcaaacggaagcaguu

SEQ ID NO: 1111362 - RNA, 19 nt, Homo sapiens
  misc_RNA (1)...(19): siRNA sense strand
caggaucuggugacaaaug

SEQ ID NO: 1111363 - RNA, 19 nt, Homo sapiens
  misc_RNA (1)...(19): siRNA sense strand
agaacagaauauagugaca

SEQ ID NO: 1111364 - RNA, 19 nt, Homo sapiens
  misc_RNA (1)...(19): siRNA sense strand
gcaaagcagaaacugaaaa

SEQ ID NO: 1111365 - RNA, 19 nt, Homo sapiens
  misc_RNA (1)...(19): siRNA sense strand
cuuuggaaguuacgguauu

SEQ ID NO: 1111366 - RNA, 19 nt, Homo sapiens
  misc_RNA (1)...(19): siRNA sense strand
ggacaauguaaccagaaca

SEQ ID NO: 1111367 - RNA, 19 nt, Homo sapiens
  misc_RNA (1)...(19): siRNA sense strand
gaagcaguugguggucuuu

SEQ ID NO: 1111368 - RNA, 19 nt, Homo sapiens
  misc_RNA (1)...(19): siRNA sense strand
agacacagacgaggacaau

SEQ ID NO: 1111369 - RNA, 19 nt, Homo sapiens
  misc_RNA (1)...(19): siRNA sense strand
aauguaaccagaacagaau

SEQ ID NO: 1111370 - RNA, 19 nt, Homo sapiens
  misc_RNA (1)...(19): siRNA sense strand
acagcugucucaccagagu

SEQ ID NO: 1111371 - RNA, 19 nt, Homo sapiens
  misc_RNA (1)...(19): siRNA sense strand
aaccagaacagaauauagu

SEQ ID NO: 1111372 - RNA, 19 nt, Homo sapiens
  misc_RNA (1)...(19): siRNA sense strand
gacuacugcucacaaacgu

SEQ ID NO: 1111373 - RNA, 19 nt, Homo sapiens
  misc_RNA (1)...(19): siRNA sense strand
ggagguaaccgugacuacu

SEQ ID NO: 1111374 - RNA, 19 nt, Homo sapiens
  misc_RNA (1)...(19): siRNA sense strand
agcagaaacugaaaacuga

SEQ ID NO: 1111375 - RNA, 19 nt, Homo sapiens
  misc_RNA (1)...(19): siRNA sense strand
ucaaacugcuucaagauua

SEQ ID NO: 1111376 - RNA, 19 nt, Homo sapiens
  misc_RNA (1)...(19): siRNA sense strand
gaucgaggcuugcaaagug

SEQ ID NO: 1111377 - RNA, 19 nt, Homo sapiens
  misc_RNA (1)...(19): siRNA sense strand
gaacuuagaaagcauggua

SEQ ID NO: 1111378 - RNA, 19 nt, Homo sapiens
  misc_RNA (1)...(19): siRNA sense strand
uaacaaagcagagaaguuu

SEQ ID NO: 1111379 - RNA, 19 nt, Homo sapiens
  misc_RNA (1)...(19): siRNA sense strand
ugacuucucuggccaguuu

SEQ ID NO: 1111380 - RNA, 19 nt, Homo sapiens
  misc_RNA (1)...(19): siRNA sense strand
caucgaaguuguuaaauuc

SEQ ID NO: 1111381 - RNA, 19 nt, Homo sapiens
  misc_RNA (1)...(19): siRNA sense strand
gcaccaggaucaugauuca

SEQ ID NO: 1111382 - RNA, 19 nt, Homo sapiens
  misc_RNA (1)...(19): siRNA sense strand
caagauggacuguaacaaa

SEQ ID NO: 1111383 - RNA, 19 nt, Homo sapiens
  misc_RNA (1)...(19): siRNA sense strand
gaacaagacuguggucaac

SEQ ID NO: 1111384 - RNA, 19 nt, Homo sapiens
  misc_RNA (1)...(19): siRNA sense strand
ggacacaucgaaguuguua

SEQ ID NO: 1111385 - RNA, 19 nt, Homo sapiens
  misc_RNA (1)...(19): siRNA sense strand
cgagaucucuuccgaaagu

SEQ ID NO: 1111386 - RNA, 19 nt, Homo sapiens
  misc_RNA (1)...(19): siRNA sense strand
ugaucaagauggacuguaa

SEQ ID NO: 1111387 - RNA, 19 nt, Homo sapiens
  misc_RNA (1)...(19): siRNA sense strand
gcgcacagcucugcauguu

SEQ ID NO: 1111388 - RNA, 19 nt, Homo sapiens
  misc_RNA (1)...(19): siRNA sense strand
gcuauuaucucaaggaaaa

SEQ ID NO: 1111389 - RNA, 19 nt, Homo sapiens
  misc_RNA (1)...(19): siRNA sense strand
aaagagaacuuagaaagca

SEQ ID NO: 1111390 - RNA, 19 nt, Homo sapiens
  misc_RNA (1)...(19): siRNA sense strand
ggaaugaauacauggguuu

SEQ ID NO: 1111391 - RNA, 19 nt, Homo sapiens
  misc_RNA (1)...(19): siRNA sense strand
gcagaaauucggaacaaga

SEQ ID NO: 1111392 - RNA, 19 nt, Homo sapiens
  misc_RNA (1)...(19): siRNA sense strand
gggcagaaauucggaacaa

SEQ ID NO: 1111393 - RNA, 19 nt, Homo sapiens
  misc_RNA (1)...(19): siRNA sense strand
ccacuggacugcagacauc

SEQ ID NO: 1111394 - RNA, 19 nt, Homo sapiens
  misc_RNA (1)...(19): siRNA sense strand
gaaguuugauuuuguguug

SEQ ID NO: 1111395 - RNA, 19 nt, Homo sapiens
  misc_RNA (1)...(19): siRNA sense strand
aagcagagaaguuugauuu

SEQ ID NO: 1111396 - RNA, 19 nt, Homo sapiens
  misc_RNA (1)...(19): siRNA sense strand
caugauggcugcccuugau

SEQ ID NO: 1111397 - RNA, 19 nt, Homo sapiens
  misc_RNA (1)...(19): siRNA sense strand
gcauguugcugcagcugaa

SEQ ID NO: 1111398 - RNA, 19 nt, Homo sapiens
  misc_RNA (1)...(19): siRNA sense strand
caaaauggcugggaaugaa

SEQ ID NO: 1111399 - RNA, 19 nt, Homo sapiens
  misc_RNA (1)...(19): siRNA sense strand
ccaaagagaacuuagaaag

SEQ ID NO: 1111400 - RNA, 19 nt, Homo sapiens
  misc_RNA (1)...(19): siRNA sense strand
gaaucccuauccacaaguu

SEQ ID NO: 1111401 - RNA, 19 nt, Homo sapiens
  misc_RNA (1)...(19): siRNA sense strand
acaacaagcucucccucaa

SEQ ID NO: 1111402 - RNA, 19 nt, Homo sapiens
  misc_RNA (1)...(19): siRNA sense strand
gcagagaaguuugauuuug

SEQ ID NO: 1111403 - RNA, 19 nt, Homo sapiens
  misc_RNA (1)...(19): siRNA sense strand
uggugucucucuucaauuu

SEQ ID NO: 1111404 - RNA, 19 nt, Homo sapiens
  misc_RNA (1)...(19): siRNA sense strand
ggaacaagacuguggucaa

SEQ ID NO: 1111405 - RNA, 19 nt, Homo sapiens
  misc_RNA (1)...(19): siRNA sense strand
guucaccacugcacuaaag

SEQ ID NO: 1111406 - RNA, 19 nt, Homo sapiens
  misc_RNA (1)...(19): siRNA sense strand
acacaucgaaguuguuaaa

SEQ ID NO: 1111407 - RNA, 19 nt, Homo sapiens
  misc_RNA (1)...(19): siRNA sense strand
gaaggacacaucgaaguug

SEQ ID NO: 1111408 - RNA, 19 nt, Homo sapiens
  misc_RNA (1)...(19): siRNA sense strand
gaacagaaagacuaugacu

SEQ ID NO: 1111409 - RNA, 19 nt, Homo sapiens
  misc_RNA (1)...(19): siRNA sense strand
caaguggccugcgcuacaa

SEQ ID NO: 1111410 - RNA, 19 nt, Homo sapiens
  misc_RNA (1)...(19): siRNA sense strand
auacauggguuucagcaau

SEQ ID NO: 1111411 - RNA, 19 nt, Homo sapiens
  misc_RNA (1)...(19): siRNA sense strand
guuauuugcugccuauagu

SEQ ID NO: 1111412 - RNA, 19 nt, Homo sapiens
  misc_RNA (1)...(19): siRNA sense strand
guuggugucucucuucaau

SEQ ID NO: 1111413 - RNA, 19 nt, Homo sapiens
  misc_RNA (1)...(19): siRNA sense strand
ggaugaugcugugcaguuc

SEQ ID NO: 1111414 - RNA, 19 nt, Homo sapiens
  misc_RNA (1)...(19): siRNA sense strand
guaacaaagcagagaaguu

SEQ ID NO: 1111415 - RNA, 19 nt, Homo sapiens
  misc_RNA (1)...(19): siRNA sense strand
ucaauuuccacaacuauga

SEQ ID NO: 1111416 - RNA, 19 nt, Homo sapiens
  misc_RNA (1)...(19): siRNA sense strand
caaguucaccacugcacua

SEQ ID NO: 1111417 - RNA, 19 nt, Homo sapiens
  misc_RNA (1)...(19): siRNA sense strand
aagaagugcuuuccuaagg

SEQ ID NO: 1111418 - RNA, 19 nt, Homo sapiens
  misc_RNA (1)...(19): siRNA sense strand
gccaucggcuauuaucuca

SEQ ID NO: 1111419 - RNA, 19 nt, Homo sapiens
  misc_RNA (1)...(19): siRNA sense strand
aacaagcucucccucaaug

SEQ ID NO: 1111420 - RNA, 19 nt, Homo sapiens
  misc_RNA (1)...(19): siRNA sense strand
caacaagcucucccucaau

SEQ ID NO: 1111421 - RNA, 19 nt, Homo sapiens
  misc_RNA (1)...(19): siRNA sense strand
caaacugcuucaagauuac

SEQ ID NO: 1111422 - RNA, 19 nt, Homo sapiens
  misc_RNA (1)...(19): siRNA sense strand
gaauuaugccaucggcuau

SEQ ID NO: 1111423 - RNA, 19 nt, Homo sapiens
  misc_RNA (1)...(19): siRNA sense strand
aagauggacuguaacaaag

SEQ ID NO: 1111424 - RNA, 19 nt, Homo sapiens
  misc_RNA (1)...(19): siRNA sense strand
caucggcuauuaucucaag

SEQ ID NO: 1111425 - RNA, 19 nt, Homo sapiens
  misc_RNA (1)...(19): siRNA sense strand
cugaggcccuguccaaaga

SEQ ID NO: 1111426 - RNA, 19 nt, Homo sapiens
  misc_RNA (1)...(19): siRNA sense strand
caugaaggcucugcagaag

SEQ ID NO: 1111427 - RNA, 19 nt, Homo sapiens
  misc_RNA (1)...(19): siRNA sense strand
ugaaggacacaucgaaguu

SEQ ID NO: 1111428 - RNA, 19 nt, Homo sapiens
  misc_RNA (1)...(19): siRNA sense strand
ugacuacgugcacaaguuu

SEQ ID NO: 1111429 - RNA, 19 nt, Homo sapiens
  misc_RNA (1)...(19): siRNA sense strand
gccagaaguuggugucucu

SEQ ID NO: 1111430 - RNA, 19 nt, Homo sapiens
  misc_RNA (1)...(19): siRNA sense strand
gauggacuguaacaaagca

SEQ ID NO: 1111431 - RNA, 19 nt, Homo sapiens
  misc_RNA (1)...(19): siRNA sense strand
guccaagaguccaguagug

SEQ ID NO: 1111432 - RNA, 19 nt, Homo sapiens
  misc_RNA (1)...(19): siRNA sense strand
gauuugcucuuuuacacua

SEQ ID NO: 1111433 - RNA, 19 nt, Homo sapiens
  misc_RNA (1)...(19): siRNA sense strand
accgagaucucuuccgaaa

SEQ ID NO: 1111434 - RNA, 19 nt, Homo sapiens
  misc_RNA (1)...(19): siRNA sense strand
ccacauuccagucagagaa

SEQ ID NO: 1111435 - RNA, 19 nt, Homo sapiens
  misc_RNA (1)...(19): siRNA sense strand
ccaugaaggcucugcagaa

SEQ ID NO: 1111436 - RNA, 19 nt, Homo sapiens
  misc_RNA (1)...(19): siRNA sense strand
uggcugcccuugaucucua

SEQ ID NO: 1111437 - RNA, 19 nt, Homo sapiens
  misc_RNA (1)...(19): siRNA sense strand
auuaugccaucggcuauua

SEQ ID NO: 1111438 - RNA, 19 nt, Homo sapiens
  misc_RNA (1)...(19): siRNA sense strand
guggucaaccuguuauuug

SEQ ID NO: 1111439 - RNA, 19 nt, Homo sapiens
  misc_RNA (1)...(19): siRNA sense strand
guccaaagagaacuuagaa

SEQ ID NO: 1111440 - RNA, 19 nt, Homo sapiens
  misc_RNA (1)...(19): siRNA sense strand
caguagugguggccucuug

SEQ ID NO: 1111441 - RNA, 19 nt, Homo sapiens
  misc_RNA (1)...(19): siRNA sense strand
caaagagaacuuagaaagc

SEQ ID NO: 1111442 - RNA, 19 nt, Homo sapiens
  misc_RNA (1)...(19): siRNA sense strand
ggucaaacugcuucaagau

SEQ ID NO: 1111443 - RNA, 19 nt, Homo sapiens
  misc_RNA (1)...(19): siRNA sense strand
ggugguacccaaugucaug

SEQ ID NO: 1111444 - RNA, 19 nt, Homo sapiens
  misc_RNA (1)...(19): siRNA sense strand
cggcauguaugacuucucu

SEQ ID NO: 1111445 - RNA, 19 nt, Homo sapiens
  misc_RNA (1)...(19): siRNA sense strand
cugacuacgugcacaaguu

SEQ ID NO: 1111446 - RNA, 19 nt, Homo sapiens
  misc_RNA (1)...(19): siRNA sense strand
gucaaacugcuucaagauu

SEQ ID NO: 1111447 - RNA, 19 nt, Homo sapiens
  misc_RNA (1)...(19): siRNA sense strand
agacuguggucaaccuguu

SEQ ID NO: 1111448 - RNA, 19 nt, Homo sapiens
  misc_RNA (1)...(19): siRNA sense strand
ggacugcagacaucagauc

SEQ ID NO: 1111449 - RNA, 19 nt, Homo sapiens
  misc_RNA (1)...(19): siRNA sense strand
ccaaguggccugcgcuaca

SEQ ID NO: 1111450 - RNA, 19 nt, Homo sapiens
  misc_RNA (1)...(19): siRNA sense strand
uacauggguuucagcaaug

SEQ ID NO: 1111451 - RNA, 19 nt, Homo sapiens
  misc_RNA (1)...(19): siRNA sense strand
gacaggaacgaaucccuau

SEQ ID NO: 1111452 - RNA, 19 nt, Homo sapiens
  misc_RNA (1)...(19): siRNA sense strand
uaagcacccuaggcacuga

SEQ ID NO: 1111453 - RNA, 19 nt, Homo sapiens
  misc_RNA (1)...(19): siRNA sense strand
cagcugaggcccuguccaa

SEQ ID NO: 1111454 - RNA, 19 nt, Homo sapiens
  misc_RNA (1)...(19): siRNA sense strand
ccuguuauuugcugccuau

SEQ ID NO: 1111455 - RNA, 19 nt, Homo sapiens
  misc_RNA (1)...(19): siRNA sense strand
cagagaaguuugauuuugu

SEQ ID NO: 1111456 - RNA, 19 nt, Homo sapiens
  misc_RNA (1)...(19): siRNA sense strand
cggcuauuaucucaaggaa

SEQ ID NO: 1111457 - RNA, 19 nt, Homo sapiens
  misc_RNA (1)...(19): siRNA sense strand
uggaacagaaagacuauga

SEQ ID NO: 1111458 - RNA, 19 nt, Homo sapiens
  misc_RNA (1)...(19): siRNA sense strand
aaauggcugggaaugaaua

SEQ ID NO: 1111459 - RNA, 19 nt, Homo sapiens
  misc_RNA (1)...(19): siRNA sense strand
agaaguuggugucucucuu

SEQ ID NO: 1111460 - RNA, 19 nt, Homo sapiens
  misc_RNA (1)...(19): siRNA sense strand
ugaaucaggcagugucaug

SEQ ID NO: 1111461 - RNA, 19 nt, Homo sapiens
  misc_RNA (1)...(19): siRNA sense strand
aaacaggggaucggaauua

SEQ ID NO: 1111462 - RNA, 19 nt, Homo sapiens
  misc_RNA (1)...(19): siRNA sense strand
gcaacacccucagccucau

SEQ ID NO: 1111463 - RNA, 19 nt, Homo sapiens
  misc_RNA (1)...(19): siRNA sense strand
gaggcccuguccaaagaga

SEQ ID NO: 1111464 - RNA, 19 nt, Homo sapiens
  misc_RNA (1)...(19): siRNA sense strand
uggucaaacugcuucaaga

SEQ ID NO: 1111465 - RNA, 19 nt, Homo sapiens
  misc_RNA (1)...(19): siRNA sense strand
gacuguggucaaccuguua

SEQ ID NO: 1111466 - RNA, 19 nt, Homo sapiens
  misc_RNA (1)...(19): siRNA sense strand
gaaugaauacauggguuuc

SEQ ID NO: 1111467 - RNA, 19 nt, Homo sapiens
  misc_RNA (1)...(19): siRNA sense strand
acacaaagauccccuucug

SEQ ID NO: 1111468 - RNA, 19 nt, Homo sapiens
  misc_RNA (1)...(19): siRNA sense strand
gcugaggcccuguccaaag

SEQ ID NO: 1111469 - RNA, 19 nt, Homo sapiens
  misc_RNA (1)...(19): siRNA sense strand
aaggacacaucgaaguugu

SEQ ID NO: 1111470 - RNA, 19 nt, Homo sapiens
  misc_RNA (1)...(19): siRNA sense strand
ccugggugauuugcucuuu

SEQ ID NO: 1111471 - RNA, 19 nt, Homo sapiens
  misc_RNA (1)...(19): siRNA sense strand
ggcugggaaugaauacaug

SEQ ID NO: 1111472 - RNA, 19 nt, Homo sapiens
  misc_RNA (1)...(19): siRNA sense strand
ugaaggacaggaacgaauc

SEQ ID NO: 1111473 - RNA, 19 nt, Homo sapiens
  misc_RNA (1)...(19): siRNA sense strand
ucccucagcuggccaaguc

SEQ ID NO: 1111474 - RNA, 19 nt, Homo sapiens
  misc_RNA (1)...(19): siRNA sense strand
gagacugcaugagcgagau

SEQ ID NO: 1111475 - RNA, 19 nt, Homo sapiens
  misc_RNA (1)...(19): siRNA sense strand
gcaccaggaucaugauuca

SEQ ID NO: 1111476 - RNA, 19 nt, Homo sapiens
  misc_RNA (1)...(19): siRNA sense strand
cgagaucucuuccgaaagu

SEQ ID NO: 1111477 - RNA, 19 nt, Homo sapiens
  misc_RNA (1)...(19): siRNA sense strand
ccacuggacugcagacauc

SEQ ID NO: 1111478 - RNA, 19 nt, Homo sapiens
  misc_RNA (1)...(19): siRNA sense strand
gaaucccuauccacaaguu

SEQ ID NO: 1111479 - RNA, 19 nt, Homo sapiens
  misc_RNA (1)...(19): siRNA sense strand
guucaccacugcacuaaag

SEQ ID NO: 1111480 - RNA, 19 nt, Homo sapiens
  misc_RNA (1)...(19): siRNA sense strand
caaguucaccacugcacua

SEQ ID NO: 1111481 - RNA, 19 nt, Homo sapiens
  misc_RNA (1)...(19): siRNA sense strand
caugaaggcucugcagaag

SEQ ID NO: 1111482 - RNA, 19 nt, Homo sapiens
  misc_RNA (1)...(19): siRNA sense strand
gauuugcucuuuuacacua

SEQ ID NO: 1111483 - RNA, 19 nt, Homo sapiens
  misc_RNA (1)...(19): siRNA sense strand
accgagaucucuuccgaaa

SEQ ID NO: 1111484 - RNA, 19 nt, Homo sapiens
  misc_RNA (1)...(19): siRNA sense strand
guccaagaguccaguagug

SEQ ID NO: 1111485 - RNA, 19 nt, Homo sapiens
  misc_RNA (1)...(19): siRNA sense strand
ccaugaaggcucugcagaa

SEQ ID NO: 1111486 - RNA, 19 nt, Homo sapiens
  misc_RNA (1)...(19): siRNA sense strand
caguagugguggccucuug

SEQ ID NO: 1111487 - RNA, 19 nt, Homo sapiens
  misc_RNA (1)...(19): siRNA sense strand
ggacugcagacaucagauc

SEQ ID NO: 1111488 - RNA, 19 nt, Homo sapiens
  misc_RNA (1)...(19): siRNA sense strand
gacaggaacgaaucccuau

SEQ ID NO: 1111489 - RNA, 19 nt, Homo sapiens
  misc_RNA (1)...(19): siRNA sense strand
ccugggugauuugcucuuu

SEQ ID NO: 1111490 - RNA, 19 nt, Homo sapiens
  misc_RNA (1)...(19): siRNA sense strand
acacaaagauccccuucug

SEQ ID NO: 1111491 - RNA, 19 nt, Homo sapiens
  misc_RNA (1)...(19): siRNA sense strand
ugaaggacaggaacgaauc

SEQ ID NO: 1111492 - RNA, 19 nt, Homo sapiens
  misc_RNA (1)...(19): siRNA sense strand
ucccucagcuggccaaguc

SEQ ID NO: 1111493 - RNA, 19 nt, Homo sapiens
  misc_RNA (1)...(19): siRNA sense strand
acgaaucccuauccacaag

SEQ ID NO: 1111494 - RNA, 19 nt, Homo sapiens
  misc_RNA (1)...(19): siRNA sense strand
gagacugcaugagcgagau

SEQ ID NO: 1111495 - RNA, 19 nt, Homo sapiens
  misc_RNA (1)...(19): siRNA sense strand
ugggugauuugcucuuuua

SEQ ID NO: 1111496 - RNA, 19 nt, Homo sapiens
  misc_RNA (1)...(19): siRNA sense strand
ugccugcaguccuguguga

SEQ ID NO: 1111497 - RNA, 19 nt, Homo sapiens
  misc_RNA (1)...(19): siRNA sense strand
uuacacuauugcugaagga

SEQ ID NO: 1111498 - RNA, 19 nt, Homo sapiens
  misc_RNA (1)...(19): siRNA sense strand
gccaguccauucagaagua

SEQ ID NO: 1111499 - RNA, 19 nt, Homo sapiens
  misc_RNA (1)...(19): siRNA sense strand
ucaagaaggccaagaagaa

SEQ ID NO: 1111500 - RNA, 19 nt, Homo sapiens
  misc_RNA (1)...(19): siRNA sense strand
ucaagaagaccaagaagga

SEQ ID NO: 1111501 - RNA, 19 nt, Homo sapiens
  misc_RNA (1)...(19): siRNA sense strand
ccaagaaggaaaucaagaa

SEQ ID NO: 1111502 - RNA, 19 nt, Homo sapiens
  misc_RNA (1)...(19): siRNA sense strand
agaaggaaaucaagaaggu

SEQ ID NO: 1111503 - RNA, 19 nt, Homo sapiens
  misc_RNA (1)...(19): siRNA sense strand
cagaucaaguuguccauca

SEQ ID NO: 1111504 - RNA, 19 nt, Homo sapiens
  misc_RNA (1)...(19): siRNA sense strand
gccaaggccuccaagaagu

SEQ ID NO: 1111505 - RNA, 19 nt, Homo sapiens
  misc_RNA (1)...(19): siRNA sense strand
gaaggaaaucaagaaggua

SEQ ID NO: 1111506 - RNA, 19 nt, Homo sapiens
  misc_RNA (1)...(19): siRNA sense strand
gaagguagccacgccaaag

SEQ ID NO: 1111507 - RNA, 19 nt, Homo sapiens
  misc_RNA (1)...(19): siRNA sense strand
ccacagaccaccccaagua

SEQ ID NO: 1111508 - RNA, 19 nt, Homo sapiens
  misc_RNA (1)...(19): siRNA sense strand
caagaagaccaagaaggaa

SEQ ID NO: 1111509 - RNA, 19 nt, Homo sapiens
  misc_RNA (1)...(19): siRNA sense strand
cagugaaacccaaagcaaa

SEQ ID NO: 1111510 - RNA, 19 nt, Homo sapiens
  misc_RNA (1)...(19): siRNA sense strand
gcaaaguccagugccaaga

SEQ ID NO: 1111511 - RNA, 19 nt, Homo sapiens
  misc_RNA (1)...(19): siRNA sense strand
ccagugaaacccaaagcaa

SEQ ID NO: 1111512 - RNA, 19 nt, Homo sapiens
  misc_RNA (1)...(19): siRNA sense strand
gcgacgaacccaagaaguc

SEQ ID NO: 1111513 - RNA, 19 nt, Homo sapiens
  misc_RNA (1)...(19): siRNA sense strand
aagaagaccaagaaggaaa

SEQ ID NO: 1111514 - RNA, 19 nt, Homo sapiens
  misc_RNA (1)...(19): siRNA sense strand
caagaaggccaagaagaag

SEQ ID NO: 1111515 - RNA, 19 nt, Homo sapiens
  misc_RNA (1)...(19): siRNA sense strand
caagaaggaaaucaagaag

SEQ ID NO: 1111516 - RNA, 19 nt, Homo sapiens
  misc_RNA (1)...(19): siRNA sense strand
cgacgaacccaagaaguca

SEQ ID NO: 1111517 - RNA, 19 nt, Homo sapiens
  misc_RNA (1)...(19): siRNA sense strand
ccaccgguguccucaagca

SEQ ID NO: 1111518 - RNA, 19 nt, Homo sapiens
  misc_RNA (1)...(19): siRNA sense strand
gaucaaguuguccaucaag

SEQ ID NO: 1111519 - RNA, 19 nt, Homo sapiens
  misc_RNA (1)...(19): siRNA sense strand
caaguauucagacaugauc

SEQ ID NO: 1111520 - RNA, 19 nt, Homo sapiens
  misc_RNA (1)...(19): siRNA sense strand
gagcgacgaacccaagaag

SEQ ID NO: 1111521 - RNA, 19 nt, Homo sapiens
  misc_RNA (1)...(19): siRNA sense strand
gaccaagaaggaaaucaag

SEQ ID NO: 1111522 - RNA, 19 nt, Homo sapiens
  misc_RNA (1)...(19): siRNA sense strand
agaucaaguuguccaucaa

SEQ ID NO: 1111523 - RNA, 19 nt, Homo sapiens
  misc_RNA (1)...(19): siRNA sense strand
caaaguccagugccaagag

SEQ ID NO: 1111524 - RNA, 19 nt, Homo sapiens
  misc_RNA (1)...(19): siRNA sense strand
gucaagaaggccaagaaga

SEQ ID NO: 1111525 - RNA, 19 nt, Homo sapiens
  misc_RNA (1)...(19): siRNA sense strand
agaccaagaaggaaaucaa

SEQ ID NO: 1111526 - RNA, 19 nt, Homo sapiens
  misc_RNA (1)...(19): siRNA sense strand
ccaaguauucagacaugau

SEQ ID NO: 1111527 - RNA, 19 nt, Homo sapiens
  misc_RNA (1)...(19): siRNA sense strand
ucaagagccacuacaaggu

SEQ ID NO: 1111528 - RNA, 19 nt, Homo sapiens
  misc_RNA (1)...(19): siRNA sense strand
caaggcauccaagcccaaa

SEQ ID NO: 1111529 - RNA, 19 nt, Homo sapiens
  misc_RNA (1)...(19): siRNA sense strand
ccauucagaaguauaucaa

SEQ ID NO: 1111530 - RNA, 19 nt, Homo sapiens
  misc_RNA (1)...(19): siRNA sense strand
caaaccagugaaacccaaa

SEQ ID NO: 1111531 - RNA, 19 nt, Homo sapiens
  misc_RNA (1)...(19): siRNA sense strand
ggucaagaaggccaagaag

SEQ ID NO: 1111532 - RNA, 19 nt, Homo sapiens
  misc_RNA (1)...(19): siRNA sense strand
ccaguccauucagaaguau

SEQ ID NO: 1111533 - RNA, 19 nt, Homo sapiens
  misc_RNA (1)...(19): siRNA sense strand
acuacaaggugggugagaa

SEQ ID NO: 1111534 - RNA, 19 nt, Homo sapiens
  misc_RNA (1)...(19): siRNA sense strand
uaucaagagccacuacaag

SEQ ID NO: 1111535 - RNA, 19 nt, Homo sapiens
  misc_RNA (1)...(19): siRNA sense strand
gaacgcugacucgcagauc

SEQ ID NO: 1111536 - RNA, 19 nt, Homo sapiens
  misc_RNA (1)...(19): siRNA sense strand
ccaaagccccaaccaagaa

SEQ ID NO: 1111537 - RNA, 19 nt, Homo sapiens
  misc_RNA (1)...(19): siRNA sense strand
gaagaccaagaaggaaauc

SEQ ID NO: 1111538 - RNA, 19 nt, Homo sapiens
  misc_RNA (1)...(19): siRNA sense strand
acucgcagaucaaguuguc

SEQ ID NO: 1111539 - RNA, 19 nt, Homo sapiens
  misc_RNA (1)...(19): siRNA sense strand
agaaagagcuggagaaguu

SEQ ID NO: 1111540 - RNA, 19 nt, Homo sapiens
  misc_RNA (1)...(19): siRNA sense strand
ggagaaagaugaccacaca

SEQ ID NO: 1111541 - RNA, 19 nt, Homo sapiens
  misc_RNA (1)...(19): siRNA sense strand
gaaugaggauggagaagug

SEQ ID NO: 1111542 - RNA, 19 nt, Homo sapiens
  misc_RNA (1)...(19): siRNA sense strand
gaacaucauugacuuuguc

SEQ ID NO: 1111543 - RNA, 19 nt, Homo sapiens
  misc_RNA (1)...(19): siRNA sense strand
ccgcuaagcuuaucgcuau

SEQ ID NO: 1111544 - RNA, 19 nt, Homo sapiens
  misc_RNA (1)...(19): siRNA sense strand
ggaagagagugaggauauu

SEQ ID NO: 1111545 - RNA, 19 nt, Homo sapiens
  misc_RNA (1)...(19): siRNA sense strand
caucaucuguggcaucuug

SEQ ID NO: 1111546 - RNA, 19 nt, Homo sapiens
  misc_RNA (1)...(19): siRNA sense strand
gacuuugucucuauuauuc

SEQ ID NO: 1111547 - RNA, 19 nt, Homo sapiens
  misc_RNA (1)...(19): siRNA sense strand
gauccugacuccacagaug

SEQ ID NO: 1111548 - RNA, 19 nt, Homo sapiens
  misc_RNA (1)...(19): siRNA sense strand
guccagauccuacggcuua

SEQ ID NO: 1111549 - RNA, 19 nt, Homo sapiens
  misc_RNA (1)...(19): siRNA sense strand
ugucggaguuccagaauga

SEQ ID NO: 1111550 - RNA, 19 nt, Homo sapiens
  misc_RNA (1)...(19): siRNA sense strand
gaacuugucaaccugaaug

SEQ ID NO: 1111551 - RNA, 19 nt, Homo sapiens
  misc_RNA (1)...(19): siRNA sense strand
gaagagagugaggauauug

SEQ ID NO: 1111552 - RNA, 19 nt, Homo sapiens
  misc_RNA (1)...(19): siRNA sense strand
gucaugagcuaccuuacuu

SEQ ID NO: 1111553 - RNA, 19 nt, Homo sapiens
  misc_RNA (1)...(19): siRNA sense strand
agacacagcuaccaugaag

SEQ ID NO: 1111554 - RNA, 19 nt, Homo sapiens
  misc_RNA (1)...(19): siRNA sense strand
gaaaagccaugaugugagu

SEQ ID NO: 1111555 - RNA, 19 nt, Homo sapiens
  misc_RNA (1)...(19): siRNA sense strand
caugagcuaccuuacuuua

SEQ ID NO: 1111556 - RNA, 19 nt, Homo sapiens
  misc_RNA (1)...(19): siRNA sense strand
agagaagugucaugagcua

SEQ ID NO: 1111557 - RNA, 19 nt, Homo sapiens
  misc_RNA (1)...(19): siRNA sense strand
gccaggagaucgaguacug

SEQ ID NO: 1111558 - RNA, 19 nt, Homo sapiens
  misc_RNA (1)...(19): siRNA sense strand
uaagcagucuguugaccaa

SEQ ID NO: 1111559 - RNA, 19 nt, Homo sapiens
  misc_RNA (1)...(19): siRNA sense strand
gugaggauauugagaacau

SEQ ID NO: 1111560 - RNA, 19 nt, Homo sapiens
  misc_RNA (1)...(19): siRNA sense strand
cggaaucccuccuuguuca

SEQ ID NO: 1111561 - RNA, 19 nt, Homo sapiens
  misc_RNA (1)...(19): siRNA sense strand
gagcuaccuuacuuuaaca

SEQ ID NO: 1111562 - RNA, 19 nt, Homo sapiens
  misc_RNA (1)...(19): siRNA sense strand
aacgagcucuucauugauu

SEQ ID NO: 1111563 - RNA, 19 nt, Homo sapiens
  misc_RNA (1)...(19): siRNA sense strand
caucaacgagcucuucauu

SEQ ID NO: 1111564 - RNA, 19 nt, Homo sapiens
  misc_RNA (1)...(19): siRNA sense strand
ucaacaaguuuuccaagua

SEQ ID NO: 1111565 - RNA, 19 nt, Homo sapiens
  misc_RNA (1)...(19): siRNA sense strand
gaaagagcuggagaaguuu

SEQ ID NO: 1111566 - RNA, 19 nt, Homo sapiens
  misc_RNA (1)...(19): siRNA sense strand
ucauugacuuugucucuau

SEQ ID NO: 1111567 - RNA, 19 nt, Homo sapiens
  misc_RNA (1)...(19): siRNA sense strand
uggaggagcugugcguauu

SEQ ID NO: 1111568 - RNA, 19 nt, Homo sapiens
  misc_RNA (1)...(19): siRNA sense strand
ggagcugugugaugauuac

SEQ ID NO: 1111569 - RNA, 19 nt, Homo sapiens
  misc_RNA (1)...(19): siRNA sense strand
ccaaggaggaagagaguga

SEQ ID NO: 1111570 - RNA, 19 nt, Homo sapiens
  misc_RNA (1)...(19): siRNA sense strand
cguacugccuguccgcuaa

SEQ ID NO: 1111571 - RNA, 19 nt, Homo sapiens
  misc_RNA (1)...(19): siRNA sense strand
acacagcuaccaugaaguu

SEQ ID NO: 1111572 - RNA, 19 nt, Homo sapiens
  misc_RNA (1)...(19): siRNA sense strand
caugacaacugugggcuau

SEQ ID NO: 1111573 - RNA, 19 nt, Homo sapiens
  misc_RNA (1)...(19): siRNA sense strand
ugagcuaccuuacuuuaac

SEQ ID NO: 1111574 - RNA, 19 nt, Homo sapiens
  misc_RNA (1)...(19): siRNA sense strand
gaguggagaucgcgugcau

SEQ ID NO: 1111575 - RNA, 19 nt, Homo sapiens
  misc_RNA (1)...(19): siRNA sense strand
uuaccagucucucuucugu

SEQ ID NO: 1111576 - RNA, 19 nt, Homo sapiens
  misc_RNA (1)...(19): siRNA sense strand
caucaucuucaacaaguuu

SEQ ID NO: 1111577 - RNA, 19 nt, Homo sapiens
  misc_RNA (1)...(19): siRNA sense strand
guggagaucgcgugcauug

SEQ ID NO: 1111578 - RNA, 19 nt, Homo sapiens
  misc_RNA (1)...(19): siRNA sense strand
ugacaacugugggcuaugg

SEQ ID NO: 1111579 - RNA, 19 nt, Homo sapiens
  misc_RNA (1)...(19): siRNA sense strand
guaccgacuccucguuuga

SEQ ID NO: 1111580 - RNA, 19 nt, Homo sapiens
  misc_RNA (1)...(19): siRNA sense strand
gguaggacuucggucucua

SEQ ID NO: 1111581 - RNA, 19 nt, Homo sapiens
  misc_RNA (1)...(19): siRNA sense strand
agagugaggauauugagaa

SEQ ID NO: 1111582 - RNA, 19 nt, Homo sapiens
  misc_RNA (1)...(19): siRNA sense strand
ucaccaucaucuucaacaa

SEQ ID NO: 1111583 - RNA, 19 nt, Homo sapiens
  misc_RNA (1)...(19): siRNA sense strand
gcaugucggaguuccagaa

SEQ ID NO: 1111584 - RNA, 19 nt, Homo sapiens
  misc_RNA (1)...(19): siRNA sense strand
gagacacagcuaccaugaa

SEQ ID NO: 1111585 - RNA, 19 nt, Homo sapiens
  misc_RNA (1)...(19): siRNA sense strand
ggaggaagagagugaggau

SEQ ID NO: 1111586 - RNA, 19 nt, Homo sapiens
  misc_RNA (1)...(19): siRNA sense strand
ugaacaucauugacuuugu

SEQ ID NO: 1111587 - RNA, 19 nt, Homo sapiens
  misc_RNA (1)...(19): siRNA sense strand
gaggagcugugcguauucu

SEQ ID NO: 1111588 - RNA, 19 nt, Homo sapiens
  misc_RNA (1)...(19): siRNA sense strand
ucugugggcauuuccauuu

SEQ ID NO: 1111589 - RNA, 19 nt, Homo sapiens
  misc_RNA (1)...(19): siRNA sense strand
cagauccuacggcuuauga

SEQ ID NO: 1111590 - RNA, 19 nt, Homo sapiens
  misc_RNA (1)...(19): siRNA sense strand
aggaagagagugaggauau

SEQ ID NO: 1111591 - RNA, 19 nt, Homo sapiens
  misc_RNA (1)...(19): siRNA sense strand
ucucuauuauucccuucua

SEQ ID NO: 1111592 - RNA, 19 nt, Homo sapiens
  misc_RNA (1)...(19): siRNA sense strand
ggagcugugcguauucuca

SEQ ID NO: 1111593 - RNA, 19 nt, Homo sapiens
  misc_RNA (1)...(19): siRNA sense strand
gaucggaaucccuccuugu

SEQ ID NO: 1111594 - RNA, 19 nt, Homo sapiens
  misc_RNA (1)...(19): siRNA sense strand
ugagacacagcuaccauga

SEQ ID NO: 1111595 - RNA, 19 nt, Homo sapiens
  misc_RNA (1)...(19): siRNA sense strand
gaggaagagagugaggaua

SEQ ID NO: 1111596 - RNA, 19 nt, Homo sapiens
  misc_RNA (1)...(19): siRNA sense strand
gcaaggugguccagauccu

SEQ ID NO: 1111597 - RNA, 19 nt, Homo sapiens
  misc_RNA (1)...(19): siRNA sense strand
cauuagggauauauaugca

SEQ ID NO: 1111598 - RNA, 19 nt, Homo sapiens
  misc_RNA (1)...(19): siRNA sense strand
caccagagaagugucauga

SEQ ID NO: 1111599 - RNA, 19 nt, Homo sapiens
  misc_RNA (1)...(19): siRNA sense strand
caacaaguuuuccaaguac

SEQ ID NO: 1111600 - RNA, 19 nt, Homo sapiens
  misc_RNA (1)...(19): siRNA sense strand
caacgagcucuucauugau

SEQ ID NO: 1111601 - RNA, 19 nt, Homo sapiens
  misc_RNA (1)...(19): siRNA sense strand
gccagcacaugcaucaucu

SEQ ID NO: 1111602 - RNA, 19 nt, Homo sapiens
  misc_RNA (1)...(19): siRNA sense strand
ucucugugcuuaucuacuc

SEQ ID NO: 1111603 - RNA, 19 nt, Homo sapiens
  misc_RNA (1)...(19): siRNA sense strand
gagugaggauauugagaac

SEQ ID NO: 1111604 - RNA, 19 nt, Homo sapiens
  misc_RNA (1)...(19): siRNA sense strand
gagagugaggauauugaga

SEQ ID NO: 1111605 - RNA, 19 nt, Homo sapiens
  misc_RNA (1)...(19): siRNA sense strand
uuacuugccauucugaaga

SEQ ID NO: 1111606 - RNA, 19 nt, Homo sapiens
  misc_RNA (1)...(19): siRNA sense strand
ggaggagcugugcguauuc

SEQ ID NO: 1111607 - RNA, 19 nt, Homo sapiens
  misc_RNA (1)...(19): siRNA sense strand
cauugacuuugucucuauu

SEQ ID NO: 1111608 - RNA, 19 nt, Homo sapiens
  misc_RNA (1)...(19): siRNA sense strand
ccagaaugaggauggagaa

SEQ ID NO: 1111609 - RNA, 19 nt, Homo sapiens
  misc_RNA (1)...(19): siRNA sense strand
ggucagcuccggaagaaaa

SEQ ID NO: 1111610 - RNA, 19 nt, Homo sapiens
  misc_RNA (1)...(19): siRNA sense strand
gagaaagagcuggagaagu

SEQ ID NO: 1111611 - RNA, 19 nt, Homo sapiens
  misc_RNA (1)...(19): siRNA sense strand
gcauuuccauuuucucugu

SEQ ID NO: 1111612 - RNA, 19 nt, Homo sapiens
  misc_RNA (1)...(19): siRNA sense strand
caucauugacuuugucucu

SEQ ID NO: 1111613 - RNA, 19 nt, Homo sapiens
  misc_RNA (1)...(19): siRNA sense strand
uggagaaguuugacacacu

SEQ ID NO: 1111614 - RNA, 19 nt, Homo sapiens
  misc_RNA (1)...(19): siRNA sense strand
ccaucagcaugacaacugu

SEQ ID NO: 1111615 - RNA, 19 nt, Homo sapiens
  misc_RNA (1)...(19): siRNA sense strand
ucgcgugcauugccugguu

SEQ ID NO: 1111616 - RNA, 19 nt, Homo sapiens
  misc_RNA (1)...(19): siRNA sense strand
caaggugguccagauccua

SEQ ID NO: 1111617 - RNA, 19 nt, Homo sapiens
  misc_RNA (1)...(19): siRNA sense strand
ccaucaccaucaucuucaa

SEQ ID NO: 1111618 - RNA, 19 nt, Homo sapiens
  misc_RNA (1)...(19): siRNA sense strand
cauccagccucaccagcau

SEQ ID NO: 1111619 - RNA, 19 nt, Homo sapiens
  misc_RNA (1)...(19): siRNA sense strand
cuacggcuuaugaggauuu

SEQ ID NO: 1111620 - RNA, 19 nt, Homo sapiens
  misc_RNA (1)...(19): siRNA sense strand
accagucucucuucuguag

SEQ ID NO: 1111621 - RNA, 19 nt, Homo sapiens
  misc_RNA (1)...(19): siRNA sense strand
ucucucuucuguaggcauu

SEQ ID NO: 1111622 - RNA, 19 nt, Homo sapiens
  misc_RNA (1)...(19): siRNA sense strand
gggcaucaacgagcucuuc

SEQ ID NO: 1111623 - RNA, 19 nt, Homo sapiens
  misc_RNA (1)...(19): siRNA sense strand
guaacaccaccuccuugga

SEQ ID NO: 1111624 - RNA, 19 nt, Homo sapiens
  misc_RNA (1)...(19): siRNA sense strand
accaucaucuucaacaagu

SEQ ID NO: 1111625 - RNA, 19 nt, Homo sapiens
  misc_RNA (1)...(19): siRNA sense strand
cagcacaugcaucaucugu

SEQ ID NO: 1111626 - RNA, 19 nt, Homo sapiens
  misc_RNA (1)...(19): siRNA sense strand
uuggucagcuccggaagaa

SEQ ID NO: 1111627 - RNA, 19 nt, Homo sapiens
  misc_RNA (1)...(19): siRNA sense strand
cagaaaagccaugauguga

SEQ ID NO: 1111628 - RNA, 19 nt, Homo sapiens
  misc_RNA (1)...(19): siRNA sense strand
cagcaaucgcuaccaggaa

SEQ ID NO: 1111629 - RNA, 19 nt, Homo sapiens
  misc_RNA (1)...(19): siRNA sense strand
gcagucuguugaccaaagc

SEQ ID NO: 1111630 - RNA, 19 nt, Homo sapiens
  misc_RNA (1)...(19): siRNA sense strand
gugaggaugcaccagagaa

SEQ ID NO: 1111631 - RNA, 19 nt, Homo sapiens
  misc_RNA (1)...(19): siRNA sense strand
ccaaguacuaccagaagca

SEQ ID NO: 1111632 - RNA, 19 nt, Homo sapiens
  misc_RNA (1)...(19): siRNA sense strand
gcugcuuacuugccauucu

SEQ ID NO: 1111633 - RNA, 19 nt, Homo sapiens
  misc_RNA (1)...(19): siRNA sense strand
gaaucccuccuuguucaga

SEQ ID NO: 1111634 - RNA, 19 nt, Homo sapiens
  misc_RNA (1)...(19): siRNA sense strand
gcaccagagaagugucaug

SEQ ID NO: 1111635 - RNA, 19 nt, Homo sapiens
  misc_RNA (1)...(19): siRNA sense strand
caaguacuaccagaagcaa

SEQ ID NO: 1111636 - RNA, 19 nt, Homo sapiens
  misc_RNA (1)...(19): siRNA sense strand
acgaggaacuugucaaccu

SEQ ID NO: 1111637 - RNA, 19 nt, Homo sapiens
  misc_RNA (1)...(19): siRNA sense strand
ggaggagaaugcaauauua

SEQ ID NO: 1111638 - RNA, 19 nt, Homo sapiens
  misc_RNA (1)...(19): siRNA sense strand
ccaaagcgcuuaauagauu

SEQ ID NO: 1111639 - RNA, 19 nt, Homo sapiens
  misc_RNA (1)...(19): siRNA sense strand
ggaugucacuuucaacuua

SEQ ID NO: 1111640 - RNA, 19 nt, Homo sapiens
  misc_RNA (1)...(19): siRNA sense strand
caaagaagaugaacagaga

SEQ ID NO: 1111641 - RNA, 19 nt, Homo sapiens
  misc_RNA (1)...(19): siRNA sense strand
gaacuugucuccaaauaca

SEQ ID NO: 1111642 - RNA, 19 nt, Homo sapiens
  misc_RNA (1)...(19): siRNA sense strand
gcucauaucuggaccaaau

SEQ ID NO: 1111643 - RNA, 19 nt, Homo sapiens
  misc_RNA (1)...(19): siRNA sense strand
ggaaggaugucacuuucaa

SEQ ID NO: 1111644 - RNA, 19 nt, Homo sapiens
  misc_RNA (1)...(19): siRNA sense strand
gcacaggcuugaagaaaga

SEQ ID NO: 1111645 - RNA, 19 nt, Homo sapiens
  misc_RNA (1)...(19): siRNA sense strand
gaaaggaucaguugccaaa

SEQ ID NO: 1111646 - RNA, 19 nt, Homo sapiens
  misc_RNA (1)...(19): siRNA sense strand
gagacaagguuauuucaug

SEQ ID NO: 1111647 - RNA, 19 nt, Homo sapiens
  misc_RNA (1)...(19): siRNA sense strand
agaaauguaugcagacuuu

SEQ ID NO: 1111648 - RNA, 19 nt, Homo sapiens
  misc_RNA (1)...(19): siRNA sense strand
gaacacagaacuaguuuca

SEQ ID NO: 1111649 - RNA, 19 nt, Homo sapiens
  misc_RNA (1)...(19): siRNA sense strand
ggaauggaauggugugaug

SEQ ID NO: 1111650 - RNA, 19 nt, Homo sapiens
  misc_RNA (1)...(19): siRNA sense strand
acacagaacuaguuucaga

SEQ ID NO: 1111651 - RNA, 19 nt, Homo sapiens
  misc_RNA (1)...(19): siRNA sense strand
gaaguugccuauaaucaag

SEQ ID NO: 1111652 - RNA, 19 nt, Homo sapiens
  misc_RNA (1)...(19): siRNA sense strand
caaauacagucccagaguu

SEQ ID NO: 1111653 - RNA, 19 nt, Homo sapiens
  misc_RNA (1)...(19): siRNA sense strand
ccaagaaguugccuauaau

SEQ ID NO: 1111654 - RNA, 19 nt, Homo sapiens
  misc_RNA (1)...(19): siRNA sense strand
gacaacaaauagcauggua

SEQ ID NO: 1111655 - RNA, 19 nt, Homo sapiens
  misc_RNA (1)...(19): siRNA sense strand
caaaugauacugaagagaa

SEQ ID NO: 1111656 - RNA, 19 nt, Homo sapiens
  misc_RNA (1)...(19): siRNA sense strand
ggcaagaagcacagaauua

SEQ ID NO: 1111657 - RNA, 19 nt, Homo sapiens
  misc_RNA (1)...(19): siRNA sense strand
ggagaaugcuggguuuaug

SEQ ID NO: 1111658 - RNA, 19 nt, Homo sapiens
  misc_RNA (1)...(19): siRNA sense strand
caaauagcaugguagaauc

SEQ ID NO: 1111659 - RNA, 19 nt, Homo sapiens
  misc_RNA (1)...(19): siRNA sense strand
ggaaggagaaggaaauuca

SEQ ID NO: 1111660 - RNA, 19 nt, Homo sapiens
  misc_RNA (1)...(19): siRNA sense strand
gaagaugaacagagaaaga

SEQ ID NO: 1111661 - RNA, 19 nt, Homo sapiens
  misc_RNA (1)...(19): siRNA sense strand
cacagcagcucgggaaaua

SEQ ID NO: 1111662 - RNA, 19 nt, Homo sapiens
  misc_RNA (1)...(19): siRNA sense strand
gaaauucagugggagacaa

SEQ ID NO: 1111663 - RNA, 19 nt, Homo sapiens
  misc_RNA (1)...(19): siRNA sense strand
cagaauuacugccgagauu

SEQ ID NO: 1111664 - RNA, 19 nt, Homo sapiens
  misc_RNA (1)...(19): siRNA sense strand
ggaaggaaaggaucaguug

SEQ ID NO: 1111665 - RNA, 19 nt, Homo sapiens
  misc_RNA (1)...(19): siRNA sense strand
ggaauggugugauguaugc

SEQ ID NO: 1111666 - RNA, 19 nt, Homo sapiens
  misc_RNA (1)...(19): siRNA sense strand
gaaggucuauccucacagu

SEQ ID NO: 1111667 - RNA, 19 nt, Homo sapiens
  misc_RNA (1)...(19): siRNA sense strand
gcacaagagcguuaucaug

SEQ ID NO: 1111668 - RNA, 19 nt, Homo sapiens
  misc_RNA (1)...(19): siRNA sense strand
gauggagaaugcuggguuu

SEQ ID NO: 1111669 - RNA, 19 nt, Homo sapiens
  misc_RNA (1)...(19): siRNA sense strand
gaugucacuuucaacuuaa

SEQ ID NO: 1111670 - RNA, 19 nt, Homo sapiens
  misc_RNA (1)...(19): siRNA sense strand
gaacagagaaagaaaauug

SEQ ID NO: 1111671 - RNA, 19 nt, Homo sapiens
  misc_RNA (1)...(19): siRNA sense strand
ucaaagagacaacaaauag

SEQ ID NO: 1111672 - RNA, 19 nt, Homo sapiens
  misc_RNA (1)...(19): siRNA sense strand
accaagaaguugccuauaa

SEQ ID NO: 1111673 - RNA, 19 nt, Homo sapiens
  misc_RNA (1)...(19): siRNA sense strand
gaagagaacacagaacuag

SEQ ID NO: 1111674 - RNA, 19 nt, Homo sapiens
  misc_RNA (1)...(19): siRNA sense strand
agacaagguuauuucauga

SEQ ID NO: 1111675 - RNA, 19 nt, Homo sapiens
  misc_RNA (1)...(19): siRNA sense strand
gugaacuugucuccaaaua

SEQ ID NO: 1111676 - RNA, 19 nt, Homo sapiens
  misc_RNA (1)...(19): siRNA sense strand
aauaucaucuuccacacua

SEQ ID NO: 1111677 - RNA, 19 nt, Homo sapiens
  misc_RNA (1)...(19): siRNA sense strand
gaggagaaugcaauauuaa

SEQ ID NO: 1111678 - RNA, 19 nt, Homo sapiens
  misc_RNA (1)...(19): siRNA sense strand
gaugcaauauaucaaccua

SEQ ID NO: 1111679 - RNA, 19 nt, Homo sapiens
  misc_RNA (1)...(19): siRNA sense strand
gaaaggaaggagaaggaaa

SEQ ID NO: 1111680 - RNA, 19 nt, Homo sapiens
  misc_RNA (1)...(19): siRNA sense strand
ucccguagaugcaauauau

SEQ ID NO: 1111681 - RNA, 19 nt, Homo sapiens
  misc_RNA (1)...(19): siRNA sense strand
gaucagaacgaguaugaau

SEQ ID NO: 1111682 - RNA, 19 nt, Homo sapiens
  misc_RNA (1)...(19): siRNA sense strand
caacaaauagcaugguaga

SEQ ID NO: 1111683 - RNA, 19 nt, Homo sapiens
  misc_RNA (1)...(19): siRNA sense strand
gcagggcugugucucaugu

SEQ ID NO: 1111684 - RNA, 19 nt, Homo sapiens
  misc_RNA (1)...(19): siRNA sense strand
ugaggaaguuggaagauca

SEQ ID NO: 1111685 - RNA, 19 nt, Homo sapiens
  misc_RNA (1)...(19): siRNA sense strand
ggaauuaggaggagaaugc

SEQ ID NO: 1111686 - RNA, 19 nt, Homo sapiens
  misc_RNA (1)...(19): siRNA sense strand
caacguuuauucuugaaag

SEQ ID NO: 1111687 - RNA, 19 nt, Homo sapiens
  misc_RNA (1)...(19): siRNA sense strand
gagaaaggaaggagaagga

SEQ ID NO: 1111688 - RNA, 19 nt, Homo sapiens
  misc_RNA (1)...(19): siRNA sense strand
agaagaaagugaggaaguu

SEQ ID NO: 1111689 - RNA, 19 nt, Homo sapiens
  misc_RNA (1)...(19): siRNA sense strand
gcaagaagcacagaauuac

SEQ ID NO: 1111690 - RNA, 19 nt, Homo sapiens
  misc_RNA (1)...(19): siRNA sense strand
gagaacacagaacuaguuu

SEQ ID NO: 1111691 - RNA, 19 nt, Homo sapiens
  misc_RNA (1)...(19): siRNA sense strand
agaacuaguuucagaagga

SEQ ID NO: 1111692 - RNA, 19 nt, Homo sapiens
  misc_RNA (1)...(19): siRNA sense strand
gaugaaccauuacugaaac

SEQ ID NO: 1111693 - RNA, 19 nt, Homo sapiens
  misc_RNA (1)...(19): siRNA sense strand
gagaaugcuggguuuauga

SEQ ID NO: 1111694 - RNA, 19 nt, Homo sapiens
  misc_RNA (1)...(19): siRNA sense strand
gaacauuacauucucacau

SEQ ID NO: 1111695 - RNA, 19 nt, Homo sapiens
  misc_RNA (1)...(19): siRNA sense strand
gaugaacauuacauucuca

SEQ ID NO: 1111696 - RNA, 19 nt, Homo sapiens
  misc_RNA (1)...(19): siRNA sense strand
gagcagguuucccaucauc

SEQ ID NO: 1111697 - RNA, 19 nt, Homo sapiens
  misc_RNA (1)...(19): siRNA sense strand
ucacuuaauucuuccuugu

SEQ ID NO: 1111698 - RNA, 19 nt, Homo sapiens
  misc_RNA (1)...(19): siRNA sense strand
gaggagcacaagagcguua

SEQ ID NO: 1111699 - RNA, 19 nt, Homo sapiens
  misc_RNA (1)...(19): siRNA sense strand
cagcagugaagaugaauuu

SEQ ID NO: 1111700 - RNA, 19 nt, Homo sapiens
  misc_RNA (1)...(19): siRNA sense strand
gaagaaagugaggaaguug

SEQ ID NO: 1111701 - RNA, 19 nt, Homo sapiens
  misc_RNA (1)...(19): siRNA sense strand
gcagugaagaugaauuuua

SEQ ID NO: 1111702 - RNA, 19 nt, Homo sapiens
  misc_RNA (1)...(19): siRNA sense strand
gagcauuagugaccagaag

SEQ ID NO: 1111703 - RNA, 19 nt, Homo sapiens
  misc_RNA (1)...(19): siRNA sense strand
guaguucuuccaacguuua

SEQ ID NO: 1111704 - RNA, 19 nt, Homo sapiens
  misc_RNA (1)...(19): siRNA sense strand
uggaagaucagaacgagua

SEQ ID NO: 1111705 - RNA, 19 nt, Homo sapiens
  misc_RNA (1)...(19): siRNA sense strand
ggacaucaucagacuccua

SEQ ID NO: 1111706 - RNA, 19 nt, Homo sapiens
  misc_RNA (1)...(19): siRNA sense strand
caagguuauuucaugaaga

SEQ ID NO: 1111707 - RNA, 19 nt, Homo sapiens
  misc_RNA (1)...(19): siRNA sense strand
acacuaaacccuucuaugg

SEQ ID NO: 1111708 - RNA, 19 nt, Homo sapiens
  misc_RNA (1)...(19): siRNA sense strand
gauaccacagaaucacuua

SEQ ID NO: 1111709 - RNA, 19 nt, Homo sapiens
  misc_RNA (1)...(19): siRNA sense strand
gcagaagcccgagaaagga

SEQ ID NO: 1111710 - RNA, 19 nt, Homo sapiens
  misc_RNA (1)...(19): siRNA sense strand
acaaauagcaugguagaau

SEQ ID NO: 1111711 - RNA, 19 nt, Homo sapiens
  misc_RNA (1)...(19): siRNA sense strand
gugcaaauaucaucuucca

SEQ ID NO: 1111712 - RNA, 19 nt, Homo sapiens
  misc_RNA (1)...(19): siRNA sense strand
acaauucaaugcucauauc

SEQ ID NO: 1111713 - RNA, 19 nt, Homo sapiens
  misc_RNA (1)...(19): siRNA sense strand
gaagauacaauucaaugcu

SEQ ID NO: 1111714 - RNA, 19 nt, Homo sapiens
  misc_RNA (1)...(19): siRNA sense strand
gaugcugaccuguuugauu

SEQ ID NO: 1111715 - RNA, 19 nt, Homo sapiens
  misc_RNA (1)...(19): siRNA sense strand
cacgugaacuugucuccaa

SEQ ID NO: 1111716 - RNA, 19 nt, Homo sapiens
  misc_RNA (1)...(19): siRNA sense strand
ucaugaagauggagaaugc

SEQ ID NO: 1111717 - RNA, 19 nt, Homo sapiens
  misc_RNA (1)...(19): siRNA sense strand
uuaugaugcugaugaauuc

SEQ ID NO: 1111718 - RNA, 19 nt, Homo sapiens
  misc_RNA (1)...(19): siRNA sense strand
caucucuugucgcagguua

SEQ ID NO: 1111719 - RNA, 19 nt, Homo sapiens
  misc_RNA (1)...(19): siRNA sense strand
gguaguucuuccaacguuu

SEQ ID NO: 1111720 - RNA, 19 nt, Homo sapiens
  misc_RNA (1)...(19): siRNA sense strand
caaagcgcuuaauagauuc

SEQ ID NO: 1111721 - RNA, 19 nt, Homo sapiens
  misc_RNA (1)...(19): siRNA sense strand
caagugaugcugaccuguu

SEQ ID NO: 1111722 - RNA, 19 nt, Homo sapiens
  misc_RNA (1)...(19): siRNA sense strand
ugaugaaccauuacugaaa

SEQ ID NO: 1111723 - RNA, 19 nt, Homo sapiens
  misc_RNA (1)...(19): siRNA sense strand
gggcaagaagcacagaauu

SEQ ID NO: 1111724 - RNA, 19 nt, Homo sapiens
  misc_RNA (1)...(19): siRNA sense strand
cuuccaacguuuauucuug

SEQ ID NO: 1111725 - RNA, 19 nt, Homo sapiens
  misc_RNA (1)...(19): siRNA sense strand
agacuuggaauggaucuua

SEQ ID NO: 1111726 - RNA, 19 nt, Homo sapiens
  misc_RNA (1)...(19): siRNA sense strand
caagagcguuaucaugcau

SEQ ID NO: 1111727 - RNA, 19 nt, Homo sapiens
  misc_RNA (1)...(19): siRNA sense strand
aagugaugcugaccuguuu

SEQ ID NO: 1111728 - RNA, 19 nt, Homo sapiens
  misc_RNA (1)...(19): siRNA sense strand
augcugaccuguuugauuc

SEQ ID NO: 1111729 - RNA, 19 nt, Homo sapiens
  misc_RNA (1)...(19): siRNA sense strand
aaugcuggguuuaugauga

SEQ ID NO: 1111730 - RNA, 19 nt, Homo sapiens
  misc_RNA (1)...(19): siRNA sense strand
gaaguuggaagaucagaac

SEQ ID NO: 1111731 - RNA, 19 nt, Homo sapiens
  misc_RNA (1)...(19): siRNA sense strand
agacuaugaugaacauuac

SEQ ID NO: 1111732 - RNA, 19 nt, Homo sapiens
  misc_RNA (1)...(19): siRNA sense strand
agagaacacagaacuaguu

SEQ ID NO: 1111733 - RNA, 19 nt, Homo sapiens
  misc_RNA (1)...(19): siRNA sense strand
ucccaaggaucgaaugguu

SEQ ID NO: 1111734 - RNA, 19 nt, Homo sapiens
  misc_RNA (1)...(19): siRNA sense strand
ggaccuguuugugagcauu

SEQ ID NO: 1111735 - RNA, 19 nt, Homo sapiens
  misc_RNA (1)...(19): siRNA sense strand
ugauucacaugaugacaga

SEQ ID NO: 1111736 - RNA, 19 nt, Homo sapiens
  misc_RNA (1)...(19): siRNA sense strand
uaugaugaaccauuacuga

SEQ ID NO: 1111737 - RNA, 19 nt, Homo sapiens
  misc_RNA (1)...(19): siRNA sense strand
ggaggagaaugcaauauua

SEQ ID NO: 1111738 - RNA, 19 nt, Homo sapiens
  misc_RNA (1)...(19): siRNA sense strand
ccaaagcgcuuaauagauu

SEQ ID NO: 1111739 - RNA, 19 nt, Homo sapiens
  misc_RNA (1)...(19): siRNA sense strand
ggaugucacuuucaacuua

SEQ ID NO: 1111740 - RNA, 19 nt, Homo sapiens
  misc_RNA (1)...(19): siRNA sense strand
gaacuugucuccaaauaca

SEQ ID NO: 1111741 - RNA, 19 nt, Homo sapiens
  misc_RNA (1)...(19): siRNA sense strand
gcucauaucuggaccaaau

SEQ ID NO: 1111742 - RNA, 19 nt, Homo sapiens
  misc_RNA (1)...(19): siRNA sense strand
ggaaggaugucacuuucaa

SEQ ID NO: 1111743 - RNA, 19 nt, Homo sapiens
  misc_RNA (1)...(19): siRNA sense strand
gcacaggcuugaagaaaga

SEQ ID NO: 1111744 - RNA, 19 nt, Homo sapiens
  misc_RNA (1)...(19): siRNA sense strand
gaaaggaucaguugccaaa

SEQ ID NO: 1111745 - RNA, 19 nt, Homo sapiens
  misc_RNA (1)...(19): siRNA sense strand
gagacaagguuauuucaug

SEQ ID NO: 1111746 - RNA, 19 nt, Homo sapiens
  misc_RNA (1)...(19): siRNA sense strand
agaaauguaugcagacuuu

SEQ ID NO: 1111747 - RNA, 19 nt, Homo sapiens
  misc_RNA (1)...(19): siRNA sense strand
gaacacagaacuaguuuca

SEQ ID NO: 1111748 - RNA, 19 nt, Homo sapiens
  misc_RNA (1)...(19): siRNA sense strand
ggaauggaauggugugaug

SEQ ID NO: 1111749 - RNA, 19 nt, Homo sapiens
  misc_RNA (1)...(19): siRNA sense strand
acacagaacuaguuucaga

SEQ ID NO: 1111750 - RNA, 19 nt, Homo sapiens
  misc_RNA (1)...(19): siRNA sense strand
gaaguugccuauaaucaag

SEQ ID NO: 1111751 - RNA, 19 nt, Homo sapiens
  misc_RNA (1)...(19): siRNA sense strand
caaauacagucccagaguu

SEQ ID NO: 1111752 - RNA, 19 nt, Homo sapiens
  misc_RNA (1)...(19): siRNA sense strand
ccaagaaguugccuauaau

SEQ ID NO: 1111753 - RNA, 19 nt, Homo sapiens
  misc_RNA (1)...(19): siRNA sense strand
caaaugauacugaagagaa

SEQ ID NO: 1111754 - RNA, 19 nt, Homo sapiens
  misc_RNA (1)...(19): siRNA sense strand
ggcaagaagcacagaauua

SEQ ID NO: 1111755 - RNA, 19 nt, Homo sapiens
  misc_RNA (1)...(19): siRNA sense strand
ggagaaugcuggguuuaug

SEQ ID NO: 1111756 - RNA, 19 nt, Homo sapiens
  misc_RNA (1)...(19): siRNA sense strand
ggaaggagaaggaaauuca

SEQ ID NO: 1111757 - RNA, 19 nt, Homo sapiens
  misc_RNA (1)...(19): siRNA sense strand
cacagcagcucgggaaaua

SEQ ID NO: 1111758 - RNA, 19 nt, Homo sapiens
  misc_RNA (1)...(19): siRNA sense strand
gaaauucagugggagacaa

SEQ ID NO: 1111759 - RNA, 19 nt, Homo sapiens
  misc_RNA (1)...(19): siRNA sense strand
cagaauuacugccgagauu

SEQ ID NO: 1111760 - RNA, 19 nt, Homo sapiens
  misc_RNA (1)...(19): siRNA sense strand
ggaaggaaaggaucaguug

SEQ ID NO: 1111761 - RNA, 19 nt, Homo sapiens
  misc_RNA (1)...(19): siRNA sense strand
ggaauggugugauguaugc

SEQ ID NO: 1111762 - RNA, 19 nt, Homo sapiens
  misc_RNA (1)...(19): siRNA sense strand
gaaggucuauccucacagu

SEQ ID NO: 1111763 - RNA, 19 nt, Homo sapiens
  misc_RNA (1)...(19): siRNA sense strand
gcacaagagcguuaucaug

SEQ ID NO: 1111764 - RNA, 19 nt, Homo sapiens
  misc_RNA (1)...(19): siRNA sense strand
gauggagaaugcuggguuu

SEQ ID NO: 1111765 - RNA, 19 nt, Homo sapiens
  misc_RNA (1)...(19): siRNA sense strand
gaugucacuuucaacuuaa

SEQ ID NO: 1111766 - RNA, 19 nt, Homo sapiens
  misc_RNA (1)...(19): siRNA sense strand
accaagaaguugccuauaa

SEQ ID NO: 1111767 - RNA, 19 nt, Homo sapiens
  misc_RNA (1)...(19): siRNA sense strand
gaagagaacacagaacuag

SEQ ID NO: 1111768 - RNA, 19 nt, Homo sapiens
  misc_RNA (1)...(19): siRNA sense strand
agacaagguuauuucauga

SEQ ID NO: 1111769 - RNA, 19 nt, Homo sapiens
  misc_RNA (1)...(19): siRNA sense strand
gugaacuugucuccaaaua

SEQ ID NO: 1111770 - RNA, 19 nt, Homo sapiens
  misc_RNA (1)...(19): siRNA sense strand
aauaucaucuuccacacua

SEQ ID NO: 1111771 - RNA, 19 nt, Homo sapiens
  misc_RNA (1)...(19): siRNA sense strand
gaggagaaugcaauauuaa

SEQ ID NO: 1111772 - RNA, 19 nt, Homo sapiens
  misc_RNA (1)...(19): siRNA sense strand
gaugcaauauaucaaccua

SEQ ID NO: 1111773 - RNA, 19 nt, Homo sapiens
  misc_RNA (1)...(19): siRNA sense strand
gaaaggaaggagaaggaaa

SEQ ID NO: 1111774 - RNA, 19 nt, Homo sapiens
  misc_RNA (1)...(19): siRNA sense strand
ucccguagaugcaauauau

SEQ ID NO: 1111775 - RNA, 19 nt, Homo sapiens
  misc_RNA (1)...(19): siRNA sense strand
gaucagaacgaguaugaau

SEQ ID NO: 1111776 - RNA, 19 nt, Homo sapiens
  misc_RNA (1)...(19): siRNA sense strand
gcagggcugugucucaugu

SEQ ID NO: 1111777 - RNA, 19 nt, Homo sapiens
  misc_RNA (1)...(19): siRNA sense strand
ugaggaaguuggaagauca

SEQ ID NO: 1111778 - RNA, 19 nt, Homo sapiens
  misc_RNA (1)...(19): siRNA sense strand
ggaauuaggaggagaaugc

SEQ ID NO: 1111779 - RNA, 19 nt, Homo sapiens
  misc_RNA (1)...(19): siRNA sense strand
caacguuuauucuugaaag

SEQ ID NO: 1111780 - RNA, 19 nt, Homo sapiens
  misc_RNA (1)...(19): siRNA sense strand
gagaaaggaaggagaagga

SEQ ID NO: 1111781 - RNA, 19 nt, Homo sapiens
  misc_RNA (1)...(19): siRNA sense strand
agaagaaagugaggaaguu

SEQ ID NO: 1111782 - RNA, 19 nt, Homo sapiens
  misc_RNA (1)...(19): siRNA sense strand
gcaagaagcacagaauuac

SEQ ID NO: 1111783 - RNA, 19 nt, Homo sapiens
  misc_RNA (1)...(19): siRNA sense strand
gagaacacagaacuaguuu

SEQ ID NO: 1111784 - RNA, 19 nt, Homo sapiens
  misc_RNA (1)...(19): siRNA sense strand
agaacuaguuucagaagga

SEQ ID NO: 1111785 - RNA, 19 nt, Homo sapiens
  misc_RNA (1)...(19): siRNA sense strand
gaugaaccauuacugaaac

SEQ ID NO: 1111786 - RNA, 19 nt, Homo sapiens
  misc_RNA (1)...(19): siRNA sense strand
gagaaugcuggguuuauga

SEQ ID NO: 1111787 - RNA, 19 nt, Homo sapiens
  misc_RNA (1)...(19): siRNA sense strand
gaacauuacauucucacau

SEQ ID NO: 1111788 - RNA, 19 nt, Homo sapiens
  misc_RNA (1)...(19): siRNA sense strand
gaugaacauuacauucuca

SEQ ID NO: 1111789 - RNA, 19 nt, Homo sapiens
  misc_RNA (1)...(19): siRNA sense strand
gagcagguuucccaucauc

SEQ ID NO: 1111790 - RNA, 19 nt, Homo sapiens
  misc_RNA (1)...(19): siRNA sense strand
ucacuuaauucuuccuugu

SEQ ID NO: 1111791 - RNA, 19 nt, Homo sapiens
  misc_RNA (1)...(19): siRNA sense strand
gaggagcacaagagcguua

SEQ ID NO: 1111792 - RNA, 19 nt, Homo sapiens
  misc_RNA (1)...(19): siRNA sense strand
cagcagugaagaugaauuu

SEQ ID NO: 1111793 - RNA, 19 nt, Homo sapiens
  misc_RNA (1)...(19): siRNA sense strand
gaagaaagugaggaaguug

SEQ ID NO: 1111794 - RNA, 19 nt, Homo sapiens
  misc_RNA (1)...(19): siRNA sense strand
gcagugaagaugaauuuua

SEQ ID NO: 1111795 - RNA, 19 nt, Homo sapiens
  misc_RNA (1)...(19): siRNA sense strand
gagcauuagugaccagaag

SEQ ID NO: 1111796 - RNA, 19 nt, Homo sapiens
  misc_RNA (1)...(19): siRNA sense strand
guaguucuuccaacguuua

SEQ ID NO: 1111797 - RNA, 19 nt, Homo sapiens
  misc_RNA (1)...(19): siRNA sense strand
uggaagaucagaacgagua

SEQ ID NO: 1111798 - RNA, 19 nt, Homo sapiens
  misc_RNA (1)...(19): siRNA sense strand
ggacaucaucagacuccua

SEQ ID NO: 1111799 - RNA, 19 nt, Homo sapiens
  misc_RNA (1)...(19): siRNA sense strand
caagguuauuucaugaaga

SEQ ID NO: 1111800 - RNA, 19 nt, Homo sapiens
  misc_RNA (1)...(19): siRNA sense strand
acacuaaacccuucuaugg

SEQ ID NO: 1111801 - RNA, 19 nt, Homo sapiens
  misc_RNA (1)...(19): siRNA sense strand
gauaccacagaaucacuua

SEQ ID NO: 1111802 - RNA, 19 nt, Homo sapiens
  misc_RNA (1)...(19): siRNA sense strand
gcagaagcccgagaaagga

SEQ ID NO: 1111803 - RNA, 19 nt, Homo sapiens
  misc_RNA (1)...(19): siRNA sense strand
gugcaaauaucaucuucca

SEQ ID NO: 1111804 - RNA, 19 nt, Homo sapiens
  misc_RNA (1)...(19): siRNA sense strand
acaauucaaugcucauauc

SEQ ID NO: 1111805 - RNA, 19 nt, Homo sapiens
  misc_RNA (1)...(19): siRNA sense strand
gaagauacaauucaaugcu

SEQ ID NO: 1111806 - RNA, 19 nt, Homo sapiens
  misc_RNA (1)...(19): siRNA sense strand
gaugcugaccuguuugauu

SEQ ID NO: 1111807 - RNA, 19 nt, Homo sapiens
  misc_RNA (1)...(19): siRNA sense strand
cacgugaacuugucuccaa

SEQ ID NO: 1111808 - RNA, 19 nt, Homo sapiens
  misc_RNA (1)...(19): siRNA sense strand
ucaugaagauggagaaugc

SEQ ID NO: 1111809 - RNA, 19 nt, Homo sapiens
  misc_RNA (1)...(19): siRNA sense strand
uuaugaugcugaugaauuc

SEQ ID NO: 1111810 - RNA, 19 nt, Homo sapiens
  misc_RNA (1)...(19): siRNA sense strand
caucucuugucgcagguua

SEQ ID NO: 1111811 - RNA, 19 nt, Homo sapiens
  misc_RNA (1)...(19): siRNA sense strand
gguaguucuuccaacguuu

SEQ ID NO: 1111812 - RNA, 19 nt, Homo sapiens
  misc_RNA (1)...(19): siRNA sense strand
caaagcgcuuaauagauuc

SEQ ID NO: 1111813 - RNA, 19 nt, Homo sapiens
  misc_RNA (1)...(19): siRNA sense strand
caagugaugcugaccuguu

SEQ ID NO: 1111814 - RNA, 19 nt, Homo sapiens
  misc_RNA (1)...(19): siRNA sense strand
ugaugaaccauuacugaaa

SEQ ID NO: 1111815 - RNA, 19 nt, Homo sapiens
  misc_RNA (1)...(19): siRNA sense strand
gggcaagaagcacagaauu

SEQ ID NO: 1111816 - RNA, 19 nt, Homo sapiens
  misc_RNA (1)...(19): siRNA sense strand
cuuccaacguuuauucuug

SEQ ID NO: 1111817 - RNA, 19 nt, Homo sapiens
  misc_RNA (1)...(19): siRNA sense strand
agacuuggaauggaucuua

SEQ ID NO: 1111818 - RNA, 19 nt, Homo sapiens
  misc_RNA (1)...(19): siRNA sense strand
caagagcguuaucaugcau

SEQ ID NO: 1111819 - RNA, 19 nt, Homo sapiens
  misc_RNA (1)...(19): siRNA sense strand
aagugaugcugaccuguuu

SEQ ID NO: 1111820 - RNA, 19 nt, Homo sapiens
  misc_RNA (1)...(19): siRNA sense strand
augcugaccuguuugauuc

SEQ ID NO: 1111821 - RNA, 19 nt, Homo sapiens
  misc_RNA (1)...(19): siRNA sense strand
aaugcuggguuuaugauga

SEQ ID NO: 1111822 - RNA, 19 nt, Homo sapiens
  misc_RNA (1)...(19): siRNA sense strand
gaaguuggaagaucagaac

SEQ ID NO: 1111823 - RNA, 19 nt, Homo sapiens
  misc_RNA (1)...(19): siRNA sense strand
agacuaugaugaacauuac

SEQ ID NO: 1111824 - RNA, 19 nt, Homo sapiens
  misc_RNA (1)...(19): siRNA sense strand
agagaacacagaacuaguu

SEQ ID NO: 1111825 - RNA, 19 nt, Homo sapiens
  misc_RNA (1)...(19): siRNA sense strand
ucccaaggaucgaaugguu

SEQ ID NO: 1111826 - RNA, 19 nt, Homo sapiens
  misc_RNA (1)...(19): siRNA sense strand
ggaccuguuugugagcauu

SEQ ID NO: 1111827 - RNA, 19 nt, Homo sapiens
  misc_RNA (1)...(19): siRNA sense strand
ugauucacaugaugacaga

SEQ ID NO: 1111828 - RNA, 19 nt, Homo sapiens
  misc_RNA (1)...(19): siRNA sense strand
ccaaauacagucccagagu

SEQ ID NO: 1111829 - RNA, 19 nt, Homo sapiens
  misc_RNA (1)...(19): siRNA sense strand
uaugaugaaccauuacuga

SEQ ID NO: 1111830 - RNA, 19 nt, Homo sapiens
  misc_RNA (1)...(19): siRNA sense strand
ucaagaagaaagugaggaa

SEQ ID NO: 1111831 - RNA, 19 nt, Homo sapiens
  misc_RNA (1)...(19): siRNA sense strand
gguuagacuuggaauggau

SEQ ID NO: 1111832 - RNA, 19 nt, Homo sapiens
  misc_RNA (1)...(19): siRNA sense strand
gcacauccggaccuguuug

SEQ ID NO: 1111833 - RNA, 19 nt, Homo sapiens
  misc_RNA (1)...(19): siRNA sense strand
aaaggaaggagaaggaaau

SEQ ID NO: 1111834 - RNA, 19 nt, Homo sapiens
  misc_RNA (1)...(19): siRNA sense strand
ugaagagaacacagaacua

SEQ ID NO: 1111835 - RNA, 19 nt, Homo sapiens
  misc_RNA (1)...(19): siRNA sense strand
ggaaguuggaagaucagaa

SEQ ID NO: 1111836 - RNA, 19 nt, Homo sapiens
  misc_RNA (1)...(19): siRNA sense strand
aagaucagaacgaguauga

SEQ ID NO: 1111837 - RNA, 19 nt, Homo sapiens
  misc_RNA (1)...(19): siRNA sense strand
ggaggagaaugcaauauua

SEQ ID NO: 1111838 - RNA, 19 nt, Homo sapiens
  misc_RNA (1)...(19): siRNA sense strand
ccaaagcgcuuaauagauu

SEQ ID NO: 1111839 - RNA, 19 nt, Homo sapiens
  misc_RNA (1)...(19): siRNA sense strand
ggaugucacuuucaacuua

SEQ ID NO: 1111840 - RNA, 19 nt, Homo sapiens
  misc_RNA (1)...(19): siRNA sense strand
gaacuugucuccaaauaca

SEQ ID NO: 1111841 - RNA, 19 nt, Homo sapiens
  misc_RNA (1)...(19): siRNA sense strand
gcucauaucuggaccaaau

SEQ ID NO: 1111842 - RNA, 19 nt, Homo sapiens
  misc_RNA (1)...(19): siRNA sense strand
ggaaggaugucacuuucaa

SEQ ID NO: 1111843 - RNA, 19 nt, Homo sapiens
  misc_RNA (1)...(19): siRNA sense strand
gcacaggcuugaagaaaga

SEQ ID NO: 1111844 - RNA, 19 nt, Homo sapiens
  misc_RNA (1)...(19): siRNA sense strand
gaaaggaucaguugccaaa

SEQ ID NO: 1111845 - RNA, 19 nt, Homo sapiens
  misc_RNA (1)...(19): siRNA sense strand
gagacaagguuauuucaug

SEQ ID NO: 1111846 - RNA, 19 nt, Homo sapiens
  misc_RNA (1)...(19): siRNA sense strand
agaaauguaugcagacuuu

SEQ ID NO: 1111847 - RNA, 19 nt, Homo sapiens
  misc_RNA (1)...(19): siRNA sense strand
gaacacagaacuaguuuca

SEQ ID NO: 1111848 - RNA, 19 nt, Homo sapiens
  misc_RNA (1)...(19): siRNA sense strand
ggaauggaauggugugaug

SEQ ID NO: 1111849 - RNA, 19 nt, Homo sapiens
  misc_RNA (1)...(19): siRNA sense strand
acacagaacuaguuucaga

SEQ ID NO: 1111850 - RNA, 19 nt, Homo sapiens
  misc_RNA (1)...(19): siRNA sense strand
gaaguugccuauaaucaag

SEQ ID NO: 1111851 - RNA, 19 nt, Homo sapiens
  misc_RNA (1)...(19): siRNA sense strand
caaauacagucccagaguu

SEQ ID NO: 1111852 - RNA, 19 nt, Homo sapiens
  misc_RNA (1)...(19): siRNA sense strand
ccaagaaguugccuauaau

SEQ ID NO: 1111853 - RNA, 19 nt, Homo sapiens
  misc_RNA (1)...(19): siRNA sense strand
caaaugauacugaagagaa

SEQ ID NO: 1111854 - RNA, 19 nt, Homo sapiens
  misc_RNA (1)...(19): siRNA sense strand
ggcaagaagcacagaauua

SEQ ID NO: 1111855 - RNA, 19 nt, Homo sapiens
  misc_RNA (1)...(19): siRNA sense strand
ggagaaugcuggguuuaug

SEQ ID NO: 1111856 - RNA, 19 nt, Homo sapiens
  misc_RNA (1)...(19): siRNA sense strand
ggaaggagaaggaaauuca

SEQ ID NO: 1111857 - RNA, 19 nt, Homo sapiens
  misc_RNA (1)...(19): siRNA sense strand
cacagcagcucgggaaaua

SEQ ID NO: 1111858 - RNA, 19 nt, Homo sapiens
  misc_RNA (1)...(19): siRNA sense strand
gaaauucagugggagacaa

SEQ ID NO: 1111859 - RNA, 19 nt, Homo sapiens
  misc_RNA (1)...(19): siRNA sense strand
cagaauuacugccgagauu

SEQ ID NO: 1111860 - RNA, 19 nt, Homo sapiens
  misc_RNA (1)...(19): siRNA sense strand
ggaaggaaaggaucaguug

SEQ ID NO: 1111861 - RNA, 19 nt, Homo sapiens
  misc_RNA (1)...(19): siRNA sense strand
ggaauggugugauguaugc

SEQ ID NO: 1111862 - RNA, 19 nt, Homo sapiens
  misc_RNA (1)...(19): siRNA sense strand
gaaggucuauccucacagu

SEQ ID NO: 1111863 - RNA, 19 nt, Homo sapiens
  misc_RNA (1)...(19): siRNA sense strand
gcacaagagcguuaucaug

SEQ ID NO: 1111864 - RNA, 19 nt, Homo sapiens
  misc_RNA (1)...(19): siRNA sense strand
gauggagaaugcuggguuu

SEQ ID NO: 1111865 - RNA, 19 nt, Homo sapiens
  misc_RNA (1)...(19): siRNA sense strand
gaugucacuuucaacuuaa

SEQ ID NO: 1111866 - RNA, 19 nt, Homo sapiens
  misc_RNA (1)...(19): siRNA sense strand
accaagaaguugccuauaa

SEQ ID NO: 1111867 - RNA, 19 nt, Homo sapiens
  misc_RNA (1)...(19): siRNA sense strand
gaagagaacacagaacuag

SEQ ID NO: 1111868 - RNA, 19 nt, Homo sapiens
  misc_RNA (1)...(19): siRNA sense strand
agacaagguuauuucauga

SEQ ID NO: 1111869 - RNA, 19 nt, Homo sapiens
  misc_RNA (1)...(19): siRNA sense strand
gugaacuugucuccaaaua

SEQ ID NO: 1111870 - RNA, 19 nt, Homo sapiens
  misc_RNA (1)...(19): siRNA sense strand
aauaucaucuuccacacua

SEQ ID NO: 1111871 - RNA, 19 nt, Homo sapiens
  misc_RNA (1)...(19): siRNA sense strand
gaggagaaugcaauauuaa

SEQ ID NO: 1111872 - RNA, 19 nt, Homo sapiens
  misc_RNA (1)...(19): siRNA sense strand
gaugcaauauaucaaccua

SEQ ID NO: 1111873 - RNA, 19 nt, Homo sapiens
  misc_RNA (1)...(19): siRNA sense strand
gaaaggaaggagaaggaaa

SEQ ID NO: 1111874 - RNA, 19 nt, Homo sapiens
  misc_RNA (1)...(19): siRNA sense strand
ucccguagaugcaauauau

SEQ ID NO: 1111875 - RNA, 19 nt, Homo sapiens
  misc_RNA (1)...(19): siRNA sense strand
gaucagaacgaguaugaau

SEQ ID NO: 1111876 - RNA, 19 nt, Homo sapiens
  misc_RNA (1)...(19): siRNA sense strand
gcagggcugugucucaugu

SEQ ID NO: 1111877 - RNA, 19 nt, Homo sapiens
  misc_RNA (1)...(19): siRNA sense strand
ugaggaaguuggaagauca

SEQ ID NO: 1111878 - RNA, 19 nt, Homo sapiens
  misc_RNA (1)...(19): siRNA sense strand
ggaauuaggaggagaaugc

SEQ ID NO: 1111879 - RNA, 19 nt, Homo sapiens
  misc_RNA (1)...(19): siRNA sense strand
caacguuuauucuugaaag

SEQ ID NO: 1111880 - RNA, 19 nt, Homo sapiens
  misc_RNA (1)...(19): siRNA sense strand
gagaaaggaaggagaagga

SEQ ID NO: 1111881 - RNA, 19 nt, Homo sapiens
  misc_RNA (1)...(19): siRNA sense strand
agaagaaagugaggaaguu

SEQ ID NO: 1111882 - RNA, 19 nt, Homo sapiens
  misc_RNA (1)...(19): siRNA sense strand
gcaagaagcacagaauuac

SEQ ID NO: 1111883 - RNA, 19 nt, Homo sapiens
  misc_RNA (1)...(19): siRNA sense strand
gagaacacagaacuaguuu

SEQ ID NO: 1111884 - RNA, 19 nt, Homo sapiens
  misc_RNA (1)...(19): siRNA sense strand
agaacuaguuucagaagga

SEQ ID NO: 1111885 - RNA, 19 nt, Homo sapiens
  misc_RNA (1)...(19): siRNA sense strand
gaugaaccauuacugaaac

SEQ ID NO: 1111886 - RNA, 19 nt, Homo sapiens
  misc_RNA (1)...(19): siRNA sense strand
gagaaugcuggguuuauga

SEQ ID NO: 1111887 - RNA, 19 nt, Homo sapiens
  misc_RNA (1)...(19): siRNA sense strand
gaacauuacauucucacau

SEQ ID NO: 1111888 - RNA, 19 nt, Homo sapiens
  misc_RNA (1)...(19): siRNA sense strand
gaugaacauuacauucuca

SEQ ID NO: 1111889 - RNA, 19 nt, Homo sapiens
  misc_RNA (1)...(19): siRNA sense strand
gagcagguuucccaucauc

SEQ ID NO: 1111890 - RNA, 19 nt, Homo sapiens
  misc_RNA (1)...(19): siRNA sense strand
ucacuuaauucuuccuugu

SEQ ID NO: 1111891 - RNA, 19 nt, Homo sapiens
  misc_RNA (1)...(19): siRNA sense strand
gaggagcacaagagcguua

SEQ ID NO: 1111892 - RNA, 19 nt, Homo sapiens
  misc_RNA (1)...(19): siRNA sense strand
cagcagugaagaugaauuu

SEQ ID NO: 1111893 - RNA, 19 nt, Homo sapiens
  misc_RNA (1)...(19): siRNA sense strand
gaagaaagugaggaaguug

SEQ ID NO: 1111894 - RNA, 19 nt, Homo sapiens
  misc_RNA (1)...(19): siRNA sense strand
gcagugaagaugaauuuua

SEQ ID NO: 1111895 - RNA, 19 nt, Homo sapiens
  misc_RNA (1)...(19): siRNA sense strand
gagcauuagugaccagaag

SEQ ID NO: 1111896 - RNA, 19 nt, Homo sapiens
  misc_RNA (1)...(19): siRNA sense strand
guaguucuuccaacguuua

SEQ ID NO: 1111897 - RNA, 19 nt, Homo sapiens
  misc_RNA (1)...(19): siRNA sense strand
uggaagaucagaacgagua

SEQ ID NO: 1111898 - RNA, 19 nt, Homo sapiens
  misc_RNA (1)...(19): siRNA sense strand
ggacaucaucagacuccua

SEQ ID NO: 1111899 - RNA, 19 nt, Homo sapiens
  misc_RNA (1)...(19): siRNA sense strand
caagguuauuucaugaaga

SEQ ID NO: 1111900 - RNA, 19 nt, Homo sapiens
  misc_RNA (1)...(19): siRNA sense strand
acacuaaacccuucuaugg

SEQ ID NO: 1111901 - RNA, 19 nt, Homo sapiens
  misc_RNA (1)...(19): siRNA sense strand
gauaccacagaaucacuua

SEQ ID NO: 1111902 - RNA, 19 nt, Homo sapiens
  misc_RNA (1)...(19): siRNA sense strand
gcagaagcccgagaaagga

SEQ ID NO: 1111903 - RNA, 19 nt, Homo sapiens
  misc_RNA (1)...(19): siRNA sense strand
gugcaaauaucaucuucca

SEQ ID NO: 1111904 - RNA, 19 nt, Homo sapiens
  misc_RNA (1)...(19): siRNA sense strand
acaauucaaugcucauauc

SEQ ID NO: 1111905 - RNA, 19 nt, Homo sapiens
  misc_RNA (1)...(19): siRNA sense strand
gaagauacaauucaaugcu

SEQ ID NO: 1111906 - RNA, 19 nt, Homo sapiens
  misc_RNA (1)...(19): siRNA sense strand
gaugcugaccuguuugauu

SEQ ID NO: 1111907 - RNA, 19 nt, Homo sapiens
  misc_RNA (1)...(19): siRNA sense strand
cacgugaacuugucuccaa

SEQ ID NO: 1111908 - RNA, 19 nt, Homo sapiens
  misc_RNA (1)...(19): siRNA sense strand
ucaugaagauggagaaugc

SEQ ID NO: 1111909 - RNA, 19 nt, Homo sapiens
  misc_RNA (1)...(19): siRNA sense strand
uuaugaugcugaugaauuc

SEQ ID NO: 1111910 - RNA, 19 nt, Homo sapiens
  misc_RNA (1)...(19): siRNA sense strand
caucucuugucgcagguua

SEQ ID NO: 1111911 - RNA, 19 nt, Homo sapiens
  misc_RNA (1)...(19): siRNA sense strand
gguaguucuuccaacguuu

SEQ ID NO: 1111912 - RNA, 19 nt, Homo sapiens
  misc_RNA (1)...(19): siRNA sense strand
caaagcgcuuaauagauuc

SEQ ID NO: 1111913 - RNA, 19 nt, Homo sapiens
  misc_RNA (1)...(19): siRNA sense strand
caagugaugcugaccuguu

SEQ ID NO: 1111914 - RNA, 19 nt, Homo sapiens
  misc_RNA (1)...(19): siRNA sense strand
ugaugaaccauuacugaaa

SEQ ID NO: 1111915 - RNA, 19 nt, Homo sapiens
  misc_RNA (1)...(19): siRNA sense strand
gggcaagaagcacagaauu

SEQ ID NO: 1111916 - RNA, 19 nt, Homo sapiens
  misc_RNA (1)...(19): siRNA sense strand
cuuccaacguuuauucuug

SEQ ID NO: 1111917 - RNA, 19 nt, Homo sapiens
  misc_RNA (1)...(19): siRNA sense strand
agacuuggaauggaucuua

SEQ ID NO: 1111918 - RNA, 19 nt, Homo sapiens
  misc_RNA (1)...(19): siRNA sense strand
caagagcguuaucaugcau

SEQ ID NO: 1111919 - RNA, 19 nt, Homo sapiens
  misc_RNA (1)...(19): siRNA sense strand
aagugaugcugaccuguuu

SEQ ID NO: 1111920 - RNA, 19 nt, Homo sapiens
  misc_RNA (1)...(19): siRNA sense strand
augcugaccuguuugauuc

SEQ ID NO: 1111921 - RNA, 19 nt, Homo sapiens
  misc_RNA (1)...(19): siRNA sense strand
aaugcuggguuuaugauga

SEQ ID NO: 1111922 - RNA, 19 nt, Homo sapiens
  misc_RNA (1)...(19): siRNA sense strand
gaaguuggaagaucagaac

SEQ ID NO: 1111923 - RNA, 19 nt, Homo sapiens
  misc_RNA (1)...(19): siRNA sense strand
agacuaugaugaacauuac

SEQ ID NO: 1111924 - RNA, 19 nt, Homo sapiens
  misc_RNA (1)...(19): siRNA sense strand
agagaacacagaacuaguu

SEQ ID NO: 1111925 - RNA, 19 nt, Homo sapiens
  misc_RNA (1)...(19): siRNA sense strand
ucccaaggaucgaaugguu

SEQ ID NO: 1111926 - RNA, 19 nt, Homo sapiens
  misc_RNA (1)...(19): siRNA sense strand
ggaccuguuugugagcauu

SEQ ID NO: 1111927 - RNA, 19 nt, Homo sapiens
  misc_RNA (1)...(19): siRNA sense strand
ugauucacaugaugacaga

SEQ ID NO: 1111928 - RNA, 19 nt, Homo sapiens
  misc_RNA (1)...(19): siRNA sense strand
ccaaauacagucccagagu

SEQ ID NO: 1111929 - RNA, 19 nt, Homo sapiens
  misc_RNA (1)...(19): siRNA sense strand
uaugaugaaccauuacuga

SEQ ID NO: 1111930 - RNA, 19 nt, Homo sapiens
  misc_RNA (1)...(19): siRNA sense strand
ucaagaagaaagugaggaa

SEQ ID NO: 1111931 - RNA, 19 nt, Homo sapiens
  misc_RNA (1)...(19): siRNA sense strand
gguuagacuuggaauggau

SEQ ID NO: 1111932 - RNA, 19 nt, Homo sapiens
  misc_RNA (1)...(19): siRNA sense strand
gcacauccggaccuguuug

SEQ ID NO: 1111933 - RNA, 19 nt, Homo sapiens
  misc_RNA (1)...(19): siRNA sense strand
aaaggaaggagaaggaaau

SEQ ID NO: 1111934 - RNA, 19 nt, Homo sapiens
  misc_RNA (1)...(19): siRNA sense strand
ugaagagaacacagaacua

SEQ ID NO: 1111935 - RNA, 19 nt, Homo sapiens
  misc_RNA (1)...(19): siRNA sense strand
ggaaguuggaagaucagaa

SEQ ID NO: 1111936 - RNA, 19 nt, Homo sapiens
  misc_RNA (1)...(19): siRNA sense strand
aagaucagaacgaguauga

SEQ ID NO: 1111937 - RNA, 19 nt, Homo sapiens
  misc_RNA (1)...(19): siRNA sense strand
ggaggagaaugcaauauua

SEQ ID NO: 1111938 - RNA, 19 nt, Homo sapiens
  misc_RNA (1)...(19): siRNA sense strand
ccaaagcgcuuaauagauu

SEQ ID NO: 1111939 - RNA, 19 nt, Homo sapiens
  misc_RNA (1)...(19): siRNA sense strand
ggaugucacuuucaacuua

SEQ ID NO: 1111940 - RNA, 19 nt, Homo sapiens
  misc_RNA (1)...(19): siRNA sense strand
gaacuugucuccaaauaca

SEQ ID NO: 1111941 - RNA, 19 nt, Homo sapiens
  misc_RNA (1)...(19): siRNA sense strand
gcucauaucuggaccaaau

SEQ ID NO: 1111942 - RNA, 19 nt, Homo sapiens
  misc_RNA (1)...(19): siRNA sense strand
ggaaggaugucacuuucaa

SEQ ID NO: 1111943 - RNA, 19 nt, Homo sapiens
  misc_RNA (1)...(19): siRNA sense strand
gcacaggcuugaagaaaga

SEQ ID NO: 1111944 - RNA, 19 nt, Homo sapiens
  misc_RNA (1)...(19): siRNA sense strand
gaaaggaucaguugccaaa

SEQ ID NO: 1111945 - RNA, 19 nt, Homo sapiens
  misc_RNA (1)...(19): siRNA sense strand
gagacaagguuauuucaug

SEQ ID NO: 1111946 - RNA, 19 nt, Homo sapiens
  misc_RNA (1)...(19): siRNA sense strand
agaaauguaugcagacuuu

SEQ ID NO: 1111947 - RNA, 19 nt, Homo sapiens
  misc_RNA (1)...(19): siRNA sense strand
gaacacagaacuaguuuca

SEQ ID NO: 1111948 - RNA, 19 nt, Homo sapiens
  misc_RNA (1)...(19): siRNA sense strand
ggaauggaauggugugaug

SEQ ID NO: 1111949 - RNA, 19 nt, Homo sapiens
  misc_RNA (1)...(19): siRNA sense strand
acacagaacuaguuucaga

SEQ ID NO: 1111950 - RNA, 19 nt, Homo sapiens
  misc_RNA (1)...(19): siRNA sense strand
gaaguugccuauaaucaag

SEQ ID NO: 1111951 - RNA, 19 nt, Homo sapiens
  misc_RNA (1)...(19): siRNA sense strand
caaauacagucccagaguu

SEQ ID NO: 1111952 - RNA, 19 nt, Homo sapiens
  misc_RNA (1)...(19): siRNA sense strand
ccaagaaguugccuauaau

SEQ ID NO: 1111953 - RNA, 19 nt, Homo sapiens
  misc_RNA (1)...(19): siRNA sense strand
caaaugauacugaagagaa

SEQ ID NO: 1111954 - RNA, 19 nt, Homo sapiens
  misc_RNA (1)...(19): siRNA sense strand
ggcaagaagcacagaauua

SEQ ID NO: 1111955 - RNA, 19 nt, Homo sapiens
  misc_RNA (1)...(19): siRNA sense strand
ggagaaugcuggguuuaug

SEQ ID NO: 1111956 - RNA, 19 nt, Homo sapiens
  misc_RNA (1)...(19): siRNA sense strand
ggaaggagaaggaaauuca

SEQ ID NO: 1111957 - RNA, 19 nt, Homo sapiens
  misc_RNA (1)...(19): siRNA sense strand
cacagcagcucgggaaaua

SEQ ID NO: 1111958 - RNA, 19 nt, Homo sapiens
  misc_RNA (1)...(19): siRNA sense strand
gaaauucagugggagacaa

SEQ ID NO: 1111959 - RNA, 19 nt, Homo sapiens
  misc_RNA (1)...(19): siRNA sense strand
cagaauuacugccgagauu

SEQ ID NO: 1111960 - RNA, 19 nt, Homo sapiens
  misc_RNA (1)...(19): siRNA sense strand
ggaaggaaaggaucaguug

SEQ ID NO: 1111961 - RNA, 19 nt, Homo sapiens
  misc_RNA (1)...(19): siRNA sense strand
ggaauggugugauguaugc

SEQ ID NO: 1111962 - RNA, 19 nt, Homo sapiens
  misc_RNA (1)...(19): siRNA sense strand
gaaggucuauccucacagu

SEQ ID NO: 1111963 - RNA, 19 nt, Homo sapiens
  misc_RNA (1)...(19): siRNA sense strand
gcacaagagcguuaucaug

SEQ ID NO: 1111964 - RNA, 19 nt, Homo sapiens
  misc_RNA (1)...(19): siRNA sense strand
gauggagaaugcuggguuu

SEQ ID NO: 1111965 - RNA, 19 nt, Homo sapiens
  misc_RNA (1)...(19): siRNA sense strand
gaugucacuuucaacuuaa

SEQ ID NO: 1111966 - RNA, 19 nt, Homo sapiens
  misc_RNA (1)...(19): siRNA sense strand
accaagaaguugccuauaa

SEQ ID NO: 1111967 - RNA, 19 nt, Homo sapiens
  misc_RNA (1)...(19): siRNA sense strand
gaagagaacacagaacuag

SEQ ID NO: 1111968 - RNA, 19 nt, Homo sapiens
  misc_RNA (1)...(19): siRNA sense strand
agacaagguuauuucauga

SEQ ID NO: 1111969 - RNA, 19 nt, Homo sapiens
  misc_RNA (1)...(19): siRNA sense strand
gugaacuugucuccaaaua

SEQ ID NO: 1111970 - RNA, 19 nt, Homo sapiens
  misc_RNA (1)...(19): siRNA sense strand
aauaucaucuuccacacua

SEQ ID NO: 1111971 - RNA, 19 nt, Homo sapiens
  misc_RNA (1)...(19): siRNA sense strand
gaggagaaugcaauauuaa

SEQ ID NO: 1111972 - RNA, 19 nt, Homo sapiens
  misc_RNA (1)...(19): siRNA sense strand
gaugcaauauaucaaccua

SEQ ID NO: 1111973 - RNA, 19 nt, Homo sapiens
  misc_RNA (1)...(19): siRNA sense strand
gaaaggaaggagaaggaaa

SEQ ID NO: 1111974 - RNA, 19 nt, Homo sapiens
  misc_RNA (1)...(19): siRNA sense strand
ucccguagaugcaauauau

SEQ ID NO: 1111975 - RNA, 19 nt, Homo sapiens
  misc_RNA (1)...(19): siRNA sense strand
gaucagaacgaguaugaau

SEQ ID NO: 1111976 - RNA, 19 nt, Homo sapiens
  misc_RNA (1)...(19): siRNA sense strand
gcagggcugugucucaugu

SEQ ID NO: 1111977 - RNA, 19 nt, Homo sapiens
  misc_RNA (1)...(19): siRNA sense strand
ugaggaaguuggaagauca

SEQ ID NO: 1111978 - RNA, 19 nt, Homo sapiens
  misc_RNA (1)...(19): siRNA sense strand
ggaauuaggaggagaaugc

SEQ ID NO: 1111979 - RNA, 19 nt, Homo sapiens
  misc_RNA (1)...(19): siRNA sense strand
caacguuuauucuugaaag

SEQ ID NO: 1111980 - RNA, 19 nt, Homo sapiens
  misc_RNA (1)...(19): siRNA sense strand
gagaaaggaaggagaagga

SEQ ID NO: 1111981 - RNA, 19 nt, Homo sapiens
  misc_RNA (1)...(19): siRNA sense strand
agaagaaagugaggaaguu

SEQ ID NO: 1111982 - RNA, 19 nt, Homo sapiens
  misc_RNA (1)...(19): siRNA sense strand
gcaagaagcacagaauuac

SEQ ID NO: 1111983 - RNA, 19 nt, Homo sapiens
  misc_RNA (1)...(19): siRNA sense strand
gagaacacagaacuaguuu

SEQ ID NO: 1111984 - RNA, 19 nt, Homo sapiens
  misc_RNA (1)...(19): siRNA sense strand
agaacuaguuucagaagga

SEQ ID NO: 1111985 - RNA, 19 nt, Homo sapiens
  misc_RNA (1)...(19): siRNA sense strand
gaugaaccauuacugaaac

SEQ ID NO: 1111986 - RNA, 19 nt, Homo sapiens
  misc_RNA (1)...(19): siRNA sense strand
gagaaugcuggguuuauga

SEQ ID NO: 1111987 - RNA, 19 nt, Homo sapiens
  misc_RNA (1)...(19): siRNA sense strand
gaacauuacauucucacau

SEQ ID NO: 1111988 - RNA, 19 nt, Homo sapiens
  misc_RNA (1)...(19): siRNA sense strand
gaugaacauuacauucuca

SEQ ID NO: 1111989 - RNA, 19 nt, Homo sapiens
  misc_RNA (1)...(19): siRNA sense strand
gagcagguuucccaucauc

SEQ ID NO: 1111990 - RNA, 19 nt, Homo sapiens
  misc_RNA (1)...(19): siRNA sense strand
ucacuuaauucuuccuugu

SEQ ID NO: 1111991 - RNA, 19 nt, Homo sapiens
  misc_RNA (1)...(19): siRNA sense strand
gaggagcacaagagcguua

SEQ ID NO: 1111992 - RNA, 19 nt, Homo sapiens
  misc_RNA (1)...(19): siRNA sense strand
cagcagugaagaugaauuu

SEQ ID NO: 1111993 - RNA, 19 nt, Homo sapiens
  misc_RNA (1)...(19): siRNA sense strand
gaagaaagugaggaaguug

SEQ ID NO: 1111994 - RNA, 19 nt, Homo sapiens
  misc_RNA (1)...(19): siRNA sense strand
gcagugaagaugaauuuua

SEQ ID NO: 1111995 - RNA, 19 nt, Homo sapiens
  misc_RNA (1)...(19): siRNA sense strand
gagcauuagugaccagaag

SEQ ID NO: 1111996 - RNA, 19 nt, Homo sapiens
  misc_RNA (1)...(19): siRNA sense strand
guaguucuuccaacguuua

SEQ ID NO: 1111997 - RNA, 19 nt, Homo sapiens
  misc_RNA (1)...(19): siRNA sense strand
uggaagaucagaacgagua

SEQ ID NO: 1111998 - RNA, 19 nt, Homo sapiens
  misc_RNA (1)...(19): siRNA sense strand
ggacaucaucagacuccua

SEQ ID NO: 1111999 - RNA, 19 nt, Homo sapiens
  misc_RNA (1)...(19): siRNA sense strand
caagguuauuucaugaaga

SEQ ID NO: 1112000 - RNA, 19 nt, Homo sapiens
  misc_RNA (1)...(19): siRNA sense strand
acacuaaacccuucuaugg

SEQ ID NO: 1112001 - RNA, 19 nt, Homo sapiens
  misc_RNA (1)...(19): siRNA sense strand
gauaccacagaaucacuua

SEQ ID NO: 1112002 - RNA, 19 nt, Homo sapiens
  misc_RNA (1)...(19): siRNA sense strand
gcagaagcccgagaaagga

SEQ ID NO: 1112003 - RNA, 19 nt, Homo sapiens
  misc_RNA (1)...(19): siRNA sense strand
gugcaaauaucaucuucca

SEQ ID NO: 1112004 - RNA, 19 nt, Homo sapiens
  misc_RNA (1)...(19): siRNA sense strand
acaauucaaugcucauauc

SEQ ID NO: 1112005 - RNA, 19 nt, Homo sapiens
  misc_RNA (1)...(19): siRNA sense strand
gaagauacaauucaaugcu

SEQ ID NO: 1112006 - RNA, 19 nt, Homo sapiens
  misc_RNA (1)...(19): siRNA sense strand
gaugcugaccuguuugauu

SEQ ID NO: 1112007 - RNA, 19 nt, Homo sapiens
  misc_RNA (1)...(19): siRNA sense strand
cacgugaacuugucuccaa

SEQ ID NO: 1112008 - RNA, 19 nt, Homo sapiens
  misc_RNA (1)...(19): siRNA sense strand
ucaugaagauggagaaugc

SEQ ID NO: 1112009 - RNA, 19 nt, Homo sapiens
  misc_RNA (1)...(19): siRNA sense strand
uuaugaugcugaugaauuc

SEQ ID NO: 1112010 - RNA, 19 nt, Homo sapiens
  misc_RNA (1)...(19): siRNA sense strand
caucucuugucgcagguua

SEQ ID NO: 1112011 - RNA, 19 nt, Homo sapiens
  misc_RNA (1)...(19): siRNA sense strand
gguaguucuuccaacguuu

SEQ ID NO: 1112012 - RNA, 19 nt, Homo sapiens
  misc_RNA (1)...(19): siRNA sense strand
caaagcgcuuaauagauuc

SEQ ID NO: 1112013 - RNA, 19 nt, Homo sapiens
  misc_RNA (1)...(19): siRNA sense strand
caagugaugcugaccuguu

SEQ ID NO: 1112014 - RNA, 19 nt, Homo sapiens
  misc_RNA (1)...(19): siRNA sense strand
ugaugaaccauuacugaaa

SEQ ID NO: 1112015 - RNA, 19 nt, Homo sapiens
  misc_RNA (1)...(19): siRNA sense strand
gggcaagaagcacagaauu

SEQ ID NO: 1112016 - RNA, 19 nt, Homo sapiens
  misc_RNA (1)...(19): siRNA sense strand
cuuccaacguuuauucuug

SEQ ID NO: 1112017 - RNA, 19 nt, Homo sapiens
  misc_RNA (1)...(19): siRNA sense strand
agacuuggaauggaucuua

SEQ ID NO: 1112018 - RNA, 19 nt, Homo sapiens
  misc_RNA (1)...(19): siRNA sense strand
caagagcguuaucaugcau

SEQ ID NO: 1112019 - RNA, 19 nt, Homo sapiens
  misc_RNA (1)...(19): siRNA sense strand
aagugaugcugaccuguuu

SEQ ID NO: 1112020 - RNA, 19 nt, Homo sapiens
  misc_RNA (1)...(19): siRNA sense strand
augcugaccuguuugauuc

SEQ ID NO: 1112021 - RNA, 19 nt, Homo sapiens
  misc_RNA (1)...(19): siRNA sense strand
aaugcuggguuuaugauga

SEQ ID NO: 1112022 - RNA, 19 nt, Homo sapiens
  misc_RNA (1)...(19): siRNA sense strand
gaaguuggaagaucagaac

SEQ ID NO: 1112023 - RNA, 19 nt, Homo sapiens
  misc_RNA (1)...(19): siRNA sense strand
agacuaugaugaacauuac

SEQ ID NO: 1112024 - RNA, 19 nt, Homo sapiens
  misc_RNA (1)...(19): siRNA sense strand
agagaacacagaacuaguu

SEQ ID NO: 1112025 - RNA, 19 nt, Homo sapiens
  misc_RNA (1)...(19): siRNA sense strand
ucccaaggaucgaaugguu

SEQ ID NO: 1112026 - RNA, 19 nt, Homo sapiens
  misc_RNA (1)...(19): siRNA sense strand
ggaccuguuugugagcauu

SEQ ID NO: 1112027 - RNA, 19 nt, Homo sapiens
  misc_RNA (1)...(19): siRNA sense strand
ugauucacaugaugacaga

SEQ ID NO: 1112028 - RNA, 19 nt, Homo sapiens
  misc_RNA (1)...(19): siRNA sense strand
ccaaauacagucccagagu

SEQ ID NO: 1112029 - RNA, 19 nt, Homo sapiens
  misc_RNA (1)...(19): siRNA sense strand
uaugaugaaccauuacuga

SEQ ID NO: 1112030 - RNA, 19 nt, Homo sapiens
  misc_RNA (1)...(19): siRNA sense strand
ucaagaagaaagugaggaa

SEQ ID NO: 1112031 - RNA, 19 nt, Homo sapiens
  misc_RNA (1)...(19): siRNA sense strand
gguuagacuuggaauggau

SEQ ID NO: 1112032 - RNA, 19 nt, Homo sapiens
  misc_RNA (1)...(19): siRNA sense strand
gcacauccggaccuguuug

SEQ ID NO: 1112033 - RNA, 19 nt, Homo sapiens
  misc_RNA (1)...(19): siRNA sense strand
aaaggaaggagaaggaaau

SEQ ID NO: 1112034 - RNA, 19 nt, Homo sapiens
  misc_RNA (1)...(19): siRNA sense strand
ugaagagaacacagaacua

SEQ ID NO: 1112035 - RNA, 19 nt, Homo sapiens
  misc_RNA (1)...(19): siRNA sense strand
ggaaguuggaagaucagaa

SEQ ID NO: 1112036 - RNA, 19 nt, Homo sapiens
  misc_RNA (1)...(19): siRNA sense strand
aagaucagaacgaguauga

SEQ ID NO: 1112037 - RNA, 19 nt, Homo sapiens
  misc_RNA (1)...(19): siRNA sense strand
ggaggagaaugcaauauua

SEQ ID NO: 1112038 - RNA, 19 nt, Homo sapiens
  misc_RNA (1)...(19): siRNA sense strand
ccaaagcgcuuaauagauu

SEQ ID NO: 1112039 - RNA, 19 nt, Homo sapiens
  misc_RNA (1)...(19): siRNA sense strand
ggaugucacuuucaacuua

SEQ ID NO: 1112040 - RNA, 19 nt, Homo sapiens
  misc_RNA (1)...(19): siRNA sense strand
caaagaagaugaacagaga

SEQ ID NO: 1112041 - RNA, 19 nt, Homo sapiens
  misc_RNA (1)...(19): siRNA sense strand
gaacuugucuccaaauaca

SEQ ID NO: 1112042 - RNA, 19 nt, Homo sapiens
  misc_RNA (1)...(19): siRNA sense strand
gcucauaucuggaccaaau

SEQ ID NO: 1112043 - RNA, 19 nt, Homo sapiens
  misc_RNA (1)...(19): siRNA sense strand
ggaaggaugucacuuucaa

SEQ ID NO: 1112044 - RNA, 19 nt, Homo sapiens
  misc_RNA (1)...(19): siRNA sense strand
gcacaggcuugaagaaaga

SEQ ID NO: 1112045 - RNA, 19 nt, Homo sapiens
  misc_RNA (1)...(19): siRNA sense strand
gaaaggaucaguugccaaa

SEQ ID NO: 1112046 - RNA, 19 nt, Homo sapiens
  misc_RNA (1)...(19): siRNA sense strand
gagacaagguuauuucaug

SEQ ID NO: 1112047 - RNA, 19 nt, Homo sapiens
  misc_RNA (1)...(19): siRNA sense strand
agaaauguaugcagacuuu

SEQ ID NO: 1112048 - RNA, 19 nt, Homo sapiens
  misc_RNA (1)...(19): siRNA sense strand
gaacacagaacuaguuuca

SEQ ID NO: 1112049 - RNA, 19 nt, Homo sapiens
  misc_RNA (1)...(19): siRNA sense strand
ggaauggaauggugugaug

SEQ ID NO: 1112050 - RNA, 19 nt, Homo sapiens
  misc_RNA (1)...(19): siRNA sense strand
acacagaacuaguuucaga

SEQ ID NO: 1112051 - RNA, 19 nt, Homo sapiens
  misc_RNA (1)...(19): siRNA sense strand
gaaguugccuauaaucaag

SEQ ID NO: 1112052 - RNA, 19 nt, Homo sapiens
  misc_RNA (1)...(19): siRNA sense strand
caaauacagucccagaguu

SEQ ID NO: 1112053 - RNA, 19 nt, Homo sapiens
  misc_RNA (1)...(19): siRNA sense strand
ccaagaaguugccuauaau

SEQ ID NO: 1112054 - RNA, 19 nt, Homo sapiens
  misc_RNA (1)...(19): siRNA sense strand
gacaacaaauagcauggua

SEQ ID NO: 1112055 - RNA, 19 nt, Homo sapiens
  misc_RNA (1)...(19): siRNA sense strand
caaaugauacugaagagaa

SEQ ID NO: 1112056 - RNA, 19 nt, Homo sapiens
  misc_RNA (1)...(19): siRNA sense strand
ggcaagaagcacagaauua

SEQ ID NO: 1112057 - RNA, 19 nt, Homo sapiens
  misc_RNA (1)...(19): siRNA sense strand
ggagaaugcuggguuuaug

SEQ ID NO: 1112058 - RNA, 19 nt, Homo sapiens
  misc_RNA (1)...(19): siRNA sense strand
caaauagcaugguagaauc

SEQ ID NO: 1112059 - RNA, 19 nt, Homo sapiens
  misc_RNA (1)...(19): siRNA sense strand
ggaaggagaaggaaauuca

SEQ ID NO: 1112060 - RNA, 19 nt, Homo sapiens
  misc_RNA (1)...(19): siRNA sense strand
gaagaugaacagagaaaga

SEQ ID NO: 1112061 - RNA, 19 nt, Homo sapiens
  misc_RNA (1)...(19): siRNA sense strand
cacagcagcucgggaaaua

SEQ ID NO: 1112062 - RNA, 19 nt, Homo sapiens
  misc_RNA (1)...(19): siRNA sense strand
gaaauucagugggagacaa

SEQ ID NO: 1112063 - RNA, 19 nt, Homo sapiens
  misc_RNA (1)...(19): siRNA sense strand
cagaauuacugccgagauu

SEQ ID NO: 1112064 - RNA, 19 nt, Homo sapiens
  misc_RNA (1)...(19): siRNA sense strand
ggaaggaaaggaucaguug

SEQ ID NO: 1112065 - RNA, 19 nt, Homo sapiens
  misc_RNA (1)...(19): siRNA sense strand
ggaauggugugauguaugc

SEQ ID NO: 1112066 - RNA, 19 nt, Homo sapiens
  misc_RNA (1)...(19): siRNA sense strand
gaaggucuauccucacagu

SEQ ID NO: 1112067 - RNA, 19 nt, Homo sapiens
  misc_RNA (1)...(19): siRNA sense strand
gcacaagagcguuaucaug

SEQ ID NO: 1112068 - RNA, 19 nt, Homo sapiens
  misc_RNA (1)...(19): siRNA sense strand
gauggagaaugcuggguuu

SEQ ID NO: 1112069 - RNA, 19 nt, Homo sapiens
  misc_RNA (1)...(19): siRNA sense strand
gaugucacuuucaacuuaa

SEQ ID NO: 1112070 - RNA, 19 nt, Homo sapiens
  misc_RNA (1)...(19): siRNA sense strand
gaacagagaaagaaaauug

SEQ ID NO: 1112071 - RNA, 19 nt, Homo sapiens
  misc_RNA (1)...(19): siRNA sense strand
ucaaagagacaacaaauag

SEQ ID NO: 1112072 - RNA, 19 nt, Homo sapiens
  misc_RNA (1)...(19): siRNA sense strand
accaagaaguugccuauaa

SEQ ID NO: 1112073 - RNA, 19 nt, Homo sapiens
  misc_RNA (1)...(19): siRNA sense strand
gaagagaacacagaacuag

SEQ ID NO: 1112074 - RNA, 19 nt, Homo sapiens
  misc_RNA (1)...(19): siRNA sense strand
agacaagguuauuucauga

SEQ ID NO: 1112075 - RNA, 19 nt, Homo sapiens
  misc_RNA (1)...(19): siRNA sense strand
gugaacuugucuccaaaua

SEQ ID NO: 1112076 - RNA, 19 nt, Homo sapiens
  misc_RNA (1)...(19): siRNA sense strand
aauaucaucuuccacacua

SEQ ID NO: 1112077 - RNA, 19 nt, Homo sapiens
  misc_RNA (1)...(19): siRNA sense strand
gaggagaaugcaauauuaa

SEQ ID NO: 1112078 - RNA, 19 nt, Homo sapiens
  misc_RNA (1)...(19): siRNA sense strand
gaugcaauauaucaaccua

SEQ ID NO: 1112079 - RNA, 19 nt, Homo sapiens
  misc_RNA (1)...(19): siRNA sense strand
gaaaggaaggagaaggaaa

SEQ ID NO: 1112080 - RNA, 19 nt, Homo sapiens
  misc_RNA (1)...(19): siRNA sense strand
ucccguagaugcaauauau

SEQ ID NO: 1112081 - RNA, 19 nt, Homo sapiens
  misc_RNA (1)...(19): siRNA sense strand
gaucagaacgaguaugaau

SEQ ID NO: 1112082 - RNA, 19 nt, Homo sapiens
  misc_RNA (1)...(19): siRNA sense strand
caacaaauagcaugguaga

SEQ ID NO: 1112083 - RNA, 19 nt, Homo sapiens
  misc_RNA (1)...(19): siRNA sense strand
gcagggcugugucucaugu

SEQ ID NO: 1112084 - RNA, 19 nt, Homo sapiens
  misc_RNA (1)...(19): siRNA sense strand
ugaggaaguuggaagauca

SEQ ID NO: 1112085 - RNA, 19 nt, Homo sapiens
  misc_RNA (1)...(19): siRNA sense strand
ggaauuaggaggagaaugc

SEQ ID NO: 1112086 - RNA, 19 nt, Homo sapiens
  misc_RNA (1)...(19): siRNA sense strand
caacguuuauucuugaaag

SEQ ID NO: 1112087 - RNA, 19 nt, Homo sapiens
  misc_RNA (1)...(19): siRNA sense strand
gagaaaggaaggagaagga

SEQ ID NO: 1112088 - RNA, 19 nt, Homo sapiens
  misc_RNA (1)...(19): siRNA sense strand
agaagaaagugaggaaguu

SEQ ID NO: 1112089 - RNA, 19 nt, Homo sapiens
  misc_RNA (1)...(19): siRNA sense strand
gcaagaagcacagaauuac

SEQ ID NO: 1112090 - RNA, 19 nt, Homo sapiens
  misc_RNA (1)...(19): siRNA sense strand
gagaacacagaacuaguuu

SEQ ID NO: 1112091 - RNA, 19 nt, Homo sapiens
  misc_RNA (1)...(19): siRNA sense strand
agaacuaguuucagaagga

SEQ ID NO: 1112092 - RNA, 19 nt, Homo sapiens
  misc_RNA (1)...(19): siRNA sense strand
gaugaaccauuacugaaac

SEQ ID NO: 1112093 - RNA, 19 nt, Homo sapiens
  misc_RNA (1)...(19): siRNA sense strand
gagaaugcuggguuuauga

SEQ ID NO: 1112094 - RNA, 19 nt, Homo sapiens
  misc_RNA (1)...(19): siRNA sense strand
gaacauuacauucucacau

SEQ ID NO: 1112095 - RNA, 19 nt, Homo sapiens
  misc_RNA (1)...(19): siRNA sense strand
gaugaacauuacauucuca

SEQ ID NO: 1112096 - RNA, 19 nt, Homo sapiens
  misc_RNA (1)...(19): siRNA sense strand
gagcagguuucccaucauc

SEQ ID NO: 1112097 - RNA, 19 nt, Homo sapiens
  misc_RNA (1)...(19): siRNA sense strand
ucacuuaauucuuccuugu

SEQ ID NO: 1112098 - RNA, 19 nt, Homo sapiens
  misc_RNA (1)...(19): siRNA sense strand
gaggagcacaagagcguua

SEQ ID NO: 1112099 - RNA, 19 nt, Homo sapiens
  misc_RNA (1)...(19): siRNA sense strand
cagcagugaagaugaauuu

SEQ ID NO: 1112100 - RNA, 19 nt, Homo sapiens
  misc_RNA (1)...(19): siRNA sense strand
gaagaaagugaggaaguug

SEQ ID NO: 1112101 - RNA, 19 nt, Homo sapiens
  misc_RNA (1)...(19): siRNA sense strand
gcagugaagaugaauuuua

SEQ ID NO: 1112102 - RNA, 19 nt, Homo sapiens
  misc_RNA (1)...(19): siRNA sense strand
gagcauuagugaccagaag

SEQ ID NO: 1112103 - RNA, 19 nt, Homo sapiens
  misc_RNA (1)...(19): siRNA sense strand
guaguucuuccaacguuua

SEQ ID NO: 1112104 - RNA, 19 nt, Homo sapiens
  misc_RNA (1)...(19): siRNA sense strand
uggaagaucagaacgagua

SEQ ID NO: 1112105 - RNA, 19 nt, Homo sapiens
  misc_RNA (1)...(19): siRNA sense strand
ggacaucaucagacuccua

SEQ ID NO: 1112106 - RNA, 19 nt, Homo sapiens
  misc_RNA (1)...(19): siRNA sense strand
caagguuauuucaugaaga

SEQ ID NO: 1112107 - RNA, 19 nt, Homo sapiens
  misc_RNA (1)...(19): siRNA sense strand
acacuaaacccuucuaugg

SEQ ID NO: 1112108 - RNA, 19 nt, Homo sapiens
  misc_RNA (1)...(19): siRNA sense strand
gauaccacagaaucacuua

SEQ ID NO: 1112109 - RNA, 19 nt, Homo sapiens
  misc_RNA (1)...(19): siRNA sense strand
gcagaagcccgagaaagga

SEQ ID NO: 1112110 - RNA, 19 nt, Homo sapiens
  misc_RNA (1)...(19): siRNA sense strand
acaaauagcaugguagaau

SEQ ID NO: 1112111 - RNA, 19 nt, Homo sapiens
  misc_RNA (1)...(19): siRNA sense strand
gugcaaauaucaucuucca

SEQ ID NO: 1112112 - RNA, 19 nt, Homo sapiens
  misc_RNA (1)...(19): siRNA sense strand
acaauucaaugcucauauc

SEQ ID NO: 1112113 - RNA, 19 nt, Homo sapiens
  misc_RNA (1)...(19): siRNA sense strand
gaagauacaauucaaugcu

SEQ ID NO: 1112114 - RNA, 19 nt, Homo sapiens
  misc_RNA (1)...(19): siRNA sense strand
gaugcugaccuguuugauu

SEQ ID NO: 1112115 - RNA, 19 nt, Homo sapiens
  misc_RNA (1)...(19): siRNA sense strand
cacgugaacuugucuccaa

SEQ ID NO: 1112116 - RNA, 19 nt, Homo sapiens
  misc_RNA (1)...(19): siRNA sense strand
ucaugaagauggagaaugc

SEQ ID NO: 1112117 - RNA, 19 nt, Homo sapiens
  misc_RNA (1)...(19): siRNA sense strand
uuaugaugcugaugaauuc

SEQ ID NO: 1112118 - RNA, 19 nt, Homo sapiens
  misc_RNA (1)...(19): siRNA sense strand
caucucuugucgcagguua

SEQ ID NO: 1112119 - RNA, 19 nt, Homo sapiens
  misc_RNA (1)...(19): siRNA sense strand
gguaguucuuccaacguuu

SEQ ID NO: 1112120 - RNA, 19 nt, Homo sapiens
  misc_RNA (1)...(19): siRNA sense strand
caaagcgcuuaauagauuc

SEQ ID NO: 1112121 - RNA, 19 nt, Homo sapiens
  misc_RNA (1)...(19): siRNA sense strand
caagugaugcugaccuguu

SEQ ID NO: 1112122 - RNA, 19 nt, Homo sapiens
  misc_RNA (1)...(19): siRNA sense strand
ugaugaaccauuacugaaa

SEQ ID NO: 1112123 - RNA, 19 nt, Homo sapiens
  misc_RNA (1)...(19): siRNA sense strand
gggcaagaagcacagaauu

SEQ ID NO: 1112124 - RNA, 19 nt, Homo sapiens
  misc_RNA (1)...(19): siRNA sense strand
cuuccaacguuuauucuug

SEQ ID NO: 1112125 - RNA, 19 nt, Homo sapiens
  misc_RNA (1)...(19): siRNA sense strand
agacuuggaauggaucuua

SEQ ID NO: 1112126 - RNA, 19 nt, Homo sapiens
  misc_RNA (1)...(19): siRNA sense strand
caagagcguuaucaugcau

SEQ ID NO: 1112127 - RNA, 19 nt, Homo sapiens
  misc_RNA (1)...(19): siRNA sense strand
aagugaugcugaccuguuu

SEQ ID NO: 1112128 - RNA, 19 nt, Homo sapiens
  misc_RNA (1)...(19): siRNA sense strand
augcugaccuguuugauuc

SEQ ID NO: 1112129 - RNA, 19 nt, Homo sapiens
  misc_RNA (1)...(19): siRNA sense strand
aaugcuggguuuaugauga

SEQ ID NO: 1112130 - RNA, 19 nt, Homo sapiens
  misc_RNA (1)...(19): siRNA sense strand
gaaguuggaagaucagaac

SEQ ID NO: 1112131 - RNA, 19 nt, Homo sapiens
  misc_RNA (1)...(19): siRNA sense strand
agacuaugaugaacauuac

SEQ ID NO: 1112132 - RNA, 19 nt, Homo sapiens
  misc_RNA (1)...(19): siRNA sense strand
agagaacacagaacuaguu

SEQ ID NO: 1112133 - RNA, 19 nt, Homo sapiens
  misc_RNA (1)...(19): siRNA sense strand
ucccaaggaucgaaugguu

SEQ ID NO: 1112134 - RNA, 19 nt, Homo sapiens
  misc_RNA (1)...(19): siRNA sense strand
ggaccuguuugugagcauu

SEQ ID NO: 1112135 - RNA, 19 nt, Homo sapiens
  misc_RNA (1)...(19): siRNA sense strand
ugauucacaugaugacaga

SEQ ID NO: 1112136 - RNA, 19 nt, Homo sapiens
  misc_RNA (1)...(19): siRNA sense strand
uaugaugaaccauuacuga

SEQ ID NO: 1112137 - RNA, 19 nt, Homo sapiens
  misc_RNA (1)...(19): siRNA sense strand
ggaggagaaugcaauauua

SEQ ID NO: 1112138 - RNA, 19 nt, Homo sapiens
  misc_RNA (1)...(19): siRNA sense strand
ccaaagcgcuuaauagauu

SEQ ID NO: 1112139 - RNA, 19 nt, Homo sapiens
  misc_RNA (1)...(19): siRNA sense strand
ggaugucacuuucaacuua

SEQ ID NO: 1112140 - RNA, 19 nt, Homo sapiens
  misc_RNA (1)...(19): siRNA sense strand
caaagaagaugaacagaga

SEQ ID NO: 1112141 - RNA, 19 nt, Homo sapiens
  misc_RNA (1)...(19): siRNA sense strand
gaacuugucuccaaauaca

SEQ ID NO: 1112142 - RNA, 19 nt, Homo sapiens
  misc_RNA (1)...(19): siRNA sense strand
gcucauaucuggaccaaau

SEQ ID NO: 1112143 - RNA, 19 nt, Homo sapiens
  misc_RNA (1)...(19): siRNA sense strand
ggaaggaugucacuuucaa

SEQ ID NO: 1112144 - RNA, 19 nt, Homo sapiens
  misc_RNA (1)...(19): siRNA sense strand
gcacaggcuugaagaaaga

SEQ ID NO: 1112145 - RNA, 19 nt, Homo sapiens
  misc_RNA (1)...(19): siRNA sense strand
gaaaggaucaguugccaaa

SEQ ID NO: 1112146 - RNA, 19 nt, Homo sapiens
  misc_RNA (1)...(19): siRNA sense strand
gagacaagguuauuucaug

SEQ ID NO: 1112147 - RNA, 19 nt, Homo sapiens
  misc_RNA (1)...(19): siRNA sense strand
agaaauguaugcagacuuu

SEQ ID NO: 1112148 - RNA, 19 nt, Homo sapiens
  misc_RNA (1)...(19): siRNA sense strand
gaacacagaacuaguuuca

SEQ ID NO: 1112149 - RNA, 19 nt, Homo sapiens
  misc_RNA (1)...(19): siRNA sense strand
ggaauggaauggugugaug

SEQ ID NO: 1112150 - RNA, 19 nt, Homo sapiens
  misc_RNA (1)...(19): siRNA sense strand
acacagaacuaguuucaga

SEQ ID NO: 1112151 - RNA, 19 nt, Homo sapiens
  misc_RNA (1)...(19): siRNA sense strand
gaaguugccuauaaucaag

SEQ ID NO: 1112152 - RNA, 19 nt, Homo sapiens
  misc_RNA (1)...(19): siRNA sense strand
caaauacagucccagaguu

SEQ ID NO: 1112153 - RNA, 19 nt, Homo sapiens
  misc_RNA (1)...(19): siRNA sense strand
ccaagaaguugccuauaau

SEQ ID NO: 1112154 - RNA, 19 nt, Homo sapiens
  misc_RNA (1)...(19): siRNA sense strand
gacaacaaauagcauggua

SEQ ID NO: 1112155 - RNA, 19 nt, Homo sapiens
  misc_RNA (1)...(19): siRNA sense strand
caaaugauacugaagagaa

SEQ ID NO: 1112156 - RNA, 19 nt, Homo sapiens
  misc_RNA (1)...(19): siRNA sense strand
ggcaagaagcacagaauua

SEQ ID NO: 1112157 - RNA, 19 nt, Homo sapiens
  misc_RNA (1)...(19): siRNA sense strand
ggagaaugcuggguuuaug

SEQ ID NO: 1112158 - RNA, 19 nt, Homo sapiens
  misc_RNA (1)...(19): siRNA sense strand
caaauagcaugguagaauc

SEQ ID NO: 1112159 - RNA, 19 nt, Homo sapiens
  misc_RNA (1)...(19): siRNA sense strand
ggaaggagaaggaaauuca

SEQ ID NO: 1112160 - RNA, 19 nt, Homo sapiens
  misc_RNA (1)...(19): siRNA sense strand
gaagaugaacagagaaaga

SEQ ID NO: 1112161 - RNA, 19 nt, Homo sapiens
  misc_RNA (1)...(19): siRNA sense strand
cacagcagcucgggaaaua

SEQ ID NO: 1112162 - RNA, 19 nt, Homo sapiens
  misc_RNA (1)...(19): siRNA sense strand
gaaauucagugggagacaa

SEQ ID NO: 1112163 - RNA, 19 nt, Homo sapiens
  misc_RNA (1)...(19): siRNA sense strand
cagaauuacugccgagauu

SEQ ID NO: 1112164 - RNA, 19 nt, Homo sapiens
  misc_RNA (1)...(19): siRNA sense strand
ggaaggaaaggaucaguug

SEQ ID NO: 1112165 - RNA, 19 nt, Homo sapiens
  misc_RNA (1)...(19): siRNA sense strand
ggaauggugugauguaugc

SEQ ID NO: 1112166 - RNA, 19 nt, Homo sapiens
  misc_RNA (1)...(19): siRNA sense strand
gaaggucuauccucacagu

SEQ ID NO: 1112167 - RNA, 19 nt, Homo sapiens
  misc_RNA (1)...(19): siRNA sense strand
gcacaagagcguuaucaug

SEQ ID NO: 1112168 - RNA, 19 nt, Homo sapiens
  misc_RNA (1)...(19): siRNA sense strand
gauggagaaugcuggguuu

SEQ ID NO: 1112169 - RNA, 19 nt, Homo sapiens
  misc_RNA (1)...(19): siRNA sense strand
gaugucacuuucaacuuaa

SEQ ID NO: 1112170 - RNA, 19 nt, Homo sapiens
  misc_RNA (1)...(19): siRNA sense strand
gaacagagaaagaaaauug

SEQ ID NO: 1112171 - RNA, 19 nt, Homo sapiens
  misc_RNA (1)...(19): siRNA sense strand
ucaaagagacaacaaauag

SEQ ID NO: 1112172 - RNA, 19 nt, Homo sapiens
  misc_RNA (1)...(19): siRNA sense strand
accaagaaguugccuauaa

SEQ ID NO: 1112173 - RNA, 19 nt, Homo sapiens
  misc_RNA (1)...(19): siRNA sense strand
gaagagaacacagaacuag

SEQ ID NO: 1112174 - RNA, 19 nt, Homo sapiens
  misc_RNA (1)...(19): siRNA sense strand
agacaagguuauuucauga

SEQ ID NO: 1112175 - RNA, 19 nt, Homo sapiens
  misc_RNA (1)...(19): siRNA sense strand
gugaacuugucuccaaaua

SEQ ID NO: 1112176 - RNA, 19 nt, Homo sapiens
  misc_RNA (1)...(19): siRNA sense strand
aauaucaucuuccacacua

SEQ ID NO: 1112177 - RNA, 19 nt, Homo sapiens
  misc_RNA (1)...(19): siRNA sense strand
gaggagaaugcaauauuaa

SEQ ID NO: 1112178 - RNA, 19 nt, Homo sapiens
  misc_RNA (1)...(19): siRNA sense strand
gaugcaauauaucaaccua

SEQ ID NO: 1112179 - RNA, 19 nt, Homo sapiens
  misc_RNA (1)...(19): siRNA sense strand
gaaaggaaggagaaggaaa

SEQ ID NO: 1112180 - RNA, 19 nt, Homo sapiens
  misc_RNA (1)...(19): siRNA sense strand
ucccguagaugcaauauau

SEQ ID NO: 1112181 - RNA, 19 nt, Homo sapiens
  misc_RNA (1)...(19): siRNA sense strand
gaucagaacgaguaugaau

SEQ ID NO: 1112182 - RNA, 19 nt, Homo sapiens
  misc_RNA (1)...(19): siRNA sense strand
caacaaauagcaugguaga

SEQ ID NO: 1112183 - RNA, 19 nt, Homo sapiens
  misc_RNA (1)...(19): siRNA sense strand
gcagggcugugucucaugu

SEQ ID NO: 1112184 - RNA, 19 nt, Homo sapiens
  misc_RNA (1)...(19): siRNA sense strand
ugaggaaguuggaagauca

SEQ ID NO: 1112185 - RNA, 19 nt, Homo sapiens
  misc_RNA (1)...(19): siRNA sense strand
ggaauuaggaggagaaugc

SEQ ID NO: 1112186 - RNA, 19 nt, Homo sapiens
  misc_RNA (1)...(19): siRNA sense strand
caacguuuauucuugaaag

SEQ ID NO: 1112187 - RNA, 19 nt, Homo sapiens
  misc_RNA (1)...(19): siRNA sense strand
gagaaaggaaggagaagga

SEQ ID NO: 1112188 - RNA, 19 nt, Homo sapiens
  misc_RNA (1)...(19): siRNA sense strand
agaagaaagugaggaaguu

SEQ ID NO: 1112189 - RNA, 19 nt, Homo sapiens
  misc_RNA (1)...(19): siRNA sense strand
gcaagaagcacagaauuac

SEQ ID NO: 1112190 - RNA, 19 nt, Homo sapiens
  misc_RNA (1)...(19): siRNA sense strand
gagaacacagaacuaguuu

SEQ ID NO: 1112191 - RNA, 19 nt, Homo sapiens
  misc_RNA (1)...(19): siRNA sense strand
agaacuaguuucagaagga

SEQ ID NO: 1112192 - RNA, 19 nt, Homo sapiens
  misc_RNA (1)...(19): siRNA sense strand
gaugaaccauuacugaaac

SEQ ID NO: 1112193 - RNA, 19 nt, Homo sapiens
  misc_RNA (1)...(19): siRNA sense strand
gagaaugcuggguuuauga

SEQ ID NO: 1112194 - RNA, 19 nt, Homo sapiens
  misc_RNA (1)...(19): siRNA sense strand
gaacauuacauucucacau

SEQ ID NO: 1112195 - RNA, 19 nt, Homo sapiens
  misc_RNA (1)...(19): siRNA sense strand
gaugaacauuacauucuca

SEQ ID NO: 1112196 - RNA, 19 nt, Homo sapiens
  misc_RNA (1)...(19): siRNA sense strand
gagcagguuucccaucauc

SEQ ID NO: 1112197 - RNA, 19 nt, Homo sapiens
  misc_RNA (1)...(19): siRNA sense strand
ucacuuaauucuuccuugu

SEQ ID NO: 1112198 - RNA, 19 nt, Homo sapiens
  misc_RNA (1)...(19): siRNA sense strand
gaggagcacaagagcguua

SEQ ID NO: 1112199 - RNA, 19 nt, Homo sapiens
  misc_RNA (1)...(19): siRNA sense strand
cagcagugaagaugaauuu

SEQ ID NO: 1112200 - RNA, 19 nt, Homo sapiens
  misc_RNA (1)...(19): siRNA sense strand
gaagaaagugaggaaguug

SEQ ID NO: 1112201 - RNA, 19 nt, Homo sapiens
  misc_RNA (1)...(19): siRNA sense strand
gcagugaagaugaauuuua

SEQ ID NO: 1112202 - RNA, 19 nt, Homo sapiens
  misc_RNA (1)...(19): siRNA sense strand
gagcauuagugaccagaag

SEQ ID NO: 1112203 - RNA, 19 nt, Homo sapiens
  misc_RNA (1)...(19): siRNA sense strand
guaguucuuccaacguuua

SEQ ID NO: 1112204 - RNA, 19 nt, Homo sapiens
  misc_RNA (1)...(19): siRNA sense strand
uggaagaucagaacgagua

SEQ ID NO: 1112205 - RNA, 19 nt, Homo sapiens
  misc_RNA (1)...(19): siRNA sense strand
ggacaucaucagacuccua

SEQ ID NO: 1112206 - RNA, 19 nt, Homo sapiens
  misc_RNA (1)...(19): siRNA sense strand
caagguuauuucaugaaga

SEQ ID NO: 1112207 - RNA, 19 nt, Homo sapiens
  misc_RNA (1)...(19): siRNA sense strand
acacuaaacccuucuaugg

SEQ ID NO: 1112208 - RNA, 19 nt, Homo sapiens
  misc_RNA (1)...(19): siRNA sense strand
gauaccacagaaucacuua

SEQ ID NO: 1112209 - RNA, 19 nt, Homo sapiens
  misc_RNA (1)...(19): siRNA sense strand
gcagaagcccgagaaagga

SEQ ID NO: 1112210 - RNA, 19 nt, Homo sapiens
  misc_RNA (1)...(19): siRNA sense strand
acaaauagcaugguagaau

SEQ ID NO: 1112211 - RNA, 19 nt, Homo sapiens
  misc_RNA (1)...(19): siRNA sense strand
gugcaaauaucaucuucca

SEQ ID NO: 1112212 - RNA, 19 nt, Homo sapiens
  misc_RNA (1)...(19): siRNA sense strand
acaauucaaugcucauauc

SEQ ID NO: 1112213 - RNA, 19 nt, Homo sapiens
  misc_RNA (1)...(19): siRNA sense strand
gaagauacaauucaaugcu

SEQ ID NO: 1112214 - RNA, 19 nt, Homo sapiens
  misc_RNA (1)...(19): siRNA sense strand
gaugcugaccuguuugauu

SEQ ID NO: 1112215 - RNA, 19 nt, Homo sapiens
  misc_RNA (1)...(19): siRNA sense strand
cacgugaacuugucuccaa

SEQ ID NO: 1112216 - RNA, 19 nt, Homo sapiens
  misc_RNA (1)...(19): siRNA sense strand
ucaugaagauggagaaugc

SEQ ID NO: 1112217 - RNA, 19 nt, Homo sapiens
  misc_RNA (1)...(19): siRNA sense strand
uuaugaugcugaugaauuc

SEQ ID NO: 1112218 - RNA, 19 nt, Homo sapiens
  misc_RNA (1)...(19): siRNA sense strand
caucucuugucgcagguua

SEQ ID NO: 1112219 - RNA, 19 nt, Homo sapiens
  misc_RNA (1)...(19): siRNA sense strand
gguaguucuuccaacguuu

SEQ ID NO: 1112220 - RNA, 19 nt, Homo sapiens
  misc_RNA (1)...(19): siRNA sense strand
caaagcgcuuaauagauuc

SEQ ID NO: 1112221 - RNA, 19 nt, Homo sapiens
  misc_RNA (1)...(19): siRNA sense strand
caagugaugcugaccuguu

SEQ ID NO: 1112222 - RNA, 19 nt, Homo sapiens
  misc_RNA (1)...(19): siRNA sense strand
ugaugaaccauuacugaaa

SEQ ID NO: 1112223 - RNA, 19 nt, Homo sapiens
  misc_RNA (1)...(19): siRNA sense strand
gggcaagaagcacagaauu

SEQ ID NO: 1112224 - RNA, 19 nt, Homo sapiens
  misc_RNA (1)...(19): siRNA sense strand
cuuccaacguuuauucuug

SEQ ID NO: 1112225 - RNA, 19 nt, Homo sapiens
  misc_RNA (1)...(19): siRNA sense strand
agacuuggaauggaucuua

SEQ ID NO: 1112226 - RNA, 19 nt, Homo sapiens
  misc_RNA (1)...(19): siRNA sense strand
caagagcguuaucaugcau

SEQ ID NO: 1112227 - RNA, 19 nt, Homo sapiens
  misc_RNA (1)...(19): siRNA sense strand
aagugaugcugaccuguuu

SEQ ID NO: 1112228 - RNA, 19 nt, Homo sapiens
  misc_RNA (1)...(19): siRNA sense strand
augcugaccuguuugauuc

SEQ ID NO: 1112229 - RNA, 19 nt, Homo sapiens
  misc_RNA (1)...(19): siRNA sense strand
aaugcuggguuuaugauga

SEQ ID NO: 1112230 - RNA, 19 nt, Homo sapiens
  misc_RNA (1)...(19): siRNA sense strand
gaaguuggaagaucagaac

SEQ ID NO: 1112231 - RNA, 19 nt, Homo sapiens
  misc_RNA (1)...(19): siRNA sense strand
agacuaugaugaacauuac

SEQ ID NO: 1112232 - RNA, 19 nt, Homo sapiens
  misc_RNA (1)...(19): siRNA sense strand
agagaacacagaacuaguu

SEQ ID NO: 1112233 - RNA, 19 nt, Homo sapiens
  misc_RNA (1)...(19): siRNA sense strand
ucccaaggaucgaaugguu

SEQ ID NO: 1112234 - RNA, 19 nt, Homo sapiens
  misc_RNA (1)...(19): siRNA sense strand
ggaccuguuugugagcauu

SEQ ID NO: 1112235 - RNA, 19 nt, Homo sapiens
  misc_RNA (1)...(19): siRNA sense strand
ugauucacaugaugacaga

SEQ ID NO: 1112236 - RNA, 19 nt, Homo sapiens
  misc_RNA (1)...(19): siRNA sense strand
uaugaugaaccauuacuga

SEQ ID NO: 1112237 - RNA, 19 nt, Homo sapiens
  misc_RNA (1)...(19): siRNA sense strand
ggaggagaaugcaauauua

SEQ ID NO: 1112238 - RNA, 19 nt, Homo sapiens
  misc_RNA (1)...(19): siRNA sense strand
ccaaagcgcuuaauagauu

SEQ ID NO: 1112239 - RNA, 19 nt, Homo sapiens
  misc_RNA (1)...(19): siRNA sense strand
ggaugucacuuucaacuua

SEQ ID NO: 1112240 - RNA, 19 nt, Homo sapiens
  misc_RNA (1)...(19): siRNA sense strand
caaagaagaugaacagaga

SEQ ID NO: 1112241 - RNA, 19 nt, Homo sapiens
  misc_RNA (1)...(19): siRNA sense strand
gaacuugucuccaaauaca

SEQ ID NO: 1112242 - RNA, 19 nt, Homo sapiens
  misc_RNA (1)...(19): siRNA sense strand
gcucauaucuggaccaaau

SEQ ID NO: 1112243 - RNA, 19 nt, Homo sapiens
  misc_RNA (1)...(19): siRNA sense strand
ggaaggaugucacuuucaa

SEQ ID NO: 1112244 - RNA, 19 nt, Homo sapiens
  misc_RNA (1)...(19): siRNA sense strand
gcacaggcuugaagaaaga

SEQ ID NO: 1112245 - RNA, 19 nt, Homo sapiens
  misc_RNA (1)...(19): siRNA sense strand
gaaaggaucaguugccaaa

SEQ ID NO: 1112246 - RNA, 19 nt, Homo sapiens
  misc_RNA (1)...(19): siRNA sense strand
gagacaagguuauuucaug

SEQ ID NO: 1112247 - RNA, 19 nt, Homo sapiens
  misc_RNA (1)...(19): siRNA sense strand
agaaauguaugcagacuuu

SEQ ID NO: 1112248 - RNA, 19 nt, Homo sapiens
  misc_RNA (1)...(19): siRNA sense strand
gaacacagaacuaguuuca

SEQ ID NO: 1112249 - RNA, 19 nt, Homo sapiens
  misc_RNA (1)...(19): siRNA sense strand
ggaauggaauggugugaug

SEQ ID NO: 1112250 - RNA, 19 nt, Homo sapiens
  misc_RNA (1)...(19): siRNA sense strand
acacagaacuaguuucaga

SEQ ID NO: 1112251 - RNA, 19 nt, Homo sapiens
  misc_RNA (1)...(19): siRNA sense strand
gaaguugccuauaaucaag

SEQ ID NO: 1112252 - RNA, 19 nt, Homo sapiens
  misc_RNA (1)...(19): siRNA sense strand
caaauacagucccagaguu

SEQ ID NO: 1112253 - RNA, 19 nt, Homo sapiens
  misc_RNA (1)...(19): siRNA sense strand
ccaagaaguugccuauaau

SEQ ID NO: 1112254 - RNA, 19 nt, Homo sapiens
  misc_RNA (1)...(19): siRNA sense strand
gacaacaaauagcauggua

SEQ ID NO: 1112255 - RNA, 19 nt, Homo sapiens
  misc_RNA (1)...(19): siRNA sense strand
caaaugauacugaagagaa

SEQ ID NO: 1112256 - RNA, 19 nt, Homo sapiens
  misc_RNA (1)...(19): siRNA sense strand
ggcaagaagcacagaauua

SEQ ID NO: 1112257 - RNA, 19 nt, Homo sapiens
  misc_RNA (1)...(19): siRNA sense strand
ggagaaugcuggguuuaug

SEQ ID NO: 1112258 - RNA, 19 nt, Homo sapiens
  misc_RNA (1)...(19): siRNA sense strand
caaauagcaugguagaauc

SEQ ID NO: 1112259 - RNA, 19 nt, Homo sapiens
  misc_RNA (1)...(19): siRNA sense strand
ggaaggagaaggaaauuca

SEQ ID NO: 1112260 - RNA, 19 nt, Homo sapiens
  misc_RNA (1)...(19): siRNA sense strand
gaagaugaacagagaaaga

SEQ ID NO: 1112261 - RNA, 19 nt, Homo sapiens
  misc_RNA (1)...(19): siRNA sense strand
cacagcagcucgggaaaua

SEQ ID NO: 1112262 - RNA, 19 nt, Homo sapiens
  misc_RNA (1)...(19): siRNA sense strand
gaaauucagugggagacaa

SEQ ID NO: 1112263 - RNA, 19 nt, Homo sapiens
  misc_RNA (1)...(19): siRNA sense strand
cagaauuacugccgagauu

SEQ ID NO: 1112264 - RNA, 19 nt, Homo sapiens
  misc_RNA (1)...(19): siRNA sense strand
ggaaggaaaggaucaguug

SEQ ID NO: 1112265 - RNA, 19 nt, Homo sapiens
  misc_RNA (1)...(19): siRNA sense strand
ggaauggugugauguaugc

SEQ ID NO: 1112266 - RNA, 19 nt, Homo sapiens
  misc_RNA (1)...(19): siRNA sense strand
gaaggucuauccucacagu

SEQ ID NO: 1112267 - RNA, 19 nt, Homo sapiens
  misc_RNA (1)...(19): siRNA sense strand
gcacaagagcguuaucaug

SEQ ID NO: 1112268 - RNA, 19 nt, Homo sapiens
  misc_RNA (1)...(19): siRNA sense strand
gauggagaaugcuggguuu

SEQ ID NO: 1112269 - RNA, 19 nt, Homo sapiens
  misc_RNA (1)...(19): siRNA sense strand
gaugucacuuucaacuuaa

SEQ ID NO: 1112270 - RNA, 19 nt, Homo sapiens
  misc_RNA (1)...(19): siRNA sense strand
gaacagagaaagaaaauug

SEQ ID NO: 1112271 - RNA, 19 nt, Homo sapiens
  misc_RNA (1)...(19): siRNA sense strand
ucaaagagacaacaaauag

SEQ ID NO: 1112272 - RNA, 19 nt, Homo sapiens
  misc_RNA (1)...(19): siRNA sense strand
accaagaaguugccuauaa

SEQ ID NO: 1112273 - RNA, 19 nt, Homo sapiens
  misc_RNA (1)...(19): siRNA sense strand
gaagagaacacagaacuag

SEQ ID NO: 1112274 - RNA, 19 nt, Homo sapiens
  misc_RNA (1)...(19): siRNA sense strand
agacaagguuauuucauga

SEQ ID NO: 1112275 - RNA, 19 nt, Homo sapiens
  misc_RNA (1)...(19): siRNA sense strand
gugaacuugucuccaaaua

SEQ ID NO: 1112276 - RNA, 19 nt, Homo sapiens
  misc_RNA (1)...(19): siRNA sense strand
aauaucaucuuccacacua

SEQ ID NO: 1112277 - RNA, 19 nt, Homo sapiens
  misc_RNA (1)...(19): siRNA sense strand
gaggagaaugcaauauuaa

SEQ ID NO: 1112278 - RNA, 19 nt, Homo sapiens
  misc_RNA (1)...(19): siRNA sense strand
gaugcaauauaucaaccua

SEQ ID NO: 1112279 - RNA, 19 nt, Homo sapiens
  misc_RNA (1)...(19): siRNA sense strand
gaaaggaaggagaaggaaa

SEQ ID NO: 1112280 - RNA, 19 nt, Homo sapiens
  misc_RNA (1)...(19): siRNA sense strand
ucccguagaugcaauauau

SEQ ID NO: 1112281 - RNA, 19 nt, Homo sapiens
  misc_RNA (1)...(19): siRNA sense strand
gaucagaacgaguaugaau

SEQ ID NO: 1112282 - RNA, 19 nt, Homo sapiens
  misc_RNA (1)...(19): siRNA sense strand
caacaaauagcaugguaga

SEQ ID NO: 1112283 - RNA, 19 nt, Homo sapiens
  misc_RNA (1)...(19): siRNA sense strand
gcagggcugugucucaugu

SEQ ID NO: 1112284 - RNA, 19 nt, Homo sapiens
  misc_RNA (1)...(19): siRNA sense strand
ugaggaaguuggaagauca

SEQ ID NO: 1112285 - RNA, 19 nt, Homo sapiens
  misc_RNA (1)...(19): siRNA sense strand
ggaauuaggaggagaaugc

SEQ ID NO: 1112286 - RNA, 19 nt, Homo sapiens
  misc_RNA (1)...(19): siRNA sense strand
caacguuuauucuugaaag

SEQ ID NO: 1112287 - RNA, 19 nt, Homo sapiens
  misc_RNA (1)...(19): siRNA sense strand
gagaaaggaaggagaagga

SEQ ID NO: 1112288 - RNA, 19 nt, Homo sapiens
  misc_RNA (1)...(19): siRNA sense strand
agaagaaagugaggaaguu

SEQ ID NO: 1112289 - RNA, 19 nt, Homo sapiens
  misc_RNA (1)...(19): siRNA sense strand
gcaagaagcacagaauuac

SEQ ID NO: 1112290 - RNA, 19 nt, Homo sapiens
  misc_RNA (1)...(19): siRNA sense strand
gagaacacagaacuaguuu

SEQ ID NO: 1112291 - RNA, 19 nt, Homo sapiens
  misc_RNA (1)...(19): siRNA sense strand
agaacuaguuucagaagga

SEQ ID NO: 1112292 - RNA, 19 nt, Homo sapiens
  misc_RNA (1)...(19): siRNA sense strand
gaugaaccauuacugaaac

SEQ ID NO: 1112293 - RNA, 19 nt, Homo sapiens
  misc_RNA (1)...(19): siRNA sense strand
gagaaugcuggguuuauga

SEQ ID NO: 1112294 - RNA, 19 nt, Homo sapiens
  misc_RNA (1)...(19): siRNA sense strand
gaacauuacauucucacau

SEQ ID NO: 1112295 - RNA, 19 nt, Homo sapiens
  misc_RNA (1)...(19): siRNA sense strand
gaugaacauuacauucuca

SEQ ID NO: 1112296 - RNA, 19 nt, Homo sapiens
  misc_RNA (1)...(19): siRNA sense strand
gagcagguuucccaucauc

SEQ ID NO: 1112297 - RNA, 19 nt, Homo sapiens
  misc_RNA (1)...(19): siRNA sense strand
ucacuuaauucuuccuugu

SEQ ID NO: 1112298 - RNA, 19 nt, Homo sapiens
  misc_RNA (1)...(19): siRNA sense strand
gaggagcacaagagcguua

SEQ ID NO: 1112299 - RNA, 19 nt, Homo sapiens
  misc_RNA (1)...(19): siRNA sense strand
cagcagugaagaugaauuu

SEQ ID NO: 1112300 - RNA, 19 nt, Homo sapiens
  misc_RNA (1)...(19): siRNA sense strand
gaagaaagugaggaaguug

SEQ ID NO: 1112301 - RNA, 19 nt, Homo sapiens
  misc_RNA (1)...(19): siRNA sense strand
gcagugaagaugaauuuua

SEQ ID NO: 1112302 - RNA, 19 nt, Homo sapiens
  misc_RNA (1)...(19): siRNA sense strand
gagcauuagugaccagaag

SEQ ID NO: 1112303 - RNA, 19 nt, Homo sapiens
  misc_RNA (1)...(19): siRNA sense strand
guaguucuuccaacguuua

SEQ ID NO: 1112304 - RNA, 19 nt, Homo sapiens
  misc_RNA (1)...(19): siRNA sense strand
uggaagaucagaacgagua

SEQ ID NO: 1112305 - RNA, 19 nt, Homo sapiens
  misc_RNA (1)...(19): siRNA sense strand
ggacaucaucagacuccua

SEQ ID NO: 1112306 - RNA, 19 nt, Homo sapiens
  misc_RNA (1)...(19): siRNA sense strand
caagguuauuucaugaaga

SEQ ID NO: 1112307 - RNA, 19 nt, Homo sapiens
  misc_RNA (1)...(19): siRNA sense strand
acacuaaacccuucuaugg

SEQ ID NO: 1112308 - RNA, 19 nt, Homo sapiens
  misc_RNA (1)...(19): siRNA sense strand
gauaccacagaaucacuua

SEQ ID NO: 1112309 - RNA, 19 nt, Homo sapiens
  misc_RNA (1)...(19): siRNA sense strand
gcagaagcccgagaaagga

SEQ ID NO: 1112310 - RNA, 19 nt, Homo sapiens
  misc_RNA (1)...(19): siRNA sense strand
acaaauagcaugguagaau

SEQ ID NO: 1112311 - RNA, 19 nt, Homo sapiens
  misc_RNA (1)...(19): siRNA sense strand
gugcaaauaucaucuucca

SEQ ID NO: 1112312 - RNA, 19 nt, Homo sapiens
  misc_RNA (1)...(19): siRNA sense strand
acaauucaaugcucauauc

SEQ ID NO: 1112313 - RNA, 19 nt, Homo sapiens
  misc_RNA (1)...(19): siRNA sense strand
gaagauacaauucaaugcu

SEQ ID NO: 1112314 - RNA, 19 nt, Homo sapiens
  misc_RNA (1)...(19): siRNA sense strand
gaugcugaccuguuugauu

SEQ ID NO: 1112315 - RNA, 19 nt, Homo sapiens
  misc_RNA (1)...(19): siRNA sense strand
cacgugaacuugucuccaa

SEQ ID NO: 1112316 - RNA, 19 nt, Homo sapiens
  misc_RNA (1)...(19): siRNA sense strand
ucaugaagauggagaaugc

SEQ ID NO: 1112317 - RNA, 19 nt, Homo sapiens
  misc_RNA (1)...(19): siRNA sense strand
uuaugaugcugaugaauuc

SEQ ID NO: 1112318 - RNA, 19 nt, Homo sapiens
  misc_RNA (1)...(19): siRNA sense strand
caucucuugucgcagguua

SEQ ID NO: 1112319 - RNA, 19 nt, Homo sapiens
  misc_RNA (1)...(19): siRNA sense strand
gguaguucuuccaacguuu

SEQ ID NO: 1112320 - RNA, 19 nt, Homo sapiens
  misc_RNA (1)...(19): siRNA sense strand
caaagcgcuuaauagauuc

SEQ ID NO: 1112321 - RNA, 19 nt, Homo sapiens
  misc_RNA (1)...(19): siRNA sense strand
caagugaugcugaccuguu

SEQ ID NO: 1112322 - RNA, 19 nt, Homo sapiens
  misc_RNA (1)...(19): siRNA sense strand
ugaugaaccauuacugaaa

SEQ ID NO: 1112323 - RNA, 19 nt, Homo sapiens
  misc_RNA (1)...(19): siRNA sense strand
gggcaagaagcacagaauu

SEQ ID NO: 1112324 - RNA, 19 nt, Homo sapiens
  misc_RNA (1)...(19): siRNA sense strand
cuuccaacguuuauucuug

SEQ ID NO: 1112325 - RNA, 19 nt, Homo sapiens
  misc_RNA (1)...(19): siRNA sense strand
agacuuggaauggaucuua

SEQ ID NO: 1112326 - RNA, 19 nt, Homo sapiens
  misc_RNA (1)...(19): siRNA sense strand
caagagcguuaucaugcau

SEQ ID NO: 1112327 - RNA, 19 nt, Homo sapiens
  misc_RNA (1)...(19): siRNA sense strand
aagugaugcugaccuguuu

SEQ ID NO: 1112328 - RNA, 19 nt, Homo sapiens
  misc_RNA (1)...(19): siRNA sense strand
augcugaccuguuugauuc

SEQ ID NO: 1112329 - RNA, 19 nt, Homo sapiens
  misc_RNA (1)...(19): siRNA sense strand
aaugcuggguuuaugauga

SEQ ID NO: 1112330 - RNA, 19 nt, Homo sapiens
  misc_RNA (1)...(19): siRNA sense strand
gaaguuggaagaucagaac

SEQ ID NO: 1112331 - RNA, 19 nt, Homo sapiens
  misc_RNA (1)...(19): siRNA sense strand
agacuaugaugaacauuac

SEQ ID NO: 1112332 - RNA, 19 nt, Homo sapiens
  misc_RNA (1)...(19): siRNA sense strand
agagaacacagaacuaguu

SEQ ID NO: 1112333 - RNA, 19 nt, Homo sapiens
  misc_RNA (1)...(19): siRNA sense strand
ucccaaggaucgaaugguu

SEQ ID NO: 1112334 - RNA, 19 nt, Homo sapiens
  misc_RNA (1)...(19): siRNA sense strand
ggaccuguuugugagcauu

SEQ ID NO: 1112335 - RNA, 19 nt, Homo sapiens
  misc_RNA (1)...(19): siRNA sense strand
ugauucacaugaugacaga

SEQ ID NO: 1112336 - RNA, 19 nt, Homo sapiens
  misc_RNA (1)...(19): siRNA sense strand
uaugaugaaccauuacuga

SEQ ID NO: 1112337 - RNA, 19 nt, Homo sapiens
  misc_RNA (1)...(19): siRNA sense strand
gaauuugccuguucuagaa

SEQ ID NO: 1112338 - RNA, 19 nt, Homo sapiens
  misc_RNA (1)...(19): siRNA sense strand
agaagacacugaagaaauu

SEQ ID NO: 1112339 - RNA, 19 nt, Homo sapiens
  misc_RNA (1)...(19): siRNA sense strand
gaaguaggcagaacugaaa

SEQ ID NO: 1112340 - RNA, 19 nt, Homo sapiens
  misc_RNA (1)...(19): siRNA sense strand
gccaccagaucuacaguua

SEQ ID NO: 1112341 - RNA, 19 nt, Homo sapiens
  misc_RNA (1)...(19): siRNA sense strand
acacagaacuuccugauac

SEQ ID NO: 1112342 - RNA, 19 nt, Homo sapiens
  misc_RNA (1)...(19): siRNA sense strand
gugcugaaacuuagaaaua

SEQ ID NO: 1112343 - RNA, 19 nt, Homo sapiens
  misc_RNA (1)...(19): siRNA sense strand
uacagaagauuacagauga

SEQ ID NO: 1112344 - RNA, 19 nt, Homo sapiens
  misc_RNA (1)...(19): siRNA sense strand
ugagauguuucuucccuua

SEQ ID NO: 1112345 - RNA, 19 nt, Homo sapiens
  misc_RNA (1)...(19): siRNA sense strand
gagaagacacugaagaaau

SEQ ID NO: 1112346 - RNA, 19 nt, Homo sapiens
  misc_RNA (1)...(19): siRNA sense strand
caaauucagaugagaguaa

SEQ ID NO: 1112347 - RNA, 19 nt, Homo sapiens
  misc_RNA (1)...(19): siRNA sense strand
gaacaaccucuccagauca

SEQ ID NO: 1112348 - RNA, 19 nt, Homo sapiens
  misc_RNA (1)...(19): siRNA sense strand
ggacuaaaauguagcaguu

SEQ ID NO: 1112349 - RNA, 19 nt, Homo sapiens
  misc_RNA (1)...(19): siRNA sense strand
cgaacaaccucuccagauc

SEQ ID NO: 1112350 - RNA, 19 nt, Homo sapiens
  misc_RNA (1)...(19): siRNA sense strand
gaaauuucuugucgaacau

SEQ ID NO: 1112351 - RNA, 19 nt, Homo sapiens
  misc_RNA (1)...(19): siRNA sense strand
gaagauuacagaugaagug

SEQ ID NO: 1112352 - RNA, 19 nt, Homo sapiens
  misc_RNA (1)...(19): siRNA sense strand
gaacaucugaaaggacuaa

SEQ ID NO: 1112353 - RNA, 19 nt, Homo sapiens
  misc_RNA (1)...(19): siRNA sense strand
ugucgaacaucaaguagaa

SEQ ID NO: 1112354 - RNA, 19 nt, Homo sapiens
  misc_RNA (1)...(19): siRNA sense strand
ggacacccuuguugaaucu

SEQ ID NO: 1112355 - RNA, 19 nt, Homo sapiens
  misc_RNA (1)...(19): siRNA sense strand
gggcauccacugucaugua

SEQ ID NO: 1112356 - RNA, 19 nt, Homo sapiens
  misc_RNA (1)...(19): siRNA sense strand
caucuucucuucaacuaca

SEQ ID NO: 1112357 - RNA, 19 nt, Homo sapiens
  misc_RNA (1)...(19): siRNA sense strand
gaagacacugaagaaauuu

SEQ ID NO: 1112358 - RNA, 19 nt, Homo sapiens
  misc_RNA (1)...(19): siRNA sense strand
aaucauagcugagagacau

SEQ ID NO: 1112359 - RNA, 19 nt, Homo sapiens
  misc_RNA (1)...(19): siRNA sense strand
cagaugaagugcugaaacu

SEQ ID NO: 1112360 - RNA, 19 nt, Homo sapiens
  misc_RNA (1)...(19): siRNA sense strand
guagagaagacacugaaga

SEQ ID NO: 1112361 - RNA, 19 nt, Homo sapiens
  misc_RNA (1)...(19): siRNA sense strand
gaaaauaccaucuucucuu

SEQ ID NO: 1112362 - RNA, 19 nt, Homo sapiens
  misc_RNA (1)...(19): siRNA sense strand
guguauaccugugugagaa

SEQ ID NO: 1112363 - RNA, 19 nt, Homo sapiens
  misc_RNA (1)...(19): siRNA sense strand
uagagaagacacugaagaa

SEQ ID NO: 1112364 - RNA, 19 nt, Homo sapiens
  misc_RNA (1)...(19): siRNA sense strand
ccagaucaaauucagauga

SEQ ID NO: 1112365 - RNA, 19 nt, Homo sapiens
  misc_RNA (1)...(19): siRNA sense strand
uaagaucacguacuguuuc

SEQ ID NO: 1112366 - RNA, 19 nt, Homo sapiens
  misc_RNA (1)...(19): siRNA sense strand
agaacuuccugauacagaa

SEQ ID NO: 1112367 - RNA, 19 nt, Homo sapiens
  misc_RNA (1)...(19): siRNA sense strand
ucuacuaauucuucucuga

SEQ ID NO: 1112368 - RNA, 19 nt, Homo sapiens
  misc_RNA (1)...(19): siRNA sense strand
cauguaccauccagaagga

SEQ ID NO: 1112369 - RNA, 19 nt, Homo sapiens
  misc_RNA (1)...(19): siRNA sense strand
ugaauuugccuguucuaga

SEQ ID NO: 1112370 - RNA, 19 nt, Homo sapiens
  misc_RNA (1)...(19): siRNA sense strand
ugugcaaacucuagugaga

SEQ ID NO: 1112371 - RNA, 19 nt, Homo sapiens
  misc_RNA (1)...(19): siRNA sense strand
uuagacuacuuacaggaaa

SEQ ID NO: 1112372 - RNA, 19 nt, Homo sapiens
  misc_RNA (1)...(19): siRNA sense strand
ggucuggacacccuuguug

SEQ ID NO: 1112373 - RNA, 19 nt, Homo sapiens
  misc_RNA (1)...(19): siRNA sense strand
aauaccaucuucucuucaa

SEQ ID NO: 1112374 - RNA, 19 nt, Homo sapiens
  misc_RNA (1)...(19): siRNA sense strand
caaccucuccagaucaaau

SEQ ID NO: 1112375 - RNA, 19 nt, Homo sapiens
  misc_RNA (1)...(19): siRNA sense strand
ucucugaauuugccuguuc

SEQ ID NO: 1112376 - RNA, 19 nt, Homo sapiens
  misc_RNA (1)...(19): siRNA sense strand
cagaucaaauucagaugag

SEQ ID NO: 1112377 - RNA, 19 nt, Homo sapiens
  misc_RNA (1)...(19): siRNA sense strand
ugaaaggacuaaaauguag

SEQ ID NO: 1112378 - RNA, 19 nt, Homo sapiens
  misc_RNA (1)...(19): siRNA sense strand
gagauguuucuucccuuaa

SEQ ID NO: 1112379 - RNA, 19 nt, Homo sapiens
  misc_RNA (1)...(19): siRNA sense strand
acagaagauuacagaugaa

SEQ ID NO: 1112380 - RNA, 19 nt, Homo sapiens
  misc_RNA (1)...(19): siRNA sense strand
ugcaaacucuagugagaug

SEQ ID NO: 1112381 - RNA, 19 nt, Homo sapiens
  misc_RNA (1)...(19): siRNA sense strand
gaacugaaaauaccaucuu

SEQ ID NO: 1112382 - RNA, 19 nt, Homo sapiens
  misc_RNA (1)...(19): siRNA sense strand
caaacucuagugagauguu

SEQ ID NO: 1112383 - RNA, 19 nt, Homo sapiens
  misc_RNA (1)...(19): siRNA sense strand
cacagaacuuccugauaca

SEQ ID NO: 1112384 - RNA, 19 nt, Homo sapiens
  misc_RNA (1)...(19): siRNA sense strand
ggcauccacugucauguac

SEQ ID NO: 1112385 - RNA, 19 nt, Homo sapiens
  misc_RNA (1)...(19): siRNA sense strand
auacagaagauuacagaug

SEQ ID NO: 1112386 - RNA, 19 nt, Homo sapiens
  misc_RNA (1)...(19): siRNA sense strand
guuagacuacuuacaggaa

SEQ ID NO: 1112387 - RNA, 19 nt, Homo sapiens
  misc_RNA (1)...(19): siRNA sense strand
aaaauaccaucuucucuuc

SEQ ID NO: 1112388 - RNA, 19 nt, Homo sapiens
  misc_RNA (1)...(19): siRNA sense strand
agaaguaggcagaacugaa

SEQ ID NO: 1112389 - RNA, 19 nt, Homo sapiens
  misc_RNA (1)...(19): siRNA sense strand
cuacuaauucuucucugaa

SEQ ID NO: 1112390 - RNA, 19 nt, Homo sapiens
  misc_RNA (1)...(19): siRNA sense strand
ugauacagaagauuacaga

SEQ ID NO: 1112391 - RNA, 19 nt, Homo sapiens
  misc_RNA (1)...(19): siRNA sense strand
aaacacagaacuuccugau

SEQ ID NO: 1112392 - RNA, 19 nt, Homo sapiens
  misc_RNA (1)...(19): siRNA sense strand
uuaagaucacguacuguuu

SEQ ID NO: 1112393 - RNA, 19 nt, Homo sapiens
  misc_RNA (1)...(19): siRNA sense strand
gagggcauccacugucaug

SEQ ID NO: 1112394 - RNA, 19 nt, Homo sapiens
  misc_RNA (1)...(19): siRNA sense strand
cagaacuuccugauacaga

SEQ ID NO: 1112395 - RNA, 19 nt, Homo sapiens
  misc_RNA (1)...(19): siRNA sense strand
aacaaccucuccagaucaa

SEQ ID NO: 1112396 - RNA, 19 nt, Homo sapiens
  misc_RNA (1)...(19): siRNA sense strand
acuagaacaucugaaagga

SEQ ID NO: 1112397 - RNA, 19 nt, Homo sapiens
  misc_RNA (1)...(19): siRNA sense strand
gaaaaucauagcugagaga

SEQ ID NO: 1112398 - RNA, 19 nt, Homo sapiens
  misc_RNA (1)...(19): siRNA sense strand
aagaucacguacuguuuca

SEQ ID NO: 1112399 - RNA, 19 nt, Homo sapiens
  misc_RNA (1)...(19): siRNA sense strand
cuuaagaucacguacuguu

SEQ ID NO: 1112400 - RNA, 19 nt, Homo sapiens
  misc_RNA (1)...(19): siRNA sense strand
uggacacccuuguugaauc

SEQ ID NO: 1112401 - RNA, 19 nt, Homo sapiens
  misc_RNA (1)...(19): siRNA sense strand
agagaagacacugaagaaa

SEQ ID NO: 1112402 - RNA, 19 nt, Homo sapiens
  misc_RNA (1)...(19): siRNA sense strand
gagaaaaucauagcugaga

SEQ ID NO: 1112403 - RNA, 19 nt, Homo sapiens
  misc_RNA (1)...(19): siRNA sense strand
uuccugauacagaagauua

SEQ ID NO: 1112404 - RNA, 19 nt, Homo sapiens
  misc_RNA (1)...(19): siRNA sense strand
ugucauguaccauccagaa

SEQ ID NO: 1112405 - RNA, 19 nt, Homo sapiens
  misc_RNA (1)...(19): siRNA sense strand
cagauggagccacgaacaa

SEQ ID NO: 1112406 - RNA, 19 nt, Homo sapiens
  misc_RNA (1)...(19): siRNA sense strand
ccagauggagccacgaaca

SEQ ID NO: 1112407 - RNA, 19 nt, Homo sapiens
  misc_RNA (1)...(19): siRNA sense strand
aaauguagcaguugugaac

SEQ ID NO: 1112408 - RNA, 19 nt, Homo sapiens
  misc_RNA (1)...(19): siRNA sense strand
ggacgccuuagaaaauuua

SEQ ID NO: 1112409 - RNA, 19 nt, Homo sapiens
  misc_RNA (1)...(19): siRNA sense strand
guaccauccagaaggagaa

SEQ ID NO: 1112410 - RNA, 19 nt, Homo sapiens
  misc_RNA (1)...(19): siRNA sense strand
cccuuaagaucacguacug

SEQ ID NO: 1112411 - RNA, 19 nt, Homo sapiens
  misc_RNA (1)...(19): siRNA sense strand
aaacuagaacaucugaaag

SEQ ID NO: 1112412 - RNA, 19 nt, Homo sapiens
  misc_RNA (1)...(19): siRNA sense strand
cauccacugucauguacca

SEQ ID NO: 1112413 - RNA, 19 nt, Homo sapiens
  misc_RNA (1)...(19): siRNA sense strand
acacccuuguugaaucuau

SEQ ID NO: 1112414 - RNA, 19 nt, Homo sapiens
  misc_RNA (1)...(19): siRNA sense strand
ugagagacauuuugaucau

SEQ ID NO: 1112415 - RNA, 19 nt, Homo sapiens
  misc_RNA (1)...(19): siRNA sense strand
accaucuucucuucaacua

SEQ ID NO: 1112416 - RNA, 19 nt, Homo sapiens
  misc_RNA (1)...(19): siRNA sense strand
cugagggcauccacuguca

SEQ ID NO: 1112417 - RNA, 19 nt, Homo sapiens
  misc_RNA (1)...(19): siRNA sense strand
uaaaguaccuacccagaug

SEQ ID NO: 1112418 - RNA, 19 nt, Homo sapiens
  misc_RNA (1)...(19): siRNA sense strand
gaacgacaccacagaagaa

SEQ ID NO: 1112419 - RNA, 19 nt, Homo sapiens
  misc_RNA (1)...(19): siRNA sense strand
guagagaaauggucagaag

SEQ ID NO: 1112420 - RNA, 19 nt, Homo sapiens
  misc_RNA (1)...(19): siRNA sense strand
gagaaauggucagaaggaa

SEQ ID NO: 1112421 - RNA, 19 nt, Homo sapiens
  misc_RNA (1)...(19): siRNA sense strand
ggaagcaguugguggucuu

SEQ ID NO: 1112422 - RNA, 19 nt, Homo sapiens
  misc_RNA (1)...(19): siRNA sense strand
cgacaccacagaagaaauu

SEQ ID NO: 1112423 - RNA, 19 nt, Homo sapiens
  misc_RNA (1)...(19): siRNA sense strand
gaaggaacgacaccacaga

SEQ ID NO: 1112424 - RNA, 19 nt, Homo sapiens
  misc_RNA (1)...(19): siRNA sense strand
ggaacgacaccacagaaga

SEQ ID NO: 1112425 - RNA, 19 nt, Homo sapiens
  misc_RNA (1)...(19): siRNA sense strand
gaacagaauauagugacaa

SEQ ID NO: 1112426 - RNA, 19 nt, Homo sapiens
  misc_RNA (1)...(19): siRNA sense strand
caauguaaccagaacagaa

SEQ ID NO: 1112427 - RNA, 19 nt, Homo sapiens
  misc_RNA (1)...(19): siRNA sense strand
guaccuacccagauggaaa

SEQ ID NO: 1112428 - RNA, 19 nt, Homo sapiens
  misc_RNA (1)...(19): siRNA sense strand
gcuugcugcucagauguua

SEQ ID NO: 1112429 - RNA, 19 nt, Homo sapiens
  misc_RNA (1)...(19): siRNA sense strand
guaaccagaacagaauaua

SEQ ID NO: 1112430 - RNA, 19 nt, Homo sapiens
  misc_RNA (1)...(19): siRNA sense strand
ccacagaagaaauuagaau

SEQ ID NO: 1112431 - RNA, 19 nt, Homo sapiens
  misc_RNA (1)...(19): siRNA sense strand
acacagacgaggacaaugu

SEQ ID NO: 1112432 - RNA, 19 nt, Homo sapiens
  misc_RNA (1)...(19): siRNA sense strand
caccagaguuugccuacgu

SEQ ID NO: 1112433 - RNA, 19 nt, Homo sapiens
  misc_RNA (1)...(19): siRNA sense strand
ccacccaguuuccaucagu

SEQ ID NO: 1112434 - RNA, 19 nt, Homo sapiens
  misc_RNA (1)...(19): siRNA sense strand
ccagaacagaauauaguga

SEQ ID NO: 1112435 - RNA, 19 nt, Homo sapiens
  misc_RNA (1)...(19): siRNA sense strand
gagcaaacggaagcaguug

SEQ ID NO: 1112436 - RNA, 19 nt, Homo sapiens
  misc_RNA (1)...(19): siRNA sense strand
caccacagaagaaauuaga

SEQ ID NO: 1112437 - RNA, 19 nt, Homo sapiens
  misc_RNA (1)...(19): siRNA sense strand
agagaaauggucagaagga

SEQ ID NO: 1112438 - RNA, 19 nt, Homo sapiens
  misc_RNA (1)...(19): siRNA sense strand
gcaaacggaagcaguuggu

SEQ ID NO: 1112439 - RNA, 19 nt, Homo sapiens
  misc_RNA (1)...(19): siRNA sense strand
uaaccagaacagaauauag

SEQ ID NO: 1112440 - RNA, 19 nt, Homo sapiens
  misc_RNA (1)...(19): siRNA sense strand
gaggacaauguaaccagaa

SEQ ID NO: 1112441 - RNA, 19 nt, Homo sapiens
  misc_RNA (1)...(19): siRNA sense strand
cacagacgaggacaaugua

SEQ ID NO: 1112442 - RNA, 19 nt, Homo sapiens
  misc_RNA (1)...(19): siRNA sense strand
gcaguugguggucuuucuu

SEQ ID NO: 1112443 - RNA, 19 nt, Homo sapiens
  misc_RNA (1)...(19): siRNA sense strand
ccaguuuccaucaguuuau

SEQ ID NO: 1112444 - RNA, 19 nt, Homo sapiens
  misc_RNA (1)...(19): siRNA sense strand
cuaaaguaccuacccagau

SEQ ID NO: 1112445 - RNA, 19 nt, Homo sapiens
  misc_RNA (1)...(19): siRNA sense strand
gacaccacagaagaaauua

SEQ ID NO: 1112446 - RNA, 19 nt, Homo sapiens
  misc_RNA (1)...(19): siRNA sense strand
cacagaagaaauuagaaug

SEQ ID NO: 1112447 - RNA, 19 nt, Homo sapiens
  misc_RNA (1)...(19): siRNA sense strand
ugagcaaacggaagcaguu

SEQ ID NO: 1112448 - RNA, 19 nt, Homo sapiens
  misc_RNA (1)...(19): siRNA sense strand
ggacaauguaaccagaaca

SEQ ID NO: 1112449 - RNA, 19 nt, Homo sapiens
  misc_RNA (1)...(19): siRNA sense strand
gaagcaguugguggucuuu

SEQ ID NO: 1112450 - RNA, 19 nt, Homo sapiens
  misc_RNA (1)...(19): siRNA sense strand
agaacagaauauagugaca

SEQ ID NO: 1112451 - RNA, 19 nt, Homo sapiens
  misc_RNA (1)...(19): siRNA sense strand
aauguaaccagaacagaau

SEQ ID NO: 1112452 - RNA, 19 nt, Homo sapiens
  misc_RNA (1)...(19): siRNA sense strand
acagcugucucaccagagu

SEQ ID NO: 1112453 - RNA, 19 nt, Homo sapiens
  misc_RNA (1)...(19): siRNA sense strand
agacacagacgaggacaau

SEQ ID NO: 1112454 - RNA, 19 nt, Homo sapiens
  misc_RNA (1)...(19): siRNA sense strand
aaccagaacagaauauagu

SEQ ID NO: 1112455 - RNA, 19 nt, Homo sapiens
  misc_RNA (1)...(19): siRNA sense strand
ugacaaaugugcucccuuu

SEQ ID NO: 1112456 - RNA, 19 nt, Homo sapiens
  misc_RNA (1)...(19): siRNA sense strand
ucacaaacgucgcaaagca

SEQ ID NO: 1112457 - RNA, 19 nt, Homo sapiens
  misc_RNA (1)...(19): siRNA sense strand
ggaagcaguugguggucuu

SEQ ID NO: 1112458 - RNA, 19 nt, Homo sapiens
  misc_RNA (1)...(19): siRNA sense strand
gaacagaauauagugacaa

SEQ ID NO: 1112459 - RNA, 19 nt, Homo sapiens
  misc_RNA (1)...(19): siRNA sense strand
caauguaaccagaacagaa

SEQ ID NO: 1112460 - RNA, 19 nt, Homo sapiens
  misc_RNA (1)...(19): siRNA sense strand
gcuugcugcucagauguua

SEQ ID NO: 1112461 - RNA, 19 nt, Homo sapiens
  misc_RNA (1)...(19): siRNA sense strand
guaaccagaacagaauaua

SEQ ID NO: 1112462 - RNA, 19 nt, Homo sapiens
  misc_RNA (1)...(19): siRNA sense strand
uucaggaucuggugacaaa

SEQ ID NO: 1112463 - RNA, 19 nt, Homo sapiens
  misc_RNA (1)...(19): siRNA sense strand
ucgcaaagcagaaacugaa

SEQ ID NO: 1112464 - RNA, 19 nt, Homo sapiens
  misc_RNA (1)...(19): siRNA sense strand
gagguaaccgugacuacug

SEQ ID NO: 1112465 - RNA, 19 nt, Homo sapiens
  misc_RNA (1)...(19): siRNA sense strand
acacagacgaggacaaugu

SEQ ID NO: 1112466 - RNA, 19 nt, Homo sapiens
  misc_RNA (1)...(19): siRNA sense strand
caccagaguuugccuacgu

SEQ ID NO: 1112467 - RNA, 19 nt, Homo sapiens
  misc_RNA (1)...(19): siRNA sense strand
ccacccaguuuccaucagu

SEQ ID NO: 1112468 - RNA, 19 nt, Homo sapiens
  misc_RNA (1)...(19): siRNA sense strand
gugcucccuuuggaaguua

SEQ ID NO: 1112469 - RNA, 19 nt, Homo sapiens
  misc_RNA (1)...(19): siRNA sense strand
ccagaacagaauauaguga

SEQ ID NO: 1112470 - RNA, 19 nt, Homo sapiens
  misc_RNA (1)...(19): siRNA sense strand
gagcaaacggaagcaguug

SEQ ID NO: 1112471 - RNA, 19 nt, Homo sapiens
  misc_RNA (1)...(19): siRNA sense strand
uaaccagaacagaauauag

SEQ ID NO: 1112472 - RNA, 19 nt, Homo sapiens
  misc_RNA (1)...(19): siRNA sense strand
gcaaacggaagcaguuggu

SEQ ID NO: 1112473 - RNA, 19 nt, Homo sapiens
  misc_RNA (1)...(19): siRNA sense strand
gaggacaauguaaccagaa

SEQ ID NO: 1112474 - RNA, 19 nt, Homo sapiens
  misc_RNA (1)...(19): siRNA sense strand
aaacgucgcaaagcagaaa

SEQ ID NO: 1112475 - RNA, 19 nt, Homo sapiens
  misc_RNA (1)...(19): siRNA sense strand
gcucacaaacgucgcaaag

SEQ ID NO: 1112476 - RNA, 19 nt, Homo sapiens
  misc_RNA (1)...(19): siRNA sense strand
cacagacgaggacaaugua

SEQ ID NO: 1112477 - RNA, 19 nt, Homo sapiens
  misc_RNA (1)...(19): siRNA sense strand
gcaguugguggucuuucuu

SEQ ID NO: 1112478 - RNA, 19 nt, Homo sapiens
  misc_RNA (1)...(19): siRNA sense strand
ccaguuuccaucaguuuau

SEQ ID NO: 1112479 - RNA, 19 nt, Homo sapiens
  misc_RNA (1)...(19): siRNA sense strand
ugagcaaacggaagcaguu

SEQ ID NO: 1112480 - RNA, 19 nt, Homo sapiens
  misc_RNA (1)...(19): siRNA sense strand
caggaucuggugacaaaug

SEQ ID NO: 1112481 - RNA, 19 nt, Homo sapiens
  misc_RNA (1)...(19): siRNA sense strand
agaacagaauauagugaca

SEQ ID NO: 1112482 - RNA, 19 nt, Homo sapiens
  misc_RNA (1)...(19): siRNA sense strand
gcaaagcagaaacugaaaa

SEQ ID NO: 1112483 - RNA, 19 nt, Homo sapiens
  misc_RNA (1)...(19): siRNA sense strand
cuuuggaaguuacgguauu

SEQ ID NO: 1112484 - RNA, 19 nt, Homo sapiens
  misc_RNA (1)...(19): siRNA sense strand
ggacaauguaaccagaaca

SEQ ID NO: 1112485 - RNA, 19 nt, Homo sapiens
  misc_RNA (1)...(19): siRNA sense strand
gaagcaguugguggucuuu

SEQ ID NO: 1112486 - RNA, 19 nt, Homo sapiens
  misc_RNA (1)...(19): siRNA sense strand
aauguaaccagaacagaau

SEQ ID NO: 1112487 - RNA, 19 nt, Homo sapiens
  misc_RNA (1)...(19): siRNA sense strand
agacacagacgaggacaau

SEQ ID NO: 1112488 - RNA, 19 nt, Homo sapiens
  misc_RNA (1)...(19): siRNA sense strand
acagcugucucaccagagu

SEQ ID NO: 1112489 - RNA, 19 nt, Homo sapiens
  misc_RNA (1)...(19): siRNA sense strand
ggagguaaccgugacuacu

SEQ ID NO: 1112490 - RNA, 19 nt, Homo sapiens
  misc_RNA (1)...(19): siRNA sense strand
gacuacugcucacaaacgu

SEQ ID NO: 1112491 - RNA, 19 nt, Homo sapiens
  misc_RNA (1)...(19): siRNA sense strand
aaccagaacagaauauagu

SEQ ID NO: 1112492 - RNA, 19 nt, Homo sapiens
  misc_RNA (1)...(19): siRNA sense strand
agcagaaacugaaaacuga

SEQ ID NO: 1112493 - RNA, 19 nt, Homo sapiens
  misc_RNA (1)...(19): siRNA sense strand
ugacaaaugugcucccuuu

SEQ ID NO: 1112494 - RNA, 19 nt, Homo sapiens
  misc_RNA (1)...(19): siRNA sense strand
uaaaguaccuacccagaug

SEQ ID NO: 1112495 - RNA, 19 nt, Homo sapiens
  misc_RNA (1)...(19): siRNA sense strand
gaacgacaccacagaagaa

SEQ ID NO: 1112496 - RNA, 19 nt, Homo sapiens
  misc_RNA (1)...(19): siRNA sense strand
guagagaaauggucagaag

SEQ ID NO: 1112497 - RNA, 19 nt, Homo sapiens
  misc_RNA (1)...(19): siRNA sense strand
ucacaaacgucgcaaagca

SEQ ID NO: 1112498 - RNA, 19 nt, Homo sapiens
  misc_RNA (1)...(19): siRNA sense strand
gagaaauggucagaaggaa

SEQ ID NO: 1112499 - RNA, 19 nt, Homo sapiens
  misc_RNA (1)...(19): siRNA sense strand
ggaagcaguugguggucuu

SEQ ID NO: 1112500 - RNA, 19 nt, Homo sapiens
  misc_RNA (1)...(19): siRNA sense strand
cgacaccacagaagaaauu

SEQ ID NO: 1112501 - RNA, 19 nt, Homo sapiens
  misc_RNA (1)...(19): siRNA sense strand
gaaggaacgacaccacaga

SEQ ID NO: 1112502 - RNA, 19 nt, Homo sapiens
  misc_RNA (1)...(19): siRNA sense strand
ggaacgacaccacagaaga

SEQ ID NO: 1112503 - RNA, 19 nt, Homo sapiens
  misc_RNA (1)...(19): siRNA sense strand
gaacagaauauagugacaa

SEQ ID NO: 1112504 - RNA, 19 nt, Homo sapiens
  misc_RNA (1)...(19): siRNA sense strand
caauguaaccagaacagaa

SEQ ID NO: 1112505 - RNA, 19 nt, Homo sapiens
  misc_RNA (1)...(19): siRNA sense strand
guaccuacccagauggaaa

SEQ ID NO: 1112506 - RNA, 19 nt, Homo sapiens
  misc_RNA (1)...(19): siRNA sense strand
gcuugcugcucagauguua

SEQ ID NO: 1112507 - RNA, 19 nt, Homo sapiens
  misc_RNA (1)...(19): siRNA sense strand
guaaccagaacagaauaua

SEQ ID NO: 1112508 - RNA, 19 nt, Homo sapiens
  misc_RNA (1)...(19): siRNA sense strand
ccacagaagaaauuagaau

SEQ ID NO: 1112509 - RNA, 19 nt, Homo sapiens
  misc_RNA (1)...(19): siRNA sense strand
uucaggaucuggugacaaa

SEQ ID NO: 1112510 - RNA, 19 nt, Homo sapiens
  misc_RNA (1)...(19): siRNA sense strand
ucgcaaagcagaaacugaa

SEQ ID NO: 1112511 - RNA, 19 nt, Homo sapiens
  misc_RNA (1)...(19): siRNA sense strand
gagguaaccgugacuacug

SEQ ID NO: 1112512 - RNA, 19 nt, Homo sapiens
  misc_RNA (1)...(19): siRNA sense strand
acacagacgaggacaaugu

SEQ ID NO: 1112513 - RNA, 19 nt, Homo sapiens
  misc_RNA (1)...(19): siRNA sense strand
caccagaguuugccuacgu

SEQ ID NO: 1112514 - RNA, 19 nt, Homo sapiens
  misc_RNA (1)...(19): siRNA sense strand
ccacccaguuuccaucagu

SEQ ID NO: 1112515 - RNA, 19 nt, Homo sapiens
  misc_RNA (1)...(19): siRNA sense strand
gugcucccuuuggaaguua

SEQ ID NO: 1112516 - RNA, 19 nt, Homo sapiens
  misc_RNA (1)...(19): siRNA sense strand
ccagaacagaauauaguga

SEQ ID NO: 1112517 - RNA, 19 nt, Homo sapiens
  misc_RNA (1)...(19): siRNA sense strand
gagcaaacggaagcaguug

SEQ ID NO: 1112518 - RNA, 19 nt, Homo sapiens
  misc_RNA (1)...(19): siRNA sense strand
caccacagaagaaauuaga

SEQ ID NO: 1112519 - RNA, 19 nt, Homo sapiens
  misc_RNA (1)...(19): siRNA sense strand
uaaccagaacagaauauag

SEQ ID NO: 1112520 - RNA, 19 nt, Homo sapiens
  misc_RNA (1)...(19): siRNA sense strand
gcaaacggaagcaguuggu

SEQ ID NO: 1112521 - RNA, 19 nt, Homo sapiens
  misc_RNA (1)...(19): siRNA sense strand
agagaaauggucagaagga

SEQ ID NO: 1112522 - RNA, 19 nt, Homo sapiens
  misc_RNA (1)...(19): siRNA sense strand
gaggacaauguaaccagaa

SEQ ID NO: 1112523 - RNA, 19 nt, Homo sapiens
  misc_RNA (1)...(19): siRNA sense strand
aaacgucgcaaagcagaaa

SEQ ID NO: 1112524 - RNA, 19 nt, Homo sapiens
  misc_RNA (1)...(19): siRNA sense strand
gcucacaaacgucgcaaag

SEQ ID NO: 1112525 - RNA, 19 nt, Homo sapiens
  misc_RNA (1)...(19): siRNA sense strand
cacagacgaggacaaugua

SEQ ID NO: 1112526 - RNA, 19 nt, Homo sapiens
  misc_RNA (1)...(19): siRNA sense strand
gcaguugguggucuuucuu

SEQ ID NO: 1112527 - RNA, 19 nt, Homo sapiens
  misc_RNA (1)...(19): siRNA sense strand
ccaguuuccaucaguuuau

SEQ ID NO: 1112528 - RNA, 19 nt, Homo sapiens
  misc_RNA (1)...(19): siRNA sense strand
gacaccacagaagaaauua

SEQ ID NO: 1112529 - RNA, 19 nt, Homo sapiens
  misc_RNA (1)...(19): siRNA sense strand
cacagaagaaauuagaaug

SEQ ID NO: 1112530 - RNA, 19 nt, Homo sapiens
  misc_RNA (1)...(19): siRNA sense strand
cuaaaguaccuacccagau

SEQ ID NO: 1112531 - RNA, 19 nt, Homo sapiens
  misc_RNA (1)...(19): siRNA sense strand
ugagcaaacggaagcaguu

SEQ ID NO: 1112532 - RNA, 19 nt, Homo sapiens
  misc_RNA (1)...(19): siRNA sense strand
caggaucuggugacaaaug

SEQ ID NO: 1112533 - RNA, 19 nt, Homo sapiens
  misc_RNA (1)...(19): siRNA sense strand
agaacagaauauagugaca

SEQ ID NO: 1112534 - RNA, 19 nt, Homo sapiens
  misc_RNA (1)...(19): siRNA sense strand
gcaaagcagaaacugaaaa

SEQ ID NO: 1112535 - RNA, 19 nt, Homo sapiens
  misc_RNA (1)...(19): siRNA sense strand
cuuuggaaguuacgguauu

SEQ ID NO: 1112536 - RNA, 19 nt, Homo sapiens
  misc_RNA (1)...(19): siRNA sense strand
ggacaauguaaccagaaca

SEQ ID NO: 1112537 - RNA, 19 nt, Homo sapiens
  misc_RNA (1)...(19): siRNA sense strand
gaagcaguugguggucuuu

SEQ ID NO: 1112538 - RNA, 19 nt, Homo sapiens
  misc_RNA (1)...(19): siRNA sense strand
agacacagacgaggacaau

SEQ ID NO: 1112539 - RNA, 19 nt, Homo sapiens
  misc_RNA (1)...(19): siRNA sense strand
aauguaaccagaacagaau

SEQ ID NO: 1112540 - RNA, 19 nt, Homo sapiens
  misc_RNA (1)...(19): siRNA sense strand
acagcugucucaccagagu

SEQ ID NO: 1112541 - RNA, 19 nt, Homo sapiens
  misc_RNA (1)...(19): siRNA sense strand
aaccagaacagaauauagu

SEQ ID NO: 1112542 - RNA, 19 nt, Homo sapiens
  misc_RNA (1)...(19): siRNA sense strand
gacuacugcucacaaacgu

SEQ ID NO: 1112543 - RNA, 19 nt, Homo sapiens
  misc_RNA (1)...(19): siRNA sense strand
ggagguaaccgugacuacu

SEQ ID NO: 1112544 - RNA, 19 nt, Homo sapiens
  misc_RNA (1)...(19): siRNA sense strand
agcagaaacugaaaacuga

SEQ ID NO: 1112545 - RNA, 19 nt, Homo sapiens
  misc_RNA (1)...(19): siRNA sense strand
uaaaguaccuacccagaug

SEQ ID NO: 1112546 - RNA, 19 nt, Homo sapiens
  misc_RNA (1)...(19): siRNA sense strand
gaacgacaccacagaagaa

SEQ ID NO: 1112547 - RNA, 19 nt, Homo sapiens
  misc_RNA (1)...(19): siRNA sense strand
guagagaaauggucagaag

SEQ ID NO: 1112548 - RNA, 19 nt, Homo sapiens
  misc_RNA (1)...(19): siRNA sense strand
gagaaauggucagaaggaa

SEQ ID NO: 1112549 - RNA, 19 nt, Homo sapiens
  misc_RNA (1)...(19): siRNA sense strand
ggaagcaguugguggucuu

SEQ ID NO: 1112550 - RNA, 19 nt, Homo sapiens
  misc_RNA (1)...(19): siRNA sense strand
cgacaccacagaagaaauu

SEQ ID NO: 1112551 - RNA, 19 nt, Homo sapiens
  misc_RNA (1)...(19): siRNA sense strand
gaaggaacgacaccacaga

SEQ ID NO: 1112552 - RNA, 19 nt, Homo sapiens
  misc_RNA (1)...(19): siRNA sense strand
ggaacgacaccacagaaga

SEQ ID NO: 1112553 - RNA, 19 nt, Homo sapiens
  misc_RNA (1)...(19): siRNA sense strand
gaacagaauauagugacaa

SEQ ID NO: 1112554 - RNA, 19 nt, Homo sapiens
  misc_RNA (1)...(19): siRNA sense strand
caauguaaccagaacagaa

SEQ ID NO: 1112555 - RNA, 19 nt, Homo sapiens
  misc_RNA (1)...(19): siRNA sense strand
guaccuacccagauggaaa

SEQ ID NO: 1112556 - RNA, 19 nt, Homo sapiens
  misc_RNA (1)...(19): siRNA sense strand
gcuugcugcucagauguua

SEQ ID NO: 1112557 - RNA, 19 nt, Homo sapiens
  misc_RNA (1)...(19): siRNA sense strand
guaaccagaacagaauaua

SEQ ID NO: 1112558 - RNA, 19 nt, Homo sapiens
  misc_RNA (1)...(19): siRNA sense strand
ccacagaagaaauuagaau

SEQ ID NO: 1112559 - RNA, 19 nt, Homo sapiens
  misc_RNA (1)...(19): siRNA sense strand
acacagacgaggacaaugu

SEQ ID NO: 1112560 - RNA, 19 nt, Homo sapiens
  misc_RNA (1)...(19): siRNA sense strand
caccagaguuugccuacgu

SEQ ID NO: 1112561 - RNA, 19 nt, Homo sapiens
  misc_RNA (1)...(19): siRNA sense strand
ccacccaguuuccaucagu

SEQ ID NO: 1112562 - RNA, 19 nt, Homo sapiens
  misc_RNA (1)...(19): siRNA sense strand
ccagaacagaauauaguga

SEQ ID NO: 1112563 - RNA, 19 nt, Homo sapiens
  misc_RNA (1)...(19): siRNA sense strand
gagcaaacggaagcaguug

SEQ ID NO: 1112564 - RNA, 19 nt, Homo sapiens
  misc_RNA (1)...(19): siRNA sense strand
caccacagaagaaauuaga

SEQ ID NO: 1112565 - RNA, 19 nt, Homo sapiens
  misc_RNA (1)...(19): siRNA sense strand
agagaaauggucagaagga

SEQ ID NO: 1112566 - RNA, 19 nt, Homo sapiens
  misc_RNA (1)...(19): siRNA sense strand
gcaaacggaagcaguuggu

SEQ ID NO: 1112567 - RNA, 19 nt, Homo sapiens
  misc_RNA (1)...(19): siRNA sense strand
uaaccagaacagaauauag

SEQ ID NO: 1112568 - RNA, 19 nt, Homo sapiens
  misc_RNA (1)...(19): siRNA sense strand
gaggacaauguaaccagaa

SEQ ID NO: 1112569 - RNA, 19 nt, Homo sapiens
  misc_RNA (1)...(19): siRNA sense strand
cacagacgaggacaaugua

SEQ ID NO: 1112570 - RNA, 19 nt, Homo sapiens
  misc_RNA (1)...(19): siRNA sense strand
gcaguugguggucuuucuu

SEQ ID NO: 1112571 - RNA, 19 nt, Homo sapiens
  misc_RNA (1)...(19): siRNA sense strand
ccaguuuccaucaguuuau

SEQ ID NO: 1112572 - RNA, 19 nt, Homo sapiens
  misc_RNA (1)...(19): siRNA sense strand
cuaaaguaccuacccagau

SEQ ID NO: 1112573 - RNA, 19 nt, Homo sapiens
  misc_RNA (1)...(19): siRNA sense strand
gacaccacagaagaaauua

SEQ ID NO: 1112574 - RNA, 19 nt, Homo sapiens
  misc_RNA (1)...(19): siRNA sense strand
cacagaagaaauuagaaug

SEQ ID NO: 1112575 - RNA, 19 nt, Homo sapiens
  misc_RNA (1)...(19): siRNA sense strand
ugagcaaacggaagcaguu

SEQ ID NO: 1112576 - RNA, 19 nt, Homo sapiens
  misc_RNA (1)...(19): siRNA sense strand
ggacaauguaaccagaaca

SEQ ID NO: 1112577 - RNA, 19 nt, Homo sapiens
  misc_RNA (1)...(19): siRNA sense strand
gaagcaguugguggucuuu

SEQ ID NO: 1112578 - RNA, 19 nt, Homo sapiens
  misc_RNA (1)...(19): siRNA sense strand
agaacagaauauagugaca

SEQ ID NO: 1112579 - RNA, 19 nt, Homo sapiens
  misc_RNA (1)...(19): siRNA sense strand
aauguaaccagaacagaau

SEQ ID NO: 1112580 - RNA, 19 nt, Homo sapiens
  misc_RNA (1)...(19): siRNA sense strand
acagcugucucaccagagu

SEQ ID NO: 1112581 - RNA, 19 nt, Homo sapiens
  misc_RNA (1)...(19): siRNA sense strand
agacacagacgaggacaau

SEQ ID NO: 1112582 - RNA, 19 nt, Homo sapiens
  misc_RNA (1)...(19): siRNA sense strand
aaccagaacagaauauagu

SEQ ID NO: 1112583 - RNA, 19 nt, Homo sapiens
  misc_RNA (1)...(19): siRNA sense strand
ugacaaaugugcucccuuu

SEQ ID NO: 1112584 - RNA, 19 nt, Homo sapiens
  misc_RNA (1)...(19): siRNA sense strand
uaaaguaccuacccagaug

SEQ ID NO: 1112585 - RNA, 19 nt, Homo sapiens
  misc_RNA (1)...(19): siRNA sense strand
gaacgacaccacagaagaa

SEQ ID NO: 1112586 - RNA, 19 nt, Homo sapiens
  misc_RNA (1)...(19): siRNA sense strand
guagagaaauggucagaag

SEQ ID NO: 1112587 - RNA, 19 nt, Homo sapiens
  misc_RNA (1)...(19): siRNA sense strand
ucacaaacgucgcaaagca

SEQ ID NO: 1112588 - RNA, 19 nt, Homo sapiens
  misc_RNA (1)...(19): siRNA sense strand
gagaaauggucagaaggaa

SEQ ID NO: 1112589 - RNA, 19 nt, Homo sapiens
  misc_RNA (1)...(19): siRNA sense strand
ggaagcaguugguggucuu

SEQ ID NO: 1112590 - RNA, 19 nt, Homo sapiens
  misc_RNA (1)...(19): siRNA sense strand
cgacaccacagaagaaauu

SEQ ID NO: 1112591 - RNA, 19 nt, Homo sapiens
  misc_RNA (1)...(19): siRNA sense strand
gaaggaacgacaccacaga

SEQ ID NO: 1112592 - RNA, 19 nt, Homo sapiens
  misc_RNA (1)...(19): siRNA sense strand
ggaacgacaccacagaaga

SEQ ID NO: 1112593 - RNA, 19 nt, Homo sapiens
  misc_RNA (1)...(19): siRNA sense strand
gaacagaauauagugacaa

SEQ ID NO: 1112594 - RNA, 19 nt, Homo sapiens
  misc_RNA (1)...(19): siRNA sense strand
caauguaaccagaacagaa

SEQ ID NO: 1112595 - RNA, 19 nt, Homo sapiens
  misc_RNA (1)...(19): siRNA sense strand
guaccuacccagauggaaa

SEQ ID NO: 1112596 - RNA, 19 nt, Homo sapiens
  misc_RNA (1)...(19): siRNA sense strand
gcuugcugcucagauguua

SEQ ID NO: 1112597 - RNA, 19 nt, Homo sapiens
  misc_RNA (1)...(19): siRNA sense strand
guaaccagaacagaauaua

SEQ ID NO: 1112598 - RNA, 19 nt, Homo sapiens
  misc_RNA (1)...(19): siRNA sense strand
ccacagaagaaauuagaau

SEQ ID NO: 1112599 - RNA, 19 nt, Homo sapiens
  misc_RNA (1)...(19): siRNA sense strand
uucaggaucuggugacaaa

SEQ ID NO: 1112600 - RNA, 19 nt, Homo sapiens
  misc_RNA (1)...(19): siRNA sense strand
ucgcaaagcagaaacugaa

SEQ ID NO: 1112601 - RNA, 19 nt, Homo sapiens
  misc_RNA (1)...(19): siRNA sense strand
gagguaaccgugacuacug

SEQ ID NO: 1112602 - RNA, 19 nt, Homo sapiens
  misc_RNA (1)...(19): siRNA sense strand
acacagacgaggacaaugu

SEQ ID NO: 1112603 - RNA, 19 nt, Homo sapiens
  misc_RNA (1)...(19): siRNA sense strand
caccagaguuugccuacgu

SEQ ID NO: 1112604 - RNA, 19 nt, Homo sapiens
  misc_RNA (1)...(19): siRNA sense strand
ccacccaguuuccaucagu

SEQ ID NO: 1112605 - RNA, 19 nt, Homo sapiens
  misc_RNA (1)...(19): siRNA sense strand
gugcucccuuuggaaguua

SEQ ID NO: 1112606 - RNA, 19 nt, Homo sapiens
  misc_RNA (1)...(19): siRNA sense strand
ccagaacagaauauaguga

SEQ ID NO: 1112607 - RNA, 19 nt, Homo sapiens
  misc_RNA (1)...(19): siRNA sense strand
gagcaaacggaagcaguug

SEQ ID NO: 1112608 - RNA, 19 nt, Homo sapiens
  misc_RNA (1)...(19): siRNA sense strand
caccacagaagaaauuaga

SEQ ID NO: 1112609 - RNA, 19 nt, Homo sapiens
  misc_RNA (1)...(19): siRNA sense strand
uaaccagaacagaauauag

SEQ ID NO: 1112610 - RNA, 19 nt, Homo sapiens
  misc_RNA (1)...(19): siRNA sense strand
gcaaacggaagcaguuggu

SEQ ID NO: 1112611 - RNA, 19 nt, Homo sapiens
  misc_RNA (1)...(19): siRNA sense strand
agagaaauggucagaagga

SEQ ID NO: 1112612 - RNA, 19 nt, Homo sapiens
  misc_RNA (1)...(19): siRNA sense strand
gaggacaauguaaccagaa

SEQ ID NO: 1112613 - RNA, 19 nt, Homo sapiens
  misc_RNA (1)...(19): siRNA sense strand
aaacgucgcaaagcagaaa

SEQ ID NO: 1112614 - RNA, 19 nt, Homo sapiens
  misc_RNA (1)...(19): siRNA sense strand
gcucacaaacgucgcaaag

SEQ ID NO: 1112615 - RNA, 19 nt, Homo sapiens
  misc_RNA (1)...(19): siRNA sense strand
cacagacgaggacaaugua

SEQ ID NO: 1112616 - RNA, 19 nt, Homo sapiens
  misc_RNA (1)...(19): siRNA sense strand
gcaguugguggucuuucuu

SEQ ID NO: 1112617 - RNA, 19 nt, Homo sapiens
  misc_RNA (1)...(19): siRNA sense strand
ccaguuuccaucaguuuau

SEQ ID NO: 1112618 - RNA, 19 nt, Homo sapiens
  misc_RNA (1)...(19): siRNA sense strand
gacaccacagaagaaauua

SEQ ID NO: 1112619 - RNA, 19 nt, Homo sapiens
  misc_RNA (1)...(19): siRNA sense strand
cacagaagaaauuagaaug

SEQ ID NO: 1112620 - RNA, 19 nt, Homo sapiens
  misc_RNA (1)...(19): siRNA sense strand
cuaaaguaccuacccagau

SEQ ID NO: 1112621 - RNA, 19 nt, Homo sapiens
  misc_RNA (1)...(19): siRNA sense strand
ugagcaaacggaagcaguu

SEQ ID NO: 1112622 - RNA, 19 nt, Homo sapiens
  misc_RNA (1)...(19): siRNA sense strand
caggaucuggugacaaaug

SEQ ID NO: 1112623 - RNA, 19 nt, Homo sapiens
  misc_RNA (1)...(19): siRNA sense strand
agaacagaauauagugaca

SEQ ID NO: 1112624 - RNA, 19 nt, Homo sapiens
  misc_RNA (1)...(19): siRNA sense strand
gcaaagcagaaacugaaaa

SEQ ID NO: 1112625 - RNA, 19 nt, Homo sapiens
  misc_RNA (1)...(19): siRNA sense strand
cuuuggaaguuacgguauu

SEQ ID NO: 1112626 - RNA, 19 nt, Homo sapiens
  misc_RNA (1)...(19): siRNA sense strand
ggacaauguaaccagaaca

SEQ ID NO: 1112627 - RNA, 19 nt, Homo sapiens
  misc_RNA (1)...(19): siRNA sense strand
gaagcaguugguggucuuu

SEQ ID NO: 1112628 - RNA, 19 nt, Homo sapiens
  misc_RNA (1)...(19): siRNA sense strand
agacacagacgaggacaau

SEQ ID NO: 1112629 - RNA, 19 nt, Homo sapiens
  misc_RNA (1)...(19): siRNA sense strand
aauguaaccagaacagaau

SEQ ID NO: 1112630 - RNA, 19 nt, Homo sapiens
  misc_RNA (1)...(19): siRNA sense strand
acagcugucucaccagagu

SEQ ID NO: 1112631 - RNA, 19 nt, Homo sapiens
  misc_RNA (1)...(19): siRNA sense strand
aaccagaacagaauauagu

SEQ ID NO: 1112632 - RNA, 19 nt, Homo sapiens
  misc_RNA (1)...(19): siRNA sense strand
gacuacugcucacaaacgu

SEQ ID NO: 1112633 - RNA, 19 nt, Homo sapiens
  misc_RNA (1)...(19): siRNA sense strand
ggagguaaccgugacuacu

SEQ ID NO: 1112634 - RNA, 19 nt, Homo sapiens
  misc_RNA (1)...(19): siRNA sense strand
agcagaaacugaaaacuga

SEQ ID NO: 1112635 - RNA, 19 nt, Homo sapiens
  misc_RNA (1)...(19): siRNA sense strand
ugacaaaugugcucccuuu

SEQ ID NO: 1112636 - RNA, 19 nt, Homo sapiens
  misc_RNA (1)...(19): siRNA sense strand
uaaaguaccuacccagaug

SEQ ID NO: 1112637 - RNA, 19 nt, Homo sapiens
  misc_RNA (1)...(19): siRNA sense strand
gaacgacaccacagaagaa

SEQ ID NO: 1112638 - RNA, 19 nt, Homo sapiens
  misc_RNA (1)...(19): siRNA sense strand
guagagaaauggucagaag

SEQ ID NO: 1112639 - RNA, 19 nt, Homo sapiens
  misc_RNA (1)...(19): siRNA sense strand
ucacaaacgucgcaaagca

SEQ ID NO: 1112640 - RNA, 19 nt, Homo sapiens
  misc_RNA (1)...(19): siRNA sense strand
gagaaauggucagaaggaa

SEQ ID NO: 1112641 - RNA, 19 nt, Homo sapiens
  misc_RNA (1)...(19): siRNA sense strand
ggaagcaguugguggucuu

SEQ ID NO: 1112642 - RNA, 19 nt, Homo sapiens
  misc_RNA (1)...(19): siRNA sense strand
cgacaccacagaagaaauu

SEQ ID NO: 1112643 - RNA, 19 nt, Homo sapiens
  misc_RNA (1)...(19): siRNA sense strand
gaaggaacgacaccacaga

SEQ ID NO: 1112644 - RNA, 19 nt, Homo sapiens
  misc_RNA (1)...(19): siRNA sense strand
ggaacgacaccacagaaga

SEQ ID NO: 1112645 - RNA, 19 nt, Homo sapiens
  misc_RNA (1)...(19): siRNA sense strand
gaacagaauauagugacaa

SEQ ID NO: 1112646 - RNA, 19 nt, Homo sapiens
  misc_RNA (1)...(19): siRNA sense strand
caauguaaccagaacagaa

SEQ ID NO: 1112647 - RNA, 19 nt, Homo sapiens
  misc_RNA (1)...(19): siRNA sense strand
guaccuacccagauggaaa

SEQ ID NO: 1112648 - RNA, 19 nt, Homo sapiens
  misc_RNA (1)...(19): siRNA sense strand
gcuugcugcucagauguua

SEQ ID NO: 1112649 - RNA, 19 nt, Homo sapiens
  misc_RNA (1)...(19): siRNA sense strand
guaaccagaacagaauaua

SEQ ID NO: 1112650 - RNA, 19 nt, Homo sapiens
  misc_RNA (1)...(19): siRNA sense strand
ccacagaagaaauuagaau

SEQ ID NO: 1112651 - RNA, 19 nt, Homo sapiens
  misc_RNA (1)...(19): siRNA sense strand
uucaggaucuggugacaaa

SEQ ID NO: 1112652 - RNA, 19 nt, Homo sapiens
  misc_RNA (1)...(19): siRNA sense strand
ucgcaaagcagaaacugaa

SEQ ID NO: 1112653 - RNA, 19 nt, Homo sapiens
  misc_RNA (1)...(19): siRNA sense strand
gagguaaccgugacuacug

SEQ ID NO: 1112654 - RNA, 19 nt, Homo sapiens
  misc_RNA (1)...(19): siRNA sense strand
acacagacgaggacaaugu

SEQ ID NO: 1112655 - RNA, 19 nt, Homo sapiens
  misc_RNA (1)...(19): siRNA sense strand
caccagaguuugccuacgu

SEQ ID NO: 1112656 - RNA, 19 nt, Homo sapiens
  misc_RNA (1)...(19): siRNA sense strand
ccacccaguuuccaucagu

SEQ ID NO: 1112657 - RNA, 19 nt, Homo sapiens
  misc_RNA (1)...(19): siRNA sense strand
gugcucccuuuggaaguua

SEQ ID NO: 1112658 - RNA, 19 nt, Homo sapiens
  misc_RNA (1)...(19): siRNA sense strand
ccagaacagaauauaguga

SEQ ID NO: 1112659 - RNA, 19 nt, Homo sapiens
  misc_RNA (1)...(19): siRNA sense strand
gagcaaacggaagcaguug

SEQ ID NO: 1112660 - RNA, 19 nt, Homo sapiens
  misc_RNA (1)...(19): siRNA sense strand
caccacagaagaaauuaga

SEQ ID NO: 1112661 - RNA, 19 nt, Homo sapiens
  misc_RNA (1)...(19): siRNA sense strand
uaaccagaacagaauauag

SEQ ID NO: 1112662 - RNA, 19 nt, Homo sapiens
  misc_RNA (1)...(19): siRNA sense strand
gcaaacggaagcaguuggu

SEQ ID NO: 1112663 - RNA, 19 nt, Homo sapiens
  misc_RNA (1)...(19): siRNA sense strand
agagaaauggucagaagga

SEQ ID NO: 1112664 - RNA, 19 nt, Homo sapiens
  misc_RNA (1)...(19): siRNA sense strand
gaggacaauguaaccagaa

SEQ ID NO: 1112665 - RNA, 19 nt, Homo sapiens
  misc_RNA (1)...(19): siRNA sense strand
aaacgucgcaaagcagaaa

SEQ ID NO: 1112666 - RNA, 19 nt, Homo sapiens
  misc_RNA (1)...(19): siRNA sense strand
gcucacaaacgucgcaaag

SEQ ID NO: 1112667 - RNA, 19 nt, Homo sapiens
  misc_RNA (1)...(19): siRNA sense strand
cacagacgaggacaaugua

SEQ ID NO: 1112668 - RNA, 19 nt, Homo sapiens
  misc_RNA (1)...(19): siRNA sense strand
gcaguugguggucuuucuu

SEQ ID NO: 1112669 - RNA, 19 nt, Homo sapiens
  misc_RNA (1)...(19): siRNA sense strand
ccaguuuccaucaguuuau

SEQ ID NO: 1112670 - RNA, 19 nt, Homo sapiens
  misc_RNA (1)...(19): siRNA sense strand
gacaccacagaagaaauua

SEQ ID NO: 1112671 - RNA, 19 nt, Homo sapiens
  misc_RNA (1)...(19): siRNA sense strand
cacagaagaaauuagaaug

SEQ ID NO: 1112672 - RNA, 19 nt, Homo sapiens
  misc_RNA (1)...(19): siRNA sense strand
cuaaaguaccuacccagau

SEQ ID NO: 1112673 - RNA, 19 nt, Homo sapiens
  misc_RNA (1)...(19): siRNA sense strand
ugagcaaacggaagcaguu

SEQ ID NO: 1112674 - RNA, 19 nt, Homo sapiens
  misc_RNA (1)...(19): siRNA sense strand
caggaucuggugacaaaug

SEQ ID NO: 1112675 - RNA, 19 nt, Homo sapiens
  misc_RNA (1)...(19): siRNA sense strand
agaacagaauauagugaca

SEQ ID NO: 1112676 - RNA, 19 nt, Homo sapiens
  misc_RNA (1)...(19): siRNA sense strand
gcaaagcagaaacugaaaa

SEQ ID NO: 1112677 - RNA, 19 nt, Homo sapiens
  misc_RNA (1)...(19): siRNA sense strand
cuuuggaaguuacgguauu

SEQ ID NO: 1112678 - RNA, 19 nt, Homo sapiens
  misc_RNA (1)...(19): siRNA sense strand
ggacaauguaaccagaaca

SEQ ID NO: 1112679 - RNA, 19 nt, Homo sapiens
  misc_RNA (1)...(19): siRNA sense strand
gaagcaguugguggucuuu

SEQ ID NO: 1112680 - RNA, 19 nt, Homo sapiens
  misc_RNA (1)...(19): siRNA sense strand
agacacagacgaggacaau

SEQ ID NO: 1112681 - RNA, 19 nt, Homo sapiens
  misc_RNA (1)...(19): siRNA sense strand
aauguaaccagaacagaau

SEQ ID NO: 1112682 - RNA, 19 nt, Homo sapiens
  misc_RNA (1)...(19): siRNA sense strand
acagcugucucaccagagu

SEQ ID NO: 1112683 - RNA, 19 nt, Homo sapiens
  misc_RNA (1)...(19): siRNA sense strand
aaccagaacagaauauagu

SEQ ID NO: 1112684 - RNA, 19 nt, Homo sapiens
  misc_RNA (1)...(19): siRNA sense strand
gacuacugcucacaaacgu

SEQ ID NO: 1112685 - RNA, 19 nt, Homo sapiens
  misc_RNA (1)...(19): siRNA sense strand
ggagguaaccgugacuacu

SEQ ID NO: 1112686 - RNA, 19 nt, Homo sapiens
  misc_RNA (1)...(19): siRNA sense strand
agcagaaacugaaaacuga

SEQ ID NO: 1112687 - RNA, 19 nt, Homo sapiens
  misc_RNA (1)...(19): siRNA sense strand
gaagugagauuccgaaaga

SEQ ID NO: 1112688 - RNA, 19 nt, Homo sapiens
  misc_RNA (1)...(19): siRNA sense strand
ggaaagaaauccagagaug

SEQ ID NO: 1112689 - RNA, 19 nt, Homo sapiens
  misc_RNA (1)...(19): siRNA sense strand
ccaaagacgucacagauaa

SEQ ID NO: 1112690 - RNA, 19 nt, Homo sapiens
  misc_RNA (1)...(19): siRNA sense strand
ccaaauggcuucagugcua

SEQ ID NO: 1112691 - RNA, 19 nt, Homo sapiens
  misc_RNA (1)...(19): siRNA sense strand
ccauagagauuacuaaaga

SEQ ID NO: 1112692 - RNA, 19 nt, Homo sapiens
  misc_RNA (1)...(19): siRNA sense strand
ccaccaagcucuauauuuc

SEQ ID NO: 1112693 - RNA, 19 nt, Homo sapiens
  misc_RNA (1)...(19): siRNA sense strand
ggauguagaugcuuccaaa

SEQ ID NO: 1112694 - RNA, 19 nt, Homo sapiens
  misc_RNA (1)...(19): siRNA sense strand
gaaccgaguuucaaagcaa

SEQ ID NO: 1112695 - RNA, 19 nt, Homo sapiens
  misc_RNA (1)...(19): siRNA sense strand
ggaaacaucgucuauucua

SEQ ID NO: 1112696 - RNA, 19 nt, Homo sapiens
  misc_RNA (1)...(19): siRNA sense strand
gagaagaaccagaugcuaa

SEQ ID NO: 1112697 - RNA, 19 nt, Homo sapiens
  misc_RNA (1)...(19): siRNA sense strand
ggaaaauccuuguaaauga

SEQ ID NO: 1112698 - RNA, 19 nt, Homo sapiens
  misc_RNA (1)...(19): siRNA sense strand
gaaaccacaccauccguua

SEQ ID NO: 1112699 - RNA, 19 nt, Homo sapiens
  misc_RNA (1)...(19): siRNA sense strand
caucuaagcuggcaaagag

SEQ ID NO: 1112700 - RNA, 19 nt, Homo sapiens
  misc_RNA (1)...(19): siRNA sense strand
ggaaaugguugugcuaucu

SEQ ID NO: 1112701 - RNA, 19 nt, Homo sapiens
  misc_RNA (1)...(19): siRNA sense strand
ggacugggcucagagaaag

SEQ ID NO: 1112702 - RNA, 19 nt, Homo sapiens
  misc_RNA (1)...(19): siRNA sense strand
gaaacuagcagcaccaagu

SEQ ID NO: 1112703 - RNA, 19 nt, Homo sapiens
  misc_RNA (1)...(19): siRNA sense strand
gaaacaucgucuauucuag

SEQ ID NO: 1112704 - RNA, 19 nt, Homo sapiens
  misc_RNA (1)...(19): siRNA sense strand
caacaucaauggugcuagu

SEQ ID NO: 1112705 - RNA, 19 nt, Homo sapiens
  misc_RNA (1)...(19): siRNA sense strand
cuauagaucugaaaucauc

SEQ ID NO: 1112706 - RNA, 19 nt, Homo sapiens
  misc_RNA (1)...(19): siRNA sense strand
cagcucaccuccucuguug

SEQ ID NO: 1112707 - RNA, 19 nt, Homo sapiens
  misc_RNA (1)...(19): siRNA sense strand
caaugcagauggcaccaaa

SEQ ID NO: 1112708 - RNA, 19 nt, Homo sapiens
  misc_RNA (1)...(19): siRNA sense strand
ggaagagaaucccuugaac

SEQ ID NO: 1112709 - RNA, 19 nt, Homo sapiens
  misc_RNA (1)...(19): siRNA sense strand
ggagaucccggucccauga

SEQ ID NO: 1112710 - RNA, 19 nt, Homo sapiens
  misc_RNA (1)...(19): siRNA sense strand
guccagaguuugugaccua

SEQ ID NO: 1112711 - RNA, 19 nt, Homo sapiens
  misc_RNA (1)...(19): siRNA sense strand
gaagcagaccguuaccaaa

SEQ ID NO: 1112712 - RNA, 19 nt, Homo sapiens
  misc_RNA (1)...(19): siRNA sense strand
cgggaaacaucgucuauuc

SEQ ID NO: 1112713 - RNA, 19 nt, Homo sapiens
  misc_RNA (1)...(19): siRNA sense strand
caucaauggugcuaguuau

SEQ ID NO: 1112714 - RNA, 19 nt, Homo sapiens
  misc_RNA (1)...(19): siRNA sense strand
gaagacagcgguucaagac

SEQ ID NO: 1112715 - RNA, 19 nt, Homo sapiens
  misc_RNA (1)...(19): siRNA sense strand
cagccagucuucaccguaa

SEQ ID NO: 1112716 - RNA, 19 nt, Homo sapiens
  misc_RNA (1)...(19): siRNA sense strand
gaaaugguugugcuaucua

SEQ ID NO: 1112717 - RNA, 19 nt, Homo sapiens
  misc_RNA (1)...(19): siRNA sense strand
ggaagacagcgguucaaga

SEQ ID NO: 1112718 - RNA, 19 nt, Homo sapiens
  misc_RNA (1)...(19): siRNA sense strand
caaagagaaucgccaacuc

SEQ ID NO: 1112719 - RNA, 19 nt, Homo sapiens
  misc_RNA (1)...(19): siRNA sense strand
cuucagugcuauauacaaa

SEQ ID NO: 1112720 - RNA, 19 nt, Homo sapiens
  misc_RNA (1)...(19): siRNA sense strand
uuccaaagcugaccacaug

SEQ ID NO: 1112721 - RNA, 19 nt, Homo sapiens
  misc_RNA (1)...(19): siRNA sense strand
gagaacggccuuccaccaa

SEQ ID NO: 1112722 - RNA, 19 nt, Homo sapiens
  misc_RNA (1)...(19): siRNA sense strand
cuaaagugguggauguaga

SEQ ID NO: 1112723 - RNA, 19 nt, Homo sapiens
  misc_RNA (1)...(19): siRNA sense strand
ccaagaggaucccaaacca

SEQ ID NO: 1112724 - RNA, 19 nt, Homo sapiens
  misc_RNA (1)...(19): siRNA sense strand
gcagguaccaacaaagaga

SEQ ID NO: 1112725 - RNA, 19 nt, Homo sapiens
  misc_RNA (1)...(19): siRNA sense strand
gcucuccaauggcaaguau

SEQ ID NO: 1112726 - RNA, 19 nt, Homo sapiens
  misc_RNA (1)...(19): siRNA sense strand
agggaagacuguugucaaa

SEQ ID NO: 1112727 - RNA, 19 nt, Homo sapiens
  misc_RNA (1)...(19): siRNA sense strand
ccaaagauggagcugauga

SEQ ID NO: 1112728 - RNA, 19 nt, Homo sapiens
  misc_RNA (1)...(19): siRNA sense strand
ggugaccgauucaaaugug

SEQ ID NO: 1112729 - RNA, 19 nt, Homo sapiens
  misc_RNA (1)...(19): siRNA sense strand
ugaaaccgaagccaucuaa

SEQ ID NO: 1112730 - RNA, 19 nt, Homo sapiens
  misc_RNA (1)...(19): siRNA sense strand
gaaauccagagaugcaguu

SEQ ID NO: 1112731 - RNA, 19 nt, Homo sapiens
  misc_RNA (1)...(19): siRNA sense strand
uuacgugggugaccgauuc

SEQ ID NO: 1112732 - RNA, 19 nt, Homo sapiens
  misc_RNA (1)...(19): siRNA sense strand
cuauauuucugucuccaaa

SEQ ID NO: 1112733 - RNA, 19 nt, Homo sapiens
  misc_RNA (1)...(19): siRNA sense strand
ugucaucacuaacguuuca

SEQ ID NO: 1112734 - RNA, 19 nt, Homo sapiens
  misc_RNA (1)...(19): siRNA sense strand
caaaacaccgccuggaaua

SEQ ID NO: 1112735 - RNA, 19 nt, Homo sapiens
  misc_RNA (1)...(19): siRNA sense strand
gcagcaccgugauuucauc

SEQ ID NO: 1112736 - RNA, 19 nt, Homo sapiens
  misc_RNA (1)...(19): siRNA sense strand
gcaaaagcaugucgcugaa

SEQ ID NO: 1112737 - RNA, 19 nt, Homo sapiens
  misc_RNA (1)...(19): siRNA sense strand
cagauaagccacuagacuu

SEQ ID NO: 1112738 - RNA, 19 nt, Homo sapiens
  misc_RNA (1)...(19): siRNA sense strand
caaagcugaccacaugaaa

SEQ ID NO: 1112739 - RNA, 19 nt, Homo sapiens
  misc_RNA (1)...(19): siRNA sense strand
uaccaaagauggagcugau

SEQ ID NO: 1112740 - RNA, 19 nt, Homo sapiens
  misc_RNA (1)...(19): siRNA sense strand
agaagaaccagaugcuaaa

SEQ ID NO: 1112741 - RNA, 19 nt, Homo sapiens
  misc_RNA (1)...(19): siRNA sense strand
caaauggcuucagugcuau

SEQ ID NO: 1112742 - RNA, 19 nt, Homo sapiens
  misc_RNA (1)...(19): siRNA sense strand
ggaaucaagggaagacugu

SEQ ID NO: 1112743 - RNA, 19 nt, Homo sapiens
  misc_RNA (1)...(19): siRNA sense strand
ggccaaguccuaacgaaga

SEQ ID NO: 1112744 - RNA, 19 nt, Homo sapiens
  misc_RNA (1)...(19): siRNA sense strand
ccacacacgcccauagaga

SEQ ID NO: 1112745 - RNA, 19 nt, Homo sapiens
  misc_RNA (1)...(19): siRNA sense strand
gaacugagggaagagaauc

SEQ ID NO: 1112746 - RNA, 19 nt, Homo sapiens
  misc_RNA (1)...(19): siRNA sense strand
ggaagacuguugucaaaag

SEQ ID NO: 1112747 - RNA, 19 nt, Homo sapiens
  misc_RNA (1)...(19): siRNA sense strand
ccucacauccagaacagua

SEQ ID NO: 1112748 - RNA, 19 nt, Homo sapiens
  misc_RNA (1)...(19): siRNA sense strand
gcccauagagauuacuaaa

SEQ ID NO: 1112749 - RNA, 19 nt, Homo sapiens
  misc_RNA (1)...(19): siRNA sense strand
ugucuacccucacccaguu

SEQ ID NO: 1112750 - RNA, 19 nt, Homo sapiens
  misc_RNA (1)...(19): siRNA sense strand
cagcaggagcucuguagaa

SEQ ID NO: 1112751 - RNA, 19 nt, Homo sapiens
  misc_RNA (1)...(19): siRNA sense strand
gacagcgguucaagacaga

SEQ ID NO: 1112752 - RNA, 19 nt, Homo sapiens
  misc_RNA (1)...(19): siRNA sense strand
gcugucaucacuaacguuu

SEQ ID NO: 1112753 - RNA, 19 nt, Homo sapiens
  misc_RNA (1)...(19): siRNA sense strand
aagaggaucccaaaccauu

SEQ ID NO: 1112754 - RNA, 19 nt, Homo sapiens
  misc_RNA (1)...(19): siRNA sense strand
gacuggaacugagggaaga

SEQ ID NO: 1112755 - RNA, 19 nt, Homo sapiens
  misc_RNA (1)...(19): siRNA sense strand
agcaggagcucuguagaaa

SEQ ID NO: 1112756 - RNA, 19 nt, Homo sapiens
  misc_RNA (1)...(19): siRNA sense strand
cgccagccaucuacccuuu

SEQ ID NO: 1112757 - RNA, 19 nt, Homo sapiens
  misc_RNA (1)...(19): siRNA sense strand
gcaaagagaaucgccaacu

SEQ ID NO: 1112758 - RNA, 19 nt, Homo sapiens
  misc_RNA (1)...(19): siRNA sense strand
cuucuaaagugguggaugu

SEQ ID NO: 1112759 - RNA, 19 nt, Homo sapiens
  misc_RNA (1)...(19): siRNA sense strand
ucacagauaagccacuaga

SEQ ID NO: 1112760 - RNA, 19 nt, Homo sapiens
  misc_RNA (1)...(19): siRNA sense strand
ccaaagcugaccacaugaa

SEQ ID NO: 1112761 - RNA, 19 nt, Homo sapiens
  misc_RNA (1)...(19): siRNA sense strand
cgaauacacccgagacagu

SEQ ID NO: 1112762 - RNA, 19 nt, Homo sapiens
  misc_RNA (1)...(19): siRNA sense strand
aaagagaaucgccaacuca

SEQ ID NO: 1112763 - RNA, 19 nt, Homo sapiens
  misc_RNA (1)...(19): siRNA sense strand
cgucacagauaagccacua

SEQ ID NO: 1112764 - RNA, 19 nt, Homo sapiens
  misc_RNA (1)...(19): siRNA sense strand
ugcccugggucaauccuua

SEQ ID NO: 1112765 - RNA, 19 nt, Homo sapiens
  misc_RNA (1)...(19): siRNA sense strand
aaagaaauccagagaugca

SEQ ID NO: 1112766 - RNA, 19 nt, Homo sapiens
  misc_RNA (1)...(19): siRNA sense strand
cgauucaaaugugucacua

SEQ ID NO: 1112767 - RNA, 19 nt, Homo sapiens
  misc_RNA (1)...(19): siRNA sense strand
caaaugauggcaaaguucu

SEQ ID NO: 1112768 - RNA, 19 nt, Homo sapiens
  misc_RNA (1)...(19): siRNA sense strand
gagcgauggcccugcugua

SEQ ID NO: 1112769 - RNA, 19 nt, Homo sapiens
  misc_RNA (1)...(19): siRNA sense strand
ggacccaacccuccggaau

SEQ ID NO: 1112770 - RNA, 19 nt, Homo sapiens
  misc_RNA (1)...(19): siRNA sense strand
gcauuggacugggcgauac

SEQ ID NO: 1112771 - RNA, 19 nt, Homo sapiens
  misc_RNA (1)...(19): siRNA sense strand
aaaagcaugucgcugaaaa

SEQ ID NO: 1112772 - RNA, 19 nt, Homo sapiens
  misc_RNA (1)...(19): siRNA sense strand
uuccucgacucgccaaaua

SEQ ID NO: 1112773 - RNA, 19 nt, Homo sapiens
  misc_RNA (1)...(19): siRNA sense strand
caauggugcuaguuaucug

SEQ ID NO: 1112774 - RNA, 19 nt, Homo sapiens
  misc_RNA (1)...(19): siRNA sense strand
gagcugaugaggcugaauc

SEQ ID NO: 1112775 - RNA, 19 nt, Homo sapiens
  misc_RNA (1)...(19): siRNA sense strand
caucagugacuuccacgaa

SEQ ID NO: 1112776 - RNA, 19 nt, Homo sapiens
  misc_RNA (1)...(19): siRNA sense strand
aaaugguugugcuaucuau

SEQ ID NO: 1112777 - RNA, 19 nt, Homo sapiens
  misc_RNA (1)...(19): siRNA sense strand
gaugcgagcacggcccaua

SEQ ID NO: 1112778 - RNA, 19 nt, Homo sapiens
  misc_RNA (1)...(19): siRNA sense strand
ccacgccuauccucacauc

SEQ ID NO: 1112779 - RNA, 19 nt, Homo sapiens
  misc_RNA (1)...(19): siRNA sense strand
ucgacucgccaaauaagua

SEQ ID NO: 1112780 - RNA, 19 nt, Homo sapiens
  misc_RNA (1)...(19): siRNA sense strand
ugacuuccacgaaacuuau

SEQ ID NO: 1112781 - RNA, 19 nt, Homo sapiens
  misc_RNA (1)...(19): siRNA sense strand
uaaagugguggauguagau

SEQ ID NO: 1112782 - RNA, 19 nt, Homo sapiens
  misc_RNA (1)...(19): siRNA sense strand
gcagcucaccuccucuguu

SEQ ID NO: 1112783 - RNA, 19 nt, Homo sapiens
  misc_RNA (1)...(19): siRNA sense strand
gaucuccaccucuccuuca

SEQ ID NO: 1112784 - RNA, 19 nt, Homo sapiens
  misc_RNA (1)...(19): siRNA sense strand
ggaggcuucugccgucucu

SEQ ID NO: 1112785 - RNA, 19 nt, Homo sapiens
  misc_RNA (1)...(19): siRNA sense strand
gaagagaacaauggcaaaa

SEQ ID NO: 1112786 - RNA, 19 nt, Homo sapiens
  misc_RNA (1)...(19): siRNA sense strand
cgaagagaacaauggcaaa

SEQ ID NO: 1112787 - RNA, 19 nt, Homo sapiens
  misc_RNA (1)...(19): siRNA sense strand
gaagugagauuccgaaaga

SEQ ID NO: 1112788 - RNA, 19 nt, Homo sapiens
  misc_RNA (1)...(19): siRNA sense strand
ggaaagaaauccagagaug

SEQ ID NO: 1112789 - RNA, 19 nt, Homo sapiens
  misc_RNA (1)...(19): siRNA sense strand
ccaaagacgucacagauaa

SEQ ID NO: 1112790 - RNA, 19 nt, Homo sapiens
  misc_RNA (1)...(19): siRNA sense strand
ccaaauggcuucagugcua

SEQ ID NO: 1112791 - RNA, 19 nt, Homo sapiens
  misc_RNA (1)...(19): siRNA sense strand
ccauagagauuacuaaaga

SEQ ID NO: 1112792 - RNA, 19 nt, Homo sapiens
  misc_RNA (1)...(19): siRNA sense strand
ccaccaagcucuauauuuc

SEQ ID NO: 1112793 - RNA, 19 nt, Homo sapiens
  misc_RNA (1)...(19): siRNA sense strand
ggauguagaugcuuccaaa

SEQ ID NO: 1112794 - RNA, 19 nt, Homo sapiens
  misc_RNA (1)...(19): siRNA sense strand
gaaccgaguuucaaagcaa

SEQ ID NO: 1112795 - RNA, 19 nt, Homo sapiens
  misc_RNA (1)...(19): siRNA sense strand
ggaaacaucgucuauucua

SEQ ID NO: 1112796 - RNA, 19 nt, Homo sapiens
  misc_RNA (1)...(19): siRNA sense strand
gagaagaaccagaugcuaa

SEQ ID NO: 1112797 - RNA, 19 nt, Homo sapiens
  misc_RNA (1)...(19): siRNA sense strand
ggaaaauccuuguaaauga

SEQ ID NO: 1112798 - RNA, 19 nt, Homo sapiens
  misc_RNA (1)...(19): siRNA sense strand
gaaaccacaccauccguua

SEQ ID NO: 1112799 - RNA, 19 nt, Homo sapiens
  misc_RNA (1)...(19): siRNA sense strand
caucuaagcuggcaaagag

SEQ ID NO: 1112800 - RNA, 19 nt, Homo sapiens
  misc_RNA (1)...(19): siRNA sense strand
ggaaaugguugugcuaucu

SEQ ID NO: 1112801 - RNA, 19 nt, Homo sapiens
  misc_RNA (1)...(19): siRNA sense strand
ggacugggcucagagaaag

SEQ ID NO: 1112802 - RNA, 19 nt, Homo sapiens
  misc_RNA (1)...(19): siRNA sense strand
gaaacuagcagcaccaagu

SEQ ID NO: 1112803 - RNA, 19 nt, Homo sapiens
  misc_RNA (1)...(19): siRNA sense strand
gaaacaucgucuauucuag

SEQ ID NO: 1112804 - RNA, 19 nt, Homo sapiens
  misc_RNA (1)...(19): siRNA sense strand
caacaucaauggugcuagu

SEQ ID NO: 1112805 - RNA, 19 nt, Homo sapiens
  misc_RNA (1)...(19): siRNA sense strand
cuauagaucugaaaucauc

SEQ ID NO: 1112806 - RNA, 19 nt, Homo sapiens
  misc_RNA (1)...(19): siRNA sense strand
cagcucaccuccucuguug

SEQ ID NO: 1112807 - RNA, 19 nt, Homo sapiens
  misc_RNA (1)...(19): siRNA sense strand
caaugcagauggcaccaaa

SEQ ID NO: 1112808 - RNA, 19 nt, Homo sapiens
  misc_RNA (1)...(19): siRNA sense strand
ggaagagaaucccuugaac

SEQ ID NO: 1112809 - RNA, 19 nt, Homo sapiens
  misc_RNA (1)...(19): siRNA sense strand
ggagaucccggucccauga

SEQ ID NO: 1112810 - RNA, 19 nt, Homo sapiens
  misc_RNA (1)...(19): siRNA sense strand
guccagaguuugugaccua

SEQ ID NO: 1112811 - RNA, 19 nt, Homo sapiens
  misc_RNA (1)...(19): siRNA sense strand
gaagcagaccguuaccaaa

SEQ ID NO: 1112812 - RNA, 19 nt, Homo sapiens
  misc_RNA (1)...(19): siRNA sense strand
cgggaaacaucgucuauuc

SEQ ID NO: 1112813 - RNA, 19 nt, Homo sapiens
  misc_RNA (1)...(19): siRNA sense strand
caucaauggugcuaguuau

SEQ ID NO: 1112814 - RNA, 19 nt, Homo sapiens
  misc_RNA (1)...(19): siRNA sense strand
gaagacagcgguucaagac

SEQ ID NO: 1112815 - RNA, 19 nt, Homo sapiens
  misc_RNA (1)...(19): siRNA sense strand
cagccagucuucaccguaa

SEQ ID NO: 1112816 - RNA, 19 nt, Homo sapiens
  misc_RNA (1)...(19): siRNA sense strand
gaaaugguugugcuaucua

SEQ ID NO: 1112817 - RNA, 19 nt, Homo sapiens
  misc_RNA (1)...(19): siRNA sense strand
ggaagacagcgguucaaga

SEQ ID NO: 1112818 - RNA, 19 nt, Homo sapiens
  misc_RNA (1)...(19): siRNA sense strand
caaagagaaucgccaacuc

SEQ ID NO: 1112819 - RNA, 19 nt, Homo sapiens
  misc_RNA (1)...(19): siRNA sense strand
cuucagugcuauauacaaa

SEQ ID NO: 1112820 - RNA, 19 nt, Homo sapiens
  misc_RNA (1)...(19): siRNA sense strand
uuccaaagcugaccacaug

SEQ ID NO: 1112821 - RNA, 19 nt, Homo sapiens
  misc_RNA (1)...(19): siRNA sense strand
gagaacggccuuccaccaa

SEQ ID NO: 1112822 - RNA, 19 nt, Homo sapiens
  misc_RNA (1)...(19): siRNA sense strand
cuaaagugguggauguaga

SEQ ID NO: 1112823 - RNA, 19 nt, Homo sapiens
  misc_RNA (1)...(19): siRNA sense strand
ccaagaggaucccaaacca

SEQ ID NO: 1112824 - RNA, 19 nt, Homo sapiens
  misc_RNA (1)...(19): siRNA sense strand
gcagguaccaacaaagaga

SEQ ID NO: 1112825 - RNA, 19 nt, Homo sapiens
  misc_RNA (1)...(19): siRNA sense strand
gcucuccaauggcaaguau

SEQ ID NO: 1112826 - RNA, 19 nt, Homo sapiens
  misc_RNA (1)...(19): siRNA sense strand
agggaagacuguugucaaa

SEQ ID NO: 1112827 - RNA, 19 nt, Homo sapiens
  misc_RNA (1)...(19): siRNA sense strand
ccaaagauggagcugauga

SEQ ID NO: 1112828 - RNA, 19 nt, Homo sapiens
  misc_RNA (1)...(19): siRNA sense strand
ggugaccgauucaaaugug

SEQ ID NO: 1112829 - RNA, 19 nt, Homo sapiens
  misc_RNA (1)...(19): siRNA sense strand
ugaaaccgaagccaucuaa

SEQ ID NO: 1112830 - RNA, 19 nt, Homo sapiens
  misc_RNA (1)...(19): siRNA sense strand
gaaauccagagaugcaguu

SEQ ID NO: 1112831 - RNA, 19 nt, Homo sapiens
  misc_RNA (1)...(19): siRNA sense strand
uuacgugggugaccgauuc

SEQ ID NO: 1112832 - RNA, 19 nt, Homo sapiens
  misc_RNA (1)...(19): siRNA sense strand
cuauauuucugucuccaaa

SEQ ID NO: 1112833 - RNA, 19 nt, Homo sapiens
  misc_RNA (1)...(19): siRNA sense strand
ugucaucacuaacguuuca

SEQ ID NO: 1112834 - RNA, 19 nt, Homo sapiens
  misc_RNA (1)...(19): siRNA sense strand
caaaacaccgccuggaaua

SEQ ID NO: 1112835 - RNA, 19 nt, Homo sapiens
  misc_RNA (1)...(19): siRNA sense strand
gcagcaccgugauuucauc

SEQ ID NO: 1112836 - RNA, 19 nt, Homo sapiens
  misc_RNA (1)...(19): siRNA sense strand
gcaaaagcaugucgcugaa

SEQ ID NO: 1112837 - RNA, 19 nt, Homo sapiens
  misc_RNA (1)...(19): siRNA sense strand
cagauaagccacuagacuu

SEQ ID NO: 1112838 - RNA, 19 nt, Homo sapiens
  misc_RNA (1)...(19): siRNA sense strand
caaagcugaccacaugaaa

SEQ ID NO: 1112839 - RNA, 19 nt, Homo sapiens
  misc_RNA (1)...(19): siRNA sense strand
uaccaaagauggagcugau

SEQ ID NO: 1112840 - RNA, 19 nt, Homo sapiens
  misc_RNA (1)...(19): siRNA sense strand
agaagaaccagaugcuaaa

SEQ ID NO: 1112841 - RNA, 19 nt, Homo sapiens
  misc_RNA (1)...(19): siRNA sense strand
caaauggcuucagugcuau

SEQ ID NO: 1112842 - RNA, 19 nt, Homo sapiens
  misc_RNA (1)...(19): siRNA sense strand
ggaaucaagggaagacugu

SEQ ID NO: 1112843 - RNA, 19 nt, Homo sapiens
  misc_RNA (1)...(19): siRNA sense strand
ggccaaguccuaacgaaga

SEQ ID NO: 1112844 - RNA, 19 nt, Homo sapiens
  misc_RNA (1)...(19): siRNA sense strand
ccacacacgcccauagaga

SEQ ID NO: 1112845 - RNA, 19 nt, Homo sapiens
  misc_RNA (1)...(19): siRNA sense strand
gaacugagggaagagaauc

SEQ ID NO: 1112846 - RNA, 19 nt, Homo sapiens
  misc_RNA (1)...(19): siRNA sense strand
ggaagacuguugucaaaag

SEQ ID NO: 1112847 - RNA, 19 nt, Homo sapiens
  misc_RNA (1)...(19): siRNA sense strand
ccucacauccagaacagua

SEQ ID NO: 1112848 - RNA, 19 nt, Homo sapiens
  misc_RNA (1)...(19): siRNA sense strand
gcccauagagauuacuaaa

SEQ ID NO: 1112849 - RNA, 19 nt, Homo sapiens
  misc_RNA (1)...(19): siRNA sense strand
ugucuacccucacccaguu

SEQ ID NO: 1112850 - RNA, 19 nt, Homo sapiens
  misc_RNA (1)...(19): siRNA sense strand
cagcaggagcucuguagaa

SEQ ID NO: 1112851 - RNA, 19 nt, Homo sapiens
  misc_RNA (1)...(19): siRNA sense strand
gacagcgguucaagacaga

SEQ ID NO: 1112852 - RNA, 19 nt, Homo sapiens
  misc_RNA (1)...(19): siRNA sense strand
gcugucaucacuaacguuu

SEQ ID NO: 1112853 - RNA, 19 nt, Homo sapiens
  misc_RNA (1)...(19): siRNA sense strand
aagaggaucccaaaccauu

SEQ ID NO: 1112854 - RNA, 19 nt, Homo sapiens
  misc_RNA (1)...(19): siRNA sense strand
gacuggaacugagggaaga

SEQ ID NO: 1112855 - RNA, 19 nt, Homo sapiens
  misc_RNA (1)...(19): siRNA sense strand
agcaggagcucuguagaaa

SEQ ID NO: 1112856 - RNA, 19 nt, Homo sapiens
  misc_RNA (1)...(19): siRNA sense strand
cgccagccaucuacccuuu

SEQ ID NO: 1112857 - RNA, 19 nt, Homo sapiens
  misc_RNA (1)...(19): siRNA sense strand
gcaaagagaaucgccaacu

SEQ ID NO: 1112858 - RNA, 19 nt, Homo sapiens
  misc_RNA (1)...(19): siRNA sense strand
cuucuaaagugguggaugu

SEQ ID NO: 1112859 - RNA, 19 nt, Homo sapiens
  misc_RNA (1)...(19): siRNA sense strand
ucacagauaagccacuaga

SEQ ID NO: 1112860 - RNA, 19 nt, Homo sapiens
  misc_RNA (1)...(19): siRNA sense strand
ccaaagcugaccacaugaa

SEQ ID NO: 1112861 - RNA, 19 nt, Homo sapiens
  misc_RNA (1)...(19): siRNA sense strand
cgaauacacccgagacagu

SEQ ID NO: 1112862 - RNA, 19 nt, Homo sapiens
  misc_RNA (1)...(19): siRNA sense strand
aaagagaaucgccaacuca

SEQ ID NO: 1112863 - RNA, 19 nt, Homo sapiens
  misc_RNA (1)...(19): siRNA sense strand
cgucacagauaagccacua

SEQ ID NO: 1112864 - RNA, 19 nt, Homo sapiens
  misc_RNA (1)...(19): siRNA sense strand
ugcccugggucaauccuua

SEQ ID NO: 1112865 - RNA, 19 nt, Homo sapiens
  misc_RNA (1)...(19): siRNA sense strand
aaagaaauccagagaugca

SEQ ID NO: 1112866 - RNA, 19 nt, Homo sapiens
  misc_RNA (1)...(19): siRNA sense strand
cgauucaaaugugucacua

SEQ ID NO: 1112867 - RNA, 19 nt, Homo sapiens
  misc_RNA (1)...(19): siRNA sense strand
caaaugauggcaaaguucu

SEQ ID NO: 1112868 - RNA, 19 nt, Homo sapiens
  misc_RNA (1)...(19): siRNA sense strand
gagcgauggcccugcugua

SEQ ID NO: 1112869 - RNA, 19 nt, Homo sapiens
  misc_RNA (1)...(19): siRNA sense strand
ggacccaacccuccggaau

SEQ ID NO: 1112870 - RNA, 19 nt, Homo sapiens
  misc_RNA (1)...(19): siRNA sense strand
gcauuggacugggcgauac

SEQ ID NO: 1112871 - RNA, 19 nt, Homo sapiens
  misc_RNA (1)...(19): siRNA sense strand
aaaagcaugucgcugaaaa

SEQ ID NO: 1112872 - RNA, 19 nt, Homo sapiens
  misc_RNA (1)...(19): siRNA sense strand
uuccucgacucgccaaaua

SEQ ID NO: 1112873 - RNA, 19 nt, Homo sapiens
  misc_RNA (1)...(19): siRNA sense strand
caauggugcuaguuaucug

SEQ ID NO: 1112874 - RNA, 19 nt, Homo sapiens
  misc_RNA (1)...(19): siRNA sense strand
gagcugaugaggcugaauc

SEQ ID NO: 1112875 - RNA, 19 nt, Homo sapiens
  misc_RNA (1)...(19): siRNA sense strand
caucagugacuuccacgaa

SEQ ID NO: 1112876 - RNA, 19 nt, Homo sapiens
  misc_RNA (1)...(19): siRNA sense strand
aaaugguugugcuaucuau

SEQ ID NO: 1112877 - RNA, 19 nt, Homo sapiens
  misc_RNA (1)...(19): siRNA sense strand
gaugcgagcacggcccaua

SEQ ID NO: 1112878 - RNA, 19 nt, Homo sapiens
  misc_RNA (1)...(19): siRNA sense strand
ccacgccuauccucacauc

SEQ ID NO: 1112879 - RNA, 19 nt, Homo sapiens
  misc_RNA (1)...(19): siRNA sense strand
ucgacucgccaaauaagua

SEQ ID NO: 1112880 - RNA, 19 nt, Homo sapiens
  misc_RNA (1)...(19): siRNA sense strand
ugacuuccacgaaacuuau

SEQ ID NO: 1112881 - RNA, 19 nt, Homo sapiens
  misc_RNA (1)...(19): siRNA sense strand
uaaagugguggauguagau

SEQ ID NO: 1112882 - RNA, 19 nt, Homo sapiens
  misc_RNA (1)...(19): siRNA sense strand
gcagcucaccuccucuguu

SEQ ID NO: 1112883 - RNA, 19 nt, Homo sapiens
  misc_RNA (1)...(19): siRNA sense strand
gaucuccaccucuccuuca

SEQ ID NO: 1112884 - RNA, 19 nt, Homo sapiens
  misc_RNA (1)...(19): siRNA sense strand
ggaggcuucugccgucucu

SEQ ID NO: 1112885 - RNA, 19 nt, Homo sapiens
  misc_RNA (1)...(19): siRNA sense strand
gaagagaacaauggcaaaa

SEQ ID NO: 1112886 - RNA, 19 nt, Homo sapiens
  misc_RNA (1)...(19): siRNA sense strand
cgaagagaacaauggcaaa

SEQ ID NO: 1112887 - RNA, 19 nt, Homo sapiens
  misc_RNA (1)...(19): siRNA sense strand
gaaguaauuccaccaauga

SEQ ID NO: 1112888 - RNA, 19 nt, Homo sapiens
  misc_RNA (1)...(19): siRNA sense strand
guaccugucuggauuauuc

SEQ ID NO: 1112889 - RNA, 19 nt, Homo sapiens
  misc_RNA (1)...(19): siRNA sense strand
gagaaguaauuccaccaau

SEQ ID NO: 1112890 - RNA, 19 nt, Homo sapiens
  misc_RNA (1)...(19): siRNA sense strand
ucuggagacuggagaagua

SEQ ID NO: 1112891 - RNA, 19 nt, Homo sapiens
  misc_RNA (1)...(19): siRNA sense strand
agaaguaauuccaccaaug

SEQ ID NO: 1112892 - RNA, 19 nt, Homo sapiens
  misc_RNA (1)...(19): siRNA sense strand
ggagacuggagaaguaauu

SEQ ID NO: 1112893 - RNA, 19 nt, Homo sapiens
  misc_RNA (1)...(19): siRNA sense strand
cugucuggauuauucauua

SEQ ID NO: 1112894 - RNA, 19 nt, Homo sapiens
  misc_RNA (1)...(19): siRNA sense strand
ggagaaguaauuccaccaa

SEQ ID NO: 1112895 - RNA, 19 nt, Homo sapiens
  misc_RNA (1)...(19): siRNA sense strand
agaauuuccugaucaacau

SEQ ID NO: 1112896 - RNA, 19 nt, Homo sapiens
  misc_RNA (1)...(19): siRNA sense strand
guacacuccggaugagaaa

SEQ ID NO: 1112897 - RNA, 19 nt, Homo sapiens
  misc_RNA (1)...(19): siRNA sense strand
guaauuccaccaaugaaag

SEQ ID NO: 1112898 - RNA, 19 nt, Homo sapiens
  misc_RNA (1)...(19): siRNA sense strand
gguacacuccggaugagaa

SEQ ID NO: 1112899 - RNA, 19 nt, Homo sapiens
  misc_RNA (1)...(19): siRNA sense strand
acuuguaccugucuggauu

SEQ ID NO: 1112900 - RNA, 19 nt, Homo sapiens
  misc_RNA (1)...(19): siRNA sense strand
uaauuccaccaaugaaaga

SEQ ID NO: 1112901 - RNA, 19 nt, Homo sapiens
  misc_RNA (1)...(19): siRNA sense strand
uuucacucauguacuugua

SEQ ID NO: 1112902 - RNA, 19 nt, Homo sapiens
  misc_RNA (1)...(19): siRNA sense strand
uuccaccaaugaaagaauu

SEQ ID NO: 1112903 - RNA, 19 nt, Homo sapiens
  misc_RNA (1)...(19): siRNA sense strand
aagaauuuccugaucaaca

SEQ ID NO: 1112904 - RNA, 19 nt, Homo sapiens
  misc_RNA (1)...(19): siRNA sense strand
gaaggcgauggcugaagga

SEQ ID NO: 1112905 - RNA, 19 nt, Homo sapiens
  misc_RNA (1)...(19): siRNA sense strand
aguaauuccaccaaugaaa

SEQ ID NO: 1112906 - RNA, 19 nt, Homo sapiens
  misc_RNA (1)...(19): siRNA sense strand
gaaguaauuccaccaauga

SEQ ID NO: 1112907 - RNA, 19 nt, Homo sapiens
  misc_RNA (1)...(19): siRNA sense strand
guaccugucuggauuauuc

SEQ ID NO: 1112908 - RNA, 19 nt, Homo sapiens
  misc_RNA (1)...(19): siRNA sense strand
gagaaguaauuccaccaau

SEQ ID NO: 1112909 - RNA, 19 nt, Homo sapiens
  misc_RNA (1)...(19): siRNA sense strand
ucuggagacuggagaagua

SEQ ID NO: 1112910 - RNA, 19 nt, Homo sapiens
  misc_RNA (1)...(19): siRNA sense strand
agaaguaauuccaccaaug

SEQ ID NO: 1112911 - RNA, 19 nt, Homo sapiens
  misc_RNA (1)...(19): siRNA sense strand
ggagacuggagaaguaauu

SEQ ID NO: 1112912 - RNA, 19 nt, Homo sapiens
  misc_RNA (1)...(19): siRNA sense strand
cugucuggauuauucauua

SEQ ID NO: 1112913 - RNA, 19 nt, Homo sapiens
  misc_RNA (1)...(19): siRNA sense strand
ggagaaguaauuccaccaa

SEQ ID NO: 1112914 - RNA, 19 nt, Homo sapiens
  misc_RNA (1)...(19): siRNA sense strand
agaauuuccugaucaacau

SEQ ID NO: 1112915 - RNA, 19 nt, Homo sapiens
  misc_RNA (1)...(19): siRNA sense strand
guacacuccggaugagaaa

SEQ ID NO: 1112916 - RNA, 19 nt, Homo sapiens
  misc_RNA (1)...(19): siRNA sense strand
guaauuccaccaaugaaag

SEQ ID NO: 1112917 - RNA, 19 nt, Homo sapiens
  misc_RNA (1)...(19): siRNA sense strand
gguacacuccggaugagaa

SEQ ID NO: 1112918 - RNA, 19 nt, Homo sapiens
  misc_RNA (1)...(19): siRNA sense strand
acuuguaccugucuggauu

SEQ ID NO: 1112919 - RNA, 19 nt, Homo sapiens
  misc_RNA (1)...(19): siRNA sense strand
uaauuccaccaaugaaaga

SEQ ID NO: 1112920 - RNA, 19 nt, Homo sapiens
  misc_RNA (1)...(19): siRNA sense strand
uuucacucauguacuugua

SEQ ID NO: 1112921 - RNA, 19 nt, Homo sapiens
  misc_RNA (1)...(19): siRNA sense strand
uuccaccaaugaaagaauu

SEQ ID NO: 1112922 - RNA, 19 nt, Homo sapiens
  misc_RNA (1)...(19): siRNA sense strand
aagaauuuccugaucaaca

SEQ ID NO: 1112923 - RNA, 19 nt, Homo sapiens
  misc_RNA (1)...(19): siRNA sense strand
gaaggcgauggcugaagga

SEQ ID NO: 1112924 - RNA, 19 nt, Homo sapiens
  misc_RNA (1)...(19): siRNA sense strand
aguaauuccaccaaugaaa

SEQ ID NO: 1112925 - RNA, 19 nt, Homo sapiens
  misc_RNA (1)...(19): siRNA sense strand
caaacaagcuuauacacaa

SEQ ID NO: 1112926 - RNA, 19 nt, Homo sapiens
  misc_RNA (1)...(19): siRNA sense strand
ccacaugcauuggaaauaa

SEQ ID NO: 1112927 - RNA, 19 nt, Homo sapiens
  misc_RNA (1)...(19): siRNA sense strand
gaccauggauguuaguaaa

SEQ ID NO: 1112928 - RNA, 19 nt, Homo sapiens
  misc_RNA (1)...(19): siRNA sense strand
gcucauugcucaaagguau

SEQ ID NO: 1112929 - RNA, 19 nt, Homo sapiens
  misc_RNA (1)...(19): siRNA sense strand
gcucaaagguauuuauuac

SEQ ID NO: 1112930 - RNA, 19 nt, Homo sapiens
  misc_RNA (1)...(19): siRNA sense strand
cuaauguucugacuaauga

SEQ ID NO: 1112931 - RNA, 19 nt, Homo sapiens
  misc_RNA (1)...(19): siRNA sense strand
gaaagacaguaaucagagu

SEQ ID NO: 1112932 - RNA, 19 nt, Homo sapiens
  misc_RNA (1)...(19): siRNA sense strand
uaaauaagaccauggaugu

SEQ ID NO: 1112933 - RNA, 19 nt, Homo sapiens
  misc_RNA (1)...(19): siRNA sense strand
gaaauugcaacacuaacaa

SEQ ID NO: 1112934 - RNA, 19 nt, Homo sapiens
  misc_RNA (1)...(19): siRNA sense strand
aaucagaguucucaaacaa

SEQ ID NO: 1112935 - RNA, 19 nt, Homo sapiens
  misc_RNA (1)...(19): siRNA sense strand
gagaauggaaagacaguaa

SEQ ID NO: 1112936 - RNA, 19 nt, Homo sapiens
  misc_RNA (1)...(19): siRNA sense strand
gcacuugcuuuagcuauca

SEQ ID NO: 1112937 - RNA, 19 nt, Homo sapiens
  misc_RNA (1)...(19): siRNA sense strand
aauaagaccauggauguua

SEQ ID NO: 1112938 - RNA, 19 nt, Homo sapiens
  misc_RNA (1)...(19): siRNA sense strand
ggaaauugcaacacuaaca

SEQ ID NO: 1112939 - RNA, 19 nt, Homo sapiens
  misc_RNA (1)...(19): siRNA sense strand
gcuuauaccaaguugaaua

SEQ ID NO: 1112940 - RNA, 19 nt, Homo sapiens
  misc_RNA (1)...(19): siRNA sense strand
gaacagaaagaaaaggaua

SEQ ID NO: 1112941 - RNA, 19 nt, Homo sapiens
  misc_RNA (1)...(19): siRNA sense strand
augcuaauguucugacuaa

SEQ ID NO: 1112942 - RNA, 19 nt, Homo sapiens
  misc_RNA (1)...(19): siRNA sense strand
uaacaagagagaauggaaa

SEQ ID NO: 1112943 - RNA, 19 nt, Homo sapiens
  misc_RNA (1)...(19): siRNA sense strand
ggagaaaugaccuugaagu

SEQ ID NO: 1112944 - RNA, 19 nt, Homo sapiens
  misc_RNA (1)...(19): siRNA sense strand
gaauaugccauggaagcua

SEQ ID NO: 1112945 - RNA, 19 nt, Homo sapiens
  misc_RNA (1)...(19): siRNA sense strand
gcuaauguucugacuaaug

SEQ ID NO: 1112946 - RNA, 19 nt, Homo sapiens
  misc_RNA (1)...(19): siRNA sense strand
cauggaagcuauuggacau

SEQ ID NO: 1112947 - RNA, 19 nt, Homo sapiens
  misc_RNA (1)...(19): siRNA sense strand
acaagacuauaaagaagga

SEQ ID NO: 1112948 - RNA, 19 nt, Homo sapiens
  misc_RNA (1)...(19): siRNA sense strand
aagcugagcgugagaagaa

SEQ ID NO: 1112949 - RNA, 19 nt, Homo sapiens
  misc_RNA (1)...(19): siRNA sense strand
ggaagaagaagccaaagcu

SEQ ID NO: 1112950 - RNA, 19 nt, Homo sapiens
  misc_RNA (1)...(19): siRNA sense strand
aguaaacucucugcugaaa

SEQ ID NO: 1112951 - RNA, 19 nt, Homo sapiens
  misc_RNA (1)...(19): siRNA sense strand
gagaaaugaccuugaaguc

SEQ ID NO: 1112952 - RNA, 19 nt, Homo sapiens
  misc_RNA (1)...(19): siRNA sense strand
cauaacuucugaugcuaau

SEQ ID NO: 1112953 - RNA, 19 nt, Homo sapiens
  misc_RNA (1)...(19): siRNA sense strand
gaaguggagcaguugauca

SEQ ID NO: 1112954 - RNA, 19 nt, Homo sapiens
  misc_RNA (1)...(19): siRNA sense strand
cuauaaagaaggagaaaug

SEQ ID NO: 1112955 - RNA, 19 nt, Homo sapiens
  misc_RNA (1)...(19): siRNA sense strand
uaacuucugaugcuaaugu

SEQ ID NO: 1112956 - RNA, 19 nt, Homo sapiens
  misc_RNA (1)...(19): siRNA sense strand
gagugacccuaguggaaau

SEQ ID NO: 1112957 - RNA, 19 nt, Homo sapiens
  misc_RNA (1)...(19): siRNA sense strand
ucaaacaagcuuauacaca

SEQ ID NO: 1112958 - RNA, 19 nt, Homo sapiens
  misc_RNA (1)...(19): siRNA sense strand
gaauggaaagacaguaauc

SEQ ID NO: 1112959 - RNA, 19 nt, Homo sapiens
  misc_RNA (1)...(19): siRNA sense strand
gcugugugauaucaaacaa

SEQ ID NO: 1112960 - RNA, 19 nt, Homo sapiens
  misc_RNA (1)...(19): siRNA sense strand
uggcaggcauaacuucuga

SEQ ID NO: 1112961 - RNA, 19 nt, Homo sapiens
  misc_RNA (1)...(19): siRNA sense strand
gcaacacuaacaagagaga

SEQ ID NO: 1112962 - RNA, 19 nt, Homo sapiens
  misc_RNA (1)...(19): siRNA sense strand
cagagugacccuaguggaa

SEQ ID NO: 1112963 - RNA, 19 nt, Homo sapiens
  misc_RNA (1)...(19): siRNA sense strand
aauaugccauggaagcuau

SEQ ID NO: 1112964 - RNA, 19 nt, Homo sapiens
  misc_RNA (1)...(19): siRNA sense strand
uaaucagaguucucaaaca

SEQ ID NO: 1112965 - RNA, 19 nt, Homo sapiens
  misc_RNA (1)...(19): siRNA sense strand
uccagaaggucgcuuauac

SEQ ID NO: 1112966 - RNA, 19 nt, Homo sapiens
  misc_RNA (1)...(19): siRNA sense strand
uugcaacacuaacaagaga

SEQ ID NO: 1112967 - RNA, 19 nt, Homo sapiens
  misc_RNA (1)...(19): siRNA sense strand
guggaaauugcaacacuaa

SEQ ID NO: 1112968 - RNA, 19 nt, Homo sapiens
  misc_RNA (1)...(19): siRNA sense strand
gcaggcauaacuucugaug

SEQ ID NO: 1112969 - RNA, 19 nt, Homo sapiens
  misc_RNA (1)...(19): siRNA sense strand
gaaggccacaugcauugga

SEQ ID NO: 1112970 - RNA, 19 nt, Homo sapiens
  misc_RNA (1)...(19): siRNA sense strand
cugcagcugugucaauguu

SEQ ID NO: 1112971 - RNA, 19 nt, Homo sapiens
  misc_RNA (1)...(19): siRNA sense strand
ucagaguucucaaacaaaa

SEQ ID NO: 1112972 - RNA, 19 nt, Homo sapiens
  misc_RNA (1)...(19): siRNA sense strand
gauggaaggccacaugcau

SEQ ID NO: 1112973 - RNA, 19 nt, Homo sapiens
  misc_RNA (1)...(19): siRNA sense strand
gagcgugagaagaaagaaa

SEQ ID NO: 1112974 - RNA, 19 nt, Homo sapiens
  misc_RNA (1)...(19): siRNA sense strand
uuucauugcuguacauugg

SEQ ID NO: 1112975 - RNA, 19 nt, Homo sapiens
  misc_RNA (1)...(19): siRNA sense strand
cacaugcauuggaaauaau

SEQ ID NO: 1112976 - RNA, 19 nt, Homo sapiens
  misc_RNA (1)...(19): siRNA sense strand
guaaucagaguucucaaac

SEQ ID NO: 1112977 - RNA, 19 nt, Homo sapiens
  misc_RNA (1)...(19): siRNA sense strand
aagagagaauggaaagaca

SEQ ID NO: 1112978 - RNA, 19 nt, Homo sapiens
  misc_RNA (1)...(19): siRNA sense strand
uggaaagacaguaaucaga

SEQ ID NO: 1112979 - RNA, 19 nt, Homo sapiens
  misc_RNA (1)...(19): siRNA sense strand
uauaccaaguugaauaugc

SEQ ID NO: 1112980 - RNA, 19 nt, Homo sapiens
  misc_RNA (1)...(19): siRNA sense strand
ucgcuuauaccaaguugaa

SEQ ID NO: 1112981 - RNA, 19 nt, Homo sapiens
  misc_RNA (1)...(19): siRNA sense strand
ggucgcuuauaccaaguug

SEQ ID NO: 1112982 - RNA, 19 nt, Homo sapiens
  misc_RNA (1)...(19): siRNA sense strand
auaagaccauggauguuag

SEQ ID NO: 1112983 - RNA, 19 nt, Homo sapiens
  misc_RNA (1)...(19): siRNA sense strand
ucccuuugguguuucauug

SEQ ID NO: 1112984 - RNA, 19 nt, Homo sapiens
  misc_RNA (1)...(19): siRNA sense strand
gaugcuaauguucugacua

SEQ ID NO: 1112985 - RNA, 19 nt, Homo sapiens
  misc_RNA (1)...(19): siRNA sense strand
gagagaauggaaagacagu

SEQ ID NO: 1112986 - RNA, 19 nt, Homo sapiens
  misc_RNA (1)...(19): siRNA sense strand
caagagagaauggaaagac

SEQ ID NO: 1112987 - RNA, 19 nt, Homo sapiens
  misc_RNA (1)...(19): siRNA sense strand
ccauggauguuaguaaacu

SEQ ID NO: 1112988 - RNA, 19 nt, Homo sapiens
  misc_RNA (1)...(19): siRNA sense strand
auacacaauuuggaggaaa

SEQ ID NO: 1112989 - RNA, 19 nt, Homo sapiens
  misc_RNA (1)...(19): siRNA sense strand
uggaaggccacaugcauug

SEQ ID NO: 1112990 - RNA, 19 nt, Homo sapiens
  misc_RNA (1)...(19): siRNA sense strand
ggaagcuauuggacaugca

SEQ ID NO: 1112991 - RNA, 19 nt, Homo sapiens
  misc_RNA (1)...(19): siRNA sense strand
ggauguuaguaaacucucu

SEQ ID NO: 1112992 - RNA, 19 nt, Homo sapiens
  misc_RNA (1)...(19): siRNA sense strand
gccacaugcauuggaaaua

SEQ ID NO: 1112993 - RNA, 19 nt, Homo sapiens
  misc_RNA (1)...(19): siRNA sense strand
uauacacaauuuggaggaa

SEQ ID NO: 1112994 - RNA, 19 nt, Homo sapiens
  misc_RNA (1)...(19): siRNA sense strand
aguugaauaugccauggaa

SEQ ID NO: 1112995 - RNA, 19 nt, Homo sapiens
  misc_RNA (1)...(19): siRNA sense strand
cuaacaagagagaauggaa

SEQ ID NO: 1112996 - RNA, 19 nt, Homo sapiens
  misc_RNA (1)...(19): siRNA sense strand
gcgcugcagcugugucaau

SEQ ID NO: 1112997 - RNA, 19 nt, Homo sapiens
  misc_RNA (1)...(19): siRNA sense strand
caacauccacaagcuucuu

SEQ ID NO: 1112998 - RNA, 19 nt, Homo sapiens
  misc_RNA (1)...(19): siRNA sense strand
agagugacccuaguggaaa

SEQ ID NO: 1112999 - RNA, 19 nt, Homo sapiens
  misc_RNA (1)...(19): siRNA sense strand
uaucaggagccaauaccuu

SEQ ID NO: 1113000 - RNA, 19 nt, Homo sapiens
  misc_RNA (1)...(19): siRNA sense strand
cuaaggcucauugcucaaa

SEQ ID NO: 1113001 - RNA, 19 nt, Homo sapiens
  misc_RNA (1)...(19): siRNA sense strand
gcaccuguuugggaauuuu

SEQ ID NO: 1113002 - RNA, 19 nt, Homo sapiens
  misc_RNA (1)...(19): siRNA sense strand
cagaaggucgcuuauacca

SEQ ID NO: 1113003 - RNA, 19 nt, Homo sapiens
  misc_RNA (1)...(19): siRNA sense strand
agaccauggauguuaguaa

SEQ ID NO: 1113004 - RNA, 19 nt, Homo sapiens
  misc_RNA (1)...(19): siRNA sense strand
guggagcaguugaucaaaa

SEQ ID NO: 1113005 - RNA, 19 nt, Homo sapiens
  misc_RNA (1)...(19): siRNA sense strand
uuuagcaaaugaugguguu

SEQ ID NO: 1113006 - RNA, 19 nt, Homo sapiens
  misc_RNA (1)...(19): siRNA sense strand
aaagacaguaaucagaguu

SEQ ID NO: 1113007 - RNA, 19 nt, Homo sapiens
  misc_RNA (1)...(19): siRNA sense strand
ggaggaaaacgucccuuug

SEQ ID NO: 1113008 - RNA, 19 nt, Homo sapiens
  misc_RNA (1)...(19): siRNA sense strand
aguaaucagaguucucaaa

SEQ ID NO: 1113009 - RNA, 19 nt, Homo sapiens
  misc_RNA (1)...(19): siRNA sense strand
gcugggauaagcacuaugg

SEQ ID NO: 1113010 - RNA, 19 nt, Homo sapiens
  misc_RNA (1)...(19): siRNA sense strand
guacauuggcugggauaag

SEQ ID NO: 1113011 - RNA, 19 nt, Homo sapiens
  misc_RNA (1)...(19): siRNA sense strand
gacgcaacauccacaagcu

SEQ ID NO: 1113012 - RNA, 19 nt, Homo sapiens
  misc_RNA (1)...(19): siRNA sense strand
gguguuucauugcuguaca

SEQ ID NO: 1113013 - RNA, 19 nt, Homo sapiens
  misc_RNA (1)...(19): siRNA sense strand
uaaggcucauugcucaaag

SEQ ID NO: 1113014 - RNA, 19 nt, Homo sapiens
  misc_RNA (1)...(19): siRNA sense strand
ccaaagcugagcgugagaa

SEQ ID NO: 1113015 - RNA, 19 nt, Homo sapiens
  misc_RNA (1)...(19): siRNA sense strand
uaucagagugacccuagug

SEQ ID NO: 1113016 - RNA, 19 nt, Homo sapiens
  misc_RNA (1)...(19): siRNA sense strand
acaaauggcuuuacaagaa

SEQ ID NO: 1113017 - RNA, 19 nt, Homo sapiens
  misc_RNA (1)...(19): siRNA sense strand
gcccaagccucucaaauuu

SEQ ID NO: 1113018 - RNA, 19 nt, Homo sapiens
  misc_RNA (1)...(19): siRNA sense strand
auaaacagcuucaagauga

SEQ ID NO: 1113019 - RNA, 19 nt, Homo sapiens
  misc_RNA (1)...(19): siRNA sense strand
gaacaaggaccacggaaug

SEQ ID NO: 1113020 - RNA, 19 nt, Homo sapiens
  misc_RNA (1)...(19): siRNA sense strand
ucacugugcuugucucuuu

SEQ ID NO: 1113021 - RNA, 19 nt, Homo sapiens
  misc_RNA (1)...(19): siRNA sense strand
ggaaaucuaugagaacaug

SEQ ID NO: 1113022 - RNA, 19 nt, Homo sapiens
  misc_RNA (1)...(19): siRNA sense strand
gugaagaugucgaggagua

SEQ ID NO: 1113023 - RNA, 19 nt, Homo sapiens
  misc_RNA (1)...(19): siRNA sense strand
gcaaaucacacuauguauu

SEQ ID NO: 1113024 - RNA, 19 nt, Homo sapiens
  misc_RNA (1)...(19): siRNA sense strand
ugaaggaaaucuaugagaa

SEQ ID NO: 1113025 - RNA, 19 nt, Homo sapiens
  misc_RNA (1)...(19): siRNA sense strand
ccggagggcuguaccuuua

SEQ ID NO: 1113026 - RNA, 19 nt, Homo sapiens
  misc_RNA (1)...(19): siRNA sense strand
ucacccagauugacaagua

SEQ ID NO: 1113027 - RNA, 19 nt, Homo sapiens
  misc_RNA (1)...(19): siRNA sense strand
caaaucacacuauguauug

SEQ ID NO: 1113028 - RNA, 19 nt, Homo sapiens
  misc_RNA (1)...(19): siRNA sense strand
gcaaggaugugguaguaca

SEQ ID NO: 1113029 - RNA, 19 nt, Homo sapiens
  misc_RNA (1)...(19): siRNA sense strand
ccaguuagcucaauaucau

SEQ ID NO: 1113030 - RNA, 19 nt, Homo sapiens
  misc_RNA (1)...(19): siRNA sense strand
gcucugagauuggcauuga

SEQ ID NO: 1113031 - RNA, 19 nt, Homo sapiens
  misc_RNA (1)...(19): siRNA sense strand
ggagauuggugcagagaug

SEQ ID NO: 1113032 - RNA, 19 nt, Homo sapiens
  misc_RNA (1)...(19): siRNA sense strand
gagacuugguuccaucuuu

SEQ ID NO: 1113033 - RNA, 19 nt, Homo sapiens
  misc_RNA (1)...(19): siRNA sense strand
gggcagaauuggccacuga

SEQ ID NO: 1113034 - RNA, 19 nt, Homo sapiens
  misc_RNA (1)...(19): siRNA sense strand
ggauugcccuuauugcuau

SEQ ID NO: 1113035 - RNA, 19 nt, Homo sapiens
  misc_RNA (1)...(19): siRNA sense strand
agacugagcucaaggauac

SEQ ID NO: 1113036 - RNA, 19 nt, Homo sapiens
  misc_RNA (1)...(19): siRNA sense strand
caaacaaccucuucauggu

SEQ ID NO: 1113037 - RNA, 19 nt, Homo sapiens
  misc_RNA (1)...(19): siRNA sense strand
ggaagaaccccaauuauga

SEQ ID NO: 1113038 - RNA, 19 nt, Homo sapiens
  misc_RNA (1)...(19): siRNA sense strand
gugaauggcuuugugaaug

SEQ ID NO: 1113039 - RNA, 19 nt, Homo sapiens
  misc_RNA (1)...(19): siRNA sense strand
ccucaucucuguuucaaau

SEQ ID NO: 1113040 - RNA, 19 nt, Homo sapiens
  misc_RNA (1)...(19): siRNA sense strand
gcacugcucucagacuaug

SEQ ID NO: 1113041 - RNA, 19 nt, Homo sapiens
  misc_RNA (1)...(19): siRNA sense strand
gaaugcugguuacguuuga

SEQ ID NO: 1113042 - RNA, 19 nt, Homo sapiens
  misc_RNA (1)...(19): siRNA sense strand
caacuuccaugacuucagu

SEQ ID NO: 1113043 - RNA, 19 nt, Homo sapiens
  misc_RNA (1)...(19): siRNA sense strand
uaagcaaauucucucauga

SEQ ID NO: 1113044 - RNA, 19 nt, Homo sapiens
  misc_RNA (1)...(19): siRNA sense strand
aagacaagcugcuaacaga

SEQ ID NO: 1113045 - RNA, 19 nt, Homo sapiens
  misc_RNA (1)...(19): siRNA sense strand
ccaaagagaaggaggaaga

SEQ ID NO: 1113046 - RNA, 19 nt, Homo sapiens
  misc_RNA (1)...(19): siRNA sense strand
gauaaacagcuucaagaug

SEQ ID NO: 1113047 - RNA, 19 nt, Homo sapiens
  misc_RNA (1)...(19): siRNA sense strand
gcucaaaucgugaagaugu

SEQ ID NO: 1113048 - RNA, 19 nt, Homo sapiens
  misc_RNA (1)...(19): siRNA sense strand
caaauucucucaugaugcu

SEQ ID NO: 1113049 - RNA, 19 nt, Homo sapiens
  misc_RNA (1)...(19): siRNA sense strand
gcagagauggcauuacgaa

SEQ ID NO: 1113050 - RNA, 19 nt, Homo sapiens
  misc_RNA (1)...(19): siRNA sense strand
caggagaaguggcuaagga

SEQ ID NO: 1113051 - RNA, 19 nt, Homo sapiens
  misc_RNA (1)...(19): siRNA sense strand
gagaucauguccaauguac

SEQ ID NO: 1113052 - RNA, 19 nt, Homo sapiens
  misc_RNA (1)...(19): siRNA sense strand
ggagaaggacauugaugaa

SEQ ID NO: 1113053 - RNA, 19 nt, Homo sapiens
  misc_RNA (1)...(19): siRNA sense strand
gccuuuaucucaccaguug

SEQ ID NO: 1113054 - RNA, 19 nt, Homo sapiens
  misc_RNA (1)...(19): siRNA sense strand
gggcuaggcuuggcuuaug

SEQ ID NO: 1113055 - RNA, 19 nt, Homo sapiens
  misc_RNA (1)...(19): siRNA sense strand
cagauucguucuucuacaa

SEQ ID NO: 1113056 - RNA, 19 nt, Homo sapiens
  misc_RNA (1)...(19): siRNA sense strand
uaacauggcccacaaugca

SEQ ID NO: 1113057 - RNA, 19 nt, Homo sapiens
  misc_RNA (1)...(19): siRNA sense strand
auccagaaguuuccuauaa

SEQ ID NO: 1113058 - RNA, 19 nt, Homo sapiens
  misc_RNA (1)...(19): siRNA sense strand
cuaagcaaauucucucaug

SEQ ID NO: 1113059 - RNA, 19 nt, Homo sapiens
  misc_RNA (1)...(19): siRNA sense strand
ccaacacacugguggaugu

SEQ ID NO: 1113060 - RNA, 19 nt, Homo sapiens
  misc_RNA (1)...(19): siRNA sense strand
ggagcugucugaagaggau

SEQ ID NO: 1113061 - RNA, 19 nt, Homo sapiens
  misc_RNA (1)...(19): siRNA sense strand
caacaaauggcuuuacaag

SEQ ID NO: 1113062 - RNA, 19 nt, Homo sapiens
  misc_RNA (1)...(19): siRNA sense strand
gagaaggacauugaugaaa

SEQ ID NO: 1113063 - RNA, 19 nt, Homo sapiens
  misc_RNA (1)...(19): siRNA sense strand
ggagauguaacuuccacua

SEQ ID NO: 1113064 - RNA, 19 nt, Homo sapiens
  misc_RNA (1)...(19): siRNA sense strand
gggauugcccuuauugcua

SEQ ID NO: 1113065 - RNA, 19 nt, Homo sapiens
  misc_RNA (1)...(19): siRNA sense strand
agaaacagauggcauucau

SEQ ID NO: 1113066 - RNA, 19 nt, Homo sapiens
  misc_RNA (1)...(19): siRNA sense strand
ccaagccucucaaauuucu

SEQ ID NO: 1113067 - RNA, 19 nt, Homo sapiens
  misc_RNA (1)...(19): siRNA sense strand
gcagauucguucuucuaca

SEQ ID NO: 1113068 - RNA, 19 nt, Homo sapiens
  misc_RNA (1)...(19): siRNA sense strand
ugaagaggauaaacagcuu

SEQ ID NO: 1113069 - RNA, 19 nt, Homo sapiens
  misc_RNA (1)...(19): siRNA sense strand
cugcaaggaugugguagua

SEQ ID NO: 1113070 - RNA, 19 nt, Homo sapiens
  misc_RNA (1)...(19): siRNA sense strand
gcaaacugaaggaaaucua

SEQ ID NO: 1113071 - RNA, 19 nt, Homo sapiens
  misc_RNA (1)...(19): siRNA sense strand
ggauaaacagcuucaagau

SEQ ID NO: 1113072 - RNA, 19 nt, Homo sapiens
  misc_RNA (1)...(19): siRNA sense strand
agaaagacaaggacaagaa

SEQ ID NO: 1113073 - RNA, 19 nt, Homo sapiens
  misc_RNA (1)...(19): siRNA sense strand
gcgaacacuuugacuccaa

SEQ ID NO: 1113074 - RNA, 19 nt, Homo sapiens
  misc_RNA (1)...(19): siRNA sense strand
ucagagccauuccgcaguu

SEQ ID NO: 1113075 - RNA, 19 nt, Homo sapiens
  misc_RNA (1)...(19): siRNA sense strand
gcaauggagauguaacuuc

SEQ ID NO: 1113076 - RNA, 19 nt, Homo sapiens
  misc_RNA (1)...(19): siRNA sense strand
gcuuuagccuguggaauga

SEQ ID NO: 1113077 - RNA, 19 nt, Homo sapiens
  misc_RNA (1)...(19): siRNA sense strand
agacuugguuccaucuuug

SEQ ID NO: 1113078 - RNA, 19 nt, Homo sapiens
  misc_RNA (1)...(19): siRNA sense strand
gguguguuccgaaaguuua

SEQ ID NO: 1113079 - RNA, 19 nt, Homo sapiens
  misc_RNA (1)...(19): siRNA sense strand
gaaagacaaggacaagaag

SEQ ID NO: 1113080 - RNA, 19 nt, Homo sapiens
  misc_RNA (1)...(19): siRNA sense strand
ggcaacaaauggcuuuaca

SEQ ID NO: 1113081 - RNA, 19 nt, Homo sapiens
  misc_RNA (1)...(19): siRNA sense strand
aaacccaccuagagaacaa

SEQ ID NO: 1113082 - RNA, 19 nt, Homo sapiens
  misc_RNA (1)...(19): siRNA sense strand
ucaaugacauggaguuggu

SEQ ID NO: 1113083 - RNA, 19 nt, Homo sapiens
  misc_RNA (1)...(19): siRNA sense strand
caaauggcuuuacaagaac

SEQ ID NO: 1113084 - RNA, 19 nt, Homo sapiens
  misc_RNA (1)...(19): siRNA sense strand
gugaagauguccuaacacu

SEQ ID NO: 1113085 - RNA, 19 nt, Homo sapiens
  misc_RNA (1)...(19): siRNA sense strand
caacagcaacaccaugaga

SEQ ID NO: 1113086 - RNA, 19 nt, Homo sapiens
  misc_RNA (1)...(19): siRNA sense strand
gcugacaucaucuccguuu

SEQ ID NO: 1113087 - RNA, 19 nt, Homo sapiens
  misc_RNA (1)...(19): siRNA sense strand
gggcagugguaccaauaau

SEQ ID NO: 1113088 - RNA, 19 nt, Homo sapiens
  misc_RNA (1)...(19): siRNA sense strand
ucaugaugcugauccagaa

SEQ ID NO: 1113089 - RNA, 19 nt, Homo sapiens
  misc_RNA (1)...(19): siRNA sense strand
ggaggaagacaaagacaag

SEQ ID NO: 1113090 - RNA, 19 nt, Homo sapiens
  misc_RNA (1)...(19): siRNA sense strand
gagacugagcucaaggaua

SEQ ID NO: 1113091 - RNA, 19 nt, Homo sapiens
  misc_RNA (1)...(19): siRNA sense strand
uggcaggugucacagcuuu

SEQ ID NO: 1113092 - RNA, 19 nt, Homo sapiens
  misc_RNA (1)...(19): siRNA sense strand
cagacuauguucuccacaa

SEQ ID NO: 1113093 - RNA, 19 nt, Homo sapiens
  misc_RNA (1)...(19): siRNA sense strand
gaaccuggccuccucuuuu

SEQ ID NO: 1113094 - RNA, 19 nt, Homo sapiens
  misc_RNA (1)...(19): siRNA sense strand
gaaggacauugaugaaaau

SEQ ID NO: 1113095 - RNA, 19 nt, Homo sapiens
  misc_RNA (1)...(19): siRNA sense strand
gaaggaaaucuaugagaac

SEQ ID NO: 1113096 - RNA, 19 nt, Homo sapiens
  misc_RNA (1)...(19): siRNA sense strand
aggcaaaucacacuaugua

SEQ ID NO: 1113097 - RNA, 19 nt, Homo sapiens
  misc_RNA (1)...(19): siRNA sense strand
guccugcaauggagaugua

SEQ ID NO: 1113098 - RNA, 19 nt, Homo sapiens
  misc_RNA (1)...(19): siRNA sense strand
acaagcugcuaacagauga

SEQ ID NO: 1113099 - RNA, 19 nt, Homo sapiens
  misc_RNA (1)...(19): siRNA sense strand
ccuauaacauggcccacaa

SEQ ID NO: 1113100 - RNA, 19 nt, Homo sapiens
  misc_RNA (1)...(19): siRNA sense strand
gcaacaaauggcuuuacaa

SEQ ID NO: 1113101 - RNA, 19 nt, Homo sapiens
  misc_RNA (1)...(19): siRNA sense strand
guucgaaacauuauucuag

SEQ ID NO: 1113102 - RNA, 19 nt, Homo sapiens
  misc_RNA (1)...(19): siRNA sense strand
caaggaccacggaauguug

SEQ ID NO: 1113103 - RNA, 19 nt, Homo sapiens
  misc_RNA (1)...(19): siRNA sense strand
cagagaucauguccaaugu

SEQ ID NO: 1113104 - RNA, 19 nt, Homo sapiens
  misc_RNA (1)...(19): siRNA sense strand
gauccagaaguuuccuaua

SEQ ID NO: 1113105 - RNA, 19 nt, Homo sapiens
  misc_RNA (1)...(19): siRNA sense strand
gugcagagauggcauuacg

SEQ ID NO: 1113106 - RNA, 19 nt, Homo sapiens
  misc_RNA (1)...(19): siRNA sense strand
gacaagcugcuaacagaug

SEQ ID NO: 1113107 - RNA, 19 nt, Homo sapiens
  misc_RNA (1)...(19): siRNA sense strand
agaaggacauugaugaaaa

SEQ ID NO: 1113108 - RNA, 19 nt, Homo sapiens
  misc_RNA (1)...(19): siRNA sense strand
gacaaagacaagaaggaaa

SEQ ID NO: 1113109 - RNA, 19 nt, Homo sapiens
  misc_RNA (1)...(19): siRNA sense strand
gagauguaacuuccacuau

SEQ ID NO: 1113110 - RNA, 19 nt, Homo sapiens
  misc_RNA (1)...(19): siRNA sense strand
uaacagaugauggcaacaa

SEQ ID NO: 1113111 - RNA, 19 nt, Homo sapiens
  misc_RNA (1)...(19): siRNA sense strand
caaacugaaggaaaucuau

SEQ ID NO: 1113112 - RNA, 19 nt, Homo sapiens
  misc_RNA (1)...(19): siRNA sense strand
gcucaacagcaacuucuug

SEQ ID NO: 1113113 - RNA, 19 nt, Homo sapiens
  misc_RNA (1)...(19): siRNA sense strand
acagagaucauguccaaug

SEQ ID NO: 1113114 - RNA, 19 nt, Homo sapiens
  misc_RNA (1)...(19): siRNA sense strand
acauggaguugguagaaga

SEQ ID NO: 1113115 - RNA, 19 nt, Homo sapiens
  misc_RNA (1)...(19): siRNA sense strand
cagcugcuccacauuugua

SEQ ID NO: 1113116 - RNA, 19 nt, Homo sapiens
  misc_RNA (1)...(19): siRNA sense strand
ggacauugcugcaggagaa

SEQ ID NO: 1113117 - RNA, 19 nt, Homo sapiens
  misc_RNA (1)...(19): siRNA sense strand
caagauaccucucgcaugu

SEQ ID NO: 1113118 - RNA, 19 nt, Homo sapiens
  misc_RNA (1)...(19): siRNA sense strand
gagaagagguugccaucaa

SEQ ID NO: 1113119 - RNA, 19 nt, Homo sapiens
  misc_RNA (1)...(19): siRNA sense strand
ccacauaccugaauuucug

SEQ ID NO: 1113120 - RNA, 19 nt, Homo sapiens
  misc_RNA (1)...(19): siRNA sense strand
gaacaaucccgaagagaug

SEQ ID NO: 1113121 - RNA, 19 nt, Homo sapiens
  misc_RNA (1)...(19): siRNA sense strand
ccaucgaaguguuguguaa

SEQ ID NO: 1113122 - RNA, 19 nt, Homo sapiens
  misc_RNA (1)...(19): siRNA sense strand
aggcuacccuuccgaauuu

SEQ ID NO: 1113123 - RNA, 19 nt, Homo sapiens
  misc_RNA (1)...(19): siRNA sense strand
ccaccaagagacagaaaua

SEQ ID NO: 1113124 - RNA, 19 nt, Homo sapiens
  misc_RNA (1)...(19): siRNA sense strand
ccaguggucuucagucugu

SEQ ID NO: 1113125 - RNA, 19 nt, Homo sapiens
  misc_RNA (1)...(19): siRNA sense strand
caacacgcaccuuggaauu

SEQ ID NO: 1113126 - RNA, 19 nt, Homo sapiens
  misc_RNA (1)...(19): siRNA sense strand
cagaaauacgaaaggauua

SEQ ID NO: 1113127 - RNA, 19 nt, Homo sapiens
  misc_RNA (1)...(19): siRNA sense strand
acacgcaccuuggaauuga

SEQ ID NO: 1113128 - RNA, 19 nt, Homo sapiens
  misc_RNA (1)...(19): siRNA sense strand
gagagagagcggaaaguga

SEQ ID NO: 1113129 - RNA, 19 nt, Homo sapiens
  misc_RNA (1)...(19): siRNA sense strand
gagaggagcggcugagaca

SEQ ID NO: 1113130 - RNA, 19 nt, Homo sapiens
  misc_RNA (1)...(19): siRNA sense strand
caacuucugcuccaggaaa

SEQ ID NO: 1113131 - RNA, 19 nt, Homo sapiens
  misc_RNA (1)...(19): siRNA sense strand
gcugcuugcugaccaaaug

SEQ ID NO: 1113132 - RNA, 19 nt, Homo sapiens
  misc_RNA (1)...(19): siRNA sense strand
caagagacagaaauacgaa

SEQ ID NO: 1113133 - RNA, 19 nt, Homo sapiens
  misc_RNA (1)...(19): siRNA sense strand
agacagaaauacgaaagga

SEQ ID NO: 1113134 - RNA, 19 nt, Homo sapiens
  misc_RNA (1)...(19): siRNA sense strand
gcuacgugcuaauguacuu

SEQ ID NO: 1113135 - RNA, 19 nt, Homo sapiens
  misc_RNA (1)...(19): siRNA sense strand
ggagagagagcggaaagug

SEQ ID NO: 1113136 - RNA, 19 nt, Homo sapiens
  misc_RNA (1)...(19): siRNA sense strand
acagaaauacgaaaggauu

SEQ ID NO: 1113137 - RNA, 19 nt, Homo sapiens
  misc_RNA (1)...(19): siRNA sense strand
gaaaggauuagcgagaaga

SEQ ID NO: 1113138 - RNA, 19 nt, Homo sapiens
  misc_RNA (1)...(19): siRNA sense strand
gccagggcuucuccuauga

SEQ ID NO: 1113139 - RNA, 19 nt, Homo sapiens
  misc_RNA (1)...(19): siRNA sense strand
cgccagggcuucuccuaug

SEQ ID NO: 1113140 - RNA, 19 nt, Homo sapiens
  misc_RNA (1)...(19): siRNA sense strand
acccucagcuccacauuga

SEQ ID NO: 1113141 - RNA, 19 nt, Homo sapiens
  misc_RNA (1)...(19): siRNA sense strand
cuuccgaauuugccacaua

SEQ ID NO: 1113142 - RNA, 19 nt, Homo sapiens
  misc_RNA (1)...(19): siRNA sense strand
aaugaucagucgcaucgaa

SEQ ID NO: 1113143 - RNA, 19 nt, Homo sapiens
  misc_RNA (1)...(19): siRNA sense strand
ccaagagacagaaauacga

SEQ ID NO: 1113144 - RNA, 19 nt, Homo sapiens
  misc_RNA (1)...(19): siRNA sense strand
gaaggcugccaccaagaga

SEQ ID NO: 1113145 - RNA, 19 nt, Homo sapiens
  misc_RNA (1)...(19): siRNA sense strand
cgaaaggauuagcgagaag

SEQ ID NO: 1113146 - RNA, 19 nt, Homo sapiens
  misc_RNA (1)...(19): siRNA sense strand
ugaacaaucccgaagagau

SEQ ID NO: 1113147 - RNA, 19 nt, Homo sapiens
  misc_RNA (1)...(19): siRNA sense strand
ugggcuacgugcuaaugua

SEQ ID NO: 1113148 - RNA, 19 nt, Homo sapiens
  misc_RNA (1)...(19): siRNA sense strand
agaagagguugccaucaag

SEQ ID NO: 1113149 - RNA, 19 nt, Homo sapiens
  misc_RNA (1)...(19): siRNA sense strand
ucucugggcuacgugcuaa

SEQ ID NO: 1113150 - RNA, 19 nt, Homo sapiens
  misc_RNA (1)...(19): siRNA sense strand
gggcuucuccuaugacuac

SEQ ID NO: 1113151 - RNA, 19 nt, Homo sapiens
  misc_RNA (1)...(19): siRNA sense strand
acgaaaggauuagcgagaa

SEQ ID NO: 1113152 - RNA, 19 nt, Homo sapiens
  misc_RNA (1)...(19): siRNA sense strand
gagcggaaagugaguaugc

SEQ ID NO: 1113153 - RNA, 19 nt, Homo sapiens
  misc_RNA (1)...(19): siRNA sense strand
gcaaccugguguacaucau

SEQ ID NO: 1113154 - RNA, 19 nt, Homo sapiens
  misc_RNA (1)...(19): siRNA sense strand
caucaacacgcaccuugga

SEQ ID NO: 1113155 - RNA, 19 nt, Homo sapiens
  misc_RNA (1)...(19): siRNA sense strand
caggaaauucagccucaaa

SEQ ID NO: 1113156 - RNA, 19 nt, Homo sapiens
  misc_RNA (1)...(19): siRNA sense strand
ggagaagagguugccauca

SEQ ID NO: 1113157 - RNA, 19 nt, Homo sapiens
  misc_RNA (1)...(19): siRNA sense strand
ccucacaggccgacaagau

SEQ ID NO: 1113158 - RNA, 19 nt, Homo sapiens
  misc_RNA (1)...(19): siRNA sense strand
ugaucagucgcaucgaaua

SEQ ID NO: 1113159 - RNA, 19 nt, Homo sapiens
  misc_RNA (1)...(19): siRNA sense strand
gagagcggaaagugaguau

SEQ ID NO: 1113160 - RNA, 19 nt, Homo sapiens
  misc_RNA (1)...(19): siRNA sense strand
gagcugagagucgggaaca

SEQ ID NO: 1113161 - RNA, 19 nt, Homo sapiens
  misc_RNA (1)...(19): siRNA sense strand
gaucagucgcaucgaauac

SEQ ID NO: 1113162 - RNA, 19 nt, Homo sapiens
  misc_RNA (1)...(19): siRNA sense strand
ucagucgcaucgaauacau

SEQ ID NO: 1113163 - RNA, 19 nt, Homo sapiens
  misc_RNA (1)...(19): siRNA sense strand
cuaccucacacacggcuaa

SEQ ID NO: 1113164 - RNA, 19 nt, Homo sapiens
  misc_RNA (1)...(19): siRNA sense strand
gaggagcggcugagacacu

SEQ ID NO: 1113165 - RNA, 19 nt, Homo sapiens
  misc_RNA (1)...(19): siRNA sense strand
gcaccuuggaauugaacaa

SEQ ID NO: 1113166 - RNA, 19 nt, Homo sapiens
  misc_RNA (1)...(19): siRNA sense strand
ccaggaaauucagccucaa

SEQ ID NO: 1113167 - RNA, 19 nt, Homo sapiens
  misc_RNA (1)...(19): siRNA sense strand
cucacaggccgacaagaua

SEQ ID NO: 1113168 - RNA, 19 nt, Homo sapiens
  misc_RNA (1)...(19): siRNA sense strand
gaagggcaaccugguguac

SEQ ID NO: 1113169 - RNA, 19 nt, Homo sapiens
  misc_RNA (1)...(19): siRNA sense strand
gccagacaacuuccucaug

SEQ ID NO: 1113170 - RNA, 19 nt, Homo sapiens
  misc_RNA (1)...(19): siRNA sense strand
caucgaaguguuguguaaa

SEQ ID NO: 1113171 - RNA, 19 nt, Homo sapiens
  misc_RNA (1)...(19): siRNA sense strand
ucaacacgcaccuuggaau

SEQ ID NO: 1113172 - RNA, 19 nt, Homo sapiens
  misc_RNA (1)...(19): siRNA sense strand
caaccugguguacaucauc

SEQ ID NO: 1113173 - RNA, 19 nt, Homo sapiens
  misc_RNA (1)...(19): siRNA sense strand
gacagaaauacgaaaggau

SEQ ID NO: 1113174 - RNA, 19 nt, Homo sapiens
  misc_RNA (1)...(19): siRNA sense strand
gcgguacgccuccaucaac

SEQ ID NO: 1113175 - RNA, 19 nt, Homo sapiens
  misc_RNA (1)...(19): siRNA sense strand
ggacauugcugcaggagaa

SEQ ID NO: 1113176 - RNA, 19 nt, Homo sapiens
  misc_RNA (1)...(19): siRNA sense strand
caagauaccucucgcaugu

SEQ ID NO: 1113177 - RNA, 19 nt, Homo sapiens
  misc_RNA (1)...(19): siRNA sense strand
gagaagagguugccaucaa

SEQ ID NO: 1113178 - RNA, 19 nt, Homo sapiens
  misc_RNA (1)...(19): siRNA sense strand
ccacauaccugaauuucug

SEQ ID NO: 1113179 - RNA, 19 nt, Homo sapiens
  misc_RNA (1)...(19): siRNA sense strand
gaacaaucccgaagagaug

SEQ ID NO: 1113180 - RNA, 19 nt, Homo sapiens
  misc_RNA (1)...(19): siRNA sense strand
ccaucgaaguguuguguaa

SEQ ID NO: 1113181 - RNA, 19 nt, Homo sapiens
  misc_RNA (1)...(19): siRNA sense strand
aggcuacccuuccgaauuu

SEQ ID NO: 1113182 - RNA, 19 nt, Homo sapiens
  misc_RNA (1)...(19): siRNA sense strand
ccaccaagagacagaaaua

SEQ ID NO: 1113183 - RNA, 19 nt, Homo sapiens
  misc_RNA (1)...(19): siRNA sense strand
caacacgcaccuuggaauu

SEQ ID NO: 1113184 - RNA, 19 nt, Homo sapiens
  misc_RNA (1)...(19): siRNA sense strand
cagaaauacgaaaggauua

SEQ ID NO: 1113185 - RNA, 19 nt, Homo sapiens
  misc_RNA (1)...(19): siRNA sense strand
acacgcaccuuggaauuga

SEQ ID NO: 1113186 - RNA, 19 nt, Homo sapiens
  misc_RNA (1)...(19): siRNA sense strand
gagagagagcggaaaguga

SEQ ID NO: 1113187 - RNA, 19 nt, Homo sapiens
  misc_RNA (1)...(19): siRNA sense strand
gagaggagcggcugagaca

SEQ ID NO: 1113188 - RNA, 19 nt, Homo sapiens
  misc_RNA (1)...(19): siRNA sense strand
caacuucugcuccaggaaa

SEQ ID NO: 1113189 - RNA, 19 nt, Homo sapiens
  misc_RNA (1)...(19): siRNA sense strand
gcugcuugcugaccaaaug

SEQ ID NO: 1113190 - RNA, 19 nt, Homo sapiens
  misc_RNA (1)...(19): siRNA sense strand
caagagacagaaauacgaa

SEQ ID NO: 1113191 - RNA, 19 nt, Homo sapiens
  misc_RNA (1)...(19): siRNA sense strand
agacagaaauacgaaagga

SEQ ID NO: 1113192 - RNA, 19 nt, Homo sapiens
  misc_RNA (1)...(19): siRNA sense strand
gcuacgugcuaauguacuu

SEQ ID NO: 1113193 - RNA, 19 nt, Homo sapiens
  misc_RNA (1)...(19): siRNA sense strand
ggagagagagcggaaagug

SEQ ID NO: 1113194 - RNA, 19 nt, Homo sapiens
  misc_RNA (1)...(19): siRNA sense strand
acagaaauacgaaaggauu

SEQ ID NO: 1113195 - RNA, 19 nt, Homo sapiens
  misc_RNA (1)...(19): siRNA sense strand
gaaaggauuagcgagaaga

SEQ ID NO: 1113196 - RNA, 19 nt, Homo sapiens
  misc_RNA (1)...(19): siRNA sense strand
gccagggcuucuccuauga

SEQ ID NO: 1113197 - RNA, 19 nt, Homo sapiens
  misc_RNA (1)...(19): siRNA sense strand
cgccagggcuucuccuaug

SEQ ID NO: 1113198 - RNA, 19 nt, Homo sapiens
  misc_RNA (1)...(19): siRNA sense strand
acccucagcuccacauuga

SEQ ID NO: 1113199 - RNA, 19 nt, Homo sapiens
  misc_RNA (1)...(19): siRNA sense strand
cuuccgaauuugccacaua

SEQ ID NO: 1113200 - RNA, 19 nt, Homo sapiens
  misc_RNA (1)...(19): siRNA sense strand
aaugaucagucgcaucgaa

SEQ ID NO: 1113201 - RNA, 19 nt, Homo sapiens
  misc_RNA (1)...(19): siRNA sense strand
ccaagagacagaaauacga

SEQ ID NO: 1113202 - RNA, 19 nt, Homo sapiens
  misc_RNA (1)...(19): siRNA sense strand
gaaggcugccaccaagaga

SEQ ID NO: 1113203 - RNA, 19 nt, Homo sapiens
  misc_RNA (1)...(19): siRNA sense strand
cgaaaggauuagcgagaag

SEQ ID NO: 1113204 - RNA, 19 nt, Homo sapiens
  misc_RNA (1)...(19): siRNA sense strand
ugaacaaucccgaagagau

SEQ ID NO: 1113205 - RNA, 19 nt, Homo sapiens
  misc_RNA (1)...(19): siRNA sense strand
ugggcuacgugcuaaugua

SEQ ID NO: 1113206 - RNA, 19 nt, Homo sapiens
  misc_RNA (1)...(19): siRNA sense strand
agaagagguugccaucaag

SEQ ID NO: 1113207 - RNA, 19 nt, Homo sapiens
  misc_RNA (1)...(19): siRNA sense strand
ucucugggcuacgugcuaa

SEQ ID NO: 1113208 - RNA, 19 nt, Homo sapiens
  misc_RNA (1)...(19): siRNA sense strand
gggcuucuccuaugacuac

SEQ ID NO: 1113209 - RNA, 19 nt, Homo sapiens
  misc_RNA (1)...(19): siRNA sense strand
acgaaaggauuagcgagaa

SEQ ID NO: 1113210 - RNA, 19 nt, Homo sapiens
  misc_RNA (1)...(19): siRNA sense strand
gagcggaaagugaguaugc

SEQ ID NO: 1113211 - RNA, 19 nt, Homo sapiens
  misc_RNA (1)...(19): siRNA sense strand
gcaaccugguguacaucau

SEQ ID NO: 1113212 - RNA, 19 nt, Homo sapiens
  misc_RNA (1)...(19): siRNA sense strand
caucaacacgcaccuugga

SEQ ID NO: 1113213 - RNA, 19 nt, Homo sapiens
  misc_RNA (1)...(19): siRNA sense strand
caggaaauucagccucaaa

SEQ ID NO: 1113214 - RNA, 19 nt, Homo sapiens
  misc_RNA (1)...(19): siRNA sense strand
ggagaagagguugccauca

SEQ ID NO: 1113215 - RNA, 19 nt, Homo sapiens
  misc_RNA (1)...(19): siRNA sense strand
ccucacaggccgacaagau

SEQ ID NO: 1113216 - RNA, 19 nt, Homo sapiens
  misc_RNA (1)...(19): siRNA sense strand
ugaucagucgcaucgaaua

SEQ ID NO: 1113217 - RNA, 19 nt, Homo sapiens
  misc_RNA (1)...(19): siRNA sense strand
gagagcggaaagugaguau

SEQ ID NO: 1113218 - RNA, 19 nt, Homo sapiens
  misc_RNA (1)...(19): siRNA sense strand
gagcugagagucgggaaca

SEQ ID NO: 1113219 - RNA, 19 nt, Homo sapiens
  misc_RNA (1)...(19): siRNA sense strand
gaucagucgcaucgaauac

SEQ ID NO: 1113220 - RNA, 19 nt, Homo sapiens
  misc_RNA (1)...(19): siRNA sense strand
ucagucgcaucgaauacau

SEQ ID NO: 1113221 - RNA, 19 nt, Homo sapiens
  misc_RNA (1)...(19): siRNA sense strand
cuaccucacacacggcuaa

SEQ ID NO: 1113222 - RNA, 19 nt, Homo sapiens
  misc_RNA (1)...(19): siRNA sense strand
gaggagcggcugagacacu

SEQ ID NO: 1113223 - RNA, 19 nt, Homo sapiens
  misc_RNA (1)...(19): siRNA sense strand
gcaccuuggaauugaacaa

SEQ ID NO: 1113224 - RNA, 19 nt, Homo sapiens
  misc_RNA (1)...(19): siRNA sense strand
ccaggaaauucagccucaa

SEQ ID NO: 1113225 - RNA, 19 nt, Homo sapiens
  misc_RNA (1)...(19): siRNA sense strand
cucacaggccgacaagaua

SEQ ID NO: 1113226 - RNA, 19 nt, Homo sapiens
  misc_RNA (1)...(19): siRNA sense strand
gaagggcaaccugguguac

SEQ ID NO: 1113227 - RNA, 19 nt, Homo sapiens
  misc_RNA (1)...(19): siRNA sense strand
gccagacaacuuccucaug

SEQ ID NO: 1113228 - RNA, 19 nt, Homo sapiens
  misc_RNA (1)...(19): siRNA sense strand
caucgaaguguuguguaaa

SEQ ID NO: 1113229 - RNA, 19 nt, Homo sapiens
  misc_RNA (1)...(19): siRNA sense strand
ucaacacgcaccuuggaau

SEQ ID NO: 1113230 - RNA, 19 nt, Homo sapiens
  misc_RNA (1)...(19): siRNA sense strand
caaccugguguacaucauc

SEQ ID NO: 1113231 - RNA, 19 nt, Homo sapiens
  misc_RNA (1)...(19): siRNA sense strand
gacagaaauacgaaaggau

SEQ ID NO: 1113232 - RNA, 19 nt, Homo sapiens
  misc_RNA (1)...(19): siRNA sense strand
gcgguacgccuccaucaac

SEQ ID NO: 1113233 - RNA, 19 nt, Homo sapiens
  misc_RNA (1)...(19): siRNA sense strand
gcacagacuccaaguauua

SEQ ID NO: 1113234 - RNA, 19 nt, Homo sapiens
  misc_RNA (1)...(19): siRNA sense strand
gaagaaugguaccucguuu

SEQ ID NO: 1113235 - RNA, 19 nt, Homo sapiens
  misc_RNA (1)...(19): siRNA sense strand
gcaccuacgugaagaaugg

SEQ ID NO: 1113236 - RNA, 19 nt, Homo sapiens
  misc_RNA (1)...(19): siRNA sense strand
ggaucccgcugcacaaguu

SEQ ID NO: 1113237 - RNA, 19 nt, Homo sapiens
  misc_RNA (1)...(19): siRNA sense strand
ccgaggugcucaagaacua

SEQ ID NO: 1113238 - RNA, 19 nt, Homo sapiens
  misc_RNA (1)...(19): siRNA sense strand
gaacaucuucuccuucuac

SEQ ID NO: 1113239 - RNA, 19 nt, Homo sapiens
  misc_RNA (1)...(19): siRNA sense strand
ggcacagacuccaaguauu

SEQ ID NO: 1113240 - RNA, 19 nt, Homo sapiens
  misc_RNA (1)...(19): siRNA sense strand
aaugguaccucguuugaca

SEQ ID NO: 1113241 - RNA, 19 nt, Homo sapiens
  misc_RNA (1)...(19): siRNA sense strand
cacaggcacuucccucaug

SEQ ID NO: 1113242 - RNA, 19 nt, Homo sapiens
  misc_RNA (1)...(19): siRNA sense strand
ggagggcugugaggccauu

SEQ ID NO: 1113243 - RNA, 19 nt, Homo sapiens
  misc_RNA (1)...(19): siRNA sense strand
ugaagaaugguaccucguu

SEQ ID NO: 1113244 - RNA, 19 nt, Homo sapiens
  misc_RNA (1)...(19): siRNA sense strand
agaaugguaccucguuuga

SEQ ID NO: 1113245 - RNA, 19 nt, Homo sapiens
  misc_RNA (1)...(19): siRNA sense strand
uggcacagacuccaaguau

SEQ ID NO: 1113246 - RNA, 19 nt, Homo sapiens
  misc_RNA (1)...(19): siRNA sense strand
gauccugggcgacgucuuc

SEQ ID NO: 1113247 - RNA, 19 nt, Homo sapiens
  misc_RNA (1)...(19): siRNA sense strand
gcuggauccaccacaagua

SEQ ID NO: 1113248 - RNA, 19 nt, Homo sapiens
  misc_RNA (1)...(19): siRNA sense strand
ccugggcggugucaaagug

SEQ ID NO: 1113249 - RNA, 19 nt, Homo sapiens
  misc_RNA (1)...(19): siRNA sense strand
guaccucguuugacaucca

SEQ ID NO: 1113250 - RNA, 19 nt, Homo sapiens
  misc_RNA (1)...(19): siRNA sense strand
cguuugacauccacuaugg

SEQ ID NO: 1113251 - RNA, 19 nt, Homo sapiens
  misc_RNA (1)...(19): siRNA sense strand
ggauccaccacaaguacaa

SEQ ID NO: 1113252 - RNA, 19 nt, Homo sapiens
  misc_RNA (1)...(19): siRNA sense strand
cuucaucgcagccaaguuc

SEQ ID NO: 1113253 - RNA, 19 nt, Homo sapiens
  misc_RNA (1)...(19): siRNA sense strand
uucccgaggugcucaagaa

SEQ ID NO: 1113254 - RNA, 19 nt, Homo sapiens
  misc_RNA (1)...(19): siRNA sense strand
gcaucuccgucaacaacgu

SEQ ID NO: 1113255 - RNA, 19 nt, Homo sapiens
  misc_RNA (1)...(19): siRNA sense strand
gugcuucacagucgucuuc

SEQ ID NO: 1113256 - RNA, 19 nt, Homo sapiens
  misc_RNA (1)...(19): siRNA sense strand
acaacgugcugcccgucuu

SEQ ID NO: 1113257 - RNA, 19 nt, Homo sapiens
  misc_RNA (1)...(19): siRNA sense strand
acaaccugaugcagcagaa

SEQ ID NO: 1113258 - RNA, 19 nt, Homo sapiens
  misc_RNA (1)...(19): siRNA sense strand
ucucuguccuaccugaaug

SEQ ID NO: 1113259 - RNA, 19 nt, Homo sapiens
  misc_RNA (1)...(19): siRNA sense strand
gggcagaugucagagauua

SEQ ID NO: 1113260 - RNA, 19 nt, Homo sapiens
  misc_RNA (1)...(19): siRNA sense strand
gaaacuauauccuaaaggu

SEQ ID NO: 1113261 - RNA, 19 nt, Homo sapiens
  misc_RNA (1)...(19): siRNA sense strand
ggauugauauuacagaugu

SEQ ID NO: 1113262 - RNA, 19 nt, Homo sapiens
  misc_RNA (1)...(19): siRNA sense strand
gcacaauuucaccguauua

SEQ ID NO: 1113263 - RNA, 19 nt, Homo sapiens
  misc_RNA (1)...(19): siRNA sense strand
cgacaacccuuauuacaac

SEQ ID NO: 1113264 - RNA, 19 nt, Homo sapiens
  misc_RNA (1)...(19): siRNA sense strand
ccacaaagcaaguuucugu

SEQ ID NO: 1113265 - RNA, 19 nt, Homo sapiens
  misc_RNA (1)...(19): siRNA sense strand
caaagcaaguuucugucuu

SEQ ID NO: 1113266 - RNA, 19 nt, Homo sapiens
  misc_RNA (1)...(19): siRNA sense strand
aguccuggcuguuaugaua

SEQ ID NO: 1113267 - RNA, 19 nt, Homo sapiens
  misc_RNA (1)...(19): siRNA sense strand
ccuggaaacuauauccuaa

SEQ ID NO: 1113268 - RNA, 19 nt, Homo sapiens
  misc_RNA (1)...(19): siRNA sense strand
cuacuacgauacuuaugaa

SEQ ID NO: 1113269 - RNA, 19 nt, Homo sapiens
  misc_RNA (1)...(19): siRNA sense strand
ugcagaagauguccaugua

SEQ ID NO: 1113270 - RNA, 19 nt, Homo sapiens
  misc_RNA (1)...(19): siRNA sense strand
cagaagauguccauguaca

SEQ ID NO: 1113271 - RNA, 19 nt, Homo sapiens
  misc_RNA (1)...(19): siRNA sense strand
caucaacauuaccacagua

SEQ ID NO: 1113272 - RNA, 19 nt, Homo sapiens
  misc_RNA (1)...(19): siRNA sense strand
caaguacucugacgacaac

SEQ ID NO: 1113273 - RNA, 19 nt, Homo sapiens
  misc_RNA (1)...(19): siRNA sense strand
gaaucugacuauaccaaca

SEQ ID NO: 1113274 - RNA, 19 nt, Homo sapiens
  misc_RNA (1)...(19): siRNA sense strand
caacuacuacgauacuuau

SEQ ID NO: 1113275 - RNA, 19 nt, Homo sapiens
  misc_RNA (1)...(19): siRNA sense strand
gcacuccgauccugcugau

SEQ ID NO: 1113276 - RNA, 19 nt, Homo sapiens
  misc_RNA (1)...(19): siRNA sense strand
acagggugcugcucagauu

SEQ ID NO: 1113277 - RNA, 19 nt, Homo sapiens
  misc_RNA (1)...(19): siRNA sense strand
gauugaguccuggcuguua

SEQ ID NO: 1113278 - RNA, 19 nt, Homo sapiens
  misc_RNA (1)...(19): siRNA sense strand
gccaguggauugauauuac

SEQ ID NO: 1113279 - RNA, 19 nt, Homo sapiens
  misc_RNA (1)...(19): siRNA sense strand
gaaguuccugcgcucagua

SEQ ID NO: 1113280 - RNA, 19 nt, Homo sapiens
  misc_RNA (1)...(19): siRNA sense strand
cacaggacaucaugcguau

SEQ ID NO: 1113281 - RNA, 19 nt, Homo sapiens
  misc_RNA (1)...(19): siRNA sense strand
gcagaugucagagauuaug

SEQ ID NO: 1113282 - RNA, 19 nt, Homo sapiens
  misc_RNA (1)...(19): siRNA sense strand
uguaaaaccuggaaacuau

SEQ ID NO: 1113283 - RNA, 19 nt, Homo sapiens
  misc_RNA (1)...(19): siRNA sense strand
caacauuaccacaguaugg

SEQ ID NO: 1113284 - RNA, 19 nt, Homo sapiens
  misc_RNA (1)...(19): siRNA sense strand
caagggacaucagauuucu

SEQ ID NO: 1113285 - RNA, 19 nt, Homo sapiens
  misc_RNA (1)...(19): siRNA sense strand
cacaggcgauuugcaugua

SEQ ID NO: 1113286 - RNA, 19 nt, Homo sapiens
  misc_RNA (1)...(19): siRNA sense strand
cuacgauacuuaugaaagg

SEQ ID NO: 1113287 - RNA, 19 nt, Homo sapiens
  misc_RNA (1)...(19): siRNA sense strand
gcacacacacagggauuga

SEQ ID NO: 1113288 - RNA, 19 nt, Homo sapiens
  misc_RNA (1)...(19): siRNA sense strand
ggaugaguuuagccacuau

SEQ ID NO: 1113289 - RNA, 19 nt, Homo sapiens
  misc_RNA (1)...(19): siRNA sense strand
auacggcacuggcuacuuc

SEQ ID NO: 1113290 - RNA, 19 nt, Homo sapiens
  misc_RNA (1)...(19): siRNA sense strand
acaacuacuacgauacuua

SEQ ID NO: 1113291 - RNA, 19 nt, Homo sapiens
  misc_RNA (1)...(19): siRNA sense strand
gcucagauuuccccaaaga

SEQ ID NO: 1113292 - RNA, 19 nt, Homo sapiens
  misc_RNA (1)...(19): siRNA sense strand
ccaagggacaucagauuuc

SEQ ID NO: 1113293 - RNA, 19 nt, Homo sapiens
  misc_RNA (1)...(19): siRNA sense strand
agggacaucagauuucuua

SEQ ID NO: 1113294 - RNA, 19 nt, Homo sapiens
  misc_RNA (1)...(19): siRNA sense strand
gacgacaacccuuauuaca

SEQ ID NO: 1113295 - RNA, 19 nt, Homo sapiens
  misc_RNA (1)...(19): siRNA sense strand
guugugcgcugugacauuc

SEQ ID NO: 1113296 - RNA, 19 nt, Homo sapiens
  misc_RNA (1)...(19): siRNA sense strand
gaauggcacaguugucauc

SEQ ID NO: 1113297 - RNA, 19 nt, Homo sapiens
  misc_RNA (1)...(19): siRNA sense strand
ccaguggauugauauuaca

SEQ ID NO: 1113298 - RNA, 19 nt, Homo sapiens
  misc_RNA (1)...(19): siRNA sense strand
caagcuggcuacucgacau

SEQ ID NO: 1113299 - RNA, 19 nt, Homo sapiens
  misc_RNA (1)...(19): siRNA sense strand
gggaauggcacaguuguca

SEQ ID NO: 1113300 - RNA, 19 nt, Homo sapiens
  misc_RNA (1)...(19): siRNA sense strand
gcugaaggccacaaagcaa

SEQ ID NO: 1113301 - RNA, 19 nt, Homo sapiens
  misc_RNA (1)...(19): siRNA sense strand
cagggcagaugucagagau

SEQ ID NO: 1113302 - RNA, 19 nt, Homo sapiens
  misc_RNA (1)...(19): siRNA sense strand
guuccugaaucugacuaua

SEQ ID NO: 1113303 - RNA, 19 nt, Homo sapiens
  misc_RNA (1)...(19): siRNA sense strand
uggaaacuauauccuaaag

SEQ ID NO: 1113304 - RNA, 19 nt, Homo sapiens
  misc_RNA (1)...(19): siRNA sense strand
uggaugaguuuagccacua

SEQ ID NO: 1113305 - RNA, 19 nt, Homo sapiens
  misc_RNA (1)...(19): siRNA sense strand
gcuggcuacucgacaucua

SEQ ID NO: 1113306 - RNA, 19 nt, Homo sapiens
  misc_RNA (1)...(19): siRNA sense strand
gaagauguccauguacaac

SEQ ID NO: 1113307 - RNA, 19 nt, Homo sapiens
  misc_RNA (1)...(19): siRNA sense strand
ugucagagauuaugaucac

SEQ ID NO: 1113308 - RNA, 19 nt, Homo sapiens
  misc_RNA (1)...(19): siRNA sense strand
auacagggcagaugucaga

SEQ ID NO: 1113309 - RNA, 19 nt, Homo sapiens
  misc_RNA (1)...(19): siRNA sense strand
cugacgacaacccuuauua

SEQ ID NO: 1113310 - RNA, 19 nt, Homo sapiens
  misc_RNA (1)...(19): siRNA sense strand
ccacaguauggaugaguuu

SEQ ID NO: 1113311 - RNA, 19 nt, Homo sapiens
  misc_RNA (1)...(19): siRNA sense strand
cagcauacagggcagaugu

SEQ ID NO: 1113312 - RNA, 19 nt, Homo sapiens
  misc_RNA (1)...(19): siRNA sense strand
ccacaggcgauuugcaugu

SEQ ID NO: 1113313 - RNA, 19 nt, Homo sapiens
  misc_RNA (1)...(19): siRNA sense strand
gugcagaagauguccaugu

SEQ ID NO: 1113314 - RNA, 19 nt, Homo sapiens
  misc_RNA (1)...(19): siRNA sense strand
cuaccugguuccugaaucu

SEQ ID NO: 1113315 - RNA, 19 nt, Homo sapiens
  misc_RNA (1)...(19): siRNA sense strand
caacccuuauuacaacuac

SEQ ID NO: 1113316 - RNA, 19 nt, Homo sapiens
  misc_RNA (1)...(19): siRNA sense strand
guggauugauauuacagau

SEQ ID NO: 1113317 - RNA, 19 nt, Homo sapiens
  misc_RNA (1)...(19): siRNA sense strand
ucaucaacauuaccacagu

SEQ ID NO: 1113318 - RNA, 19 nt, Homo sapiens
  misc_RNA (1)...(19): siRNA sense strand
gcuguuaugauaccuaugg

SEQ ID NO: 1113319 - RNA, 19 nt, Homo sapiens
  misc_RNA (1)...(19): siRNA sense strand
gaaggccacaaagcaaguu

SEQ ID NO: 1113320 - RNA, 19 nt, Homo sapiens
  misc_RNA (1)...(19): siRNA sense strand
cugcacaauuucaccguau

SEQ ID NO: 1113321 - RNA, 19 nt, Homo sapiens
  misc_RNA (1)...(19): siRNA sense strand
gcagaagauguccauguac

SEQ ID NO: 1113322 - RNA, 19 nt, Homo sapiens
  misc_RNA (1)...(19): siRNA sense strand
acucugacgacaacccuua

SEQ ID NO: 1113323 - RNA, 19 nt, Homo sapiens
  misc_RNA (1)...(19): siRNA sense strand
gcauacagggcagauguca

SEQ ID NO: 1113324 - RNA, 19 nt, Homo sapiens
  misc_RNA (1)...(19): siRNA sense strand
gaugucagagauuaugauc

SEQ ID NO: 1113325 - RNA, 19 nt, Homo sapiens
  misc_RNA (1)...(19): siRNA sense strand
acgacaacccuuauuacaa

SEQ ID NO: 1113326 - RNA, 19 nt, Homo sapiens
  misc_RNA (1)...(19): siRNA sense strand
ugacgacaacccuuauuac

SEQ ID NO: 1113327 - RNA, 19 nt, Homo sapiens
  misc_RNA (1)...(19): siRNA sense strand
uccuaaaggucaguguaaa

SEQ ID NO: 1113328 - RNA, 19 nt, Homo sapiens
  misc_RNA (1)...(19): siRNA sense strand
uauccuaaaggucagugua

SEQ ID NO: 1113329 - RNA, 19 nt, Homo sapiens
  misc_RNA (1)...(19): siRNA sense strand
uggcuguuaugauaccuau

SEQ ID NO: 1113330 - RNA, 19 nt, Homo sapiens
  misc_RNA (1)...(19): siRNA sense strand
uagccacuaugaccugcuu

SEQ ID NO: 1113331 - RNA, 19 nt, Homo sapiens
  misc_RNA (1)...(19): siRNA sense strand
uuacccagccgaccaagau

SEQ ID NO: 1113332 - RNA, 19 nt, Homo sapiens
  misc_RNA (1)...(19): siRNA sense strand
acaaguacucugacgacaa

SEQ ID NO: 1113333 - RNA, 19 nt, Homo sapiens
  misc_RNA (1)...(19): siRNA sense strand
aaccaagggacaucagauu

SEQ ID NO: 1113334 - RNA, 19 nt, Homo sapiens
  misc_RNA (1)...(19): siRNA sense strand
guaaaaccuggaaacuaua

SEQ ID NO: 1113335 - RNA, 19 nt, Homo sapiens
  misc_RNA (1)...(19): siRNA sense strand
ggacaucagauuucuuacc

SEQ ID NO: 1113336 - RNA, 19 nt, Homo sapiens
  misc_RNA (1)...(19): siRNA sense strand
acuacuacgauacuuauga

SEQ ID NO: 1113337 - RNA, 19 nt, Homo sapiens
  misc_RNA (1)...(19): siRNA sense strand
gcuaccugguuccugaauc

SEQ ID NO: 1113338 - RNA, 19 nt, Homo sapiens
  misc_RNA (1)...(19): siRNA sense strand
ugccaguggauugauauua

SEQ ID NO: 1113339 - RNA, 19 nt, Homo sapiens
  misc_RNA (1)...(19): siRNA sense strand
ggauugaguccuggcuguu

SEQ ID NO: 1113340 - RNA, 19 nt, Homo sapiens
  misc_RNA (1)...(19): siRNA sense strand
ccauguacaaccugagaug

SEQ ID NO: 1113341 - RNA, 19 nt, Homo sapiens
  misc_RNA (1)...(19): siRNA sense strand
cuaaacaucucacauauga

SEQ ID NO: 1113342 - RNA, 19 nt, Homo sapiens
  misc_RNA (1)...(19): siRNA sense strand
guaggugccuuauugguuu

SEQ ID NO: 1113343 - RNA, 19 nt, Homo sapiens
  misc_RNA (1)...(19): siRNA sense strand
gcaacaaugugguuccuau

SEQ ID NO: 1113344 - RNA, 19 nt, Homo sapiens
  misc_RNA (1)...(19): siRNA sense strand
ugaaagaacugagagauca

SEQ ID NO: 1113345 - RNA, 19 nt, Homo sapiens
  misc_RNA (1)...(19): siRNA sense strand
caagagcgauaucgagcua

SEQ ID NO: 1113346 - RNA, 19 nt, Homo sapiens
  misc_RNA (1)...(19): siRNA sense strand
caagaagcauccagguuga

SEQ ID NO: 1113347 - RNA, 19 nt, Homo sapiens
  misc_RNA (1)...(19): siRNA sense strand
gcuauaacaucagcauauu

SEQ ID NO: 1113348 - RNA, 19 nt, Homo sapiens
  misc_RNA (1)...(19): siRNA sense strand
gaguacgacuaccucuuua

SEQ ID NO: 1113349 - RNA, 19 nt, Homo sapiens
  misc_RNA (1)...(19): siRNA sense strand
gagauuuaccgcauuguuu

SEQ ID NO: 1113350 - RNA, 19 nt, Homo sapiens
  misc_RNA (1)...(19): siRNA sense strand
gaaagcaagagcaccauug

SEQ ID NO: 1113351 - RNA, 19 nt, Homo sapiens
  misc_RNA (1)...(19): siRNA sense strand
caagagcaccauuggagua

SEQ ID NO: 1113352 - RNA, 19 nt, Homo sapiens
  misc_RNA (1)...(19): siRNA sense strand
guagagcgauggcugaaag

SEQ ID NO: 1113353 - RNA, 19 nt, Homo sapiens
  misc_RNA (1)...(19): siRNA sense strand
gacuaccucuuuaaaguug

SEQ ID NO: 1113354 - RNA, 19 nt, Homo sapiens
  misc_RNA (1)...(19): siRNA sense strand
gaguagaguuugcaacaag

SEQ ID NO: 1113355 - RNA, 19 nt, Homo sapiens
  misc_RNA (1)...(19): siRNA sense strand
guacgacuaccucuuuaaa

SEQ ID NO: 1113356 - RNA, 19 nt, Homo sapiens
  misc_RNA (1)...(19): siRNA sense strand
ggaguagaguuugcaacaa

SEQ ID NO: 1113357 - RNA, 19 nt, Homo sapiens
  misc_RNA (1)...(19): siRNA sense strand
cgaguacgacuaccucuuu

SEQ ID NO: 1113358 - RNA, 19 nt, Homo sapiens
  misc_RNA (1)...(19): siRNA sense strand
caauaaaggcacagauaug

SEQ ID NO: 1113359 - RNA, 19 nt, Homo sapiens
  misc_RNA (1)...(19): siRNA sense strand
agagcgauaucgagcuaua

SEQ ID NO: 1113360 - RNA, 19 nt, Homo sapiens
  misc_RNA (1)...(19): siRNA sense strand
gugcagugcugucagaaca

SEQ ID NO: 1113361 - RNA, 19 nt, Homo sapiens
  misc_RNA (1)...(19): siRNA sense strand
gggcaguuccuacagauga

SEQ ID NO: 1113362 - RNA, 19 nt, Homo sapiens
  misc_RNA (1)...(19): siRNA sense strand
acagagauuuaccgcauug

SEQ ID NO: 1113363 - RNA, 19 nt, Homo sapiens
  misc_RNA (1)...(19): siRNA sense strand
acaaugugguuccuauuca

SEQ ID NO: 1113364 - RNA, 19 nt, Homo sapiens
  misc_RNA (1)...(19): siRNA sense strand
caauaagagugaucuacgu

SEQ ID NO: 1113365 - RNA, 19 nt, Homo sapiens
  misc_RNA (1)...(19): siRNA sense strand
ggaaagcaagagcaccauu

SEQ ID NO: 1113366 - RNA, 19 nt, Homo sapiens
  misc_RNA (1)...(19): siRNA sense strand
cagcagggcaagagcgaua

SEQ ID NO: 1113367 - RNA, 19 nt, Homo sapiens
  misc_RNA (1)...(19): siRNA sense strand
cgacuaccucuuuaaaguu

SEQ ID NO: 1113368 - RNA, 19 nt, Homo sapiens
  misc_RNA (1)...(19): siRNA sense strand
gaaaaugacaugucuccaa

SEQ ID NO: 1113369 - RNA, 19 nt, Homo sapiens
  misc_RNA (1)...(19): siRNA sense strand
ugacauugcuaaacaucuc

SEQ ID NO: 1113370 - RNA, 19 nt, Homo sapiens
  misc_RNA (1)...(19): siRNA sense strand
aacaauaaaggcacagaua

SEQ ID NO: 1113371 - RNA, 19 nt, Homo sapiens
  misc_RNA (1)...(19): siRNA sense strand
uugcuaaacaucucacaua

SEQ ID NO: 1113372 - RNA, 19 nt, Homo sapiens
  misc_RNA (1)...(19): siRNA sense strand
gcagugcugucagaacauc

SEQ ID NO: 1113373 - RNA, 19 nt, Homo sapiens
  misc_RNA (1)...(19): siRNA sense strand
ucagggcaguuccuacaga

SEQ ID NO: 1113374 - RNA, 19 nt, Homo sapiens
  misc_RNA (1)...(19): siRNA sense strand
uauuggagauucugguguu

SEQ ID NO: 1113375 - RNA, 19 nt, Homo sapiens
  misc_RNA (1)...(19): siRNA sense strand
acgacuaccucuuuaaagu

SEQ ID NO: 1113376 - RNA, 19 nt, Homo sapiens
  misc_RNA (1)...(19): siRNA sense strand
caacaaugugguuccuauu

SEQ ID NO: 1113377 - RNA, 19 nt, Homo sapiens
  misc_RNA (1)...(19): siRNA sense strand
gcuaaacaucucacauaug

SEQ ID NO: 1113378 - RNA, 19 nt, Homo sapiens
  misc_RNA (1)...(19): siRNA sense strand
gagauucugguguuggaaa

SEQ ID NO: 1113379 - RNA, 19 nt, Homo sapiens
  misc_RNA (1)...(19): siRNA sense strand
ggacacagcagggcaagag

SEQ ID NO: 1113380 - RNA, 19 nt, Homo sapiens
  misc_RNA (1)...(19): siRNA sense strand
acaauaaaggcacagauau

SEQ ID NO: 1113381 - RNA, 19 nt, Homo sapiens
  misc_RNA (1)...(19): siRNA sense strand
gagcaccauuggaguagag

SEQ ID NO: 1113382 - RNA, 19 nt, Homo sapiens
  misc_RNA (1)...(19): siRNA sense strand
gagcuauaacaucagcaua

SEQ ID NO: 1113383 - RNA, 19 nt, Homo sapiens
  misc_RNA (1)...(19): siRNA sense strand
uaagagugaucuacgucau

SEQ ID NO: 1113384 - RNA, 19 nt, Homo sapiens
  misc_RNA (1)...(19): siRNA sense strand
uaggugccuuauugguuua

SEQ ID NO: 1113385 - RNA, 19 nt, Homo sapiens
  misc_RNA (1)...(19): siRNA sense strand
caaugugguuccuauucau

SEQ ID NO: 1113386 - RNA, 19 nt, Homo sapiens
  misc_RNA (1)...(19): siRNA sense strand
aaagaguaaucuccugucu

SEQ ID NO: 1113387 - RNA, 19 nt, Homo sapiens
  misc_RNA (1)...(19): siRNA sense strand
ugcuaaacaucucacauau

SEQ ID NO: 1113388 - RNA, 19 nt, Homo sapiens
  misc_RNA (1)...(19): siRNA sense strand
uaacaucagcauauuaucg

SEQ ID NO: 1113389 - RNA, 19 nt, Homo sapiens
  misc_RNA (1)...(19): siRNA sense strand
uuaaaguuguccuuauugg

SEQ ID NO: 1113390 - RNA, 19 nt, Homo sapiens
  misc_RNA (1)...(19): siRNA sense strand
auaucgagcuauaacauca

SEQ ID NO: 1113391 - RNA, 19 nt, Homo sapiens
  misc_RNA (1)...(19): siRNA sense strand
ggcaguuccuacagaugaa

SEQ ID NO: 1113392 - RNA, 19 nt, Homo sapiens
  misc_RNA (1)...(19): siRNA sense strand
aguuuaaucuggaaagcaa

SEQ ID NO: 1113393 - RNA, 19 nt, Homo sapiens
  misc_RNA (1)...(19): siRNA sense strand
gaaagaacugagagaucau

SEQ ID NO: 1113394 - RNA, 19 nt, Homo sapiens
  misc_RNA (1)...(19): siRNA sense strand
gugccuuauugguuuauga

SEQ ID NO: 1113395 - RNA, 19 nt, Homo sapiens
  misc_RNA (1)...(19): siRNA sense strand
gauaucgagcuauaacauc

SEQ ID NO: 1113396 - RNA, 19 nt, Homo sapiens
  misc_RNA (1)...(19): siRNA sense strand
gagcgauaucgagcuauaa

SEQ ID NO: 1113397 - RNA, 19 nt, Homo sapiens
  misc_RNA (1)...(19): siRNA sense strand
caccauuggaguagaguuu

SEQ ID NO: 1113398 - RNA, 19 nt, Homo sapiens
  misc_RNA (1)...(19): siRNA sense strand
agaaaagaaugguuuguca

SEQ ID NO: 1113399 - RNA, 19 nt, Homo sapiens
  misc_RNA (1)...(19): siRNA sense strand
agcuguaggugccuuauug

SEQ ID NO: 1113400 - RNA, 19 nt, Homo sapiens
  misc_RNA (1)...(19): siRNA sense strand
uaaaguuguccuuauugga

SEQ ID NO: 1113401 - RNA, 19 nt, Homo sapiens
  misc_RNA (1)...(19): siRNA sense strand
aaugacaugucuccaagca

SEQ ID NO: 1113402 - RNA, 19 nt, Homo sapiens
  misc_RNA (1)...(19): siRNA sense strand
gagcuguaggugccuuauu

SEQ ID NO: 1113403 - RNA, 19 nt, Homo sapiens
  misc_RNA (1)...(19): siRNA sense strand
caaaggugcagugcuguca

SEQ ID NO: 1113404 - RNA, 19 nt, Homo sapiens
  misc_RNA (1)...(19): siRNA sense strand
guagaguuugcaacaagaa

SEQ ID NO: 1113405 - RNA, 19 nt, Homo sapiens
  misc_RNA (1)...(19): siRNA sense strand
cagggcaguuccuacagau

SEQ ID NO: 1113406 - RNA, 19 nt, Homo sapiens
  misc_RNA (1)...(19): siRNA sense strand
uggagauucugguguugga

SEQ ID NO: 1113407 - RNA, 19 nt, Homo sapiens
  misc_RNA (1)...(19): siRNA sense strand
uccuacagaugaagcaaga

SEQ ID NO: 1113408 - RNA, 19 nt, Homo sapiens
  misc_RNA (1)...(19): siRNA sense strand
cgauaucgagcuauaacau

SEQ ID NO: 1113409 - RNA, 19 nt, Homo sapiens
  misc_RNA (1)...(19): siRNA sense strand
aaggugcagugcugucaga

SEQ ID NO: 1113410 - RNA, 19 nt, Homo sapiens
  misc_RNA (1)...(19): siRNA sense strand
agagugaucuacgucaucu

SEQ ID NO: 1113411 - RNA, 19 nt, Homo sapiens
  misc_RNA (1)...(19): siRNA sense strand
ucaugcugauaguaacauu

SEQ ID NO: 1113412 - RNA, 19 nt, Homo sapiens
  misc_RNA (1)...(19): siRNA sense strand
gcugaaagaacugagagau

SEQ ID NO: 1113413 - RNA, 19 nt, Homo sapiens
  misc_RNA (1)...(19): siRNA sense strand
aguagaguuugcaacaaga

SEQ ID NO: 1113414 - RNA, 19 nt, Homo sapiens
  misc_RNA (1)...(19): siRNA sense strand
gcgacgacgaguacgacua

SEQ ID NO: 1113415 - RNA, 19 nt, Homo sapiens
  misc_RNA (1)...(19): siRNA sense strand
uguaggugccuuauugguu

SEQ ID NO: 1113416 - RNA, 19 nt, Homo sapiens
  misc_RNA (1)...(19): siRNA sense strand
aauaaaggcacagauaugg

SEQ ID NO: 1113417 - RNA, 19 nt, Homo sapiens
  misc_RNA (1)...(19): siRNA sense strand
cgacgacgaguacgacuac

SEQ ID NO: 1113418 - RNA, 19 nt, Homo sapiens
  misc_RNA (1)...(19): siRNA sense strand
aacagagauuuaccgcauu

SEQ ID NO: 1113419 - RNA, 19 nt, Homo sapiens
  misc_RNA (1)...(19): siRNA sense strand
gcacacgccugcuggaugu

SEQ ID NO: 1113420 - RNA, 19 nt, Homo sapiens
  misc_RNA (1)...(19): siRNA sense strand
gaagaagacaguccuagga

SEQ ID NO: 1113421 - RNA, 19 nt, Homo sapiens
  misc_RNA (1)...(19): siRNA sense strand
gcacugggaccauaccaaa

SEQ ID NO: 1113422 - RNA, 19 nt, Homo sapiens
  misc_RNA (1)...(19): siRNA sense strand
uagcugugcuggcgucuuu

SEQ ID NO: 1113423 - RNA, 19 nt, Homo sapiens
  misc_RNA (1)...(19): siRNA sense strand
uagagucaguaccagguua

SEQ ID NO: 1113424 - RNA, 19 nt, Homo sapiens
  misc_RNA (1)...(19): siRNA sense strand
uggaggaggugaucacaga

SEQ ID NO: 1113425 - RNA, 19 nt, Homo sapiens
  misc_RNA (1)...(19): siRNA sense strand
gaccauaccaaaggagaua

SEQ ID NO: 1113426 - RNA, 19 nt, Homo sapiens
  misc_RNA (1)...(19): siRNA sense strand
gccaagcagccgacuauga

SEQ ID NO: 1113427 - RNA, 19 nt, Homo sapiens
  misc_RNA (1)...(19): siRNA sense strand
gccaguaccggauuaaugu

SEQ ID NO: 1113428 - RNA, 19 nt, Homo sapiens
  misc_RNA (1)...(19): siRNA sense strand
gcacugaugagggcaccua

SEQ ID NO: 1113429 - RNA, 19 nt, Homo sapiens
  misc_RNA (1)...(19): siRNA sense strand
gacccuggauggugcacuu

SEQ ID NO: 1113430 - RNA, 19 nt, Homo sapiens
  misc_RNA (1)...(19): siRNA sense strand
ucaaguuccguuugcagua

SEQ ID NO: 1113431 - RNA, 19 nt, Homo sapiens
  misc_RNA (1)...(19): siRNA sense strand
ccaagcagccgacuaugag

SEQ ID NO: 1113432 - RNA, 19 nt, Homo sapiens
  misc_RNA (1)...(19): siRNA sense strand
ccagccagaucagcgguuu

SEQ ID NO: 1113433 - RNA, 19 nt, Homo sapiens
  misc_RNA (1)...(19): siRNA sense strand
uggagccaguaccggauua

SEQ ID NO: 1113434 - RNA, 19 nt, Homo sapiens
  misc_RNA (1)...(19): siRNA sense strand
caaguuccguuugcaguac

SEQ ID NO: 1113435 - RNA, 19 nt, Homo sapiens
  misc_RNA (1)...(19): siRNA sense strand
gaggaggugaucacagaug

SEQ ID NO: 1113436 - RNA, 19 nt, Homo sapiens
  misc_RNA (1)...(19): siRNA sense strand
gagcuugcagagcaucuug

SEQ ID NO: 1113437 - RNA, 19 nt, Homo sapiens
  misc_RNA (1)...(19): siRNA sense strand
cuuugggaauccuuucuuu

SEQ ID NO: 1113438 - RNA, 19 nt, Homo sapiens
  misc_RNA (1)...(19): siRNA sense strand
cccgcuaccucaccuccua

SEQ ID NO: 1113439 - RNA, 19 nt, Homo sapiens
  misc_RNA (1)...(19): siRNA sense strand
ccacacccucggcuacuug

SEQ ID NO: 1113440 - RNA, 19 nt, Homo sapiens
  misc_RNA (1)...(19): siRNA sense strand
acucugggcuagggcauga

SEQ ID NO: 1113441 - RNA, 19 nt, Homo sapiens
  misc_RNA (1)...(19): siRNA sense strand
uccgagcacugggaccaua

SEQ ID NO: 1113442 - RNA, 19 nt, Homo sapiens
  misc_RNA (1)...(19): siRNA sense strand
uaaugugacugaggugaac

SEQ ID NO: 1113443 - RNA, 19 nt, Homo sapiens
  misc_RNA (1)...(19): siRNA sense strand
ggagccaguaccggauuaa

SEQ ID NO: 1113444 - RNA, 19 nt, Homo sapiens
  misc_RNA (1)...(19): siRNA sense strand
aggcagacagcacugauga

SEQ ID NO: 1113445 - RNA, 19 nt, Homo sapiens
  misc_RNA (1)...(19): siRNA sense strand
ggaccauaccaaaggagau

SEQ ID NO: 1113446 - RNA, 19 nt, Homo sapiens
  misc_RNA (1)...(19): siRNA sense strand
guagagucaguaccagguu

SEQ ID NO: 1113447 - RNA, 19 nt, Homo sapiens
  misc_RNA (1)...(19): siRNA sense strand
gcacacgccugcuggaugu

SEQ ID NO: 1113448 - RNA, 19 nt, Homo sapiens
  misc_RNA (1)...(19): siRNA sense strand
gaagaagacaguccuagga

SEQ ID NO: 1113449 - RNA, 19 nt, Homo sapiens
  misc_RNA (1)...(19): siRNA sense strand
gcacugggaccauaccaaa

SEQ ID NO: 1113450 - RNA, 19 nt, Homo sapiens
  misc_RNA (1)...(19): siRNA sense strand
uagcugugcuggcgucuuu

SEQ ID NO: 1113451 - RNA, 19 nt, Homo sapiens
  misc_RNA (1)...(19): siRNA sense strand
uagagucaguaccagguua

SEQ ID NO: 1113452 - RNA, 19 nt, Homo sapiens
  misc_RNA (1)...(19): siRNA sense strand
uggaggaggugaucacaga

SEQ ID NO: 1113453 - RNA, 19 nt, Homo sapiens
  misc_RNA (1)...(19): siRNA sense strand
gaccauaccaaaggagaua

SEQ ID NO: 1113454 - RNA, 19 nt, Homo sapiens
  misc_RNA (1)...(19): siRNA sense strand
gccaagcagccgacuauga

SEQ ID NO: 1113455 - RNA, 19 nt, Homo sapiens
  misc_RNA (1)...(19): siRNA sense strand
gccaguaccggauuaaugu

SEQ ID NO: 1113456 - RNA, 19 nt, Homo sapiens
  misc_RNA (1)...(19): siRNA sense strand
gcacugaugagggcaccua

SEQ ID NO: 1113457 - RNA, 19 nt, Homo sapiens
  misc_RNA (1)...(19): siRNA sense strand
gacccuggauggugcacuu

SEQ ID NO: 1113458 - RNA, 19 nt, Homo sapiens
  misc_RNA (1)...(19): siRNA sense strand
ucaaguuccguuugcagua

SEQ ID NO: 1113459 - RNA, 19 nt, Homo sapiens
  misc_RNA (1)...(19): siRNA sense strand
ccaagcagccgacuaugag

SEQ ID NO: 1113460 - RNA, 19 nt, Homo sapiens
  misc_RNA (1)...(19): siRNA sense strand
ccagccagaucagcgguuu

SEQ ID NO: 1113461 - RNA, 19 nt, Homo sapiens
  misc_RNA (1)...(19): siRNA sense strand
uggagccaguaccggauua

SEQ ID NO: 1113462 - RNA, 19 nt, Homo sapiens
  misc_RNA (1)...(19): siRNA sense strand
caaguuccguuugcaguac

SEQ ID NO: 1113463 - RNA, 19 nt, Homo sapiens
  misc_RNA (1)...(19): siRNA sense strand
gaggaggugaucacagaug

SEQ ID NO: 1113464 - RNA, 19 nt, Homo sapiens
  misc_RNA (1)...(19): siRNA sense strand
gagcuugcagagcaucuug

SEQ ID NO: 1113465 - RNA, 19 nt, Homo sapiens
  misc_RNA (1)...(19): siRNA sense strand
cuuugggaauccuuucuuu

SEQ ID NO: 1113466 - RNA, 19 nt, Homo sapiens
  misc_RNA (1)...(19): siRNA sense strand
cccgcuaccucaccuccua

SEQ ID NO: 1113467 - RNA, 19 nt, Homo sapiens
  misc_RNA (1)...(19): siRNA sense strand
ccacacccucggcuacuug

SEQ ID NO: 1113468 - RNA, 19 nt, Homo sapiens
  misc_RNA (1)...(19): siRNA sense strand
acucugggcuagggcauga

SEQ ID NO: 1113469 - RNA, 19 nt, Homo sapiens
  misc_RNA (1)...(19): siRNA sense strand
uccgagcacugggaccaua

SEQ ID NO: 1113470 - RNA, 19 nt, Homo sapiens
  misc_RNA (1)...(19): siRNA sense strand
uaaugugacugaggugaac

SEQ ID NO: 1113471 - RNA, 19 nt, Homo sapiens
  misc_RNA (1)...(19): siRNA sense strand
ggagccaguaccggauuaa

SEQ ID NO: 1113472 - RNA, 19 nt, Homo sapiens
  misc_RNA (1)...(19): siRNA sense strand
aggcagacagcacugauga

SEQ ID NO: 1113473 - RNA, 19 nt, Homo sapiens
  misc_RNA (1)...(19): siRNA sense strand
ggaccauaccaaaggagau

SEQ ID NO: 1113474 - RNA, 19 nt, Homo sapiens
  misc_RNA (1)...(19): siRNA sense strand
guagagucaguaccagguu

SEQ ID NO: 1113475 - RNA, 19 nt, Homo sapiens
  misc_RNA (1)...(19): siRNA sense strand
gcaaggagcgcgagauggu

SEQ ID NO: 1113476 - RNA, 19 nt, Homo sapiens
  misc_RNA (1)...(19): siRNA sense strand
gcaccgcgacuaugugaug

SEQ ID NO: 1113477 - RNA, 19 nt, Homo sapiens
  misc_RNA (1)...(19): siRNA sense strand
gagcaccgcgacuauguga

SEQ ID NO: 1113478 - RNA, 19 nt, Homo sapiens
  misc_RNA (1)...(19): siRNA sense strand
ccacacagcaggagaugau

SEQ ID NO: 1113479 - RNA, 19 nt, Homo sapiens
  misc_RNA (1)...(19): siRNA sense strand
gcgagaugguggccacaca

SEQ ID NO: 1113480 - RNA, 19 nt, Homo sapiens
  misc_RNA (1)...(19): siRNA sense strand
ccaacuuccuggccugcaa

SEQ ID NO: 1113481 - RNA, 19 nt, Homo sapiens
  misc_RNA (1)...(19): siRNA sense strand
caaccuucccgccagacua

SEQ ID NO: 1113482 - RNA, 19 nt, Homo sapiens
  misc_RNA (1)...(19): siRNA sense strand
gcgagcaccgcgacuaugu

SEQ ID NO: 1113483 - RNA, 19 nt, Homo sapiens
  misc_RNA (1)...(19): siRNA sense strand
ucauccggcugcucaagug

SEQ ID NO: 1113484 - RNA, 19 nt, Homo sapiens
  misc_RNA (1)...(19): siRNA sense strand
gacuaugugaugcgcauga

SEQ ID NO: 1113485 - RNA, 19 nt, Homo sapiens
  misc_RNA (1)...(19): siRNA sense strand
ugaugcgcaugaaggaguu

SEQ ID NO: 1113486 - RNA, 19 nt, Homo sapiens
  misc_RNA (1)...(19): siRNA sense strand
ugaagaagcuggaaaugaa

SEQ ID NO: 1113487 - RNA, 19 nt, Homo sapiens
  misc_RNA (1)...(19): siRNA sense strand
ccaagagcguguccaggua

SEQ ID NO: 1113488 - RNA, 19 nt, Homo sapiens
  misc_RNA (1)...(19): siRNA sense strand
gcaccaagcgcuucaucaa

SEQ ID NO: 1113489 - RNA, 19 nt, Homo sapiens
  misc_RNA (1)...(19): siRNA sense strand
ggaaaugaagccaaaguac

SEQ ID NO: 1113490 - RNA, 19 nt, Homo sapiens
  misc_RNA (1)...(19): siRNA sense strand
gugaagaagcuggaaauga

SEQ ID NO: 1113491 - RNA, 19 nt, Homo sapiens
  misc_RNA (1)...(19): siRNA sense strand
gcgaggagaagaugguuau

SEQ ID NO: 1113492 - RNA, 19 nt, Homo sapiens
  misc_RNA (1)...(19): siRNA sense strand
gaggagaagaugguuauca

SEQ ID NO: 1113493 - RNA, 19 nt, Homo sapiens
  misc_RNA (1)...(19): siRNA sense strand
gaagaagcuggaaaugaag

SEQ ID NO: 1113494 - RNA, 19 nt, Homo sapiens
  misc_RNA (1)...(19): siRNA sense strand
ccaagcgcuucaucaagug

SEQ ID NO: 1113495 - RNA, 19 nt, Homo sapiens
  misc_RNA (1)...(19): siRNA sense strand
gcacugcgaggagaagaug

SEQ ID NO: 1113496 - RNA, 19 nt, Homo sapiens
  misc_RNA (1)...(19): siRNA sense strand
accaagcgcuucaucaagu

SEQ ID NO: 1113497 - RNA, 19 nt, Homo sapiens
  misc_RNA (1)...(19): siRNA sense strand
aggagaagaugguuaucau

SEQ ID NO: 1113498 - RNA, 19 nt, Homo sapiens
  misc_RNA (1)...(19): siRNA sense strand
uggaaaugaagccaaagua

SEQ ID NO: 1113499 - RNA, 19 nt, Homo sapiens
  misc_RNA (1)...(19): siRNA sense strand
guuaucaucaccaccaaga

SEQ ID NO: 1113500 - RNA, 19 nt, Homo sapiens
  misc_RNA (1)...(19): siRNA sense strand
gacccaagauccgcuacag

SEQ ID NO: 1113501 - RNA, 19 nt, Homo sapiens
  misc_RNA (1)...(19): siRNA sense strand
gaagaagagcgcuaagaaa

SEQ ID NO: 1113502 - RNA, 19 nt, Homo sapiens
  misc_RNA (1)...(19): siRNA sense strand
caacagccguaucaaacuu

SEQ ID NO: 1113503 - RNA, 19 nt, Homo sapiens
  misc_RNA (1)...(19): siRNA sense strand
ugucagagcucaucaccaa

SEQ ID NO: 1113504 - RNA, 19 nt, Homo sapiens
  misc_RNA (1)...(19): siRNA sense strand
caagaaagcugccaaaagu

SEQ ID NO: 1113505 - RNA, 19 nt, Homo sapiens
  misc_RNA (1)...(19): siRNA sense strand
ccuuuaaacucaacaagaa

SEQ ID NO: 1113506 - RNA, 19 nt, Homo sapiens
  misc_RNA (1)...(19): siRNA sense strand
gaagccaagcccaagguua

SEQ ID NO: 1113507 - RNA, 19 nt, Homo sapiens
  misc_RNA (1)...(19): siRNA sense strand
ccaagaaaguggcuaagag

SEQ ID NO: 1113508 - RNA, 19 nt, Homo sapiens
  misc_RNA (1)...(19): siRNA sense strand
cgaagaagagcgcuaagaa

SEQ ID NO: 1113509 - RNA, 19 nt, Homo sapiens
  misc_RNA (1)...(19): siRNA sense strand
aaacaacagccguaucaaa

SEQ ID NO: 1113510 - RNA, 19 nt, Homo sapiens
  misc_RNA (1)...(19): siRNA sense strand
ccaagguugucaagccuaa

SEQ ID NO: 1113511 - RNA, 19 nt, Homo sapiens
  misc_RNA (1)...(19): siRNA sense strand
ucaagagccuggugagcaa

SEQ ID NO: 1113512 - RNA, 19 nt, Homo sapiens
  misc_RNA (1)...(19): siRNA sense strand
uaaagagcguagcggaguu

SEQ ID NO: 1113513 - RNA, 19 nt, Homo sapiens
  misc_RNA (1)...(19): siRNA sense strand
uaaccaagaaaguggcuaa

SEQ ID NO: 1113514 - RNA, 19 nt, Homo sapiens
  misc_RNA (1)...(19): siRNA sense strand
aagccaagcccaagguuaa

SEQ ID NO: 1113515 - RNA, 19 nt, Homo sapiens
  misc_RNA (1)...(19): siRNA sense strand
gcgcaacuccgaagaagag

SEQ ID NO: 1113516 - RNA, 19 nt, Homo sapiens
  misc_RNA (1)...(19): siRNA sense strand
gcuucuggcuccuuuaaac

SEQ ID NO: 1113517 - RNA, 19 nt, Homo sapiens
  misc_RNA (1)...(19): siRNA sense strand
ccgcuaagcccaagguugu

SEQ ID NO: 1113518 - RNA, 19 nt, Homo sapiens
  misc_RNA (1)...(19): siRNA sense strand
guaucaaacuuggucucaa

SEQ ID NO: 1113519 - RNA, 19 nt, Homo sapiens
  misc_RNA (1)...(19): siRNA sense strand
cagccaagaagcccaagaa

SEQ ID NO: 1113520 - RNA, 19 nt, Homo sapiens
  misc_RNA (1)...(19): siRNA sense strand
gugcuucuggcuccuuuaa

SEQ ID NO: 1113521 - RNA, 19 nt, Homo sapiens
  misc_RNA (1)...(19): siRNA sense strand
cggcuaugauguggagaaa

SEQ ID NO: 1113522 - RNA, 19 nt, Homo sapiens
  misc_RNA (1)...(19): siRNA sense strand
ggaagccaagcccaagguu

SEQ ID NO: 1113523 - RNA, 19 nt, Homo sapiens
  misc_RNA (1)...(19): siRNA sense strand
aagaagagcgcuaagaaaa

SEQ ID NO: 1113524 - RNA, 19 nt, Homo sapiens
  misc_RNA (1)...(19): siRNA sense strand
gcccaaagaaggccaaggu

SEQ ID NO: 1113525 - RNA, 19 nt, Homo sapiens
  misc_RNA (1)...(19): siRNA sense strand
ccacuguaaccaagaaagu

SEQ ID NO: 1113526 - RNA, 19 nt, Homo sapiens
  misc_RNA (1)...(19): siRNA sense strand
aaaccuaagaagccaguug

SEQ ID NO: 1113527 - RNA, 19 nt, Homo sapiens
  misc_RNA (1)...(19): siRNA sense strand
gagcguagcggaguuucuc

SEQ ID NO: 1113528 - RNA, 19 nt, Homo sapiens
  misc_RNA (1)...(19): siRNA sense strand
gggcggaaccaaaccuaag

SEQ ID NO: 1113529 - RNA, 19 nt, Homo sapiens
  misc_RNA (1)...(19): siRNA sense strand
aaagagcguagcggaguuu

SEQ ID NO: 1113530 - RNA, 19 nt, Homo sapiens
  misc_RNA (1)...(19): siRNA sense strand
cggccacuguaaccaagaa

SEQ ID NO: 1113531 - RNA, 19 nt, Homo sapiens
  misc_RNA (1)...(19): siRNA sense strand
gcggaaccaaaccuaagaa

SEQ ID NO: 1113532 - RNA, 19 nt, Homo sapiens
  misc_RNA (1)...(19): siRNA sense strand
ggcggaaccaaaccuaaga

SEQ ID NO: 1113533 - RNA, 19 nt, Homo sapiens
  misc_RNA (1)...(19): siRNA sense strand
gcccaagaaagcugccaaa

SEQ ID NO: 1113534 - RNA, 19 nt, Homo sapiens
  misc_RNA (1)...(19): siRNA sense strand
gaaagaagagauugcaauu

SEQ ID NO: 1113535 - RNA, 19 nt, Homo sapiens
  misc_RNA (1)...(19): siRNA sense strand
cagaacaaauuaugcaaga

SEQ ID NO: 1113536 - RNA, 19 nt, Homo sapiens
  misc_RNA (1)...(19): siRNA sense strand
cuagugugcucauggauaa

SEQ ID NO: 1113537 - RNA, 19 nt, Homo sapiens
  misc_RNA (1)...(19): siRNA sense strand
aaacaagcuucagaaagua

SEQ ID NO: 1113538 - RNA, 19 nt, Homo sapiens
  misc_RNA (1)...(19): siRNA sense strand
gaagauugauuuggacagu

SEQ ID NO: 1113539 - RNA, 19 nt, Homo sapiens
  misc_RNA (1)...(19): siRNA sense strand
cagaggauccugcccuuaa

SEQ ID NO: 1113540 - RNA, 19 nt, Homo sapiens
  misc_RNA (1)...(19): siRNA sense strand
gcaaaucgaagcuaaaauu

SEQ ID NO: 1113541 - RNA, 19 nt, Homo sapiens
  misc_RNA (1)...(19): siRNA sense strand
gaaaagaacaaacagaaga

SEQ ID NO: 1113542 - RNA, 19 nt, Homo sapiens
  misc_RNA (1)...(19): siRNA sense strand
ggaaauuguucugcagcuu

SEQ ID NO: 1113543 - RNA, 19 nt, Homo sapiens
  misc_RNA (1)...(19): siRNA sense strand
aaaacaagcuucagaaagu

SEQ ID NO: 1113544 - RNA, 19 nt, Homo sapiens
  misc_RNA (1)...(19): siRNA sense strand
aacagaagauugauuugga

SEQ ID NO: 1113545 - RNA, 19 nt, Homo sapiens
  misc_RNA (1)...(19): siRNA sense strand
ucagagaggauaaagauca

SEQ ID NO: 1113546 - RNA, 19 nt, Homo sapiens
  misc_RNA (1)...(19): siRNA sense strand
gacaaaacaacaacucuua

SEQ ID NO: 1113547 - RNA, 19 nt, Homo sapiens
  misc_RNA (1)...(19): siRNA sense strand
gaacaaacagaagauugau

SEQ ID NO: 1113548 - RNA, 19 nt, Homo sapiens
  misc_RNA (1)...(19): siRNA sense strand
aaucacagcaggaaucuug

SEQ ID NO: 1113549 - RNA, 19 nt, Homo sapiens
  misc_RNA (1)...(19): siRNA sense strand
gaaacaccuauuagagcua

SEQ ID NO: 1113550 - RNA, 19 nt, Homo sapiens
  misc_RNA (1)...(19): siRNA sense strand
agaacaaacagaagauuga

SEQ ID NO: 1113551 - RNA, 19 nt, Homo sapiens
  misc_RNA (1)...(19): siRNA sense strand
uugaagaccuggaaaauga

SEQ ID NO: 1113552 - RNA, 19 nt, Homo sapiens
  misc_RNA (1)...(19): siRNA sense strand
aaauuguucugcagcuuga

SEQ ID NO: 1113553 - RNA, 19 nt, Homo sapiens
  misc_RNA (1)...(19): siRNA sense strand
aaaagcaaaucgaagcuaa

SEQ ID NO: 1113554 - RNA, 19 nt, Homo sapiens
  misc_RNA (1)...(19): siRNA sense strand
agauugauuuggacaguau

SEQ ID NO: 1113555 - RNA, 19 nt, Homo sapiens
  misc_RNA (1)...(19): siRNA sense strand
uuagacaggaugagacuuu

SEQ ID NO: 1113556 - RNA, 19 nt, Homo sapiens
  misc_RNA (1)...(19): siRNA sense strand
gauaacaugaaacaccuau

SEQ ID NO: 1113557 - RNA, 19 nt, Homo sapiens
  misc_RNA (1)...(19): siRNA sense strand
gacaaaaccuacagaugga

SEQ ID NO: 1113558 - RNA, 19 nt, Homo sapiens
  misc_RNA (1)...(19): siRNA sense strand
ugaaaucacagcaggaauc

SEQ ID NO: 1113559 - RNA, 19 nt, Homo sapiens
  misc_RNA (1)...(19): siRNA sense strand
gaaaucacagcaggaaucu

SEQ ID NO: 1113560 - RNA, 19 nt, Homo sapiens
  misc_RNA (1)...(19): siRNA sense strand
gaggauaaagaucauacga

SEQ ID NO: 1113561 - RNA, 19 nt, Homo sapiens
  misc_RNA (1)...(19): siRNA sense strand
gauaaagaucauacgacaa

SEQ ID NO: 1113562 - RNA, 19 nt, Homo sapiens
  misc_RNA (1)...(19): siRNA sense strand
acuuucaacugcacuuaaa

SEQ ID NO: 1113563 - RNA, 19 nt, Homo sapiens
  misc_RNA (1)...(19): siRNA sense strand
cagagaggauaaagaucau

SEQ ID NO: 1113564 - RNA, 19 nt, Homo sapiens
  misc_RNA (1)...(19): siRNA sense strand
gauuuggacaguauggaaa

SEQ ID NO: 1113565 - RNA, 19 nt, Homo sapiens
  misc_RNA (1)...(19): siRNA sense strand
caugaaacaccuauuagag

SEQ ID NO: 1113566 - RNA, 19 nt, Homo sapiens
  misc_RNA (1)...(19): siRNA sense strand
agaaagaagagauugcaau

SEQ ID NO: 1113567 - RNA, 19 nt, Homo sapiens
  misc_RNA (1)...(19): siRNA sense strand
ggaaaacucagagaggaua

SEQ ID NO: 1113568 - RNA, 19 nt, Homo sapiens
  misc_RNA (1)...(19): siRNA sense strand
gcaagaaaagcaaaucgaa

SEQ ID NO: 1113569 - RNA, 19 nt, Homo sapiens
  misc_RNA (1)...(19): siRNA sense strand
gaucauacgacaaaaccua

SEQ ID NO: 1113570 - RNA, 19 nt, Homo sapiens
  misc_RNA (1)...(19): siRNA sense strand
aagauugauuuggacagua

SEQ ID NO: 1113571 - RNA, 19 nt, Homo sapiens
  misc_RNA (1)...(19): siRNA sense strand
gacaggaugagacuuucaa

SEQ ID NO: 1113572 - RNA, 19 nt, Homo sapiens
  misc_RNA (1)...(19): siRNA sense strand
gagaggauaaagaucauac

SEQ ID NO: 1113573 - RNA, 19 nt, Homo sapiens
  misc_RNA (1)...(19): siRNA sense strand
aagaacaaacagaagauug

SEQ ID NO: 1113574 - RNA, 19 nt, Homo sapiens
  misc_RNA (1)...(19): siRNA sense strand
gacuuucaacugcacuuaa

SEQ ID NO: 1113575 - RNA, 19 nt, Homo sapiens
  misc_RNA (1)...(19): siRNA sense strand
acucagagaggauaaagau

SEQ ID NO: 1113576 - RNA, 19 nt, Homo sapiens
  misc_RNA (1)...(19): siRNA sense strand
acaugaaacaccuauuaga

SEQ ID NO: 1113577 - RNA, 19 nt, Homo sapiens
  misc_RNA (1)...(19): siRNA sense strand
ucuagugugcucauggaua

SEQ ID NO: 1113578 - RNA, 19 nt, Homo sapiens
  misc_RNA (1)...(19): siRNA sense strand
accuacagauggagauaaa

SEQ ID NO: 1113579 - RNA, 19 nt, Homo sapiens
  misc_RNA (1)...(19): siRNA sense strand
aaacagaagauugauuugg

SEQ ID NO: 1113580 - RNA, 19 nt, Homo sapiens
  misc_RNA (1)...(19): siRNA sense strand
ggauaacaugaaacaccua

SEQ ID NO: 1113581 - RNA, 19 nt, Homo sapiens
  misc_RNA (1)...(19): siRNA sense strand
gaaaagcaaaucgaagcua

SEQ ID NO: 1113582 - RNA, 19 nt, Homo sapiens
  misc_RNA (1)...(19): siRNA sense strand
gcaauuaaaacaagcuuca

SEQ ID NO: 1113583 - RNA, 19 nt, Homo sapiens
  misc_RNA (1)...(19): siRNA sense strand
aaagcaaaucgaagcuaaa

SEQ ID NO: 1113584 - RNA, 19 nt, Homo sapiens
  misc_RNA (1)...(19): siRNA sense strand
caaaacaacaacucuuaga

SEQ ID NO: 1113585 - RNA, 19 nt, Homo sapiens
  misc_RNA (1)...(19): siRNA sense strand
gaaauacagacugaaaaga

SEQ ID NO: 1113586 - RNA, 19 nt, Homo sapiens
  misc_RNA (1)...(19): siRNA sense strand
aaaccuacagauggagaua

SEQ ID NO: 1113587 - RNA, 19 nt, Homo sapiens
  misc_RNA (1)...(19): siRNA sense strand
aaugguugaugcaagugaa

SEQ ID NO: 1113588 - RNA, 19 nt, Homo sapiens
  misc_RNA (1)...(19): siRNA sense strand
aggaugagacuuucaacug

SEQ ID NO: 1113589 - RNA, 19 nt, Homo sapiens
  misc_RNA (1)...(19): siRNA sense strand
uagacaggaugagacuuuc

SEQ ID NO: 1113590 - RNA, 19 nt, Homo sapiens
  misc_RNA (1)...(19): siRNA sense strand
agaggauccugcccuuaag

SEQ ID NO: 1113591 - RNA, 19 nt, Homo sapiens
  misc_RNA (1)...(19): siRNA sense strand
aaacauggcugucauacau

SEQ ID NO: 1113592 - RNA, 19 nt, Homo sapiens
  misc_RNA (1)...(19): siRNA sense strand
ggaaaggauugcaagagaa

SEQ ID NO: 1113593 - RNA, 19 nt, Homo sapiens
  misc_RNA (1)...(19): siRNA sense strand
gauguaaagugcucuguug

SEQ ID NO: 1113594 - RNA, 19 nt, Homo sapiens
  misc_RNA (1)...(19): siRNA sense strand
ggaauaacaaugaugugua

SEQ ID NO: 1113595 - RNA, 19 nt, Homo sapiens
  misc_RNA (1)...(19): siRNA sense strand
caucagggaucuuaaucaa

SEQ ID NO: 1113596 - RNA, 19 nt, Homo sapiens
  misc_RNA (1)...(19): siRNA sense strand
uaacuacuauggcaacuca

SEQ ID NO: 1113597 - RNA, 19 nt, Homo sapiens
  misc_RNA (1)...(19): siRNA sense strand
ucagggaucuuaaucaaca

SEQ ID NO: 1113598 - RNA, 19 nt, Homo sapiens
  misc_RNA (1)...(19): siRNA sense strand
gaauaucaccagcucugua

SEQ ID NO: 1113599 - RNA, 19 nt, Homo sapiens
  misc_RNA (1)...(19): siRNA sense strand
uauaucggguacacaauuu

SEQ ID NO: 1113600 - RNA, 19 nt, Homo sapiens
  misc_RNA (1)...(19): siRNA sense strand
ucaggauccuugucaauug

SEQ ID NO: 1113601 - RNA, 19 nt, Homo sapiens
  misc_RNA (1)...(19): siRNA sense strand
guaaagugcucuguuguac

SEQ ID NO: 1113602 - RNA, 19 nt, Homo sapiens
  misc_RNA (1)...(19): siRNA sense strand
uggaaaggauugcaagaga

SEQ ID NO: 1113603 - RNA, 19 nt, Homo sapiens
  misc_RNA (1)...(19): siRNA sense strand
gaagggagaacccaaaguc

SEQ ID NO: 1113604 - RNA, 19 nt, Homo sapiens
  misc_RNA (1)...(19): siRNA sense strand
gguagucuaggaaugaaua

SEQ ID NO: 1113605 - RNA, 19 nt, Homo sapiens
  misc_RNA (1)...(19): siRNA sense strand
gugcuggaauucugcauug

SEQ ID NO: 1113606 - RNA, 19 nt, Homo sapiens
  misc_RNA (1)...(19): siRNA sense strand
guaacccuauuuccgugua

SEQ ID NO: 1113607 - RNA, 19 nt, Homo sapiens
  misc_RNA (1)...(19): siRNA sense strand
gcaucucccacaccacuua

SEQ ID NO: 1113608 - RNA, 19 nt, Homo sapiens
  misc_RNA (1)...(19): siRNA sense strand
gcauggugcuccucuuaag

SEQ ID NO: 1113609 - RNA, 19 nt, Homo sapiens
  misc_RNA (1)...(19): siRNA sense strand
gguccgagguagucuagga

SEQ ID NO: 1113610 - RNA, 19 nt, Homo sapiens
  misc_RNA (1)...(19): siRNA sense strand
gcagcaggaauuagaacua

SEQ ID NO: 1113611 - RNA, 19 nt, Homo sapiens
  misc_RNA (1)...(19): siRNA sense strand
gaaaggauugcaagagaag

SEQ ID NO: 1113612 - RNA, 19 nt, Homo sapiens
  misc_RNA (1)...(19): siRNA sense strand
uaagugugcuggaauucug

SEQ ID NO: 1113613 - RNA, 19 nt, Homo sapiens
  misc_RNA (1)...(19): siRNA sense strand
ggaucuuaaucaacacauu

SEQ ID NO: 1113614 - RNA, 19 nt, Homo sapiens
  misc_RNA (1)...(19): siRNA sense strand
guauaucggguacacaauu

SEQ ID NO: 1113615 - RNA, 19 nt, Homo sapiens
  misc_RNA (1)...(19): siRNA sense strand
gagguagucuaggaaugaa

SEQ ID NO: 1113616 - RNA, 19 nt, Homo sapiens
  misc_RNA (1)...(19): siRNA sense strand
gccaucacauucucacaug

SEQ ID NO: 1113617 - RNA, 19 nt, Homo sapiens
  misc_RNA (1)...(19): siRNA sense strand
gcaggaauuagaacuacaa

SEQ ID NO: 1113618 - RNA, 19 nt, Homo sapiens
  misc_RNA (1)...(19): siRNA sense strand
gggaaacauggcugucaua

SEQ ID NO: 1113619 - RNA, 19 nt, Homo sapiens
  misc_RNA (1)...(19): siRNA sense strand
gauucugacugcccugaug

SEQ ID NO: 1113620 - RNA, 19 nt, Homo sapiens
  misc_RNA (1)...(19): siRNA sense strand
ugucauacauucacaucug

SEQ ID NO: 1113621 - RNA, 19 nt, Homo sapiens
  misc_RNA (1)...(19): siRNA sense strand
gcaacucaaauaauuguca

SEQ ID NO: 1113622 - RNA, 19 nt, Homo sapiens
  misc_RNA (1)...(19): siRNA sense strand
gaaacauggcugucauaca

SEQ ID NO: 1113623 - RNA, 19 nt, Homo sapiens
  misc_RNA (1)...(19): siRNA sense strand
cgagguagucuaggaauga

SEQ ID NO: 1113624 - RNA, 19 nt, Homo sapiens
  misc_RNA (1)...(19): siRNA sense strand
gcaugggaauaacaaugau

SEQ ID NO: 1113625 - RNA, 19 nt, Homo sapiens
  misc_RNA (1)...(19): siRNA sense strand
ggaauuagaacuacaaaag

SEQ ID NO: 1113626 - RNA, 19 nt, Homo sapiens
  misc_RNA (1)...(19): siRNA sense strand
uguaaagugcucuguugua

SEQ ID NO: 1113627 - RNA, 19 nt, Homo sapiens
  misc_RNA (1)...(19): siRNA sense strand
gggagaacccaaaguccuu

SEQ ID NO: 1113628 - RNA, 19 nt, Homo sapiens
  misc_RNA (1)...(19): siRNA sense strand
ccucuuaagugugcuggaa

SEQ ID NO: 1113629 - RNA, 19 nt, Homo sapiens
  misc_RNA (1)...(19): siRNA sense strand
gacuauguccaucuuaaug

SEQ ID NO: 1113630 - RNA, 19 nt, Homo sapiens
  misc_RNA (1)...(19): siRNA sense strand
uuaauucugccaucacauu

SEQ ID NO: 1113631 - RNA, 19 nt, Homo sapiens
  misc_RNA (1)...(19): siRNA sense strand
gggaauaacaaugaugugu

SEQ ID NO: 1113632 - RNA, 19 nt, Homo sapiens
  misc_RNA (1)...(19): siRNA sense strand
ucuuaagugugcuggaauu

SEQ ID NO: 1113633 - RNA, 19 nt, Homo sapiens
  misc_RNA (1)...(19): siRNA sense strand
uggcauggugcuccucuua

SEQ ID NO: 1113634 - RNA, 19 nt, Homo sapiens
  misc_RNA (1)...(19): siRNA sense strand
uacuauggcaacucaaaua

SEQ ID NO: 1113635 - RNA, 19 nt, Homo sapiens
  misc_RNA (1)...(19): siRNA sense strand
cagcaggaauuagaacuac

SEQ ID NO: 1113636 - RNA, 19 nt, Homo sapiens
  misc_RNA (1)...(19): siRNA sense strand
gcaucagggaucuuaauca

SEQ ID NO: 1113637 - RNA, 19 nt, Homo sapiens
  misc_RNA (1)...(19): siRNA sense strand
ggauguaaagugcucuguu

SEQ ID NO: 1113638 - RNA, 19 nt, Homo sapiens
  misc_RNA (1)...(19): siRNA sense strand
uauggaaguaacccuauuu

SEQ ID NO: 1113639 - RNA, 19 nt, Homo sapiens
  misc_RNA (1)...(19): siRNA sense strand
uuauggaaguaacccuauu

SEQ ID NO: 1113640 - RNA, 19 nt, Homo sapiens
  misc_RNA (1)...(19): siRNA sense strand
ggcauggugcuccucuuaa

SEQ ID NO: 1113641 - RNA, 19 nt, Homo sapiens
  misc_RNA (1)...(19): siRNA sense strand
ggaaacauggcugucauac

SEQ ID NO: 1113642 - RNA, 19 nt, Homo sapiens
  misc_RNA (1)...(19): siRNA sense strand
acauggcugucauacauuc

SEQ ID NO: 1113643 - RNA, 19 nt, Homo sapiens
  misc_RNA (1)...(19): siRNA sense strand
gcaucuaauacuuauggaa

SEQ ID NO: 1113644 - RNA, 19 nt, Homo sapiens
  misc_RNA (1)...(19): siRNA sense strand
acuauggcaacucaaauaa

SEQ ID NO: 1113645 - RNA, 19 nt, Homo sapiens
  misc_RNA (1)...(19): siRNA sense strand
gucauacauucacaucugu

SEQ ID NO: 1113646 - RNA, 19 nt, Homo sapiens
  misc_RNA (1)...(19): siRNA sense strand
agccuuagcaugggaauaa

SEQ ID NO: 1113647 - RNA, 19 nt, Homo sapiens
  misc_RNA (1)...(19): siRNA sense strand
uaacccuauuuccguguau

SEQ ID NO: 1113648 - RNA, 19 nt, Homo sapiens
  misc_RNA (1)...(19): siRNA sense strand
ucucugccuuuggauguaa

SEQ ID NO: 1113649 - RNA, 19 nt, Homo sapiens
  misc_RNA (1)...(19): siRNA sense strand
uagcaugggaauaacaaug

SEQ ID NO: 1113650 - RNA, 19 nt, Homo sapiens
  misc_RNA (1)...(19): siRNA sense strand
ccgagguagucuaggaaug

SEQ ID NO: 1113651 - RNA, 19 nt, Homo sapiens
  misc_RNA (1)...(19): siRNA sense strand
acauuuagcuuggcguuuu

SEQ ID NO: 1113652 - RNA, 19 nt, Homo sapiens
  misc_RNA (1)...(19): siRNA sense strand
gucccucucugccuuugga

SEQ ID NO: 1113653 - RNA, 19 nt, Homo sapiens
  misc_RNA (1)...(19): siRNA sense strand
caggauccuugucaauugc

SEQ ID NO: 1113654 - RNA, 19 nt, Homo sapiens
  misc_RNA (1)...(19): siRNA sense strand
agucuaggaaugaauauca

SEQ ID NO: 1113655 - RNA, 19 nt, Homo sapiens
  misc_RNA (1)...(19): siRNA sense strand
aaacauggcugucauacau

SEQ ID NO: 1113656 - RNA, 19 nt, Homo sapiens
  misc_RNA (1)...(19): siRNA sense strand
ggaaaggauugcaagagaa

SEQ ID NO: 1113657 - RNA, 19 nt, Homo sapiens
  misc_RNA (1)...(19): siRNA sense strand
gauguaaagugcucuguug

SEQ ID NO: 1113658 - RNA, 19 nt, Homo sapiens
  misc_RNA (1)...(19): siRNA sense strand
ggaauaacaaugaugugua

SEQ ID NO: 1113659 - RNA, 19 nt, Homo sapiens
  misc_RNA (1)...(19): siRNA sense strand
caucagggaucuuaaucaa

SEQ ID NO: 1113660 - RNA, 19 nt, Homo sapiens
  misc_RNA (1)...(19): siRNA sense strand
uaacuacuauggcaacuca

SEQ ID NO: 1113661 - RNA, 19 nt, Homo sapiens
  misc_RNA (1)...(19): siRNA sense strand
ucagggaucuuaaucaaca

SEQ ID NO: 1113662 - RNA, 19 nt, Homo sapiens
  misc_RNA (1)...(19): siRNA sense strand
gaauaucaccagcucugua

SEQ ID NO: 1113663 - RNA, 19 nt, Homo sapiens
  misc_RNA (1)...(19): siRNA sense strand
uauaucggguacacaauuu

SEQ ID NO: 1113664 - RNA, 19 nt, Homo sapiens
  misc_RNA (1)...(19): siRNA sense strand
ucaggauccuugucaauug

SEQ ID NO: 1113665 - RNA, 19 nt, Homo sapiens
  misc_RNA (1)...(19): siRNA sense strand
guaaagugcucuguuguac

SEQ ID NO: 1113666 - RNA, 19 nt, Homo sapiens
  misc_RNA (1)...(19): siRNA sense strand
uggaaaggauugcaagaga

SEQ ID NO: 1113667 - RNA, 19 nt, Homo sapiens
  misc_RNA (1)...(19): siRNA sense strand
gaagggagaacccaaaguc

SEQ ID NO: 1113668 - RNA, 19 nt, Homo sapiens
  misc_RNA (1)...(19): siRNA sense strand
ugacaaccaugcaaggaau

SEQ ID NO: 1113669 - RNA, 19 nt, Homo sapiens
  misc_RNA (1)...(19): siRNA sense strand
gguagucuaggaaugaaua

SEQ ID NO: 1113670 - RNA, 19 nt, Homo sapiens
  misc_RNA (1)...(19): siRNA sense strand
gugcuggaauucugcauug

SEQ ID NO: 1113671 - RNA, 19 nt, Homo sapiens
  misc_RNA (1)...(19): siRNA sense strand
guaacccuauuuccgugua

SEQ ID NO: 1113672 - RNA, 19 nt, Homo sapiens
  misc_RNA (1)...(19): siRNA sense strand
gcaucucccacaccacuua

SEQ ID NO: 1113673 - RNA, 19 nt, Homo sapiens
  misc_RNA (1)...(19): siRNA sense strand
gcauggugcuccucuuaag

SEQ ID NO: 1113674 - RNA, 19 nt, Homo sapiens
  misc_RNA (1)...(19): siRNA sense strand
gguccgagguagucuagga

SEQ ID NO: 1113675 - RNA, 19 nt, Homo sapiens
  misc_RNA (1)...(19): siRNA sense strand
gcagcaggaauuagaacua

SEQ ID NO: 1113676 - RNA, 19 nt, Homo sapiens
  misc_RNA (1)...(19): siRNA sense strand
gaaaggauugcaagagaag

SEQ ID NO: 1113677 - RNA, 19 nt, Homo sapiens
  misc_RNA (1)...(19): siRNA sense strand
uaagugugcuggaauucug

SEQ ID NO: 1113678 - RNA, 19 nt, Homo sapiens
  misc_RNA (1)...(19): siRNA sense strand
ggaucuuaaucaacacauu

SEQ ID NO: 1113679 - RNA, 19 nt, Homo sapiens
  misc_RNA (1)...(19): siRNA sense strand
guauaucggguacacaauu

SEQ ID NO: 1113680 - RNA, 19 nt, Homo sapiens
  misc_RNA (1)...(19): siRNA sense strand
gagguagucuaggaaugaa

SEQ ID NO: 1113681 - RNA, 19 nt, Homo sapiens
  misc_RNA (1)...(19): siRNA sense strand
gccaucacauucucacaug

SEQ ID NO: 1113682 - RNA, 19 nt, Homo sapiens
  misc_RNA (1)...(19): siRNA sense strand
gggaaacauggcugucaua

SEQ ID NO: 1113683 - RNA, 19 nt, Homo sapiens
  misc_RNA (1)...(19): siRNA sense strand
gcaggaauuagaacuacaa

SEQ ID NO: 1113684 - RNA, 19 nt, Homo sapiens
  misc_RNA (1)...(19): siRNA sense strand
gauucugacugcccugaug

SEQ ID NO: 1113685 - RNA, 19 nt, Homo sapiens
  misc_RNA (1)...(19): siRNA sense strand
ugucauacauucacaucug

SEQ ID NO: 1113686 - RNA, 19 nt, Homo sapiens
  misc_RNA (1)...(19): siRNA sense strand
gcaacucaaauaauuguca

SEQ ID NO: 1113687 - RNA, 19 nt, Homo sapiens
  misc_RNA (1)...(19): siRNA sense strand
gaaacauggcugucauaca

SEQ ID NO: 1113688 - RNA, 19 nt, Homo sapiens
  misc_RNA (1)...(19): siRNA sense strand
cgagguagucuaggaauga

SEQ ID NO: 1113689 - RNA, 19 nt, Homo sapiens
  misc_RNA (1)...(19): siRNA sense strand
gcaugggaauaacaaugau

SEQ ID NO: 1113690 - RNA, 19 nt, Homo sapiens
  misc_RNA (1)...(19): siRNA sense strand
ggaauuagaacuacaaaag

SEQ ID NO: 1113691 - RNA, 19 nt, Homo sapiens
  misc_RNA (1)...(19): siRNA sense strand
uguaaagugcucuguugua

SEQ ID NO: 1113692 - RNA, 19 nt, Homo sapiens
  misc_RNA (1)...(19): siRNA sense strand
gggagaacccaaaguccuu

SEQ ID NO: 1113693 - RNA, 19 nt, Homo sapiens
  misc_RNA (1)...(19): siRNA sense strand
ccucuuaagugugcuggaa

SEQ ID NO: 1113694 - RNA, 19 nt, Homo sapiens
  misc_RNA (1)...(19): siRNA sense strand
gacuauguccaucuuaaug

SEQ ID NO: 1113695 - RNA, 19 nt, Homo sapiens
  misc_RNA (1)...(19): siRNA sense strand
uuaauucugccaucacauu

SEQ ID NO: 1113696 - RNA, 19 nt, Homo sapiens
  misc_RNA (1)...(19): siRNA sense strand
gggaauaacaaugaugugu

SEQ ID NO: 1113697 - RNA, 19 nt, Homo sapiens
  misc_RNA (1)...(19): siRNA sense strand
ucuuaagugugcuggaauu

SEQ ID NO: 1113698 - RNA, 19 nt, Homo sapiens
  misc_RNA (1)...(19): siRNA sense strand
uggcauggugcuccucuua

SEQ ID NO: 1113699 - RNA, 19 nt, Homo sapiens
  misc_RNA (1)...(19): siRNA sense strand
uacuauggcaacucaaaua

SEQ ID NO: 1113700 - RNA, 19 nt, Homo sapiens
  misc_RNA (1)...(19): siRNA sense strand
cagcaggaauuagaacuac

SEQ ID NO: 1113701 - RNA, 19 nt, Homo sapiens
  misc_RNA (1)...(19): siRNA sense strand
gcaucagggaucuuaauca

SEQ ID NO: 1113702 - RNA, 19 nt, Homo sapiens
  misc_RNA (1)...(19): siRNA sense strand
ggauguaaagugcucuguu

SEQ ID NO: 1113703 - RNA, 19 nt, Homo sapiens
  misc_RNA (1)...(19): siRNA sense strand
uauggaaguaacccuauuu

SEQ ID NO: 1113704 - RNA, 19 nt, Homo sapiens
  misc_RNA (1)...(19): siRNA sense strand
uuauggaaguaacccuauu

SEQ ID NO: 1113705 - RNA, 19 nt, Homo sapiens
  misc_RNA (1)...(19): siRNA sense strand
ggaaacauggcugucauac

SEQ ID NO: 1113706 - RNA, 19 nt, Homo sapiens
  misc_RNA (1)...(19): siRNA sense strand
ggcauggugcuccucuuaa

SEQ ID NO: 1113707 - RNA, 19 nt, Homo sapiens
  misc_RNA (1)...(19): siRNA sense strand
acauggcugucauacauuc

SEQ ID NO: 1113708 - RNA, 19 nt, Homo sapiens
  misc_RNA (1)...(19): siRNA sense strand
agccuuagcaugggaauaa

SEQ ID NO: 1113709 - RNA, 19 nt, Homo sapiens
  misc_RNA (1)...(19): siRNA sense strand
acuauggcaacucaaauaa

SEQ ID NO: 1113710 - RNA, 19 nt, Homo sapiens
  misc_RNA (1)...(19): siRNA sense strand
gucauacauucacaucugu

SEQ ID NO: 1113711 - RNA, 19 nt, Homo sapiens
  misc_RNA (1)...(19): siRNA sense strand
gcaucuaauacuuauggaa

SEQ ID NO: 1113712 - RNA, 19 nt, Homo sapiens
  misc_RNA (1)...(19): siRNA sense strand
uaacccuauuuccguguau

SEQ ID NO: 1113713 - RNA, 19 nt, Homo sapiens
  misc_RNA (1)...(19): siRNA sense strand
ucucugccuuuggauguaa

SEQ ID NO: 1113714 - RNA, 19 nt, Homo sapiens
  misc_RNA (1)...(19): siRNA sense strand
uagcaugggaauaacaaug

SEQ ID NO: 1113715 - RNA, 19 nt, Homo sapiens
  misc_RNA (1)...(19): siRNA sense strand
ccgagguagucuaggaaug

SEQ ID NO: 1113716 - RNA, 19 nt, Homo sapiens
  misc_RNA (1)...(19): siRNA sense strand
acauuuagcuuggcguuuu

SEQ ID NO: 1113717 - RNA, 19 nt, Homo sapiens
  misc_RNA (1)...(19): siRNA sense strand
gucccucucugccuuugga

SEQ ID NO: 1113718 - RNA, 19 nt, Homo sapiens
  misc_RNA (1)...(19): siRNA sense strand
caggauccuugucaauugc

SEQ ID NO: 1113719 - RNA, 19 nt, Homo sapiens
  misc_RNA (1)...(19): siRNA sense strand
agucuaggaaugaauauca

SEQ ID NO: 1113720 - RNA, 19 nt, Homo sapiens
  misc_RNA (1)...(19): siRNA sense strand
ggagaugguuuccuauuuc

SEQ ID NO: 1113721 - RNA, 19 nt, Homo sapiens
  misc_RNA (1)...(19): siRNA sense strand
ggaaggacaacuccaauuc

SEQ ID NO: 1113722 - RNA, 19 nt, Homo sapiens
  misc_RNA (1)...(19): siRNA sense strand
ccaauucccugcaggugaa

SEQ ID NO: 1113723 - RNA, 19 nt, Homo sapiens
  misc_RNA (1)...(19): siRNA sense strand
caagaugucccuguuguuu

SEQ ID NO: 1113724 - RNA, 19 nt, Homo sapiens
  misc_RNA (1)...(19): siRNA sense strand
cagcggaguuugacuugaa

SEQ ID NO: 1113725 - RNA, 19 nt, Homo sapiens
  misc_RNA (1)...(19): siRNA sense strand
ggaguuggcugagcagauc

SEQ ID NO: 1113726 - RNA, 19 nt, Homo sapiens
  misc_RNA (1)...(19): siRNA sense strand
ugaagcagcucuuuagcau

SEQ ID NO: 1113727 - RNA, 19 nt, Homo sapiens
  misc_RNA (1)...(19): siRNA sense strand
ccaagcugcuccacaucua

SEQ ID NO: 1113728 - RNA, 19 nt, Homo sapiens
  misc_RNA (1)...(19): siRNA sense strand
gaucauccgugggaacuuc

SEQ ID NO: 1113729 - RNA, 19 nt, Homo sapiens
  misc_RNA (1)...(19): siRNA sense strand
gugcaaggaucgccuguca

SEQ ID NO: 1113730 - RNA, 19 nt, Homo sapiens
  misc_RNA (1)...(19): siRNA sense strand
gcaaggaucgccugucagu

SEQ ID NO: 1113731 - RNA, 19 nt, Homo sapiens
  misc_RNA (1)...(19): siRNA sense strand
agaugucccuguuguuuga

SEQ ID NO: 1113732 - RNA, 19 nt, Homo sapiens
  misc_RNA (1)...(19): siRNA sense strand
cggagcaucucaccuacuu

SEQ ID NO: 1113733 - RNA, 19 nt, Homo sapiens
  misc_RNA (1)...(19): siRNA sense strand
ggaagcggcaggugacuca

SEQ ID NO: 1113734 - RNA, 19 nt, Homo sapiens
  misc_RNA (1)...(19): siRNA sense strand
gcagggaggagaugguuuc

SEQ ID NO: 1113735 - RNA, 19 nt, Homo sapiens
  misc_RNA (1)...(19): siRNA sense strand
ccacaucucacaggaagaa

SEQ ID NO: 1113736 - RNA, 19 nt, Homo sapiens
  misc_RNA (1)...(19): siRNA sense strand
gcaagaugucccuguuguu

SEQ ID NO: 1113737 - RNA, 19 nt, Homo sapiens
  misc_RNA (1)...(19): siRNA sense strand
uguuugacauccacuugua

SEQ ID NO: 1113738 - RNA, 19 nt, Homo sapiens
  misc_RNA (1)...(19): siRNA sense strand
cggugucucuggaucagua

SEQ ID NO: 1113739 - RNA, 19 nt, Homo sapiens
  misc_RNA (1)...(19): siRNA sense strand
cgacggcacagcagccuaa

SEQ ID NO: 1113740 - RNA, 19 nt, Homo sapiens
  misc_RNA (1)...(19): siRNA sense strand
aaggaucgccugucaguug

SEQ ID NO: 1113741 - RNA, 19 nt, Homo sapiens
  misc_RNA (1)...(19): siRNA sense strand
ucaggacuaucacaguuuc

SEQ ID NO: 1113742 - RNA, 19 nt, Homo sapiens
  misc_RNA (1)...(19): siRNA sense strand
agaagaugguggagucugu

SEQ ID NO: 1113743 - RNA, 19 nt, Homo sapiens
  misc_RNA (1)...(19): siRNA sense strand
gcugaaggcucugcuagac

SEQ ID NO: 1113744 - RNA, 19 nt, Homo sapiens
  misc_RNA (1)...(19): siRNA sense strand
gggagggucucacggaacu

SEQ ID NO: 1113745 - RNA, 19 nt, Homo sapiens
  misc_RNA (1)...(19): siRNA sense strand
gagacccacagccacguua

SEQ ID NO: 1113746 - RNA, 19 nt, Homo sapiens
  misc_RNA (1)...(19): siRNA sense strand
gaacuucaacacgcugaug

SEQ ID NO: 1113747 - RNA, 19 nt, Homo sapiens
  misc_RNA (1)...(19): siRNA sense strand
uuucaggacuaucacaguu

SEQ ID NO: 1113748 - RNA, 19 nt, Homo sapiens
  misc_RNA (1)...(19): siRNA sense strand
gcaugggcuucguacacaa

SEQ ID NO: 1113749 - RNA, 19 nt, Homo sapiens
  misc_RNA (1)...(19): siRNA sense strand
agacggaggaugagcugua

SEQ ID NO: 1113750 - RNA, 19 nt, Homo sapiens
  misc_RNA (1)...(19): siRNA sense strand
uggaggagcuggccauggu

SEQ ID NO: 1113751 - RNA, 19 nt, Homo sapiens
  misc_RNA (1)...(19): siRNA sense strand
gcucaugauccucagcaaa

SEQ ID NO: 1113752 - RNA, 19 nt, Homo sapiens
  misc_RNA (1)...(19): siRNA sense strand
cgcaagaugucccuguugu

SEQ ID NO: 1113753 - RNA, 19 nt, Homo sapiens
  misc_RNA (1)...(19): siRNA sense strand
ucugcaagauccuguuuca

SEQ ID NO: 1113754 - RNA, 19 nt, Homo sapiens
  misc_RNA (1)...(19): siRNA sense strand
gaugguggagucuguguuc

SEQ ID NO: 1113755 - RNA, 19 nt, Homo sapiens
  misc_RNA (1)...(19): siRNA sense strand
cggccaagcugcuccacau

SEQ ID NO: 1113756 - RNA, 19 nt, Homo sapiens
  misc_RNA (1)...(19): siRNA sense strand
uggcugagcagaucaagga

SEQ ID NO: 1113757 - RNA, 19 nt, Homo sapiens
  misc_RNA (1)...(19): siRNA sense strand
uggcggagcaucucaccua

SEQ ID NO: 1113758 - RNA, 19 nt, Homo sapiens
  misc_RNA (1)...(19): siRNA sense strand
cagcgucccuaccuacaag

SEQ ID NO: 1113759 - RNA, 19 nt, Homo sapiens
  misc_RNA (1)...(19): siRNA sense strand
gcagccuaaucgacauaga

SEQ ID NO: 1113760 - RNA, 19 nt, Homo sapiens
  misc_RNA (1)...(19): siRNA sense strand
uagacagcgucccuaccua

SEQ ID NO: 1113761 - RNA, 19 nt, Homo sapiens
  misc_RNA (1)...(19): siRNA sense strand
cuacaagcagggccucaaa

SEQ ID NO: 1113762 - RNA, 19 nt, Homo sapiens
  misc_RNA (1)...(19): siRNA sense strand
ugcuacagcugcagaacuu

SEQ ID NO: 1113763 - RNA, 19 nt, Homo sapiens
  misc_RNA (1)...(19): siRNA sense strand
ggucaucacacacuuuguc

SEQ ID NO: 1113764 - RNA, 19 nt, Homo sapiens
  misc_RNA (1)...(19): siRNA sense strand
uaucgcuccuucugcaaga

SEQ ID NO: 1113765 - RNA, 19 nt, Homo sapiens
  misc_RNA (1)...(19): siRNA sense strand
gagaugguuuccuauuucc

SEQ ID NO: 1113766 - RNA, 19 nt, Homo sapiens
  misc_RNA (1)...(19): siRNA sense strand
caucucacaggaagaauuc

SEQ ID NO: 1113767 - RNA, 19 nt, Homo sapiens
  misc_RNA (1)...(19): siRNA sense strand
acaagcagggccucaaaug

SEQ ID NO: 1113768 - RNA, 19 nt, Homo sapiens
  misc_RNA (1)...(19): siRNA sense strand
uggagcacaucgagaagau

SEQ ID NO: 1113769 - RNA, 19 nt, Homo sapiens
  misc_RNA (1)...(19): siRNA sense strand
gcgcaagaugucccuguug

SEQ ID NO: 1113770 - RNA, 19 nt, Homo sapiens
  misc_RNA (1)...(19): siRNA sense strand
ccacaucuaccaacaaucc

SEQ ID NO: 1113771 - RNA, 19 nt, Homo sapiens
  misc_RNA (1)...(19): siRNA sense strand
agaugaagcagcucuuuag

SEQ ID NO: 1113772 - RNA, 19 nt, Homo sapiens
  misc_RNA (1)...(19): siRNA sense strand
gaaggacaacuccaauucc

SEQ ID NO: 1113773 - RNA, 19 nt, Homo sapiens
  misc_RNA (1)...(19): siRNA sense strand
guucaucucccucuucaac

SEQ ID NO: 1113774 - RNA, 19 nt, Homo sapiens
  misc_RNA (1)...(19): siRNA sense strand
gcuccaggccuccagagau

SEQ ID NO: 1113775 - RNA, 19 nt, Homo sapiens
  misc_RNA (1)...(19): siRNA sense strand
cuccacaucuaccaacaau

SEQ ID NO: 1113776 - RNA, 19 nt, Homo sapiens
  misc_RNA (1)...(19): siRNA sense strand
cggaaggacaacuccaauu

SEQ ID NO: 1113777 - RNA, 19 nt, Homo sapiens
  misc_RNA (1)...(19): siRNA sense strand
cagcagccuaaucgacaua

SEQ ID NO: 1113778 - RNA, 19 nt, Homo sapiens
  misc_RNA (1)...(19): siRNA sense strand
gaucgccugucaguugagu

SEQ ID NO: 1113779 - RNA, 19 nt, Homo sapiens
  misc_RNA (1)...(19): siRNA sense strand
aggaucgccugucaguuga

SEQ ID NO: 1113780 - RNA, 19 nt, Homo sapiens
  misc_RNA (1)...(19): siRNA sense strand
ccacaagcagugcaaggau

SEQ ID NO: 1113781 - RNA, 19 nt, Homo sapiens
  misc_RNA (1)...(19): siRNA sense strand
ggagacccacagccacguu

SEQ ID NO: 1113782 - RNA, 19 nt, Homo sapiens
  misc_RNA (1)...(19): siRNA sense strand
aguaucagacggaggauga

SEQ ID NO: 1113783 - RNA, 19 nt, Homo sapiens
  misc_RNA (1)...(19): siRNA sense strand
aggcaacuauggcaacuac

SEQ ID NO: 1113784 - RNA, 19 nt, Homo sapiens
  misc_RNA (1)...(19): siRNA sense strand
gacggaggaugagcuguac

SEQ ID NO: 1113785 - RNA, 19 nt, Homo sapiens
  misc_RNA (1)...(19): siRNA sense strand
gggcuucguacacaacuuc

SEQ ID NO: 1113786 - RNA, 19 nt, Homo sapiens
  misc_RNA (1)...(19): siRNA sense strand
gcgcuccagcucuguguug

SEQ ID NO: 1113787 - RNA, 19 nt, Homo sapiens
  misc_RNA (1)...(19): siRNA sense strand
ccagcggaguuugacuuga

SEQ ID NO: 1113788 - RNA, 19 nt, Homo sapiens
  misc_RNA (1)...(19): siRNA sense strand
ccaaacccaagcuggauca

SEQ ID NO: 1113789 - RNA, 19 nt, Homo sapiens
  misc_RNA (1)...(19): siRNA sense strand
cgguucaucucccucuuca

SEQ ID NO: 1113790 - RNA, 19 nt, Homo sapiens
  misc_RNA (1)...(19): siRNA sense strand
gguguuugacauccacuug

SEQ ID NO: 1113791 - RNA, 19 nt, Homo sapiens
  misc_RNA (1)...(19): siRNA sense strand
cuccaggccuccagagauc

SEQ ID NO: 1113792 - RNA, 19 nt, Homo sapiens
  misc_RNA (1)...(19): siRNA sense strand
caagcagggccucaaaugc

SEQ ID NO: 1113793 - RNA, 19 nt, Homo sapiens
  misc_RNA (1)...(19): siRNA sense strand
cgcaugggcuucguacaca

SEQ ID NO: 1113794 - RNA, 19 nt, Homo sapiens
  misc_RNA (1)...(19): siRNA sense strand
ugacuugaacccggaguug

SEQ ID NO: 1113795 - RNA, 19 nt, Homo sapiens
  misc_RNA (1)...(19): siRNA sense strand
ggagaugguuuccuauuuc

SEQ ID NO: 1113796 - RNA, 19 nt, Homo sapiens
  misc_RNA (1)...(19): siRNA sense strand
ggaaggacaacuccaauuc

SEQ ID NO: 1113797 - RNA, 19 nt, Homo sapiens
  misc_RNA (1)...(19): siRNA sense strand
ccaauucccugcaggugaa

SEQ ID NO: 1113798 - RNA, 19 nt, Homo sapiens
  misc_RNA (1)...(19): siRNA sense strand
caagaugucccuguuguuu

SEQ ID NO: 1113799 - RNA, 19 nt, Homo sapiens
  misc_RNA (1)...(19): siRNA sense strand
cagcggaguuugacuugaa

SEQ ID NO: 1113800 - RNA, 19 nt, Homo sapiens
  misc_RNA (1)...(19): siRNA sense strand
ggaguuggcugagcagauc

SEQ ID NO: 1113801 - RNA, 19 nt, Homo sapiens
  misc_RNA (1)...(19): siRNA sense strand
ugaagcagcucuuuagcau

SEQ ID NO: 1113802 - RNA, 19 nt, Homo sapiens
  misc_RNA (1)...(19): siRNA sense strand
ccaagcugcuccacaucua

SEQ ID NO: 1113803 - RNA, 19 nt, Homo sapiens
  misc_RNA (1)...(19): siRNA sense strand
gaucauccgugggaacuuc

SEQ ID NO: 1113804 - RNA, 19 nt, Homo sapiens
  misc_RNA (1)...(19): siRNA sense strand
gugcaaggaucgccuguca

SEQ ID NO: 1113805 - RNA, 19 nt, Homo sapiens
  misc_RNA (1)...(19): siRNA sense strand
gcaaggaucgccugucagu

SEQ ID NO: 1113806 - RNA, 19 nt, Homo sapiens
  misc_RNA (1)...(19): siRNA sense strand
agaugucccuguuguuuga

SEQ ID NO: 1113807 - RNA, 19 nt, Homo sapiens
  misc_RNA (1)...(19): siRNA sense strand
cggagcaucucaccuacuu

SEQ ID NO: 1113808 - RNA, 19 nt, Homo sapiens
  misc_RNA (1)...(19): siRNA sense strand
ggaagcggcaggugacuca

SEQ ID NO: 1113809 - RNA, 19 nt, Homo sapiens
  misc_RNA (1)...(19): siRNA sense strand
gcagggaggagaugguuuc

SEQ ID NO: 1113810 - RNA, 19 nt, Homo sapiens
  misc_RNA (1)...(19): siRNA sense strand
ccacaucucacaggaagaa

SEQ ID NO: 1113811 - RNA, 19 nt, Homo sapiens
  misc_RNA (1)...(19): siRNA sense strand
gcaagaugucccuguuguu

SEQ ID NO: 1113812 - RNA, 19 nt, Homo sapiens
  misc_RNA (1)...(19): siRNA sense strand
uguuugacauccacuugua

SEQ ID NO: 1113813 - RNA, 19 nt, Homo sapiens
  misc_RNA (1)...(19): siRNA sense strand
cggugucucuggaucagua

SEQ ID NO: 1113814 - RNA, 19 nt, Homo sapiens
  misc_RNA (1)...(19): siRNA sense strand
cgacggcacagcagccuaa

SEQ ID NO: 1113815 - RNA, 19 nt, Homo sapiens
  misc_RNA (1)...(19): siRNA sense strand
aaggaucgccugucaguug

SEQ ID NO: 1113816 - RNA, 19 nt, Homo sapiens
  misc_RNA (1)...(19): siRNA sense strand
ucaggacuaucacaguuuc

SEQ ID NO: 1113817 - RNA, 19 nt, Homo sapiens
  misc_RNA (1)...(19): siRNA sense strand
agaagaugguggagucugu

SEQ ID NO: 1113818 - RNA, 19 nt, Homo sapiens
  misc_RNA (1)...(19): siRNA sense strand
gcugaaggcucugcuagac

SEQ ID NO: 1113819 - RNA, 19 nt, Homo sapiens
  misc_RNA (1)...(19): siRNA sense strand
gggagggucucacggaacu

SEQ ID NO: 1113820 - RNA, 19 nt, Homo sapiens
  misc_RNA (1)...(19): siRNA sense strand
gagacccacagccacguua

SEQ ID NO: 1113821 - RNA, 19 nt, Homo sapiens
  misc_RNA (1)...(19): siRNA sense strand
gaacuucaacacgcugaug

SEQ ID NO: 1113822 - RNA, 19 nt, Homo sapiens
  misc_RNA (1)...(19): siRNA sense strand
uuucaggacuaucacaguu

SEQ ID NO: 1113823 - RNA, 19 nt, Homo sapiens
  misc_RNA (1)...(19): siRNA sense strand
gcaugggcuucguacacaa

SEQ ID NO: 1113824 - RNA, 19 nt, Homo sapiens
  misc_RNA (1)...(19): siRNA sense strand
agacggaggaugagcugua

SEQ ID NO: 1113825 - RNA, 19 nt, Homo sapiens
  misc_RNA (1)...(19): siRNA sense strand
uggaggagcuggccauggu

SEQ ID NO: 1113826 - RNA, 19 nt, Homo sapiens
  misc_RNA (1)...(19): siRNA sense strand
gcucaugauccucagcaaa

SEQ ID NO: 1113827 - RNA, 19 nt, Homo sapiens
  misc_RNA (1)...(19): siRNA sense strand
cgcaagaugucccuguugu

SEQ ID NO: 1113828 - RNA, 19 nt, Homo sapiens
  misc_RNA (1)...(19): siRNA sense strand
ucugcaagauccuguuuca

SEQ ID NO: 1113829 - RNA, 19 nt, Homo sapiens
  misc_RNA (1)...(19): siRNA sense strand
gaugguggagucuguguuc

SEQ ID NO: 1113830 - RNA, 19 nt, Homo sapiens
  misc_RNA (1)...(19): siRNA sense strand
cggccaagcugcuccacau

SEQ ID NO: 1113831 - RNA, 19 nt, Homo sapiens
  misc_RNA (1)...(19): siRNA sense strand
uggcugagcagaucaagga

SEQ ID NO: 1113832 - RNA, 19 nt, Homo sapiens
  misc_RNA (1)...(19): siRNA sense strand
uggcggagcaucucaccua

SEQ ID NO: 1113833 - RNA, 19 nt, Homo sapiens
  misc_RNA (1)...(19): siRNA sense strand
cagcgucccuaccuacaag

SEQ ID NO: 1113834 - RNA, 19 nt, Homo sapiens
  misc_RNA (1)...(19): siRNA sense strand
gcagccuaaucgacauaga

SEQ ID NO: 1113835 - RNA, 19 nt, Homo sapiens
  misc_RNA (1)...(19): siRNA sense strand
uagacagcgucccuaccua

SEQ ID NO: 1113836 - RNA, 19 nt, Homo sapiens
  misc_RNA (1)...(19): siRNA sense strand
cuacaagcagggccucaaa

SEQ ID NO: 1113837 - RNA, 19 nt, Homo sapiens
  misc_RNA (1)...(19): siRNA sense strand
ugcuacagcugcagaacuu

SEQ ID NO: 1113838 - RNA, 19 nt, Homo sapiens
  misc_RNA (1)...(19): siRNA sense strand
ggucaucacacacuuuguc

SEQ ID NO: 1113839 - RNA, 19 nt, Homo sapiens
  misc_RNA (1)...(19): siRNA sense strand
uaucgcuccuucugcaaga

SEQ ID NO: 1113840 - RNA, 19 nt, Homo sapiens
  misc_RNA (1)...(19): siRNA sense strand
gagaugguuuccuauuucc

SEQ ID NO: 1113841 - RNA, 19 nt, Homo sapiens
  misc_RNA (1)...(19): siRNA sense strand
caucucacaggaagaauuc

SEQ ID NO: 1113842 - RNA, 19 nt, Homo sapiens
  misc_RNA (1)...(19): siRNA sense strand
acaagcagggccucaaaug

SEQ ID NO: 1113843 - RNA, 19 nt, Homo sapiens
  misc_RNA (1)...(19): siRNA sense strand
uggagcacaucgagaagau

SEQ ID NO: 1113844 - RNA, 19 nt, Homo sapiens
  misc_RNA (1)...(19): siRNA sense strand
gcgcaagaugucccuguug

SEQ ID NO: 1113845 - RNA, 19 nt, Homo sapiens
  misc_RNA (1)...(19): siRNA sense strand
ccacaucuaccaacaaucc

SEQ ID NO: 1113846 - RNA, 19 nt, Homo sapiens
  misc_RNA (1)...(19): siRNA sense strand
agaugaagcagcucuuuag

SEQ ID NO: 1113847 - RNA, 19 nt, Homo sapiens
  misc_RNA (1)...(19): siRNA sense strand
gaaggacaacuccaauucc

SEQ ID NO: 1113848 - RNA, 19 nt, Homo sapiens
  misc_RNA (1)...(19): siRNA sense strand
guucaucucccucuucaac

SEQ ID NO: 1113849 - RNA, 19 nt, Homo sapiens
  misc_RNA (1)...(19): siRNA sense strand
gcuccaggccuccagagau

SEQ ID NO: 1113850 - RNA, 19 nt, Homo sapiens
  misc_RNA (1)...(19): siRNA sense strand
cuccacaucuaccaacaau

SEQ ID NO: 1113851 - RNA, 19 nt, Homo sapiens
  misc_RNA (1)...(19): siRNA sense strand
cggaaggacaacuccaauu

SEQ ID NO: 1113852 - RNA, 19 nt, Homo sapiens
  misc_RNA (1)...(19): siRNA sense strand
cagcagccuaaucgacaua

SEQ ID NO: 1113853 - RNA, 19 nt, Homo sapiens
  misc_RNA (1)...(19): siRNA sense strand
gaucgccugucaguugagu

SEQ ID NO: 1113854 - RNA, 19 nt, Homo sapiens
  misc_RNA (1)...(19): siRNA sense strand
aggaucgccugucaguuga

SEQ ID NO: 1113855 - RNA, 19 nt, Homo sapiens
  misc_RNA (1)...(19): siRNA sense strand
ccacaagcagugcaaggau

SEQ ID NO: 1113856 - RNA, 19 nt, Homo sapiens
  misc_RNA (1)...(19): siRNA sense strand
ggagacccacagccacguu

SEQ ID NO: 1113857 - RNA, 19 nt, Homo sapiens
  misc_RNA (1)...(19): siRNA sense strand
aguaucagacggaggauga

SEQ ID NO: 1113858 - RNA, 19 nt, Homo sapiens
  misc_RNA (1)...(19): siRNA sense strand
aggcaacuauggcaacuac

SEQ ID NO: 1113859 - RNA, 19 nt, Homo sapiens
  misc_RNA (1)...(19): siRNA sense strand
gacggaggaugagcuguac

SEQ ID NO: 1113860 - RNA, 19 nt, Homo sapiens
  misc_RNA (1)...(19): siRNA sense strand
gggcuucguacacaacuuc

SEQ ID NO: 1113861 - RNA, 19 nt, Homo sapiens
  misc_RNA (1)...(19): siRNA sense strand
gcgcuccagcucuguguug

SEQ ID NO: 1113862 - RNA, 19 nt, Homo sapiens
  misc_RNA (1)...(19): siRNA sense strand
ccagcggaguuugacuuga

SEQ ID NO: 1113863 - RNA, 19 nt, Homo sapiens
  misc_RNA (1)...(19): siRNA sense strand
ccaaacccaagcuggauca

SEQ ID NO: 1113864 - RNA, 19 nt, Homo sapiens
  misc_RNA (1)...(19): siRNA sense strand
cgguucaucucccucuuca

SEQ ID NO: 1113865 - RNA, 19 nt, Homo sapiens
  misc_RNA (1)...(19): siRNA sense strand
gguguuugacauccacuug

SEQ ID NO: 1113866 - RNA, 19 nt, Homo sapiens
  misc_RNA (1)...(19): siRNA sense strand
cuccaggccuccagagauc

SEQ ID NO: 1113867 - RNA, 19 nt, Homo sapiens
  misc_RNA (1)...(19): siRNA sense strand
caagcagggccucaaaugc

SEQ ID NO: 1113868 - RNA, 19 nt, Homo sapiens
  misc_RNA (1)...(19): siRNA sense strand
cgcaugggcuucguacaca

SEQ ID NO: 1113869 - RNA, 19 nt, Homo sapiens
  misc_RNA (1)...(19): siRNA sense strand
ugacuugaacccggaguug

SEQ ID NO: 1113870 - RNA, 19 nt, Homo sapiens
  misc_RNA (1)...(19): siRNA sense strand
gaagagagaagacauauuc

SEQ ID NO: 1113871 - RNA, 19 nt, Homo sapiens
  misc_RNA (1)...(19): siRNA sense strand
gaagacauauucuacacuu

SEQ ID NO: 1113872 - RNA, 19 nt, Homo sapiens
  misc_RNA (1)...(19): siRNA sense strand
aaacagaaaugugcgauau

SEQ ID NO: 1113873 - RNA, 19 nt, Homo sapiens
  misc_RNA (1)...(19): siRNA sense strand
gcaaccagguggaauguca

SEQ ID NO: 1113874 - RNA, 19 nt, Homo sapiens
  misc_RNA (1)...(19): siRNA sense strand
ggaaugucauccuuacuuc

SEQ ID NO: 1113875 - RNA, 19 nt, Homo sapiens
  misc_RNA (1)...(19): siRNA sense strand
guguaaagaugcaggauug

SEQ ID NO: 1113876 - RNA, 19 nt, Homo sapiens
  misc_RNA (1)...(19): siRNA sense strand
gagcagcgcaucagacaga

SEQ ID NO: 1113877 - RNA, 19 nt, Homo sapiens
  misc_RNA (1)...(19): siRNA sense strand
gugaggaagugaucccaaa

SEQ ID NO: 1113878 - RNA, 19 nt, Homo sapiens
  misc_RNA (1)...(19): siRNA sense strand
uagauggccuaaacagaaa

SEQ ID NO: 1113879 - RNA, 19 nt, Homo sapiens
  misc_RNA (1)...(19): siRNA sense strand
agagaaaacugcuggauuu

SEQ ID NO: 1113880 - RNA, 19 nt, Homo sapiens
  misc_RNA (1)...(19): siRNA sense strand
gacagaacgugcagguguu

SEQ ID NO: 1113881 - RNA, 19 nt, Homo sapiens
  misc_RNA (1)...(19): siRNA sense strand
gcugaaugauggucacuuc

SEQ ID NO: 1113882 - RNA, 19 nt, Homo sapiens
  misc_RNA (1)...(19): siRNA sense strand
ggagaaguguaaagaugca

SEQ ID NO: 1113883 - RNA, 19 nt, Homo sapiens
  misc_RNA (1)...(19): siRNA sense strand
gagaugaaagccauagaug

SEQ ID NO: 1113884 - RNA, 19 nt, Homo sapiens
  misc_RNA (1)...(19): siRNA sense strand
gaagugaucccaaaagaug

SEQ ID NO: 1113885 - RNA, 19 nt, Homo sapiens
  misc_RNA (1)...(19): siRNA sense strand
gacauauucuacacuucaa

SEQ ID NO: 1113886 - RNA, 19 nt, Homo sapiens
  misc_RNA (1)...(19): siRNA sense strand
ggagaugaaagccauagau

SEQ ID NO: 1113887 - RNA, 19 nt, Homo sapiens
  misc_RNA (1)...(19): siRNA sense strand
auagauggccuaaacagaa

SEQ ID NO: 1113888 - RNA, 19 nt, Homo sapiens
  misc_RNA (1)...(19): siRNA sense strand
uaaacagaaaugugcgaua

SEQ ID NO: 1113889 - RNA, 19 nt, Homo sapiens
  misc_RNA (1)...(19): siRNA sense strand
gguggaaugucauccuuac

SEQ ID NO: 1113890 - RNA, 19 nt, Homo sapiens
  misc_RNA (1)...(19): siRNA sense strand
gaacgugcagguguuugaa

SEQ ID NO: 1113891 - RNA, 19 nt, Homo sapiens
  misc_RNA (1)...(19): siRNA sense strand
ggacuggccauccgaagca

SEQ ID NO: 1113892 - RNA, 19 nt, Homo sapiens
  misc_RNA (1)...(19): siRNA sense strand
agacauauucuacacuuca

SEQ ID NO: 1113893 - RNA, 19 nt, Homo sapiens
  misc_RNA (1)...(19): siRNA sense strand
gcagagguuccuaaaagua

SEQ ID NO: 1113894 - RNA, 19 nt, Homo sapiens
  misc_RNA (1)...(19): siRNA sense strand
ggagaugauccucaacaag

SEQ ID NO: 1113895 - RNA, 19 nt, Homo sapiens
  misc_RNA (1)...(19): siRNA sense strand
uggagaugauccucaacaa

SEQ ID NO: 1113896 - RNA, 19 nt, Homo sapiens
  misc_RNA (1)...(19): siRNA sense strand
guguuugaauuccaguuga

SEQ ID NO: 1113897 - RNA, 19 nt, Homo sapiens
  misc_RNA (1)...(19): siRNA sense strand
gaaugucauccuuacuuca

SEQ ID NO: 1113898 - RNA, 19 nt, Homo sapiens
  misc_RNA (1)...(19): siRNA sense strand
cagguggaaugucauccuu

SEQ ID NO: 1113899 - RNA, 19 nt, Homo sapiens
  misc_RNA (1)...(19): siRNA sense strand
gaauuccaguugacuucag

SEQ ID NO: 1113900 - RNA, 19 nt, Homo sapiens
  misc_RNA (1)...(19): siRNA sense strand
cgauauuugacccuugaua

SEQ ID NO: 1113901 - RNA, 19 nt, Homo sapiens
  misc_RNA (1)...(19): siRNA sense strand
cauagauggccuaaacaga

SEQ ID NO: 1113902 - RNA, 19 nt, Homo sapiens
  misc_RNA (1)...(19): siRNA sense strand
gugaagagagaagacauau

SEQ ID NO: 1113903 - RNA, 19 nt, Homo sapiens
  misc_RNA (1)...(19): siRNA sense strand
uggccaagagcuacaauga

SEQ ID NO: 1113904 - RNA, 19 nt, Homo sapiens
  misc_RNA (1)...(19): siRNA sense strand
uggaaugucauccuuacuu

SEQ ID NO: 1113905 - RNA, 19 nt, Homo sapiens
  misc_RNA (1)...(19): siRNA sense strand
auucuacacuucaaagcuu

SEQ ID NO: 1113906 - RNA, 19 nt, Homo sapiens
  misc_RNA (1)...(19): siRNA sense strand
ugcgauauuugacccuuga

SEQ ID NO: 1113907 - RNA, 19 nt, Homo sapiens
  misc_RNA (1)...(19): siRNA sense strand
aaagccaggugaggaagug

SEQ ID NO: 1113908 - RNA, 19 nt, Homo sapiens
  misc_RNA (1)...(19): siRNA sense strand
ccugggauuuggcaccuau

SEQ ID NO: 1113909 - RNA, 19 nt, Homo sapiens
  misc_RNA (1)...(19): siRNA sense strand
acgugcagguguuugaauu

SEQ ID NO: 1113910 - RNA, 19 nt, Homo sapiens
  misc_RNA (1)...(19): siRNA sense strand
gaugcaggauuggccaagu

SEQ ID NO: 1113911 - RNA, 19 nt, Homo sapiens
  misc_RNA (1)...(19): siRNA sense strand
ugaagagagaagacauauu

SEQ ID NO: 1113912 - RNA, 19 nt, Homo sapiens
  misc_RNA (1)...(19): siRNA sense strand
cccaaaagaugaaaaugga

SEQ ID NO: 1113913 - RNA, 19 nt, Homo sapiens
  misc_RNA (1)...(19): siRNA sense strand
gguguuugaauuccaguug

SEQ ID NO: 1113914 - RNA, 19 nt, Homo sapiens
  misc_RNA (1)...(19): siRNA sense strand
uguaaagccaggugaggaa

SEQ ID NO: 1113915 - RNA, 19 nt, Homo sapiens
  misc_RNA (1)...(19): siRNA sense strand
uuggaaaggucacugaaaa

SEQ ID NO: 1113916 - RNA, 19 nt, Homo sapiens
  misc_RNA (1)...(19): siRNA sense strand
cuaugcgccugcagagguu

SEQ ID NO: 1113917 - RNA, 19 nt, Homo sapiens
  misc_RNA (1)...(19): siRNA sense strand
aaaagacauuguucugguu

SEQ ID NO: 1113918 - RNA, 19 nt, Homo sapiens
  misc_RNA (1)...(19): siRNA sense strand
aguacaagccugucugcaa

SEQ ID NO: 1113919 - RNA, 19 nt, Homo sapiens
  misc_RNA (1)...(19): siRNA sense strand
cugcagagguuccuaaaag

SEQ ID NO: 1113920 - RNA, 19 nt, Homo sapiens
  misc_RNA (1)...(19): siRNA sense strand
agaacgugcagguguuuga

SEQ ID NO: 1113921 - RNA, 19 nt, Homo sapiens
  misc_RNA (1)...(19): siRNA sense strand
guacacagcgaccucaugu

SEQ ID NO: 1113922 - RNA, 19 nt, Homo sapiens
  misc_RNA (1)...(19): siRNA sense strand
agaaggcgcugcggaacaa

SEQ ID NO: 1113923 - RNA, 19 nt, Homo sapiens
  misc_RNA (1)...(19): siRNA sense strand
gcgaugaucaagaagaugu

SEQ ID NO: 1113924 - RNA, 19 nt, Homo sapiens
  misc_RNA (1)...(19): siRNA sense strand
gcaaggucucggugcagua

SEQ ID NO: 1113925 - RNA, 19 nt, Homo sapiens
  misc_RNA (1)...(19): siRNA sense strand
acagcgaccucauguacau

SEQ ID NO: 1113926 - RNA, 19 nt, Homo sapiens
  misc_RNA (1)...(19): siRNA sense strand
aaggagcgcugcgucauca

SEQ ID NO: 1113927 - RNA, 19 nt, Homo sapiens
  misc_RNA (1)...(19): siRNA sense strand
ccgcgaugaucaagaagau

SEQ ID NO: 1113928 - RNA, 19 nt, Homo sapiens
  misc_RNA (1)...(19): siRNA sense strand
acacagcgaccucauguac

SEQ ID NO: 1113929 - RNA, 19 nt, Homo sapiens
  misc_RNA (1)...(19): siRNA sense strand
gcagccaggccaaggacaa

SEQ ID NO: 1113930 - RNA, 19 nt, Homo sapiens
  misc_RNA (1)...(19): siRNA sense strand
ucauguacauccgcgagaa

SEQ ID NO: 1113931 - RNA, 19 nt, Homo sapiens
  misc_RNA (1)...(19): siRNA sense strand
ggucaucugcggcaacaag

SEQ ID NO: 1113932 - RNA, 19 nt, Homo sapiens
  misc_RNA (1)...(19): siRNA sense strand
caagggugaccgcgacuuc

SEQ ID NO: 1113933 - RNA, 19 nt, Homo sapiens
  misc_RNA (1)...(19): siRNA sense strand
gaacaaaaccaaggagaac

SEQ ID NO: 1113934 - RNA, 19 nt, Homo sapiens
  misc_RNA (1)...(19): siRNA sense strand
caaggagcgcugcgucauc

SEQ ID NO: 1113935 - RNA, 19 nt, Homo sapiens
  misc_RNA (1)...(19): siRNA sense strand
gaagaugagucuccugaaa

SEQ ID NO: 1113936 - RNA, 19 nt, Homo sapiens
  misc_RNA (1)...(19): siRNA sense strand
ggauggagcaccucauuua

SEQ ID NO: 1113937 - RNA, 19 nt, Homo sapiens
  misc_RNA (1)...(19): siRNA sense strand
gaucacaaaggcagaaaua

SEQ ID NO: 1113938 - RNA, 19 nt, Homo sapiens
  misc_RNA (1)...(19): siRNA sense strand
ccacuucccuuuguuguuu

SEQ ID NO: 1113939 - RNA, 19 nt, Homo sapiens
  misc_RNA (1)...(19): siRNA sense strand
ugaaggagccgaucacaaa

SEQ ID NO: 1113940 - RNA, 19 nt, Homo sapiens
  misc_RNA (1)...(19): siRNA sense strand
gaagugagauagaugaaaa

SEQ ID NO: 1113941 - RNA, 19 nt, Homo sapiens
  misc_RNA (1)...(19): siRNA sense strand
gaucuucaaucccaaagug

SEQ ID NO: 1113942 - RNA, 19 nt, Homo sapiens
  misc_RNA (1)...(19): siRNA sense strand
ggaagcugcucacccaaga

SEQ ID NO: 1113943 - RNA, 19 nt, Homo sapiens
  misc_RNA (1)...(19): siRNA sense strand
gggaagcacugaauaugau

SEQ ID NO: 1113944 - RNA, 19 nt, Homo sapiens
  misc_RNA (1)...(19): siRNA sense strand
agaugagucuccugaaauu

SEQ ID NO: 1113945 - RNA, 19 nt, Homo sapiens
  misc_RNA (1)...(19): siRNA sense strand
cagaaauacuggagagugu

SEQ ID NO: 1113946 - RNA, 19 nt, Homo sapiens
  misc_RNA (1)...(19): siRNA sense strand
gaaagaugaggaagagaga

SEQ ID NO: 1113947 - RNA, 19 nt, Homo sapiens
  misc_RNA (1)...(19): siRNA sense strand
ggagguuucugcugaugau

SEQ ID NO: 1113948 - RNA, 19 nt, Homo sapiens
  misc_RNA (1)...(19): siRNA sense strand
gaauugccaccacagauga

SEQ ID NO: 1113949 - RNA, 19 nt, Homo sapiens
  misc_RNA (1)...(19): siRNA sense strand
gcauugauguaaaggaagu

SEQ ID NO: 1113950 - RNA, 19 nt, Homo sapiens
  misc_RNA (1)...(19): siRNA sense strand
ccaagauccuucccacugu

SEQ ID NO: 1113951 - RNA, 19 nt, Homo sapiens
  misc_RNA (1)...(19): siRNA sense strand
gaaauacuggagaguguca

SEQ ID NO: 1113952 - RNA, 19 nt, Homo sapiens
  misc_RNA (1)...(19): siRNA sense strand
gguaugaggaggcuuugaa

SEQ ID NO: 1113953 - RNA, 19 nt, Homo sapiens
  misc_RNA (1)...(19): siRNA sense strand
cuccugcuauccucuaaua

SEQ ID NO: 1113954 - RNA, 19 nt, Homo sapiens
  misc_RNA (1)...(19): siRNA sense strand
uggcauugauguaaaggaa

SEQ ID NO: 1113955 - RNA, 19 nt, Homo sapiens
  misc_RNA (1)...(19): siRNA sense strand
cugcaugccugaagaagau

SEQ ID NO: 1113956 - RNA, 19 nt, Homo sapiens
  misc_RNA (1)...(19): siRNA sense strand
caagacuggcauucucaua

SEQ ID NO: 1113957 - RNA, 19 nt, Homo sapiens
  misc_RNA (1)...(19): siRNA sense strand
ucaaguaucaaaugaagga

SEQ ID NO: 1113958 - RNA, 19 nt, Homo sapiens
  misc_RNA (1)...(19): siRNA sense strand
gaugggaugcugagugaug

SEQ ID NO: 1113959 - RNA, 19 nt, Homo sapiens
  misc_RNA (1)...(19): siRNA sense strand
uccaagggcucaugcugaa

SEQ ID NO: 1113960 - RNA, 19 nt, Homo sapiens
  misc_RNA (1)...(19): siRNA sense strand
gcugaaauuaggaagauga

SEQ ID NO: 1113961 - RNA, 19 nt, Homo sapiens
  misc_RNA (1)...(19): siRNA sense strand
ccagaagugagauagauga

SEQ ID NO: 1113962 - RNA, 19 nt, Homo sapiens
  misc_RNA (1)...(19): siRNA sense strand
uggagcaccucauuuaugg

SEQ ID NO: 1113963 - RNA, 19 nt, Homo sapiens
  misc_RNA (1)...(19): siRNA sense strand
gauggagcaccucauuuau

SEQ ID NO: 1113964 - RNA, 19 nt, Homo sapiens
  misc_RNA (1)...(19): siRNA sense strand
gcucuucaaguaucaaaug

SEQ ID NO: 1113965 - RNA, 19 nt, Homo sapiens
  misc_RNA (1)...(19): siRNA sense strand
caagguaaaugggagugau

SEQ ID NO: 1113966 - RNA, 19 nt, Homo sapiens
  misc_RNA (1)...(19): siRNA sense strand
guccagagcaugcccaaga

SEQ ID NO: 1113967 - RNA, 19 nt, Homo sapiens
  misc_RNA (1)...(19): siRNA sense strand
aaaugggagugauccaaga

SEQ ID NO: 1113968 - RNA, 19 nt, Homo sapiens
  misc_RNA (1)...(19): siRNA sense strand
caaaugaaggagccgauca

SEQ ID NO: 1113969 - RNA, 19 nt, Homo sapiens
  misc_RNA (1)...(19): siRNA sense strand
gaggagguuucugcugaug

SEQ ID NO: 1113970 - RNA, 19 nt, Homo sapiens
  misc_RNA (1)...(19): siRNA sense strand
agagagagcccaggacaga

SEQ ID NO: 1113971 - RNA, 19 nt, Homo sapiens
  misc_RNA (1)...(19): siRNA sense strand
ggaagaugagucuccugaa

SEQ ID NO: 1113972 - RNA, 19 nt, Homo sapiens
  misc_RNA (1)...(19): siRNA sense strand
caagggcucaugcugaaau

SEQ ID NO: 1113973 - RNA, 19 nt, Homo sapiens
  misc_RNA (1)...(19): siRNA sense strand
caagauugggugcaggaaa

SEQ ID NO: 1113974 - RNA, 19 nt, Homo sapiens
  misc_RNA (1)...(19): siRNA sense strand
gcccaagacuggcauucuc

SEQ ID NO: 1113975 - RNA, 19 nt, Homo sapiens
  misc_RNA (1)...(19): siRNA sense strand
gcaugcugcuggucuuugg

SEQ ID NO: 1113976 - RNA, 19 nt, Homo sapiens
  misc_RNA (1)...(19): siRNA sense strand
gaugaugagacaccaaauc

SEQ ID NO: 1113977 - RNA, 19 nt, Homo sapiens
  misc_RNA (1)...(19): siRNA sense strand
uugcuucccuuccauuaga

SEQ ID NO: 1113978 - RNA, 19 nt, Homo sapiens
  misc_RNA (1)...(19): siRNA sense strand
guaugaggaggcuuugaaa

SEQ ID NO: 1113979 - RNA, 19 nt, Homo sapiens
  misc_RNA (1)...(19): siRNA sense strand
gggauggagcaccucauuu

SEQ ID NO: 1113980 - RNA, 19 nt, Homo sapiens
  misc_RNA (1)...(19): siRNA sense strand
ugagugauguccagagcau

SEQ ID NO: 1113981 - RNA, 19 nt, Homo sapiens
  misc_RNA (1)...(19): siRNA sense strand
ggucuuuggcauugaugua

SEQ ID NO: 1113982 - RNA, 19 nt, Homo sapiens
  misc_RNA (1)...(19): siRNA sense strand
ggucguugcuucccuucca

SEQ ID NO: 1113983 - RNA, 19 nt, Homo sapiens
  misc_RNA (1)...(19): siRNA sense strand
ucacaaaggcagaaauacu

SEQ ID NO: 1113984 - RNA, 19 nt, Homo sapiens
  misc_RNA (1)...(19): siRNA sense strand
augaaaaggugacugauuu

SEQ ID NO: 1113985 - RNA, 19 nt, Homo sapiens
  misc_RNA (1)...(19): siRNA sense strand
gaaggagccgaucacaaag

SEQ ID NO: 1113986 - RNA, 19 nt, Homo sapiens
  misc_RNA (1)...(19): siRNA sense strand
guaaaugggagugauccaa

SEQ ID NO: 1113987 - RNA, 19 nt, Homo sapiens
  misc_RNA (1)...(19): siRNA sense strand
gaugagucuccugaaauuu

SEQ ID NO: 1113988 - RNA, 19 nt, Homo sapiens
  misc_RNA (1)...(19): siRNA sense strand
cacaaaggcagaaauacug

SEQ ID NO: 1113989 - RNA, 19 nt, Homo sapiens
  misc_RNA (1)...(19): siRNA sense strand
augaugggaugcugaguga

SEQ ID NO: 1113990 - RNA, 19 nt, Homo sapiens
  misc_RNA (1)...(19): siRNA sense strand
gggcucaugcugaaauuag

SEQ ID NO: 1113991 - RNA, 19 nt, Homo sapiens
  misc_RNA (1)...(19): siRNA sense strand
caccacagaugauacuacu

SEQ ID NO: 1113992 - RNA, 19 nt, Homo sapiens
  misc_RNA (1)...(19): siRNA sense strand
ccacuggccacuccuuugu

SEQ ID NO: 1113993 - RNA, 19 nt, Homo sapiens
  misc_RNA (1)...(19): siRNA sense strand
ugggaagcacugaauauga

SEQ ID NO: 1113994 - RNA, 19 nt, Homo sapiens
  misc_RNA (1)...(19): siRNA sense strand
aguuucugcucuucaagua

SEQ ID NO: 1113995 - RNA, 19 nt, Homo sapiens
  misc_RNA (1)...(19): siRNA sense strand
ggaagcacugaauaugaug

SEQ ID NO: 1113996 - RNA, 19 nt, Homo sapiens
  misc_RNA (1)...(19): siRNA sense strand
cugcuggucuuuggcauug

SEQ ID NO: 1113997 - RNA, 19 nt, Homo sapiens
  misc_RNA (1)...(19): siRNA sense strand
gagagcccaggacagaauu

SEQ ID NO: 1113998 - RNA, 19 nt, Homo sapiens
  misc_RNA (1)...(19): siRNA sense strand
gaugaaaaggugacugauu

SEQ ID NO: 1113999 - RNA, 19 nt, Homo sapiens
  misc_RNA (1)...(19): siRNA sense strand
agaauugccaccacagaug

SEQ ID NO: 1114000 - RNA, 19 nt, Homo sapiens
  misc_RNA (1)...(19): siRNA sense strand
aagaugagucuccugaaau

SEQ ID NO: 1114001 - RNA, 19 nt, Homo sapiens
  misc_RNA (1)...(19): siRNA sense strand
gacuggcauucucauacuu

SEQ ID NO: 1114002 - RNA, 19 nt, Homo sapiens
  misc_RNA (1)...(19): siRNA sense strand
agacuggcauucucauacu

SEQ ID NO: 1114003 - RNA, 19 nt, Homo sapiens
  misc_RNA (1)...(19): siRNA sense strand
cccugggccucaccuauga

SEQ ID NO: 1114004 - RNA, 19 nt, Homo sapiens
  misc_RNA (1)...(19): siRNA sense strand
gcuggucuuuggcauugau

SEQ ID NO: 1114005 - RNA, 19 nt, Homo sapiens
  misc_RNA (1)...(19): siRNA sense strand
uagcuucuccuacccugaa

SEQ ID NO: 1114006 - RNA, 19 nt, Homo sapiens
  misc_RNA (1)...(19): siRNA sense strand
gagagagcccaggacagaa

SEQ ID NO: 1114007 - RNA, 19 nt, Homo sapiens
  misc_RNA (1)...(19): siRNA sense strand
uuucugcucuucaaguauc

SEQ ID NO: 1114008 - RNA, 19 nt, Homo sapiens
  misc_RNA (1)...(19): siRNA sense strand
cagaauugccaccacagau

SEQ ID NO: 1114009 - RNA, 19 nt, Homo sapiens
  misc_RNA (1)...(19): siRNA sense strand
caucugggaagcacugaau

SEQ ID NO: 1114010 - RNA, 19 nt, Homo sapiens
  misc_RNA (1)...(19): siRNA sense strand
ucccuuuguuguuuaguga

SEQ ID NO: 1114011 - RNA, 19 nt, Homo sapiens
  misc_RNA (1)...(19): siRNA sense strand
gcugcaugccugaagaaga

SEQ ID NO: 1114012 - RNA, 19 nt, Homo sapiens
  misc_RNA (1)...(19): siRNA sense strand
aagauugggugcaggaaaa

SEQ ID NO: 1114013 - RNA, 19 nt, Homo sapiens
  misc_RNA (1)...(19): siRNA sense strand
aagcugcucacccaagauu

SEQ ID NO: 1114014 - RNA, 19 nt, Homo sapiens
  misc_RNA (1)...(19): siRNA sense strand
ucuuuggcauugauguaaa

SEQ ID NO: 1114015 - RNA, 19 nt, Homo sapiens
  misc_RNA (1)...(19): siRNA sense strand
cacuucccuuuguuguuua

SEQ ID NO: 1114016 - RNA, 19 nt, Homo sapiens
  misc_RNA (1)...(19): siRNA sense strand
cagugauccugcacgguau

SEQ ID NO: 1114017 - RNA, 19 nt, Homo sapiens
  misc_RNA (1)...(19): siRNA sense strand
cuucuccuacccugaauaa

SEQ ID NO: 1114018 - RNA, 19 nt, Homo sapiens
  misc_RNA (1)...(19): siRNA sense strand
uuugaaagaugaggaagag

SEQ ID NO: 1114019 - RNA, 19 nt, Homo sapiens
  misc_RNA (1)...(19): siRNA sense strand
cagaagugagauagaugaa

SEQ ID NO: 1114020 - RNA, 19 nt, Homo sapiens
  misc_RNA (1)...(19): siRNA sense strand
ccacuccuuuguccuuguc

SEQ ID NO: 1114021 - RNA, 19 nt, Homo sapiens
  misc_RNA (1)...(19): siRNA sense strand
gcuaugaauucaccaguaa

SEQ ID NO: 1114022 - RNA, 19 nt, Homo sapiens
  misc_RNA (1)...(19): siRNA sense strand
ggaccugggugcgaagcua

SEQ ID NO: 1114023 - RNA, 19 nt, Homo sapiens
  misc_RNA (1)...(19): siRNA sense strand
gugcgaagcuaugaauuca

SEQ ID NO: 1114024 - RNA, 19 nt, Homo sapiens
  misc_RNA (1)...(19): siRNA sense strand
gauauucacuaccaaaaga

SEQ ID NO: 1114025 - RNA, 19 nt, Homo sapiens
  misc_RNA (1)...(19): siRNA sense strand
gaaagucuguacccaucca

SEQ ID NO: 1114026 - RNA, 19 nt, Homo sapiens
  misc_RNA (1)...(19): siRNA sense strand
ggagugacauauccaagac

SEQ ID NO: 1114027 - RNA, 19 nt, Homo sapiens
  misc_RNA (1)...(19): siRNA sense strand
gggagugacauauccaaga

SEQ ID NO: 1114028 - RNA, 19 nt, Homo sapiens
  misc_RNA (1)...(19): siRNA sense strand
ugaaaacuccgaaacaauu

SEQ ID NO: 1114029 - RNA, 19 nt, Homo sapiens
  misc_RNA (1)...(19): siRNA sense strand
ggugcgaagcuaugaauuc

SEQ ID NO: 1114030 - RNA, 19 nt, Homo sapiens
  misc_RNA (1)...(19): siRNA sense strand
gaaaacuccgaaacaauug

SEQ ID NO: 1114031 - RNA, 19 nt, Homo sapiens
  misc_RNA (1)...(19): siRNA sense strand
caagaccugcugcuuccaa

SEQ ID NO: 1114032 - RNA, 19 nt, Homo sapiens
  misc_RNA (1)...(19): siRNA sense strand
gaccugcugcuuccaauac

SEQ ID NO: 1114033 - RNA, 19 nt, Homo sapiens
  misc_RNA (1)...(19): siRNA sense strand
agcuaugaauucaccagua

SEQ ID NO: 1114034 - RNA, 19 nt, Homo sapiens
  misc_RNA (1)...(19): siRNA sense strand
gaucguuucucaucucuaa

SEQ ID NO: 1114035 - RNA, 19 nt, Homo sapiens
  misc_RNA (1)...(19): siRNA sense strand
gcgaauaucccucuauaaa

SEQ ID NO: 1114036 - RNA, 19 nt, Homo sapiens
  misc_RNA (1)...(19): siRNA sense strand
ggaauuaacugcccuaucc

SEQ ID NO: 1114037 - RNA, 19 nt, Homo sapiens
  misc_RNA (1)...(19): siRNA sense strand
ggacugcgguucuguggau

SEQ ID NO: 1114038 - RNA, 19 nt, Homo sapiens
  misc_RNA (1)...(19): siRNA sense strand
ugaauaaacuaccagugaa

SEQ ID NO: 1114039 - RNA, 19 nt, Homo sapiens
  misc_RNA (1)...(19): siRNA sense strand
ggauggaguuauaaaggaa

SEQ ID NO: 1114040 - RNA, 19 nt, Homo sapiens
  misc_RNA (1)...(19): siRNA sense strand
aagcgaauaucccucuaua

SEQ ID NO: 1114041 - RNA, 19 nt, Homo sapiens
  misc_RNA (1)...(19): siRNA sense strand
gaauaaacuaccagugaaa

SEQ ID NO: 1114042 - RNA, 19 nt, Homo sapiens
  misc_RNA (1)...(19): siRNA sense strand
guacagaucguuucucauc

SEQ ID NO: 1114043 - RNA, 19 nt, Homo sapiens
  misc_RNA (1)...(19): siRNA sense strand
ggaaaucccaguacagauc

SEQ ID NO: 1114044 - RNA, 19 nt, Homo sapiens
  misc_RNA (1)...(19): siRNA sense strand
accuauagcuaccugaaua

SEQ ID NO: 1114045 - RNA, 19 nt, Homo sapiens
  misc_RNA (1)...(19): siRNA sense strand
gaauaucccucuauaaaac

SEQ ID NO: 1114046 - RNA, 19 nt, Homo sapiens
  misc_RNA (1)...(19): siRNA sense strand
caguacagaucguuucuca

SEQ ID NO: 1114047 - RNA, 19 nt, Homo sapiens
  misc_RNA (1)...(19): siRNA sense strand
gcaaaggacagucuuacag

SEQ ID NO: 1114048 - RNA, 19 nt, Homo sapiens
  misc_RNA (1)...(19): siRNA sense strand
cugaauaaacuaccaguga

SEQ ID NO: 1114049 - RNA, 19 nt, Homo sapiens
  misc_RNA (1)...(19): siRNA sense strand
gguuguaagaguggaauua

SEQ ID NO: 1114050 - RNA, 19 nt, Homo sapiens
  misc_RNA (1)...(19): siRNA sense strand
uggauggaguuauaaagga

SEQ ID NO: 1114051 - RNA, 19 nt, Homo sapiens
  misc_RNA (1)...(19): siRNA sense strand
aguggcaacuucaggauga

SEQ ID NO: 1114052 - RNA, 19 nt, Homo sapiens
  misc_RNA (1)...(19): siRNA sense strand
ggaguuauaaaggaaguga

SEQ ID NO: 1114053 - RNA, 19 nt, Homo sapiens
  misc_RNA (1)...(19): siRNA sense strand
gggcgucccaguucccuuu

SEQ ID NO: 1114054 - RNA, 19 nt, Homo sapiens
  misc_RNA (1)...(19): siRNA sense strand
guuguaagaguggaauuaa

SEQ ID NO: 1114055 - RNA, 19 nt, Homo sapiens
  misc_RNA (1)...(19): siRNA sense strand
aagacaagaccuauagcua

SEQ ID NO: 1114056 - RNA, 19 nt, Homo sapiens
  misc_RNA (1)...(19): siRNA sense strand
gcaacuucaggaugacaaa

SEQ ID NO: 1114057 - RNA, 19 nt, Homo sapiens
  misc_RNA (1)...(19): siRNA sense strand
ugagcaaaggacagucuua

SEQ ID NO: 1114058 - RNA, 19 nt, Homo sapiens
  misc_RNA (1)...(19): siRNA sense strand
auagcuaccugaauaaacu

SEQ ID NO: 1114059 - RNA, 19 nt, Homo sapiens
  misc_RNA (1)...(19): siRNA sense strand
auaaaggaagugaauguga

SEQ ID NO: 1114060 - RNA, 19 nt, Homo sapiens
  misc_RNA (1)...(19): siRNA sense strand
gagcaaaggacagucuuac

SEQ ID NO: 1114061 - RNA, 19 nt, Homo sapiens
  misc_RNA (1)...(19): siRNA sense strand
cgaauaucccucuauaaaa

SEQ ID NO: 1114062 - RNA, 19 nt, Homo sapiens
  misc_RNA (1)...(19): siRNA sense strand
gugguggaguggcaacuuc

SEQ ID NO: 1114063 - RNA, 19 nt, Homo sapiens
  misc_RNA (1)...(19): siRNA sense strand
ccuauagcuaccugaauaa

SEQ ID NO: 1114064 - RNA, 19 nt, Homo sapiens
  misc_RNA (1)...(19): siRNA sense strand
caccuucaccagcaauauu

SEQ ID NO: 1114065 - RNA, 19 nt, Homo sapiens
  misc_RNA (1)...(19): siRNA sense strand
uucuguggauggaguuaua

SEQ ID NO: 1114066 - RNA, 19 nt, Homo sapiens
  misc_RNA (1)...(19): siRNA sense strand
gagccugaugguuguaaga

SEQ ID NO: 1114067 - RNA, 19 nt, Homo sapiens
  misc_RNA (1)...(19): siRNA sense strand
ggaguggcaacuucaggau

SEQ ID NO: 1114068 - RNA, 19 nt, Homo sapiens
  misc_RNA (1)...(19): siRNA sense strand
guaagaguggaauuaacug

SEQ ID NO: 1114069 - RNA, 19 nt, Homo sapiens
  misc_RNA (1)...(19): siRNA sense strand
gagacuaguuccacgauua

SEQ ID NO: 1114070 - RNA, 19 nt, Homo sapiens
  misc_RNA (1)...(19): siRNA sense strand
aggcugaaguccuuaauua

SEQ ID NO: 1114071 - RNA, 19 nt, Homo sapiens
  misc_RNA (1)...(19): siRNA sense strand
gaacacagccaaugaagca

SEQ ID NO: 1114072 - RNA, 19 nt, Homo sapiens
  misc_RNA (1)...(19): siRNA sense strand
gcuaagaaaccuaauguug

SEQ ID NO: 1114073 - RNA, 19 nt, Homo sapiens
  misc_RNA (1)...(19): siRNA sense strand
caaacccacugaagagaaa

SEQ ID NO: 1114074 - RNA, 19 nt, Homo sapiens
  misc_RNA (1)...(19): siRNA sense strand
cuuaacagcuccaaacuau

SEQ ID NO: 1114075 - RNA, 19 nt, Homo sapiens
  misc_RNA (1)...(19): siRNA sense strand
gaagcaaacccacugaaga

SEQ ID NO: 1114076 - RNA, 19 nt, Homo sapiens
  misc_RNA (1)...(19): siRNA sense strand
ugacuacaauucuggauga

SEQ ID NO: 1114077 - RNA, 19 nt, Homo sapiens
  misc_RNA (1)...(19): siRNA sense strand
gugacaagccaaagauuua

SEQ ID NO: 1114078 - RNA, 19 nt, Homo sapiens
  misc_RNA (1)...(19): siRNA sense strand
ccugauagauacugcuuaa

SEQ ID NO: 1114079 - RNA, 19 nt, Homo sapiens
  misc_RNA (1)...(19): siRNA sense strand
gcugaaguccuuaauuaaa

SEQ ID NO: 1114080 - RNA, 19 nt, Homo sapiens
  misc_RNA (1)...(19): siRNA sense strand
gaauuugcuuuccguuaug

SEQ ID NO: 1114081 - RNA, 19 nt, Homo sapiens
  misc_RNA (1)...(19): siRNA sense strand
cuaagaaaccuaauguuga

SEQ ID NO: 1114082 - RNA, 19 nt, Homo sapiens
  misc_RNA (1)...(19): siRNA sense strand
caagaacgcuccgagagau

SEQ ID NO: 1114083 - RNA, 19 nt, Homo sapiens
  misc_RNA (1)...(19): siRNA sense strand
uaacagcuccaaacuauag

SEQ ID NO: 1114084 - RNA, 19 nt, Homo sapiens
  misc_RNA (1)...(19): siRNA sense strand
guuccacgauuaaguguug

SEQ ID NO: 1114085 - RNA, 19 nt, Homo sapiens
  misc_RNA (1)...(19): siRNA sense strand
ugaagaugaugaugacaau

SEQ ID NO: 1114086 - RNA, 19 nt, Homo sapiens
  misc_RNA (1)...(19): siRNA sense strand
gcaaacccacugaagagaa

SEQ ID NO: 1114087 - RNA, 19 nt, Homo sapiens
  misc_RNA (1)...(19): siRNA sense strand
gauagauacugcuuaacag

SEQ ID NO: 1114088 - RNA, 19 nt, Homo sapiens
  misc_RNA (1)...(19): siRNA sense strand
ggagacuaguuccacgauu

SEQ ID NO: 1114089 - RNA, 19 nt, Homo sapiens
  misc_RNA (1)...(19): siRNA sense strand
gagaaaacaugaagaugau

SEQ ID NO: 1114090 - RNA, 19 nt, Homo sapiens
  misc_RNA (1)...(19): siRNA sense strand
caaaccaguuccugcaaca

SEQ ID NO: 1114091 - RNA, 19 nt, Homo sapiens
  misc_RNA (1)...(19): siRNA sense strand
ugaugcagaugaugugaga

SEQ ID NO: 1114092 - RNA, 19 nt, Homo sapiens
  misc_RNA (1)...(19): siRNA sense strand
ccaagaacgcuccgagaga

SEQ ID NO: 1114093 - RNA, 19 nt, Homo sapiens
  misc_RNA (1)...(19): siRNA sense strand
acuauaggcugaaguccuu

SEQ ID NO: 1114094 - RNA, 19 nt, Homo sapiens
  misc_RNA (1)...(19): siRNA sense strand
gaugaugaugacaaugaua

SEQ ID NO: 1114095 - RNA, 19 nt, Homo sapiens
  misc_RNA (1)...(19): siRNA sense strand
gcaacuccaaugucaguga

SEQ ID NO: 1114096 - RNA, 19 nt, Homo sapiens
  misc_RNA (1)...(19): siRNA sense strand
cggugucugucccaaauaa

SEQ ID NO: 1114097 - RNA, 19 nt, Homo sapiens
  misc_RNA (1)...(19): siRNA sense strand
gaaaccuaauguugaugca

SEQ ID NO: 1114098 - RNA, 19 nt, Homo sapiens
  misc_RNA (1)...(19): siRNA sense strand
aagaugaugaugacaauga

SEQ ID NO: 1114099 - RNA, 19 nt, Homo sapiens
  misc_RNA (1)...(19): siRNA sense strand
uaaccaagggagacuaguu

SEQ ID NO: 1114100 - RNA, 19 nt, Homo sapiens
  misc_RNA (1)...(19): siRNA sense strand
ugauagauacugcuuaaca

SEQ ID NO: 1114101 - RNA, 19 nt, Homo sapiens
  misc_RNA (1)...(19): siRNA sense strand
gcuuaacagcuccaaacua

SEQ ID NO: 1114102 - RNA, 19 nt, Homo sapiens
  misc_RNA (1)...(19): siRNA sense strand
ggauaucgcaaggcagaaa

SEQ ID NO: 1114103 - RNA, 19 nt, Homo sapiens
  misc_RNA (1)...(19): siRNA sense strand
gaaaacaugaagaugauga

SEQ ID NO: 1114104 - RNA, 19 nt, Homo sapiens
  misc_RNA (1)...(19): siRNA sense strand
gaagagaaaacaugaagau

SEQ ID NO: 1114105 - RNA, 19 nt, Homo sapiens
  misc_RNA (1)...(19): siRNA sense strand
ucacagaacacagccaaug

SEQ ID NO: 1114106 - RNA, 19 nt, Homo sapiens
  misc_RNA (1)...(19): siRNA sense strand
ccaaggguuauaaaucaaa

SEQ ID NO: 1114107 - RNA, 19 nt, Homo sapiens
  misc_RNA (1)...(19): siRNA sense strand
gauaugggaaucacagagu

SEQ ID NO: 1114108 - RNA, 19 nt, Homo sapiens
  misc_RNA (1)...(19): siRNA sense strand
ccaacaugguuucgucaca

SEQ ID NO: 1114109 - RNA, 19 nt, Homo sapiens
  misc_RNA (1)...(19): siRNA sense strand
ggcugaaguccuuaauuaa

SEQ ID NO: 1114110 - RNA, 19 nt, Homo sapiens
  misc_RNA (1)...(19): siRNA sense strand
uaauguugaugcagaugau

SEQ ID NO: 1114111 - RNA, 19 nt, Homo sapiens
  misc_RNA (1)...(19): siRNA sense strand
gcuguuaguagcaaaccua

SEQ ID NO: 1114112 - RNA, 19 nt, Homo sapiens
  misc_RNA (1)...(19): siRNA sense strand
agacuaguuccacgauuaa

SEQ ID NO: 1114113 - RNA, 19 nt, Homo sapiens
  misc_RNA (1)...(19): siRNA sense strand
ccuagacugccaccugaua

SEQ ID NO: 1114114 - RNA, 19 nt, Homo sapiens
  misc_RNA (1)...(19): siRNA sense strand
guccacaccugucaaacca

SEQ ID NO: 1114115 - RNA, 19 nt, Homo sapiens
  misc_RNA (1)...(19): siRNA sense strand
gagagaugccuuggugaug

SEQ ID NO: 1114116 - RNA, 19 nt, Homo sapiens
  misc_RNA (1)...(19): siRNA sense strand
gggaaucacagaguaugaa

SEQ ID NO: 1114117 - RNA, 19 nt, Homo sapiens
  misc_RNA (1)...(19): siRNA sense strand
caaacuauaggcugaaguc

SEQ ID NO: 1114118 - RNA, 19 nt, Homo sapiens
  misc_RNA (1)...(19): siRNA sense strand
gacugccaccugauagaua

SEQ ID NO: 1114119 - RNA, 19 nt, Homo sapiens
  misc_RNA (1)...(19): siRNA sense strand
cugauuaauccuucaauga

SEQ ID NO: 1114120 - RNA, 19 nt, Homo sapiens
  misc_RNA (1)...(19): siRNA sense strand
auaugggaaucacagagua

SEQ ID NO: 1114121 - RNA, 19 nt, Homo sapiens
  misc_RNA (1)...(19): siRNA sense strand
cacagaacacagccaauga

SEQ ID NO: 1114122 - RNA, 19 nt, Homo sapiens
  misc_RNA (1)...(19): siRNA sense strand
ugccacugauuaagccaua

SEQ ID NO: 1114123 - RNA, 19 nt, Homo sapiens
  misc_RNA (1)...(19): siRNA sense strand
aaaccuacuacuccuacua

SEQ ID NO: 1114124 - RNA, 19 nt, Homo sapiens
  misc_RNA (1)...(19): siRNA sense strand
acagaacacagccaaugaa

SEQ ID NO: 1114125 - RNA, 19 nt, Homo sapiens
  misc_RNA (1)...(19): siRNA sense strand
ucugauuaauccuucaaug

SEQ ID NO: 1114126 - RNA, 19 nt, Homo sapiens
  misc_RNA (1)...(19): siRNA sense strand
gauggcgccucccaagaac

SEQ ID NO: 1114127 - RNA, 19 nt, Homo sapiens
  misc_RNA (1)...(19): siRNA sense strand
cgagagaugccuuggugau

SEQ ID NO: 1114128 - RNA, 19 nt, Homo sapiens
  misc_RNA (1)...(19): siRNA sense strand
acacagccaaugaagcaaa

SEQ ID NO: 1114129 - RNA, 19 nt, Homo sapiens
  misc_RNA (1)...(19): siRNA sense strand
agauggcgccucccaagaa

SEQ ID NO: 1114130 - RNA, 19 nt, Homo sapiens
  misc_RNA (1)...(19): siRNA sense strand
gccaugcuaagaaaccuaa

SEQ ID NO: 1114131 - RNA, 19 nt, Homo sapiens
  misc_RNA (1)...(19): siRNA sense strand
acaugaagaugaugaugac

SEQ ID NO: 1114132 - RNA, 19 nt, Homo sapiens
  misc_RNA (1)...(19): siRNA sense strand
gauuuacggugcagauucc

SEQ ID NO: 1114133 - RNA, 19 nt, Homo sapiens
  misc_RNA (1)...(19): siRNA sense strand
uccguuaugugacuacaau

SEQ ID NO: 1114134 - RNA, 19 nt, Homo sapiens
  misc_RNA (1)...(19): siRNA sense strand
gaagaugaugaugacaaug

SEQ ID NO: 1114135 - RNA, 19 nt, Homo sapiens
  misc_RNA (1)...(19): siRNA sense strand
agugacaagccaaagauuu

SEQ ID NO: 1114136 - RNA, 19 nt, Homo sapiens
  misc_RNA (1)...(19): siRNA sense strand
ccagugucgugcugaccaa

SEQ ID NO: 1114137 - RNA, 19 nt, Homo sapiens
  misc_RNA (1)...(19): siRNA sense strand
aagcaaacccacugaagag

SEQ ID NO: 1114138 - RNA, 19 nt, Homo sapiens
  misc_RNA (1)...(19): siRNA sense strand
agagaaaacaugaagauga

SEQ ID NO: 1114139 - RNA, 19 nt, Homo sapiens
  misc_RNA (1)...(19): siRNA sense strand
aacggugucugucccaaau

SEQ ID NO: 1114140 - RNA, 19 nt, Homo sapiens
  misc_RNA (1)...(19): siRNA sense strand
aacaugaagaugaugauga

SEQ ID NO: 1114141 - RNA, 19 nt, Homo sapiens
  misc_RNA (1)...(19): siRNA sense strand
ucagugacaagccaaagau

SEQ ID NO: 1114142 - RNA, 19 nt, Homo sapiens
  misc_RNA (1)...(19): siRNA sense strand
ccacugauuaagccauaug

SEQ ID NO: 1114143 - RNA, 19 nt, Homo sapiens
  misc_RNA (1)...(19): siRNA sense strand
ucaguccacaccugucaaa

SEQ ID NO: 1114144 - RNA, 19 nt, Homo sapiens
  misc_RNA (1)...(19): siRNA sense strand
aaacggugucugucccaaa

SEQ ID NO: 1114145 - RNA, 19 nt, Homo sapiens
  misc_RNA (1)...(19): siRNA sense strand
cuaguuccacgauuaagug

SEQ ID NO: 1114146 - RNA, 19 nt, Homo sapiens
  misc_RNA (1)...(19): siRNA sense strand
uucgagccaugcuaagaaa

SEQ ID NO: 1114147 - RNA, 19 nt, Homo sapiens
  misc_RNA (1)...(19): siRNA sense strand
agaugaugaugacaaugau

SEQ ID NO: 1114148 - RNA, 19 nt, Homo sapiens
  misc_RNA (1)...(19): siRNA sense strand
ugaagcaaacccacugaag

SEQ ID NO: 1114149 - RNA, 19 nt, Homo sapiens
  misc_RNA (1)...(19): siRNA sense strand
ggaaucacagaguaugaac

SEQ ID NO: 1114150 - RNA, 19 nt, Homo sapiens
  misc_RNA (1)...(19): siRNA sense strand
ccaaagaccuguaagaacu

SEQ ID NO: 1114151 - RNA, 19 nt, Homo sapiens
  misc_RNA (1)...(19): siRNA sense strand
ccaaggaggugacccaaca

SEQ ID NO: 1114152 - RNA, 19 nt, Homo sapiens
  misc_RNA (1)...(19): siRNA sense strand
ugaagaucauuaaggcaua

SEQ ID NO: 1114153 - RNA, 19 nt, Homo sapiens
  misc_RNA (1)...(19): siRNA sense strand
gcauaggaauggugaaucg

SEQ ID NO: 1114154 - RNA, 19 nt, Homo sapiens
  misc_RNA (1)...(19): siRNA sense strand
ccacagaauuaucaaagac

SEQ ID NO: 1114155 - RNA, 19 nt, Homo sapiens
  misc_RNA (1)...(19): siRNA sense strand
ucauugugcuggagcugua

SEQ ID NO: 1114156 - RNA, 19 nt, Homo sapiens
  misc_RNA (1)...(19): siRNA sense strand
uguaagaacuuugcugagu

SEQ ID NO: 1114157 - RNA, 19 nt, Homo sapiens
  misc_RNA (1)...(19): siRNA sense strand
gaagaucauuaaggcauac

SEQ ID NO: 1114158 - RNA, 19 nt, Homo sapiens
  misc_RNA (1)...(19): siRNA sense strand
ucaaagacuucaugaucca

SEQ ID NO: 1114159 - RNA, 19 nt, Homo sapiens
  misc_RNA (1)...(19): siRNA sense strand
gaacuucauccagacuuga

SEQ ID NO: 1114160 - RNA, 19 nt, Homo sapiens
  misc_RNA (1)...(19): siRNA sense strand
gggcuggaauucucgcaau

SEQ ID NO: 1114161 - RNA, 19 nt, Homo sapiens
  misc_RNA (1)...(19): siRNA sense strand
gguggugcaucuaucuaug

SEQ ID NO: 1114162 - RNA, 19 nt, Homo sapiens
  misc_RNA (1)...(19): siRNA sense strand
ggcagccaguucuuuguga

SEQ ID NO: 1114163 - RNA, 19 nt, Homo sapiens
  misc_RNA (1)...(19): siRNA sense strand
ggcagccacccaacguuua

SEQ ID NO: 1114164 - RNA, 19 nt, Homo sapiens
  misc_RNA (1)...(19): siRNA sense strand
ccaguggcuugacggcaaa

SEQ ID NO: 1114165 - RNA, 19 nt, Homo sapiens
  misc_RNA (1)...(19): siRNA sense strand
caaagaccuguaagaacuu

SEQ ID NO: 1114166 - RNA, 19 nt, Homo sapiens
  misc_RNA (1)...(19): siRNA sense strand
ggaagcaugcuccaaagac

SEQ ID NO: 1114167 - RNA, 19 nt, Homo sapiens
  misc_RNA (1)...(19): siRNA sense strand
gaaucgcgugggaauggua

SEQ ID NO: 1114168 - RNA, 19 nt, Homo sapiens
  misc_RNA (1)...(19): siRNA sense strand
gcuccaaagaccuguaaga

SEQ ID NO: 1114169 - RNA, 19 nt, Homo sapiens
  misc_RNA (1)...(19): siRNA sense strand
ugcuggagcuguacuggaa

SEQ ID NO: 1114170 - RNA, 19 nt, Homo sapiens
  misc_RNA (1)...(19): siRNA sense strand
ugggaaugguagaaacaaa

SEQ ID NO: 1114171 - RNA, 19 nt, Homo sapiens
  misc_RNA (1)...(19): siRNA sense strand
gagaccagcaugggaauca

SEQ ID NO: 1114172 - RNA, 19 nt, Homo sapiens
  misc_RNA (1)...(19): siRNA sense strand
gacgacgugaagaucauua

SEQ ID NO: 1114173 - RNA, 19 nt, Homo sapiens
  misc_RNA (1)...(19): siRNA sense strand
gaccagcaugggaaucauu

SEQ ID NO: 1114174 - RNA, 19 nt, Homo sapiens
  misc_RNA (1)...(19): siRNA sense strand
ccgagugugucagggcaua

SEQ ID NO: 1114175 - RNA, 19 nt, Homo sapiens
  misc_RNA (1)...(19): siRNA sense strand
cgucgagguuacuacaaug

SEQ ID NO: 1114176 - RNA, 19 nt, Homo sapiens
  misc_RNA (1)...(19): siRNA sense strand
uccacagaauuaucaaaga

SEQ ID NO: 1114177 - RNA, 19 nt, Homo sapiens
  misc_RNA (1)...(19): siRNA sense strand
ggaaugguagaaacaaacu

SEQ ID NO: 1114178 - RNA, 19 nt, Homo sapiens
  misc_RNA (1)...(19): siRNA sense strand
gacggcaaacacaccauuu

SEQ ID NO: 1114179 - RNA, 19 nt, Homo sapiens
  misc_RNA (1)...(19): siRNA sense strand
gagguggugcaucuaucua

SEQ ID NO: 1114180 - RNA, 19 nt, Homo sapiens
  misc_RNA (1)...(19): siRNA sense strand
gcaucuaucuauggcaaac

SEQ ID NO: 1114181 - RNA, 19 nt, Homo sapiens
  misc_RNA (1)...(19): siRNA sense strand
ggacgacgugaagaucauu

SEQ ID NO: 1114182 - RNA, 19 nt, Homo sapiens
  misc_RNA (1)...(19): siRNA sense strand
uuacuacaauggcacaaaa

SEQ ID NO: 1114183 - RNA, 19 nt, Homo sapiens
  misc_RNA (1)...(19): siRNA sense strand
gggcauaggaauggugaau

SEQ ID NO: 1114184 - RNA, 19 nt, Homo sapiens
  misc_RNA (1)...(19): siRNA sense strand
ggcuggaauucucgcaaug

SEQ ID NO: 1114185 - RNA, 19 nt, Homo sapiens
  misc_RNA (1)...(19): siRNA sense strand
ugacggcaaacacaccauu

SEQ ID NO: 1114186 - RNA, 19 nt, Homo sapiens
  misc_RNA (1)...(19): siRNA sense strand
cuccaaagaccuguaagaa

SEQ ID NO: 1114187 - RNA, 19 nt, Homo sapiens
  misc_RNA (1)...(19): siRNA sense strand
ucgucgagguuacuacaau

SEQ ID NO: 1114188 - RNA, 19 nt, Homo sapiens
  misc_RNA (1)...(19): siRNA sense strand
gugaaucgcgugggaaugg

SEQ ID NO: 1114189 - RNA, 19 nt, Homo sapiens
  misc_RNA (1)...(19): siRNA sense strand
gaagcuggcuggagacaug

SEQ ID NO: 1114190 - RNA, 19 nt, Homo sapiens
  misc_RNA (1)...(19): siRNA sense strand
ggaaugcggucccugacau

SEQ ID NO: 1114191 - RNA, 19 nt, Homo sapiens
  misc_RNA (1)...(19): siRNA sense strand
ugacauccagggagacuca

SEQ ID NO: 1114192 - RNA, 19 nt, Homo sapiens
  misc_RNA (1)...(19): siRNA sense strand
gaugggaccaccucgucuu

SEQ ID NO: 1114193 - RNA, 19 nt, Homo sapiens
  misc_RNA (1)...(19): siRNA sense strand
cggacuucaucuccuguga

SEQ ID NO: 1114194 - RNA, 19 nt, Homo sapiens
  misc_RNA (1)...(19): siRNA sense strand
gaagcuggcuggagacaug

SEQ ID NO: 1114195 - RNA, 19 nt, Homo sapiens
  misc_RNA (1)...(19): siRNA sense strand
ggaaugcggucccugacau

SEQ ID NO: 1114196 - RNA, 19 nt, Homo sapiens
  misc_RNA (1)...(19): siRNA sense strand
ugacauccagggagacuca

SEQ ID NO: 1114197 - RNA, 19 nt, Homo sapiens
  misc_RNA (1)...(19): siRNA sense strand
gaugggaccaccucgucuu

SEQ ID NO: 1114198 - RNA, 19 nt, Homo sapiens
  misc_RNA (1)...(19): siRNA sense strand
cggacuucaucuccuguga

SEQ ID NO: 1114199 - RNA, 19 nt, Homo sapiens
  misc_RNA (1)...(19): siRNA sense strand
gaagcuggcuggagacaug

SEQ ID NO: 1114200 - RNA, 19 nt, Homo sapiens
  misc_RNA (1)...(19): siRNA sense strand
ggaaugcggucccugacau

SEQ ID NO: 1114201 - RNA, 19 nt, Homo sapiens
  misc_RNA (1)...(19): siRNA sense strand
ugacauccagggagacuca

SEQ ID NO: 1114202 - RNA, 19 nt, Homo sapiens
  misc_RNA (1)...(19): siRNA sense strand
gaugggaccaccucgucuu

SEQ ID NO: 1114203 - RNA, 19 nt, Homo sapiens
  misc_RNA (1)...(19): siRNA sense strand
cggacuucaucuccuguga

SEQ ID NO: 1114204 - RNA, 19 nt, Homo sapiens
  misc_RNA (1)...(19): siRNA sense strand
cuacauaacuuccuacgua

SEQ ID NO: 1114205 - RNA, 19 nt, Homo sapiens
  misc_RNA (1)...(19): siRNA sense strand
gcaagaagccacccuccuu

SEQ ID NO: 1114206 - RNA, 19 nt, Homo sapiens
  misc_RNA (1)...(19): siRNA sense strand
caaggacgguucuuacaca

SEQ ID NO: 1114207 - RNA, 19 nt, Homo sapiens
  misc_RNA (1)...(19): siRNA sense strand
ggaagcuguuggaugauga

SEQ ID NO: 1114208 - RNA, 19 nt, Homo sapiens
  misc_RNA (1)...(19): siRNA sense strand
gccagauccugcagaagua

SEQ ID NO: 1114209 - RNA, 19 nt, Homo sapiens
  misc_RNA (1)...(19): siRNA sense strand
cagcaugccugaacuacau

SEQ ID NO: 1114210 - RNA, 19 nt, Homo sapiens
  misc_RNA (1)...(19): siRNA sense strand
ugaacuacauaacuuccua

SEQ ID NO: 1114211 - RNA, 19 nt, Homo sapiens
  misc_RNA (1)...(19): siRNA sense strand
ugcggaagcuguuggauga

SEQ ID NO: 1114212 - RNA, 19 nt, Homo sapiens
  misc_RNA (1)...(19): siRNA sense strand
ugacaaggcccugagcuuu

SEQ ID NO: 1114213 - RNA, 19 nt, Homo sapiens
  misc_RNA (1)...(19): siRNA sense strand
gacaaggcccugagcuuug

SEQ ID NO: 1114214 - RNA, 19 nt, Homo sapiens
  misc_RNA (1)...(19): siRNA sense strand
gcccaaggaugcugucaag

SEQ ID NO: 1114215 - RNA, 19 nt, Homo sapiens
  misc_RNA (1)...(19): siRNA sense strand
ugccugaacuacauaacuu

SEQ ID NO: 1114216 - RNA, 19 nt, Homo sapiens
  misc_RNA (1)...(19): siRNA sense strand
cugcagaaguacuccuauu

SEQ ID NO: 1114217 - RNA, 19 nt, Homo sapiens
  misc_RNA (1)...(19): siRNA sense strand
uacauaacuuccuacguau

SEQ ID NO: 1114218 - RNA, 19 nt, Homo sapiens
  misc_RNA (1)...(19): siRNA sense strand
gcagaaguacuccuauugc

SEQ ID NO: 1114219 - RNA, 19 nt, Homo sapiens
  misc_RNA (1)...(19): siRNA sense strand
gagcgucacggccaagugu

SEQ ID NO: 1114220 - RNA, 19 nt, Homo sapiens
  misc_RNA (1)...(19): siRNA sense strand
acacaggcuucaucaaggu

SEQ ID NO: 1114221 - RNA, 19 nt, Homo sapiens
  misc_RNA (1)...(19): siRNA sense strand
aagggcacgugaagucauu

SEQ ID NO: 1114222 - RNA, 19 nt, Homo sapiens
  misc_RNA (1)...(19): siRNA sense strand
gcacaagggcacgugaagu

SEQ ID NO: 1114223 - RNA, 19 nt, Homo sapiens
  misc_RNA (1)...(19): siRNA sense strand
ucugugcccuccagcaaga

SEQ ID NO: 1114224 - RNA, 19 nt, Homo sapiens
  misc_RNA (1)...(19): siRNA sense strand
cggaagcuguuggaugaug

SEQ ID NO: 1114225 - RNA, 19 nt, Homo sapiens
  misc_RNA (1)...(19): siRNA sense strand
uuacacaggcuucaucaag

SEQ ID NO: 1114226 - RNA, 19 nt, Homo sapiens
  misc_RNA (1)...(19): siRNA sense strand
uugaggcccugcugcgaaa

SEQ ID NO: 1114227 - RNA, 19 nt, Homo sapiens
  misc_RNA (1)...(19): siRNA sense strand
cacaagggcacgugaaguc

SEQ ID NO: 1114228 - RNA, 19 nt, Homo sapiens
  misc_RNA (1)...(19): siRNA sense strand
ggacggggcacaaguguca

SEQ ID NO: 1114229 - RNA, 19 nt, Homo sapiens
  misc_RNA (1)...(19): siRNA sense strand
caaguuugcacucuuugag

SEQ ID NO: 1114230 - RNA, 19 nt, Homo sapiens
  misc_RNA (1)...(19): siRNA sense strand
cgccagauccugcagaagu

SEQ ID NO: 1114231 - RNA, 19 nt, Homo sapiens
  misc_RNA (1)...(19): siRNA sense strand
gcaugccugaacuacauaa

SEQ ID NO: 1114232 - RNA, 19 nt, Homo sapiens
  misc_RNA (1)...(19): siRNA sense strand
cuacauaacuuccuacgua

SEQ ID NO: 1114233 - RNA, 19 nt, Homo sapiens
  misc_RNA (1)...(19): siRNA sense strand
gcaagaagccacccuccuu

SEQ ID NO: 1114234 - RNA, 19 nt, Homo sapiens
  misc_RNA (1)...(19): siRNA sense strand
caaggacgguucuuacaca

SEQ ID NO: 1114235 - RNA, 19 nt, Homo sapiens
  misc_RNA (1)...(19): siRNA sense strand
ggaagcuguuggaugauga

SEQ ID NO: 1114236 - RNA, 19 nt, Homo sapiens
  misc_RNA (1)...(19): siRNA sense strand
gccagauccugcagaagua

SEQ ID NO: 1114237 - RNA, 19 nt, Homo sapiens
  misc_RNA (1)...(19): siRNA sense strand
cagcaugccugaacuacau

SEQ ID NO: 1114238 - RNA, 19 nt, Homo sapiens
  misc_RNA (1)...(19): siRNA sense strand
ugaacuacauaacuuccua

SEQ ID NO: 1114239 - RNA, 19 nt, Homo sapiens
  misc_RNA (1)...(19): siRNA sense strand
ugcggaagcuguuggauga

SEQ ID NO: 1114240 - RNA, 19 nt, Homo sapiens
  misc_RNA (1)...(19): siRNA sense strand
ugacaaggcccugagcuuu

SEQ ID NO: 1114241 - RNA, 19 nt, Homo sapiens
  misc_RNA (1)...(19): siRNA sense strand
gacaaggcccugagcuuug

SEQ ID NO: 1114242 - RNA, 19 nt, Homo sapiens
  misc_RNA (1)...(19): siRNA sense strand
gcccaaggaugcugucaag

SEQ ID NO: 1114243 - RNA, 19 nt, Homo sapiens
  misc_RNA (1)...(19): siRNA sense strand
ugccugaacuacauaacuu

SEQ ID NO: 1114244 - RNA, 19 nt, Homo sapiens
  misc_RNA (1)...(19): siRNA sense strand
cugcagaaguacuccuauu

SEQ ID NO: 1114245 - RNA, 19 nt, Homo sapiens
  misc_RNA (1)...(19): siRNA sense strand
uacauaacuuccuacguau

SEQ ID NO: 1114246 - RNA, 19 nt, Homo sapiens
  misc_RNA (1)...(19): siRNA sense strand
gcagaaguacuccuauugc

SEQ ID NO: 1114247 - RNA, 19 nt, Homo sapiens
  misc_RNA (1)...(19): siRNA sense strand
gagcgucacggccaagugu

SEQ ID NO: 1114248 - RNA, 19 nt, Homo sapiens
  misc_RNA (1)...(19): siRNA sense strand
acacaggcuucaucaaggu

SEQ ID NO: 1114249 - RNA, 19 nt, Homo sapiens
  misc_RNA (1)...(19): siRNA sense strand
aagggcacgugaagucauu

SEQ ID NO: 1114250 - RNA, 19 nt, Homo sapiens
  misc_RNA (1)...(19): siRNA sense strand
gcacaagggcacgugaagu

SEQ ID NO: 1114251 - RNA, 19 nt, Homo sapiens
  misc_RNA (1)...(19): siRNA sense strand
ucugugcccuccagcaaga

SEQ ID NO: 1114252 - RNA, 19 nt, Homo sapiens
  misc_RNA (1)...(19): siRNA sense strand
cggaagcuguuggaugaug

SEQ ID NO: 1114253 - RNA, 19 nt, Homo sapiens
  misc_RNA (1)...(19): siRNA sense strand
uuacacaggcuucaucaag

SEQ ID NO: 1114254 - RNA, 19 nt, Homo sapiens
  misc_RNA (1)...(19): siRNA sense strand
uugaggcccugcugcgaaa

SEQ ID NO: 1114255 - RNA, 19 nt, Homo sapiens
  misc_RNA (1)...(19): siRNA sense strand
cacaagggcacgugaaguc

SEQ ID NO: 1114256 - RNA, 19 nt, Homo sapiens
  misc_RNA (1)...(19): siRNA sense strand
ggacggggcacaaguguca

SEQ ID NO: 1114257 - RNA, 19 nt, Homo sapiens
  misc_RNA (1)...(19): siRNA sense strand
caaguuugcacucuuugag

SEQ ID NO: 1114258 - RNA, 19 nt, Homo sapiens
  misc_RNA (1)...(19): siRNA sense strand
cgccagauccugcagaagu

SEQ ID NO: 1114259 - RNA, 19 nt, Homo sapiens
  misc_RNA (1)...(19): siRNA sense strand
gcaugccugaacuacauaa

SEQ ID NO: 1114260 - RNA, 19 nt, Homo sapiens
  misc_RNA (1)...(19): siRNA sense strand
cuacauaacuuccuacgua

SEQ ID NO: 1114261 - RNA, 19 nt, Homo sapiens
  misc_RNA (1)...(19): siRNA sense strand
gcaagaagccacccuccuu

SEQ ID NO: 1114262 - RNA, 19 nt, Homo sapiens
  misc_RNA (1)...(19): siRNA sense strand
caaggacgguucuuacaca

SEQ ID NO: 1114263 - RNA, 19 nt, Homo sapiens
  misc_RNA (1)...(19): siRNA sense strand
ggaagcuguuggaugauga

SEQ ID NO: 1114264 - RNA, 19 nt, Homo sapiens
  misc_RNA (1)...(19): siRNA sense strand
gccagauccugcagaagua

SEQ ID NO: 1114265 - RNA, 19 nt, Homo sapiens
  misc_RNA (1)...(19): siRNA sense strand
cagcaugccugaacuacau

SEQ ID NO: 1114266 - RNA, 19 nt, Homo sapiens
  misc_RNA (1)...(19): siRNA sense strand
ugaacuacauaacuuccua

SEQ ID NO: 1114267 - RNA, 19 nt, Homo sapiens
  misc_RNA (1)...(19): siRNA sense strand
ugcggaagcuguuggauga

SEQ ID NO: 1114268 - RNA, 19 nt, Homo sapiens
  misc_RNA (1)...(19): siRNA sense strand
ugacaaggcccugagcuuu

SEQ ID NO: 1114269 - RNA, 19 nt, Homo sapiens
  misc_RNA (1)...(19): siRNA sense strand
gacaaggcccugagcuuug

SEQ ID NO: 1114270 - RNA, 19 nt, Homo sapiens
  misc_RNA (1)...(19): siRNA sense strand
gcccaaggaugcugucaag

SEQ ID NO: 1114271 - RNA, 19 nt, Homo sapiens
  misc_RNA (1)...(19): siRNA sense strand
ugccugaacuacauaacuu

SEQ ID NO: 1114272 - RNA, 19 nt, Homo sapiens
  misc_RNA (1)...(19): siRNA sense strand
cugcagaaguacuccuauu

SEQ ID NO: 1114273 - RNA, 19 nt, Homo sapiens
  misc_RNA (1)...(19): siRNA sense strand
uacauaacuuccuacguau

SEQ ID NO: 1114274 - RNA, 19 nt, Homo sapiens
  misc_RNA (1)...(19): siRNA sense strand
gcagaaguacuccuauugc

SEQ ID NO: 1114275 - RNA, 19 nt, Homo sapiens
  misc_RNA (1)...(19): siRNA sense strand
gagcgucacggccaagugu

SEQ ID NO: 1114276 - RNA, 19 nt, Homo sapiens
  misc_RNA (1)...(19): siRNA sense strand
acacaggcuucaucaaggu

SEQ ID NO: 1114277 - RNA, 19 nt, Homo sapiens
  misc_RNA (1)...(19): siRNA sense strand
aagggcacgugaagucauu

SEQ ID NO: 1114278 - RNA, 19 nt, Homo sapiens
  misc_RNA (1)...(19): siRNA sense strand
gcacaagggcacgugaagu

SEQ ID NO: 1114279 - RNA, 19 nt, Homo sapiens
  misc_RNA (1)...(19): siRNA sense strand
ucugugcccuccagcaaga

SEQ ID NO: 1114280 - RNA, 19 nt, Homo sapiens
  misc_RNA (1)...(19): siRNA sense strand
cggaagcuguuggaugaug

SEQ ID NO: 1114281 - RNA, 19 nt, Homo sapiens
  misc_RNA (1)...(19): siRNA sense strand
uuacacaggcuucaucaag

SEQ ID NO: 1114282 - RNA, 19 nt, Homo sapiens
  misc_RNA (1)...(19): siRNA sense strand
uugaggcccugcugcgaaa

SEQ ID NO: 1114283 - RNA, 19 nt, Homo sapiens
  misc_RNA (1)...(19): siRNA sense strand
cacaagggcacgugaaguc

SEQ ID NO: 1114284 - RNA, 19 nt, Homo sapiens
  misc_RNA (1)...(19): siRNA sense strand
ggacggggcacaaguguca

SEQ ID NO: 1114285 - RNA, 19 nt, Homo sapiens
  misc_RNA (1)...(19): siRNA sense strand
caaguuugcacucuuugag

SEQ ID NO: 1114286 - RNA, 19 nt, Homo sapiens
  misc_RNA (1)...(19): siRNA sense strand
cgccagauccugcagaagu

SEQ ID NO: 1114287 - RNA, 19 nt, Homo sapiens
  misc_RNA (1)...(19): siRNA sense strand
gcaugccugaacuacauaa

SEQ ID NO: 1114288 - RNA, 19 nt, Homo sapiens
  misc_RNA (1)...(19): siRNA sense strand
cuacauaacuuccuacgua

SEQ ID NO: 1114289 - RNA, 19 nt, Homo sapiens
  misc_RNA (1)...(19): siRNA sense strand
gcaagaagccacccuccuu

SEQ ID NO: 1114290 - RNA, 19 nt, Homo sapiens
  misc_RNA (1)...(19): siRNA sense strand
caaggacgguucuuacaca

SEQ ID NO: 1114291 - RNA, 19 nt, Homo sapiens
  misc_RNA (1)...(19): siRNA sense strand
ggaagcuguuggaugauga

SEQ ID NO: 1114292 - RNA, 19 nt, Homo sapiens
  misc_RNA (1)...(19): siRNA sense strand
gccagauccugcagaagua

SEQ ID NO: 1114293 - RNA, 19 nt, Homo sapiens
  misc_RNA (1)...(19): siRNA sense strand
cagcaugccugaacuacau

SEQ ID NO: 1114294 - RNA, 19 nt, Homo sapiens
  misc_RNA (1)...(19): siRNA sense strand
ugaacuacauaacuuccua

SEQ ID NO: 1114295 - RNA, 19 nt, Homo sapiens
  misc_RNA (1)...(19): siRNA sense strand
ugcggaagcuguuggauga

SEQ ID NO: 1114296 - RNA, 19 nt, Homo sapiens
  misc_RNA (1)...(19): siRNA sense strand
ugacaaggcccugagcuuu

SEQ ID NO: 1114297 - RNA, 19 nt, Homo sapiens
  misc_RNA (1)...(19): siRNA sense strand
gacaaggcccugagcuuug

SEQ ID NO: 1114298 - RNA, 19 nt, Homo sapiens
  misc_RNA (1)...(19): siRNA sense strand
gcccaaggaugcugucaag

SEQ ID NO: 1114299 - RNA, 19 nt, Homo sapiens
  misc_RNA (1)...(19): siRNA sense strand
ugccugaacuacauaacuu

SEQ ID NO: 1114300 - RNA, 19 nt, Homo sapiens
  misc_RNA (1)...(19): siRNA sense strand
cugcagaaguacuccuauu

SEQ ID NO: 1114301 - RNA, 19 nt, Homo sapiens
  misc_RNA (1)...(19): siRNA sense strand
uacauaacuuccuacguau

SEQ ID NO: 1114302 - RNA, 19 nt, Homo sapiens
  misc_RNA (1)...(19): siRNA sense strand
gcagaaguacuccuauugc

SEQ ID NO: 1114303 - RNA, 19 nt, Homo sapiens
  misc_RNA (1)...(19): siRNA sense strand
gagcgucacggccaagugu

SEQ ID NO: 1114304 - RNA, 19 nt, Homo sapiens
  misc_RNA (1)...(19): siRNA sense strand
acacaggcuucaucaaggu

SEQ ID NO: 1114305 - RNA, 19 nt, Homo sapiens
  misc_RNA (1)...(19): siRNA sense strand
aagggcacgugaagucauu

SEQ ID NO: 1114306 - RNA, 19 nt, Homo sapiens
  misc_RNA (1)...(19): siRNA sense strand
gcacaagggcacgugaagu

SEQ ID NO: 1114307 - RNA, 19 nt, Homo sapiens
  misc_RNA (1)...(19): siRNA sense strand
ucugugcccuccagcaaga

SEQ ID NO: 1114308 - RNA, 19 nt, Homo sapiens
  misc_RNA (1)...(19): siRNA sense strand
cggaagcuguuggaugaug

SEQ ID NO: 1114309 - RNA, 19 nt, Homo sapiens
  misc_RNA (1)...(19): siRNA sense strand
uuacacaggcuucaucaag

SEQ ID NO: 1114310 - RNA, 19 nt, Homo sapiens
  misc_RNA (1)...(19): siRNA sense strand
uugaggcccugcugcgaaa

SEQ ID NO: 1114311 - RNA, 19 nt, Homo sapiens
  misc_RNA (1)...(19): siRNA sense strand
cacaagggcacgugaaguc

SEQ ID NO: 1114312 - RNA, 19 nt, Homo sapiens
  misc_RNA (1)...(19): siRNA sense strand
ggacggggcacaaguguca

SEQ ID NO: 1114313 - RNA, 19 nt, Homo sapiens
  misc_RNA (1)...(19): siRNA sense strand
caaguuugcacucuuugag

SEQ ID NO: 1114314 - RNA, 19 nt, Homo sapiens
  misc_RNA (1)...(19): siRNA sense strand
cgccagauccugcagaagu

SEQ ID NO: 1114315 - RNA, 19 nt, Homo sapiens
  misc_RNA (1)...(19): siRNA sense strand
gcaugccugaacuacauaa

SEQ ID NO: 1114316 - RNA, 19 nt, Homo sapiens
  misc_RNA (1)...(19): siRNA sense strand
cuacauaacuuccuacgua

SEQ ID NO: 1114317 - RNA, 19 nt, Homo sapiens
  misc_RNA (1)...(19): siRNA sense strand
gcaagaagccacccuccuu

SEQ ID NO: 1114318 - RNA, 19 nt, Homo sapiens
  misc_RNA (1)...(19): siRNA sense strand
caaggacgguucuuacaca

SEQ ID NO: 1114319 - RNA, 19 nt, Homo sapiens
  misc_RNA (1)...(19): siRNA sense strand
ggaagcuguuggaugauga

SEQ ID NO: 1114320 - RNA, 19 nt, Homo sapiens
  misc_RNA (1)...(19): siRNA sense strand
gccagauccugcagaagua

SEQ ID NO: 1114321 - RNA, 19 nt, Homo sapiens
  misc_RNA (1)...(19): siRNA sense strand
cagcaugccugaacuacau

SEQ ID NO: 1114322 - RNA, 19 nt, Homo sapiens
  misc_RNA (1)...(19): siRNA sense strand
ugaacuacauaacuuccua

SEQ ID NO: 1114323 - RNA, 19 nt, Homo sapiens
  misc_RNA (1)...(19): siRNA sense strand
ugcggaagcuguuggauga

SEQ ID NO: 1114324 - RNA, 19 nt, Homo sapiens
  misc_RNA (1)...(19): siRNA sense strand
ugacaaggcccugagcuuu

SEQ ID NO: 1114325 - RNA, 19 nt, Homo sapiens
  misc_RNA (1)...(19): siRNA sense strand
gacaaggcccugagcuuug

SEQ ID NO: 1114326 - RNA, 19 nt, Homo sapiens
  misc_RNA (1)...(19): siRNA sense strand
gcccaaggaugcugucaag

SEQ ID NO: 1114327 - RNA, 19 nt, Homo sapiens
  misc_RNA (1)...(19): siRNA sense strand
ugccugaacuacauaacuu

SEQ ID NO: 1114328 - RNA, 19 nt, Homo sapiens
  misc_RNA (1)...(19): siRNA sense strand
cugcagaaguacuccuauu

SEQ ID NO: 1114329 - RNA, 19 nt, Homo sapiens
  misc_RNA (1)...(19): siRNA sense strand
uacauaacuuccuacguau

SEQ ID NO: 1114330 - RNA, 19 nt, Homo sapiens
  misc_RNA (1)...(19): siRNA sense strand
gcagaaguacuccuauugc

SEQ ID NO: 1114331 - RNA, 19 nt, Homo sapiens
  misc_RNA (1)...(19): siRNA sense strand
gagcgucacggccaagugu

SEQ ID NO: 1114332 - RNA, 19 nt, Homo sapiens
  misc_RNA (1)...(19): siRNA sense strand
acacaggcuucaucaaggu

SEQ ID NO: 1114333 - RNA, 19 nt, Homo sapiens
  misc_RNA (1)...(19): siRNA sense strand
aagggcacgugaagucauu

SEQ ID NO: 1114334 - RNA, 19 nt, Homo sapiens
  misc_RNA (1)...(19): siRNA sense strand
gcacaagggcacgugaagu

SEQ ID NO: 1114335 - RNA, 19 nt, Homo sapiens
  misc_RNA (1)...(19): siRNA sense strand
ucugugcccuccagcaaga

SEQ ID NO: 1114336 - RNA, 19 nt, Homo sapiens
  misc_RNA (1)...(19): siRNA sense strand
cggaagcuguuggaugaug

SEQ ID NO: 1114337 - RNA, 19 nt, Homo sapiens
  misc_RNA (1)...(19): siRNA sense strand
uuacacaggcuucaucaag

SEQ ID NO: 1114338 - RNA, 19 nt, Homo sapiens
  misc_RNA (1)...(19): siRNA sense strand
uugaggcccugcugcgaaa

SEQ ID NO: 1114339 - RNA, 19 nt, Homo sapiens
  misc_RNA (1)...(19): siRNA sense strand
cacaagggcacgugaaguc

SEQ ID NO: 1114340 - RNA, 19 nt, Homo sapiens
  misc_RNA (1)...(19): siRNA sense strand
ggacggggcacaaguguca

SEQ ID NO: 1114341 - RNA, 19 nt, Homo sapiens
  misc_RNA (1)...(19): siRNA sense strand
caaguuugcacucuuugag

SEQ ID NO: 1114342 - RNA, 19 nt, Homo sapiens
  misc_RNA (1)...(19): siRNA sense strand
cgccagauccugcagaagu

SEQ ID NO: 1114343 - RNA, 19 nt, Homo sapiens
  misc_RNA (1)...(19): siRNA sense strand
gcaugccugaacuacauaa

SEQ ID NO: 1114344 - RNA, 19 nt, Homo sapiens
  misc_RNA (1)...(19): siRNA sense strand
gcaagaagccacccuccuu

SEQ ID NO: 1114345 - RNA, 19 nt, Homo sapiens
  misc_RNA (1)...(19): siRNA sense strand
caaggacgguucuuacaca

SEQ ID NO: 1114346 - RNA, 19 nt, Homo sapiens
  misc_RNA (1)...(19): siRNA sense strand
gcccaaggaugcugucaag

SEQ ID NO: 1114347 - RNA, 19 nt, Homo sapiens
  misc_RNA (1)...(19): siRNA sense strand
acacaggcuucaucaaggu

SEQ ID NO: 1114348 - RNA, 19 nt, Homo sapiens
  misc_RNA (1)...(19): siRNA sense strand
uuacacaggcuucaucaag

SEQ ID NO: 1114349 - RNA, 19 nt, Homo sapiens
  misc_RNA (1)...(19): siRNA sense strand
ucugugcccuccagcaaga

SEQ ID NO: 1114350 - RNA, 19 nt, Homo sapiens
  misc_RNA (1)...(19): siRNA sense strand
ggacggggcacaaguguca

SEQ ID NO: 1114351 - RNA, 19 nt, Homo sapiens
  misc_RNA (1)...(19): siRNA sense strand
uagaagagcucaucagaga

SEQ ID NO: 1114352 - RNA, 19 nt, Homo sapiens
  misc_RNA (1)...(19): siRNA sense strand
ggaagagucugccgaaggu

SEQ ID NO: 1114353 - RNA, 19 nt, Homo sapiens
  misc_RNA (1)...(19): siRNA sense strand
ggaucuagguauggaguua

SEQ ID NO: 1114354 - RNA, 19 nt, Homo sapiens
  misc_RNA (1)...(19): siRNA sense strand
ggaagaagaagaaagaugu

SEQ ID NO: 1114355 - RNA, 19 nt, Homo sapiens
  misc_RNA (1)...(19): siRNA sense strand
gauccuggcugacuuacug

SEQ ID NO: 1114356 - RNA, 19 nt, Homo sapiens
  misc_RNA (1)...(19): siRNA sense strand
gaacucaccgcuucucaug

SEQ ID NO: 1114357 - RNA, 19 nt, Homo sapiens
  misc_RNA (1)...(19): siRNA sense strand
gugccgagauggaacagua

SEQ ID NO: 1114358 - RNA, 19 nt, Homo sapiens
  misc_RNA (1)...(19): siRNA sense strand
ggaaauccaagaacuccua

SEQ ID NO: 1114359 - RNA, 19 nt, Homo sapiens
  misc_RNA (1)...(19): siRNA sense strand
gauggaacaguaugaaauu

SEQ ID NO: 1114360 - RNA, 19 nt, Homo sapiens
  misc_RNA (1)...(19): siRNA sense strand
gaaaagagcggaaauccaa

SEQ ID NO: 1114361 - RNA, 19 nt, Homo sapiens
  misc_RNA (1)...(19): siRNA sense strand
acaccaaccucucuguaaa

SEQ ID NO: 1114362 - RNA, 19 nt, Homo sapiens
  misc_RNA (1)...(19): siRNA sense strand
gcggauggaucuagguaug

SEQ ID NO: 1114363 - RNA, 19 nt, Homo sapiens
  misc_RNA (1)...(19): siRNA sense strand
gagcggaaauccaagaacu

SEQ ID NO: 1114364 - RNA, 19 nt, Homo sapiens
  misc_RNA (1)...(19): siRNA sense strand
ggaaugcugugguggugau

SEQ ID NO: 1114365 - RNA, 19 nt, Homo sapiens
  misc_RNA (1)...(19): siRNA sense strand
caacccaggcuuucuuuga

SEQ ID NO: 1114366 - RNA, 19 nt, Homo sapiens
  misc_RNA (1)...(19): siRNA sense strand
gcaagaugagcauuccuuu

SEQ ID NO: 1114367 - RNA, 19 nt, Homo sapiens
  misc_RNA (1)...(19): siRNA sense strand
ccucagggcugggcaaaga

SEQ ID NO: 1114368 - RNA, 19 nt, Homo sapiens
  misc_RNA (1)...(19): siRNA sense strand
gaagaagaaagaugugauc

SEQ ID NO: 1114369 - RNA, 19 nt, Homo sapiens
  misc_RNA (1)...(19): siRNA sense strand
ggaacaguaugaaauugag

SEQ ID NO: 1114370 - RNA, 19 nt, Homo sapiens
  misc_RNA (1)...(19): siRNA sense strand
gaagagcucaucagagaac

SEQ ID NO: 1114371 - RNA, 19 nt, Homo sapiens
  misc_RNA (1)...(19): siRNA sense strand
gagauggaacaguaugaaa

SEQ ID NO: 1114372 - RNA, 19 nt, Homo sapiens
  misc_RNA (1)...(19): siRNA sense strand
ggauggaucuagguaugga

SEQ ID NO: 1114373 - RNA, 19 nt, Homo sapiens
  misc_RNA (1)...(19): siRNA sense strand
caaagaaugugcaaaaguc

SEQ ID NO: 1114374 - RNA, 19 nt, Homo sapiens
  misc_RNA (1)...(19): siRNA sense strand
gcacuccugcccuccauga

SEQ ID NO: 1114375 - RNA, 19 nt, Homo sapiens
  misc_RNA (1)...(19): siRNA sense strand
gaagaagaagaaagaugug

SEQ ID NO: 1114376 - RNA, 19 nt, Homo sapiens
  misc_RNA (1)...(19): siRNA sense strand
gagcauuccuuuucgauca

SEQ ID NO: 1114377 - RNA, 19 nt, Homo sapiens
  misc_RNA (1)...(19): siRNA sense strand
ggagguggcccaggauguu

SEQ ID NO: 1114378 - RNA, 19 nt, Homo sapiens
  misc_RNA (1)...(19): siRNA sense strand
gcagugcuuuggcuauguc

SEQ ID NO: 1114379 - RNA, 19 nt, Homo sapiens
  misc_RNA (1)...(19): siRNA sense strand
cccaguugcucuaacgaaa

SEQ ID NO: 1114380 - RNA, 19 nt, Homo sapiens
  misc_RNA (1)...(19): siRNA sense strand
ccacaccaaccucucugua

SEQ ID NO: 1114381 - RNA, 19 nt, Homo sapiens
  misc_RNA (1)...(19): siRNA sense strand
gggaagaagaagaaagaug

SEQ ID NO: 1114382 - RNA, 19 nt, Homo sapiens
  misc_RNA (1)...(19): siRNA sense strand
gaggaggcaaggccacauu

SEQ ID NO: 1114383 - RNA, 19 nt, Homo sapiens
  misc_RNA (1)...(19): siRNA sense strand
gcacgcaacccaggcuuuc

SEQ ID NO: 1114384 - RNA, 19 nt, Homo sapiens
  misc_RNA (1)...(19): siRNA sense strand
gggcaaagaaugugcaaaa

SEQ ID NO: 1114385 - RNA, 19 nt, Homo sapiens
  misc_RNA (1)...(19): siRNA sense strand
cacaccaaccucucuguaa

SEQ ID NO: 1114386 - RNA, 19 nt, Homo sapiens
  misc_RNA (1)...(19): siRNA sense strand
ccuagaagagcucaucaga

SEQ ID NO: 1114387 - RNA, 19 nt, Homo sapiens
  misc_RNA (1)...(19): siRNA sense strand
agagggucauggagacaaa

SEQ ID NO: 1114388 - RNA, 19 nt, Homo sapiens
  misc_RNA (1)...(19): siRNA sense strand
cauggagacaaacuacuuu

SEQ ID NO: 1114389 - RNA, 19 nt, Homo sapiens
  misc_RNA (1)...(19): siRNA sense strand
gagcucaucagagaacuca

SEQ ID NO: 1114390 - RNA, 19 nt, Homo sapiens
  misc_RNA (1)...(19): siRNA sense strand
ugccuuccuuggcuguuua

SEQ ID NO: 1114391 - RNA, 19 nt, Homo sapiens
  misc_RNA (1)...(19): siRNA sense strand
uuccuuggcuguuuaucuu

SEQ ID NO: 1114392 - RNA, 19 nt, Homo sapiens
  misc_RNA (1)...(19): siRNA sense strand
ccaaggugcagacacacaa

SEQ ID NO: 1114393 - RNA, 19 nt, Homo sapiens
  misc_RNA (1)...(19): siRNA sense strand
uggaacaguaugaaauuga

SEQ ID NO: 1114394 - RNA, 19 nt, Homo sapiens
  misc_RNA (1)...(19): siRNA sense strand
ucauggagacaaacuacuu

SEQ ID NO: 1114395 - RNA, 19 nt, Homo sapiens
  misc_RNA (1)...(19): siRNA sense strand
aaagagcggaaauccaaga

SEQ ID NO: 1114396 - RNA, 19 nt, Homo sapiens
  misc_RNA (1)...(19): siRNA sense strand
cgagauggaacaguaugaa

SEQ ID NO: 1114397 - RNA, 19 nt, Homo sapiens
  misc_RNA (1)...(19): siRNA sense strand
cagcauaugcagccuccaa

SEQ ID NO: 1114398 - RNA, 19 nt, Homo sapiens
  misc_RNA (1)...(19): siRNA sense strand
ggcaagaugagcauuccuu

SEQ ID NO: 1114399 - RNA, 19 nt, Homo sapiens
  misc_RNA (1)...(19): siRNA sense strand
ggaggcaaggccacauugu

SEQ ID NO: 1114400 - RNA, 19 nt, Homo sapiens
  misc_RNA (1)...(19): siRNA sense strand
agacacacaagccuuacuu

SEQ ID NO: 1114401 - RNA, 19 nt, Homo sapiens
  misc_RNA (1)...(19): siRNA sense strand
gcaaagaaugugcaaaagu

SEQ ID NO: 1114402 - RNA, 19 nt, Homo sapiens
  misc_RNA (1)...(19): siRNA sense strand
caguggauguggacaagag

SEQ ID NO: 1114403 - RNA, 19 nt, Homo sapiens
  misc_RNA (1)...(19): siRNA sense strand
ggucauggagacaaacuac

SEQ ID NO: 1114404 - RNA, 19 nt, Homo sapiens
  misc_RNA (1)...(19): siRNA sense strand
agauggaacaguaugaaau

SEQ ID NO: 1114405 - RNA, 19 nt, Homo sapiens
  misc_RNA (1)...(19): siRNA sense strand
gugcaaaagucuucuaugc

SEQ ID NO: 1114406 - RNA, 19 nt, Homo sapiens
  misc_RNA (1)...(19): siRNA sense strand
gaggcaaggccacauuguc

SEQ ID NO: 1114407 - RNA, 19 nt, Homo sapiens
  misc_RNA (1)...(19): siRNA sense strand
ugcagacacacaagccuua

SEQ ID NO: 1114408 - RNA, 19 nt, Homo sapiens
  misc_RNA (1)...(19): siRNA sense strand
cuccugcccuccaugauca

SEQ ID NO: 1114409 - RNA, 19 nt, Homo sapiens
  misc_RNA (1)...(19): siRNA sense strand
gaucuagguauggaguuau

SEQ ID NO: 1114410 - RNA, 19 nt, Homo sapiens
  misc_RNA (1)...(19): siRNA sense strand
caccaaccucucuguaaau

SEQ ID NO: 1114411 - RNA, 19 nt, Homo sapiens
  misc_RNA (1)...(19): siRNA sense strand
gcaacccaggcuuucuuug

SEQ ID NO: 1114412 - RNA, 19 nt, Homo sapiens
  misc_RNA (1)...(19): siRNA sense strand
gaagaaaucguucaucaua

SEQ ID NO: 1114413 - RNA, 19 nt, Homo sapiens
  misc_RNA (1)...(19): siRNA sense strand
gagaacaacuggcagcuuu

SEQ ID NO: 1114414 - RNA, 19 nt, Homo sapiens
  misc_RNA (1)...(19): siRNA sense strand
aagaagaaaucguucauca

SEQ ID NO: 1114415 - RNA, 19 nt, Homo sapiens
  misc_RNA (1)...(19): siRNA sense strand
gaacaacuggcagcuuuga

SEQ ID NO: 1114416 - RNA, 19 nt, Homo sapiens
  misc_RNA (1)...(19): siRNA sense strand
agaaaucguucaucauaag

SEQ ID NO: 1114417 - RNA, 19 nt, Homo sapiens
  misc_RNA (1)...(19): siRNA sense strand
gaaaucguucaucauaaga

SEQ ID NO: 1114418 - RNA, 19 nt, Homo sapiens
  misc_RNA (1)...(19): siRNA sense strand
agagagagcaggcugaaga

SEQ ID NO: 1114419 - RNA, 19 nt, Homo sapiens
  misc_RNA (1)...(19): siRNA sense strand
gaaauugagcgccauaagc

SEQ ID NO: 1114420 - RNA, 19 nt, Homo sapiens
  misc_RNA (1)...(19): siRNA sense strand
agagcaggcugaagaggaa

SEQ ID NO: 1114421 - RNA, 19 nt, Homo sapiens
  misc_RNA (1)...(19): siRNA sense strand
gccauaagcagaagaucaa

SEQ ID NO: 1114422 - RNA, 19 nt, Homo sapiens
  misc_RNA (1)...(19): siRNA sense strand
gagcgucugcagaaagaaa

SEQ ID NO: 1114423 - RNA, 19 nt, Homo sapiens
  misc_RNA (1)...(19): siRNA sense strand
gaagaagaaaucguucauc

SEQ ID NO: 1114424 - RNA, 19 nt, Homo sapiens
  misc_RNA (1)...(19): siRNA sense strand
gauugagcgucugcagaaa

SEQ ID NO: 1114425 - RNA, 19 nt, Homo sapiens
  misc_RNA (1)...(19): siRNA sense strand
ugaagaggaacgauauuuc

SEQ ID NO: 1114426 - RNA, 19 nt, Homo sapiens
  misc_RNA (1)...(19): siRNA sense strand
ccaugaagaagaaaucguu

SEQ ID NO: 1114427 - RNA, 19 nt, Homo sapiens
  misc_RNA (1)...(19): siRNA sense strand
acaacuggcagcuuugaaa

SEQ ID NO: 1114428 - RNA, 19 nt, Homo sapiens
  misc_RNA (1)...(19): siRNA sense strand
aaagaaauugagcgccaua

SEQ ID NO: 1114429 - RNA, 19 nt, Homo sapiens
  misc_RNA (1)...(19): siRNA sense strand
aaauugagcgccauaagca

SEQ ID NO: 1114430 - RNA, 19 nt, Homo sapiens
  misc_RNA (1)...(19): siRNA sense strand
gcacagaguagagaacaac

SEQ ID NO: 1114431 - RNA, 19 nt, Homo sapiens
  misc_RNA (1)...(19): siRNA sense strand
gagcacagaguagagaaca

SEQ ID NO: 1114432 - RNA, 19 nt, Homo sapiens
  misc_RNA (1)...(19): siRNA sense strand
agauugagcgucugcagaa

SEQ ID NO: 1114433 - RNA, 19 nt, Homo sapiens
  misc_RNA (1)...(19): siRNA sense strand
uugagcgucugcagaaaga

SEQ ID NO: 1114434 - RNA, 19 nt, Homo sapiens
  misc_RNA (1)...(19): siRNA sense strand
cugaagaggaacgauauuu

SEQ ID NO: 1114435 - RNA, 19 nt, Homo sapiens
  misc_RNA (1)...(19): siRNA sense strand
aaaacaccaugaagaagaa

SEQ ID NO: 1114436 - RNA, 19 nt, Homo sapiens
  misc_RNA (1)...(19): siRNA sense strand
caucauaagaaggagauug

SEQ ID NO: 1114437 - RNA, 19 nt, Homo sapiens
  misc_RNA (1)...(19): siRNA sense strand
gcugaagaggaacgauauu

SEQ ID NO: 1114438 - RNA, 19 nt, Homo sapiens
  misc_RNA (1)...(19): siRNA sense strand
cagaagaucaaaaugcuaa

SEQ ID NO: 1114439 - RNA, 19 nt, Homo sapiens
  misc_RNA (1)...(19): siRNA sense strand
aaagagagagcaggcugaa

SEQ ID NO: 1114440 - RNA, 19 nt, Homo sapiens
  misc_RNA (1)...(19): siRNA sense strand
aaucguucaucauaagaag

SEQ ID NO: 1114441 - RNA, 19 nt, Homo sapiens
  misc_RNA (1)...(19): siRNA sense strand
ggcugaagaggaacgauau

SEQ ID NO: 1114442 - RNA, 19 nt, Homo sapiens
  misc_RNA (1)...(19): siRNA sense strand
agagagagcaggcugaaga

SEQ ID NO: 1114443 - RNA, 19 nt, Homo sapiens
  misc_RNA (1)...(19): siRNA sense strand
agagcaggcugaagaggaa

SEQ ID NO: 1114444 - RNA, 19 nt, Homo sapiens
  misc_RNA (1)...(19): siRNA sense strand
ugaagaggaacgauauuuc

SEQ ID NO: 1114445 - RNA, 19 nt, Homo sapiens
  misc_RNA (1)...(19): siRNA sense strand
cugaagaggaacgauauuu

SEQ ID NO: 1114446 - RNA, 19 nt, Homo sapiens
  misc_RNA (1)...(19): siRNA sense strand
gcugaagaggaacgauauu

SEQ ID NO: 1114447 - RNA, 19 nt, Homo sapiens
  misc_RNA (1)...(19): siRNA sense strand
aaagagagagcaggcugaa

SEQ ID NO: 1114448 - RNA, 19 nt, Homo sapiens
  misc_RNA (1)...(19): siRNA sense strand
ggcugaagaggaacgauau

SEQ ID NO: 1114449 - RNA, 19 nt, Homo sapiens
  misc_RNA (1)...(19): siRNA sense strand
agagagagcaggcugaaga

SEQ ID NO: 1114450 - RNA, 19 nt, Homo sapiens
  misc_RNA (1)...(19): siRNA sense strand
agagcaggcugaagaggaa

SEQ ID NO: 1114451 - RNA, 19 nt, Homo sapiens
  misc_RNA (1)...(19): siRNA sense strand
ugaagaggaacgauauuuc

SEQ ID NO: 1114452 - RNA, 19 nt, Homo sapiens
  misc_RNA (1)...(19): siRNA sense strand
cugaagaggaacgauauuu

SEQ ID NO: 1114453 - RNA, 19 nt, Homo sapiens
  misc_RNA (1)...(19): siRNA sense strand
gcugaagaggaacgauauu

SEQ ID NO: 1114454 - RNA, 19 nt, Homo sapiens
  misc_RNA (1)...(19): siRNA sense strand
aaagagagagcaggcugaa

SEQ ID NO: 1114455 - RNA, 19 nt, Homo sapiens
  misc_RNA (1)...(19): siRNA sense strand
ggcugaagaggaacgauau

SEQ ID NO: 1114456 - RNA, 19 nt, Homo sapiens
  misc_RNA (1)...(19): siRNA sense strand
ccucuuagccgcagcauua

SEQ ID NO: 1114457 - RNA, 19 nt, Homo sapiens
  misc_RNA (1)...(19): siRNA sense strand
gcacccaaauccuaugcua

SEQ ID NO: 1114458 - RNA, 19 nt, Homo sapiens
  misc_RNA (1)...(19): siRNA sense strand
gccugucacucuucauuua

SEQ ID NO: 1114459 - RNA, 19 nt, Homo sapiens
  misc_RNA (1)...(19): siRNA sense strand
ggaaaaggguaauaugguu

SEQ ID NO: 1114460 - RNA, 19 nt, Homo sapiens
  misc_RNA (1)...(19): siRNA sense strand
gcauuaagccugucacucu

SEQ ID NO: 1114461 - RNA, 19 nt, Homo sapiens
  misc_RNA (1)...(19): siRNA sense strand
agaauucagugacaaggaa

SEQ ID NO: 1114462 - RNA, 19 nt, Homo sapiens
  misc_RNA (1)...(19): siRNA sense strand
uuaauagccuguagagaca

SEQ ID NO: 1114463 - RNA, 19 nt, Homo sapiens
  misc_RNA (1)...(19): siRNA sense strand
uuaauagcagcuccucuua

SEQ ID NO: 1114464 - RNA, 19 nt, Homo sapiens
  misc_RNA (1)...(19): siRNA sense strand
acacagaauucagugacaa

SEQ ID NO: 1114465 - RNA, 19 nt, Homo sapiens
  misc_RNA (1)...(19): siRNA sense strand
caaauccuaugcuauucgu

SEQ ID NO: 1114466 - RNA, 19 nt, Homo sapiens
  misc_RNA (1)...(19): siRNA sense strand
gacacagaauucagugaca

SEQ ID NO: 1114467 - RNA, 19 nt, Homo sapiens
  misc_RNA (1)...(19): siRNA sense strand
cauuaagccugucacucuu

SEQ ID NO: 1114468 - RNA, 19 nt, Homo sapiens
  misc_RNA (1)...(19): siRNA sense strand
gaaaaggguaauaugguuu

SEQ ID NO: 1114469 - RNA, 19 nt, Homo sapiens
  misc_RNA (1)...(19): siRNA sense strand
gaauucagugacaaggaaa

SEQ ID NO: 1114470 - RNA, 19 nt, Homo sapiens
  misc_RNA (1)...(19): siRNA sense strand
acccaaauccuaugcuauu

SEQ ID NO: 1114471 - RNA, 19 nt, Homo sapiens
  misc_RNA (1)...(19): siRNA sense strand
gguccugaguggaaauucu

SEQ ID NO: 1114472 - RNA, 19 nt, Homo sapiens
  misc_RNA (1)...(19): siRNA sense strand
aauagcagcuccucuuagc

SEQ ID NO: 1114473 - RNA, 19 nt, Homo sapiens
  misc_RNA (1)...(19): siRNA sense strand
ccuaugcuauucgugauuc

SEQ ID NO: 1114474 - RNA, 19 nt, Homo sapiens
  misc_RNA (1)...(19): siRNA sense strand
ggaggcagcacccaaaucc

SEQ ID NO: 1114475 - RNA, 19 nt, Homo sapiens
  misc_RNA (1)...(19): siRNA sense strand
aggcagcacccaaauccua

SEQ ID NO: 1114476 - RNA, 19 nt, Homo sapiens
  misc_RNA (1)...(19): siRNA sense strand
gagacacagaauucaguga

SEQ ID NO: 1114477 - RNA, 19 nt, Homo sapiens
  misc_RNA (1)...(19): siRNA sense strand
uuaagccugucacucuuca

SEQ ID NO: 1114478 - RNA, 19 nt, Homo sapiens
  misc_RNA (1)...(19): siRNA sense strand
uuuaauagcagcuccucuu

SEQ ID NO: 1114479 - RNA, 19 nt, Homo sapiens
  misc_RNA (1)...(19): siRNA sense strand
uaauagcagcuccucuuag

SEQ ID NO: 1114480 - RNA, 19 nt, Homo sapiens
  misc_RNA (1)...(19): siRNA sense strand
ccugucacucuucauuuaa

SEQ ID NO: 1114481 - RNA, 19 nt, Homo sapiens
  misc_RNA (1)...(19): siRNA sense strand
ccugaguggaaauucuuua

SEQ ID NO: 1114482 - RNA, 19 nt, Homo sapiens
  misc_RNA (1)...(19): siRNA sense strand
cccaaauccuaugcuauuc

SEQ ID NO: 1114483 - RNA, 19 nt, Homo sapiens
  misc_RNA (1)...(19): siRNA sense strand
guagagacacagaauucag

SEQ ID NO: 1114484 - RNA, 19 nt, Homo sapiens
  misc_RNA (1)...(19): siRNA sense strand
cugaguggaaauucuuuaa

SEQ ID NO: 1114485 - RNA, 19 nt, Homo sapiens
  misc_RNA (1)...(19): siRNA sense strand
ccucuuagccgcagcauua

SEQ ID NO: 1114486 - RNA, 19 nt, Homo sapiens
  misc_RNA (1)...(19): siRNA sense strand
gcacccaaauccuaugcua

SEQ ID NO: 1114487 - RNA, 19 nt, Homo sapiens
  misc_RNA (1)...(19): siRNA sense strand
gccugucacucuucauuua

SEQ ID NO: 1114488 - RNA, 19 nt, Homo sapiens
  misc_RNA (1)...(19): siRNA sense strand
ggaaaaggguaauaugguu

SEQ ID NO: 1114489 - RNA, 19 nt, Homo sapiens
  misc_RNA (1)...(19): siRNA sense strand
gcauuaagccugucacucu

SEQ ID NO: 1114490 - RNA, 19 nt, Homo sapiens
  misc_RNA (1)...(19): siRNA sense strand
agaauucagugacaaggaa

SEQ ID NO: 1114491 - RNA, 19 nt, Homo sapiens
  misc_RNA (1)...(19): siRNA sense strand
uuaauagccuguagagaca

SEQ ID NO: 1114492 - RNA, 19 nt, Homo sapiens
  misc_RNA (1)...(19): siRNA sense strand
uuaauagcagcuccucuua

SEQ ID NO: 1114493 - RNA, 19 nt, Homo sapiens
  misc_RNA (1)...(19): siRNA sense strand
acacagaauucagugacaa

SEQ ID NO: 1114494 - RNA, 19 nt, Homo sapiens
  misc_RNA (1)...(19): siRNA sense strand
caaauccuaugcuauucgu

SEQ ID NO: 1114495 - RNA, 19 nt, Homo sapiens
  misc_RNA (1)...(19): siRNA sense strand
gacacagaauucagugaca

SEQ ID NO: 1114496 - RNA, 19 nt, Homo sapiens
  misc_RNA (1)...(19): siRNA sense strand
cauuaagccugucacucuu

SEQ ID NO: 1114497 - RNA, 19 nt, Homo sapiens
  misc_RNA (1)...(19): siRNA sense strand
gaaaaggguaauaugguuu

SEQ ID NO: 1114498 - RNA, 19 nt, Homo sapiens
  misc_RNA (1)...(19): siRNA sense strand
gaauucagugacaaggaaa

SEQ ID NO: 1114499 - RNA, 19 nt, Homo sapiens
  misc_RNA (1)...(19): siRNA sense strand
acccaaauccuaugcuauu

SEQ ID NO: 1114500 - RNA, 19 nt, Homo sapiens
  misc_RNA (1)...(19): siRNA sense strand
gguccugaguggaaauucu

SEQ ID NO: 1114501 - RNA, 19 nt, Homo sapiens
  misc_RNA (1)...(19): siRNA sense strand
aauagcagcuccucuuagc

SEQ ID NO: 1114502 - RNA, 19 nt, Homo sapiens
  misc_RNA (1)...(19): siRNA sense strand
ccuaugcuauucgugauuc

SEQ ID NO: 1114503 - RNA, 19 nt, Homo sapiens
  misc_RNA (1)...(19): siRNA sense strand
ggaggcagcacccaaaucc

SEQ ID NO: 1114504 - RNA, 19 nt, Homo sapiens
  misc_RNA (1)...(19): siRNA sense strand
aggcagcacccaaauccua

SEQ ID NO: 1114505 - RNA, 19 nt, Homo sapiens
  misc_RNA (1)...(19): siRNA sense strand
gagacacagaauucaguga

SEQ ID NO: 1114506 - RNA, 19 nt, Homo sapiens
  misc_RNA (1)...(19): siRNA sense strand
uuaagccugucacucuuca

SEQ ID NO: 1114507 - RNA, 19 nt, Homo sapiens
  misc_RNA (1)...(19): siRNA sense strand
uuuaauagcagcuccucuu

SEQ ID NO: 1114508 - RNA, 19 nt, Homo sapiens
  misc_RNA (1)...(19): siRNA sense strand
uaauagcagcuccucuuag

SEQ ID NO: 1114509 - RNA, 19 nt, Homo sapiens
  misc_RNA (1)...(19): siRNA sense strand
ccugucacucuucauuuaa

SEQ ID NO: 1114510 - RNA, 19 nt, Homo sapiens
  misc_RNA (1)...(19): siRNA sense strand
ccugaguggaaauucuuua

SEQ ID NO: 1114511 - RNA, 19 nt, Homo sapiens
  misc_RNA (1)...(19): siRNA sense strand
cccaaauccuaugcuauuc

SEQ ID NO: 1114512 - RNA, 19 nt, Homo sapiens
  misc_RNA (1)...(19): siRNA sense strand
guagagacacagaauucag

SEQ ID NO: 1114513 - RNA, 19 nt, Homo sapiens
  misc_RNA (1)...(19): siRNA sense strand
cugaguggaaauucuuuaa

SEQ ID NO: 1114514 - RNA, 19 nt, Homo sapiens
  misc_RNA (1)...(19): siRNA sense strand
uaaaggcagucgugauaua

SEQ ID NO: 1114515 - RNA, 19 nt, Homo sapiens
  misc_RNA (1)...(19): siRNA sense strand
caaacaagauggccaaugu

SEQ ID NO: 1114516 - RNA, 19 nt, Homo sapiens
  misc_RNA (1)...(19): siRNA sense strand
gccaguacaucgcuuauga

SEQ ID NO: 1114517 - RNA, 19 nt, Homo sapiens
  misc_RNA (1)...(19): siRNA sense strand
ggaaacaguugccacaucu

SEQ ID NO: 1114518 - RNA, 19 nt, Homo sapiens
  misc_RNA (1)...(19): siRNA sense strand
uaaagaaccuccuccaaac

SEQ ID NO: 1114519 - RNA, 19 nt, Homo sapiens
  misc_RNA (1)...(19): siRNA sense strand
guacaaagguaucauugac

SEQ ID NO: 1114520 - RNA, 19 nt, Homo sapiens
  misc_RNA (1)...(19): siRNA sense strand
cagagaaggugaauaaugc

SEQ ID NO: 1114521 - RNA, 19 nt, Homo sapiens
  misc_RNA (1)...(19): siRNA sense strand
gaaguacaaagguaucauu

SEQ ID NO: 1114522 - RNA, 19 nt, Homo sapiens
  misc_RNA (1)...(19): siRNA sense strand
guacagcucaggcaaguug

SEQ ID NO: 1114523 - RNA, 19 nt, Homo sapiens
  misc_RNA (1)...(19): siRNA sense strand
gcacugggauuugccaagu

SEQ ID NO: 1114524 - RNA, 19 nt, Homo sapiens
  misc_RNA (1)...(19): siRNA sense strand
gaagaucuggaaacaguug

SEQ ID NO: 1114525 - RNA, 19 nt, Homo sapiens
  misc_RNA (1)...(19): siRNA sense strand
ucuaaaggcagucgugaua

SEQ ID NO: 1114526 - RNA, 19 nt, Homo sapiens
  misc_RNA (1)...(19): siRNA sense strand
acgaggcccuggauaagua

SEQ ID NO: 1114527 - RNA, 19 nt, Homo sapiens
  misc_RNA (1)...(19): siRNA sense strand
gaacauggaggacaagacu

SEQ ID NO: 1114528 - RNA, 19 nt, Homo sapiens
  misc_RNA (1)...(19): siRNA sense strand
cugaagaucuggaaacagu

SEQ ID NO: 1114529 - RNA, 19 nt, Homo sapiens
  misc_RNA (1)...(19): siRNA sense strand
auaaagaaccuccuccaaa

SEQ ID NO: 1114530 - RNA, 19 nt, Homo sapiens
  misc_RNA (1)...(19): siRNA sense strand
ccagagaaggugaauaaug

SEQ ID NO: 1114531 - RNA, 19 nt, Homo sapiens
  misc_RNA (1)...(19): siRNA sense strand
aaacaguugccacaucuaa

SEQ ID NO: 1114532 - RNA, 19 nt, Homo sapiens
  misc_RNA (1)...(19): siRNA sense strand
aggcagucgugauauauaa

SEQ ID NO: 1114533 - RNA, 19 nt, Homo sapiens
  misc_RNA (1)...(19): siRNA sense strand
cugauaaucugacugaaca

SEQ ID NO: 1114534 - RNA, 19 nt, Homo sapiens
  misc_RNA (1)...(19): siRNA sense strand
ggcagccacucuccaaaga

SEQ ID NO: 1114535 - RNA, 19 nt, Homo sapiens
  misc_RNA (1)...(19): siRNA sense strand
gcaacgccaugcucauugg

SEQ ID NO: 1114536 - RNA, 19 nt, Homo sapiens
  misc_RNA (1)...(19): siRNA sense strand
gaaugaagugccugaggaa

SEQ ID NO: 1114537 - RNA, 19 nt, Homo sapiens
  misc_RNA (1)...(19): siRNA sense strand
caagauggccaauguguac

SEQ ID NO: 1114538 - RNA, 19 nt, Homo sapiens
  misc_RNA (1)...(19): siRNA sense strand
gcaauucuggagcuggaua

SEQ ID NO: 1114539 - RNA, 19 nt, Homo sapiens
  misc_RNA (1)...(19): siRNA sense strand
gggaacacaucuccuacuc

SEQ ID NO: 1114540 - RNA, 19 nt, Homo sapiens
  misc_RNA (1)...(19): siRNA sense strand
uguccgagaucauagagaa

SEQ ID NO: 1114541 - RNA, 19 nt, Homo sapiens
  misc_RNA (1)...(19): siRNA sense strand
caucgucacuggcaucuac

SEQ ID NO: 1114542 - RNA, 19 nt, Homo sapiens
  misc_RNA (1)...(19): siRNA sense strand
gcagugggcacaguauuug

SEQ ID NO: 1114543 - RNA, 19 nt, Homo sapiens
  misc_RNA (1)...(19): siRNA sense strand
ugccagagaaggugaauaa

SEQ ID NO: 1114544 - RNA, 19 nt, Homo sapiens
  misc_RNA (1)...(19): siRNA sense strand
ccagaggccugccaguaca

SEQ ID NO: 1114545 - RNA, 19 nt, Homo sapiens
  misc_RNA (1)...(19): siRNA sense strand
ggacaagugggaacacauc

SEQ ID NO: 1114546 - RNA, 19 nt, Homo sapiens
  misc_RNA (1)...(19): siRNA sense strand
gccgauggcuuccucuaca

SEQ ID NO: 1114547 - RNA, 19 nt, Homo sapiens
  misc_RNA (1)...(19): siRNA sense strand
gaugcugagucaagacaau

SEQ ID NO: 1114548 - RNA, 19 nt, Homo sapiens
  misc_RNA (1)...(19): siRNA sense strand
gaaccuccuccaaacaaga

SEQ ID NO: 1114549 - RNA, 19 nt, Homo sapiens
  misc_RNA (1)...(19): siRNA sense strand
ggcagugggcacaguauuu

SEQ ID NO: 1114550 - RNA, 19 nt, Homo sapiens
  misc_RNA (1)...(19): siRNA sense strand
agacugauaaucugacuga

SEQ ID NO: 1114551 - RNA, 19 nt, Homo sapiens
  misc_RNA (1)...(19): siRNA sense strand
ccucaaagaauuaaucauc

SEQ ID NO: 1114552 - RNA, 19 nt, Homo sapiens
  misc_RNA (1)...(19): siRNA sense strand
uguacacgauggaggaauu

SEQ ID NO: 1114553 - RNA, 19 nt, Homo sapiens
  misc_RNA (1)...(19): siRNA sense strand
gugaggaccacccaagaaa

SEQ ID NO: 1114554 - RNA, 19 nt, Homo sapiens
  misc_RNA (1)...(19): siRNA sense strand
gaaacaguugccacaucua

SEQ ID NO: 1114555 - RNA, 19 nt, Homo sapiens
  misc_RNA (1)...(19): siRNA sense strand
gcccacagcuucccuacac

SEQ ID NO: 1114556 - RNA, 19 nt, Homo sapiens
  misc_RNA (1)...(19): siRNA sense strand
ccaaagagucccugaacca

SEQ ID NO: 1114557 - RNA, 19 nt, Homo sapiens
  misc_RNA (1)...(19): siRNA sense strand
uuggagaaguacaaaggua

SEQ ID NO: 1114558 - RNA, 19 nt, Homo sapiens
  misc_RNA (1)...(19): siRNA sense strand
caaccagugcugugugcua

SEQ ID NO: 1114559 - RNA, 19 nt, Homo sapiens
  misc_RNA (1)...(19): siRNA sense strand
ccaugucggugaccuugga

SEQ ID NO: 1114560 - RNA, 19 nt, Homo sapiens
  misc_RNA (1)...(19): siRNA sense strand
cggcaggacaugauuguga

SEQ ID NO: 1114561 - RNA, 19 nt, Homo sapiens
  misc_RNA (1)...(19): siRNA sense strand
gcgccaaugucaucauggu

SEQ ID NO: 1114562 - RNA, 19 nt, Homo sapiens
  misc_RNA (1)...(19): siRNA sense strand
gaucauagagaagaaggau

SEQ ID NO: 1114563 - RNA, 19 nt, Homo sapiens
  misc_RNA (1)...(19): siRNA sense strand
ccaugcugcucaccuugaa

SEQ ID NO: 1114564 - RNA, 19 nt, Homo sapiens
  misc_RNA (1)...(19): siRNA sense strand
agaagcagcuggaaaagau

SEQ ID NO: 1114565 - RNA, 19 nt, Homo sapiens
  misc_RNA (1)...(19): siRNA sense strand
ucuacgaggcccuggauaa

SEQ ID NO: 1114566 - RNA, 19 nt, Homo sapiens
  misc_RNA (1)...(19): siRNA sense strand
uggaaacaguugccacauc

SEQ ID NO: 1114567 - RNA, 19 nt, Homo sapiens
  misc_RNA (1)...(19): siRNA sense strand
cacaguguccgagaucaua

SEQ ID NO: 1114568 - RNA, 19 nt, Homo sapiens
  misc_RNA (1)...(19): siRNA sense strand
ggagaaguacaaagguauc

SEQ ID NO: 1114569 - RNA, 19 nt, Homo sapiens
  misc_RNA (1)...(19): siRNA sense strand
cauuucggguggagaguug

SEQ ID NO: 1114570 - RNA, 19 nt, Homo sapiens
  misc_RNA (1)...(19): siRNA sense strand
ugaagcaggcccacagugu

SEQ ID NO: 1114571 - RNA, 19 nt, Homo sapiens
  misc_RNA (1)...(19): siRNA sense strand
ccaccacaguguccgagau

SEQ ID NO: 1114572 - RNA, 19 nt, Homo sapiens
  misc_RNA (1)...(19): siRNA sense strand
gcagagacacagcacuucu

SEQ ID NO: 1114573 - RNA, 19 nt, Homo sapiens
  misc_RNA (1)...(19): siRNA sense strand
uggaaaagauccugaagau

SEQ ID NO: 1114574 - RNA, 19 nt, Homo sapiens
  misc_RNA (1)...(19): siRNA sense strand
ucacaguuuuggagaagua

SEQ ID NO: 1114575 - RNA, 19 nt, Homo sapiens
  misc_RNA (1)...(19): siRNA sense strand
uauaaagaaccuccuccaa

SEQ ID NO: 1114576 - RNA, 19 nt, Homo sapiens
  misc_RNA (1)...(19): siRNA sense strand
acaagauggccaaugugua

SEQ ID NO: 1114577 - RNA, 19 nt, Homo sapiens
  misc_RNA (1)...(19): siRNA sense strand
gcagucgugauauauaaag

SEQ ID NO: 1114578 - RNA, 19 nt, Homo sapiens
  misc_RNA (1)...(19): siRNA sense strand
gagaaguacaaagguauca

SEQ ID NO: 1114579 - RNA, 19 nt, Homo sapiens
  misc_RNA (1)...(19): siRNA sense strand
uaaucugacugaacaagcu

SEQ ID NO: 1114580 - RNA, 19 nt, Homo sapiens
  misc_RNA (1)...(19): siRNA sense strand
gcgugaugcugagucaaga

SEQ ID NO: 1114581 - RNA, 19 nt, Homo sapiens
  misc_RNA (1)...(19): siRNA sense strand
aagaaccuccuccaaacaa

SEQ ID NO: 1114582 - RNA, 19 nt, Homo sapiens
  misc_RNA (1)...(19): siRNA sense strand
agaaggaugaggccgugua

SEQ ID NO: 1114583 - RNA, 19 nt, Homo sapiens
  misc_RNA (1)...(19): siRNA sense strand
ccgagaucauagagaagaa

SEQ ID NO: 1114584 - RNA, 19 nt, Homo sapiens
  misc_RNA (1)...(19): siRNA sense strand
cgaggaggccgugaagaug

SEQ ID NO: 1114585 - RNA, 19 nt, Homo sapiens
  misc_RNA (1)...(19): siRNA sense strand
caaagagucccugaaccau

SEQ ID NO: 1114586 - RNA, 19 nt, Homo sapiens
  misc_RNA (1)...(19): siRNA sense strand
gucccacgaugaaacugaa

SEQ ID NO: 1114587 - RNA, 19 nt, Homo sapiens
  misc_RNA (1)...(19): siRNA sense strand
ccuaccacauccagaagug

SEQ ID NO: 1114588 - RNA, 19 nt, Homo sapiens
  misc_RNA (1)...(19): siRNA sense strand
guaccaggccaucgaagag

SEQ ID NO: 1114589 - RNA, 19 nt, Homo sapiens
  misc_RNA (1)...(19): siRNA sense strand
gaaggaugaggccguguac

SEQ ID NO: 1114590 - RNA, 19 nt, Homo sapiens
  misc_RNA (1)...(19): siRNA sense strand
ugggcuaccugaacaugga

SEQ ID NO: 1114591 - RNA, 19 nt, Homo sapiens
  misc_RNA (1)...(19): siRNA sense strand
gcccuggacgccaucauug

SEQ ID NO: 1114592 - RNA, 19 nt, Homo sapiens
  misc_RNA (1)...(19): siRNA sense strand
aaaggcagucgugauauau

SEQ ID NO: 1114593 - RNA, 19 nt, Homo sapiens
  misc_RNA (1)...(19): siRNA sense strand
aaagaaccuccuccaaaca

SEQ ID NO: 1114594 - RNA, 19 nt, Homo sapiens
  misc_RNA (1)...(19): siRNA sense strand
gagccggcaggacaugauu

SEQ ID NO: 1114595 - RNA, 19 nt, Homo sapiens
  misc_RNA (1)...(19): siRNA sense strand
ggucucaacauccgcuugu

SEQ ID NO: 1114596 - RNA, 19 nt, Homo sapiens
  misc_RNA (1)...(19): siRNA sense strand
gauaaucugacugaacaag

SEQ ID NO: 1114597 - RNA, 19 nt, Homo sapiens
  misc_RNA (1)...(19): siRNA sense strand
uguccagucccuacaacua

SEQ ID NO: 1114598 - RNA, 19 nt, Homo sapiens
  misc_RNA (1)...(19): siRNA sense strand
ccaaacaagauggccaaug

SEQ ID NO: 1114599 - RNA, 19 nt, Homo sapiens
  misc_RNA (1)...(19): siRNA sense strand
aaggcagucgugauauaua

SEQ ID NO: 1114600 - RNA, 19 nt, Homo sapiens
  misc_RNA (1)...(19): siRNA sense strand
ggcccuaccacauccagaa

SEQ ID NO: 1114601 - RNA, 19 nt, Homo sapiens
  misc_RNA (1)...(19): siRNA sense strand
caggacaagugggaacaca

SEQ ID NO: 1114602 - RNA, 19 nt, Homo sapiens
  misc_RNA (1)...(19): siRNA sense strand
ucgaggaggccgugaagau

SEQ ID NO: 1114603 - RNA, 19 nt, Homo sapiens
  misc_RNA (1)...(19): siRNA sense strand
cagagacacagcacuucuu

SEQ ID NO: 1114604 - RNA, 19 nt, Homo sapiens
  misc_RNA (1)...(19): siRNA sense strand
ccagugcugugugcuaguc

SEQ ID NO: 1114605 - RNA, 19 nt, Homo sapiens
  misc_RNA (1)...(19): siRNA sense strand
uggccaauguguacacgau

SEQ ID NO: 1114606 - RNA, 19 nt, Homo sapiens
  misc_RNA (1)...(19): siRNA sense strand
cgugauauauaaagaaccu

SEQ ID NO: 1114607 - RNA, 19 nt, Homo sapiens
  misc_RNA (1)...(19): siRNA sense strand
cagucgugauauauaaaga

SEQ ID NO: 1114608 - RNA, 19 nt, Homo sapiens
  misc_RNA (1)...(19): siRNA sense strand
uaugacugcugcgccaaug

SEQ ID NO: 1114609 - RNA, 19 nt, Homo sapiens
  misc_RNA (1)...(19): siRNA sense strand
ggucccacgaugaaacuga

SEQ ID NO: 1114610 - RNA, 19 nt, Homo sapiens
  misc_RNA (1)...(19): siRNA sense strand
ggagcccacaucacacaug

SEQ ID NO: 1114611 - RNA, 19 nt, Homo sapiens
  misc_RNA (1)...(19): siRNA sense strand
acaaagagcuggcugauga

SEQ ID NO: 1114612 - RNA, 19 nt, Homo sapiens
  misc_RNA (1)...(19): siRNA sense strand
caaagagcauggagcugua

SEQ ID NO: 1114613 - RNA, 19 nt, Homo sapiens
  misc_RNA (1)...(19): siRNA sense strand
aaucagagccuaccacaaa

SEQ ID NO: 1114614 - RNA, 19 nt, Homo sapiens
  misc_RNA (1)...(19): siRNA sense strand
ggaggcuggugcagaaauu

SEQ ID NO: 1114615 - RNA, 19 nt, Homo sapiens
  misc_RNA (1)...(19): siRNA sense strand
agccagcucuuccaucuua

SEQ ID NO: 1114616 - RNA, 19 nt, Homo sapiens
  misc_RNA (1)...(19): siRNA sense strand
ccacaaacauccaaauucg

SEQ ID NO: 1114617 - RNA, 19 nt, Homo sapiens
  misc_RNA (1)...(19): siRNA sense strand
ggacaggugaacuuggaua

SEQ ID NO: 1114618 - RNA, 19 nt, Homo sapiens
  misc_RNA (1)...(19): siRNA sense strand
gaagccaaccugcucaaug

SEQ ID NO: 1114619 - RNA, 19 nt, Homo sapiens
  misc_RNA (1)...(19): siRNA sense strand
gauaauggagaacucagaa

SEQ ID NO: 1114620 - RNA, 19 nt, Homo sapiens
  misc_RNA (1)...(19): siRNA sense strand
gaacaaagagcuggcugau

SEQ ID NO: 1114621 - RNA, 19 nt, Homo sapiens
  misc_RNA (1)...(19): siRNA sense strand
ggacgaggacuuugugaag

SEQ ID NO: 1114622 - RNA, 19 nt, Homo sapiens
  misc_RNA (1)...(19): siRNA sense strand
ggauucagccuggauaaug

SEQ ID NO: 1114623 - RNA, 19 nt, Homo sapiens
  misc_RNA (1)...(19): siRNA sense strand
ugaccaagaugaagaugag

SEQ ID NO: 1114624 - RNA, 19 nt, Homo sapiens
  misc_RNA (1)...(19): siRNA sense strand
gcucuuccaucuuaaucga

SEQ ID NO: 1114625 - RNA, 19 nt, Homo sapiens
  misc_RNA (1)...(19): siRNA sense strand
ugacuacuuucccgaacaa

SEQ ID NO: 1114626 - RNA, 19 nt, Homo sapiens
  misc_RNA (1)...(19): siRNA sense strand
guggacaggugaacuugga

SEQ ID NO: 1114627 - RNA, 19 nt, Homo sapiens
  misc_RNA (1)...(19): siRNA sense strand
caggugaacuuggauaugg

SEQ ID NO: 1114628 - RNA, 19 nt, Homo sapiens
  misc_RNA (1)...(19): siRNA sense strand
gauucagccuggauaaugg

SEQ ID NO: 1114629 - RNA, 19 nt, Homo sapiens
  misc_RNA (1)...(19): siRNA sense strand
aaagccagcucuuccaucu

SEQ ID NO: 1114630 - RNA, 19 nt, Homo sapiens
  misc_RNA (1)...(19): siRNA sense strand
guauugaaacucuggaaga

SEQ ID NO: 1114631 - RNA, 19 nt, Homo sapiens
  misc_RNA (1)...(19): siRNA sense strand
caucuuaaucgacgaauca

SEQ ID NO: 1114632 - RNA, 19 nt, Homo sapiens
  misc_RNA (1)...(19): siRNA sense strand
cagccuggauaauggagaa

SEQ ID NO: 1114633 - RNA, 19 nt, Homo sapiens
  misc_RNA (1)...(19): siRNA sense strand
cauguaguauugaaacucu

SEQ ID NO: 1114634 - RNA, 19 nt, Homo sapiens
  misc_RNA (1)...(19): siRNA sense strand
ggauaauggagaacucaga

SEQ ID NO: 1114635 - RNA, 19 nt, Homo sapiens
  misc_RNA (1)...(19): siRNA sense strand
agaugaagaugaggaggaa

SEQ ID NO: 1114636 - RNA, 19 nt, Homo sapiens
  misc_RNA (1)...(19): siRNA sense strand
gauaauagagugacauccu

SEQ ID NO: 1114637 - RNA, 19 nt, Homo sapiens
  misc_RNA (1)...(19): siRNA sense strand
auaauagagugacauccuu

SEQ ID NO: 1114638 - RNA, 19 nt, Homo sapiens
  misc_RNA (1)...(19): siRNA sense strand
ggaggugccagcagagcuu

SEQ ID NO: 1114639 - RNA, 19 nt, Homo sapiens
  misc_RNA (1)...(19): siRNA sense strand
uaccaagacccauccaaug

SEQ ID NO: 1114640 - RNA, 19 nt, Homo sapiens
  misc_RNA (1)...(19): siRNA sense strand
uaccacaaacauccaaauu

SEQ ID NO: 1114641 - RNA, 19 nt, Homo sapiens
  misc_RNA (1)...(19): siRNA sense strand
auggagaacucagaagcua

SEQ ID NO: 1114642 - RNA, 19 nt, Homo sapiens
  misc_RNA (1)...(19): siRNA sense strand
cccauccaaugcccaguuu

SEQ ID NO: 1114643 - RNA, 19 nt, Homo sapiens
  misc_RNA (1)...(19): siRNA sense strand
ggcagaaaaugaagccaaa

SEQ ID NO: 1114644 - RNA, 19 nt, Homo sapiens
  misc_RNA (1)...(19): siRNA sense strand
gcuuuauccucaugacuac

SEQ ID NO: 1114645 - RNA, 19 nt, Homo sapiens
  misc_RNA (1)...(19): siRNA sense strand
gacaggugaacuuggauau

SEQ ID NO: 1114646 - RNA, 19 nt, Homo sapiens
  misc_RNA (1)...(19): siRNA sense strand
cgacauccgacucuucauc

SEQ ID NO: 1114647 - RNA, 19 nt, Homo sapiens
  misc_RNA (1)...(19): siRNA sense strand
gaaucagagccuaccacaa

SEQ ID NO: 1114648 - RNA, 19 nt, Homo sapiens
  misc_RNA (1)...(19): siRNA sense strand
uagagugacauccuucaga

SEQ ID NO: 1114649 - RNA, 19 nt, Homo sapiens
  misc_RNA (1)...(19): siRNA sense strand
cuaccaagacccauccaau

SEQ ID NO: 1114650 - RNA, 19 nt, Homo sapiens
  misc_RNA (1)...(19): siRNA sense strand
caccagcuuuauccucaug

SEQ ID NO: 1114651 - RNA, 19 nt, Homo sapiens
  misc_RNA (1)...(19): siRNA sense strand
gggacgaggacuuugugaa

SEQ ID NO: 1114652 - RNA, 19 nt, Homo sapiens
  misc_RNA (1)...(19): siRNA sense strand
gagccagacccugaaggaa

SEQ ID NO: 1114653 - RNA, 19 nt, Homo sapiens
  misc_RNA (1)...(19): siRNA sense strand
ucgugcagcgguuaacaua

SEQ ID NO: 1114654 - RNA, 19 nt, Homo sapiens
  misc_RNA (1)...(19): siRNA sense strand
aggcuggugcagaaauuua

SEQ ID NO: 1114655 - RNA, 19 nt, Homo sapiens
  misc_RNA (1)...(19): siRNA sense strand
aggaggcgcugagggaguu

SEQ ID NO: 1114656 - RNA, 19 nt, Homo sapiens
  misc_RNA (1)...(19): siRNA sense strand
gaggcuggugcagaaauuu

SEQ ID NO: 1114657 - RNA, 19 nt, Homo sapiens
  misc_RNA (1)...(19): siRNA sense strand
ggaagccaaccugcucaau

SEQ ID NO: 1114658 - RNA, 19 nt, Homo sapiens
  misc_RNA (1)...(19): siRNA sense strand
ggcuggugcagaaauuuaa

SEQ ID NO: 1114659 - RNA, 19 nt, Homo sapiens
  misc_RNA (1)...(19): siRNA sense strand
cuucagagaccucauucau

SEQ ID NO: 1114660 - RNA, 19 nt, Homo sapiens
  misc_RNA (1)...(19): siRNA sense strand
acaaagagcuggcugauga

SEQ ID NO: 1114661 - RNA, 19 nt, Homo sapiens
  misc_RNA (1)...(19): siRNA sense strand
caaagagcauggagcugua

SEQ ID NO: 1114662 - RNA, 19 nt, Homo sapiens
  misc_RNA (1)...(19): siRNA sense strand
aaucagagccuaccacaaa

SEQ ID NO: 1114663 - RNA, 19 nt, Homo sapiens
  misc_RNA (1)...(19): siRNA sense strand
ggaggcuggugcagaaauu

SEQ ID NO: 1114664 - RNA, 19 nt, Homo sapiens
  misc_RNA (1)...(19): siRNA sense strand
agccagcucuuccaucuua

SEQ ID NO: 1114665 - RNA, 19 nt, Homo sapiens
  misc_RNA (1)...(19): siRNA sense strand
ccacaaacauccaaauucg

SEQ ID NO: 1114666 - RNA, 19 nt, Homo sapiens
  misc_RNA (1)...(19): siRNA sense strand
ggacaggugaacuuggaua

SEQ ID NO: 1114667 - RNA, 19 nt, Homo sapiens
  misc_RNA (1)...(19): siRNA sense strand
gaagccaaccugcucaaug

SEQ ID NO: 1114668 - RNA, 19 nt, Homo sapiens
  misc_RNA (1)...(19): siRNA sense strand
gauaauggagaacucagaa

SEQ ID NO: 1114669 - RNA, 19 nt, Homo sapiens
  misc_RNA (1)...(19): siRNA sense strand
gaacaaagagcuggcugau

SEQ ID NO: 1114670 - RNA, 19 nt, Homo sapiens
  misc_RNA (1)...(19): siRNA sense strand
ggacgaggacuuugugaag

SEQ ID NO: 1114671 - RNA, 19 nt, Homo sapiens
  misc_RNA (1)...(19): siRNA sense strand
ggauucagccuggauaaug

SEQ ID NO: 1114672 - RNA, 19 nt, Homo sapiens
  misc_RNA (1)...(19): siRNA sense strand
ugaccaagaugaagaugag

SEQ ID NO: 1114673 - RNA, 19 nt, Homo sapiens
  misc_RNA (1)...(19): siRNA sense strand
gcucuuccaucuuaaucga

SEQ ID NO: 1114674 - RNA, 19 nt, Homo sapiens
  misc_RNA (1)...(19): siRNA sense strand
ugacuacuuucccgaacaa

SEQ ID NO: 1114675 - RNA, 19 nt, Homo sapiens
  misc_RNA (1)...(19): siRNA sense strand
guggacaggugaacuugga

SEQ ID NO: 1114676 - RNA, 19 nt, Homo sapiens
  misc_RNA (1)...(19): siRNA sense strand
caggugaacuuggauaugg

SEQ ID NO: 1114677 - RNA, 19 nt, Homo sapiens
  misc_RNA (1)...(19): siRNA sense strand
gauucagccuggauaaugg

SEQ ID NO: 1114678 - RNA, 19 nt, Homo sapiens
  misc_RNA (1)...(19): siRNA sense strand
aaagccagcucuuccaucu

SEQ ID NO: 1114679 - RNA, 19 nt, Homo sapiens
  misc_RNA (1)...(19): siRNA sense strand
guauugaaacucuggaaga

SEQ ID NO: 1114680 - RNA, 19 nt, Homo sapiens
  misc_RNA (1)...(19): siRNA sense strand
caucuuaaucgacgaauca

SEQ ID NO: 1114681 - RNA, 19 nt, Homo sapiens
  misc_RNA (1)...(19): siRNA sense strand
cagccuggauaauggagaa

SEQ ID NO: 1114682 - RNA, 19 nt, Homo sapiens
  misc_RNA (1)...(19): siRNA sense strand
cauguaguauugaaacucu

SEQ ID NO: 1114683 - RNA, 19 nt, Homo sapiens
  misc_RNA (1)...(19): siRNA sense strand
ggauaauggagaacucaga

SEQ ID NO: 1114684 - RNA, 19 nt, Homo sapiens
  misc_RNA (1)...(19): siRNA sense strand
agaugaagaugaggaggaa

SEQ ID NO: 1114685 - RNA, 19 nt, Homo sapiens
  misc_RNA (1)...(19): siRNA sense strand
gauaauagagugacauccu

SEQ ID NO: 1114686 - RNA, 19 nt, Homo sapiens
  misc_RNA (1)...(19): siRNA sense strand
auaauagagugacauccuu

SEQ ID NO: 1114687 - RNA, 19 nt, Homo sapiens
  misc_RNA (1)...(19): siRNA sense strand
ggaggugccagcagagcuu

SEQ ID NO: 1114688 - RNA, 19 nt, Homo sapiens
  misc_RNA (1)...(19): siRNA sense strand
uaccaagacccauccaaug

SEQ ID NO: 1114689 - RNA, 19 nt, Homo sapiens
  misc_RNA (1)...(19): siRNA sense strand
uaccacaaacauccaaauu

SEQ ID NO: 1114690 - RNA, 19 nt, Homo sapiens
  misc_RNA (1)...(19): siRNA sense strand
auggagaacucagaagcua

SEQ ID NO: 1114691 - RNA, 19 nt, Homo sapiens
  misc_RNA (1)...(19): siRNA sense strand
cccauccaaugcccaguuu

SEQ ID NO: 1114692 - RNA, 19 nt, Homo sapiens
  misc_RNA (1)...(19): siRNA sense strand
ggcagaaaaugaagccaaa

SEQ ID NO: 1114693 - RNA, 19 nt, Homo sapiens
  misc_RNA (1)...(19): siRNA sense strand
gcuuuauccucaugacuac

SEQ ID NO: 1114694 - RNA, 19 nt, Homo sapiens
  misc_RNA (1)...(19): siRNA sense strand
gacaggugaacuuggauau

SEQ ID NO: 1114695 - RNA, 19 nt, Homo sapiens
  misc_RNA (1)...(19): siRNA sense strand
cgacauccgacucuucauc

SEQ ID NO: 1114696 - RNA, 19 nt, Homo sapiens
  misc_RNA (1)...(19): siRNA sense strand
gaaucagagccuaccacaa

SEQ ID NO: 1114697 - RNA, 19 nt, Homo sapiens
  misc_RNA (1)...(19): siRNA sense strand
uagagugacauccuucaga

SEQ ID NO: 1114698 - RNA, 19 nt, Homo sapiens
  misc_RNA (1)...(19): siRNA sense strand
cuaccaagacccauccaau

SEQ ID NO: 1114699 - RNA, 19 nt, Homo sapiens
  misc_RNA (1)...(19): siRNA sense strand
caccagcuuuauccucaug

SEQ ID NO: 1114700 - RNA, 19 nt, Homo sapiens
  misc_RNA (1)...(19): siRNA sense strand
gggacgaggacuuugugaa

SEQ ID NO: 1114701 - RNA, 19 nt, Homo sapiens
  misc_RNA (1)...(19): siRNA sense strand
gagccagacccugaaggaa

SEQ ID NO: 1114702 - RNA, 19 nt, Homo sapiens
  misc_RNA (1)...(19): siRNA sense strand
ucgugcagcgguuaacaua

SEQ ID NO: 1114703 - RNA, 19 nt, Homo sapiens
  misc_RNA (1)...(19): siRNA sense strand
aggcuggugcagaaauuua

SEQ ID NO: 1114704 - RNA, 19 nt, Homo sapiens
  misc_RNA (1)...(19): siRNA sense strand
aggaggcgcugagggaguu

SEQ ID NO: 1114705 - RNA, 19 nt, Homo sapiens
  misc_RNA (1)...(19): siRNA sense strand
gaggcuggugcagaaauuu

SEQ ID NO: 1114706 - RNA, 19 nt, Homo sapiens
  misc_RNA (1)...(19): siRNA sense strand
ggaagccaaccugcucaau

SEQ ID NO: 1114707 - RNA, 19 nt, Homo sapiens
  misc_RNA (1)...(19): siRNA sense strand
ggcuggugcagaaauuuaa

SEQ ID NO: 1114708 - RNA, 19 nt, Homo sapiens
  misc_RNA (1)...(19): siRNA sense strand
cuucagagaccucauucau

SEQ ID NO: 1114709 - RNA, 19 nt, Homo sapiens
  misc_RNA (1)...(19): siRNA sense strand
acaaagagcuggcugauga

SEQ ID NO: 1114710 - RNA, 19 nt, Homo sapiens
  misc_RNA (1)...(19): siRNA sense strand
caaagagcauggagcugua

SEQ ID NO: 1114711 - RNA, 19 nt, Homo sapiens
  misc_RNA (1)...(19): siRNA sense strand
aaucagagccuaccacaaa

SEQ ID NO: 1114712 - RNA, 19 nt, Homo sapiens
  misc_RNA (1)...(19): siRNA sense strand
ggaggcuggugcagaaauu

SEQ ID NO: 1114713 - RNA, 19 nt, Homo sapiens
  misc_RNA (1)...(19): siRNA sense strand
agccagcucuuccaucuua

SEQ ID NO: 1114714 - RNA, 19 nt, Homo sapiens
  misc_RNA (1)...(19): siRNA sense strand
ccacaaacauccaaauucg

SEQ ID NO: 1114715 - RNA, 19 nt, Homo sapiens
  misc_RNA (1)...(19): siRNA sense strand
ggacaggugaacuuggaua

SEQ ID NO: 1114716 - RNA, 19 nt, Homo sapiens
  misc_RNA (1)...(19): siRNA sense strand
gaagccaaccugcucaaug

SEQ ID NO: 1114717 - RNA, 19 nt, Homo sapiens
  misc_RNA (1)...(19): siRNA sense strand
gauaauggagaacucagaa

SEQ ID NO: 1114718 - RNA, 19 nt, Homo sapiens
  misc_RNA (1)...(19): siRNA sense strand
gaacaaagagcuggcugau

SEQ ID NO: 1114719 - RNA, 19 nt, Homo sapiens
  misc_RNA (1)...(19): siRNA sense strand
ggacgaggacuuugugaag

SEQ ID NO: 1114720 - RNA, 19 nt, Homo sapiens
  misc_RNA (1)...(19): siRNA sense strand
ggauucagccuggauaaug

SEQ ID NO: 1114721 - RNA, 19 nt, Homo sapiens
  misc_RNA (1)...(19): siRNA sense strand
gcucuuccaucuuaaucga

SEQ ID NO: 1114722 - RNA, 19 nt, Homo sapiens
  misc_RNA (1)...(19): siRNA sense strand
ugacuacuuucccgaacaa

SEQ ID NO: 1114723 - RNA, 19 nt, Homo sapiens
  misc_RNA (1)...(19): siRNA sense strand
guggacaggugaacuugga

SEQ ID NO: 1114724 - RNA, 19 nt, Homo sapiens
  misc_RNA (1)...(19): siRNA sense strand
caggugaacuuggauaugg

SEQ ID NO: 1114725 - RNA, 19 nt, Homo sapiens
  misc_RNA (1)...(19): siRNA sense strand
gauucagccuggauaaugg

SEQ ID NO: 1114726 - RNA, 19 nt, Homo sapiens
  misc_RNA (1)...(19): siRNA sense strand
aaagccagcucuuccaucu

SEQ ID NO: 1114727 - RNA, 19 nt, Homo sapiens
  misc_RNA (1)...(19): siRNA sense strand
guauugaaacucuggaaga

SEQ ID NO: 1114728 - RNA, 19 nt, Homo sapiens
  misc_RNA (1)...(19): siRNA sense strand
caucuuaaucgacgaauca

SEQ ID NO: 1114729 - RNA, 19 nt, Homo sapiens
  misc_RNA (1)...(19): siRNA sense strand
cagccuggauaauggagaa

SEQ ID NO: 1114730 - RNA, 19 nt, Homo sapiens
  misc_RNA (1)...(19): siRNA sense strand
cauguaguauugaaacucu

SEQ ID NO: 1114731 - RNA, 19 nt, Homo sapiens
  misc_RNA (1)...(19): siRNA sense strand
ggauaauggagaacucaga

SEQ ID NO: 1114732 - RNA, 19 nt, Homo sapiens
  misc_RNA (1)...(19): siRNA sense strand
agaugaagaugaggaggaa

SEQ ID NO: 1114733 - RNA, 19 nt, Homo sapiens
  misc_RNA (1)...(19): siRNA sense strand
ggaggugccagcagagcuu

SEQ ID NO: 1114734 - RNA, 19 nt, Homo sapiens
  misc_RNA (1)...(19): siRNA sense strand
uaccaagacccauccaaug

SEQ ID NO: 1114735 - RNA, 19 nt, Homo sapiens
  misc_RNA (1)...(19): siRNA sense strand
uaccacaaacauccaaauu

SEQ ID NO: 1114736 - RNA, 19 nt, Homo sapiens
  misc_RNA (1)...(19): siRNA sense strand
auggagaacucagaagcua

SEQ ID NO: 1114737 - RNA, 19 nt, Homo sapiens
  misc_RNA (1)...(19): siRNA sense strand
cccauccaaugcccaguuu

SEQ ID NO: 1114738 - RNA, 19 nt, Homo sapiens
  misc_RNA (1)...(19): siRNA sense strand
ggcagaaaaugaagccaaa

SEQ ID NO: 1114739 - RNA, 19 nt, Homo sapiens
  misc_RNA (1)...(19): siRNA sense strand
gcuuuauccucaugacuac

SEQ ID NO: 1114740 - RNA, 19 nt, Homo sapiens
  misc_RNA (1)...(19): siRNA sense strand
gacaggugaacuuggauau

SEQ ID NO: 1114741 - RNA, 19 nt, Homo sapiens
  misc_RNA (1)...(19): siRNA sense strand
cgacauccgacucuucauc

SEQ ID NO: 1114742 - RNA, 19 nt, Homo sapiens
  misc_RNA (1)...(19): siRNA sense strand
gaaucagagccuaccacaa

SEQ ID NO: 1114743 - RNA, 19 nt, Homo sapiens
  misc_RNA (1)...(19): siRNA sense strand
cuaccaagacccauccaau

SEQ ID NO: 1114744 - RNA, 19 nt, Homo sapiens
  misc_RNA (1)...(19): siRNA sense strand
caccagcuuuauccucaug

SEQ ID NO: 1114745 - RNA, 19 nt, Homo sapiens
  misc_RNA (1)...(19): siRNA sense strand
gggacgaggacuuugugaa

SEQ ID NO: 1114746 - RNA, 19 nt, Homo sapiens
  misc_RNA (1)...(19): siRNA sense strand
gagccagacccugaaggaa

SEQ ID NO: 1114747 - RNA, 19 nt, Homo sapiens
  misc_RNA (1)...(19): siRNA sense strand
ucgugcagcgguuaacaua

SEQ ID NO: 1114748 - RNA, 19 nt, Homo sapiens
  misc_RNA (1)...(19): siRNA sense strand
aggcuggugcagaaauuua

SEQ ID NO: 1114749 - RNA, 19 nt, Homo sapiens
  misc_RNA (1)...(19): siRNA sense strand
gaggcuggugcagaaauuu

SEQ ID NO: 1114750 - RNA, 19 nt, Homo sapiens
  misc_RNA (1)...(19): siRNA sense strand
ggaagccaaccugcucaau

SEQ ID NO: 1114751 - RNA, 19 nt, Homo sapiens
  misc_RNA (1)...(19): siRNA sense strand
ggcuggugcagaaauuuaa

SEQ ID NO: 1114752 - RNA, 19 nt, Homo sapiens
  misc_RNA (1)...(19): siRNA sense strand
gcaagaagguaacgucauu

SEQ ID NO: 1114753 - RNA, 19 nt, Homo sapiens
  misc_RNA (1)...(19): siRNA sense strand
gaacugacaugggaagauu

SEQ ID NO: 1114754 - RNA, 19 nt, Homo sapiens
  misc_RNA (1)...(19): siRNA sense strand
ggaaugggcuguucuccaa

SEQ ID NO: 1114755 - RNA, 19 nt, Homo sapiens
  misc_RNA (1)...(19): siRNA sense strand
gaacaucgcuguguaugag

SEQ ID NO: 1114756 - RNA, 19 nt, Homo sapiens
  misc_RNA (1)...(19): siRNA sense strand
ggacuuccaucgccucauu

SEQ ID NO: 1114757 - RNA, 19 nt, Homo sapiens
  misc_RNA (1)...(19): siRNA sense strand
gaagaaauccgaaauacca

SEQ ID NO: 1114758 - RNA, 19 nt, Homo sapiens
  misc_RNA (1)...(19): siRNA sense strand
gcagcgacauugagacuga

SEQ ID NO: 1114759 - RNA, 19 nt, Homo sapiens
  misc_RNA (1)...(19): siRNA sense strand
cagcaucucuuucauguuc

SEQ ID NO: 1114760 - RNA, 19 nt, Homo sapiens
  misc_RNA (1)...(19): siRNA sense strand
agaaggagauugaagaaau

SEQ ID NO: 1114761 - RNA, 19 nt, Homo sapiens
  misc_RNA (1)...(19): siRNA sense strand
caucauccaugguagcuuu

SEQ ID NO: 1114762 - RNA, 19 nt, Homo sapiens
  misc_RNA (1)...(19): siRNA sense strand
ggaagaagguggagaucag

SEQ ID NO: 1114763 - RNA, 19 nt, Homo sapiens
  misc_RNA (1)...(19): siRNA sense strand
caucguccuugaacaauuu

SEQ ID NO: 1114764 - RNA, 19 nt, Homo sapiens
  misc_RNA (1)...(19): siRNA sense strand
gcacucugcugcucaagau

SEQ ID NO: 1114765 - RNA, 19 nt, Homo sapiens
  misc_RNA (1)...(19): siRNA sense strand
ggaggugccugaagucauc

SEQ ID NO: 1114766 - RNA, 19 nt, Homo sapiens
  misc_RNA (1)...(19): siRNA sense strand
gaaccggagucuauucaca

SEQ ID NO: 1114767 - RNA, 19 nt, Homo sapiens
  misc_RNA (1)...(19): siRNA sense strand
gaggaaaagucucgccuua

SEQ ID NO: 1114768 - RNA, 19 nt, Homo sapiens
  misc_RNA (1)...(19): siRNA sense strand
ggaaaagucucgccuuaug

SEQ ID NO: 1114769 - RNA, 19 nt, Homo sapiens
  misc_RNA (1)...(19): siRNA sense strand
ugacagaugugccagauac

SEQ ID NO: 1114770 - RNA, 19 nt, Homo sapiens
  misc_RNA (1)...(19): siRNA sense strand
ggagagggccuacuacuac

SEQ ID NO: 1114771 - RNA, 19 nt, Homo sapiens
  misc_RNA (1)...(19): siRNA sense strand
acaaagugcugaagaugug

SEQ ID NO: 1114772 - RNA, 19 nt, Homo sapiens
  misc_RNA (1)...(19): siRNA sense strand
ggacccagcgucaguuuga

SEQ ID NO: 1114773 - RNA, 19 nt, Homo sapiens
  misc_RNA (1)...(19): siRNA sense strand
gcuaucacgugcuuucaga

SEQ ID NO: 1114774 - RNA, 19 nt, Homo sapiens
  misc_RNA (1)...(19): siRNA sense strand
ccaaagcuguaccuugaug

SEQ ID NO: 1114775 - RNA, 19 nt, Homo sapiens
  misc_RNA (1)...(19): siRNA sense strand
acccaaagcuguaccuuga

SEQ ID NO: 1114776 - RNA, 19 nt, Homo sapiens
  misc_RNA (1)...(19): siRNA sense strand
gaugagagcagcugugaca

SEQ ID NO: 1114777 - RNA, 19 nt, Homo sapiens
  misc_RNA (1)...(19): siRNA sense strand
ccagauacccaaagcugua

SEQ ID NO: 1114778 - RNA, 19 nt, Homo sapiens
  misc_RNA (1)...(19): siRNA sense strand
ccaagaaggagauugaaga

SEQ ID NO: 1114779 - RNA, 19 nt, Homo sapiens
  misc_RNA (1)...(19): siRNA sense strand
gccagcaucucuuucaugu

SEQ ID NO: 1114780 - RNA, 19 nt, Homo sapiens
  misc_RNA (1)...(19): siRNA sense strand
cauggaagcuuuggaaugg

SEQ ID NO: 1114781 - RNA, 19 nt, Homo sapiens
  misc_RNA (1)...(19): siRNA sense strand
gcagauccgugugguagau

SEQ ID NO: 1114782 - RNA, 19 nt, Homo sapiens
  misc_RNA (1)...(19): siRNA sense strand
ccacuaugcuguacaucug

SEQ ID NO: 1114783 - RNA, 19 nt, Homo sapiens
  misc_RNA (1)...(19): siRNA sense strand
ggaccacuaugcuguacau

SEQ ID NO: 1114784 - RNA, 19 nt, Homo sapiens
  misc_RNA (1)...(19): siRNA sense strand
gcucuagcauggacacuuc

SEQ ID NO: 1114785 - RNA, 19 nt, Homo sapiens
  misc_RNA (1)...(19): siRNA sense strand
ggacaaggaggaacugaca

SEQ ID NO: 1114786 - RNA, 19 nt, Homo sapiens
  misc_RNA (1)...(19): siRNA sense strand
caagaaggagauugaagaa

SEQ ID NO: 1114787 - RNA, 19 nt, Homo sapiens
  misc_RNA (1)...(19): siRNA sense strand
gcugccaaguguucuguaa

SEQ ID NO: 1114788 - RNA, 19 nt, Homo sapiens
  misc_RNA (1)...(19): siRNA sense strand
cguccucucuugccucuuu

SEQ ID NO: 1114789 - RNA, 19 nt, Homo sapiens
  misc_RNA (1)...(19): siRNA sense strand
gugcugcccuuccagagaa

SEQ ID NO: 1114790 - RNA, 19 nt, Homo sapiens
  misc_RNA (1)...(19): siRNA sense strand
ggugaccgcuacugguuug

SEQ ID NO: 1114791 - RNA, 19 nt, Homo sapiens
  misc_RNA (1)...(19): siRNA sense strand
ggacggcagcgccaucuau

SEQ ID NO: 1114792 - RNA, 19 nt, Homo sapiens
  misc_RNA (1)...(19): siRNA sense strand
ucacuucucccaccauuau

SEQ ID NO: 1114793 - RNA, 19 nt, Homo sapiens
  misc_RNA (1)...(19): siRNA sense strand
gaccuggugcugcuguuua

SEQ ID NO: 1114794 - RNA, 19 nt, Homo sapiens
  misc_RNA (1)...(19): siRNA sense strand
ggacuuauccuggcuagag

SEQ ID NO: 1114795 - RNA, 19 nt, Homo sapiens
  misc_RNA (1)...(19): siRNA sense strand
ggucaucaaucggaacuca

SEQ ID NO: 1114796 - RNA, 19 nt, Homo sapiens
  misc_RNA (1)...(19): siRNA sense strand
aaucggaacucaagugucu

SEQ ID NO: 1114797 - RNA, 19 nt, Homo sapiens
  misc_RNA (1)...(19): siRNA sense strand
gauccuggccaucauguau

SEQ ID NO: 1114798 - RNA, 19 nt, Homo sapiens
  misc_RNA (1)...(19): siRNA sense strand
gagauucggcggagguuug

SEQ ID NO: 1114799 - RNA, 19 nt, Homo sapiens
  misc_RNA (1)...(19): siRNA sense strand
gcuggucgcuguuaucaac

SEQ ID NO: 1114800 - RNA, 19 nt, Homo sapiens
  misc_RNA (1)...(19): siRNA sense strand
gagaaaccgcacaguguug

SEQ ID NO: 1114801 - RNA, 19 nt, Homo sapiens
  misc_RNA (1)...(19): siRNA sense strand
gccauguggugaaugugua

SEQ ID NO: 1114802 - RNA, 19 nt, Homo sapiens
  misc_RNA (1)...(19): siRNA sense strand
guacgacuuugaugggaau

SEQ ID NO: 1114803 - RNA, 19 nt, Homo sapiens
  misc_RNA (1)...(19): siRNA sense strand
gcauggaagcuuuggaaug

SEQ ID NO: 1114804 - RNA, 19 nt, Homo sapiens
  misc_RNA (1)...(19): siRNA sense strand
gcgagaggaccauguguug

SEQ ID NO: 1114805 - RNA, 19 nt, Homo sapiens
  misc_RNA (1)...(19): siRNA sense strand
cagcaucuccucagaguuc

SEQ ID NO: 1114806 - RNA, 19 nt, Homo sapiens
  misc_RNA (1)...(19): siRNA sense strand
ucaucgagaucuccaacaa

SEQ ID NO: 1114807 - RNA, 19 nt, Homo sapiens
  misc_RNA (1)...(19): siRNA sense strand
gcacaucacacgggcauca

SEQ ID NO: 1114808 - RNA, 19 nt, Homo sapiens
  misc_RNA (1)...(19): siRNA sense strand
gagagguggaggagaauga

SEQ ID NO: 1114809 - RNA, 19 nt, Homo sapiens
  misc_RNA (1)...(19): siRNA sense strand
uugaagaugugcgggauuu

SEQ ID NO: 1114810 - RNA, 19 nt, Homo sapiens
  misc_RNA (1)...(19): siRNA sense strand
gcauaaguuugagguguca

SEQ ID NO: 1114811 - RNA, 19 nt, Homo sapiens
  misc_RNA (1)...(19): siRNA sense strand
cgugggaggugcagcgauu

SEQ ID NO: 1114812 - RNA, 19 nt, Homo sapiens
  misc_RNA (1)...(19): siRNA sense strand
gcagccagcaucucuuuca

SEQ ID NO: 1114813 - RNA, 19 nt, Homo sapiens
  misc_RNA (1)...(19): siRNA sense strand
ccggagcaaugacacugua

SEQ ID NO: 1114814 - RNA, 19 nt, Homo sapiens
  misc_RNA (1)...(19): siRNA sense strand
ugccaaguguucuguaaga

SEQ ID NO: 1114815 - RNA, 19 nt, Homo sapiens
  misc_RNA (1)...(19): siRNA sense strand
cggcgagccuccuacauca

SEQ ID NO: 1114816 - RNA, 19 nt, Homo sapiens
  misc_RNA (1)...(19): siRNA sense strand
ucacgcagcucugugucaa

SEQ ID NO: 1114817 - RNA, 19 nt, Homo sapiens
  misc_RNA (1)...(19): siRNA sense strand
gcaccaucguccuugaaca

SEQ ID NO: 1114818 - RNA, 19 nt, Homo sapiens
  misc_RNA (1)...(19): siRNA sense strand
gaccgcuacugguuugaga

SEQ ID NO: 1114819 - RNA, 19 nt, Homo sapiens
  misc_RNA (1)...(19): siRNA sense strand
ccuacaaagugcugaagau

SEQ ID NO: 1114820 - RNA, 19 nt, Homo sapiens
  misc_RNA (1)...(19): siRNA sense strand
caccaggaguggcauaagu

SEQ ID NO: 1114821 - RNA, 19 nt, Homo sapiens
  misc_RNA (1)...(19): siRNA sense strand
cagcagccagcaucucuuu

SEQ ID NO: 1114822 - RNA, 19 nt, Homo sapiens
  misc_RNA (1)...(19): siRNA sense strand
cagcugcccuguacaacca

SEQ ID NO: 1114823 - RNA, 19 nt, Homo sapiens
  misc_RNA (1)...(19): siRNA sense strand
ugagaaaccgcacaguguu

SEQ ID NO: 1114824 - RNA, 19 nt, Homo sapiens
  misc_RNA (1)...(19): siRNA sense strand
ccaucguccuugaacaauu

SEQ ID NO: 1114825 - RNA, 19 nt, Homo sapiens
  misc_RNA (1)...(19): siRNA sense strand
gagcacccaagccuacaaa

SEQ ID NO: 1114826 - RNA, 19 nt, Homo sapiens
  misc_RNA (1)...(19): siRNA sense strand
uccgagagguggaggagaa

SEQ ID NO: 1114827 - RNA, 19 nt, Homo sapiens
  misc_RNA (1)...(19): siRNA sense strand
ggugacagaugugccagau

SEQ ID NO: 1114828 - RNA, 19 nt, Homo sapiens
  misc_RNA (1)...(19): siRNA sense strand
gcgagaaaccuuccucaac

SEQ ID NO: 1114829 - RNA, 19 nt, Homo sapiens
  misc_RNA (1)...(19): siRNA sense strand
cggcggagguuuggcaaga

SEQ ID NO: 1114830 - RNA, 19 nt, Homo sapiens
  misc_RNA (1)...(19): siRNA sense strand
ggguggaggugccugaagu

SEQ ID NO: 1114831 - RNA, 19 nt, Homo sapiens
  misc_RNA (1)...(19): siRNA sense strand
ugggaggcauggaagcuuu

SEQ ID NO: 1114832 - RNA, 19 nt, Homo sapiens
  misc_RNA (1)...(19): siRNA sense strand
gcacccaagccuacaaagu

SEQ ID NO: 1114833 - RNA, 19 nt, Homo sapiens
  misc_RNA (1)...(19): siRNA sense strand
cacccaagccuacaaagug

SEQ ID NO: 1114834 - RNA, 19 nt, Homo sapiens
  misc_RNA (1)...(19): siRNA sense strand
ccaggaguggcauaaguuu

SEQ ID NO: 1114835 - RNA, 19 nt, Homo sapiens
  misc_RNA (1)...(19): siRNA sense strand
gaagaugugcgggauuucu

SEQ ID NO: 1114836 - RNA, 19 nt, Homo sapiens
  misc_RNA (1)...(19): siRNA sense strand
gccgcaaccucaucaccuu

SEQ ID NO: 1114837 - RNA, 19 nt, Homo sapiens
  misc_RNA (1)...(19): siRNA sense strand
ugagauccuucaucgagau

SEQ ID NO: 1114838 - RNA, 19 nt, Homo sapiens
  misc_RNA (1)...(19): siRNA sense strand
gcucagugccuggauuguu

SEQ ID NO: 1114839 - RNA, 19 nt, Homo sapiens
  misc_RNA (1)...(19): siRNA sense strand
caucguccucacagucuua

SEQ ID NO: 1114840 - RNA, 19 nt, Homo sapiens
  misc_RNA (1)...(19): siRNA sense strand
ugccugaagucaucaagga

SEQ ID NO: 1114841 - RNA, 19 nt, Homo sapiens
  misc_RNA (1)...(19): siRNA sense strand
cgccuuauguuccgcaugu

SEQ ID NO: 1114842 - RNA, 19 nt, Homo sapiens
  misc_RNA (1)...(19): siRNA sense strand
cucagugccuggauuguug

SEQ ID NO: 1114843 - RNA, 19 nt, Homo sapiens
  misc_RNA (1)...(19): siRNA sense strand
ccagaacaucgcuguguau

SEQ ID NO: 1114844 - RNA, 19 nt, Homo sapiens
  misc_RNA (1)...(19): siRNA sense strand
guggcuggcugacaucauc

SEQ ID NO: 1114845 - RNA, 19 nt, Homo sapiens
  misc_RNA (1)...(19): siRNA sense strand
gaggugcagcgauuugaug

SEQ ID NO: 1114846 - RNA, 19 nt, Homo sapiens
  misc_RNA (1)...(19): siRNA sense strand
ggccaucauguaugucuuu

SEQ ID NO: 1114847 - RNA, 19 nt, Homo sapiens
  misc_RNA (1)...(19): siRNA sense strand
ccucuuuccuggccucuuc

SEQ ID NO: 1114848 - RNA, 19 nt, Homo sapiens
  misc_RNA (1)...(19): siRNA sense strand
cgacauugagacugaguug

SEQ ID NO: 1114849 - RNA, 19 nt, Homo sapiens
  misc_RNA (1)...(19): siRNA sense strand
gaccuuagcaacaccaucu

SEQ ID NO: 1114850 - RNA, 19 nt, Homo sapiens
  misc_RNA (1)...(19): siRNA sense strand
ggcaggcgcugguggaaaa

SEQ ID NO: 1114851 - RNA, 19 nt, Homo sapiens
  misc_RNA (1)...(19): siRNA sense strand
gcugagcagggccgaguuu

SEQ ID NO: 1114852 - RNA, 19 nt, Homo sapiens
  misc_RNA (1)...(19): siRNA sense strand
gcaagaagguaacgucauu

SEQ ID NO: 1114853 - RNA, 19 nt, Homo sapiens
  misc_RNA (1)...(19): siRNA sense strand
gaacugacaugggaagauu

SEQ ID NO: 1114854 - RNA, 19 nt, Homo sapiens
  misc_RNA (1)...(19): siRNA sense strand
ggaaugggcuguucuccaa

SEQ ID NO: 1114855 - RNA, 19 nt, Homo sapiens
  misc_RNA (1)...(19): siRNA sense strand
gaacaucgcuguguaugag

SEQ ID NO: 1114856 - RNA, 19 nt, Homo sapiens
  misc_RNA (1)...(19): siRNA sense strand
ggacuuccaucgccucauu

SEQ ID NO: 1114857 - RNA, 19 nt, Homo sapiens
  misc_RNA (1)...(19): siRNA sense strand
gaagaaauccgaaauacca

SEQ ID NO: 1114858 - RNA, 19 nt, Homo sapiens
  misc_RNA (1)...(19): siRNA sense strand
gcagcgacauugagacuga

SEQ ID NO: 1114859 - RNA, 19 nt, Homo sapiens
  misc_RNA (1)...(19): siRNA sense strand
cagcaucucuuucauguuc

SEQ ID NO: 1114860 - RNA, 19 nt, Homo sapiens
  misc_RNA (1)...(19): siRNA sense strand
agaaggagauugaagaaau

SEQ ID NO: 1114861 - RNA, 19 nt, Homo sapiens
  misc_RNA (1)...(19): siRNA sense strand
caucauccaugguagcuuu

SEQ ID NO: 1114862 - RNA, 19 nt, Homo sapiens
  misc_RNA (1)...(19): siRNA sense strand
ggaagaagguggagaucag

SEQ ID NO: 1114863 - RNA, 19 nt, Homo sapiens
  misc_RNA (1)...(19): siRNA sense strand
caucguccuugaacaauuu

SEQ ID NO: 1114864 - RNA, 19 nt, Homo sapiens
  misc_RNA (1)...(19): siRNA sense strand
gcacucugcugcucaagau

SEQ ID NO: 1114865 - RNA, 19 nt, Homo sapiens
  misc_RNA (1)...(19): siRNA sense strand
ggaggugccugaagucauc

SEQ ID NO: 1114866 - RNA, 19 nt, Homo sapiens
  misc_RNA (1)...(19): siRNA sense strand
gaaccggagucuauucaca

SEQ ID NO: 1114867 - RNA, 19 nt, Homo sapiens
  misc_RNA (1)...(19): siRNA sense strand
gaggaaaagucucgccuua

SEQ ID NO: 1114868 - RNA, 19 nt, Homo sapiens
  misc_RNA (1)...(19): siRNA sense strand
ggaaaagucucgccuuaug

SEQ ID NO: 1114869 - RNA, 19 nt, Homo sapiens
  misc_RNA (1)...(19): siRNA sense strand
ugacagaugugccagauac

SEQ ID NO: 1114870 - RNA, 19 nt, Homo sapiens
  misc_RNA (1)...(19): siRNA sense strand
ggagagggccuacuacuac

SEQ ID NO: 1114871 - RNA, 19 nt, Homo sapiens
  misc_RNA (1)...(19): siRNA sense strand
acaaagugcugaagaugug

SEQ ID NO: 1114872 - RNA, 19 nt, Homo sapiens
  misc_RNA (1)...(19): siRNA sense strand
ggacccagcgucaguuuga

SEQ ID NO: 1114873 - RNA, 19 nt, Homo sapiens
  misc_RNA (1)...(19): siRNA sense strand
gcuaucacgugcuuucaga

SEQ ID NO: 1114874 - RNA, 19 nt, Homo sapiens
  misc_RNA (1)...(19): siRNA sense strand
ccaaagcuguaccuugaug

SEQ ID NO: 1114875 - RNA, 19 nt, Homo sapiens
  misc_RNA (1)...(19): siRNA sense strand
acccaaagcuguaccuuga

SEQ ID NO: 1114876 - RNA, 19 nt, Homo sapiens
  misc_RNA (1)...(19): siRNA sense strand
gaugagagcagcugugaca

SEQ ID NO: 1114877 - RNA, 19 nt, Homo sapiens
  misc_RNA (1)...(19): siRNA sense strand
ccagauacccaaagcugua

SEQ ID NO: 1114878 - RNA, 19 nt, Homo sapiens
  misc_RNA (1)...(19): siRNA sense strand
ccaagaaggagauugaaga

SEQ ID NO: 1114879 - RNA, 19 nt, Homo sapiens
  misc_RNA (1)...(19): siRNA sense strand
gccagcaucucuuucaugu

SEQ ID NO: 1114880 - RNA, 19 nt, Homo sapiens
  misc_RNA (1)...(19): siRNA sense strand
cauggaagcuuuggaaugg

SEQ ID NO: 1114881 - RNA, 19 nt, Homo sapiens
  misc_RNA (1)...(19): siRNA sense strand
gcagauccgugugguagau

SEQ ID NO: 1114882 - RNA, 19 nt, Homo sapiens
  misc_RNA (1)...(19): siRNA sense strand
ccacuaugcuguacaucug

SEQ ID NO: 1114883 - RNA, 19 nt, Homo sapiens
  misc_RNA (1)...(19): siRNA sense strand
ggaccacuaugcuguacau

SEQ ID NO: 1114884 - RNA, 19 nt, Homo sapiens
  misc_RNA (1)...(19): siRNA sense strand
gcucuagcauggacacuuc

SEQ ID NO: 1114885 - RNA, 19 nt, Homo sapiens
  misc_RNA (1)...(19): siRNA sense strand
ggacaaggaggaacugaca

SEQ ID NO: 1114886 - RNA, 19 nt, Homo sapiens
  misc_RNA (1)...(19): siRNA sense strand
caagaaggagauugaagaa

SEQ ID NO: 1114887 - RNA, 19 nt, Homo sapiens
  misc_RNA (1)...(19): siRNA sense strand
gcugccaaguguucuguaa

SEQ ID NO: 1114888 - RNA, 19 nt, Homo sapiens
  misc_RNA (1)...(19): siRNA sense strand
cguccucucuugccucuuu

SEQ ID NO: 1114889 - RNA, 19 nt, Homo sapiens
  misc_RNA (1)...(19): siRNA sense strand
gugcugcccuuccagagaa

SEQ ID NO: 1114890 - RNA, 19 nt, Homo sapiens
  misc_RNA (1)...(19): siRNA sense strand
ggugaccgcuacugguuug

SEQ ID NO: 1114891 - RNA, 19 nt, Homo sapiens
  misc_RNA (1)...(19): siRNA sense strand
ggacggcagcgccaucuau

SEQ ID NO: 1114892 - RNA, 19 nt, Homo sapiens
  misc_RNA (1)...(19): siRNA sense strand
ucacuucucccaccauuau

SEQ ID NO: 1114893 - RNA, 19 nt, Homo sapiens
  misc_RNA (1)...(19): siRNA sense strand
gaccuggugcugcuguuua

SEQ ID NO: 1114894 - RNA, 19 nt, Homo sapiens
  misc_RNA (1)...(19): siRNA sense strand
ggacuuauccuggcuagag

SEQ ID NO: 1114895 - RNA, 19 nt, Homo sapiens
  misc_RNA (1)...(19): siRNA sense strand
ggucaucaaucggaacuca

SEQ ID NO: 1114896 - RNA, 19 nt, Homo sapiens
  misc_RNA (1)...(19): siRNA sense strand
aaucggaacucaagugucu

SEQ ID NO: 1114897 - RNA, 19 nt, Homo sapiens
  misc_RNA (1)...(19): siRNA sense strand
gauccuggccaucauguau

SEQ ID NO: 1114898 - RNA, 19 nt, Homo sapiens
  misc_RNA (1)...(19): siRNA sense strand
gagauucggcggagguuug

SEQ ID NO: 1114899 - RNA, 19 nt, Homo sapiens
  misc_RNA (1)...(19): siRNA sense strand
gcuggucgcuguuaucaac

SEQ ID NO: 1114900 - RNA, 19 nt, Homo sapiens
  misc_RNA (1)...(19): siRNA sense strand
gagaaaccgcacaguguug

SEQ ID NO: 1114901 - RNA, 19 nt, Homo sapiens
  misc_RNA (1)...(19): siRNA sense strand
gccauguggugaaugugua

SEQ ID NO: 1114902 - RNA, 19 nt, Homo sapiens
  misc_RNA (1)...(19): siRNA sense strand
guacgacuuugaugggaau

SEQ ID NO: 1114903 - RNA, 19 nt, Homo sapiens
  misc_RNA (1)...(19): siRNA sense strand
gcauggaagcuuuggaaug

SEQ ID NO: 1114904 - RNA, 19 nt, Homo sapiens
  misc_RNA (1)...(19): siRNA sense strand
gcgagaggaccauguguug

SEQ ID NO: 1114905 - RNA, 19 nt, Homo sapiens
  misc_RNA (1)...(19): siRNA sense strand
cagcaucuccucagaguuc

SEQ ID NO: 1114906 - RNA, 19 nt, Homo sapiens
  misc_RNA (1)...(19): siRNA sense strand
ucaucgagaucuccaacaa

SEQ ID NO: 1114907 - RNA, 19 nt, Homo sapiens
  misc_RNA (1)...(19): siRNA sense strand
gcacaucacacgggcauca

SEQ ID NO: 1114908 - RNA, 19 nt, Homo sapiens
  misc_RNA (1)...(19): siRNA sense strand
gagagguggaggagaauga

SEQ ID NO: 1114909 - RNA, 19 nt, Homo sapiens
  misc_RNA (1)...(19): siRNA sense strand
uugaagaugugcgggauuu

SEQ ID NO: 1114910 - RNA, 19 nt, Homo sapiens
  misc_RNA (1)...(19): siRNA sense strand
gcauaaguuugagguguca

SEQ ID NO: 1114911 - RNA, 19 nt, Homo sapiens
  misc_RNA (1)...(19): siRNA sense strand
cgugggaggugcagcgauu

SEQ ID NO: 1114912 - RNA, 19 nt, Homo sapiens
  misc_RNA (1)...(19): siRNA sense strand
gcagccagcaucucuuuca

SEQ ID NO: 1114913 - RNA, 19 nt, Homo sapiens
  misc_RNA (1)...(19): siRNA sense strand
ccggagcaaugacacugua

SEQ ID NO: 1114914 - RNA, 19 nt, Homo sapiens
  misc_RNA (1)...(19): siRNA sense strand
ugccaaguguucuguaaga

SEQ ID NO: 1114915 - RNA, 19 nt, Homo sapiens
  misc_RNA (1)...(19): siRNA sense strand
cggcgagccuccuacauca

SEQ ID NO: 1114916 - RNA, 19 nt, Homo sapiens
  misc_RNA (1)...(19): siRNA sense strand
ucacgcagcucugugucaa

SEQ ID NO: 1114917 - RNA, 19 nt, Homo sapiens
  misc_RNA (1)...(19): siRNA sense strand
gcaccaucguccuugaaca

SEQ ID NO: 1114918 - RNA, 19 nt, Homo sapiens
  misc_RNA (1)...(19): siRNA sense strand
gaccgcuacugguuugaga

SEQ ID NO: 1114919 - RNA, 19 nt, Homo sapiens
  misc_RNA (1)...(19): siRNA sense strand
ccuacaaagugcugaagau

SEQ ID NO: 1114920 - RNA, 19 nt, Homo sapiens
  misc_RNA (1)...(19): siRNA sense strand
caccaggaguggcauaagu

SEQ ID NO: 1114921 - RNA, 19 nt, Homo sapiens
  misc_RNA (1)...(19): siRNA sense strand
cagcagccagcaucucuuu

SEQ ID NO: 1114922 - RNA, 19 nt, Homo sapiens
  misc_RNA (1)...(19): siRNA sense strand
cagcugcccuguacaacca

SEQ ID NO: 1114923 - RNA, 19 nt, Homo sapiens
  misc_RNA (1)...(19): siRNA sense strand
ugagaaaccgcacaguguu

SEQ ID NO: 1114924 - RNA, 19 nt, Homo sapiens
  misc_RNA (1)...(19): siRNA sense strand
ccaucguccuugaacaauu

SEQ ID NO: 1114925 - RNA, 19 nt, Homo sapiens
  misc_RNA (1)...(19): siRNA sense strand
gagcacccaagccuacaaa

SEQ ID NO: 1114926 - RNA, 19 nt, Homo sapiens
  misc_RNA (1)...(19): siRNA sense strand
uccgagagguggaggagaa

SEQ ID NO: 1114927 - RNA, 19 nt, Homo sapiens
  misc_RNA (1)...(19): siRNA sense strand
ggugacagaugugccagau

SEQ ID NO: 1114928 - RNA, 19 nt, Homo sapiens
  misc_RNA (1)...(19): siRNA sense strand
gcgagaaaccuuccucaac

SEQ ID NO: 1114929 - RNA, 19 nt, Homo sapiens
  misc_RNA (1)...(19): siRNA sense strand
cggcggagguuuggcaaga

SEQ ID NO: 1114930 - RNA, 19 nt, Homo sapiens
  misc_RNA (1)...(19): siRNA sense strand
ggguggaggugccugaagu

SEQ ID NO: 1114931 - RNA, 19 nt, Homo sapiens
  misc_RNA (1)...(19): siRNA sense strand
ugggaggcauggaagcuuu

SEQ ID NO: 1114932 - RNA, 19 nt, Homo sapiens
  misc_RNA (1)...(19): siRNA sense strand
gcacccaagccuacaaagu

SEQ ID NO: 1114933 - RNA, 19 nt, Homo sapiens
  misc_RNA (1)...(19): siRNA sense strand
cacccaagccuacaaagug

SEQ ID NO: 1114934 - RNA, 19 nt, Homo sapiens
  misc_RNA (1)...(19): siRNA sense strand
ccaggaguggcauaaguuu

SEQ ID NO: 1114935 - RNA, 19 nt, Homo sapiens
  misc_RNA (1)...(19): siRNA sense strand
gaagaugugcgggauuucu

SEQ ID NO: 1114936 - RNA, 19 nt, Homo sapiens
  misc_RNA (1)...(19): siRNA sense strand
gccgcaaccucaucaccuu

SEQ ID NO: 1114937 - RNA, 19 nt, Homo sapiens
  misc_RNA (1)...(19): siRNA sense strand
ugagauccuucaucgagau

SEQ ID NO: 1114938 - RNA, 19 nt, Homo sapiens
  misc_RNA (1)...(19): siRNA sense strand
gcucagugccuggauuguu

SEQ ID NO: 1114939 - RNA, 19 nt, Homo sapiens
  misc_RNA (1)...(19): siRNA sense strand
caucguccucacagucuua

SEQ ID NO: 1114940 - RNA, 19 nt, Homo sapiens
  misc_RNA (1)...(19): siRNA sense strand
ugccugaagucaucaagga

SEQ ID NO: 1114941 - RNA, 19 nt, Homo sapiens
  misc_RNA (1)...(19): siRNA sense strand
cgccuuauguuccgcaugu

SEQ ID NO: 1114942 - RNA, 19 nt, Homo sapiens
  misc_RNA (1)...(19): siRNA sense strand
cucagugccuggauuguug

SEQ ID NO: 1114943 - RNA, 19 nt, Homo sapiens
  misc_RNA (1)...(19): siRNA sense strand
ccagaacaucgcuguguau

SEQ ID NO: 1114944 - RNA, 19 nt, Homo sapiens
  misc_RNA (1)...(19): siRNA sense strand
guggcuggcugacaucauc

SEQ ID NO: 1114945 - RNA, 19 nt, Homo sapiens
  misc_RNA (1)...(19): siRNA sense strand
gaggugcagcgauuugaug

SEQ ID NO: 1114946 - RNA, 19 nt, Homo sapiens
  misc_RNA (1)...(19): siRNA sense strand
ggccaucauguaugucuuu

SEQ ID NO: 1114947 - RNA, 19 nt, Homo sapiens
  misc_RNA (1)...(19): siRNA sense strand
ccucuuuccuggccucuuc

SEQ ID NO: 1114948 - RNA, 19 nt, Homo sapiens
  misc_RNA (1)...(19): siRNA sense strand
cgacauugagacugaguug

SEQ ID NO: 1114949 - RNA, 19 nt, Homo sapiens
  misc_RNA (1)...(19): siRNA sense strand
gaccuuagcaacaccaucu

SEQ ID NO: 1114950 - RNA, 19 nt, Homo sapiens
  misc_RNA (1)...(19): siRNA sense strand
ggcaggcgcugguggaaaa

SEQ ID NO: 1114951 - RNA, 19 nt, Homo sapiens
  misc_RNA (1)...(19): siRNA sense strand
gcugagcagggccgaguuu

SEQ ID NO: 1114952 - RNA, 19 nt, Homo sapiens
  misc_RNA (1)...(19): siRNA sense strand
ugaaagaguuccucacaua

SEQ ID NO: 1114953 - RNA, 19 nt, Homo sapiens
  misc_RNA (1)...(19): siRNA sense strand
ggaaagcccuucgaaguuu

SEQ ID NO: 1114954 - RNA, 19 nt, Homo sapiens
  misc_RNA (1)...(19): siRNA sense strand
ccaccaagaugucgugaga

SEQ ID NO: 1114955 - RNA, 19 nt, Homo sapiens
  misc_RNA (1)...(19): siRNA sense strand
uaaacacgguaaacagauu

SEQ ID NO: 1114956 - RNA, 19 nt, Homo sapiens
  misc_RNA (1)...(19): siRNA sense strand
gcaguguugucucuuguga

SEQ ID NO: 1114957 - RNA, 19 nt, Homo sapiens
  misc_RNA (1)...(19): siRNA sense strand
gacagugacguccacauua

SEQ ID NO: 1114958 - RNA, 19 nt, Homo sapiens
  misc_RNA (1)...(19): siRNA sense strand
ggagagaagucggucuuuc

SEQ ID NO: 1114959 - RNA, 19 nt, Homo sapiens
  misc_RNA (1)...(19): siRNA sense strand
caugagguccuacacguua

SEQ ID NO: 1114960 - RNA, 19 nt, Homo sapiens
  misc_RNA (1)...(19): siRNA sense strand
gaauaaacacgguaaacag

SEQ ID NO: 1114961 - RNA, 19 nt, Homo sapiens
  misc_RNA (1)...(19): siRNA sense strand
gcuggacuguggucagauu

SEQ ID NO: 1114962 - RNA, 19 nt, Homo sapiens
  misc_RNA (1)...(19): siRNA sense strand
ucaaagcaguguugucucu

SEQ ID NO: 1114963 - RNA, 19 nt, Homo sapiens
  misc_RNA (1)...(19): siRNA sense strand
cgaugucucuugccugguu

SEQ ID NO: 1114964 - RNA, 19 nt, Homo sapiens
  misc_RNA (1)...(19): siRNA sense strand
ucugggaccugaauaaaca

SEQ ID NO: 1114965 - RNA, 19 nt, Homo sapiens
  misc_RNA (1)...(19): siRNA sense strand
ccaagaaaaugaaagaguu

SEQ ID NO: 1114966 - RNA, 19 nt, Homo sapiens
  misc_RNA (1)...(19): siRNA sense strand
gcaucugggaccugaauaa

SEQ ID NO: 1114967 - RNA, 19 nt, Homo sapiens
  misc_RNA (1)...(19): siRNA sense strand
gaaagaguuccucacauac

SEQ ID NO: 1114968 - RNA, 19 nt, Homo sapiens
  misc_RNA (1)...(19): siRNA sense strand
gaagcuagagggccaucaa

SEQ ID NO: 1114969 - RNA, 19 nt, Homo sapiens
  misc_RNA (1)...(19): siRNA sense strand
cuucgaaguuuccuaacaa

SEQ ID NO: 1114970 - RNA, 19 nt, Homo sapiens
  misc_RNA (1)...(19): siRNA sense strand
gggcuuugcugcacauuuu

SEQ ID NO: 1114971 - RNA, 19 nt, Homo sapiens
  misc_RNA (1)...(19): siRNA sense strand
aaagcaguguugucucuug

SEQ ID NO: 1114972 - RNA, 19 nt, Homo sapiens
  misc_RNA (1)...(19): siRNA sense strand
gcgaaaggcugaggucacu

SEQ ID NO: 1114973 - RNA, 19 nt, Homo sapiens
  misc_RNA (1)...(19): siRNA sense strand
caagaugucgugagagauc

SEQ ID NO: 1114974 - RNA, 19 nt, Homo sapiens
  misc_RNA (1)...(19): siRNA sense strand
cggaaagcccuucgaaguu

SEQ ID NO: 1114975 - RNA, 19 nt, Homo sapiens
  misc_RNA (1)...(19): siRNA sense strand
gaacugaaaacucccauug

SEQ ID NO: 1114976 - RNA, 19 nt, Homo sapiens
  misc_RNA (1)...(19): siRNA sense strand
acagugacguccacauuag

SEQ ID NO: 1114977 - RNA, 19 nt, Homo sapiens
  misc_RNA (1)...(19): siRNA sense strand
ugacagugacguccacauu

SEQ ID NO: 1114978 - RNA, 19 nt, Homo sapiens
  misc_RNA (1)...(19): siRNA sense strand
gaagucggucuuucuaugg

SEQ ID NO: 1114979 - RNA, 19 nt, Homo sapiens
  misc_RNA (1)...(19): siRNA sense strand
ugucacggcuucuuacgau

SEQ ID NO: 1114980 - RNA, 19 nt, Homo sapiens
  misc_RNA (1)...(19): siRNA sense strand
gagauggccacguccaguu

SEQ ID NO: 1114981 - RNA, 19 nt, Homo sapiens
  misc_RNA (1)...(19): siRNA sense strand
ggacuguggucagauuguc

SEQ ID NO: 1114982 - RNA, 19 nt, Homo sapiens
  misc_RNA (1)...(19): siRNA sense strand
gagcaguucaucccuaaag

SEQ ID NO: 1114983 - RNA, 19 nt, Homo sapiens
  misc_RNA (1)...(19): siRNA sense strand
gaaaacucccauugcauuu

SEQ ID NO: 1114984 - RNA, 19 nt, Homo sapiens
  misc_RNA (1)...(19): siRNA sense strand
gguaaacagauucaagugu

SEQ ID NO: 1114985 - RNA, 19 nt, Homo sapiens
  misc_RNA (1)...(19): siRNA sense strand
ugaauaaacacgguaaaca

SEQ ID NO: 1114986 - RNA, 19 nt, Homo sapiens
  misc_RNA (1)...(19): siRNA sense strand
aauaaacacgguaaacaga

SEQ ID NO: 1114987 - RNA, 19 nt, Homo sapiens
  misc_RNA (1)...(19): siRNA sense strand
accaagaugucgugagaga

SEQ ID NO: 1114988 - RNA, 19 nt, Homo sapiens
  misc_RNA (1)...(19): siRNA sense strand
auaccaaugugauuaugug

SEQ ID NO: 1114989 - RNA, 19 nt, Homo sapiens
  misc_RNA (1)...(19): siRNA sense strand
cccaguggcaguuugauuu

SEQ ID NO: 1114990 - RNA, 19 nt, Homo sapiens
  misc_RNA (1)...(19): siRNA sense strand
ccggaaagcccuucgaagu

SEQ ID NO: 1114991 - RNA, 19 nt, Homo sapiens
  misc_RNA (1)...(19): siRNA sense strand
aggagcaguucaucccuaa

SEQ ID NO: 1114992 - RNA, 19 nt, Homo sapiens
  misc_RNA (1)...(19): siRNA sense strand
caucaaagcaguguugucu

SEQ ID NO: 1114993 - RNA, 19 nt, Homo sapiens
  misc_RNA (1)...(19): siRNA sense strand
gauggcuccugguuugcuu

SEQ ID NO: 1114994 - RNA, 19 nt, Homo sapiens
  misc_RNA (1)...(19): siRNA sense strand
gcccuucgaaguuuccuaa

SEQ ID NO: 1114995 - RNA, 19 nt, Homo sapiens
  misc_RNA (1)...(19): siRNA sense strand
gaucugggcccuggaacug

SEQ ID NO: 1114996 - RNA, 19 nt, Homo sapiens
  misc_RNA (1)...(19): siRNA sense strand
caucugggaccugaauaaa

SEQ ID NO: 1114997 - RNA, 19 nt, Homo sapiens
  misc_RNA (1)...(19): siRNA sense strand
uacgauaccaaugugauua

SEQ ID NO: 1114998 - RNA, 19 nt, Homo sapiens
  misc_RNA (1)...(19): siRNA sense strand
gcaugagguccuacacguu

SEQ ID NO: 1114999 - RNA, 19 nt, Homo sapiens
  misc_RNA (1)...(19): siRNA sense strand
ccaagugcccgaugucucu

SEQ ID NO: 1115000 - RNA, 19 nt, Homo sapiens
  misc_RNA (1)...(19): siRNA sense strand
ccauugcauuugcuccuau

SEQ ID NO: 1115001 - RNA, 19 nt, Homo sapiens
  misc_RNA (1)...(19): siRNA sense strand
gacacugcaucgucaaacu

SEQ ID NO: 1115002 - RNA, 19 nt, Homo sapiens
  misc_RNA (1)...(19): siRNA sense strand
aaagaguuccucacauaca

SEQ ID NO: 1115003 - RNA, 19 nt, Homo sapiens
  misc_RNA (1)...(19): siRNA sense strand
ggccaucaaagcaguguug

SEQ ID NO: 1115004 - RNA, 19 nt, Homo sapiens
  misc_RNA (1)...(19): siRNA sense strand
aaacucccauugcauuugc

SEQ ID NO: 1115005 - RNA, 19 nt, Homo sapiens
  misc_RNA (1)...(19): siRNA sense strand
gauaccaaugugauuaugu

SEQ ID NO: 1115006 - RNA, 19 nt, Homo sapiens
  misc_RNA (1)...(19): siRNA sense strand
cgauaccaaugugauuaug

SEQ ID NO: 1115007 - RNA, 19 nt, Homo sapiens
  misc_RNA (1)...(19): siRNA sense strand
uguugucucuugugacuuc

SEQ ID NO: 1115008 - RNA, 19 nt, Homo sapiens
  misc_RNA (1)...(19): siRNA sense strand
ugagagaucugagcuucac

SEQ ID NO: 1115009 - RNA, 19 nt, Homo sapiens
  misc_RNA (1)...(19): siRNA sense strand
gaagcacuuaugccggaaa

SEQ ID NO: 1115010 - RNA, 19 nt, Homo sapiens
  misc_RNA (1)...(19): siRNA sense strand
uguccucacugaagcacuu

SEQ ID NO: 1115011 - RNA, 19 nt, Homo sapiens
  misc_RNA (1)...(19): siRNA sense strand
ugaaaacucccauugcauu

SEQ ID NO: 1115012 - RNA, 19 nt, Homo sapiens
  misc_RNA (1)...(19): siRNA sense strand
cuagagggccaucaaagca

SEQ ID NO: 1115013 - RNA, 19 nt, Homo sapiens
  misc_RNA (1)...(19): siRNA sense strand
gucuuucuauggagcauga

SEQ ID NO: 1115014 - RNA, 19 nt, Homo sapiens
  misc_RNA (1)...(19): siRNA sense strand
gucacggcuucuuacgaua

SEQ ID NO: 1115015 - RNA, 19 nt, Homo sapiens
  misc_RNA (1)...(19): siRNA sense strand
uuacgauaccaaugugauu

SEQ ID NO: 1115016 - RNA, 19 nt, Homo sapiens
  misc_RNA (1)...(19): siRNA sense strand
aaugaaagaguuccucaca

SEQ ID NO: 1115017 - RNA, 19 nt, Homo sapiens
  misc_RNA (1)...(19): siRNA sense strand
gaaucuuuccggccaccaa

SEQ ID NO: 1115018 - RNA, 19 nt, Homo sapiens
  misc_RNA (1)...(19): siRNA sense strand
ucugggcccuggaacugaa

SEQ ID NO: 1115019 - RNA, 19 nt, Homo sapiens
  misc_RNA (1)...(19): siRNA sense strand
aagcaguguugucucuugu

SEQ ID NO: 1115020 - RNA, 19 nt, Homo sapiens
  misc_RNA (1)...(19): siRNA sense strand
cacguuaauucggaagcua

SEQ ID NO: 1115021 - RNA, 19 nt, Homo sapiens
  misc_RNA (1)...(19): siRNA sense strand
guuuacugcuguuccaucu

SEQ ID NO: 1115022 - RNA, 19 nt, Homo sapiens
  misc_RNA (1)...(19): siRNA sense strand
ccuucgaaguuuccuaaca

SEQ ID NO: 1115023 - RNA, 19 nt, Homo sapiens
  misc_RNA (1)...(19): siRNA sense strand
gccaaaagccgaaguagca

SEQ ID NO: 1115024 - RNA, 19 nt, Homo sapiens
  misc_RNA (1)...(19): siRNA sense strand
uauggagcaugagguccua

SEQ ID NO: 1115025 - RNA, 19 nt, Homo sapiens
  misc_RNA (1)...(19): siRNA sense strand
gaagccaaaagccgaagua

SEQ ID NO: 1115026 - RNA, 19 nt, Homo sapiens
  misc_RNA (1)...(19): siRNA sense strand
gcuagagggccaucaaagc

SEQ ID NO: 1115027 - RNA, 19 nt, Homo sapiens
  misc_RNA (1)...(19): siRNA sense strand
gaagagcccugaggagauc

SEQ ID NO: 1115028 - RNA, 19 nt, Homo sapiens
  misc_RNA (1)...(19): siRNA sense strand
gaagaaaguggaccugucu

SEQ ID NO: 1115029 - RNA, 19 nt, Homo sapiens
  misc_RNA (1)...(19): siRNA sense strand
cauugaaccuggccacauc

SEQ ID NO: 1115030 - RNA, 19 nt, Homo sapiens
  misc_RNA (1)...(19): siRNA sense strand
gaaaguggaccugucuaag

SEQ ID NO: 1115031 - RNA, 19 nt, Homo sapiens
  misc_RNA (1)...(19): siRNA sense strand
agaaaguggaccugucuaa

SEQ ID NO: 1115032 - RNA, 19 nt, Homo sapiens
  misc_RNA (1)...(19): siRNA sense strand
acgaggacaucaaggagaa

SEQ ID NO: 1115033 - RNA, 19 nt, Homo sapiens
  misc_RNA (1)...(19): siRNA sense strand
ccgagcauuucgcggagua

SEQ ID NO: 1115034 - RNA, 19 nt, Homo sapiens
  misc_RNA (1)...(19): siRNA sense strand
ucaaggagaaccuggaauc

SEQ ID NO: 1115035 - RNA, 19 nt, Homo sapiens
  misc_RNA (1)...(19): siRNA sense strand
agccagacgugcccaucua

SEQ ID NO: 1115036 - RNA, 19 nt, Homo sapiens
  misc_RNA (1)...(19): siRNA sense strand
caucaaggagaaccuggaa

SEQ ID NO: 1115037 - RNA, 19 nt, Homo sapiens
  misc_RNA (1)...(19): siRNA sense strand
ccugguaccugccgaagcu

SEQ ID NO: 1115038 - RNA, 19 nt, Homo sapiens
  misc_RNA (1)...(19): siRNA sense strand
agaagagcccugaggagau

SEQ ID NO: 1115039 - RNA, 19 nt, Homo sapiens
  misc_RNA (1)...(19): siRNA sense strand
gcauugaaccuggccacau

SEQ ID NO: 1115040 - RNA, 19 nt, Homo sapiens
  misc_RNA (1)...(19): siRNA sense strand
gaccuacgaggacaucaag

SEQ ID NO: 1115041 - RNA, 19 nt, Homo sapiens
  misc_RNA (1)...(19): siRNA sense strand
ggaaacagcucuacuccaa

SEQ ID NO: 1115042 - RNA, 19 nt, Homo sapiens
  misc_RNA (1)...(19): siRNA sense strand
gcucagaaauggauuaucu

SEQ ID NO: 1115043 - RNA, 19 nt, Homo sapiens
  misc_RNA (1)...(19): siRNA sense strand
ccacuucaauccagcaauu

SEQ ID NO: 1115044 - RNA, 19 nt, Homo sapiens
  misc_RNA (1)...(19): siRNA sense strand
agagaaaccuggacacaug

SEQ ID NO: 1115045 - RNA, 19 nt, Homo sapiens
  misc_RNA (1)...(19): siRNA sense strand
caacaacccugggaguuca

SEQ ID NO: 1115046 - RNA, 19 nt, Homo sapiens
  misc_RNA (1)...(19): siRNA sense strand
ucucacagcuuuacaccaa

SEQ ID NO: 1115047 - RNA, 19 nt, Homo sapiens
  misc_RNA (1)...(19): siRNA sense strand
gauccuguguugccuguug

SEQ ID NO: 1115048 - RNA, 19 nt, Homo sapiens
  misc_RNA (1)...(19): siRNA sense strand
aaacagcucuacuccaaca

SEQ ID NO: 1115049 - RNA, 19 nt, Homo sapiens
  misc_RNA (1)...(19): siRNA sense strand
cuuauuagcugcauacagu

SEQ ID NO: 1115050 - RNA, 19 nt, Homo sapiens
  misc_RNA (1)...(19): siRNA sense strand
gcaauuuccaccacuuuga

SEQ ID NO: 1115051 - RNA, 19 nt, Homo sapiens
  misc_RNA (1)...(19): siRNA sense strand
caaaugcagugaguucugu

SEQ ID NO: 1115052 - RNA, 19 nt, Homo sapiens
  misc_RNA (1)...(19): siRNA sense strand
agaacgggcugccaacaga

SEQ ID NO: 1115053 - RNA, 19 nt, Homo sapiens
  misc_RNA (1)...(19): siRNA sense strand
ggacugccucucaacauug

SEQ ID NO: 1115054 - RNA, 19 nt, Homo sapiens
  misc_RNA (1)...(19): siRNA sense strand
cuuauucggaguacuauua

SEQ ID NO: 1115055 - RNA, 19 nt, Homo sapiens
  misc_RNA (1)...(19): siRNA sense strand
gggcaucacuaucccucaa

SEQ ID NO: 1115056 - RNA, 19 nt, Homo sapiens
  misc_RNA (1)...(19): siRNA sense strand
cuggaucccucucaauuau

SEQ ID NO: 1115057 - RNA, 19 nt, Homo sapiens
  misc_RNA (1)...(19): siRNA sense strand
caacauuguggcucagaaa

SEQ ID NO: 1115058 - RNA, 19 nt, Homo sapiens
  misc_RNA (1)...(19): siRNA sense strand
acaaucaacuaagcccuuu

SEQ ID NO: 1115059 - RNA, 19 nt, Homo sapiens
  misc_RNA (1)...(19): siRNA sense strand
ggaucccucucaauuaucu

SEQ ID NO: 1115060 - RNA, 19 nt, Homo sapiens
  misc_RNA (1)...(19): siRNA sense strand
gucacaagaucauauccaa

SEQ ID NO: 1115061 - RNA, 19 nt, Homo sapiens
  misc_RNA (1)...(19): siRNA sense strand
uuuaacagguguccuagug

SEQ ID NO: 1115062 - RNA, 19 nt, Homo sapiens
  misc_RNA (1)...(19): siRNA sense strand
ucacugugcuggagcucuu

SEQ ID NO: 1115063 - RNA, 19 nt, Homo sapiens
  misc_RNA (1)...(19): siRNA sense strand
caccaaagggcaucacuau

SEQ ID NO: 1115064 - RNA, 19 nt, Homo sapiens
  misc_RNA (1)...(19): siRNA sense strand
gaacgggcugccaacagaa

SEQ ID NO: 1115065 - RNA, 19 nt, Homo sapiens
  misc_RNA (1)...(19): siRNA sense strand
ggaaaacaaucaacuaagc

SEQ ID NO: 1115066 - RNA, 19 nt, Homo sapiens
  misc_RNA (1)...(19): siRNA sense strand
ucucaauuaucucuggaaa

SEQ ID NO: 1115067 - RNA, 19 nt, Homo sapiens
  misc_RNA (1)...(19): siRNA sense strand
uguguugccuguugauuuc

SEQ ID NO: 1115068 - RNA, 19 nt, Homo sapiens
  misc_RNA (1)...(19): siRNA sense strand
cacaagaucauauccaaca

SEQ ID NO: 1115069 - RNA, 19 nt, Homo sapiens
  misc_RNA (1)...(19): siRNA sense strand
ccaaagggcaucacuaucc

SEQ ID NO: 1115070 - RNA, 19 nt, Homo sapiens
  misc_RNA (1)...(19): siRNA sense strand
ucacuaucccucaaagaga

SEQ ID NO: 1115071 - RNA, 19 nt, Homo sapiens
  misc_RNA (1)...(19): siRNA sense strand
gcaucacuaucccucaaag

SEQ ID NO: 1115072 - RNA, 19 nt, Homo sapiens
  misc_RNA (1)...(19): siRNA sense strand
ccagcaauuuccaccacuu

SEQ ID NO: 1115073 - RNA, 19 nt, Homo sapiens
  misc_RNA (1)...(19): siRNA sense strand
gagagaaaccuggacacau

SEQ ID NO: 1115074 - RNA, 19 nt, Homo sapiens
  misc_RNA (1)...(19): siRNA sense strand
aggacugccucucaacauu

SEQ ID NO: 1115075 - RNA, 19 nt, Homo sapiens
  misc_RNA (1)...(19): siRNA sense strand
ucaacauuguggcucagaa

SEQ ID NO: 1115076 - RNA, 19 nt, Homo sapiens
  misc_RNA (1)...(19): siRNA sense strand
cagcaauuuccaccacuuu

SEQ ID NO: 1115077 - RNA, 19 nt, Homo sapiens
  misc_RNA (1)...(19): siRNA sense strand
gagaaaccuggacacaugu

SEQ ID NO: 1115078 - RNA, 19 nt, Homo sapiens
  misc_RNA (1)...(19): siRNA sense strand
gacugccucucaacauugu

SEQ ID NO: 1115079 - RNA, 19 nt, Homo sapiens
  misc_RNA (1)...(19): siRNA sense strand
acuggaucccucucaauua

SEQ ID NO: 1115080 - RNA, 19 nt, Homo sapiens
  misc_RNA (1)...(19): siRNA sense strand
caguuuaacagguguccua

SEQ ID NO: 1115081 - RNA, 19 nt, Homo sapiens
  misc_RNA (1)...(19): siRNA sense strand
ccaacaacccugggaguuc

SEQ ID NO: 1115082 - RNA, 19 nt, Homo sapiens
  misc_RNA (1)...(19): siRNA sense strand
ugugcuggagcucuuauua

SEQ ID NO: 1115083 - RNA, 19 nt, Homo sapiens
  misc_RNA (1)...(19): siRNA sense strand
gcucuguguuuuggcauua

SEQ ID NO: 1115084 - RNA, 19 nt, Homo sapiens
  misc_RNA (1)...(19): siRNA sense strand
ucaauuaucucuggaaaac

SEQ ID NO: 1115085 - RNA, 19 nt, Homo sapiens
  misc_RNA (1)...(19): siRNA sense strand
uucacggucuuggauauaa

SEQ ID NO: 1115086 - RNA, 19 nt, Homo sapiens
  misc_RNA (1)...(19): siRNA sense strand
ccaccguucuugggacugu

SEQ ID NO: 1115087 - RNA, 19 nt, Homo sapiens
  misc_RNA (1)...(19): siRNA sense strand
uacuggaucccucucaauu

SEQ ID NO: 1115088 - RNA, 19 nt, Homo sapiens
  misc_RNA (1)...(19): siRNA sense strand
caauuuccaccacuuugau

SEQ ID NO: 1115089 - RNA, 19 nt, Homo sapiens
  misc_RNA (1)...(19): siRNA sense strand
gguggaaacagcucuacuc

SEQ ID NO: 1115090 - RNA, 19 nt, Homo sapiens
  misc_RNA (1)...(19): siRNA sense strand
acaccaaagggcaucacua

SEQ ID NO: 1115091 - RNA, 19 nt, Homo sapiens
  misc_RNA (1)...(19): siRNA sense strand
ggacacauguaccaaaacg

SEQ ID NO: 1115092 - RNA, 19 nt, Homo sapiens
  misc_RNA (1)...(19): siRNA sense strand
ucggaguacuauuauccaa

SEQ ID NO: 1115093 - RNA, 19 nt, Homo sapiens
  misc_RNA (1)...(19): siRNA sense strand
gaugagaacaagauaauug

SEQ ID NO: 1115094 - RNA, 19 nt, Homo sapiens
  misc_RNA (1)...(19): siRNA sense strand
cagaaggccuauccuagaa

SEQ ID NO: 1115095 - RNA, 19 nt, Homo sapiens
  misc_RNA (1)...(19): siRNA sense strand
acaccaaccugugcaagua

SEQ ID NO: 1115096 - RNA, 19 nt, Homo sapiens
  misc_RNA (1)...(19): siRNA sense strand
gaagcuggauugaggaaac

SEQ ID NO: 1115097 - RNA, 19 nt, Homo sapiens
  misc_RNA (1)...(19): siRNA sense strand
ccagaaggccuauccuaga

SEQ ID NO: 1115098 - RNA, 19 nt, Homo sapiens
  misc_RNA (1)...(19): siRNA sense strand
gaggaugagaacaagauaa

SEQ ID NO: 1115099 - RNA, 19 nt, Homo sapiens
  misc_RNA (1)...(19): siRNA sense strand
gccaagaggaugagaacaa

SEQ ID NO: 1115100 - RNA, 19 nt, Homo sapiens
  misc_RNA (1)...(19): siRNA sense strand
gaaacgaugcgggacaaau

SEQ ID NO: 1115101 - RNA, 19 nt, Homo sapiens
  misc_RNA (1)...(19): siRNA sense strand
ccaagaggaugagaacaag

SEQ ID NO: 1115102 - RNA, 19 nt, Homo sapiens
  misc_RNA (1)...(19): siRNA sense strand
gauaauugguggccauacg

SEQ ID NO: 1115103 - RNA, 19 nt, Homo sapiens
  misc_RNA (1)...(19): siRNA sense strand
cggaugaggugugccagaa

SEQ ID NO: 1115104 - RNA, 19 nt, Homo sapiens
  misc_RNA (1)...(19): siRNA sense strand
aaacgaugcgggacaaaug

SEQ ID NO: 1115105 - RNA, 19 nt, Homo sapiens
  misc_RNA (1)...(19): siRNA sense strand
gcuauagccaugacacaga

SEQ ID NO: 1115106 - RNA, 19 nt, Homo sapiens
  misc_RNA (1)...(19): siRNA sense strand
cauggucugugcaggaguu

SEQ ID NO: 1115107 - RNA, 19 nt, Homo sapiens
  misc_RNA (1)...(19): siRNA sense strand
ggaugagaacaagauaauu

SEQ ID NO: 1115108 - RNA, 19 nt, Homo sapiens
  misc_RNA (1)...(19): siRNA sense strand
ccacgacaacgaccucaug

SEQ ID NO: 1115109 - RNA, 19 nt, Homo sapiens
  misc_RNA (1)...(19): siRNA sense strand
uccagggccucgugucuug

SEQ ID NO: 1115110 - RNA, 19 nt, Homo sapiens
  misc_RNA (1)...(19): siRNA sense strand
gcgggaaggacucuuguca

SEQ ID NO: 1115111 - RNA, 19 nt, Homo sapiens
  misc_RNA (1)...(19): siRNA sense strand
guacagaagcuggauugag

SEQ ID NO: 1115112 - RNA, 19 nt, Homo sapiens
  misc_RNA (1)...(19): siRNA sense strand
ugcaaugcgugaacaucaa

SEQ ID NO: 1115113 - RNA, 19 nt, Homo sapiens
  misc_RNA (1)...(19): siRNA sense strand
gcgugaacaucaacaucuc

SEQ ID NO: 1115114 - RNA, 19 nt, Homo sapiens
  misc_RNA (1)...(19): siRNA sense strand
ggaaacgaugcgggacaaa

SEQ ID NO: 1115115 - RNA, 19 nt, Homo sapiens
  misc_RNA (1)...(19): siRNA sense strand
gagccaagaggaugagaac

SEQ ID NO: 1115116 - RNA, 19 nt, Homo sapiens
  misc_RNA (1)...(19): siRNA sense strand
caagaggaugagaacaaga

SEQ ID NO: 1115117 - RNA, 19 nt, Homo sapiens
  misc_RNA (1)...(19): siRNA sense strand
caaguacagaagcuggauu

SEQ ID NO: 1115118 - RNA, 19 nt, Homo sapiens
  misc_RNA (1)...(19): siRNA sense strand
gcaaguacagaagcuggau

SEQ ID NO: 1115119 - RNA, 19 nt, Homo sapiens
  misc_RNA (1)...(19): siRNA sense strand
aggaugagaacaagauaau

SEQ ID NO: 1115120 - RNA, 19 nt, Homo sapiens
  misc_RNA (1)...(19): siRNA sense strand
caacaguacuggaaagaug

SEQ ID NO: 1115121 - RNA, 19 nt, Homo sapiens
  misc_RNA (1)...(19): siRNA sense strand
uggaaagugucaugaauug

SEQ ID NO: 1115122 - RNA, 19 nt, Homo sapiens
  misc_RNA (1)...(19): siRNA sense strand
gagauuguccuccugcauu

SEQ ID NO: 1115123 - RNA, 19 nt, Homo sapiens
  misc_RNA (1)...(19): siRNA sense strand
agaagaauuuggaaagugu

SEQ ID NO: 1115124 - RNA, 19 nt, Homo sapiens
  misc_RNA (1)...(19): siRNA sense strand
cagaagaauuuggaaagug

SEQ ID NO: 1115125 - RNA, 19 nt, Homo sapiens
  misc_RNA (1)...(19): siRNA sense strand
ucaaagaccagaugaugug

SEQ ID NO: 1115126 - RNA, 19 nt, Homo sapiens
  misc_RNA (1)...(19): siRNA sense strand
guacuggaaagaugagauu

SEQ ID NO: 1115127 - RNA, 19 nt, Homo sapiens
  misc_RNA (1)...(19): siRNA sense strand
gaagcgcaaguucucuuaa

SEQ ID NO: 1115128 - RNA, 19 nt, Homo sapiens
  misc_RNA (1)...(19): siRNA sense strand
cggcucggcuuguuucuca

SEQ ID NO: 1115129 - RNA, 19 nt, Homo sapiens
  misc_RNA (1)...(19): siRNA sense strand
ucagaagaauuuggaaagu

SEQ ID NO: 1115130 - RNA, 19 nt, Homo sapiens
  misc_RNA (1)...(19): siRNA sense strand
gcagaucggcgagguguuc

SEQ ID NO: 1115131 - RNA, 19 nt, Homo sapiens
  misc_RNA (1)...(19): siRNA sense strand
gaauuuggaaagugucaug

SEQ ID NO: 1115132 - RNA, 19 nt, Homo sapiens
  misc_RNA (1)...(19): siRNA sense strand
gccauuuacuugcuauuuu

SEQ ID NO: 1115133 - RNA, 19 nt, Homo sapiens
  misc_RNA (1)...(19): siRNA sense strand
ccuauaucccucccuguaa

SEQ ID NO: 1115134 - RNA, 19 nt, Homo sapiens
  misc_RNA (1)...(19): siRNA sense strand
ggugggcguucucauugug

SEQ ID NO: 1115135 - RNA, 19 nt, Homo sapiens
  misc_RNA (1)...(19): siRNA sense strand
gagagaaaaucagaagaau

SEQ ID NO: 1115136 - RNA, 19 nt, Homo sapiens
  misc_RNA (1)...(19): siRNA sense strand
ccggguggcuuacgaguac

SEQ ID NO: 1115137 - RNA, 19 nt, Homo sapiens
  misc_RNA (1)...(19): siRNA sense strand
agauuguccuccugcauug

SEQ ID NO: 1115138 - RNA, 19 nt, Homo sapiens
  misc_RNA (1)...(19): siRNA sense strand
guucccagccauuuacuug

SEQ ID NO: 1115139 - RNA, 19 nt, Homo sapiens
  misc_RNA (1)...(19): siRNA sense strand
gcauccggcucggcuuguu

SEQ ID NO: 1115140 - RNA, 19 nt, Homo sapiens
  misc_RNA (1)...(19): siRNA sense strand
cuauaucccucccuguaag

SEQ ID NO: 1115141 - RNA, 19 nt, Homo sapiens
  misc_RNA (1)...(19): siRNA sense strand
aagaccagaugaugugcuu

SEQ ID NO: 1115142 - RNA, 19 nt, Homo sapiens
  misc_RNA (1)...(19): siRNA sense strand
guggugggcguucucauug

SEQ ID NO: 1115143 - RNA, 19 nt, Homo sapiens
  misc_RNA (1)...(19): siRNA sense strand
uuuggaaagugucaugaau

SEQ ID NO: 1115144 - RNA, 19 nt, Homo sapiens
  misc_RNA (1)...(19): siRNA sense strand
gcaacaguacuggaaagau

SEQ ID NO: 1115145 - RNA, 19 nt, Homo sapiens
  misc_RNA (1)...(19): siRNA sense strand
ugaauuggcaacaguacug

SEQ ID NO: 1115146 - RNA, 19 nt, Homo sapiens
  misc_RNA (1)...(19): siRNA sense strand
gucaugaauuggcaacagu

SEQ ID NO: 1115147 - RNA, 19 nt, Homo sapiens
  misc_RNA (1)...(19): siRNA sense strand
ucgugucgcucuucaucuu

SEQ ID NO: 1115148 - RNA, 19 nt, Homo sapiens
  misc_RNA (1)...(19): siRNA sense strand
gcguccaggucuacgugaa

SEQ ID NO: 1115149 - RNA, 19 nt, Homo sapiens
  misc_RNA (1)...(19): siRNA sense strand
cggcuuguuucucaucauc

SEQ ID NO: 1115150 - RNA, 19 nt, Homo sapiens
  misc_RNA (1)...(19): siRNA sense strand
gaccagaugaugugcuucu

SEQ ID NO: 1115151 - RNA, 19 nt, Homo sapiens
  misc_RNA (1)...(19): siRNA sense strand
acacggaagccgaggacaa

SEQ ID NO: 1115152 - RNA, 19 nt, Homo sapiens
  misc_RNA (1)...(19): siRNA sense strand
gauugguucccagccauuu

SEQ ID NO: 1115153 - RNA, 19 nt, Homo sapiens
  misc_RNA (1)...(19): siRNA sense strand
ucaugaauuggcaacagua

SEQ ID NO: 1115154 - RNA, 19 nt, Homo sapiens
  misc_RNA (1)...(19): siRNA sense strand
cccaagugcuccuauaucc

SEQ ID NO: 1115155 - RNA, 19 nt, Homo sapiens
  misc_RNA (1)...(19): siRNA sense strand
ccaugaagaagcgcaaguu

SEQ ID NO: 1115156 - RNA, 19 nt, Homo sapiens
  misc_RNA (1)...(19): siRNA sense strand
aggcggaagccaugaagaa

SEQ ID NO: 1115157 - RNA, 19 nt, Homo sapiens
  misc_RNA (1)...(19): siRNA sense strand
gacaaugacuuccucaaug

SEQ ID NO: 1115158 - RNA, 19 nt, Homo sapiens
  misc_RNA (1)...(19): siRNA sense strand
ucaaugagcugagcaaugu

SEQ ID NO: 1115159 - RNA, 19 nt, Homo sapiens
  misc_RNA (1)...(19): siRNA sense strand
gaaauaccaccaguuuaua

SEQ ID NO: 1115160 - RNA, 19 nt, Homo sapiens
  misc_RNA (1)...(19): siRNA sense strand
ggacaaucaucucuucaau

SEQ ID NO: 1115161 - RNA, 19 nt, Homo sapiens
  misc_RNA (1)...(19): siRNA sense strand
aaagaaauaccaccaguuu

SEQ ID NO: 1115162 - RNA, 19 nt, Homo sapiens
  misc_RNA (1)...(19): siRNA sense strand
acaaugacuuccucaauga

SEQ ID NO: 1115163 - RNA, 19 nt, Homo sapiens
  misc_RNA (1)...(19): siRNA sense strand
gaucaggauuaccagaauu

SEQ ID NO: 1115164 - RNA, 19 nt, Homo sapiens
  misc_RNA (1)...(19): siRNA sense strand
gacaaucaucucuucaaua

SEQ ID NO: 1115165 - RNA, 19 nt, Homo sapiens
  misc_RNA (1)...(19): siRNA sense strand
gccagaaagugaagcuauu

SEQ ID NO: 1115166 - RNA, 19 nt, Homo sapiens
  misc_RNA (1)...(19): siRNA sense strand
gaccguggaugguguggaa

SEQ ID NO: 1115167 - RNA, 19 nt, Homo sapiens
  misc_RNA (1)...(19): siRNA sense strand
agaaauaccaccaguuuau

SEQ ID NO: 1115168 - RNA, 19 nt, Homo sapiens
  misc_RNA (1)...(19): siRNA sense strand
cccagccgcuuuaaguuua

SEQ ID NO: 1115169 - RNA, 19 nt, Homo sapiens
  misc_RNA (1)...(19): siRNA sense strand
ggagagguuuggaauugau

SEQ ID NO: 1115170 - RNA, 19 nt, Homo sapiens
  misc_RNA (1)...(19): siRNA sense strand
ggacuugccaacauucaaa

SEQ ID NO: 1115171 - RNA, 19 nt, Homo sapiens
  misc_RNA (1)...(19): siRNA sense strand
cgggagagguuuggaauug

SEQ ID NO: 1115172 - RNA, 19 nt, Homo sapiens
  misc_RNA (1)...(19): siRNA sense strand
aaucaucucuucaauaagg

SEQ ID NO: 1115173 - RNA, 19 nt, Homo sapiens
  misc_RNA (1)...(19): siRNA sense strand
gcaagaccaagaccaagaa

SEQ ID NO: 1115174 - RNA, 19 nt, Homo sapiens
  misc_RNA (1)...(19): siRNA sense strand
gaaccugcccagccgcuuu

SEQ ID NO: 1115175 - RNA, 19 nt, Homo sapiens
  misc_RNA (1)...(19): siRNA sense strand
guucuacgguugccagaga

SEQ ID NO: 1115176 - RNA, 19 nt, Homo sapiens
  misc_RNA (1)...(19): siRNA sense strand
gcugagcaauguuccuguu

SEQ ID NO: 1115177 - RNA, 19 nt, Homo sapiens
  misc_RNA (1)...(19): siRNA sense strand
gagaagcgagcgacaagga

SEQ ID NO: 1115178 - RNA, 19 nt, Homo sapiens
  misc_RNA (1)...(19): siRNA sense strand
gggagagguuuggaauuga

SEQ ID NO: 1115179 - RNA, 19 nt, Homo sapiens
  misc_RNA (1)...(19): siRNA sense strand
gguggacaaucaucucuuc

SEQ ID NO: 1115180 - RNA, 19 nt, Homo sapiens
  misc_RNA (1)...(19): siRNA sense strand
gcuaaugccagaugacuuc

SEQ ID NO: 1115181 - RNA, 19 nt, Homo sapiens
  misc_RNA (1)...(19): siRNA sense strand
agaccaagaagaagcauuu

SEQ ID NO: 1115182 - RNA, 19 nt, Homo sapiens
  misc_RNA (1)...(19): siRNA sense strand
agaccaagaccaagaagaa

SEQ ID NO: 1115183 - RNA, 19 nt, Homo sapiens
  misc_RNA (1)...(19): siRNA sense strand
agaucaagguggacaauca

SEQ ID NO: 1115184 - RNA, 19 nt, Homo sapiens
  misc_RNA (1)...(19): siRNA sense strand
gcccagccgcuuuaaguuu

SEQ ID NO: 1115185 - RNA, 19 nt, Homo sapiens
  misc_RNA (1)...(19): siRNA sense strand
uaaagaaauaccaccaguu

SEQ ID NO: 1115186 - RNA, 19 nt, Homo sapiens
  misc_RNA (1)...(19): siRNA sense strand
ugaaccacacgaucaauga

SEQ ID NO: 1115187 - RNA, 19 nt, Homo sapiens
  misc_RNA (1)...(19): siRNA sense strand
aagaaauaccaccaguuua

SEQ ID NO: 1115188 - RNA, 19 nt, Homo sapiens
  misc_RNA (1)...(19): siRNA sense strand
aaugccagaugacuucaaa

SEQ ID NO: 1115189 - RNA, 19 nt, Homo sapiens
  misc_RNA (1)...(19): siRNA sense strand
uggcggagaugcacaacau

SEQ ID NO: 1115190 - RNA, 19 nt, Homo sapiens
  misc_RNA (1)...(19): siRNA sense strand
uggaugguguggaaaccua

SEQ ID NO: 1115191 - RNA, 19 nt, Homo sapiens
  misc_RNA (1)...(19): siRNA sense strand
ugaucaggauuaccagaau

SEQ ID NO: 1115192 - RNA, 19 nt, Homo sapiens
  misc_RNA (1)...(19): siRNA sense strand
acaaggagaaggccaagga

SEQ ID NO: 1115193 - RNA, 19 nt, Homo sapiens
  misc_RNA (1)...(19): siRNA sense strand
ucacugugcaucgcaagua

SEQ ID NO: 1115194 - RNA, 19 nt, Homo sapiens
  misc_RNA (1)...(19): siRNA sense strand
agacaaugacuuccucaau

SEQ ID NO: 1115195 - RNA, 19 nt, Homo sapiens
  misc_RNA (1)...(19): siRNA sense strand
ccagcaagaccaagaccaa

SEQ ID NO: 1115196 - RNA, 19 nt, Homo sapiens
  misc_RNA (1)...(19): siRNA sense strand
aaaagaacuuccuggagaa

SEQ ID NO: 1115197 - RNA, 19 nt, Homo sapiens
  misc_RNA (1)...(19): siRNA sense strand
ucgcaaguaugaccucaag

SEQ ID NO: 1115198 - RNA, 19 nt, Homo sapiens
  misc_RNA (1)...(19): siRNA sense strand
ugucauggcaacacgcuuu

SEQ ID NO: 1115199 - RNA, 19 nt, Homo sapiens
  misc_RNA (1)...(19): siRNA sense strand
cacaguuccugggcaugua

SEQ ID NO: 1115200 - RNA, 19 nt, Homo sapiens
  misc_RNA (1)...(19): siRNA sense strand
gaucaagguggacaaucau

SEQ ID NO: 1115201 - RNA, 19 nt, Homo sapiens
  misc_RNA (1)...(19): siRNA sense strand
gaaccacacgaucaaugag

SEQ ID NO: 1115202 - RNA, 19 nt, Homo sapiens
  misc_RNA (1)...(19): siRNA sense strand
ccaagaagaagcauuucgu

SEQ ID NO: 1115203 - RNA, 19 nt, Homo sapiens
  misc_RNA (1)...(19): siRNA sense strand
gcaagaucaagguggacaa

SEQ ID NO: 1115204 - RNA, 19 nt, Homo sapiens
  misc_RNA (1)...(19): siRNA sense strand
gaaacugaagcgggacguu

SEQ ID NO: 1115205 - RNA, 19 nt, Homo sapiens
  misc_RNA (1)...(19): siRNA sense strand
aaauaccaccaguuuauag

SEQ ID NO: 1115206 - RNA, 19 nt, Homo sapiens
  misc_RNA (1)...(19): siRNA sense strand
ccagaaagugaagcuauuc

SEQ ID NO: 1115207 - RNA, 19 nt, Homo sapiens
  misc_RNA (1)...(19): siRNA sense strand
caaugacuuccucaaugaa

SEQ ID NO: 1115208 - RNA, 19 nt, Homo sapiens
  misc_RNA (1)...(19): siRNA sense strand
gagcaauguuccuguuccu

SEQ ID NO: 1115209 - RNA, 19 nt, Homo sapiens
  misc_RNA (1)...(19): siRNA sense strand
gugaaccacacgaucaaug

SEQ ID NO: 1115210 - RNA, 19 nt, Homo sapiens
  misc_RNA (1)...(19): siRNA sense strand
cagagaagcgagcgacaag

SEQ ID NO: 1115211 - RNA, 19 nt, Homo sapiens
  misc_RNA (1)...(19): siRNA sense strand
gcuuugucaucaagacugu

SEQ ID NO: 1115212 - RNA, 19 nt, Homo sapiens
  misc_RNA (1)...(19): siRNA sense strand
uucaaagccuacagcaaga

SEQ ID NO: 1115213 - RNA, 19 nt, Homo sapiens
  misc_RNA (1)...(19): siRNA sense strand
caagaucaagguggacaau

SEQ ID NO: 1115214 - RNA, 19 nt, Homo sapiens
  misc_RNA (1)...(19): siRNA sense strand
gaacuuccuggagaaacug

SEQ ID NO: 1115215 - RNA, 19 nt, Homo sapiens
  misc_RNA (1)...(19): siRNA sense strand
agaacuuccuggagaaacu

SEQ ID NO: 1115216 - RNA, 19 nt, Homo sapiens
  misc_RNA (1)...(19): siRNA sense strand
aaagaacuuccuggagaaa

SEQ ID NO: 1115217 - RNA, 19 nt, Homo sapiens
  misc_RNA (1)...(19): siRNA sense strand
ccacaguuccugggcaugu

SEQ ID NO: 1115218 - RNA, 19 nt, Homo sapiens
  misc_RNA (1)...(19): siRNA sense strand
auucaaagacaaugacuuc

SEQ ID NO: 1115219 - RNA, 19 nt, Homo sapiens
  misc_RNA (1)...(19): siRNA sense strand
ccagagaagcgagcgacaa

SEQ ID NO: 1115220 - RNA, 19 nt, Homo sapiens
  misc_RNA (1)...(19): siRNA sense strand
cacugugcaucgcaaguau

SEQ ID NO: 1115221 - RNA, 19 nt, Homo sapiens
  misc_RNA (1)...(19): siRNA sense strand
ccaagaccaagaagaagca

SEQ ID NO: 1115222 - RNA, 19 nt, Homo sapiens
  misc_RNA (1)...(19): siRNA sense strand
ugccaacauucaaagacaa

SEQ ID NO: 1115223 - RNA, 19 nt, Homo sapiens
  misc_RNA (1)...(19): siRNA sense strand
gacaaugacuuccucaaug

SEQ ID NO: 1115224 - RNA, 19 nt, Homo sapiens
  misc_RNA (1)...(19): siRNA sense strand
ucaaugagcugagcaaugu

SEQ ID NO: 1115225 - RNA, 19 nt, Homo sapiens
  misc_RNA (1)...(19): siRNA sense strand
gaaauaccaccaguuuaua

SEQ ID NO: 1115226 - RNA, 19 nt, Homo sapiens
  misc_RNA (1)...(19): siRNA sense strand
ggacaaucaucucuucaau

SEQ ID NO: 1115227 - RNA, 19 nt, Homo sapiens
  misc_RNA (1)...(19): siRNA sense strand
aaagaaauaccaccaguuu

SEQ ID NO: 1115228 - RNA, 19 nt, Homo sapiens
  misc_RNA (1)...(19): siRNA sense strand
acaaugacuuccucaauga

SEQ ID NO: 1115229 - RNA, 19 nt, Homo sapiens
  misc_RNA (1)...(19): siRNA sense strand
gaucaggauuaccagaauu

SEQ ID NO: 1115230 - RNA, 19 nt, Homo sapiens
  misc_RNA (1)...(19): siRNA sense strand
gacaaucaucucuucaaua

SEQ ID NO: 1115231 - RNA, 19 nt, Homo sapiens
  misc_RNA (1)...(19): siRNA sense strand
gccagaaagugaagcuauu

SEQ ID NO: 1115232 - RNA, 19 nt, Homo sapiens
  misc_RNA (1)...(19): siRNA sense strand
gaccguggaugguguggaa

SEQ ID NO: 1115233 - RNA, 19 nt, Homo sapiens
  misc_RNA (1)...(19): siRNA sense strand
agaaauaccaccaguuuau

SEQ ID NO: 1115234 - RNA, 19 nt, Homo sapiens
  misc_RNA (1)...(19): siRNA sense strand
cccagccgcuuuaaguuua

SEQ ID NO: 1115235 - RNA, 19 nt, Homo sapiens
  misc_RNA (1)...(19): siRNA sense strand
ggagagguuuggaauugau

SEQ ID NO: 1115236 - RNA, 19 nt, Homo sapiens
  misc_RNA (1)...(19): siRNA sense strand
ggacuugccaacauucaaa

SEQ ID NO: 1115237 - RNA, 19 nt, Homo sapiens
  misc_RNA (1)...(19): siRNA sense strand
cgggagagguuuggaauug

SEQ ID NO: 1115238 - RNA, 19 nt, Homo sapiens
  misc_RNA (1)...(19): siRNA sense strand
aaucaucucuucaauaagg

SEQ ID NO: 1115239 - RNA, 19 nt, Homo sapiens
  misc_RNA (1)...(19): siRNA sense strand
gcaagaccaagaccaagaa

SEQ ID NO: 1115240 - RNA, 19 nt, Homo sapiens
  misc_RNA (1)...(19): siRNA sense strand
gaaccugcccagccgcuuu

SEQ ID NO: 1115241 - RNA, 19 nt, Homo sapiens
  misc_RNA (1)...(19): siRNA sense strand
guucuacgguugccagaga

SEQ ID NO: 1115242 - RNA, 19 nt, Homo sapiens
  misc_RNA (1)...(19): siRNA sense strand
gcugagcaauguuccuguu

SEQ ID NO: 1115243 - RNA, 19 nt, Homo sapiens
  misc_RNA (1)...(19): siRNA sense strand
gagaagcgagcgacaagga

SEQ ID NO: 1115244 - RNA, 19 nt, Homo sapiens
  misc_RNA (1)...(19): siRNA sense strand
gggagagguuuggaauuga

SEQ ID NO: 1115245 - RNA, 19 nt, Homo sapiens
  misc_RNA (1)...(19): siRNA sense strand
gguggacaaucaucucuuc

SEQ ID NO: 1115246 - RNA, 19 nt, Homo sapiens
  misc_RNA (1)...(19): siRNA sense strand
gcuaaugccagaugacuuc

SEQ ID NO: 1115247 - RNA, 19 nt, Homo sapiens
  misc_RNA (1)...(19): siRNA sense strand
agaccaagaagaagcauuu

SEQ ID NO: 1115248 - RNA, 19 nt, Homo sapiens
  misc_RNA (1)...(19): siRNA sense strand
agaccaagaccaagaagaa

SEQ ID NO: 1115249 - RNA, 19 nt, Homo sapiens
  misc_RNA (1)...(19): siRNA sense strand
agaucaagguggacaauca

SEQ ID NO: 1115250 - RNA, 19 nt, Homo sapiens
  misc_RNA (1)...(19): siRNA sense strand
gcccagccgcuuuaaguuu

SEQ ID NO: 1115251 - RNA, 19 nt, Homo sapiens
  misc_RNA (1)...(19): siRNA sense strand
uaaagaaauaccaccaguu

SEQ ID NO: 1115252 - RNA, 19 nt, Homo sapiens
  misc_RNA (1)...(19): siRNA sense strand
ugaaccacacgaucaauga

SEQ ID NO: 1115253 - RNA, 19 nt, Homo sapiens
  misc_RNA (1)...(19): siRNA sense strand
aagaaauaccaccaguuua

SEQ ID NO: 1115254 - RNA, 19 nt, Homo sapiens
  misc_RNA (1)...(19): siRNA sense strand
aaugccagaugacuucaaa

SEQ ID NO: 1115255 - RNA, 19 nt, Homo sapiens
  misc_RNA (1)...(19): siRNA sense strand
uggcggagaugcacaacau

SEQ ID NO: 1115256 - RNA, 19 nt, Homo sapiens
  misc_RNA (1)...(19): siRNA sense strand
uggaugguguggaaaccua

SEQ ID NO: 1115257 - RNA, 19 nt, Homo sapiens
  misc_RNA (1)...(19): siRNA sense strand
ugaucaggauuaccagaau

SEQ ID NO: 1115258 - RNA, 19 nt, Homo sapiens
  misc_RNA (1)...(19): siRNA sense strand
acaaggagaaggccaagga

SEQ ID NO: 1115259 - RNA, 19 nt, Homo sapiens
  misc_RNA (1)...(19): siRNA sense strand
ucacugugcaucgcaagua

SEQ ID NO: 1115260 - RNA, 19 nt, Homo sapiens
  misc_RNA (1)...(19): siRNA sense strand
agacaaugacuuccucaau

SEQ ID NO: 1115261 - RNA, 19 nt, Homo sapiens
  misc_RNA (1)...(19): siRNA sense strand
ccagcaagaccaagaccaa

SEQ ID NO: 1115262 - RNA, 19 nt, Homo sapiens
  misc_RNA (1)...(19): siRNA sense strand
aaaagaacuuccuggagaa

SEQ ID NO: 1115263 - RNA, 19 nt, Homo sapiens
  misc_RNA (1)...(19): siRNA sense strand
ucgcaaguaugaccucaag

SEQ ID NO: 1115264 - RNA, 19 nt, Homo sapiens
  misc_RNA (1)...(19): siRNA sense strand
ugucauggcaacacgcuuu

SEQ ID NO: 1115265 - RNA, 19 nt, Homo sapiens
  misc_RNA (1)...(19): siRNA sense strand
cacaguuccugggcaugua

SEQ ID NO: 1115266 - RNA, 19 nt, Homo sapiens
  misc_RNA (1)...(19): siRNA sense strand
gaucaagguggacaaucau

SEQ ID NO: 1115267 - RNA, 19 nt, Homo sapiens
  misc_RNA (1)...(19): siRNA sense strand
gaaccacacgaucaaugag

SEQ ID NO: 1115268 - RNA, 19 nt, Homo sapiens
  misc_RNA (1)...(19): siRNA sense strand
ccaagaagaagcauuucgu

SEQ ID NO: 1115269 - RNA, 19 nt, Homo sapiens
  misc_RNA (1)...(19): siRNA sense strand
gcaagaucaagguggacaa

SEQ ID NO: 1115270 - RNA, 19 nt, Homo sapiens
  misc_RNA (1)...(19): siRNA sense strand
gaaacugaagcgggacguu

SEQ ID NO: 1115271 - RNA, 19 nt, Homo sapiens
  misc_RNA (1)...(19): siRNA sense strand
aaauaccaccaguuuauag

SEQ ID NO: 1115272 - RNA, 19 nt, Homo sapiens
  misc_RNA (1)...(19): siRNA sense strand
ccagaaagugaagcuauuc

SEQ ID NO: 1115273 - RNA, 19 nt, Homo sapiens
  misc_RNA (1)...(19): siRNA sense strand
caaugacuuccucaaugaa

SEQ ID NO: 1115274 - RNA, 19 nt, Homo sapiens
  misc_RNA (1)...(19): siRNA sense strand
gagcaauguuccuguuccu

SEQ ID NO: 1115275 - RNA, 19 nt, Homo sapiens
  misc_RNA (1)...(19): siRNA sense strand
gugaaccacacgaucaaug

SEQ ID NO: 1115276 - RNA, 19 nt, Homo sapiens
  misc_RNA (1)...(19): siRNA sense strand
cagagaagcgagcgacaag

SEQ ID NO: 1115277 - RNA, 19 nt, Homo sapiens
  misc_RNA (1)...(19): siRNA sense strand
gcuuugucaucaagacugu

SEQ ID NO: 1115278 - RNA, 19 nt, Homo sapiens
  misc_RNA (1)...(19): siRNA sense strand
uucaaagccuacagcaaga

SEQ ID NO: 1115279 - RNA, 19 nt, Homo sapiens
  misc_RNA (1)...(19): siRNA sense strand
caagaucaagguggacaau

SEQ ID NO: 1115280 - RNA, 19 nt, Homo sapiens
  misc_RNA (1)...(19): siRNA sense strand
gaacuuccuggagaaacug

SEQ ID NO: 1115281 - RNA, 19 nt, Homo sapiens
  misc_RNA (1)...(19): siRNA sense strand
agaacuuccuggagaaacu

SEQ ID NO: 1115282 - RNA, 19 nt, Homo sapiens
  misc_RNA (1)...(19): siRNA sense strand
aaagaacuuccuggagaaa

SEQ ID NO: 1115283 - RNA, 19 nt, Homo sapiens
  misc_RNA (1)...(19): siRNA sense strand
ccacaguuccugggcaugu

SEQ ID NO: 1115284 - RNA, 19 nt, Homo sapiens
  misc_RNA (1)...(19): siRNA sense strand
auucaaagacaaugacuuc

SEQ ID NO: 1115285 - RNA, 19 nt, Homo sapiens
  misc_RNA (1)...(19): siRNA sense strand
ccagagaagcgagcgacaa

SEQ ID NO: 1115286 - RNA, 19 nt, Homo sapiens
  misc_RNA (1)...(19): siRNA sense strand
cacugugcaucgcaaguau

SEQ ID NO: 1115287 - RNA, 19 nt, Homo sapiens
  misc_RNA (1)...(19): siRNA sense strand
ccaagaccaagaagaagca

SEQ ID NO: 1115288 - RNA, 19 nt, Homo sapiens
  misc_RNA (1)...(19): siRNA sense strand
ugccaacauucaaagacaa

SEQ ID NO: 1115289 - RNA, 19 nt, Homo sapiens
  misc_RNA (1)...(19): siRNA sense strand
acaauaagcuggaccucua

SEQ ID NO: 1115290 - RNA, 19 nt, Homo sapiens
  misc_RNA (1)...(19): siRNA sense strand
gcaacuggcuguuccugaa

SEQ ID NO: 1115291 - RNA, 19 nt, Homo sapiens
  misc_RNA (1)...(19): siRNA sense strand
gcaaugcacugggccauau

SEQ ID NO: 1115292 - RNA, 19 nt, Homo sapiens
  misc_RNA (1)...(19): siRNA sense strand
ggacaaccaccacuucuau

SEQ ID NO: 1115293 - RNA, 19 nt, Homo sapiens
  misc_RNA (1)...(19): siRNA sense strand
ugaaggagcuggacaugca

SEQ ID NO: 1115294 - RNA, 19 nt, Homo sapiens
  misc_RNA (1)...(19): siRNA sense strand
acaauuaccuggccuucuu

SEQ ID NO: 1115295 - RNA, 19 nt, Homo sapiens
  misc_RNA (1)...(19): siRNA sense strand
gcccugcgcuuccuauuca

SEQ ID NO: 1115296 - RNA, 19 nt, Homo sapiens
  misc_RNA (1)...(19): siRNA sense strand
cuagaccugucccacaaua

SEQ ID NO: 1115297 - RNA, 19 nt, Homo sapiens
  misc_RNA (1)...(19): siRNA sense strand
ugaaggcccugaccaaugg

SEQ ID NO: 1115298 - RNA, 19 nt, Homo sapiens
  misc_RNA (1)...(19): siRNA sense strand
gacggcaacuguuauuaca

SEQ ID NO: 1115299 - RNA, 19 nt, Homo sapiens
  misc_RNA (1)...(19): siRNA sense strand
acaacaacaucaugacugu

SEQ ID NO: 1115300 - RNA, 19 nt, Homo sapiens
  misc_RNA (1)...(19): siRNA sense strand
gugagaacuuccucuacaa

SEQ ID NO: 1115301 - RNA, 19 nt, Homo sapiens
  misc_RNA (1)...(19): siRNA sense strand
caacuguuauuacaagaac

SEQ ID NO: 1115302 - RNA, 19 nt, Homo sapiens
  misc_RNA (1)...(19): siRNA sense strand
gacaaccaccacuucuaua

SEQ ID NO: 1115303 - RNA, 19 nt, Homo sapiens
  misc_RNA (1)...(19): siRNA sense strand
gaacuuccucuacaaaugc

SEQ ID NO: 1115304 - RNA, 19 nt, Homo sapiens
  misc_RNA (1)...(19): siRNA sense strand
agaacuuccucuacaaaug

SEQ ID NO: 1115305 - RNA, 19 nt, Homo sapiens
  misc_RNA (1)...(19): siRNA sense strand
ggaccugagugagaacuuc

SEQ ID NO: 1115306 - RNA, 19 nt, Homo sapiens
  misc_RNA (1)...(19): siRNA sense strand
cuacaaaugcaucacuaaa

SEQ ID NO: 1115307 - RNA, 19 nt, Homo sapiens
  misc_RNA (1)...(19): siRNA sense strand
acaaccaccacuucuauaa

SEQ ID NO: 1115308 - RNA, 19 nt, Homo sapiens
  misc_RNA (1)...(19): siRNA sense strand
ggacggcaacuguuauuac

SEQ ID NO: 1115309 - RNA, 19 nt, Homo sapiens
  misc_RNA (1)...(19): siRNA sense strand
gcaaauacuagauguaagc

SEQ ID NO: 1115310 - RNA, 19 nt, Homo sapiens
  misc_RNA (1)...(19): siRNA sense strand
ccaacgcccucaagacagu

SEQ ID NO: 1115311 - RNA, 19 nt, Homo sapiens
  misc_RNA (1)...(19): siRNA sense strand
gagaacuuccucuacaaau

SEQ ID NO: 1115312 - RNA, 19 nt, Homo sapiens
  misc_RNA (1)...(19): siRNA sense strand
gcaacuguuauuacaagaa

SEQ ID NO: 1115313 - RNA, 19 nt, Homo sapiens
  misc_RNA (1)...(19): siRNA sense strand
caacauccacagccaagug

SEQ ID NO: 1115314 - RNA, 19 nt, Homo sapiens
  misc_RNA (1)...(19): siRNA sense strand
cggcaacuguuauuacaag

SEQ ID NO: 1115315 - RNA, 19 nt, Homo sapiens
  misc_RNA (1)...(19): siRNA sense strand
uaccuggccuucuuuaagu

SEQ ID NO: 1115316 - RNA, 19 nt, Homo sapiens
  misc_RNA (1)...(19): siRNA sense strand
uugaaggccugguguugaa

SEQ ID NO: 1115317 - RNA, 19 nt, Homo sapiens
  misc_RNA (1)...(19): siRNA sense strand
caaccucacccaccuguca

SEQ ID NO: 1115318 - RNA, 19 nt, Homo sapiens
  misc_RNA (1)...(19): siRNA sense strand
aaccugagcuacaacaaca

SEQ ID NO: 1115319 - RNA, 19 nt, Homo sapiens
  misc_RNA (1)...(19): siRNA sense strand
ugcgagagcucaaccuuag

SEQ ID NO: 1115320 - RNA, 19 nt, Homo sapiens
  misc_RNA (1)...(19): siRNA sense strand
ggcaaugucaccagccuuu

SEQ ID NO: 1115321 - RNA, 19 nt, Homo sapiens
  misc_RNA (1)...(19): siRNA sense strand
uggaguaucugcuguuguc

SEQ ID NO: 1115322 - RNA, 19 nt, Homo sapiens
  misc_RNA (1)...(19): siRNA sense strand
ucauggacggcaacuguua

SEQ ID NO: 1115323 - RNA, 19 nt, Homo sapiens
  misc_RNA (1)...(19): siRNA sense strand
cuuaaccuguccuucaauu

SEQ ID NO: 1115324 - RNA, 19 nt, Homo sapiens
  misc_RNA (1)...(19): siRNA sense strand
cugaggaccuggccaaucu

SEQ ID NO: 1115325 - RNA, 19 nt, Homo sapiens
  misc_RNA (1)...(19): siRNA sense strand
gggacaaccaccacuucua

SEQ ID NO: 1115326 - RNA, 19 nt, Homo sapiens
  misc_RNA (1)...(19): siRNA sense strand
cagacuggguguacaacga

SEQ ID NO: 1115327 - RNA, 19 nt, Homo sapiens
  misc_RNA (1)...(19): siRNA sense strand
gcugggaccucugguacug

SEQ ID NO: 1115328 - RNA, 19 nt, Homo sapiens
  misc_RNA (1)...(19): siRNA sense strand
cgagugcccugcaaauacu

SEQ ID NO: 1115329 - RNA, 19 nt, Homo sapiens
  misc_RNA (1)...(19): siRNA sense strand
gagcuacaacaacaucaug

SEQ ID NO: 1115330 - RNA, 19 nt, Homo sapiens
  misc_RNA (1)...(19): siRNA sense strand
cugcaaauacuagauguaa

SEQ ID NO: 1115331 - RNA, 19 nt, Homo sapiens
  misc_RNA (1)...(19): siRNA sense strand
gcgagugcccugcaaauac

SEQ ID NO: 1115332 - RNA, 19 nt, Homo sapiens
  misc_RNA (1)...(19): siRNA sense strand
ggcgagugcccugcaaaua

SEQ ID NO: 1115333 - RNA, 19 nt, Homo sapiens
  misc_RNA (1)...(19): siRNA sense strand
ucacccaccugucacucaa

SEQ ID NO: 1115334 - RNA, 19 nt, Homo sapiens
  misc_RNA (1)...(19): siRNA sense strand
uaaccuguccuucaauuac

SEQ ID NO: 1115335 - RNA, 19 nt, Homo sapiens
  misc_RNA (1)...(19): siRNA sense strand
ugagaacuuccucuacaaa

SEQ ID NO: 1115336 - RNA, 19 nt, Homo sapiens
  misc_RNA (1)...(19): siRNA sense strand
agugagaacuuccucuaca

SEQ ID NO: 1115337 - RNA, 19 nt, Homo sapiens
  misc_RNA (1)...(19): siRNA sense strand
ucaccagccuuuccuuguc

SEQ ID NO: 1115338 - RNA, 19 nt, Homo sapiens
  misc_RNA (1)...(19): siRNA sense strand
ugagugagaacuuccucua

SEQ ID NO: 1115339 - RNA, 19 nt, Homo sapiens
  misc_RNA (1)...(19): siRNA sense strand
ugccugcgcugcccaaauc

SEQ ID NO: 1115340 - RNA, 19 nt, Homo sapiens
  misc_RNA (1)...(19): siRNA sense strand
ggacuucagcggcaaugca

SEQ ID NO: 1115341 - RNA, 19 nt, Homo sapiens
  misc_RNA (1)...(19): siRNA sense strand
caccugagccgucuugaag

SEQ ID NO: 1115342 - RNA, 19 nt, Homo sapiens
  misc_RNA (1)...(19): siRNA sense strand
cuacaaccgcaucgucaaa

SEQ ID NO: 1115343 - RNA, 19 nt, Homo sapiens
  misc_RNA (1)...(19): siRNA sense strand
gcccaaaucccucauaucc

SEQ ID NO: 1115344 - RNA, 19 nt, Homo sapiens
  misc_RNA (1)...(19): siRNA sense strand
aguaucugcuguuguccua

SEQ ID NO: 1115345 - RNA, 19 nt, Homo sapiens
  misc_RNA (1)...(19): siRNA sense strand
aagcuuaaccuguccuuca

SEQ ID NO: 1115346 - RNA, 19 nt, Homo sapiens
  misc_RNA (1)...(19): siRNA sense strand
gugcuggaccugagugaga

SEQ ID NO: 1115347 - RNA, 19 nt, Homo sapiens
  misc_RNA (1)...(19): siRNA sense strand
caacuucaccuuggaucug

SEQ ID NO: 1115348 - RNA, 19 nt, Homo sapiens
  misc_RNA (1)...(19): siRNA sense strand
ccgggucaguggucucuug

SEQ ID NO: 1115349 - RNA, 19 nt, Homo sapiens
  misc_RNA (1)...(19): siRNA sense strand
ggccugagcgguuugaucu

SEQ ID NO: 1115350 - RNA, 19 nt, Homo sapiens
  misc_RNA (1)...(19): siRNA sense strand
uaucugcuguuguccuaca

SEQ ID NO: 1115351 - RNA, 19 nt, Homo sapiens
  misc_RNA (1)...(19): siRNA sense strand
uccaaggccugagcgguuu

SEQ ID NO: 1115352 - RNA, 19 nt, Homo sapiens
  misc_RNA (1)...(19): siRNA sense strand
gcagcacccucaacuucac

SEQ ID NO: 1115353 - RNA, 19 nt, Homo sapiens
  misc_RNA (1)...(19): siRNA sense strand
ggacacucccagcucugaa

SEQ ID NO: 1115354 - RNA, 19 nt, Homo sapiens
  misc_RNA (1)...(19): siRNA sense strand
ccucagccauaccaacauc

SEQ ID NO: 1115355 - RNA, 19 nt, Homo sapiens
  misc_RNA (1)...(19): siRNA sense strand
caauuaccuggccuucuuu

SEQ ID NO: 1115356 - RNA, 19 nt, Homo sapiens
  misc_RNA (1)...(19): siRNA sense strand
uuaaccuguccuucaauua

SEQ ID NO: 1115357 - RNA, 19 nt, Homo sapiens
  misc_RNA (1)...(19): siRNA sense strand
gaggaccuggccaaucuga

SEQ ID NO: 1115358 - RNA, 19 nt, Homo sapiens
  misc_RNA (1)...(19): siRNA sense strand
ggcaacuguuauuacaaga

SEQ ID NO: 1115359 - RNA, 19 nt, Homo sapiens
  misc_RNA (1)...(19): siRNA sense strand
uacaacagccagcccuuug

SEQ ID NO: 1115360 - RNA, 19 nt, Homo sapiens
  misc_RNA (1)...(19): siRNA sense strand
cuacaacagccagcccuuu

SEQ ID NO: 1115361 - RNA, 19 nt, Homo sapiens
  misc_RNA (1)...(19): siRNA sense strand
gcacuuccccugccacaug

SEQ ID NO: 1115362 - RNA, 19 nt, Homo sapiens
  misc_RNA (1)...(19): siRNA sense strand
gcugaaggcccugaccaau

SEQ ID NO: 1115363 - RNA, 19 nt, Homo sapiens
  misc_RNA (1)...(19): siRNA sense strand
ugaucuggcuggacuuguc

SEQ ID NO: 1115364 - RNA, 19 nt, Homo sapiens
  misc_RNA (1)...(19): siRNA sense strand
ugcuagaccugucccacaa

SEQ ID NO: 1115365 - RNA, 19 nt, Homo sapiens
  misc_RNA (1)...(19): siRNA sense strand
cugcgagagcucaaccuua

SEQ ID NO: 1115366 - RNA, 19 nt, Homo sapiens
  misc_RNA (1)...(19): siRNA sense strand
ggcaaugcacugggccaua

SEQ ID NO: 1115367 - RNA, 19 nt, Homo sapiens
  misc_RNA (1)...(19): siRNA sense strand
ccaccugagccgucuugaa

SEQ ID NO: 1115368 - RNA, 19 nt, Homo sapiens
  misc_RNA (1)...(19): siRNA sense strand
aggaugcccugcccuacga

SEQ ID NO: 1115369 - RNA, 19 nt, Homo sapiens
  misc_RNA (1)...(19): siRNA sense strand
cugaaggcccugaccaaug

SEQ ID NO: 1115370 - RNA, 19 nt, Homo sapiens
  misc_RNA (1)...(19): siRNA sense strand
uuaccuggccuucuuuaag

SEQ ID NO: 1115371 - RNA, 19 nt, Homo sapiens
  misc_RNA (1)...(19): siRNA sense strand
cugcagcacccucaacuuc

SEQ ID NO: 1115372 - RNA, 19 nt, Homo sapiens
  misc_RNA (1)...(19): siRNA sense strand
ccuggaguaucugcuguug

SEQ ID NO: 1115373 - RNA, 19 nt, Homo sapiens
  misc_RNA (1)...(19): siRNA sense strand
caaccaccacuucuauaac

SEQ ID NO: 1115374 - RNA, 19 nt, Homo sapiens
  misc_RNA (1)...(19): siRNA sense strand
cgccaacgcccucaagaca

SEQ ID NO: 1115375 - RNA, 19 nt, Homo sapiens
  misc_RNA (1)...(19): siRNA sense strand
gcaacagcaucagcuucgu

SEQ ID NO: 1115376 - RNA, 19 nt, Homo sapiens
  misc_RNA (1)...(19): siRNA sense strand
cugcccaaaucccucauau

SEQ ID NO: 1115377 - RNA, 19 nt, Homo sapiens
  misc_RNA (1)...(19): siRNA sense strand
gcacucauucacggagcua

SEQ ID NO: 1115378 - RNA, 19 nt, Homo sapiens
  misc_RNA (1)...(19): siRNA sense strand
acaauaagcuggaccucua

SEQ ID NO: 1115379 - RNA, 19 nt, Homo sapiens
  misc_RNA (1)...(19): siRNA sense strand
gcaaugcacugggccauau

SEQ ID NO: 1115380 - RNA, 19 nt, Homo sapiens
  misc_RNA (1)...(19): siRNA sense strand
ggacaaccaccacuucuau

SEQ ID NO: 1115381 - RNA, 19 nt, Homo sapiens
  misc_RNA (1)...(19): siRNA sense strand
ugaaggagcuggacaugca

SEQ ID NO: 1115382 - RNA, 19 nt, Homo sapiens
  misc_RNA (1)...(19): siRNA sense strand
acaauuaccuggccuucuu

SEQ ID NO: 1115383 - RNA, 19 nt, Homo sapiens
  misc_RNA (1)...(19): siRNA sense strand
gcccugcgcuuccuauuca

SEQ ID NO: 1115384 - RNA, 19 nt, Homo sapiens
  misc_RNA (1)...(19): siRNA sense strand
cuagaccugucccacaaua

SEQ ID NO: 1115385 - RNA, 19 nt, Homo sapiens
  misc_RNA (1)...(19): siRNA sense strand
ugaaggcccugaccaaugg

SEQ ID NO: 1115386 - RNA, 19 nt, Homo sapiens
  misc_RNA (1)...(19): siRNA sense strand
gacggcaacuguuauuaca

SEQ ID NO: 1115387 - RNA, 19 nt, Homo sapiens
  misc_RNA (1)...(19): siRNA sense strand
acaacaacaucaugacugu

SEQ ID NO: 1115388 - RNA, 19 nt, Homo sapiens
  misc_RNA (1)...(19): siRNA sense strand
gugagaacuuccucuacaa

SEQ ID NO: 1115389 - RNA, 19 nt, Homo sapiens
  misc_RNA (1)...(19): siRNA sense strand
caacuguuauuacaagaac

SEQ ID NO: 1115390 - RNA, 19 nt, Homo sapiens
  misc_RNA (1)...(19): siRNA sense strand
gacaaccaccacuucuaua

SEQ ID NO: 1115391 - RNA, 19 nt, Homo sapiens
  misc_RNA (1)...(19): siRNA sense strand
gaacuuccucuacaaaugc

SEQ ID NO: 1115392 - RNA, 19 nt, Homo sapiens
  misc_RNA (1)...(19): siRNA sense strand
agaacuuccucuacaaaug

SEQ ID NO: 1115393 - RNA, 19 nt, Homo sapiens
  misc_RNA (1)...(19): siRNA sense strand
ggaccugagugagaacuuc

SEQ ID NO: 1115394 - RNA, 19 nt, Homo sapiens
  misc_RNA (1)...(19): siRNA sense strand
cuacaaaugcaucacuaaa

SEQ ID NO: 1115395 - RNA, 19 nt, Homo sapiens
  misc_RNA (1)...(19): siRNA sense strand
acaaccaccacuucuauaa

SEQ ID NO: 1115396 - RNA, 19 nt, Homo sapiens
  misc_RNA (1)...(19): siRNA sense strand
ggacggcaacuguuauuac

SEQ ID NO: 1115397 - RNA, 19 nt, Homo sapiens
  misc_RNA (1)...(19): siRNA sense strand
gcaaauacuagauguaagc

SEQ ID NO: 1115398 - RNA, 19 nt, Homo sapiens
  misc_RNA (1)...(19): siRNA sense strand
ccaacgcccucaagacagu

SEQ ID NO: 1115399 - RNA, 19 nt, Homo sapiens
  misc_RNA (1)...(19): siRNA sense strand
gagaacuuccucuacaaau

SEQ ID NO: 1115400 - RNA, 19 nt, Homo sapiens
  misc_RNA (1)...(19): siRNA sense strand
gcaacuguuauuacaagaa

SEQ ID NO: 1115401 - RNA, 19 nt, Homo sapiens
  misc_RNA (1)...(19): siRNA sense strand
caacauccacagccaagug

SEQ ID NO: 1115402 - RNA, 19 nt, Homo sapiens
  misc_RNA (1)...(19): siRNA sense strand
cggcaacuguuauuacaag

SEQ ID NO: 1115403 - RNA, 19 nt, Homo sapiens
  misc_RNA (1)...(19): siRNA sense strand
uaccuggccuucuuuaagu

SEQ ID NO: 1115404 - RNA, 19 nt, Homo sapiens
  misc_RNA (1)...(19): siRNA sense strand
uugaaggccugguguugaa

SEQ ID NO: 1115405 - RNA, 19 nt, Homo sapiens
  misc_RNA (1)...(19): siRNA sense strand
caaccucacccaccuguca

SEQ ID NO: 1115406 - RNA, 19 nt, Homo sapiens
  misc_RNA (1)...(19): siRNA sense strand
aaccugagcuacaacaaca

SEQ ID NO: 1115407 - RNA, 19 nt, Homo sapiens
  misc_RNA (1)...(19): siRNA sense strand
ugcgagagcucaaccuuag

SEQ ID NO: 1115408 - RNA, 19 nt, Homo sapiens
  misc_RNA (1)...(19): siRNA sense strand
ggcaaugucaccagccuuu

SEQ ID NO: 1115409 - RNA, 19 nt, Homo sapiens
  misc_RNA (1)...(19): siRNA sense strand
uggaguaucugcuguuguc

SEQ ID NO: 1115410 - RNA, 19 nt, Homo sapiens
  misc_RNA (1)...(19): siRNA sense strand
ucauggacggcaacuguua

SEQ ID NO: 1115411 - RNA, 19 nt, Homo sapiens
  misc_RNA (1)...(19): siRNA sense strand
cuuaaccuguccuucaauu

SEQ ID NO: 1115412 - RNA, 19 nt, Homo sapiens
  misc_RNA (1)...(19): siRNA sense strand
cugaggaccuggccaaucu

SEQ ID NO: 1115413 - RNA, 19 nt, Homo sapiens
  misc_RNA (1)...(19): siRNA sense strand
gggacaaccaccacuucua

SEQ ID NO: 1115414 - RNA, 19 nt, Homo sapiens
  misc_RNA (1)...(19): siRNA sense strand
cagacuggguguacaacga

SEQ ID NO: 1115415 - RNA, 19 nt, Homo sapiens
  misc_RNA (1)...(19): siRNA sense strand
gcugggaccucugguacug

SEQ ID NO: 1115416 - RNA, 19 nt, Homo sapiens
  misc_RNA (1)...(19): siRNA sense strand
cgagugcccugcaaauacu

SEQ ID NO: 1115417 - RNA, 19 nt, Homo sapiens
  misc_RNA (1)...(19): siRNA sense strand
gagcuacaacaacaucaug

SEQ ID NO: 1115418 - RNA, 19 nt, Homo sapiens
  misc_RNA (1)...(19): siRNA sense strand
cugcaaauacuagauguaa

SEQ ID NO: 1115419 - RNA, 19 nt, Homo sapiens
  misc_RNA (1)...(19): siRNA sense strand
gcgagugcccugcaaauac

SEQ ID NO: 1115420 - RNA, 19 nt, Homo sapiens
  misc_RNA (1)...(19): siRNA sense strand
ggcgagugcccugcaaaua

SEQ ID NO: 1115421 - RNA, 19 nt, Homo sapiens
  misc_RNA (1)...(19): siRNA sense strand
ucacccaccugucacucaa

SEQ ID NO: 1115422 - RNA, 19 nt, Homo sapiens
  misc_RNA (1)...(19): siRNA sense strand
uaaccuguccuucaauuac

SEQ ID NO: 1115423 - RNA, 19 nt, Homo sapiens
  misc_RNA (1)...(19): siRNA sense strand
ugagaacuuccucuacaaa

SEQ ID NO: 1115424 - RNA, 19 nt, Homo sapiens
  misc_RNA (1)...(19): siRNA sense strand
agugagaacuuccucuaca

SEQ ID NO: 1115425 - RNA, 19 nt, Homo sapiens
  misc_RNA (1)...(19): siRNA sense strand
ucaccagccuuuccuuguc

SEQ ID NO: 1115426 - RNA, 19 nt, Homo sapiens
  misc_RNA (1)...(19): siRNA sense strand
ugagugagaacuuccucua

SEQ ID NO: 1115427 - RNA, 19 nt, Homo sapiens
  misc_RNA (1)...(19): siRNA sense strand
ugccugcgcugcccaaauc

SEQ ID NO: 1115428 - RNA, 19 nt, Homo sapiens
  misc_RNA (1)...(19): siRNA sense strand
ggacuucagcggcaaugca

SEQ ID NO: 1115429 - RNA, 19 nt, Homo sapiens
  misc_RNA (1)...(19): siRNA sense strand
caccugagccgucuugaag

SEQ ID NO: 1115430 - RNA, 19 nt, Homo sapiens
  misc_RNA (1)...(19): siRNA sense strand
cuacaaccgcaucgucaaa

SEQ ID NO: 1115431 - RNA, 19 nt, Homo sapiens
  misc_RNA (1)...(19): siRNA sense strand
gcccaaaucccucauaucc

SEQ ID NO: 1115432 - RNA, 19 nt, Homo sapiens
  misc_RNA (1)...(19): siRNA sense strand
aguaucugcuguuguccua

SEQ ID NO: 1115433 - RNA, 19 nt, Homo sapiens
  misc_RNA (1)...(19): siRNA sense strand
aagcuuaaccuguccuuca

SEQ ID NO: 1115434 - RNA, 19 nt, Homo sapiens
  misc_RNA (1)...(19): siRNA sense strand
gugcuggaccugagugaga

SEQ ID NO: 1115435 - RNA, 19 nt, Homo sapiens
  misc_RNA (1)...(19): siRNA sense strand
caacuucaccuuggaucug

SEQ ID NO: 1115436 - RNA, 19 nt, Homo sapiens
  misc_RNA (1)...(19): siRNA sense strand
ccgggucaguggucucuug

SEQ ID NO: 1115437 - RNA, 19 nt, Homo sapiens
  misc_RNA (1)...(19): siRNA sense strand
ggccugagcgguuugaucu

SEQ ID NO: 1115438 - RNA, 19 nt, Homo sapiens
  misc_RNA (1)...(19): siRNA sense strand
uaucugcuguuguccuaca

SEQ ID NO: 1115439 - RNA, 19 nt, Homo sapiens
  misc_RNA (1)...(19): siRNA sense strand
uccaaggccugagcgguuu

SEQ ID NO: 1115440 - RNA, 19 nt, Homo sapiens
  misc_RNA (1)...(19): siRNA sense strand
gcagcacccucaacuucac

SEQ ID NO: 1115441 - RNA, 19 nt, Homo sapiens
  misc_RNA (1)...(19): siRNA sense strand
ggacacucccagcucugaa

SEQ ID NO: 1115442 - RNA, 19 nt, Homo sapiens
  misc_RNA (1)...(19): siRNA sense strand
ccucagccauaccaacauc

SEQ ID NO: 1115443 - RNA, 19 nt, Homo sapiens
  misc_RNA (1)...(19): siRNA sense strand
caauuaccuggccuucuuu

SEQ ID NO: 1115444 - RNA, 19 nt, Homo sapiens
  misc_RNA (1)...(19): siRNA sense strand
uuaaccuguccuucaauua

SEQ ID NO: 1115445 - RNA, 19 nt, Homo sapiens
  misc_RNA (1)...(19): siRNA sense strand
gaggaccuggccaaucuga

SEQ ID NO: 1115446 - RNA, 19 nt, Homo sapiens
  misc_RNA (1)...(19): siRNA sense strand
ggcaacuguuauuacaaga

SEQ ID NO: 1115447 - RNA, 19 nt, Homo sapiens
  misc_RNA (1)...(19): siRNA sense strand
uacaacagccagcccuuug

SEQ ID NO: 1115448 - RNA, 19 nt, Homo sapiens
  misc_RNA (1)...(19): siRNA sense strand
gcacuuccccugccacaug

SEQ ID NO: 1115449 - RNA, 19 nt, Homo sapiens
  misc_RNA (1)...(19): siRNA sense strand
gcugaaggcccugaccaau

SEQ ID NO: 1115450 - RNA, 19 nt, Homo sapiens
  misc_RNA (1)...(19): siRNA sense strand
ugaucuggcuggacuuguc

SEQ ID NO: 1115451 - RNA, 19 nt, Homo sapiens
  misc_RNA (1)...(19): siRNA sense strand
cuacaacagccagcccuuu

SEQ ID NO: 1115452 - RNA, 19 nt, Homo sapiens
  misc_RNA (1)...(19): siRNA sense strand
ugcuagaccugucccacaa

SEQ ID NO: 1115453 - RNA, 19 nt, Homo sapiens
  misc_RNA (1)...(19): siRNA sense strand
cugcgagagcucaaccuua

SEQ ID NO: 1115454 - RNA, 19 nt, Homo sapiens
  misc_RNA (1)...(19): siRNA sense strand
ggcaaugcacugggccaua

SEQ ID NO: 1115455 - RNA, 19 nt, Homo sapiens
  misc_RNA (1)...(19): siRNA sense strand
ccaccugagccgucuugaa

SEQ ID NO: 1115456 - RNA, 19 nt, Homo sapiens
  misc_RNA (1)...(19): siRNA sense strand
aggaugcccugcccuacga

SEQ ID NO: 1115457 - RNA, 19 nt, Homo sapiens
  misc_RNA (1)...(19): siRNA sense strand
cugaaggcccugaccaaug

SEQ ID NO: 1115458 - RNA, 19 nt, Homo sapiens
  misc_RNA (1)...(19): siRNA sense strand
uuaccuggccuucuuuaag

SEQ ID NO: 1115459 - RNA, 19 nt, Homo sapiens
  misc_RNA (1)...(19): siRNA sense strand
cugcagcacccucaacuuc

SEQ ID NO: 1115460 - RNA, 19 nt, Homo sapiens
  misc_RNA (1)...(19): siRNA sense strand
ccuggaguaucugcuguug

SEQ ID NO: 1115461 - RNA, 19 nt, Homo sapiens
  misc_RNA (1)...(19): siRNA sense strand
caaccaccacuucuauaac

SEQ ID NO: 1115462 - RNA, 19 nt, Homo sapiens
  misc_RNA (1)...(19): siRNA sense strand
cgccaacgcccucaagaca

SEQ ID NO: 1115463 - RNA, 19 nt, Homo sapiens
  misc_RNA (1)...(19): siRNA sense strand
gcaacagcaucagcuucgu

SEQ ID NO: 1115464 - RNA, 19 nt, Homo sapiens
  misc_RNA (1)...(19): siRNA sense strand
gcacucauucacggagcua

SEQ ID NO: 1115465 - RNA, 19 nt, Homo sapiens
  misc_RNA (1)...(19): siRNA sense strand
cugcccaaaucccucauau

SEQ ID NO: 1115466 - RNA, 19 nt, Homo sapiens
  misc_RNA (1)...(19): siRNA sense strand
gaacaaacaucacaauuac

SEQ ID NO: 1115467 - RNA, 19 nt, Homo sapiens
  misc_RNA (1)...(19): siRNA sense strand
gcacggagaugagauauau

SEQ ID NO: 1115468 - RNA, 19 nt, Homo sapiens
  misc_RNA (1)...(19): siRNA sense strand
gaaaauaucucuucaagga

SEQ ID NO: 1115469 - RNA, 19 nt, Homo sapiens
  misc_RNA (1)...(19): siRNA sense strand
cgagauagcuguacuuuca

SEQ ID NO: 1115470 - RNA, 19 nt, Homo sapiens
  misc_RNA (1)...(19): siRNA sense strand
gcagaagacucccaaguug

SEQ ID NO: 1115471 - RNA, 19 nt, Homo sapiens
  misc_RNA (1)...(19): siRNA sense strand
uauaauagcuccuguaaca

SEQ ID NO: 1115472 - RNA, 19 nt, Homo sapiens
  misc_RNA (1)...(19): siRNA sense strand
guacucaucuguugaauuc

SEQ ID NO: 1115473 - RNA, 19 nt, Homo sapiens
  misc_RNA (1)...(19): siRNA sense strand
gcagagaacaguggaauua

SEQ ID NO: 1115474 - RNA, 19 nt, Homo sapiens
  misc_RNA (1)...(19): siRNA sense strand
guauauggcuggauuauca

SEQ ID NO: 1115475 - RNA, 19 nt, Homo sapiens
  misc_RNA (1)...(19): siRNA sense strand
ccaauuaccgucaagauua

SEQ ID NO: 1115476 - RNA, 19 nt, Homo sapiens
  misc_RNA (1)...(19): siRNA sense strand
gguauggucucuuuguaua

SEQ ID NO: 1115477 - RNA, 19 nt, Homo sapiens
  misc_RNA (1)...(19): siRNA sense strand
aaacaaccacugucaauua

SEQ ID NO: 1115478 - RNA, 19 nt, Homo sapiens
  misc_RNA (1)...(19): siRNA sense strand
gaaguaaccucuccaacuc

SEQ ID NO: 1115479 - RNA, 19 nt, Homo sapiens
  misc_RNA (1)...(19): siRNA sense strand
auacagaccucuaucuuaa

SEQ ID NO: 1115480 - RNA, 19 nt, Homo sapiens
  misc_RNA (1)...(19): siRNA sense strand
aaggaaaucucacuaauga

SEQ ID NO: 1115481 - RNA, 19 nt, Homo sapiens
  misc_RNA (1)...(19): siRNA sense strand
gaaagucaaugguccacaa

SEQ ID NO: 1115482 - RNA, 19 nt, Homo sapiens
  misc_RNA (1)...(19): siRNA sense strand
caagguggauuuacuguga

SEQ ID NO: 1115483 - RNA, 19 nt, Homo sapiens
  misc_RNA (1)...(19): siRNA sense strand
gaacgaggcccagaaguuu

SEQ ID NO: 1115484 - RNA, 19 nt, Homo sapiens
  misc_RNA (1)...(19): siRNA sense strand
gauuaucacuggaagauug

SEQ ID NO: 1115485 - RNA, 19 nt, Homo sapiens
  misc_RNA (1)...(19): siRNA sense strand
caacucaccuaucugguuu

SEQ ID NO: 1115486 - RNA, 19 nt, Homo sapiens
  misc_RNA (1)...(19): siRNA sense strand
caacuuccuugcaauguaa

SEQ ID NO: 1115487 - RNA, 19 nt, Homo sapiens
  misc_RNA (1)...(19): siRNA sense strand
gcagaaacauaagcaauau

SEQ ID NO: 1115488 - RNA, 19 nt, Homo sapiens
  misc_RNA (1)...(19): siRNA sense strand
caccagcucuuacagaaua

SEQ ID NO: 1115489 - RNA, 19 nt, Homo sapiens
  misc_RNA (1)...(19): siRNA sense strand
guaauugucaccugucuua

SEQ ID NO: 1115490 - RNA, 19 nt, Homo sapiens
  misc_RNA (1)...(19): siRNA sense strand
ggauacagaucuuccauuc

SEQ ID NO: 1115491 - RNA, 19 nt, Homo sapiens
  misc_RNA (1)...(19): siRNA sense strand
cuacucaacucccuucuuu

SEQ ID NO: 1115492 - RNA, 19 nt, Homo sapiens
  misc_RNA (1)...(19): siRNA sense strand
gaacugugauguugagaca

SEQ ID NO: 1115493 - RNA, 19 nt, Homo sapiens
  misc_RNA (1)...(19): siRNA sense strand
gaagcaauguucugagugu

SEQ ID NO: 1115494 - RNA, 19 nt, Homo sapiens
  misc_RNA (1)...(19): siRNA sense strand
cagaugggauuugcuaaua

SEQ ID NO: 1115495 - RNA, 19 nt, Homo sapiens
  misc_RNA (1)...(19): siRNA sense strand
acacagauuugccgccuua

SEQ ID NO: 1115496 - RNA, 19 nt, Homo sapiens
  misc_RNA (1)...(19): siRNA sense strand
ggccuuaccucuacauuug

SEQ ID NO: 1115497 - RNA, 19 nt, Homo sapiens
  misc_RNA (1)...(19): siRNA sense strand
gaauugaucucuauuucuc

SEQ ID NO: 1115498 - RNA, 19 nt, Homo sapiens
  misc_RNA (1)...(19): siRNA sense strand
gcgagcaucuggugugaaa

SEQ ID NO: 1115499 - RNA, 19 nt, Homo sapiens
  misc_RNA (1)...(19): siRNA sense strand
gaacuguccuuguggauac

SEQ ID NO: 1115500 - RNA, 19 nt, Homo sapiens
  misc_RNA (1)...(19): siRNA sense strand
ggaaauagagguagaugga

SEQ ID NO: 1115501 - RNA, 19 nt, Homo sapiens
  misc_RNA (1)...(19): siRNA sense strand
gaauugcacucuuuucaua

SEQ ID NO: 1115502 - RNA, 19 nt, Homo sapiens
  misc_RNA (1)...(19): siRNA sense strand
aauguuagcuucucaguau

SEQ ID NO: 1115503 - RNA, 19 nt, Homo sapiens
  misc_RNA (1)...(19): siRNA sense strand
ccuauacugucacuaauaa

SEQ ID NO: 1115504 - RNA, 19 nt, Homo sapiens
  misc_RNA (1)...(19): siRNA sense strand
gauauugccucaggaaaug

SEQ ID NO: 1115505 - RNA, 19 nt, Homo sapiens
  misc_RNA (1)...(19): siRNA sense strand
gagcucagaucacacucua

SEQ ID NO: 1115506 - RNA, 19 nt, Homo sapiens
  misc_RNA (1)...(19): siRNA sense strand
ggaagguguuagccugaua

SEQ ID NO: 1115507 - RNA, 19 nt, Homo sapiens
  misc_RNA (1)...(19): siRNA sense strand
guucuacuuuccuucauua

SEQ ID NO: 1115508 - RNA, 19 nt, Homo sapiens
  misc_RNA (1)...(19): siRNA sense strand
ggaccaggaugcuaaagau

SEQ ID NO: 1115509 - RNA, 19 nt, Homo sapiens
  misc_RNA (1)...(19): siRNA sense strand
ccacgucagucuauauuga

SEQ ID NO: 1115510 - RNA, 19 nt, Homo sapiens
  misc_RNA (1)...(19): siRNA sense strand
ggaagccucuugaccauag

SEQ ID NO: 1115511 - RNA, 19 nt, Homo sapiens
  misc_RNA (1)...(19): siRNA sense strand
ggcauuccaugugauauua

SEQ ID NO: 1115512 - RNA, 19 nt, Homo sapiens
  misc_RNA (1)...(19): siRNA sense strand
gaacuucgggucaccauug

SEQ ID NO: 1115513 - RNA, 19 nt, Homo sapiens
  misc_RNA (1)...(19): siRNA sense strand
caccugaguuuacauauug

SEQ ID NO: 1115514 - RNA, 19 nt, Homo sapiens
  misc_RNA (1)...(19): siRNA sense strand
auacagggcugcacaguga

SEQ ID NO: 1115515 - RNA, 19 nt, Homo sapiens
  misc_RNA (1)...(19): siRNA sense strand
uaucuuaagucaccuuuga

SEQ ID NO: 1115516 - RNA, 19 nt, Homo sapiens
  misc_RNA (1)...(19): siRNA sense strand
gcagugaugccucggauaa

SEQ ID NO: 1115517 - RNA, 19 nt, Homo sapiens
  misc_RNA (1)...(19): siRNA sense strand
caucuauccucuccaagua

SEQ ID NO: 1115518 - RNA, 19 nt, Homo sapiens
  misc_RNA (1)...(19): siRNA sense strand
ggacuauucugcaguucuu

SEQ ID NO: 1115519 - RNA, 19 nt, Homo sapiens
  misc_RNA (1)...(19): siRNA sense strand
aaacaaccauugaggaguu

SEQ ID NO: 1115520 - RNA, 19 nt, Homo sapiens
  misc_RNA (1)...(19): siRNA sense strand
gaacguggaucacagucau

SEQ ID NO: 1115521 - RNA, 19 nt, Homo sapiens
  misc_RNA (1)...(19): siRNA sense strand
caacuuugcuccugguaau

SEQ ID NO: 1115522 - RNA, 19 nt, Homo sapiens
  misc_RNA (1)...(19): siRNA sense strand
gaauugacgucuuggaaag

SEQ ID NO: 1115523 - RNA, 19 nt, Homo sapiens
  misc_RNA (1)...(19): siRNA sense strand
uuccagagcuucacaguuu

SEQ ID NO: 1115524 - RNA, 19 nt, Homo sapiens
  misc_RNA (1)...(19): siRNA sense strand
gucaggacauggaaauaua

SEQ ID NO: 1115525 - RNA, 19 nt, Homo sapiens
  misc_RNA (1)...(19): siRNA sense strand
gaagguggacaguaaugua

SEQ ID NO: 1115526 - RNA, 19 nt, Homo sapiens
  misc_RNA (1)...(19): siRNA sense strand
gaacaccacgucagucuau

SEQ ID NO: 1115527 - RNA, 19 nt, Homo sapiens
  misc_RNA (1)...(19): siRNA sense strand
gguguuagccugauauuau

SEQ ID NO: 1115528 - RNA, 19 nt, Homo sapiens
  misc_RNA (1)...(19): siRNA sense strand
gaacacguguggaccuugu

SEQ ID NO: 1115529 - RNA, 19 nt, Homo sapiens
  misc_RNA (1)...(19): siRNA sense strand
gaaggaggaucuauacacu

SEQ ID NO: 1115530 - RNA, 19 nt, Homo sapiens
  misc_RNA (1)...(19): siRNA sense strand
gcuaucggcuagaucagua

SEQ ID NO: 1115531 - RNA, 19 nt, Homo sapiens
  misc_RNA (1)...(19): siRNA sense strand
gaggauugguguccagauu

SEQ ID NO: 1115532 - RNA, 19 nt, Homo sapiens
  misc_RNA (1)...(19): siRNA sense strand
gggaagcuguuauccuauu

SEQ ID NO: 1115533 - RNA, 19 nt, Homo sapiens
  misc_RNA (1)...(19): siRNA sense strand
ggaaaugagagaauuauag

SEQ ID NO: 1115534 - RNA, 19 nt, Homo sapiens
  misc_RNA (1)...(19): siRNA sense strand
ucaaagggcuguaugugau

SEQ ID NO: 1115535 - RNA, 19 nt, Homo sapiens
  misc_RNA (1)...(19): siRNA sense strand
caaccacugucaauuaugu

SEQ ID NO: 1115536 - RNA, 19 nt, Homo sapiens
  misc_RNA (1)...(19): siRNA sense strand
gaacugauggugucuaaca

SEQ ID NO: 1115537 - RNA, 19 nt, Homo sapiens
  misc_RNA (1)...(19): siRNA sense strand
gaacauugcacauucuugu

SEQ ID NO: 1115538 - RNA, 19 nt, Homo sapiens
  misc_RNA (1)...(19): siRNA sense strand
ggacaguaauguauucuac

SEQ ID NO: 1115539 - RNA, 19 nt, Homo sapiens
  misc_RNA (1)...(19): siRNA sense strand
gacacacucagaaauauua

SEQ ID NO: 1115540 - RNA, 19 nt, Homo sapiens
  misc_RNA (1)...(19): siRNA sense strand
ccagacacacucagaaaua

SEQ ID NO: 1115541 - RNA, 19 nt, Homo sapiens
  misc_RNA (1)...(19): siRNA sense strand
uaaagaauaccaccuguga

SEQ ID NO: 1115542 - RNA, 19 nt, Homo sapiens
  misc_RNA (1)...(19): siRNA sense strand
gaacugcuuuggucugaca

SEQ ID NO: 1115543 - RNA, 19 nt, Homo sapiens
  misc_RNA (1)...(19): siRNA sense strand
gacccgaaauauacaaauu

SEQ ID NO: 1115544 - RNA, 19 nt, Homo sapiens
  misc_RNA (1)...(19): siRNA sense strand
auacagaucuuccauucuu

SEQ ID NO: 1115545 - RNA, 19 nt, Homo sapiens
  misc_RNA (1)...(19): siRNA sense strand
caucguaugucuauugguu

SEQ ID NO: 1115546 - RNA, 19 nt, Homo sapiens
  misc_RNA (1)...(19): siRNA sense strand
gggaacugauggugucuaa

SEQ ID NO: 1115547 - RNA, 19 nt, Homo sapiens
  misc_RNA (1)...(19): siRNA sense strand
ggaaagugaugcaaauacu

SEQ ID NO: 1115548 - RNA, 19 nt, Homo sapiens
  misc_RNA (1)...(19): siRNA sense strand
gcacacgccauccuuguuu

SEQ ID NO: 1115549 - RNA, 19 nt, Homo sapiens
  misc_RNA (1)...(19): siRNA sense strand
guguucaccucaagaguua

SEQ ID NO: 1115550 - RNA, 19 nt, Homo sapiens
  misc_RNA (1)...(19): siRNA sense strand
uccagacacuucuacauua

SEQ ID NO: 1115551 - RNA, 19 nt, Homo sapiens
  misc_RNA (1)...(19): siRNA sense strand
ggagaaaucacaaauagca

SEQ ID NO: 1115552 - RNA, 19 nt, Homo sapiens
  misc_RNA (1)...(19): siRNA sense strand
gaaugugacugugaucaga

SEQ ID NO: 1115553 - RNA, 19 nt, Homo sapiens
  misc_RNA (1)...(19): siRNA sense strand
cuaauacagugauuucuga

SEQ ID NO: 1115554 - RNA, 19 nt, Homo sapiens
  misc_RNA (1)...(19): siRNA sense strand
gaaacuucuuccuuacuug

SEQ ID NO: 1115555 - RNA, 19 nt, Homo sapiens
  misc_RNA (1)...(19): siRNA sense strand
aguagucuguccugaauua

SEQ ID NO: 1115556 - RNA, 19 nt, Homo sapiens
  misc_RNA (1)...(19): siRNA sense strand
ggaguuggguguucuuuac

SEQ ID NO: 1115557 - RNA, 19 nt, Homo sapiens
  misc_RNA (1)...(19): siRNA sense strand
gaauaaugccgaugacuuc

SEQ ID NO: 1115558 - RNA, 19 nt, Homo sapiens
  misc_RNA (1)...(19): siRNA sense strand
ugaacaagauccugaagau

SEQ ID NO: 1115559 - RNA, 19 nt, Homo sapiens
  misc_RNA (1)...(19): siRNA sense strand
gaaacaacgugaucaucca

SEQ ID NO: 1115560 - RNA, 19 nt, Homo sapiens
  misc_RNA (1)...(19): siRNA sense strand
ucaacuuacugcacauuaa

SEQ ID NO: 1115561 - RNA, 19 nt, Homo sapiens
  misc_RNA (1)...(19): siRNA sense strand
uggcugaucucucugauga

SEQ ID NO: 1115562 - RNA, 19 nt, Homo sapiens
  misc_RNA (1)...(19): siRNA sense strand
caaggagaaaucacaaaua

SEQ ID NO: 1115563 - RNA, 19 nt, Homo sapiens
  misc_RNA (1)...(19): siRNA sense strand
gaauuuccgucucuaucaa

SEQ ID NO: 1115564 - RNA, 19 nt, Homo sapiens
  misc_RNA (1)...(19): siRNA sense strand
acauaugucucuuccuuaa

SEQ ID NO: 1115565 - RNA, 19 nt, Homo sapiens
  misc_RNA (1)...(19): siRNA sense strand
ugaugucccuguacaaauu

SEQ ID NO: 1115566 - RNA, 19 nt, Homo sapiens
  misc_RNA (1)...(19): siRNA sense strand
gaacaaacaucacaauuac

SEQ ID NO: 1115567 - RNA, 19 nt, Homo sapiens
  misc_RNA (1)...(19): siRNA sense strand
gcacggagaugagauauau

SEQ ID NO: 1115568 - RNA, 19 nt, Homo sapiens
  misc_RNA (1)...(19): siRNA sense strand
gaaaauaucucuucaagga

SEQ ID NO: 1115569 - RNA, 19 nt, Homo sapiens
  misc_RNA (1)...(19): siRNA sense strand
cgagauagcuguacuuuca

SEQ ID NO: 1115570 - RNA, 19 nt, Homo sapiens
  misc_RNA (1)...(19): siRNA sense strand
gcagaagacucccaaguug

SEQ ID NO: 1115571 - RNA, 19 nt, Homo sapiens
  misc_RNA (1)...(19): siRNA sense strand
uauaauagcuccuguaaca

SEQ ID NO: 1115572 - RNA, 19 nt, Homo sapiens
  misc_RNA (1)...(19): siRNA sense strand
guacucaucuguugaauuc

SEQ ID NO: 1115573 - RNA, 19 nt, Homo sapiens
  misc_RNA (1)...(19): siRNA sense strand
gcagagaacaguggaauua

SEQ ID NO: 1115574 - RNA, 19 nt, Homo sapiens
  misc_RNA (1)...(19): siRNA sense strand
guauauggcuggauuauca

SEQ ID NO: 1115575 - RNA, 19 nt, Homo sapiens
  misc_RNA (1)...(19): siRNA sense strand
ccaauuaccgucaagauua

SEQ ID NO: 1115576 - RNA, 19 nt, Homo sapiens
  misc_RNA (1)...(19): siRNA sense strand
gguauggucucuuuguaua

SEQ ID NO: 1115577 - RNA, 19 nt, Homo sapiens
  misc_RNA (1)...(19): siRNA sense strand
aaacaaccacugucaauua

SEQ ID NO: 1115578 - RNA, 19 nt, Homo sapiens
  misc_RNA (1)...(19): siRNA sense strand
gaaguaaccucuccaacuc

SEQ ID NO: 1115579 - RNA, 19 nt, Homo sapiens
  misc_RNA (1)...(19): siRNA sense strand
auacagaccucuaucuuaa

SEQ ID NO: 1115580 - RNA, 19 nt, Homo sapiens
  misc_RNA (1)...(19): siRNA sense strand
aaggaaaucucacuaauga

SEQ ID NO: 1115581 - RNA, 19 nt, Homo sapiens
  misc_RNA (1)...(19): siRNA sense strand
gaaagucaaugguccacaa

SEQ ID NO: 1115582 - RNA, 19 nt, Homo sapiens
  misc_RNA (1)...(19): siRNA sense strand
caagguggauuuacuguga

SEQ ID NO: 1115583 - RNA, 19 nt, Homo sapiens
  misc_RNA (1)...(19): siRNA sense strand
gaacgaggcccagaaguuu

SEQ ID NO: 1115584 - RNA, 19 nt, Homo sapiens
  misc_RNA (1)...(19): siRNA sense strand
gauuaucacuggaagauug

SEQ ID NO: 1115585 - RNA, 19 nt, Homo sapiens
  misc_RNA (1)...(19): siRNA sense strand
caacucaccuaucugguuu

SEQ ID NO: 1115586 - RNA, 19 nt, Homo sapiens
  misc_RNA (1)...(19): siRNA sense strand
caacuuccuugcaauguaa

SEQ ID NO: 1115587 - RNA, 19 nt, Homo sapiens
  misc_RNA (1)...(19): siRNA sense strand
gcagaaacauaagcaauau

SEQ ID NO: 1115588 - RNA, 19 nt, Homo sapiens
  misc_RNA (1)...(19): siRNA sense strand
caccagcucuuacagaaua

SEQ ID NO: 1115589 - RNA, 19 nt, Homo sapiens
  misc_RNA (1)...(19): siRNA sense strand
guaauugucaccugucuua

SEQ ID NO: 1115590 - RNA, 19 nt, Homo sapiens
  misc_RNA (1)...(19): siRNA sense strand
ggauacagaucuuccauuc

SEQ ID NO: 1115591 - RNA, 19 nt, Homo sapiens
  misc_RNA (1)...(19): siRNA sense strand
cuacucaacucccuucuuu

SEQ ID NO: 1115592 - RNA, 19 nt, Homo sapiens
  misc_RNA (1)...(19): siRNA sense strand
gaacugugauguugagaca

SEQ ID NO: 1115593 - RNA, 19 nt, Homo sapiens
  misc_RNA (1)...(19): siRNA sense strand
gaagcaauguucugagugu

SEQ ID NO: 1115594 - RNA, 19 nt, Homo sapiens
  misc_RNA (1)...(19): siRNA sense strand
cagaugggauuugcuaaua

SEQ ID NO: 1115595 - RNA, 19 nt, Homo sapiens
  misc_RNA (1)...(19): siRNA sense strand
acacagauuugccgccuua

SEQ ID NO: 1115596 - RNA, 19 nt, Homo sapiens
  misc_RNA (1)...(19): siRNA sense strand
ggccuuaccucuacauuug

SEQ ID NO: 1115597 - RNA, 19 nt, Homo sapiens
  misc_RNA (1)...(19): siRNA sense strand
gaauugaucucuauuucuc

SEQ ID NO: 1115598 - RNA, 19 nt, Homo sapiens
  misc_RNA (1)...(19): siRNA sense strand
gcgagcaucuggugugaaa

SEQ ID NO: 1115599 - RNA, 19 nt, Homo sapiens
  misc_RNA (1)...(19): siRNA sense strand
gaacuguccuuguggauac

SEQ ID NO: 1115600 - RNA, 19 nt, Homo sapiens
  misc_RNA (1)...(19): siRNA sense strand
ggaaauagagguagaugga

SEQ ID NO: 1115601 - RNA, 19 nt, Homo sapiens
  misc_RNA (1)...(19): siRNA sense strand
gaauugcacucuuuucaua

SEQ ID NO: 1115602 - RNA, 19 nt, Homo sapiens
  misc_RNA (1)...(19): siRNA sense strand
aauguuagcuucucaguau

SEQ ID NO: 1115603 - RNA, 19 nt, Homo sapiens
  misc_RNA (1)...(19): siRNA sense strand
ccuauacugucacuaauaa

SEQ ID NO: 1115604 - RNA, 19 nt, Homo sapiens
  misc_RNA (1)...(19): siRNA sense strand
gauauugccucaggaaaug

SEQ ID NO: 1115605 - RNA, 19 nt, Homo sapiens
  misc_RNA (1)...(19): siRNA sense strand
gagcucagaucacacucua

SEQ ID NO: 1115606 - RNA, 19 nt, Homo sapiens
  misc_RNA (1)...(19): siRNA sense strand
ggaagguguuagccugaua

SEQ ID NO: 1115607 - RNA, 19 nt, Homo sapiens
  misc_RNA (1)...(19): siRNA sense strand
guucuacuuuccuucauua

SEQ ID NO: 1115608 - RNA, 19 nt, Homo sapiens
  misc_RNA (1)...(19): siRNA sense strand
ggaccaggaugcuaaagau

SEQ ID NO: 1115609 - RNA, 19 nt, Homo sapiens
  misc_RNA (1)...(19): siRNA sense strand
ccacgucagucuauauuga

SEQ ID NO: 1115610 - RNA, 19 nt, Homo sapiens
  misc_RNA (1)...(19): siRNA sense strand
ggaagccucuugaccauag

SEQ ID NO: 1115611 - RNA, 19 nt, Homo sapiens
  misc_RNA (1)...(19): siRNA sense strand
ggcauuccaugugauauua

SEQ ID NO: 1115612 - RNA, 19 nt, Homo sapiens
  misc_RNA (1)...(19): siRNA sense strand
gaacuucgggucaccauug

SEQ ID NO: 1115613 - RNA, 19 nt, Homo sapiens
  misc_RNA (1)...(19): siRNA sense strand
caccugaguuuacauauug

SEQ ID NO: 1115614 - RNA, 19 nt, Homo sapiens
  misc_RNA (1)...(19): siRNA sense strand
auacagggcugcacaguga

SEQ ID NO: 1115615 - RNA, 19 nt, Homo sapiens
  misc_RNA (1)...(19): siRNA sense strand
uaucuuaagucaccuuuga

SEQ ID NO: 1115616 - RNA, 19 nt, Homo sapiens
  misc_RNA (1)...(19): siRNA sense strand
gcagugaugccucggauaa

SEQ ID NO: 1115617 - RNA, 19 nt, Homo sapiens
  misc_RNA (1)...(19): siRNA sense strand
caucuauccucuccaagua

SEQ ID NO: 1115618 - RNA, 19 nt, Homo sapiens
  misc_RNA (1)...(19): siRNA sense strand
ggacuauucugcaguucuu

SEQ ID NO: 1115619 - RNA, 19 nt, Homo sapiens
  misc_RNA (1)...(19): siRNA sense strand
aaacaaccauugaggaguu

SEQ ID NO: 1115620 - RNA, 19 nt, Homo sapiens
  misc_RNA (1)...(19): siRNA sense strand
gaacguggaucacagucau

SEQ ID NO: 1115621 - RNA, 19 nt, Homo sapiens
  misc_RNA (1)...(19): siRNA sense strand
caacuuugcuccugguaau

SEQ ID NO: 1115622 - RNA, 19 nt, Homo sapiens
  misc_RNA (1)...(19): siRNA sense strand
gaauugacgucuuggaaag

SEQ ID NO: 1115623 - RNA, 19 nt, Homo sapiens
  misc_RNA (1)...(19): siRNA sense strand
uuccagagcuucacaguuu

SEQ ID NO: 1115624 - RNA, 19 nt, Homo sapiens
  misc_RNA (1)...(19): siRNA sense strand
gucaggacauggaaauaua

SEQ ID NO: 1115625 - RNA, 19 nt, Homo sapiens
  misc_RNA (1)...(19): siRNA sense strand
gaagguggacaguaaugua

SEQ ID NO: 1115626 - RNA, 19 nt, Homo sapiens
  misc_RNA (1)...(19): siRNA sense strand
gaacaccacgucagucuau

SEQ ID NO: 1115627 - RNA, 19 nt, Homo sapiens
  misc_RNA (1)...(19): siRNA sense strand
gguguuagccugauauuau

SEQ ID NO: 1115628 - RNA, 19 nt, Homo sapiens
  misc_RNA (1)...(19): siRNA sense strand
gaacacguguggaccuugu

SEQ ID NO: 1115629 - RNA, 19 nt, Homo sapiens
  misc_RNA (1)...(19): siRNA sense strand
gaaggaggaucuauacacu

SEQ ID NO: 1115630 - RNA, 19 nt, Homo sapiens
  misc_RNA (1)...(19): siRNA sense strand
gcuaucggcuagaucagua

SEQ ID NO: 1115631 - RNA, 19 nt, Homo sapiens
  misc_RNA (1)...(19): siRNA sense strand
gaggauugguguccagauu

SEQ ID NO: 1115632 - RNA, 19 nt, Homo sapiens
  misc_RNA (1)...(19): siRNA sense strand
gggaagcuguuauccuauu

SEQ ID NO: 1115633 - RNA, 19 nt, Homo sapiens
  misc_RNA (1)...(19): siRNA sense strand
ggaaaugagagaauuauag

SEQ ID NO: 1115634 - RNA, 19 nt, Homo sapiens
  misc_RNA (1)...(19): siRNA sense strand
ucaaagggcuguaugugau

SEQ ID NO: 1115635 - RNA, 19 nt, Homo sapiens
  misc_RNA (1)...(19): siRNA sense strand
caaccacugucaauuaugu

SEQ ID NO: 1115636 - RNA, 19 nt, Homo sapiens
  misc_RNA (1)...(19): siRNA sense strand
gaacugauggugucuaaca

SEQ ID NO: 1115637 - RNA, 19 nt, Homo sapiens
  misc_RNA (1)...(19): siRNA sense strand
gaacauugcacauucuugu

SEQ ID NO: 1115638 - RNA, 19 nt, Homo sapiens
  misc_RNA (1)...(19): siRNA sense strand
ggacaguaauguauucuac

SEQ ID NO: 1115639 - RNA, 19 nt, Homo sapiens
  misc_RNA (1)...(19): siRNA sense strand
gacacacucagaaauauua

SEQ ID NO: 1115640 - RNA, 19 nt, Homo sapiens
  misc_RNA (1)...(19): siRNA sense strand
ccagacacacucagaaaua

SEQ ID NO: 1115641 - RNA, 19 nt, Homo sapiens
  misc_RNA (1)...(19): siRNA sense strand
uaaagaauaccaccuguga

SEQ ID NO: 1115642 - RNA, 19 nt, Homo sapiens
  misc_RNA (1)...(19): siRNA sense strand
gaacugcuuuggucugaca

SEQ ID NO: 1115643 - RNA, 19 nt, Homo sapiens
  misc_RNA (1)...(19): siRNA sense strand
gacccgaaauauacaaauu

SEQ ID NO: 1115644 - RNA, 19 nt, Homo sapiens
  misc_RNA (1)...(19): siRNA sense strand
auacagaucuuccauucuu

SEQ ID NO: 1115645 - RNA, 19 nt, Homo sapiens
  misc_RNA (1)...(19): siRNA sense strand
caucguaugucuauugguu

SEQ ID NO: 1115646 - RNA, 19 nt, Homo sapiens
  misc_RNA (1)...(19): siRNA sense strand
gggaacugauggugucuaa

SEQ ID NO: 1115647 - RNA, 19 nt, Homo sapiens
  misc_RNA (1)...(19): siRNA sense strand
ggaaagugaugcaaauacu

SEQ ID NO: 1115648 - RNA, 19 nt, Homo sapiens
  misc_RNA (1)...(19): siRNA sense strand
gcacacgccauccuuguuu

SEQ ID NO: 1115649 - RNA, 19 nt, Homo sapiens
  misc_RNA (1)...(19): siRNA sense strand
guguucaccucaagaguua

SEQ ID NO: 1115650 - RNA, 19 nt, Homo sapiens
  misc_RNA (1)...(19): siRNA sense strand
uccagacacuucuacauua

SEQ ID NO: 1115651 - RNA, 19 nt, Homo sapiens
  misc_RNA (1)...(19): siRNA sense strand
ggagaaaucacaaauagca

SEQ ID NO: 1115652 - RNA, 19 nt, Homo sapiens
  misc_RNA (1)...(19): siRNA sense strand
gaaugugacugugaucaga

SEQ ID NO: 1115653 - RNA, 19 nt, Homo sapiens
  misc_RNA (1)...(19): siRNA sense strand
cuaauacagugauuucuga

SEQ ID NO: 1115654 - RNA, 19 nt, Homo sapiens
  misc_RNA (1)...(19): siRNA sense strand
gaaacuucuuccuuacuug

SEQ ID NO: 1115655 - RNA, 19 nt, Homo sapiens
  misc_RNA (1)...(19): siRNA sense strand
aguagucuguccugaauua

SEQ ID NO: 1115656 - RNA, 19 nt, Homo sapiens
  misc_RNA (1)...(19): siRNA sense strand
ggaguuggguguucuuuac

SEQ ID NO: 1115657 - RNA, 19 nt, Homo sapiens
  misc_RNA (1)...(19): siRNA sense strand
gaauaaugccgaugacuuc

SEQ ID NO: 1115658 - RNA, 19 nt, Homo sapiens
  misc_RNA (1)...(19): siRNA sense strand
ugaacaagauccugaagau

SEQ ID NO: 1115659 - RNA, 19 nt, Homo sapiens
  misc_RNA (1)...(19): siRNA sense strand
gaaacaacgugaucaucca

SEQ ID NO: 1115660 - RNA, 19 nt, Homo sapiens
  misc_RNA (1)...(19): siRNA sense strand
ucaacuuacugcacauuaa

SEQ ID NO: 1115661 - RNA, 19 nt, Homo sapiens
  misc_RNA (1)...(19): siRNA sense strand
uggcugaucucucugauga

SEQ ID NO: 1115662 - RNA, 19 nt, Homo sapiens
  misc_RNA (1)...(19): siRNA sense strand
caaggagaaaucacaaaua

SEQ ID NO: 1115663 - RNA, 19 nt, Homo sapiens
  misc_RNA (1)...(19): siRNA sense strand
gaauuuccgucucuaucaa

SEQ ID NO: 1115664 - RNA, 19 nt, Homo sapiens
  misc_RNA (1)...(19): siRNA sense strand
acauaugucucuuccuuaa

SEQ ID NO: 1115665 - RNA, 19 nt, Homo sapiens
  misc_RNA (1)...(19): siRNA sense strand
ugaugucccuguacaaauu

SEQ ID NO: 1115666 - RNA, 19 nt, Homo sapiens
  misc_RNA (1)...(19): siRNA sense strand
gaaagcaucuauugugaaa

SEQ ID NO: 1115667 - RNA, 19 nt, Homo sapiens
  misc_RNA (1)...(19): siRNA sense strand
gaaaggagauguaauggau

SEQ ID NO: 1115668 - RNA, 19 nt, Homo sapiens
  misc_RNA (1)...(19): siRNA sense strand
gaagaucaaugguaugguu

SEQ ID NO: 1115669 - RNA, 19 nt, Homo sapiens
  misc_RNA (1)...(19): siRNA sense strand
caagaagaaugagagauua

SEQ ID NO: 1115670 - RNA, 19 nt, Homo sapiens
  misc_RNA (1)...(19): siRNA sense strand
gauuauggcuucuggauga

SEQ ID NO: 1115671 - RNA, 19 nt, Homo sapiens
  misc_RNA (1)...(19): siRNA sense strand
gcaggaagaucaaugguau

SEQ ID NO: 1115672 - RNA, 19 nt, Homo sapiens
  misc_RNA (1)...(19): siRNA sense strand
gagagaggaugaauuauca

SEQ ID NO: 1115673 - RNA, 19 nt, Homo sapiens
  misc_RNA (1)...(19): siRNA sense strand
ugagagagaggaugaauua

SEQ ID NO: 1115674 - RNA, 19 nt, Homo sapiens
  misc_RNA (1)...(19): siRNA sense strand
gaacaagaguuggacauca

SEQ ID NO: 1115675 - RNA, 19 nt, Homo sapiens
  misc_RNA (1)...(19): siRNA sense strand
ggacaaaggugaucgucau

SEQ ID NO: 1115676 - RNA, 19 nt, Homo sapiens
  misc_RNA (1)...(19): siRNA sense strand
ccgcuuaugugaaauuuaa

SEQ ID NO: 1115677 - RNA, 19 nt, Homo sapiens
  misc_RNA (1)...(19): siRNA sense strand
uagcagcagucgucaauaa

SEQ ID NO: 1115678 - RNA, 19 nt, Homo sapiens
  misc_RNA (1)...(19): siRNA sense strand
ggaagaacuuguagaacau

SEQ ID NO: 1115679 - RNA, 19 nt, Homo sapiens
  misc_RNA (1)...(19): siRNA sense strand
caaacuauguaacugaaga

SEQ ID NO: 1115680 - RNA, 19 nt, Homo sapiens
  misc_RNA (1)...(19): siRNA sense strand
ggagauguaauggauguua

SEQ ID NO: 1115681 - RNA, 19 nt, Homo sapiens
  misc_RNA (1)...(19): siRNA sense strand
uggaagaacuuguagaaca

SEQ ID NO: 1115682 - RNA, 19 nt, Homo sapiens
  misc_RNA (1)...(19): siRNA sense strand
cggaaagcaucuauuguga

SEQ ID NO: 1115683 - RNA, 19 nt, Homo sapiens
  misc_RNA (1)...(19): siRNA sense strand
cgagaaaggagauguaaug

SEQ ID NO: 1115684 - RNA, 19 nt, Homo sapiens
  misc_RNA (1)...(19): siRNA sense strand
ugucaagcauuuaucauga

SEQ ID NO: 1115685 - RNA, 19 nt, Homo sapiens
  misc_RNA (1)...(19): siRNA sense strand
ucaagaagaaugagagauu

SEQ ID NO: 1115686 - RNA, 19 nt, Homo sapiens
  misc_RNA (1)...(19): siRNA sense strand
caaaggugaucgucaugga

SEQ ID NO: 1115687 - RNA, 19 nt, Homo sapiens
  misc_RNA (1)...(19): siRNA sense strand
gagauguaauggauguuau

SEQ ID NO: 1115688 - RNA, 19 nt, Homo sapiens
  misc_RNA (1)...(19): siRNA sense strand
cuaacuauguggaaaggaa

SEQ ID NO: 1115689 - RNA, 19 nt, Homo sapiens
  misc_RNA (1)...(19): siRNA sense strand
ggccuucacucacuggaaa

SEQ ID NO: 1115690 - RNA, 19 nt, Homo sapiens
  misc_RNA (1)...(19): siRNA sense strand
gaugggugguggcguggua

SEQ ID NO: 1115691 - RNA, 19 nt, Homo sapiens
  misc_RNA (1)...(19): siRNA sense strand
ggaaagcaucuauugugaa

SEQ ID NO: 1115692 - RNA, 19 nt, Homo sapiens
  misc_RNA (1)...(19): siRNA sense strand
uagcuacaauggacaaguu

SEQ ID NO: 1115693 - RNA, 19 nt, Homo sapiens
  misc_RNA (1)...(19): siRNA sense strand
gcucggaaagcaucuauug

SEQ ID NO: 1115694 - RNA, 19 nt, Homo sapiens
  misc_RNA (1)...(19): siRNA sense strand
gguaguagccaaauuugau

SEQ ID NO: 1115695 - RNA, 19 nt, Homo sapiens
  misc_RNA (1)...(19): siRNA sense strand
ggugguaguagccaaauuu

SEQ ID NO: 1115696 - RNA, 19 nt, Homo sapiens
  misc_RNA (1)...(19): siRNA sense strand
ggaaaugcaggaagaucaa

SEQ ID NO: 1115697 - RNA, 19 nt, Homo sapiens
  misc_RNA (1)...(19): siRNA sense strand
uccauuaacuucagguuug

SEQ ID NO: 1115698 - RNA, 19 nt, Homo sapiens
  misc_RNA (1)...(19): siRNA sense strand
cagaagaaguggugguagu

SEQ ID NO: 1115699 - RNA, 19 nt, Homo sapiens
  misc_RNA (1)...(19): siRNA sense strand
gaugguucccuucaaacua

SEQ ID NO: 1115700 - RNA, 19 nt, Homo sapiens
  misc_RNA (1)...(19): siRNA sense strand
caugcccgcuuaugugaaa

SEQ ID NO: 1115701 - RNA, 19 nt, Homo sapiens
  misc_RNA (1)...(19): siRNA sense strand
cuauguaacugaagaaggu

SEQ ID NO: 1115702 - RNA, 19 nt, Homo sapiens
  misc_RNA (1)...(19): siRNA sense strand
gaagaacuuguagaacauu

SEQ ID NO: 1115703 - RNA, 19 nt, Homo sapiens
  misc_RNA (1)...(19): siRNA sense strand
ggcaauccuugguauuaug

SEQ ID NO: 1115704 - RNA, 19 nt, Homo sapiens
  misc_RNA (1)...(19): siRNA sense strand
gucaauaaccuaaauacug

SEQ ID NO: 1115705 - RNA, 19 nt, Homo sapiens
  misc_RNA (1)...(19): siRNA sense strand
ccauguggguucucuguca

SEQ ID NO: 1115706 - RNA, 19 nt, Homo sapiens
  misc_RNA (1)...(19): siRNA sense strand
gcauugggcagcguaaauu

SEQ ID NO: 1115707 - RNA, 19 nt, Homo sapiens
  misc_RNA (1)...(19): siRNA sense strand
uacaggcucuuuacccauu

SEQ ID NO: 1115708 - RNA, 19 nt, Homo sapiens
  misc_RNA (1)...(19): siRNA sense strand
gaagaaugagagauuaugg

SEQ ID NO: 1115709 - RNA, 19 nt, Homo sapiens
  misc_RNA (1)...(19): siRNA sense strand
cauggaagaacuuguagaa

SEQ ID NO: 1115710 - RNA, 19 nt, Homo sapiens
  misc_RNA (1)...(19): siRNA sense strand
caccaggcaucaagcagaa

SEQ ID NO: 1115711 - RNA, 19 nt, Homo sapiens
  misc_RNA (1)...(19): siRNA sense strand
ugguaugguuggucuagua

SEQ ID NO: 1115712 - RNA, 19 nt, Homo sapiens
  misc_RNA (1)...(19): siRNA sense strand
guaguagccaaauuugauu

SEQ ID NO: 1115713 - RNA, 19 nt, Homo sapiens
  misc_RNA (1)...(19): siRNA sense strand
aacaagaguuggacaucaa

SEQ ID NO: 1115714 - RNA, 19 nt, Homo sapiens
  misc_RNA (1)...(19): siRNA sense strand
gauuuccucauucgugaua

SEQ ID NO: 1115715 - RNA, 19 nt, Homo sapiens
  misc_RNA (1)...(19): siRNA sense strand
gugaaucuucgccaaauga

SEQ ID NO: 1115716 - RNA, 19 nt, Homo sapiens
  misc_RNA (1)...(19): siRNA sense strand
caccauggaagaacuugua

SEQ ID NO: 1115717 - RNA, 19 nt, Homo sapiens
  misc_RNA (1)...(19): siRNA sense strand
gcagucgucaauaaccuaa

SEQ ID NO: 1115718 - RNA, 19 nt, Homo sapiens
  misc_RNA (1)...(19): siRNA sense strand
ugaaggggauuuccucauu

SEQ ID NO: 1115719 - RNA, 19 nt, Homo sapiens
  misc_RNA (1)...(19): siRNA sense strand
gagauuauggcuucuggau

SEQ ID NO: 1115720 - RNA, 19 nt, Homo sapiens
  misc_RNA (1)...(19): siRNA sense strand
aaacuauguuaccguuaug

SEQ ID NO: 1115721 - RNA, 19 nt, Homo sapiens
  misc_RNA (1)...(19): siRNA sense strand
aaggagauguaauggaugu

SEQ ID NO: 1115722 - RNA, 19 nt, Homo sapiens
  misc_RNA (1)...(19): siRNA sense strand
guagccaaauuugauuaug

SEQ ID NO: 1115723 - RNA, 19 nt, Homo sapiens
  misc_RNA (1)...(19): siRNA sense strand
ccagagugguggaaaugca

SEQ ID NO: 1115724 - RNA, 19 nt, Homo sapiens
  misc_RNA (1)...(19): siRNA sense strand
uaaauucagcaccauggaa

SEQ ID NO: 1115725 - RNA, 19 nt, Homo sapiens
  misc_RNA (1)...(19): siRNA sense strand
gaagaaguggugguaguag

SEQ ID NO: 1115726 - RNA, 19 nt, Homo sapiens
  misc_RNA (1)...(19): siRNA sense strand
gauguaauggauguuauug

SEQ ID NO: 1115727 - RNA, 19 nt, Homo sapiens
  misc_RNA (1)...(19): siRNA sense strand
gacccagagugguggaaau

SEQ ID NO: 1115728 - RNA, 19 nt, Homo sapiens
  misc_RNA (1)...(19): siRNA sense strand
aaaccuagugugccagauu

SEQ ID NO: 1115729 - RNA, 19 nt, Homo sapiens
  misc_RNA (1)...(19): siRNA sense strand
uaaaugaaagaggacauga

SEQ ID NO: 1115730 - RNA, 19 nt, Homo sapiens
  misc_RNA (1)...(19): siRNA sense strand
agagagaggaugaauuauc

SEQ ID NO: 1115731 - RNA, 19 nt, Homo sapiens
  misc_RNA (1)...(19): siRNA sense strand
gaaggggauuuccucauuc

SEQ ID NO: 1115732 - RNA, 19 nt, Homo sapiens
  misc_RNA (1)...(19): siRNA sense strand
uggcaauccuugguauuau

SEQ ID NO: 1115733 - RNA, 19 nt, Homo sapiens
  misc_RNA (1)...(19): siRNA sense strand
agaagaaguggugguagua

SEQ ID NO: 1115734 - RNA, 19 nt, Homo sapiens
  misc_RNA (1)...(19): siRNA sense strand
gaugaagaacuuaauuucg

SEQ ID NO: 1115735 - RNA, 19 nt, Homo sapiens
  misc_RNA (1)...(19): siRNA sense strand
ccuaaauacugggcaagug

SEQ ID NO: 1115736 - RNA, 19 nt, Homo sapiens
  misc_RNA (1)...(19): siRNA sense strand
ccucauucgugauagugaa

SEQ ID NO: 1115737 - RNA, 19 nt, Homo sapiens
  misc_RNA (1)...(19): siRNA sense strand
uacauuaggccuucacuca

SEQ ID NO: 1115738 - RNA, 19 nt, Homo sapiens
  misc_RNA (1)...(19): siRNA sense strand
uuauguggcccaacaagaa

SEQ ID NO: 1115739 - RNA, 19 nt, Homo sapiens
  misc_RNA (1)...(19): siRNA sense strand
uuggaugguucccuucaaa

SEQ ID NO: 1115740 - RNA, 19 nt, Homo sapiens
  misc_RNA (1)...(19): siRNA sense strand
uagugaaucuucgccaaau

SEQ ID NO: 1115741 - RNA, 19 nt, Homo sapiens
  misc_RNA (1)...(19): siRNA sense strand
cgaguucgaaauuccauga

SEQ ID NO: 1115742 - RNA, 19 nt, Homo sapiens
  misc_RNA (1)...(19): siRNA sense strand
gcaaagucaccaggcauca

SEQ ID NO: 1115743 - RNA, 19 nt, Homo sapiens
  misc_RNA (1)...(19): siRNA sense strand
gaguuggacaucaagaaga

SEQ ID NO: 1115744 - RNA, 19 nt, Homo sapiens
  misc_RNA (1)...(19): siRNA sense strand
cuggcaauccuugguauua

SEQ ID NO: 1115745 - RNA, 19 nt, Homo sapiens
  misc_RNA (1)...(19): siRNA sense strand
uucacucacuggaaaguuu

SEQ ID NO: 1115746 - RNA, 19 nt, Homo sapiens
  misc_RNA (1)...(19): siRNA sense strand
gaaaugcaggaagaucaau

SEQ ID NO: 1115747 - RNA, 19 nt, Homo sapiens
  misc_RNA (1)...(19): siRNA sense strand
aguuggacaucaagaagaa

SEQ ID NO: 1115748 - RNA, 19 nt, Homo sapiens
  misc_RNA (1)...(19): siRNA sense strand
ucggaaagcaucuauugug

SEQ ID NO: 1115749 - RNA, 19 nt, Homo sapiens
  misc_RNA (1)...(19): siRNA sense strand
uaaauacugggcaaguguu

SEQ ID NO: 1115750 - RNA, 19 nt, Homo sapiens
  misc_RNA (1)...(19): siRNA sense strand
gcccgcuuaugugaaauuu

SEQ ID NO: 1115751 - RNA, 19 nt, Homo sapiens
  misc_RNA (1)...(19): siRNA sense strand
uaacuauguggaaaggaaa

SEQ ID NO: 1115752 - RNA, 19 nt, Homo sapiens
  misc_RNA (1)...(19): siRNA sense strand
cauuaggccuucacucacu

SEQ ID NO: 1115753 - RNA, 19 nt, Homo sapiens
  misc_RNA (1)...(19): siRNA sense strand
gaucaaugguaugguuggu

SEQ ID NO: 1115754 - RNA, 19 nt, Homo sapiens
  misc_RNA (1)...(19): siRNA sense strand
ggcagaagaagugguggua

SEQ ID NO: 1115755 - RNA, 19 nt, Homo sapiens
  misc_RNA (1)...(19): siRNA sense strand
auggagaaaugcagugaug

SEQ ID NO: 1115756 - RNA, 19 nt, Homo sapiens
  misc_RNA (1)...(19): siRNA sense strand
gagaaaggagauguaaugg

SEQ ID NO: 1115757 - RNA, 19 nt, Homo sapiens
  misc_RNA (1)...(19): siRNA sense strand
cuaaauacugggcaagugu

SEQ ID NO: 1115758 - RNA, 19 nt, Homo sapiens
  misc_RNA (1)...(19): siRNA sense strand
augguucccuucaaacuau

SEQ ID NO: 1115759 - RNA, 19 nt, Homo sapiens
  misc_RNA (1)...(19): siRNA sense strand
guaaauucagcaccaugga

SEQ ID NO: 1115760 - RNA, 19 nt, Homo sapiens
  misc_RNA (1)...(19): siRNA sense strand
agucgucaauaaccuaaau

SEQ ID NO: 1115761 - RNA, 19 nt, Homo sapiens
  misc_RNA (1)...(19): siRNA sense strand
gaccauguggguucucugu

SEQ ID NO: 1115762 - RNA, 19 nt, Homo sapiens
  misc_RNA (1)...(19): siRNA sense strand
agccaaauuugauuaugug

SEQ ID NO: 1115763 - RNA, 19 nt, Homo sapiens
  misc_RNA (1)...(19): siRNA sense strand
gaaccaucaccuccacagu

SEQ ID NO: 1115764 - RNA, 19 nt, Homo sapiens
  misc_RNA (1)...(19): siRNA sense strand
caaagucaccaggcaucaa

SEQ ID NO: 1115765 - RNA, 19 nt, Homo sapiens
  misc_RNA (1)...(19): siRNA sense strand
gcaauccuugguauuaugg

SEQ ID NO: 1115766 - RNA, 19 nt, Homo sapiens
  misc_RNA (1)...(19): siRNA sense strand
agaaagcucuccuacauua

SEQ ID NO: 1115767 - RNA, 19 nt, Homo sapiens
  misc_RNA (1)...(19): siRNA sense strand
ugaagaggcuguccagaua

SEQ ID NO: 1115768 - RNA, 19 nt, Homo sapiens
  misc_RNA (1)...(19): siRNA sense strand
caacagugcucuggacaua

SEQ ID NO: 1115769 - RNA, 19 nt, Homo sapiens
  misc_RNA (1)...(19): siRNA sense strand
ucagaaagcucuccuacau

SEQ ID NO: 1115770 - RNA, 19 nt, Homo sapiens
  misc_RNA (1)...(19): siRNA sense strand
gcacugccauccacacaga

SEQ ID NO: 1115771 - RNA, 19 nt, Homo sapiens
  misc_RNA (1)...(19): siRNA sense strand
caacaccuguccuuacugu

SEQ ID NO: 1115772 - RNA, 19 nt, Homo sapiens
  misc_RNA (1)...(19): siRNA sense strand
gaagaggcuguccagauaa

SEQ ID NO: 1115773 - RNA, 19 nt, Homo sapiens
  misc_RNA (1)...(19): siRNA sense strand
gagaugagguagguggaaa

SEQ ID NO: 1115774 - RNA, 19 nt, Homo sapiens
  misc_RNA (1)...(19): siRNA sense strand
caaaggaagagcagagaaa

SEQ ID NO: 1115775 - RNA, 19 nt, Homo sapiens
  misc_RNA (1)...(19): siRNA sense strand
acagugcucuggacauaaa

SEQ ID NO: 1115776 - RNA, 19 nt, Homo sapiens
  misc_RNA (1)...(19): siRNA sense strand
ggaagaagagagagacaga

SEQ ID NO: 1115777 - RNA, 19 nt, Homo sapiens
  misc_RNA (1)...(19): siRNA sense strand
gcacuguagucagagauga

SEQ ID NO: 1115778 - RNA, 19 nt, Homo sapiens
  misc_RNA (1)...(19): siRNA sense strand
gagacagacuacagugaug

SEQ ID NO: 1115779 - RNA, 19 nt, Homo sapiens
  misc_RNA (1)...(19): siRNA sense strand
gaagagagagacagacuac

SEQ ID NO: 1115780 - RNA, 19 nt, Homo sapiens
  misc_RNA (1)...(19): siRNA sense strand
aaagcucuccuacauuaua

SEQ ID NO: 1115781 - RNA, 19 nt, Homo sapiens
  misc_RNA (1)...(19): siRNA sense strand
ugagguagguggaaaagua

SEQ ID NO: 1115782 - RNA, 19 nt, Homo sapiens
  misc_RNA (1)...(19): siRNA sense strand
gcuagguggugcccugauu

SEQ ID NO: 1115783 - RNA, 19 nt, Homo sapiens
  misc_RNA (1)...(19): siRNA sense strand
ccaccaagauagaaaugau

SEQ ID NO: 1115784 - RNA, 19 nt, Homo sapiens
  misc_RNA (1)...(19): siRNA sense strand
uaacacaacaccuguccuu

SEQ ID NO: 1115785 - RNA, 19 nt, Homo sapiens
  misc_RNA (1)...(19): siRNA sense strand
gcaaaggaagagcagagaa

SEQ ID NO: 1115786 - RNA, 19 nt, Homo sapiens
  misc_RNA (1)...(19): siRNA sense strand
aagaggcuguccagauaaa

SEQ ID NO: 1115787 - RNA, 19 nt, Homo sapiens
  misc_RNA (1)...(19): siRNA sense strand
ggaaaaguaccuuauauag

SEQ ID NO: 1115788 - RNA, 19 nt, Homo sapiens
  misc_RNA (1)...(19): siRNA sense strand
gauggagacccacuagaug

SEQ ID NO: 1115789 - RNA, 19 nt, Homo sapiens
  misc_RNA (1)...(19): siRNA sense strand
ccuaagugccaccaagaua

SEQ ID NO: 1115790 - RNA, 19 nt, Homo sapiens
  misc_RNA (1)...(19): siRNA sense strand
aagcucuccuacauuauaa

SEQ ID NO: 1115791 - RNA, 19 nt, Homo sapiens
  misc_RNA (1)...(19): siRNA sense strand
uucaaacugugcauuauga

SEQ ID NO: 1115792 - RNA, 19 nt, Homo sapiens
  misc_RNA (1)...(19): siRNA sense strand
gagagacagacuacaguga

SEQ ID NO: 1115793 - RNA, 19 nt, Homo sapiens
  misc_RNA (1)...(19): siRNA sense strand
ggaacaaccauucuaaagc

SEQ ID NO: 1115794 - RNA, 19 nt, Homo sapiens
  misc_RNA (1)...(19): siRNA sense strand
auauagcacuguagucaga

SEQ ID NO: 1115795 - RNA, 19 nt, Homo sapiens
  misc_RNA (1)...(19): siRNA sense strand
gggcuucucaguccuaaug

SEQ ID NO: 1115796 - RNA, 19 nt, Homo sapiens
  misc_RNA (1)...(19): siRNA sense strand
gcucagcauucagagagaa

SEQ ID NO: 1115797 - RNA, 19 nt, Homo sapiens
  misc_RNA (1)...(19): siRNA sense strand
gcucggaacaaccauucua

SEQ ID NO: 1115798 - RNA, 19 nt, Homo sapiens
  misc_RNA (1)...(19): siRNA sense strand
gauaaaucccaagugcuuu

SEQ ID NO: 1115799 - RNA, 19 nt, Homo sapiens
  misc_RNA (1)...(19): siRNA sense strand
gguggugcccugauuguug

SEQ ID NO: 1115800 - RNA, 19 nt, Homo sapiens
  misc_RNA (1)...(19): siRNA sense strand
gaaagcucuccuacauuau

SEQ ID NO: 1115801 - RNA, 19 nt, Homo sapiens
  misc_RNA (1)...(19): siRNA sense strand
aaauauagcacuguaguca

SEQ ID NO: 1115802 - RNA, 19 nt, Homo sapiens
  misc_RNA (1)...(19): siRNA sense strand
cagaaagcucuccuacauu

SEQ ID NO: 1115803 - RNA, 19 nt, Homo sapiens
  misc_RNA (1)...(19): siRNA sense strand
cacaacaccuguccuuacu

SEQ ID NO: 1115804 - RNA, 19 nt, Homo sapiens
  misc_RNA (1)...(19): siRNA sense strand
agauaaaucccaagugcuu

SEQ ID NO: 1115805 - RNA, 19 nt, Homo sapiens
  misc_RNA (1)...(19): siRNA sense strand
gagagagacagacuacagu

SEQ ID NO: 1115806 - RNA, 19 nt, Homo sapiens
  misc_RNA (1)...(19): siRNA sense strand
uaagugccaccaagauaga

SEQ ID NO: 1115807 - RNA, 19 nt, Homo sapiens
  misc_RNA (1)...(19): siRNA sense strand
agaauucuucgaucacaaa

SEQ ID NO: 1115808 - RNA, 19 nt, Homo sapiens
  misc_RNA (1)...(19): siRNA sense strand
guggaaaaguaccuuauau

SEQ ID NO: 1115809 - RNA, 19 nt, Homo sapiens
  misc_RNA (1)...(19): siRNA sense strand
gaggaggagcaaaggaaga

SEQ ID NO: 1115810 - RNA, 19 nt, Homo sapiens
  misc_RNA (1)...(19): siRNA sense strand
guucaaacugugcauuaug

SEQ ID NO: 1115811 - RNA, 19 nt, Homo sapiens
  misc_RNA (1)...(19): siRNA sense strand
agucagagaugagguaggu

SEQ ID NO: 1115812 - RNA, 19 nt, Homo sapiens
  misc_RNA (1)...(19): siRNA sense strand
cggaacaaccauucuaaag

SEQ ID NO: 1115813 - RNA, 19 nt, Homo sapiens
  misc_RNA (1)...(19): siRNA sense strand
gcuucucaguccuaauguu

SEQ ID NO: 1115814 - RNA, 19 nt, Homo sapiens
  misc_RNA (1)...(19): siRNA sense strand
ugauggagacccacuagau

SEQ ID NO: 1115815 - RNA, 19 nt, Homo sapiens
  misc_RNA (1)...(19): siRNA sense strand
gaugggcuucucaguccua

SEQ ID NO: 1115816 - RNA, 19 nt, Homo sapiens
  misc_RNA (1)...(19): siRNA sense strand
cacuagaugugcacaagag

SEQ ID NO: 1115817 - RNA, 19 nt, Homo sapiens
  misc_RNA (1)...(19): siRNA sense strand
ucucaguccuaauguucuu

SEQ ID NO: 1115818 - RNA, 19 nt, Homo sapiens
  misc_RNA (1)...(19): siRNA sense strand
acacaacaccuguccuuac

SEQ ID NO: 1115819 - RNA, 19 nt, Homo sapiens
  misc_RNA (1)...(19): siRNA sense strand
uggcuaucuuccacuguuu

SEQ ID NO: 1115820 - RNA, 19 nt, Homo sapiens
  misc_RNA (1)...(19): siRNA sense strand
cuaagugccaccaagauag

SEQ ID NO: 1115821 - RNA, 19 nt, Homo sapiens
  misc_RNA (1)...(19): siRNA sense strand
ggcuaucuuccacuguuua

SEQ ID NO: 1115822 - RNA, 19 nt, Homo sapiens
  misc_RNA (1)...(19): siRNA sense strand
ccucagggaagaagagaga

SEQ ID NO: 1115823 - RNA, 19 nt, Homo sapiens
  misc_RNA (1)...(19): siRNA sense strand
gaggcuguccagauaaauc

SEQ ID NO: 1115824 - RNA, 19 nt, Homo sapiens
  misc_RNA (1)...(19): siRNA sense strand
auauagaacagcaucaguu

SEQ ID NO: 1115825 - RNA, 19 nt, Homo sapiens
  misc_RNA (1)...(19): siRNA sense strand
guuggcauggugagauuaa

SEQ ID NO: 1115826 - RNA, 19 nt, Homo sapiens
  misc_RNA (1)...(19): siRNA sense strand
aaaggaagagcagagaaau

SEQ ID NO: 1115827 - RNA, 19 nt, Homo sapiens
  misc_RNA (1)...(19): siRNA sense strand
cauccacacagauaucaug

SEQ ID NO: 1115828 - RNA, 19 nt, Homo sapiens
  misc_RNA (1)...(19): siRNA sense strand
caccaagauagaaaugauu

SEQ ID NO: 1115829 - RNA, 19 nt, Homo sapiens
  misc_RNA (1)...(19): siRNA sense strand
agaagagagagacagacua

SEQ ID NO: 1115830 - RNA, 19 nt, Homo sapiens
  misc_RNA (1)...(19): siRNA sense strand
ccacuagaugugcacaaga

SEQ ID NO: 1115831 - RNA, 19 nt, Homo sapiens
  misc_RNA (1)...(19): siRNA sense strand
gcuaucuuccacuguuuau

SEQ ID NO: 1115832 - RNA, 19 nt, Homo sapiens
  misc_RNA (1)...(19): siRNA sense strand
gguggaaaaguaccuuaua

SEQ ID NO: 1115833 - RNA, 19 nt, Homo sapiens
  misc_RNA (1)...(19): siRNA sense strand
agaaagcucuccuacauua

SEQ ID NO: 1115834 - RNA, 19 nt, Homo sapiens
  misc_RNA (1)...(19): siRNA sense strand
ugaagaggcuguccagaua

SEQ ID NO: 1115835 - RNA, 19 nt, Homo sapiens
  misc_RNA (1)...(19): siRNA sense strand
caacagugcucuggacaua

SEQ ID NO: 1115836 - RNA, 19 nt, Homo sapiens
  misc_RNA (1)...(19): siRNA sense strand
ucagaaagcucuccuacau

SEQ ID NO: 1115837 - RNA, 19 nt, Homo sapiens
  misc_RNA (1)...(19): siRNA sense strand
gcacugccauccacacaga

SEQ ID NO: 1115838 - RNA, 19 nt, Homo sapiens
  misc_RNA (1)...(19): siRNA sense strand
caacaccuguccuuacugu

SEQ ID NO: 1115839 - RNA, 19 nt, Homo sapiens
  misc_RNA (1)...(19): siRNA sense strand
gaagaggcuguccagauaa

SEQ ID NO: 1115840 - RNA, 19 nt, Homo sapiens
  misc_RNA (1)...(19): siRNA sense strand
gagaugagguagguggaaa

SEQ ID NO: 1115841 - RNA, 19 nt, Homo sapiens
  misc_RNA (1)...(19): siRNA sense strand
caaaggaagagcagagaaa

SEQ ID NO: 1115842 - RNA, 19 nt, Homo sapiens
  misc_RNA (1)...(19): siRNA sense strand
acagugcucuggacauaaa

SEQ ID NO: 1115843 - RNA, 19 nt, Homo sapiens
  misc_RNA (1)...(19): siRNA sense strand
ggaagaagagagagacaga

SEQ ID NO: 1115844 - RNA, 19 nt, Homo sapiens
  misc_RNA (1)...(19): siRNA sense strand
gcacuguagucagagauga

SEQ ID NO: 1115845 - RNA, 19 nt, Homo sapiens
  misc_RNA (1)...(19): siRNA sense strand
gagacagacuacagugaug

SEQ ID NO: 1115846 - RNA, 19 nt, Homo sapiens
  misc_RNA (1)...(19): siRNA sense strand
gaagagagagacagacuac

SEQ ID NO: 1115847 - RNA, 19 nt, Homo sapiens
  misc_RNA (1)...(19): siRNA sense strand
aaagcucuccuacauuaua

SEQ ID NO: 1115848 - RNA, 19 nt, Homo sapiens
  misc_RNA (1)...(19): siRNA sense strand
ugagguagguggaaaagua

SEQ ID NO: 1115849 - RNA, 19 nt, Homo sapiens
  misc_RNA (1)...(19): siRNA sense strand
gcuagguggugcccugauu

SEQ ID NO: 1115850 - RNA, 19 nt, Homo sapiens
  misc_RNA (1)...(19): siRNA sense strand
ccaccaagauagaaaugau

SEQ ID NO: 1115851 - RNA, 19 nt, Homo sapiens
  misc_RNA (1)...(19): siRNA sense strand
uaacacaacaccuguccuu

SEQ ID NO: 1115852 - RNA, 19 nt, Homo sapiens
  misc_RNA (1)...(19): siRNA sense strand
gcaaaggaagagcagagaa

SEQ ID NO: 1115853 - RNA, 19 nt, Homo sapiens
  misc_RNA (1)...(19): siRNA sense strand
aagaggcuguccagauaaa

SEQ ID NO: 1115854 - RNA, 19 nt, Homo sapiens
  misc_RNA (1)...(19): siRNA sense strand
ggaaaaguaccuuauauag

SEQ ID NO: 1115855 - RNA, 19 nt, Homo sapiens
  misc_RNA (1)...(19): siRNA sense strand
gauggagacccacuagaug

SEQ ID NO: 1115856 - RNA, 19 nt, Homo sapiens
  misc_RNA (1)...(19): siRNA sense strand
ccuaagugccaccaagaua

SEQ ID NO: 1115857 - RNA, 19 nt, Homo sapiens
  misc_RNA (1)...(19): siRNA sense strand
aagcucuccuacauuauaa

SEQ ID NO: 1115858 - RNA, 19 nt, Homo sapiens
  misc_RNA (1)...(19): siRNA sense strand
uucaaacugugcauuauga

SEQ ID NO: 1115859 - RNA, 19 nt, Homo sapiens
  misc_RNA (1)...(19): siRNA sense strand
gagagacagacuacaguga

SEQ ID NO: 1115860 - RNA, 19 nt, Homo sapiens
  misc_RNA (1)...(19): siRNA sense strand
ggaacaaccauucuaaagc

SEQ ID NO: 1115861 - RNA, 19 nt, Homo sapiens
  misc_RNA (1)...(19): siRNA sense strand
auauagcacuguagucaga

SEQ ID NO: 1115862 - RNA, 19 nt, Homo sapiens
  misc_RNA (1)...(19): siRNA sense strand
gggcuucucaguccuaaug

SEQ ID NO: 1115863 - RNA, 19 nt, Homo sapiens
  misc_RNA (1)...(19): siRNA sense strand
gcucagcauucagagagaa

SEQ ID NO: 1115864 - RNA, 19 nt, Homo sapiens
  misc_RNA (1)...(19): siRNA sense strand
gcucggaacaaccauucua

SEQ ID NO: 1115865 - RNA, 19 nt, Homo sapiens
  misc_RNA (1)...(19): siRNA sense strand
gauaaaucccaagugcuuu

SEQ ID NO: 1115866 - RNA, 19 nt, Homo sapiens
  misc_RNA (1)...(19): siRNA sense strand
gguggugcccugauuguug

SEQ ID NO: 1115867 - RNA, 19 nt, Homo sapiens
  misc_RNA (1)...(19): siRNA sense strand
gaaagcucuccuacauuau

SEQ ID NO: 1115868 - RNA, 19 nt, Homo sapiens
  misc_RNA (1)...(19): siRNA sense strand
aaauauagcacuguaguca

SEQ ID NO: 1115869 - RNA, 19 nt, Homo sapiens
  misc_RNA (1)...(19): siRNA sense strand
cagaaagcucuccuacauu

SEQ ID NO: 1115870 - RNA, 19 nt, Homo sapiens
  misc_RNA (1)...(19): siRNA sense strand
cacaacaccuguccuuacu

SEQ ID NO: 1115871 - RNA, 19 nt, Homo sapiens
  misc_RNA (1)...(19): siRNA sense strand
agauaaaucccaagugcuu

SEQ ID NO: 1115872 - RNA, 19 nt, Homo sapiens
  misc_RNA (1)...(19): siRNA sense strand
gagagagacagacuacagu

SEQ ID NO: 1115873 - RNA, 19 nt, Homo sapiens
  misc_RNA (1)...(19): siRNA sense strand
uaagugccaccaagauaga

SEQ ID NO: 1115874 - RNA, 19 nt, Homo sapiens
  misc_RNA (1)...(19): siRNA sense strand
agaauucuucgaucacaaa

SEQ ID NO: 1115875 - RNA, 19 nt, Homo sapiens
  misc_RNA (1)...(19): siRNA sense strand
guggaaaaguaccuuauau

SEQ ID NO: 1115876 - RNA, 19 nt, Homo sapiens
  misc_RNA (1)...(19): siRNA sense strand
gaggaggagcaaaggaaga

SEQ ID NO: 1115877 - RNA, 19 nt, Homo sapiens
  misc_RNA (1)...(19): siRNA sense strand
guucaaacugugcauuaug

SEQ ID NO: 1115878 - RNA, 19 nt, Homo sapiens
  misc_RNA (1)...(19): siRNA sense strand
agucagagaugagguaggu

SEQ ID NO: 1115879 - RNA, 19 nt, Homo sapiens
  misc_RNA (1)...(19): siRNA sense strand
cggaacaaccauucuaaag

SEQ ID NO: 1115880 - RNA, 19 nt, Homo sapiens
  misc_RNA (1)...(19): siRNA sense strand
gcuucucaguccuaauguu

SEQ ID NO: 1115881 - RNA, 19 nt, Homo sapiens
  misc_RNA (1)...(19): siRNA sense strand
ugauggagacccacuagau

SEQ ID NO: 1115882 - RNA, 19 nt, Homo sapiens
  misc_RNA (1)...(19): siRNA sense strand
gaugggcuucucaguccua

SEQ ID NO: 1115883 - RNA, 19 nt, Homo sapiens
  misc_RNA (1)...(19): siRNA sense strand
cacuagaugugcacaagag

SEQ ID NO: 1115884 - RNA, 19 nt, Homo sapiens
  misc_RNA (1)...(19): siRNA sense strand
ucucaguccuaauguucuu

SEQ ID NO: 1115885 - RNA, 19 nt, Homo sapiens
  misc_RNA (1)...(19): siRNA sense strand
acacaacaccuguccuuac

SEQ ID NO: 1115886 - RNA, 19 nt, Homo sapiens
  misc_RNA (1)...(19): siRNA sense strand
uggcuaucuuccacuguuu

SEQ ID NO: 1115887 - RNA, 19 nt, Homo sapiens
  misc_RNA (1)...(19): siRNA sense strand
cuaagugccaccaagauag

SEQ ID NO: 1115888 - RNA, 19 nt, Homo sapiens
  misc_RNA (1)...(19): siRNA sense strand
ggcuaucuuccacuguuua

SEQ ID NO: 1115889 - RNA, 19 nt, Homo sapiens
  misc_RNA (1)...(19): siRNA sense strand
ccucagggaagaagagaga

SEQ ID NO: 1115890 - RNA, 19 nt, Homo sapiens
  misc_RNA (1)...(19): siRNA sense strand
gaggcuguccagauaaauc

SEQ ID NO: 1115891 - RNA, 19 nt, Homo sapiens
  misc_RNA (1)...(19): siRNA sense strand
auauagaacagcaucaguu

SEQ ID NO: 1115892 - RNA, 19 nt, Homo sapiens
  misc_RNA (1)...(19): siRNA sense strand
guuggcauggugagauuaa

SEQ ID NO: 1115893 - RNA, 19 nt, Homo sapiens
  misc_RNA (1)...(19): siRNA sense strand
aaaggaagagcagagaaau

SEQ ID NO: 1115894 - RNA, 19 nt, Homo sapiens
  misc_RNA (1)...(19): siRNA sense strand
cauccacacagauaucaug

SEQ ID NO: 1115895 - RNA, 19 nt, Homo sapiens
  misc_RNA (1)...(19): siRNA sense strand
caccaagauagaaaugauu

SEQ ID NO: 1115896 - RNA, 19 nt, Homo sapiens
  misc_RNA (1)...(19): siRNA sense strand
agaagagagagacagacua

SEQ ID NO: 1115897 - RNA, 19 nt, Homo sapiens
  misc_RNA (1)...(19): siRNA sense strand
ccacuagaugugcacaaga

SEQ ID NO: 1115898 - RNA, 19 nt, Homo sapiens
  misc_RNA (1)...(19): siRNA sense strand
gcuaucuuccacuguuuau

SEQ ID NO: 1115899 - RNA, 19 nt, Homo sapiens
  misc_RNA (1)...(19): siRNA sense strand
gguggaaaaguaccuuaua

SEQ ID NO: 1115900 - RNA, 19 nt, Homo sapiens
  misc_RNA (1)...(19): siRNA sense strand
agaaagcucuccuacauua

SEQ ID NO: 1115901 - RNA, 19 nt, Homo sapiens
  misc_RNA (1)...(19): siRNA sense strand
ugaagaggcuguccagaua

SEQ ID NO: 1115902 - RNA, 19 nt, Homo sapiens
  misc_RNA (1)...(19): siRNA sense strand
caacagugcucuggacaua

SEQ ID NO: 1115903 - RNA, 19 nt, Homo sapiens
  misc_RNA (1)...(19): siRNA sense strand
ucagaaagcucuccuacau

SEQ ID NO: 1115904 - RNA, 19 nt, Homo sapiens
  misc_RNA (1)...(19): siRNA sense strand
gcacugccauccacacaga

SEQ ID NO: 1115905 - RNA, 19 nt, Homo sapiens
  misc_RNA (1)...(19): siRNA sense strand
caacaccuguccuuacugu

SEQ ID NO: 1115906 - RNA, 19 nt, Homo sapiens
  misc_RNA (1)...(19): siRNA sense strand
gaagaggcuguccagauaa

SEQ ID NO: 1115907 - RNA, 19 nt, Homo sapiens
  misc_RNA (1)...(19): siRNA sense strand
gagaugagguagguggaaa

SEQ ID NO: 1115908 - RNA, 19 nt, Homo sapiens
  misc_RNA (1)...(19): siRNA sense strand
caaaggaagagcagagaaa

SEQ ID NO: 1115909 - RNA, 19 nt, Homo sapiens
  misc_RNA (1)...(19): siRNA sense strand
acagugcucuggacauaaa

SEQ ID NO: 1115910 - RNA, 19 nt, Homo sapiens
  misc_RNA (1)...(19): siRNA sense strand
ggaagaagagagagacaga

SEQ ID NO: 1115911 - RNA, 19 nt, Homo sapiens
  misc_RNA (1)...(19): siRNA sense strand
gcacuguagucagagauga

SEQ ID NO: 1115912 - RNA, 19 nt, Homo sapiens
  misc_RNA (1)...(19): siRNA sense strand
gagacagacuacagugaug

SEQ ID NO: 1115913 - RNA, 19 nt, Homo sapiens
  misc_RNA (1)...(19): siRNA sense strand
gaagagagagacagacuac

SEQ ID NO: 1115914 - RNA, 19 nt, Homo sapiens
  misc_RNA (1)...(19): siRNA sense strand
aaagcucuccuacauuaua

SEQ ID NO: 1115915 - RNA, 19 nt, Homo sapiens
  misc_RNA (1)...(19): siRNA sense strand
ugagguagguggaaaagua

SEQ ID NO: 1115916 - RNA, 19 nt, Homo sapiens
  misc_RNA (1)...(19): siRNA sense strand
gcuagguggugcccugauu

SEQ ID NO: 1115917 - RNA, 19 nt, Homo sapiens
  misc_RNA (1)...(19): siRNA sense strand
ccaccaagauagaaaugau

SEQ ID NO: 1115918 - RNA, 19 nt, Homo sapiens
  misc_RNA (1)...(19): siRNA sense strand
uaacacaacaccuguccuu

SEQ ID NO: 1115919 - RNA, 19 nt, Homo sapiens
  misc_RNA (1)...(19): siRNA sense strand
gcaaaggaagagcagagaa

SEQ ID NO: 1115920 - RNA, 19 nt, Homo sapiens
  misc_RNA (1)...(19): siRNA sense strand
aagaggcuguccagauaaa

SEQ ID NO: 1115921 - RNA, 19 nt, Homo sapiens
  misc_RNA (1)...(19): siRNA sense strand
ggaaaaguaccuuauauag

SEQ ID NO: 1115922 - RNA, 19 nt, Homo sapiens
  misc_RNA (1)...(19): siRNA sense strand
gauggagacccacuagaug

SEQ ID NO: 1115923 - RNA, 19 nt, Homo sapiens
  misc_RNA (1)...(19): siRNA sense strand
ccuaagugccaccaagaua

SEQ ID NO: 1115924 - RNA, 19 nt, Homo sapiens
  misc_RNA (1)...(19): siRNA sense strand
aagcucuccuacauuauaa

SEQ ID NO: 1115925 - RNA, 19 nt, Homo sapiens
  misc_RNA (1)...(19): siRNA sense strand
uucaaacugugcauuauga

SEQ ID NO: 1115926 - RNA, 19 nt, Homo sapiens
  misc_RNA (1)...(19): siRNA sense strand
gagagacagacuacaguga

SEQ ID NO: 1115927 - RNA, 19 nt, Homo sapiens
  misc_RNA (1)...(19): siRNA sense strand
ggaacaaccauucuaaagc

SEQ ID NO: 1115928 - RNA, 19 nt, Homo sapiens
  misc_RNA (1)...(19): siRNA sense strand
auauagcacuguagucaga

SEQ ID NO: 1115929 - RNA, 19 nt, Homo sapiens
  misc_RNA (1)...(19): siRNA sense strand
gggcuucucaguccuaaug

SEQ ID NO: 1115930 - RNA, 19 nt, Homo sapiens
  misc_RNA (1)...(19): siRNA sense strand
gcucagcauucagagagaa

SEQ ID NO: 1115931 - RNA, 19 nt, Homo sapiens
  misc_RNA (1)...(19): siRNA sense strand
gcucggaacaaccauucua

SEQ ID NO: 1115932 - RNA, 19 nt, Homo sapiens
  misc_RNA (1)...(19): siRNA sense strand
gauaaaucccaagugcuuu

SEQ ID NO: 1115933 - RNA, 19 nt, Homo sapiens
  misc_RNA (1)...(19): siRNA sense strand
gguggugcccugauuguug

SEQ ID NO: 1115934 - RNA, 19 nt, Homo sapiens
  misc_RNA (1)...(19): siRNA sense strand
gaaagcucuccuacauuau

SEQ ID NO: 1115935 - RNA, 19 nt, Homo sapiens
  misc_RNA (1)...(19): siRNA sense strand
aaauauagcacuguaguca

SEQ ID NO: 1115936 - RNA, 19 nt, Homo sapiens
  misc_RNA (1)...(19): siRNA sense strand
cagaaagcucuccuacauu

SEQ ID NO: 1115937 - RNA, 19 nt, Homo sapiens
  misc_RNA (1)...(19): siRNA sense strand
cacaacaccuguccuuacu

SEQ ID NO: 1115938 - RNA, 19 nt, Homo sapiens
  misc_RNA (1)...(19): siRNA sense strand
agauaaaucccaagugcuu

SEQ ID NO: 1115939 - RNA, 19 nt, Homo sapiens
  misc_RNA (1)...(19): siRNA sense strand
gagagagacagacuacagu

SEQ ID NO: 1115940 - RNA, 19 nt, Homo sapiens
  misc_RNA (1)...(19): siRNA sense strand
uaagugccaccaagauaga

SEQ ID NO: 1115941 - RNA, 19 nt, Homo sapiens
  misc_RNA (1)...(19): siRNA sense strand
agaauucuucgaucacaaa

SEQ ID NO: 1115942 - RNA, 19 nt, Homo sapiens
  misc_RNA (1)...(19): siRNA sense strand
guggaaaaguaccuuauau

SEQ ID NO: 1115943 - RNA, 19 nt, Homo sapiens
  misc_RNA (1)...(19): siRNA sense strand
gaggaggagcaaaggaaga

SEQ ID NO: 1115944 - RNA, 19 nt, Homo sapiens
  misc_RNA (1)...(19): siRNA sense strand
guucaaacugugcauuaug

SEQ ID NO: 1115945 - RNA, 19 nt, Homo sapiens
  misc_RNA (1)...(19): siRNA sense strand
agucagagaugagguaggu

SEQ ID NO: 1115946 - RNA, 19 nt, Homo sapiens
  misc_RNA (1)...(19): siRNA sense strand
cggaacaaccauucuaaag

SEQ ID NO: 1115947 - RNA, 19 nt, Homo sapiens
  misc_RNA (1)...(19): siRNA sense strand
gcuucucaguccuaauguu

SEQ ID NO: 1115948 - RNA, 19 nt, Homo sapiens
  misc_RNA (1)...(19): siRNA sense strand
ugauggagacccacuagau

SEQ ID NO: 1115949 - RNA, 19 nt, Homo sapiens
  misc_RNA (1)...(19): siRNA sense strand
gaugggcuucucaguccua

SEQ ID NO: 1115950 - RNA, 19 nt, Homo sapiens
  misc_RNA (1)...(19): siRNA sense strand
cacuagaugugcacaagag

SEQ ID NO: 1115951 - RNA, 19 nt, Homo sapiens
  misc_RNA (1)...(19): siRNA sense strand
ucucaguccuaauguucuu

SEQ ID NO: 1115952 - RNA, 19 nt, Homo sapiens
  misc_RNA (1)...(19): siRNA sense strand
acacaacaccuguccuuac

SEQ ID NO: 1115953 - RNA, 19 nt, Homo sapiens
  misc_RNA (1)...(19): siRNA sense strand
uggcuaucuuccacuguuu

SEQ ID NO: 1115954 - RNA, 19 nt, Homo sapiens
  misc_RNA (1)...(19): siRNA sense strand
cuaagugccaccaagauag

SEQ ID NO: 1115955 - RNA, 19 nt, Homo sapiens
  misc_RNA (1)...(19): siRNA sense strand
ggcuaucuuccacuguuua

SEQ ID NO: 1115956 - RNA, 19 nt, Homo sapiens
  misc_RNA (1)...(19): siRNA sense strand
ccucagggaagaagagaga

SEQ ID NO: 1115957 - RNA, 19 nt, Homo sapiens
  misc_RNA (1)...(19): siRNA sense strand
gaggcuguccagauaaauc

SEQ ID NO: 1115958 - RNA, 19 nt, Homo sapiens
  misc_RNA (1)...(19): siRNA sense strand
auauagaacagcaucaguu

SEQ ID NO: 1115959 - RNA, 19 nt, Homo sapiens
  misc_RNA (1)...(19): siRNA sense strand
guuggcauggugagauuaa

SEQ ID NO: 1115960 - RNA, 19 nt, Homo sapiens
  misc_RNA (1)...(19): siRNA sense strand
aaaggaagagcagagaaau

SEQ ID NO: 1115961 - RNA, 19 nt, Homo sapiens
  misc_RNA (1)...(19): siRNA sense strand
cauccacacagauaucaug

SEQ ID NO: 1115962 - RNA, 19 nt, Homo sapiens
  misc_RNA (1)...(19): siRNA sense strand
caccaagauagaaaugauu

SEQ ID NO: 1115963 - RNA, 19 nt, Homo sapiens
  misc_RNA (1)...(19): siRNA sense strand
agaagagagagacagacua

SEQ ID NO: 1115964 - RNA, 19 nt, Homo sapiens
  misc_RNA (1)...(19): siRNA sense strand
ccacuagaugugcacaaga

SEQ ID NO: 1115965 - RNA, 19 nt, Homo sapiens
  misc_RNA (1)...(19): siRNA sense strand
gcuaucuuccacuguuuau

SEQ ID NO: 1115966 - RNA, 19 nt, Homo sapiens
  misc_RNA (1)...(19): siRNA sense strand
gguggaaaaguaccuuaua

SEQ ID NO: 1115967 - RNA, 19 nt, Homo sapiens
  misc_RNA (1)...(19): siRNA sense strand
agaaagcucuccuacauua

SEQ ID NO: 1115968 - RNA, 19 nt, Homo sapiens
  misc_RNA (1)...(19): siRNA sense strand
ugaagaggcuguccagaua

SEQ ID NO: 1115969 - RNA, 19 nt, Homo sapiens
  misc_RNA (1)...(19): siRNA sense strand
caacagugcucuggacaua

SEQ ID NO: 1115970 - RNA, 19 nt, Homo sapiens
  misc_RNA (1)...(19): siRNA sense strand
ucagaaagcucuccuacau

SEQ ID NO: 1115971 - RNA, 19 nt, Homo sapiens
  misc_RNA (1)...(19): siRNA sense strand
gcacugccauccacacaga

SEQ ID NO: 1115972 - RNA, 19 nt, Homo sapiens
  misc_RNA (1)...(19): siRNA sense strand
caacaccuguccuuacugu

SEQ ID NO: 1115973 - RNA, 19 nt, Homo sapiens
  misc_RNA (1)...(19): siRNA sense strand
gaagaggcuguccagauaa

SEQ ID NO: 1115974 - RNA, 19 nt, Homo sapiens
  misc_RNA (1)...(19): siRNA sense strand
gagaugagguagguggaaa

SEQ ID NO: 1115975 - RNA, 19 nt, Homo sapiens
  misc_RNA (1)...(19): siRNA sense strand
caaaggaagagcagagaaa

SEQ ID NO: 1115976 - RNA, 19 nt, Homo sapiens
  misc_RNA (1)...(19): siRNA sense strand
acagugcucuggacauaaa

SEQ ID NO: 1115977 - RNA, 19 nt, Homo sapiens
  misc_RNA (1)...(19): siRNA sense strand
ggaagaagagagagacaga

SEQ ID NO: 1115978 - RNA, 19 nt, Homo sapiens
  misc_RNA (1)...(19): siRNA sense strand
gcacuguagucagagauga

SEQ ID NO: 1115979 - RNA, 19 nt, Homo sapiens
  misc_RNA (1)...(19): siRNA sense strand
gagacagacuacagugaug

SEQ ID NO: 1115980 - RNA, 19 nt, Homo sapiens
  misc_RNA (1)...(19): siRNA sense strand
gaagagagagacagacuac

SEQ ID NO: 1115981 - RNA, 19 nt, Homo sapiens
  misc_RNA (1)...(19): siRNA sense strand
aaagcucuccuacauuaua

SEQ ID NO: 1115982 - RNA, 19 nt, Homo sapiens
  misc_RNA (1)...(19): siRNA sense strand
ugagguagguggaaaagua

SEQ ID NO: 1115983 - RNA, 19 nt, Homo sapiens
  misc_RNA (1)...(19): siRNA sense strand
gcuagguggugcccugauu

SEQ ID NO: 1115984 - RNA, 19 nt, Homo sapiens
  misc_RNA (1)...(19): siRNA sense strand
ccaccaagauagaaaugau

SEQ ID NO: 1115985 - RNA, 19 nt, Homo sapiens
  misc_RNA (1)...(19): siRNA sense strand
uaacacaacaccuguccuu

SEQ ID NO: 1115986 - RNA, 19 nt, Homo sapiens
  misc_RNA (1)...(19): siRNA sense strand
gcaaaggaagagcagagaa

SEQ ID NO: 1115987 - RNA, 19 nt, Homo sapiens
  misc_RNA (1)...(19): siRNA sense strand
aagaggcuguccagauaaa

SEQ ID NO: 1115988 - RNA, 19 nt, Homo sapiens
  misc_RNA (1)...(19): siRNA sense strand
ggaaaaguaccuuauauag

SEQ ID NO: 1115989 - RNA, 19 nt, Homo sapiens
  misc_RNA (1)...(19): siRNA sense strand
gauggagacccacuagaug

SEQ ID NO: 1115990 - RNA, 19 nt, Homo sapiens
  misc_RNA (1)...(19): siRNA sense strand
ccuaagugccaccaagaua

SEQ ID NO: 1115991 - RNA, 19 nt, Homo sapiens
  misc_RNA (1)...(19): siRNA sense strand
aagcucuccuacauuauaa

SEQ ID NO: 1115992 - RNA, 19 nt, Homo sapiens
  misc_RNA (1)...(19): siRNA sense strand
uucaaacugugcauuauga

SEQ ID NO: 1115993 - RNA, 19 nt, Homo sapiens
  misc_RNA (1)...(19): siRNA sense strand
gagagacagacuacaguga

SEQ ID NO: 1115994 - RNA, 19 nt, Homo sapiens
  misc_RNA (1)...(19): siRNA sense strand
ggaacaaccauucuaaagc

SEQ ID NO: 1115995 - RNA, 19 nt, Homo sapiens
  misc_RNA (1)...(19): siRNA sense strand
auauagcacuguagucaga

SEQ ID NO: 1115996 - RNA, 19 nt, Homo sapiens
  misc_RNA (1)...(19): siRNA sense strand
gggcuucucaguccuaaug

SEQ ID NO: 1115997 - RNA, 19 nt, Homo sapiens
  misc_RNA (1)...(19): siRNA sense strand
gcucagcauucagagagaa

SEQ ID NO: 1115998 - RNA, 19 nt, Homo sapiens
  misc_RNA (1)...(19): siRNA sense strand
gcucggaacaaccauucua

SEQ ID NO: 1115999 - RNA, 19 nt, Homo sapiens
  misc_RNA (1)...(19): siRNA sense strand
gauaaaucccaagugcuuu

SEQ ID NO: 1116000 - RNA, 19 nt, Homo sapiens
  misc_RNA (1)...(19): siRNA sense strand
gguggugcccugauuguug

SEQ ID NO: 1116001 - RNA, 19 nt, Homo sapiens
  misc_RNA (1)...(19): siRNA sense strand
gaaagcucuccuacauuau

SEQ ID NO: 1116002 - RNA, 19 nt, Homo sapiens
  misc_RNA (1)...(19): siRNA sense strand
aaauauagcacuguaguca

SEQ ID NO: 1116003 - RNA, 19 nt, Homo sapiens
  misc_RNA (1)...(19): siRNA sense strand
cagaaagcucuccuacauu

SEQ ID NO: 1116004 - RNA, 19 nt, Homo sapiens
  misc_RNA (1)...(19): siRNA sense strand
cacaacaccuguccuuacu

SEQ ID NO: 1116005 - RNA, 19 nt, Homo sapiens
  misc_RNA (1)...(19): siRNA sense strand
agauaaaucccaagugcuu

SEQ ID NO: 1116006 - RNA, 19 nt, Homo sapiens
  misc_RNA (1)...(19): siRNA sense strand
gagagagacagacuacagu

SEQ ID NO: 1116007 - RNA, 19 nt, Homo sapiens
  misc_RNA (1)...(19): siRNA sense strand
uaagugccaccaagauaga

SEQ ID NO: 1116008 - RNA, 19 nt, Homo sapiens
  misc_RNA (1)...(19): siRNA sense strand
agaauucuucgaucacaaa

SEQ ID NO: 1116009 - RNA, 19 nt, Homo sapiens
  misc_RNA (1)...(19): siRNA sense strand
guggaaaaguaccuuauau

SEQ ID NO: 1116010 - RNA, 19 nt, Homo sapiens
  misc_RNA (1)...(19): siRNA sense strand
gaggaggagcaaaggaaga

SEQ ID NO: 1116011 - RNA, 19 nt, Homo sapiens
  misc_RNA (1)...(19): siRNA sense strand
guucaaacugugcauuaug

SEQ ID NO: 1116012 - RNA, 19 nt, Homo sapiens
  misc_RNA (1)...(19): siRNA sense strand
agucagagaugagguaggu

SEQ ID NO: 1116013 - RNA, 19 nt, Homo sapiens
  misc_RNA (1)...(19): siRNA sense strand
cggaacaaccauucuaaag

SEQ ID NO: 1116014 - RNA, 19 nt, Homo sapiens
  misc_RNA (1)...(19): siRNA sense strand
gcuucucaguccuaauguu

SEQ ID NO: 1116015 - RNA, 19 nt, Homo sapiens
  misc_RNA (1)...(19): siRNA sense strand
ugauggagacccacuagau

SEQ ID NO: 1116016 - RNA, 19 nt, Homo sapiens
  misc_RNA (1)...(19): siRNA sense strand
gaugggcuucucaguccua

SEQ ID NO: 1116017 - RNA, 19 nt, Homo sapiens
  misc_RNA (1)...(19): siRNA sense strand
cacuagaugugcacaagag

SEQ ID NO: 1116018 - RNA, 19 nt, Homo sapiens
  misc_RNA (1)...(19): siRNA sense strand
ucucaguccuaauguucuu

SEQ ID NO: 1116019 - RNA, 19 nt, Homo sapiens
  misc_RNA (1)...(19): siRNA sense strand
acacaacaccuguccuuac

SEQ ID NO: 1116020 - RNA, 19 nt, Homo sapiens
  misc_RNA (1)...(19): siRNA sense strand
uggcuaucuuccacuguuu

SEQ ID NO: 1116021 - RNA, 19 nt, Homo sapiens
  misc_RNA (1)...(19): siRNA sense strand
cuaagugccaccaagauag

SEQ ID NO: 1116022 - RNA, 19 nt, Homo sapiens
  misc_RNA (1)...(19): siRNA sense strand
ggcuaucuuccacuguuua

SEQ ID NO: 1116023 - RNA, 19 nt, Homo sapiens
  misc_RNA (1)...(19): siRNA sense strand
ccucagggaagaagagaga

SEQ ID NO: 1116024 - RNA, 19 nt, Homo sapiens
  misc_RNA (1)...(19): siRNA sense strand
gaggcuguccagauaaauc

SEQ ID NO: 1116025 - RNA, 19 nt, Homo sapiens
  misc_RNA (1)...(19): siRNA sense strand
auauagaacagcaucaguu

SEQ ID NO: 1116026 - RNA, 19 nt, Homo sapiens
  misc_RNA (1)...(19): siRNA sense strand
guuggcauggugagauuaa

SEQ ID NO: 1116027 - RNA, 19 nt, Homo sapiens
  misc_RNA (1)...(19): siRNA sense strand
aaaggaagagcagagaaau

SEQ ID NO: 1116028 - RNA, 19 nt, Homo sapiens
  misc_RNA (1)...(19): siRNA sense strand
cauccacacagauaucaug

SEQ ID NO: 1116029 - RNA, 19 nt, Homo sapiens
  misc_RNA (1)...(19): siRNA sense strand
caccaagauagaaaugauu

SEQ ID NO: 1116030 - RNA, 19 nt, Homo sapiens
  misc_RNA (1)...(19): siRNA sense strand
agaagagagagacagacua

SEQ ID NO: 1116031 - RNA, 19 nt, Homo sapiens
  misc_RNA (1)...(19): siRNA sense strand
ccacuagaugugcacaaga

SEQ ID NO: 1116032 - RNA, 19 nt, Homo sapiens
  misc_RNA (1)...(19): siRNA sense strand
gcuaucuuccacuguuuau

SEQ ID NO: 1116033 - RNA, 19 nt, Homo sapiens
  misc_RNA (1)...(19): siRNA sense strand
gguggaaaaguaccuuaua

SEQ ID NO: 1116034 - RNA, 19 nt, Homo sapiens
  misc_RNA (1)...(19): siRNA sense strand
gguaaggacuugccagaga

SEQ ID NO: 1116035 - RNA, 19 nt, Homo sapiens
  misc_RNA (1)...(19): siRNA sense strand
guaaggacuugccagagaa

SEQ ID NO: 1116036 - RNA, 19 nt, Homo sapiens
  misc_RNA (1)...(19): siRNA sense strand
gguaccagcuguaugaugu

SEQ ID NO: 1116037 - RNA, 19 nt, Homo sapiens
  misc_RNA (1)...(19): siRNA sense strand
ccacauagagcuccaagga

SEQ ID NO: 1116038 - RNA, 19 nt, Homo sapiens
  misc_RNA (1)...(19): siRNA sense strand
gaacuacaacgaggccaaa

SEQ ID NO: 1116039 - RNA, 19 nt, Homo sapiens
  misc_RNA (1)...(19): siRNA sense strand
ggucuuguagcuucaauga

SEQ ID NO: 1116040 - RNA, 19 nt, Homo sapiens
  misc_RNA (1)...(19): siRNA sense strand
gaggugacccugugugaca

SEQ ID NO: 1116041 - RNA, 19 nt, Homo sapiens
  misc_RNA (1)...(19): siRNA sense strand
uguaugauguguguucuga

SEQ ID NO: 1116042 - RNA, 19 nt, Homo sapiens
  misc_RNA (1)...(19): siRNA sense strand
gccugcagcuucucauuuc

SEQ ID NO: 1116043 - RNA, 19 nt, Homo sapiens
  misc_RNA (1)...(19): siRNA sense strand
ccaaaugugucaccuucag

SEQ ID NO: 1116044 - RNA, 19 nt, Homo sapiens
  misc_RNA (1)...(19): siRNA sense strand
cuacaacgaggccaaaugu

SEQ ID NO: 1116045 - RNA, 19 nt, Homo sapiens
  misc_RNA (1)...(19): siRNA sense strand
gcacuuccaggccuccauu

SEQ ID NO: 1116046 - RNA, 19 nt, Homo sapiens
  misc_RNA (1)...(19): siRNA sense strand
caacagcacagagcacuuc

SEQ ID NO: 1116047 - RNA, 19 nt, Homo sapiens
  misc_RNA (1)...(19): siRNA sense strand
ccagcuguaugaugugugu

SEQ ID NO: 1116048 - RNA, 19 nt, Homo sapiens
  misc_RNA (1)...(19): siRNA sense strand
ggccugcagcuucucauuu

SEQ ID NO: 1116049 - RNA, 19 nt, Homo sapiens
  misc_RNA (1)...(19): siRNA sense strand
cuacggugcuggcagugau

SEQ ID NO: 1116050 - RNA, 19 nt, Homo sapiens
  misc_RNA (1)...(19): siRNA sense strand
acaacgaggccaaaugugu

SEQ ID NO: 1116051 - RNA, 19 nt, Homo sapiens
  misc_RNA (1)...(19): siRNA sense strand
ggguugaggagauaaacaa

SEQ ID NO: 1116052 - RNA, 19 nt, Homo sapiens
  misc_RNA (1)...(19): siRNA sense strand
gcauggcuaccaccucuuc

SEQ ID NO: 1116053 - RNA, 19 nt, Homo sapiens
  misc_RNA (1)...(19): siRNA sense strand
ucagccugcucuucaacuu

SEQ ID NO: 1116054 - RNA, 19 nt, Homo sapiens
  misc_RNA (1)...(19): siRNA sense strand
guucugacucugccaaugu

SEQ ID NO: 1116055 - RNA, 19 nt, Homo sapiens
  misc_RNA (1)...(19): siRNA sense strand
ggacuugccagagaacuac

SEQ ID NO: 1116056 - RNA, 19 nt, Homo sapiens
  misc_RNA (1)...(19): siRNA sense strand
uaugauguguguucugacu

SEQ ID NO: 1116057 - RNA, 19 nt, Homo sapiens
  misc_RNA (1)...(19): siRNA sense strand
gccagggcaacaccacaua

SEQ ID NO: 1116058 - RNA, 19 nt, Homo sapiens
  misc_RNA (1)...(19): siRNA sense strand
ccuguucccucuccauucu

SEQ ID NO: 1116059 - RNA, 19 nt, Homo sapiens
  misc_RNA (1)...(19): siRNA sense strand
gguauuuucugccuaagug

SEQ ID NO: 1116060 - RNA, 19 nt, Homo sapiens
  misc_RNA (1)...(19): siRNA sense strand
ugacucugccaauguguau

SEQ ID NO: 1116061 - RNA, 19 nt, Homo sapiens
  misc_RNA (1)...(19): siRNA sense strand
gcagugauugggccugaca

SEQ ID NO: 1116062 - RNA, 19 nt, Homo sapiens
  misc_RNA (1)...(19): siRNA sense strand
gacaggucuuguagcuuca

SEQ ID NO: 1116063 - RNA, 19 nt, Homo sapiens
  misc_RNA (1)...(19): siRNA sense strand
ugauguguguucugacucu

SEQ ID NO: 1116064 - RNA, 19 nt, Homo sapiens
  misc_RNA (1)...(19): siRNA sense strand
gccuuugccugccauagca

SEQ ID NO: 1116065 - RNA, 19 nt, Homo sapiens
  misc_RNA (1)...(19): siRNA sense strand
ucaaugagcauggcuacca

SEQ ID NO: 1116066 - RNA, 19 nt, Homo sapiens
  misc_RNA (1)...(19): siRNA sense strand
uugaggagauaaacaacuc

SEQ ID NO: 1116067 - RNA, 19 nt, Homo sapiens
  misc_RNA (1)...(19): siRNA sense strand
ugugacaggucuuguagcu

SEQ ID NO: 1116068 - RNA, 19 nt, Homo sapiens
  misc_RNA (1)...(19): siRNA sense strand
gguaccagcuguaugaugu

SEQ ID NO: 1116069 - RNA, 19 nt, Homo sapiens
  misc_RNA (1)...(19): siRNA sense strand
ccacauagagcuccaagga

SEQ ID NO: 1116070 - RNA, 19 nt, Homo sapiens
  misc_RNA (1)...(19): siRNA sense strand
ggucuuguagcuucaauga

SEQ ID NO: 1116071 - RNA, 19 nt, Homo sapiens
  misc_RNA (1)...(19): siRNA sense strand
gccugcagcuucucauuuc

SEQ ID NO: 1116072 - RNA, 19 nt, Homo sapiens
  misc_RNA (1)...(19): siRNA sense strand
uguaugauguguguucuga

SEQ ID NO: 1116073 - RNA, 19 nt, Homo sapiens
  misc_RNA (1)...(19): siRNA sense strand
gaggugacccugugugaca

SEQ ID NO: 1116074 - RNA, 19 nt, Homo sapiens
  misc_RNA (1)...(19): siRNA sense strand
ccagcuguaugaugugugu

SEQ ID NO: 1116075 - RNA, 19 nt, Homo sapiens
  misc_RNA (1)...(19): siRNA sense strand
ggccugcagcuucucauuu

SEQ ID NO: 1116076 - RNA, 19 nt, Homo sapiens
  misc_RNA (1)...(19): siRNA sense strand
cuacggugcuggcagugau

SEQ ID NO: 1116077 - RNA, 19 nt, Homo sapiens
  misc_RNA (1)...(19): siRNA sense strand
ggguugaggagauaaacaa

SEQ ID NO: 1116078 - RNA, 19 nt, Homo sapiens
  misc_RNA (1)...(19): siRNA sense strand
gcauggcuaccaccucuuc

SEQ ID NO: 1116079 - RNA, 19 nt, Homo sapiens
  misc_RNA (1)...(19): siRNA sense strand
guucugacucugccaaugu

SEQ ID NO: 1116080 - RNA, 19 nt, Homo sapiens
  misc_RNA (1)...(19): siRNA sense strand
uaugauguguguucugacu

SEQ ID NO: 1116081 - RNA, 19 nt, Homo sapiens
  misc_RNA (1)...(19): siRNA sense strand
gccagggcaacaccacaua

SEQ ID NO: 1116082 - RNA, 19 nt, Homo sapiens
  misc_RNA (1)...(19): siRNA sense strand
ccuguucccucuccauucu

SEQ ID NO: 1116083 - RNA, 19 nt, Homo sapiens
  misc_RNA (1)...(19): siRNA sense strand
ugacucugccaauguguau

SEQ ID NO: 1116084 - RNA, 19 nt, Homo sapiens
  misc_RNA (1)...(19): siRNA sense strand
gcagugauugggccugaca

SEQ ID NO: 1116085 - RNA, 19 nt, Homo sapiens
  misc_RNA (1)...(19): siRNA sense strand
gacaggucuuguagcuuca

SEQ ID NO: 1116086 - RNA, 19 nt, Homo sapiens
  misc_RNA (1)...(19): siRNA sense strand
ugauguguguucugacucu

SEQ ID NO: 1116087 - RNA, 19 nt, Homo sapiens
  misc_RNA (1)...(19): siRNA sense strand
gccuuugccugccauagca

SEQ ID NO: 1116088 - RNA, 19 nt, Homo sapiens
  misc_RNA (1)...(19): siRNA sense strand
ucaaugagcauggcuacca

SEQ ID NO: 1116089 - RNA, 19 nt, Homo sapiens
  misc_RNA (1)...(19): siRNA sense strand
ugugacaggucuuguagcu

SEQ ID NO: 1116090 - RNA, 19 nt, Homo sapiens
  misc_RNA (1)...(19): siRNA sense strand
uugaggagauaaacaacuc

SEQ ID NO: 1116091 - RNA, 19 nt, Homo sapiens
  misc_RNA (1)...(19): siRNA sense strand
gguaaggacuugccagaga

SEQ ID NO: 1116092 - RNA, 19 nt, Homo sapiens
  misc_RNA (1)...(19): siRNA sense strand
guaaggacuugccagagaa

SEQ ID NO: 1116093 - RNA, 19 nt, Homo sapiens
  misc_RNA (1)...(19): siRNA sense strand
gguaccagcuguaugaugu

SEQ ID NO: 1116094 - RNA, 19 nt, Homo sapiens
  misc_RNA (1)...(19): siRNA sense strand
ccacauagagcuccaagga

SEQ ID NO: 1116095 - RNA, 19 nt, Homo sapiens
  misc_RNA (1)...(19): siRNA sense strand
gaacuacaacgaggccaaa

SEQ ID NO: 1116096 - RNA, 19 nt, Homo sapiens
  misc_RNA (1)...(19): siRNA sense strand
ggucuuguagcuucaauga

SEQ ID NO: 1116097 - RNA, 19 nt, Homo sapiens
  misc_RNA (1)...(19): siRNA sense strand
gaggugacccugugugaca

SEQ ID NO: 1116098 - RNA, 19 nt, Homo sapiens
  misc_RNA (1)...(19): siRNA sense strand
uguaugauguguguucuga

SEQ ID NO: 1116099 - RNA, 19 nt, Homo sapiens
  misc_RNA (1)...(19): siRNA sense strand
gccugcagcuucucauuuc

SEQ ID NO: 1116100 - RNA, 19 nt, Homo sapiens
  misc_RNA (1)...(19): siRNA sense strand
ccaaaugugucaccuucag

SEQ ID NO: 1116101 - RNA, 19 nt, Homo sapiens
  misc_RNA (1)...(19): siRNA sense strand
cuacaacgaggccaaaugu

SEQ ID NO: 1116102 - RNA, 19 nt, Homo sapiens
  misc_RNA (1)...(19): siRNA sense strand
gcacuuccaggccuccauu

SEQ ID NO: 1116103 - RNA, 19 nt, Homo sapiens
  misc_RNA (1)...(19): siRNA sense strand
caacagcacagagcacuuc

SEQ ID NO: 1116104 - RNA, 19 nt, Homo sapiens
  misc_RNA (1)...(19): siRNA sense strand
ccagcuguaugaugugugu

SEQ ID NO: 1116105 - RNA, 19 nt, Homo sapiens
  misc_RNA (1)...(19): siRNA sense strand
ggccugcagcuucucauuu

SEQ ID NO: 1116106 - RNA, 19 nt, Homo sapiens
  misc_RNA (1)...(19): siRNA sense strand
cuacggugcuggcagugau

SEQ ID NO: 1116107 - RNA, 19 nt, Homo sapiens
  misc_RNA (1)...(19): siRNA sense strand
acaacgaggccaaaugugu

SEQ ID NO: 1116108 - RNA, 19 nt, Homo sapiens
  misc_RNA (1)...(19): siRNA sense strand
ggguugaggagauaaacaa

SEQ ID NO: 1116109 - RNA, 19 nt, Homo sapiens
  misc_RNA (1)...(19): siRNA sense strand
gcauggcuaccaccucuuc

SEQ ID NO: 1116110 - RNA, 19 nt, Homo sapiens
  misc_RNA (1)...(19): siRNA sense strand
ucagccugcucuucaacuu

SEQ ID NO: 1116111 - RNA, 19 nt, Homo sapiens
  misc_RNA (1)...(19): siRNA sense strand
guucugacucugccaaugu

SEQ ID NO: 1116112 - RNA, 19 nt, Homo sapiens
  misc_RNA (1)...(19): siRNA sense strand
ggacuugccagagaacuac

SEQ ID NO: 1116113 - RNA, 19 nt, Homo sapiens
  misc_RNA (1)...(19): siRNA sense strand
uaugauguguguucugacu

SEQ ID NO: 1116114 - RNA, 19 nt, Homo sapiens
  misc_RNA (1)...(19): siRNA sense strand
gccagggcaacaccacaua

SEQ ID NO: 1116115 - RNA, 19 nt, Homo sapiens
  misc_RNA (1)...(19): siRNA sense strand
ccuguucccucuccauucu

SEQ ID NO: 1116116 - RNA, 19 nt, Homo sapiens
  misc_RNA (1)...(19): siRNA sense strand
gguauuuucugccuaagug

SEQ ID NO: 1116117 - RNA, 19 nt, Homo sapiens
  misc_RNA (1)...(19): siRNA sense strand
ugacucugccaauguguau

SEQ ID NO: 1116118 - RNA, 19 nt, Homo sapiens
  misc_RNA (1)...(19): siRNA sense strand
gcagugauugggccugaca

SEQ ID NO: 1116119 - RNA, 19 nt, Homo sapiens
  misc_RNA (1)...(19): siRNA sense strand
gacaggucuuguagcuuca

SEQ ID NO: 1116120 - RNA, 19 nt, Homo sapiens
  misc_RNA (1)...(19): siRNA sense strand
ugauguguguucugacucu

SEQ ID NO: 1116121 - RNA, 19 nt, Homo sapiens
  misc_RNA (1)...(19): siRNA sense strand
gccuuugccugccauagca

SEQ ID NO: 1116122 - RNA, 19 nt, Homo sapiens
  misc_RNA (1)...(19): siRNA sense strand
ucaaugagcauggcuacca

SEQ ID NO: 1116123 - RNA, 19 nt, Homo sapiens
  misc_RNA (1)...(19): siRNA sense strand
uugaggagauaaacaacuc

SEQ ID NO: 1116124 - RNA, 19 nt, Homo sapiens
  misc_RNA (1)...(19): siRNA sense strand
ugugacaggucuuguagcu

SEQ ID NO: 1116125 - RNA, 19 nt, Homo sapiens
  misc_RNA (1)...(19): siRNA sense strand
gguaaggacuugccagaga

SEQ ID NO: 1116126 - RNA, 19 nt, Homo sapiens
  misc_RNA (1)...(19): siRNA sense strand
guaaggacuugccagagaa

SEQ ID NO: 1116127 - RNA, 19 nt, Homo sapiens
  misc_RNA (1)...(19): siRNA sense strand
gguaccagcuguaugaugu

SEQ ID NO: 1116128 - RNA, 19 nt, Homo sapiens
  misc_RNA (1)...(19): siRNA sense strand
ccacauagagcuccaagga

SEQ ID NO: 1116129 - RNA, 19 nt, Homo sapiens
  misc_RNA (1)...(19): siRNA sense strand
gaacuacaacgaggccaaa

SEQ ID NO: 1116130 - RNA, 19 nt, Homo sapiens
  misc_RNA (1)...(19): siRNA sense strand
ggucuuguagcuucaauga

SEQ ID NO: 1116131 - RNA, 19 nt, Homo sapiens
  misc_RNA (1)...(19): siRNA sense strand
gaggugacccugugugaca

SEQ ID NO: 1116132 - RNA, 19 nt, Homo sapiens
  misc_RNA (1)...(19): siRNA sense strand
uguaugauguguguucuga

SEQ ID NO: 1116133 - RNA, 19 nt, Homo sapiens
  misc_RNA (1)...(19): siRNA sense strand
gccugcagcuucucauuuc

SEQ ID NO: 1116134 - RNA, 19 nt, Homo sapiens
  misc_RNA (1)...(19): siRNA sense strand
ccaaaugugucaccuucag

SEQ ID NO: 1116135 - RNA, 19 nt, Homo sapiens
  misc_RNA (1)...(19): siRNA sense strand
cuacaacgaggccaaaugu

SEQ ID NO: 1116136 - RNA, 19 nt, Homo sapiens
  misc_RNA (1)...(19): siRNA sense strand
ccagcuguaugaugugugu

SEQ ID NO: 1116137 - RNA, 19 nt, Homo sapiens
  misc_RNA (1)...(19): siRNA sense strand
ggccugcagcuucucauuu

SEQ ID NO: 1116138 - RNA, 19 nt, Homo sapiens
  misc_RNA (1)...(19): siRNA sense strand
cuacggugcuggcagugau

SEQ ID NO: 1116139 - RNA, 19 nt, Homo sapiens
  misc_RNA (1)...(19): siRNA sense strand
acaacgaggccaaaugugu

SEQ ID NO: 1116140 - RNA, 19 nt, Homo sapiens
  misc_RNA (1)...(19): siRNA sense strand
ggguugaggagauaaacaa

SEQ ID NO: 1116141 - RNA, 19 nt, Homo sapiens
  misc_RNA (1)...(19): siRNA sense strand
gcauggcuaccaccucuuc

SEQ ID NO: 1116142 - RNA, 19 nt, Homo sapiens
  misc_RNA (1)...(19): siRNA sense strand
ucagccugcucuucaacuu

SEQ ID NO: 1116143 - RNA, 19 nt, Homo sapiens
  misc_RNA (1)...(19): siRNA sense strand
guucugacucugccaaugu

SEQ ID NO: 1116144 - RNA, 19 nt, Homo sapiens
  misc_RNA (1)...(19): siRNA sense strand
ggacuugccagagaacuac

SEQ ID NO: 1116145 - RNA, 19 nt, Homo sapiens
  misc_RNA (1)...(19): siRNA sense strand
uaugauguguguucugacu

SEQ ID NO: 1116146 - RNA, 19 nt, Homo sapiens
  misc_RNA (1)...(19): siRNA sense strand
gccagggcaacaccacaua

SEQ ID NO: 1116147 - RNA, 19 nt, Homo sapiens
  misc_RNA (1)...(19): siRNA sense strand
ccuguucccucuccauucu

SEQ ID NO: 1116148 - RNA, 19 nt, Homo sapiens
  misc_RNA (1)...(19): siRNA sense strand
ugacucugccaauguguau

SEQ ID NO: 1116149 - RNA, 19 nt, Homo sapiens
  misc_RNA (1)...(19): siRNA sense strand
gcagugauugggccugaca

SEQ ID NO: 1116150 - RNA, 19 nt, Homo sapiens
  misc_RNA (1)...(19): siRNA sense strand
gacaggucuuguagcuuca

SEQ ID NO: 1116151 - RNA, 19 nt, Homo sapiens
  misc_RNA (1)...(19): siRNA sense strand
gccuuugccugccauagca

SEQ ID NO: 1116152 - RNA, 19 nt, Homo sapiens
  misc_RNA (1)...(19): siRNA sense strand
ugauguguguucugacucu

SEQ ID NO: 1116153 - RNA, 19 nt, Homo sapiens
  misc_RNA (1)...(19): siRNA sense strand
ucaaugagcauggcuacca

SEQ ID NO: 1116154 - RNA, 19 nt, Homo sapiens
  misc_RNA (1)...(19): siRNA sense strand
ugugacaggucuuguagcu

SEQ ID NO: 1116155 - RNA, 19 nt, Homo sapiens
  misc_RNA (1)...(19): siRNA sense strand
uugaggagauaaacaacuc

SEQ ID NO: 1116156 - RNA, 19 nt, Homo sapiens
  misc_RNA (1)...(19): siRNA sense strand
guacauggaugcuuugaaa

SEQ ID NO: 1116157 - RNA, 19 nt, Homo sapiens
  misc_RNA (1)...(19): siRNA sense strand
cauuagaccucaccuauga

SEQ ID NO: 1116158 - RNA, 19 nt, Homo sapiens
  misc_RNA (1)...(19): siRNA sense strand
caagaacugucuccugauu

SEQ ID NO: 1116159 - RNA, 19 nt, Homo sapiens
  misc_RNA (1)...(19): siRNA sense strand
caacuucuguccugaguga

SEQ ID NO: 1116160 - RNA, 19 nt, Homo sapiens
  misc_RNA (1)...(19): siRNA sense strand
gcauugcccugacugauau

SEQ ID NO: 1116161 - RNA, 19 nt, Homo sapiens
  misc_RNA (1)...(19): siRNA sense strand
caaccacuccuauuucuuu

SEQ ID NO: 1116162 - RNA, 19 nt, Homo sapiens
  misc_RNA (1)...(19): siRNA sense strand
cgacugucaucaagaagua

SEQ ID NO: 1116163 - RNA, 19 nt, Homo sapiens
  misc_RNA (1)...(19): siRNA sense strand
caaaagagccugucacaaa

SEQ ID NO: 1116164 - RNA, 19 nt, Homo sapiens
  misc_RNA (1)...(19): siRNA sense strand
gagggaagccugauugaug

SEQ ID NO: 1116165 - RNA, 19 nt, Homo sapiens
  misc_RNA (1)...(19): siRNA sense strand
ccagaguccuccugagauu

SEQ ID NO: 1116166 - RNA, 19 nt, Homo sapiens
  misc_RNA (1)...(19): siRNA sense strand
uaucaucccuagugccuuu

SEQ ID NO: 1116167 - RNA, 19 nt, Homo sapiens
  misc_RNA (1)...(19): siRNA sense strand
uauccaagcuauccaguau

SEQ ID NO: 1116168 - RNA, 19 nt, Homo sapiens
  misc_RNA (1)...(19): siRNA sense strand
agacagagcccaggccaua

SEQ ID NO: 1116169 - RNA, 19 nt, Homo sapiens
  misc_RNA (1)...(19): siRNA sense strand
gcaguuucuucuccucaaa

SEQ ID NO: 1116170 - RNA, 19 nt, Homo sapiens
  misc_RNA (1)...(19): siRNA sense strand
gcaguuucuucuccucaaa

SEQ ID NO: 1116171 - RNA, 19 nt, Homo sapiens
  misc_RNA (1)...(19): siRNA sense strand
ccacuccuauuucuuugaa

SEQ ID NO: 1116172 - RNA, 19 nt, Homo sapiens
  misc_RNA (1)...(19): siRNA sense strand
caagaaguauaaggacuau

SEQ ID NO: 1116173 - RNA, 19 nt, Homo sapiens
  misc_RNA (1)...(19): siRNA sense strand
gacaaccacuccuauuucu

SEQ ID NO: 1116174 - RNA, 19 nt, Homo sapiens
  misc_RNA (1)...(19): siRNA sense strand
gugaauccuugcccaggua

SEQ ID NO: 1116175 - RNA, 19 nt, Homo sapiens
  misc_RNA (1)...(19): siRNA sense strand
cagagaugcugacgacugu

SEQ ID NO: 1116176 - RNA, 19 nt, Homo sapiens
  misc_RNA (1)...(19): siRNA sense strand
ccugguacauggaugcuuu

SEQ ID NO: 1116177 - RNA, 19 nt, Homo sapiens
  misc_RNA (1)...(19): siRNA sense strand
gaagaggaggauacagcua

SEQ ID NO: 1116178 - RNA, 19 nt, Homo sapiens
  misc_RNA (1)...(19): siRNA sense strand
ggaaguguugagugcaaua

SEQ ID NO: 1116179 - RNA, 19 nt, Homo sapiens
  misc_RNA (1)...(19): siRNA sense strand
gagcccaggccauaauuga

SEQ ID NO: 1116180 - RNA, 19 nt, Homo sapiens
  misc_RNA (1)...(19): siRNA sense strand
ucaagaaguauaaggacua

SEQ ID NO: 1116181 - RNA, 19 nt, Homo sapiens
  misc_RNA (1)...(19): siRNA sense strand
uaauugacaccacagauga

SEQ ID NO: 1116182 - RNA, 19 nt, Homo sapiens
  misc_RNA (1)...(19): siRNA sense strand
gaggucaucugggaagugu

SEQ ID NO: 1116183 - RNA, 19 nt, Homo sapiens
  misc_RNA (1)...(19): siRNA sense strand
agggaagccugauugauga

SEQ ID NO: 1116184 - RNA, 19 nt, Homo sapiens
  misc_RNA (1)...(19): siRNA sense strand
cgacaaccacuccuauuuc

SEQ ID NO: 1116185 - RNA, 19 nt, Homo sapiens
  misc_RNA (1)...(19): siRNA sense strand
cgggaaagcccaugaguuc

SEQ ID NO: 1116186 - RNA, 19 nt, Homo sapiens
  misc_RNA (1)...(19): siRNA sense strand
gguaugcccuggaugaaaa

SEQ ID NO: 1116187 - RNA, 19 nt, Homo sapiens
  misc_RNA (1)...(19): siRNA sense strand
ccgacaaccacuccuauuu

SEQ ID NO: 1116188 - RNA, 19 nt, Homo sapiens
  misc_RNA (1)...(19): siRNA sense strand
uggcugaguuggugcaguu

SEQ ID NO: 1116189 - RNA, 19 nt, Homo sapiens
  misc_RNA (1)...(19): siRNA sense strand
gaaagauauggaagacaga

SEQ ID NO: 1116190 - RNA, 19 nt, Homo sapiens
  misc_RNA (1)...(19): siRNA sense strand
ggucaucugggaaguguug

SEQ ID NO: 1116191 - RNA, 19 nt, Homo sapiens
  misc_RNA (1)...(19): siRNA sense strand
uccaagcuauccaguauca

SEQ ID NO: 1116192 - RNA, 19 nt, Homo sapiens
  misc_RNA (1)...(19): siRNA sense strand
cacauuagaccucaccuau

SEQ ID NO: 1116193 - RNA, 19 nt, Homo sapiens
  misc_RNA (1)...(19): siRNA sense strand
gaguucauagagcuaauuu

SEQ ID NO: 1116194 - RNA, 19 nt, Homo sapiens
  misc_RNA (1)...(19): siRNA sense strand
caagcuauccaguaucauc

SEQ ID NO: 1116195 - RNA, 19 nt, Homo sapiens
  misc_RNA (1)...(19): siRNA sense strand
gcagugaagaggaggauac

SEQ ID NO: 1116196 - RNA, 19 nt, Homo sapiens
  misc_RNA (1)...(19): siRNA sense strand
ccaggguccucccaagauc

SEQ ID NO: 1116197 - RNA, 19 nt, Homo sapiens
  misc_RNA (1)...(19): siRNA sense strand
ucagaggccagcaagagaa

SEQ ID NO: 1116198 - RNA, 19 nt, Homo sapiens
  misc_RNA (1)...(19): siRNA sense strand
aguuucuucuccucaaaua

SEQ ID NO: 1116199 - RNA, 19 nt, Homo sapiens
  misc_RNA (1)...(19): siRNA sense strand
aguuucuucuccucaaaua

SEQ ID NO: 1116200 - RNA, 19 nt, Homo sapiens
  misc_RNA (1)...(19): siRNA sense strand
uaugagggaagccugauug

SEQ ID NO: 1116201 - RNA, 19 nt, Homo sapiens
  misc_RNA (1)...(19): siRNA sense strand
ccagugucauguccaccaa

SEQ ID NO: 1116202 - RNA, 19 nt, Homo sapiens
  misc_RNA (1)...(19): siRNA sense strand
caccacagaugaugcuacu

SEQ ID NO: 1116203 - RNA, 19 nt, Homo sapiens
  misc_RNA (1)...(19): siRNA sense strand
gcugggaugccaccucuuc

SEQ ID NO: 1116204 - RNA, 19 nt, Homo sapiens
  misc_RNA (1)...(19): siRNA sense strand
gacagagcccaggccauaa

SEQ ID NO: 1116205 - RNA, 19 nt, Homo sapiens
  misc_RNA (1)...(19): siRNA sense strand
aacugucuccugauucuua

SEQ ID NO: 1116206 - RNA, 19 nt, Homo sapiens
  misc_RNA (1)...(19): siRNA sense strand
aaaagagccugucacaaag

SEQ ID NO: 1116207 - RNA, 19 nt, Homo sapiens
  misc_RNA (1)...(19): siRNA sense strand
agagaagucuuagaguuuu

SEQ ID NO: 1116208 - RNA, 19 nt, Homo sapiens
  misc_RNA (1)...(19): siRNA sense strand
gggaaguguugagugcaau

SEQ ID NO: 1116209 - RNA, 19 nt, Homo sapiens
  misc_RNA (1)...(19): siRNA sense strand
ugggaaguguugagugcaa

SEQ ID NO: 1116210 - RNA, 19 nt, Homo sapiens
  misc_RNA (1)...(19): siRNA sense strand
gaaguguugagugcaauag

SEQ ID NO: 1116211 - RNA, 19 nt, Homo sapiens
  misc_RNA (1)...(19): siRNA sense strand
gcccaggccauaauugaca

SEQ ID NO: 1116212 - RNA, 19 nt, Homo sapiens
  misc_RNA (1)...(19): siRNA sense strand
ucaucaagaaguauaagga

SEQ ID NO: 1116213 - RNA, 19 nt, Homo sapiens
  misc_RNA (1)...(19): siRNA sense strand
ccucuagacuccugcucau

SEQ ID NO: 1116214 - RNA, 19 nt, Homo sapiens
  misc_RNA (1)...(19): siRNA sense strand
cccaugaucuucgggaaag

SEQ ID NO: 1116215 - RNA, 19 nt, Homo sapiens
  misc_RNA (1)...(19): siRNA sense strand
gcagagggaagcgucuuag

SEQ ID NO: 1116216 - RNA, 19 nt, Homo sapiens
  misc_RNA (1)...(19): siRNA sense strand
gcagaguccuccccagagu

SEQ ID NO: 1116217 - RNA, 19 nt, Homo sapiens
  misc_RNA (1)...(19): siRNA sense strand
ugucauguccaccaacuuc

SEQ ID NO: 1116218 - RNA, 19 nt, Homo sapiens
  misc_RNA (1)...(19): siRNA sense strand
auaauugacaccacagaug

SEQ ID NO: 1116219 - RNA, 19 nt, Homo sapiens
  misc_RNA (1)...(19): siRNA sense strand
ucacaaaggcagagaugcu

SEQ ID NO: 1116220 - RNA, 19 nt, Homo sapiens
  misc_RNA (1)...(19): siRNA sense strand
ucuuagaccuggccaaucc

SEQ ID NO: 1116221 - RNA, 19 nt, Homo sapiens
  misc_RNA (1)...(19): siRNA sense strand
gaacugucuccugauucuu

SEQ ID NO: 1116222 - RNA, 19 nt, Homo sapiens
  misc_RNA (1)...(19): siRNA sense strand
cauuagaccucaccuauga

SEQ ID NO: 1116223 - RNA, 19 nt, Homo sapiens
  misc_RNA (1)...(19): siRNA sense strand
caagaacugucuccugauu

SEQ ID NO: 1116224 - RNA, 19 nt, Homo sapiens
  misc_RNA (1)...(19): siRNA sense strand
gcauugcccugacugauau

SEQ ID NO: 1116225 - RNA, 19 nt, Homo sapiens
  misc_RNA (1)...(19): siRNA sense strand
caaccacuccuauuucuuu

SEQ ID NO: 1116226 - RNA, 19 nt, Homo sapiens
  misc_RNA (1)...(19): siRNA sense strand
cgacugucaucaagaagua

SEQ ID NO: 1116227 - RNA, 19 nt, Homo sapiens
  misc_RNA (1)...(19): siRNA sense strand
caaaagagccugucacaaa

SEQ ID NO: 1116228 - RNA, 19 nt, Homo sapiens
  misc_RNA (1)...(19): siRNA sense strand
gagggaagccugauugaug

SEQ ID NO: 1116229 - RNA, 19 nt, Homo sapiens
  misc_RNA (1)...(19): siRNA sense strand
ccagaguccuccugagauu

SEQ ID NO: 1116230 - RNA, 19 nt, Homo sapiens
  misc_RNA (1)...(19): siRNA sense strand
uauccaagcuauccaguau

SEQ ID NO: 1116231 - RNA, 19 nt, Homo sapiens
  misc_RNA (1)...(19): siRNA sense strand
gcaguuucuucuccucaaa

SEQ ID NO: 1116232 - RNA, 19 nt, Homo sapiens
  misc_RNA (1)...(19): siRNA sense strand
ccacuccuauuucuuugaa

SEQ ID NO: 1116233 - RNA, 19 nt, Homo sapiens
  misc_RNA (1)...(19): siRNA sense strand
caagaaguauaaggacuau

SEQ ID NO: 1116234 - RNA, 19 nt, Homo sapiens
  misc_RNA (1)...(19): siRNA sense strand
gacaaccacuccuauuucu

SEQ ID NO: 1116235 - RNA, 19 nt, Homo sapiens
  misc_RNA (1)...(19): siRNA sense strand
gugaauccuugcccaggua

SEQ ID NO: 1116236 - RNA, 19 nt, Homo sapiens
  misc_RNA (1)...(19): siRNA sense strand
cagagaugcugacgacugu

SEQ ID NO: 1116237 - RNA, 19 nt, Homo sapiens
  misc_RNA (1)...(19): siRNA sense strand
gaagaggaggauacagcua

SEQ ID NO: 1116238 - RNA, 19 nt, Homo sapiens
  misc_RNA (1)...(19): siRNA sense strand
ggaaguguugagugcaaua

SEQ ID NO: 1116239 - RNA, 19 nt, Homo sapiens
  misc_RNA (1)...(19): siRNA sense strand
ucaagaaguauaaggacua

SEQ ID NO: 1116240 - RNA, 19 nt, Homo sapiens
  misc_RNA (1)...(19): siRNA sense strand
gaggucaucugggaagugu

SEQ ID NO: 1116241 - RNA, 19 nt, Homo sapiens
  misc_RNA (1)...(19): siRNA sense strand
agggaagccugauugauga

SEQ ID NO: 1116242 - RNA, 19 nt, Homo sapiens
  misc_RNA (1)...(19): siRNA sense strand
cgacaaccacuccuauuuc

SEQ ID NO: 1116243 - RNA, 19 nt, Homo sapiens
  misc_RNA (1)...(19): siRNA sense strand
cgggaaagcccaugaguuc

SEQ ID NO: 1116244 - RNA, 19 nt, Homo sapiens
  misc_RNA (1)...(19): siRNA sense strand
gguaugcccuggaugaaaa

SEQ ID NO: 1116245 - RNA, 19 nt, Homo sapiens
  misc_RNA (1)...(19): siRNA sense strand
ccgacaaccacuccuauuu

SEQ ID NO: 1116246 - RNA, 19 nt, Homo sapiens
  misc_RNA (1)...(19): siRNA sense strand
uggcugaguuggugcaguu

SEQ ID NO: 1116247 - RNA, 19 nt, Homo sapiens
  misc_RNA (1)...(19): siRNA sense strand
ggucaucugggaaguguug

SEQ ID NO: 1116248 - RNA, 19 nt, Homo sapiens
  misc_RNA (1)...(19): siRNA sense strand
uccaagcuauccaguauca

SEQ ID NO: 1116249 - RNA, 19 nt, Homo sapiens
  misc_RNA (1)...(19): siRNA sense strand
cacauuagaccucaccuau

SEQ ID NO: 1116250 - RNA, 19 nt, Homo sapiens
  misc_RNA (1)...(19): siRNA sense strand
gaguucauagagcuaauuu

SEQ ID NO: 1116251 - RNA, 19 nt, Homo sapiens
  misc_RNA (1)...(19): siRNA sense strand
caagcuauccaguaucauc

SEQ ID NO: 1116252 - RNA, 19 nt, Homo sapiens
  misc_RNA (1)...(19): siRNA sense strand
gcagugaagaggaggauac

SEQ ID NO: 1116253 - RNA, 19 nt, Homo sapiens
  misc_RNA (1)...(19): siRNA sense strand
ccaggguccucccaagauc

SEQ ID NO: 1116254 - RNA, 19 nt, Homo sapiens
  misc_RNA (1)...(19): siRNA sense strand
ucagaggccagcaagagaa

SEQ ID NO: 1116255 - RNA, 19 nt, Homo sapiens
  misc_RNA (1)...(19): siRNA sense strand
aguuucuucuccucaaaua

SEQ ID NO: 1116256 - RNA, 19 nt, Homo sapiens
  misc_RNA (1)...(19): siRNA sense strand
uaugagggaagccugauug

SEQ ID NO: 1116257 - RNA, 19 nt, Homo sapiens
  misc_RNA (1)...(19): siRNA sense strand
aacugucuccugauucuua

SEQ ID NO: 1116258 - RNA, 19 nt, Homo sapiens
  misc_RNA (1)...(19): siRNA sense strand
gcugggaugccaccucuuc

SEQ ID NO: 1116259 - RNA, 19 nt, Homo sapiens
  misc_RNA (1)...(19): siRNA sense strand
aaaagagccugucacaaag

SEQ ID NO: 1116260 - RNA, 19 nt, Homo sapiens
  misc_RNA (1)...(19): siRNA sense strand
agagaagucuuagaguuuu

SEQ ID NO: 1116261 - RNA, 19 nt, Homo sapiens
  misc_RNA (1)...(19): siRNA sense strand
gggaaguguugagugcaau

SEQ ID NO: 1116262 - RNA, 19 nt, Homo sapiens
  misc_RNA (1)...(19): siRNA sense strand
ugggaaguguugagugcaa

SEQ ID NO: 1116263 - RNA, 19 nt, Homo sapiens
  misc_RNA (1)...(19): siRNA sense strand
gaaguguugagugcaauag

SEQ ID NO: 1116264 - RNA, 19 nt, Homo sapiens
  misc_RNA (1)...(19): siRNA sense strand
ccucuagacuccugcucau

SEQ ID NO: 1116265 - RNA, 19 nt, Homo sapiens
  misc_RNA (1)...(19): siRNA sense strand
cccaugaucuucgggaaag

SEQ ID NO: 1116266 - RNA, 19 nt, Homo sapiens
  misc_RNA (1)...(19): siRNA sense strand
ucaucaagaaguauaagga

SEQ ID NO: 1116267 - RNA, 19 nt, Homo sapiens
  misc_RNA (1)...(19): siRNA sense strand
gcagaguccuccccagagu

SEQ ID NO: 1116268 - RNA, 19 nt, Homo sapiens
  misc_RNA (1)...(19): siRNA sense strand
ucacaaaggcagagaugcu

SEQ ID NO: 1116269 - RNA, 19 nt, Homo sapiens
  misc_RNA (1)...(19): siRNA sense strand
gaacugucuccugauucuu

SEQ ID NO: 1116270 - RNA, 19 nt, Homo sapiens
  misc_RNA (1)...(19): siRNA sense strand
caaagaaacucauuacuga

SEQ ID NO: 1116271 - RNA, 19 nt, Homo sapiens
  misc_RNA (1)...(19): siRNA sense strand
gugcaguucuugcugauua

SEQ ID NO: 1116272 - RNA, 19 nt, Homo sapiens
  misc_RNA (1)...(19): siRNA sense strand
gacagagacuggagccaua

SEQ ID NO: 1116273 - RNA, 19 nt, Homo sapiens
  misc_RNA (1)...(19): siRNA sense strand
gguauaagcugguggaacu

SEQ ID NO: 1116274 - RNA, 19 nt, Homo sapiens
  misc_RNA (1)...(19): siRNA sense strand
ggaggaggaugccgagaug

SEQ ID NO: 1116275 - RNA, 19 nt, Homo sapiens
  misc_RNA (1)...(19): siRNA sense strand
agaagaagauuccgaucaa

SEQ ID NO: 1116276 - RNA, 19 nt, Homo sapiens
  misc_RNA (1)...(19): siRNA sense strand
gauccaaagaaacucauua

SEQ ID NO: 1116277 - RNA, 19 nt, Homo sapiens
  misc_RNA (1)...(19): siRNA sense strand
ccaaagaaacucauuacug

SEQ ID NO: 1116278 - RNA, 19 nt, Homo sapiens
  misc_RNA (1)...(19): siRNA sense strand
acacuuacauccucaucaa

SEQ ID NO: 1116279 - RNA, 19 nt, Homo sapiens
  misc_RNA (1)...(19): siRNA sense strand
gaagaagauuccgaucaag

SEQ ID NO: 1116280 - RNA, 19 nt, Homo sapiens
  misc_RNA (1)...(19): siRNA sense strand
ucuuagggcucaucuuuau

SEQ ID NO: 1116281 - RNA, 19 nt, Homo sapiens
  misc_RNA (1)...(19): siRNA sense strand
gaccaaggcacgcccacua

SEQ ID NO: 1116282 - RNA, 19 nt, Homo sapiens
  misc_RNA (1)...(19): siRNA sense strand
gcaguacugugaggcuuug

SEQ ID NO: 1116283 - RNA, 19 nt, Homo sapiens
  misc_RNA (1)...(19): siRNA sense strand
uguccgagcuggugcaguu

SEQ ID NO: 1116284 - RNA, 19 nt, Homo sapiens
  misc_RNA (1)...(19): siRNA sense strand
uggccaagguccauaauca

SEQ ID NO: 1116285 - RNA, 19 nt, Homo sapiens
  misc_RNA (1)...(19): siRNA sense strand
uuaaagaccagaagaagau

SEQ ID NO: 1116286 - RNA, 19 nt, Homo sapiens
  misc_RNA (1)...(19): siRNA sense strand
gaaaccagcaagaugaaag

SEQ ID NO: 1116287 - RNA, 19 nt, Homo sapiens
  misc_RNA (1)...(19): siRNA sense strand
gcaacaccaucaaggaaac

SEQ ID NO: 1116288 - RNA, 19 nt, Homo sapiens
  misc_RNA (1)...(19): siRNA sense strand
ggacuacaaggacaucuuc

SEQ ID NO: 1116289 - RNA, 19 nt, Homo sapiens
  misc_RNA (1)...(19): siRNA sense strand
cgucuuagggcucaucuuu

SEQ ID NO: 1116290 - RNA, 19 nt, Homo sapiens
  misc_RNA (1)...(19): siRNA sense strand
ggccagcgcaguacuguga

SEQ ID NO: 1116291 - RNA, 19 nt, Homo sapiens
  misc_RNA (1)...(19): siRNA sense strand
gggcaacaccaucaaggaa

SEQ ID NO: 1116292 - RNA, 19 nt, Homo sapiens
  misc_RNA (1)...(19): siRNA sense strand
ccagcaagaugaaaguucu

SEQ ID NO: 1116293 - RNA, 19 nt, Homo sapiens
  misc_RNA (1)...(19): siRNA sense strand
cgacagcguuaccuggaau

SEQ ID NO: 1116294 - RNA, 19 nt, Homo sapiens
  misc_RNA (1)...(19): siRNA sense strand
cuacgggccuccugaugau

SEQ ID NO: 1116295 - RNA, 19 nt, Homo sapiens
  misc_RNA (1)...(19): siRNA sense strand
cagaagaagauuccgauca

SEQ ID NO: 1116296 - RNA, 19 nt, Homo sapiens
  misc_RNA (1)...(19): siRNA sense strand
gugaggcuuuggcagauga

SEQ ID NO: 1116297 - RNA, 19 nt, Homo sapiens
  misc_RNA (1)...(19): siRNA sense strand
gcgacagcguuaccuggaa

SEQ ID NO: 1116298 - RNA, 19 nt, Homo sapiens
  misc_RNA (1)...(19): siRNA sense strand
caccaagaagcauuuaauu

SEQ ID NO: 1116299 - RNA, 19 nt, Homo sapiens
  misc_RNA (1)...(19): siRNA sense strand
ccaccaagaagcauuuaau

SEQ ID NO: 1116300 - RNA, 19 nt, Homo sapiens
  misc_RNA (1)...(19): siRNA sense strand
ggaaaccagcaagaugaaa

SEQ ID NO: 1116301 - RNA, 19 nt, Homo sapiens
  misc_RNA (1)...(19): siRNA sense strand
gaaaguucuuaaguuugug

SEQ ID NO: 1116302 - RNA, 19 nt, Homo sapiens
  misc_RNA (1)...(19): siRNA sense strand
ggcaacaccaucaaggaaa

SEQ ID NO: 1116303 - RNA, 19 nt, Homo sapiens
  misc_RNA (1)...(19): siRNA sense strand
ggagauccaaagaaacuca

SEQ ID NO: 1116304 - RNA, 19 nt, Homo sapiens
  misc_RNA (1)...(19): siRNA sense strand
gaacccaagagcaacacuu

SEQ ID NO: 1116305 - RNA, 19 nt, Homo sapiens
  misc_RNA (1)...(19): siRNA sense strand
caguacgucuucggguaua

SEQ ID NO: 1116306 - RNA, 19 nt, Homo sapiens
  misc_RNA (1)...(19): siRNA sense strand
gauuaaagaccagaagaag

SEQ ID NO: 1116307 - RNA, 19 nt, Homo sapiens
  misc_RNA (1)...(19): siRNA sense strand
aacccaagagcaacacuua

SEQ ID NO: 1116308 - RNA, 19 nt, Homo sapiens
  misc_RNA (1)...(19): siRNA sense strand
ggccagaccucagccuagu

SEQ ID NO: 1116309 - RNA, 19 nt, Homo sapiens
  misc_RNA (1)...(19): siRNA sense strand
caagguccauaaucaagac

SEQ ID NO: 1116310 - RNA, 19 nt, Homo sapiens
  misc_RNA (1)...(19): siRNA sense strand
caagagcaacacuuacauc

SEQ ID NO: 1116311 - RNA, 19 nt, Homo sapiens
  misc_RNA (1)...(19): siRNA sense strand
gcccagcuccauccucuug

SEQ ID NO: 1116312 - RNA, 19 nt, Homo sapiens
  misc_RNA (1)...(19): siRNA sense strand
ccaagguccauaaucaaga

SEQ ID NO: 1116313 - RNA, 19 nt, Homo sapiens
  misc_RNA (1)...(19): siRNA sense strand
gaagggcaacaccaucaag

SEQ ID NO: 1116314 - RNA, 19 nt, Homo sapiens
  misc_RNA (1)...(19): siRNA sense strand
gggccgacauacugaagca

SEQ ID NO: 1116315 - RNA, 19 nt, Homo sapiens
  misc_RNA (1)...(19): siRNA sense strand
ugauuaaagaccagaagaa

SEQ ID NO: 1116316 - RNA, 19 nt, Homo sapiens
  misc_RNA (1)...(19): siRNA sense strand
gcaguucuugcugauuaaa

SEQ ID NO: 1116317 - RNA, 19 nt, Homo sapiens
  misc_RNA (1)...(19): siRNA sense strand
ggccaagguccauaaucaa

SEQ ID NO: 1116318 - RNA, 19 nt, Homo sapiens
  misc_RNA (1)...(19): siRNA sense strand
gucuuagggcucaucuuua

SEQ ID NO: 1116319 - RNA, 19 nt, Homo sapiens
  misc_RNA (1)...(19): siRNA sense strand
ccaguacgucuucggguau

SEQ ID NO: 1116320 - RNA, 19 nt, Homo sapiens
  misc_RNA (1)...(19): siRNA sense strand
gccaagguccauaaucaag

SEQ ID NO: 1116321 - RNA, 19 nt, Homo sapiens
  misc_RNA (1)...(19): siRNA sense strand
gcauuuaauuuucggagau

SEQ ID NO: 1116322 - RNA, 19 nt, Homo sapiens
  misc_RNA (1)...(19): siRNA sense strand
auaagcugguggaacuuga

SEQ ID NO: 1116323 - RNA, 19 nt, Homo sapiens
  misc_RNA (1)...(19): siRNA sense strand
aaacugaagccugggacuu

SEQ ID NO: 1116324 - RNA, 19 nt, Homo sapiens
  misc_RNA (1)...(19): siRNA sense strand
gacagcguuaccuggaaua

SEQ ID NO: 1116325 - RNA, 19 nt, Homo sapiens
  misc_RNA (1)...(19): siRNA sense strand
uaaagaccagaagaagauu

SEQ ID NO: 1116326 - RNA, 19 nt, Homo sapiens
  misc_RNA (1)...(19): siRNA sense strand
ccaagagcaacacuuacau

SEQ ID NO: 1116327 - RNA, 19 nt, Homo sapiens
  misc_RNA (1)...(19): siRNA sense strand
ggaaaugggagaagaagug

SEQ ID NO: 1116328 - RNA, 19 nt, Homo sapiens
  misc_RNA (1)...(19): siRNA sense strand
ccgagaaccuaauggcuuu

SEQ ID NO: 1116329 - RNA, 19 nt, Homo sapiens
  misc_RNA (1)...(19): siRNA sense strand
ccucggaaguugcugauga

SEQ ID NO: 1116330 - RNA, 19 nt, Homo sapiens
  misc_RNA (1)...(19): siRNA sense strand
ggaaguugcugaugaaccu

SEQ ID NO: 1116331 - RNA, 19 nt, Homo sapiens
  misc_RNA (1)...(19): siRNA sense strand
ccuaauggcuuuccuucug

SEQ ID NO: 1116332 - RNA, 19 nt, Homo sapiens
  misc_RNA (1)...(19): siRNA sense strand
cuaauggcuuuccuucuga

SEQ ID NO: 1116333 - RNA, 19 nt, Homo sapiens
  misc_RNA (1)...(19): siRNA sense strand
acacgucccugaggauauu

SEQ ID NO: 1116334 - RNA, 19 nt, Homo sapiens
  misc_RNA (1)...(19): siRNA sense strand
ccaaggacgacaucaagaa

SEQ ID NO: 1116335 - RNA, 19 nt, Homo sapiens
  misc_RNA (1)...(19): siRNA sense strand
ggacagcagcaccaacuca

SEQ ID NO: 1116336 - RNA, 19 nt, Homo sapiens
  misc_RNA (1)...(19): siRNA sense strand
caauuccucucuccuucuu

SEQ ID NO: 1116337 - RNA, 19 nt, Homo sapiens
  misc_RNA (1)...(19): siRNA sense strand
gaaaacagcaaccagaguu

SEQ ID NO: 1116338 - RNA, 19 nt, Homo sapiens
  misc_RNA (1)...(19): siRNA sense strand
uaaguggguuccugugaca

SEQ ID NO: 1116339 - RNA, 19 nt, Homo sapiens
  misc_RNA (1)...(19): siRNA sense strand
ugacagacagcaaggagaa

SEQ ID NO: 1116340 - RNA, 19 nt, Homo sapiens
  misc_RNA (1)...(19): siRNA sense strand
gaaccuaauggcuuuccuu

SEQ ID NO: 1116341 - RNA, 19 nt, Homo sapiens
  misc_RNA (1)...(19): siRNA sense strand
caaccagaguuccgugucu

SEQ ID NO: 1116342 - RNA, 19 nt, Homo sapiens
  misc_RNA (1)...(19): siRNA sense strand
ccucucuccuucuugaauu

SEQ ID NO: 1116343 - RNA, 19 nt, Homo sapiens
  misc_RNA (1)...(19): siRNA sense strand
gugcggaaaugggagaaga

SEQ ID NO: 1116344 - RNA, 19 nt, Homo sapiens
  misc_RNA (1)...(19): siRNA sense strand
ugacacgucccugaggaua

SEQ ID NO: 1116345 - RNA, 19 nt, Homo sapiens
  misc_RNA (1)...(19): siRNA sense strand
ucgagaaagugcggaaaug

SEQ ID NO: 1116346 - RNA, 19 nt, Homo sapiens
  misc_RNA (1)...(19): siRNA sense strand
cagcagcccgagaaccuaa

SEQ ID NO: 1116347 - RNA, 19 nt, Homo sapiens
  misc_RNA (1)...(19): siRNA sense strand
gaaagaaaagucaaaaucg

SEQ ID NO: 1116348 - RNA, 19 nt, Homo sapiens
  misc_RNA (1)...(19): siRNA sense strand
ugacgucuaucagcuuaag

SEQ ID NO: 1116349 - RNA, 19 nt, Homo sapiens
  misc_RNA (1)...(19): siRNA sense strand
gacagcagcaccaacucaa

SEQ ID NO: 1116350 - RNA, 19 nt, Homo sapiens
  misc_RNA (1)...(19): siRNA sense strand
caaggacgacaucaagaag

SEQ ID NO: 1116351 - RNA, 19 nt, Homo sapiens
  misc_RNA (1)...(19): siRNA sense strand
ggccaaggacgacaucaag

SEQ ID NO: 1116352 - RNA, 19 nt, Homo sapiens
  misc_RNA (1)...(19): siRNA sense strand
gacagcaaggagaaagaaa

SEQ ID NO: 1116353 - RNA, 19 nt, Homo sapiens
  misc_RNA (1)...(19): siRNA sense strand
uuccgugucugacgucuau

SEQ ID NO: 1116354 - RNA, 19 nt, Homo sapiens
  misc_RNA (1)...(19): siRNA sense strand
ggagaaagaaaagucaaaa

SEQ ID NO: 1116355 - RNA, 19 nt, Homo sapiens
  misc_RNA (1)...(19): siRNA sense strand
agaagaagugggugacugu

SEQ ID NO: 1116356 - RNA, 19 nt, Homo sapiens
  misc_RNA (1)...(19): siRNA sense strand
gccaaggacgacaucaaga

SEQ ID NO: 1116357 - RNA, 19 nt, Homo sapiens
  misc_RNA (1)...(19): siRNA sense strand
cagcacacaccuccgacuu

SEQ ID NO: 1116358 - RNA, 19 nt, Homo sapiens
  misc_RNA (1)...(19): siRNA sense strand
gggccaaggacgacaucaa

SEQ ID NO: 1116359 - RNA, 19 nt, Homo sapiens
  misc_RNA (1)...(19): siRNA sense strand
gacacgucccugaggauau

SEQ ID NO: 1116360 - RNA, 19 nt, Homo sapiens
  misc_RNA (1)...(19): siRNA sense strand
agacagcaaggagaaagaa

SEQ ID NO: 1116361 - RNA, 19 nt, Homo sapiens
  misc_RNA (1)...(19): siRNA sense strand
ggaaaugggagaagaagug

SEQ ID NO: 1116362 - RNA, 19 nt, Homo sapiens
  misc_RNA (1)...(19): siRNA sense strand
ccgagaaccuaauggcuuu

SEQ ID NO: 1116363 - RNA, 19 nt, Homo sapiens
  misc_RNA (1)...(19): siRNA sense strand
ccucggaaguugcugauga

SEQ ID NO: 1116364 - RNA, 19 nt, Homo sapiens
  misc_RNA (1)...(19): siRNA sense strand
ggaaguugcugaugaaccu

SEQ ID NO: 1116365 - RNA, 19 nt, Homo sapiens
  misc_RNA (1)...(19): siRNA sense strand
ccuaauggcuuuccuucug

SEQ ID NO: 1116366 - RNA, 19 nt, Homo sapiens
  misc_RNA (1)...(19): siRNA sense strand
cuaauggcuuuccuucuga

SEQ ID NO: 1116367 - RNA, 19 nt, Homo sapiens
  misc_RNA (1)...(19): siRNA sense strand
acacgucccugaggauauu

SEQ ID NO: 1116368 - RNA, 19 nt, Homo sapiens
  misc_RNA (1)...(19): siRNA sense strand
ccaaggacgacaucaagaa

SEQ ID NO: 1116369 - RNA, 19 nt, Homo sapiens
  misc_RNA (1)...(19): siRNA sense strand
ggacagcagcaccaacuca

SEQ ID NO: 1116370 - RNA, 19 nt, Homo sapiens
  misc_RNA (1)...(19): siRNA sense strand
caauuccucucuccuucuu

SEQ ID NO: 1116371 - RNA, 19 nt, Homo sapiens
  misc_RNA (1)...(19): siRNA sense strand
gaaaacagcaaccagaguu

SEQ ID NO: 1116372 - RNA, 19 nt, Homo sapiens
  misc_RNA (1)...(19): siRNA sense strand
uaaguggguuccugugaca

SEQ ID NO: 1116373 - RNA, 19 nt, Homo sapiens
  misc_RNA (1)...(19): siRNA sense strand
ugacagacagcaaggagaa

SEQ ID NO: 1116374 - RNA, 19 nt, Homo sapiens
  misc_RNA (1)...(19): siRNA sense strand
gaaccuaauggcuuuccuu

SEQ ID NO: 1116375 - RNA, 19 nt, Homo sapiens
  misc_RNA (1)...(19): siRNA sense strand
caaccagaguuccgugucu

SEQ ID NO: 1116376 - RNA, 19 nt, Homo sapiens
  misc_RNA (1)...(19): siRNA sense strand
ccucucuccuucuugaauu

SEQ ID NO: 1116377 - RNA, 19 nt, Homo sapiens
  misc_RNA (1)...(19): siRNA sense strand
gugcggaaaugggagaaga

SEQ ID NO: 1116378 - RNA, 19 nt, Homo sapiens
  misc_RNA (1)...(19): siRNA sense strand
ugacacgucccugaggaua

SEQ ID NO: 1116379 - RNA, 19 nt, Homo sapiens
  misc_RNA (1)...(19): siRNA sense strand
ucgagaaagugcggaaaug

SEQ ID NO: 1116380 - RNA, 19 nt, Homo sapiens
  misc_RNA (1)...(19): siRNA sense strand
cagcagcccgagaaccuaa

SEQ ID NO: 1116381 - RNA, 19 nt, Homo sapiens
  misc_RNA (1)...(19): siRNA sense strand
gaaagaaaagucaaaaucg

SEQ ID NO: 1116382 - RNA, 19 nt, Homo sapiens
  misc_RNA (1)...(19): siRNA sense strand
ugacgucuaucagcuuaag

SEQ ID NO: 1116383 - RNA, 19 nt, Homo sapiens
  misc_RNA (1)...(19): siRNA sense strand
gacagcagcaccaacucaa

SEQ ID NO: 1116384 - RNA, 19 nt, Homo sapiens
  misc_RNA (1)...(19): siRNA sense strand
caaggacgacaucaagaag

SEQ ID NO: 1116385 - RNA, 19 nt, Homo sapiens
  misc_RNA (1)...(19): siRNA sense strand
ggccaaggacgacaucaag

SEQ ID NO: 1116386 - RNA, 19 nt, Homo sapiens
  misc_RNA (1)...(19): siRNA sense strand
gacagcaaggagaaagaaa

SEQ ID NO: 1116387 - RNA, 19 nt, Homo sapiens
  misc_RNA (1)...(19): siRNA sense strand
uuccgugucugacgucuau

SEQ ID NO: 1116388 - RNA, 19 nt, Homo sapiens
  misc_RNA (1)...(19): siRNA sense strand
ggagaaagaaaagucaaaa

SEQ ID NO: 1116389 - RNA, 19 nt, Homo sapiens
  misc_RNA (1)...(19): siRNA sense strand
agaagaagugggugacugu

SEQ ID NO: 1116390 - RNA, 19 nt, Homo sapiens
  misc_RNA (1)...(19): siRNA sense strand
gccaaggacgacaucaaga

SEQ ID NO: 1116391 - RNA, 19 nt, Homo sapiens
  misc_RNA (1)...(19): siRNA sense strand
cagcacacaccuccgacuu

SEQ ID NO: 1116392 - RNA, 19 nt, Homo sapiens
  misc_RNA (1)...(19): siRNA sense strand
gggccaaggacgacaucaa

SEQ ID NO: 1116393 - RNA, 19 nt, Homo sapiens
  misc_RNA (1)...(19): siRNA sense strand
gacacgucccugaggauau

SEQ ID NO: 1116394 - RNA, 19 nt, Homo sapiens
  misc_RNA (1)...(19): siRNA sense strand
agacagcaaggagaaagaa

SEQ ID NO: 1116395 - RNA, 19 nt, Homo sapiens
  misc_RNA (1)...(19): siRNA sense strand
ggaaaugggagaagaagug

SEQ ID NO: 1116396 - RNA, 19 nt, Homo sapiens
  misc_RNA (1)...(19): siRNA sense strand
ccgagaaccuaauggcuuu

SEQ ID NO: 1116397 - RNA, 19 nt, Homo sapiens
  misc_RNA (1)...(19): siRNA sense strand
ccucggaaguugcugauga

SEQ ID NO: 1116398 - RNA, 19 nt, Homo sapiens
  misc_RNA (1)...(19): siRNA sense strand
ggaaguugcugaugaaccu

SEQ ID NO: 1116399 - RNA, 19 nt, Homo sapiens
  misc_RNA (1)...(19): siRNA sense strand
ccuaauggcuuuccuucug

SEQ ID NO: 1116400 - RNA, 19 nt, Homo sapiens
  misc_RNA (1)...(19): siRNA sense strand
cuaauggcuuuccuucuga

SEQ ID NO: 1116401 - RNA, 19 nt, Homo sapiens
  misc_RNA (1)...(19): siRNA sense strand
acacgucccugaggauauu

SEQ ID NO: 1116402 - RNA, 19 nt, Homo sapiens
  misc_RNA (1)...(19): siRNA sense strand
ccaaggacgacaucaagaa

SEQ ID NO: 1116403 - RNA, 19 nt, Homo sapiens
  misc_RNA (1)...(19): siRNA sense strand
ggacagcagcaccaacuca

SEQ ID NO: 1116404 - RNA, 19 nt, Homo sapiens
  misc_RNA (1)...(19): siRNA sense strand
caauuccucucuccuucuu

SEQ ID NO: 1116405 - RNA, 19 nt, Homo sapiens
  misc_RNA (1)...(19): siRNA sense strand
gaaaacagcaaccagaguu

SEQ ID NO: 1116406 - RNA, 19 nt, Homo sapiens
  misc_RNA (1)...(19): siRNA sense strand
uaaguggguuccugugaca

SEQ ID NO: 1116407 - RNA, 19 nt, Homo sapiens
  misc_RNA (1)...(19): siRNA sense strand
ugacagacagcaaggagaa

SEQ ID NO: 1116408 - RNA, 19 nt, Homo sapiens
  misc_RNA (1)...(19): siRNA sense strand
gaaccuaauggcuuuccuu

SEQ ID NO: 1116409 - RNA, 19 nt, Homo sapiens
  misc_RNA (1)...(19): siRNA sense strand
caaccagaguuccgugucu

SEQ ID NO: 1116410 - RNA, 19 nt, Homo sapiens
  misc_RNA (1)...(19): siRNA sense strand
ccucucuccuucuugaauu

SEQ ID NO: 1116411 - RNA, 19 nt, Homo sapiens
  misc_RNA (1)...(19): siRNA sense strand
gugcggaaaugggagaaga

SEQ ID NO: 1116412 - RNA, 19 nt, Homo sapiens
  misc_RNA (1)...(19): siRNA sense strand
ugacacgucccugaggaua

SEQ ID NO: 1116413 - RNA, 19 nt, Homo sapiens
  misc_RNA (1)...(19): siRNA sense strand
ucgagaaagugcggaaaug

SEQ ID NO: 1116414 - RNA, 19 nt, Homo sapiens
  misc_RNA (1)...(19): siRNA sense strand
cagcagcccgagaaccuaa

SEQ ID NO: 1116415 - RNA, 19 nt, Homo sapiens
  misc_RNA (1)...(19): siRNA sense strand
gaaagaaaagucaaaaucg

SEQ ID NO: 1116416 - RNA, 19 nt, Homo sapiens
  misc_RNA (1)...(19): siRNA sense strand
ugacgucuaucagcuuaag

SEQ ID NO: 1116417 - RNA, 19 nt, Homo sapiens
  misc_RNA (1)...(19): siRNA sense strand
gacagcagcaccaacucaa

SEQ ID NO: 1116418 - RNA, 19 nt, Homo sapiens
  misc_RNA (1)...(19): siRNA sense strand
caaggacgacaucaagaag

SEQ ID NO: 1116419 - RNA, 19 nt, Homo sapiens
  misc_RNA (1)...(19): siRNA sense strand
ggccaaggacgacaucaag

SEQ ID NO: 1116420 - RNA, 19 nt, Homo sapiens
  misc_RNA (1)...(19): siRNA sense strand
gacagcaaggagaaagaaa

SEQ ID NO: 1116421 - RNA, 19 nt, Homo sapiens
  misc_RNA (1)...(19): siRNA sense strand
uuccgugucugacgucuau

SEQ ID NO: 1116422 - RNA, 19 nt, Homo sapiens
  misc_RNA (1)...(19): siRNA sense strand
ggagaaagaaaagucaaaa

SEQ ID NO: 1116423 - RNA, 19 nt, Homo sapiens
  misc_RNA (1)...(19): siRNA sense strand
agaagaagugggugacugu

SEQ ID NO: 1116424 - RNA, 19 nt, Homo sapiens
  misc_RNA (1)...(19): siRNA sense strand
gccaaggacgacaucaaga

SEQ ID NO: 1116425 - RNA, 19 nt, Homo sapiens
  misc_RNA (1)...(19): siRNA sense strand
cagcacacaccuccgacuu

SEQ ID NO: 1116426 - RNA, 19 nt, Homo sapiens
  misc_RNA (1)...(19): siRNA sense strand
gggccaaggacgacaucaa

SEQ ID NO: 1116427 - RNA, 19 nt, Homo sapiens
  misc_RNA (1)...(19): siRNA sense strand
gacacgucccugaggauau

SEQ ID NO: 1116428 - RNA, 19 nt, Homo sapiens
  misc_RNA (1)...(19): siRNA sense strand
agacagcaaggagaaagaa

SEQ ID NO: 1116429 - RNA, 19 nt, Homo sapiens
  misc_RNA (1)...(19): siRNA sense strand
ggaaaugggagaagaagug

SEQ ID NO: 1116430 - RNA, 19 nt, Homo sapiens
  misc_RNA (1)...(19): siRNA sense strand
ccgagaaccuaauggcuuu

SEQ ID NO: 1116431 - RNA, 19 nt, Homo sapiens
  misc_RNA (1)...(19): siRNA sense strand
ccucggaaguugcugauga

SEQ ID NO: 1116432 - RNA, 19 nt, Homo sapiens
  misc_RNA (1)...(19): siRNA sense strand
ggaaguugcugaugaaccu

SEQ ID NO: 1116433 - RNA, 19 nt, Homo sapiens
  misc_RNA (1)...(19): siRNA sense strand
ccuaauggcuuuccuucug

SEQ ID NO: 1116434 - RNA, 19 nt, Homo sapiens
  misc_RNA (1)...(19): siRNA sense strand
cuaauggcuuuccuucuga

SEQ ID NO: 1116435 - RNA, 19 nt, Homo sapiens
  misc_RNA (1)...(19): siRNA sense strand
acacgucccugaggauauu

SEQ ID NO: 1116436 - RNA, 19 nt, Homo sapiens
  misc_RNA (1)...(19): siRNA sense strand
ccaaggacgacaucaagaa

SEQ ID NO: 1116437 - RNA, 19 nt, Homo sapiens
  misc_RNA (1)...(19): siRNA sense strand
ggacagcagcaccaacuca

SEQ ID NO: 1116438 - RNA, 19 nt, Homo sapiens
  misc_RNA (1)...(19): siRNA sense strand
caauuccucucuccuucuu

SEQ ID NO: 1116439 - RNA, 19 nt, Homo sapiens
  misc_RNA (1)...(19): siRNA sense strand
gaaaacagcaaccagaguu

SEQ ID NO: 1116440 - RNA, 19 nt, Homo sapiens
  misc_RNA (1)...(19): siRNA sense strand
uaaguggguuccugugaca

SEQ ID NO: 1116441 - RNA, 19 nt, Homo sapiens
  misc_RNA (1)...(19): siRNA sense strand
ugacagacagcaaggagaa

SEQ ID NO: 1116442 - RNA, 19 nt, Homo sapiens
  misc_RNA (1)...(19): siRNA sense strand
gaaccuaauggcuuuccuu

SEQ ID NO: 1116443 - RNA, 19 nt, Homo sapiens
  misc_RNA (1)...(19): siRNA sense strand
caaccagaguuccgugucu

SEQ ID NO: 1116444 - RNA, 19 nt, Homo sapiens
  misc_RNA (1)...(19): siRNA sense strand
ccucucuccuucuugaauu

SEQ ID NO: 1116445 - RNA, 19 nt, Homo sapiens
  misc_RNA (1)...(19): siRNA sense strand
gugcggaaaugggagaaga

SEQ ID NO: 1116446 - RNA, 19 nt, Homo sapiens
  misc_RNA (1)...(19): siRNA sense strand
ugacacgucccugaggaua

SEQ ID NO: 1116447 - RNA, 19 nt, Homo sapiens
  misc_RNA (1)...(19): siRNA sense strand
ucgagaaagugcggaaaug

SEQ ID NO: 1116448 - RNA, 19 nt, Homo sapiens
  misc_RNA (1)...(19): siRNA sense strand
cagcagcccgagaaccuaa

SEQ ID NO: 1116449 - RNA, 19 nt, Homo sapiens
  misc_RNA (1)...(19): siRNA sense strand
gaaagaaaagucaaaaucg

SEQ ID NO: 1116450 - RNA, 19 nt, Homo sapiens
  misc_RNA (1)...(19): siRNA sense strand
ugacgucuaucagcuuaag

SEQ ID NO: 1116451 - RNA, 19 nt, Homo sapiens
  misc_RNA (1)...(19): siRNA sense strand
gacagcagcaccaacucaa

SEQ ID NO: 1116452 - RNA, 19 nt, Homo sapiens
  misc_RNA (1)...(19): siRNA sense strand
caaggacgacaucaagaag

SEQ ID NO: 1116453 - RNA, 19 nt, Homo sapiens
  misc_RNA (1)...(19): siRNA sense strand
ggccaaggacgacaucaag

SEQ ID NO: 1116454 - RNA, 19 nt, Homo sapiens
  misc_RNA (1)...(19): siRNA sense strand
gacagcaaggagaaagaaa

SEQ ID NO: 1116455 - RNA, 19 nt, Homo sapiens
  misc_RNA (1)...(19): siRNA sense strand
uuccgugucugacgucuau

SEQ ID NO: 1116456 - RNA, 19 nt, Homo sapiens
  misc_RNA (1)...(19): siRNA sense strand
ggagaaagaaaagucaaaa

SEQ ID NO: 1116457 - RNA, 19 nt, Homo sapiens
  misc_RNA (1)...(19): siRNA sense strand
agaagaagugggugacugu

SEQ ID NO: 1116458 - RNA, 19 nt, Homo sapiens
  misc_RNA (1)...(19): siRNA sense strand
gccaaggacgacaucaaga

SEQ ID NO: 1116459 - RNA, 19 nt, Homo sapiens
  misc_RNA (1)...(19): siRNA sense strand
cagcacacaccuccgacuu

SEQ ID NO: 1116460 - RNA, 19 nt, Homo sapiens
  misc_RNA (1)...(19): siRNA sense strand
gggccaaggacgacaucaa

SEQ ID NO: 1116461 - RNA, 19 nt, Homo sapiens
  misc_RNA (1)...(19): siRNA sense strand
gacacgucccugaggauau

SEQ ID NO: 1116462 - RNA, 19 nt, Homo sapiens
  misc_RNA (1)...(19): siRNA sense strand
agacagcaaggagaaagaa

SEQ ID NO: 1116463 - RNA, 19 nt, Homo sapiens
  misc_RNA (1)...(19): siRNA sense strand
ucauuuggcuguuggauuu

SEQ ID NO: 1116464 - RNA, 19 nt, Homo sapiens
  misc_RNA (1)...(19): siRNA sense strand
ggaagcagcucucauucuc

SEQ ID NO: 1116465 - RNA, 19 nt, Homo sapiens
  misc_RNA (1)...(19): siRNA sense strand
gaaguccaaucgaaaggaa

SEQ ID NO: 1116466 - RNA, 19 nt, Homo sapiens
  misc_RNA (1)...(19): siRNA sense strand
gcugagaaguccaaucgaa

SEQ ID NO: 1116467 - RNA, 19 nt, Homo sapiens
  misc_RNA (1)...(19): siRNA sense strand
caacacagacuaccacaug

SEQ ID NO: 1116468 - RNA, 19 nt, Homo sapiens
  misc_RNA (1)...(19): siRNA sense strand
ggucaucaguaauaucuuc

SEQ ID NO: 1116469 - RNA, 19 nt, Homo sapiens
  misc_RNA (1)...(19): siRNA sense strand
ggaagaaugccguguucaa

SEQ ID NO: 1116470 - RNA, 19 nt, Homo sapiens
  misc_RNA (1)...(19): siRNA sense strand
ccacuaugacgcuuccuua

SEQ ID NO: 1116471 - RNA, 19 nt, Homo sapiens
  misc_RNA (1)...(19): siRNA sense strand
gccaagaucugaccgugau

SEQ ID NO: 1116472 - RNA, 19 nt, Homo sapiens
  misc_RNA (1)...(19): siRNA sense strand
guaauaucuucaacacaga

SEQ ID NO: 1116473 - RNA, 19 nt, Homo sapiens
  misc_RNA (1)...(19): siRNA sense strand
ucauucuccucuucuauuu

SEQ ID NO: 1116474 - RNA, 19 nt, Homo sapiens
  misc_RNA (1)...(19): siRNA sense strand
gcaacgauacccaguuugu

SEQ ID NO: 1116475 - RNA, 19 nt, Homo sapiens
  misc_RNA (1)...(19): siRNA sense strand
ggaagguggucaucacacu

SEQ ID NO: 1116476 - RNA, 19 nt, Homo sapiens
  misc_RNA (1)...(19): siRNA sense strand
ggagcaguguggccuucaa

SEQ ID NO: 1116477 - RNA, 19 nt, Homo sapiens
  misc_RNA (1)...(19): siRNA sense strand
cuaugacgcuuccuuagag

SEQ ID NO: 1116478 - RNA, 19 nt, Homo sapiens
  misc_RNA (1)...(19): siRNA sense strand
gaagaaugccguguucaac

SEQ ID NO: 1116479 - RNA, 19 nt, Homo sapiens
  misc_RNA (1)...(19): siRNA sense strand
ugguggaggugacagcuuu

SEQ ID NO: 1116480 - RNA, 19 nt, Homo sapiens
  misc_RNA (1)...(19): siRNA sense strand
ucaguaauaucuucaacac

SEQ ID NO: 1116481 - RNA, 19 nt, Homo sapiens
  misc_RNA (1)...(19): siRNA sense strand
gcucguggcauccuaucaa

SEQ ID NO: 1116482 - RNA, 19 nt, Homo sapiens
  misc_RNA (1)...(19): siRNA sense strand
aaggaagaaugccguguuc

SEQ ID NO: 1116483 - RNA, 19 nt, Homo sapiens
  misc_RNA (1)...(19): siRNA sense strand
aaaggaagaaugccguguu

SEQ ID NO: 1116484 - RNA, 19 nt, Homo sapiens
  misc_RNA (1)...(19): siRNA sense strand
guauucggcuggccaccau

SEQ ID NO: 1116485 - RNA, 19 nt, Homo sapiens
  misc_RNA (1)...(19): siRNA sense strand
acacagacuaccacaugaa

SEQ ID NO: 1116486 - RNA, 19 nt, Homo sapiens
  misc_RNA (1)...(19): siRNA sense strand
gcccucuucuuguggaugu

SEQ ID NO: 1116487 - RNA, 19 nt, Homo sapiens
  misc_RNA (1)...(19): siRNA sense strand
aacacagacuaccacauga

SEQ ID NO: 1116488 - RNA, 19 nt, Homo sapiens
  misc_RNA (1)...(19): siRNA sense strand
acuggaagcagcucucauu

SEQ ID NO: 1116489 - RNA, 19 nt, Homo sapiens
  misc_RNA (1)...(19): siRNA sense strand
caucaguaauaucuucaac

SEQ ID NO: 1116490 - RNA, 19 nt, Homo sapiens
  misc_RNA (1)...(19): siRNA sense strand
caaguuuucuggaaguuuc

SEQ ID NO: 1116491 - RNA, 19 nt, Homo sapiens
  misc_RNA (1)...(19): siRNA sense strand
ugagaaguccaaucgaaag

SEQ ID NO: 1116492 - RNA, 19 nt, Homo sapiens
  misc_RNA (1)...(19): siRNA sense strand
gguggaggugacagcuuua

SEQ ID NO: 1116493 - RNA, 19 nt, Homo sapiens
  misc_RNA (1)...(19): siRNA sense strand
cugagaaguccaaucgaaa

SEQ ID NO: 1116494 - RNA, 19 nt, Homo sapiens
  misc_RNA (1)...(19): siRNA sense strand
ggccuucaaccucuucaug

SEQ ID NO: 1116495 - RNA, 19 nt, Homo sapiens
  misc_RNA (1)...(19): siRNA sense strand
ccaaucgaaaggaagaaug

SEQ ID NO: 1116496 - RNA, 19 nt, Homo sapiens
  misc_RNA (1)...(19): siRNA sense strand
gagaaguccaaucgaaagg

SEQ ID NO: 1116497 - RNA, 19 nt, Homo sapiens
  misc_RNA (1)...(19): siRNA sense strand
ggaagcagcucucauucuc

SEQ ID NO: 1116498 - RNA, 19 nt, Homo sapiens
  misc_RNA (1)...(19): siRNA sense strand
gaaguccaaucgaaaggaa

SEQ ID NO: 1116499 - RNA, 19 nt, Homo sapiens
  misc_RNA (1)...(19): siRNA sense strand
gcugagaaguccaaucgaa

SEQ ID NO: 1116500 - RNA, 19 nt, Homo sapiens
  misc_RNA (1)...(19): siRNA sense strand
caacacagacuaccacaug

SEQ ID NO: 1116501 - RNA, 19 nt, Homo sapiens
  misc_RNA (1)...(19): siRNA sense strand
ggucaucaguaauaucuuc

SEQ ID NO: 1116502 - RNA, 19 nt, Homo sapiens
  misc_RNA (1)...(19): siRNA sense strand
ggaagaaugccguguucaa

SEQ ID NO: 1116503 - RNA, 19 nt, Homo sapiens
  misc_RNA (1)...(19): siRNA sense strand
ccacuaugacgcuuccuua

SEQ ID NO: 1116504 - RNA, 19 nt, Homo sapiens
  misc_RNA (1)...(19): siRNA sense strand
gccaagaucugaccgugau

SEQ ID NO: 1116505 - RNA, 19 nt, Homo sapiens
  misc_RNA (1)...(19): siRNA sense strand
guaauaucuucaacacaga

SEQ ID NO: 1116506 - RNA, 19 nt, Homo sapiens
  misc_RNA (1)...(19): siRNA sense strand
ucauucuccucuucuauuu

SEQ ID NO: 1116507 - RNA, 19 nt, Homo sapiens
  misc_RNA (1)...(19): siRNA sense strand
gcaacgauacccaguuugu

SEQ ID NO: 1116508 - RNA, 19 nt, Homo sapiens
  misc_RNA (1)...(19): siRNA sense strand
ggaagguggucaucacacu

SEQ ID NO: 1116509 - RNA, 19 nt, Homo sapiens
  misc_RNA (1)...(19): siRNA sense strand
ggagcaguguggccuucaa

SEQ ID NO: 1116510 - RNA, 19 nt, Homo sapiens
  misc_RNA (1)...(19): siRNA sense strand
cuaugacgcuuccuuagag

SEQ ID NO: 1116511 - RNA, 19 nt, Homo sapiens
  misc_RNA (1)...(19): siRNA sense strand
gaagaaugccguguucaac

SEQ ID NO: 1116512 - RNA, 19 nt, Homo sapiens
  misc_RNA (1)...(19): siRNA sense strand
ugguggaggugacagcuuu

SEQ ID NO: 1116513 - RNA, 19 nt, Homo sapiens
  misc_RNA (1)...(19): siRNA sense strand
ucaguaauaucuucaacac

SEQ ID NO: 1116514 - RNA, 19 nt, Homo sapiens
  misc_RNA (1)...(19): siRNA sense strand
gcucguggcauccuaucaa

SEQ ID NO: 1116515 - RNA, 19 nt, Homo sapiens
  misc_RNA (1)...(19): siRNA sense strand
aaggaagaaugccguguuc

SEQ ID NO: 1116516 - RNA, 19 nt, Homo sapiens
  misc_RNA (1)...(19): siRNA sense strand
aaaggaagaaugccguguu

SEQ ID NO: 1116517 - RNA, 19 nt, Homo sapiens
  misc_RNA (1)...(19): siRNA sense strand
guauucggcuggccaccau

SEQ ID NO: 1116518 - RNA, 19 nt, Homo sapiens
  misc_RNA (1)...(19): siRNA sense strand
acacagacuaccacaugaa

SEQ ID NO: 1116519 - RNA, 19 nt, Homo sapiens
  misc_RNA (1)...(19): siRNA sense strand
gcccucuucuuguggaugu

SEQ ID NO: 1116520 - RNA, 19 nt, Homo sapiens
  misc_RNA (1)...(19): siRNA sense strand
aacacagacuaccacauga

SEQ ID NO: 1116521 - RNA, 19 nt, Homo sapiens
  misc_RNA (1)...(19): siRNA sense strand
acuggaagcagcucucauu

SEQ ID NO: 1116522 - RNA, 19 nt, Homo sapiens
  misc_RNA (1)...(19): siRNA sense strand
caucaguaauaucuucaac

SEQ ID NO: 1116523 - RNA, 19 nt, Homo sapiens
  misc_RNA (1)...(19): siRNA sense strand
ugagaaguccaaucgaaag

SEQ ID NO: 1116524 - RNA, 19 nt, Homo sapiens
  misc_RNA (1)...(19): siRNA sense strand
gguggaggugacagcuuua

SEQ ID NO: 1116525 - RNA, 19 nt, Homo sapiens
  misc_RNA (1)...(19): siRNA sense strand
cugagaaguccaaucgaaa

SEQ ID NO: 1116526 - RNA, 19 nt, Homo sapiens
  misc_RNA (1)...(19): siRNA sense strand
ggccuucaaccucuucaug

SEQ ID NO: 1116527 - RNA, 19 nt, Homo sapiens
  misc_RNA (1)...(19): siRNA sense strand
ccaaucgaaaggaagaaug

SEQ ID NO: 1116528 - RNA, 19 nt, Homo sapiens
  misc_RNA (1)...(19): siRNA sense strand
gagaaguccaaucgaaagg

SEQ ID NO: 1116529 - RNA, 19 nt, Homo sapiens
  misc_RNA (1)...(19): siRNA sense strand
ucauuuggcuguuggauuu

SEQ ID NO: 1116530 - RNA, 19 nt, Homo sapiens
  misc_RNA (1)...(19): siRNA sense strand
ggaagcagcucucauucuc

SEQ ID NO: 1116531 - RNA, 19 nt, Homo sapiens
  misc_RNA (1)...(19): siRNA sense strand
gaaguccaaucgaaaggaa

SEQ ID NO: 1116532 - RNA, 19 nt, Homo sapiens
  misc_RNA (1)...(19): siRNA sense strand
gcugagaaguccaaucgaa

SEQ ID NO: 1116533 - RNA, 19 nt, Homo sapiens
  misc_RNA (1)...(19): siRNA sense strand
caacacagacuaccacaug

SEQ ID NO: 1116534 - RNA, 19 nt, Homo sapiens
  misc_RNA (1)...(19): siRNA sense strand
ggucaucaguaauaucuuc

SEQ ID NO: 1116535 - RNA, 19 nt, Homo sapiens
  misc_RNA (1)...(19): siRNA sense strand
ggaagaaugccguguucaa

SEQ ID NO: 1116536 - RNA, 19 nt, Homo sapiens
  misc_RNA (1)...(19): siRNA sense strand
ccacuaugacgcuuccuua

SEQ ID NO: 1116537 - RNA, 19 nt, Homo sapiens
  misc_RNA (1)...(19): siRNA sense strand
gccaagaucugaccgugau

SEQ ID NO: 1116538 - RNA, 19 nt, Homo sapiens
  misc_RNA (1)...(19): siRNA sense strand
guaauaucuucaacacaga

SEQ ID NO: 1116539 - RNA, 19 nt, Homo sapiens
  misc_RNA (1)...(19): siRNA sense strand
ucauucuccucuucuauuu

SEQ ID NO: 1116540 - RNA, 19 nt, Homo sapiens
  misc_RNA (1)...(19): siRNA sense strand
gcaacgauacccaguuugu

SEQ ID NO: 1116541 - RNA, 19 nt, Homo sapiens
  misc_RNA (1)...(19): siRNA sense strand
ggaagguggucaucacacu

SEQ ID NO: 1116542 - RNA, 19 nt, Homo sapiens
  misc_RNA (1)...(19): siRNA sense strand
ggagcaguguggccuucaa

SEQ ID NO: 1116543 - RNA, 19 nt, Homo sapiens
  misc_RNA (1)...(19): siRNA sense strand
cuaugacgcuuccuuagag

SEQ ID NO: 1116544 - RNA, 19 nt, Homo sapiens
  misc_RNA (1)...(19): siRNA sense strand
gaagaaugccguguucaac

SEQ ID NO: 1116545 - RNA, 19 nt, Homo sapiens
  misc_RNA (1)...(19): siRNA sense strand
ugguggaggugacagcuuu

SEQ ID NO: 1116546 - RNA, 19 nt, Homo sapiens
  misc_RNA (1)...(19): siRNA sense strand
ucaguaauaucuucaacac

SEQ ID NO: 1116547 - RNA, 19 nt, Homo sapiens
  misc_RNA (1)...(19): siRNA sense strand
gcucguggcauccuaucaa

SEQ ID NO: 1116548 - RNA, 19 nt, Homo sapiens
  misc_RNA (1)...(19): siRNA sense strand
aaggaagaaugccguguuc

SEQ ID NO: 1116549 - RNA, 19 nt, Homo sapiens
  misc_RNA (1)...(19): siRNA sense strand
aaaggaagaaugccguguu

SEQ ID NO: 1116550 - RNA, 19 nt, Homo sapiens
  misc_RNA (1)...(19): siRNA sense strand
guauucggcuggccaccau

SEQ ID NO: 1116551 - RNA, 19 nt, Homo sapiens
  misc_RNA (1)...(19): siRNA sense strand
acacagacuaccacaugaa

SEQ ID NO: 1116552 - RNA, 19 nt, Homo sapiens
  misc_RNA (1)...(19): siRNA sense strand
gcccucuucuuguggaugu

SEQ ID NO: 1116553 - RNA, 19 nt, Homo sapiens
  misc_RNA (1)...(19): siRNA sense strand
aacacagacuaccacauga

SEQ ID NO: 1116554 - RNA, 19 nt, Homo sapiens
  misc_RNA (1)...(19): siRNA sense strand
acuggaagcagcucucauu

SEQ ID NO: 1116555 - RNA, 19 nt, Homo sapiens
  misc_RNA (1)...(19): siRNA sense strand
caucaguaauaucuucaac

SEQ ID NO: 1116556 - RNA, 19 nt, Homo sapiens
  misc_RNA (1)...(19): siRNA sense strand
caaguuuucuggaaguuuc

SEQ ID NO: 1116557 - RNA, 19 nt, Homo sapiens
  misc_RNA (1)...(19): siRNA sense strand
ugagaaguccaaucgaaag

SEQ ID NO: 1116558 - RNA, 19 nt, Homo sapiens
  misc_RNA (1)...(19): siRNA sense strand
gguggaggugacagcuuua

SEQ ID NO: 1116559 - RNA, 19 nt, Homo sapiens
  misc_RNA (1)...(19): siRNA sense strand
cugagaaguccaaucgaaa

SEQ ID NO: 1116560 - RNA, 19 nt, Homo sapiens
  misc_RNA (1)...(19): siRNA sense strand
ggccuucaaccucuucaug

SEQ ID NO: 1116561 - RNA, 19 nt, Homo sapiens
  misc_RNA (1)...(19): siRNA sense strand
ccaaucgaaaggaagaaug

SEQ ID NO: 1116562 - RNA, 19 nt, Homo sapiens
  misc_RNA (1)...(19): siRNA sense strand
gagaaguccaaucgaaagg

SEQ ID NO: 1116563 - RNA, 19 nt, Homo sapiens
  misc_RNA (1)...(19): siRNA sense strand
ggaagcagcucucauucuc

SEQ ID NO: 1116564 - RNA, 19 nt, Homo sapiens
  misc_RNA (1)...(19): siRNA sense strand
gaaguccaaucgaaaggaa

SEQ ID NO: 1116565 - RNA, 19 nt, Homo sapiens
  misc_RNA (1)...(19): siRNA sense strand
gcugagaaguccaaucgaa

SEQ ID NO: 1116566 - RNA, 19 nt, Homo sapiens
  misc_RNA (1)...(19): siRNA sense strand
caacacagacuaccacaug

SEQ ID NO: 1116567 - RNA, 19 nt, Homo sapiens
  misc_RNA (1)...(19): siRNA sense strand
ggucaucaguaauaucuuc

SEQ ID NO: 1116568 - RNA, 19 nt, Homo sapiens
  misc_RNA (1)...(19): siRNA sense strand
ggaagaaugccguguucaa

SEQ ID NO: 1116569 - RNA, 19 nt, Homo sapiens
  misc_RNA (1)...(19): siRNA sense strand
ccacuaugacgcuuccuua

SEQ ID NO: 1116570 - RNA, 19 nt, Homo sapiens
  misc_RNA (1)...(19): siRNA sense strand
gccaagaucugaccgugau

SEQ ID NO: 1116571 - RNA, 19 nt, Homo sapiens
  misc_RNA (1)...(19): siRNA sense strand
guaauaucuucaacacaga

SEQ ID NO: 1116572 - RNA, 19 nt, Homo sapiens
  misc_RNA (1)...(19): siRNA sense strand
ucauucuccucuucuauuu

SEQ ID NO: 1116573 - RNA, 19 nt, Homo sapiens
  misc_RNA (1)...(19): siRNA sense strand
gcaacgauacccaguuugu

SEQ ID NO: 1116574 - RNA, 19 nt, Homo sapiens
  misc_RNA (1)...(19): siRNA sense strand
ggaagguggucaucacacu

SEQ ID NO: 1116575 - RNA, 19 nt, Homo sapiens
  misc_RNA (1)...(19): siRNA sense strand
ggagcaguguggccuucaa

SEQ ID NO: 1116576 - RNA, 19 nt, Homo sapiens
  misc_RNA (1)...(19): siRNA sense strand
cuaugacgcuuccuuagag

SEQ ID NO: 1116577 - RNA, 19 nt, Homo sapiens
  misc_RNA (1)...(19): siRNA sense strand
gaagaaugccguguucaac

SEQ ID NO: 1116578 - RNA, 19 nt, Homo sapiens
  misc_RNA (1)...(19): siRNA sense strand
ugguggaggugacagcuuu

SEQ ID NO: 1116579 - RNA, 19 nt, Homo sapiens
  misc_RNA (1)...(19): siRNA sense strand
ucaguaauaucuucaacac

SEQ ID NO: 1116580 - RNA, 19 nt, Homo sapiens
  misc_RNA (1)...(19): siRNA sense strand
gcucguggcauccuaucaa

SEQ ID NO: 1116581 - RNA, 19 nt, Homo sapiens
  misc_RNA (1)...(19): siRNA sense strand
aaggaagaaugccguguuc

SEQ ID NO: 1116582 - RNA, 19 nt, Homo sapiens
  misc_RNA (1)...(19): siRNA sense strand
aaaggaagaaugccguguu

SEQ ID NO: 1116583 - RNA, 19 nt, Homo sapiens
  misc_RNA (1)...(19): siRNA sense strand
guauucggcuggccaccau

SEQ ID NO: 1116584 - RNA, 19 nt, Homo sapiens
  misc_RNA (1)...(19): siRNA sense strand
acacagacuaccacaugaa

SEQ ID NO: 1116585 - RNA, 19 nt, Homo sapiens
  misc_RNA (1)...(19): siRNA sense strand
gcccucuucuuguggaugu

SEQ ID NO: 1116586 - RNA, 19 nt, Homo sapiens
  misc_RNA (1)...(19): siRNA sense strand
aacacagacuaccacauga

SEQ ID NO: 1116587 - RNA, 19 nt, Homo sapiens
  misc_RNA (1)...(19): siRNA sense strand
acuggaagcagcucucauu

SEQ ID NO: 1116588 - RNA, 19 nt, Homo sapiens
  misc_RNA (1)...(19): siRNA sense strand
caucaguaauaucuucaac

SEQ ID NO: 1116589 - RNA, 19 nt, Homo sapiens
  misc_RNA (1)...(19): siRNA sense strand
ugagaaguccaaucgaaag

SEQ ID NO: 1116590 - RNA, 19 nt, Homo sapiens
  misc_RNA (1)...(19): siRNA sense strand
gguggaggugacagcuuua

SEQ ID NO: 1116591 - RNA, 19 nt, Homo sapiens
  misc_RNA (1)...(19): siRNA sense strand
cugagaaguccaaucgaaa

SEQ ID NO: 1116592 - RNA, 19 nt, Homo sapiens
  misc_RNA (1)...(19): siRNA sense strand
ggccuucaaccucuucaug

SEQ ID NO: 1116593 - RNA, 19 nt, Homo sapiens
  misc_RNA (1)...(19): siRNA sense strand
ccaaucgaaaggaagaaug

SEQ ID NO: 1116594 - RNA, 19 nt, Homo sapiens
  misc_RNA (1)...(19): siRNA sense strand
gagaaguccaaucgaaagg

SEQ ID NO: 1116595 - RNA, 19 nt, Homo sapiens
  misc_RNA (1)...(19): siRNA sense strand
gauugaagcuuaucuauga

SEQ ID NO: 1116596 - RNA, 19 nt, Homo sapiens
  misc_RNA (1)...(19): siRNA sense strand
agacucagcucuacaauaa

SEQ ID NO: 1116597 - RNA, 19 nt, Homo sapiens
  misc_RNA (1)...(19): siRNA sense strand
ccaaguaacucuccucaaa

SEQ ID NO: 1116598 - RNA, 19 nt, Homo sapiens
  misc_RNA (1)...(19): siRNA sense strand
agauaaagcuucuggauuu

SEQ ID NO: 1116599 - RNA, 19 nt, Homo sapiens
  misc_RNA (1)...(19): siRNA sense strand
gacaugaauuccuuaauga

SEQ ID NO: 1116600 - RNA, 19 nt, Homo sapiens
  misc_RNA (1)...(19): siRNA sense strand
gaaguucaaugcacuggaa

SEQ ID NO: 1116601 - RNA, 19 nt, Homo sapiens
  misc_RNA (1)...(19): siRNA sense strand
guaccaaagugcaaucaaa

SEQ ID NO: 1116602 - RNA, 19 nt, Homo sapiens
  misc_RNA (1)...(19): siRNA sense strand
ugacaugaauuccuuaaug

SEQ ID NO: 1116603 - RNA, 19 nt, Homo sapiens
  misc_RNA (1)...(19): siRNA sense strand
aaguaacucuccucaaaua

SEQ ID NO: 1116604 - RNA, 19 nt, Homo sapiens
  misc_RNA (1)...(19): siRNA sense strand
ucaaugcacuggaauuaga

SEQ ID NO: 1116605 - RNA, 19 nt, Homo sapiens
  misc_RNA (1)...(19): siRNA sense strand
gcauuucuacuccacauua

SEQ ID NO: 1116606 - RNA, 19 nt, Homo sapiens
  misc_RNA (1)...(19): siRNA sense strand
gacauuccauucacaagaa

SEQ ID NO: 1116607 - RNA, 19 nt, Homo sapiens
  misc_RNA (1)...(19): siRNA sense strand
uuacaaguaugaccugaaa

SEQ ID NO: 1116608 - RNA, 19 nt, Homo sapiens
  misc_RNA (1)...(19): siRNA sense strand
ggccaaggcuucaugacaa

SEQ ID NO: 1116609 - RNA, 19 nt, Homo sapiens
  misc_RNA (1)...(19): siRNA sense strand
gcaauugaaugucgugucu

SEQ ID NO: 1116610 - RNA, 19 nt, Homo sapiens
  misc_RNA (1)...(19): siRNA sense strand
acaauaagccucaugaaga

SEQ ID NO: 1116611 - RNA, 19 nt, Homo sapiens
  misc_RNA (1)...(19): siRNA sense strand
caagggaguuucuaaagag

SEQ ID NO: 1116612 - RNA, 19 nt, Homo sapiens
  misc_RNA (1)...(19): siRNA sense strand
caauaagccucaugaagag

SEQ ID NO: 1116613 - RNA, 19 nt, Homo sapiens
  misc_RNA (1)...(19): siRNA sense strand
gagauaaagcuucuggauu

SEQ ID NO: 1116614 - RNA, 19 nt, Homo sapiens
  misc_RNA (1)...(19): siRNA sense strand
acaagggaguuucuaaaga

SEQ ID NO: 1116615 - RNA, 19 nt, Homo sapiens
  misc_RNA (1)...(19): siRNA sense strand
gaaauaaaugucaguacug

SEQ ID NO: 1116616 - RNA, 19 nt, Homo sapiens
  misc_RNA (1)...(19): siRNA sense strand
gaucacagaguaugccaaa

SEQ ID NO: 1116617 - RNA, 19 nt, Homo sapiens
  misc_RNA (1)...(19): siRNA sense strand
gaaagacaacagacaaauc

SEQ ID NO: 1116618 - RNA, 19 nt, Homo sapiens
  misc_RNA (1)...(19): siRNA sense strand
ugacagaccucagacagau

SEQ ID NO: 1116619 - RNA, 19 nt, Homo sapiens
  misc_RNA (1)...(19): siRNA sense strand
aagaacagauccagugguu

SEQ ID NO: 1116620 - RNA, 19 nt, Homo sapiens
  misc_RNA (1)...(19): siRNA sense strand
gguugcagauuacaaguau

SEQ ID NO: 1116621 - RNA, 19 nt, Homo sapiens
  misc_RNA (1)...(19): siRNA sense strand
gacaaaucaccauucguua

SEQ ID NO: 1116622 - RNA, 19 nt, Homo sapiens
  misc_RNA (1)...(19): siRNA sense strand
gcacuggaauuagaugaca

SEQ ID NO: 1116623 - RNA, 19 nt, Homo sapiens
  misc_RNA (1)...(19): siRNA sense strand
guucaaugcacuggaauua

SEQ ID NO: 1116624 - RNA, 19 nt, Homo sapiens
  misc_RNA (1)...(19): siRNA sense strand
caccauucguuaucuauga

SEQ ID NO: 1116625 - RNA, 19 nt, Homo sapiens
  misc_RNA (1)...(19): siRNA sense strand
gaagacauuccauucacaa

SEQ ID NO: 1116626 - RNA, 19 nt, Homo sapiens
  misc_RNA (1)...(19): siRNA sense strand
gaagcccauugaagacauu

SEQ ID NO: 1116627 - RNA, 19 nt, Homo sapiens
  misc_RNA (1)...(19): siRNA sense strand
ugcaggagaucacagagua

SEQ ID NO: 1116628 - RNA, 19 nt, Homo sapiens
  misc_RNA (1)...(19): siRNA sense strand
gauaaagcuucuggauuuc

SEQ ID NO: 1116629 - RNA, 19 nt, Homo sapiens
  misc_RNA (1)...(19): siRNA sense strand
caacagacaaaucaccauu

SEQ ID NO: 1116630 - RNA, 19 nt, Homo sapiens
  misc_RNA (1)...(19): siRNA sense strand
ucaagaagacggagacaga

SEQ ID NO: 1116631 - RNA, 19 nt, Homo sapiens
  misc_RNA (1)...(19): siRNA sense strand
ugacagcgacuuggcaaua

SEQ ID NO: 1116632 - RNA, 19 nt, Homo sapiens
  misc_RNA (1)...(19): siRNA sense strand
agacaaaucaccauucguu

SEQ ID NO: 1116633 - RNA, 19 nt, Homo sapiens
  misc_RNA (1)...(19): siRNA sense strand
ggaaagacaacagacaaau

SEQ ID NO: 1116634 - RNA, 19 nt, Homo sapiens
  misc_RNA (1)...(19): siRNA sense strand
gauaucaagcccuucacua

SEQ ID NO: 1116635 - RNA, 19 nt, Homo sapiens
  misc_RNA (1)...(19): siRNA sense strand
acacaaugcuggccuccuu

SEQ ID NO: 1116636 - RNA, 19 nt, Homo sapiens
  misc_RNA (1)...(19): siRNA sense strand
uaacucuccucaaauaugg

SEQ ID NO: 1116637 - RNA, 19 nt, Homo sapiens
  misc_RNA (1)...(19): siRNA sense strand
aaagacaacagacaaauca

SEQ ID NO: 1116638 - RNA, 19 nt, Homo sapiens
  misc_RNA (1)...(19): siRNA sense strand
ggagauaaagcuucuggau

SEQ ID NO: 1116639 - RNA, 19 nt, Homo sapiens
  misc_RNA (1)...(19): siRNA sense strand
gacagcgacuuggcaauau

SEQ ID NO: 1116640 - RNA, 19 nt, Homo sapiens
  misc_RNA (1)...(19): siRNA sense strand
guugacuucuccagcauuu

SEQ ID NO: 1116641 - RNA, 19 nt, Homo sapiens
  misc_RNA (1)...(19): siRNA sense strand
guaacucuccucaaauaug

SEQ ID NO: 1116642 - RNA, 19 nt, Homo sapiens
  misc_RNA (1)...(19): siRNA sense strand
caagacaaccugcuacaag

SEQ ID NO: 1116643 - RNA, 19 nt, Homo sapiens
  misc_RNA (1)...(19): siRNA sense strand
ugucgugucuguggagaua

SEQ ID NO: 1116644 - RNA, 19 nt, Homo sapiens
  misc_RNA (1)...(19): siRNA sense strand
caaaucaccauucguuauc

SEQ ID NO: 1116645 - RNA, 19 nt, Homo sapiens
  misc_RNA (1)...(19): siRNA sense strand
ccaacucccucauggcaau

SEQ ID NO: 1116646 - RNA, 19 nt, Homo sapiens
  misc_RNA (1)...(19): siRNA sense strand
gaaaaugacagaccucaga

SEQ ID NO: 1116647 - RNA, 19 nt, Homo sapiens
  misc_RNA (1)...(19): siRNA sense strand
cuaaagagccugcgaaagc

SEQ ID NO: 1116648 - RNA, 19 nt, Homo sapiens
  misc_RNA (1)...(19): siRNA sense strand
ugacaagggaguuucuaaa

SEQ ID NO: 1116649 - RNA, 19 nt, Homo sapiens
  misc_RNA (1)...(19): siRNA sense strand
ccaaaagcauuccugguuu

SEQ ID NO: 1116650 - RNA, 19 nt, Homo sapiens
  misc_RNA (1)...(19): siRNA sense strand
ggauuucacuauggaguuc

SEQ ID NO: 1116651 - RNA, 19 nt, Homo sapiens
  misc_RNA (1)...(19): siRNA sense strand
cagguuugcugaaugugaa

SEQ ID NO: 1116652 - RNA, 19 nt, Homo sapiens
  misc_RNA (1)...(19): siRNA sense strand
ucuaugacaugaauuccuu

SEQ ID NO: 1116653 - RNA, 19 nt, Homo sapiens
  misc_RNA (1)...(19): siRNA sense strand
cgaagacauuccauucaca

SEQ ID NO: 1116654 - RNA, 19 nt, Homo sapiens
  misc_RNA (1)...(19): siRNA sense strand
gcccagguuugcugaaugu

SEQ ID NO: 1116655 - RNA, 19 nt, Homo sapiens
  misc_RNA (1)...(19): siRNA sense strand
uuauggagcccaaguuuga

SEQ ID NO: 1116656 - RNA, 19 nt, Homo sapiens
  misc_RNA (1)...(19): siRNA sense strand
ugcaggagaucuacaagga

SEQ ID NO: 1116657 - RNA, 19 nt, Homo sapiens
  misc_RNA (1)...(19): siRNA sense strand
cauaaugccaucagguuug

SEQ ID NO: 1116658 - RNA, 19 nt, Homo sapiens
  misc_RNA (1)...(19): siRNA sense strand
gacaagggaguuucuaaag

SEQ ID NO: 1116659 - RNA, 19 nt, Homo sapiens
  misc_RNA (1)...(19): siRNA sense strand
ggaguccacgagaucauuu

SEQ ID NO: 1116660 - RNA, 19 nt, Homo sapiens
  misc_RNA (1)...(19): siRNA sense strand
caaguaacucuccucaaau

SEQ ID NO: 1116661 - RNA, 19 nt, Homo sapiens
  misc_RNA (1)...(19): siRNA sense strand
acaaaucaccauucguuau

SEQ ID NO: 1116662 - RNA, 19 nt, Homo sapiens
  misc_RNA (1)...(19): siRNA sense strand
gaagacggagacagacaug

SEQ ID NO: 1116663 - RNA, 19 nt, Homo sapiens
  misc_RNA (1)...(19): siRNA sense strand
uugccaagcugcuccagaa

SEQ ID NO: 1116664 - RNA, 19 nt, Homo sapiens
  misc_RNA (1)...(19): siRNA sense strand
ugaguuugcugugaaguuc

SEQ ID NO: 1116665 - RNA, 19 nt, Homo sapiens
  misc_RNA (1)...(19): siRNA sense strand
ccuccuugaugaauaaaga

SEQ ID NO: 1116666 - RNA, 19 nt, Homo sapiens
  misc_RNA (1)...(19): siRNA sense strand
uuucagggcugccaguuuc

SEQ ID NO: 1116667 - RNA, 19 nt, Homo sapiens
  misc_RNA (1)...(19): siRNA sense strand
ccaaagugcaaucaaagug

SEQ ID NO: 1116668 - RNA, 19 nt, Homo sapiens
  misc_RNA (1)...(19): siRNA sense strand
gagcccaaguuugaguuug

SEQ ID NO: 1116669 - RNA, 19 nt, Homo sapiens
  misc_RNA (1)...(19): siRNA sense strand
auccagugguugcagauua

SEQ ID NO: 1116670 - RNA, 19 nt, Homo sapiens
  misc_RNA (1)...(19): siRNA sense strand
ggaucucuccguaauggaa

SEQ ID NO: 1116671 - RNA, 19 nt, Homo sapiens
  misc_RNA (1)...(19): siRNA sense strand
acucauacauaaaguccuu

SEQ ID NO: 1116672 - RNA, 19 nt, Homo sapiens
  misc_RNA (1)...(19): siRNA sense strand
uggccuccuugaugaauaa

SEQ ID NO: 1116673 - RNA, 19 nt, Homo sapiens
  misc_RNA (1)...(19): siRNA sense strand
caugaauuccuuaaugaug

SEQ ID NO: 1116674 - RNA, 19 nt, Homo sapiens
  misc_RNA (1)...(19): siRNA sense strand
ccucauggcaauugaaugu

SEQ ID NO: 1116675 - RNA, 19 nt, Homo sapiens
  misc_RNA (1)...(19): siRNA sense strand
guggagaccgcccagguuu

SEQ ID NO: 1116676 - RNA, 19 nt, Homo sapiens
  misc_RNA (1)...(19): siRNA sense strand
acagcgacuuggcaauauu

SEQ ID NO: 1116677 - RNA, 19 nt, Homo sapiens
  misc_RNA (1)...(19): siRNA sense strand
uuacgaagacauuccauuc

SEQ ID NO: 1116678 - RNA, 19 nt, Homo sapiens
  misc_RNA (1)...(19): siRNA sense strand
aaucaccauucguuaucua

SEQ ID NO: 1116679 - RNA, 19 nt, Homo sapiens
  misc_RNA (1)...(19): siRNA sense strand
ugacaggaaagacaacaga

SEQ ID NO: 1116680 - RNA, 19 nt, Homo sapiens
  misc_RNA (1)...(19): siRNA sense strand
guggaucucuccguaaugg

SEQ ID NO: 1116681 - RNA, 19 nt, Homo sapiens
  misc_RNA (1)...(19): siRNA sense strand
uuaaugaugggagaagaua

SEQ ID NO: 1116682 - RNA, 19 nt, Homo sapiens
  misc_RNA (1)...(19): siRNA sense strand
cguuaucuaugacaugaau

SEQ ID NO: 1116683 - RNA, 19 nt, Homo sapiens
  misc_RNA (1)...(19): siRNA sense strand
caggaaagacaacagacaa

SEQ ID NO: 1116684 - RNA, 19 nt, Homo sapiens
  misc_RNA (1)...(19): siRNA sense strand
caaaggcgagggcgaucuu

SEQ ID NO: 1116685 - RNA, 19 nt, Homo sapiens
  misc_RNA (1)...(19): siRNA sense strand
cagcgacuuggcaauauuu

SEQ ID NO: 1116686 - RNA, 19 nt, Homo sapiens
  misc_RNA (1)...(19): siRNA sense strand
caagaguaccaaagugcaa

SEQ ID NO: 1116687 - RNA, 19 nt, Homo sapiens
  misc_RNA (1)...(19): siRNA sense strand
gaguccacgagaucauuua

SEQ ID NO: 1116688 - RNA, 19 nt, Homo sapiens
  misc_RNA (1)...(19): siRNA sense strand
ucacuacuguugacuucuc

SEQ ID NO: 1116689 - RNA, 19 nt, Homo sapiens
  misc_RNA (1)...(19): siRNA sense strand
ucauaaugccaucagguuu

SEQ ID NO: 1116690 - RNA, 19 nt, Homo sapiens
  misc_RNA (1)...(19): siRNA sense strand
ugucaguacugucgguuuc

SEQ ID NO: 1116691 - RNA, 19 nt, Homo sapiens
  misc_RNA (1)...(19): siRNA sense strand
caaaguggagccugcaucu

SEQ ID NO: 1116692 - RNA, 19 nt, Homo sapiens
  misc_RNA (1)...(19): siRNA sense strand
cuauggaguucaugcuugu

SEQ ID NO: 1116693 - RNA, 19 nt, Homo sapiens
  misc_RNA (1)...(19): siRNA sense strand
augcuggccuccuugauga

SEQ ID NO: 1116694 - RNA, 19 nt, Homo sapiens
  misc_RNA (1)...(19): siRNA sense strand
gggcgaucuugacaggaaa

SEQ ID NO: 1116695 - RNA, 19 nt, Homo sapiens
  misc_RNA (1)...(19): siRNA sense strand
gauugaagcuuaucuauga

SEQ ID NO: 1116696 - RNA, 19 nt, Homo sapiens
  misc_RNA (1)...(19): siRNA sense strand
agacucagcucuacaauaa

SEQ ID NO: 1116697 - RNA, 19 nt, Homo sapiens
  misc_RNA (1)...(19): siRNA sense strand
ccaaguaacucuccucaaa

SEQ ID NO: 1116698 - RNA, 19 nt, Homo sapiens
  misc_RNA (1)...(19): siRNA sense strand
agauaaagcuucuggauuu

SEQ ID NO: 1116699 - RNA, 19 nt, Homo sapiens
  misc_RNA (1)...(19): siRNA sense strand
gacaugaauuccuuaauga

SEQ ID NO: 1116700 - RNA, 19 nt, Homo sapiens
  misc_RNA (1)...(19): siRNA sense strand
gaaguucaaugcacuggaa

SEQ ID NO: 1116701 - RNA, 19 nt, Homo sapiens
  misc_RNA (1)...(19): siRNA sense strand
guaccaaagugcaaucaaa

SEQ ID NO: 1116702 - RNA, 19 nt, Homo sapiens
  misc_RNA (1)...(19): siRNA sense strand
ugacaugaauuccuuaaug

SEQ ID NO: 1116703 - RNA, 19 nt, Homo sapiens
  misc_RNA (1)...(19): siRNA sense strand
aaguaacucuccucaaaua

SEQ ID NO: 1116704 - RNA, 19 nt, Homo sapiens
  misc_RNA (1)...(19): siRNA sense strand
ucaaugcacuggaauuaga

SEQ ID NO: 1116705 - RNA, 19 nt, Homo sapiens
  misc_RNA (1)...(19): siRNA sense strand
gcauuucuacuccacauua

SEQ ID NO: 1116706 - RNA, 19 nt, Homo sapiens
  misc_RNA (1)...(19): siRNA sense strand
gacauuccauucacaagaa

SEQ ID NO: 1116707 - RNA, 19 nt, Homo sapiens
  misc_RNA (1)...(19): siRNA sense strand
uuacaaguaugaccugaaa

SEQ ID NO: 1116708 - RNA, 19 nt, Homo sapiens
  misc_RNA (1)...(19): siRNA sense strand
ggccaaggcuucaugacaa

SEQ ID NO: 1116709 - RNA, 19 nt, Homo sapiens
  misc_RNA (1)...(19): siRNA sense strand
gcaauugaaugucgugucu

SEQ ID NO: 1116710 - RNA, 19 nt, Homo sapiens
  misc_RNA (1)...(19): siRNA sense strand
acaauaagccucaugaaga

SEQ ID NO: 1116711 - RNA, 19 nt, Homo sapiens
  misc_RNA (1)...(19): siRNA sense strand
caagggaguuucuaaagag

SEQ ID NO: 1116712 - RNA, 19 nt, Homo sapiens
  misc_RNA (1)...(19): siRNA sense strand
caauaagccucaugaagag

SEQ ID NO: 1116713 - RNA, 19 nt, Homo sapiens
  misc_RNA (1)...(19): siRNA sense strand
gagauaaagcuucuggauu

SEQ ID NO: 1116714 - RNA, 19 nt, Homo sapiens
  misc_RNA (1)...(19): siRNA sense strand
acaagggaguuucuaaaga

SEQ ID NO: 1116715 - RNA, 19 nt, Homo sapiens
  misc_RNA (1)...(19): siRNA sense strand
gaaauaaaugucaguacug

SEQ ID NO: 1116716 - RNA, 19 nt, Homo sapiens
  misc_RNA (1)...(19): siRNA sense strand
gaucacagaguaugccaaa

SEQ ID NO: 1116717 - RNA, 19 nt, Homo sapiens
  misc_RNA (1)...(19): siRNA sense strand
gaaagacaacagacaaauc

SEQ ID NO: 1116718 - RNA, 19 nt, Homo sapiens
  misc_RNA (1)...(19): siRNA sense strand
ugacagaccucagacagau

SEQ ID NO: 1116719 - RNA, 19 nt, Homo sapiens
  misc_RNA (1)...(19): siRNA sense strand
aagaacagauccagugguu

SEQ ID NO: 1116720 - RNA, 19 nt, Homo sapiens
  misc_RNA (1)...(19): siRNA sense strand
gaaaugaccaugguugaca

SEQ ID NO: 1116721 - RNA, 19 nt, Homo sapiens
  misc_RNA (1)...(19): siRNA sense strand
gguugcagauuacaaguau

SEQ ID NO: 1116722 - RNA, 19 nt, Homo sapiens
  misc_RNA (1)...(19): siRNA sense strand
gacaaaucaccauucguua

SEQ ID NO: 1116723 - RNA, 19 nt, Homo sapiens
  misc_RNA (1)...(19): siRNA sense strand
gcacuggaauuagaugaca

SEQ ID NO: 1116724 - RNA, 19 nt, Homo sapiens
  misc_RNA (1)...(19): siRNA sense strand
guucaaugcacuggaauua

SEQ ID NO: 1116725 - RNA, 19 nt, Homo sapiens
  misc_RNA (1)...(19): siRNA sense strand
caccauucguuaucuauga

SEQ ID NO: 1116726 - RNA, 19 nt, Homo sapiens
  misc_RNA (1)...(19): siRNA sense strand
gaagacauuccauucacaa

SEQ ID NO: 1116727 - RNA, 19 nt, Homo sapiens
  misc_RNA (1)...(19): siRNA sense strand
gaagcccauugaagacauu

SEQ ID NO: 1116728 - RNA, 19 nt, Homo sapiens
  misc_RNA (1)...(19): siRNA sense strand
ugcaggagaucacagagua

SEQ ID NO: 1116729 - RNA, 19 nt, Homo sapiens
  misc_RNA (1)...(19): siRNA sense strand
gauaaagcuucuggauuuc

SEQ ID NO: 1116730 - RNA, 19 nt, Homo sapiens
  misc_RNA (1)...(19): siRNA sense strand
caacagacaaaucaccauu

SEQ ID NO: 1116731 - RNA, 19 nt, Homo sapiens
  misc_RNA (1)...(19): siRNA sense strand
ucaagaagacggagacaga

SEQ ID NO: 1116732 - RNA, 19 nt, Homo sapiens
  misc_RNA (1)...(19): siRNA sense strand
ugacagcgacuuggcaaua

SEQ ID NO: 1116733 - RNA, 19 nt, Homo sapiens
  misc_RNA (1)...(19): siRNA sense strand
agacaaaucaccauucguu

SEQ ID NO: 1116734 - RNA, 19 nt, Homo sapiens
  misc_RNA (1)...(19): siRNA sense strand
ggaaagacaacagacaaau

SEQ ID NO: 1116735 - RNA, 19 nt, Homo sapiens
  misc_RNA (1)...(19): siRNA sense strand
acacaaugcuggccuccuu

SEQ ID NO: 1116736 - RNA, 19 nt, Homo sapiens
  misc_RNA (1)...(19): siRNA sense strand
uaacucuccucaaauaugg

SEQ ID NO: 1116737 - RNA, 19 nt, Homo sapiens
  misc_RNA (1)...(19): siRNA sense strand
gauaucaagcccuucacua

SEQ ID NO: 1116738 - RNA, 19 nt, Homo sapiens
  misc_RNA (1)...(19): siRNA sense strand
aaagacaacagacaaauca

SEQ ID NO: 1116739 - RNA, 19 nt, Homo sapiens
  misc_RNA (1)...(19): siRNA sense strand
ggagauaaagcuucuggau

SEQ ID NO: 1116740 - RNA, 19 nt, Homo sapiens
  misc_RNA (1)...(19): siRNA sense strand
gacagcgacuuggcaauau

SEQ ID NO: 1116741 - RNA, 19 nt, Homo sapiens
  misc_RNA (1)...(19): siRNA sense strand
guaacucuccucaaauaug

SEQ ID NO: 1116742 - RNA, 19 nt, Homo sapiens
  misc_RNA (1)...(19): siRNA sense strand
guugacuucuccagcauuu

SEQ ID NO: 1116743 - RNA, 19 nt, Homo sapiens
  misc_RNA (1)...(19): siRNA sense strand
caagacaaccugcuacaag

SEQ ID NO: 1116744 - RNA, 19 nt, Homo sapiens
  misc_RNA (1)...(19): siRNA sense strand
ugucgugucuguggagaua

SEQ ID NO: 1116745 - RNA, 19 nt, Homo sapiens
  misc_RNA (1)...(19): siRNA sense strand
caaaucaccauucguuauc

SEQ ID NO: 1116746 - RNA, 19 nt, Homo sapiens
  misc_RNA (1)...(19): siRNA sense strand
ccaacucccucauggcaau

SEQ ID NO: 1116747 - RNA, 19 nt, Homo sapiens
  misc_RNA (1)...(19): siRNA sense strand
gaaaaugacagaccucaga

SEQ ID NO: 1116748 - RNA, 19 nt, Homo sapiens
  misc_RNA (1)...(19): siRNA sense strand
cuaaagagccugcgaaagc

SEQ ID NO: 1116749 - RNA, 19 nt, Homo sapiens
  misc_RNA (1)...(19): siRNA sense strand
ugacaagggaguuucuaaa

SEQ ID NO: 1116750 - RNA, 19 nt, Homo sapiens
  misc_RNA (1)...(19): siRNA sense strand
ccaaaagcauuccugguuu

SEQ ID NO: 1116751 - RNA, 19 nt, Homo sapiens
  misc_RNA (1)...(19): siRNA sense strand
ggauuucacuauggaguuc

SEQ ID NO: 1116752 - RNA, 19 nt, Homo sapiens
  misc_RNA (1)...(19): siRNA sense strand
cagguuugcugaaugugaa

SEQ ID NO: 1116753 - RNA, 19 nt, Homo sapiens
  misc_RNA (1)...(19): siRNA sense strand
ucuaugacaugaauuccuu

SEQ ID NO: 1116754 - RNA, 19 nt, Homo sapiens
  misc_RNA (1)...(19): siRNA sense strand
cgaagacauuccauucaca

SEQ ID NO: 1116755 - RNA, 19 nt, Homo sapiens
  misc_RNA (1)...(19): siRNA sense strand
gcccagguuugcugaaugu

SEQ ID NO: 1116756 - RNA, 19 nt, Homo sapiens
  misc_RNA (1)...(19): siRNA sense strand
uuauggagcccaaguuuga

SEQ ID NO: 1116757 - RNA, 19 nt, Homo sapiens
  misc_RNA (1)...(19): siRNA sense strand
ugcaggagaucuacaagga

SEQ ID NO: 1116758 - RNA, 19 nt, Homo sapiens
  misc_RNA (1)...(19): siRNA sense strand
cauaaugccaucagguuug

SEQ ID NO: 1116759 - RNA, 19 nt, Homo sapiens
  misc_RNA (1)...(19): siRNA sense strand
gacaagggaguuucuaaag

SEQ ID NO: 1116760 - RNA, 19 nt, Homo sapiens
  misc_RNA (1)...(19): siRNA sense strand
ggaguccacgagaucauuu

SEQ ID NO: 1116761 - RNA, 19 nt, Homo sapiens
  misc_RNA (1)...(19): siRNA sense strand
caaguaacucuccucaaau

SEQ ID NO: 1116762 - RNA, 19 nt, Homo sapiens
  misc_RNA (1)...(19): siRNA sense strand
acaaaucaccauucguuau

SEQ ID NO: 1116763 - RNA, 19 nt, Homo sapiens
  misc_RNA (1)...(19): siRNA sense strand
gaagacggagacagacaug

SEQ ID NO: 1116764 - RNA, 19 nt, Homo sapiens
  misc_RNA (1)...(19): siRNA sense strand
uugccaagcugcuccagaa

SEQ ID NO: 1116765 - RNA, 19 nt, Homo sapiens
  misc_RNA (1)...(19): siRNA sense strand
ugaguuugcugugaaguuc

SEQ ID NO: 1116766 - RNA, 19 nt, Homo sapiens
  misc_RNA (1)...(19): siRNA sense strand
ccuccuugaugaauaaaga

SEQ ID NO: 1116767 - RNA, 19 nt, Homo sapiens
  misc_RNA (1)...(19): siRNA sense strand
uuucagggcugccaguuuc

SEQ ID NO: 1116768 - RNA, 19 nt, Homo sapiens
  misc_RNA (1)...(19): siRNA sense strand
ccaaagugcaaucaaagug

SEQ ID NO: 1116769 - RNA, 19 nt, Homo sapiens
  misc_RNA (1)...(19): siRNA sense strand
gagcccaaguuugaguuug

SEQ ID NO: 1116770 - RNA, 19 nt, Homo sapiens
  misc_RNA (1)...(19): siRNA sense strand
ugaccaugguugacacaga

SEQ ID NO: 1116771 - RNA, 19 nt, Homo sapiens
  misc_RNA (1)...(19): siRNA sense strand
auccagugguugcagauua

SEQ ID NO: 1116772 - RNA, 19 nt, Homo sapiens
  misc_RNA (1)...(19): siRNA sense strand
ggaucucuccguaauggaa

SEQ ID NO: 1116773 - RNA, 19 nt, Homo sapiens
  misc_RNA (1)...(19): siRNA sense strand
acucauacauaaaguccuu

SEQ ID NO: 1116774 - RNA, 19 nt, Homo sapiens
  misc_RNA (1)...(19): siRNA sense strand
uggccuccuugaugaauaa

SEQ ID NO: 1116775 - RNA, 19 nt, Homo sapiens
  misc_RNA (1)...(19): siRNA sense strand
caugaauuccuuaaugaug

SEQ ID NO: 1116776 - RNA, 19 nt, Homo sapiens
  misc_RNA (1)...(19): siRNA sense strand
ccucauggcaauugaaugu

SEQ ID NO: 1116777 - RNA, 19 nt, Homo sapiens
  misc_RNA (1)...(19): siRNA sense strand
guggagaccgcccagguuu

SEQ ID NO: 1116778 - RNA, 19 nt, Homo sapiens
  misc_RNA (1)...(19): siRNA sense strand
acagcgacuuggcaauauu

SEQ ID NO: 1116779 - RNA, 19 nt, Homo sapiens
  misc_RNA (1)...(19): siRNA sense strand
uuacgaagacauuccauuc

SEQ ID NO: 1116780 - RNA, 19 nt, Homo sapiens
  misc_RNA (1)...(19): siRNA sense strand
aaucaccauucguuaucua

SEQ ID NO: 1116781 - RNA, 19 nt, Homo sapiens
  misc_RNA (1)...(19): siRNA sense strand
guggaucucuccguaaugg

SEQ ID NO: 1116782 - RNA, 19 nt, Homo sapiens
  misc_RNA (1)...(19): siRNA sense strand
uuaaugaugggagaagaua

SEQ ID NO: 1116783 - RNA, 19 nt, Homo sapiens
  misc_RNA (1)...(19): siRNA sense strand
cguuaucuaugacaugaau

SEQ ID NO: 1116784 - RNA, 19 nt, Homo sapiens
  misc_RNA (1)...(19): siRNA sense strand
caggaaagacaacagacaa

SEQ ID NO: 1116785 - RNA, 19 nt, Homo sapiens
  misc_RNA (1)...(19): siRNA sense strand
ugacaggaaagacaacaga

SEQ ID NO: 1116786 - RNA, 19 nt, Homo sapiens
  misc_RNA (1)...(19): siRNA sense strand
caaaggcgagggcgaucuu

SEQ ID NO: 1116787 - RNA, 19 nt, Homo sapiens
  misc_RNA (1)...(19): siRNA sense strand
cagcgacuuggcaauauuu

SEQ ID NO: 1116788 - RNA, 19 nt, Homo sapiens
  misc_RNA (1)...(19): siRNA sense strand
caagaguaccaaagugcaa

SEQ ID NO: 1116789 - RNA, 19 nt, Homo sapiens
  misc_RNA (1)...(19): siRNA sense strand
gaguccacgagaucauuua

SEQ ID NO: 1116790 - RNA, 19 nt, Homo sapiens
  misc_RNA (1)...(19): siRNA sense strand
ucacuacuguugacuucuc

SEQ ID NO: 1116791 - RNA, 19 nt, Homo sapiens
  misc_RNA (1)...(19): siRNA sense strand
ucauaaugccaucagguuu

SEQ ID NO: 1116792 - RNA, 19 nt, Homo sapiens
  misc_RNA (1)...(19): siRNA sense strand
ugucaguacugucgguuuc

SEQ ID NO: 1116793 - RNA, 19 nt, Homo sapiens
  misc_RNA (1)...(19): siRNA sense strand
caaaguggagccugcaucu

SEQ ID NO: 1116794 - RNA, 19 nt, Homo sapiens
  misc_RNA (1)...(19): siRNA sense strand
augcuggccuccuugauga

SEQ ID NO: 1116795 - RNA, 19 nt, Homo sapiens
  misc_RNA (1)...(19): siRNA sense strand
gauugaagcuuaucuauga

SEQ ID NO: 1116796 - RNA, 19 nt, Homo sapiens
  misc_RNA (1)...(19): siRNA sense strand
agacucagcucuacaauaa

SEQ ID NO: 1116797 - RNA, 19 nt, Homo sapiens
  misc_RNA (1)...(19): siRNA sense strand
ccaaguaacucuccucaaa

SEQ ID NO: 1116798 - RNA, 19 nt, Homo sapiens
  misc_RNA (1)...(19): siRNA sense strand
agauaaagcuucuggauuu

SEQ ID NO: 1116799 - RNA, 19 nt, Homo sapiens
  misc_RNA (1)...(19): siRNA sense strand
gacaugaauuccuuaauga

SEQ ID NO: 1116800 - RNA, 19 nt, Homo sapiens
  misc_RNA (1)...(19): siRNA sense strand
gaaguucaaugcacuggaa

SEQ ID NO: 1116801 - RNA, 19 nt, Homo sapiens
  misc_RNA (1)...(19): siRNA sense strand
guaccaaagugcaaucaaa

SEQ ID NO: 1116802 - RNA, 19 nt, Homo sapiens
  misc_RNA (1)...(19): siRNA sense strand
ugacaugaauuccuuaaug

SEQ ID NO: 1116803 - RNA, 19 nt, Homo sapiens
  misc_RNA (1)...(19): siRNA sense strand
aaguaacucuccucaaaua

SEQ ID NO: 1116804 - RNA, 19 nt, Homo sapiens
  misc_RNA (1)...(19): siRNA sense strand
ucaaugcacuggaauuaga

SEQ ID NO: 1116805 - RNA, 19 nt, Homo sapiens
  misc_RNA (1)...(19): siRNA sense strand
gcauuucuacuccacauua

SEQ ID NO: 1116806 - RNA, 19 nt, Homo sapiens
  misc_RNA (1)...(19): siRNA sense strand
gacauuccauucacaagaa

SEQ ID NO: 1116807 - RNA, 19 nt, Homo sapiens
  misc_RNA (1)...(19): siRNA sense strand
uuacaaguaugaccugaaa

SEQ ID NO: 1116808 - RNA, 19 nt, Homo sapiens
  misc_RNA (1)...(19): siRNA sense strand
ggccaaggcuucaugacaa

SEQ ID NO: 1116809 - RNA, 19 nt, Homo sapiens
  misc_RNA (1)...(19): siRNA sense strand
gcaauugaaugucgugucu

SEQ ID NO: 1116810 - RNA, 19 nt, Homo sapiens
  misc_RNA (1)...(19): siRNA sense strand
acaauaagccucaugaaga

SEQ ID NO: 1116811 - RNA, 19 nt, Homo sapiens
  misc_RNA (1)...(19): siRNA sense strand
caagggaguuucuaaagag

SEQ ID NO: 1116812 - RNA, 19 nt, Homo sapiens
  misc_RNA (1)...(19): siRNA sense strand
caauaagccucaugaagag

SEQ ID NO: 1116813 - RNA, 19 nt, Homo sapiens
  misc_RNA (1)...(19): siRNA sense strand
gagauaaagcuucuggauu

SEQ ID NO: 1116814 - RNA, 19 nt, Homo sapiens
  misc_RNA (1)...(19): siRNA sense strand
acaagggaguuucuaaaga

SEQ ID NO: 1116815 - RNA, 19 nt, Homo sapiens
  misc_RNA (1)...(19): siRNA sense strand
gaaauaaaugucaguacug

SEQ ID NO: 1116816 - RNA, 19 nt, Homo sapiens
  misc_RNA (1)...(19): siRNA sense strand
gaucacagaguaugccaaa

SEQ ID NO: 1116817 - RNA, 19 nt, Homo sapiens
  misc_RNA (1)...(19): siRNA sense strand
gaaagacaacagacaaauc

SEQ ID NO: 1116818 - RNA, 19 nt, Homo sapiens
  misc_RNA (1)...(19): siRNA sense strand
ugacagaccucagacagau

SEQ ID NO: 1116819 - RNA, 19 nt, Homo sapiens
  misc_RNA (1)...(19): siRNA sense strand
aagaacagauccagugguu

SEQ ID NO: 1116820 - RNA, 19 nt, Homo sapiens
  misc_RNA (1)...(19): siRNA sense strand
gguugcagauuacaaguau

SEQ ID NO: 1116821 - RNA, 19 nt, Homo sapiens
  misc_RNA (1)...(19): siRNA sense strand
gacaaaucaccauucguua

SEQ ID NO: 1116822 - RNA, 19 nt, Homo sapiens
  misc_RNA (1)...(19): siRNA sense strand
gcacuggaauuagaugaca

SEQ ID NO: 1116823 - RNA, 19 nt, Homo sapiens
  misc_RNA (1)...(19): siRNA sense strand
guucaaugcacuggaauua

SEQ ID NO: 1116824 - RNA, 19 nt, Homo sapiens
  misc_RNA (1)...(19): siRNA sense strand
caccauucguuaucuauga

SEQ ID NO: 1116825 - RNA, 19 nt, Homo sapiens
  misc_RNA (1)...(19): siRNA sense strand
gaagacauuccauucacaa

SEQ ID NO: 1116826 - RNA, 19 nt, Homo sapiens
  misc_RNA (1)...(19): siRNA sense strand
gaagcccauugaagacauu

SEQ ID NO: 1116827 - RNA, 19 nt, Homo sapiens
  misc_RNA (1)...(19): siRNA sense strand
ugcaggagaucacagagua

SEQ ID NO: 1116828 - RNA, 19 nt, Homo sapiens
  misc_RNA (1)...(19): siRNA sense strand
gauaaagcuucuggauuuc

SEQ ID NO: 1116829 - RNA, 19 nt, Homo sapiens
  misc_RNA (1)...(19): siRNA sense strand
caacagacaaaucaccauu

SEQ ID NO: 1116830 - RNA, 19 nt, Homo sapiens
  misc_RNA (1)...(19): siRNA sense strand
ucaagaagacggagacaga

SEQ ID NO: 1116831 - RNA, 19 nt, Homo sapiens
  misc_RNA (1)...(19): siRNA sense strand
ugacagcgacuuggcaaua

SEQ ID NO: 1116832 - RNA, 19 nt, Homo sapiens
  misc_RNA (1)...(19): siRNA sense strand
agacaaaucaccauucguu

SEQ ID NO: 1116833 - RNA, 19 nt, Homo sapiens
  misc_RNA (1)...(19): siRNA sense strand
ggaaagacaacagacaaau

SEQ ID NO: 1116834 - RNA, 19 nt, Homo sapiens
  misc_RNA (1)...(19): siRNA sense strand
gauaucaagcccuucacua

SEQ ID NO: 1116835 - RNA, 19 nt, Homo sapiens
  misc_RNA (1)...(19): siRNA sense strand
acacaaugcuggccuccuu

SEQ ID NO: 1116836 - RNA, 19 nt, Homo sapiens
  misc_RNA (1)...(19): siRNA sense strand
uaacucuccucaaauaugg

SEQ ID NO: 1116837 - RNA, 19 nt, Homo sapiens
  misc_RNA (1)...(19): siRNA sense strand
aaagacaacagacaaauca

SEQ ID NO: 1116838 - RNA, 19 nt, Homo sapiens
  misc_RNA (1)...(19): siRNA sense strand
ggagauaaagcuucuggau

SEQ ID NO: 1116839 - RNA, 19 nt, Homo sapiens
  misc_RNA (1)...(19): siRNA sense strand
gacagcgacuuggcaauau

SEQ ID NO: 1116840 - RNA, 19 nt, Homo sapiens
  misc_RNA (1)...(19): siRNA sense strand
guugacuucuccagcauuu

SEQ ID NO: 1116841 - RNA, 19 nt, Homo sapiens
  misc_RNA (1)...(19): siRNA sense strand
guaacucuccucaaauaug

SEQ ID NO: 1116842 - RNA, 19 nt, Homo sapiens
  misc_RNA (1)...(19): siRNA sense strand
caagacaaccugcuacaag

SEQ ID NO: 1116843 - RNA, 19 nt, Homo sapiens
  misc_RNA (1)...(19): siRNA sense strand
ugucgugucuguggagaua

SEQ ID NO: 1116844 - RNA, 19 nt, Homo sapiens
  misc_RNA (1)...(19): siRNA sense strand
caaaucaccauucguuauc

SEQ ID NO: 1116845 - RNA, 19 nt, Homo sapiens
  misc_RNA (1)...(19): siRNA sense strand
ccaacucccucauggcaau

SEQ ID NO: 1116846 - RNA, 19 nt, Homo sapiens
  misc_RNA (1)...(19): siRNA sense strand
gaaaaugacagaccucaga

SEQ ID NO: 1116847 - RNA, 19 nt, Homo sapiens
  misc_RNA (1)...(19): siRNA sense strand
cuaaagagccugcgaaagc

SEQ ID NO: 1116848 - RNA, 19 nt, Homo sapiens
  misc_RNA (1)...(19): siRNA sense strand
ugacaagggaguuucuaaa

SEQ ID NO: 1116849 - RNA, 19 nt, Homo sapiens
  misc_RNA (1)...(19): siRNA sense strand
ccaaaagcauuccugguuu

SEQ ID NO: 1116850 - RNA, 19 nt, Homo sapiens
  misc_RNA (1)...(19): siRNA sense strand
ggauuucacuauggaguuc

SEQ ID NO: 1116851 - RNA, 19 nt, Homo sapiens
  misc_RNA (1)...(19): siRNA sense strand
cagguuugcugaaugugaa

SEQ ID NO: 1116852 - RNA, 19 nt, Homo sapiens
  misc_RNA (1)...(19): siRNA sense strand
ucuaugacaugaauuccuu

SEQ ID NO: 1116853 - RNA, 19 nt, Homo sapiens
  misc_RNA (1)...(19): siRNA sense strand
cgaagacauuccauucaca

SEQ ID NO: 1116854 - RNA, 19 nt, Homo sapiens
  misc_RNA (1)...(19): siRNA sense strand
gcccagguuugcugaaugu

SEQ ID NO: 1116855 - RNA, 19 nt, Homo sapiens
  misc_RNA (1)...(19): siRNA sense strand
uuauggagcccaaguuuga

SEQ ID NO: 1116856 - RNA, 19 nt, Homo sapiens
  misc_RNA (1)...(19): siRNA sense strand
ugcaggagaucuacaagga

SEQ ID NO: 1116857 - RNA, 19 nt, Homo sapiens
  misc_RNA (1)...(19): siRNA sense strand
cauaaugccaucagguuug

SEQ ID NO: 1116858 - RNA, 19 nt, Homo sapiens
  misc_RNA (1)...(19): siRNA sense strand
gacaagggaguuucuaaag

SEQ ID NO: 1116859 - RNA, 19 nt, Homo sapiens
  misc_RNA (1)...(19): siRNA sense strand
ggaguccacgagaucauuu

SEQ ID NO: 1116860 - RNA, 19 nt, Homo sapiens
  misc_RNA (1)...(19): siRNA sense strand
caaguaacucuccucaaau

SEQ ID NO: 1116861 - RNA, 19 nt, Homo sapiens
  misc_RNA (1)...(19): siRNA sense strand
acaaaucaccauucguuau

SEQ ID NO: 1116862 - RNA, 19 nt, Homo sapiens
  misc_RNA (1)...(19): siRNA sense strand
gaagacggagacagacaug

SEQ ID NO: 1116863 - RNA, 19 nt, Homo sapiens
  misc_RNA (1)...(19): siRNA sense strand
uugccaagcugcuccagaa

SEQ ID NO: 1116864 - RNA, 19 nt, Homo sapiens
  misc_RNA (1)...(19): siRNA sense strand
ugaguuugcugugaaguuc

SEQ ID NO: 1116865 - RNA, 19 nt, Homo sapiens
  misc_RNA (1)...(19): siRNA sense strand
ccuccuugaugaauaaaga

SEQ ID NO: 1116866 - RNA, 19 nt, Homo sapiens
  misc_RNA (1)...(19): siRNA sense strand
uuucagggcugccaguuuc

SEQ ID NO: 1116867 - RNA, 19 nt, Homo sapiens
  misc_RNA (1)...(19): siRNA sense strand
ccaaagugcaaucaaagug

SEQ ID NO: 1116868 - RNA, 19 nt, Homo sapiens
  misc_RNA (1)...(19): siRNA sense strand
gagcccaaguuugaguuug

SEQ ID NO: 1116869 - RNA, 19 nt, Homo sapiens
  misc_RNA (1)...(19): siRNA sense strand
auccagugguugcagauua

SEQ ID NO: 1116870 - RNA, 19 nt, Homo sapiens
  misc_RNA (1)...(19): siRNA sense strand
ggaucucuccguaauggaa

SEQ ID NO: 1116871 - RNA, 19 nt, Homo sapiens
  misc_RNA (1)...(19): siRNA sense strand
acucauacauaaaguccuu

SEQ ID NO: 1116872 - RNA, 19 nt, Homo sapiens
  misc_RNA (1)...(19): siRNA sense strand
uggccuccuugaugaauaa

SEQ ID NO: 1116873 - RNA, 19 nt, Homo sapiens
  misc_RNA (1)...(19): siRNA sense strand
caugaauuccuuaaugaug

SEQ ID NO: 1116874 - RNA, 19 nt, Homo sapiens
  misc_RNA (1)...(19): siRNA sense strand
ccucauggcaauugaaugu

SEQ ID NO: 1116875 - RNA, 19 nt, Homo sapiens
  misc_RNA (1)...(19): siRNA sense strand
guggagaccgcccagguuu

SEQ ID NO: 1116876 - RNA, 19 nt, Homo sapiens
  misc_RNA (1)...(19): siRNA sense strand
acagcgacuuggcaauauu

SEQ ID NO: 1116877 - RNA, 19 nt, Homo sapiens
  misc_RNA (1)...(19): siRNA sense strand
uuacgaagacauuccauuc

SEQ ID NO: 1116878 - RNA, 19 nt, Homo sapiens
  misc_RNA (1)...(19): siRNA sense strand
aaucaccauucguuaucua

SEQ ID NO: 1116879 - RNA, 19 nt, Homo sapiens
  misc_RNA (1)...(19): siRNA sense strand
ugacaggaaagacaacaga

SEQ ID NO: 1116880 - RNA, 19 nt, Homo sapiens
  misc_RNA (1)...(19): siRNA sense strand
guggaucucuccguaaugg

SEQ ID NO: 1116881 - RNA, 19 nt, Homo sapiens
  misc_RNA (1)...(19): siRNA sense strand
uuaaugaugggagaagaua

SEQ ID NO: 1116882 - RNA, 19 nt, Homo sapiens
  misc_RNA (1)...(19): siRNA sense strand
cguuaucuaugacaugaau

SEQ ID NO: 1116883 - RNA, 19 nt, Homo sapiens
  misc_RNA (1)...(19): siRNA sense strand
caggaaagacaacagacaa

SEQ ID NO: 1116884 - RNA, 19 nt, Homo sapiens
  misc_RNA (1)...(19): siRNA sense strand
caaaggcgagggcgaucuu

SEQ ID NO: 1116885 - RNA, 19 nt, Homo sapiens
  misc_RNA (1)...(19): siRNA sense strand
cagcgacuuggcaauauuu

SEQ ID NO: 1116886 - RNA, 19 nt, Homo sapiens
  misc_RNA (1)...(19): siRNA sense strand
caagaguaccaaagugcaa

SEQ ID NO: 1116887 - RNA, 19 nt, Homo sapiens
  misc_RNA (1)...(19): siRNA sense strand
gaguccacgagaucauuua

SEQ ID NO: 1116888 - RNA, 19 nt, Homo sapiens
  misc_RNA (1)...(19): siRNA sense strand
ucacuacuguugacuucuc

SEQ ID NO: 1116889 - RNA, 19 nt, Homo sapiens
  misc_RNA (1)...(19): siRNA sense strand
ucauaaugccaucagguuu

SEQ ID NO: 1116890 - RNA, 19 nt, Homo sapiens
  misc_RNA (1)...(19): siRNA sense strand
ugucaguacugucgguuuc

SEQ ID NO: 1116891 - RNA, 19 nt, Homo sapiens
  misc_RNA (1)...(19): siRNA sense strand
caaaguggagccugcaucu

SEQ ID NO: 1116892 - RNA, 19 nt, Homo sapiens
  misc_RNA (1)...(19): siRNA sense strand
cuauggaguucaugcuugu

SEQ ID NO: 1116893 - RNA, 19 nt, Homo sapiens
  misc_RNA (1)...(19): siRNA sense strand
augcuggccuccuugauga

SEQ ID NO: 1116894 - RNA, 19 nt, Homo sapiens
  misc_RNA (1)...(19): siRNA sense strand
gggcgaucuugacaggaaa

SEQ ID NO: 1116895 - RNA, 19 nt, Homo sapiens
  misc_RNA (1)...(19): siRNA sense strand
gauugaagcuuaucuauga

SEQ ID NO: 1116896 - RNA, 19 nt, Homo sapiens
  misc_RNA (1)...(19): siRNA sense strand
agacucagcucuacaauaa

SEQ ID NO: 1116897 - RNA, 19 nt, Homo sapiens
  misc_RNA (1)...(19): siRNA sense strand
ccaaguaacucuccucaaa

SEQ ID NO: 1116898 - RNA, 19 nt, Homo sapiens
  misc_RNA (1)...(19): siRNA sense strand
agauaaagcuucuggauuu

SEQ ID NO: 1116899 - RNA, 19 nt, Homo sapiens
  misc_RNA (1)...(19): siRNA sense strand
gacaugaauuccuuaauga

SEQ ID NO: 1116900 - RNA, 19 nt, Homo sapiens
  misc_RNA (1)...(19): siRNA sense strand
gaaguucaaugcacuggaa

SEQ ID NO: 1116901 - RNA, 19 nt, Homo sapiens
  misc_RNA (1)...(19): siRNA sense strand
guaccaaagugcaaucaaa

SEQ ID NO: 1116902 - RNA, 19 nt, Homo sapiens
  misc_RNA (1)...(19): siRNA sense strand
ugacaugaauuccuuaaug

SEQ ID NO: 1116903 - RNA, 19 nt, Homo sapiens
  misc_RNA (1)...(19): siRNA sense strand
aaguaacucuccucaaaua

SEQ ID NO: 1116904 - RNA, 19 nt, Homo sapiens
  misc_RNA (1)...(19): siRNA sense strand
ucaaugcacuggaauuaga

SEQ ID NO: 1116905 - RNA, 19 nt, Homo sapiens
  misc_RNA (1)...(19): siRNA sense strand
gcauuucuacuccacauua

SEQ ID NO: 1116906 - RNA, 19 nt, Homo sapiens
  misc_RNA (1)...(19): siRNA sense strand
gacauuccauucacaagaa

SEQ ID NO: 1116907 - RNA, 19 nt, Homo sapiens
  misc_RNA (1)...(19): siRNA sense strand
uuacaaguaugaccugaaa

SEQ ID NO: 1116908 - RNA, 19 nt, Homo sapiens
  misc_RNA (1)...(19): siRNA sense strand
ggccaaggcuucaugacaa

SEQ ID NO: 1116909 - RNA, 19 nt, Homo sapiens
  misc_RNA (1)...(19): siRNA sense strand
gcaauugaaugucgugucu

SEQ ID NO: 1116910 - RNA, 19 nt, Homo sapiens
  misc_RNA (1)...(19): siRNA sense strand
acaauaagccucaugaaga

SEQ ID NO: 1116911 - RNA, 19 nt, Homo sapiens
  misc_RNA (1)...(19): siRNA sense strand
caagggaguuucuaaagag

SEQ ID NO: 1116912 - RNA, 19 nt, Homo sapiens
  misc_RNA (1)...(19): siRNA sense strand
caauaagccucaugaagag

SEQ ID NO: 1116913 - RNA, 19 nt, Homo sapiens
  misc_RNA (1)...(19): siRNA sense strand
gagauaaagcuucuggauu

SEQ ID NO: 1116914 - RNA, 19 nt, Homo sapiens
  misc_RNA (1)...(19): siRNA sense strand
acaagggaguuucuaaaga

SEQ ID NO: 1116915 - RNA, 19 nt, Homo sapiens
  misc_RNA (1)...(19): siRNA sense strand
gaaauaaaugucaguacug

SEQ ID NO: 1116916 - RNA, 19 nt, Homo sapiens
  misc_RNA (1)...(19): siRNA sense strand
gaucacagaguaugccaaa

SEQ ID NO: 1116917 - RNA, 19 nt, Homo sapiens
  misc_RNA (1)...(19): siRNA sense strand
gaaagacaacagacaaauc

SEQ ID NO: 1116918 - RNA, 19 nt, Homo sapiens
  misc_RNA (1)...(19): siRNA sense strand
ugacagaccucagacagau

SEQ ID NO: 1116919 - RNA, 19 nt, Homo sapiens
  misc_RNA (1)...(19): siRNA sense strand
aagaacagauccagugguu

SEQ ID NO: 1116920 - RNA, 19 nt, Homo sapiens
  misc_RNA (1)...(19): siRNA sense strand
gguugcagauuacaaguau

SEQ ID NO: 1116921 - RNA, 19 nt, Homo sapiens
  misc_RNA (1)...(19): siRNA sense strand
gacaaaucaccauucguua

SEQ ID NO: 1116922 - RNA, 19 nt, Homo sapiens
  misc_RNA (1)...(19): siRNA sense strand
gcacuggaauuagaugaca

SEQ ID NO: 1116923 - RNA, 19 nt, Homo sapiens
  misc_RNA (1)...(19): siRNA sense strand
guucaaugcacuggaauua

SEQ ID NO: 1116924 - RNA, 19 nt, Homo sapiens
  misc_RNA (1)...(19): siRNA sense strand
caccauucguuaucuauga

SEQ ID NO: 1116925 - RNA, 19 nt, Homo sapiens
  misc_RNA (1)...(19): siRNA sense strand
gaagacauuccauucacaa

SEQ ID NO: 1116926 - RNA, 19 nt, Homo sapiens
  misc_RNA (1)...(19): siRNA sense strand
gaagcccauugaagacauu

SEQ ID NO: 1116927 - RNA, 19 nt, Homo sapiens
  misc_RNA (1)...(19): siRNA sense strand
ugcaggagaucacagagua

SEQ ID NO: 1116928 - RNA, 19 nt, Homo sapiens
  misc_RNA (1)...(19): siRNA sense strand
gauaaagcuucuggauuuc

SEQ ID NO: 1116929 - RNA, 19 nt, Homo sapiens
  misc_RNA (1)...(19): siRNA sense strand
caacagacaaaucaccauu

SEQ ID NO: 1116930 - RNA, 19 nt, Homo sapiens
  misc_RNA (1)...(19): siRNA sense strand
ucaagaagacggagacaga

SEQ ID NO: 1116931 - RNA, 19 nt, Homo sapiens
  misc_RNA (1)...(19): siRNA sense strand
ugacagcgacuuggcaaua

SEQ ID NO: 1116932 - RNA, 19 nt, Homo sapiens
  misc_RNA (1)...(19): siRNA sense strand
agacaaaucaccauucguu

SEQ ID NO: 1116933 - RNA, 19 nt, Homo sapiens
  misc_RNA (1)...(19): siRNA sense strand
ggaaagacaacagacaaau

SEQ ID NO: 1116934 - RNA, 19 nt, Homo sapiens
  misc_RNA (1)...(19): siRNA sense strand
gauaucaagcccuucacua

SEQ ID NO: 1116935 - RNA, 19 nt, Homo sapiens
  misc_RNA (1)...(19): siRNA sense strand
acacaaugcuggccuccuu

SEQ ID NO: 1116936 - RNA, 19 nt, Homo sapiens
  misc_RNA (1)...(19): siRNA sense strand
uaacucuccucaaauaugg

SEQ ID NO: 1116937 - RNA, 19 nt, Homo sapiens
  misc_RNA (1)...(19): siRNA sense strand
aaagacaacagacaaauca

SEQ ID NO: 1116938 - RNA, 19 nt, Homo sapiens
  misc_RNA (1)...(19): siRNA sense strand
ggagauaaagcuucuggau

SEQ ID NO: 1116939 - RNA, 19 nt, Homo sapiens
  misc_RNA (1)...(19): siRNA sense strand
gacagcgacuuggcaauau

SEQ ID NO: 1116940 - RNA, 19 nt, Homo sapiens
  misc_RNA (1)...(19): siRNA sense strand
guugacuucuccagcauuu

SEQ ID NO: 1116941 - RNA, 19 nt, Homo sapiens
  misc_RNA (1)...(19): siRNA sense strand
guaacucuccucaaauaug

SEQ ID NO: 1116942 - RNA, 19 nt, Homo sapiens
  misc_RNA (1)...(19): siRNA sense strand
caagacaaccugcuacaag

SEQ ID NO: 1116943 - RNA, 19 nt, Homo sapiens
  misc_RNA (1)...(19): siRNA sense strand
ugucgugucuguggagaua

SEQ ID NO: 1116944 - RNA, 19 nt, Homo sapiens
  misc_RNA (1)...(19): siRNA sense strand
caaaucaccauucguuauc

SEQ ID NO: 1116945 - RNA, 19 nt, Homo sapiens
  misc_RNA (1)...(19): siRNA sense strand
ccaacucccucauggcaau

SEQ ID NO: 1116946 - RNA, 19 nt, Homo sapiens
  misc_RNA (1)...(19): siRNA sense strand
gaaaaugacagaccucaga

SEQ ID NO: 1116947 - RNA, 19 nt, Homo sapiens
  misc_RNA (1)...(19): siRNA sense strand
cuaaagagccugcgaaagc

SEQ ID NO: 1116948 - RNA, 19 nt, Homo sapiens
  misc_RNA (1)...(19): siRNA sense strand
ugacaagggaguuucuaaa

SEQ ID NO: 1116949 - RNA, 19 nt, Homo sapiens
  misc_RNA (1)...(19): siRNA sense strand
ccaaaagcauuccugguuu

SEQ ID NO: 1116950 - RNA, 19 nt, Homo sapiens
  misc_RNA (1)...(19): siRNA sense strand
ggauuucacuauggaguuc

SEQ ID NO: 1116951 - RNA, 19 nt, Homo sapiens
  misc_RNA (1)...(19): siRNA sense strand
cagguuugcugaaugugaa

SEQ ID NO: 1116952 - RNA, 19 nt, Homo sapiens
  misc_RNA (1)...(19): siRNA sense strand
ucuaugacaugaauuccuu

SEQ ID NO: 1116953 - RNA, 19 nt, Homo sapiens
  misc_RNA (1)...(19): siRNA sense strand
cgaagacauuccauucaca

SEQ ID NO: 1116954 - RNA, 19 nt, Homo sapiens
  misc_RNA (1)...(19): siRNA sense strand
gcccagguuugcugaaugu

SEQ ID NO: 1116955 - RNA, 19 nt, Homo sapiens
  misc_RNA (1)...(19): siRNA sense strand
uuauggagcccaaguuuga

SEQ ID NO: 1116956 - RNA, 19 nt, Homo sapiens
  misc_RNA (1)...(19): siRNA sense strand
ugcaggagaucuacaagga

SEQ ID NO: 1116957 - RNA, 19 nt, Homo sapiens
  misc_RNA (1)...(19): siRNA sense strand
cauaaugccaucagguuug

SEQ ID NO: 1116958 - RNA, 19 nt, Homo sapiens
  misc_RNA (1)...(19): siRNA sense strand
gacaagggaguuucuaaag

SEQ ID NO: 1116959 - RNA, 19 nt, Homo sapiens
  misc_RNA (1)...(19): siRNA sense strand
ggaguccacgagaucauuu

SEQ ID NO: 1116960 - RNA, 19 nt, Homo sapiens
  misc_RNA (1)...(19): siRNA sense strand
caaguaacucuccucaaau

SEQ ID NO: 1116961 - RNA, 19 nt, Homo sapiens
  misc_RNA (1)...(19): siRNA sense strand
acaaaucaccauucguuau

SEQ ID NO: 1116962 - RNA, 19 nt, Homo sapiens
  misc_RNA (1)...(19): siRNA sense strand
gaagacggagacagacaug

SEQ ID NO: 1116963 - RNA, 19 nt, Homo sapiens
  misc_RNA (1)...(19): siRNA sense strand
uugccaagcugcuccagaa

SEQ ID NO: 1116964 - RNA, 19 nt, Homo sapiens
  misc_RNA (1)...(19): siRNA sense strand
ugaguuugcugugaaguuc

SEQ ID NO: 1116965 - RNA, 19 nt, Homo sapiens
  misc_RNA (1)...(19): siRNA sense strand
ccuccuugaugaauaaaga

SEQ ID NO: 1116966 - RNA, 19 nt, Homo sapiens
  misc_RNA (1)...(19): siRNA sense strand
uuucagggcugccaguuuc

SEQ ID NO: 1116967 - RNA, 19 nt, Homo sapiens
  misc_RNA (1)...(19): siRNA sense strand
ccaaagugcaaucaaagug

SEQ ID NO: 1116968 - RNA, 19 nt, Homo sapiens
  misc_RNA (1)...(19): siRNA sense strand
gagcccaaguuugaguuug

SEQ ID NO: 1116969 - RNA, 19 nt, Homo sapiens
  misc_RNA (1)...(19): siRNA sense strand
auccagugguugcagauua

SEQ ID NO: 1116970 - RNA, 19 nt, Homo sapiens
  misc_RNA (1)...(19): siRNA sense strand
ggaucucuccguaauggaa

SEQ ID NO: 1116971 - RNA, 19 nt, Homo sapiens
  misc_RNA (1)...(19): siRNA sense strand
acucauacauaaaguccuu

SEQ ID NO: 1116972 - RNA, 19 nt, Homo sapiens
  misc_RNA (1)...(19): siRNA sense strand
uggccuccuugaugaauaa

SEQ ID NO: 1116973 - RNA, 19 nt, Homo sapiens
  misc_RNA (1)...(19): siRNA sense strand
caugaauuccuuaaugaug

SEQ ID NO: 1116974 - RNA, 19 nt, Homo sapiens
  misc_RNA (1)...(19): siRNA sense strand
ccucauggcaauugaaugu

SEQ ID NO: 1116975 - RNA, 19 nt, Homo sapiens
  misc_RNA (1)...(19): siRNA sense strand
guggagaccgcccagguuu

SEQ ID NO: 1116976 - RNA, 19 nt, Homo sapiens
  misc_RNA (1)...(19): siRNA sense strand
acagcgacuuggcaauauu

SEQ ID NO: 1116977 - RNA, 19 nt, Homo sapiens
  misc_RNA (1)...(19): siRNA sense strand
uuacgaagacauuccauuc

SEQ ID NO: 1116978 - RNA, 19 nt, Homo sapiens
  misc_RNA (1)...(19): siRNA sense strand
aaucaccauucguuaucua

SEQ ID NO: 1116979 - RNA, 19 nt, Homo sapiens
  misc_RNA (1)...(19): siRNA sense strand
ugacaggaaagacaacaga

SEQ ID NO: 1116980 - RNA, 19 nt, Homo sapiens
  misc_RNA (1)...(19): siRNA sense strand
guggaucucuccguaaugg

SEQ ID NO: 1116981 - RNA, 19 nt, Homo sapiens
  misc_RNA (1)...(19): siRNA sense strand
uuaaugaugggagaagaua

SEQ ID NO: 1116982 - RNA, 19 nt, Homo sapiens
  misc_RNA (1)...(19): siRNA sense strand
cguuaucuaugacaugaau

SEQ ID NO: 1116983 - RNA, 19 nt, Homo sapiens
  misc_RNA (1)...(19): siRNA sense strand
caggaaagacaacagacaa

SEQ ID NO: 1116984 - RNA, 19 nt, Homo sapiens
  misc_RNA (1)...(19): siRNA sense strand
caaaggcgagggcgaucuu

SEQ ID NO: 1116985 - RNA, 19 nt, Homo sapiens
  misc_RNA (1)...(19): siRNA sense strand
cagcgacuuggcaauauuu

SEQ ID NO: 1116986 - RNA, 19 nt, Homo sapiens
  misc_RNA (1)...(19): siRNA sense strand
caagaguaccaaagugcaa

SEQ ID NO: 1116987 - RNA, 19 nt, Homo sapiens
  misc_RNA (1)...(19): siRNA sense strand
gaguccacgagaucauuua

SEQ ID NO: 1116988 - RNA, 19 nt, Homo sapiens
  misc_RNA (1)...(19): siRNA sense strand
ucacuacuguugacuucuc

SEQ ID NO: 1116989 - RNA, 19 nt, Homo sapiens
  misc_RNA (1)...(19): siRNA sense strand
ucauaaugccaucagguuu

SEQ ID NO: 1116990 - RNA, 19 nt, Homo sapiens
  misc_RNA (1)...(19): siRNA sense strand
ugucaguacugucgguuuc

SEQ ID NO: 1116991 - RNA, 19 nt, Homo sapiens
  misc_RNA (1)...(19): siRNA sense strand
caaaguggagccugcaucu

SEQ ID NO: 1116992 - RNA, 19 nt, Homo sapiens
  misc_RNA (1)...(19): siRNA sense strand
cuauggaguucaugcuugu

SEQ ID NO: 1116993 - RNA, 19 nt, Homo sapiens
  misc_RNA (1)...(19): siRNA sense strand
augcuggccuccuugauga

SEQ ID NO: 1116994 - RNA, 19 nt, Homo sapiens
  misc_RNA (1)...(19): siRNA sense strand
gggcgaucuugacaggaaa

SEQ ID NO: 1116995 - RNA, 19 nt, Homo sapiens
  misc_RNA (1)...(19): siRNA sense strand
gauugaagcuuaucuauga

SEQ ID NO: 1116996 - RNA, 19 nt, Homo sapiens
  misc_RNA (1)...(19): siRNA sense strand
agacucagcucuacaauaa

SEQ ID NO: 1116997 - RNA, 19 nt, Homo sapiens
  misc_RNA (1)...(19): siRNA sense strand
ccaaguaacucuccucaaa

SEQ ID NO: 1116998 - RNA, 19 nt, Homo sapiens
  misc_RNA (1)...(19): siRNA sense strand
agauaaagcuucuggauuu

SEQ ID NO: 1116999 - RNA, 19 nt, Homo sapiens
  misc_RNA (1)...(19): siRNA sense strand
gacaugaauuccuuaauga

SEQ ID NO: 1117000 - RNA, 19 nt, Homo sapiens
  misc_RNA (1)...(19): siRNA sense strand
gaaguucaaugcacuggaa

SEQ ID NO: 1117001 - RNA, 19 nt, Homo sapiens
  misc_RNA (1)...(19): siRNA sense strand
guaccaaagugcaaucaaa

SEQ ID NO: 1117002 - RNA, 19 nt, Homo sapiens
  misc_RNA (1)...(19): siRNA sense strand
ugacaugaauuccuuaaug

SEQ ID NO: 1117003 - RNA, 19 nt, Homo sapiens
  misc_RNA (1)...(19): siRNA sense strand
aaguaacucuccucaaaua

SEQ ID NO: 1117004 - RNA, 19 nt, Homo sapiens
  misc_RNA (1)...(19): siRNA sense strand
ucaaugcacuggaauuaga

SEQ ID NO: 1117005 - RNA, 19 nt, Homo sapiens
  misc_RNA (1)...(19): siRNA sense strand
gcauuucuacuccacauua

SEQ ID NO: 1117006 - RNA, 19 nt, Homo sapiens
  misc_RNA (1)...(19): siRNA sense strand
gacauuccauucacaagaa

SEQ ID NO: 1117007 - RNA, 19 nt, Homo sapiens
  misc_RNA (1)...(19): siRNA sense strand
uuacaaguaugaccugaaa

SEQ ID NO: 1117008 - RNA, 19 nt, Homo sapiens
  misc_RNA (1)...(19): siRNA sense strand
ggccaaggcuucaugacaa

SEQ ID NO: 1117009 - RNA, 19 nt, Homo sapiens
  misc_RNA (1)...(19): siRNA sense strand
gcaauugaaugucgugucu

SEQ ID NO: 1117010 - RNA, 19 nt, Homo sapiens
  misc_RNA (1)...(19): siRNA sense strand
acaauaagccucaugaaga

SEQ ID NO: 1117011 - RNA, 19 nt, Homo sapiens
  misc_RNA (1)...(19): siRNA sense strand
caagggaguuucuaaagag

SEQ ID NO: 1117012 - RNA, 19 nt, Homo sapiens
  misc_RNA (1)...(19): siRNA sense strand
caauaagccucaugaagag

SEQ ID NO: 1117013 - RNA, 19 nt, Homo sapiens
  misc_RNA (1)...(19): siRNA sense strand
gagauaaagcuucuggauu

SEQ ID NO: 1117014 - RNA, 19 nt, Homo sapiens
  misc_RNA (1)...(19): siRNA sense strand
acaagggaguuucuaaaga

SEQ ID NO: 1117015 - RNA, 19 nt, Homo sapiens
  misc_RNA (1)...(19): siRNA sense strand
gaaauaaaugucaguacug

SEQ ID NO: 1117016 - RNA, 19 nt, Homo sapiens
  misc_RNA (1)...(19): siRNA sense strand
gaucacagaguaugccaaa

SEQ ID NO: 1117017 - RNA, 19 nt, Homo sapiens
  misc_RNA (1)...(19): siRNA sense strand
gaaagacaacagacaaauc

SEQ ID NO: 1117018 - RNA, 19 nt, Homo sapiens
  misc_RNA (1)...(19): siRNA sense strand
ugacagaccucagacagau

SEQ ID NO: 1117019 - RNA, 19 nt, Homo sapiens
  misc_RNA (1)...(19): siRNA sense strand
aagaacagauccagugguu

SEQ ID NO: 1117020 - RNA, 19 nt, Homo sapiens
  misc_RNA (1)...(19): siRNA sense strand
gguugcagauuacaaguau

SEQ ID NO: 1117021 - RNA, 19 nt, Homo sapiens
  misc_RNA (1)...(19): siRNA sense strand
gacaaaucaccauucguua

SEQ ID NO: 1117022 - RNA, 19 nt, Homo sapiens
  misc_RNA (1)...(19): siRNA sense strand
gcacuggaauuagaugaca

SEQ ID NO: 1117023 - RNA, 19 nt, Homo sapiens
  misc_RNA (1)...(19): siRNA sense strand
guucaaugcacuggaauua

SEQ ID NO: 1117024 - RNA, 19 nt, Homo sapiens
  misc_RNA (1)...(19): siRNA sense strand
caccauucguuaucuauga

SEQ ID NO: 1117025 - RNA, 19 nt, Homo sapiens
  misc_RNA (1)...(19): siRNA sense strand
gaagacauuccauucacaa

SEQ ID NO: 1117026 - RNA, 19 nt, Homo sapiens
  misc_RNA (1)...(19): siRNA sense strand
gaagcccauugaagacauu

SEQ ID NO: 1117027 - RNA, 19 nt, Homo sapiens
  misc_RNA (1)...(19): siRNA sense strand
ugcaggagaucacagagua

SEQ ID NO: 1117028 - RNA, 19 nt, Homo sapiens
  misc_RNA (1)...(19): siRNA sense strand
gauaaagcuucuggauuuc

SEQ ID NO: 1117029 - RNA, 19 nt, Homo sapiens
  misc_RNA (1)...(19): siRNA sense strand
caacagacaaaucaccauu

SEQ ID NO: 1117030 - RNA, 19 nt, Homo sapiens
  misc_RNA (1)...(19): siRNA sense strand
ucaagaagacggagacaga

SEQ ID NO: 1117031 - RNA, 19 nt, Homo sapiens
  misc_RNA (1)...(19): siRNA sense strand
ugacagcgacuuggcaaua

SEQ ID NO: 1117032 - RNA, 19 nt, Homo sapiens
  misc_RNA (1)...(19): siRNA sense strand
agacaaaucaccauucguu

SEQ ID NO: 1117033 - RNA, 19 nt, Homo sapiens
  misc_RNA (1)...(19): siRNA sense strand
ggaaagacaacagacaaau

SEQ ID NO: 1117034 - RNA, 19 nt, Homo sapiens
  misc_RNA (1)...(19): siRNA sense strand
gauaucaagcccuucacua

SEQ ID NO: 1117035 - RNA, 19 nt, Homo sapiens
  misc_RNA (1)...(19): siRNA sense strand
acacaaugcuggccuccuu

SEQ ID NO: 1117036 - RNA, 19 nt, Homo sapiens
  misc_RNA (1)...(19): siRNA sense strand
uaacucuccucaaauaugg

SEQ ID NO: 1117037 - RNA, 19 nt, Homo sapiens
  misc_RNA (1)...(19): siRNA sense strand
aaagacaacagacaaauca

SEQ ID NO: 1117038 - RNA, 19 nt, Homo sapiens
  misc_RNA (1)...(19): siRNA sense strand
ggagauaaagcuucuggau

SEQ ID NO: 1117039 - RNA, 19 nt, Homo sapiens
  misc_RNA (1)...(19): siRNA sense strand
gacagcgacuuggcaauau

SEQ ID NO: 1117040 - RNA, 19 nt, Homo sapiens
  misc_RNA (1)...(19): siRNA sense strand
guugacuucuccagcauuu

SEQ ID NO: 1117041 - RNA, 19 nt, Homo sapiens
  misc_RNA (1)...(19): siRNA sense strand
guaacucuccucaaauaug

SEQ ID NO: 1117042 - RNA, 19 nt, Homo sapiens
  misc_RNA (1)...(19): siRNA sense strand
caagacaaccugcuacaag

SEQ ID NO: 1117043 - RNA, 19 nt, Homo sapiens
  misc_RNA (1)...(19): siRNA sense strand
ugucgugucuguggagaua

SEQ ID NO: 1117044 - RNA, 19 nt, Homo sapiens
  misc_RNA (1)...(19): siRNA sense strand
caaaucaccauucguuauc

SEQ ID NO: 1117045 - RNA, 19 nt, Homo sapiens
  misc_RNA (1)...(19): siRNA sense strand
ccaacucccucauggcaau

SEQ ID NO: 1117046 - RNA, 19 nt, Homo sapiens
  misc_RNA (1)...(19): siRNA sense strand
gaaaaugacagaccucaga

SEQ ID NO: 1117047 - RNA, 19 nt, Homo sapiens
  misc_RNA (1)...(19): siRNA sense strand
cuaaagagccugcgaaagc

SEQ ID NO: 1117048 - RNA, 19 nt, Homo sapiens
  misc_RNA (1)...(19): siRNA sense strand
ugacaagggaguuucuaaa

SEQ ID NO: 1117049 - RNA, 19 nt, Homo sapiens
  misc_RNA (1)...(19): siRNA sense strand
ccaaaagcauuccugguuu

SEQ ID NO: 1117050 - RNA, 19 nt, Homo sapiens
  misc_RNA (1)...(19): siRNA sense strand
ggauuucacuauggaguuc

SEQ ID NO: 1117051 - RNA, 19 nt, Homo sapiens
  misc_RNA (1)...(19): siRNA sense strand
cagguuugcugaaugugaa

SEQ ID NO: 1117052 - RNA, 19 nt, Homo sapiens
  misc_RNA (1)...(19): siRNA sense strand
ucuaugacaugaauuccuu

SEQ ID NO: 1117053 - RNA, 19 nt, Homo sapiens
  misc_RNA (1)...(19): siRNA sense strand
cgaagacauuccauucaca

SEQ ID NO: 1117054 - RNA, 19 nt, Homo sapiens
  misc_RNA (1)...(19): siRNA sense strand
gcccagguuugcugaaugu

SEQ ID NO: 1117055 - RNA, 19 nt, Homo sapiens
  misc_RNA (1)...(19): siRNA sense strand
uuauggagcccaaguuuga

SEQ ID NO: 1117056 - RNA, 19 nt, Homo sapiens
  misc_RNA (1)...(19): siRNA sense strand
ugcaggagaucuacaagga

SEQ ID NO: 1117057 - RNA, 19 nt, Homo sapiens
  misc_RNA (1)...(19): siRNA sense strand
cauaaugccaucagguuug

SEQ ID NO: 1117058 - RNA, 19 nt, Homo sapiens
  misc_RNA (1)...(19): siRNA sense strand
gacaagggaguuucuaaag

SEQ ID NO: 1117059 - RNA, 19 nt, Homo sapiens
  misc_RNA (1)...(19): siRNA sense strand
ggaguccacgagaucauuu

SEQ ID NO: 1117060 - RNA, 19 nt, Homo sapiens
  misc_RNA (1)...(19): siRNA sense strand
caaguaacucuccucaaau

SEQ ID NO: 1117061 - RNA, 19 nt, Homo sapiens
  misc_RNA (1)...(19): siRNA sense strand
acaaaucaccauucguuau

SEQ ID NO: 1117062 - RNA, 19 nt, Homo sapiens
  misc_RNA (1)...(19): siRNA sense strand
gaagacggagacagacaug

SEQ ID NO: 1117063 - RNA, 19 nt, Homo sapiens
  misc_RNA (1)...(19): siRNA sense strand
uugccaagcugcuccagaa

SEQ ID NO: 1117064 - RNA, 19 nt, Homo sapiens
  misc_RNA (1)...(19): siRNA sense strand
ugaguuugcugugaaguuc

SEQ ID NO: 1117065 - RNA, 19 nt, Homo sapiens
  misc_RNA (1)...(19): siRNA sense strand
ccuccuugaugaauaaaga

SEQ ID NO: 1117066 - RNA, 19 nt, Homo sapiens
  misc_RNA (1)...(19): siRNA sense strand
uuucagggcugccaguuuc

SEQ ID NO: 1117067 - RNA, 19 nt, Homo sapiens
  misc_RNA (1)...(19): siRNA sense strand
ccaaagugcaaucaaagug

SEQ ID NO: 1117068 - RNA, 19 nt, Homo sapiens
  misc_RNA (1)...(19): siRNA sense strand
gagcccaaguuugaguuug

SEQ ID NO: 1117069 - RNA, 19 nt, Homo sapiens
  misc_RNA (1)...(19): siRNA sense strand
auccagugguugcagauua

SEQ ID NO: 1117070 - RNA, 19 nt, Homo sapiens
  misc_RNA (1)...(19): siRNA sense strand
ggaucucuccguaauggaa

SEQ ID NO: 1117071 - RNA, 19 nt, Homo sapiens
  misc_RNA (1)...(19): siRNA sense strand
acucauacauaaaguccuu

SEQ ID NO: 1117072 - RNA, 19 nt, Homo sapiens
  misc_RNA (1)...(19): siRNA sense strand
uggccuccuugaugaauaa

SEQ ID NO: 1117073 - RNA, 19 nt, Homo sapiens
  misc_RNA (1)...(19): siRNA sense strand
caugaauuccuuaaugaug

SEQ ID NO: 1117074 - RNA, 19 nt, Homo sapiens
  misc_RNA (1)...(19): siRNA sense strand
ccucauggcaauugaaugu

SEQ ID NO: 1117075 - RNA, 19 nt, Homo sapiens
  misc_RNA (1)...(19): siRNA sense strand
guggagaccgcccagguuu

SEQ ID NO: 1117076 - RNA, 19 nt, Homo sapiens
  misc_RNA (1)...(19): siRNA sense strand
acagcgacuuggcaauauu

SEQ ID NO: 1117077 - RNA, 19 nt, Homo sapiens
  misc_RNA (1)...(19): siRNA sense strand
uuacgaagacauuccauuc

SEQ ID NO: 1117078 - RNA, 19 nt, Homo sapiens
  misc_RNA (1)...(19): siRNA sense strand
aaucaccauucguuaucua

SEQ ID NO: 1117079 - RNA, 19 nt, Homo sapiens
  misc_RNA (1)...(19): siRNA sense strand
ugacaggaaagacaacaga

SEQ ID NO: 1117080 - RNA, 19 nt, Homo sapiens
  misc_RNA (1)...(19): siRNA sense strand
guggaucucuccguaaugg

SEQ ID NO: 1117081 - RNA, 19 nt, Homo sapiens
  misc_RNA (1)...(19): siRNA sense strand
uuaaugaugggagaagaua

SEQ ID NO: 1117082 - RNA, 19 nt, Homo sapiens
  misc_RNA (1)...(19): siRNA sense strand
cguuaucuaugacaugaau

SEQ ID NO: 1117083 - RNA, 19 nt, Homo sapiens
  misc_RNA (1)...(19): siRNA sense strand
caggaaagacaacagacaa

SEQ ID NO: 1117084 - RNA, 19 nt, Homo sapiens
  misc_RNA (1)...(19): siRNA sense strand
caaaggcgagggcgaucuu

SEQ ID NO: 1117085 - RNA, 19 nt, Homo sapiens
  misc_RNA (1)...(19): siRNA sense strand
cagcgacuuggcaauauuu

SEQ ID NO: 1117086 - RNA, 19 nt, Homo sapiens
  misc_RNA (1)...(19): siRNA sense strand
caagaguaccaaagugcaa

SEQ ID NO: 1117087 - RNA, 19 nt, Homo sapiens
  misc_RNA (1)...(19): siRNA sense strand
gaguccacgagaucauuua

SEQ ID NO: 1117088 - RNA, 19 nt, Homo sapiens
  misc_RNA (1)...(19): siRNA sense strand
ucacuacuguugacuucuc

SEQ ID NO: 1117089 - RNA, 19 nt, Homo sapiens
  misc_RNA (1)...(19): siRNA sense strand
ucauaaugccaucagguuu

SEQ ID NO: 1117090 - RNA, 19 nt, Homo sapiens
  misc_RNA (1)...(19): siRNA sense strand
ugucaguacugucgguuuc

SEQ ID NO: 1117091 - RNA, 19 nt, Homo sapiens
  misc_RNA (1)...(19): siRNA sense strand
caaaguggagccugcaucu

SEQ ID NO: 1117092 - RNA, 19 nt, Homo sapiens
  misc_RNA (1)...(19): siRNA sense strand
cuauggaguucaugcuugu

SEQ ID NO: 1117093 - RNA, 19 nt, Homo sapiens
  misc_RNA (1)...(19): siRNA sense strand
augcuggccuccuugauga

SEQ ID NO: 1117094 - RNA, 19 nt, Homo sapiens
  misc_RNA (1)...(19): siRNA sense strand
gggcgaucuugacaggaaa

SEQ ID NO: 1117095 - RNA, 19 nt, Homo sapiens
  misc_RNA (1)...(19): siRNA sense strand
gauugaagcuuaucuauga

SEQ ID NO: 1117096 - RNA, 19 nt, Homo sapiens
  misc_RNA (1)...(19): siRNA sense strand
agacucagcucuacaauaa

SEQ ID NO: 1117097 - RNA, 19 nt, Homo sapiens
  misc_RNA (1)...(19): siRNA sense strand
ccaaguaacucuccucaaa

SEQ ID NO: 1117098 - RNA, 19 nt, Homo sapiens
  misc_RNA (1)...(19): siRNA sense strand
agauaaagcuucuggauuu

SEQ ID NO: 1117099 - RNA, 19 nt, Homo sapiens
  misc_RNA (1)...(19): siRNA sense strand
gacaugaauuccuuaauga

SEQ ID NO: 1117100 - RNA, 19 nt, Homo sapiens
  misc_RNA (1)...(19): siRNA sense strand
gaaguucaaugcacuggaa

SEQ ID NO: 1117101 - RNA, 19 nt, Homo sapiens
  misc_RNA (1)...(19): siRNA sense strand
guaccaaagugcaaucaaa

SEQ ID NO: 1117102 - RNA, 19 nt, Homo sapiens
  misc_RNA (1)...(19): siRNA sense strand
ugacaugaauuccuuaaug

SEQ ID NO: 1117103 - RNA, 19 nt, Homo sapiens
  misc_RNA (1)...(19): siRNA sense strand
aaguaacucuccucaaaua

SEQ ID NO: 1117104 - RNA, 19 nt, Homo sapiens
  misc_RNA (1)...(19): siRNA sense strand
ucaaugcacuggaauuaga

SEQ ID NO: 1117105 - RNA, 19 nt, Homo sapiens
  misc_RNA (1)...(19): siRNA sense strand
gcauuucuacuccacauua

SEQ ID NO: 1117106 - RNA, 19 nt, Homo sapiens
  misc_RNA (1)...(19): siRNA sense strand
gacauuccauucacaagaa

SEQ ID NO: 1117107 - RNA, 19 nt, Homo sapiens
  misc_RNA (1)...(19): siRNA sense strand
uuacaaguaugaccugaaa

SEQ ID NO: 1117108 - RNA, 19 nt, Homo sapiens
  misc_RNA (1)...(19): siRNA sense strand
ggccaaggcuucaugacaa

SEQ ID NO: 1117109 - RNA, 19 nt, Homo sapiens
  misc_RNA (1)...(19): siRNA sense strand
gcaauugaaugucgugucu

SEQ ID NO: 1117110 - RNA, 19 nt, Homo sapiens
  misc_RNA (1)...(19): siRNA sense strand
acaauaagccucaugaaga

SEQ ID NO: 1117111 - RNA, 19 nt, Homo sapiens
  misc_RNA (1)...(19): siRNA sense strand
caagggaguuucuaaagag

SEQ ID NO: 1117112 - RNA, 19 nt, Homo sapiens
  misc_RNA (1)...(19): siRNA sense strand
caauaagccucaugaagag

SEQ ID NO: 1117113 - RNA, 19 nt, Homo sapiens
  misc_RNA (1)...(19): siRNA sense strand
gagauaaagcuucuggauu

SEQ ID NO: 1117114 - RNA, 19 nt, Homo sapiens
  misc_RNA (1)...(19): siRNA sense strand
acaagggaguuucuaaaga

SEQ ID NO: 1117115 - RNA, 19 nt, Homo sapiens
  misc_RNA (1)...(19): siRNA sense strand
gaaauaaaugucaguacug

SEQ ID NO: 1117116 - RNA, 19 nt, Homo sapiens
  misc_RNA (1)...(19): siRNA sense strand
gaucacagaguaugccaaa

SEQ ID NO: 1117117 - RNA, 19 nt, Homo sapiens
  misc_RNA (1)...(19): siRNA sense strand
gaaagacaacagacaaauc

SEQ ID NO: 1117118 - RNA, 19 nt, Homo sapiens
  misc_RNA (1)...(19): siRNA sense strand
ugacagaccucagacagau

SEQ ID NO: 1117119 - RNA, 19 nt, Homo sapiens
  misc_RNA (1)...(19): siRNA sense strand
aagaacagauccagugguu

SEQ ID NO: 1117120 - RNA, 19 nt, Homo sapiens
  misc_RNA (1)...(19): siRNA sense strand
gaaaugaccaugguugaca

SEQ ID NO: 1117121 - RNA, 19 nt, Homo sapiens
  misc_RNA (1)...(19): siRNA sense strand
gguugcagauuacaaguau

SEQ ID NO: 1117122 - RNA, 19 nt, Homo sapiens
  misc_RNA (1)...(19): siRNA sense strand
gacaaaucaccauucguua

SEQ ID NO: 1117123 - RNA, 19 nt, Homo sapiens
  misc_RNA (1)...(19): siRNA sense strand
gcacuggaauuagaugaca

SEQ ID NO: 1117124 - RNA, 19 nt, Homo sapiens
  misc_RNA (1)...(19): siRNA sense strand
guucaaugcacuggaauua

SEQ ID NO: 1117125 - RNA, 19 nt, Homo sapiens
  misc_RNA (1)...(19): siRNA sense strand
caccauucguuaucuauga

SEQ ID NO: 1117126 - RNA, 19 nt, Homo sapiens
  misc_RNA (1)...(19): siRNA sense strand
gaagacauuccauucacaa

SEQ ID NO: 1117127 - RNA, 19 nt, Homo sapiens
  misc_RNA (1)...(19): siRNA sense strand
gaagcccauugaagacauu

SEQ ID NO: 1117128 - RNA, 19 nt, Homo sapiens
  misc_RNA (1)...(19): siRNA sense strand
ugcaggagaucacagagua

SEQ ID NO: 1117129 - RNA, 19 nt, Homo sapiens
  misc_RNA (1)...(19): siRNA sense strand
gauaaagcuucuggauuuc

SEQ ID NO: 1117130 - RNA, 19 nt, Homo sapiens
  misc_RNA (1)...(19): siRNA sense strand
caacagacaaaucaccauu

SEQ ID NO: 1117131 - RNA, 19 nt, Homo sapiens
  misc_RNA (1)...(19): siRNA sense strand
ucaagaagacggagacaga

SEQ ID NO: 1117132 - RNA, 19 nt, Homo sapiens
  misc_RNA (1)...(19): siRNA sense strand
ugacagcgacuuggcaaua

SEQ ID NO: 1117133 - RNA, 19 nt, Homo sapiens
  misc_RNA (1)...(19): siRNA sense strand
agacaaaucaccauucguu

SEQ ID NO: 1117134 - RNA, 19 nt, Homo sapiens
  misc_RNA (1)...(19): siRNA sense strand
ggaaagacaacagacaaau

SEQ ID NO: 1117135 - RNA, 19 nt, Homo sapiens
  misc_RNA (1)...(19): siRNA sense strand
acacaaugcuggccuccuu

SEQ ID NO: 1117136 - RNA, 19 nt, Homo sapiens
  misc_RNA (1)...(19): siRNA sense strand
uaacucuccucaaauaugg

SEQ ID NO: 1117137 - RNA, 19 nt, Homo sapiens
  misc_RNA (1)...(19): siRNA sense strand
gauaucaagcccuucacua

SEQ ID NO: 1117138 - RNA, 19 nt, Homo sapiens
  misc_RNA (1)...(19): siRNA sense strand
aaagacaacagacaaauca

SEQ ID NO: 1117139 - RNA, 19 nt, Homo sapiens
  misc_RNA (1)...(19): siRNA sense strand
ggagauaaagcuucuggau

SEQ ID NO: 1117140 - RNA, 19 nt, Homo sapiens
  misc_RNA (1)...(19): siRNA sense strand
gacagcgacuuggcaauau

SEQ ID NO: 1117141 - RNA, 19 nt, Homo sapiens
  misc_RNA (1)...(19): siRNA sense strand
guaacucuccucaaauaug

SEQ ID NO: 1117142 - RNA, 19 nt, Homo sapiens
  misc_RNA (1)...(19): siRNA sense strand
guugacuucuccagcauuu

SEQ ID NO: 1117143 - RNA, 19 nt, Homo sapiens
  misc_RNA (1)...(19): siRNA sense strand
caagacaaccugcuacaag

SEQ ID NO: 1117144 - RNA, 19 nt, Homo sapiens
  misc_RNA (1)...(19): siRNA sense strand
ugucgugucuguggagaua

SEQ ID NO: 1117145 - RNA, 19 nt, Homo sapiens
  misc_RNA (1)...(19): siRNA sense strand
caaaucaccauucguuauc

SEQ ID NO: 1117146 - RNA, 19 nt, Homo sapiens
  misc_RNA (1)...(19): siRNA sense strand
ccaacucccucauggcaau

SEQ ID NO: 1117147 - RNA, 19 nt, Homo sapiens
  misc_RNA (1)...(19): siRNA sense strand
gaaaaugacagaccucaga

SEQ ID NO: 1117148 - RNA, 19 nt, Homo sapiens
  misc_RNA (1)...(19): siRNA sense strand
cuaaagagccugcgaaagc

SEQ ID NO: 1117149 - RNA, 19 nt, Homo sapiens
  misc_RNA (1)...(19): siRNA sense strand
ugacaagggaguuucuaaa

SEQ ID NO: 1117150 - RNA, 19 nt, Homo sapiens
  misc_RNA (1)...(19): siRNA sense strand
ccaaaagcauuccugguuu

SEQ ID NO: 1117151 - RNA, 19 nt, Homo sapiens
  misc_RNA (1)...(19): siRNA sense strand
ggauuucacuauggaguuc

SEQ ID NO: 1117152 - RNA, 19 nt, Homo sapiens
  misc_RNA (1)...(19): siRNA sense strand
cagguuugcugaaugugaa

SEQ ID NO: 1117153 - RNA, 19 nt, Homo sapiens
  misc_RNA (1)...(19): siRNA sense strand
ucuaugacaugaauuccuu

SEQ ID NO: 1117154 - RNA, 19 nt, Homo sapiens
  misc_RNA (1)...(19): siRNA sense strand
cgaagacauuccauucaca

SEQ ID NO: 1117155 - RNA, 19 nt, Homo sapiens
  misc_RNA (1)...(19): siRNA sense strand
gcccagguuugcugaaugu

SEQ ID NO: 1117156 - RNA, 19 nt, Homo sapiens
  misc_RNA (1)...(19): siRNA sense strand
uuauggagcccaaguuuga

SEQ ID NO: 1117157 - RNA, 19 nt, Homo sapiens
  misc_RNA (1)...(19): siRNA sense strand
ugcaggagaucuacaagga

SEQ ID NO: 1117158 - RNA, 19 nt, Homo sapiens
  misc_RNA (1)...(19): siRNA sense strand
cauaaugccaucagguuug

SEQ ID NO: 1117159 - RNA, 19 nt, Homo sapiens
  misc_RNA (1)...(19): siRNA sense strand
gacaagggaguuucuaaag

SEQ ID NO: 1117160 - RNA, 19 nt, Homo sapiens
  misc_RNA (1)...(19): siRNA sense strand
ggaguccacgagaucauuu

SEQ ID NO: 1117161 - RNA, 19 nt, Homo sapiens
  misc_RNA (1)...(19): siRNA sense strand
caaguaacucuccucaaau

SEQ ID NO: 1117162 - RNA, 19 nt, Homo sapiens
  misc_RNA (1)...(19): siRNA sense strand
acaaaucaccauucguuau

SEQ ID NO: 1117163 - RNA, 19 nt, Homo sapiens
  misc_RNA (1)...(19): siRNA sense strand
gaagacggagacagacaug

SEQ ID NO: 1117164 - RNA, 19 nt, Homo sapiens
  misc_RNA (1)...(19): siRNA sense strand
uugccaagcugcuccagaa

SEQ ID NO: 1117165 - RNA, 19 nt, Homo sapiens
  misc_RNA (1)...(19): siRNA sense strand
ugaguuugcugugaaguuc

SEQ ID NO: 1117166 - RNA, 19 nt, Homo sapiens
  misc_RNA (1)...(19): siRNA sense strand
ccuccuugaugaauaaaga

SEQ ID NO: 1117167 - RNA, 19 nt, Homo sapiens
  misc_RNA (1)...(19): siRNA sense strand
uuucagggcugccaguuuc

SEQ ID NO: 1117168 - RNA, 19 nt, Homo sapiens
  misc_RNA (1)...(19): siRNA sense strand
ccaaagugcaaucaaagug

SEQ ID NO: 1117169 - RNA, 19 nt, Homo sapiens
  misc_RNA (1)...(19): siRNA sense strand
gagcccaaguuugaguuug

SEQ ID NO: 1117170 - RNA, 19 nt, Homo sapiens
  misc_RNA (1)...(19): siRNA sense strand
ugaccaugguugacacaga

SEQ ID NO: 1117171 - RNA, 19 nt, Homo sapiens
  misc_RNA (1)...(19): siRNA sense strand
auccagugguugcagauua

SEQ ID NO: 1117172 - RNA, 19 nt, Homo sapiens
  misc_RNA (1)...(19): siRNA sense strand
ggaucucuccguaauggaa

SEQ ID NO: 1117173 - RNA, 19 nt, Homo sapiens
  misc_RNA (1)...(19): siRNA sense strand
acucauacauaaaguccuu

SEQ ID NO: 1117174 - RNA, 19 nt, Homo sapiens
  misc_RNA (1)...(19): siRNA sense strand
uggccuccuugaugaauaa

SEQ ID NO: 1117175 - RNA, 19 nt, Homo sapiens
  misc_RNA (1)...(19): siRNA sense strand
caugaauuccuuaaugaug

SEQ ID NO: 1117176 - RNA, 19 nt, Homo sapiens
  misc_RNA (1)...(19): siRNA sense strand
ccucauggcaauugaaugu

SEQ ID NO: 1117177 - RNA, 19 nt, Homo sapiens
  misc_RNA (1)...(19): siRNA sense strand
guggagaccgcccagguuu

SEQ ID NO: 1117178 - RNA, 19 nt, Homo sapiens
  misc_RNA (1)...(19): siRNA sense strand
acagcgacuuggcaauauu

SEQ ID NO: 1117179 - RNA, 19 nt, Homo sapiens
  misc_RNA (1)...(19): siRNA sense strand
uuacgaagacauuccauuc

SEQ ID NO: 1117180 - RNA, 19 nt, Homo sapiens
  misc_RNA (1)...(19): siRNA sense strand
aaucaccauucguuaucua

SEQ ID NO: 1117181 - RNA, 19 nt, Homo sapiens
  misc_RNA (1)...(19): siRNA sense strand
guggaucucuccguaaugg

SEQ ID NO: 1117182 - RNA, 19 nt, Homo sapiens
  misc_RNA (1)...(19): siRNA sense strand
uuaaugaugggagaagaua

SEQ ID NO: 1117183 - RNA, 19 nt, Homo sapiens
  misc_RNA (1)...(19): siRNA sense strand
cguuaucuaugacaugaau

SEQ ID NO: 1117184 - RNA, 19 nt, Homo sapiens
  misc_RNA (1)...(19): siRNA sense strand
caggaaagacaacagacaa

SEQ ID NO: 1117185 - RNA, 19 nt, Homo sapiens
  misc_RNA (1)...(19): siRNA sense strand
ugacaggaaagacaacaga

SEQ ID NO: 1117186 - RNA, 19 nt, Homo sapiens
  misc_RNA (1)...(19): siRNA sense strand
caaaggcgagggcgaucuu

SEQ ID NO: 1117187 - RNA, 19 nt, Homo sapiens
  misc_RNA (1)...(19): siRNA sense strand
cagcgacuuggcaauauuu

SEQ ID NO: 1117188 - RNA, 19 nt, Homo sapiens
  misc_RNA (1)...(19): siRNA sense strand
caagaguaccaaagugcaa

SEQ ID NO: 1117189 - RNA, 19 nt, Homo sapiens
  misc_RNA (1)...(19): siRNA sense strand
gaguccacgagaucauuua

SEQ ID NO: 1117190 - RNA, 19 nt, Homo sapiens
  misc_RNA (1)...(19): siRNA sense strand
ucacuacuguugacuucuc

SEQ ID NO: 1117191 - RNA, 19 nt, Homo sapiens
  misc_RNA (1)...(19): siRNA sense strand
ucauaaugccaucagguuu

SEQ ID NO: 1117192 - RNA, 19 nt, Homo sapiens
  misc_RNA (1)...(19): siRNA sense strand
ugucaguacugucgguuuc

SEQ ID NO: 1117193 - RNA, 19 nt, Homo sapiens
  misc_RNA (1)...(19): siRNA sense strand
caaaguggagccugcaucu

SEQ ID NO: 1117194 - RNA, 19 nt, Homo sapiens
  misc_RNA (1)...(19): siRNA sense strand
augcuggccuccuugauga

SEQ ID NO: 1117195 - RNA, 19 nt, Homo sapiens
  misc_RNA (1)...(19): siRNA sense strand
gauugaagcuuaucuauga

SEQ ID NO: 1117196 - RNA, 19 nt, Homo sapiens
  misc_RNA (1)...(19): siRNA sense strand
agacucagcucuacaauaa

SEQ ID NO: 1117197 - RNA, 19 nt, Homo sapiens
  misc_RNA (1)...(19): siRNA sense strand
ccaaguaacucuccucaaa

SEQ ID NO: 1117198 - RNA, 19 nt, Homo sapiens
  misc_RNA (1)...(19): siRNA sense strand
agauaaagcuucuggauuu

SEQ ID NO: 1117199 - RNA, 19 nt, Homo sapiens
  misc_RNA (1)...(19): siRNA sense strand
gacaugaauuccuuaauga

SEQ ID NO: 1117200 - RNA, 19 nt, Homo sapiens
  misc_RNA (1)...(19): siRNA sense strand
gaaguucaaugcacuggaa

SEQ ID NO: 1117201 - RNA, 19 nt, Homo sapiens
  misc_RNA (1)...(19): siRNA sense strand
guaccaaagugcaaucaaa

SEQ ID NO: 1117202 - RNA, 19 nt, Homo sapiens
  misc_RNA (1)...(19): siRNA sense strand
ugacaugaauuccuuaaug

SEQ ID NO: 1117203 - RNA, 19 nt, Homo sapiens
  misc_RNA (1)...(19): siRNA sense strand
aaguaacucuccucaaaua

SEQ ID NO: 1117204 - RNA, 19 nt, Homo sapiens
  misc_RNA (1)...(19): siRNA sense strand
ucaaugcacuggaauuaga

SEQ ID NO: 1117205 - RNA, 19 nt, Homo sapiens
  misc_RNA (1)...(19): siRNA sense strand
gcauuucuacuccacauua

SEQ ID NO: 1117206 - RNA, 19 nt, Homo sapiens
  misc_RNA (1)...(19): siRNA sense strand
gacauuccauucacaagaa

SEQ ID NO: 1117207 - RNA, 19 nt, Homo sapiens
  misc_RNA (1)...(19): siRNA sense strand
uuacaaguaugaccugaaa

SEQ ID NO: 1117208 - RNA, 19 nt, Homo sapiens
  misc_RNA (1)...(19): siRNA sense strand
ggccaaggcuucaugacaa

SEQ ID NO: 1117209 - RNA, 19 nt, Homo sapiens
  misc_RNA (1)...(19): siRNA sense strand
gcaauugaaugucgugucu

SEQ ID NO: 1117210 - RNA, 19 nt, Homo sapiens
  misc_RNA (1)...(19): siRNA sense strand
acaauaagccucaugaaga

SEQ ID NO: 1117211 - RNA, 19 nt, Homo sapiens
  misc_RNA (1)...(19): siRNA sense strand
caagggaguuucuaaagag

SEQ ID NO: 1117212 - RNA, 19 nt, Homo sapiens
  misc_RNA (1)...(19): siRNA sense strand
caauaagccucaugaagag

SEQ ID NO: 1117213 - RNA, 19 nt, Homo sapiens
  misc_RNA (1)...(19): siRNA sense strand
gagauaaagcuucuggauu

SEQ ID NO: 1117214 - RNA, 19 nt, Homo sapiens
  misc_RNA (1)...(19): siRNA sense strand
acaagggaguuucuaaaga

SEQ ID NO: 1117215 - RNA, 19 nt, Homo sapiens
  misc_RNA (1)...(19): siRNA sense strand
gaaauaaaugucaguacug

SEQ ID NO: 1117216 - RNA, 19 nt, Homo sapiens
  misc_RNA (1)...(19): siRNA sense strand
gaucacagaguaugccaaa

SEQ ID NO: 1117217 - RNA, 19 nt, Homo sapiens
  misc_RNA (1)...(19): siRNA sense strand
gaaagacaacagacaaauc

SEQ ID NO: 1117218 - RNA, 19 nt, Homo sapiens
  misc_RNA (1)...(19): siRNA sense strand
ugacagaccucagacagau

SEQ ID NO: 1117219 - RNA, 19 nt, Homo sapiens
  misc_RNA (1)...(19): siRNA sense strand
aagaacagauccagugguu

SEQ ID NO: 1117220 - RNA, 19 nt, Homo sapiens
  misc_RNA (1)...(19): siRNA sense strand
gguugcagauuacaaguau

SEQ ID NO: 1117221 - RNA, 19 nt, Homo sapiens
  misc_RNA (1)...(19): siRNA sense strand
gacaaaucaccauucguua

SEQ ID NO: 1117222 - RNA, 19 nt, Homo sapiens
  misc_RNA (1)...(19): siRNA sense strand
gcacuggaauuagaugaca

SEQ ID NO: 1117223 - RNA, 19 nt, Homo sapiens
  misc_RNA (1)...(19): siRNA sense strand
guucaaugcacuggaauua

SEQ ID NO: 1117224 - RNA, 19 nt, Homo sapiens
  misc_RNA (1)...(19): siRNA sense strand
caccauucguuaucuauga

SEQ ID NO: 1117225 - RNA, 19 nt, Homo sapiens
  misc_RNA (1)...(19): siRNA sense strand
gaagacauuccauucacaa

SEQ ID NO: 1117226 - RNA, 19 nt, Homo sapiens
  misc_RNA (1)...(19): siRNA sense strand
gaagcccauugaagacauu

SEQ ID NO: 1117227 - RNA, 19 nt, Homo sapiens
  misc_RNA (1)...(19): siRNA sense strand
ugcaggagaucacagagua

SEQ ID NO: 1117228 - RNA, 19 nt, Homo sapiens
  misc_RNA (1)...(19): siRNA sense strand
gauaaagcuucuggauuuc

SEQ ID NO: 1117229 - RNA, 19 nt, Homo sapiens
  misc_RNA (1)...(19): siRNA sense strand
caacagacaaaucaccauu

SEQ ID NO: 1117230 - RNA, 19 nt, Homo sapiens
  misc_RNA (1)...(19): siRNA sense strand
ucaagaagacggagacaga

SEQ ID NO: 1117231 - RNA, 19 nt, Homo sapiens
  misc_RNA (1)...(19): siRNA sense strand
ugacagcgacuuggcaaua

SEQ ID NO: 1117232 - RNA, 19 nt, Homo sapiens
  misc_RNA (1)...(19): siRNA sense strand
agacaaaucaccauucguu

SEQ ID NO: 1117233 - RNA, 19 nt, Homo sapiens
  misc_RNA (1)...(19): siRNA sense strand
ggaaagacaacagacaaau

SEQ ID NO: 1117234 - RNA, 19 nt, Homo sapiens
  misc_RNA (1)...(19): siRNA sense strand
gauaucaagcccuucacua

SEQ ID NO: 1117235 - RNA, 19 nt, Homo sapiens
  misc_RNA (1)...(19): siRNA sense strand
acacaaugcuggccuccuu

SEQ ID NO: 1117236 - RNA, 19 nt, Homo sapiens
  misc_RNA (1)...(19): siRNA sense strand
uaacucuccucaaauaugg

SEQ ID NO: 1117237 - RNA, 19 nt, Homo sapiens
  misc_RNA (1)...(19): siRNA sense strand
aaagacaacagacaaauca

SEQ ID NO: 1117238 - RNA, 19 nt, Homo sapiens
  misc_RNA (1)...(19): siRNA sense strand
ggagauaaagcuucuggau

SEQ ID NO: 1117239 - RNA, 19 nt, Homo sapiens
  misc_RNA (1)...(19): siRNA sense strand
gacagcgacuuggcaauau

SEQ ID NO: 1117240 - RNA, 19 nt, Homo sapiens
  misc_RNA (1)...(19): siRNA sense strand
guugacuucuccagcauuu

SEQ ID NO: 1117241 - RNA, 19 nt, Homo sapiens
  misc_RNA (1)...(19): siRNA sense strand
guaacucuccucaaauaug

SEQ ID NO: 1117242 - RNA, 19 nt, Homo sapiens
  misc_RNA (1)...(19): siRNA sense strand
caagacaaccugcuacaag

SEQ ID NO: 1117243 - RNA, 19 nt, Homo sapiens
  misc_RNA (1)...(19): siRNA sense strand
ugucgugucuguggagaua

SEQ ID NO: 1117244 - RNA, 19 nt, Homo sapiens
  misc_RNA (1)...(19): siRNA sense strand
caaaucaccauucguuauc

SEQ ID NO: 1117245 - RNA, 19 nt, Homo sapiens
  misc_RNA (1)...(19): siRNA sense strand
ccaacucccucauggcaau

SEQ ID NO: 1117246 - RNA, 19 nt, Homo sapiens
  misc_RNA (1)...(19): siRNA sense strand
gaaaaugacagaccucaga

SEQ ID NO: 1117247 - RNA, 19 nt, Homo sapiens
  misc_RNA (1)...(19): siRNA sense strand
cuaaagagccugcgaaagc

SEQ ID NO: 1117248 - RNA, 19 nt, Homo sapiens
  misc_RNA (1)...(19): siRNA sense strand
ugacaagggaguuucuaaa

SEQ ID NO: 1117249 - RNA, 19 nt, Homo sapiens
  misc_RNA (1)...(19): siRNA sense strand
ccaaaagcauuccugguuu

SEQ ID NO: 1117250 - RNA, 19 nt, Homo sapiens
  misc_RNA (1)...(19): siRNA sense strand
ggauuucacuauggaguuc

SEQ ID NO: 1117251 - RNA, 19 nt, Homo sapiens
  misc_RNA (1)...(19): siRNA sense strand
cagguuugcugaaugugaa

SEQ ID NO: 1117252 - RNA, 19 nt, Homo sapiens
  misc_RNA (1)...(19): siRNA sense strand
ucuaugacaugaauuccuu

SEQ ID NO: 1117253 - RNA, 19 nt, Homo sapiens
  misc_RNA (1)...(19): siRNA sense strand
cgaagacauuccauucaca

SEQ ID NO: 1117254 - RNA, 19 nt, Homo sapiens
  misc_RNA (1)...(19): siRNA sense strand
gcccagguuugcugaaugu

SEQ ID NO: 1117255 - RNA, 19 nt, Homo sapiens
  misc_RNA (1)...(19): siRNA sense strand
uuauggagcccaaguuuga

SEQ ID NO: 1117256 - RNA, 19 nt, Homo sapiens
  misc_RNA (1)...(19): siRNA sense strand
ugcaggagaucuacaagga

SEQ ID NO: 1117257 - RNA, 19 nt, Homo sapiens
  misc_RNA (1)...(19): siRNA sense strand
cauaaugccaucagguuug

SEQ ID NO: 1117258 - RNA, 19 nt, Homo sapiens
  misc_RNA (1)...(19): siRNA sense strand
gacaagggaguuucuaaag

SEQ ID NO: 1117259 - RNA, 19 nt, Homo sapiens
  misc_RNA (1)...(19): siRNA sense strand
ggaguccacgagaucauuu

SEQ ID NO: 1117260 - RNA, 19 nt, Homo sapiens
  misc_RNA (1)...(19): siRNA sense strand
caaguaacucuccucaaau

SEQ ID NO: 1117261 - RNA, 19 nt, Homo sapiens
  misc_RNA (1)...(19): siRNA sense strand
acaaaucaccauucguuau

SEQ ID NO: 1117262 - RNA, 19 nt, Homo sapiens
  misc_RNA (1)...(19): siRNA sense strand
gaagacggagacagacaug

SEQ ID NO: 1117263 - RNA, 19 nt, Homo sapiens
  misc_RNA (1)...(19): siRNA sense strand
uugccaagcugcuccagaa

SEQ ID NO: 1117264 - RNA, 19 nt, Homo sapiens
  misc_RNA (1)...(19): siRNA sense strand
ugaguuugcugugaaguuc

SEQ ID NO: 1117265 - RNA, 19 nt, Homo sapiens
  misc_RNA (1)...(19): siRNA sense strand
ccuccuugaugaauaaaga

SEQ ID NO: 1117266 - RNA, 19 nt, Homo sapiens
  misc_RNA (1)...(19): siRNA sense strand
uuucagggcugccaguuuc

SEQ ID NO: 1117267 - RNA, 19 nt, Homo sapiens
  misc_RNA (1)...(19): siRNA sense strand
ccaaagugcaaucaaagug

SEQ ID NO: 1117268 - RNA, 19 nt, Homo sapiens
  misc_RNA (1)...(19): siRNA sense strand
gagcccaaguuugaguuug

SEQ ID NO: 1117269 - RNA, 19 nt, Homo sapiens
  misc_RNA (1)...(19): siRNA sense strand
auccagugguugcagauua

SEQ ID NO: 1117270 - RNA, 19 nt, Homo sapiens
  misc_RNA (1)...(19): siRNA sense strand
ggaucucuccguaauggaa

SEQ ID NO: 1117271 - RNA, 19 nt, Homo sapiens
  misc_RNA (1)...(19): siRNA sense strand
acucauacauaaaguccuu

SEQ ID NO: 1117272 - RNA, 19 nt, Homo sapiens
  misc_RNA (1)...(19): siRNA sense strand
uggccuccuugaugaauaa

SEQ ID NO: 1117273 - RNA, 19 nt, Homo sapiens
  misc_RNA (1)...(19): siRNA sense strand
caugaauuccuuaaugaug

SEQ ID NO: 1117274 - RNA, 19 nt, Homo sapiens
  misc_RNA (1)...(19): siRNA sense strand
ccucauggcaauugaaugu

SEQ ID NO: 1117275 - RNA, 19 nt, Homo sapiens
  misc_RNA (1)...(19): siRNA sense strand
guggagaccgcccagguuu

SEQ ID NO: 1117276 - RNA, 19 nt, Homo sapiens
  misc_RNA (1)...(19): siRNA sense strand
acagcgacuuggcaauauu

SEQ ID NO: 1117277 - RNA, 19 nt, Homo sapiens
  misc_RNA (1)...(19): siRNA sense strand
uuacgaagacauuccauuc

SEQ ID NO: 1117278 - RNA, 19 nt, Homo sapiens
  misc_RNA (1)...(19): siRNA sense strand
aaucaccauucguuaucua

SEQ ID NO: 1117279 - RNA, 19 nt, Homo sapiens
  misc_RNA (1)...(19): siRNA sense strand
ugacaggaaagacaacaga

SEQ ID NO: 1117280 - RNA, 19 nt, Homo sapiens
  misc_RNA (1)...(19): siRNA sense strand
guggaucucuccguaaugg

SEQ ID NO: 1117281 - RNA, 19 nt, Homo sapiens
  misc_RNA (1)...(19): siRNA sense strand
uuaaugaugggagaagaua

SEQ ID NO: 1117282 - RNA, 19 nt, Homo sapiens
  misc_RNA (1)...(19): siRNA sense strand
cguuaucuaugacaugaau

SEQ ID NO: 1117283 - RNA, 19 nt, Homo sapiens
  misc_RNA (1)...(19): siRNA sense strand
caggaaagacaacagacaa

SEQ ID NO: 1117284 - RNA, 19 nt, Homo sapiens
  misc_RNA (1)...(19): siRNA sense strand
caaaggcgagggcgaucuu

SEQ ID NO: 1117285 - RNA, 19 nt, Homo sapiens
  misc_RNA (1)...(19): siRNA sense strand
cagcgacuuggcaauauuu

SEQ ID NO: 1117286 - RNA, 19 nt, Homo sapiens
  misc_RNA (1)...(19): siRNA sense strand
caagaguaccaaagugcaa

SEQ ID NO: 1117287 - RNA, 19 nt, Homo sapiens
  misc_RNA (1)...(19): siRNA sense strand
gaguccacgagaucauuua

SEQ ID NO: 1117288 - RNA, 19 nt, Homo sapiens
  misc_RNA (1)...(19): siRNA sense strand
ucacuacuguugacuucuc

SEQ ID NO: 1117289 - RNA, 19 nt, Homo sapiens
  misc_RNA (1)...(19): siRNA sense strand
ucauaaugccaucagguuu

SEQ ID NO: 1117290 - RNA, 19 nt, Homo sapiens
  misc_RNA (1)...(19): siRNA sense strand
ugucaguacugucgguuuc

SEQ ID NO: 1117291 - RNA, 19 nt, Homo sapiens
  misc_RNA (1)...(19): siRNA sense strand
caaaguggagccugcaucu

SEQ ID NO: 1117292 - RNA, 19 nt, Homo sapiens
  misc_RNA (1)...(19): siRNA sense strand
cuauggaguucaugcuugu

SEQ ID NO: 1117293 - RNA, 19 nt, Homo sapiens
  misc_RNA (1)...(19): siRNA sense strand
augcuggccuccuugauga

SEQ ID NO: 1117294 - RNA, 19 nt, Homo sapiens
  misc_RNA (1)...(19): siRNA sense strand
gggcgaucuugacaggaaa

SEQ ID NO: 1117295 - RNA, 19 nt, Homo sapiens
  misc_RNA (1)...(19): siRNA sense strand
gauugaagcuuaucuauga

SEQ ID NO: 1117296 - RNA, 19 nt, Homo sapiens
  misc_RNA (1)...(19): siRNA sense strand
agacucagcucuacaauaa

SEQ ID NO: 1117297 - RNA, 19 nt, Homo sapiens
  misc_RNA (1)...(19): siRNA sense strand
ccaaguaacucuccucaaa

SEQ ID NO: 1117298 - RNA, 19 nt, Homo sapiens
  misc_RNA (1)...(19): siRNA sense strand
agauaaagcuucuggauuu

SEQ ID NO: 1117299 - RNA, 19 nt, Homo sapiens
  misc_RNA (1)...(19): siRNA sense strand
gacaugaauuccuuaauga

SEQ ID NO: 1117300 - RNA, 19 nt, Homo sapiens
  misc_RNA (1)...(19): siRNA sense strand
gaaguucaaugcacuggaa

SEQ ID NO: 1117301 - RNA, 19 nt, Homo sapiens
  misc_RNA (1)...(19): siRNA sense strand
guaccaaagugcaaucaaa

SEQ ID NO: 1117302 - RNA, 19 nt, Homo sapiens
  misc_RNA (1)...(19): siRNA sense strand
ugacaugaauuccuuaaug

SEQ ID NO: 1117303 - RNA, 19 nt, Homo sapiens
  misc_RNA (1)...(19): siRNA sense strand
aaguaacucuccucaaaua

SEQ ID NO: 1117304 - RNA, 19 nt, Homo sapiens
  misc_RNA (1)...(19): siRNA sense strand
ucaaugcacuggaauuaga

SEQ ID NO: 1117305 - RNA, 19 nt, Homo sapiens
  misc_RNA (1)...(19): siRNA sense strand
gcauuucuacuccacauua

SEQ ID NO: 1117306 - RNA, 19 nt, Homo sapiens
  misc_RNA (1)...(19): siRNA sense strand
gacauuccauucacaagaa

SEQ ID NO: 1117307 - RNA, 19 nt, Homo sapiens
  misc_RNA (1)...(19): siRNA sense strand
uuacaaguaugaccugaaa

SEQ ID NO: 1117308 - RNA, 19 nt, Homo sapiens
  misc_RNA (1)...(19): siRNA sense strand
ggccaaggcuucaugacaa

SEQ ID NO: 1117309 - RNA, 19 nt, Homo sapiens
  misc_RNA (1)...(19): siRNA sense strand
gcaauugaaugucgugucu

SEQ ID NO: 1117310 - RNA, 19 nt, Homo sapiens
  misc_RNA (1)...(19): siRNA sense strand
acaauaagccucaugaaga

SEQ ID NO: 1117311 - RNA, 19 nt, Homo sapiens
  misc_RNA (1)...(19): siRNA sense strand
caagggaguuucuaaagag

SEQ ID NO: 1117312 - RNA, 19 nt, Homo sapiens
  misc_RNA (1)...(19): siRNA sense strand
caauaagccucaugaagag

SEQ ID NO: 1117313 - RNA, 19 nt, Homo sapiens
  misc_RNA (1)...(19): siRNA sense strand
gagauaaagcuucuggauu

SEQ ID NO: 1117314 - RNA, 19 nt, Homo sapiens
  misc_RNA (1)...(19): siRNA sense strand
acaagggaguuucuaaaga

SEQ ID NO: 1117315 - RNA, 19 nt, Homo sapiens
  misc_RNA (1)...(19): siRNA sense strand
gaaauaaaugucaguacug

SEQ ID NO: 1117316 - RNA, 19 nt, Homo sapiens
  misc_RNA (1)...(19): siRNA sense strand
gaucacagaguaugccaaa

SEQ ID NO: 1117317 - RNA, 19 nt, Homo sapiens
  misc_RNA (1)...(19): siRNA sense strand
gaaagacaacagacaaauc

SEQ ID NO: 1117318 - RNA, 19 nt, Homo sapiens
  misc_RNA (1)...(19): siRNA sense strand
ugacagaccucagacagau

SEQ ID NO: 1117319 - RNA, 19 nt, Homo sapiens
  misc_RNA (1)...(19): siRNA sense strand
aagaacagauccagugguu

SEQ ID NO: 1117320 - RNA, 19 nt, Homo sapiens
  misc_RNA (1)...(19): siRNA sense strand
gguugcagauuacaaguau

SEQ ID NO: 1117321 - RNA, 19 nt, Homo sapiens
  misc_RNA (1)...(19): siRNA sense strand
gacaaaucaccauucguua

SEQ ID NO: 1117322 - RNA, 19 nt, Homo sapiens
  misc_RNA (1)...(19): siRNA sense strand
gcacuggaauuagaugaca

SEQ ID NO: 1117323 - RNA, 19 nt, Homo sapiens
  misc_RNA (1)...(19): siRNA sense strand
guucaaugcacuggaauua

SEQ ID NO: 1117324 - RNA, 19 nt, Homo sapiens
  misc_RNA (1)...(19): siRNA sense strand
caccauucguuaucuauga

SEQ ID NO: 1117325 - RNA, 19 nt, Homo sapiens
  misc_RNA (1)...(19): siRNA sense strand
gaagacauuccauucacaa

SEQ ID NO: 1117326 - RNA, 19 nt, Homo sapiens
  misc_RNA (1)...(19): siRNA sense strand
gaagcccauugaagacauu

SEQ ID NO: 1117327 - RNA, 19 nt, Homo sapiens
  misc_RNA (1)...(19): siRNA sense strand
ugcaggagaucacagagua

SEQ ID NO: 1117328 - RNA, 19 nt, Homo sapiens
  misc_RNA (1)...(19): siRNA sense strand
gauaaagcuucuggauuuc

SEQ ID NO: 1117329 - RNA, 19 nt, Homo sapiens
  misc_RNA (1)...(19): siRNA sense strand
caacagacaaaucaccauu

SEQ ID NO: 1117330 - RNA, 19 nt, Homo sapiens
  misc_RNA (1)...(19): siRNA sense strand
ucaagaagacggagacaga

SEQ ID NO: 1117331 - RNA, 19 nt, Homo sapiens
  misc_RNA (1)...(19): siRNA sense strand
ugacagcgacuuggcaaua

SEQ ID NO: 1117332 - RNA, 19 nt, Homo sapiens
  misc_RNA (1)...(19): siRNA sense strand
agacaaaucaccauucguu

SEQ ID NO: 1117333 - RNA, 19 nt, Homo sapiens
  misc_RNA (1)...(19): siRNA sense strand
ggaaagacaacagacaaau

SEQ ID NO: 1117334 - RNA, 19 nt, Homo sapiens
  misc_RNA (1)...(19): siRNA sense strand
gauaucaagcccuucacua

SEQ ID NO: 1117335 - RNA, 19 nt, Homo sapiens
  misc_RNA (1)...(19): siRNA sense strand
acacaaugcuggccuccuu

SEQ ID NO: 1117336 - RNA, 19 nt, Homo sapiens
  misc_RNA (1)...(19): siRNA sense strand
uaacucuccucaaauaugg

SEQ ID NO: 1117337 - RNA, 19 nt, Homo sapiens
  misc_RNA (1)...(19): siRNA sense strand
aaagacaacagacaaauca

SEQ ID NO: 1117338 - RNA, 19 nt, Homo sapiens
  misc_RNA (1)...(19): siRNA sense strand
ggagauaaagcuucuggau

SEQ ID NO: 1117339 - RNA, 19 nt, Homo sapiens
  misc_RNA (1)...(19): siRNA sense strand
gacagcgacuuggcaauau

SEQ ID NO: 1117340 - RNA, 19 nt, Homo sapiens
  misc_RNA (1)...(19): siRNA sense strand
guugacuucuccagcauuu

SEQ ID NO: 1117341 - RNA, 19 nt, Homo sapiens
  misc_RNA (1)...(19): siRNA sense strand
guaacucuccucaaauaug

SEQ ID NO: 1117342 - RNA, 19 nt, Homo sapiens
  misc_RNA (1)...(19): siRNA sense strand
caagacaaccugcuacaag

SEQ ID NO: 1117343 - RNA, 19 nt, Homo sapiens
  misc_RNA (1)...(19): siRNA sense strand
ugucgugucuguggagaua

SEQ ID NO: 1117344 - RNA, 19 nt, Homo sapiens
  misc_RNA (1)...(19): siRNA sense strand
caaaucaccauucguuauc

SEQ ID NO: 1117345 - RNA, 19 nt, Homo sapiens
  misc_RNA (1)...(19): siRNA sense strand
ccaacucccucauggcaau

SEQ ID NO: 1117346 - RNA, 19 nt, Homo sapiens
  misc_RNA (1)...(19): siRNA sense strand
gaaaaugacagaccucaga

SEQ ID NO: 1117347 - RNA, 19 nt, Homo sapiens
  misc_RNA (1)...(19): siRNA sense strand
cuaaagagccugcgaaagc

SEQ ID NO: 1117348 - RNA, 19 nt, Homo sapiens
  misc_RNA (1)...(19): siRNA sense strand
ugacaagggaguuucuaaa

SEQ ID NO: 1117349 - RNA, 19 nt, Homo sapiens
  misc_RNA (1)...(19): siRNA sense strand
ccaaaagcauuccugguuu

SEQ ID NO: 1117350 - RNA, 19 nt, Homo sapiens
  misc_RNA (1)...(19): siRNA sense strand
ggauuucacuauggaguuc

SEQ ID NO: 1117351 - RNA, 19 nt, Homo sapiens
  misc_RNA (1)...(19): siRNA sense strand
cagguuugcugaaugugaa

SEQ ID NO: 1117352 - RNA, 19 nt, Homo sapiens
  misc_RNA (1)...(19): siRNA sense strand
ucuaugacaugaauuccuu

SEQ ID NO: 1117353 - RNA, 19 nt, Homo sapiens
  misc_RNA (1)...(19): siRNA sense strand
cgaagacauuccauucaca

SEQ ID NO: 1117354 - RNA, 19 nt, Homo sapiens
  misc_RNA (1)...(19): siRNA sense strand
gcccagguuugcugaaugu

SEQ ID NO: 1117355 - RNA, 19 nt, Homo sapiens
  misc_RNA (1)...(19): siRNA sense strand
uuauggagcccaaguuuga

SEQ ID NO: 1117356 - RNA, 19 nt, Homo sapiens
  misc_RNA (1)...(19): siRNA sense strand
ugcaggagaucuacaagga

SEQ ID NO: 1117357 - RNA, 19 nt, Homo sapiens
  misc_RNA (1)...(19): siRNA sense strand
cauaaugccaucagguuug

SEQ ID NO: 1117358 - RNA, 19 nt, Homo sapiens
  misc_RNA (1)...(19): siRNA sense strand
gacaagggaguuucuaaag

SEQ ID NO: 1117359 - RNA, 19 nt, Homo sapiens
  misc_RNA (1)...(19): siRNA sense strand
ggaguccacgagaucauuu

SEQ ID NO: 1117360 - RNA, 19 nt, Homo sapiens
  misc_RNA (1)...(19): siRNA sense strand
caaguaacucuccucaaau

SEQ ID NO: 1117361 - RNA, 19 nt, Homo sapiens
  misc_RNA (1)...(19): siRNA sense strand
acaaaucaccauucguuau

SEQ ID NO: 1117362 - RNA, 19 nt, Homo sapiens
  misc_RNA (1)...(19): siRNA sense strand
gaagacggagacagacaug

SEQ ID NO: 1117363 - RNA, 19 nt, Homo sapiens
  misc_RNA (1)...(19): siRNA sense strand
uugccaagcugcuccagaa

SEQ ID NO: 1117364 - RNA, 19 nt, Homo sapiens
  misc_RNA (1)...(19): siRNA sense strand
ugaguuugcugugaaguuc

SEQ ID NO: 1117365 - RNA, 19 nt, Homo sapiens
  misc_RNA (1)...(19): siRNA sense strand
ccuccuugaugaauaaaga

SEQ ID NO: 1117366 - RNA, 19 nt, Homo sapiens
  misc_RNA (1)...(19): siRNA sense strand
uuucagggcugccaguuuc

SEQ ID NO: 1117367 - RNA, 19 nt, Homo sapiens
  misc_RNA (1)...(19): siRNA sense strand
ccaaagugcaaucaaagug

SEQ ID NO: 1117368 - RNA, 19 nt, Homo sapiens
  misc_RNA (1)...(19): siRNA sense strand
gagcccaaguuugaguuug

SEQ ID NO: 1117369 - RNA, 19 nt, Homo sapiens
  misc_RNA (1)...(19): siRNA sense strand
auccagugguugcagauua

SEQ ID NO: 1117370 - RNA, 19 nt, Homo sapiens
  misc_RNA (1)...(19): siRNA sense strand
ggaucucuccguaauggaa

SEQ ID NO: 1117371 - RNA, 19 nt, Homo sapiens
  misc_RNA (1)...(19): siRNA sense strand
acucauacauaaaguccuu

SEQ ID NO: 1117372 - RNA, 19 nt, Homo sapiens
  misc_RNA (1)...(19): siRNA sense strand
uggccuccuugaugaauaa

SEQ ID NO: 1117373 - RNA, 19 nt, Homo sapiens
  misc_RNA (1)...(19): siRNA sense strand
caugaauuccuuaaugaug

SEQ ID NO: 1117374 - RNA, 19 nt, Homo sapiens
  misc_RNA (1)...(19): siRNA sense strand
ccucauggcaauugaaugu

SEQ ID NO: 1117375 - RNA, 19 nt, Homo sapiens
  misc_RNA (1)...(19): siRNA sense strand
guggagaccgcccagguuu

SEQ ID NO: 1117376 - RNA, 19 nt, Homo sapiens
  misc_RNA (1)...(19): siRNA sense strand
acagcgacuuggcaauauu

SEQ ID NO: 1117377 - RNA, 19 nt, Homo sapiens
  misc_RNA (1)...(19): siRNA sense strand
uuacgaagacauuccauuc

SEQ ID NO: 1117378 - RNA, 19 nt, Homo sapiens
  misc_RNA (1)...(19): siRNA sense strand
aaucaccauucguuaucua

SEQ ID NO: 1117379 - RNA, 19 nt, Homo sapiens
  misc_RNA (1)...(19): siRNA sense strand
ugacaggaaagacaacaga

SEQ ID NO: 1117380 - RNA, 19 nt, Homo sapiens
  misc_RNA (1)...(19): siRNA sense strand
guggaucucuccguaaugg

SEQ ID NO: 1117381 - RNA, 19 nt, Homo sapiens
  misc_RNA (1)...(19): siRNA sense strand
uuaaugaugggagaagaua

SEQ ID NO: 1117382 - RNA, 19 nt, Homo sapiens
  misc_RNA (1)...(19): siRNA sense strand
cguuaucuaugacaugaau

SEQ ID NO: 1117383 - RNA, 19 nt, Homo sapiens
  misc_RNA (1)...(19): siRNA sense strand
caggaaagacaacagacaa

SEQ ID NO: 1117384 - RNA, 19 nt, Homo sapiens
  misc_RNA (1)...(19): siRNA sense strand
caaaggcgagggcgaucuu

SEQ ID NO: 1117385 - RNA, 19 nt, Homo sapiens
  misc_RNA (1)...(19): siRNA sense strand
cagcgacuuggcaauauuu

SEQ ID NO: 1117386 - RNA, 19 nt, Homo sapiens
  misc_RNA (1)...(19): siRNA sense strand
caagaguaccaaagugcaa

SEQ ID NO: 1117387 - RNA, 19 nt, Homo sapiens
  misc_RNA (1)...(19): siRNA sense strand
gaguccacgagaucauuua

SEQ ID NO: 1117388 - RNA, 19 nt, Homo sapiens
  misc_RNA (1)...(19): siRNA sense strand
ucacuacuguugacuucuc

SEQ ID NO: 1117389 - RNA, 19 nt, Homo sapiens
  misc_RNA (1)...(19): siRNA sense strand
ucauaaugccaucagguuu

SEQ ID NO: 1117390 - RNA, 19 nt, Homo sapiens
  misc_RNA (1)...(19): siRNA sense strand
ugucaguacugucgguuuc

SEQ ID NO: 1117391 - RNA, 19 nt, Homo sapiens
  misc_RNA (1)...(19): siRNA sense strand
caaaguggagccugcaucu

SEQ ID NO: 1117392 - RNA, 19 nt, Homo sapiens
  misc_RNA (1)...(19): siRNA sense strand
cuauggaguucaugcuugu

SEQ ID NO: 1117393 - RNA, 19 nt, Homo sapiens
  misc_RNA (1)...(19): siRNA sense strand
augcuggccuccuugauga

SEQ ID NO: 1117394 - RNA, 19 nt, Homo sapiens
  misc_RNA (1)...(19): siRNA sense strand
gggcgaucuugacaggaaa

SEQ ID NO: 1117395 - RNA, 19 nt, Homo sapiens
  misc_RNA (1)...(19): siRNA sense strand
gcuaagagcucuauaauuu

SEQ ID NO: 1117396 - RNA, 19 nt, Homo sapiens
  misc_RNA (1)...(19): siRNA sense strand
gaagugggcugaagaauuu

SEQ ID NO: 1117397 - RNA, 19 nt, Homo sapiens
  misc_RNA (1)...(19): siRNA sense strand
gcaaagaacuucaucuaaa

SEQ ID NO: 1117398 - RNA, 19 nt, Homo sapiens
  misc_RNA (1)...(19): siRNA sense strand
ggaacuagcucuucagaaa

SEQ ID NO: 1117399 - RNA, 19 nt, Homo sapiens
  misc_RNA (1)...(19): siRNA sense strand
ccaaagagaugauuaagaa

SEQ ID NO: 1117400 - RNA, 19 nt, Homo sapiens
  misc_RNA (1)...(19): siRNA sense strand
ggaaguaacucugauauga

SEQ ID NO: 1117401 - RNA, 19 nt, Homo sapiens
  misc_RNA (1)...(19): siRNA sense strand
gaggaaaccuucaauugua

SEQ ID NO: 1117402 - RNA, 19 nt, Homo sapiens
  misc_RNA (1)...(19): siRNA sense strand
gauaguagcucaaguggaa

SEQ ID NO: 1117403 - RNA, 19 nt, Homo sapiens
  misc_RNA (1)...(19): siRNA sense strand
gcagagaaauuccuaaaga

SEQ ID NO: 1117404 - RNA, 19 nt, Homo sapiens
  misc_RNA (1)...(19): siRNA sense strand
ggaaagaguucaaggaaga

SEQ ID NO: 1117405 - RNA, 19 nt, Homo sapiens
  misc_RNA (1)...(19): siRNA sense strand
gaagaugcgucuaaugaaa

SEQ ID NO: 1117406 - RNA, 19 nt, Homo sapiens
  misc_RNA (1)...(19): siRNA sense strand
gaagaaaggugagcaguga

SEQ ID NO: 1117407 - RNA, 19 nt, Homo sapiens
  misc_RNA (1)...(19): siRNA sense strand
gagaagcaaucuacaauga

SEQ ID NO: 1117408 - RNA, 19 nt, Homo sapiens
  misc_RNA (1)...(19): siRNA sense strand
gaacauacauccagauuuu

SEQ ID NO: 1117409 - RNA, 19 nt, Homo sapiens
  misc_RNA (1)...(19): siRNA sense strand
gacaacaggucaaucauuu

SEQ ID NO: 1117410 - RNA, 19 nt, Homo sapiens
  misc_RNA (1)...(19): siRNA sense strand
gaacaccacuucaaaauaa

SEQ ID NO: 1117411 - RNA, 19 nt, Homo sapiens
  misc_RNA (1)...(19): siRNA sense strand
gaagcaagcugacauuaca

SEQ ID NO: 1117412 - RNA, 19 nt, Homo sapiens
  misc_RNA (1)...(19): siRNA sense strand
gaugaaaccuccaugaguu

SEQ ID NO: 1117413 - RNA, 19 nt, Homo sapiens
  misc_RNA (1)...(19): siRNA sense strand
gaugaagccuuaucuaaau

SEQ ID NO: 1117414 - RNA, 19 nt, Homo sapiens
  misc_RNA (1)...(19): siRNA sense strand
gcaagaagauggugguguu

SEQ ID NO: 1117415 - RNA, 19 nt, Homo sapiens
  misc_RNA (1)...(19): siRNA sense strand
ggaaaguucugaagauaau

SEQ ID NO: 1117416 - RNA, 19 nt, Homo sapiens
  misc_RNA (1)...(19): siRNA sense strand
caaagagcauaaagucaua

SEQ ID NO: 1117417 - RNA, 19 nt, Homo sapiens
  misc_RNA (1)...(19): siRNA sense strand
gccaggagcuugauguuaa

SEQ ID NO: 1117418 - RNA, 19 nt, Homo sapiens
  misc_RNA (1)...(19): siRNA sense strand
gaggaaaguucugaagaua

SEQ ID NO: 1117419 - RNA, 19 nt, Homo sapiens
  misc_RNA (1)...(19): siRNA sense strand
gaaagaagaugguuguaac

SEQ ID NO: 1117420 - RNA, 19 nt, Homo sapiens
  misc_RNA (1)...(19): siRNA sense strand
gguuguaacucuucugaua

SEQ ID NO: 1117421 - RNA, 19 nt, Homo sapiens
  misc_RNA (1)...(19): siRNA sense strand
gaccaugcguuucaacaua

SEQ ID NO: 1117422 - RNA, 19 nt, Homo sapiens
  misc_RNA (1)...(19): siRNA sense strand
gauguuagcuggauguguu

SEQ ID NO: 1117423 - RNA, 19 nt, Homo sapiens
  misc_RNA (1)...(19): siRNA sense strand
gaacaaggucugcaaagaa

SEQ ID NO: 1117424 - RNA, 19 nt, Homo sapiens
  misc_RNA (1)...(19): siRNA sense strand
gaagcaaucuacaaugaug

SEQ ID NO: 1117425 - RNA, 19 nt, Homo sapiens
  misc_RNA (1)...(19): siRNA sense strand
cagaguauauucagaguuu

SEQ ID NO: 1117426 - RNA, 19 nt, Homo sapiens
  misc_RNA (1)...(19): siRNA sense strand
gaggagguauuaaaucaaa

SEQ ID NO: 1117427 - RNA, 19 nt, Homo sapiens
  misc_RNA (1)...(19): siRNA sense strand
gaaagcaaguugaauacau

SEQ ID NO: 1117428 - RNA, 19 nt, Homo sapiens
  misc_RNA (1)...(19): siRNA sense strand
agacuuaaauuccgaguuu

SEQ ID NO: 1117429 - RNA, 19 nt, Homo sapiens
  misc_RNA (1)...(19): siRNA sense strand
ggauauaauuucagcugua

SEQ ID NO: 1117430 - RNA, 19 nt, Homo sapiens
  misc_RNA (1)...(19): siRNA sense strand
caacagaggagguauuaaa

SEQ ID NO: 1117431 - RNA, 19 nt, Homo sapiens
  misc_RNA (1)...(19): siRNA sense strand
caaaguauguagaaucaga

SEQ ID NO: 1117432 - RNA, 19 nt, Homo sapiens
  misc_RNA (1)...(19): siRNA sense strand
uaacaggugugggcaauaa

SEQ ID NO: 1117433 - RNA, 19 nt, Homo sapiens
  misc_RNA (1)...(19): siRNA sense strand
agucauagaugcuaaguuu

SEQ ID NO: 1117434 - RNA, 19 nt, Homo sapiens
  misc_RNA (1)...(19): siRNA sense strand
gauggaugcuguaaacaaa

SEQ ID NO: 1117435 - RNA, 19 nt, Homo sapiens
  misc_RNA (1)...(19): siRNA sense strand
agaagaaccucaauaugaa

SEQ ID NO: 1117436 - RNA, 19 nt, Homo sapiens
  misc_RNA (1)...(19): siRNA sense strand
gagaucgacuuccuaagaa

SEQ ID NO: 1117437 - RNA, 19 nt, Homo sapiens
  misc_RNA (1)...(19): siRNA sense strand
gaagaagaguugacugaag

SEQ ID NO: 1117438 - RNA, 19 nt, Homo sapiens
  misc_RNA (1)...(19): siRNA sense strand
guacuucucuuugaaauuc

SEQ ID NO: 1117439 - RNA, 19 nt, Homo sapiens
  misc_RNA (1)...(19): siRNA sense strand
gaugaaggccauauucuaa

SEQ ID NO: 1117440 - RNA, 19 nt, Homo sapiens
  misc_RNA (1)...(19): siRNA sense strand
gguggaaacuugauuuguu

SEQ ID NO: 1117441 - RNA, 19 nt, Homo sapiens
  misc_RNA (1)...(19): siRNA sense strand
cuacuuagaucacuuaaca

SEQ ID NO: 1117442 - RNA, 19 nt, Homo sapiens
  misc_RNA (1)...(19): siRNA sense strand
gcuugagguuucugaauua

SEQ ID NO: 1117443 - RNA, 19 nt, Homo sapiens
  misc_RNA (1)...(19): siRNA sense strand
guauuaagguucaagaaga

SEQ ID NO: 1117444 - RNA, 19 nt, Homo sapiens
  misc_RNA (1)...(19): siRNA sense strand
agaagaaucugaagaaaca

SEQ ID NO: 1117445 - RNA, 19 nt, Homo sapiens
  misc_RNA (1)...(19): siRNA sense strand
ggaaagaugauaaaggaaa

SEQ ID NO: 1117446 - RNA, 19 nt, Homo sapiens
  misc_RNA (1)...(19): siRNA sense strand
gaaaucaguucugcuacaa

SEQ ID NO: 1117447 - RNA, 19 nt, Homo sapiens
  misc_RNA (1)...(19): siRNA sense strand
gaaaacagguagauaguga

SEQ ID NO: 1117448 - RNA, 19 nt, Homo sapiens
  misc_RNA (1)...(19): siRNA sense strand
guacaggcguuagcauuaa

SEQ ID NO: 1117449 - RNA, 19 nt, Homo sapiens
  misc_RNA (1)...(19): siRNA sense strand
gcaaguaacuaagcaguca

SEQ ID NO: 1117450 - RNA, 19 nt, Homo sapiens
  misc_RNA (1)...(19): siRNA sense strand
aaagaaaucuccagguuca

SEQ ID NO: 1117451 - RNA, 19 nt, Homo sapiens
  misc_RNA (1)...(19): siRNA sense strand
ugagagaggugauagaaau

SEQ ID NO: 1117452 - RNA, 19 nt, Homo sapiens
  misc_RNA (1)...(19): siRNA sense strand
gaaacuugauuuguuguga

SEQ ID NO: 1117453 - RNA, 19 nt, Homo sapiens
  misc_RNA (1)...(19): siRNA sense strand
gaauauguguuagcuguga

SEQ ID NO: 1117454 - RNA, 19 nt, Homo sapiens
  misc_RNA (1)...(19): siRNA sense strand
gaguaucauuguaugguua

SEQ ID NO: 1117455 - RNA, 19 nt, Homo sapiens
  misc_RNA (1)...(19): siRNA sense strand
caaaguggcucaucaucau

SEQ ID NO: 1117456 - RNA, 19 nt, Homo sapiens
  misc_RNA (1)...(19): siRNA sense strand
caucugauacugagaaaua

SEQ ID NO: 1117457 - RNA, 19 nt, Homo sapiens
  misc_RNA (1)...(19): siRNA sense strand
guggagaguucaucuguaa

SEQ ID NO: 1117458 - RNA, 19 nt, Homo sapiens
  misc_RNA (1)...(19): siRNA sense strand
gaagcuaaacuuucaagaa

SEQ ID NO: 1117459 - RNA, 19 nt, Homo sapiens
  misc_RNA (1)...(19): siRNA sense strand
caaagaagaagaagaguug

SEQ ID NO: 1117460 - RNA, 19 nt, Homo sapiens
  misc_RNA (1)...(19): siRNA sense strand
gugaagagucggaaacuua

SEQ ID NO: 1117461 - RNA, 19 nt, Homo sapiens
  misc_RNA (1)...(19): siRNA sense strand
aagagaaacucccuaagaa

SEQ ID NO: 1117462 - RNA, 19 nt, Homo sapiens
  misc_RNA (1)...(19): siRNA sense strand
acaaagaaaucuccagguu

SEQ ID NO: 1117463 - RNA, 19 nt, Homo sapiens
  misc_RNA (1)...(19): siRNA sense strand
cagcggagcuauaaacaga

SEQ ID NO: 1117464 - RNA, 19 nt, Homo sapiens
  misc_RNA (1)...(19): siRNA sense strand
caaagaagacuaguucaaa

SEQ ID NO: 1117465 - RNA, 19 nt, Homo sapiens
  misc_RNA (1)...(19): siRNA sense strand
gaagagaagcaaucuacaa

SEQ ID NO: 1117466 - RNA, 19 nt, Homo sapiens
  misc_RNA (1)...(19): siRNA sense strand
ugaaugagcuuacugaacu

SEQ ID NO: 1117467 - RNA, 19 nt, Homo sapiens
  misc_RNA (1)...(19): siRNA sense strand
ggagaagacagaagauaaa

SEQ ID NO: 1117468 - RNA, 19 nt, Homo sapiens
  misc_RNA (1)...(19): siRNA sense strand
cggagaaucuggagaagaa

SEQ ID NO: 1117469 - RNA, 19 nt, Homo sapiens
  misc_RNA (1)...(19): siRNA sense strand
gaauagaauugccaagaag

SEQ ID NO: 1117470 - RNA, 19 nt, Homo sapiens
  misc_RNA (1)...(19): siRNA sense strand
gcagaaggcacaguugaua

SEQ ID NO: 1117471 - RNA, 19 nt, Homo sapiens
  misc_RNA (1)...(19): siRNA sense strand
cagaggagguauuaaauca

SEQ ID NO: 1117472 - RNA, 19 nt, Homo sapiens
  misc_RNA (1)...(19): siRNA sense strand
aagaagaaccucaauauga

SEQ ID NO: 1117473 - RNA, 19 nt, Homo sapiens
  misc_RNA (1)...(19): siRNA sense strand
cagcguauuugagaauuua

SEQ ID NO: 1117474 - RNA, 19 nt, Homo sapiens
  misc_RNA (1)...(19): siRNA sense strand
gagccagacuuauuagaug

SEQ ID NO: 1117475 - RNA, 19 nt, Homo sapiens
  misc_RNA (1)...(19): siRNA sense strand
gaagacagaagauaaagau

SEQ ID NO: 1117476 - RNA, 19 nt, Homo sapiens
  misc_RNA (1)...(19): siRNA sense strand
ucaaggaggaggauuauuu

SEQ ID NO: 1117477 - RNA, 19 nt, Homo sapiens
  misc_RNA (1)...(19): siRNA sense strand
gaggaacaaagaacaaaua

SEQ ID NO: 1117478 - RNA, 19 nt, Homo sapiens
  misc_RNA (1)...(19): siRNA sense strand
gaacaacaguaugaaucuu

SEQ ID NO: 1117479 - RNA, 19 nt, Homo sapiens
  misc_RNA (1)...(19): siRNA sense strand
cagagaaauuccuaaagaa

SEQ ID NO: 1117480 - RNA, 19 nt, Homo sapiens
  misc_RNA (1)...(19): siRNA sense strand
gaagagagacgaaaacgua

SEQ ID NO: 1117481 - RNA, 19 nt, Homo sapiens
  misc_RNA (1)...(19): siRNA sense strand
uaaaugaagaugcgucuaa

SEQ ID NO: 1117482 - RNA, 19 nt, Homo sapiens
  misc_RNA (1)...(19): siRNA sense strand
gcugaagaauuuaaugaug

SEQ ID NO: 1117483 - RNA, 19 nt, Homo sapiens
  misc_RNA (1)...(19): siRNA sense strand
ggacucauccuugguguuu

SEQ ID NO: 1117484 - RNA, 19 nt, Homo sapiens
  misc_RNA (1)...(19): siRNA sense strand
gaagacuaguucaaauugu

SEQ ID NO: 1117485 - RNA, 19 nt, Homo sapiens
  misc_RNA (1)...(19): siRNA sense strand
ggacaacaggucaaucauu

SEQ ID NO: 1117486 - RNA, 19 nt, Homo sapiens
  misc_RNA (1)...(19): siRNA sense strand
aagaacacauuguaggaua

SEQ ID NO: 1117487 - RNA, 19 nt, Homo sapiens
  misc_RNA (1)...(19): siRNA sense strand
gaauccaucuuaugacauc

SEQ ID NO: 1117488 - RNA, 19 nt, Homo sapiens
  misc_RNA (1)...(19): siRNA sense strand
gugagaggacgauuauuua

SEQ ID NO: 1117489 - RNA, 19 nt, Homo sapiens
  misc_RNA (1)...(19): siRNA sense strand
ggaaagauuauacagcauu

SEQ ID NO: 1117490 - RNA, 19 nt, Homo sapiens
  misc_RNA (1)...(19): siRNA sense strand
gagaggugauagaaauuga

SEQ ID NO: 1117491 - RNA, 19 nt, Homo sapiens
  misc_RNA (1)...(19): siRNA sense strand
gaagguggaaacuugauuu

SEQ ID NO: 1117492 - RNA, 19 nt, Homo sapiens
  misc_RNA (1)...(19): siRNA sense strand
ugacaaugauguugaagug

SEQ ID NO: 1117493 - RNA, 19 nt, Homo sapiens
  misc_RNA (1)...(19): siRNA sense strand
gggagaagacagaagauaa

SEQ ID NO: 1117494 - RNA, 19 nt, Homo sapiens
  misc_RNA (1)...(19): siRNA sense strand
ccucauaucucuggacuug

SEQ ID NO: 1117495 - RNA, 19 nt, Homo sapiens
  misc_RNA (1)...(19): siRNA sense strand
gcuaagagcucuauaauuu

SEQ ID NO: 1117496 - RNA, 19 nt, Homo sapiens
  misc_RNA (1)...(19): siRNA sense strand
gaagugggcugaagaauuu

SEQ ID NO: 1117497 - RNA, 19 nt, Homo sapiens
  misc_RNA (1)...(19): siRNA sense strand
gcaaagaacuucaucuaaa

SEQ ID NO: 1117498 - RNA, 19 nt, Homo sapiens
  misc_RNA (1)...(19): siRNA sense strand
ggaacuagcucuucagaaa

SEQ ID NO: 1117499 - RNA, 19 nt, Homo sapiens
  misc_RNA (1)...(19): siRNA sense strand
ccaaagagaugauuaagaa

SEQ ID NO: 1117500 - RNA, 19 nt, Homo sapiens
  misc_RNA (1)...(19): siRNA sense strand
ggaaguaacucugauauga

SEQ ID NO: 1117501 - RNA, 19 nt, Homo sapiens
  misc_RNA (1)...(19): siRNA sense strand
gaggaaaccuucaauugua

SEQ ID NO: 1117502 - RNA, 19 nt, Homo sapiens
  misc_RNA (1)...(19): siRNA sense strand
gauaguagcucaaguggaa

SEQ ID NO: 1117503 - RNA, 19 nt, Homo sapiens
  misc_RNA (1)...(19): siRNA sense strand
gcagagaaauuccuaaaga

SEQ ID NO: 1117504 - RNA, 19 nt, Homo sapiens
  misc_RNA (1)...(19): siRNA sense strand
ggaaagaguucaaggaaga

SEQ ID NO: 1117505 - RNA, 19 nt, Homo sapiens
  misc_RNA (1)...(19): siRNA sense strand
gaagaugcgucuaaugaaa

SEQ ID NO: 1117506 - RNA, 19 nt, Homo sapiens
  misc_RNA (1)...(19): siRNA sense strand
gaagaaaggugagcaguga

SEQ ID NO: 1117507 - RNA, 19 nt, Homo sapiens
  misc_RNA (1)...(19): siRNA sense strand
gagaagcaaucuacaauga

SEQ ID NO: 1117508 - RNA, 19 nt, Homo sapiens
  misc_RNA (1)...(19): siRNA sense strand
gaacauacauccagauuuu

SEQ ID NO: 1117509 - RNA, 19 nt, Homo sapiens
  misc_RNA (1)...(19): siRNA sense strand
gacaacaggucaaucauuu

SEQ ID NO: 1117510 - RNA, 19 nt, Homo sapiens
  misc_RNA (1)...(19): siRNA sense strand
gaacaccacuucaaaauaa

SEQ ID NO: 1117511 - RNA, 19 nt, Homo sapiens
  misc_RNA (1)...(19): siRNA sense strand
gaagcaagcugacauuaca

SEQ ID NO: 1117512 - RNA, 19 nt, Homo sapiens
  misc_RNA (1)...(19): siRNA sense strand
gaugaaaccuccaugaguu

SEQ ID NO: 1117513 - RNA, 19 nt, Homo sapiens
  misc_RNA (1)...(19): siRNA sense strand
gaugaagccuuaucuaaau

SEQ ID NO: 1117514 - RNA, 19 nt, Homo sapiens
  misc_RNA (1)...(19): siRNA sense strand
gcaagaagauggugguguu

SEQ ID NO: 1117515 - RNA, 19 nt, Homo sapiens
  misc_RNA (1)...(19): siRNA sense strand
ggaaaguucugaagauaau

SEQ ID NO: 1117516 - RNA, 19 nt, Homo sapiens
  misc_RNA (1)...(19): siRNA sense strand
caaagagcauaaagucaua

SEQ ID NO: 1117517 - RNA, 19 nt, Homo sapiens
  misc_RNA (1)...(19): siRNA sense strand
gccaggagcuugauguuaa

SEQ ID NO: 1117518 - RNA, 19 nt, Homo sapiens
  misc_RNA (1)...(19): siRNA sense strand
gaggaaaguucugaagaua

SEQ ID NO: 1117519 - RNA, 19 nt, Homo sapiens
  misc_RNA (1)...(19): siRNA sense strand
gaaagaagaugguuguaac

SEQ ID NO: 1117520 - RNA, 19 nt, Homo sapiens
  misc_RNA (1)...(19): siRNA sense strand
gguuguaacucuucugaua

SEQ ID NO: 1117521 - RNA, 19 nt, Homo sapiens
  misc_RNA (1)...(19): siRNA sense strand
gaccaugcguuucaacaua

SEQ ID NO: 1117522 - RNA, 19 nt, Homo sapiens
  misc_RNA (1)...(19): siRNA sense strand
gauguuagcuggauguguu

SEQ ID NO: 1117523 - RNA, 19 nt, Homo sapiens
  misc_RNA (1)...(19): siRNA sense strand
gaacaaggucugcaaagaa

SEQ ID NO: 1117524 - RNA, 19 nt, Homo sapiens
  misc_RNA (1)...(19): siRNA sense strand
gaagcaaucuacaaugaug

SEQ ID NO: 1117525 - RNA, 19 nt, Homo sapiens
  misc_RNA (1)...(19): siRNA sense strand
cagaguauauucagaguuu

SEQ ID NO: 1117526 - RNA, 19 nt, Homo sapiens
  misc_RNA (1)...(19): siRNA sense strand
gaggagguauuaaaucaaa

SEQ ID NO: 1117527 - RNA, 19 nt, Homo sapiens
  misc_RNA (1)...(19): siRNA sense strand
gaaagcaaguugaauacau

SEQ ID NO: 1117528 - RNA, 19 nt, Homo sapiens
  misc_RNA (1)...(19): siRNA sense strand
agacuuaaauuccgaguuu

SEQ ID NO: 1117529 - RNA, 19 nt, Homo sapiens
  misc_RNA (1)...(19): siRNA sense strand
ggauauaauuucagcugua

SEQ ID NO: 1117530 - RNA, 19 nt, Homo sapiens
  misc_RNA (1)...(19): siRNA sense strand
caacagaggagguauuaaa

SEQ ID NO: 1117531 - RNA, 19 nt, Homo sapiens
  misc_RNA (1)...(19): siRNA sense strand
caaaguauguagaaucaga

SEQ ID NO: 1117532 - RNA, 19 nt, Homo sapiens
  misc_RNA (1)...(19): siRNA sense strand
uaacaggugugggcaauaa

SEQ ID NO: 1117533 - RNA, 19 nt, Homo sapiens
  misc_RNA (1)...(19): siRNA sense strand
agucauagaugcuaaguuu

SEQ ID NO: 1117534 - RNA, 19 nt, Homo sapiens
  misc_RNA (1)...(19): siRNA sense strand
gauggaugcuguaaacaaa

SEQ ID NO: 1117535 - RNA, 19 nt, Homo sapiens
  misc_RNA (1)...(19): siRNA sense strand
agaagaaccucaauaugaa

SEQ ID NO: 1117536 - RNA, 19 nt, Homo sapiens
  misc_RNA (1)...(19): siRNA sense strand
gagaucgacuuccuaagaa

SEQ ID NO: 1117537 - RNA, 19 nt, Homo sapiens
  misc_RNA (1)...(19): siRNA sense strand
gaagaagaguugacugaag

SEQ ID NO: 1117538 - RNA, 19 nt, Homo sapiens
  misc_RNA (1)...(19): siRNA sense strand
guacuucucuuugaaauuc

SEQ ID NO: 1117539 - RNA, 19 nt, Homo sapiens
  misc_RNA (1)...(19): siRNA sense strand
gaugaaggccauauucuaa

SEQ ID NO: 1117540 - RNA, 19 nt, Homo sapiens
  misc_RNA (1)...(19): siRNA sense strand
gguggaaacuugauuuguu

SEQ ID NO: 1117541 - RNA, 19 nt, Homo sapiens
  misc_RNA (1)...(19): siRNA sense strand
cuacuuagaucacuuaaca

SEQ ID NO: 1117542 - RNA, 19 nt, Homo sapiens
  misc_RNA (1)...(19): siRNA sense strand
gcuugagguuucugaauua

SEQ ID NO: 1117543 - RNA, 19 nt, Homo sapiens
  misc_RNA (1)...(19): siRNA sense strand
guauuaagguucaagaaga

SEQ ID NO: 1117544 - RNA, 19 nt, Homo sapiens
  misc_RNA (1)...(19): siRNA sense strand
agaagaaucugaagaaaca

SEQ ID NO: 1117545 - RNA, 19 nt, Homo sapiens
  misc_RNA (1)...(19): siRNA sense strand
ggaaagaugauaaaggaaa

SEQ ID NO: 1117546 - RNA, 19 nt, Homo sapiens
  misc_RNA (1)...(19): siRNA sense strand
gaaaucaguucugcuacaa

SEQ ID NO: 1117547 - RNA, 19 nt, Homo sapiens
  misc_RNA (1)...(19): siRNA sense strand
gaaaacagguagauaguga

SEQ ID NO: 1117548 - RNA, 19 nt, Homo sapiens
  misc_RNA (1)...(19): siRNA sense strand
guacaggcguuagcauuaa

SEQ ID NO: 1117549 - RNA, 19 nt, Homo sapiens
  misc_RNA (1)...(19): siRNA sense strand
gcaaguaacuaagcaguca

SEQ ID NO: 1117550 - RNA, 19 nt, Homo sapiens
  misc_RNA (1)...(19): siRNA sense strand
aaagaaaucuccagguuca

SEQ ID NO: 1117551 - RNA, 19 nt, Homo sapiens
  misc_RNA (1)...(19): siRNA sense strand
ugagagaggugauagaaau

SEQ ID NO: 1117552 - RNA, 19 nt, Homo sapiens
  misc_RNA (1)...(19): siRNA sense strand
gaaacuugauuuguuguga

SEQ ID NO: 1117553 - RNA, 19 nt, Homo sapiens
  misc_RNA (1)...(19): siRNA sense strand
gaauauguguuagcuguga

SEQ ID NO: 1117554 - RNA, 19 nt, Homo sapiens
  misc_RNA (1)...(19): siRNA sense strand
gaguaucauuguaugguua

SEQ ID NO: 1117555 - RNA, 19 nt, Homo sapiens
  misc_RNA (1)...(19): siRNA sense strand
caaaguggcucaucaucau

SEQ ID NO: 1117556 - RNA, 19 nt, Homo sapiens
  misc_RNA (1)...(19): siRNA sense strand
caucugauacugagaaaua

SEQ ID NO: 1117557 - RNA, 19 nt, Homo sapiens
  misc_RNA (1)...(19): siRNA sense strand
guggagaguucaucuguaa

SEQ ID NO: 1117558 - RNA, 19 nt, Homo sapiens
  misc_RNA (1)...(19): siRNA sense strand
gaagcuaaacuuucaagaa

SEQ ID NO: 1117559 - RNA, 19 nt, Homo sapiens
  misc_RNA (1)...(19): siRNA sense strand
caaagaagaagaagaguug

SEQ ID NO: 1117560 - RNA, 19 nt, Homo sapiens
  misc_RNA (1)...(19): siRNA sense strand
gugaagagucggaaacuua

SEQ ID NO: 1117561 - RNA, 19 nt, Homo sapiens
  misc_RNA (1)...(19): siRNA sense strand
aagagaaacucccuaagaa

SEQ ID NO: 1117562 - RNA, 19 nt, Homo sapiens
  misc_RNA (1)...(19): siRNA sense strand
acaaagaaaucuccagguu

SEQ ID NO: 1117563 - RNA, 19 nt, Homo sapiens
  misc_RNA (1)...(19): siRNA sense strand
cagcggagcuauaaacaga

SEQ ID NO: 1117564 - RNA, 19 nt, Homo sapiens
  misc_RNA (1)...(19): siRNA sense strand
caaagaagacuaguucaaa

SEQ ID NO: 1117565 - RNA, 19 nt, Homo sapiens
  misc_RNA (1)...(19): siRNA sense strand
gaagagaagcaaucuacaa

SEQ ID NO: 1117566 - RNA, 19 nt, Homo sapiens
  misc_RNA (1)...(19): siRNA sense strand
ugaaugagcuuacugaacu

SEQ ID NO: 1117567 - RNA, 19 nt, Homo sapiens
  misc_RNA (1)...(19): siRNA sense strand
ggagaagacagaagauaaa

SEQ ID NO: 1117568 - RNA, 19 nt, Homo sapiens
  misc_RNA (1)...(19): siRNA sense strand
cggagaaucuggagaagaa

SEQ ID NO: 1117569 - RNA, 19 nt, Homo sapiens
  misc_RNA (1)...(19): siRNA sense strand
gaauagaauugccaagaag

SEQ ID NO: 1117570 - RNA, 19 nt, Homo sapiens
  misc_RNA (1)...(19): siRNA sense strand
gcagaaggcacaguugaua

SEQ ID NO: 1117571 - RNA, 19 nt, Homo sapiens
  misc_RNA (1)...(19): siRNA sense strand
cagaggagguauuaaauca

SEQ ID NO: 1117572 - RNA, 19 nt, Homo sapiens
  misc_RNA (1)...(19): siRNA sense strand
aagaagaaccucaauauga

SEQ ID NO: 1117573 - RNA, 19 nt, Homo sapiens
  misc_RNA (1)...(19): siRNA sense strand
cagcguauuugagaauuua

SEQ ID NO: 1117574 - RNA, 19 nt, Homo sapiens
  misc_RNA (1)...(19): siRNA sense strand
gagccagacuuauuagaug

SEQ ID NO: 1117575 - RNA, 19 nt, Homo sapiens
  misc_RNA (1)...(19): siRNA sense strand
gaagacagaagauaaagau

SEQ ID NO: 1117576 - RNA, 19 nt, Homo sapiens
  misc_RNA (1)...(19): siRNA sense strand
ucaaggaggaggauuauuu

SEQ ID NO: 1117577 - RNA, 19 nt, Homo sapiens
  misc_RNA (1)...(19): siRNA sense strand
gaggaacaaagaacaaaua

SEQ ID NO: 1117578 - RNA, 19 nt, Homo sapiens
  misc_RNA (1)...(19): siRNA sense strand
gaacaacaguaugaaucuu

SEQ ID NO: 1117579 - RNA, 19 nt, Homo sapiens
  misc_RNA (1)...(19): siRNA sense strand
cagagaaauuccuaaagaa

SEQ ID NO: 1117580 - RNA, 19 nt, Homo sapiens
  misc_RNA (1)...(19): siRNA sense strand
gaagagagacgaaaacgua

SEQ ID NO: 1117581 - RNA, 19 nt, Homo sapiens
  misc_RNA (1)...(19): siRNA sense strand
uaaaugaagaugcgucuaa

SEQ ID NO: 1117582 - RNA, 19 nt, Homo sapiens
  misc_RNA (1)...(19): siRNA sense strand
gcugaagaauuuaaugaug

SEQ ID NO: 1117583 - RNA, 19 nt, Homo sapiens
  misc_RNA (1)...(19): siRNA sense strand
ggacucauccuugguguuu

SEQ ID NO: 1117584 - RNA, 19 nt, Homo sapiens
  misc_RNA (1)...(19): siRNA sense strand
gaagacuaguucaaauugu

SEQ ID NO: 1117585 - RNA, 19 nt, Homo sapiens
  misc_RNA (1)...(19): siRNA sense strand
ggacaacaggucaaucauu

SEQ ID NO: 1117586 - RNA, 19 nt, Homo sapiens
  misc_RNA (1)...(19): siRNA sense strand
aagaacacauuguaggaua

SEQ ID NO: 1117587 - RNA, 19 nt, Homo sapiens
  misc_RNA (1)...(19): siRNA sense strand
gaauccaucuuaugacauc

SEQ ID NO: 1117588 - RNA, 19 nt, Homo sapiens
  misc_RNA (1)...(19): siRNA sense strand
gugagaggacgauuauuua

SEQ ID NO: 1117589 - RNA, 19 nt, Homo sapiens
  misc_RNA (1)...(19): siRNA sense strand
ggaaagauuauacagcauu

SEQ ID NO: 1117590 - RNA, 19 nt, Homo sapiens
  misc_RNA (1)...(19): siRNA sense strand
gagaggugauagaaauuga

SEQ ID NO: 1117591 - RNA, 19 nt, Homo sapiens
  misc_RNA (1)...(19): siRNA sense strand
gaagguggaaacuugauuu

SEQ ID NO: 1117592 - RNA, 19 nt, Homo sapiens
  misc_RNA (1)...(19): siRNA sense strand
ugacaaugauguugaagug

SEQ ID NO: 1117593 - RNA, 19 nt, Homo sapiens
  misc_RNA (1)...(19): siRNA sense strand
gggagaagacagaagauaa

SEQ ID NO: 1117594 - RNA, 19 nt, Homo sapiens
  misc_RNA (1)...(19): siRNA sense strand
ccucauaucucuggacuug

SEQ ID NO: 1117595 - RNA, 19 nt, Homo sapiens
  misc_RNA (1)...(19): siRNA sense strand
gcuaagagcucuauaauuu

SEQ ID NO: 1117596 - RNA, 19 nt, Homo sapiens
  misc_RNA (1)...(19): siRNA sense strand
gaagugggcugaagaauuu

SEQ ID NO: 1117597 - RNA, 19 nt, Homo sapiens
  misc_RNA (1)...(19): siRNA sense strand
gcaaagaacuucaucuaaa

SEQ ID NO: 1117598 - RNA, 19 nt, Homo sapiens
  misc_RNA (1)...(19): siRNA sense strand
ccaaagagaugauuaagaa

SEQ ID NO: 1117599 - RNA, 19 nt, Homo sapiens
  misc_RNA (1)...(19): siRNA sense strand
gauaguagcucaaguggaa

SEQ ID NO: 1117600 - RNA, 19 nt, Homo sapiens
  misc_RNA (1)...(19): siRNA sense strand
gcagagaaauuccuaaaga

SEQ ID NO: 1117601 - RNA, 19 nt, Homo sapiens
  misc_RNA (1)...(19): siRNA sense strand
ggaaagaguucaaggaaga

SEQ ID NO: 1117602 - RNA, 19 nt, Homo sapiens
  misc_RNA (1)...(19): siRNA sense strand
gaagaaaggugagcaguga

SEQ ID NO: 1117603 - RNA, 19 nt, Homo sapiens
  misc_RNA (1)...(19): siRNA sense strand
gagaagcaaucuacaauga

SEQ ID NO: 1117604 - RNA, 19 nt, Homo sapiens
  misc_RNA (1)...(19): siRNA sense strand
gaacauacauccagauuuu

SEQ ID NO: 1117605 - RNA, 19 nt, Homo sapiens
  misc_RNA (1)...(19): siRNA sense strand
gaacaccacuucaaaauaa

SEQ ID NO: 1117606 - RNA, 19 nt, Homo sapiens
  misc_RNA (1)...(19): siRNA sense strand
gaagcaagcugacauuaca

SEQ ID NO: 1117607 - RNA, 19 nt, Homo sapiens
  misc_RNA (1)...(19): siRNA sense strand
gaugaaaccuccaugaguu

SEQ ID NO: 1117608 - RNA, 19 nt, Homo sapiens
  misc_RNA (1)...(19): siRNA sense strand
gaugaagccuuaucuaaau

SEQ ID NO: 1117609 - RNA, 19 nt, Homo sapiens
  misc_RNA (1)...(19): siRNA sense strand
gcaagaagauggugguguu

SEQ ID NO: 1117610 - RNA, 19 nt, Homo sapiens
  misc_RNA (1)...(19): siRNA sense strand
ggaaaguucugaagauaau

SEQ ID NO: 1117611 - RNA, 19 nt, Homo sapiens
  misc_RNA (1)...(19): siRNA sense strand
caaagagcauaaagucaua

SEQ ID NO: 1117612 - RNA, 19 nt, Homo sapiens
  misc_RNA (1)...(19): siRNA sense strand
gccaggagcuugauguuaa

SEQ ID NO: 1117613 - RNA, 19 nt, Homo sapiens
  misc_RNA (1)...(19): siRNA sense strand
gaggaaaguucugaagaua

SEQ ID NO: 1117614 - RNA, 19 nt, Homo sapiens
  misc_RNA (1)...(19): siRNA sense strand
gaaagaagaugguuguaac

SEQ ID NO: 1117615 - RNA, 19 nt, Homo sapiens
  misc_RNA (1)...(19): siRNA sense strand
gguuguaacucuucugaua

SEQ ID NO: 1117616 - RNA, 19 nt, Homo sapiens
  misc_RNA (1)...(19): siRNA sense strand
gaccaugcguuucaacaua

SEQ ID NO: 1117617 - RNA, 19 nt, Homo sapiens
  misc_RNA (1)...(19): siRNA sense strand
gauguuagcuggauguguu

SEQ ID NO: 1117618 - RNA, 19 nt, Homo sapiens
  misc_RNA (1)...(19): siRNA sense strand
gaacaaggucugcaaagaa

SEQ ID NO: 1117619 - RNA, 19 nt, Homo sapiens
  misc_RNA (1)...(19): siRNA sense strand
gaagcaaucuacaaugaug

SEQ ID NO: 1117620 - RNA, 19 nt, Homo sapiens
  misc_RNA (1)...(19): siRNA sense strand
cagaguauauucagaguuu

SEQ ID NO: 1117621 - RNA, 19 nt, Homo sapiens
  misc_RNA (1)...(19): siRNA sense strand
gaggagguauuaaaucaaa

SEQ ID NO: 1117622 - RNA, 19 nt, Homo sapiens
  misc_RNA (1)...(19): siRNA sense strand
agacuuaaauuccgaguuu

SEQ ID NO: 1117623 - RNA, 19 nt, Homo sapiens
  misc_RNA (1)...(19): siRNA sense strand
ggauauaauuucagcugua

SEQ ID NO: 1117624 - RNA, 19 nt, Homo sapiens
  misc_RNA (1)...(19): siRNA sense strand
caacagaggagguauuaaa

SEQ ID NO: 1117625 - RNA, 19 nt, Homo sapiens
  misc_RNA (1)...(19): siRNA sense strand
gauggaugcuguaaacaaa

SEQ ID NO: 1117626 - RNA, 19 nt, Homo sapiens
  misc_RNA (1)...(19): siRNA sense strand
uaacaggugugggcaauaa

SEQ ID NO: 1117627 - RNA, 19 nt, Homo sapiens
  misc_RNA (1)...(19): siRNA sense strand
agucauagaugcuaaguuu

SEQ ID NO: 1117628 - RNA, 19 nt, Homo sapiens
  misc_RNA (1)...(19): siRNA sense strand
agaagaaccucaauaugaa

SEQ ID NO: 1117629 - RNA, 19 nt, Homo sapiens
  misc_RNA (1)...(19): siRNA sense strand
gagaucgacuuccuaagaa

SEQ ID NO: 1117630 - RNA, 19 nt, Homo sapiens
  misc_RNA (1)...(19): siRNA sense strand
gaagaagaguugacugaag

SEQ ID NO: 1117631 - RNA, 19 nt, Homo sapiens
  misc_RNA (1)...(19): siRNA sense strand
guacuucucuuugaaauuc

SEQ ID NO: 1117632 - RNA, 19 nt, Homo sapiens
  misc_RNA (1)...(19): siRNA sense strand
gaugaaggccauauucuaa

SEQ ID NO: 1117633 - RNA, 19 nt, Homo sapiens
  misc_RNA (1)...(19): siRNA sense strand
gaaaucaguucugcuacaa

SEQ ID NO: 1117634 - RNA, 19 nt, Homo sapiens
  misc_RNA (1)...(19): siRNA sense strand
cuacuuagaucacuuaaca

SEQ ID NO: 1117635 - RNA, 19 nt, Homo sapiens
  misc_RNA (1)...(19): siRNA sense strand
gguggaaacuugauuuguu

SEQ ID NO: 1117636 - RNA, 19 nt, Homo sapiens
  misc_RNA (1)...(19): siRNA sense strand
gcuugagguuucugaauua

SEQ ID NO: 1117637 - RNA, 19 nt, Homo sapiens
  misc_RNA (1)...(19): siRNA sense strand
guauuaagguucaagaaga

SEQ ID NO: 1117638 - RNA, 19 nt, Homo sapiens
  misc_RNA (1)...(19): siRNA sense strand
ggaaagaugauaaaggaaa

SEQ ID NO: 1117639 - RNA, 19 nt, Homo sapiens
  misc_RNA (1)...(19): siRNA sense strand
gaaaacagguagauaguga

SEQ ID NO: 1117640 - RNA, 19 nt, Homo sapiens
  misc_RNA (1)...(19): siRNA sense strand
guacaggcguuagcauuaa

SEQ ID NO: 1117641 - RNA, 19 nt, Homo sapiens
  misc_RNA (1)...(19): siRNA sense strand
gcaaguaacuaagcaguca

SEQ ID NO: 1117642 - RNA, 19 nt, Homo sapiens
  misc_RNA (1)...(19): siRNA sense strand
aaagaaaucuccagguuca

SEQ ID NO: 1117643 - RNA, 19 nt, Homo sapiens
  misc_RNA (1)...(19): siRNA sense strand
ugagagaggugauagaaau

SEQ ID NO: 1117644 - RNA, 19 nt, Homo sapiens
  misc_RNA (1)...(19): siRNA sense strand
guggagaguucaucuguaa

SEQ ID NO: 1117645 - RNA, 19 nt, Homo sapiens
  misc_RNA (1)...(19): siRNA sense strand
gaauauguguuagcuguga

SEQ ID NO: 1117646 - RNA, 19 nt, Homo sapiens
  misc_RNA (1)...(19): siRNA sense strand
gaguaucauuguaugguua

SEQ ID NO: 1117647 - RNA, 19 nt, Homo sapiens
  misc_RNA (1)...(19): siRNA sense strand
gaaacuugauuuguuguga

SEQ ID NO: 1117648 - RNA, 19 nt, Homo sapiens
  misc_RNA (1)...(19): siRNA sense strand
caaaguggcucaucaucau

SEQ ID NO: 1117649 - RNA, 19 nt, Homo sapiens
  misc_RNA (1)...(19): siRNA sense strand
caucugauacugagaaaua

SEQ ID NO: 1117650 - RNA, 19 nt, Homo sapiens
  misc_RNA (1)...(19): siRNA sense strand
gaagcuaaacuuucaagaa

SEQ ID NO: 1117651 - RNA, 19 nt, Homo sapiens
  misc_RNA (1)...(19): siRNA sense strand
caaagaagaagaagaguug

SEQ ID NO: 1117652 - RNA, 19 nt, Homo sapiens
  misc_RNA (1)...(19): siRNA sense strand
gugaagagucggaaacuua

SEQ ID NO: 1117653 - RNA, 19 nt, Homo sapiens
  misc_RNA (1)...(19): siRNA sense strand
aagagaaacucccuaagaa

SEQ ID NO: 1117654 - RNA, 19 nt, Homo sapiens
  misc_RNA (1)...(19): siRNA sense strand
acaaagaaaucuccagguu

SEQ ID NO: 1117655 - RNA, 19 nt, Homo sapiens
  misc_RNA (1)...(19): siRNA sense strand
cagcggagcuauaaacaga

SEQ ID NO: 1117656 - RNA, 19 nt, Homo sapiens
  misc_RNA (1)...(19): siRNA sense strand
caaagaagacuaguucaaa

SEQ ID NO: 1117657 - RNA, 19 nt, Homo sapiens
  misc_RNA (1)...(19): siRNA sense strand
gaagagaagcaaucuacaa

SEQ ID NO: 1117658 - RNA, 19 nt, Homo sapiens
  misc_RNA (1)...(19): siRNA sense strand
ugaaugagcuuacugaacu

SEQ ID NO: 1117659 - RNA, 19 nt, Homo sapiens
  misc_RNA (1)...(19): siRNA sense strand
ggagaagacagaagauaaa

SEQ ID NO: 1117660 - RNA, 19 nt, Homo sapiens
  misc_RNA (1)...(19): siRNA sense strand
cggagaaucuggagaagaa

SEQ ID NO: 1117661 - RNA, 19 nt, Homo sapiens
  misc_RNA (1)...(19): siRNA sense strand
gaauagaauugccaagaag

SEQ ID NO: 1117662 - RNA, 19 nt, Homo sapiens
  misc_RNA (1)...(19): siRNA sense strand
gcagaaggcacaguugaua

SEQ ID NO: 1117663 - RNA, 19 nt, Homo sapiens
  misc_RNA (1)...(19): siRNA sense strand
cagaggagguauuaaauca

SEQ ID NO: 1117664 - RNA, 19 nt, Homo sapiens
  misc_RNA (1)...(19): siRNA sense strand
aagaagaaccucaauauga

SEQ ID NO: 1117665 - RNA, 19 nt, Homo sapiens
  misc_RNA (1)...(19): siRNA sense strand
cagcguauuugagaauuua

SEQ ID NO: 1117666 - RNA, 19 nt, Homo sapiens
  misc_RNA (1)...(19): siRNA sense strand
gagccagacuuauuagaug

SEQ ID NO: 1117667 - RNA, 19 nt, Homo sapiens
  misc_RNA (1)...(19): siRNA sense strand
gaagacagaagauaaagau

SEQ ID NO: 1117668 - RNA, 19 nt, Homo sapiens
  misc_RNA (1)...(19): siRNA sense strand
ucaaggaggaggauuauuu

SEQ ID NO: 1117669 - RNA, 19 nt, Homo sapiens
  misc_RNA (1)...(19): siRNA sense strand
gaggaacaaagaacaaaua

SEQ ID NO: 1117670 - RNA, 19 nt, Homo sapiens
  misc_RNA (1)...(19): siRNA sense strand
gaacaacaguaugaaucuu

SEQ ID NO: 1117671 - RNA, 19 nt, Homo sapiens
  misc_RNA (1)...(19): siRNA sense strand
cagagaaauuccuaaagaa

SEQ ID NO: 1117672 - RNA, 19 nt, Homo sapiens
  misc_RNA (1)...(19): siRNA sense strand
gaagagagacgaaaacgua

SEQ ID NO: 1117673 - RNA, 19 nt, Homo sapiens
  misc_RNA (1)...(19): siRNA sense strand
gaagacuaguucaaauugu

SEQ ID NO: 1117674 - RNA, 19 nt, Homo sapiens
  misc_RNA (1)...(19): siRNA sense strand
gcugaagaauuuaaugaug

SEQ ID NO: 1117675 - RNA, 19 nt, Homo sapiens
  misc_RNA (1)...(19): siRNA sense strand
ggacucauccuugguguuu

SEQ ID NO: 1117676 - RNA, 19 nt, Homo sapiens
  misc_RNA (1)...(19): siRNA sense strand
gaagguggaaacuugauuu

SEQ ID NO: 1117677 - RNA, 19 nt, Homo sapiens
  misc_RNA (1)...(19): siRNA sense strand
aagaacacauuguaggaua

SEQ ID NO: 1117678 - RNA, 19 nt, Homo sapiens
  misc_RNA (1)...(19): siRNA sense strand
gaauccaucuuaugacauc

SEQ ID NO: 1117679 - RNA, 19 nt, Homo sapiens
  misc_RNA (1)...(19): siRNA sense strand
gugagaggacgauuauuua

SEQ ID NO: 1117680 - RNA, 19 nt, Homo sapiens
  misc_RNA (1)...(19): siRNA sense strand
ggaaagauuauacagcauu

SEQ ID NO: 1117681 - RNA, 19 nt, Homo sapiens
  misc_RNA (1)...(19): siRNA sense strand
gagaggugauagaaauuga

SEQ ID NO: 1117682 - RNA, 19 nt, Homo sapiens
  misc_RNA (1)...(19): siRNA sense strand
gacaacagaggagguauua

SEQ ID NO: 1117683 - RNA, 19 nt, Homo sapiens
  misc_RNA (1)...(19): siRNA sense strand
gggagaagacagaagauaa

SEQ ID NO: 1117684 - RNA, 19 nt, Homo sapiens
  misc_RNA (1)...(19): siRNA sense strand
ccucauaucucuggacuug

SEQ ID NO: 1117685 - RNA, 19 nt, Homo sapiens
  misc_RNA (1)...(19): siRNA sense strand
ugacaaugauguugaagug

SEQ ID NO: 1117686 - RNA, 19 nt, Homo sapiens
  misc_RNA (1)...(19): siRNA sense strand
cgacaaugauccugagaau

SEQ ID NO: 1117687 - RNA, 19 nt, Homo sapiens
  misc_RNA (1)...(19): siRNA sense strand
aagcagcgaugaacagaaa

SEQ ID NO: 1117688 - RNA, 19 nt, Homo sapiens
  misc_RNA (1)...(19): siRNA sense strand
gaauggagcauaugguaga

SEQ ID NO: 1117689 - RNA, 19 nt, Homo sapiens
  misc_RNA (1)...(19): siRNA sense strand
gaguaagaauggagcauau

SEQ ID NO: 1117690 - RNA, 19 nt, Homo sapiens
  misc_RNA (1)...(19): siRNA sense strand
gagauaaagagcaugagua

SEQ ID NO: 1117691 - RNA, 19 nt, Homo sapiens
  misc_RNA (1)...(19): siRNA sense strand
gaauuuauagccucagauu

SEQ ID NO: 1117692 - RNA, 19 nt, Homo sapiens
  misc_RNA (1)...(19): siRNA sense strand
ggaaggagaacaugaaucu

SEQ ID NO: 1117693 - RNA, 19 nt, Homo sapiens
  misc_RNA (1)...(19): siRNA sense strand
agaguugacugaagaagaa

SEQ ID NO: 1117694 - RNA, 19 nt, Homo sapiens
  misc_RNA (1)...(19): siRNA sense strand
gaagaagugggcugaagaa

SEQ ID NO: 1117695 - RNA, 19 nt, Homo sapiens
  misc_RNA (1)...(19): siRNA sense strand
gcaaguaacucucuucuua

SEQ ID NO: 1117696 - RNA, 19 nt, Homo sapiens
  misc_RNA (1)...(19): siRNA sense strand
gaaaggagcugaagauagu

SEQ ID NO: 1117697 - RNA, 19 nt, Homo sapiens
  misc_RNA (1)...(19): siRNA sense strand
gcaaagaaguggacauuga

SEQ ID NO: 1117698 - RNA, 19 nt, Homo sapiens
  misc_RNA (1)...(19): siRNA sense strand
caacagcgaugcacuauug

SEQ ID NO: 1117699 - RNA, 19 nt, Homo sapiens
  misc_RNA (1)...(19): siRNA sense strand
caacagaaccagucaauuu

SEQ ID NO: 1117700 - RNA, 19 nt, Homo sapiens
  misc_RNA (1)...(19): siRNA sense strand
gcaguuaucuucaguuuua

SEQ ID NO: 1117701 - RNA, 19 nt, Homo sapiens
  misc_RNA (1)...(19): siRNA sense strand
guacaagggucaccuaguu

SEQ ID NO: 1117702 - RNA, 19 nt, Homo sapiens
  misc_RNA (1)...(19): siRNA sense strand
caacuugacuggcuccuuu

SEQ ID NO: 1117703 - RNA, 19 nt, Homo sapiens
  misc_RNA (1)...(19): siRNA sense strand
caacaugccuggaauucaa

SEQ ID NO: 1117704 - RNA, 19 nt, Homo sapiens
  misc_RNA (1)...(19): siRNA sense strand
guagggauauugaaauuga

SEQ ID NO: 1117705 - RNA, 19 nt, Homo sapiens
  misc_RNA (1)...(19): siRNA sense strand
ucacagcacucaauaguug

SEQ ID NO: 1117706 - RNA, 19 nt, Homo sapiens
  misc_RNA (1)...(19): siRNA sense strand
gcaacagucuccucuuuau

SEQ ID NO: 1117707 - RNA, 19 nt, Homo sapiens
  misc_RNA (1)...(19): siRNA sense strand
ccacuggcauccucuauaa

SEQ ID NO: 1117708 - RNA, 19 nt, Homo sapiens
  misc_RNA (1)...(19): siRNA sense strand
gaaaagcaguuaaccagua

SEQ ID NO: 1117709 - RNA, 19 nt, Homo sapiens
  misc_RNA (1)...(19): siRNA sense strand
ggaaugagaugaugucacu

SEQ ID NO: 1117710 - RNA, 19 nt, Homo sapiens
  misc_RNA (1)...(19): siRNA sense strand
gaaaacaucucaaacauag

SEQ ID NO: 1117711 - RNA, 19 nt, Homo sapiens
  misc_RNA (1)...(19): siRNA sense strand
gcaguaugauuaagaguga

SEQ ID NO: 1117712 - RNA, 19 nt, Homo sapiens
  misc_RNA (1)...(19): siRNA sense strand
gcaaggcuuuccuacagua

SEQ ID NO: 1117713 - RNA, 19 nt, Homo sapiens
  misc_RNA (1)...(19): siRNA sense strand
ugacaacacuucuuucuca

SEQ ID NO: 1117714 - RNA, 19 nt, Homo sapiens
  misc_RNA (1)...(19): siRNA sense strand
gagaugaugucacuucaau

SEQ ID NO: 1117715 - RNA, 19 nt, Homo sapiens
  misc_RNA (1)...(19): siRNA sense strand
gaaacucagucuagagaga

SEQ ID NO: 1117716 - RNA, 19 nt, Homo sapiens
  misc_RNA (1)...(19): siRNA sense strand
gcagcaggcuacacaguuu

SEQ ID NO: 1117717 - RNA, 19 nt, Homo sapiens
  misc_RNA (1)...(19): siRNA sense strand
gaaaggagaagaagaagug

SEQ ID NO: 1117718 - RNA, 19 nt, Homo sapiens
  misc_RNA (1)...(19): siRNA sense strand
uaaugaaccuguaguguug

SEQ ID NO: 1117719 - RNA, 19 nt, Homo sapiens
  misc_RNA (1)...(19): siRNA sense strand
uaucaggccugcagaguaa

SEQ ID NO: 1117720 - RNA, 19 nt, Homo sapiens
  misc_RNA (1)...(19): siRNA sense strand
ugaaggcacuacuguuaua

SEQ ID NO: 1117721 - RNA, 19 nt, Homo sapiens
  misc_RNA (1)...(19): siRNA sense strand
gaggaaugcugaugucgaa

SEQ ID NO: 1117722 - RNA, 19 nt, Homo sapiens
  misc_RNA (1)...(19): siRNA sense strand
gcagucaaccaacauauuu

SEQ ID NO: 1117723 - RNA, 19 nt, Homo sapiens
  misc_RNA (1)...(19): siRNA sense strand
gacaaucaaccucaaguua

SEQ ID NO: 1117724 - RNA, 19 nt, Homo sapiens
  misc_RNA (1)...(19): siRNA sense strand
uugcauagcuguucaguga

SEQ ID NO: 1117725 - RNA, 19 nt, Homo sapiens
  misc_RNA (1)...(19): siRNA sense strand
gaacucaauuucuccacuu

SEQ ID NO: 1117726 - RNA, 19 nt, Homo sapiens
  misc_RNA (1)...(19): siRNA sense strand
gggaauauauguagugaca

SEQ ID NO: 1117727 - RNA, 19 nt, Homo sapiens
  misc_RNA (1)...(19): siRNA sense strand
caaagcaccucacuaugug

SEQ ID NO: 1117728 - RNA, 19 nt, Homo sapiens
  misc_RNA (1)...(19): siRNA sense strand
caucaggaauguucuuauu

SEQ ID NO: 1117729 - RNA, 19 nt, Homo sapiens
  misc_RNA (1)...(19): siRNA sense strand
acaacaagguaaugguuua

SEQ ID NO: 1117730 - RNA, 19 nt, Homo sapiens
  misc_RNA (1)...(19): siRNA sense strand
gcaaaugcagugugaauug

SEQ ID NO: 1117731 - RNA, 19 nt, Homo sapiens
  misc_RNA (1)...(19): siRNA sense strand
agaaacaucuguagcauca

SEQ ID NO: 1117732 - RNA, 19 nt, Homo sapiens
  misc_RNA (1)...(19): siRNA sense strand
caacaagucagucaaauuc

SEQ ID NO: 1117733 - RNA, 19 nt, Homo sapiens
  misc_RNA (1)...(19): siRNA sense strand
ggaacuauuucaucagaau

SEQ ID NO: 1117734 - RNA, 19 nt, Homo sapiens
  misc_RNA (1)...(19): siRNA sense strand
gcacuacuguuauagaagu

SEQ ID NO: 1117735 - RNA, 19 nt, Homo sapiens
  misc_RNA (1)...(19): siRNA sense strand
cagaguaacuggacgaaau

SEQ ID NO: 1117736 - RNA, 19 nt, Homo sapiens
  misc_RNA (1)...(19): siRNA sense strand
ucaggaauguucuuauuug

SEQ ID NO: 1117737 - RNA, 19 nt, Homo sapiens
  misc_RNA (1)...(19): siRNA sense strand
uuacagggcucuucaguuc

SEQ ID NO: 1117738 - RNA, 19 nt, Homo sapiens
  misc_RNA (1)...(19): siRNA sense strand
uguaagcccuggaauguuu

SEQ ID NO: 1117739 - RNA, 19 nt, Homo sapiens
  misc_RNA (1)...(19): siRNA sense strand
uggaagaucucaugauguu

SEQ ID NO: 1117740 - RNA, 19 nt, Homo sapiens
  misc_RNA (1)...(19): siRNA sense strand
gaaaacacguuaucuaauc

SEQ ID NO: 1117741 - RNA, 19 nt, Homo sapiens
  misc_RNA (1)...(19): siRNA sense strand
uggaagagcugaaaguguu

SEQ ID NO: 1117742 - RNA, 19 nt, Homo sapiens
  misc_RNA (1)...(19): siRNA sense strand
ccagagacccugacaacua

SEQ ID NO: 1117743 - RNA, 19 nt, Homo sapiens
  misc_RNA (1)...(19): siRNA sense strand
gcuggaagaucucaugaug

SEQ ID NO: 1117744 - RNA, 19 nt, Homo sapiens
  misc_RNA (1)...(19): siRNA sense strand
agaagaaacuggaacacaa

SEQ ID NO: 1117745 - RNA, 19 nt, Homo sapiens
  misc_RNA (1)...(19): siRNA sense strand
gaucaacucagcaaacauu

SEQ ID NO: 1117746 - RNA, 19 nt, Homo sapiens
  misc_RNA (1)...(19): siRNA sense strand
gaagagcccuauguugugu

SEQ ID NO: 1117747 - RNA, 19 nt, Homo sapiens
  misc_RNA (1)...(19): siRNA sense strand
ccauagcucuccucagauu

SEQ ID NO: 1117748 - RNA, 19 nt, Homo sapiens
  misc_RNA (1)...(19): siRNA sense strand
acagcaagcuccaauauca

SEQ ID NO: 1117749 - RNA, 19 nt, Homo sapiens
  misc_RNA (1)...(19): siRNA sense strand
cagcagacuucucacauga

SEQ ID NO: 1117750 - RNA, 19 nt, Homo sapiens
  misc_RNA (1)...(19): siRNA sense strand
gaguuaauaucaugaggaa

SEQ ID NO: 1117751 - RNA, 19 nt, Homo sapiens
  misc_RNA (1)...(19): siRNA sense strand
gaacuggaguaaagaagag

SEQ ID NO: 1117752 - RNA, 19 nt, Homo sapiens
  misc_RNA (1)...(19): siRNA sense strand
caacaacaacagagcauuu

SEQ ID NO: 1117753 - RNA, 19 nt, Homo sapiens
  misc_RNA (1)...(19): siRNA sense strand
gaacaaaugcagccuccaa

SEQ ID NO: 1117754 - RNA, 19 nt, Homo sapiens
  misc_RNA (1)...(19): siRNA sense strand
gcagcagucuucucauuca

SEQ ID NO: 1117755 - RNA, 19 nt, Homo sapiens
  misc_RNA (1)...(19): siRNA sense strand
gaaaugaaacuucuacaac

SEQ ID NO: 1117756 - RNA, 19 nt, Homo sapiens
  misc_RNA (1)...(19): siRNA sense strand
uaccagaccagauaauuua

SEQ ID NO: 1117757 - RNA, 19 nt, Homo sapiens
  misc_RNA (1)...(19): siRNA sense strand
aaauacaacuccuugcaaa

SEQ ID NO: 1117758 - RNA, 19 nt, Homo sapiens
  misc_RNA (1)...(19): siRNA sense strand
cagcaguuaucuucaguuu

SEQ ID NO: 1117759 - RNA, 19 nt, Homo sapiens
  misc_RNA (1)...(19): siRNA sense strand
gcaccgaacucaauuucuc

SEQ ID NO: 1117760 - RNA, 19 nt, Homo sapiens
  misc_RNA (1)...(19): siRNA sense strand
guaaugagaauguucaaga

SEQ ID NO: 1117761 - RNA, 19 nt, Homo sapiens
  misc_RNA (1)...(19): siRNA sense strand
gaaauacaacuccuugcaa

SEQ ID NO: 1117762 - RNA, 19 nt, Homo sapiens
  misc_RNA (1)...(19): siRNA sense strand
gaacaacaugccuggaauu

SEQ ID NO: 1117763 - RNA, 19 nt, Homo sapiens
  misc_RNA (1)...(19): siRNA sense strand
ggaaaugaaacuucuacaa

SEQ ID NO: 1117764 - RNA, 19 nt, Homo sapiens
  misc_RNA (1)...(19): siRNA sense strand
gcagacuucucacaugaug

SEQ ID NO: 1117765 - RNA, 19 nt, Homo sapiens
  misc_RNA (1)...(19): siRNA sense strand
ugagucagcuucagaauac

SEQ ID NO: 1117766 - RNA, 19 nt, Homo sapiens
  misc_RNA (1)...(19): siRNA sense strand
cagagacccugacaacuau

SEQ ID NO: 1117767 - RNA, 19 nt, Homo sapiens
  misc_RNA (1)...(19): siRNA sense strand
gaagaucucaugauguuca

SEQ ID NO: 1117768 - RNA, 19 nt, Homo sapiens
  misc_RNA (1)...(19): siRNA sense strand
gcguagggauauugaaauu

SEQ ID NO: 1117769 - RNA, 19 nt, Homo sapiens
  misc_RNA (1)...(19): siRNA sense strand
ccaaagcaccucacuaugu

SEQ ID NO: 1117770 - RNA, 19 nt, Homo sapiens
  misc_RNA (1)...(19): siRNA sense strand
ugaaccaacugcagaauuc

SEQ ID NO: 1117771 - RNA, 19 nt, Homo sapiens
  misc_RNA (1)...(19): siRNA sense strand
cagagucaguccacaguuu

SEQ ID NO: 1117772 - RNA, 19 nt, Homo sapiens
  misc_RNA (1)...(19): siRNA sense strand
gaauagugguacccaacaa

SEQ ID NO: 1117773 - RNA, 19 nt, Homo sapiens
  misc_RNA (1)...(19): siRNA sense strand
gauuaagagugaagauguu

SEQ ID NO: 1117774 - RNA, 19 nt, Homo sapiens
  misc_RNA (1)...(19): siRNA sense strand
caaacacccucuucuccaa

SEQ ID NO: 1117775 - RNA, 19 nt, Homo sapiens
  misc_RNA (1)...(19): siRNA sense strand
ucuaugaucuucucccaaa

SEQ ID NO: 1117776 - RNA, 19 nt, Homo sapiens
  misc_RNA (1)...(19): siRNA sense strand
gacaaaugcuggaagaucu

SEQ ID NO: 1117777 - RNA, 19 nt, Homo sapiens
  misc_RNA (1)...(19): siRNA sense strand
ccugaggacuugcuggaua

SEQ ID NO: 1117778 - RNA, 19 nt, Homo sapiens
  misc_RNA (1)...(19): siRNA sense strand
caacagcaagcuccaauau

SEQ ID NO: 1117779 - RNA, 19 nt, Homo sapiens
  misc_RNA (1)...(19): siRNA sense strand
gcaagggaaugagaugaug

SEQ ID NO: 1117780 - RNA, 19 nt, Homo sapiens
  misc_RNA (1)...(19): siRNA sense strand
guacagugguuaauuuguc

SEQ ID NO: 1117781 - RNA, 19 nt, Homo sapiens
  misc_RNA (1)...(19): siRNA sense strand
ggaaaggagcugaagauag

SEQ ID NO: 1117782 - RNA, 19 nt, Homo sapiens
  misc_RNA (1)...(19): siRNA sense strand
guaaagaagagcccuaugu

SEQ ID NO: 1117783 - RNA, 19 nt, Homo sapiens
  misc_RNA (1)...(19): siRNA sense strand
caccaaacaugauauucaa

SEQ ID NO: 1117784 - RNA, 19 nt, Homo sapiens
  misc_RNA (1)...(19): siRNA sense strand
caaccaacauauuucuuuc

SEQ ID NO: 1117785 - RNA, 19 nt, Homo sapiens
  misc_RNA (1)...(19): siRNA sense strand
ucacuucaaucuggaaauu

SEQ ID NO: 1117786 - RNA, 19 nt, Homo sapiens
  misc_RNA (1)...(19): siRNA sense strand
gagaaacucagucuagaga

SEQ ID NO: 1117787 - RNA, 19 nt, Homo sapiens
  misc_RNA (1)...(19): siRNA sense strand
gugaagauguuacuccaau

SEQ ID NO: 1117788 - RNA, 19 nt, Homo sapiens
  misc_RNA (1)...(19): siRNA sense strand
gaagaggccaugaaagcaa

SEQ ID NO: 1117789 - RNA, 19 nt, Homo sapiens
  misc_RNA (1)...(19): siRNA sense strand
gaauguaaaugugaagaag

SEQ ID NO: 1117790 - RNA, 19 nt, Homo sapiens
  misc_RNA (1)...(19): siRNA sense strand
gagcaccaguuccuacaau

SEQ ID NO: 1117791 - RNA, 19 nt, Homo sapiens
  misc_RNA (1)...(19): siRNA sense strand
caagagaaacucagucuag

SEQ ID NO: 1117792 - RNA, 19 nt, Homo sapiens
  misc_RNA (1)...(19): siRNA sense strand
gauccuagcaacaacauga

SEQ ID NO: 1117793 - RNA, 19 nt, Homo sapiens
  misc_RNA (1)...(19): siRNA sense strand
caacagcccaugcaauuuc

SEQ ID NO: 1117794 - RNA, 19 nt, Homo sapiens
  misc_RNA (1)...(19): siRNA sense strand
aaacaucuguagcaucaau

SEQ ID NO: 1117795 - RNA, 19 nt, Homo sapiens
  misc_RNA (1)...(19): siRNA sense strand
gcaaguaacucucuucuua

SEQ ID NO: 1117796 - RNA, 19 nt, Homo sapiens
  misc_RNA (1)...(19): siRNA sense strand
gaaaggagcugaagauagu

SEQ ID NO: 1117797 - RNA, 19 nt, Homo sapiens
  misc_RNA (1)...(19): siRNA sense strand
gcaaagaaguggacauuga

SEQ ID NO: 1117798 - RNA, 19 nt, Homo sapiens
  misc_RNA (1)...(19): siRNA sense strand
caacagcgaugcacuauug

SEQ ID NO: 1117799 - RNA, 19 nt, Homo sapiens
  misc_RNA (1)...(19): siRNA sense strand
caacagaaccagucaauuu

SEQ ID NO: 1117800 - RNA, 19 nt, Homo sapiens
  misc_RNA (1)...(19): siRNA sense strand
gcaguuaucuucaguuuua

SEQ ID NO: 1117801 - RNA, 19 nt, Homo sapiens
  misc_RNA (1)...(19): siRNA sense strand
guacaagggucaccuaguu

SEQ ID NO: 1117802 - RNA, 19 nt, Homo sapiens
  misc_RNA (1)...(19): siRNA sense strand
caacuugacuggcuccuuu

SEQ ID NO: 1117803 - RNA, 19 nt, Homo sapiens
  misc_RNA (1)...(19): siRNA sense strand
caacaugccuggaauucaa

SEQ ID NO: 1117804 - RNA, 19 nt, Homo sapiens
  misc_RNA (1)...(19): siRNA sense strand
guagggauauugaaauuga

SEQ ID NO: 1117805 - RNA, 19 nt, Homo sapiens
  misc_RNA (1)...(19): siRNA sense strand
ucacagcacucaauaguug

SEQ ID NO: 1117806 - RNA, 19 nt, Homo sapiens
  misc_RNA (1)...(19): siRNA sense strand
gcaacagucuccucuuuau

SEQ ID NO: 1117807 - RNA, 19 nt, Homo sapiens
  misc_RNA (1)...(19): siRNA sense strand
ccacuggcauccucuauaa

SEQ ID NO: 1117808 - RNA, 19 nt, Homo sapiens
  misc_RNA (1)...(19): siRNA sense strand
gaaaagcaguuaaccagua

SEQ ID NO: 1117809 - RNA, 19 nt, Homo sapiens
  misc_RNA (1)...(19): siRNA sense strand
ggaaugagaugaugucacu

SEQ ID NO: 1117810 - RNA, 19 nt, Homo sapiens
  misc_RNA (1)...(19): siRNA sense strand
gaaaacaucucaaacauag

SEQ ID NO: 1117811 - RNA, 19 nt, Homo sapiens
  misc_RNA (1)...(19): siRNA sense strand
gcaguaugauuaagaguga

SEQ ID NO: 1117812 - RNA, 19 nt, Homo sapiens
  misc_RNA (1)...(19): siRNA sense strand
gcaaggcuuuccuacagua

SEQ ID NO: 1117813 - RNA, 19 nt, Homo sapiens
  misc_RNA (1)...(19): siRNA sense strand
ugacaacacuucuuucuca

SEQ ID NO: 1117814 - RNA, 19 nt, Homo sapiens
  misc_RNA (1)...(19): siRNA sense strand
gagaugaugucacuucaau

SEQ ID NO: 1117815 - RNA, 19 nt, Homo sapiens
  misc_RNA (1)...(19): siRNA sense strand
gaaacucagucuagagaga

SEQ ID NO: 1117816 - RNA, 19 nt, Homo sapiens
  misc_RNA (1)...(19): siRNA sense strand
gcagcaggcuacacaguuu

SEQ ID NO: 1117817 - RNA, 19 nt, Homo sapiens
  misc_RNA (1)...(19): siRNA sense strand
gaaaggagaagaagaagug

SEQ ID NO: 1117818 - RNA, 19 nt, Homo sapiens
  misc_RNA (1)...(19): siRNA sense strand
uaaugaaccuguaguguug

SEQ ID NO: 1117819 - RNA, 19 nt, Homo sapiens
  misc_RNA (1)...(19): siRNA sense strand
uaucaggccugcagaguaa

SEQ ID NO: 1117820 - RNA, 19 nt, Homo sapiens
  misc_RNA (1)...(19): siRNA sense strand
ugaaggcacuacuguuaua

SEQ ID NO: 1117821 - RNA, 19 nt, Homo sapiens
  misc_RNA (1)...(19): siRNA sense strand
gaggaaugcugaugucgaa

SEQ ID NO: 1117822 - RNA, 19 nt, Homo sapiens
  misc_RNA (1)...(19): siRNA sense strand
gcagucaaccaacauauuu

SEQ ID NO: 1117823 - RNA, 19 nt, Homo sapiens
  misc_RNA (1)...(19): siRNA sense strand
gacaaucaaccucaaguua

SEQ ID NO: 1117824 - RNA, 19 nt, Homo sapiens
  misc_RNA (1)...(19): siRNA sense strand
uugcauagcuguucaguga

SEQ ID NO: 1117825 - RNA, 19 nt, Homo sapiens
  misc_RNA (1)...(19): siRNA sense strand
gaacucaauuucuccacuu

SEQ ID NO: 1117826 - RNA, 19 nt, Homo sapiens
  misc_RNA (1)...(19): siRNA sense strand
gggaauauauguagugaca

SEQ ID NO: 1117827 - RNA, 19 nt, Homo sapiens
  misc_RNA (1)...(19): siRNA sense strand
caaagcaccucacuaugug

SEQ ID NO: 1117828 - RNA, 19 nt, Homo sapiens
  misc_RNA (1)...(19): siRNA sense strand
caucaggaauguucuuauu

SEQ ID NO: 1117829 - RNA, 19 nt, Homo sapiens
  misc_RNA (1)...(19): siRNA sense strand
acaacaagguaaugguuua

SEQ ID NO: 1117830 - RNA, 19 nt, Homo sapiens
  misc_RNA (1)...(19): siRNA sense strand
gcaaaugcagugugaauug

SEQ ID NO: 1117831 - RNA, 19 nt, Homo sapiens
  misc_RNA (1)...(19): siRNA sense strand
gcacuacuguuauagaagu

SEQ ID NO: 1117832 - RNA, 19 nt, Homo sapiens
  misc_RNA (1)...(19): siRNA sense strand
caacaagucagucaaauuc

SEQ ID NO: 1117833 - RNA, 19 nt, Homo sapiens
  misc_RNA (1)...(19): siRNA sense strand
ggaacuauuucaucagaau

SEQ ID NO: 1117834 - RNA, 19 nt, Homo sapiens
  misc_RNA (1)...(19): siRNA sense strand
cagaguaacuggacgaaau

SEQ ID NO: 1117835 - RNA, 19 nt, Homo sapiens
  misc_RNA (1)...(19): siRNA sense strand
ucaggaauguucuuauuug

SEQ ID NO: 1117836 - RNA, 19 nt, Homo sapiens
  misc_RNA (1)...(19): siRNA sense strand
uuacagggcucuucaguuc

SEQ ID NO: 1117837 - RNA, 19 nt, Homo sapiens
  misc_RNA (1)...(19): siRNA sense strand
uguaagcccuggaauguuu

SEQ ID NO: 1117838 - RNA, 19 nt, Homo sapiens
  misc_RNA (1)...(19): siRNA sense strand
uggaagaucucaugauguu

SEQ ID NO: 1117839 - RNA, 19 nt, Homo sapiens
  misc_RNA (1)...(19): siRNA sense strand
gaaaacacguuaucuaauc

SEQ ID NO: 1117840 - RNA, 19 nt, Homo sapiens
  misc_RNA (1)...(19): siRNA sense strand
uggaagagcugaaaguguu

SEQ ID NO: 1117841 - RNA, 19 nt, Homo sapiens
  misc_RNA (1)...(19): siRNA sense strand
ccagagacccugacaacua

SEQ ID NO: 1117842 - RNA, 19 nt, Homo sapiens
  misc_RNA (1)...(19): siRNA sense strand
gcuggaagaucucaugaug

SEQ ID NO: 1117843 - RNA, 19 nt, Homo sapiens
  misc_RNA (1)...(19): siRNA sense strand
agaagaaacuggaacacaa

SEQ ID NO: 1117844 - RNA, 19 nt, Homo sapiens
  misc_RNA (1)...(19): siRNA sense strand
gaucaacucagcaaacauu

SEQ ID NO: 1117845 - RNA, 19 nt, Homo sapiens
  misc_RNA (1)...(19): siRNA sense strand
gaagagcccuauguugugu

SEQ ID NO: 1117846 - RNA, 19 nt, Homo sapiens
  misc_RNA (1)...(19): siRNA sense strand
ccauagcucuccucagauu

SEQ ID NO: 1117847 - RNA, 19 nt, Homo sapiens
  misc_RNA (1)...(19): siRNA sense strand
acagcaagcuccaauauca

SEQ ID NO: 1117848 - RNA, 19 nt, Homo sapiens
  misc_RNA (1)...(19): siRNA sense strand
cagcagacuucucacauga

SEQ ID NO: 1117849 - RNA, 19 nt, Homo sapiens
  misc_RNA (1)...(19): siRNA sense strand
gaguuaauaucaugaggaa

SEQ ID NO: 1117850 - RNA, 19 nt, Homo sapiens
  misc_RNA (1)...(19): siRNA sense strand
gaacuggaguaaagaagag

SEQ ID NO: 1117851 - RNA, 19 nt, Homo sapiens
  misc_RNA (1)...(19): siRNA sense strand
caacaacaacagagcauuu

SEQ ID NO: 1117852 - RNA, 19 nt, Homo sapiens
  misc_RNA (1)...(19): siRNA sense strand
gaacaaaugcagccuccaa

SEQ ID NO: 1117853 - RNA, 19 nt, Homo sapiens
  misc_RNA (1)...(19): siRNA sense strand
gcagcagucuucucauuca

SEQ ID NO: 1117854 - RNA, 19 nt, Homo sapiens
  misc_RNA (1)...(19): siRNA sense strand
gaaaugaaacuucuacaac

SEQ ID NO: 1117855 - RNA, 19 nt, Homo sapiens
  misc_RNA (1)...(19): siRNA sense strand
uaccagaccagauaauuua

SEQ ID NO: 1117856 - RNA, 19 nt, Homo sapiens
  misc_RNA (1)...(19): siRNA sense strand
aaauacaacuccuugcaaa

SEQ ID NO: 1117857 - RNA, 19 nt, Homo sapiens
  misc_RNA (1)...(19): siRNA sense strand
cagcaguuaucuucaguuu

SEQ ID NO: 1117858 - RNA, 19 nt, Homo sapiens
  misc_RNA (1)...(19): siRNA sense strand
gcaccgaacucaauuucuc

SEQ ID NO: 1117859 - RNA, 19 nt, Homo sapiens
  misc_RNA (1)...(19): siRNA sense strand
guaaugagaauguucaaga

SEQ ID NO: 1117860 - RNA, 19 nt, Homo sapiens
  misc_RNA (1)...(19): siRNA sense strand
gaaauacaacuccuugcaa

SEQ ID NO: 1117861 - RNA, 19 nt, Homo sapiens
  misc_RNA (1)...(19): siRNA sense strand
gaacaacaugccuggaauu

SEQ ID NO: 1117862 - RNA, 19 nt, Homo sapiens
  misc_RNA (1)...(19): siRNA sense strand
ggaaaugaaacuucuacaa

SEQ ID NO: 1117863 - RNA, 19 nt, Homo sapiens
  misc_RNA (1)...(19): siRNA sense strand
gcagacuucucacaugaug

SEQ ID NO: 1117864 - RNA, 19 nt, Homo sapiens
  misc_RNA (1)...(19): siRNA sense strand
ugagucagcuucagaauac

SEQ ID NO: 1117865 - RNA, 19 nt, Homo sapiens
  misc_RNA (1)...(19): siRNA sense strand
cagagacccugacaacuau

SEQ ID NO: 1117866 - RNA, 19 nt, Homo sapiens
  misc_RNA (1)...(19): siRNA sense strand
gaagaucucaugauguuca

SEQ ID NO: 1117867 - RNA, 19 nt, Homo sapiens
  misc_RNA (1)...(19): siRNA sense strand
gcguagggauauugaaauu

SEQ ID NO: 1117868 - RNA, 19 nt, Homo sapiens
  misc_RNA (1)...(19): siRNA sense strand
ccaaagcaccucacuaugu

SEQ ID NO: 1117869 - RNA, 19 nt, Homo sapiens
  misc_RNA (1)...(19): siRNA sense strand
ugaaccaacugcagaauuc

SEQ ID NO: 1117870 - RNA, 19 nt, Homo sapiens
  misc_RNA (1)...(19): siRNA sense strand
cagagucaguccacaguuu

SEQ ID NO: 1117871 - RNA, 19 nt, Homo sapiens
  misc_RNA (1)...(19): siRNA sense strand
gaauagugguacccaacaa

SEQ ID NO: 1117872 - RNA, 19 nt, Homo sapiens
  misc_RNA (1)...(19): siRNA sense strand
gauuaagagugaagauguu

SEQ ID NO: 1117873 - RNA, 19 nt, Homo sapiens
  misc_RNA (1)...(19): siRNA sense strand
caaacacccucuucuccaa

SEQ ID NO: 1117874 - RNA, 19 nt, Homo sapiens
  misc_RNA (1)...(19): siRNA sense strand
gacaaaugcuggaagaucu

SEQ ID NO: 1117875 - RNA, 19 nt, Homo sapiens
  misc_RNA (1)...(19): siRNA sense strand
ccugaggacuugcuggaua

SEQ ID NO: 1117876 - RNA, 19 nt, Homo sapiens
  misc_RNA (1)...(19): siRNA sense strand
caacagcaagcuccaauau

SEQ ID NO: 1117877 - RNA, 19 nt, Homo sapiens
  misc_RNA (1)...(19): siRNA sense strand
gcaagggaaugagaugaug

SEQ ID NO: 1117878 - RNA, 19 nt, Homo sapiens
  misc_RNA (1)...(19): siRNA sense strand
guacagugguuaauuuguc

SEQ ID NO: 1117879 - RNA, 19 nt, Homo sapiens
  misc_RNA (1)...(19): siRNA sense strand
ggaaaggagcugaagauag

SEQ ID NO: 1117880 - RNA, 19 nt, Homo sapiens
  misc_RNA (1)...(19): siRNA sense strand
guaaagaagagcccuaugu

SEQ ID NO: 1117881 - RNA, 19 nt, Homo sapiens
  misc_RNA (1)...(19): siRNA sense strand
caccaaacaugauauucaa

SEQ ID NO: 1117882 - RNA, 19 nt, Homo sapiens
  misc_RNA (1)...(19): siRNA sense strand
caaccaacauauuucuuuc

SEQ ID NO: 1117883 - RNA, 19 nt, Homo sapiens
  misc_RNA (1)...(19): siRNA sense strand
ucacuucaaucuggaaauu

SEQ ID NO: 1117884 - RNA, 19 nt, Homo sapiens
  misc_RNA (1)...(19): siRNA sense strand
gagaaacucagucuagaga

SEQ ID NO: 1117885 - RNA, 19 nt, Homo sapiens
  misc_RNA (1)...(19): siRNA sense strand
gugaagauguuacuccaau

SEQ ID NO: 1117886 - RNA, 19 nt, Homo sapiens
  misc_RNA (1)...(19): siRNA sense strand
gaagaggccaugaaagcaa

SEQ ID NO: 1117887 - RNA, 19 nt, Homo sapiens
  misc_RNA (1)...(19): siRNA sense strand
gaauguaaaugugaagaag

SEQ ID NO: 1117888 - RNA, 19 nt, Homo sapiens
  misc_RNA (1)...(19): siRNA sense strand
gagcaccaguuccuacaau

SEQ ID NO: 1117889 - RNA, 19 nt, Homo sapiens
  misc_RNA (1)...(19): siRNA sense strand
caagagaaacucagucuag

SEQ ID NO: 1117890 - RNA, 19 nt, Homo sapiens
  misc_RNA (1)...(19): siRNA sense strand
uaaagaagagcccuauguu

SEQ ID NO: 1117891 - RNA, 19 nt, Homo sapiens
  misc_RNA (1)...(19): siRNA sense strand
caacagcccaugcaauuuc

SEQ ID NO: 1117892 - RNA, 19 nt, Homo sapiens
  misc_RNA (1)...(19): siRNA sense strand
gauccuagcaacaacauga

SEQ ID NO: 1117893 - RNA, 19 nt, Homo sapiens
  misc_RNA (1)...(19): siRNA sense strand
cagcaaggcuuuccuacag

SEQ ID NO: 1117894 - RNA, 19 nt, Homo sapiens
  misc_RNA (1)...(19): siRNA sense strand
gcagucaccacuacaagaa

SEQ ID NO: 1117895 - RNA, 19 nt, Homo sapiens
  misc_RNA (1)...(19): siRNA sense strand
gcaaguaacucucuucuua

SEQ ID NO: 1117896 - RNA, 19 nt, Homo sapiens
  misc_RNA (1)...(19): siRNA sense strand
gaaaggagcugaagauagu

SEQ ID NO: 1117897 - RNA, 19 nt, Homo sapiens
  misc_RNA (1)...(19): siRNA sense strand
gcaaagaaguggacauuga

SEQ ID NO: 1117898 - RNA, 19 nt, Homo sapiens
  misc_RNA (1)...(19): siRNA sense strand
caacagcgaugcacuauug

SEQ ID NO: 1117899 - RNA, 19 nt, Homo sapiens
  misc_RNA (1)...(19): siRNA sense strand
caacagaaccagucaauuu

SEQ ID NO: 1117900 - RNA, 19 nt, Homo sapiens
  misc_RNA (1)...(19): siRNA sense strand
gcaguuaucuucaguuuua

SEQ ID NO: 1117901 - RNA, 19 nt, Homo sapiens
  misc_RNA (1)...(19): siRNA sense strand
guacaagggucaccuaguu

SEQ ID NO: 1117902 - RNA, 19 nt, Homo sapiens
  misc_RNA (1)...(19): siRNA sense strand
caacuugacuggcuccuuu

SEQ ID NO: 1117903 - RNA, 19 nt, Homo sapiens
  misc_RNA (1)...(19): siRNA sense strand
caacaugccuggaauucaa

SEQ ID NO: 1117904 - RNA, 19 nt, Homo sapiens
  misc_RNA (1)...(19): siRNA sense strand
guagggauauugaaauuga

SEQ ID NO: 1117905 - RNA, 19 nt, Homo sapiens
  misc_RNA (1)...(19): siRNA sense strand
ucacagcacucaauaguug

SEQ ID NO: 1117906 - RNA, 19 nt, Homo sapiens
  misc_RNA (1)...(19): siRNA sense strand
gcaacagucuccucuuuau

SEQ ID NO: 1117907 - RNA, 19 nt, Homo sapiens
  misc_RNA (1)...(19): siRNA sense strand
ccacuggcauccucuauaa

SEQ ID NO: 1117908 - RNA, 19 nt, Homo sapiens
  misc_RNA (1)...(19): siRNA sense strand
gaaaagcaguuaaccagua

SEQ ID NO: 1117909 - RNA, 19 nt, Homo sapiens
  misc_RNA (1)...(19): siRNA sense strand
ggaaugagaugaugucacu

SEQ ID NO: 1117910 - RNA, 19 nt, Homo sapiens
  misc_RNA (1)...(19): siRNA sense strand
gaaaacaucucaaacauag

SEQ ID NO: 1117911 - RNA, 19 nt, Homo sapiens
  misc_RNA (1)...(19): siRNA sense strand
gcaguaugauuaagaguga

SEQ ID NO: 1117912 - RNA, 19 nt, Homo sapiens
  misc_RNA (1)...(19): siRNA sense strand
gcaaggcuuuccuacagua

SEQ ID NO: 1117913 - RNA, 19 nt, Homo sapiens
  misc_RNA (1)...(19): siRNA sense strand
ugacaacacuucuuucuca

SEQ ID NO: 1117914 - RNA, 19 nt, Homo sapiens
  misc_RNA (1)...(19): siRNA sense strand
gagaugaugucacuucaau

SEQ ID NO: 1117915 - RNA, 19 nt, Homo sapiens
  misc_RNA (1)...(19): siRNA sense strand
gaaacucagucuagagaga

SEQ ID NO: 1117916 - RNA, 19 nt, Homo sapiens
  misc_RNA (1)...(19): siRNA sense strand
gcagcaggcuacacaguuu

SEQ ID NO: 1117917 - RNA, 19 nt, Homo sapiens
  misc_RNA (1)...(19): siRNA sense strand
gaaaggagaagaagaagug

SEQ ID NO: 1117918 - RNA, 19 nt, Homo sapiens
  misc_RNA (1)...(19): siRNA sense strand
uaaugaaccuguaguguug

SEQ ID NO: 1117919 - RNA, 19 nt, Homo sapiens
  misc_RNA (1)...(19): siRNA sense strand
uaucaggccugcagaguaa

SEQ ID NO: 1117920 - RNA, 19 nt, Homo sapiens
  misc_RNA (1)...(19): siRNA sense strand
ugaaggcacuacuguuaua

SEQ ID NO: 1117921 - RNA, 19 nt, Homo sapiens
  misc_RNA (1)...(19): siRNA sense strand
gaggaaugcugaugucgaa

SEQ ID NO: 1117922 - RNA, 19 nt, Homo sapiens
  misc_RNA (1)...(19): siRNA sense strand
gcagucaaccaacauauuu

SEQ ID NO: 1117923 - RNA, 19 nt, Homo sapiens
  misc_RNA (1)...(19): siRNA sense strand
gacaaucaaccucaaguua

SEQ ID NO: 1117924 - RNA, 19 nt, Homo sapiens
  misc_RNA (1)...(19): siRNA sense strand
uugcauagcuguucaguga

SEQ ID NO: 1117925 - RNA, 19 nt, Homo sapiens
  misc_RNA (1)...(19): siRNA sense strand
gaacucaauuucuccacuu

SEQ ID NO: 1117926 - RNA, 19 nt, Homo sapiens
  misc_RNA (1)...(19): siRNA sense strand
gggaauauauguagugaca

SEQ ID NO: 1117927 - RNA, 19 nt, Homo sapiens
  misc_RNA (1)...(19): siRNA sense strand
caaagcaccucacuaugug

SEQ ID NO: 1117928 - RNA, 19 nt, Homo sapiens
  misc_RNA (1)...(19): siRNA sense strand
caucaggaauguucuuauu

SEQ ID NO: 1117929 - RNA, 19 nt, Homo sapiens
  misc_RNA (1)...(19): siRNA sense strand
acaacaagguaaugguuua

SEQ ID NO: 1117930 - RNA, 19 nt, Homo sapiens
  misc_RNA (1)...(19): siRNA sense strand
gcaaaugcagugugaauug

SEQ ID NO: 1117931 - RNA, 19 nt, Homo sapiens
  misc_RNA (1)...(19): siRNA sense strand
gcacuacuguuauagaagu

SEQ ID NO: 1117932 - RNA, 19 nt, Homo sapiens
  misc_RNA (1)...(19): siRNA sense strand
caacaagucagucaaauuc

SEQ ID NO: 1117933 - RNA, 19 nt, Homo sapiens
  misc_RNA (1)...(19): siRNA sense strand
ggaacuauuucaucagaau

SEQ ID NO: 1117934 - RNA, 19 nt, Homo sapiens
  misc_RNA (1)...(19): siRNA sense strand
cagaguaacuggacgaaau

SEQ ID NO: 1117935 - RNA, 19 nt, Homo sapiens
  misc_RNA (1)...(19): siRNA sense strand
ucaggaauguucuuauuug

SEQ ID NO: 1117936 - RNA, 19 nt, Homo sapiens
  misc_RNA (1)...(19): siRNA sense strand
uuacagggcucuucaguuc

SEQ ID NO: 1117937 - RNA, 19 nt, Homo sapiens
  misc_RNA (1)...(19): siRNA sense strand
uguaagcccuggaauguuu

SEQ ID NO: 1117938 - RNA, 19 nt, Homo sapiens
  misc_RNA (1)...(19): siRNA sense strand
uggaagaucucaugauguu

SEQ ID NO: 1117939 - RNA, 19 nt, Homo sapiens
  misc_RNA (1)...(19): siRNA sense strand
gaaaacacguuaucuaauc

SEQ ID NO: 1117940 - RNA, 19 nt, Homo sapiens
  misc_RNA (1)...(19): siRNA sense strand
uggaagagcugaaaguguu

SEQ ID NO: 1117941 - RNA, 19 nt, Homo sapiens
  misc_RNA (1)...(19): siRNA sense strand
ccagagacccugacaacua

SEQ ID NO: 1117942 - RNA, 19 nt, Homo sapiens
  misc_RNA (1)...(19): siRNA sense strand
gcuggaagaucucaugaug

SEQ ID NO: 1117943 - RNA, 19 nt, Homo sapiens
  misc_RNA (1)...(19): siRNA sense strand
agaagaaacuggaacacaa

SEQ ID NO: 1117944 - RNA, 19 nt, Homo sapiens
  misc_RNA (1)...(19): siRNA sense strand
gaucaacucagcaaacauu

SEQ ID NO: 1117945 - RNA, 19 nt, Homo sapiens
  misc_RNA (1)...(19): siRNA sense strand
gaagagcccuauguugugu

SEQ ID NO: 1117946 - RNA, 19 nt, Homo sapiens
  misc_RNA (1)...(19): siRNA sense strand
ccauagcucuccucagauu

SEQ ID NO: 1117947 - RNA, 19 nt, Homo sapiens
  misc_RNA (1)...(19): siRNA sense strand
acagcaagcuccaauauca

SEQ ID NO: 1117948 - RNA, 19 nt, Homo sapiens
  misc_RNA (1)...(19): siRNA sense strand
cagcagacuucucacauga

SEQ ID NO: 1117949 - RNA, 19 nt, Homo sapiens
  misc_RNA (1)...(19): siRNA sense strand
gaguuaauaucaugaggaa

SEQ ID NO: 1117950 - RNA, 19 nt, Homo sapiens
  misc_RNA (1)...(19): siRNA sense strand
gaacuggaguaaagaagag

SEQ ID NO: 1117951 - RNA, 19 nt, Homo sapiens
  misc_RNA (1)...(19): siRNA sense strand
caacaacaacagagcauuu

SEQ ID NO: 1117952 - RNA, 19 nt, Homo sapiens
  misc_RNA (1)...(19): siRNA sense strand
gaacaaaugcagccuccaa

SEQ ID NO: 1117953 - RNA, 19 nt, Homo sapiens
  misc_RNA (1)...(19): siRNA sense strand
gcagcagucuucucauuca

SEQ ID NO: 1117954 - RNA, 19 nt, Homo sapiens
  misc_RNA (1)...(19): siRNA sense strand
gaaaugaaacuucuacaac

SEQ ID NO: 1117955 - RNA, 19 nt, Homo sapiens
  misc_RNA (1)...(19): siRNA sense strand
uaccagaccagauaauuua

SEQ ID NO: 1117956 - RNA, 19 nt, Homo sapiens
  misc_RNA (1)...(19): siRNA sense strand
aaauacaacuccuugcaaa

SEQ ID NO: 1117957 - RNA, 19 nt, Homo sapiens
  misc_RNA (1)...(19): siRNA sense strand
cagcaguuaucuucaguuu

SEQ ID NO: 1117958 - RNA, 19 nt, Homo sapiens
  misc_RNA (1)...(19): siRNA sense strand
gcaccgaacucaauuucuc

SEQ ID NO: 1117959 - RNA, 19 nt, Homo sapiens
  misc_RNA (1)...(19): siRNA sense strand
guaaugagaauguucaaga

SEQ ID NO: 1117960 - RNA, 19 nt, Homo sapiens
  misc_RNA (1)...(19): siRNA sense strand
gaaauacaacuccuugcaa

SEQ ID NO: 1117961 - RNA, 19 nt, Homo sapiens
  misc_RNA (1)...(19): siRNA sense strand
gaacaacaugccuggaauu

SEQ ID NO: 1117962 - RNA, 19 nt, Homo sapiens
  misc_RNA (1)...(19): siRNA sense strand
ggaaaugaaacuucuacaa

SEQ ID NO: 1117963 - RNA, 19 nt, Homo sapiens
  misc_RNA (1)...(19): siRNA sense strand
gcagacuucucacaugaug

SEQ ID NO: 1117964 - RNA, 19 nt, Homo sapiens
  misc_RNA (1)...(19): siRNA sense strand
ugagucagcuucagaauac

SEQ ID NO: 1117965 - RNA, 19 nt, Homo sapiens
  misc_RNA (1)...(19): siRNA sense strand
cagagacccugacaacuau

SEQ ID NO: 1117966 - RNA, 19 nt, Homo sapiens
  misc_RNA (1)...(19): siRNA sense strand
gaagaucucaugauguuca

SEQ ID NO: 1117967 - RNA, 19 nt, Homo sapiens
  misc_RNA (1)...(19): siRNA sense strand
gcguagggauauugaaauu

SEQ ID NO: 1117968 - RNA, 19 nt, Homo sapiens
  misc_RNA (1)...(19): siRNA sense strand
ccaaagcaccucacuaugu

SEQ ID NO: 1117969 - RNA, 19 nt, Homo sapiens
  misc_RNA (1)...(19): siRNA sense strand
ugaaccaacugcagaauuc

SEQ ID NO: 1117970 - RNA, 19 nt, Homo sapiens
  misc_RNA (1)...(19): siRNA sense strand
cagagucaguccacaguuu

SEQ ID NO: 1117971 - RNA, 19 nt, Homo sapiens
  misc_RNA (1)...(19): siRNA sense strand
gaauagugguacccaacaa

SEQ ID NO: 1117972 - RNA, 19 nt, Homo sapiens
  misc_RNA (1)...(19): siRNA sense strand
gauuaagagugaagauguu

SEQ ID NO: 1117973 - RNA, 19 nt, Homo sapiens
  misc_RNA (1)...(19): siRNA sense strand
caaacacccucuucuccaa

SEQ ID NO: 1117974 - RNA, 19 nt, Homo sapiens
  misc_RNA (1)...(19): siRNA sense strand
gacaaaugcuggaagaucu

SEQ ID NO: 1117975 - RNA, 19 nt, Homo sapiens
  misc_RNA (1)...(19): siRNA sense strand
ccugaggacuugcuggaua

SEQ ID NO: 1117976 - RNA, 19 nt, Homo sapiens
  misc_RNA (1)...(19): siRNA sense strand
caacagcaagcuccaauau

SEQ ID NO: 1117977 - RNA, 19 nt, Homo sapiens
  misc_RNA (1)...(19): siRNA sense strand
gcaagggaaugagaugaug

SEQ ID NO: 1117978 - RNA, 19 nt, Homo sapiens
  misc_RNA (1)...(19): siRNA sense strand
guacagugguuaauuuguc

SEQ ID NO: 1117979 - RNA, 19 nt, Homo sapiens
  misc_RNA (1)...(19): siRNA sense strand
ggaaaggagcugaagauag

SEQ ID NO: 1117980 - RNA, 19 nt, Homo sapiens
  misc_RNA (1)...(19): siRNA sense strand
guaaagaagagcccuaugu

SEQ ID NO: 1117981 - RNA, 19 nt, Homo sapiens
  misc_RNA (1)...(19): siRNA sense strand
caccaaacaugauauucaa

SEQ ID NO: 1117982 - RNA, 19 nt, Homo sapiens
  misc_RNA (1)...(19): siRNA sense strand
caaccaacauauuucuuuc

SEQ ID NO: 1117983 - RNA, 19 nt, Homo sapiens
  misc_RNA (1)...(19): siRNA sense strand
ucacuucaaucuggaaauu

SEQ ID NO: 1117984 - RNA, 19 nt, Homo sapiens
  misc_RNA (1)...(19): siRNA sense strand
gagaaacucagucuagaga

SEQ ID NO: 1117985 - RNA, 19 nt, Homo sapiens
  misc_RNA (1)...(19): siRNA sense strand
gugaagauguuacuccaau

SEQ ID NO: 1117986 - RNA, 19 nt, Homo sapiens
  misc_RNA (1)...(19): siRNA sense strand
gaagaggccaugaaagcaa

SEQ ID NO: 1117987 - RNA, 19 nt, Homo sapiens
  misc_RNA (1)...(19): siRNA sense strand
gaauguaaaugugaagaag

SEQ ID NO: 1117988 - RNA, 19 nt, Homo sapiens
  misc_RNA (1)...(19): siRNA sense strand
gagcaccaguuccuacaau

SEQ ID NO: 1117989 - RNA, 19 nt, Homo sapiens
  misc_RNA (1)...(19): siRNA sense strand
caagagaaacucagucuag

SEQ ID NO: 1117990 - RNA, 19 nt, Homo sapiens
  misc_RNA (1)...(19): siRNA sense strand
uaaagaagagcccuauguu

SEQ ID NO: 1117991 - RNA, 19 nt, Homo sapiens
  misc_RNA (1)...(19): siRNA sense strand
caacagcccaugcaauuuc

SEQ ID NO: 1117992 - RNA, 19 nt, Homo sapiens
  misc_RNA (1)...(19): siRNA sense strand
gauccuagcaacaacauga

SEQ ID NO: 1117993 - RNA, 19 nt, Homo sapiens
  misc_RNA (1)...(19): siRNA sense strand
cagcaaggcuuuccuacag

SEQ ID NO: 1117994 - RNA, 19 nt, Homo sapiens
  misc_RNA (1)...(19): siRNA sense strand
gcagucaccacuacaagaa

SEQ ID NO: 1117995 - RNA, 19 nt, Homo sapiens
  misc_RNA (1)...(19): siRNA sense strand
gcaaguaacucucuucuua

SEQ ID NO: 1117996 - RNA, 19 nt, Homo sapiens
  misc_RNA (1)...(19): siRNA sense strand
gaaaggagcugaagauagu

SEQ ID NO: 1117997 - RNA, 19 nt, Homo sapiens
  misc_RNA (1)...(19): siRNA sense strand
gcaaagaaguggacauuga

SEQ ID NO: 1117998 - RNA, 19 nt, Homo sapiens
  misc_RNA (1)...(19): siRNA sense strand
caacagcgaugcacuauug

SEQ ID NO: 1117999 - RNA, 19 nt, Homo sapiens
  misc_RNA (1)...(19): siRNA sense strand
caacagaaccagucaauuu

SEQ ID NO: 1118000 - RNA, 19 nt, Homo sapiens
  misc_RNA (1)...(19): siRNA sense strand
gcaguuaucuucaguuuua

SEQ ID NO: 1118001 - RNA, 19 nt, Homo sapiens
  misc_RNA (1)...(19): siRNA sense strand
guacaagggucaccuaguu

SEQ ID NO: 1118002 - RNA, 19 nt, Homo sapiens
  misc_RNA (1)...(19): siRNA sense strand
caacuugacuggcuccuuu

SEQ ID NO: 1118003 - RNA, 19 nt, Homo sapiens
  misc_RNA (1)...(19): siRNA sense strand
caacaugccuggaauucaa

SEQ ID NO: 1118004 - RNA, 19 nt, Homo sapiens
  misc_RNA (1)...(19): siRNA sense strand
guagggauauugaaauuga

SEQ ID NO: 1118005 - RNA, 19 nt, Homo sapiens
  misc_RNA (1)...(19): siRNA sense strand
ucacagcacucaauaguug

SEQ ID NO: 1118006 - RNA, 19 nt, Homo sapiens
  misc_RNA (1)...(19): siRNA sense strand
gcaacagucuccucuuuau

SEQ ID NO: 1118007 - RNA, 19 nt, Homo sapiens
  misc_RNA (1)...(19): siRNA sense strand
ccacuggcauccucuauaa

SEQ ID NO: 1118008 - RNA, 19 nt, Homo sapiens
  misc_RNA (1)...(19): siRNA sense strand
gaaaagcaguuaaccagua

SEQ ID NO: 1118009 - RNA, 19 nt, Homo sapiens
  misc_RNA (1)...(19): siRNA sense strand
ggaaugagaugaugucacu

SEQ ID NO: 1118010 - RNA, 19 nt, Homo sapiens
  misc_RNA (1)...(19): siRNA sense strand
gaaaacaucucaaacauag

SEQ ID NO: 1118011 - RNA, 19 nt, Homo sapiens
  misc_RNA (1)...(19): siRNA sense strand
gcaguaugauuaagaguga

SEQ ID NO: 1118012 - RNA, 19 nt, Homo sapiens
  misc_RNA (1)...(19): siRNA sense strand
gcaaggcuuuccuacagua

SEQ ID NO: 1118013 - RNA, 19 nt, Homo sapiens
  misc_RNA (1)...(19): siRNA sense strand
ugacaacacuucuuucuca

SEQ ID NO: 1118014 - RNA, 19 nt, Homo sapiens
  misc_RNA (1)...(19): siRNA sense strand
gagaugaugucacuucaau

SEQ ID NO: 1118015 - RNA, 19 nt, Homo sapiens
  misc_RNA (1)...(19): siRNA sense strand
gaaacucagucuagagaga

SEQ ID NO: 1118016 - RNA, 19 nt, Homo sapiens
  misc_RNA (1)...(19): siRNA sense strand
gcagcaggcuacacaguuu

SEQ ID NO: 1118017 - RNA, 19 nt, Homo sapiens
  misc_RNA (1)...(19): siRNA sense strand
gaaaggagaagaagaagug

SEQ ID NO: 1118018 - RNA, 19 nt, Homo sapiens
  misc_RNA (1)...(19): siRNA sense strand
uaaugaaccuguaguguug

SEQ ID NO: 1118019 - RNA, 19 nt, Homo sapiens
  misc_RNA (1)...(19): siRNA sense strand
uaucaggccugcagaguaa

SEQ ID NO: 1118020 - RNA, 19 nt, Homo sapiens
  misc_RNA (1)...(19): siRNA sense strand
ugaaggcacuacuguuaua

SEQ ID NO: 1118021 - RNA, 19 nt, Homo sapiens
  misc_RNA (1)...(19): siRNA sense strand
gaggaaugcugaugucgaa

SEQ ID NO: 1118022 - RNA, 19 nt, Homo sapiens
  misc_RNA (1)...(19): siRNA sense strand
gcagucaaccaacauauuu

SEQ ID NO: 1118023 - RNA, 19 nt, Homo sapiens
  misc_RNA (1)...(19): siRNA sense strand
gacaaucaaccucaaguua

SEQ ID NO: 1118024 - RNA, 19 nt, Homo sapiens
  misc_RNA (1)...(19): siRNA sense strand
uugcauagcuguucaguga

SEQ ID NO: 1118025 - RNA, 19 nt, Homo sapiens
  misc_RNA (1)...(19): siRNA sense strand
gaacucaauuucuccacuu

SEQ ID NO: 1118026 - RNA, 19 nt, Homo sapiens
  misc_RNA (1)...(19): siRNA sense strand
gggaauauauguagugaca

SEQ ID NO: 1118027 - RNA, 19 nt, Homo sapiens
  misc_RNA (1)...(19): siRNA sense strand
caaagcaccucacuaugug

SEQ ID NO: 1118028 - RNA, 19 nt, Homo sapiens
  misc_RNA (1)...(19): siRNA sense strand
caucaggaauguucuuauu

SEQ ID NO: 1118029 - RNA, 19 nt, Homo sapiens
  misc_RNA (1)...(19): siRNA sense strand
acaacaagguaaugguuua

SEQ ID NO: 1118030 - RNA, 19 nt, Homo sapiens
  misc_RNA (1)...(19): siRNA sense strand
gcaaaugcagugugaauug

SEQ ID NO: 1118031 - RNA, 19 nt, Homo sapiens
  misc_RNA (1)...(19): siRNA sense strand
gcacuacuguuauagaagu

SEQ ID NO: 1118032 - RNA, 19 nt, Homo sapiens
  misc_RNA (1)...(19): siRNA sense strand
caacaagucagucaaauuc

SEQ ID NO: 1118033 - RNA, 19 nt, Homo sapiens
  misc_RNA (1)...(19): siRNA sense strand
ggaacuauuucaucagaau

SEQ ID NO: 1118034 - RNA, 19 nt, Homo sapiens
  misc_RNA (1)...(19): siRNA sense strand
cagaguaacuggacgaaau

SEQ ID NO: 1118035 - RNA, 19 nt, Homo sapiens
  misc_RNA (1)...(19): siRNA sense strand
ucaggaauguucuuauuug

SEQ ID NO: 1118036 - RNA, 19 nt, Homo sapiens
  misc_RNA (1)...(19): siRNA sense strand
uuacagggcucuucaguuc

SEQ ID NO: 1118037 - RNA, 19 nt, Homo sapiens
  misc_RNA (1)...(19): siRNA sense strand
uguaagcccuggaauguuu

SEQ ID NO: 1118038 - RNA, 19 nt, Homo sapiens
  misc_RNA (1)...(19): siRNA sense strand
uggaagaucucaugauguu

SEQ ID NO: 1118039 - RNA, 19 nt, Homo sapiens
  misc_RNA (1)...(19): siRNA sense strand
gaaaacacguuaucuaauc

SEQ ID NO: 1118040 - RNA, 19 nt, Homo sapiens
  misc_RNA (1)...(19): siRNA sense strand
uggaagagcugaaaguguu

SEQ ID NO: 1118041 - RNA, 19 nt, Homo sapiens
  misc_RNA (1)...(19): siRNA sense strand
ccagagacccugacaacua

SEQ ID NO: 1118042 - RNA, 19 nt, Homo sapiens
  misc_RNA (1)...(19): siRNA sense strand
gcuggaagaucucaugaug

SEQ ID NO: 1118043 - RNA, 19 nt, Homo sapiens
  misc_RNA (1)...(19): siRNA sense strand
agaagaaacuggaacacaa

SEQ ID NO: 1118044 - RNA, 19 nt, Homo sapiens
  misc_RNA (1)...(19): siRNA sense strand
gaucaacucagcaaacauu

SEQ ID NO: 1118045 - RNA, 19 nt, Homo sapiens
  misc_RNA (1)...(19): siRNA sense strand
gaagagcccuauguugugu

SEQ ID NO: 1118046 - RNA, 19 nt, Homo sapiens
  misc_RNA (1)...(19): siRNA sense strand
ccauagcucuccucagauu

SEQ ID NO: 1118047 - RNA, 19 nt, Homo sapiens
  misc_RNA (1)...(19): siRNA sense strand
acagcaagcuccaauauca

SEQ ID NO: 1118048 - RNA, 19 nt, Homo sapiens
  misc_RNA (1)...(19): siRNA sense strand
cagcagacuucucacauga

SEQ ID NO: 1118049 - RNA, 19 nt, Homo sapiens
  misc_RNA (1)...(19): siRNA sense strand
gaguuaauaucaugaggaa

SEQ ID NO: 1118050 - RNA, 19 nt, Homo sapiens
  misc_RNA (1)...(19): siRNA sense strand
gaacuggaguaaagaagag

SEQ ID NO: 1118051 - RNA, 19 nt, Homo sapiens
  misc_RNA (1)...(19): siRNA sense strand
caacaacaacagagcauuu

SEQ ID NO: 1118052 - RNA, 19 nt, Homo sapiens
  misc_RNA (1)...(19): siRNA sense strand
gaacaaaugcagccuccaa

SEQ ID NO: 1118053 - RNA, 19 nt, Homo sapiens
  misc_RNA (1)...(19): siRNA sense strand
gcagcagucuucucauuca

SEQ ID NO: 1118054 - RNA, 19 nt, Homo sapiens
  misc_RNA (1)...(19): siRNA sense strand
gaaaugaaacuucuacaac

SEQ ID NO: 1118055 - RNA, 19 nt, Homo sapiens
  misc_RNA (1)...(19): siRNA sense strand
uaccagaccagauaauuua

SEQ ID NO: 1118056 - RNA, 19 nt, Homo sapiens
  misc_RNA (1)...(19): siRNA sense strand
aaauacaacuccuugcaaa

SEQ ID NO: 1118057 - RNA, 19 nt, Homo sapiens
  misc_RNA (1)...(19): siRNA sense strand
cagcaguuaucuucaguuu

SEQ ID NO: 1118058 - RNA, 19 nt, Homo sapiens
  misc_RNA (1)...(19): siRNA sense strand
gcaccgaacucaauuucuc

SEQ ID NO: 1118059 - RNA, 19 nt, Homo sapiens
  misc_RNA (1)...(19): siRNA sense strand
guaaugagaauguucaaga

SEQ ID NO: 1118060 - RNA, 19 nt, Homo sapiens
  misc_RNA (1)...(19): siRNA sense strand
gaaauacaacuccuugcaa

SEQ ID NO: 1118061 - RNA, 19 nt, Homo sapiens
  misc_RNA (1)...(19): siRNA sense strand
gaacaacaugccuggaauu

SEQ ID NO: 1118062 - RNA, 19 nt, Homo sapiens
  misc_RNA (1)...(19): siRNA sense strand
ggaaaugaaacuucuacaa

SEQ ID NO: 1118063 - RNA, 19 nt, Homo sapiens
  misc_RNA (1)...(19): siRNA sense strand
gcagacuucucacaugaug

SEQ ID NO: 1118064 - RNA, 19 nt, Homo sapiens
  misc_RNA (1)...(19): siRNA sense strand
ugagucagcuucagaauac

SEQ ID NO: 1118065 - RNA, 19 nt, Homo sapiens
  misc_RNA (1)...(19): siRNA sense strand
cagagacccugacaacuau

SEQ ID NO: 1118066 - RNA, 19 nt, Homo sapiens
  misc_RNA (1)...(19): siRNA sense strand
gaagaucucaugauguuca

SEQ ID NO: 1118067 - RNA, 19 nt, Homo sapiens
  misc_RNA (1)...(19): siRNA sense strand
gcguagggauauugaaauu

SEQ ID NO: 1118068 - RNA, 19 nt, Homo sapiens
  misc_RNA (1)...(19): siRNA sense strand
ccaaagcaccucacuaugu

SEQ ID NO: 1118069 - RNA, 19 nt, Homo sapiens
  misc_RNA (1)...(19): siRNA sense strand
ugaaccaacugcagaauuc

SEQ ID NO: 1118070 - RNA, 19 nt, Homo sapiens
  misc_RNA (1)...(19): siRNA sense strand
cagagucaguccacaguuu

SEQ ID NO: 1118071 - RNA, 19 nt, Homo sapiens
  misc_RNA (1)...(19): siRNA sense strand
gaauagugguacccaacaa

SEQ ID NO: 1118072 - RNA, 19 nt, Homo sapiens
  misc_RNA (1)...(19): siRNA sense strand
gauuaagagugaagauguu

SEQ ID NO: 1118073 - RNA, 19 nt, Homo sapiens
  misc_RNA (1)...(19): siRNA sense strand
caaacacccucuucuccaa

SEQ ID NO: 1118074 - RNA, 19 nt, Homo sapiens
  misc_RNA (1)...(19): siRNA sense strand
gacaaaugcuggaagaucu

SEQ ID NO: 1118075 - RNA, 19 nt, Homo sapiens
  misc_RNA (1)...(19): siRNA sense strand
ccugaggacuugcuggaua

SEQ ID NO: 1118076 - RNA, 19 nt, Homo sapiens
  misc_RNA (1)...(19): siRNA sense strand
caacagcaagcuccaauau

SEQ ID NO: 1118077 - RNA, 19 nt, Homo sapiens
  misc_RNA (1)...(19): siRNA sense strand
gcaagggaaugagaugaug

SEQ ID NO: 1118078 - RNA, 19 nt, Homo sapiens
  misc_RNA (1)...(19): siRNA sense strand
guacagugguuaauuuguc

SEQ ID NO: 1118079 - RNA, 19 nt, Homo sapiens
  misc_RNA (1)...(19): siRNA sense strand
ggaaaggagcugaagauag

SEQ ID NO: 1118080 - RNA, 19 nt, Homo sapiens
  misc_RNA (1)...(19): siRNA sense strand
guaaagaagagcccuaugu

SEQ ID NO: 1118081 - RNA, 19 nt, Homo sapiens
  misc_RNA (1)...(19): siRNA sense strand
caccaaacaugauauucaa

SEQ ID NO: 1118082 - RNA, 19 nt, Homo sapiens
  misc_RNA (1)...(19): siRNA sense strand
caaccaacauauuucuuuc

SEQ ID NO: 1118083 - RNA, 19 nt, Homo sapiens
  misc_RNA (1)...(19): siRNA sense strand
ucacuucaaucuggaaauu

SEQ ID NO: 1118084 - RNA, 19 nt, Homo sapiens
  misc_RNA (1)...(19): siRNA sense strand
gagaaacucagucuagaga

SEQ ID NO: 1118085 - RNA, 19 nt, Homo sapiens
  misc_RNA (1)...(19): siRNA sense strand
gugaagauguuacuccaau

SEQ ID NO: 1118086 - RNA, 19 nt, Homo sapiens
  misc_RNA (1)...(19): siRNA sense strand
gaagaggccaugaaagcaa

SEQ ID NO: 1118087 - RNA, 19 nt, Homo sapiens
  misc_RNA (1)...(19): siRNA sense strand
gaauguaaaugugaagaag

SEQ ID NO: 1118088 - RNA, 19 nt, Homo sapiens
  misc_RNA (1)...(19): siRNA sense strand
gagcaccaguuccuacaau

SEQ ID NO: 1118089 - RNA, 19 nt, Homo sapiens
  misc_RNA (1)...(19): siRNA sense strand
caagagaaacucagucuag

SEQ ID NO: 1118090 - RNA, 19 nt, Homo sapiens
  misc_RNA (1)...(19): siRNA sense strand
uaaagaagagcccuauguu

SEQ ID NO: 1118091 - RNA, 19 nt, Homo sapiens
  misc_RNA (1)...(19): siRNA sense strand
caacagcccaugcaauuuc

SEQ ID NO: 1118092 - RNA, 19 nt, Homo sapiens
  misc_RNA (1)...(19): siRNA sense strand
gauccuagcaacaacauga

SEQ ID NO: 1118093 - RNA, 19 nt, Homo sapiens
  misc_RNA (1)...(19): siRNA sense strand
cagcaaggcuuuccuacag

SEQ ID NO: 1118094 - RNA, 19 nt, Homo sapiens
  misc_RNA (1)...(19): siRNA sense strand
gcagucaccacuacaagaa

SEQ ID NO: 1118095 - RNA, 19 nt, Homo sapiens
  misc_RNA (1)...(19): siRNA sense strand
gcaaguaacucucuucuua

SEQ ID NO: 1118096 - RNA, 19 nt, Homo sapiens
  misc_RNA (1)...(19): siRNA sense strand
gaaaggagcugaagauagu

SEQ ID NO: 1118097 - RNA, 19 nt, Homo sapiens
  misc_RNA (1)...(19): siRNA sense strand
gcaaagaaguggacauuga

SEQ ID NO: 1118098 - RNA, 19 nt, Homo sapiens
  misc_RNA (1)...(19): siRNA sense strand
caacagcgaugcacuauug

SEQ ID NO: 1118099 - RNA, 19 nt, Homo sapiens
  misc_RNA (1)...(19): siRNA sense strand
caacagaaccagucaauuu

SEQ ID NO: 1118100 - RNA, 19 nt, Homo sapiens
  misc_RNA (1)...(19): siRNA sense strand
gcaguuaucuucaguuuua

SEQ ID NO: 1118101 - RNA, 19 nt, Homo sapiens
  misc_RNA (1)...(19): siRNA sense strand
guacaagggucaccuaguu

SEQ ID NO: 1118102 - RNA, 19 nt, Homo sapiens
  misc_RNA (1)...(19): siRNA sense strand
caacuugacuggcuccuuu

SEQ ID NO: 1118103 - RNA, 19 nt, Homo sapiens
  misc_RNA (1)...(19): siRNA sense strand
caacaugccuggaauucaa

SEQ ID NO: 1118104 - RNA, 19 nt, Homo sapiens
  misc_RNA (1)...(19): siRNA sense strand
guagggauauugaaauuga

SEQ ID NO: 1118105 - RNA, 19 nt, Homo sapiens
  misc_RNA (1)...(19): siRNA sense strand
ucacagcacucaauaguug

SEQ ID NO: 1118106 - RNA, 19 nt, Homo sapiens
  misc_RNA (1)...(19): siRNA sense strand
gcaacagucuccucuuuau

SEQ ID NO: 1118107 - RNA, 19 nt, Homo sapiens
  misc_RNA (1)...(19): siRNA sense strand
ccacuggcauccucuauaa

SEQ ID NO: 1118108 - RNA, 19 nt, Homo sapiens
  misc_RNA (1)...(19): siRNA sense strand
gaaaagcaguuaaccagua

SEQ ID NO: 1118109 - RNA, 19 nt, Homo sapiens
  misc_RNA (1)...(19): siRNA sense strand
ggaaugagaugaugucacu

SEQ ID NO: 1118110 - RNA, 19 nt, Homo sapiens
  misc_RNA (1)...(19): siRNA sense strand
gaaaacaucucaaacauag

SEQ ID NO: 1118111 - RNA, 19 nt, Homo sapiens
  misc_RNA (1)...(19): siRNA sense strand
gcaguaugauuaagaguga

SEQ ID NO: 1118112 - RNA, 19 nt, Homo sapiens
  misc_RNA (1)...(19): siRNA sense strand
gcaaggcuuuccuacagua

SEQ ID NO: 1118113 - RNA, 19 nt, Homo sapiens
  misc_RNA (1)...(19): siRNA sense strand
ugacaacacuucuuucuca

SEQ ID NO: 1118114 - RNA, 19 nt, Homo sapiens
  misc_RNA (1)...(19): siRNA sense strand
gagaugaugucacuucaau

SEQ ID NO: 1118115 - RNA, 19 nt, Homo sapiens
  misc_RNA (1)...(19): siRNA sense strand
gaaacucagucuagagaga

SEQ ID NO: 1118116 - RNA, 19 nt, Homo sapiens
  misc_RNA (1)...(19): siRNA sense strand
gcagcaggcuacacaguuu

SEQ ID NO: 1118117 - RNA, 19 nt, Homo sapiens
  misc_RNA (1)...(19): siRNA sense strand
gaaaggagaagaagaagug

SEQ ID NO: 1118118 - RNA, 19 nt, Homo sapiens
  misc_RNA (1)...(19): siRNA sense strand
uaaugaaccuguaguguug

SEQ ID NO: 1118119 - RNA, 19 nt, Homo sapiens
  misc_RNA (1)...(19): siRNA sense strand
uaucaggccugcagaguaa

SEQ ID NO: 1118120 - RNA, 19 nt, Homo sapiens
  misc_RNA (1)...(19): siRNA sense strand
ugaaggcacuacuguuaua

SEQ ID NO: 1118121 - RNA, 19 nt, Homo sapiens
  misc_RNA (1)...(19): siRNA sense strand
gaggaaugcugaugucgaa

SEQ ID NO: 1118122 - RNA, 19 nt, Homo sapiens
  misc_RNA (1)...(19): siRNA sense strand
gcagucaaccaacauauuu

SEQ ID NO: 1118123 - RNA, 19 nt, Homo sapiens
  misc_RNA (1)...(19): siRNA sense strand
gacaaucaaccucaaguua

SEQ ID NO: 1118124 - RNA, 19 nt, Homo sapiens
  misc_RNA (1)...(19): siRNA sense strand
uugcauagcuguucaguga

SEQ ID NO: 1118125 - RNA, 19 nt, Homo sapiens
  misc_RNA (1)...(19): siRNA sense strand
gaacucaauuucuccacuu

SEQ ID NO: 1118126 - RNA, 19 nt, Homo sapiens
  misc_RNA (1)...(19): siRNA sense strand
gggaauauauguagugaca

SEQ ID NO: 1118127 - RNA, 19 nt, Homo sapiens
  misc_RNA (1)...(19): siRNA sense strand
caaagcaccucacuaugug

SEQ ID NO: 1118128 - RNA, 19 nt, Homo sapiens
  misc_RNA (1)...(19): siRNA sense strand
caucaggaauguucuuauu

SEQ ID NO: 1118129 - RNA, 19 nt, Homo sapiens
  misc_RNA (1)...(19): siRNA sense strand
acaacaagguaaugguuua

SEQ ID NO: 1118130 - RNA, 19 nt, Homo sapiens
  misc_RNA (1)...(19): siRNA sense strand
gcaaaugcagugugaauug

SEQ ID NO: 1118131 - RNA, 19 nt, Homo sapiens
  misc_RNA (1)...(19): siRNA sense strand
gcacuacuguuauagaagu

SEQ ID NO: 1118132 - RNA, 19 nt, Homo sapiens
  misc_RNA (1)...(19): siRNA sense strand
caacaagucagucaaauuc

SEQ ID NO: 1118133 - RNA, 19 nt, Homo sapiens
  misc_RNA (1)...(19): siRNA sense strand
ggaacuauuucaucagaau

SEQ ID NO: 1118134 - RNA, 19 nt, Homo sapiens
  misc_RNA (1)...(19): siRNA sense strand
cagaguaacuggacgaaau

SEQ ID NO: 1118135 - RNA, 19 nt, Homo sapiens
  misc_RNA (1)...(19): siRNA sense strand
ucaggaauguucuuauuug

SEQ ID NO: 1118136 - RNA, 19 nt, Homo sapiens
  misc_RNA (1)...(19): siRNA sense strand
uuacagggcucuucaguuc

SEQ ID NO: 1118137 - RNA, 19 nt, Homo sapiens
  misc_RNA (1)...(19): siRNA sense strand
uguaagcccuggaauguuu

SEQ ID NO: 1118138 - RNA, 19 nt, Homo sapiens
  misc_RNA (1)...(19): siRNA sense strand
uggaagaucucaugauguu

SEQ ID NO: 1118139 - RNA, 19 nt, Homo sapiens
  misc_RNA (1)...(19): siRNA sense strand
gaaaacacguuaucuaauc

SEQ ID NO: 1118140 - RNA, 19 nt, Homo sapiens
  misc_RNA (1)...(19): siRNA sense strand
uggaagagcugaaaguguu

SEQ ID NO: 1118141 - RNA, 19 nt, Homo sapiens
  misc_RNA (1)...(19): siRNA sense strand
ccagagacccugacaacua

SEQ ID NO: 1118142 - RNA, 19 nt, Homo sapiens
  misc_RNA (1)...(19): siRNA sense strand
gcuggaagaucucaugaug

SEQ ID NO: 1118143 - RNA, 19 nt, Homo sapiens
  misc_RNA (1)...(19): siRNA sense strand
agaagaaacuggaacacaa

SEQ ID NO: 1118144 - RNA, 19 nt, Homo sapiens
  misc_RNA (1)...(19): siRNA sense strand
gaucaacucagcaaacauu

SEQ ID NO: 1118145 - RNA, 19 nt, Homo sapiens
  misc_RNA (1)...(19): siRNA sense strand
gaagagcccuauguugugu

SEQ ID NO: 1118146 - RNA, 19 nt, Homo sapiens
  misc_RNA (1)...(19): siRNA sense strand
ccauagcucuccucagauu

SEQ ID NO: 1118147 - RNA, 19 nt, Homo sapiens
  misc_RNA (1)...(19): siRNA sense strand
acagcaagcuccaauauca

SEQ ID NO: 1118148 - RNA, 19 nt, Homo sapiens
  misc_RNA (1)...(19): siRNA sense strand
cagcagacuucucacauga

SEQ ID NO: 1118149 - RNA, 19 nt, Homo sapiens
  misc_RNA (1)...(19): siRNA sense strand
gaguuaauaucaugaggaa

SEQ ID NO: 1118150 - RNA, 19 nt, Homo sapiens
  misc_RNA (1)...(19): siRNA sense strand
gaacuggaguaaagaagag

SEQ ID NO: 1118151 - RNA, 19 nt, Homo sapiens
  misc_RNA (1)...(19): siRNA sense strand
caacaacaacagagcauuu

SEQ ID NO: 1118152 - RNA, 19 nt, Homo sapiens
  misc_RNA (1)...(19): siRNA sense strand
gaacaaaugcagccuccaa

SEQ ID NO: 1118153 - RNA, 19 nt, Homo sapiens
  misc_RNA (1)...(19): siRNA sense strand
gcagcagucuucucauuca

SEQ ID NO: 1118154 - RNA, 19 nt, Homo sapiens
  misc_RNA (1)...(19): siRNA sense strand
gaaaugaaacuucuacaac

SEQ ID NO: 1118155 - RNA, 19 nt, Homo sapiens
  misc_RNA (1)...(19): siRNA sense strand
uaccagaccagauaauuua

SEQ ID NO: 1118156 - RNA, 19 nt, Homo sapiens
  misc_RNA (1)...(19): siRNA sense strand
aaauacaacuccuugcaaa

SEQ ID NO: 1118157 - RNA, 19 nt, Homo sapiens
  misc_RNA (1)...(19): siRNA sense strand
cagcaguuaucuucaguuu

SEQ ID NO: 1118158 - RNA, 19 nt, Homo sapiens
  misc_RNA (1)...(19): siRNA sense strand
gcaccgaacucaauuucuc

SEQ ID NO: 1118159 - RNA, 19 nt, Homo sapiens
  misc_RNA (1)...(19): siRNA sense strand
guaaugagaauguucaaga

SEQ ID NO: 1118160 - RNA, 19 nt, Homo sapiens
  misc_RNA (1)...(19): siRNA sense strand
gaaauacaacuccuugcaa

SEQ ID NO: 1118161 - RNA, 19 nt, Homo sapiens
  misc_RNA (1)...(19): siRNA sense strand
gaacaacaugccuggaauu

SEQ ID NO: 1118162 - RNA, 19 nt, Homo sapiens
  misc_RNA (1)...(19): siRNA sense strand
ggaaaugaaacuucuacaa

SEQ ID NO: 1118163 - RNA, 19 nt, Homo sapiens
  misc_RNA (1)...(19): siRNA sense strand
gcagacuucucacaugaug

SEQ ID NO: 1118164 - RNA, 19 nt, Homo sapiens
  misc_RNA (1)...(19): siRNA sense strand
ugagucagcuucagaauac

SEQ ID NO: 1118165 - RNA, 19 nt, Homo sapiens
  misc_RNA (1)...(19): siRNA sense strand
cagagacccugacaacuau

SEQ ID NO: 1118166 - RNA, 19 nt, Homo sapiens
  misc_RNA (1)...(19): siRNA sense strand
gaagaucucaugauguuca

SEQ ID NO: 1118167 - RNA, 19 nt, Homo sapiens
  misc_RNA (1)...(19): siRNA sense strand
gcguagggauauugaaauu

SEQ ID NO: 1118168 - RNA, 19 nt, Homo sapiens
  misc_RNA (1)...(19): siRNA sense strand
ccaaagcaccucacuaugu

SEQ ID NO: 1118169 - RNA, 19 nt, Homo sapiens
  misc_RNA (1)...(19): siRNA sense strand
ugaaccaacugcagaauuc

SEQ ID NO: 1118170 - RNA, 19 nt, Homo sapiens
  misc_RNA (1)...(19): siRNA sense strand
cagagucaguccacaguuu

SEQ ID NO: 1118171 - RNA, 19 nt, Homo sapiens
  misc_RNA (1)...(19): siRNA sense strand
gaauagugguacccaacaa

SEQ ID NO: 1118172 - RNA, 19 nt, Homo sapiens
  misc_RNA (1)...(19): siRNA sense strand
gauuaagagugaagauguu

SEQ ID NO: 1118173 - RNA, 19 nt, Homo sapiens
  misc_RNA (1)...(19): siRNA sense strand
caaacacccucuucuccaa

SEQ ID NO: 1118174 - RNA, 19 nt, Homo sapiens
  misc_RNA (1)...(19): siRNA sense strand
gacaaaugcuggaagaucu

SEQ ID NO: 1118175 - RNA, 19 nt, Homo sapiens
  misc_RNA (1)...(19): siRNA sense strand
ccugaggacuugcuggaua

SEQ ID NO: 1118176 - RNA, 19 nt, Homo sapiens
  misc_RNA (1)...(19): siRNA sense strand
caacagcaagcuccaauau

SEQ ID NO: 1118177 - RNA, 19 nt, Homo sapiens
  misc_RNA (1)...(19): siRNA sense strand
gcaagggaaugagaugaug

SEQ ID NO: 1118178 - RNA, 19 nt, Homo sapiens
  misc_RNA (1)...(19): siRNA sense strand
guacagugguuaauuuguc

SEQ ID NO: 1118179 - RNA, 19 nt, Homo sapiens
  misc_RNA (1)...(19): siRNA sense strand
ggaaaggagcugaagauag

SEQ ID NO: 1118180 - RNA, 19 nt, Homo sapiens
  misc_RNA (1)...(19): siRNA sense strand
guaaagaagagcccuaugu

SEQ ID NO: 1118181 - RNA, 19 nt, Homo sapiens
  misc_RNA (1)...(19): siRNA sense strand
caccaaacaugauauucaa

SEQ ID NO: 1118182 - RNA, 19 nt, Homo sapiens
  misc_RNA (1)...(19): siRNA sense strand
caaccaacauauuucuuuc

SEQ ID NO: 1118183 - RNA, 19 nt, Homo sapiens
  misc_RNA (1)...(19): siRNA sense strand
ucacuucaaucuggaaauu

SEQ ID NO: 1118184 - RNA, 19 nt, Homo sapiens
  misc_RNA (1)...(19): siRNA sense strand
gagaaacucagucuagaga

SEQ ID NO: 1118185 - RNA, 19 nt, Homo sapiens
  misc_RNA (1)...(19): siRNA sense strand
gugaagauguuacuccaau

SEQ ID NO: 1118186 - RNA, 19 nt, Homo sapiens
  misc_RNA (1)...(19): siRNA sense strand
gaagaggccaugaaagcaa

SEQ ID NO: 1118187 - RNA, 19 nt, Homo sapiens
  misc_RNA (1)...(19): siRNA sense strand
gaauguaaaugugaagaag

SEQ ID NO: 1118188 - RNA, 19 nt, Homo sapiens
  misc_RNA (1)...(19): siRNA sense strand
gagcaccaguuccuacaau

SEQ ID NO: 1118189 - RNA, 19 nt, Homo sapiens
  misc_RNA (1)...(19): siRNA sense strand
caagagaaacucagucuag

SEQ ID NO: 1118190 - RNA, 19 nt, Homo sapiens
  misc_RNA (1)...(19): siRNA sense strand
uaaagaagagcccuauguu

SEQ ID NO: 1118191 - RNA, 19 nt, Homo sapiens
  misc_RNA (1)...(19): siRNA sense strand
caacagcccaugcaauuuc

SEQ ID NO: 1118192 - RNA, 19 nt, Homo sapiens
  misc_RNA (1)...(19): siRNA sense strand
gauccuagcaacaacauga

SEQ ID NO: 1118193 - RNA, 19 nt, Homo sapiens
  misc_RNA (1)...(19): siRNA sense strand
cagcaaggcuuuccuacag

SEQ ID NO: 1118194 - RNA, 19 nt, Homo sapiens
  misc_RNA (1)...(19): siRNA sense strand
gcagucaccacuacaagaa

SEQ ID NO: 1118195 - RNA, 19 nt, Homo sapiens
  misc_RNA (1)...(19): siRNA sense strand
ggaggagccuguuccagaa

SEQ ID NO: 1118196 - RNA, 19 nt, Homo sapiens
  misc_RNA (1)...(19): siRNA sense strand
gagaacagcaaccagaguu

SEQ ID NO: 1118197 - RNA, 19 nt, Homo sapiens
  misc_RNA (1)...(19): siRNA sense strand
gaacagcaaccagaguuuc

SEQ ID NO: 1118198 - RNA, 19 nt, Homo sapiens
  misc_RNA (1)...(19): siRNA sense strand
aagcgcaucugcccaaaug

SEQ ID NO: 1118199 - RNA, 19 nt, Homo sapiens
  misc_RNA (1)...(19): siRNA sense strand
aagcuuacccugucuuuga

SEQ ID NO: 1118200 - RNA, 19 nt, Homo sapiens
  misc_RNA (1)...(19): siRNA sense strand
gcaaccagaguuuccauuc

SEQ ID NO: 1118201 - RNA, 19 nt, Homo sapiens
  misc_RNA (1)...(19): siRNA sense strand
ggcgacacuucccuucgua

SEQ ID NO: 1118202 - RNA, 19 nt, Homo sapiens
  misc_RNA (1)...(19): siRNA sense strand
ugcuggaucuuaaugauga

SEQ ID NO: 1118203 - RNA, 19 nt, Homo sapiens
  misc_RNA (1)...(19): siRNA sense strand
acacuucccuucguaucuu

SEQ ID NO: 1118204 - RNA, 19 nt, Homo sapiens
  misc_RNA (1)...(19): siRNA sense strand
caaccagaguuuccauucg

SEQ ID NO: 1118205 - RNA, 19 nt, Homo sapiens
  misc_RNA (1)...(19): siRNA sense strand
gggcgacacuucccuucgu

SEQ ID NO: 1118206 - RNA, 19 nt, Homo sapiens
  misc_RNA (1)...(19): siRNA sense strand
ucgagaagguccggagaug

SEQ ID NO: 1118207 - RNA, 19 nt, Homo sapiens
  misc_RNA (1)...(19): siRNA sense strand
cgaagcuuacccugucuuu

SEQ ID NO: 1118208 - RNA, 19 nt, Homo sapiens
  misc_RNA (1)...(19): siRNA sense strand
gaagcuuacccugucuuug

SEQ ID NO: 1118209 - RNA, 19 nt, Homo sapiens
  misc_RNA (1)...(19): siRNA sense strand
uuaaugaugagaacagcaa

SEQ ID NO: 1118210 - RNA, 19 nt, Homo sapiens
  misc_RNA (1)...(19): siRNA sense strand
ucaagcgcaucugcccaaa

SEQ ID NO: 1118211 - RNA, 19 nt, Homo sapiens
  misc_RNA (1)...(19): siRNA sense strand
ccugcuggaucuuaaugau

SEQ ID NO: 1118212 - RNA, 19 nt, Homo sapiens
  misc_RNA (1)...(19): siRNA sense strand
agaacagcaaccagaguuu

SEQ ID NO: 1118213 - RNA, 19 nt, Homo sapiens
  misc_RNA (1)...(19): siRNA sense strand
ggaucuuaaugaugagaac

SEQ ID NO: 1118214 - RNA, 19 nt, Homo sapiens
  misc_RNA (1)...(19): siRNA sense strand
gaagugaaaguacugaaua

SEQ ID NO: 1118215 - RNA, 19 nt, Homo sapiens
  misc_RNA (1)...(19): siRNA sense strand
gagaauaccuucaaacaac

SEQ ID NO: 1118216 - RNA, 19 nt, Homo sapiens
  misc_RNA (1)...(19): siRNA sense strand
cuucaaagcugcacugauu

SEQ ID NO: 1118217 - RNA, 19 nt, Homo sapiens
  misc_RNA (1)...(19): siRNA sense strand
gagaagagaauccagcaua

SEQ ID NO: 1118218 - RNA, 19 nt, Homo sapiens
  misc_RNA (1)...(19): siRNA sense strand
caugacaacugaucaaaga

SEQ ID NO: 1118219 - RNA, 19 nt, Homo sapiens
  misc_RNA (1)...(19): siRNA sense strand
gcagcuaaguaccuuguuu

SEQ ID NO: 1118220 - RNA, 19 nt, Homo sapiens
  misc_RNA (1)...(19): siRNA sense strand
gacaacugaucaaagauuu

SEQ ID NO: 1118221 - RNA, 19 nt, Homo sapiens
  misc_RNA (1)...(19): siRNA sense strand
ggaaaucaguaaauuagag

SEQ ID NO: 1118222 - RNA, 19 nt, Homo sapiens
  misc_RNA (1)...(19): siRNA sense strand
cagcagaaauuauggcuau

SEQ ID NO: 1118223 - RNA, 19 nt, Homo sapiens
  misc_RNA (1)...(19): siRNA sense strand
ggaaugcaauagaugaaau

SEQ ID NO: 1118224 - RNA, 19 nt, Homo sapiens
  misc_RNA (1)...(19): siRNA sense strand
acgaagaauugcucaguua

SEQ ID NO: 1118225 - RNA, 19 nt, Homo sapiens
  misc_RNA (1)...(19): siRNA sense strand
aaacagcccuucccuucaa

SEQ ID NO: 1118226 - RNA, 19 nt, Homo sapiens
  misc_RNA (1)...(19): siRNA sense strand
gaaauuauggcuaugaaag

SEQ ID NO: 1118227 - RNA, 19 nt, Homo sapiens
  misc_RNA (1)...(19): siRNA sense strand
ccacauugcuugauuugca

SEQ ID NO: 1118228 - RNA, 19 nt, Homo sapiens
  misc_RNA (1)...(19): siRNA sense strand
caauguaucagcagaaauu

SEQ ID NO: 1118229 - RNA, 19 nt, Homo sapiens
  misc_RNA (1)...(19): siRNA sense strand
ccgaaucugugaaauuuga

SEQ ID NO: 1118230 - RNA, 19 nt, Homo sapiens
  misc_RNA (1)...(19): siRNA sense strand
gaaagaagaacaagugcau

SEQ ID NO: 1118231 - RNA, 19 nt, Homo sapiens
  misc_RNA (1)...(19): siRNA sense strand
gaggaaaucaguaaauuag

SEQ ID NO: 1118232 - RNA, 19 nt, Homo sapiens
  misc_RNA (1)...(19): siRNA sense strand
ccaagagaauaccuucaaa

SEQ ID NO: 1118233 - RNA, 19 nt, Homo sapiens
  misc_RNA (1)...(19): siRNA sense strand
gaagagaauccagcauauu

SEQ ID NO: 1118234 - RNA, 19 nt, Homo sapiens
  misc_RNA (1)...(19): siRNA sense strand
ggacacagagcauuuccaa

SEQ ID NO: 1118235 - RNA, 19 nt, Homo sapiens
  misc_RNA (1)...(19): siRNA sense strand
cagcucaacuccugaagug

SEQ ID NO: 1118236 - RNA, 19 nt, Homo sapiens
  misc_RNA (1)...(19): siRNA sense strand
aagagaaacugaaguccuu

SEQ ID NO: 1118237 - RNA, 19 nt, Homo sapiens
  misc_RNA (1)...(19): siRNA sense strand
aagagaauccagcauauuu

SEQ ID NO: 1118238 - RNA, 19 nt, Homo sapiens
  misc_RNA (1)...(19): siRNA sense strand
gcccuucccuucaagagaa

SEQ ID NO: 1118239 - RNA, 19 nt, Homo sapiens
  misc_RNA (1)...(19): siRNA sense strand
caacaagaggaaaucagua

SEQ ID NO: 1118240 - RNA, 19 nt, Homo sapiens
  misc_RNA (1)...(19): siRNA sense strand
agaagagaauccagcauau

SEQ ID NO: 1118241 - RNA, 19 nt, Homo sapiens
  misc_RNA (1)...(19): siRNA sense strand
gggaucacuuucacaauca

SEQ ID NO: 1118242 - RNA, 19 nt, Homo sapiens
  misc_RNA (1)...(19): siRNA sense strand
caacaggaggacacugaua

SEQ ID NO: 1118243 - RNA, 19 nt, Homo sapiens
  misc_RNA (1)...(19): siRNA sense strand
gcgaagaggaaaugagauu

SEQ ID NO: 1118244 - RNA, 19 nt, Homo sapiens
  misc_RNA (1)...(19): siRNA sense strand
cagaaauuauggcuaugaa

SEQ ID NO: 1118245 - RNA, 19 nt, Homo sapiens
  misc_RNA (1)...(19): siRNA sense strand
aagaauugcucaguuaguu

SEQ ID NO: 1118246 - RNA, 19 nt, Homo sapiens
  misc_RNA (1)...(19): siRNA sense strand
gcagaaauuauggcuauga

SEQ ID NO: 1118247 - RNA, 19 nt, Homo sapiens
  misc_RNA (1)...(19): siRNA sense strand
ugaaaucuccaaguccuua

SEQ ID NO: 1118248 - RNA, 19 nt, Homo sapiens
  misc_RNA (1)...(19): siRNA sense strand
cuccgaaucugugaaauuu

SEQ ID NO: 1118249 - RNA, 19 nt, Homo sapiens
  misc_RNA (1)...(19): siRNA sense strand
gucgaggacucccaggaua

SEQ ID NO: 1118250 - RNA, 19 nt, Homo sapiens
  misc_RNA (1)...(19): siRNA sense strand
caagaggaaaucaguaaau

SEQ ID NO: 1118251 - RNA, 19 nt, Homo sapiens
  misc_RNA (1)...(19): siRNA sense strand
aagaagaacaagugcauuu

SEQ ID NO: 1118252 - RNA, 19 nt, Homo sapiens
  misc_RNA (1)...(19): siRNA sense strand
guucaacuaaugcaaauga

SEQ ID NO: 1118253 - RNA, 19 nt, Homo sapiens
  misc_RNA (1)...(19): siRNA sense strand
gaaaguacugaauaacauc

SEQ ID NO: 1118254 - RNA, 19 nt, Homo sapiens
  misc_RNA (1)...(19): siRNA sense strand
gaagaacaagugcauuugg

SEQ ID NO: 1118255 - RNA, 19 nt, Homo sapiens
  misc_RNA (1)...(19): siRNA sense strand
uagaggagcguguuuacaa

SEQ ID NO: 1118256 - RNA, 19 nt, Homo sapiens
  misc_RNA (1)...(19): siRNA sense strand
acugauagcugcuccgaau

SEQ ID NO: 1118257 - RNA, 19 nt, Homo sapiens
  misc_RNA (1)...(19): siRNA sense strand
ucucaucccucucauugga

SEQ ID NO: 1118258 - RNA, 19 nt, Homo sapiens
  misc_RNA (1)...(19): siRNA sense strand
ugacaacugaucaaagauu

SEQ ID NO: 1118259 - RNA, 19 nt, Homo sapiens
  misc_RNA (1)...(19): siRNA sense strand
gagaauccagcauauuuua

SEQ ID NO: 1118260 - RNA, 19 nt, Homo sapiens
  misc_RNA (1)...(19): siRNA sense strand
gaagaauugcucaguuagu

SEQ ID NO: 1118261 - RNA, 19 nt, Homo sapiens
  misc_RNA (1)...(19): siRNA sense strand
cugaauaacaucacuaaug

SEQ ID NO: 1118262 - RNA, 19 nt, Homo sapiens
  misc_RNA (1)...(19): siRNA sense strand
gaaaucuccaaguccuuaa

SEQ ID NO: 1118263 - RNA, 19 nt, Homo sapiens
  misc_RNA (1)...(19): siRNA sense strand
gcaguucucaucccucuca

SEQ ID NO: 1118264 - RNA, 19 nt, Homo sapiens
  misc_RNA (1)...(19): siRNA sense strand
gaauugcucaguuaguuca

SEQ ID NO: 1118265 - RNA, 19 nt, Homo sapiens
  misc_RNA (1)...(19): siRNA sense strand
guucucaucccucucauug

SEQ ID NO: 1118266 - RNA, 19 nt, Homo sapiens
  misc_RNA (1)...(19): siRNA sense strand
gaacauucucagaccuuga

SEQ ID NO: 1118267 - RNA, 19 nt, Homo sapiens
  misc_RNA (1)...(19): siRNA sense strand
aagaacaagugcauuugga

SEQ ID NO: 1118268 - RNA, 19 nt, Homo sapiens
  misc_RNA (1)...(19): siRNA sense strand
gauauaacucaaagucuca

SEQ ID NO: 1118269 - RNA, 19 nt, Homo sapiens
  misc_RNA (1)...(19): siRNA sense strand
gcuccgaaucugugaaauu

SEQ ID NO: 1118270 - RNA, 19 nt, Homo sapiens
  misc_RNA (1)...(19): siRNA sense strand
gggaguggaaacacauuaa

SEQ ID NO: 1118271 - RNA, 19 nt, Homo sapiens
  misc_RNA (1)...(19): siRNA sense strand
cugcacugauugcccuuua

SEQ ID NO: 1118272 - RNA, 19 nt, Homo sapiens
  misc_RNA (1)...(19): siRNA sense strand
uaugaaagaagaacaagug

SEQ ID NO: 1118273 - RNA, 19 nt, Homo sapiens
  misc_RNA (1)...(19): siRNA sense strand
ggacaugggaaugcaauag

SEQ ID NO: 1118274 - RNA, 19 nt, Homo sapiens
  misc_RNA (1)...(19): siRNA sense strand
cagcgaagaggaaaugaga

SEQ ID NO: 1118275 - RNA, 19 nt, Homo sapiens
  misc_RNA (1)...(19): siRNA sense strand
aauaccacauugcuugauu

SEQ ID NO: 1118276 - RNA, 19 nt, Homo sapiens
  misc_RNA (1)...(19): siRNA sense strand
gugaaaguacugaauaaca

SEQ ID NO: 1118277 - RNA, 19 nt, Homo sapiens
  misc_RNA (1)...(19): siRNA sense strand
ugggaucacuuucacaauc

SEQ ID NO: 1118278 - RNA, 19 nt, Homo sapiens
  misc_RNA (1)...(19): siRNA sense strand
cucaaagucucacgggaaa

SEQ ID NO: 1118279 - RNA, 19 nt, Homo sapiens
  misc_RNA (1)...(19): siRNA sense strand
ugaaagauugggaacauuc

SEQ ID NO: 1118280 - RNA, 19 nt, Homo sapiens
  misc_RNA (1)...(19): siRNA sense strand
ggaaauaaaaggagaagug

SEQ ID NO: 1118281 - RNA, 19 nt, Homo sapiens
  misc_RNA (1)...(19): siRNA sense strand
aaugagauuucaagaaguc

SEQ ID NO: 1118282 - RNA, 19 nt, Homo sapiens
  misc_RNA (1)...(19): siRNA sense strand
guacugaauaacaucacua

SEQ ID NO: 1118283 - RNA, 19 nt, Homo sapiens
  misc_RNA (1)...(19): siRNA sense strand
acacagagcauuuccaaaa

SEQ ID NO: 1118284 - RNA, 19 nt, Homo sapiens
  misc_RNA (1)...(19): siRNA sense strand
gacaugggaaugcaauaga

SEQ ID NO: 1118285 - RNA, 19 nt, Homo sapiens
  misc_RNA (1)...(19): siRNA sense strand
gaaauaaaaggagaaguga

SEQ ID NO: 1118286 - RNA, 19 nt, Homo sapiens
  misc_RNA (1)...(19): siRNA sense strand
aacaagaggaaaucaguaa

SEQ ID NO: 1118287 - RNA, 19 nt, Homo sapiens
  misc_RNA (1)...(19): siRNA sense strand
ucaaacaacaagaggaaau

SEQ ID NO: 1118288 - RNA, 19 nt, Homo sapiens
  misc_RNA (1)...(19): siRNA sense strand
agaauaccuucaaacaaca

SEQ ID NO: 1118289 - RNA, 19 nt, Homo sapiens
  misc_RNA (1)...(19): siRNA sense strand
auaccacauugcuugauuu

SEQ ID NO: 1118290 - RNA, 19 nt, Homo sapiens
  misc_RNA (1)...(19): siRNA sense strand
gacauucuucugcagcuaa

SEQ ID NO: 1118291 - RNA, 19 nt, Homo sapiens
  misc_RNA (1)...(19): siRNA sense strand
gaggagcguguuuacaaug

SEQ ID NO: 1118292 - RNA, 19 nt, Homo sapiens
  misc_RNA (1)...(19): siRNA sense strand
agaggagcguguuuacaau

SEQ ID NO: 1118293 - RNA, 19 nt, Homo sapiens
  misc_RNA (1)...(19): siRNA sense strand
uaaauuagaggagcguguu

SEQ ID NO: 1118294 - RNA, 19 nt, Homo sapiens
  misc_RNA (1)...(19): siRNA sense strand
ggaucacuuucacaaucaa

SEQ ID NO: 1118295 - RNA, 19 nt, Homo sapiens
  misc_RNA (1)...(19): siRNA sense strand
gaaagauugggaacauucu

SEQ ID NO: 1118296 - RNA, 19 nt, Homo sapiens
  misc_RNA (1)...(19): siRNA sense strand
gggaaugcaauagaugaaa

SEQ ID NO: 1118297 - RNA, 19 nt, Homo sapiens
  misc_RNA (1)...(19): siRNA sense strand
agagaauaccuucaaacaa

SEQ ID NO: 1118298 - RNA, 19 nt, Homo sapiens
  misc_RNA (1)...(19): siRNA sense strand
gaaugcaauagaugaaauc

SEQ ID NO: 1118299 - RNA, 19 nt, Homo sapiens
  misc_RNA (1)...(19): siRNA sense strand
ugagcaacauggagaagag

SEQ ID NO: 1118300 - RNA, 19 nt, Homo sapiens
  misc_RNA (1)...(19): siRNA sense strand
uguaucagcagaaauuaug

SEQ ID NO: 1118301 - RNA, 19 nt, Homo sapiens
  misc_RNA (1)...(19): siRNA sense strand
aagagaauaccuucaaaca

SEQ ID NO: 1118302 - RNA, 19 nt, Homo sapiens
  misc_RNA (1)...(19): siRNA sense strand
ugaagugggaaacgaagaa

SEQ ID NO: 1118303 - RNA, 19 nt, Homo sapiens
  misc_RNA (1)...(19): siRNA sense strand
ggagaagugaaaguacuga

SEQ ID NO: 1118304 - RNA, 19 nt, Homo sapiens
  misc_RNA (1)...(19): siRNA sense strand
uuauggcuaugaaagaaga

SEQ ID NO: 1118305 - RNA, 19 nt, Homo sapiens
  misc_RNA (1)...(19): siRNA sense strand
gaauaccuucaaacaacaa

SEQ ID NO: 1118306 - RNA, 19 nt, Homo sapiens
  misc_RNA (1)...(19): siRNA sense strand
ugacagcgaagaggaaaug

SEQ ID NO: 1118307 - RNA, 19 nt, Homo sapiens
  misc_RNA (1)...(19): siRNA sense strand
aacgaagaauugcucaguu

SEQ ID NO: 1118308 - RNA, 19 nt, Homo sapiens
  misc_RNA (1)...(19): siRNA sense strand
ggauuuccagguccaauag

SEQ ID NO: 1118309 - RNA, 19 nt, Homo sapiens
  misc_RNA (1)...(19): siRNA sense strand
ugacauucuucugcagcua

SEQ ID NO: 1118310 - RNA, 19 nt, Homo sapiens
  misc_RNA (1)...(19): siRNA sense strand
gcaacauggagaagagaau

SEQ ID NO: 1118311 - RNA, 19 nt, Homo sapiens
  misc_RNA (1)...(19): siRNA sense strand
aaucuccaaguccuuaaua

SEQ ID NO: 1118312 - RNA, 19 nt, Homo sapiens
  misc_RNA (1)...(19): siRNA sense strand
gagaagugaaaguacugaa

SEQ ID NO: 1118313 - RNA, 19 nt, Homo sapiens
  misc_RNA (1)...(19): siRNA sense strand
gauagcugcuccgaaucug

SEQ ID NO: 1118314 - RNA, 19 nt, Homo sapiens
  misc_RNA (1)...(19): siRNA sense strand
gaagugaaaguacugaaua

SEQ ID NO: 1118315 - RNA, 19 nt, Homo sapiens
  misc_RNA (1)...(19): siRNA sense strand
gagaauaccuucaaacaac

SEQ ID NO: 1118316 - RNA, 19 nt, Homo sapiens
  misc_RNA (1)...(19): siRNA sense strand
cuucaaagcugcacugauu

SEQ ID NO: 1118317 - RNA, 19 nt, Homo sapiens
  misc_RNA (1)...(19): siRNA sense strand
gagaagagaauccagcaua

SEQ ID NO: 1118318 - RNA, 19 nt, Homo sapiens
  misc_RNA (1)...(19): siRNA sense strand
caugacaacugaucaaaga

SEQ ID NO: 1118319 - RNA, 19 nt, Homo sapiens
  misc_RNA (1)...(19): siRNA sense strand
gcagcuaaguaccuuguuu

SEQ ID NO: 1118320 - RNA, 19 nt, Homo sapiens
  misc_RNA (1)...(19): siRNA sense strand
gacaacugaucaaagauuu

SEQ ID NO: 1118321 - RNA, 19 nt, Homo sapiens
  misc_RNA (1)...(19): siRNA sense strand
ggaaaucaguaaauuagag

SEQ ID NO: 1118322 - RNA, 19 nt, Homo sapiens
  misc_RNA (1)...(19): siRNA sense strand
cagcagaaauuauggcuau

SEQ ID NO: 1118323 - RNA, 19 nt, Homo sapiens
  misc_RNA (1)...(19): siRNA sense strand
ggaaugcaauagaugaaau

SEQ ID NO: 1118324 - RNA, 19 nt, Homo sapiens
  misc_RNA (1)...(19): siRNA sense strand
acgaagaauugcucaguua

SEQ ID NO: 1118325 - RNA, 19 nt, Homo sapiens
  misc_RNA (1)...(19): siRNA sense strand
aaacagcccuucccuucaa

SEQ ID NO: 1118326 - RNA, 19 nt, Homo sapiens
  misc_RNA (1)...(19): siRNA sense strand
gaaauuauggcuaugaaag

SEQ ID NO: 1118327 - RNA, 19 nt, Homo sapiens
  misc_RNA (1)...(19): siRNA sense strand
ccacauugcuugauuugca

SEQ ID NO: 1118328 - RNA, 19 nt, Homo sapiens
  misc_RNA (1)...(19): siRNA sense strand
caauguaucagcagaaauu

SEQ ID NO: 1118329 - RNA, 19 nt, Homo sapiens
  misc_RNA (1)...(19): siRNA sense strand
ccgaaucugugaaauuuga

SEQ ID NO: 1118330 - RNA, 19 nt, Homo sapiens
  misc_RNA (1)...(19): siRNA sense strand
gaaagaagaacaagugcau

SEQ ID NO: 1118331 - RNA, 19 nt, Homo sapiens
  misc_RNA (1)...(19): siRNA sense strand
gaggaaaucaguaaauuag

SEQ ID NO: 1118332 - RNA, 19 nt, Homo sapiens
  misc_RNA (1)...(19): siRNA sense strand
ccaagagaauaccuucaaa

SEQ ID NO: 1118333 - RNA, 19 nt, Homo sapiens
  misc_RNA (1)...(19): siRNA sense strand
gaagagaauccagcauauu

SEQ ID NO: 1118334 - RNA, 19 nt, Homo sapiens
  misc_RNA (1)...(19): siRNA sense strand
ggacacagagcauuuccaa

SEQ ID NO: 1118335 - RNA, 19 nt, Homo sapiens
  misc_RNA (1)...(19): siRNA sense strand
cagcucaacuccugaagug

SEQ ID NO: 1118336 - RNA, 19 nt, Homo sapiens
  misc_RNA (1)...(19): siRNA sense strand
aagagaaacugaaguccuu

SEQ ID NO: 1118337 - RNA, 19 nt, Homo sapiens
  misc_RNA (1)...(19): siRNA sense strand
aagagaauccagcauauuu

SEQ ID NO: 1118338 - RNA, 19 nt, Homo sapiens
  misc_RNA (1)...(19): siRNA sense strand
gcccuucccuucaagagaa

SEQ ID NO: 1118339 - RNA, 19 nt, Homo sapiens
  misc_RNA (1)...(19): siRNA sense strand
caacaagaggaaaucagua

SEQ ID NO: 1118340 - RNA, 19 nt, Homo sapiens
  misc_RNA (1)...(19): siRNA sense strand
agaagagaauccagcauau

SEQ ID NO: 1118341 - RNA, 19 nt, Homo sapiens
  misc_RNA (1)...(19): siRNA sense strand
gggaucacuuucacaauca

SEQ ID NO: 1118342 - RNA, 19 nt, Homo sapiens
  misc_RNA (1)...(19): siRNA sense strand
caacaggaggacacugaua

SEQ ID NO: 1118343 - RNA, 19 nt, Homo sapiens
  misc_RNA (1)...(19): siRNA sense strand
gcgaagaggaaaugagauu

SEQ ID NO: 1118344 - RNA, 19 nt, Homo sapiens
  misc_RNA (1)...(19): siRNA sense strand
cagaaauuauggcuaugaa

SEQ ID NO: 1118345 - RNA, 19 nt, Homo sapiens
  misc_RNA (1)...(19): siRNA sense strand
aagaauugcucaguuaguu

SEQ ID NO: 1118346 - RNA, 19 nt, Homo sapiens
  misc_RNA (1)...(19): siRNA sense strand
gcagaaauuauggcuauga

SEQ ID NO: 1118347 - RNA, 19 nt, Homo sapiens
  misc_RNA (1)...(19): siRNA sense strand
ugaaaucuccaaguccuua

SEQ ID NO: 1118348 - RNA, 19 nt, Homo sapiens
  misc_RNA (1)...(19): siRNA sense strand
cuccgaaucugugaaauuu

SEQ ID NO: 1118349 - RNA, 19 nt, Homo sapiens
  misc_RNA (1)...(19): siRNA sense strand
gucgaggacucccaggaua

SEQ ID NO: 1118350 - RNA, 19 nt, Homo sapiens
  misc_RNA (1)...(19): siRNA sense strand
caagaggaaaucaguaaau

SEQ ID NO: 1118351 - RNA, 19 nt, Homo sapiens
  misc_RNA (1)...(19): siRNA sense strand
aagaagaacaagugcauuu

SEQ ID NO: 1118352 - RNA, 19 nt, Homo sapiens
  misc_RNA (1)...(19): siRNA sense strand
guucaacuaaugcaaauga

SEQ ID NO: 1118353 - RNA, 19 nt, Homo sapiens
  misc_RNA (1)...(19): siRNA sense strand
gaaaguacugaauaacauc

SEQ ID NO: 1118354 - RNA, 19 nt, Homo sapiens
  misc_RNA (1)...(19): siRNA sense strand
gaagaacaagugcauuugg

SEQ ID NO: 1118355 - RNA, 19 nt, Homo sapiens
  misc_RNA (1)...(19): siRNA sense strand
uagaggagcguguuuacaa

SEQ ID NO: 1118356 - RNA, 19 nt, Homo sapiens
  misc_RNA (1)...(19): siRNA sense strand
acugauagcugcuccgaau

SEQ ID NO: 1118357 - RNA, 19 nt, Homo sapiens
  misc_RNA (1)...(19): siRNA sense strand
ucucaucccucucauugga

SEQ ID NO: 1118358 - RNA, 19 nt, Homo sapiens
  misc_RNA (1)...(19): siRNA sense strand
ugacaacugaucaaagauu

SEQ ID NO: 1118359 - RNA, 19 nt, Homo sapiens
  misc_RNA (1)...(19): siRNA sense strand
gagaauccagcauauuuua

SEQ ID NO: 1118360 - RNA, 19 nt, Homo sapiens
  misc_RNA (1)...(19): siRNA sense strand
gaagaauugcucaguuagu

SEQ ID NO: 1118361 - RNA, 19 nt, Homo sapiens
  misc_RNA (1)...(19): siRNA sense strand
cugaauaacaucacuaaug

SEQ ID NO: 1118362 - RNA, 19 nt, Homo sapiens
  misc_RNA (1)...(19): siRNA sense strand
gaaaucuccaaguccuuaa

SEQ ID NO: 1118363 - RNA, 19 nt, Homo sapiens
  misc_RNA (1)...(19): siRNA sense strand
gcaguucucaucccucuca

SEQ ID NO: 1118364 - RNA, 19 nt, Homo sapiens
  misc_RNA (1)...(19): siRNA sense strand
gaauugcucaguuaguuca

SEQ ID NO: 1118365 - RNA, 19 nt, Homo sapiens
  misc_RNA (1)...(19): siRNA sense strand
guucucaucccucucauug

SEQ ID NO: 1118366 - RNA, 19 nt, Homo sapiens
  misc_RNA (1)...(19): siRNA sense strand
gaacauucucagaccuuga

SEQ ID NO: 1118367 - RNA, 19 nt, Homo sapiens
  misc_RNA (1)...(19): siRNA sense strand
aagaacaagugcauuugga

SEQ ID NO: 1118368 - RNA, 19 nt, Homo sapiens
  misc_RNA (1)...(19): siRNA sense strand
gauauaacucaaagucuca

SEQ ID NO: 1118369 - RNA, 19 nt, Homo sapiens
  misc_RNA (1)...(19): siRNA sense strand
gcuccgaaucugugaaauu

SEQ ID NO: 1118370 - RNA, 19 nt, Homo sapiens
  misc_RNA (1)...(19): siRNA sense strand
gggaguggaaacacauuaa

SEQ ID NO: 1118371 - RNA, 19 nt, Homo sapiens
  misc_RNA (1)...(19): siRNA sense strand
cugcacugauugcccuuua

SEQ ID NO: 1118372 - RNA, 19 nt, Homo sapiens
  misc_RNA (1)...(19): siRNA sense strand
uaugaaagaagaacaagug

SEQ ID NO: 1118373 - RNA, 19 nt, Homo sapiens
  misc_RNA (1)...(19): siRNA sense strand
ggacaugggaaugcaauag

SEQ ID NO: 1118374 - RNA, 19 nt, Homo sapiens
  misc_RNA (1)...(19): siRNA sense strand
cagcgaagaggaaaugaga

SEQ ID NO: 1118375 - RNA, 19 nt, Homo sapiens
  misc_RNA (1)...(19): siRNA sense strand
aauaccacauugcuugauu

SEQ ID NO: 1118376 - RNA, 19 nt, Homo sapiens
  misc_RNA (1)...(19): siRNA sense strand
gugaaaguacugaauaaca

SEQ ID NO: 1118377 - RNA, 19 nt, Homo sapiens
  misc_RNA (1)...(19): siRNA sense strand
ugggaucacuuucacaauc

SEQ ID NO: 1118378 - RNA, 19 nt, Homo sapiens
  misc_RNA (1)...(19): siRNA sense strand
cucaaagucucacgggaaa

SEQ ID NO: 1118379 - RNA, 19 nt, Homo sapiens
  misc_RNA (1)...(19): siRNA sense strand
ugaaagauugggaacauuc

SEQ ID NO: 1118380 - RNA, 19 nt, Homo sapiens
  misc_RNA (1)...(19): siRNA sense strand
ggaaauaaaaggagaagug

SEQ ID NO: 1118381 - RNA, 19 nt, Homo sapiens
  misc_RNA (1)...(19): siRNA sense strand
aaugagauuucaagaaguc

SEQ ID NO: 1118382 - RNA, 19 nt, Homo sapiens
  misc_RNA (1)...(19): siRNA sense strand
guacugaauaacaucacua

SEQ ID NO: 1118383 - RNA, 19 nt, Homo sapiens
  misc_RNA (1)...(19): siRNA sense strand
acacagagcauuuccaaaa

SEQ ID NO: 1118384 - RNA, 19 nt, Homo sapiens
  misc_RNA (1)...(19): siRNA sense strand
gacaugggaaugcaauaga

SEQ ID NO: 1118385 - RNA, 19 nt, Homo sapiens
  misc_RNA (1)...(19): siRNA sense strand
gaaauaaaaggagaaguga

SEQ ID NO: 1118386 - RNA, 19 nt, Homo sapiens
  misc_RNA (1)...(19): siRNA sense strand
aacaagaggaaaucaguaa

SEQ ID NO: 1118387 - RNA, 19 nt, Homo sapiens
  misc_RNA (1)...(19): siRNA sense strand
ucaaacaacaagaggaaau

SEQ ID NO: 1118388 - RNA, 19 nt, Homo sapiens
  misc_RNA (1)...(19): siRNA sense strand
agaauaccuucaaacaaca

SEQ ID NO: 1118389 - RNA, 19 nt, Homo sapiens
  misc_RNA (1)...(19): siRNA sense strand
auaccacauugcuugauuu

SEQ ID NO: 1118390 - RNA, 19 nt, Homo sapiens
  misc_RNA (1)...(19): siRNA sense strand
gacauucuucugcagcuaa

SEQ ID NO: 1118391 - RNA, 19 nt, Homo sapiens
  misc_RNA (1)...(19): siRNA sense strand
gaggagcguguuuacaaug

SEQ ID NO: 1118392 - RNA, 19 nt, Homo sapiens
  misc_RNA (1)...(19): siRNA sense strand
agaggagcguguuuacaau

SEQ ID NO: 1118393 - RNA, 19 nt, Homo sapiens
  misc_RNA (1)...(19): siRNA sense strand
uaaauuagaggagcguguu

SEQ ID NO: 1118394 - RNA, 19 nt, Homo sapiens
  misc_RNA (1)...(19): siRNA sense strand
ggaucacuuucacaaucaa

SEQ ID NO: 1118395 - RNA, 19 nt, Homo sapiens
  misc_RNA (1)...(19): siRNA sense strand
gaaagauugggaacauucu

SEQ ID NO: 1118396 - RNA, 19 nt, Homo sapiens
  misc_RNA (1)...(19): siRNA sense strand
gggaaugcaauagaugaaa

SEQ ID NO: 1118397 - RNA, 19 nt, Homo sapiens
  misc_RNA (1)...(19): siRNA sense strand
agagaauaccuucaaacaa

SEQ ID NO: 1118398 - RNA, 19 nt, Homo sapiens
  misc_RNA (1)...(19): siRNA sense strand
gaaugcaauagaugaaauc

SEQ ID NO: 1118399 - RNA, 19 nt, Homo sapiens
  misc_RNA (1)...(19): siRNA sense strand
ugagcaacauggagaagag

SEQ ID NO: 1118400 - RNA, 19 nt, Homo sapiens
  misc_RNA (1)...(19): siRNA sense strand
uguaucagcagaaauuaug

SEQ ID NO: 1118401 - RNA, 19 nt, Homo sapiens
  misc_RNA (1)...(19): siRNA sense strand
aagagaauaccuucaaaca

SEQ ID NO: 1118402 - RNA, 19 nt, Homo sapiens
  misc_RNA (1)...(19): siRNA sense strand
ugaagugggaaacgaagaa

SEQ ID NO: 1118403 - RNA, 19 nt, Homo sapiens
  misc_RNA (1)...(19): siRNA sense strand
ggagaagugaaaguacuga

SEQ ID NO: 1118404 - RNA, 19 nt, Homo sapiens
  misc_RNA (1)...(19): siRNA sense strand
uuauggcuaugaaagaaga

SEQ ID NO: 1118405 - RNA, 19 nt, Homo sapiens
  misc_RNA (1)...(19): siRNA sense strand
gaauaccuucaaacaacaa

SEQ ID NO: 1118406 - RNA, 19 nt, Homo sapiens
  misc_RNA (1)...(19): siRNA sense strand
ugacagcgaagaggaaaug

SEQ ID NO: 1118407 - RNA, 19 nt, Homo sapiens
  misc_RNA (1)...(19): siRNA sense strand
aacgaagaauugcucaguu

SEQ ID NO: 1118408 - RNA, 19 nt, Homo sapiens
  misc_RNA (1)...(19): siRNA sense strand
ggauuuccagguccaauag

SEQ ID NO: 1118409 - RNA, 19 nt, Homo sapiens
  misc_RNA (1)...(19): siRNA sense strand
ugacauucuucugcagcua

SEQ ID NO: 1118410 - RNA, 19 nt, Homo sapiens
  misc_RNA (1)...(19): siRNA sense strand
gcaacauggagaagagaau

SEQ ID NO: 1118411 - RNA, 19 nt, Homo sapiens
  misc_RNA (1)...(19): siRNA sense strand
aaucuccaaguccuuaaua

SEQ ID NO: 1118412 - RNA, 19 nt, Homo sapiens
  misc_RNA (1)...(19): siRNA sense strand
gagaagugaaaguacugaa

SEQ ID NO: 1118413 - RNA, 19 nt, Homo sapiens
  misc_RNA (1)...(19): siRNA sense strand
gauagcugcuccgaaucug

SEQ ID NO: 1118414 - RNA, 19 nt, Homo sapiens
  misc_RNA (1)...(19): siRNA sense strand
gaagugaaaguacugaaua

SEQ ID NO: 1118415 - RNA, 19 nt, Homo sapiens
  misc_RNA (1)...(19): siRNA sense strand
gagaauaccuucaaacaac

SEQ ID NO: 1118416 - RNA, 19 nt, Homo sapiens
  misc_RNA (1)...(19): siRNA sense strand
cuucaaagcugcacugauu

SEQ ID NO: 1118417 - RNA, 19 nt, Homo sapiens
  misc_RNA (1)...(19): siRNA sense strand
gagaagagaauccagcaua

SEQ ID NO: 1118418 - RNA, 19 nt, Homo sapiens
  misc_RNA (1)...(19): siRNA sense strand
caugacaacugaucaaaga

SEQ ID NO: 1118419 - RNA, 19 nt, Homo sapiens
  misc_RNA (1)...(19): siRNA sense strand
gcagcuaaguaccuuguuu

SEQ ID NO: 1118420 - RNA, 19 nt, Homo sapiens
  misc_RNA (1)...(19): siRNA sense strand
gacaacugaucaaagauuu

SEQ ID NO: 1118421 - RNA, 19 nt, Homo sapiens
  misc_RNA (1)...(19): siRNA sense strand
ggaaaucaguaaauuagag

SEQ ID NO: 1118422 - RNA, 19 nt, Homo sapiens
  misc_RNA (1)...(19): siRNA sense strand
cagcagaaauuauggcuau

SEQ ID NO: 1118423 - RNA, 19 nt, Homo sapiens
  misc_RNA (1)...(19): siRNA sense strand
ggaaugcaauagaugaaau

SEQ ID NO: 1118424 - RNA, 19 nt, Homo sapiens
  misc_RNA (1)...(19): siRNA sense strand
acgaagaauugcucaguua

SEQ ID NO: 1118425 - RNA, 19 nt, Homo sapiens
  misc_RNA (1)...(19): siRNA sense strand
aaacagcccuucccuucaa

SEQ ID NO: 1118426 - RNA, 19 nt, Homo sapiens
  misc_RNA (1)...(19): siRNA sense strand
gaaauuauggcuaugaaag

SEQ ID NO: 1118427 - RNA, 19 nt, Homo sapiens
  misc_RNA (1)...(19): siRNA sense strand
ccacauugcuugauuugca

SEQ ID NO: 1118428 - RNA, 19 nt, Homo sapiens
  misc_RNA (1)...(19): siRNA sense strand
caauguaucagcagaaauu

SEQ ID NO: 1118429 - RNA, 19 nt, Homo sapiens
  misc_RNA (1)...(19): siRNA sense strand
ccgaaucugugaaauuuga

SEQ ID NO: 1118430 - RNA, 19 nt, Homo sapiens
  misc_RNA (1)...(19): siRNA sense strand
gaaagaagaacaagugcau

SEQ ID NO: 1118431 - RNA, 19 nt, Homo sapiens
  misc_RNA (1)...(19): siRNA sense strand
gaggaaaucaguaaauuag

SEQ ID NO: 1118432 - RNA, 19 nt, Homo sapiens
  misc_RNA (1)...(19): siRNA sense strand
ccaagagaauaccuucaaa

SEQ ID NO: 1118433 - RNA, 19 nt, Homo sapiens
  misc_RNA (1)...(19): siRNA sense strand
gaagagaauccagcauauu

SEQ ID NO: 1118434 - RNA, 19 nt, Homo sapiens
  misc_RNA (1)...(19): siRNA sense strand
ggacacagagcauuuccaa

SEQ ID NO: 1118435 - RNA, 19 nt, Homo sapiens
  misc_RNA (1)...(19): siRNA sense strand
cagcucaacuccugaagug

SEQ ID NO: 1118436 - RNA, 19 nt, Homo sapiens
  misc_RNA (1)...(19): siRNA sense strand
aagagaaacugaaguccuu

SEQ ID NO: 1118437 - RNA, 19 nt, Homo sapiens
  misc_RNA (1)...(19): siRNA sense strand
aagagaauccagcauauuu

SEQ ID NO: 1118438 - RNA, 19 nt, Homo sapiens
  misc_RNA (1)...(19): siRNA sense strand
gcccuucccuucaagagaa

SEQ ID NO: 1118439 - RNA, 19 nt, Homo sapiens
  misc_RNA (1)...(19): siRNA sense strand
caacaagaggaaaucagua

SEQ ID NO: 1118440 - RNA, 19 nt, Homo sapiens
  misc_RNA (1)...(19): siRNA sense strand
agaagagaauccagcauau

SEQ ID NO: 1118441 - RNA, 19 nt, Homo sapiens
  misc_RNA (1)...(19): siRNA sense strand
gggaucacuuucacaauca

SEQ ID NO: 1118442 - RNA, 19 nt, Homo sapiens
  misc_RNA (1)...(19): siRNA sense strand
caacaggaggacacugaua

SEQ ID NO: 1118443 - RNA, 19 nt, Homo sapiens
  misc_RNA (1)...(19): siRNA sense strand
gcgaagaggaaaugagauu

SEQ ID NO: 1118444 - RNA, 19 nt, Homo sapiens
  misc_RNA (1)...(19): siRNA sense strand
cagaaauuauggcuaugaa

SEQ ID NO: 1118445 - RNA, 19 nt, Homo sapiens
  misc_RNA (1)...(19): siRNA sense strand
aagaauugcucaguuaguu

SEQ ID NO: 1118446 - RNA, 19 nt, Homo sapiens
  misc_RNA (1)...(19): siRNA sense strand
gcagaaauuauggcuauga

SEQ ID NO: 1118447 - RNA, 19 nt, Homo sapiens
  misc_RNA (1)...(19): siRNA sense strand
ugaaaucuccaaguccuua

SEQ ID NO: 1118448 - RNA, 19 nt, Homo sapiens
  misc_RNA (1)...(19): siRNA sense strand
cuccgaaucugugaaauuu

SEQ ID NO: 1118449 - RNA, 19 nt, Homo sapiens
  misc_RNA (1)...(19): siRNA sense strand
gucgaggacucccaggaua

SEQ ID NO: 1118450 - RNA, 19 nt, Homo sapiens
  misc_RNA (1)...(19): siRNA sense strand
caagaggaaaucaguaaau

SEQ ID NO: 1118451 - RNA, 19 nt, Homo sapiens
  misc_RNA (1)...(19): siRNA sense strand
aagaagaacaagugcauuu

SEQ ID NO: 1118452 - RNA, 19 nt, Homo sapiens
  misc_RNA (1)...(19): siRNA sense strand
guucaacuaaugcaaauga

SEQ ID NO: 1118453 - RNA, 19 nt, Homo sapiens
  misc_RNA (1)...(19): siRNA sense strand
gaaaguacugaauaacauc

SEQ ID NO: 1118454 - RNA, 19 nt, Homo sapiens
  misc_RNA (1)...(19): siRNA sense strand
gaagaacaagugcauuugg

SEQ ID NO: 1118455 - RNA, 19 nt, Homo sapiens
  misc_RNA (1)...(19): siRNA sense strand
uagaggagcguguuuacaa

SEQ ID NO: 1118456 - RNA, 19 nt, Homo sapiens
  misc_RNA (1)...(19): siRNA sense strand
acugauagcugcuccgaau

SEQ ID NO: 1118457 - RNA, 19 nt, Homo sapiens
  misc_RNA (1)...(19): siRNA sense strand
ucucaucccucucauugga

SEQ ID NO: 1118458 - RNA, 19 nt, Homo sapiens
  misc_RNA (1)...(19): siRNA sense strand
ugacaacugaucaaagauu

SEQ ID NO: 1118459 - RNA, 19 nt, Homo sapiens
  misc_RNA (1)...(19): siRNA sense strand
gagaauccagcauauuuua

SEQ ID NO: 1118460 - RNA, 19 nt, Homo sapiens
  misc_RNA (1)...(19): siRNA sense strand
gaagaauugcucaguuagu

SEQ ID NO: 1118461 - RNA, 19 nt, Homo sapiens
  misc_RNA (1)...(19): siRNA sense strand
cugaauaacaucacuaaug

SEQ ID NO: 1118462 - RNA, 19 nt, Homo sapiens
  misc_RNA (1)...(19): siRNA sense strand
gaaaucuccaaguccuuaa

SEQ ID NO: 1118463 - RNA, 19 nt, Homo sapiens
  misc_RNA (1)...(19): siRNA sense strand
gcaguucucaucccucuca

SEQ ID NO: 1118464 - RNA, 19 nt, Homo sapiens
  misc_RNA (1)...(19): siRNA sense strand
gaauugcucaguuaguuca

SEQ ID NO: 1118465 - RNA, 19 nt, Homo sapiens
  misc_RNA (1)...(19): siRNA sense strand
guucucaucccucucauug

SEQ ID NO: 1118466 - RNA, 19 nt, Homo sapiens
  misc_RNA (1)...(19): siRNA sense strand
gaacauucucagaccuuga

SEQ ID NO: 1118467 - RNA, 19 nt, Homo sapiens
  misc_RNA (1)...(19): siRNA sense strand
aagaacaagugcauuugga

SEQ ID NO: 1118468 - RNA, 19 nt, Homo sapiens
  misc_RNA (1)...(19): siRNA sense strand
gauauaacucaaagucuca

SEQ ID NO: 1118469 - RNA, 19 nt, Homo sapiens
  misc_RNA (1)...(19): siRNA sense strand
gcuccgaaucugugaaauu

SEQ ID NO: 1118470 - RNA, 19 nt, Homo sapiens
  misc_RNA (1)...(19): siRNA sense strand
gggaguggaaacacauuaa

SEQ ID NO: 1118471 - RNA, 19 nt, Homo sapiens
  misc_RNA (1)...(19): siRNA sense strand
cugcacugauugcccuuua

SEQ ID NO: 1118472 - RNA, 19 nt, Homo sapiens
  misc_RNA (1)...(19): siRNA sense strand
uaugaaagaagaacaagug

SEQ ID NO: 1118473 - RNA, 19 nt, Homo sapiens
  misc_RNA (1)...(19): siRNA sense strand
ggacaugggaaugcaauag

SEQ ID NO: 1118474 - RNA, 19 nt, Homo sapiens
  misc_RNA (1)...(19): siRNA sense strand
cagcgaagaggaaaugaga

SEQ ID NO: 1118475 - RNA, 19 nt, Homo sapiens
  misc_RNA (1)...(19): siRNA sense strand
aauaccacauugcuugauu

SEQ ID NO: 1118476 - RNA, 19 nt, Homo sapiens
  misc_RNA (1)...(19): siRNA sense strand
gugaaaguacugaauaaca

SEQ ID NO: 1118477 - RNA, 19 nt, Homo sapiens
  misc_RNA (1)...(19): siRNA sense strand
ugggaucacuuucacaauc

SEQ ID NO: 1118478 - RNA, 19 nt, Homo sapiens
  misc_RNA (1)...(19): siRNA sense strand
cucaaagucucacgggaaa

SEQ ID NO: 1118479 - RNA, 19 nt, Homo sapiens
  misc_RNA (1)...(19): siRNA sense strand
ugaaagauugggaacauuc

SEQ ID NO: 1118480 - RNA, 19 nt, Homo sapiens
  misc_RNA (1)...(19): siRNA sense strand
ggaaauaaaaggagaagug

SEQ ID NO: 1118481 - RNA, 19 nt, Homo sapiens
  misc_RNA (1)...(19): siRNA sense strand
aaugagauuucaagaaguc

SEQ ID NO: 1118482 - RNA, 19 nt, Homo sapiens
  misc_RNA (1)...(19): siRNA sense strand
guacugaauaacaucacua

SEQ ID NO: 1118483 - RNA, 19 nt, Homo sapiens
  misc_RNA (1)...(19): siRNA sense strand
acacagagcauuuccaaaa

SEQ ID NO: 1118484 - RNA, 19 nt, Homo sapiens
  misc_RNA (1)...(19): siRNA sense strand
gacaugggaaugcaauaga

SEQ ID NO: 1118485 - RNA, 19 nt, Homo sapiens
  misc_RNA (1)...(19): siRNA sense strand
gaaauaaaaggagaaguga

SEQ ID NO: 1118486 - RNA, 19 nt, Homo sapiens
  misc_RNA (1)...(19): siRNA sense strand
aacaagaggaaaucaguaa

SEQ ID NO: 1118487 - RNA, 19 nt, Homo sapiens
  misc_RNA (1)...(19): siRNA sense strand
ucaaacaacaagaggaaau

SEQ ID NO: 1118488 - RNA, 19 nt, Homo sapiens
  misc_RNA (1)...(19): siRNA sense strand
agaauaccuucaaacaaca

SEQ ID NO: 1118489 - RNA, 19 nt, Homo sapiens
  misc_RNA (1)...(19): siRNA sense strand
auaccacauugcuugauuu

SEQ ID NO: 1118490 - RNA, 19 nt, Homo sapiens
  misc_RNA (1)...(19): siRNA sense strand
gacauucuucugcagcuaa

SEQ ID NO: 1118491 - RNA, 19 nt, Homo sapiens
  misc_RNA (1)...(19): siRNA sense strand
gaggagcguguuuacaaug

SEQ ID NO: 1118492 - RNA, 19 nt, Homo sapiens
  misc_RNA (1)...(19): siRNA sense strand
agaggagcguguuuacaau

SEQ ID NO: 1118493 - RNA, 19 nt, Homo sapiens
  misc_RNA (1)...(19): siRNA sense strand
uaaauuagaggagcguguu

SEQ ID NO: 1118494 - RNA, 19 nt, Homo sapiens
  misc_RNA (1)...(19): siRNA sense strand
ggaucacuuucacaaucaa

SEQ ID NO: 1118495 - RNA, 19 nt, Homo sapiens
  misc_RNA (1)...(19): siRNA sense strand
gaaagauugggaacauucu

SEQ ID NO: 1118496 - RNA, 19 nt, Homo sapiens
  misc_RNA (1)...(19): siRNA sense strand
gggaaugcaauagaugaaa

SEQ ID NO: 1118497 - RNA, 19 nt, Homo sapiens
  misc_RNA (1)...(19): siRNA sense strand
agagaauaccuucaaacaa

SEQ ID NO: 1118498 - RNA, 19 nt, Homo sapiens
  misc_RNA (1)...(19): siRNA sense strand
gaaugcaauagaugaaauc

SEQ ID NO: 1118499 - RNA, 19 nt, Homo sapiens
  misc_RNA (1)...(19): siRNA sense strand
ugagcaacauggagaagag

SEQ ID NO: 1118500 - RNA, 19 nt, Homo sapiens
  misc_RNA (1)...(19): siRNA sense strand
uguaucagcagaaauuaug

SEQ ID NO: 1118501 - RNA, 19 nt, Homo sapiens
  misc_RNA (1)...(19): siRNA sense strand
aagagaauaccuucaaaca

SEQ ID NO: 1118502 - RNA, 19 nt, Homo sapiens
  misc_RNA (1)...(19): siRNA sense strand
ugaagugggaaacgaagaa

SEQ ID NO: 1118503 - RNA, 19 nt, Homo sapiens
  misc_RNA (1)...(19): siRNA sense strand
ggagaagugaaaguacuga

SEQ ID NO: 1118504 - RNA, 19 nt, Homo sapiens
  misc_RNA (1)...(19): siRNA sense strand
uuauggcuaugaaagaaga

SEQ ID NO: 1118505 - RNA, 19 nt, Homo sapiens
  misc_RNA (1)...(19): siRNA sense strand
gaauaccuucaaacaacaa

SEQ ID NO: 1118506 - RNA, 19 nt, Homo sapiens
  misc_RNA (1)...(19): siRNA sense strand
ugacagcgaagaggaaaug

SEQ ID NO: 1118507 - RNA, 19 nt, Homo sapiens
  misc_RNA (1)...(19): siRNA sense strand
aacgaagaauugcucaguu

SEQ ID NO: 1118508 - RNA, 19 nt, Homo sapiens
  misc_RNA (1)...(19): siRNA sense strand
ggauuuccagguccaauag

SEQ ID NO: 1118509 - RNA, 19 nt, Homo sapiens
  misc_RNA (1)...(19): siRNA sense strand
ugacauucuucugcagcua

SEQ ID NO: 1118510 - RNA, 19 nt, Homo sapiens
  misc_RNA (1)...(19): siRNA sense strand
gcaacauggagaagagaau

SEQ ID NO: 1118511 - RNA, 19 nt, Homo sapiens
  misc_RNA (1)...(19): siRNA sense strand
aaucuccaaguccuuaaua

SEQ ID NO: 1118512 - RNA, 19 nt, Homo sapiens
  misc_RNA (1)...(19): siRNA sense strand
gagaagugaaaguacugaa

SEQ ID NO: 1118513 - RNA, 19 nt, Homo sapiens
  misc_RNA (1)...(19): siRNA sense strand
gauagcugcuccgaaucug

SEQ ID NO: 1118514 - RNA, 19 nt, Homo sapiens
  misc_RNA (1)...(19): siRNA sense strand
gaagugaaaguacugaaua

SEQ ID NO: 1118515 - RNA, 19 nt, Homo sapiens
  misc_RNA (1)...(19): siRNA sense strand
gagaauaccuucaaacaac

SEQ ID NO: 1118516 - RNA, 19 nt, Homo sapiens
  misc_RNA (1)...(19): siRNA sense strand
cuucaaagcugcacugauu

SEQ ID NO: 1118517 - RNA, 19 nt, Homo sapiens
  misc_RNA (1)...(19): siRNA sense strand
gagaagagaauccagcaua

SEQ ID NO: 1118518 - RNA, 19 nt, Homo sapiens
  misc_RNA (1)...(19): siRNA sense strand
caugacaacugaucaaaga

SEQ ID NO: 1118519 - RNA, 19 nt, Homo sapiens
  misc_RNA (1)...(19): siRNA sense strand
gcagcuaaguaccuuguuu

SEQ ID NO: 1118520 - RNA, 19 nt, Homo sapiens
  misc_RNA (1)...(19): siRNA sense strand
gacaacugaucaaagauuu

SEQ ID NO: 1118521 - RNA, 19 nt, Homo sapiens
  misc_RNA (1)...(19): siRNA sense strand
ggaaaucaguaaauuagag

SEQ ID NO: 1118522 - RNA, 19 nt, Homo sapiens
  misc_RNA (1)...(19): siRNA sense strand
cagcagaaauuauggcuau

SEQ ID NO: 1118523 - RNA, 19 nt, Homo sapiens
  misc_RNA (1)...(19): siRNA sense strand
ggaaugcaauagaugaaau

SEQ ID NO: 1118524 - RNA, 19 nt, Homo sapiens
  misc_RNA (1)...(19): siRNA sense strand
acgaagaauugcucaguua

SEQ ID NO: 1118525 - RNA, 19 nt, Homo sapiens
  misc_RNA (1)...(19): siRNA sense strand
aaacagcccuucccuucaa

SEQ ID NO: 1118526 - RNA, 19 nt, Homo sapiens
  misc_RNA (1)...(19): siRNA sense strand
gaaauuauggcuaugaaag

SEQ ID NO: 1118527 - RNA, 19 nt, Homo sapiens
  misc_RNA (1)...(19): siRNA sense strand
ccacauugcuugauuugca

SEQ ID NO: 1118528 - RNA, 19 nt, Homo sapiens
  misc_RNA (1)...(19): siRNA sense strand
caauguaucagcagaaauu

SEQ ID NO: 1118529 - RNA, 19 nt, Homo sapiens
  misc_RNA (1)...(19): siRNA sense strand
ccgaaucugugaaauuuga

SEQ ID NO: 1118530 - RNA, 19 nt, Homo sapiens
  misc_RNA (1)...(19): siRNA sense strand
gaaagaagaacaagugcau

SEQ ID NO: 1118531 - RNA, 19 nt, Homo sapiens
  misc_RNA (1)...(19): siRNA sense strand
gaggaaaucaguaaauuag

SEQ ID NO: 1118532 - RNA, 19 nt, Homo sapiens
  misc_RNA (1)...(19): siRNA sense strand
ccaagagaauaccuucaaa

SEQ ID NO: 1118533 - RNA, 19 nt, Homo sapiens
  misc_RNA (1)...(19): siRNA sense strand
gaagagaauccagcauauu

SEQ ID NO: 1118534 - RNA, 19 nt, Homo sapiens
  misc_RNA (1)...(19): siRNA sense strand
ggacacagagcauuuccaa

SEQ ID NO: 1118535 - RNA, 19 nt, Homo sapiens
  misc_RNA (1)...(19): siRNA sense strand
cagcucaacuccugaagug

SEQ ID NO: 1118536 - RNA, 19 nt, Homo sapiens
  misc_RNA (1)...(19): siRNA sense strand
aagagaaacugaaguccuu

SEQ ID NO: 1118537 - RNA, 19 nt, Homo sapiens
  misc_RNA (1)...(19): siRNA sense strand
aagagaauccagcauauuu

SEQ ID NO: 1118538 - RNA, 19 nt, Homo sapiens
  misc_RNA (1)...(19): siRNA sense strand
gcccuucccuucaagagaa

SEQ ID NO: 1118539 - RNA, 19 nt, Homo sapiens
  misc_RNA (1)...(19): siRNA sense strand
caacaagaggaaaucagua

SEQ ID NO: 1118540 - RNA, 19 nt, Homo sapiens
  misc_RNA (1)...(19): siRNA sense strand
agaagagaauccagcauau

SEQ ID NO: 1118541 - RNA, 19 nt, Homo sapiens
  misc_RNA (1)...(19): siRNA sense strand
gggaucacuuucacaauca

SEQ ID NO: 1118542 - RNA, 19 nt, Homo sapiens
  misc_RNA (1)...(19): siRNA sense strand
caacaggaggacacugaua

SEQ ID NO: 1118543 - RNA, 19 nt, Homo sapiens
  misc_RNA (1)...(19): siRNA sense strand
gcgaagaggaaaugagauu

SEQ ID NO: 1118544 - RNA, 19 nt, Homo sapiens
  misc_RNA (1)...(19): siRNA sense strand
cagaaauuauggcuaugaa

SEQ ID NO: 1118545 - RNA, 19 nt, Homo sapiens
  misc_RNA (1)...(19): siRNA sense strand
aagaauugcucaguuaguu

SEQ ID NO: 1118546 - RNA, 19 nt, Homo sapiens
  misc_RNA (1)...(19): siRNA sense strand
gcagaaauuauggcuauga

SEQ ID NO: 1118547 - RNA, 19 nt, Homo sapiens
  misc_RNA (1)...(19): siRNA sense strand
ugaaaucuccaaguccuua

SEQ ID NO: 1118548 - RNA, 19 nt, Homo sapiens
  misc_RNA (1)...(19): siRNA sense strand
cuccgaaucugugaaauuu

SEQ ID NO: 1118549 - RNA, 19 nt, Homo sapiens
  misc_RNA (1)...(19): siRNA sense strand
gucgaggacucccaggaua

SEQ ID NO: 1118550 - RNA, 19 nt, Homo sapiens
  misc_RNA (1)...(19): siRNA sense strand
caagaggaaaucaguaaau

SEQ ID NO: 1118551 - RNA, 19 nt, Homo sapiens
  misc_RNA (1)...(19): siRNA sense strand
aagaagaacaagugcauuu

SEQ ID NO: 1118552 - RNA, 19 nt, Homo sapiens
  misc_RNA (1)...(19): siRNA sense strand
guucaacuaaugcaaauga

SEQ ID NO: 1118553 - RNA, 19 nt, Homo sapiens
  misc_RNA (1)...(19): siRNA sense strand
gaaaguacugaauaacauc

SEQ ID NO: 1118554 - RNA, 19 nt, Homo sapiens
  misc_RNA (1)...(19): siRNA sense strand
gaagaacaagugcauuugg

SEQ ID NO: 1118555 - RNA, 19 nt, Homo sapiens
  misc_RNA (1)...(19): siRNA sense strand
uagaggagcguguuuacaa

SEQ ID NO: 1118556 - RNA, 19 nt, Homo sapiens
  misc_RNA (1)...(19): siRNA sense strand
acugauagcugcuccgaau

SEQ ID NO: 1118557 - RNA, 19 nt, Homo sapiens
  misc_RNA (1)...(19): siRNA sense strand
ucucaucccucucauugga

SEQ ID NO: 1118558 - RNA, 19 nt, Homo sapiens
  misc_RNA (1)...(19): siRNA sense strand
ugacaacugaucaaagauu

SEQ ID NO: 1118559 - RNA, 19 nt, Homo sapiens
  misc_RNA (1)...(19): siRNA sense strand
gagaauccagcauauuuua

SEQ ID NO: 1118560 - RNA, 19 nt, Homo sapiens
  misc_RNA (1)...(19): siRNA sense strand
gaagaauugcucaguuagu

SEQ ID NO: 1118561 - RNA, 19 nt, Homo sapiens
  misc_RNA (1)...(19): siRNA sense strand
cugaauaacaucacuaaug

SEQ ID NO: 1118562 - RNA, 19 nt, Homo sapiens
  misc_RNA (1)...(19): siRNA sense strand
gaaaucuccaaguccuuaa

SEQ ID NO: 1118563 - RNA, 19 nt, Homo sapiens
  misc_RNA (1)...(19): siRNA sense strand
gcaguucucaucccucuca

SEQ ID NO: 1118564 - RNA, 19 nt, Homo sapiens
  misc_RNA (1)...(19): siRNA sense strand
gaauugcucaguuaguuca

SEQ ID NO: 1118565 - RNA, 19 nt, Homo sapiens
  misc_RNA (1)...(19): siRNA sense strand
guucucaucccucucauug

SEQ ID NO: 1118566 - RNA, 19 nt, Homo sapiens
  misc_RNA (1)...(19): siRNA sense strand
gaacauucucagaccuuga

SEQ ID NO: 1118567 - RNA, 19 nt, Homo sapiens
  misc_RNA (1)...(19): siRNA sense strand
aagaacaagugcauuugga

SEQ ID NO: 1118568 - RNA, 19 nt, Homo sapiens
  misc_RNA (1)...(19): siRNA sense strand
gauauaacucaaagucuca

SEQ ID NO: 1118569 - RNA, 19 nt, Homo sapiens
  misc_RNA (1)...(19): siRNA sense strand
gcuccgaaucugugaaauu

SEQ ID NO: 1118570 - RNA, 19 nt, Homo sapiens
  misc_RNA (1)...(19): siRNA sense strand
gggaguggaaacacauuaa

SEQ ID NO: 1118571 - RNA, 19 nt, Homo sapiens
  misc_RNA (1)...(19): siRNA sense strand
cugcacugauugcccuuua

SEQ ID NO: 1118572 - RNA, 19 nt, Homo sapiens
  misc_RNA (1)...(19): siRNA sense strand
uaugaaagaagaacaagug

SEQ ID NO: 1118573 - RNA, 19 nt, Homo sapiens
  misc_RNA (1)...(19): siRNA sense strand
ggacaugggaaugcaauag

SEQ ID NO: 1118574 - RNA, 19 nt, Homo sapiens
  misc_RNA (1)...(19): siRNA sense strand
cagcgaagaggaaaugaga

SEQ ID NO: 1118575 - RNA, 19 nt, Homo sapiens
  misc_RNA (1)...(19): siRNA sense strand
aauaccacauugcuugauu

SEQ ID NO: 1118576 - RNA, 19 nt, Homo sapiens
  misc_RNA (1)...(19): siRNA sense strand
gugaaaguacugaauaaca

SEQ ID NO: 1118577 - RNA, 19 nt, Homo sapiens
  misc_RNA (1)...(19): siRNA sense strand
ugggaucacuuucacaauc

SEQ ID NO: 1118578 - RNA, 19 nt, Homo sapiens
  misc_RNA (1)...(19): siRNA sense strand
cucaaagucucacgggaaa

SEQ ID NO: 1118579 - RNA, 19 nt, Homo sapiens
  misc_RNA (1)...(19): siRNA sense strand
ugaaagauugggaacauuc

SEQ ID NO: 1118580 - RNA, 19 nt, Homo sapiens
  misc_RNA (1)...(19): siRNA sense strand
ggaaauaaaaggagaagug

SEQ ID NO: 1118581 - RNA, 19 nt, Homo sapiens
  misc_RNA (1)...(19): siRNA sense strand
aaugagauuucaagaaguc

SEQ ID NO: 1118582 - RNA, 19 nt, Homo sapiens
  misc_RNA (1)...(19): siRNA sense strand
guacugaauaacaucacua

SEQ ID NO: 1118583 - RNA, 19 nt, Homo sapiens
  misc_RNA (1)...(19): siRNA sense strand
acacagagcauuuccaaaa

SEQ ID NO: 1118584 - RNA, 19 nt, Homo sapiens
  misc_RNA (1)...(19): siRNA sense strand
gacaugggaaugcaauaga

SEQ ID NO: 1118585 - RNA, 19 nt, Homo sapiens
  misc_RNA (1)...(19): siRNA sense strand
gaaauaaaaggagaaguga

SEQ ID NO: 1118586 - RNA, 19 nt, Homo sapiens
  misc_RNA (1)...(19): siRNA sense strand
aacaagaggaaaucaguaa

SEQ ID NO: 1118587 - RNA, 19 nt, Homo sapiens
  misc_RNA (1)...(19): siRNA sense strand
ucaaacaacaagaggaaau

SEQ ID NO: 1118588 - RNA, 19 nt, Homo sapiens
  misc_RNA (1)...(19): siRNA sense strand
agaauaccuucaaacaaca

SEQ ID NO: 1118589 - RNA, 19 nt, Homo sapiens
  misc_RNA (1)...(19): siRNA sense strand
auaccacauugcuugauuu

SEQ ID NO: 1118590 - RNA, 19 nt, Homo sapiens
  misc_RNA (1)...(19): siRNA sense strand
gacauucuucugcagcuaa

SEQ ID NO: 1118591 - RNA, 19 nt, Homo sapiens
  misc_RNA (1)...(19): siRNA sense strand
gaggagcguguuuacaaug

SEQ ID NO: 1118592 - RNA, 19 nt, Homo sapiens
  misc_RNA (1)...(19): siRNA sense strand
agaggagcguguuuacaau

SEQ ID NO: 1118593 - RNA, 19 nt, Homo sapiens
  misc_RNA (1)...(19): siRNA sense strand
uaaauuagaggagcguguu

SEQ ID NO: 1118594 - RNA, 19 nt, Homo sapiens
  misc_RNA (1)...(19): siRNA sense strand
ggaucacuuucacaaucaa

SEQ ID NO: 1118595 - RNA, 19 nt, Homo sapiens
  misc_RNA (1)...(19): siRNA sense strand
gaaagauugggaacauucu

SEQ ID NO: 1118596 - RNA, 19 nt, Homo sapiens
  misc_RNA (1)...(19): siRNA sense strand
gggaaugcaauagaugaaa

SEQ ID NO: 1118597 - RNA, 19 nt, Homo sapiens
  misc_RNA (1)...(19): siRNA sense strand
agagaauaccuucaaacaa

SEQ ID NO: 1118598 - RNA, 19 nt, Homo sapiens
  misc_RNA (1)...(19): siRNA sense strand
gaaugcaauagaugaaauc

SEQ ID NO: 1118599 - RNA, 19 nt, Homo sapiens
  misc_RNA (1)...(19): siRNA sense strand
ugagcaacauggagaagag

SEQ ID NO: 1118600 - RNA, 19 nt, Homo sapiens
  misc_RNA (1)...(19): siRNA sense strand
uguaucagcagaaauuaug

SEQ ID NO: 1118601 - RNA, 19 nt, Homo sapiens
  misc_RNA (1)...(19): siRNA sense strand
aagagaauaccuucaaaca

SEQ ID NO: 1118602 - RNA, 19 nt, Homo sapiens
  misc_RNA (1)...(19): siRNA sense strand
ugaagugggaaacgaagaa

SEQ ID NO: 1118603 - RNA, 19 nt, Homo sapiens
  misc_RNA (1)...(19): siRNA sense strand
ggagaagugaaaguacuga

SEQ ID NO: 1118604 - RNA, 19 nt, Homo sapiens
  misc_RNA (1)...(19): siRNA sense strand
uuauggcuaugaaagaaga

SEQ ID NO: 1118605 - RNA, 19 nt, Homo sapiens
  misc_RNA (1)...(19): siRNA sense strand
gaauaccuucaaacaacaa

SEQ ID NO: 1118606 - RNA, 19 nt, Homo sapiens
  misc_RNA (1)...(19): siRNA sense strand
ugacagcgaagaggaaaug

SEQ ID NO: 1118607 - RNA, 19 nt, Homo sapiens
  misc_RNA (1)...(19): siRNA sense strand
aacgaagaauugcucaguu

SEQ ID NO: 1118608 - RNA, 19 nt, Homo sapiens
  misc_RNA (1)...(19): siRNA sense strand
ggauuuccagguccaauag

SEQ ID NO: 1118609 - RNA, 19 nt, Homo sapiens
  misc_RNA (1)...(19): siRNA sense strand
ugacauucuucugcagcua

SEQ ID NO: 1118610 - RNA, 19 nt, Homo sapiens
  misc_RNA (1)...(19): siRNA sense strand
gcaacauggagaagagaau

SEQ ID NO: 1118611 - RNA, 19 nt, Homo sapiens
  misc_RNA (1)...(19): siRNA sense strand
aaucuccaaguccuuaaua

SEQ ID NO: 1118612 - RNA, 19 nt, Homo sapiens
  misc_RNA (1)...(19): siRNA sense strand
gagaagugaaaguacugaa

SEQ ID NO: 1118613 - RNA, 19 nt, Homo sapiens
  misc_RNA (1)...(19): siRNA sense strand
gauagcugcuccgaaucug

SEQ ID NO: 1118614 - RNA, 19 nt, Homo sapiens
  misc_RNA (1)...(19): siRNA sense strand
gaagugaaaguacugaaua

SEQ ID NO: 1118615 - RNA, 19 nt, Homo sapiens
  misc_RNA (1)...(19): siRNA sense strand
gagaauaccuucaaacaac

SEQ ID NO: 1118616 - RNA, 19 nt, Homo sapiens
  misc_RNA (1)...(19): siRNA sense strand
cuucaaagcugcacugauu

SEQ ID NO: 1118617 - RNA, 19 nt, Homo sapiens
  misc_RNA (1)...(19): siRNA sense strand
gagaagagaauccagcaua

SEQ ID NO: 1118618 - RNA, 19 nt, Homo sapiens
  misc_RNA (1)...(19): siRNA sense strand
caugacaacugaucaaaga

SEQ ID NO: 1118619 - RNA, 19 nt, Homo sapiens
  misc_RNA (1)...(19): siRNA sense strand
gcagcuaaguaccuuguuu

SEQ ID NO: 1118620 - RNA, 19 nt, Homo sapiens
  misc_RNA (1)...(19): siRNA sense strand
gacaacugaucaaagauuu

SEQ ID NO: 1118621 - RNA, 19 nt, Homo sapiens
  misc_RNA (1)...(19): siRNA sense strand
ggaaaucaguaaauuagag

SEQ ID NO: 1118622 - RNA, 19 nt, Homo sapiens
  misc_RNA (1)...(19): siRNA sense strand
cagcagaaauuauggcuau

SEQ ID NO: 1118623 - RNA, 19 nt, Homo sapiens
  misc_RNA (1)...(19): siRNA sense strand
ggaaugcaauagaugaaau

SEQ ID NO: 1118624 - RNA, 19 nt, Homo sapiens
  misc_RNA (1)...(19): siRNA sense strand
acgaagaauugcucaguua

SEQ ID NO: 1118625 - RNA, 19 nt, Homo sapiens
  misc_RNA (1)...(19): siRNA sense strand
aaacagcccuucccuucaa

SEQ ID NO: 1118626 - RNA, 19 nt, Homo sapiens
  misc_RNA (1)...(19): siRNA sense strand
gaaauuauggcuaugaaag

SEQ ID NO: 1118627 - RNA, 19 nt, Homo sapiens
  misc_RNA (1)...(19): siRNA sense strand
ccacauugcuugauuugca

SEQ ID NO: 1118628 - RNA, 19 nt, Homo sapiens
  misc_RNA (1)...(19): siRNA sense strand
caauguaucagcagaaauu

SEQ ID NO: 1118629 - RNA, 19 nt, Homo sapiens
  misc_RNA (1)...(19): siRNA sense strand
ccgaaucugugaaauuuga

SEQ ID NO: 1118630 - RNA, 19 nt, Homo sapiens
  misc_RNA (1)...(19): siRNA sense strand
gaaagaagaacaagugcau

SEQ ID NO: 1118631 - RNA, 19 nt, Homo sapiens
  misc_RNA (1)...(19): siRNA sense strand
gaggaaaucaguaaauuag

SEQ ID NO: 1118632 - RNA, 19 nt, Homo sapiens
  misc_RNA (1)...(19): siRNA sense strand
ccaagagaauaccuucaaa

SEQ ID NO: 1118633 - RNA, 19 nt, Homo sapiens
  misc_RNA (1)...(19): siRNA sense strand
gaagagaauccagcauauu

SEQ ID NO: 1118634 - RNA, 19 nt, Homo sapiens
  misc_RNA (1)...(19): siRNA sense strand
ggacacagagcauuuccaa

SEQ ID NO: 1118635 - RNA, 19 nt, Homo sapiens
  misc_RNA (1)...(19): siRNA sense strand
cagcucaacuccugaagug

SEQ ID NO: 1118636 - RNA, 19 nt, Homo sapiens
  misc_RNA (1)...(19): siRNA sense strand
aagagaaacugaaguccuu

SEQ ID NO: 1118637 - RNA, 19 nt, Homo sapiens
  misc_RNA (1)...(19): siRNA sense strand
aagagaauccagcauauuu

SEQ ID NO: 1118638 - RNA, 19 nt, Homo sapiens
  misc_RNA (1)...(19): siRNA sense strand
gcccuucccuucaagagaa

SEQ ID NO: 1118639 - RNA, 19 nt, Homo sapiens
  misc_RNA (1)...(19): siRNA sense strand
caacaagaggaaaucagua

SEQ ID NO: 1118640 - RNA, 19 nt, Homo sapiens
  misc_RNA (1)...(19): siRNA sense strand
agaagagaauccagcauau

SEQ ID NO: 1118641 - RNA, 19 nt, Homo sapiens
  misc_RNA (1)...(19): siRNA sense strand
gggaucacuuucacaauca

SEQ ID NO: 1118642 - RNA, 19 nt, Homo sapiens
  misc_RNA (1)...(19): siRNA sense strand
caacaggaggacacugaua

SEQ ID NO: 1118643 - RNA, 19 nt, Homo sapiens
  misc_RNA (1)...(19): siRNA sense strand
gcgaagaggaaaugagauu

SEQ ID NO: 1118644 - RNA, 19 nt, Homo sapiens
  misc_RNA (1)...(19): siRNA sense strand
cagaaauuauggcuaugaa

SEQ ID NO: 1118645 - RNA, 19 nt, Homo sapiens
  misc_RNA (1)...(19): siRNA sense strand
aagaauugcucaguuaguu

SEQ ID NO: 1118646 - RNA, 19 nt, Homo sapiens
  misc_RNA (1)...(19): siRNA sense strand
gcagaaauuauggcuauga

SEQ ID NO: 1118647 - RNA, 19 nt, Homo sapiens
  misc_RNA (1)...(19): siRNA sense strand
ugaaaucuccaaguccuua

SEQ ID NO: 1118648 - RNA, 19 nt, Homo sapiens
  misc_RNA (1)...(19): siRNA sense strand
cuccgaaucugugaaauuu

SEQ ID NO: 1118649 - RNA, 19 nt, Homo sapiens
  misc_RNA (1)...(19): siRNA sense strand
gucgaggacucccaggaua

SEQ ID NO: 1118650 - RNA, 19 nt, Homo sapiens
  misc_RNA (1)...(19): siRNA sense strand
caagaggaaaucaguaaau

SEQ ID NO: 1118651 - RNA, 19 nt, Homo sapiens
  misc_RNA (1)...(19): siRNA sense strand
aagaagaacaagugcauuu

SEQ ID NO: 1118652 - RNA, 19 nt, Homo sapiens
  misc_RNA (1)...(19): siRNA sense strand
guucaacuaaugcaaauga

SEQ ID NO: 1118653 - RNA, 19 nt, Homo sapiens
  misc_RNA (1)...(19): siRNA sense strand
gaaaguacugaauaacauc

SEQ ID NO: 1118654 - RNA, 19 nt, Homo sapiens
  misc_RNA (1)...(19): siRNA sense strand
gaagaacaagugcauuugg

SEQ ID NO: 1118655 - RNA, 19 nt, Homo sapiens
  misc_RNA (1)...(19): siRNA sense strand
uagaggagcguguuuacaa

SEQ ID NO: 1118656 - RNA, 19 nt, Homo sapiens
  misc_RNA (1)...(19): siRNA sense strand
acugauagcugcuccgaau

SEQ ID NO: 1118657 - RNA, 19 nt, Homo sapiens
  misc_RNA (1)...(19): siRNA sense strand
ucucaucccucucauugga

SEQ ID NO: 1118658 - RNA, 19 nt, Homo sapiens
  misc_RNA (1)...(19): siRNA sense strand
ugacaacugaucaaagauu

SEQ ID NO: 1118659 - RNA, 19 nt, Homo sapiens
  misc_RNA (1)...(19): siRNA sense strand
gagaauccagcauauuuua

SEQ ID NO: 1118660 - RNA, 19 nt, Homo sapiens
  misc_RNA (1)...(19): siRNA sense strand
gaagaauugcucaguuagu

SEQ ID NO: 1118661 - RNA, 19 nt, Homo sapiens
  misc_RNA (1)...(19): siRNA sense strand
cugaauaacaucacuaaug

SEQ ID NO: 1118662 - RNA, 19 nt, Homo sapiens
  misc_RNA (1)...(19): siRNA sense strand
gaaaucuccaaguccuuaa

SEQ ID NO: 1118663 - RNA, 19 nt, Homo sapiens
  misc_RNA (1)...(19): siRNA sense strand
gcaguucucaucccucuca

SEQ ID NO: 1118664 - RNA, 19 nt, Homo sapiens
  misc_RNA (1)...(19): siRNA sense strand
gaauugcucaguuaguuca

SEQ ID NO: 1118665 - RNA, 19 nt, Homo sapiens
  misc_RNA (1)...(19): siRNA sense strand
guucucaucccucucauug

SEQ ID NO: 1118666 - RNA, 19 nt, Homo sapiens
  misc_RNA (1)...(19): siRNA sense strand
gaacauucucagaccuuga

SEQ ID NO: 1118667 - RNA, 19 nt, Homo sapiens
  misc_RNA (1)...(19): siRNA sense strand
aagaacaagugcauuugga

SEQ ID NO: 1118668 - RNA, 19 nt, Homo sapiens
  misc_RNA (1)...(19): siRNA sense strand
gauauaacucaaagucuca

SEQ ID NO: 1118669 - RNA, 19 nt, Homo sapiens
  misc_RNA (1)...(19): siRNA sense strand
gcuccgaaucugugaaauu

SEQ ID NO: 1118670 - RNA, 19 nt, Homo sapiens
  misc_RNA (1)...(19): siRNA sense strand
gggaguggaaacacauuaa

SEQ ID NO: 1118671 - RNA, 19 nt, Homo sapiens
  misc_RNA (1)...(19): siRNA sense strand
cugcacugauugcccuuua

SEQ ID NO: 1118672 - RNA, 19 nt, Homo sapiens
  misc_RNA (1)...(19): siRNA sense strand
uaugaaagaagaacaagug

SEQ ID NO: 1118673 - RNA, 19 nt, Homo sapiens
  misc_RNA (1)...(19): siRNA sense strand
ggacaugggaaugcaauag

SEQ ID NO: 1118674 - RNA, 19 nt, Homo sapiens
  misc_RNA (1)...(19): siRNA sense strand
cagcgaagaggaaaugaga

SEQ ID NO: 1118675 - RNA, 19 nt, Homo sapiens
  misc_RNA (1)...(19): siRNA sense strand
aauaccacauugcuugauu

SEQ ID NO: 1118676 - RNA, 19 nt, Homo sapiens
  misc_RNA (1)...(19): siRNA sense strand
gugaaaguacugaauaaca

SEQ ID NO: 1118677 - RNA, 19 nt, Homo sapiens
  misc_RNA (1)...(19): siRNA sense strand
ugggaucacuuucacaauc

SEQ ID NO: 1118678 - RNA, 19 nt, Homo sapiens
  misc_RNA (1)...(19): siRNA sense strand
cucaaagucucacgggaaa

SEQ ID NO: 1118679 - RNA, 19 nt, Homo sapiens
  misc_RNA (1)...(19): siRNA sense strand
ugaaagauugggaacauuc

SEQ ID NO: 1118680 - RNA, 19 nt, Homo sapiens
  misc_RNA (1)...(19): siRNA sense strand
ggaaauaaaaggagaagug

SEQ ID NO: 1118681 - RNA, 19 nt, Homo sapiens
  misc_RNA (1)...(19): siRNA sense strand
aaugagauuucaagaaguc

SEQ ID NO: 1118682 - RNA, 19 nt, Homo sapiens
  misc_RNA (1)...(19): siRNA sense strand
guacugaauaacaucacua

SEQ ID NO: 1118683 - RNA, 19 nt, Homo sapiens
  misc_RNA (1)...(19): siRNA sense strand
acacagagcauuuccaaaa

SEQ ID NO: 1118684 - RNA, 19 nt, Homo sapiens
  misc_RNA (1)...(19): siRNA sense strand
gacaugggaaugcaauaga

SEQ ID NO: 1118685 - RNA, 19 nt, Homo sapiens
  misc_RNA (1)...(19): siRNA sense strand
gaaauaaaaggagaaguga

SEQ ID NO: 1118686 - RNA, 19 nt, Homo sapiens
  misc_RNA (1)...(19): siRNA sense strand
aacaagaggaaaucaguaa

SEQ ID NO: 1118687 - RNA, 19 nt, Homo sapiens
  misc_RNA (1)...(19): siRNA sense strand
ucaaacaacaagaggaaau

SEQ ID NO: 1118688 - RNA, 19 nt, Homo sapiens
  misc_RNA (1)...(19): siRNA sense strand
agaauaccuucaaacaaca

SEQ ID NO: 1118689 - RNA, 19 nt, Homo sapiens
  misc_RNA (1)...(19): siRNA sense strand
auaccacauugcuugauuu

SEQ ID NO: 1118690 - RNA, 19 nt, Homo sapiens
  misc_RNA (1)...(19): siRNA sense strand
gacauucuucugcagcuaa

SEQ ID NO: 1118691 - RNA, 19 nt, Homo sapiens
  misc_RNA (1)...(19): siRNA sense strand
gaggagcguguuuacaaug

SEQ ID NO: 1118692 - RNA, 19 nt, Homo sapiens
  misc_RNA (1)...(19): siRNA sense strand
agaggagcguguuuacaau

SEQ ID NO: 1118693 - RNA, 19 nt, Homo sapiens
  misc_RNA (1)...(19): siRNA sense strand
uaaauuagaggagcguguu

SEQ ID NO: 1118694 - RNA, 19 nt, Homo sapiens
  misc_RNA (1)...(19): siRNA sense strand
ggaucacuuucacaaucaa

SEQ ID NO: 1118695 - RNA, 19 nt, Homo sapiens
  misc_RNA (1)...(19): siRNA sense strand
gaaagauugggaacauucu

SEQ ID NO: 1118696 - RNA, 19 nt, Homo sapiens
  misc_RNA (1)...(19): siRNA sense strand
gggaaugcaauagaugaaa

SEQ ID NO: 1118697 - RNA, 19 nt, Homo sapiens
  misc_RNA (1)...(19): siRNA sense strand
agagaauaccuucaaacaa

SEQ ID NO: 1118698 - RNA, 19 nt, Homo sapiens
  misc_RNA (1)...(19): siRNA sense strand
gaaugcaauagaugaaauc

SEQ ID NO: 1118699 - RNA, 19 nt, Homo sapiens
  misc_RNA (1)...(19): siRNA sense strand
ugagcaacauggagaagag

SEQ ID NO: 1118700 - RNA, 19 nt, Homo sapiens
  misc_RNA (1)...(19): siRNA sense strand
uguaucagcagaaauuaug

SEQ ID NO: 1118701 - RNA, 19 nt, Homo sapiens
  misc_RNA (1)...(19): siRNA sense strand
aagagaauaccuucaaaca

SEQ ID NO: 1118702 - RNA, 19 nt, Homo sapiens
  misc_RNA (1)...(19): siRNA sense strand
ugaagugggaaacgaagaa

SEQ ID NO: 1118703 - RNA, 19 nt, Homo sapiens
  misc_RNA (1)...(19): siRNA sense strand
ggagaagugaaaguacuga

SEQ ID NO: 1118704 - RNA, 19 nt, Homo sapiens
  misc_RNA (1)...(19): siRNA sense strand
uuauggcuaugaaagaaga

SEQ ID NO: 1118705 - RNA, 19 nt, Homo sapiens
  misc_RNA (1)...(19): siRNA sense strand
gaauaccuucaaacaacaa

SEQ ID NO: 1118706 - RNA, 19 nt, Homo sapiens
  misc_RNA (1)...(19): siRNA sense strand
ugacagcgaagaggaaaug

SEQ ID NO: 1118707 - RNA, 19 nt, Homo sapiens
  misc_RNA (1)...(19): siRNA sense strand
aacgaagaauugcucaguu

SEQ ID NO: 1118708 - RNA, 19 nt, Homo sapiens
  misc_RNA (1)...(19): siRNA sense strand
ggauuuccagguccaauag

SEQ ID NO: 1118709 - RNA, 19 nt, Homo sapiens
  misc_RNA (1)...(19): siRNA sense strand
ugacauucuucugcagcua

SEQ ID NO: 1118710 - RNA, 19 nt, Homo sapiens
  misc_RNA (1)...(19): siRNA sense strand
gcaacauggagaagagaau

SEQ ID NO: 1118711 - RNA, 19 nt, Homo sapiens
  misc_RNA (1)...(19): siRNA sense strand
aaucuccaaguccuuaaua

SEQ ID NO: 1118712 - RNA, 19 nt, Homo sapiens
  misc_RNA (1)...(19): siRNA sense strand
gagaagugaaaguacugaa

SEQ ID NO: 1118713 - RNA, 19 nt, Homo sapiens
  misc_RNA (1)...(19): siRNA sense strand
gauagcugcuccgaaucug

SEQ ID NO: 1118714 - RNA, 19 nt, Homo sapiens
  misc_RNA (1)...(19): siRNA sense strand
gaagugaaaguacugaaua

SEQ ID NO: 1118715 - RNA, 19 nt, Homo sapiens
  misc_RNA (1)...(19): siRNA sense strand
gagaauaccuucaaacaac

SEQ ID NO: 1118716 - RNA, 19 nt, Homo sapiens
  misc_RNA (1)...(19): siRNA sense strand
cuucaaagcugcacugauu

SEQ ID NO: 1118717 - RNA, 19 nt, Homo sapiens
  misc_RNA (1)...(19): siRNA sense strand
gagaagagaauccagcaua

SEQ ID NO: 1118718 - RNA, 19 nt, Homo sapiens
  misc_RNA (1)...(19): siRNA sense strand
caugacaacugaucaaaga

SEQ ID NO: 1118719 - RNA, 19 nt, Homo sapiens
  misc_RNA (1)...(19): siRNA sense strand
gcagcuaaguaccuuguuu

SEQ ID NO: 1118720 - RNA, 19 nt, Homo sapiens
  misc_RNA (1)...(19): siRNA sense strand
gacaacugaucaaagauuu

SEQ ID NO: 1118721 - RNA, 19 nt, Homo sapiens
  misc_RNA (1)...(19): siRNA sense strand
ggaaaucaguaaauuagag

SEQ ID NO: 1118722 - RNA, 19 nt, Homo sapiens
  misc_RNA (1)...(19): siRNA sense strand
cagcagaaauuauggcuau

SEQ ID NO: 1118723 - RNA, 19 nt, Homo sapiens
  misc_RNA (1)...(19): siRNA sense strand
ggaaugcaauagaugaaau

SEQ ID NO: 1118724 - RNA, 19 nt, Homo sapiens
  misc_RNA (1)...(19): siRNA sense strand
acgaagaauugcucaguua

SEQ ID NO: 1118725 - RNA, 19 nt, Homo sapiens
  misc_RNA (1)...(19): siRNA sense strand
aaacagcccuucccuucaa

SEQ ID NO: 1118726 - RNA, 19 nt, Homo sapiens
  misc_RNA (1)...(19): siRNA sense strand
gaaauuauggcuaugaaag

SEQ ID NO: 1118727 - RNA, 19 nt, Homo sapiens
  misc_RNA (1)...(19): siRNA sense strand
ccacauugcuugauuugca

SEQ ID NO: 1118728 - RNA, 19 nt, Homo sapiens
  misc_RNA (1)...(19): siRNA sense strand
caauguaucagcagaaauu

SEQ ID NO: 1118729 - RNA, 19 nt, Homo sapiens
  misc_RNA (1)...(19): siRNA sense strand
ccgaaucugugaaauuuga

SEQ ID NO: 1118730 - RNA, 19 nt, Homo sapiens
  misc_RNA (1)...(19): siRNA sense strand
gaaagaagaacaagugcau

SEQ ID NO: 1118731 - RNA, 19 nt, Homo sapiens
  misc_RNA (1)...(19): siRNA sense strand
gaggaaaucaguaaauuag

SEQ ID NO: 1118732 - RNA, 19 nt, Homo sapiens
  misc_RNA (1)...(19): siRNA sense strand
ccaagagaauaccuucaaa

SEQ ID NO: 1118733 - RNA, 19 nt, Homo sapiens
  misc_RNA (1)...(19): siRNA sense strand
gaagagaauccagcauauu

SEQ ID NO: 1118734 - RNA, 19 nt, Homo sapiens
  misc_RNA (1)...(19): siRNA sense strand
ggacacagagcauuuccaa

SEQ ID NO: 1118735 - RNA, 19 nt, Homo sapiens
  misc_RNA (1)...(19): siRNA sense strand
cagcucaacuccugaagug

SEQ ID NO: 1118736 - RNA, 19 nt, Homo sapiens
  misc_RNA (1)...(19): siRNA sense strand
aagagaaacugaaguccuu

SEQ ID NO: 1118737 - RNA, 19 nt, Homo sapiens
  misc_RNA (1)...(19): siRNA sense strand
aagagaauccagcauauuu

SEQ ID NO: 1118738 - RNA, 19 nt, Homo sapiens
  misc_RNA (1)...(19): siRNA sense strand
gcccuucccuucaagagaa

SEQ ID NO: 1118739 - RNA, 19 nt, Homo sapiens
  misc_RNA (1)...(19): siRNA sense strand
caacaagaggaaaucagua

SEQ ID NO: 1118740 - RNA, 19 nt, Homo sapiens
  misc_RNA (1)...(19): siRNA sense strand
agaagagaauccagcauau

SEQ ID NO: 1118741 - RNA, 19 nt, Homo sapiens
  misc_RNA (1)...(19): siRNA sense strand
gggaucacuuucacaauca

SEQ ID NO: 1118742 - RNA, 19 nt, Homo sapiens
  misc_RNA (1)...(19): siRNA sense strand
caacaggaggacacugaua

SEQ ID NO: 1118743 - RNA, 19 nt, Homo sapiens
  misc_RNA (1)...(19): siRNA sense strand
gcgaagaggaaaugagauu

SEQ ID NO: 1118744 - RNA, 19 nt, Homo sapiens
  misc_RNA (1)...(19): siRNA sense strand
cagaaauuauggcuaugaa

SEQ ID NO: 1118745 - RNA, 19 nt, Homo sapiens
  misc_RNA (1)...(19): siRNA sense strand
aagaauugcucaguuaguu

SEQ ID NO: 1118746 - RNA, 19 nt, Homo sapiens
  misc_RNA (1)...(19): siRNA sense strand
gcagaaauuauggcuauga

SEQ ID NO: 1118747 - RNA, 19 nt, Homo sapiens
  misc_RNA (1)...(19): siRNA sense strand
ugaaaucuccaaguccuua

SEQ ID NO: 1118748 - RNA, 19 nt, Homo sapiens
  misc_RNA (1)...(19): siRNA sense strand
cuccgaaucugugaaauuu

SEQ ID NO: 1118749 - RNA, 19 nt, Homo sapiens
  misc_RNA (1)...(19): siRNA sense strand
gucgaggacucccaggaua

SEQ ID NO: 1118750 - RNA, 19 nt, Homo sapiens
  misc_RNA (1)...(19): siRNA sense strand
caagaggaaaucaguaaau

SEQ ID NO: 1118751 - RNA, 19 nt, Homo sapiens
  misc_RNA (1)...(19): siRNA sense strand
aagaagaacaagugcauuu

SEQ ID NO: 1118752 - RNA, 19 nt, Homo sapiens
  misc_RNA (1)...(19): siRNA sense strand
guucaacuaaugcaaauga

SEQ ID NO: 1118753 - RNA, 19 nt, Homo sapiens
  misc_RNA (1)...(19): siRNA sense strand
gaaaguacugaauaacauc

SEQ ID NO: 1118754 - RNA, 19 nt, Homo sapiens
  misc_RNA (1)...(19): siRNA sense strand
gaagaacaagugcauuugg

SEQ ID NO: 1118755 - RNA, 19 nt, Homo sapiens
  misc_RNA (1)...(19): siRNA sense strand
uagaggagcguguuuacaa

SEQ ID NO: 1118756 - RNA, 19 nt, Homo sapiens
  misc_RNA (1)...(19): siRNA sense strand
acugauagcugcuccgaau

SEQ ID NO: 1118757 - RNA, 19 nt, Homo sapiens
  misc_RNA (1)...(19): siRNA sense strand
ucucaucccucucauugga

SEQ ID NO: 1118758 - RNA, 19 nt, Homo sapiens
  misc_RNA (1)...(19): siRNA sense strand
ugacaacugaucaaagauu

SEQ ID NO: 1118759 - RNA, 19 nt, Homo sapiens
  misc_RNA (1)...(19): siRNA sense strand
gagaauccagcauauuuua

SEQ ID NO: 1118760 - RNA, 19 nt, Homo sapiens
  misc_RNA (1)...(19): siRNA sense strand
gaagaauugcucaguuagu

SEQ ID NO: 1118761 - RNA, 19 nt, Homo sapiens
  misc_RNA (1)...(19): siRNA sense strand
cugaauaacaucacuaaug

SEQ ID NO: 1118762 - RNA, 19 nt, Homo sapiens
  misc_RNA (1)...(19): siRNA sense strand
gaaaucuccaaguccuuaa

SEQ ID NO: 1118763 - RNA, 19 nt, Homo sapiens
  misc_RNA (1)...(19): siRNA sense strand
gcaguucucaucccucuca

SEQ ID NO: 1118764 - RNA, 19 nt, Homo sapiens
  misc_RNA (1)...(19): siRNA sense strand
gaauugcucaguuaguuca

SEQ ID NO: 1118765 - RNA, 19 nt, Homo sapiens
  misc_RNA (1)...(19): siRNA sense strand
guucucaucccucucauug

SEQ ID NO: 1118766 - RNA, 19 nt, Homo sapiens
  misc_RNA (1)...(19): siRNA sense strand
gaacauucucagaccuuga

SEQ ID NO: 1118767 - RNA, 19 nt, Homo sapiens
  misc_RNA (1)...(19): siRNA sense strand
aagaacaagugcauuugga

SEQ ID NO: 1118768 - RNA, 19 nt, Homo sapiens
  misc_RNA (1)...(19): siRNA sense strand
gauauaacucaaagucuca

SEQ ID NO: 1118769 - RNA, 19 nt, Homo sapiens
  misc_RNA (1)...(19): siRNA sense strand
gcuccgaaucugugaaauu

SEQ ID NO: 1118770 - RNA, 19 nt, Homo sapiens
  misc_RNA (1)...(19): siRNA sense strand
gggaguggaaacacauuaa

SEQ ID NO: 1118771 - RNA, 19 nt, Homo sapiens
  misc_RNA (1)...(19): siRNA sense strand
cugcacugauugcccuuua

SEQ ID NO: 1118772 - RNA, 19 nt, Homo sapiens
  misc_RNA (1)...(19): siRNA sense strand
uaugaaagaagaacaagug

SEQ ID NO: 1118773 - RNA, 19 nt, Homo sapiens
  misc_RNA (1)...(19): siRNA sense strand
ggacaugggaaugcaauag

SEQ ID NO: 1118774 - RNA, 19 nt, Homo sapiens
  misc_RNA (1)...(19): siRNA sense strand
cagcgaagaggaaaugaga

SEQ ID NO: 1118775 - RNA, 19 nt, Homo sapiens
  misc_RNA (1)...(19): siRNA sense strand
aauaccacauugcuugauu

SEQ ID NO: 1118776 - RNA, 19 nt, Homo sapiens
  misc_RNA (1)...(19): siRNA sense strand
gugaaaguacugaauaaca

SEQ ID NO: 1118777 - RNA, 19 nt, Homo sapiens
  misc_RNA (1)...(19): siRNA sense strand
ugggaucacuuucacaauc

SEQ ID NO: 1118778 - RNA, 19 nt, Homo sapiens
  misc_RNA (1)...(19): siRNA sense strand
cucaaagucucacgggaaa

SEQ ID NO: 1118779 - RNA, 19 nt, Homo sapiens
  misc_RNA (1)...(19): siRNA sense strand
ugaaagauugggaacauuc

SEQ ID NO: 1118780 - RNA, 19 nt, Homo sapiens
  misc_RNA (1)...(19): siRNA sense strand
ggaaauaaaaggagaagug

SEQ ID NO: 1118781 - RNA, 19 nt, Homo sapiens
  misc_RNA (1)...(19): siRNA sense strand
aaugagauuucaagaaguc

SEQ ID NO: 1118782 - RNA, 19 nt, Homo sapiens
  misc_RNA (1)...(19): siRNA sense strand
guacugaauaacaucacua

SEQ ID NO: 1118783 - RNA, 19 nt, Homo sapiens
  misc_RNA (1)...(19): siRNA sense strand
acacagagcauuuccaaaa

SEQ ID NO: 1118784 - RNA, 19 nt, Homo sapiens
  misc_RNA (1)...(19): siRNA sense strand
gacaugggaaugcaauaga

SEQ ID NO: 1118785 - RNA, 19 nt, Homo sapiens
  misc_RNA (1)...(19): siRNA sense strand
gaaauaaaaggagaaguga

SEQ ID NO: 1118786 - RNA, 19 nt, Homo sapiens
  misc_RNA (1)...(19): siRNA sense strand
aacaagaggaaaucaguaa

SEQ ID NO: 1118787 - RNA, 19 nt, Homo sapiens
  misc_RNA (1)...(19): siRNA sense strand
ucaaacaacaagaggaaau

SEQ ID NO: 1118788 - RNA, 19 nt, Homo sapiens
  misc_RNA (1)...(19): siRNA sense strand
agaauaccuucaaacaaca

SEQ ID NO: 1118789 - RNA, 19 nt, Homo sapiens
  misc_RNA (1)...(19): siRNA sense strand
auaccacauugcuugauuu

SEQ ID NO: 1118790 - RNA, 19 nt, Homo sapiens
  misc_RNA (1)...(19): siRNA sense strand
gacauucuucugcagcuaa

SEQ ID NO: 1118791 - RNA, 19 nt, Homo sapiens
  misc_RNA (1)...(19): siRNA sense strand
gaggagcguguuuacaaug

SEQ ID NO: 1118792 - RNA, 19 nt, Homo sapiens
  misc_RNA (1)...(19): siRNA sense strand
agaggagcguguuuacaau

SEQ ID NO: 1118793 - RNA, 19 nt, Homo sapiens
  misc_RNA (1)...(19): siRNA sense strand
uaaauuagaggagcguguu

SEQ ID NO: 1118794 - RNA, 19 nt, Homo sapiens
  misc_RNA (1)...(19): siRNA sense strand
ggaucacuuucacaaucaa

SEQ ID NO: 1118795 - RNA, 19 nt, Homo sapiens
  misc_RNA (1)...(19): siRNA sense strand
gaaagauugggaacauucu

SEQ ID NO: 1118796 - RNA, 19 nt, Homo sapiens
  misc_RNA (1)...(19): siRNA sense strand
gggaaugcaauagaugaaa

SEQ ID NO: 1118797 - RNA, 19 nt, Homo sapiens
  misc_RNA (1)...(19): siRNA sense strand
agagaauaccuucaaacaa

SEQ ID NO: 1118798 - RNA, 19 nt, Homo sapiens
  misc_RNA (1)...(19): siRNA sense strand
gaaugcaauagaugaaauc

SEQ ID NO: 1118799 - RNA, 19 nt, Homo sapiens
  misc_RNA (1)...(19): siRNA sense strand
ugagcaacauggagaagag

SEQ ID NO: 1118800 - RNA, 19 nt, Homo sapiens
  misc_RNA (1)...(19): siRNA sense strand
uguaucagcagaaauuaug

SEQ ID NO: 1118801 - RNA, 19 nt, Homo sapiens
  misc_RNA (1)...(19): siRNA sense strand
aagagaauaccuucaaaca

SEQ ID NO: 1118802 - RNA, 19 nt, Homo sapiens
  misc_RNA (1)...(19): siRNA sense strand
ugaagugggaaacgaagaa

SEQ ID NO: 1118803 - RNA, 19 nt, Homo sapiens
  misc_RNA (1)...(19): siRNA sense strand
ggagaagugaaaguacuga

SEQ ID NO: 1118804 - RNA, 19 nt, Homo sapiens
  misc_RNA (1)...(19): siRNA sense strand
uuauggcuaugaaagaaga

SEQ ID NO: 1118805 - RNA, 19 nt, Homo sapiens
  misc_RNA (1)...(19): siRNA sense strand
gaauaccuucaaacaacaa

SEQ ID NO: 1118806 - RNA, 19 nt, Homo sapiens
  misc_RNA (1)...(19): siRNA sense strand
ugacagcgaagaggaaaug

SEQ ID NO: 1118807 - RNA, 19 nt, Homo sapiens
  misc_RNA (1)...(19): siRNA sense strand
aacgaagaauugcucaguu

SEQ ID NO: 1118808 - RNA, 19 nt, Homo sapiens
  misc_RNA (1)...(19): siRNA sense strand
ggauuuccagguccaauag

SEQ ID NO: 1118809 - RNA, 19 nt, Homo sapiens
  misc_RNA (1)...(19): siRNA sense strand
ugacauucuucugcagcua

SEQ ID NO: 1118810 - RNA, 19 nt, Homo sapiens
  misc_RNA (1)...(19): siRNA sense strand
gcaacauggagaagagaau

SEQ ID NO: 1118811 - RNA, 19 nt, Homo sapiens
  misc_RNA (1)...(19): siRNA sense strand
aaucuccaaguccuuaaua

SEQ ID NO: 1118812 - RNA, 19 nt, Homo sapiens
  misc_RNA (1)...(19): siRNA sense strand
gagaagugaaaguacugaa

SEQ ID NO: 1118813 - RNA, 19 nt, Homo sapiens
  misc_RNA (1)...(19): siRNA sense strand
gauagcugcuccgaaucug

SEQ ID NO: 1118814 - RNA, 19 nt, Homo sapiens
  misc_RNA (1)...(19): siRNA sense strand
gagagaagcuggagagaua

SEQ ID NO: 1118815 - RNA, 19 nt, Homo sapiens
  misc_RNA (1)...(19): siRNA sense strand
gaaggaggcuggugucuga

SEQ ID NO: 1118816 - RNA, 19 nt, Homo sapiens
  misc_RNA (1)...(19): siRNA sense strand
gcaugaagcucccagacaa

SEQ ID NO: 1118817 - RNA, 19 nt, Homo sapiens
  misc_RNA (1)...(19): siRNA sense strand
gcacugggcucaggaagga

SEQ ID NO: 1118818 - RNA, 19 nt, Homo sapiens
  misc_RNA (1)...(19): siRNA sense strand
ggaugaaacccaagaaaga

SEQ ID NO: 1118819 - RNA, 19 nt, Homo sapiens
  misc_RNA (1)...(19): siRNA sense strand
gcacuggccucagagaaga

SEQ ID NO: 1118820 - RNA, 19 nt, Homo sapiens
  misc_RNA (1)...(19): siRNA sense strand
agaaacagcucagagaaga

SEQ ID NO: 1118821 - RNA, 19 nt, Homo sapiens
  misc_RNA (1)...(19): siRNA sense strand
gaugaaacccaagaaagaa

SEQ ID NO: 1118822 - RNA, 19 nt, Homo sapiens
  misc_RNA (1)...(19): siRNA sense strand
ggaggaagaggcagauaug

SEQ ID NO: 1118823 - RNA, 19 nt, Homo sapiens
  misc_RNA (1)...(19): siRNA sense strand
gcuggacgcugagguguga

SEQ ID NO: 1118824 - RNA, 19 nt, Homo sapiens
  misc_RNA (1)...(19): siRNA sense strand
agaaggugcuggccucaga

SEQ ID NO: 1118825 - RNA, 19 nt, Homo sapiens
  misc_RNA (1)...(19): siRNA sense strand
gaaagggguuccagaaaag

SEQ ID NO: 1118826 - RNA, 19 nt, Homo sapiens
  misc_RNA (1)...(19): siRNA sense strand
gcaagcgccaccucuuuga

SEQ ID NO: 1118827 - RNA, 19 nt, Homo sapiens
  misc_RNA (1)...(19): siRNA sense strand
ggaggcuggugucugagaa

SEQ ID NO: 1118828 - RNA, 19 nt, Homo sapiens
  misc_RNA (1)...(19): siRNA sense strand
gauagcagugucagagaaa

SEQ ID NO: 1118829 - RNA, 19 nt, Homo sapiens
  misc_RNA (1)...(19): siRNA sense strand
gaagaaagggguuccagaa

SEQ ID NO: 1118830 - RNA, 19 nt, Homo sapiens
  misc_RNA (1)...(19): siRNA sense strand
cagcaagcgccaccucuuu

SEQ ID NO: 1118831 - RNA, 19 nt, Homo sapiens
  misc_RNA (1)...(19): siRNA sense strand
aaagaaacagcucagagaa

SEQ ID NO: 1118832 - RNA, 19 nt, Homo sapiens
  misc_RNA (1)...(19): siRNA sense strand
gaaacagcucagagaagaa

SEQ ID NO: 1118833 - RNA, 19 nt, Homo sapiens
  misc_RNA (1)...(19): siRNA sense strand
agaaagggguuccagaaaa

SEQ ID NO: 1118834 - RNA, 19 nt, Homo sapiens
  misc_RNA (1)...(19): siRNA sense strand
aagcuuccaucuuugagaa

SEQ ID NO: 1118835 - RNA, 19 nt, Homo sapiens
  misc_RNA (1)...(19): siRNA sense strand
gaagagcccaacugcagau

SEQ ID NO: 1118836 - RNA, 19 nt, Homo sapiens
  misc_RNA (1)...(19): siRNA sense strand
cuacagcagcucccucaaa

SEQ ID NO: 1118837 - RNA, 19 nt, Homo sapiens
  misc_RNA (1)...(19): siRNA sense strand
agauagcagugucagagaa

SEQ ID NO: 1118838 - RNA, 19 nt, Homo sapiens
  misc_RNA (1)...(19): siRNA sense strand
aaagaaaacucggaaacaa

SEQ ID NO: 1118839 - RNA, 19 nt, Homo sapiens
  misc_RNA (1)...(19): siRNA sense strand
ccaagaaggaacuggaaau

SEQ ID NO: 1118840 - RNA, 19 nt, Homo sapiens
  misc_RNA (1)...(19): siRNA sense strand
cagaagagaggaagaaagg

SEQ ID NO: 1118841 - RNA, 19 nt, Homo sapiens
  misc_RNA (1)...(19): siRNA sense strand
gagccuggucuccgauaaa

SEQ ID NO: 1118842 - RNA, 19 nt, Homo sapiens
  misc_RNA (1)...(19): siRNA sense strand
ggagagaagcuggagagau

SEQ ID NO: 1118843 - RNA, 19 nt, Homo sapiens
  misc_RNA (1)...(19): siRNA sense strand
gugcuggccucagagaaga

SEQ ID NO: 1118844 - RNA, 19 nt, Homo sapiens
  misc_RNA (1)...(19): siRNA sense strand
caagaaggaacuggaaauc

SEQ ID NO: 1118845 - RNA, 19 nt, Homo sapiens
  misc_RNA (1)...(19): siRNA sense strand
gaagcucccagacaacaca

SEQ ID NO: 1118846 - RNA, 19 nt, Homo sapiens
  misc_RNA (1)...(19): siRNA sense strand
acagugaaguugggagaga

SEQ ID NO: 1118847 - RNA, 19 nt, Homo sapiens
  misc_RNA (1)...(19): siRNA sense strand
aagaagacggcaccugaaa

SEQ ID NO: 1118848 - RNA, 19 nt, Homo sapiens
  misc_RNA (1)...(19): siRNA sense strand
gagcccaacugcagaugcu

SEQ ID NO: 1118849 - RNA, 19 nt, Homo sapiens
  misc_RNA (1)...(19): siRNA sense strand
gagacuaccgagcguggaa

SEQ ID NO: 1118850 - RNA, 19 nt, Homo sapiens
  misc_RNA (1)...(19): siRNA sense strand
gaaagaaaacucggaaaca

SEQ ID NO: 1118851 - RNA, 19 nt, Homo sapiens
  misc_RNA (1)...(19): siRNA sense strand
aaagaagacggcaccugaa

SEQ ID NO: 1118852 - RNA, 19 nt, Homo sapiens
  misc_RNA (1)...(19): siRNA sense strand
uacagcagcucccucaaac

SEQ ID NO: 1118853 - RNA, 19 nt, Homo sapiens
  misc_RNA (1)...(19): siRNA sense strand
cuucagacccuccgacugu

SEQ ID NO: 1118854 - RNA, 19 nt, Homo sapiens
  misc_RNA (1)...(19): siRNA sense strand
gccuugcacugaguuauuc

SEQ ID NO: 1118855 - RNA, 19 nt, Homo sapiens
  misc_RNA (1)...(19): siRNA sense strand
ggucugccuugcacugagu

SEQ ID NO: 1118856 - RNA, 19 nt, Homo sapiens
  misc_RNA (1)...(19): siRNA sense strand
gcccaacugcagaugcuaa

SEQ ID NO: 1118857 - RNA, 19 nt, Homo sapiens
  misc_RNA (1)...(19): siRNA sense strand
gaucagcaggacccaggaa

SEQ ID NO: 1118858 - RNA, 19 nt, Homo sapiens
  misc_RNA (1)...(19): siRNA sense strand
cagacaacacagugaaguu

SEQ ID NO: 1118859 - RNA, 19 nt, Homo sapiens
  misc_RNA (1)...(19): siRNA sense strand
gagauaccacacggccaua

SEQ ID NO: 1118860 - RNA, 19 nt, Homo sapiens
  misc_RNA (1)...(19): siRNA sense strand
cagugaaguugggagagaa

SEQ ID NO: 1118861 - RNA, 19 nt, Homo sapiens
  misc_RNA (1)...(19): siRNA sense strand
gaagacggcaccugaaaag

SEQ ID NO: 1118862 - RNA, 19 nt, Homo sapiens
  misc_RNA (1)...(19): siRNA sense strand
ccaccucuuugagaaggaa

SEQ ID NO: 1118863 - RNA, 19 nt, Homo sapiens
  misc_RNA (1)...(19): siRNA sense strand
ccacacagcgaaccuacag

SEQ ID NO: 1118864 - RNA, 19 nt, Homo sapiens
  misc_RNA (1)...(19): siRNA sense strand
agagccuggucuccgauaa

SEQ ID NO: 1118865 - RNA, 19 nt, Homo sapiens
  misc_RNA (1)...(19): siRNA sense strand
gaggaagaggcagauaugu

SEQ ID NO: 1118866 - RNA, 19 nt, Homo sapiens
  misc_RNA (1)...(19): siRNA sense strand
gcuccaccacggacgauga

SEQ ID NO: 1118867 - RNA, 19 nt, Homo sapiens
  misc_RNA (1)...(19): siRNA sense strand
agaagacaucucuaucaga

SEQ ID NO: 1118868 - RNA, 19 nt, Homo sapiens
  misc_RNA (1)...(19): siRNA sense strand
ggaggcacagaaagcauca

SEQ ID NO: 1118869 - RNA, 19 nt, Homo sapiens
  misc_RNA (1)...(19): siRNA sense strand
ggccauacggagaucagaa

SEQ ID NO: 1118870 - RNA, 19 nt, Homo sapiens
  misc_RNA (1)...(19): siRNA sense strand
ccagaaaaguccccagucu

SEQ ID NO: 1118871 - RNA, 19 nt, Homo sapiens
  misc_RNA (1)...(19): siRNA sense strand
ucagagaagagcccaacug

SEQ ID NO: 1118872 - RNA, 19 nt, Homo sapiens
  misc_RNA (1)...(19): siRNA sense strand
aaacagcucagagaagaag

SEQ ID NO: 1118873 - RNA, 19 nt, Homo sapiens
  misc_RNA (1)...(19): siRNA sense strand
aaaagaaacagcucagaga

SEQ ID NO: 1118874 - RNA, 19 nt, Homo sapiens
  misc_RNA (1)...(19): siRNA sense strand
agaaaaguccccagucuug

SEQ ID NO: 1118875 - RNA, 19 nt, Homo sapiens
  misc_RNA (1)...(19): siRNA sense strand
cagcaggacccaggaaucu

SEQ ID NO: 1118876 - RNA, 19 nt, Homo sapiens
  misc_RNA (1)...(19): siRNA sense strand
gccauacggagaucagaau

SEQ ID NO: 1118877 - RNA, 19 nt, Homo sapiens
  misc_RNA (1)...(19): siRNA sense strand
gcuggugucugagaaagcu

SEQ ID NO: 1118878 - RNA, 19 nt, Homo sapiens
  misc_RNA (1)...(19): siRNA sense strand
gaggcuggugucugagaaa

SEQ ID NO: 1118879 - RNA, 19 nt, Homo sapiens
  misc_RNA (1)...(19): siRNA sense strand
gaaagcagcuggugguuua

SEQ ID NO: 1118880 - RNA, 19 nt, Homo sapiens
  misc_RNA (1)...(19): siRNA sense strand
gaacggagacgacgccuuu

SEQ ID NO: 1118881 - RNA, 19 nt, Homo sapiens
  misc_RNA (1)...(19): siRNA sense strand
ugaggaagaugacgaguaa

SEQ ID NO: 1118882 - RNA, 19 nt, Homo sapiens
  misc_RNA (1)...(19): siRNA sense strand
gaaaggccuucgaugauau

SEQ ID NO: 1118883 - RNA, 19 nt, Homo sapiens
  misc_RNA (1)...(19): siRNA sense strand
uaaacgggcugcagacuuc

SEQ ID NO: 1118884 - RNA, 19 nt, Homo sapiens
  misc_RNA (1)...(19): siRNA sense strand
gccaaauacuucucuaaga

SEQ ID NO: 1118885 - RNA, 19 nt, Homo sapiens
  misc_RNA (1)...(19): siRNA sense strand
cagggaugaugcucaaaua

SEQ ID NO: 1118886 - RNA, 19 nt, Homo sapiens
  misc_RNA (1)...(19): siRNA sense strand
gaugaaauccucggagaaa

SEQ ID NO: 1118887 - RNA, 19 nt, Homo sapiens
  misc_RNA (1)...(19): siRNA sense strand
ggucaugacuaaacuaggu

SEQ ID NO: 1118888 - RNA, 19 nt, Homo sapiens
  misc_RNA (1)...(19): siRNA sense strand
gcucaaauaucagagaagu

SEQ ID NO: 1118889 - RNA, 19 nt, Homo sapiens
  misc_RNA (1)...(19): siRNA sense strand
ucagagaaguuacgaaagg

SEQ ID NO: 1118890 - RNA, 19 nt, Homo sapiens
  misc_RNA (1)...(19): siRNA sense strand
gaaaaucgucuauguguau

SEQ ID NO: 1118891 - RNA, 19 nt, Homo sapiens
  misc_RNA (1)...(19): siRNA sense strand
ccacaggaaucagguugaa

SEQ ID NO: 1118892 - RNA, 19 nt, Homo sapiens
  misc_RNA (1)...(19): siRNA sense strand
uaucagagaaguuacgaaa

SEQ ID NO: 1118893 - RNA, 19 nt, Homo sapiens
  misc_RNA (1)...(19): siRNA sense strand
gaucgaaaccacaggaauc

SEQ ID NO: 1118894 - RNA, 19 nt, Homo sapiens
  misc_RNA (1)...(19): siRNA sense strand
gguugaacguccucagaug

SEQ ID NO: 1118895 - RNA, 19 nt, Homo sapiens
  misc_RNA (1)...(19): siRNA sense strand
gggaugaugcucaaauauc

SEQ ID NO: 1118896 - RNA, 19 nt, Homo sapiens
  misc_RNA (1)...(19): siRNA sense strand
guaaacgggcugcagacuu

SEQ ID NO: 1118897 - RNA, 19 nt, Homo sapiens
  misc_RNA (1)...(19): siRNA sense strand
caaggagacccagggauga

SEQ ID NO: 1118898 - RNA, 19 nt, Homo sapiens
  misc_RNA (1)...(19): siRNA sense strand
gagaaaaucgucuaugugu

SEQ ID NO: 1118899 - RNA, 19 nt, Homo sapiens
  misc_RNA (1)...(19): siRNA sense strand
gcuggugguuuaugaagag

SEQ ID NO: 1118900 - RNA, 19 nt, Homo sapiens
  misc_RNA (1)...(19): siRNA sense strand
ccaccuuucaugcguagua

SEQ ID NO: 1118901 - RNA, 19 nt, Homo sapiens
  misc_RNA (1)...(19): siRNA sense strand
gaacguccucagaugacuu

SEQ ID NO: 1118902 - RNA, 19 nt, Homo sapiens
  misc_RNA (1)...(19): siRNA sense strand
ggagacgacgccuuugcaa

SEQ ID NO: 1118903 - RNA, 19 nt, Homo sapiens
  misc_RNA (1)...(19): siRNA sense strand
cagcgacccugaggaagau

SEQ ID NO: 1118904 - RNA, 19 nt, Homo sapiens
  misc_RNA (1)...(19): siRNA sense strand
ccacagacugcgugagaga

SEQ ID NO: 1118905 - RNA, 19 nt, Homo sapiens
  misc_RNA (1)...(19): siRNA sense strand
guugaacguccucagauga

SEQ ID NO: 1118906 - RNA, 19 nt, Homo sapiens
  misc_RNA (1)...(19): siRNA sense strand
ggugguuuaugaagagauc

SEQ ID NO: 1118907 - RNA, 19 nt, Homo sapiens
  misc_RNA (1)...(19): siRNA sense strand
ggaaugauuuugguaacga

SEQ ID NO: 1118908 - RNA, 19 nt, Homo sapiens
  misc_RNA (1)...(19): siRNA sense strand
aaucgucuauguguauaug

SEQ ID NO: 1118909 - RNA, 19 nt, Homo sapiens
  misc_RNA (1)...(19): siRNA sense strand
caccuuucaugcguaguaa

SEQ ID NO: 1118910 - RNA, 19 nt, Homo sapiens
  misc_RNA (1)...(19): siRNA sense strand
ccagggaugaugcucaaau

SEQ ID NO: 1118911 - RNA, 19 nt, Homo sapiens
  misc_RNA (1)...(19): siRNA sense strand
gcagcuggugguuuaugaa

SEQ ID NO: 1118912 - RNA, 19 nt, Homo sapiens
  misc_RNA (1)...(19): siRNA sense strand
gaaagagugggaaaagaug

SEQ ID NO: 1118913 - RNA, 19 nt, Homo sapiens
  misc_RNA (1)...(19): siRNA sense strand
agaaagcagcuggugguuu

SEQ ID NO: 1118914 - RNA, 19 nt, Homo sapiens
  misc_RNA (1)...(19): siRNA sense strand
gagaaagcagcuggugguu

SEQ ID NO: 1118915 - RNA, 19 nt, Homo sapiens
  misc_RNA (1)...(19): siRNA sense strand
gaggucaugacuaaacuag

SEQ ID NO: 1118916 - RNA, 19 nt, Homo sapiens
  misc_RNA (1)...(19): siRNA sense strand
cggagaaaaucgucuaugu

SEQ ID NO: 1118917 - RNA, 19 nt, Homo sapiens
  misc_RNA (1)...(19): siRNA sense strand
agaaaaucgucuaugugua

SEQ ID NO: 1118918 - RNA, 19 nt, Homo sapiens
  misc_RNA (1)...(19): siRNA sense strand
gaugcucaaauaucagaga

SEQ ID NO: 1118919 - RNA, 19 nt, Homo sapiens
  misc_RNA (1)...(19): siRNA sense strand
ucgucuauguguauaugaa

SEQ ID NO: 1118920 - RNA, 19 nt, Homo sapiens
  misc_RNA (1)...(19): siRNA sense strand
acagacugcgugagagaaa

SEQ ID NO: 1118921 - RNA, 19 nt, Homo sapiens
  misc_RNA (1)...(19): siRNA sense strand
cuucgaugauauugccaaa

SEQ ID NO: 1118922 - RNA, 19 nt, Homo sapiens
  misc_RNA (1)...(19): siRNA sense strand
cugaggaagaugacgagua

SEQ ID NO: 1118923 - RNA, 19 nt, Homo sapiens
  misc_RNA (1)...(19): siRNA sense strand
gaaagcagcuggugguuua

SEQ ID NO: 1118924 - RNA, 19 nt, Homo sapiens
  misc_RNA (1)...(19): siRNA sense strand
gaacggagacgacgccuuu

SEQ ID NO: 1118925 - RNA, 19 nt, Homo sapiens
  misc_RNA (1)...(19): siRNA sense strand
ugaggaagaugacgaguaa

SEQ ID NO: 1118926 - RNA, 19 nt, Homo sapiens
  misc_RNA (1)...(19): siRNA sense strand
gaaaggccuucgaugauau

SEQ ID NO: 1118927 - RNA, 19 nt, Homo sapiens
  misc_RNA (1)...(19): siRNA sense strand
uaaacgggcugcagacuuc

SEQ ID NO: 1118928 - RNA, 19 nt, Homo sapiens
  misc_RNA (1)...(19): siRNA sense strand
gccaaauacuucucuaaga

SEQ ID NO: 1118929 - RNA, 19 nt, Homo sapiens
  misc_RNA (1)...(19): siRNA sense strand
cagggaugaugcucaaaua

SEQ ID NO: 1118930 - RNA, 19 nt, Homo sapiens
  misc_RNA (1)...(19): siRNA sense strand
gaugaaauccucggagaaa

SEQ ID NO: 1118931 - RNA, 19 nt, Homo sapiens
  misc_RNA (1)...(19): siRNA sense strand
ggucaugacuaaacuaggu

SEQ ID NO: 1118932 - RNA, 19 nt, Homo sapiens
  misc_RNA (1)...(19): siRNA sense strand
gcucaaauaucagagaagu

SEQ ID NO: 1118933 - RNA, 19 nt, Homo sapiens
  misc_RNA (1)...(19): siRNA sense strand
ucagagaaguuacgaaagg

SEQ ID NO: 1118934 - RNA, 19 nt, Homo sapiens
  misc_RNA (1)...(19): siRNA sense strand
gaaaaucgucuauguguau

SEQ ID NO: 1118935 - RNA, 19 nt, Homo sapiens
  misc_RNA (1)...(19): siRNA sense strand
ccacaggaaucagguugaa

SEQ ID NO: 1118936 - RNA, 19 nt, Homo sapiens
  misc_RNA (1)...(19): siRNA sense strand
uaucagagaaguuacgaaa

SEQ ID NO: 1118937 - RNA, 19 nt, Homo sapiens
  misc_RNA (1)...(19): siRNA sense strand
gaucgaaaccacaggaauc

SEQ ID NO: 1118938 - RNA, 19 nt, Homo sapiens
  misc_RNA (1)...(19): siRNA sense strand
gguugaacguccucagaug

SEQ ID NO: 1118939 - RNA, 19 nt, Homo sapiens
  misc_RNA (1)...(19): siRNA sense strand
gggaugaugcucaaauauc

SEQ ID NO: 1118940 - RNA, 19 nt, Homo sapiens
  misc_RNA (1)...(19): siRNA sense strand
guaaacgggcugcagacuu

SEQ ID NO: 1118941 - RNA, 19 nt, Homo sapiens
  misc_RNA (1)...(19): siRNA sense strand
caaggagacccagggauga

SEQ ID NO: 1118942 - RNA, 19 nt, Homo sapiens
  misc_RNA (1)...(19): siRNA sense strand
gagaaaaucgucuaugugu

SEQ ID NO: 1118943 - RNA, 19 nt, Homo sapiens
  misc_RNA (1)...(19): siRNA sense strand
gcuggugguuuaugaagag

SEQ ID NO: 1118944 - RNA, 19 nt, Homo sapiens
  misc_RNA (1)...(19): siRNA sense strand
ccaccuuucaugcguagua

SEQ ID NO: 1118945 - RNA, 19 nt, Homo sapiens
  misc_RNA (1)...(19): siRNA sense strand
gaacguccucagaugacuu

SEQ ID NO: 1118946 - RNA, 19 nt, Homo sapiens
  misc_RNA (1)...(19): siRNA sense strand
ggagacgacgccuuugcaa

SEQ ID NO: 1118947 - RNA, 19 nt, Homo sapiens
  misc_RNA (1)...(19): siRNA sense strand
cagcgacccugaggaagau

SEQ ID NO: 1118948 - RNA, 19 nt, Homo sapiens
  misc_RNA (1)...(19): siRNA sense strand
ccacagacugcgugagaga

SEQ ID NO: 1118949 - RNA, 19 nt, Homo sapiens
  misc_RNA (1)...(19): siRNA sense strand
guugaacguccucagauga

SEQ ID NO: 1118950 - RNA, 19 nt, Homo sapiens
  misc_RNA (1)...(19): siRNA sense strand
ggugguuuaugaagagauc

SEQ ID NO: 1118951 - RNA, 19 nt, Homo sapiens
  misc_RNA (1)...(19): siRNA sense strand
ggaaugauuuugguaacga

SEQ ID NO: 1118952 - RNA, 19 nt, Homo sapiens
  misc_RNA (1)...(19): siRNA sense strand
aaucgucuauguguauaug

SEQ ID NO: 1118953 - RNA, 19 nt, Homo sapiens
  misc_RNA (1)...(19): siRNA sense strand
caccuuucaugcguaguaa

SEQ ID NO: 1118954 - RNA, 19 nt, Homo sapiens
  misc_RNA (1)...(19): siRNA sense strand
ccagggaugaugcucaaau

SEQ ID NO: 1118955 - RNA, 19 nt, Homo sapiens
  misc_RNA (1)...(19): siRNA sense strand
gcagcuggugguuuaugaa

SEQ ID NO: 1118956 - RNA, 19 nt, Homo sapiens
  misc_RNA (1)...(19): siRNA sense strand
gaaagagugggaaaagaug

SEQ ID NO: 1118957 - RNA, 19 nt, Homo sapiens
  misc_RNA (1)...(19): siRNA sense strand
agaaagcagcuggugguuu

SEQ ID NO: 1118958 - RNA, 19 nt, Homo sapiens
  misc_RNA (1)...(19): siRNA sense strand
gagaaagcagcuggugguu

SEQ ID NO: 1118959 - RNA, 19 nt, Homo sapiens
  misc_RNA (1)...(19): siRNA sense strand
gaggucaugacuaaacuag

SEQ ID NO: 1118960 - RNA, 19 nt, Homo sapiens
  misc_RNA (1)...(19): siRNA sense strand
cggagaaaaucgucuaugu

SEQ ID NO: 1118961 - RNA, 19 nt, Homo sapiens
  misc_RNA (1)...(19): siRNA sense strand
agaaaaucgucuaugugua

SEQ ID NO: 1118962 - RNA, 19 nt, Homo sapiens
  misc_RNA (1)...(19): siRNA sense strand
gaugcucaaauaucagaga

SEQ ID NO: 1118963 - RNA, 19 nt, Homo sapiens
  misc_RNA (1)...(19): siRNA sense strand
ucgucuauguguauaugaa

SEQ ID NO: 1118964 - RNA, 19 nt, Homo sapiens
  misc_RNA (1)...(19): siRNA sense strand
acagacugcgugagagaaa

SEQ ID NO: 1118965 - RNA, 19 nt, Homo sapiens
  misc_RNA (1)...(19): siRNA sense strand
cuucgaugauauugccaaa

SEQ ID NO: 1118966 - RNA, 19 nt, Homo sapiens
  misc_RNA (1)...(19): siRNA sense strand
cugaggaagaugacgagua

SEQ ID NO: 1118967 - RNA, 19 nt, Homo sapiens
  misc_RNA (1)...(19): siRNA sense strand
caacguggauucuuucauc

SEQ ID NO: 1118968 - RNA, 19 nt, Homo sapiens
  misc_RNA (1)...(19): siRNA sense strand
ggaaagagaccaucccaau

SEQ ID NO: 1118969 - RNA, 19 nt, Homo sapiens
  misc_RNA (1)...(19): siRNA sense strand
gaaagagaccaucccaaug

SEQ ID NO: 1118970 - RNA, 19 nt, Homo sapiens
  misc_RNA (1)...(19): siRNA sense strand
ugacagugcucgaucucuu

SEQ ID NO: 1118971 - RNA, 19 nt, Homo sapiens
  misc_RNA (1)...(19): siRNA sense strand
gggugcaucucaucugcua

SEQ ID NO: 1118972 - RNA, 19 nt, Homo sapiens
  misc_RNA (1)...(19): siRNA sense strand
cagcuucuuugguuucuau

SEQ ID NO: 1118973 - RNA, 19 nt, Homo sapiens
  misc_RNA (1)...(19): siRNA sense strand
ccaccacgaugacuuguac

SEQ ID NO: 1118974 - RNA, 19 nt, Homo sapiens
  misc_RNA (1)...(19): siRNA sense strand
ccaccuccaugcggucuaa

SEQ ID NO: 1118975 - RNA, 19 nt, Homo sapiens
  misc_RNA (1)...(19): siRNA sense strand
caguccagcuucuuugguu

SEQ ID NO: 1118976 - RNA, 19 nt, Homo sapiens
  misc_RNA (1)...(19): siRNA sense strand
ccacagaugggacaguaug

SEQ ID NO: 1118977 - RNA, 19 nt, Homo sapiens
  misc_RNA (1)...(19): siRNA sense strand
ggccaggaauucuccaucu

SEQ ID NO: 1118978 - RNA, 19 nt, Homo sapiens
  misc_RNA (1)...(19): siRNA sense strand
gaucacaacguggauucuu

SEQ ID NO: 1118979 - RNA, 19 nt, Homo sapiens
  misc_RNA (1)...(19): siRNA sense strand
aaagagaccaucccaaugc

SEQ ID NO: 1118980 - RNA, 19 nt, Homo sapiens
  misc_RNA (1)...(19): siRNA sense strand
ccucuccucuccacagaug

SEQ ID NO: 1118981 - RNA, 19 nt, Homo sapiens
  misc_RNA (1)...(19): siRNA sense strand
ggagacacggacuacuuga

SEQ ID NO: 1118982 - RNA, 19 nt, Homo sapiens
  misc_RNA (1)...(19): siRNA sense strand
gaugacuuguaccucaaug

SEQ ID NO: 1118983 - RNA, 19 nt, Homo sapiens
  misc_RNA (1)...(19): siRNA sense strand
caugcggucuaaccucuau

SEQ ID NO: 1118984 - RNA, 19 nt, Homo sapiens
  misc_RNA (1)...(19): siRNA sense strand
gagacacggacuacuugaa

SEQ ID NO: 1118985 - RNA, 19 nt, Homo sapiens
  misc_RNA (1)...(19): siRNA sense strand
ggaauacaucaaugagaca

SEQ ID NO: 1118986 - RNA, 19 nt, Homo sapiens
  misc_RNA (1)...(19): siRNA sense strand
cuccacagaugggacagua

SEQ ID NO: 1118987 - RNA, 19 nt, Homo sapiens
  misc_RNA (1)...(19): siRNA sense strand
caguauggcggaagaacuu

SEQ ID NO: 1118988 - RNA, 19 nt, Homo sapiens
  misc_RNA (1)...(19): siRNA sense strand
gccaggaauucuccaucug

SEQ ID NO: 1118989 - RNA, 19 nt, Homo sapiens
  misc_RNA (1)...(19): siRNA sense strand
ucacaacguggauucuuuc

SEQ ID NO: 1118990 - RNA, 19 nt, Homo sapiens
  misc_RNA (1)...(19): siRNA sense strand
ggagauggaggagcaacug

SEQ ID NO: 1118991 - RNA, 19 nt, Homo sapiens
  misc_RNA (1)...(19): siRNA sense strand
gaugaugguguuauuacuc

SEQ ID NO: 1118992 - RNA, 19 nt, Homo sapiens
  misc_RNA (1)...(19): siRNA sense strand
ccaucccaaugccacagua

SEQ ID NO: 1118993 - RNA, 19 nt, Homo sapiens
  misc_RNA (1)...(19): siRNA sense strand
gcagcuuccuggcccugau

SEQ ID NO: 1118994 - RNA, 19 nt, Homo sapiens
  misc_RNA (1)...(19): siRNA sense strand
uccgccaccugcuggaaua

SEQ ID NO: 1118995 - RNA, 19 nt, Homo sapiens
  misc_RNA (1)...(19): siRNA sense strand
gggcucugcuuucugucau

SEQ ID NO: 1118996 - RNA, 19 nt, Homo sapiens
  misc_RNA (1)...(19): siRNA sense strand
ccugaugaugguguuauua

SEQ ID NO: 1118997 - RNA, 19 nt, Homo sapiens
  misc_RNA (1)...(19): siRNA sense strand
gaugaucacaacguggauu

SEQ ID NO: 1118998 - RNA, 19 nt, Homo sapiens
  misc_RNA (1)...(19): siRNA sense strand
aucacaacguggauucuuu

SEQ ID NO: 1118999 - RNA, 19 nt, Homo sapiens
  misc_RNA (1)...(19): siRNA sense strand
cuucuuugguuucuaugau

SEQ ID NO: 1119000 - RNA, 19 nt, Homo sapiens
  misc_RNA (1)...(19): siRNA sense strand
agacacggacuacuugaag

SEQ ID NO: 1119001 - RNA, 19 nt, Homo sapiens
  misc_RNA (1)...(19): siRNA sense strand
ucuaaccucuaucggaucu

SEQ ID NO: 1119002 - RNA, 19 nt, Homo sapiens
  misc_RNA (1)...(19): siRNA sense strand
gacagugcucgaucucuuc

SEQ ID NO: 1119003 - RNA, 19 nt, Homo sapiens
  misc_RNA (1)...(19): siRNA sense strand
agaccguccuggagaugga

SEQ ID NO: 1119004 - RNA, 19 nt, Homo sapiens
  misc_RNA (1)...(19): siRNA sense strand
cugcuggaauacaucaaug

SEQ ID NO: 1119005 - RNA, 19 nt, Homo sapiens
  misc_RNA (1)...(19): siRNA sense strand
caacguggauucuuucauc

SEQ ID NO: 1119006 - RNA, 19 nt, Homo sapiens
  misc_RNA (1)...(19): siRNA sense strand
ggaaagagaccaucccaau

SEQ ID NO: 1119007 - RNA, 19 nt, Homo sapiens
  misc_RNA (1)...(19): siRNA sense strand
gaaagagaccaucccaaug

SEQ ID NO: 1119008 - RNA, 19 nt, Homo sapiens
  misc_RNA (1)...(19): siRNA sense strand
ugacagugcucgaucucuu

SEQ ID NO: 1119009 - RNA, 19 nt, Homo sapiens
  misc_RNA (1)...(19): siRNA sense strand
gggugcaucucaucugcua

SEQ ID NO: 1119010 - RNA, 19 nt, Homo sapiens
  misc_RNA (1)...(19): siRNA sense strand
cagcuucuuugguuucuau

SEQ ID NO: 1119011 - RNA, 19 nt, Homo sapiens
  misc_RNA (1)...(19): siRNA sense strand
ccaccacgaugacuuguac

SEQ ID NO: 1119012 - RNA, 19 nt, Homo sapiens
  misc_RNA (1)...(19): siRNA sense strand
ccaccuccaugcggucuaa

SEQ ID NO: 1119013 - RNA, 19 nt, Homo sapiens
  misc_RNA (1)...(19): siRNA sense strand
caguccagcuucuuugguu

SEQ ID NO: 1119014 - RNA, 19 nt, Homo sapiens
  misc_RNA (1)...(19): siRNA sense strand
ccacagaugggacaguaug

SEQ ID NO: 1119015 - RNA, 19 nt, Homo sapiens
  misc_RNA (1)...(19): siRNA sense strand
ggccaggaauucuccaucu

SEQ ID NO: 1119016 - RNA, 19 nt, Homo sapiens
  misc_RNA (1)...(19): siRNA sense strand
gaucacaacguggauucuu

SEQ ID NO: 1119017 - RNA, 19 nt, Homo sapiens
  misc_RNA (1)...(19): siRNA sense strand
aaagagaccaucccaaugc

SEQ ID NO: 1119018 - RNA, 19 nt, Homo sapiens
  misc_RNA (1)...(19): siRNA sense strand
ccucuccucuccacagaug

SEQ ID NO: 1119019 - RNA, 19 nt, Homo sapiens
  misc_RNA (1)...(19): siRNA sense strand
ggagacacggacuacuuga

SEQ ID NO: 1119020 - RNA, 19 nt, Homo sapiens
  misc_RNA (1)...(19): siRNA sense strand
gaugacuuguaccucaaug

SEQ ID NO: 1119021 - RNA, 19 nt, Homo sapiens
  misc_RNA (1)...(19): siRNA sense strand
caugcggucuaaccucuau

SEQ ID NO: 1119022 - RNA, 19 nt, Homo sapiens
  misc_RNA (1)...(19): siRNA sense strand
gagacacggacuacuugaa

SEQ ID NO: 1119023 - RNA, 19 nt, Homo sapiens
  misc_RNA (1)...(19): siRNA sense strand
ggaauacaucaaugagaca

SEQ ID NO: 1119024 - RNA, 19 nt, Homo sapiens
  misc_RNA (1)...(19): siRNA sense strand
cuccacagaugggacagua

SEQ ID NO: 1119025 - RNA, 19 nt, Homo sapiens
  misc_RNA (1)...(19): siRNA sense strand
caguauggcggaagaacuu

SEQ ID NO: 1119026 - RNA, 19 nt, Homo sapiens
  misc_RNA (1)...(19): siRNA sense strand
gccaggaauucuccaucug

SEQ ID NO: 1119027 - RNA, 19 nt, Homo sapiens
  misc_RNA (1)...(19): siRNA sense strand
ucacaacguggauucuuuc

SEQ ID NO: 1119028 - RNA, 19 nt, Homo sapiens
  misc_RNA (1)...(19): siRNA sense strand
ggagauggaggagcaacug

SEQ ID NO: 1119029 - RNA, 19 nt, Homo sapiens
  misc_RNA (1)...(19): siRNA sense strand
gaugaugguguuauuacuc

SEQ ID NO: 1119030 - RNA, 19 nt, Homo sapiens
  misc_RNA (1)...(19): siRNA sense strand
ccaucccaaugccacagua

SEQ ID NO: 1119031 - RNA, 19 nt, Homo sapiens
  misc_RNA (1)...(19): siRNA sense strand
gcagcuuccuggcccugau

SEQ ID NO: 1119032 - RNA, 19 nt, Homo sapiens
  misc_RNA (1)...(19): siRNA sense strand
uccgccaccugcuggaaua

SEQ ID NO: 1119033 - RNA, 19 nt, Homo sapiens
  misc_RNA (1)...(19): siRNA sense strand
gggcucugcuuucugucau

SEQ ID NO: 1119034 - RNA, 19 nt, Homo sapiens
  misc_RNA (1)...(19): siRNA sense strand
ccugaugaugguguuauua

SEQ ID NO: 1119035 - RNA, 19 nt, Homo sapiens
  misc_RNA (1)...(19): siRNA sense strand
gaugaucacaacguggauu

SEQ ID NO: 1119036 - RNA, 19 nt, Homo sapiens
  misc_RNA (1)...(19): siRNA sense strand
aucacaacguggauucuuu

SEQ ID NO: 1119037 - RNA, 19 nt, Homo sapiens
  misc_RNA (1)...(19): siRNA sense strand
cuucuuugguuucuaugau

SEQ ID NO: 1119038 - RNA, 19 nt, Homo sapiens
  misc_RNA (1)...(19): siRNA sense strand
agacacggacuacuugaag

SEQ ID NO: 1119039 - RNA, 19 nt, Homo sapiens
  misc_RNA (1)...(19): siRNA sense strand
ucuaaccucuaucggaucu

SEQ ID NO: 1119040 - RNA, 19 nt, Homo sapiens
  misc_RNA (1)...(19): siRNA sense strand
gacagugcucgaucucuuc

SEQ ID NO: 1119041 - RNA, 19 nt, Homo sapiens
  misc_RNA (1)...(19): siRNA sense strand
agaccguccuggagaugga

SEQ ID NO: 1119042 - RNA, 19 nt, Homo sapiens
  misc_RNA (1)...(19): siRNA sense strand
cugcuggaauacaucaaug

SEQ ID NO: 1119043 - RNA, 19 nt, Homo sapiens
  misc_RNA (1)...(19): siRNA sense strand
caacguggauucuuucauc

SEQ ID NO: 1119044 - RNA, 19 nt, Homo sapiens
  misc_RNA (1)...(19): siRNA sense strand
ggaaagagaccaucccaau

SEQ ID NO: 1119045 - RNA, 19 nt, Homo sapiens
  misc_RNA (1)...(19): siRNA sense strand
gaaagagaccaucccaaug

SEQ ID NO: 1119046 - RNA, 19 nt, Homo sapiens
  misc_RNA (1)...(19): siRNA sense strand
ugacagugcucgaucucuu

SEQ ID NO: 1119047 - RNA, 19 nt, Homo sapiens
  misc_RNA (1)...(19): siRNA sense strand
gggugcaucucaucugcua

SEQ ID NO: 1119048 - RNA, 19 nt, Homo sapiens
  misc_RNA (1)...(19): siRNA sense strand
cagcuucuuugguuucuau

SEQ ID NO: 1119049 - RNA, 19 nt, Homo sapiens
  misc_RNA (1)...(19): siRNA sense strand
ccaccacgaugacuuguac

SEQ ID NO: 1119050 - RNA, 19 nt, Homo sapiens
  misc_RNA (1)...(19): siRNA sense strand
ccaccuccaugcggucuaa

SEQ ID NO: 1119051 - RNA, 19 nt, Homo sapiens
  misc_RNA (1)...(19): siRNA sense strand
caguccagcuucuuugguu

SEQ ID NO: 1119052 - RNA, 19 nt, Homo sapiens
  misc_RNA (1)...(19): siRNA sense strand
ccacagaugggacaguaug

SEQ ID NO: 1119053 - RNA, 19 nt, Homo sapiens
  misc_RNA (1)...(19): siRNA sense strand
ggccaggaauucuccaucu

SEQ ID NO: 1119054 - RNA, 19 nt, Homo sapiens
  misc_RNA (1)...(19): siRNA sense strand
gaucacaacguggauucuu

SEQ ID NO: 1119055 - RNA, 19 nt, Homo sapiens
  misc_RNA (1)...(19): siRNA sense strand
aaagagaccaucccaaugc

SEQ ID NO: 1119056 - RNA, 19 nt, Homo sapiens
  misc_RNA (1)...(19): siRNA sense strand
ccucuccucuccacagaug

SEQ ID NO: 1119057 - RNA, 19 nt, Homo sapiens
  misc_RNA (1)...(19): siRNA sense strand
ggagacacggacuacuuga

SEQ ID NO: 1119058 - RNA, 19 nt, Homo sapiens
  misc_RNA (1)...(19): siRNA sense strand
gaugacuuguaccucaaug

SEQ ID NO: 1119059 - RNA, 19 nt, Homo sapiens
  misc_RNA (1)...(19): siRNA sense strand
caugcggucuaaccucuau

SEQ ID NO: 1119060 - RNA, 19 nt, Homo sapiens
  misc_RNA (1)...(19): siRNA sense strand
gagacacggacuacuugaa

SEQ ID NO: 1119061 - RNA, 19 nt, Homo sapiens
  misc_RNA (1)...(19): siRNA sense strand
ggaauacaucaaugagaca

SEQ ID NO: 1119062 - RNA, 19 nt, Homo sapiens
  misc_RNA (1)...(19): siRNA sense strand
cuccacagaugggacagua

SEQ ID NO: 1119063 - RNA, 19 nt, Homo sapiens
  misc_RNA (1)...(19): siRNA sense strand
caguauggcggaagaacuu

SEQ ID NO: 1119064 - RNA, 19 nt, Homo sapiens
  misc_RNA (1)...(19): siRNA sense strand
gccaggaauucuccaucug

SEQ ID NO: 1119065 - RNA, 19 nt, Homo sapiens
  misc_RNA (1)...(19): siRNA sense strand
ucacaacguggauucuuuc

SEQ ID NO: 1119066 - RNA, 19 nt, Homo sapiens
  misc_RNA (1)...(19): siRNA sense strand
ggagauggaggagcaacug

SEQ ID NO: 1119067 - RNA, 19 nt, Homo sapiens
  misc_RNA (1)...(19): siRNA sense strand
gaugaugguguuauuacuc

SEQ ID NO: 1119068 - RNA, 19 nt, Homo sapiens
  misc_RNA (1)...(19): siRNA sense strand
ccaucccaaugccacagua

SEQ ID NO: 1119069 - RNA, 19 nt, Homo sapiens
  misc_RNA (1)...(19): siRNA sense strand
gcagcuuccuggcccugau

SEQ ID NO: 1119070 - RNA, 19 nt, Homo sapiens
  misc_RNA (1)...(19): siRNA sense strand
uccgccaccugcuggaaua

SEQ ID NO: 1119071 - RNA, 19 nt, Homo sapiens
  misc_RNA (1)...(19): siRNA sense strand
gggcucugcuuucugucau

SEQ ID NO: 1119072 - RNA, 19 nt, Homo sapiens
  misc_RNA (1)...(19): siRNA sense strand
ccugaugaugguguuauua

SEQ ID NO: 1119073 - RNA, 19 nt, Homo sapiens
  misc_RNA (1)...(19): siRNA sense strand
gaugaucacaacguggauu

SEQ ID NO: 1119074 - RNA, 19 nt, Homo sapiens
  misc_RNA (1)...(19): siRNA sense strand
aucacaacguggauucuuu

SEQ ID NO: 1119075 - RNA, 19 nt, Homo sapiens
  misc_RNA (1)...(19): siRNA sense strand
cuucuuugguuucuaugau

SEQ ID NO: 1119076 - RNA, 19 nt, Homo sapiens
  misc_RNA (1)...(19): siRNA sense strand
agacacggacuacuugaag

SEQ ID NO: 1119077 - RNA, 19 nt, Homo sapiens
  misc_RNA (1)...(19): siRNA sense strand
ucuaaccucuaucggaucu

SEQ ID NO: 1119078 - RNA, 19 nt, Homo sapiens
  misc_RNA (1)...(19): siRNA sense strand
gacagugcucgaucucuuc

SEQ ID NO: 1119079 - RNA, 19 nt, Homo sapiens
  misc_RNA (1)...(19): siRNA sense strand
agaccguccuggagaugga

SEQ ID NO: 1119080 - RNA, 19 nt, Homo sapiens
  misc_RNA (1)...(19): siRNA sense strand
cugcuggaauacaucaaug

SEQ ID NO: 1119081 - RNA, 19 nt, Homo sapiens
  misc_RNA (1)...(19): siRNA sense strand
ggagaucacucaucccuua

SEQ ID NO: 1119082 - RNA, 19 nt, Homo sapiens
  misc_RNA (1)...(19): siRNA sense strand
ggauaaaucuggaggaaga

SEQ ID NO: 1119083 - RNA, 19 nt, Homo sapiens
  misc_RNA (1)...(19): siRNA sense strand
ccuaauaacucaucaagaa

SEQ ID NO: 1119084 - RNA, 19 nt, Homo sapiens
  misc_RNA (1)...(19): siRNA sense strand
ggaaagauuugcagguguu

SEQ ID NO: 1119085 - RNA, 19 nt, Homo sapiens
  misc_RNA (1)...(19): siRNA sense strand
gaaaccagccagacgcuua

SEQ ID NO: 1119086 - RNA, 19 nt, Homo sapiens
  misc_RNA (1)...(19): siRNA sense strand
uuucagaucuuguguguuu
